United States Patent Application Publication US 2018/0305689 A1 - sequence listing, part 93

SEQ ID NO: 1311686 - RNA, 19 nt, Artificial Sequence
  Description of Artificial Sequence: Synthetic oligonucleotide
  Sense strand starting at position 2045 of SEQ ID NO: 1241945
ugaggagauggcugaauau

SEQ ID NO: 1311687 - RNA, 19 nt, Artificial Sequence
  Description of Artificial Sequence: Synthetic oligonucleotide
  Antisense strand to SEQ ID NO: 1311686
auauucagccaucuccuca

SEQ ID NO: 1311688 - RNA, 19 nt, Artificial Sequence
  Description of Artificial Sequence: Synthetic oligonucleotide
  Sense strand starting at position 2463 of SEQ ID NO: 1241945
cccgguaauugaguaagca

SEQ ID NO: 1311689 - RNA, 19 nt, Artificial Sequence
  Description of Artificial Sequence: Synthetic oligonucleotide
  Antisense strand to SEQ ID NO: 1311688
ugcuuacucaauuaccggg

SEQ ID NO: 1311690 - RNA, 19 nt, Artificial Sequence
  Description of Artificial Sequence: Synthetic oligonucleotide
  Sense strand starting at position 2464 of SEQ ID NO: 1241945
ccgguaauugaguaagcaa

SEQ ID NO: 1311691 - RNA, 19 nt, Artificial Sequence
  Description of Artificial Sequence: Synthetic oligonucleotide
  Antisense strand to SEQ ID NO: 1311690
uugcuuacucaauuaccgg

SEQ ID NO: 1311692 - RNA, 19 nt, Artificial Sequence
  Description of Artificial Sequence: Synthetic oligonucleotide
  Sense strand starting at position 2467 of SEQ ID NO: 1241945
guaauugaguaagcaauua

SEQ ID NO: 1311693 - RNA, 19 nt, Artificial Sequence
  Description of Artificial Sequence: Synthetic oligonucleotide
  Antisense strand to SEQ ID NO: 1311692
uaauugcuuacucaauuac

SEQ ID NO: 1311694 - RNA, 19 nt, Artificial Sequence
  Description of Artificial Sequence: Synthetic oligonucleotide
  Sense strand starting at position 2518 of SEQ ID NO: 1241945
gauugauugcaucaggguc

SEQ ID NO: 1311695 - RNA, 19 nt, Artificial Sequence
  Description of Artificial Sequence: Synthetic oligonucleotide
  Antisense strand to SEQ ID NO: 1311694
gacccugaugcaaucaauc

SEQ ID NO: 1311696 - RNA, 19 nt, Artificial Sequence
  Description of Artificial Sequence: Synthetic oligonucleotide
  Sense strand starting at position 2818 of SEQ ID NO: 1241945
aauuuaaugugccagauga

SEQ ID NO: 1311697 - RNA, 19 nt, Artificial Sequence
  Description of Artificial Sequence: Synthetic oligonucleotide
  Antisense strand to SEQ ID NO: 1311696
ucaucuggcacauuaaauu

SEQ ID NO: 1311698 - RNA, 19 nt, Artificial Sequence
  Description of Artificial Sequence: Synthetic oligonucleotide
  Sense strand starting at position 3094 of SEQ ID NO: 1241945
gggccagaucuaggguuua

SEQ ID NO: 1311699 - RNA, 19 nt, Artificial Sequence
  Description of Artificial Sequence: Synthetic oligonucleotide
  Antisense strand to SEQ ID NO: 1311698
uaaacccuagaucuggccc

SEQ ID NO: 1311700 - RNA, 19 nt, Artificial Sequence
  Description of Artificial Sequence: Synthetic oligonucleotide
  Sense strand starting at position 3099 of SEQ ID NO: 1241945
agaucuaggguuuagaugu

SEQ ID NO: 1311701 - RNA, 19 nt, Artificial Sequence
  Description of Artificial Sequence: Synthetic oligonucleotide
  Antisense strand to SEQ ID NO: 1311700
acaucuaaacccuagaucu

SEQ ID NO: 1311702 - RNA, 19 nt, Artificial Sequence
  Description of Artificial Sequence: Synthetic oligonucleotide
  Sense strand starting at position 3198 of SEQ ID NO: 1241945
guguaugugugcauggaca

SEQ ID NO: 1311703 - RNA, 19 nt, Artificial Sequence
  Description of Artificial Sequence: Synthetic oligonucleotide
  Antisense strand to SEQ ID NO: 1311702
uguccaugcacacauacac

SEQ ID NO: 1311704 - RNA, 19 nt, Artificial Sequence
  Description of Artificial Sequence: Synthetic oligonucleotide
  Sense strand starting at position 3343 of SEQ ID NO: 1241945
gccauagggaaguaguauu

SEQ ID NO: 1311705 - RNA, 19 nt, Artificial Sequence
  Description of Artificial Sequence: Synthetic oligonucleotide
  Antisense strand to SEQ ID NO: 1311704
aauacuacuucccuauggc

SEQ ID NO: 1311706 - RNA, 19 nt, Artificial Sequence
  Description of Artificial Sequence: Synthetic oligonucleotide
  Sense strand starting at position 3417 of SEQ ID NO: 1241945
ucugcugaucucgauggaa

SEQ ID NO: 1311707 - RNA, 19 nt, Artificial Sequence
  Description of Artificial Sequence: Synthetic oligonucleotide
  Antisense strand to SEQ ID NO: 1311706
uuccaucgagaucagcaga

SEQ ID NO: 1311708 - RNA, 19 nt, Artificial Sequence
  Description of Artificial Sequence: Synthetic oligonucleotide
  Sense strand starting at position 3420 of SEQ ID NO: 1241945
gcugaucucgauggaagga

SEQ ID NO: 1311709 - RNA, 19 nt, Artificial Sequence
  Description of Artificial Sequence: Synthetic oligonucleotide
  Antisense strand to SEQ ID NO: 1311708
uccuuccaucgagaucagc

SEQ ID NO: 1311710 - RNA, 19 nt, Artificial Sequence
  Description of Artificial Sequence: Synthetic oligonucleotide
  Sense strand starting at position 3459 of SEQ ID NO: 1241945
ggcuuugggccucauaaag

SEQ ID NO: 1311711 - RNA, 19 nt, Artificial Sequence
  Description of Artificial Sequence: Synthetic oligonucleotide
  Antisense strand to SEQ ID NO: 1311710
cuuuaugaggcccaaagcc

SEQ ID NO: 1311712 - RNA, 19 nt, Artificial Sequence
  Description of Artificial Sequence: Synthetic oligonucleotide
  Sense strand starting at position 3474 of SEQ ID NO: 1241945
aaagguugaguuggucuaa

SEQ ID NO: 1311713 - RNA, 19 nt, Artificial Sequence
  Description of Artificial Sequence: Synthetic oligonucleotide
  Antisense strand to SEQ ID NO: 1311712
uuagaccaacucaaccuuu

SEQ ID NO: 1311714 - RNA, 19 nt, Artificial Sequence
  Description of Artificial Sequence: Synthetic oligonucleotide
  Sense strand starting at position 3475 of SEQ ID NO: 1241945
aagguugaguuggucuaaa

SEQ ID NO: 1311715 - RNA, 19 nt, Artificial Sequence
  Description of Artificial Sequence: Synthetic oligonucleotide
  Antisense strand to SEQ ID NO: 1311714
uuuagaccaacucaaccuu

SEQ ID NO: 1311716 - RNA, 19 nt, Artificial Sequence
  Description of Artificial Sequence: Synthetic oligonucleotide
  Sense strand starting at position 3483 of SEQ ID NO: 1241945
guuggucuaaaucagugua

SEQ ID NO: 1311717 - RNA, 19 nt, Artificial Sequence
  Description of Artificial Sequence: Synthetic oligonucleotide
  Antisense strand to SEQ ID NO: 1311716
uacacugauuuagaccaac

SEQ ID NO: 1311718 - RNA, 19 nt, Artificial Sequence
  Description of Artificial Sequence: Synthetic oligonucleotide
  Sense strand starting at position 3486 of SEQ ID NO: 1241945
ggucuaaaucaguguaucu

SEQ ID NO: 1311719 - RNA, 19 nt, Artificial Sequence
  Description of Artificial Sequence: Synthetic oligonucleotide
  Antisense strand to SEQ ID NO: 1311718
agauacacugauuuagacc

SEQ ID NO: 1311720 - RNA, 19 nt, Artificial Sequence
  Description of Artificial Sequence: Synthetic oligonucleotide
  Sense strand starting at position 3488 of SEQ ID NO: 1241945
ucuaaaucaguguaucuca

SEQ ID NO: 1311721 - RNA, 19 nt, Artificial Sequence
  Description of Artificial Sequence: Synthetic oligonucleotide
  Antisense strand to SEQ ID NO: 1311720
ugagauacacugauuuaga

SEQ ID NO: 1311722 - RNA, 19 nt, Artificial Sequence
  Description of Artificial Sequence: Synthetic oligonucleotide
  Sense strand starting at position 3512 of SEQ ID NO: 1241945
guacacaacugugcucaua

SEQ ID NO: 1311723 - RNA, 19 nt, Artificial Sequence
  Description of Artificial Sequence: Synthetic oligonucleotide
  Antisense strand to SEQ ID NO: 1311722
uaugagcacaguuguguac

SEQ ID NO: 1311724 - RNA, 19 nt, Artificial Sequence
  Description of Artificial Sequence: Synthetic oligonucleotide
  Sense strand starting at position 3540 of SEQ ID NO: 1241945
uccuuaagucugcagugua

SEQ ID NO: 1311725 - RNA, 19 nt, Artificial Sequence
  Description of Artificial Sequence: Synthetic oligonucleotide
  Antisense strand to SEQ ID NO: 1311724
uacacugcagacuuaagga

SEQ ID NO: 1311726 - RNA, 19 nt, Artificial Sequence
  Description of Artificial Sequence: Synthetic oligonucleotide
  Sense strand starting at position 3556 of SEQ ID NO: 1241945
guagucugccacuauauau

SEQ ID NO: 1311727 - RNA, 19 nt, Artificial Sequence
  Description of Artificial Sequence: Synthetic oligonucleotide
  Antisense strand to SEQ ID NO: 1311726
auauauaguggcagacuac

SEQ ID NO: 1311728 - RNA, 19 nt, Artificial Sequence
  Description of Artificial Sequence: Synthetic oligonucleotide
  Sense strand starting at position 3694 of SEQ ID NO: 1241945
gggcuauauucuuugguca

SEQ ID NO: 1311729 - RNA, 19 nt, Artificial Sequence
  Description of Artificial Sequence: Synthetic oligonucleotide
  Antisense strand to SEQ ID NO: 1311728
ugaccaaagaauauagccc

SEQ ID NO: 1311730 - RNA, 19 nt, Artificial Sequence
  Description of Artificial Sequence: Synthetic oligonucleotide
  Sense strand starting at position 3695 of SEQ ID NO: 1241945
ggcuauauucuuuggucaa

SEQ ID NO: 1311731 - RNA, 19 nt, Artificial Sequence
  Description of Artificial Sequence: Synthetic oligonucleotide
  Antisense strand to SEQ ID NO: 1311730
uugaccaaagaauauagcc

SEQ ID NO: 1311732 - RNA, 19 nt, Artificial Sequence
  Description of Artificial Sequence: Synthetic oligonucleotide
  Sense strand starting at position 3697 of SEQ ID NO: 1241945
cuauauucuuuggucaagu

SEQ ID NO: 1311733 - RNA, 19 nt, Artificial Sequence
  Description of Artificial Sequence: Synthetic oligonucleotide
  Antisense strand to SEQ ID NO: 1311732
acuugaccaaagaauauag

SEQ ID NO: 1311734 - RNA, 19 nt, Artificial Sequence
  Description of Artificial Sequence: Synthetic oligonucleotide
  Sense strand starting at position 3730 of SEQ ID NO: 1241945
ugggcaaugucagugagaa

SEQ ID NO: 1311735 - RNA, 19 nt, Artificial Sequence
  Description of Artificial Sequence: Synthetic oligonucleotide
  Antisense strand to SEQ ID NO: 1311734
uucucacugacauugccca

SEQ ID NO: 1311736 - RNA, 19 nt, Artificial Sequence
  Description of Artificial Sequence: Synthetic oligonucleotide
  Sense strand starting at position 3731 of SEQ ID NO: 1241945
gggcaaugucagugagaag

SEQ ID NO: 1311737 - RNA, 19 nt, Artificial Sequence
  Description of Artificial Sequence: Synthetic oligonucleotide
  Antisense strand to SEQ ID NO: 1311736
cuucucacugacauugccc

SEQ ID NO: 1311738 - RNA, 19 nt, Artificial Sequence
  Description of Artificial Sequence: Synthetic oligonucleotide
  Sense strand starting at position 3777 of SEQ ID NO: 1241945
ucggcagauuugucuccua

SEQ ID NO: 1311739 - RNA, 19 nt, Artificial Sequence
  Description of Artificial Sequence: Synthetic oligonucleotide
  Antisense strand to SEQ ID NO: 1311738
uaggagacaaaucugccga

SEQ ID NO: 1311740 - RNA, 19 nt, Artificial Sequence
  Description of Artificial Sequence: Synthetic oligonucleotide
  Sense strand starting at position 3780 of SEQ ID NO: 1241945
gcagauuugucuccuagca

SEQ ID NO: 1311741 - RNA, 19 nt, Artificial Sequence
  Description of Artificial Sequence: Synthetic oligonucleotide
  Antisense strand to SEQ ID NO: 1311740
ugcuaggagacaaaucugc

SEQ ID NO: 1311742 - RNA, 19 nt, Artificial Sequence
  Description of Artificial Sequence: Synthetic oligonucleotide
  Sense strand starting at position 3835 of SEQ ID NO: 1241945
gcacgugaugcauaagcca

SEQ ID NO: 1311743 - RNA, 19 nt, Artificial Sequence
  Description of Artificial Sequence: Synthetic oligonucleotide
  Antisense strand to SEQ ID NO: 1311742
uggcuuaugcaucacgugc

SEQ ID NO: 1311744 - RNA, 19 nt, Artificial Sequence
  Description of Artificial Sequence: Synthetic oligonucleotide
  Sense strand starting at position 8 of SEQ ID NO: 1241946
ccaucuguacauuggaagu

SEQ ID NO: 1311745 - RNA, 19 nt, Artificial Sequence
  Description of Artificial Sequence: Synthetic oligonucleotide
  Antisense strand to SEQ ID NO: 1311744
acuuccaauguacagaugg

SEQ ID NO: 1311746 - RNA, 19 nt, Artificial Sequence
  Description of Artificial Sequence: Synthetic oligonucleotide
  Sense strand starting at position 14 of SEQ ID NO: 1241946
guacauuggaagugacauc

SEQ ID NO: 1311747 - RNA, 19 nt, Artificial Sequence
  Description of Artificial Sequence: Synthetic oligonucleotide
  Antisense strand to SEQ ID NO: 1311746
gaugucacuuccaauguac

SEQ ID NO: 1311748 - RNA, 19 nt, Artificial Sequence
  Description of Artificial Sequence: Synthetic oligonucleotide
  Sense strand starting at position 41 of SEQ ID NO: 1241946
cauugucaagacugaguaa

SEQ ID NO: 1311749 - RNA, 19 nt, Artificial Sequence
  Description of Artificial Sequence: Synthetic oligonucleotide
  Antisense strand to SEQ ID NO: 1311748
uuacucagucuugacaaug

SEQ ID NO: 1311750 - RNA, 19 nt, Artificial Sequence
  Description of Artificial Sequence: Synthetic oligonucleotide
  Sense strand starting at position 44 of SEQ ID NO: 1241946
ugucaagacugaguaagau

SEQ ID NO: 1311751 - RNA, 19 nt, Artificial Sequence
  Description of Artificial Sequence: Synthetic oligonucleotide
  Antisense strand to SEQ ID NO: 1311750
aucuuacucagucuugaca

SEQ ID NO: 1311752 - RNA, 19 nt, Artificial Sequence
  Description of Artificial Sequence: Synthetic oligonucleotide
  Sense strand starting at position 409 of SEQ ID NO: 1241946
ccaguacauuguuucuaag

SEQ ID NO: 1311753 - RNA, 19 nt, Artificial Sequence
  Description of Artificial Sequence: Synthetic oligonucleotide
  Antisense strand to SEQ ID NO: 1311752
cuuagaaacaauguacugg

SEQ ID NO: 1311754 - RNA, 19 nt, Artificial Sequence
  Description of Artificial Sequence: Synthetic oligonucleotide
  Sense strand starting at position 564 of SEQ ID NO: 1241946
gcgcaugcuagugcucaga

SEQ ID NO: 1311755 - RNA, 19 nt, Artificial Sequence
  Description of Artificial Sequence: Synthetic oligonucleotide
  Antisense strand to SEQ ID NO: 1311754
ucugagcacuagcaugcgc

SEQ ID NO: 1311756 - RNA, 19 nt, Artificial Sequence
  Description of Artificial Sequence: Synthetic oligonucleotide
  Sense strand starting at position 567 of SEQ ID NO: 1241946
caugcuagugcucagaaac

SEQ ID NO: 1311757 - RNA, 19 nt, Artificial Sequence
  Description of Artificial Sequence: Synthetic oligonucleotide
  Antisense strand to SEQ ID NO: 1311756
guuucugagcacuagcaug

SEQ ID NO: 1311758 - RNA, 19 nt, Artificial Sequence
  Description of Artificial Sequence: Synthetic oligonucleotide
  Sense strand starting at position 611 of SEQ ID NO: 1241946
ggauaaagacuguguccuu

SEQ ID NO: 1311759 - RNA, 19 nt, Artificial Sequence
  Description of Artificial Sequence: Synthetic oligonucleotide
  Antisense strand to SEQ ID NO: 1311758
aaggacacagucuuuaucc

SEQ ID NO: 1311760 - RNA, 19 nt, Artificial Sequence
  Description of Artificial Sequence: Synthetic oligonucleotide
  Sense strand starting at position 612 of SEQ ID NO: 1241946
gauaaagacuguguccuua

SEQ ID NO: 1311761 - RNA, 19 nt, Artificial Sequence
  Description of Artificial Sequence: Synthetic oligonucleotide
  Antisense strand to SEQ ID NO: 1311760
uaaggacacagucuuuauc

SEQ ID NO: 1311762 - RNA, 19 nt, Artificial Sequence
  Description of Artificial Sequence: Synthetic oligonucleotide
  Sense strand starting at position 761 of SEQ ID NO: 1241946
cuagacuugcugcaauuaa

SEQ ID NO: 1311763 - RNA, 19 nt, Artificial Sequence
  Description of Artificial Sequence: Synthetic oligonucleotide
  Antisense strand to SEQ ID NO: 1311762
uuaauugcagcaagucuag

SEQ ID NO: 1311764 - RNA, 19 nt, Artificial Sequence
  Description of Artificial Sequence: Synthetic oligonucleotide
  Sense strand starting at position 866 of SEQ ID NO: 1241946
cacuguuucccuggaugga

SEQ ID NO: 1311765 - RNA, 19 nt, Artificial Sequence
  Description of Artificial Sequence: Synthetic oligonucleotide
  Antisense strand to SEQ ID NO: 1311764
uccauccagggaaacagug

SEQ ID NO: 1311766 - RNA, 19 nt, Artificial Sequence
  Description of Artificial Sequence: Synthetic oligonucleotide
  Sense strand starting at position 907 of SEQ ID NO: 1241946
ccuaccaaguccucugaga

SEQ ID NO: 1311767 - RNA, 19 nt, Artificial Sequence
  Description of Artificial Sequence: Synthetic oligonucleotide
  Antisense strand to SEQ ID NO: 1311766
ucucagaggacuugguagg

SEQ ID NO: 1311768 - RNA, 19 nt, Artificial Sequence
  Description of Artificial Sequence: Synthetic oligonucleotide
  Sense strand starting at position 1100 of SEQ ID NO: 1241946
gcugaaugcagugaauguu

SEQ ID NO: 1311769 - RNA, 19 nt, Artificial Sequence
  Description of Artificial Sequence: Synthetic oligonucleotide
  Antisense strand to SEQ ID NO: 1311768
aacauucacugcauucagc

SEQ ID NO: 1311770 - RNA, 19 nt, Artificial Sequence
  Description of Artificial Sequence: Synthetic oligonucleotide
  Sense strand starting at position 1108 of SEQ ID NO: 1241946
cagugaauguuucugguca

SEQ ID NO: 1311771 - RNA, 19 nt, Artificial Sequence
  Description of Artificial Sequence: Synthetic oligonucleotide
  Antisense strand to SEQ ID NO: 1311770
ugaccagaaacauucacug

SEQ ID NO: 1311772 - RNA, 19 nt, Artificial Sequence
  Description of Artificial Sequence: Synthetic oligonucleotide
  Sense strand starting at position 1112 of SEQ ID NO: 1241946
gaauguuucuggucaguaa

SEQ ID NO: 1311773 - RNA, 19 nt, Artificial Sequence
  Description of Artificial Sequence: Synthetic oligonucleotide
  Antisense strand to SEQ ID NO: 1311772
uuacugaccagaaacauuc

SEQ ID NO: 1311774 - RNA, 19 nt, Artificial Sequence
  Description of Artificial Sequence: Synthetic oligonucleotide
  Sense strand starting at position 1113 of SEQ ID NO: 1241946
aauguuucuggucaguaaa

SEQ ID NO: 1311775 - RNA, 19 nt, Artificial Sequence
  Description of Artificial Sequence: Synthetic oligonucleotide
  Antisense strand to SEQ ID NO: 1311774
uuuacugaccagaaacauu

SEQ ID NO: 1311776 - RNA, 19 nt, Artificial Sequence
  Description of Artificial Sequence: Synthetic oligonucleotide
  Sense strand starting at position 1293 of SEQ ID NO: 1241946
ccugauaaaugacagaauc

SEQ ID NO: 1311777 - RNA, 19 nt, Artificial Sequence
  Description of Artificial Sequence: Synthetic oligonucleotide
  Antisense strand to SEQ ID NO: 1311776
gauucugucauuuaucagg

SEQ ID NO: 1311778 - RNA, 19 nt, Artificial Sequence
  Description of Artificial Sequence: Synthetic oligonucleotide
  Sense strand starting at position 1359 of SEQ ID NO: 1241946
ccggaacuugcggauaagu

SEQ ID NO: 1311779 - RNA, 19 nt, Artificial Sequence
  Description of Artificial Sequence: Synthetic oligonucleotide
  Antisense strand to SEQ ID NO: 1311778
acuuauccgcaaguuccgg

SEQ ID NO: 1311780 - RNA, 19 nt, Artificial Sequence
  Description of Artificial Sequence: Synthetic oligonucleotide
  Sense strand starting at position 1867 of SEQ ID NO: 1241946
cugccuuuccgaggaagag

SEQ ID NO: 1311781 - RNA, 19 nt, Artificial Sequence
  Description of Artificial Sequence: Synthetic oligonucleotide
  Antisense strand to SEQ ID NO: 1311780
cucuuccucggaaaggcag

SEQ ID NO: 1311782 - RNA, 19 nt, Artificial Sequence
  Description of Artificial Sequence: Synthetic oligonucleotide
  Sense strand starting at position 1868 of SEQ ID NO: 1241946
ugccuuuccgaggaagaga

SEQ ID NO: 1311783 - RNA, 19 nt, Artificial Sequence
  Description of Artificial Sequence: Synthetic oligonucleotide
  Antisense strand to SEQ ID NO: 1311782
ucucuuccucggaaaggca

SEQ ID NO: 1311784 - RNA, 19 nt, Artificial Sequence
  Description of Artificial Sequence: Synthetic oligonucleotide
  Sense strand starting at position 2196 of SEQ ID NO: 1241946
gggaaucucugucuagggu

SEQ ID NO: 1311785 - RNA, 19 nt, Artificial Sequence
  Description of Artificial Sequence: Synthetic oligonucleotide
  Antisense strand to SEQ ID NO: 1311784
acccuagacagagauuccc

SEQ ID NO: 1311786 - RNA, 19 nt, Artificial Sequence
  Description of Artificial Sequence: Synthetic oligonucleotide
  Sense strand starting at position 2257 of SEQ ID NO: 1241946
gagauagacuaagcugauu

SEQ ID NO: 1311787 - RNA, 19 nt, Artificial Sequence
  Description of Artificial Sequence: Synthetic oligonucleotide
  Antisense strand to SEQ ID NO: 1311786
aaucagcuuagucuaucuc

SEQ ID NO: 1311788 - RNA, 19 nt, Artificial Sequence
  Description of Artificial Sequence: Synthetic oligonucleotide
  Sense strand starting at position 2316 of SEQ ID NO: 1241946
uguucuuacggguggagga

SEQ ID NO: 1311789 - RNA, 19 nt, Artificial Sequence
  Description of Artificial Sequence: Synthetic oligonucleotide
  Antisense strand to SEQ ID NO: 1311788
uccuccacccguaagaaca

SEQ ID NO: 1311790 - RNA, 19 nt, Artificial Sequence
  Description of Artificial Sequence: Synthetic oligonucleotide
  Sense strand starting at position 2439 of SEQ ID NO: 1241946
guuggugacaucuagaguc

SEQ ID NO: 1311791 - RNA, 19 nt, Artificial Sequence
  Description of Artificial Sequence: Synthetic oligonucleotide
  Antisense strand to SEQ ID NO: 1311790
gacucuagaugucaccaac

SEQ ID NO: 1311792 - RNA, 19 nt, Artificial Sequence
  Description of Artificial Sequence: Synthetic oligonucleotide
  Sense strand starting at position 2445 of SEQ ID NO: 1241946
gacaucuagagucguguga

SEQ ID NO: 1311793 - RNA, 19 nt, Artificial Sequence
  Description of Artificial Sequence: Synthetic oligonucleotide
  Antisense strand to SEQ ID NO: 1311792
ucacacgacucuagauguc

SEQ ID NO: 1311794 - RNA, 19 nt, Artificial Sequence
  Description of Artificial Sequence: Synthetic oligonucleotide
  Sense strand starting at position 2605 of SEQ ID NO: 1241946
cuuugaacgcauuaagcuu

SEQ ID NO: 1311795 - RNA, 19 nt, Artificial Sequence
  Description of Artificial Sequence: Synthetic oligonucleotide
  Antisense strand to SEQ ID NO: 1311794
aagcuuaaugcguucaaag

SEQ ID NO: 1311796 - RNA, 19 nt, Artificial Sequence
  Description of Artificial Sequence: Synthetic oligonucleotide
  Sense strand starting at position 2795 of SEQ ID NO: 1241946
ggcagauugccaggacuuc

SEQ ID NO: 1311797 - RNA, 19 nt, Artificial Sequence
  Description of Artificial Sequence: Synthetic oligonucleotide
  Antisense strand to SEQ ID NO: 1311796
gaaguccuggcaaucugcc

SEQ ID NO: 1311798 - RNA, 19 nt, Artificial Sequence
  Description of Artificial Sequence: Synthetic oligonucleotide
  Sense strand starting at position 2818 of SEQ ID NO: 1241946
gugguaccacuuugaacua

SEQ ID NO: 1311799 - RNA, 19 nt, Artificial Sequence
  Description of Artificial Sequence: Synthetic oligonucleotide
  Antisense strand to SEQ ID NO: 1311798
uaguucaaagugguaccac

SEQ ID NO: 1311800 - RNA, 19 nt, Artificial Sequence
  Description of Artificial Sequence: Synthetic oligonucleotide
  Sense strand starting at position 2827 of SEQ ID NO: 1241946
cuuugaacuagcugugaug

SEQ ID NO: 1311801 - RNA, 19 nt, Artificial Sequence
  Description of Artificial Sequence: Synthetic oligonucleotide
  Antisense strand to SEQ ID NO: 1311800
caucacagcuaguucaaag

SEQ ID NO: 1311802 - RNA, 19 nt, Artificial Sequence
  Description of Artificial Sequence: Synthetic oligonucleotide
  Sense strand starting at position 2916 of SEQ ID NO: 1241946
cuacauuggaguugugaug

SEQ ID NO: 1311803 - RNA, 19 nt, Artificial Sequence
  Description of Artificial Sequence: Synthetic oligonucleotide
  Antisense strand to SEQ ID NO: 1311802
caucacaacuccaauguag

SEQ ID NO: 1311804 - RNA, 19 nt, Artificial Sequence
  Description of Artificial Sequence: Synthetic oligonucleotide
  Sense strand starting at position 2922 of SEQ ID NO: 1241946
uggaguugugaugacuaua

SEQ ID NO: 1311805 - RNA, 19 nt, Artificial Sequence
  Description of Artificial Sequence: Synthetic oligonucleotide
  Antisense strand to SEQ ID NO: 1311804
uauagucaucacaacucca

SEQ ID NO: 1311806 - RNA, 19 nt, Artificial Sequence
  Description of Artificial Sequence: Synthetic oligonucleotide
  Sense strand starting at position 3357 of SEQ ID NO: 1241946
gucuuucuucuugggagau

SEQ ID NO: 1311807 - RNA, 19 nt, Artificial Sequence
  Description of Artificial Sequence: Synthetic oligonucleotide
  Antisense strand to SEQ ID NO: 1311806
aucucccaagaagaaagac

SEQ ID NO: 1311808 - RNA, 19 nt, Artificial Sequence
  Description of Artificial Sequence: Synthetic oligonucleotide
  Sense strand starting at position 3361 of SEQ ID NO: 1241946
uucuucuugggagauguuu

SEQ ID NO: 1311809 - RNA, 19 nt, Artificial Sequence
  Description of Artificial Sequence: Synthetic oligonucleotide
  Antisense strand to SEQ ID NO: 1311808
aaacaucucccaagaagaa

SEQ ID NO: 1311810 - RNA, 19 nt, Artificial Sequence
  Description of Artificial Sequence: Synthetic oligonucleotide
  Sense strand starting at position 3363 of SEQ ID NO: 1241946
cuucuugggagauguuuau

SEQ ID NO: 1311811 - RNA, 19 nt, Artificial Sequence
  Description of Artificial Sequence: Synthetic oligonucleotide
  Antisense strand to SEQ ID NO: 1311810
auaaacaucucccaagaag

SEQ ID NO: 1311812 - RNA, 19 nt, Artificial Sequence
  Description of Artificial Sequence: Synthetic oligonucleotide
  Sense strand starting at position 3369 of SEQ ID NO: 1241946
gggagauguuuauuggauu

SEQ ID NO: 1311813 - RNA, 19 nt, Artificial Sequence
  Description of Artificial Sequence: Synthetic oligonucleotide
  Antisense strand to SEQ ID NO: 1311812
aauccaauaaacaucuccc

SEQ ID NO: 1311814 - RNA, 19 nt, Artificial Sequence
  Description of Artificial Sequence: Synthetic oligonucleotide
  Sense strand starting at position 3709 of SEQ ID NO: 1241946
agauuuaauucuggugaau

SEQ ID NO: 1311815 - RNA, 19 nt, Artificial Sequence
  Description of Artificial Sequence: Synthetic oligonucleotide
  Antisense strand to SEQ ID NO: 1311814
auucaccagaauuaaaucu

SEQ ID NO: 1311816 - RNA, 19 nt, Artificial Sequence
  Description of Artificial Sequence: Synthetic oligonucleotide
  Sense strand starting at position 3720 of SEQ ID NO: 1241946
uggugaaucugaucuacac

SEQ ID NO: 1311817 - RNA, 19 nt, Artificial Sequence
  Description of Artificial Sequence: Synthetic oligonucleotide
  Antisense strand to SEQ ID NO: 1311816
guguagaucagauucacca

SEQ ID NO: 1311818 - RNA, 19 nt, Artificial Sequence
  Description of Artificial Sequence: Synthetic oligonucleotide
  Sense strand starting at position 3738 of SEQ ID NO: 1241946
caucgaucucgguauacac

SEQ ID NO: 1311819 - RNA, 19 nt, Artificial Sequence
  Description of Artificial Sequence: Synthetic oligonucleotide
  Antisense strand to SEQ ID NO: 1311818
guguauaccgagaucgaug

SEQ ID NO: 1311820 - RNA, 19 nt, Artificial Sequence
  Description of Artificial Sequence: Synthetic oligonucleotide
  Sense strand starting at position 3856 of SEQ ID NO: 1241946
ccaugaugucaucaucgau

SEQ ID NO: 1311821 - RNA, 19 nt, Artificial Sequence
  Description of Artificial Sequence: Synthetic oligonucleotide
  Antisense strand to SEQ ID NO: 1311820
aucgaugaugacaucaugg

SEQ ID NO: 1311822 - RNA, 19 nt, Artificial Sequence
  Description of Artificial Sequence: Synthetic oligonucleotide
  Sense strand starting at position 3892 of SEQ ID NO: 1241946
ugggcuuccagccaucaga

SEQ ID NO: 1311823 - RNA, 19 nt, Artificial Sequence
  Description of Artificial Sequence: Synthetic oligonucleotide
  Antisense strand to SEQ ID NO: 1311822
ucugauggcuggaagccca

SEQ ID NO: 1311824 - RNA, 19 nt, Artificial Sequence
  Description of Artificial Sequence: Synthetic oligonucleotide
  Sense strand starting at position 167 of SEQ ID NO: 1241947
cggaguuugcaguaaacug

SEQ ID NO: 1311825 - RNA, 19 nt, Artificial Sequence
  Description of Artificial Sequence: Synthetic oligonucleotide
  Antisense strand to SEQ ID NO: 1311824
caguuuacugcaaacuccg

SEQ ID NO: 1311826 - RNA, 19 nt, Artificial Sequence
  Description of Artificial Sequence: Synthetic oligonucleotide
  Sense strand starting at position 440 of SEQ ID NO: 1241947
cacggacucuuggcuacaa

SEQ ID NO: 1311827 - RNA, 19 nt, Artificial Sequence
  Description of Artificial Sequence: Synthetic oligonucleotide
  Antisense strand to SEQ ID NO: 1311826
uuguagccaagaguccgug

SEQ ID NO: 1311828 - RNA, 19 nt, Artificial Sequence
  Description of Artificial Sequence: Synthetic oligonucleotide
  Sense strand starting at position 442 of SEQ ID NO: 1241947
cggacucuuggcuacaaga

SEQ ID NO: 1311829 - RNA, 19 nt, Artificial Sequence
  Description of Artificial Sequence: Synthetic oligonucleotide
  Antisense strand to SEQ ID NO: 1311828
ucuuguagccaagaguccg

SEQ ID NO: 1311830 - RNA, 19 nt, Artificial Sequence
  Description of Artificial Sequence: Synthetic oligonucleotide
  Sense strand starting at position 534 of SEQ ID NO: 1241947
cuguauuauucuuugucua

SEQ ID NO: 1311831 - RNA, 19 nt, Artificial Sequence
  Description of Artificial Sequence: Synthetic oligonucleotide
  Antisense strand to SEQ ID NO: 1311830
uagacaaagaauaauacag

SEQ ID NO: 1311832 - RNA, 19 nt, Artificial Sequence
  Description of Artificial Sequence: Synthetic oligonucleotide
  Sense strand starting at position 535 of SEQ ID NO: 1241947
uguauuauucuuugucuac

SEQ ID NO: 1311833 - RNA, 19 nt, Artificial Sequence
  Description of Artificial Sequence: Synthetic oligonucleotide
  Antisense strand to SEQ ID NO: 1311832
guagacaaagaauaauaca

SEQ ID NO: 1311834 - RNA, 19 nt, Artificial Sequence
  Description of Artificial Sequence: Synthetic oligonucleotide
  Sense strand starting at position 536 of SEQ ID NO: 1241947
guauuauucuuugucuacu

SEQ ID NO: 1311835 - RNA, 19 nt, Artificial Sequence
  Description of Artificial Sequence: Synthetic oligonucleotide
  Antisense strand to SEQ ID NO: 1311834
aguagacaaagaauaauac

SEQ ID NO: 1311836 - RNA, 19 nt, Artificial Sequence
  Description of Artificial Sequence: Synthetic oligonucleotide
  Sense strand starting at position 544 of SEQ ID NO: 1241947
cuuugucuacuccacuaga

SEQ ID NO: 1311837 - RNA, 19 nt, Artificial Sequence
  Description of Artificial Sequence: Synthetic oligonucleotide
  Antisense strand to SEQ ID NO: 1311836
ucuaguggaguagacaaag

SEQ ID NO: 1311838 - RNA, 19 nt, Artificial Sequence
  Description of Artificial Sequence: Synthetic oligonucleotide
  Sense strand starting at position 718 of SEQ ID NO: 1241947
gggacaucuacugguugag

SEQ ID NO: 1311839 - RNA, 19 nt, Artificial Sequence
  Description of Artificial Sequence: Synthetic oligonucleotide
  Antisense strand to SEQ ID NO: 1311838
cucaaccaguagauguccc

SEQ ID NO: 1311840 - RNA, 19 nt, Artificial Sequence
  Description of Artificial Sequence: Synthetic oligonucleotide
  Sense strand starting at position 728 of SEQ ID NO: 1241947
cugguugaggcuuaacauc

SEQ ID NO: 1311841 - RNA, 19 nt, Artificial Sequence
  Description of Artificial Sequence: Synthetic oligonucleotide
  Antisense strand to SEQ ID NO: 1311840
gauguuaagccucaaccag

SEQ ID NO: 1311842 - RNA, 19 nt, Artificial Sequence
  Description of Artificial Sequence: Synthetic oligonucleotide
  Sense strand starting at position 822 of SEQ ID NO: 1241947
auccuuccuucuguaguaa

SEQ ID NO: 1311843 - RNA, 19 nt, Artificial Sequence
  Description of Artificial Sequence: Synthetic oligonucleotide
  Antisense strand to SEQ ID NO: 1311842
uuacuacagaaggaaggau

SEQ ID NO: 1311844 - RNA, 19 nt, Artificial Sequence
  Description of Artificial Sequence: Synthetic oligonucleotide
  Sense strand starting at position 823 of SEQ ID NO: 1241947
uccuuccuucuguaguaaa

SEQ ID NO: 1311845 - RNA, 19 nt, Artificial Sequence
  Description of Artificial Sequence: Synthetic oligonucleotide
  Antisense strand to SEQ ID NO: 1311844
uuuacuacagaaggaagga

SEQ ID NO: 1311846 - RNA, 19 nt, Artificial Sequence
  Description of Artificial Sequence: Synthetic oligonucleotide
  Sense strand starting at position 878 of SEQ ID NO: 1241947
uuauaauuggcuuagaagu

SEQ ID NO: 1311847 - RNA, 19 nt, Artificial Sequence
  Description of Artificial Sequence: Synthetic oligonucleotide
  Antisense strand to SEQ ID NO: 1311846
acuucuaagccaauuauaa

SEQ ID NO: 1311848 - RNA, 19 nt, Artificial Sequence
  Description of Artificial Sequence: Synthetic oligonucleotide
  Sense strand starting at position 933 of SEQ ID NO: 1241947
gucauaaaccgauaagcca

SEQ ID NO: 1311849 - RNA, 19 nt, Artificial Sequence
  Description of Artificial Sequence: Synthetic oligonucleotide
  Antisense strand to SEQ ID NO: 1311848
uggcuuaucgguuuaugac

SEQ ID NO: 1311850 - RNA, 19 nt, Artificial Sequence
  Description of Artificial Sequence: Synthetic oligonucleotide
  Sense strand starting at position 965 of SEQ ID NO: 1241947
uugucuagaagucagucau

SEQ ID NO: 1311851 - RNA, 19 nt, Artificial Sequence
  Description of Artificial Sequence: Synthetic oligonucleotide
  Antisense strand to SEQ ID NO: 1311850
augacugacuucuagacaa

SEQ ID NO: 1311852 - RNA, 19 nt, Artificial Sequence
  Description of Artificial Sequence: Synthetic oligonucleotide
  Sense strand starting at position 971 of SEQ ID NO: 1241947
agaagucagucauuauaac

SEQ ID NO: 1311853 - RNA, 19 nt, Artificial Sequence
  Description of Artificial Sequence: Synthetic oligonucleotide
  Antisense strand to SEQ ID NO: 1311852
guuauaaugacugacuucu

SEQ ID NO: 1311854 - RNA, 19 nt, Artificial Sequence
  Description of Artificial Sequence: Synthetic oligonucleotide
  Sense strand starting at position 1321 of SEQ ID NO: 1241947
uaguaacaucucggguauc

SEQ ID NO: 1311855 - RNA, 19 nt, Artificial Sequence
  Description of Artificial Sequence: Synthetic oligonucleotide
  Antisense strand to SEQ ID NO: 1311854
gauacccgagauguuacua

SEQ ID NO: 1311856 - RNA, 19 nt, Artificial Sequence
  Description of Artificial Sequence: Synthetic oligonucleotide
  Sense strand starting at position 1635 of SEQ ID NO: 1241947
gaaggaguuuacuuccaau

SEQ ID NO: 1311857 - RNA, 19 nt, Artificial Sequence
  Description of Artificial Sequence: Synthetic oligonucleotide
  Antisense strand to SEQ ID NO: 1311856
auuggaaguaaacuccuuc

SEQ ID NO: 1311858 - RNA, 19 nt, Artificial Sequence
  Description of Artificial Sequence: Synthetic oligonucleotide
  Sense strand starting at position 1638 of SEQ ID NO: 1241947
ggaguuuacuuccaauuug

SEQ ID NO: 1311859 - RNA, 19 nt, Artificial Sequence
  Description of Artificial Sequence: Synthetic oligonucleotide
  Antisense strand to SEQ ID NO: 1311858
caaauuggaaguaaacucc

SEQ ID NO: 1311860 - RNA, 19 nt, Artificial Sequence
  Description of Artificial Sequence: Synthetic oligonucleotide
  Sense strand starting at position 1835 of SEQ ID NO: 1241947
gcacuauuucguuaccucu

SEQ ID NO: 1311861 - RNA, 19 nt, Artificial Sequence
  Description of Artificial Sequence: Synthetic oligonucleotide
  Antisense strand to SEQ ID NO: 1311860
agagguaacgaaauagugc

SEQ ID NO: 1311862 - RNA, 19 nt, Artificial Sequence
  Description of Artificial Sequence: Synthetic oligonucleotide
  Sense strand starting at position 1983 of SEQ ID NO: 1241947
gcgugaauccugcccgcaa

SEQ ID NO: 1311863 - RNA, 19 nt, Artificial Sequence
  Description of Artificial Sequence: Synthetic oligonucleotide
  Antisense strand to SEQ ID NO: 1311862
uugcgggcaggauucacgc

SEQ ID NO: 1311864 - RNA, 19 nt, Artificial Sequence
  Description of Artificial Sequence: Synthetic oligonucleotide
  Sense strand starting at position 2307 of SEQ ID NO: 1241947
caaugaguucccuacggca

SEQ ID NO: 1311865 - RNA, 19 nt, Artificial Sequence
  Description of Artificial Sequence: Synthetic oligonucleotide
  Antisense strand to SEQ ID NO: 1311864
ugccguagggaacucauug

SEQ ID NO: 1311866 - RNA, 19 nt, Artificial Sequence
  Description of Artificial Sequence: Synthetic oligonucleotide
  Sense strand starting at position 2410 of SEQ ID NO: 1241947
gcgauagacgcggagagau

SEQ ID NO: 1311867 - RNA, 19 nt, Artificial Sequence
  Description of Artificial Sequence: Synthetic oligonucleotide
  Antisense strand to SEQ ID NO: 1311866
aucucuccgcgucuaucgc

SEQ ID NO: 1311868 - RNA, 19 nt, Artificial Sequence
  Description of Artificial Sequence: Synthetic oligonucleotide
  Sense strand starting at position 2440 of SEQ ID NO: 1241947
cuuguagucccgagucguc

SEQ ID NO: 1311869 - RNA, 19 nt, Artificial Sequence
  Description of Artificial Sequence: Synthetic oligonucleotide
  Antisense strand to SEQ ID NO: 1311868
gacgacucgggacuacaag

SEQ ID NO: 1311870 - RNA, 19 nt, Artificial Sequence
  Description of Artificial Sequence: Synthetic oligonucleotide
  Sense strand starting at position 2442 of SEQ ID NO: 1241947
uguagucccgagucgucau

SEQ ID NO: 1311871 - RNA, 19 nt, Artificial Sequence
  Description of Artificial Sequence: Synthetic oligonucleotide
  Antisense strand to SEQ ID NO: 1311870
augacgacucgggacuaca

SEQ ID NO: 1311872 - RNA, 19 nt, Artificial Sequence
  Description of Artificial Sequence: Synthetic oligonucleotide
  Sense strand starting at position 2464 of SEQ ID NO: 1241947
cgagcucuuccggucacuu

SEQ ID NO: 1311873 - RNA, 19 nt, Artificial Sequence
  Description of Artificial Sequence: Synthetic oligonucleotide
  Antisense strand to SEQ ID NO: 1311872
aagugaccggaagagcucg

SEQ ID NO: 1311874 - RNA, 19 nt, Artificial Sequence
  Description of Artificial Sequence: Synthetic oligonucleotide
  Sense strand starting at position 2652 of SEQ ID NO: 1241947
guaacauggaguugguauu

SEQ ID NO: 1311875 - RNA, 19 nt, Artificial Sequence
  Description of Artificial Sequence: Synthetic oligonucleotide
  Antisense strand to SEQ ID NO: 1311874
aauaccaacuccauguuac

SEQ ID NO: 1311876 - RNA, 19 nt, Artificial Sequence
  Description of Artificial Sequence: Synthetic oligonucleotide
  Sense strand starting at position 2672 of SEQ ID NO: 1241947
ucaguuaguucccugagca

SEQ ID NO: 1311877 - RNA, 19 nt, Artificial Sequence
  Description of Artificial Sequence: Synthetic oligonucleotide
  Antisense strand to SEQ ID NO: 1311876
ugcucagggaacuaacuga

SEQ ID NO: 1311878 - RNA, 19 nt, Artificial Sequence
  Description of Artificial Sequence: Synthetic oligonucleotide
  Sense strand starting at position 2673 of SEQ ID NO: 1241947
caguuaguucccugagcag

SEQ ID NO: 1311879 - RNA, 19 nt, Artificial Sequence
  Description of Artificial Sequence: Synthetic oligonucleotide
  Antisense strand to SEQ ID NO: 1311878
cugcucagggaacuaacug

SEQ ID NO: 1311880 - RNA, 19 nt, Artificial Sequence
  Description of Artificial Sequence: Synthetic oligonucleotide
  Sense strand starting at position 2690 of SEQ ID NO: 1241947
agcaauuguuaguugguaa

SEQ ID NO: 1311881 - RNA, 19 nt, Artificial Sequence
  Description of Artificial Sequence: Synthetic oligonucleotide
  Antisense strand to SEQ ID NO: 1311880
uuaccaacuaacaauugcu

SEQ ID NO: 1311882 - RNA, 19 nt, Artificial Sequence
  Description of Artificial Sequence: Synthetic oligonucleotide
  Sense strand starting at position 2778 of SEQ ID NO: 1241947
cuuuaaagucuugaggguu

SEQ ID NO: 1311883 - RNA, 19 nt, Artificial Sequence
  Description of Artificial Sequence: Synthetic oligonucleotide
  Antisense strand to SEQ ID NO: 1311882
aacccucaagacuuuaaag

SEQ ID NO: 1311884 - RNA, 19 nt, Artificial Sequence
  Description of Artificial Sequence: Synthetic oligonucleotide
  Sense strand starting at position 2945 of SEQ ID NO: 1241947
cgugauuaaggauggcacu

SEQ ID NO: 1311885 - RNA, 19 nt, Artificial Sequence
  Description of Artificial Sequence: Synthetic oligonucleotide
  Antisense strand to SEQ ID NO: 1311884
agugccauccuuaaucacg

SEQ ID NO: 1311886 - RNA, 19 nt, Artificial Sequence
  Description of Artificial Sequence: Synthetic oligonucleotide
  Sense strand starting at position 2955 of SEQ ID NO: 1241947
gauggcacugcauagauaa

SEQ ID NO: 1311887 - RNA, 19 nt, Artificial Sequence
  Description of Artificial Sequence: Synthetic oligonucleotide
  Antisense strand to SEQ ID NO: 1311886
uuaucuaugcagugccauc

SEQ ID NO: 1311888 - RNA, 19 nt, Artificial Sequence
  Description of Artificial Sequence: Synthetic oligonucleotide
  Sense strand starting at position 2969 of SEQ ID NO: 1241947
gauaaccucuggucagguu

SEQ ID NO: 1311889 - RNA, 19 nt, Artificial Sequence
  Description of Artificial Sequence: Synthetic oligonucleotide
  Antisense strand to SEQ ID NO: 1311888
aaccugaccagagguuauc

SEQ ID NO: 1311890 - RNA, 19 nt, Artificial Sequence
  Description of Artificial Sequence: Synthetic oligonucleotide
  Sense strand starting at position 3344 of SEQ ID NO: 1241947
ugagauuaucccugugaga

SEQ ID NO: 1311891 - RNA, 19 nt, Artificial Sequence
  Description of Artificial Sequence: Synthetic oligonucleotide
  Antisense strand to SEQ ID NO: 1311890
ucucacagggauaaucuca

SEQ ID NO: 1311892 - RNA, 19 nt, Artificial Sequence
  Description of Artificial Sequence: Synthetic oligonucleotide
  Sense strand starting at position 3346 of SEQ ID NO: 1241947
agauuaucccugugagaaa

SEQ ID NO: 1311893 - RNA, 19 nt, Artificial Sequence
  Description of Artificial Sequence: Synthetic oligonucleotide
  Antisense strand to SEQ ID NO: 1311892
uuucucacagggauaaucu

SEQ ID NO: 1311894 - RNA, 19 nt, Artificial Sequence
  Description of Artificial Sequence: Synthetic oligonucleotide
  Sense strand starting at position 3504 of SEQ ID NO: 1241947
guuuacacuggaggaguua

SEQ ID NO: 1311895 - RNA, 19 nt, Artificial Sequence
  Description of Artificial Sequence: Synthetic oligonucleotide
  Antisense strand to SEQ ID NO: 1311894
uaacuccuccaguguaaac

SEQ ID NO: 1311896 - RNA, 19 nt, Artificial Sequence
  Description of Artificial Sequence: Synthetic oligonucleotide
  Sense strand starting at position 3516 of SEQ ID NO: 1241947
ggaguuaacuccuugaguu

SEQ ID NO: 1311897 - RNA, 19 nt, Artificial Sequence
  Description of Artificial Sequence: Synthetic oligonucleotide
  Antisense strand to SEQ ID NO: 1311896
aacucaaggaguuaacucc

SEQ ID NO: 1311898 - RNA, 19 nt, Artificial Sequence
  Description of Artificial Sequence: Synthetic oligonucleotide
  Sense strand starting at position 3517 of SEQ ID NO: 1241947
gaguuaacuccuugaguua

SEQ ID NO: 1311899 - RNA, 19 nt, Artificial Sequence
  Description of Artificial Sequence: Synthetic oligonucleotide
  Antisense strand to SEQ ID NO: 1311898
uaacucaaggaguuaacuc

SEQ ID NO: 1311900 - RNA, 19 nt, Artificial Sequence
  Description of Artificial Sequence: Synthetic oligonucleotide
  Sense strand starting at position 3518 of SEQ ID NO: 1241947
aguuaacuccuugaguuau

SEQ ID NO: 1311901 - RNA, 19 nt, Artificial Sequence
  Description of Artificial Sequence: Synthetic oligonucleotide
  Antisense strand to SEQ ID NO: 1311900
auaacucaaggaguuaacu

SEQ ID NO: 1311902 - RNA, 19 nt, Artificial Sequence
  Description of Artificial Sequence: Synthetic oligonucleotide
  Sense strand starting at position 3764 of SEQ ID NO: 1241947
uauguuggccguguuaguu

SEQ ID NO: 1311903 - RNA, 19 nt, Artificial Sequence
  Description of Artificial Sequence: Synthetic oligonucleotide
  Antisense strand to SEQ ID NO: 1311902
aacuaacacggccaacaua

SEQ ID NO: 1311904 - RNA, 19 nt, Artificial Sequence
  Description of Artificial Sequence: Synthetic oligonucleotide
  Sense strand starting at position 688 of SEQ ID NO: 1241948
guggcuugcuauccuuuaa

SEQ ID NO: 1311905 - RNA, 19 nt, Artificial Sequence
  Description of Artificial Sequence: Synthetic oligonucleotide
  Antisense strand to SEQ ID NO: 1311904
uuaaaggauagcaagccac

SEQ ID NO: 1311906 - RNA, 19 nt, Artificial Sequence
  Description of Artificial Sequence: Synthetic oligonucleotide
  Sense strand starting at position 887 of SEQ ID NO: 1241948
agaacagccuuucuugauu

SEQ ID NO: 1311907 - RNA, 19 nt, Artificial Sequence
  Description of Artificial Sequence: Synthetic oligonucleotide
  Antisense strand to SEQ ID NO: 1311906
aaucaagaaaggcuguucu

SEQ ID NO: 1311908 - RNA, 19 nt, Artificial Sequence
  Description of Artificial Sequence: Synthetic oligonucleotide
  Sense strand starting at position 934 of SEQ ID NO: 1241948
ggaaauuauggaggccagu

SEQ ID NO: 1311909 - RNA, 19 nt, Artificial Sequence
  Description of Artificial Sequence: Synthetic oligonucleotide
  Antisense strand to SEQ ID NO: 1311908
acuggccuccauaauuucc

SEQ ID NO: 1311910 - RNA, 19 nt, Artificial Sequence
  Description of Artificial Sequence: Synthetic oligonucleotide
  Sense strand starting at position 947 of SEQ ID NO: 1241948
gccaguggauacguucauu

SEQ ID NO: 1311911 - RNA, 19 nt, Artificial Sequence
  Description of Artificial Sequence: Synthetic oligonucleotide
  Antisense strand to SEQ ID NO: 1311910
aaugaacguauccacuggc

SEQ ID NO: 1311912 - RNA, 19 nt, Artificial Sequence
  Description of Artificial Sequence: Synthetic oligonucleotide
  Sense strand starting at position 1029 of SEQ ID NO: 1241948
cccuaaccugcagaugaua

SEQ ID NO: 1311913 - RNA, 19 nt, Artificial Sequence
  Description of Artificial Sequence: Synthetic oligonucleotide
  Antisense strand to SEQ ID NO: 1311912
uaucaucugcagguuaggg

SEQ ID NO: 1311914 - RNA, 19 nt, Artificial Sequence
  Description of Artificial Sequence: Synthetic oligonucleotide
  Sense strand starting at position 1215 of SEQ ID NO: 1241948
gccuuuaaguuugauggca

SEQ ID NO: 1311915 - RNA, 19 nt, Artificial Sequence
  Description of Artificial Sequence: Synthetic oligonucleotide
  Antisense strand to SEQ ID NO: 1311914
ugccaucaaacuuaaaggc

SEQ ID NO: 1311916 - RNA, 19 nt, Artificial Sequence
  Description of Artificial Sequence: Synthetic oligonucleotide
  Sense strand starting at position 1217 of SEQ ID NO: 1241948
cuuuaaguuugauggcauc

SEQ ID NO: 1311917 - RNA, 19 nt, Artificial Sequence
  Description of Artificial Sequence: Synthetic oligonucleotide
  Antisense strand to SEQ ID NO: 1311916
gaugccaucaaacuuaaag

SEQ ID NO: 1311918 - RNA, 19 nt, Artificial Sequence
  Description of Artificial Sequence: Synthetic oligonucleotide
  Sense strand starting at position 1387 of SEQ ID NO: 1241948
gcgcuuagaacguacggau

SEQ ID NO: 1311919 - RNA, 19 nt, Artificial Sequence
  Description of Artificial Sequence: Synthetic oligonucleotide
  Antisense strand to SEQ ID NO: 1311918
auccguacguucuaagcgc

SEQ ID NO: 1311920 - RNA, 19 nt, Artificial Sequence
  Description of Artificial Sequence: Synthetic oligonucleotide
  Sense strand starting at position 1454 of SEQ ID NO: 1241948
cuuucuggcucuggaaaga

SEQ ID NO: 1311921 - RNA, 19 nt, Artificial Sequence
  Description of Artificial Sequence: Synthetic oligonucleotide
  Antisense strand to SEQ ID NO: 1311920
ucuuuccagagccagaaag

SEQ ID NO: 1311922 - RNA, 19 nt, Artificial Sequence
  Description of Artificial Sequence: Synthetic oligonucleotide
  Sense strand starting at position 1481 of SEQ ID NO: 1241948
gcuuccuaacaguguggaa

SEQ ID NO: 1311923 - RNA, 19 nt, Artificial Sequence
  Description of Artificial Sequence: Synthetic oligonucleotide
  Antisense strand to SEQ ID NO: 1311922
uuccacacuguuaggaagc

SEQ ID NO: 1311924 - RNA, 19 nt, Artificial Sequence
  Description of Artificial Sequence: Synthetic oligonucleotide
  Sense strand starting at position 1483 of SEQ ID NO: 1241948
uuccuaacaguguggaaga

SEQ ID NO: 1311925 - RNA, 19 nt, Artificial Sequence
  Description of Artificial Sequence: Synthetic oligonucleotide
  Antisense strand to SEQ ID NO: 1311924
ucuuccacacuguuaggaa

SEQ ID NO: 1311926 - RNA, 19 nt, Artificial Sequence
  Description of Artificial Sequence: Synthetic oligonucleotide
  Sense strand starting at position 1500 of SEQ ID NO: 1241948
gagugagccugauucuaag

SEQ ID NO: 1311927 - RNA, 19 nt, Artificial Sequence
  Description of Artificial Sequence: Synthetic oligonucleotide
  Antisense strand to SEQ ID NO: 1311926
cuuagaaucaggcucacuc

SEQ ID NO: 1311928 - RNA, 19 nt, Artificial Sequence
  Description of Artificial Sequence: Synthetic oligonucleotide
  Sense strand starting at position 1506 of SEQ ID NO: 1241948
gccugauucuaagcaccuu

SEQ ID NO: 1311929 - RNA, 19 nt, Artificial Sequence
  Description of Artificial Sequence: Synthetic oligonucleotide
  Antisense strand to SEQ ID NO: 1311928
aaggugcuuagaaucaggc

SEQ ID NO: 1311930 - RNA, 19 nt, Artificial Sequence
  Description of Artificial Sequence: Synthetic oligonucleotide
  Sense strand starting at position 2307 of SEQ ID NO: 1241948
acuauugacgucuacuaca

SEQ ID NO: 1311931 - RNA, 19 nt, Artificial Sequence
  Description of Artificial Sequence: Synthetic oligonucleotide
  Antisense strand to SEQ ID NO: 1311930
uguaguagacgucaauagu

SEQ ID NO: 1311932 - RNA, 19 nt, Artificial Sequence
  Description of Artificial Sequence: Synthetic oligonucleotide
  Sense strand starting at position 2453 of SEQ ID NO: 1241948
uuugaugaaucaucuaggu

SEQ ID NO: 1311933 - RNA, 19 nt, Artificial Sequence
  Description of Artificial Sequence: Synthetic oligonucleotide
  Antisense strand to SEQ ID NO: 1311932
accuagaugauucaucaaa

SEQ ID NO: 1311934 - RNA, 19 nt, Artificial Sequence
  Description of Artificial Sequence: Synthetic oligonucleotide
  Sense strand starting at position 2458 of SEQ ID NO: 1241948
ugaaucaucuaggugccua

SEQ ID NO: 1311935 - RNA, 19 nt, Artificial Sequence
  Description of Artificial Sequence: Synthetic oligonucleotide
  Antisense strand to SEQ ID NO: 1311934
uaggcaccuagaugauuca

SEQ ID NO: 1311936 - RNA, 19 nt, Artificial Sequence
  Description of Artificial Sequence: Synthetic oligonucleotide
  Sense strand starting at position 2463 of SEQ ID NO: 1241948
caucuaggugccuagcaaa

SEQ ID NO: 1311937 - RNA, 19 nt, Artificial Sequence
  Description of Artificial Sequence: Synthetic oligonucleotide
  Antisense strand to SEQ ID NO: 1311936
uuugcuaggcaccuagaug

SEQ ID NO: 1311938 - RNA, 19 nt, Artificial Sequence
  Description of Artificial Sequence: Synthetic oligonucleotide
  Sense strand starting at position 2492 of SEQ ID NO: 1241948
auaauuacuugcucaggaa

SEQ ID NO: 1311939 - RNA, 19 nt, Artificial Sequence
  Description of Artificial Sequence: Synthetic oligonucleotide
  Antisense strand to SEQ ID NO: 1311938
uuccugagcaaguaauuau

SEQ ID NO: 1311940 - RNA, 19 nt, Artificial Sequence
  Description of Artificial Sequence: Synthetic oligonucleotide
  Sense strand starting at position 2758 of SEQ ID NO: 1241948
uugguaaccucaggauguu

SEQ ID NO: 1311941 - RNA, 19 nt, Artificial Sequence
  Description of Artificial Sequence: Synthetic oligonucleotide
  Antisense strand to SEQ ID NO: 1311940
aacauccugagguuaccaa

SEQ ID NO: 1311942 - RNA, 19 nt, Artificial Sequence
  Description of Artificial Sequence: Synthetic oligonucleotide
  Sense strand starting at position 2847 of SEQ ID NO: 1241948
gcaaauaaccugugcacau

SEQ ID NO: 1311943 - RNA, 19 nt, Artificial Sequence
  Description of Artificial Sequence: Synthetic oligonucleotide
  Antisense strand to SEQ ID NO: 1311942
augugcacagguuauuugc

SEQ ID NO: 1311944 - RNA, 19 nt, Artificial Sequence
  Description of Artificial Sequence: Synthetic oligonucleotide
  Sense strand starting at position 2928 of SEQ ID NO: 1241948
guaaauagcuguuauaaag

SEQ ID NO: 1311945 - RNA, 19 nt, Artificial Sequence
  Description of Artificial Sequence: Synthetic oligonucleotide
  Antisense strand to SEQ ID NO: 1311944
cuuuauaacagcuauuuac

SEQ ID NO: 1311946 - RNA, 19 nt, Artificial Sequence
  Description of Artificial Sequence: Synthetic oligonucleotide
  Sense strand starting at position 3150 of SEQ ID NO: 1241948
cgaugcacaguugguuaaa

SEQ ID NO: 1311947 - RNA, 19 nt, Artificial Sequence
  Description of Artificial Sequence: Synthetic oligonucleotide
  Antisense strand to SEQ ID NO: 1311946
uuuaaccaacugugcaucg

SEQ ID NO: 1311948 - RNA, 19 nt, Artificial Sequence
  Description of Artificial Sequence: Synthetic oligonucleotide
  Sense strand starting at position 3162 of SEQ ID NO: 1241948
gguuaaauccaaggaucca

SEQ ID NO: 1311949 - RNA, 19 nt, Artificial Sequence
  Description of Artificial Sequence: Synthetic oligonucleotide
  Antisense strand to SEQ ID NO: 1311948
uggauccuuggauuuaacc

SEQ ID NO: 1311950 - RNA, 19 nt, Artificial Sequence
  Description of Artificial Sequence: Synthetic oligonucleotide
  Sense strand starting at position 3365 of SEQ ID NO: 1241948
ugagcucauuucugaagag

SEQ ID NO: 1311951 - RNA, 19 nt, Artificial Sequence
  Description of Artificial Sequence: Synthetic oligonucleotide
  Antisense strand to SEQ ID NO: 1311950
cucuucagaaaugagcuca

SEQ ID NO: 1311952 - RNA, 19 nt, Artificial Sequence
  Description of Artificial Sequence: Synthetic oligonucleotide
  Sense strand starting at position 3366 of SEQ ID NO: 1241948
gagcucauuucugaagagu

SEQ ID NO: 1311953 - RNA, 19 nt, Artificial Sequence
  Description of Artificial Sequence: Synthetic oligonucleotide
  Antisense strand to SEQ ID NO: 1311952
acucuucagaaaugagcuc

SEQ ID NO: 1311954 - RNA, 19 nt, Artificial Sequence
  Description of Artificial Sequence: Synthetic oligonucleotide
  Sense strand starting at position 3419 of SEQ ID NO: 1241948
acaacaguacguuaaguua

SEQ ID NO: 1311955 - RNA, 19 nt, Artificial Sequence
  Description of Artificial Sequence: Synthetic oligonucleotide
  Antisense strand to SEQ ID NO: 1311954
uaacuuaacguacuguugu

SEQ ID NO: 1311956 - RNA, 19 nt, Artificial Sequence
  Description of Artificial Sequence: Synthetic oligonucleotide
  Sense strand starting at position 3427 of SEQ ID NO: 1241948
acguuaaguuacuagacua

SEQ ID NO: 1311957 - RNA, 19 nt, Artificial Sequence
  Description of Artificial Sequence: Synthetic oligonucleotide
  Antisense strand to SEQ ID NO: 1311956
uagucuaguaacuuaacgu

SEQ ID NO: 1311958 - RNA, 19 nt, Artificial Sequence
  Description of Artificial Sequence: Synthetic oligonucleotide
  Sense strand starting at position 776 of SEQ ID NO: 1241949
guggcuugcuauccuuuaa

SEQ ID NO: 1311959 - RNA, 19 nt, Artificial Sequence
  Description of Artificial Sequence: Synthetic oligonucleotide
  Antisense strand to SEQ ID NO: 1311958
uuaaaggauagcaagccac

SEQ ID NO: 1311960 - RNA, 19 nt, Artificial Sequence
  Description of Artificial Sequence: Synthetic oligonucleotide
  Sense strand starting at position 975 of SEQ ID NO: 1241949
agaacagccuuucuugauu

SEQ ID NO: 1311961 - RNA, 19 nt, Artificial Sequence
  Description of Artificial Sequence: Synthetic oligonucleotide
  Antisense strand to SEQ ID NO: 1311960
aaucaagaaaggcuguucu

SEQ ID NO: 1311962 - RNA, 19 nt, Artificial Sequence
  Description of Artificial Sequence: Synthetic oligonucleotide
  Sense strand starting at position 1022 of SEQ ID NO: 1241949
ggaaauuauggaggccagu

SEQ ID NO: 1311963 - RNA, 19 nt, Artificial Sequence
  Description of Artificial Sequence: Synthetic oligonucleotide
  Antisense strand to SEQ ID NO: 1311962
acuggccuccauaauuucc

SEQ ID NO: 1311964 - RNA, 19 nt, Artificial Sequence
  Description of Artificial Sequence: Synthetic oligonucleotide
  Sense strand starting at position 1035 of SEQ ID NO: 1241949
gccaguggauacguucauu

SEQ ID NO: 1311965 - RNA, 19 nt, Artificial Sequence
  Description of Artificial Sequence: Synthetic oligonucleotide
  Antisense strand to SEQ ID NO: 1311964
aaugaacguauccacuggc

SEQ ID NO: 1311966 - RNA, 19 nt, Artificial Sequence
  Description of Artificial Sequence: Synthetic oligonucleotide
  Sense strand starting at position 1117 of SEQ ID NO: 1241949
cccuaaccugcagaugaua

SEQ ID NO: 1311967 - RNA, 19 nt, Artificial Sequence
  Description of Artificial Sequence: Synthetic oligonucleotide
  Antisense strand to SEQ ID NO: 1311966
uaucaucugcagguuaggg

SEQ ID NO: 1311968 - RNA, 19 nt, Artificial Sequence
  Description of Artificial Sequence: Synthetic oligonucleotide
  Sense strand starting at position 1303 of SEQ ID NO: 1241949
gccuuuaaguuugauggca

SEQ ID NO: 1311969 - RNA, 19 nt, Artificial Sequence
  Description of Artificial Sequence: Synthetic oligonucleotide
  Antisense strand to SEQ ID NO: 1311968
ugccaucaaacuuaaaggc

SEQ ID NO: 1311970 - RNA, 19 nt, Artificial Sequence
  Description of Artificial Sequence: Synthetic oligonucleotide
  Sense strand starting at position 1305 of SEQ ID NO: 1241949
cuuuaaguuugauggcauc

SEQ ID NO: 1311971 - RNA, 19 nt, Artificial Sequence
  Description of Artificial Sequence: Synthetic oligonucleotide
  Antisense strand to SEQ ID NO: 1311970
gaugccaucaaacuuaaag

SEQ ID NO: 1311972 - RNA, 19 nt, Artificial Sequence
  Description of Artificial Sequence: Synthetic oligonucleotide
  Sense strand starting at position 1475 of SEQ ID NO: 1241949
gcgcuuagaacguacggau

SEQ ID NO: 1311973 - RNA, 19 nt, Artificial Sequence
  Description of Artificial Sequence: Synthetic oligonucleotide
  Antisense strand to SEQ ID NO: 1311972
auccguacguucuaagcgc

SEQ ID NO: 1311974 - RNA, 19 nt, Artificial Sequence
  Description of Artificial Sequence: Synthetic oligonucleotide
  Sense strand starting at position 1542 of SEQ ID NO: 1241949
cuuucuggcucuggaaaga

SEQ ID NO: 1311975 - RNA, 19 nt, Artificial Sequence
  Description of Artificial Sequence: Synthetic oligonucleotide
  Antisense strand to SEQ ID NO: 1311974
ucuuuccagagccagaaag

SEQ ID NO: 1311976 - RNA, 19 nt, Artificial Sequence
  Description of Artificial Sequence: Synthetic oligonucleotide
  Sense strand starting at position 1569 of SEQ ID NO: 1241949
gcuuccuaacaguguggaa

SEQ ID NO: 1311977 - RNA, 19 nt, Artificial Sequence
  Description of Artificial Sequence: Synthetic oligonucleotide
  Antisense strand to SEQ ID NO: 1311976
uuccacacuguuaggaagc

SEQ ID NO: 1311978 - RNA, 19 nt, Artificial Sequence
  Description of Artificial Sequence: Synthetic oligonucleotide
  Sense strand starting at position 1571 of SEQ ID NO: 1241949
uuccuaacaguguggaaga

SEQ ID NO: 1311979 - RNA, 19 nt, Artificial Sequence
  Description of Artificial Sequence: Synthetic oligonucleotide
  Antisense strand to SEQ ID NO: 1311978
ucuuccacacuguuaggaa

SEQ ID NO: 1311980 - RNA, 19 nt, Artificial Sequence
  Description of Artificial Sequence: Synthetic oligonucleotide
  Sense strand starting at position 1588 of SEQ ID NO: 1241949
gagugagccugauucuaag

SEQ ID NO: 1311981 - RNA, 19 nt, Artificial Sequence
  Description of Artificial Sequence: Synthetic oligonucleotide
  Antisense strand to SEQ ID NO: 1311980
cuuagaaucaggcucacuc

SEQ ID NO: 1311982 - RNA, 19 nt, Artificial Sequence
  Description of Artificial Sequence: Synthetic oligonucleotide
  Sense strand starting at position 1594 of SEQ ID NO: 1241949
gccugauucuaagcaccuu

SEQ ID NO: 1311983 - RNA, 19 nt, Artificial Sequence
  Description of Artificial Sequence: Synthetic oligonucleotide
  Antisense strand to SEQ ID NO: 1311982
aaggugcuuagaaucaggc

SEQ ID NO: 1311984 - RNA, 19 nt, Artificial Sequence
  Description of Artificial Sequence: Synthetic oligonucleotide
  Sense strand starting at position 2395 of SEQ ID NO: 1241949
acuauugacgucuacuaca

SEQ ID NO: 1311985 - RNA, 19 nt, Artificial Sequence
  Description of Artificial Sequence: Synthetic oligonucleotide
  Antisense strand to SEQ ID NO: 1311984
uguaguagacgucaauagu

SEQ ID NO: 1311986 - RNA, 19 nt, Artificial Sequence
  Description of Artificial Sequence: Synthetic oligonucleotide
  Sense strand starting at position 2541 of SEQ ID NO: 1241949
uuugaugaaucaucuaggu

SEQ ID NO: 1311987 - RNA, 19 nt, Artificial Sequence
  Description of Artificial Sequence: Synthetic oligonucleotide
  Antisense strand to SEQ ID NO: 1311986
accuagaugauucaucaaa

SEQ ID NO: 1311988 - RNA, 19 nt, Artificial Sequence
  Description of Artificial Sequence: Synthetic oligonucleotide
  Sense strand starting at position 2546 of SEQ ID NO: 1241949
ugaaucaucuaggugccua

SEQ ID NO: 1311989 - RNA, 19 nt, Artificial Sequence
  Description of Artificial Sequence: Synthetic oligonucleotide
  Antisense strand to SEQ ID NO: 1311988
uaggcaccuagaugauuca

SEQ ID NO: 1311990 - RNA, 19 nt, Artificial Sequence
  Description of Artificial Sequence: Synthetic oligonucleotide
  Sense strand starting at position 2551 of SEQ ID NO: 1241949
caucuaggugccuagcaaa

SEQ ID NO: 1311991 - RNA, 19 nt, Artificial Sequence
  Description of Artificial Sequence: Synthetic oligonucleotide
  Antisense strand to SEQ ID NO: 1311990
uuugcuaggcaccuagaug

SEQ ID NO: 1311992 - RNA, 19 nt, Artificial Sequence
  Description of Artificial Sequence: Synthetic oligonucleotide
  Sense strand starting at position 2580 of SEQ ID NO: 1241949
auaauuacuugcucaggaa

SEQ ID NO: 1311993 - RNA, 19 nt, Artificial Sequence
  Description of Artificial Sequence: Synthetic oligonucleotide
  Antisense strand to SEQ ID NO: 1311992
uuccugagcaaguaauuau

SEQ ID NO: 1311994 - RNA, 19 nt, Artificial Sequence
  Description of Artificial Sequence: Synthetic oligonucleotide
  Sense strand starting at position 2846 of SEQ ID NO: 1241949
uugguaaccucaggauguu

SEQ ID NO: 1311995 - RNA, 19 nt, Artificial Sequence
  Description of Artificial Sequence: Synthetic oligonucleotide
  Antisense strand to SEQ ID NO: 1311994
aacauccugagguuaccaa

SEQ ID NO: 1311996 - RNA, 19 nt, Artificial Sequence
  Description of Artificial Sequence: Synthetic oligonucleotide
  Sense strand starting at position 2935 of SEQ ID NO: 1241949
gcaaauaaccugugcacau

SEQ ID NO: 1311997 - RNA, 19 nt, Artificial Sequence
  Description of Artificial Sequence: Synthetic oligonucleotide
  Antisense strand to SEQ ID NO: 1311996
augugcacagguuauuugc

SEQ ID NO: 1311998 - RNA, 19 nt, Artificial Sequence
  Description of Artificial Sequence: Synthetic oligonucleotide
  Sense strand starting at position 3016 of SEQ ID NO: 1241949
guaaauagcuguuauaaag

SEQ ID NO: 1311999 - RNA, 19 nt, Artificial Sequence
  Description of Artificial Sequence: Synthetic oligonucleotide
  Antisense strand to SEQ ID NO: 1311998
cuuuauaacagcuauuuac

SEQ ID NO: 1312000 - RNA, 19 nt, Artificial Sequence
  Description of Artificial Sequence: Synthetic oligonucleotide
  Sense strand starting at position 3238 of SEQ ID NO: 1241949
cgaugcacaguugguuaaa

SEQ ID NO: 1312001 - RNA, 19 nt, Artificial Sequence
  Description of Artificial Sequence: Synthetic oligonucleotide
  Antisense strand to SEQ ID NO: 1312000
uuuaaccaacugugcaucg

SEQ ID NO: 1312002 - RNA, 19 nt, Artificial Sequence
  Description of Artificial Sequence: Synthetic oligonucleotide
  Sense strand starting at position 3250 of SEQ ID NO: 1241949
gguuaaauccaaggaucca

SEQ ID NO: 1312003 - RNA, 19 nt, Artificial Sequence
  Description of Artificial Sequence: Synthetic oligonucleotide
  Antisense strand to SEQ ID NO: 1312002
uggauccuuggauuuaacc

SEQ ID NO: 1312004 - RNA, 19 nt, Artificial Sequence
  Description of Artificial Sequence: Synthetic oligonucleotide
  Sense strand starting at position 3453 of SEQ ID NO: 1241949
ugagcucauuucugaagag

SEQ ID NO: 1312005 - RNA, 19 nt, Artificial Sequence
  Description of Artificial Sequence: Synthetic oligonucleotide
  Antisense strand to SEQ ID NO: 1312004
cucuucagaaaugagcuca

SEQ ID NO: 1312006 - RNA, 19 nt, Artificial Sequence
  Description of Artificial Sequence: Synthetic oligonucleotide
  Sense strand starting at position 3454 of SEQ ID NO: 1241949
gagcucauuucugaagagu

SEQ ID NO: 1312007 - RNA, 19 nt, Artificial Sequence
  Description of Artificial Sequence: Synthetic oligonucleotide
  Antisense strand to SEQ ID NO: 1312006
acucuucagaaaugagcuc

SEQ ID NO: 1312008 - RNA, 19 nt, Artificial Sequence
  Description of Artificial Sequence: Synthetic oligonucleotide
  Sense strand starting at position 3507 of SEQ ID NO: 1241949
acaacaguacguuaaguua

SEQ ID NO: 1312009 - RNA, 19 nt, Artificial Sequence
  Description of Artificial Sequence: Synthetic oligonucleotide
  Antisense strand to SEQ ID NO: 1312008
uaacuuaacguacuguugu

SEQ ID NO: 1312010 - RNA, 19 nt, Artificial Sequence
  Description of Artificial Sequence: Synthetic oligonucleotide
  Sense strand starting at position 3515 of SEQ ID NO: 1241949
acguuaaguuacuagacua

SEQ ID NO: 1312011 - RNA, 19 nt, Artificial Sequence
  Description of Artificial Sequence: Synthetic oligonucleotide
  Antisense strand to SEQ ID NO: 1312010
uagucuaguaacuuaacgu

SEQ ID NO: 1312012 - RNA, 19 nt, Artificial Sequence
  Description of Artificial Sequence: Synthetic oligonucleotide
  Sense strand starting at position 64 of SEQ ID NO: 1241950
gaaauucugucaguuugca

SEQ ID NO: 1312013 - RNA, 19 nt, Artificial Sequence
  Description of Artificial Sequence: Synthetic oligonucleotide
  Antisense strand to SEQ ID NO: 1312012
ugcaaacugacagaauuuc

SEQ ID NO: 1312014 - RNA, 19 nt, Artificial Sequence
  Description of Artificial Sequence: Synthetic oligonucleotide
  Sense strand starting at position 84 of SEQ ID NO: 1241950
caacauggaucuggagaau

SEQ ID NO: 1312015 - RNA, 19 nt, Artificial Sequence
  Description of Artificial Sequence: Synthetic oligonucleotide
  Antisense strand to SEQ ID NO: 1312014
auucuccagauccauguug

SEQ ID NO: 1312016 - RNA, 19 nt, Artificial Sequence
  Description of Artificial Sequence: Synthetic oligonucleotide
  Sense strand starting at position 99 of SEQ ID NO: 1241950
gaauuagguuaagugaaau

SEQ ID NO: 1312017 - RNA, 19 nt, Artificial Sequence
  Description of Artificial Sequence: Synthetic oligonucleotide
  Antisense strand to SEQ ID NO: 1312016
auuucacuuaaccuaauuc

SEQ ID NO: 1312018 - RNA, 19 nt, Artificial Sequence
  Description of Artificial Sequence: Synthetic oligonucleotide
  Sense strand starting at position 153 of SEQ ID NO: 1241950
cacucagaucugggagcaa

SEQ ID NO: 1312019 - RNA, 19 nt, Artificial Sequence
  Description of Artificial Sequence: Synthetic oligonucleotide
  Antisense strand to SEQ ID NO: 1312018
uugcucccagaucugagug

SEQ ID NO: 1312020 - RNA, 19 nt, Artificial Sequence
  Description of Artificial Sequence: Synthetic oligonucleotide
  Sense strand starting at position 176 of SEQ ID NO: 1241950
aguugauuucacgguggua

SEQ ID NO: 1312021 - RNA, 19 nt, Artificial Sequence
  Description of Artificial Sequence: Synthetic oligonucleotide
  Antisense strand to SEQ ID NO: 1312020
uaccaccgugaaaucaacu

SEQ ID NO: 1312022 - RNA, 19 nt, Artificial Sequence
  Description of Artificial Sequence: Synthetic oligonucleotide
  Sense strand starting at position 202 of SEQ ID NO: 1241950
gaaugauaggaaggguguu

SEQ ID NO: 1312023 - RNA, 19 nt, Artificial Sequence
  Description of Artificial Sequence: Synthetic oligonucleotide
  Antisense strand to SEQ ID NO: 1312022
aacacccuuccuaucauuc

SEQ ID NO: 1312024 - RNA, 19 nt, Artificial Sequence
  Description of Artificial Sequence: Synthetic oligonucleotide
  Sense strand starting at position 244 of SEQ ID NO: 1241950
guaagagaaguugguuaau

SEQ ID NO: 1312025 - RNA, 19 nt, Artificial Sequence
  Description of Artificial Sequence: Synthetic oligonucleotide
  Antisense strand to SEQ ID NO: 1312024
auuaaccaacuucucuuac

SEQ ID NO: 1312026 - RNA, 19 nt, Artificial Sequence
  Description of Artificial Sequence: Synthetic oligonucleotide
  Sense strand starting at position 255 of SEQ ID NO: 1241950
ugguuaaugguauguacaa

SEQ ID NO: 1312027 - RNA, 19 nt, Artificial Sequence
  Description of Artificial Sequence: Synthetic oligonucleotide
  Antisense strand to SEQ ID NO: 1312026
uuguacauaccauuaacca

SEQ ID NO: 1312028 - RNA, 19 nt, Artificial Sequence
  Description of Artificial Sequence: Synthetic oligonucleotide
  Sense strand starting at position 256 of SEQ ID NO: 1241950
gguuaaugguauguacaaa

SEQ ID NO: 1312029 - RNA, 19 nt, Artificial Sequence
  Description of Artificial Sequence: Synthetic oligonucleotide
  Antisense strand to SEQ ID NO: 1312028
uuuguacauaccauuaacc

SEQ ID NO: 1312030 - RNA, 19 nt, Artificial Sequence
  Description of Artificial Sequence: Synthetic oligonucleotide
  Sense strand starting at position 409 of SEQ ID NO: 1241950
aacacaaggugauggauau

SEQ ID NO: 1312031 - RNA, 19 nt, Artificial Sequence
  Description of Artificial Sequence: Synthetic oligonucleotide
  Antisense strand to SEQ ID NO: 1312030
auauccaucaccuuguguu

SEQ ID NO: 1312032 - RNA, 19 nt, Artificial Sequence
  Description of Artificial Sequence: Synthetic oligonucleotide
  Sense strand starting at position 436 of SEQ ID NO: 1241950
ccgacuugaucacuacaua

SEQ ID NO: 1312033 - RNA, 19 nt, Artificial Sequence
  Description of Artificial Sequence: Synthetic oligonucleotide
  Antisense strand to SEQ ID NO: 1312032
uauguagugaucaagucgg

SEQ ID NO: 1312034 - RNA, 19 nt, Artificial Sequence
  Description of Artificial Sequence: Synthetic oligonucleotide
  Sense strand starting at position 448 of SEQ ID NO: 1241950
cuacauauccugugcaugu

SEQ ID NO: 1312035 - RNA, 19 nt, Artificial Sequence
  Description of Artificial Sequence: Synthetic oligonucleotide
  Antisense strand to SEQ ID NO: 1312034
acaugcacaggauauguag

SEQ ID NO: 1312036 - RNA, 19 nt, Artificial Sequence
  Description of Artificial Sequence: Synthetic oligonucleotide
  Sense strand starting at position 450 of SEQ ID NO: 1241950
acauauccugugcauguaa

SEQ ID NO: 1312037 - RNA, 19 nt, Artificial Sequence
  Description of Artificial Sequence: Synthetic oligonucleotide
  Antisense strand to SEQ ID NO: 1312036
uuacaugcacaggauaugu

SEQ ID NO: 1312038 - RNA, 19 nt, Artificial Sequence
  Description of Artificial Sequence: Synthetic oligonucleotide
  Sense strand starting at position 739 of SEQ ID NO: 1241950
gcgagaauuuccuuucucc

SEQ ID NO: 1312039 - RNA, 19 nt, Artificial Sequence
  Description of Artificial Sequence: Synthetic oligonucleotide
  Antisense strand to SEQ ID NO: 1312038
ggagaaaggaaauucucgc

SEQ ID NO: 1312040 - RNA, 19 nt, Artificial Sequence
  Description of Artificial Sequence: Synthetic oligonucleotide
  Sense strand starting at position 762 of SEQ ID NO: 1241950
ugcaaagugugccuuauuu

SEQ ID NO: 1312041 - RNA, 19 nt, Artificial Sequence
  Description of Artificial Sequence: Synthetic oligonucleotide
  Antisense strand to SEQ ID NO: 1312040
aaauaaggcacacuuugca

SEQ ID NO: 1312042 - RNA, 19 nt, Artificial Sequence
  Description of Artificial Sequence: Synthetic oligonucleotide
  Sense strand starting at position 1007 of SEQ ID NO: 1241950
ugaguuuccacacgauguu

SEQ ID NO: 1312043 - RNA, 19 nt, Artificial Sequence
  Description of Artificial Sequence: Synthetic oligonucleotide
  Antisense strand to SEQ ID NO: 1312042
aacaucguguggaaacuca

SEQ ID NO: 1312044 - RNA, 19 nt, Artificial Sequence
  Description of Artificial Sequence: Synthetic oligonucleotide
  Sense strand starting at position 1008 of SEQ ID NO: 1241950
gaguuuccacacgauguuu

SEQ ID NO: 1312045 - RNA, 19 nt, Artificial Sequence
  Description of Artificial Sequence: Synthetic oligonucleotide
  Antisense strand to SEQ ID NO: 1312044
aaacaucguguggaaacuc

SEQ ID NO: 1312046 - RNA, 19 nt, Artificial Sequence
  Description of Artificial Sequence: Synthetic oligonucleotide
  Sense strand starting at position 1114 of SEQ ID NO: 1241950
cguuuauuucuaugcuguu

SEQ ID NO: 1312047 - RNA, 19 nt, Artificial Sequence
  Description of Artificial Sequence: Synthetic oligonucleotide
  Antisense strand to SEQ ID NO: 1312046
aacagcauagaaauaaacg

SEQ ID NO: 1312048 - RNA, 19 nt, Artificial Sequence
  Description of Artificial Sequence: Synthetic oligonucleotide
  Sense strand starting at position 1144 of SEQ ID NO: 1241950
cuuuguauacugggaaauu

SEQ ID NO: 1312049 - RNA, 19 nt, Artificial Sequence
  Description of Artificial Sequence: Synthetic oligonucleotide
  Antisense strand to SEQ ID NO: 1312048
aauuucccaguauacaaag

SEQ ID NO: 1312050 - RNA, 19 nt, Artificial Sequence
  Description of Artificial Sequence: Synthetic oligonucleotide
  Sense strand starting at position 1145 of SEQ ID NO: 1241950
uuuguauacugggaaauuu

SEQ ID NO: 1312051 - RNA, 19 nt, Artificial Sequence
  Description of Artificial Sequence: Synthetic oligonucleotide
  Antisense strand to SEQ ID NO: 1312050
aaauuucccaguauacaaa

SEQ ID NO: 1312052 - RNA, 19 nt, Artificial Sequence
  Description of Artificial Sequence: Synthetic oligonucleotide
  Sense strand starting at position 1153 of SEQ ID NO: 1241950
cugggaaauuucuaaggga

SEQ ID NO: 1312053 - RNA, 19 nt, Artificial Sequence
  Description of Artificial Sequence: Synthetic oligonucleotide
  Antisense strand to SEQ ID NO: 1312052
ucccuuagaaauuucccag

SEQ ID NO: 1312054 - RNA, 19 nt, Artificial Sequence
  Description of Artificial Sequence: Synthetic oligonucleotide
  Sense strand starting at position 1284 of SEQ ID NO: 1241950
ucaguuaucuuugcucuga

SEQ ID NO: 1312055 - RNA, 19 nt, Artificial Sequence
  Description of Artificial Sequence: Synthetic oligonucleotide
  Antisense strand to SEQ ID NO: 1312054
ucagagcaaagauaacuga

SEQ ID NO: 1312056 - RNA, 19 nt, Artificial Sequence
  Description of Artificial Sequence: Synthetic oligonucleotide
  Sense strand starting at position 1286 of SEQ ID NO: 1241950
aguuaucuuugcucugaac

SEQ ID NO: 1312057 - RNA, 19 nt, Artificial Sequence
  Description of Artificial Sequence: Synthetic oligonucleotide
  Antisense strand to SEQ ID NO: 1312056
guucagagcaaagauaacu

SEQ ID NO: 1312058 - RNA, 19 nt, Artificial Sequence
  Description of Artificial Sequence: Synthetic oligonucleotide
  Sense strand starting at position 1315 of SEQ ID NO: 1241950
acacuuaccucggaccaaa

SEQ ID NO: 1312059 - RNA, 19 nt, Artificial Sequence
  Description of Artificial Sequence: Synthetic oligonucleotide
  Antisense strand to SEQ ID NO: 1312058
uuugguccgagguaagugu

SEQ ID NO: 1312060 - RNA, 19 nt, Artificial Sequence
  Description of Artificial Sequence: Synthetic oligonucleotide
  Sense strand starting at position 1356 of SEQ ID NO: 1241950
aagcuaugucuccaggaga

SEQ ID NO: 1312061 - RNA, 19 nt, Artificial Sequence
  Description of Artificial Sequence: Synthetic oligonucleotide
  Antisense strand to SEQ ID NO: 1312060
ucuccuggagacauagcuu

SEQ ID NO: 1312062 - RNA, 19 nt, Artificial Sequence
  Description of Artificial Sequence: Synthetic oligonucleotide
  Sense strand starting at position 1883 of SEQ ID NO: 1241950
cucaucaucgcacaugaaa

SEQ ID NO: 1312063 - RNA, 19 nt, Artificial Sequence
  Description of Artificial Sequence: Synthetic oligonucleotide
  Antisense strand to SEQ ID NO: 1312062
uuucaugugcgaugaugag

SEQ ID NO: 1312064 - RNA, 19 nt, Artificial Sequence
  Description of Artificial Sequence: Synthetic oligonucleotide
  Sense strand starting at position 2032 of SEQ ID NO: 1241950
cuguuuccugccggaacua

SEQ ID NO: 1312065 - RNA, 19 nt, Artificial Sequence
  Description of Artificial Sequence: Synthetic oligonucleotide
  Antisense strand to SEQ ID NO: 1312064
uaguuccggcaggaaacag

SEQ ID NO: 1312066 - RNA, 19 nt, Artificial Sequence
  Description of Artificial Sequence: Synthetic oligonucleotide
  Sense strand starting at position 2033 of SEQ ID NO: 1241950
uguuuccugccggaacuaa

SEQ ID NO: 1312067 - RNA, 19 nt, Artificial Sequence
  Description of Artificial Sequence: Synthetic oligonucleotide
  Antisense strand to SEQ ID NO: 1312066
uuaguuccggcaggaaaca

SEQ ID NO: 1312068 - RNA, 19 nt, Artificial Sequence
  Description of Artificial Sequence: Synthetic oligonucleotide
  Sense strand starting at position 2044 of SEQ ID NO: 1241950
ggaacuaauuaucucgacu

SEQ ID NO: 1312069 - RNA, 19 nt, Artificial Sequence
  Description of Artificial Sequence: Synthetic oligonucleotide
  Antisense strand to SEQ ID NO: 1312068
agucgagauaauuaguucc

SEQ ID NO: 1312070 - RNA, 19 nt, Artificial Sequence
  Description of Artificial Sequence: Synthetic oligonucleotide
  Sense strand starting at position 2047 of SEQ ID NO: 1241950
acuaauuaucucgacuugu

SEQ ID NO: 1312071 - RNA, 19 nt, Artificial Sequence
  Description of Artificial Sequence: Synthetic oligonucleotide
  Antisense strand to SEQ ID NO: 1312070
acaagucgagauaauuagu

SEQ ID NO: 1312072 - RNA, 19 nt, Artificial Sequence
  Description of Artificial Sequence: Synthetic oligonucleotide
  Sense strand starting at position 2060 of SEQ ID NO: 1241950
acuuguagcugauucgcua

SEQ ID NO: 1312073 - RNA, 19 nt, Artificial Sequence
  Description of Artificial Sequence: Synthetic oligonucleotide
  Antisense strand to SEQ ID NO: 1312072
uagcgaaucagcuacaagu

SEQ ID NO: 1312074 - RNA, 19 nt, Artificial Sequence
  Description of Artificial Sequence: Synthetic oligonucleotide
  Sense strand starting at position 2358 of SEQ ID NO: 1241950
agguauuauuucugcuauc

SEQ ID NO: 1312075 - RNA, 19 nt, Artificial Sequence
  Description of Artificial Sequence: Synthetic oligonucleotide
  Antisense strand to SEQ ID NO: 1312074
gauagcagaaauaauaccu

SEQ ID NO: 1312076 - RNA, 19 nt, Artificial Sequence
  Description of Artificial Sequence: Synthetic oligonucleotide
  Sense strand starting at position 2359 of SEQ ID NO: 1241950
gguauuauuucugcuauca

SEQ ID NO: 1312077 - RNA, 19 nt, Artificial Sequence
  Description of Artificial Sequence: Synthetic oligonucleotide
  Antisense strand to SEQ ID NO: 1312076
ugauagcagaaauaauacc

SEQ ID NO: 1312078 - RNA, 19 nt, Artificial Sequence
  Description of Artificial Sequence: Synthetic oligonucleotide
  Sense strand starting at position 2374 of SEQ ID NO: 1241950
aucauuguacgugugcauu

SEQ ID NO: 1312079 - RNA, 19 nt, Artificial Sequence
  Description of Artificial Sequence: Synthetic oligonucleotide
  Antisense strand to SEQ ID NO: 1312078
aaugcacacguacaaugau

SEQ ID NO: 1312080 - RNA, 19 nt, Artificial Sequence
  Description of Artificial Sequence: Synthetic oligonucleotide
  Sense strand starting at position 2376 of SEQ ID NO: 1241950
cauuguacgugugcauuua

SEQ ID NO: 1312081 - RNA, 19 nt, Artificial Sequence
  Description of Artificial Sequence: Synthetic oligonucleotide
  Antisense strand to SEQ ID NO: 1312080
uaaaugcacacguacaaug

SEQ ID NO: 1312082 - RNA, 19 nt, Artificial Sequence
  Description of Artificial Sequence: Synthetic oligonucleotide
  Sense strand starting at position 2419 of SEQ ID NO: 1241950
cuaagauacuuggaguacu

SEQ ID NO: 1312083 - RNA, 19 nt, Artificial Sequence
  Description of Artificial Sequence: Synthetic oligonucleotide
  Antisense strand to SEQ ID NO: 1312082
aguacuccaaguaucuuag

SEQ ID NO: 1312084 - RNA, 19 nt, Artificial Sequence
  Description of Artificial Sequence: Synthetic oligonucleotide
  Sense strand starting at position 2464 of SEQ ID NO: 1241950
gcuuguuauauuuguaguu

SEQ ID NO: 1312085 - RNA, 19 nt, Artificial Sequence
  Description of Artificial Sequence: Synthetic oligonucleotide
  Antisense strand to SEQ ID NO: 1312084
aacuacaaauauaacaagc

SEQ ID NO: 1312086 - RNA, 19 nt, Artificial Sequence
  Description of Artificial Sequence: Synthetic oligonucleotide
  Sense strand starting at position 2519 of SEQ ID NO: 1241950
gcagcuaucaguugaguug

SEQ ID NO: 1312087 - RNA, 19 nt, Artificial Sequence
  Description of Artificial Sequence: Synthetic oligonucleotide
  Antisense strand to SEQ ID NO: 1312086
caacucaacugauagcugc

SEQ ID NO: 1312088 - RNA, 19 nt, Artificial Sequence
  Description of Artificial Sequence: Synthetic oligonucleotide
  Sense strand starting at position 2526 of SEQ ID NO: 1241950
ucaguugaguugccuuaaa

SEQ ID NO: 1312089 - RNA, 19 nt, Artificial Sequence
  Description of Artificial Sequence: Synthetic oligonucleotide
  Antisense strand to SEQ ID NO: 1312088
uuuaaggcaacucaacuga

SEQ ID NO: 1312090 - RNA, 19 nt, Artificial Sequence
  Description of Artificial Sequence: Synthetic oligonucleotide
  Sense strand starting at position 2563 of SEQ ID NO: 1241950
cgaguuguaaacugaccuu

SEQ ID NO: 1312091 - RNA, 19 nt, Artificial Sequence
  Description of Artificial Sequence: Synthetic oligonucleotide
  Antisense strand to SEQ ID NO: 1312090
aaggucaguuuacaacucg

SEQ ID NO: 1312092 - RNA, 19 nt, Artificial Sequence
  Description of Artificial Sequence: Synthetic oligonucleotide
  Sense strand starting at position 179 of SEQ ID NO: 1241951
gcacaugauuuacauguaa

SEQ ID NO: 1312093 - RNA, 19 nt, Artificial Sequence
  Description of Artificial Sequence: Synthetic oligonucleotide
  Antisense strand to SEQ ID NO: 1312092
uuacauguaaaucaugugc

SEQ ID NO: 1312094 - RNA, 19 nt, Artificial Sequence
  Description of Artificial Sequence: Synthetic oligonucleotide
  Sense strand starting at position 417 of SEQ ID NO: 1241951
uguguauugggucacaaca

SEQ ID NO: 1312095 - RNA, 19 nt, Artificial Sequence
  Description of Artificial Sequence: Synthetic oligonucleotide
  Antisense strand to SEQ ID NO: 1312094
uguugugacccaauacaca

SEQ ID NO: 1312096 - RNA, 19 nt, Artificial Sequence
  Description of Artificial Sequence: Synthetic oligonucleotide
  Sense strand starting at position 613 of SEQ ID NO: 1241951
uccagaauggcauguuacu

SEQ ID NO: 1312097 - RNA, 19 nt, Artificial Sequence
  Description of Artificial Sequence: Synthetic oligonucleotide
  Antisense strand to SEQ ID NO: 1312096
aguaacaugccauucugga

SEQ ID NO: 1312098 - RNA, 19 nt, Artificial Sequence
  Description of Artificial Sequence: Synthetic oligonucleotide
  Sense strand starting at position 632 of SEQ ID NO: 1241951
agggcauuccaguagccua

SEQ ID NO: 1312099 - RNA, 19 nt, Artificial Sequence
  Description of Artificial Sequence: Synthetic oligonucleotide
  Antisense strand to SEQ ID NO: 1312098
uaggcuacuggaaugcccu

SEQ ID NO: 1312100 - RNA, 19 nt, Artificial Sequence
  Description of Artificial Sequence: Synthetic oligonucleotide
  Sense strand starting at position 749 of SEQ ID NO: 1241951
ucaaguugagguuguuaga

SEQ ID NO: 1312101 - RNA, 19 nt, Artificial Sequence
  Description of Artificial Sequence: Synthetic oligonucleotide
  Antisense strand to SEQ ID NO: 1312100
ucuaacaaccucaacuuga

SEQ ID NO: 1312102 - RNA, 19 nt, Artificial Sequence
  Description of Artificial Sequence: Synthetic oligonucleotide
  Sense strand starting at position 912 of SEQ ID NO: 1241951
gaguuuaucugguccuacu

SEQ ID NO: 1312103 - RNA, 19 nt, Artificial Sequence
  Description of Artificial Sequence: Synthetic oligonucleotide
  Antisense strand to SEQ ID NO: 1312102
aguaggaccagauaaacuc

SEQ ID NO: 1312104 - RNA, 19 nt, Artificial Sequence
  Description of Artificial Sequence: Synthetic oligonucleotide
  Sense strand starting at position 942 of SEQ ID NO: 1241951
guuugcugagaaugaacau

SEQ ID NO: 1312105 - RNA, 19 nt, Artificial Sequence
  Description of Artificial Sequence: Synthetic oligonucleotide
  Antisense strand to SEQ ID NO: 1312104
auguucauucucagcaaac

SEQ ID NO: 1312106 - RNA, 19 nt, Artificial Sequence
  Description of Artificial Sequence: Synthetic oligonucleotide
  Sense strand starting at position 948 of SEQ ID NO: 1241951
ugagaaugaacaugugcau

SEQ ID NO: 1312107 - RNA, 19 nt, Artificial Sequence
  Description of Artificial Sequence: Synthetic oligonucleotide
  Antisense strand to SEQ ID NO: 1312106
augcacauguucauucuca

SEQ ID NO: 1312108 - RNA, 19 nt, Artificial Sequence
  Description of Artificial Sequence: Synthetic oligonucleotide
  Sense strand starting at position 951 of SEQ ID NO: 1241951
gaaugaacaugugcauaca

SEQ ID NO: 1312109 - RNA, 19 nt, Artificial Sequence
  Description of Artificial Sequence: Synthetic oligonucleotide
  Antisense strand to SEQ ID NO: 1312108
uguaugcacauguucauuc

SEQ ID NO: 1312110 - RNA, 19 nt, Artificial Sequence
  Description of Artificial Sequence: Synthetic oligonucleotide
  Sense strand starting at position 1067 of SEQ ID NO: 1241951
gggcaagugaccugcucaa

SEQ ID NO: 1312111 - RNA, 19 nt, Artificial Sequence
  Description of Artificial Sequence: Synthetic oligonucleotide
  Antisense strand to SEQ ID NO: 1312110
uugagcaggucacuugccc

SEQ ID NO: 1312112 - RNA, 19 nt, Artificial Sequence
  Description of Artificial Sequence: Synthetic oligonucleotide
  Sense strand starting at position 1228 of SEQ ID NO: 1241951
gcuccaagaucugcagaga

SEQ ID NO: 1312113 - RNA, 19 nt, Artificial Sequence
  Description of Artificial Sequence: Synthetic oligonucleotide
  Antisense strand to SEQ ID NO: 1312112
ucucugcagaucuuggagc

SEQ ID NO: 1312114 - RNA, 19 nt, Artificial Sequence
  Description of Artificial Sequence: Synthetic oligonucleotide
  Sense strand starting at position 1349 of SEQ ID NO: 1241951
ggauaugacucaucccauu

SEQ ID NO: 1312115 - RNA, 19 nt, Artificial Sequence
  Description of Artificial Sequence: Synthetic oligonucleotide
  Antisense strand to SEQ ID NO: 1312114
aaugggaugagucauaucc

SEQ ID NO: 1312116 - RNA, 19 nt, Artificial Sequence
  Description of Artificial Sequence: Synthetic oligonucleotide
  Sense strand starting at position 1383 of SEQ ID NO: 1241951
aagccaauguuguuggaaa

SEQ ID NO: 1312117 - RNA, 19 nt, Artificial Sequence
  Description of Artificial Sequence: Synthetic oligonucleotide
  Antisense strand to SEQ ID NO: 1312116
uuuccaacaacauuggcuu

SEQ ID NO: 1312118 - RNA, 19 nt, Artificial Sequence
  Description of Artificial Sequence: Synthetic oligonucleotide
  Sense strand starting at position 1406 of SEQ ID NO: 1241951
gggcuugaaggcugacaga

SEQ ID NO: 1312119 - RNA, 19 nt, Artificial Sequence
  Description of Artificial Sequence: Synthetic oligonucleotide
  Antisense strand to SEQ ID NO: 1312118
ucugucagccuucaagccc

SEQ ID NO: 1312120 - RNA, 19 nt, Artificial Sequence
  Description of Artificial Sequence: Synthetic oligonucleotide
  Sense strand starting at position 1505 of SEQ ID NO: 1241951
gguuacuacucuccauaua

SEQ ID NO: 1312121 - RNA, 19 nt, Artificial Sequence
  Description of Artificial Sequence: Synthetic oligonucleotide
  Antisense strand to SEQ ID NO: 1312120
uauauggagaguaguaacc

SEQ ID NO: 1312122 - RNA, 19 nt, Artificial Sequence
  Description of Artificial Sequence: Synthetic oligonucleotide
  Sense strand starting at position 1564 of SEQ ID NO: 1241951
auaccuaguguuuguaaac

SEQ ID NO: 1312123 - RNA, 19 nt, Artificial Sequence
  Description of Artificial Sequence: Synthetic oligonucleotide
  Antisense strand to SEQ ID NO: 1312122
guuuacaaacacuagguau

SEQ ID NO: 1312124 - RNA, 19 nt, Artificial Sequence
  Description of Artificial Sequence: Synthetic oligonucleotide
  Sense strand starting at position 1631 of SEQ ID NO: 1241951
ucaggcaugucuuccaaau

SEQ ID NO: 1312125 - RNA, 19 nt, Artificial Sequence
  Description of Artificial Sequence: Synthetic oligonucleotide
  Antisense strand to SEQ ID NO: 1312124
auuuggaagacaugccuga

SEQ ID NO: 1312126 - RNA, 19 nt, Artificial Sequence
  Description of Artificial Sequence: Synthetic oligonucleotide
  Sense strand starting at position 1693 of SEQ ID NO: 1241951
uuggaauuaaucuggcugu

SEQ ID NO: 1312127 - RNA, 19 nt, Artificial Sequence
  Description of Artificial Sequence: Synthetic oligonucleotide
  Antisense strand to SEQ ID NO: 1312126
acagccagauuaauuccaa

SEQ ID NO: 1312128 - RNA, 19 nt, Artificial Sequence
  Description of Artificial Sequence: Synthetic oligonucleotide
  Sense strand starting at position 1696 of SEQ ID NO: 1241951
gaauuaaucuggcugugug

SEQ ID NO: 1312129 - RNA, 19 nt, Artificial Sequence
  Description of Artificial Sequence: Synthetic oligonucleotide
  Antisense strand to SEQ ID NO: 1312128
cacacagccagauuaauuc

SEQ ID NO: 1312130 - RNA, 19 nt, Artificial Sequence
  Description of Artificial Sequence: Synthetic oligonucleotide
  Sense strand starting at position 2323 of SEQ ID NO: 1241951
ugauaauucugauuagcca

SEQ ID NO: 1312131 - RNA, 19 nt, Artificial Sequence
  Description of Artificial Sequence: Synthetic oligonucleotide
  Antisense strand to SEQ ID NO: 1312130
uggcuaaucagaauuauca

SEQ ID NO: 1312132 - RNA, 19 nt, Artificial Sequence
  Description of Artificial Sequence: Synthetic oligonucleotide
  Sense strand starting at position 2405 of SEQ ID NO: 1241951
agagucaguccuugggcaa

SEQ ID NO: 1312133 - RNA, 19 nt, Artificial Sequence
  Description of Artificial Sequence: Synthetic oligonucleotide
  Antisense strand to SEQ ID NO: 1312132
uugcccaaggacugacucu

SEQ ID NO: 1312134 - RNA, 19 nt, Artificial Sequence
  Description of Artificial Sequence: Synthetic oligonucleotide
  Sense strand starting at position 2545 of SEQ ID NO: 1241951
cacaguagguguucuauaa

SEQ ID NO: 1312135 - RNA, 19 nt, Artificial Sequence
  Description of Artificial Sequence: Synthetic oligonucleotide
  Antisense strand to SEQ ID NO: 1312134
uuauagaacaccuacugug

SEQ ID NO: 1312136 - RNA, 19 nt, Artificial Sequence
  Description of Artificial Sequence: Synthetic oligonucleotide
  Sense strand starting at position 2583 of SEQ ID NO: 1241951
ugcucaucugggcaaaguu

SEQ ID NO: 1312137 - RNA, 19 nt, Artificial Sequence
  Description of Artificial Sequence: Synthetic oligonucleotide
  Antisense strand to SEQ ID NO: 1312136
aacuuugcccagaugagca

SEQ ID NO: 1312138 - RNA, 19 nt, Artificial Sequence
  Description of Artificial Sequence: Synthetic oligonucleotide
  Sense strand starting at position 2598 of SEQ ID NO: 1241951
aguuuaugucucuaucaag

SEQ ID NO: 1312139 - RNA, 19 nt, Artificial Sequence
  Description of Artificial Sequence: Synthetic oligonucleotide
  Antisense strand to SEQ ID NO: 1312138
cuugauagagacauaaacu

SEQ ID NO: 1312140 - RNA, 19 nt, Artificial Sequence
  Description of Artificial Sequence: Synthetic oligonucleotide
  Sense strand starting at position 2616 of SEQ ID NO: 1241951
gcaguaagcaucuaggaag

SEQ ID NO: 1312141 - RNA, 19 nt, Artificial Sequence
  Description of Artificial Sequence: Synthetic oligonucleotide
  Antisense strand to SEQ ID NO: 1312140
cuuccuagaugcuuacugc

SEQ ID NO: 1312142 - RNA, 19 nt, Artificial Sequence
  Description of Artificial Sequence: Synthetic oligonucleotide
  Sense strand starting at position 2631 of SEQ ID NO: 1241951
gaaggaaggcuaugaucuu

SEQ ID NO: 1312143 - RNA, 19 nt, Artificial Sequence
  Description of Artificial Sequence: Synthetic oligonucleotide
  Antisense strand to SEQ ID NO: 1312142
aagaucauagccuuccuuc

SEQ ID NO: 1312144 - RNA, 19 nt, Artificial Sequence
  Description of Artificial Sequence: Synthetic oligonucleotide
  Sense strand starting at position 2637 of SEQ ID NO: 1241951
aggcuaugaucuucuuucu

SEQ ID NO: 1312145 - RNA, 19 nt, Artificial Sequence
  Description of Artificial Sequence: Synthetic oligonucleotide
  Antisense strand to SEQ ID NO: 1312144
agaaagaagaucauagccu

SEQ ID NO: 1312146 - RNA, 19 nt, Artificial Sequence
  Description of Artificial Sequence: Synthetic oligonucleotide
  Sense strand starting at position 2640 of SEQ ID NO: 1241951
cuaugaucuucuuucuugu

SEQ ID NO: 1312147 - RNA, 19 nt, Artificial Sequence
  Description of Artificial Sequence: Synthetic oligonucleotide
  Antisense strand to SEQ ID NO: 1312146
acaagaaagaagaucauag

SEQ ID NO: 1312148 - RNA, 19 nt, Artificial Sequence
  Description of Artificial Sequence: Synthetic oligonucleotide
  Sense strand starting at position 2701 of SEQ ID NO: 1241951
guggcuuaugaacaacaua

SEQ ID NO: 1312149 - RNA, 19 nt, Artificial Sequence
  Description of Artificial Sequence: Synthetic oligonucleotide
  Antisense strand to SEQ ID NO: 1312148
uauguuguucauaagccac

SEQ ID NO: 1312150 - RNA, 19 nt, Artificial Sequence
  Description of Artificial Sequence: Synthetic oligonucleotide
  Sense strand starting at position 2922 of SEQ ID NO: 1241951
ucauaaaggugacugguua

SEQ ID NO: 1312151 - RNA, 19 nt, Artificial Sequence
  Description of Artificial Sequence: Synthetic oligonucleotide
  Antisense strand to SEQ ID NO: 1312150
uaaccagucaccuuuauga

SEQ ID NO: 1312152 - RNA, 19 nt, Artificial Sequence
  Description of Artificial Sequence: Synthetic oligonucleotide
  Sense strand starting at position 2923 of SEQ ID NO: 1241951
cauaaaggugacugguuaa

SEQ ID NO: 1312153 - RNA, 19 nt, Artificial Sequence
  Description of Artificial Sequence: Synthetic oligonucleotide
  Antisense strand to SEQ ID NO: 1312152
uuaaccagucaccuuuaug

SEQ ID NO: 1312154 - RNA, 19 nt, Artificial Sequence
  Description of Artificial Sequence: Synthetic oligonucleotide
  Sense strand starting at position 2926 of SEQ ID NO: 1241951
aaaggugacugguuaauga

SEQ ID NO: 1312155 - RNA, 19 nt, Artificial Sequence
  Description of Artificial Sequence: Synthetic oligonucleotide
  Antisense strand to SEQ ID NO: 1312154
ucauuaaccagucaccuuu

SEQ ID NO: 1312156 - RNA, 19 nt, Artificial Sequence
  Description of Artificial Sequence: Synthetic oligonucleotide
  Sense strand starting at position 2933 of SEQ ID NO: 1241951
acugguuaaugaccaauca

SEQ ID NO: 1312157 - RNA, 19 nt, Artificial Sequence
  Description of Artificial Sequence: Synthetic oligonucleotide
  Antisense strand to SEQ ID NO: 1312156
ugauuggucauuaaccagu

SEQ ID NO: 1312158 - RNA, 19 nt, Artificial Sequence
  Description of Artificial Sequence: Synthetic oligonucleotide
  Sense strand starting at position 3067 of SEQ ID NO: 1241951
cagccaauggcucaggaau

SEQ ID NO: 1312159 - RNA, 19 nt, Artificial Sequence
  Description of Artificial Sequence: Synthetic oligonucleotide
  Antisense strand to SEQ ID NO: 1312158
auuccugagccauuggcug

SEQ ID NO: 1312160 - RNA, 19 nt, Artificial Sequence
  Description of Artificial Sequence: Synthetic oligonucleotide
  Sense strand starting at position 3124 of SEQ ID NO: 1241951
acaaacauccacuguguga

SEQ ID NO: 1312161 - RNA, 19 nt, Artificial Sequence
  Description of Artificial Sequence: Synthetic oligonucleotide
  Antisense strand to SEQ ID NO: 1312160
ucacacaguggauguuugu

SEQ ID NO: 1312162 - RNA, 19 nt, Artificial Sequence
  Description of Artificial Sequence: Synthetic oligonucleotide
  Sense strand starting at position 3137 of SEQ ID NO: 1241951
gugugauugcccuacacca

SEQ ID NO: 1312163 - RNA, 19 nt, Artificial Sequence
  Description of Artificial Sequence: Synthetic oligonucleotide
  Antisense strand to SEQ ID NO: 1312162
ugguguagggcaaucacac

SEQ ID NO: 1312164 - RNA, 19 nt, Artificial Sequence
  Description of Artificial Sequence: Synthetic oligonucleotide
  Sense strand starting at position 3237 of SEQ ID NO: 1241951
uguccacuuugauuagaaa

SEQ ID NO: 1312165 - RNA, 19 nt, Artificial Sequence
  Description of Artificial Sequence: Synthetic oligonucleotide
  Antisense strand to SEQ ID NO: 1312164
uuucuaaucaaaguggaca

SEQ ID NO: 1312166 - RNA, 19 nt, Artificial Sequence
  Description of Artificial Sequence: Synthetic oligonucleotide
  Sense strand starting at position 3277 of SEQ ID NO: 1241951
augggugcccuagggaauu

SEQ ID NO: 1312167 - RNA, 19 nt, Artificial Sequence
  Description of Artificial Sequence: Synthetic oligonucleotide
  Antisense strand to SEQ ID NO: 1312166
aauucccuagggcacccau

SEQ ID NO: 1312168 - RNA, 19 nt, Artificial Sequence
  Description of Artificial Sequence: Synthetic oligonucleotide
  Sense strand starting at position 3309 of SEQ ID NO: 1241951
ggucacgguuagucagaga

SEQ ID NO: 1312169 - RNA, 19 nt, Artificial Sequence
  Description of Artificial Sequence: Synthetic oligonucleotide
  Antisense strand to SEQ ID NO: 1312168
ucucugacuaaccgugacc

SEQ ID NO: 1312170 - RNA, 19 nt, Artificial Sequence
  Description of Artificial Sequence: Synthetic oligonucleotide
  Sense strand starting at position 3387 of SEQ ID NO: 1241951
ggaucauuucucuggcugu

SEQ ID NO: 1312171 - RNA, 19 nt, Artificial Sequence
  Description of Artificial Sequence: Synthetic oligonucleotide
  Antisense strand to SEQ ID NO: 1312170
acagccagagaaaugaucc

SEQ ID NO: 1312172 - RNA, 19 nt, Artificial Sequence
  Description of Artificial Sequence: Synthetic oligonucleotide
  Sense strand starting at position 119 of SEQ ID NO: 1241952
gaaugugguaacuggugau

SEQ ID NO: 1312173 - RNA, 19 nt, Artificial Sequence
  Description of Artificial Sequence: Synthetic oligonucleotide
  Antisense strand to SEQ ID NO: 1312172
aucaccaguuaccacauuc

SEQ ID NO: 1312174 - RNA, 19 nt, Artificial Sequence
  Description of Artificial Sequence: Synthetic oligonucleotide
  Sense strand starting at position 219 of SEQ ID NO: 1241952
cguuguaguaucucuguua

SEQ ID NO: 1312175 - RNA, 19 nt, Artificial Sequence
  Description of Artificial Sequence: Synthetic oligonucleotide
  Antisense strand to SEQ ID NO: 1312174
uaacagagauacuacaacg

SEQ ID NO: 1312176 - RNA, 19 nt, Artificial Sequence
  Description of Artificial Sequence: Synthetic oligonucleotide
  Sense strand starting at position 287 of SEQ ID NO: 1241952
guugaaguucuuuauauug

SEQ ID NO: 1312177 - RNA, 19 nt, Artificial Sequence
  Description of Artificial Sequence: Synthetic oligonucleotide
  Antisense strand to SEQ ID NO: 1312176
caauauaaagaacuucaac

SEQ ID NO: 1312178 - RNA, 19 nt, Artificial Sequence
  Description of Artificial Sequence: Synthetic oligonucleotide
  Sense strand starting at position 380 of SEQ ID NO: 1241952
cacagagcuuacuuggaga

SEQ ID NO: 1312179 - RNA, 19 nt, Artificial Sequence
  Description of Artificial Sequence: Synthetic oligonucleotide
  Antisense strand to SEQ ID NO: 1312178
ucuccaaguaagcucugug

SEQ ID NO: 1312180 - RNA, 19 nt, Artificial Sequence
  Description of Artificial Sequence: Synthetic oligonucleotide
  Sense strand starting at position 382 of SEQ ID NO: 1241952
cagagcuuacuuggagaua

SEQ ID NO: 1312181 - RNA, 19 nt, Artificial Sequence
  Description of Artificial Sequence: Synthetic oligonucleotide
  Antisense strand to SEQ ID NO: 1312180
uaucuccaaguaagcucug

SEQ ID NO: 1312182 - RNA, 19 nt, Artificial Sequence
  Description of Artificial Sequence: Synthetic oligonucleotide
  Sense strand starting at position 394 of SEQ ID NO: 1241952
ggagauaaauucuuugcac

SEQ ID NO: 1312183 - RNA, 19 nt, Artificial Sequence
  Description of Artificial Sequence: Synthetic oligonucleotide
  Antisense strand to SEQ ID NO: 1312182
gugcaaagaauuuaucucc

SEQ ID NO: 1312184 - RNA, 19 nt, Artificial Sequence
  Description of Artificial Sequence: Synthetic oligonucleotide
  Sense strand starting at position 396 of SEQ ID NO: 1241952
agauaaauucuuugcacug

SEQ ID NO: 1312185 - RNA, 19 nt, Artificial Sequence
  Description of Artificial Sequence: Synthetic oligonucleotide
  Antisense strand to SEQ ID NO: 1312184
cagugcaaagaauuuaucu

SEQ ID NO: 1312186 - RNA, 19 nt, Artificial Sequence
  Description of Artificial Sequence: Synthetic oligonucleotide
  Sense strand starting at position 709 of SEQ ID NO: 1241952
agaggagucuugcugggau

SEQ ID NO: 1312187 - RNA, 19 nt, Artificial Sequence
  Description of Artificial Sequence: Synthetic oligonucleotide
  Antisense strand to SEQ ID NO: 1312186
aucccagcaagacuccucu

SEQ ID NO: 1312188 - RNA, 19 nt, Artificial Sequence
  Description of Artificial Sequence: Synthetic oligonucleotide
  Sense strand starting at position 711 of SEQ ID NO: 1241952
aggagucuugcugggaucu

SEQ ID NO: 1312189 - RNA, 19 nt, Artificial Sequence
  Description of Artificial Sequence: Synthetic oligonucleotide
  Antisense strand to SEQ ID NO: 1312188
agaucccagcaagacuccu

SEQ ID NO: 1312190 - RNA, 19 nt, Artificial Sequence
  Description of Artificial Sequence: Synthetic oligonucleotide
  Sense strand starting at position 723 of SEQ ID NO: 1241952
gggaucuguggccaacagu

SEQ ID NO: 1312191 - RNA, 19 nt, Artificial Sequence
  Description of Artificial Sequence: Synthetic oligonucleotide
  Antisense strand to SEQ ID NO: 1312190
acuguuggccacagauccc

SEQ ID NO: 1312192 - RNA, 19 nt, Artificial Sequence
  Description of Artificial Sequence: Synthetic oligonucleotide
  Sense strand starting at position 832 of SEQ ID NO: 1241952
acagcucugcuccauagaa

SEQ ID NO: 1312193 - RNA, 19 nt, Artificial Sequence
  Description of Artificial Sequence: Synthetic oligonucleotide
  Antisense strand to SEQ ID NO: 1312192
uucuauggagcagagcugu

SEQ ID NO: 1312194 - RNA, 19 nt, Artificial Sequence
  Description of Artificial Sequence: Synthetic oligonucleotide
  Sense strand starting at position 834 of SEQ ID NO: 1241952
agcucugcuccauagaagu

SEQ ID NO: 1312195 - RNA, 19 nt, Artificial Sequence
  Description of Artificial Sequence: Synthetic oligonucleotide
  Antisense strand to SEQ ID NO: 1312194
acuucuauggagcagagcu

SEQ ID NO: 1312196 - RNA, 19 nt, Artificial Sequence
  Description of Artificial Sequence: Synthetic oligonucleotide
  Sense strand starting at position 895 of SEQ ID NO: 1241952
ccuugaaggguuuaaaugu

SEQ ID NO: 1312197 - RNA, 19 nt, Artificial Sequence
  Description of Artificial Sequence: Synthetic oligonucleotide
  Antisense strand to SEQ ID NO: 1312196
acauuuaaacccuucaagg

SEQ ID NO: 1312198 - RNA, 19 nt, Artificial Sequence
  Description of Artificial Sequence: Synthetic oligonucleotide
  Sense strand starting at position 901 of SEQ ID NO: 1241952
aggguuuaaaugugggcua

SEQ ID NO: 1312199 - RNA, 19 nt, Artificial Sequence
  Description of Artificial Sequence: Synthetic oligonucleotide
  Antisense strand to SEQ ID NO: 1312198
uagcccacauuuaaacccu

SEQ ID NO: 1312200 - RNA, 19 nt, Artificial Sequence
  Description of Artificial Sequence: Synthetic oligonucleotide
  Sense strand starting at position 903 of SEQ ID NO: 1241952
gguuuaaaugugggcuaca

SEQ ID NO: 1312201 - RNA, 19 nt, Artificial Sequence
  Description of Artificial Sequence: Synthetic oligonucleotide
  Antisense strand to SEQ ID NO: 1312200
uguagcccacauuuaaacc

SEQ ID NO: 1312202 - RNA, 19 nt, Artificial Sequence
  Description of Artificial Sequence: Synthetic oligonucleotide
  Sense strand starting at position 1034 of SEQ ID NO: 1241952
gugcacuguucugcauuua

SEQ ID NO: 1312203 - RNA, 19 nt, Artificial Sequence
  Description of Artificial Sequence: Synthetic oligonucleotide
  Antisense strand to SEQ ID NO: 1312202
uaaaugcagaacagugcac

SEQ ID NO: 1312204 - RNA, 19 nt, Artificial Sequence
  Description of Artificial Sequence: Synthetic oligonucleotide
  Sense strand starting at position 1044 of SEQ ID NO: 1241952
cugcauuuacuagguguaa

SEQ ID NO: 1312205 - RNA, 19 nt, Artificial Sequence
  Description of Artificial Sequence: Synthetic oligonucleotide
  Antisense strand to SEQ ID NO: 1312204
uuacaccuaguaaaugcag

SEQ ID NO: 1312206 - RNA, 19 nt, Artificial Sequence
  Description of Artificial Sequence: Synthetic oligonucleotide
  Sense strand starting at position 1045 of SEQ ID NO: 1241952
ugcauuuacuagguguaac

SEQ ID NO: 1312207 - RNA, 19 nt, Artificial Sequence
  Description of Artificial Sequence: Synthetic oligonucleotide
  Antisense strand to SEQ ID NO: 1312206
guuacaccuaguaaaugca

SEQ ID NO: 1312208 - RNA, 19 nt, Artificial Sequence
  Description of Artificial Sequence: Synthetic oligonucleotide
  Sense strand starting at position 1418 of SEQ ID NO: 1241952
uccauuauccagggagagu

SEQ ID NO: 1312209 - RNA, 19 nt, Artificial Sequence
  Description of Artificial Sequence: Synthetic oligonucleotide
  Antisense strand to SEQ ID NO: 1312208
acucucccuggauaaugga

SEQ ID NO: 1312210 - RNA, 19 nt, Artificial Sequence
  Description of Artificial Sequence: Synthetic oligonucleotide
  Sense strand starting at position 1431 of SEQ ID NO: 1241952
gagaguucggacuguuaaa

SEQ ID NO: 1312211 - RNA, 19 nt, Artificial Sequence
  Description of Artificial Sequence: Synthetic oligonucleotide
  Antisense strand to SEQ ID NO: 1312210
uuuaacaguccgaacucuc

SEQ ID NO: 1312212 - RNA, 19 nt, Artificial Sequence
  Description of Artificial Sequence: Synthetic oligonucleotide
  Sense strand starting at position 1510 of SEQ ID NO: 1241952
ucuuaagagccagaauugu

SEQ ID NO: 1312213 - RNA, 19 nt, Artificial Sequence
  Description of Artificial Sequence: Synthetic oligonucleotide
  Antisense strand to SEQ ID NO: 1312212
acaauucuggcucuuaaga

SEQ ID NO: 1312214 - RNA, 19 nt, Artificial Sequence
  Description of Artificial Sequence: Synthetic oligonucleotide
  Sense strand starting at position 1533 of SEQ ID NO: 1241952
agaggacguuucucaacuu

SEQ ID NO: 1312215 - RNA, 19 nt, Artificial Sequence
  Description of Artificial Sequence: Synthetic oligonucleotide
  Antisense strand to SEQ ID NO: 1312214
aaguugagaaacguccucu

SEQ ID NO: 1312216 - RNA, 19 nt, Artificial Sequence
  Description of Artificial Sequence: Synthetic oligonucleotide
  Sense strand starting at position 1552 of SEQ ID NO: 1241952
cugucucuccguguuagca

SEQ ID NO: 1312217 - RNA, 19 nt, Artificial Sequence
  Description of Artificial Sequence: Synthetic oligonucleotide
  Antisense strand to SEQ ID NO: 1312216
ugcuaacacggagagacag

SEQ ID NO: 1312218 - RNA, 19 nt, Artificial Sequence
  Description of Artificial Sequence: Synthetic oligonucleotide
  Sense strand starting at position 1553 of SEQ ID NO: 1241952
ugucucuccguguuagcaa

SEQ ID NO: 1312219 - RNA, 19 nt, Artificial Sequence
  Description of Artificial Sequence: Synthetic oligonucleotide
  Antisense strand to SEQ ID NO: 1312218
uugcuaacacggagagaca

SEQ ID NO: 1312220 - RNA, 19 nt, Artificial Sequence
  Description of Artificial Sequence: Synthetic oligonucleotide
  Sense strand starting at position 1561 of SEQ ID NO: 1241952
cguguuagcaaaugaagag

SEQ ID NO: 1312221 - RNA, 19 nt, Artificial Sequence
  Description of Artificial Sequence: Synthetic oligonucleotide
  Antisense strand to SEQ ID NO: 1312220
cucuucauuugcuaacacg

SEQ ID NO: 1312222 - RNA, 19 nt, Artificial Sequence
  Description of Artificial Sequence: Synthetic oligonucleotide
  Sense strand starting at position 1562 of SEQ ID NO: 1241952
guguuagcaaaugaagagu

SEQ ID NO: 1312223 - RNA, 19 nt, Artificial Sequence
  Description of Artificial Sequence: Synthetic oligonucleotide
  Antisense strand to SEQ ID NO: 1312222
acucuucauuugcuaacac

SEQ ID NO: 1312224 - RNA, 19 nt, Artificial Sequence
  Description of Artificial Sequence: Synthetic oligonucleotide
  Sense strand starting at position 1588 of SEQ ID NO: 1241952
ggcugacuccaucacaacu

SEQ ID NO: 1312225 - RNA, 19 nt, Artificial Sequence
  Description of Artificial Sequence: Synthetic oligonucleotide
  Antisense strand to SEQ ID NO: 1312224
aguugugauggagucagcc

SEQ ID NO: 1312226 - RNA, 19 nt, Artificial Sequence
  Description of Artificial Sequence: Synthetic oligonucleotide
  Sense strand starting at position 1988 of SEQ ID NO: 1241952
ucaacagaaucuguugcua

SEQ ID NO: 1312227 - RNA, 19 nt, Artificial Sequence
  Description of Artificial Sequence: Synthetic oligonucleotide
  Antisense strand to SEQ ID NO: 1312226
uagcaacagauucuguuga

SEQ ID NO: 1312228 - RNA, 19 nt, Artificial Sequence
  Description of Artificial Sequence: Synthetic oligonucleotide
  Sense strand starting at position 2172 of SEQ ID NO: 1241952
gguguagcuacugauguca

SEQ ID NO: 1312229 - RNA, 19 nt, Artificial Sequence
  Description of Artificial Sequence: Synthetic oligonucleotide
  Antisense strand to SEQ ID NO: 1312228
ugacaucaguagcuacacc

SEQ ID NO: 1312230 - RNA, 19 nt, Artificial Sequence
  Description of Artificial Sequence: Synthetic oligonucleotide
  Sense strand starting at position 2331 of SEQ ID NO: 1241952
uuuacacguguugagauua

SEQ ID NO: 1312231 - RNA, 19 nt, Artificial Sequence
  Description of Artificial Sequence: Synthetic oligonucleotide
  Antisense strand to SEQ ID NO: 1312230
uaaucucaacacguguaaa

SEQ ID NO: 1312232 - RNA, 19 nt, Artificial Sequence
  Description of Artificial Sequence: Synthetic oligonucleotide
  Sense strand starting at position 2343 of SEQ ID NO: 1241952
gagauuaacuucucccgga

SEQ ID NO: 1312233 - RNA, 19 nt, Artificial Sequence
  Description of Artificial Sequence: Synthetic oligonucleotide
  Antisense strand to SEQ ID NO: 1312232
uccgggagaaguuaaucuc

SEQ ID NO: 1312234 - RNA, 19 nt, Artificial Sequence
  Description of Artificial Sequence: Synthetic oligonucleotide
  Sense strand starting at position 2528 of SEQ ID NO: 1241952
accacuuacuagguaucua

SEQ ID NO: 1312235 - RNA, 19 nt, Artificial Sequence
  Description of Artificial Sequence: Synthetic oligonucleotide
  Antisense strand to SEQ ID NO: 1312234
uagauaccuaguaaguggu

SEQ ID NO: 1312236 - RNA, 19 nt, Artificial Sequence
  Description of Artificial Sequence: Synthetic oligonucleotide
  Sense strand starting at position 2871 of SEQ ID NO: 1241952
ggcagaucugcugacugga

SEQ ID NO: 1312237 - RNA, 19 nt, Artificial Sequence
  Description of Artificial Sequence: Synthetic oligonucleotide
  Antisense strand to SEQ ID NO: 1312236
uccagucagcagaucugcc

SEQ ID NO: 1312238 - RNA, 19 nt, Artificial Sequence
  Description of Artificial Sequence: Synthetic oligonucleotide
  Sense strand starting at position 3315 of SEQ ID NO: 1241952
aauccuagagcuugaguca

SEQ ID NO: 1312239 - RNA, 19 nt, Artificial Sequence
  Description of Artificial Sequence: Synthetic oligonucleotide
  Antisense strand to SEQ ID NO: 1312238
ugacucaagcucuaggauu

SEQ ID NO: 1312240 - RNA, 19 nt, Artificial Sequence
  Description of Artificial Sequence: Synthetic oligonucleotide
  Sense strand starting at position 3408 of SEQ ID NO: 1241952
gguaguagaucucugaguc

SEQ ID NO: 1312241 - RNA, 19 nt, Artificial Sequence
  Description of Artificial Sequence: Synthetic oligonucleotide
  Antisense strand to SEQ ID NO: 1312240
gacucagagaucuacuacc

SEQ ID NO: 1312242 - RNA, 19 nt, Artificial Sequence
  Description of Artificial Sequence: Synthetic oligonucleotide
  Sense strand starting at position 3416 of SEQ ID NO: 1241952
aucucugagucuuugaaca

SEQ ID NO: 1312243 - RNA, 19 nt, Artificial Sequence
  Description of Artificial Sequence: Synthetic oligonucleotide
  Antisense strand to SEQ ID NO: 1312242
uguucaaagacucagagau

SEQ ID NO: 1312244 - RNA, 19 nt, Artificial Sequence
  Description of Artificial Sequence: Synthetic oligonucleotide
  Sense strand starting at position 3475 of SEQ ID NO: 1241952
agcaaagaacuuugcuauu

SEQ ID NO: 1312245 - RNA, 19 nt, Artificial Sequence
  Description of Artificial Sequence: Synthetic oligonucleotide
  Antisense strand to SEQ ID NO: 1312244
aauagcaaaguucuuugcu

SEQ ID NO: 1312246 - RNA, 19 nt, Artificial Sequence
  Description of Artificial Sequence: Synthetic oligonucleotide
  Sense strand starting at position 3780 of SEQ ID NO: 1241952
ugagccuugaaaggagauu

SEQ ID NO: 1312247 - RNA, 19 nt, Artificial Sequence
  Description of Artificial Sequence: Synthetic oligonucleotide
  Antisense strand to SEQ ID NO: 1312246
aaucuccuuucaaggcuca

SEQ ID NO: 1312248 - RNA, 19 nt, Artificial Sequence
  Description of Artificial Sequence: Synthetic oligonucleotide
  Sense strand starting at position 3880 of SEQ ID NO: 1241952
cgagguaauggaugcagaa

SEQ ID NO: 1312249 - RNA, 19 nt, Artificial Sequence
  Description of Artificial Sequence: Synthetic oligonucleotide
  Antisense strand to SEQ ID NO: 1312248
uucugcauccauuaccucg

SEQ ID NO: 1312250 - RNA, 19 nt, Artificial Sequence
  Description of Artificial Sequence: Synthetic oligonucleotide
  Sense strand starting at position 3967 of SEQ ID NO: 1241952
ggcaaugcugggugacaga

SEQ ID NO: 1312251 - RNA, 19 nt, Artificial Sequence
  Description of Artificial Sequence: Synthetic oligonucleotide
  Antisense strand to SEQ ID NO: 1312250
ucugucacccagcauugcc

SEQ ID NO: 1312252 - RNA, 19 nt, Artificial Sequence
  Description of Artificial Sequence: Synthetic oligonucleotide
  Sense strand starting at position 48 of SEQ ID NO: 1241953
aguuccuuccacuguuaaa

SEQ ID NO: 1312253 - RNA, 19 nt, Artificial Sequence
  Description of Artificial Sequence: Synthetic oligonucleotide
  Antisense strand to SEQ ID NO: 1312252
uuuaacaguggaaggaacu

SEQ ID NO: 1312254 - RNA, 19 nt, Artificial Sequence
  Description of Artificial Sequence: Synthetic oligonucleotide
  Sense strand starting at position 113 of SEQ ID NO: 1241953
gcaugagcucgcgcacaaa

SEQ ID NO: 1312255 - RNA, 19 nt, Artificial Sequence
  Description of Artificial Sequence: Synthetic oligonucleotide
  Antisense strand to SEQ ID NO: 1312254
uuugugcgcgagcucaugc

SEQ ID NO: 1312256 - RNA, 19 nt, Artificial Sequence
  Description of Artificial Sequence: Synthetic oligonucleotide
  Sense strand starting at position 152 of SEQ ID NO: 1241953
ugaguuaauccucagcgcu

SEQ ID NO: 1312257 - RNA, 19 nt, Artificial Sequence
  Description of Artificial Sequence: Synthetic oligonucleotide
  Antisense strand to SEQ ID NO: 1312256
agcgcugaggauuaacuca

SEQ ID NO: 1312258 - RNA, 19 nt, Artificial Sequence
  Description of Artificial Sequence: Synthetic oligonucleotide
  Sense strand starting at position 235 of SEQ ID NO: 1241953
cugcuugcaucuuugacau

SEQ ID NO: 1312259 - RNA, 19 nt, Artificial Sequence
  Description of Artificial Sequence: Synthetic oligonucleotide
  Antisense strand to SEQ ID NO: 1312258
augucaaagaugcaagcag

SEQ ID NO: 1312260 - RNA, 19 nt, Artificial Sequence
  Description of Artificial Sequence: Synthetic oligonucleotide
  Sense strand starting at position 438 of SEQ ID NO: 1241953
uggaguugggcccaagaau

SEQ ID NO: 1312261 - RNA, 19 nt, Artificial Sequence
  Description of Artificial Sequence: Synthetic oligonucleotide
  Antisense strand to SEQ ID NO: 1312260
auucuugggcccaacucca

SEQ ID NO: 1312262 - RNA, 19 nt, Artificial Sequence
  Description of Artificial Sequence: Synthetic oligonucleotide
  Sense strand starting at position 447 of SEQ ID NO: 1241953
gcccaagaauccgcacaaa

SEQ ID NO: 1312263 - RNA, 19 nt, Artificial Sequence
  Description of Artificial Sequence: Synthetic oligonucleotide
  Antisense strand to SEQ ID NO: 1312262
uuugugcggauucuugggc

SEQ ID NO: 1312264 - RNA, 19 nt, Artificial Sequence
  Description of Artificial Sequence: Synthetic oligonucleotide
  Sense strand starting at position 742 of SEQ ID NO: 1241953
acagaucucucugaagagu

SEQ ID NO: 1312265 - RNA, 19 nt, Artificial Sequence
  Description of Artificial Sequence: Synthetic oligonucleotide
  Antisense strand to SEQ ID NO: 1312264
acucuucagagagaucugu

SEQ ID NO: 1312266 - RNA, 19 nt, Artificial Sequence
  Description of Artificial Sequence: Synthetic oligonucleotide
  Sense strand starting at position 776 of SEQ ID NO: 1241953
ugauguuauugguucuuua

SEQ ID NO: 1312267 - RNA, 19 nt, Artificial Sequence
  Description of Artificial Sequence: Synthetic oligonucleotide
  Antisense strand to SEQ ID NO: 1312266
uaaagaaccaauaacauca

SEQ ID NO: 1312268 - RNA, 19 nt, Artificial Sequence
  Description of Artificial Sequence: Synthetic oligonucleotide
  Sense strand starting at position 779 of SEQ ID NO: 1241953
uguuauugguucuuuaaca

SEQ ID NO: 1312269 - RNA, 19 nt, Artificial Sequence
  Description of Artificial Sequence: Synthetic oligonucleotide
  Antisense strand to SEQ ID NO: 1312268
uguuaaagaaccaauaaca

SEQ ID NO: 1312270 - RNA, 19 nt, Artificial Sequence
  Description of Artificial Sequence: Synthetic oligonucleotide
  Sense strand starting at position 780 of SEQ ID NO: 1241953
guuauugguucuuuaacag

SEQ ID NO: 1312271 - RNA, 19 nt, Artificial Sequence
  Description of Artificial Sequence: Synthetic oligonucleotide
  Antisense strand to SEQ ID NO: 1312270
cuguuaaagaaccaauaac

SEQ ID NO: 1312272 - RNA, 19 nt, Artificial Sequence
  Description of Artificial Sequence: Synthetic oligonucleotide
  Sense strand starting at position 898 of SEQ ID NO: 1241953
cugggauagagcugggauu

SEQ ID NO: 1312273 - RNA, 19 nt, Artificial Sequence
  Description of Artificial Sequence: Synthetic oligonucleotide
  Antisense strand to SEQ ID NO: 1312272
aaucccagcucuaucccag

SEQ ID NO: 1312274 - RNA, 19 nt, Artificial Sequence
  Description of Artificial Sequence: Synthetic oligonucleotide
  Sense strand starting at position 2486 of SEQ ID NO: 1241953
gccagacggauuuguguaa

SEQ ID NO: 1312275 - RNA, 19 nt, Artificial Sequence
  Description of Artificial Sequence: Synthetic oligonucleotide
  Antisense strand to SEQ ID NO: 1312274
uuacacaaauccgucuggc

SEQ ID NO: 1312276 - RNA, 19 nt, Artificial Sequence
  Description of Artificial Sequence: Synthetic oligonucleotide
  Sense strand starting at position 2493 of SEQ ID NO: 1241953
ggauuuguguaagcacucu

SEQ ID NO: 1312277 - RNA, 19 nt, Artificial Sequence
  Description of Artificial Sequence: Synthetic oligonucleotide
  Antisense strand to SEQ ID NO: 1312276
agagugcuuacacaaaucc

SEQ ID NO: 1312278 - RNA, 19 nt, Artificial Sequence
  Description of Artificial Sequence: Synthetic oligonucleotide
  Sense strand starting at position 2517 of SEQ ID NO: 1241953
aucuaauucccgccgcgau

SEQ ID NO: 1312279 - RNA, 19 nt, Artificial Sequence
  Description of Artificial Sequence: Synthetic oligonucleotide
  Antisense strand to SEQ ID NO: 1312278
aucgcggcgggaauuagau

SEQ ID NO: 1312280 - RNA, 19 nt, Artificial Sequence
  Description of Artificial Sequence: Synthetic oligonucleotide
  Sense strand starting at position 2529 of SEQ ID NO: 1241953
ccgcgaugacuugcccgaa

SEQ ID NO: 1312281 - RNA, 19 nt, Artificial Sequence
  Description of Artificial Sequence: Synthetic oligonucleotide
  Antisense strand to SEQ ID NO: 1312280
uucgggcaagucaucgcgg

SEQ ID NO: 1312282 - RNA, 19 nt, Artificial Sequence
  Description of Artificial Sequence: Synthetic oligonucleotide
  Sense strand starting at position 2599 of SEQ ID NO: 1241953
ggacgugggaagugacuua

SEQ ID NO: 1312283 - RNA, 19 nt, Artificial Sequence
  Description of Artificial Sequence: Synthetic oligonucleotide
  Antisense strand to SEQ ID NO: 1312282
uaagucacuucccacgucc

SEQ ID NO: 1312284 - RNA, 19 nt, Artificial Sequence
  Description of Artificial Sequence: Synthetic oligonucleotide
  Sense strand starting at position 2606 of SEQ ID NO: 1241953
ggaagugacuuagaccaca

SEQ ID NO: 1312285 - RNA, 19 nt, Artificial Sequence
  Description of Artificial Sequence: Synthetic oligonucleotide
  Antisense strand to SEQ ID NO: 1312284
uguggucuaagucacuucc

SEQ ID NO: 1312286 - RNA, 19 nt, Artificial Sequence
  Description of Artificial Sequence: Synthetic oligonucleotide
  Sense strand starting at position 2673 of SEQ ID NO: 1241953
ccgcuagcucccuaaggaa

SEQ ID NO: 1312287 - RNA, 19 nt, Artificial Sequence
  Description of Artificial Sequence: Synthetic oligonucleotide
  Antisense strand to SEQ ID NO: 1312286
uuccuuagggagcuagcgg

SEQ ID NO: 1312288 - RNA, 19 nt, Artificial Sequence
  Description of Artificial Sequence: Synthetic oligonucleotide
  Sense strand starting at position 2687 of SEQ ID NO: 1241953
aggaaccucuuguuauaga

SEQ ID NO: 1312289 - RNA, 19 nt, Artificial Sequence
  Description of Artificial Sequence: Synthetic oligonucleotide
  Antisense strand to SEQ ID NO: 1312288
ucuauaacaagagguuccu

SEQ ID NO: 1312290 - RNA, 19 nt, Artificial Sequence
  Description of Artificial Sequence: Synthetic oligonucleotide
  Sense strand starting at position 2688 of SEQ ID NO: 1241953
ggaaccucuuguuauagaa

SEQ ID NO: 1312291 - RNA, 19 nt, Artificial Sequence
  Description of Artificial Sequence: Synthetic oligonucleotide
  Antisense strand to SEQ ID NO: 1312290
uucuauaacaagagguucc

SEQ ID NO: 1312292 - RNA, 19 nt, Artificial Sequence
  Description of Artificial Sequence: Synthetic oligonucleotide
  Sense strand starting at position 2748 of SEQ ID NO: 1241953
gcucuacugguggagugau

SEQ ID NO: 1312293 - RNA, 19 nt, Artificial Sequence
  Description of Artificial Sequence: Synthetic oligonucleotide
  Antisense strand to SEQ ID NO: 1312292
aucacuccaccaguagagc

SEQ ID NO: 1312294 - RNA, 19 nt, Artificial Sequence
  Description of Artificial Sequence: Synthetic oligonucleotide
  Sense strand starting at position 2844 of SEQ ID NO: 1241953
gggacagucaccugaaggu

SEQ ID NO: 1312295 - RNA, 19 nt, Artificial Sequence
  Description of Artificial Sequence: Synthetic oligonucleotide
  Antisense strand to SEQ ID NO: 1312294
accuucaggugacuguccc

SEQ ID NO: 1312296 - RNA, 19 nt, Artificial Sequence
  Description of Artificial Sequence: Synthetic oligonucleotide
  Sense strand starting at position 2866 of SEQ ID NO: 1241953
cucgcaagucuugagaaag

SEQ ID NO: 1312297 - RNA, 19 nt, Artificial Sequence
  Description of Artificial Sequence: Synthetic oligonucleotide
  Antisense strand to SEQ ID NO: 1312296
cuuucucaagacuugcgag

SEQ ID NO: 1312298 - RNA, 19 nt, Artificial Sequence
  Description of Artificial Sequence: Synthetic oligonucleotide
  Sense strand starting at position 2956 of SEQ ID NO: 1241953
ggaguuagcagagguggaa

SEQ ID NO: 1312299 - RNA, 19 nt, Artificial Sequence
  Description of Artificial Sequence: Synthetic oligonucleotide
  Antisense strand to SEQ ID NO: 1312298
uuccaccucugcuaacucc

SEQ ID NO: 1312300 - RNA, 19 nt, Artificial Sequence
  Description of Artificial Sequence: Synthetic oligonucleotide
  Sense strand starting at position 3024 of SEQ ID NO: 1241953
cuuccugcuccacgguaau

SEQ ID NO: 1312301 - RNA, 19 nt, Artificial Sequence
  Description of Artificial Sequence: Synthetic oligonucleotide
  Antisense strand to SEQ ID NO: 1312300
auuaccguggagcaggaag

SEQ ID NO: 1312302 - RNA, 19 nt, Artificial Sequence
  Description of Artificial Sequence: Synthetic oligonucleotide
  Sense strand starting at position 3035 of SEQ ID NO: 1241953
acgguaauuaccggugcaa

SEQ ID NO: 1312303 - RNA, 19 nt, Artificial Sequence
  Description of Artificial Sequence: Synthetic oligonucleotide
  Antisense strand to SEQ ID NO: 1312302
uugcaccgguaauuaccgu

SEQ ID NO: 1312304 - RNA, 19 nt, Artificial Sequence
  Description of Artificial Sequence: Synthetic oligonucleotide
  Sense strand starting at position 3037 of SEQ ID NO: 1241953
gguaauuaccggugcaauu

SEQ ID NO: 1312305 - RNA, 19 nt, Artificial Sequence
  Description of Artificial Sequence: Synthetic oligonucleotide
  Antisense strand to SEQ ID NO: 1312304
aauugcaccgguaauuacc

SEQ ID NO: 1312306 - RNA, 19 nt, Artificial Sequence
  Description of Artificial Sequence: Synthetic oligonucleotide
  Sense strand starting at position 3087 of SEQ ID NO: 1241953
agcaccugcucuguggaaa

SEQ ID NO: 1312307 - RNA, 19 nt, Artificial Sequence
  Description of Artificial Sequence: Synthetic oligonucleotide
  Antisense strand to SEQ ID NO: 1312306
uuuccacagagcaggugcu

SEQ ID NO: 1312308 - RNA, 19 nt, Artificial Sequence
  Description of Artificial Sequence: Synthetic oligonucleotide
  Sense strand starting at position 3088 of SEQ ID NO: 1241953
gcaccugcucuguggaaag

SEQ ID NO: 1312309 - RNA, 19 nt, Artificial Sequence
  Description of Artificial Sequence: Synthetic oligonucleotide
  Antisense strand to SEQ ID NO: 1312308
cuuuccacagagcaggugc

SEQ ID NO: 1312310 - RNA, 19 nt, Artificial Sequence
  Description of Artificial Sequence: Synthetic oligonucleotide
  Sense strand starting at position 3147 of SEQ ID NO: 1241953
ggagaccagugucuagauu

SEQ ID NO: 1312311 - RNA, 19 nt, Artificial Sequence
  Description of Artificial Sequence: Synthetic oligonucleotide
  Antisense strand to SEQ ID NO: 1312310
aaucuagacacuggucucc

SEQ ID NO: 1312312 - RNA, 19 nt, Artificial Sequence
  Description of Artificial Sequence: Synthetic oligonucleotide
  Sense strand starting at position 3199 of SEQ ID NO: 1241953
aagugcuuugugggucauu

SEQ ID NO: 1312313 - RNA, 19 nt, Artificial Sequence
  Description of Artificial Sequence: Synthetic oligonucleotide
  Antisense strand to SEQ ID NO: 1312312
aaugacccacaaagcacuu

SEQ ID NO: 1312314 - RNA, 19 nt, Artificial Sequence
  Description of Artificial Sequence: Synthetic oligonucleotide
  Sense strand starting at position 3201 of SEQ ID NO: 1241953
gugcuuugugggucauugu

SEQ ID NO: 1312315 - RNA, 19 nt, Artificial Sequence
  Description of Artificial Sequence: Synthetic oligonucleotide
  Antisense strand to SEQ ID NO: 1312314
acaaugacccacaaagcac

SEQ ID NO: 1312316 - RNA, 19 nt, Artificial Sequence
  Description of Artificial Sequence: Synthetic oligonucleotide
  Sense strand starting at position 3208 of SEQ ID NO: 1241953
gugggucauugugcaauuu

SEQ ID NO: 1312317 - RNA, 19 nt, Artificial Sequence
  Description of Artificial Sequence: Synthetic oligonucleotide
  Antisense strand to SEQ ID NO: 1312316
aaauugcacaaugacccac

SEQ ID NO: 1312318 - RNA, 19 nt, Artificial Sequence
  Description of Artificial Sequence: Synthetic oligonucleotide
  Sense strand starting at position 3554 of SEQ ID NO: 1241953
gggaguccuaaaugcaaca

SEQ ID NO: 1312319 - RNA, 19 nt, Artificial Sequence
  Description of Artificial Sequence: Synthetic oligonucleotide
  Antisense strand to SEQ ID NO: 1312318
uguugcauuuaggacuccc

SEQ ID NO: 1312320 - RNA, 19 nt, Artificial Sequence
  Description of Artificial Sequence: Synthetic oligonucleotide
  Sense strand starting at position 3635 of SEQ ID NO: 1241953
ggaauugcccaagagcaca

SEQ ID NO: 1312321 - RNA, 19 nt, Artificial Sequence
  Description of Artificial Sequence: Synthetic oligonucleotide
  Antisense strand to SEQ ID NO: 1312320
ugugcucuugggcaauucc

SEQ ID NO: 1312322 - RNA, 19 nt, Artificial Sequence
  Description of Artificial Sequence: Synthetic oligonucleotide
  Sense strand starting at position 3665 of SEQ ID NO: 1241953
cgaggacuugaaugaaagu

SEQ ID NO: 1312323 - RNA, 19 nt, Artificial Sequence
  Description of Artificial Sequence: Synthetic oligonucleotide
  Antisense strand to SEQ ID NO: 1312322
acuuucauucaaguccucg

SEQ ID NO: 1312324 - RNA, 19 nt, Artificial Sequence
  Description of Artificial Sequence: Synthetic oligonucleotide
  Sense strand starting at position 3699 of SEQ ID NO: 1241953
ucagcauugugcuuugaau

SEQ ID NO: 1312325 - RNA, 19 nt, Artificial Sequence
  Description of Artificial Sequence: Synthetic oligonucleotide
  Antisense strand to SEQ ID NO: 1312324
auucaaagcacaaugcuga

SEQ ID NO: 1312326 - RNA, 19 nt, Artificial Sequence
  Description of Artificial Sequence: Synthetic oligonucleotide
  Sense strand starting at position 3707 of SEQ ID NO: 1241953
gugcuuugaauccgugaac

SEQ ID NO: 1312327 - RNA, 19 nt, Artificial Sequence
  Description of Artificial Sequence: Synthetic oligonucleotide
  Antisense strand to SEQ ID NO: 1312326
guucacggauucaaagcac

SEQ ID NO: 1312328 - RNA, 19 nt, Artificial Sequence
  Description of Artificial Sequence: Synthetic oligonucleotide
  Sense strand starting at position 3708 of SEQ ID NO: 1241953
ugcuuugaauccgugaacu

SEQ ID NO: 1312329 - RNA, 19 nt, Artificial Sequence
  Description of Artificial Sequence: Synthetic oligonucleotide
  Antisense strand to SEQ ID NO: 1312328
aguucacggauucaaagca

SEQ ID NO: 1312330 - RNA, 19 nt, Artificial Sequence
  Description of Artificial Sequence: Synthetic oligonucleotide
  Sense strand starting at position 3828 of SEQ ID NO: 1241953
aaaucucuuggguagcaga

SEQ ID NO: 1312331 - RNA, 19 nt, Artificial Sequence
  Description of Artificial Sequence: Synthetic oligonucleotide
  Antisense strand to SEQ ID NO: 1312330
ucugcuacccaagagauuu

SEQ ID NO: 1312332 - RNA, 19 nt, Artificial Sequence
  Description of Artificial Sequence: Synthetic oligonucleotide
  Sense strand starting at position 98 of SEQ ID NO: 1241954
acgaaacucugucucaaga

SEQ ID NO: 1312333 - RNA, 19 nt, Artificial Sequence
  Description of Artificial Sequence: Synthetic oligonucleotide
  Antisense strand to SEQ ID NO: 1312332
ucuugagacagaguuucgu

SEQ ID NO: 1312334 - RNA, 19 nt, Artificial Sequence
  Description of Artificial Sequence: Synthetic oligonucleotide
  Sense strand starting at position 172 of SEQ ID NO: 1241954
aggagucaguuucccaaga

SEQ ID NO: 1312335 - RNA, 19 nt, Artificial Sequence
  Description of Artificial Sequence: Synthetic oligonucleotide
  Antisense strand to SEQ ID NO: 1312334
ucuugggaaacugacuccu

SEQ ID NO: 1312336 - RNA, 19 nt, Artificial Sequence
  Description of Artificial Sequence: Synthetic oligonucleotide
  Sense strand starting at position 173 of SEQ ID NO: 1241954
ggagucaguuucccaagau

SEQ ID NO: 1312337 - RNA, 19 nt, Artificial Sequence
  Description of Artificial Sequence: Synthetic oligonucleotide
  Antisense strand to SEQ ID NO: 1312336
aucuugggaaacugacucc

SEQ ID NO: 1312338 - RNA, 19 nt, Artificial Sequence
  Description of Artificial Sequence: Synthetic oligonucleotide
  Sense strand starting at position 227 of SEQ ID NO: 1241954
uuccacgaucucuaaagua

SEQ ID NO: 1312339 - RNA, 19 nt, Artificial Sequence
  Description of Artificial Sequence: Synthetic oligonucleotide
  Antisense strand to SEQ ID NO: 1312338
uacuuuagagaucguggaa

SEQ ID NO: 1312340 - RNA, 19 nt, Artificial Sequence
  Description of Artificial Sequence: Synthetic oligonucleotide
  Sense strand starting at position 810 of SEQ ID NO: 1241954
ugaaacgaguuucugaguu

SEQ ID NO: 1312341 - RNA, 19 nt, Artificial Sequence
  Description of Artificial Sequence: Synthetic oligonucleotide
  Antisense strand to SEQ ID NO: 1312340
aacucagaaacucguuuca

SEQ ID NO: 1312342 - RNA, 19 nt, Artificial Sequence
  Description of Artificial Sequence: Synthetic oligonucleotide
  Sense strand starting at position 814 of SEQ ID NO: 1241954
acgaguuucugaguucuua

SEQ ID NO: 1312343 - RNA, 19 nt, Artificial Sequence
  Description of Artificial Sequence: Synthetic oligonucleotide
  Antisense strand to SEQ ID NO: 1312342
uaagaacucagaaacucgu

SEQ ID NO: 1312344 - RNA, 19 nt, Artificial Sequence
  Description of Artificial Sequence: Synthetic oligonucleotide
  Sense strand starting at position 818 of SEQ ID NO: 1241954
guuucugaguucuuauguu

SEQ ID NO: 1312345 - RNA, 19 nt, Artificial Sequence
  Description of Artificial Sequence: Synthetic oligonucleotide
  Antisense strand to SEQ ID NO: 1312344
aacauaagaacucagaaac

SEQ ID NO: 1312346 - RNA, 19 nt, Artificial Sequence
  Description of Artificial Sequence: Synthetic oligonucleotide
  Sense strand starting at position 822 of SEQ ID NO: 1241954
cugaguucuuauguuuaaa

SEQ ID NO: 1312347 - RNA, 19 nt, Artificial Sequence
  Description of Artificial Sequence: Synthetic oligonucleotide
  Antisense strand to SEQ ID NO: 1312346
uuuaaacauaagaacucag

SEQ ID NO: 1312348 - RNA, 19 nt, Artificial Sequence
  Description of Artificial Sequence: Synthetic oligonucleotide
  Sense strand starting at position 845 of SEQ ID NO: 1241954
caugcauaguugccaguga

SEQ ID NO: 1312349 - RNA, 19 nt, Artificial Sequence
  Description of Artificial Sequence: Synthetic oligonucleotide
  Antisense strand to SEQ ID NO: 1312348
ucacuggcaacuaugcaug

SEQ ID NO: 1312350 - RNA, 19 nt, Artificial Sequence
  Description of Artificial Sequence: Synthetic oligonucleotide
  Sense strand starting at position 849 of SEQ ID NO: 1241954
cauaguugccagugaugca

SEQ ID NO: 1312351 - RNA, 19 nt, Artificial Sequence
  Description of Artificial Sequence: Synthetic oligonucleotide
  Antisense strand to SEQ ID NO: 1312350
ugcaucacuggcaacuaug

SEQ ID NO: 1312352 - RNA, 19 nt, Artificial Sequence
  Description of Artificial Sequence: Synthetic oligonucleotide
  Sense strand starting at position 856 of SEQ ID NO: 1241954
gccagugaugcagguucaa

SEQ ID NO: 1312353 - RNA, 19 nt, Artificial Sequence
  Description of Artificial Sequence: Synthetic oligonucleotide
  Antisense strand to SEQ ID NO: 1312352
uugaaccugcaucacuggc

SEQ ID NO: 1312354 - RNA, 19 nt, Artificial Sequence
  Description of Artificial Sequence: Synthetic oligonucleotide
  Sense strand starting at position 882 of SEQ ID NO: 1241954
auauaauaugcaugcauag

SEQ ID NO: 1312355 - RNA, 19 nt, Artificial Sequence
  Description of Artificial Sequence: Synthetic oligonucleotide
  Antisense strand to SEQ ID NO: 1312354
cuaugcaugcauauuauau

SEQ ID NO: 1312356 - RNA, 19 nt, Artificial Sequence
  Description of Artificial Sequence: Synthetic oligonucleotide
  Sense strand starting at position 918 of SEQ ID NO: 1241954
ccaagaucgaagugcaauu

SEQ ID NO: 1312357 - RNA, 19 nt, Artificial Sequence
  Description of Artificial Sequence: Synthetic oligonucleotide
  Antisense strand to SEQ ID NO: 1312356
aauugcacuucgaucuugg

SEQ ID NO: 1312358 - RNA, 19 nt, Artificial Sequence
  Description of Artificial Sequence: Synthetic oligonucleotide
  Sense strand starting at position 929 of SEQ ID NO: 1241954
gugcaauuacuguaauuau

SEQ ID NO: 1312359 - RNA, 19 nt, Artificial Sequence
  Description of Artificial Sequence: Synthetic oligonucleotide
  Antisense strand to SEQ ID NO: 1312358
auaauuacaguaauugcac

SEQ ID NO: 1312360 - RNA, 19 nt, Artificial Sequence
  Description of Artificial Sequence: Synthetic oligonucleotide
  Sense strand starting at position 940 of SEQ ID NO: 1241954
guaauuauucuaugguggu

SEQ ID NO: 1312361 - RNA, 19 nt, Artificial Sequence
  Description of Artificial Sequence: Synthetic oligonucleotide
  Antisense strand to SEQ ID NO: 1312360
accaccauagaauaauuac

SEQ ID NO: 1312362 - RNA, 19 nt, Artificial Sequence
  Description of Artificial Sequence: Synthetic oligonucleotide
  Sense strand starting at position 1019 of SEQ ID NO: 1241954
cgucucauacuccagcaau

SEQ ID NO: 1312363 - RNA, 19 nt, Artificial Sequence
  Description of Artificial Sequence: Synthetic oligonucleotide
  Antisense strand to SEQ ID NO: 1312362
auugcuggaguaugagacg

SEQ ID NO: 1312364 - RNA, 19 nt, Artificial Sequence
  Description of Artificial Sequence: Synthetic oligonucleotide
  Sense strand starting at position 1070 of SEQ ID NO: 1241954
agcguuccuaugcuuguaa

SEQ ID NO: 1312365 - RNA, 19 nt, Artificial Sequence
  Description of Artificial Sequence: Synthetic oligonucleotide
  Antisense strand to SEQ ID NO: 1312364
uuacaagcauaggaacgcu

SEQ ID NO: 1312366 - RNA, 19 nt, Artificial Sequence
  Description of Artificial Sequence: Synthetic oligonucleotide
  Sense strand starting at position 1096 of SEQ ID NO: 1241954
uauuccugugucugugaca

SEQ ID NO: 1312367 - RNA, 19 nt, Artificial Sequence
  Description of Artificial Sequence: Synthetic oligonucleotide
  Antisense strand to SEQ ID NO: 1312366
ugucacagacacaggaaua

SEQ ID NO: 1312368 - RNA, 19 nt, Artificial Sequence
  Description of Artificial Sequence: Synthetic oligonucleotide
  Sense strand starting at position 1097 of SEQ ID NO: 1241954
auuccugugucugugacau

SEQ ID NO: 1312369 - RNA, 19 nt, Artificial Sequence
  Description of Artificial Sequence: Synthetic oligonucleotide
  Antisense strand to SEQ ID NO: 1312368
augucacagacacaggaau

SEQ ID NO: 1312370 - RNA, 19 nt, Artificial Sequence
  Description of Artificial Sequence: Synthetic oligonucleotide
  Sense strand starting at position 1165 of SEQ ID NO: 1241954
ggcuaucuuccggagauca

SEQ ID NO: 1312371 - RNA, 19 nt, Artificial Sequence
  Description of Artificial Sequence: Synthetic oligonucleotide
  Antisense strand to SEQ ID NO: 1312370
ugaucuccggaagauagcc

SEQ ID NO: 1312372 - RNA, 19 nt, Artificial Sequence
  Description of Artificial Sequence: Synthetic oligonucleotide
  Sense strand starting at position 1222 of SEQ ID NO: 1241954
agaauuagaacguggcaca

SEQ ID NO: 1312373 - RNA, 19 nt, Artificial Sequence
  Description of Artificial Sequence: Synthetic oligonucleotide
  Antisense strand to SEQ ID NO: 1312372
ugugccacguucuaauucu

SEQ ID NO: 1312374 - RNA, 19 nt, Artificial Sequence
  Description of Artificial Sequence: Synthetic oligonucleotide
  Sense strand starting at position 1275 of SEQ ID NO: 1241954
gugacacacuaaucgcuaa

SEQ ID NO: 1312375 - RNA, 19 nt, Artificial Sequence
  Description of Artificial Sequence: Synthetic oligonucleotide
  Antisense strand to SEQ ID NO: 1312374
uuagcgauuagugugucac

SEQ ID NO: 1312376 - RNA, 19 nt, Artificial Sequence
  Description of Artificial Sequence: Synthetic oligonucleotide
  Sense strand starting at position 1282 of SEQ ID NO: 1241954
acuaaucgcuaaccgagaa

SEQ ID NO: 1312377 - RNA, 19 nt, Artificial Sequence
  Description of Artificial Sequence: Synthetic oligonucleotide
  Antisense strand to SEQ ID NO: 1312376
uucucgguuagcgauuagu

SEQ ID NO: 1312378 - RNA, 19 nt, Artificial Sequence
  Description of Artificial Sequence: Synthetic oligonucleotide
  Sense strand starting at position 1294 of SEQ ID NO: 1241954
ccgagaaaugccugauuga

SEQ ID NO: 1312379 - RNA, 19 nt, Artificial Sequence
  Description of Artificial Sequence: Synthetic oligonucleotide
  Antisense strand to SEQ ID NO: 1312378
ucaaucaggcauuucucgg

SEQ ID NO: 1312380 - RNA, 19 nt, Artificial Sequence
  Description of Artificial Sequence: Synthetic oligonucleotide
  Sense strand starting at position 1315 of SEQ ID NO: 1241954
aguauaaucguguguccca

SEQ ID NO: 1312381 - RNA, 19 nt, Artificial Sequence
  Description of Artificial Sequence: Synthetic oligonucleotide
  Antisense strand to SEQ ID NO: 1312380
ugggacacacgauuauacu

SEQ ID NO: 1312382 - RNA, 19 nt, Artificial Sequence
  Description of Artificial Sequence: Synthetic oligonucleotide
  Sense strand starting at position 1316 of SEQ ID NO: 1241954
guauaaucgugugucccau

SEQ ID NO: 1312383 - RNA, 19 nt, Artificial Sequence
  Description of Artificial Sequence: Synthetic oligonucleotide
  Antisense strand to SEQ ID NO: 1312382
augggacacacgauuauac

SEQ ID NO: 1312384 - RNA, 19 nt, Artificial Sequence
  Description of Artificial Sequence: Synthetic oligonucleotide
  Sense strand starting at position 1322 of SEQ ID NO: 1241954
ucgugugucccauacggaa

SEQ ID NO: 1312385 - RNA, 19 nt, Artificial Sequence
  Description of Artificial Sequence: Synthetic oligonucleotide
  Antisense strand to SEQ ID NO: 1312384
uuccguaugggacacacga

SEQ ID NO: 1312386 - RNA, 19 nt, Artificial Sequence
  Description of Artificial Sequence: Synthetic oligonucleotide
  Sense strand starting at position 1340 of SEQ ID NO: 1241954
aguauauuguguccucgga

SEQ ID NO: 1312387 - RNA, 19 nt, Artificial Sequence
  Description of Artificial Sequence: Synthetic oligonucleotide
  Antisense strand to SEQ ID NO: 1312386
uccgaggacacaauauacu

SEQ ID NO: 1312388 - RNA, 19 nt, Artificial Sequence
  Description of Artificial Sequence: Synthetic oligonucleotide
  Sense strand starting at position 2152 of SEQ ID NO: 1241954
cgugaucuuguucgaguca

SEQ ID NO: 1312389 - RNA, 19 nt, Artificial Sequence
  Description of Artificial Sequence: Synthetic oligonucleotide
  Antisense strand to SEQ ID NO: 1312388
ugacucgaacaagaucacg

SEQ ID NO: 1312390 - RNA, 19 nt, Artificial Sequence
  Description of Artificial Sequence: Synthetic oligonucleotide
  Sense strand starting at position 2925 of SEQ ID NO: 1241954
ggccuaugcguaagggauu

SEQ ID NO: 1312391 - RNA, 19 nt, Artificial Sequence
  Description of Artificial Sequence: Synthetic oligonucleotide
  Antisense strand to SEQ ID NO: 1312390
aaucccuuacgcauaggcc

SEQ ID NO: 1312392 - RNA, 19 nt, Artificial Sequence
  Description of Artificial Sequence: Synthetic oligonucleotide
  Sense strand starting at position 3083 of SEQ ID NO: 1241954
ugaggacucucaccugaau

SEQ ID NO: 1312393 - RNA, 19 nt, Artificial Sequence
  Description of Artificial Sequence: Synthetic oligonucleotide
  Antisense strand to SEQ ID NO: 1312392
auucaggugagaguccuca

SEQ ID NO: 1312394 - RNA, 19 nt, Artificial Sequence
  Description of Artificial Sequence: Synthetic oligonucleotide
  Sense strand starting at position 3086 of SEQ ID NO: 1241954
ggacucucaccugaauguu

SEQ ID NO: 1312395 - RNA, 19 nt, Artificial Sequence
  Description of Artificial Sequence: Synthetic oligonucleotide
  Antisense strand to SEQ ID NO: 1312394
aacauucaggugagagucc

SEQ ID NO: 1312396 - RNA, 19 nt, Artificial Sequence
  Description of Artificial Sequence: Synthetic oligonucleotide
  Sense strand starting at position 3134 of SEQ ID NO: 1241954
ccacgauggcucugaaaua

SEQ ID NO: 1312397 - RNA, 19 nt, Artificial Sequence
  Description of Artificial Sequence: Synthetic oligonucleotide
  Antisense strand to SEQ ID NO: 1312396
uauuucagagccaucgugg

SEQ ID NO: 1312398 - RNA, 19 nt, Artificial Sequence
  Description of Artificial Sequence: Synthetic oligonucleotide
  Sense strand starting at position 3158 of SEQ ID NO: 1241954
gaucaaguuccacaguugu

SEQ ID NO: 1312399 - RNA, 19 nt, Artificial Sequence
  Description of Artificial Sequence: Synthetic oligonucleotide
  Antisense strand to SEQ ID NO: 1312398
acaacuguggaacuugauc

SEQ ID NO: 1312400 - RNA, 19 nt, Artificial Sequence
  Description of Artificial Sequence: Synthetic oligonucleotide
  Sense strand starting at position 3175 of SEQ ID NO: 1241954
guugcaucuuaucucacua

SEQ ID NO: 1312401 - RNA, 19 nt, Artificial Sequence
  Description of Artificial Sequence: Synthetic oligonucleotide
  Antisense strand to SEQ ID NO: 1312400
uagugagauaagaugcaac

SEQ ID NO: 1312402 - RNA, 19 nt, Artificial Sequence
  Description of Artificial Sequence: Synthetic oligonucleotide
  Sense strand starting at position 3256 of SEQ ID NO: 1241954
ggaugcugcccagaguuaa

SEQ ID NO: 1312403 - RNA, 19 nt, Artificial Sequence
  Description of Artificial Sequence: Synthetic oligonucleotide
  Antisense strand to SEQ ID NO: 1312402
uuaacucugggcagcaucc

SEQ ID NO: 1312404 - RNA, 19 nt, Artificial Sequence
  Description of Artificial Sequence: Synthetic oligonucleotide
  Sense strand starting at position 3276 of SEQ ID NO: 1241954
gagacauuguauucugucu

SEQ ID NO: 1312405 - RNA, 19 nt, Artificial Sequence
  Description of Artificial Sequence: Synthetic oligonucleotide
  Antisense strand to SEQ ID NO: 1312404
agacagaauacaaugucuc

SEQ ID NO: 1312406 - RNA, 19 nt, Artificial Sequence
  Description of Artificial Sequence: Synthetic oligonucleotide
  Sense strand starting at position 3554 of SEQ ID NO: 1241954
ugaagcaguuucucucuga

SEQ ID NO: 1312407 - RNA, 19 nt, Artificial Sequence
  Description of Artificial Sequence: Synthetic oligonucleotide
  Antisense strand to SEQ ID NO: 1312406
ucagagagaaacugcuuca

SEQ ID NO: 1312408 - RNA, 19 nt, Artificial Sequence
  Description of Artificial Sequence: Synthetic oligonucleotide
  Sense strand starting at position 3558 of SEQ ID NO: 1241954
gcaguuucucucugaccuu

SEQ ID NO: 1312409 - RNA, 19 nt, Artificial Sequence
  Description of Artificial Sequence: Synthetic oligonucleotide
  Antisense strand to SEQ ID NO: 1312408
aaggucagagagaaacugc

SEQ ID NO: 1312410 - RNA, 19 nt, Artificial Sequence
  Description of Artificial Sequence: Synthetic oligonucleotide
  Sense strand starting at position 3721 of SEQ ID NO: 1241954
cucuuugccuuucuaugua

SEQ ID NO: 1312411 - RNA, 19 nt, Artificial Sequence
  Description of Artificial Sequence: Synthetic oligonucleotide
  Antisense strand to SEQ ID NO: 1312410
uacauagaaaggcaaagag

SEQ ID NO: 1312412 - RNA, 19 nt, Artificial Sequence
  Description of Artificial Sequence: Synthetic oligonucleotide
  Sense strand starting at position 83 of SEQ ID NO: 1241955
caagguuggcgucaagaac

SEQ ID NO: 1312413 - RNA, 19 nt, Artificial Sequence
  Description of Artificial Sequence: Synthetic oligonucleotide
  Antisense strand to SEQ ID NO: 1312412
guucuugacgccaaccuug

SEQ ID NO: 1312414 - RNA, 19 nt, Artificial Sequence
  Description of Artificial Sequence: Synthetic oligonucleotide
  Sense strand starting at position 119 of SEQ ID NO: 1241955
guggucuccaggcauagaa

SEQ ID NO: 1312415 - RNA, 19 nt, Artificial Sequence
  Description of Artificial Sequence: Synthetic oligonucleotide
  Antisense strand to SEQ ID NO: 1312414
uucuaugccuggagaccac

SEQ ID NO: 1312416 - RNA, 19 nt, Artificial Sequence
  Description of Artificial Sequence: Synthetic oligonucleotide
  Sense strand starting at position 121 of SEQ ID NO: 1241955
ggucuccaggcauagaaua

SEQ ID NO: 1312417 - RNA, 19 nt, Artificial Sequence
  Description of Artificial Sequence: Synthetic oligonucleotide
  Antisense strand to SEQ ID NO: 1312416
uauucuaugccuggagacc

SEQ ID NO: 1312418 - RNA, 19 nt, Artificial Sequence
  Description of Artificial Sequence: Synthetic oligonucleotide
  Sense strand starting at position 252 of SEQ ID NO: 1241955
agagauaguuacuuaaggu

SEQ ID NO: 1312419 - RNA, 19 nt, Artificial Sequence
  Description of Artificial Sequence: Synthetic oligonucleotide
  Antisense strand to SEQ ID NO: 1312418
accuuaaguaacuaucucu

SEQ ID NO: 1312420 - RNA, 19 nt, Artificial Sequence
  Description of Artificial Sequence: Synthetic oligonucleotide
  Sense strand starting at position 653 of SEQ ID NO: 1241955
uaaguauaccuguaguguu

SEQ ID NO: 1312421 - RNA, 19 nt, Artificial Sequence
  Description of Artificial Sequence: Synthetic oligonucleotide
  Antisense strand to SEQ ID NO: 1312420
aacacuacagguauacuua

SEQ ID NO: 1312422 - RNA, 19 nt, Artificial Sequence
  Description of Artificial Sequence: Synthetic oligonucleotide
  Sense strand starting at position 696 of SEQ ID NO: 1241955
cuccaagacuuguauuuag

SEQ ID NO: 1312423 - RNA, 19 nt, Artificial Sequence
  Description of Artificial Sequence: Synthetic oligonucleotide
  Antisense strand to SEQ ID NO: 1312422
cuaaauacaagucuuggag

SEQ ID NO: 1312424 - RNA, 19 nt, Artificial Sequence
  Description of Artificial Sequence: Synthetic oligonucleotide
  Sense strand starting at position 914 of SEQ ID NO: 1241955
agauucuauagcugggagu

SEQ ID NO: 1312425 - RNA, 19 nt, Artificial Sequence
  Description of Artificial Sequence: Synthetic oligonucleotide
  Antisense strand to SEQ ID NO: 1312424
acucccagcuauagaaucu

SEQ ID NO: 1312426 - RNA, 19 nt, Artificial Sequence
  Description of Artificial Sequence: Synthetic oligonucleotide
  Sense strand starting at position 915 of SEQ ID NO: 1241955
gauucuauagcugggaguu

SEQ ID NO: 1312427 - RNA, 19 nt, Artificial Sequence
  Description of Artificial Sequence: Synthetic oligonucleotide
  Antisense strand to SEQ ID NO: 1312426
aacucccagcuauagaauc

SEQ ID NO: 1312428 - RNA, 19 nt, Artificial Sequence
  Description of Artificial Sequence: Synthetic oligonucleotide
  Sense strand starting at position 916 of SEQ ID NO: 1241955
auucuauagcugggaguua

SEQ ID NO: 1312429 - RNA, 19 nt, Artificial Sequence
  Description of Artificial Sequence: Synthetic oligonucleotide
  Antisense strand to SEQ ID NO: 1312428
uaacucccagcuauagaau

SEQ ID NO: 1312430 - RNA, 19 nt, Artificial Sequence
  Description of Artificial Sequence: Synthetic oligonucleotide
  Sense strand starting at position 977 of SEQ ID NO: 1241955
cucugaacccuauguuaag

SEQ ID NO: 1312431 - RNA, 19 nt, Artificial Sequence
  Description of Artificial Sequence: Synthetic oligonucleotide
  Antisense strand to SEQ ID NO: 1312430
cuuaacauaggguucagag

SEQ ID NO: 1312432 - RNA, 19 nt, Artificial Sequence
  Description of Artificial Sequence: Synthetic oligonucleotide
  Sense strand starting at position 978 of SEQ ID NO: 1241955
ucugaacccuauguuaagu

SEQ ID NO: 1312433 - RNA, 19 nt, Artificial Sequence
  Description of Artificial Sequence: Synthetic oligonucleotide
  Antisense strand to SEQ ID NO: 1312432
acuuaacauaggguucaga

SEQ ID NO: 1312434 - RNA, 19 nt, Artificial Sequence
  Description of Artificial Sequence: Synthetic oligonucleotide
  Sense strand starting at position 983 of SEQ ID NO: 1241955
acccuauguuaagucaauu

SEQ ID NO: 1312435 - RNA, 19 nt, Artificial Sequence
  Description of Artificial Sequence: Synthetic oligonucleotide
  Antisense strand to SEQ ID NO: 1312434
aauugacuuaacauagggu

SEQ ID NO: 1312436 - RNA, 19 nt, Artificial Sequence
  Description of Artificial Sequence: Synthetic oligonucleotide
  Sense strand starting at position 1111 of SEQ ID NO: 1241955
gaguaauucuggucaucca

SEQ ID NO: 1312437 - RNA, 19 nt, Artificial Sequence
  Description of Artificial Sequence: Synthetic oligonucleotide
  Antisense strand to SEQ ID NO: 1312436
uggaugaccagaauuacuc

SEQ ID NO: 1312438 - RNA, 19 nt, Artificial Sequence
  Description of Artificial Sequence: Synthetic oligonucleotide
  Sense strand starting at position 1119 of SEQ ID NO: 1241955
cuggucauccaguaaucaa

SEQ ID NO: 1312439 - RNA, 19 nt, Artificial Sequence
  Description of Artificial Sequence: Synthetic oligonucleotide
  Antisense strand to SEQ ID NO: 1312438
uugauuacuggaugaccag

SEQ ID NO: 1312440 - RNA, 19 nt, Artificial Sequence
  Description of Artificial Sequence: Synthetic oligonucleotide
  Sense strand starting at position 1291 of SEQ ID NO: 1241955
cagggaauuuaucagggua

SEQ ID NO: 1312441 - RNA, 19 nt, Artificial Sequence
  Description of Artificial Sequence: Synthetic oligonucleotide
  Antisense strand to SEQ ID NO: 1312440
uacccugauaaauucccug

SEQ ID NO: 1312442 - RNA, 19 nt, Artificial Sequence
  Description of Artificial Sequence: Synthetic oligonucleotide
  Sense strand starting at position 1293 of SEQ ID NO: 1241955
gggaauuuaucaggguaag

SEQ ID NO: 1312443 - RNA, 19 nt, Artificial Sequence
  Description of Artificial Sequence: Synthetic oligonucleotide
  Antisense strand to SEQ ID NO: 1312442
cuuacccugauaaauuccc

SEQ ID NO: 1312444 - RNA, 19 nt, Artificial Sequence
  Description of Artificial Sequence: Synthetic oligonucleotide
  Sense strand starting at position 1532 of SEQ ID NO: 1241955
cugcucugggcugaggaau

SEQ ID NO: 1312445 - RNA, 19 nt, Artificial Sequence
  Description of Artificial Sequence: Synthetic oligonucleotide
  Antisense strand to SEQ ID NO: 1312444
auuccucagcccagagcag

SEQ ID NO: 1312446 - RNA, 19 nt, Artificial Sequence
  Description of Artificial Sequence: Synthetic oligonucleotide
  Sense strand starting at position 1610 of SEQ ID NO: 1241955
aggcacaagucauuugcau

SEQ ID NO: 1312447 - RNA, 19 nt, Artificial Sequence
  Description of Artificial Sequence: Synthetic oligonucleotide
  Antisense strand to SEQ ID NO: 1312446
augcaaaugacuugugccu

SEQ ID NO: 1312448 - RNA, 19 nt, Artificial Sequence
  Description of Artificial Sequence: Synthetic oligonucleotide
  Sense strand starting at position 1644 of SEQ ID NO: 1241955
aagauucuugcgcagaggu

SEQ ID NO: 1312449 - RNA, 19 nt, Artificial Sequence
  Description of Artificial Sequence: Synthetic oligonucleotide
  Antisense strand to SEQ ID NO: 1312448
accucugcgcaagaaucuu

SEQ ID NO: 1312450 - RNA, 19 nt, Artificial Sequence
  Description of Artificial Sequence: Synthetic oligonucleotide
  Sense strand starting at position 2020 of SEQ ID NO: 1241955
ggcaucaucccucacagaa

SEQ ID NO: 1312451 - RNA, 19 nt, Artificial Sequence
  Description of Artificial Sequence: Synthetic oligonucleotide
  Antisense strand to SEQ ID NO: 1312450
uucugugagggaugaugcc

SEQ ID NO: 1312452 - RNA, 19 nt, Artificial Sequence
  Description of Artificial Sequence: Synthetic oligonucleotide
  Sense strand starting at position 2444 of SEQ ID NO: 1241955
aguguuuaccacugaggaa

SEQ ID NO: 1312453 - RNA, 19 nt, Artificial Sequence
  Description of Artificial Sequence: Synthetic oligonucleotide
  Antisense strand to SEQ ID NO: 1312452
uuccucagugguaaacacu

SEQ ID NO: 1312454 - RNA, 19 nt, Artificial Sequence
  Description of Artificial Sequence: Synthetic oligonucleotide
  Sense strand starting at position 2445 of SEQ ID NO: 1241955
guguuuaccacugaggaac

SEQ ID NO: 1312455 - RNA, 19 nt, Artificial Sequence
  Description of Artificial Sequence: Synthetic oligonucleotide
  Antisense strand to SEQ ID NO: 1312454
guuccucagugguaaacac

SEQ ID NO: 1312456 - RNA, 19 nt, Artificial Sequence
  Description of Artificial Sequence: Synthetic oligonucleotide
  Sense strand starting at position 2650 of SEQ ID NO: 1241955
cugcccugacuaggauaau

SEQ ID NO: 1312457 - RNA, 19 nt, Artificial Sequence
  Description of Artificial Sequence: Synthetic oligonucleotide
  Antisense strand to SEQ ID NO: 1312456
auuauccuagucagggcag

SEQ ID NO: 1312458 - RNA, 19 nt, Artificial Sequence
  Description of Artificial Sequence: Synthetic oligonucleotide
  Sense strand starting at position 2662 of SEQ ID NO: 1241955
ggauaaucccugugcccag

SEQ ID NO: 1312459 - RNA, 19 nt, Artificial Sequence
  Description of Artificial Sequence: Synthetic oligonucleotide
  Antisense strand to SEQ ID NO: 1312458
cugggcacagggauuaucc

SEQ ID NO: 1312460 - RNA, 19 nt, Artificial Sequence
  Description of Artificial Sequence: Synthetic oligonucleotide
  Sense strand starting at position 2807 of SEQ ID NO: 1241955
gagaaacagucucugaagu

SEQ ID NO: 1312461 - RNA, 19 nt, Artificial Sequence
  Description of Artificial Sequence: Synthetic oligonucleotide
  Antisense strand to SEQ ID NO: 1312460
acuucagagacuguuucuc

SEQ ID NO: 1312462 - RNA, 19 nt, Artificial Sequence
  Description of Artificial Sequence: Synthetic oligonucleotide
  Sense strand starting at position 2808 of SEQ ID NO: 1241955
agaaacagucucugaagua

SEQ ID NO: 1312463 - RNA, 19 nt, Artificial Sequence
  Description of Artificial Sequence: Synthetic oligonucleotide
  Antisense strand to SEQ ID NO: 1312462
uacuucagagacuguuucu

SEQ ID NO: 1312464 - RNA, 19 nt, Artificial Sequence
  Description of Artificial Sequence: Synthetic oligonucleotide
  Sense strand starting at position 2907 of SEQ ID NO: 1241955
gagcccugagcaugauaca

SEQ ID NO: 1312465 - RNA, 19 nt, Artificial Sequence
  Description of Artificial Sequence: Synthetic oligonucleotide
  Antisense strand to SEQ ID NO: 1312464
uguaucaugcucagggcuc

SEQ ID NO: 1312466 - RNA, 19 nt, Artificial Sequence
  Description of Artificial Sequence: Synthetic oligonucleotide
  Sense strand starting at position 2983 of SEQ ID NO: 1241955
gcacaagaccaaugcuuau

SEQ ID NO: 1312467 - RNA, 19 nt, Artificial Sequence
  Description of Artificial Sequence: Synthetic oligonucleotide
  Antisense strand to SEQ ID NO: 1312466
auaagcauuggucuugugc

SEQ ID NO: 1312468 - RNA, 19 nt, Artificial Sequence
  Description of Artificial Sequence: Synthetic oligonucleotide
  Sense strand starting at position 3124 of SEQ ID NO: 1241955
cugggcuucuuccucauaa

SEQ ID NO: 1312469 - RNA, 19 nt, Artificial Sequence
  Description of Artificial Sequence: Synthetic oligonucleotide
  Antisense strand to SEQ ID NO: 1312468
uuaugaggaagaagcccag

SEQ ID NO: 1312470 - RNA, 19 nt, Artificial Sequence
  Description of Artificial Sequence: Synthetic oligonucleotide
  Sense strand starting at position 3125 of SEQ ID NO: 1241955
ugggcuucuuccucauaaa

SEQ ID NO: 1312471 - RNA, 19 nt, Artificial Sequence
  Description of Artificial Sequence: Synthetic oligonucleotide
  Antisense strand to SEQ ID NO: 1312470
uuuaugaggaagaagccca

SEQ ID NO: 1312472 - RNA, 19 nt, Artificial Sequence
  Description of Artificial Sequence: Synthetic oligonucleotide
  Sense strand starting at position 3126 of SEQ ID NO: 1241955
gggcuucuuccucauaaag

SEQ ID NO: 1312473 - RNA, 19 nt, Artificial Sequence
  Description of Artificial Sequence: Synthetic oligonucleotide
  Antisense strand to SEQ ID NO: 1312472
cuuuaugaggaagaagccc

SEQ ID NO: 1312474 - RNA, 19 nt, Artificial Sequence
  Description of Artificial Sequence: Synthetic oligonucleotide
  Sense strand starting at position 3284 of SEQ ID NO: 1241955
auggcagggucgagagaau

SEQ ID NO: 1312475 - RNA, 19 nt, Artificial Sequence
  Description of Artificial Sequence: Synthetic oligonucleotide
  Antisense strand to SEQ ID NO: 1312474
auucucucgacccugccau

SEQ ID NO: 1312476 - RNA, 19 nt, Artificial Sequence
  Description of Artificial Sequence: Synthetic oligonucleotide
  Sense strand starting at position 3394 of SEQ ID NO: 1241955
gucuccuuccuuuggagau

SEQ ID NO: 1312477 - RNA, 19 nt, Artificial Sequence
  Description of Artificial Sequence: Synthetic oligonucleotide
  Antisense strand to SEQ ID NO: 1312476
aucuccaaaggaaggagac

SEQ ID NO: 1312478 - RNA, 19 nt, Artificial Sequence
  Description of Artificial Sequence: Synthetic oligonucleotide
  Sense strand starting at position 3396 of SEQ ID NO: 1241955
cuccuuccuuuggagauuu

SEQ ID NO: 1312479 - RNA, 19 nt, Artificial Sequence
  Description of Artificial Sequence: Synthetic oligonucleotide
  Antisense strand to SEQ ID NO: 1312478
aaaucuccaaaggaaggag

SEQ ID NO: 1312480 - RNA, 19 nt, Artificial Sequence
  Description of Artificial Sequence: Synthetic oligonucleotide
  Sense strand starting at position 3461 of SEQ ID NO: 1241955
uccuccuggcuguagauau

SEQ ID NO: 1312481 - RNA, 19 nt, Artificial Sequence
  Description of Artificial Sequence: Synthetic oligonucleotide
  Antisense strand to SEQ ID NO: 1312480
auaucuacagccaggagga

SEQ ID NO: 1312482 - RNA, 19 nt, Artificial Sequence
  Description of Artificial Sequence: Synthetic oligonucleotide
  Sense strand starting at position 3492 of SEQ ID NO: 1241955
cuaucuguguuugucaaag

SEQ ID NO: 1312483 - RNA, 19 nt, Artificial Sequence
  Description of Artificial Sequence: Synthetic oligonucleotide
  Antisense strand to SEQ ID NO: 1312482
cuuugacaaacacagauag

SEQ ID NO: 1312484 - RNA, 19 nt, Artificial Sequence
  Description of Artificial Sequence: Synthetic oligonucleotide
  Sense strand starting at position 3746 of SEQ ID NO: 1241955
gagggcaucuaugucuaga

SEQ ID NO: 1312485 - RNA, 19 nt, Artificial Sequence
  Description of Artificial Sequence: Synthetic oligonucleotide
  Antisense strand to SEQ ID NO: 1312484
ucuagacauagaugcccuc

SEQ ID NO: 1312486 - RNA, 19 nt, Artificial Sequence
  Description of Artificial Sequence: Synthetic oligonucleotide
  Sense strand starting at position 3748 of SEQ ID NO: 1241955
gggcaucuaugucuagaag

SEQ ID NO: 1312487 - RNA, 19 nt, Artificial Sequence
  Description of Artificial Sequence: Synthetic oligonucleotide
  Antisense strand to SEQ ID NO: 1312486
cuucuagacauagaugccc

SEQ ID NO: 1312488 - RNA, 19 nt, Artificial Sequence
  Description of Artificial Sequence: Synthetic oligonucleotide
  Sense strand starting at position 3794 of SEQ ID NO: 1241955
ggugacugugcauaugauu

SEQ ID NO: 1312489 - RNA, 19 nt, Artificial Sequence
  Description of Artificial Sequence: Synthetic oligonucleotide
  Antisense strand to SEQ ID NO: 1312488
aaucauaugcacagucacc

SEQ ID NO: 1312490 - RNA, 19 nt, Artificial Sequence
  Description of Artificial Sequence: Synthetic oligonucleotide
  Sense strand starting at position 3892 of SEQ ID NO: 1241955
ucaccaggagcuuguuaua

SEQ ID NO: 1312491 - RNA, 19 nt, Artificial Sequence
  Description of Artificial Sequence: Synthetic oligonucleotide
  Antisense strand to SEQ ID NO: 1312490
uauaacaagcuccugguga

SEQ ID NO: 1312492 - RNA, 19 nt, Artificial Sequence
  Description of Artificial Sequence: Synthetic oligonucleotide
  Sense strand starting at position 316 of SEQ ID NO: 1241956
agcaacgugcucugggaau

SEQ ID NO: 1312493 - RNA, 19 nt, Artificial Sequence
  Description of Artificial Sequence: Synthetic oligonucleotide
  Antisense strand to SEQ ID NO: 1312492
auucccagagcacguugcu

SEQ ID NO: 1312494 - RNA, 19 nt, Artificial Sequence
  Description of Artificial Sequence: Synthetic oligonucleotide
  Sense strand starting at position 491 of SEQ ID NO: 1241956
acuugagguuuccaagguu

SEQ ID NO: 1312495 - RNA, 19 nt, Artificial Sequence
  Description of Artificial Sequence: Synthetic oligonucleotide
  Antisense strand to SEQ ID NO: 1312494
aaccuuggaaaccucaagu

SEQ ID NO: 1312496 - RNA, 19 nt, Artificial Sequence
  Description of Artificial Sequence: Synthetic oligonucleotide
  Sense strand starting at position 504 of SEQ ID NO: 1241956
aagguuggguccuguuuga

SEQ ID NO: 1312497 - RNA, 19 nt, Artificial Sequence
  Description of Artificial Sequence: Synthetic oligonucleotide
  Antisense strand to SEQ ID NO: 1312496
ucaaacaggacccaaccuu

SEQ ID NO: 1312498 - RNA, 19 nt, Artificial Sequence
  Description of Artificial Sequence: Synthetic oligonucleotide
  Sense strand starting at position 508 of SEQ ID NO: 1241956
uuggguccuguuugaauuu

SEQ ID NO: 1312499 - RNA, 19 nt, Artificial Sequence
  Description of Artificial Sequence: Synthetic oligonucleotide
  Antisense strand to SEQ ID NO: 1312498
aaauucaaacaggacccaa

SEQ ID NO: 1312500 - RNA, 19 nt, Artificial Sequence
  Description of Artificial Sequence: Synthetic oligonucleotide
  Sense strand starting at position 509 of SEQ ID NO: 1241956
uggguccuguuugaauuua

SEQ ID NO: 1312501 - RNA, 19 nt, Artificial Sequence
  Description of Artificial Sequence: Synthetic oligonucleotide
  Antisense strand to SEQ ID NO: 1312500
uaaauucaaacaggaccca

SEQ ID NO: 1312502 - RNA, 19 nt, Artificial Sequence
  Description of Artificial Sequence: Synthetic oligonucleotide
  Sense strand starting at position 544 of SEQ ID NO: 1241956
cagcaugugucccuagacu

SEQ ID NO: 1312503 - RNA, 19 nt, Artificial Sequence
  Description of Artificial Sequence: Synthetic oligonucleotide
  Antisense strand to SEQ ID NO: 1312502
agucuagggacacaugcug

SEQ ID NO: 1312504 - RNA, 19 nt, Artificial Sequence
  Description of Artificial Sequence: Synthetic oligonucleotide
  Sense strand starting at position 587 of SEQ ID NO: 1241956
gcaaacuguccuuagcaga

SEQ ID NO: 1312505 - RNA, 19 nt, Artificial Sequence
  Description of Artificial Sequence: Synthetic oligonucleotide
  Antisense strand to SEQ ID NO: 1312504
ucugcuaaggacaguuugc

SEQ ID NO: 1312506 - RNA, 19 nt, Artificial Sequence
  Description of Artificial Sequence: Synthetic oligonucleotide
  Sense strand starting at position 669 of SEQ ID NO: 1241956
accugugccuuccagaaua

SEQ ID NO: 1312507 - RNA, 19 nt, Artificial Sequence
  Description of Artificial Sequence: Synthetic oligonucleotide
  Antisense strand to SEQ ID NO: 1312506
uauucuggaaggcacaggu

SEQ ID NO: 1312508 - RNA, 19 nt, Artificial Sequence
  Description of Artificial Sequence: Synthetic oligonucleotide
  Sense strand starting at position 809 of SEQ ID NO: 1241956
agagaaaugcggcgucagu

SEQ ID NO: 1312509 - RNA, 19 nt, Artificial Sequence
  Description of Artificial Sequence: Synthetic oligonucleotide
  Antisense strand to SEQ ID NO: 1312508
acugacgccgcauuucucu

SEQ ID NO: 1312510 - RNA, 19 nt, Artificial Sequence
  Description of Artificial Sequence: Synthetic oligonucleotide
  Sense strand starting at position 917 of SEQ ID NO: 1241956
gcgaauucggcucccgacu

SEQ ID NO: 1312511 - RNA, 19 nt, Artificial Sequence
  Description of Artificial Sequence: Synthetic oligonucleotide
  Antisense strand to SEQ ID NO: 1312510
agucgggagccgaauucgc

SEQ ID NO: 1312512 - RNA, 19 nt, Artificial Sequence
  Description of Artificial Sequence: Synthetic oligonucleotide
  Sense strand starting at position 1104 of SEQ ID NO: 1241956
cuggguccucuaggaauga

SEQ ID NO: 1312513 - RNA, 19 nt, Artificial Sequence
  Description of Artificial Sequence: Synthetic oligonucleotide
  Antisense strand to SEQ ID NO: 1312512
ucauuccuagaggacccag

SEQ ID NO: 1312514 - RNA, 19 nt, Artificial Sequence
  Description of Artificial Sequence: Synthetic oligonucleotide
  Sense strand starting at position 1660 of SEQ ID NO: 1241956
acgugaccugcccaggauu

SEQ ID NO: 1312515 - RNA, 19 nt, Artificial Sequence
  Description of Artificial Sequence: Synthetic oligonucleotide
  Antisense strand to SEQ ID NO: 1312514
aauccugggcaggucacgu

SEQ ID NO: 1312516 - RNA, 19 nt, Artificial Sequence
  Description of Artificial Sequence: Synthetic oligonucleotide
  Sense strand starting at position 1696 of SEQ ID NO: 1241956
gcuugagcccuccaccuua

SEQ ID NO: 1312517 - RNA, 19 nt, Artificial Sequence
  Description of Artificial Sequence: Synthetic oligonucleotide
  Antisense strand to SEQ ID NO: 1312516
uaagguggagggcucaagc

SEQ ID NO: 1312518 - RNA, 19 nt, Artificial Sequence
  Description of Artificial Sequence: Synthetic oligonucleotide
  Sense strand starting at position 1921 of SEQ ID NO: 1241956
ccuuuauguccggucagcu

SEQ ID NO: 1312519 - RNA, 19 nt, Artificial Sequence
  Description of Artificial Sequence: Synthetic oligonucleotide
  Antisense strand to SEQ ID NO: 1312518
agcugaccggacauaaagg

SEQ ID NO: 1312520 - RNA, 19 nt, Artificial Sequence
  Description of Artificial Sequence: Synthetic oligonucleotide
  Sense strand starting at position 3217 of SEQ ID NO: 1241956
cuuuauucugcagacagca

SEQ ID NO: 1312521 - RNA, 19 nt, Artificial Sequence
  Description of Artificial Sequence: Synthetic oligonucleotide
  Antisense strand to SEQ ID NO: 1312520
ugcugucugcagaauaaag

SEQ ID NO: 1312522 - RNA, 19 nt, Artificial Sequence
  Description of Artificial Sequence: Synthetic oligonucleotide
  Sense strand starting at position 3267 of SEQ ID NO: 1241956
ggcaguugucgggucuguu

SEQ ID NO: 1312523 - RNA, 19 nt, Artificial Sequence
  Description of Artificial Sequence: Synthetic oligonucleotide
  Antisense strand to SEQ ID NO: 1312522
aacagacccgacaacugcc

SEQ ID NO: 1312524 - RNA, 19 nt, Artificial Sequence
  Description of Artificial Sequence: Synthetic oligonucleotide
  Sense strand starting at position 3268 of SEQ ID NO: 1241956
gcaguugucgggucuguuu

SEQ ID NO: 1312525 - RNA, 19 nt, Artificial Sequence
  Description of Artificial Sequence: Synthetic oligonucleotide
  Antisense strand to SEQ ID NO: 1312524
aaacagacccgacaacugc

SEQ ID NO: 1312526 - RNA, 19 nt, Artificial Sequence
  Description of Artificial Sequence: Synthetic oligonucleotide
  Sense strand starting at position 3363 of SEQ ID NO: 1241956
accagaguuuauugaacau

SEQ ID NO: 1312527 - RNA, 19 nt, Artificial Sequence
  Description of Artificial Sequence: Synthetic oligonucleotide
  Antisense strand to SEQ ID NO: 1312526
auguucaauaaacucuggu

SEQ ID NO: 1312528 - RNA, 19 nt, Artificial Sequence
  Description of Artificial Sequence: Synthetic oligonucleotide
  Sense strand starting at position 3393 of SEQ ID NO: 1241956
uuacaugugucauguuauc

SEQ ID NO: 1312529 - RNA, 19 nt, Artificial Sequence
  Description of Artificial Sequence: Synthetic oligonucleotide
  Antisense strand to SEQ ID NO: 1312528
gauaacaugacacauguaa

SEQ ID NO: 1312530 - RNA, 19 nt, Artificial Sequence
  Description of Artificial Sequence: Synthetic oligonucleotide
  Sense strand starting at position 3398 of SEQ ID NO: 1241956
ugugucauguuaucaugau

SEQ ID NO: 1312531 - RNA, 19 nt, Artificial Sequence
  Description of Artificial Sequence: Synthetic oligonucleotide
  Antisense strand to SEQ ID NO: 1312530
aucaugauaacaugacaca

SEQ ID NO: 1312532 - RNA, 19 nt, Artificial Sequence
  Description of Artificial Sequence: Synthetic oligonucleotide
  Sense strand starting at position 3399 of SEQ ID NO: 1241956
gugucauguuaucaugaua

SEQ ID NO: 1312533 - RNA, 19 nt, Artificial Sequence
  Description of Artificial Sequence: Synthetic oligonucleotide
  Antisense strand to SEQ ID NO: 1312532
uaucaugauaacaugacac

SEQ ID NO: 1312534 - RNA, 19 nt, Artificial Sequence
  Description of Artificial Sequence: Synthetic oligonucleotide
  Sense strand starting at position 3483 of SEQ ID NO: 1241956
cuuccugggcuugaucuaa

SEQ ID NO: 1312535 - RNA, 19 nt, Artificial Sequence
  Description of Artificial Sequence: Synthetic oligonucleotide
  Antisense strand to SEQ ID NO: 1312534
uuagaucaagcccaggaag

SEQ ID NO: 1312536 - RNA, 19 nt, Artificial Sequence
  Description of Artificial Sequence: Synthetic oligonucleotide
  Sense strand starting at position 3529 of SEQ ID NO: 1241956
gucaguuucugccugaggu

SEQ ID NO: 1312537 - RNA, 19 nt, Artificial Sequence
  Description of Artificial Sequence: Synthetic oligonucleotide
  Antisense strand to SEQ ID NO: 1312536
accucaggcagaaacugac

SEQ ID NO: 1312538 - RNA, 19 nt, Artificial Sequence
  Description of Artificial Sequence: Synthetic oligonucleotide
  Sense strand starting at position 3531 of SEQ ID NO: 1241956
caguuucugccugagguga

SEQ ID NO: 1312539 - RNA, 19 nt, Artificial Sequence
  Description of Artificial Sequence: Synthetic oligonucleotide
  Antisense strand to SEQ ID NO: 1312538
ucaccucaggcagaaacug

SEQ ID NO: 1312540 - RNA, 19 nt, Artificial Sequence
  Description of Artificial Sequence: Synthetic oligonucleotide
  Sense strand starting at position 3539 of SEQ ID NO: 1241956
gccugaggugauggagaaa

SEQ ID NO: 1312541 - RNA, 19 nt, Artificial Sequence
  Description of Artificial Sequence: Synthetic oligonucleotide
  Antisense strand to SEQ ID NO: 1312540
uuucuccaucaccucaggc

SEQ ID NO: 1312542 - RNA, 19 nt, Artificial Sequence
  Description of Artificial Sequence: Synthetic oligonucleotide
  Sense strand starting at position 3557 of SEQ ID NO: 1241956
agaggaagcugauauuaua

SEQ ID NO: 1312543 - RNA, 19 nt, Artificial Sequence
  Description of Artificial Sequence: Synthetic oligonucleotide
  Antisense strand to SEQ ID NO: 1312542
uauaauaucagcuuccucu

SEQ ID NO: 1312544 - RNA, 19 nt, Artificial Sequence
  Description of Artificial Sequence: Synthetic oligonucleotide
  Sense strand starting at position 3565 of SEQ ID NO: 1241956
cugauauuauagucuagug

SEQ ID NO: 1312545 - RNA, 19 nt, Artificial Sequence
  Description of Artificial Sequence: Synthetic oligonucleotide
  Antisense strand to SEQ ID NO: 1312544
cacuagacuauaauaucag

SEQ ID NO: 1312546 - RNA, 19 nt, Artificial Sequence
  Description of Artificial Sequence: Synthetic oligonucleotide
  Sense strand starting at position 3567 of SEQ ID NO: 1241956
gauauuauagucuaguguu

SEQ ID NO: 1312547 - RNA, 19 nt, Artificial Sequence
  Description of Artificial Sequence: Synthetic oligonucleotide
  Antisense strand to SEQ ID NO: 1312546
aacacuagacuauaauauc

SEQ ID NO: 1312548 - RNA, 19 nt, Artificial Sequence
  Description of Artificial Sequence: Synthetic oligonucleotide
  Sense strand starting at position 3607 of SEQ ID NO: 1241956
ggguggugagcauaagagu

SEQ ID NO: 1312549 - RNA, 19 nt, Artificial Sequence
  Description of Artificial Sequence: Synthetic oligonucleotide
  Antisense strand to SEQ ID NO: 1312548
acucuuaugcucaccaccc

SEQ ID NO: 1312550 - RNA, 19 nt, Artificial Sequence
  Description of Artificial Sequence: Synthetic oligonucleotide
  Sense strand starting at position 3680 of SEQ ID NO: 1241956
ggucuacuuacaggagcuu

SEQ ID NO: 1312551 - RNA, 19 nt, Artificial Sequence
  Description of Artificial Sequence: Synthetic oligonucleotide
  Antisense strand to SEQ ID NO: 1312550
aagcuccuguaaguagacc

SEQ ID NO: 1312552 - RNA, 19 nt, Artificial Sequence
  Description of Artificial Sequence: Synthetic oligonucleotide
  Sense strand starting at position 3786 of SEQ ID NO: 1241956
ccaugcuuucuccaggagu

SEQ ID NO: 1312553 - RNA, 19 nt, Artificial Sequence
  Description of Artificial Sequence: Synthetic oligonucleotide
  Antisense strand to SEQ ID NO: 1312552
acuccuggagaaagcaugg

SEQ ID NO: 1312554 - RNA, 19 nt, Artificial Sequence
  Description of Artificial Sequence: Synthetic oligonucleotide
  Sense strand starting at position 3788 of SEQ ID NO: 1241956
augcuuucuccaggaguag

SEQ ID NO: 1312555 - RNA, 19 nt, Artificial Sequence
  Description of Artificial Sequence: Synthetic oligonucleotide
  Antisense strand to SEQ ID NO: 1312554
cuacuccuggagaaagcau

SEQ ID NO: 1312556 - RNA, 19 nt, Artificial Sequence
  Description of Artificial Sequence: Synthetic oligonucleotide
  Sense strand starting at position 3797 of SEQ ID NO: 1241956
ccaggaguagccuacuuga

SEQ ID NO: 1312557 - RNA, 19 nt, Artificial Sequence
  Description of Artificial Sequence: Synthetic oligonucleotide
  Antisense strand to SEQ ID NO: 1312556
ucaaguaggcuacuccugg

SEQ ID NO: 1312558 - RNA, 19 nt, Artificial Sequence
  Description of Artificial Sequence: Synthetic oligonucleotide
  Sense strand starting at position 80 of SEQ ID NO: 1241957
acuugagguuuccaagguu

SEQ ID NO: 1312559 - RNA, 19 nt, Artificial Sequence
  Description of Artificial Sequence: Synthetic oligonucleotide
  Antisense strand to SEQ ID NO: 1312558
aaccuuggaaaccucaagu

SEQ ID NO: 1312560 - RNA, 19 nt, Artificial Sequence
  Description of Artificial Sequence: Synthetic oligonucleotide
  Sense strand starting at position 93 of SEQ ID NO: 1241957
aagguuggguccuguuuga

SEQ ID NO: 1312561 - RNA, 19 nt, Artificial Sequence
  Description of Artificial Sequence: Synthetic oligonucleotide
  Antisense strand to SEQ ID NO: 1312560
ucaaacaggacccaaccuu

SEQ ID NO: 1312562 - RNA, 19 nt, Artificial Sequence
  Description of Artificial Sequence: Synthetic oligonucleotide
  Sense strand starting at position 97 of SEQ ID NO: 1241957
uuggguccuguuugaauuu

SEQ ID NO: 1312563 - RNA, 19 nt, Artificial Sequence
  Description of Artificial Sequence: Synthetic oligonucleotide
  Antisense strand to SEQ ID NO: 1312562
aaauucaaacaggacccaa

SEQ ID NO: 1312564 - RNA, 19 nt, Artificial Sequence
  Description of Artificial Sequence: Synthetic oligonucleotide
  Sense strand starting at position 98 of SEQ ID NO: 1241957
uggguccuguuugaauuua

SEQ ID NO: 1312565 - RNA, 19 nt, Artificial Sequence
  Description of Artificial Sequence: Synthetic oligonucleotide
  Antisense strand to SEQ ID NO: 1312564
uaaauucaaacaggaccca

SEQ ID NO: 1312566 - RNA, 19 nt, Artificial Sequence
  Description of Artificial Sequence: Synthetic oligonucleotide
  Sense strand starting at position 133 of SEQ ID NO: 1241957
cagcaugugucccuagacu

SEQ ID NO: 1312567 - RNA, 19 nt, Artificial Sequence
  Description of Artificial Sequence: Synthetic oligonucleotide
  Antisense strand to SEQ ID NO: 1312566
agucuagggacacaugcug

SEQ ID NO: 1312568 - RNA, 19 nt, Artificial Sequence
  Description of Artificial Sequence: Synthetic oligonucleotide
  Sense strand starting at position 176 of SEQ ID NO: 1241957
gcaaacuguccuuagcaga

SEQ ID NO: 1312569 - RNA, 19 nt, Artificial Sequence
  Description of Artificial Sequence: Synthetic oligonucleotide
  Antisense strand to SEQ ID NO: 1312568
ucugcuaaggacaguuugc

SEQ ID NO: 1312570 - RNA, 19 nt, Artificial Sequence
  Description of Artificial Sequence: Synthetic oligonucleotide
  Sense strand starting at position 258 of SEQ ID NO: 1241957
accugugccuuccagaaua

SEQ ID NO: 1312571 - RNA, 19 nt, Artificial Sequence
  Description of Artificial Sequence: Synthetic oligonucleotide
  Antisense strand to SEQ ID NO: 1312570
uauucuggaaggcacaggu

SEQ ID NO: 1312572 - RNA, 19 nt, Artificial Sequence
  Description of Artificial Sequence: Synthetic oligonucleotide
  Sense strand starting at position 398 of SEQ ID NO: 1241957
agagaaaugcggcgucagu

SEQ ID NO: 1312573 - RNA, 19 nt, Artificial Sequence
  Description of Artificial Sequence: Synthetic oligonucleotide
  Antisense strand to SEQ ID NO: 1312572
acugacgccgcauuucucu

SEQ ID NO: 1312574 - RNA, 19 nt, Artificial Sequence
  Description of Artificial Sequence: Synthetic oligonucleotide
  Sense strand starting at position 506 of SEQ ID NO: 1241957
gcgaauucggcucccgacu

SEQ ID NO: 1312575 - RNA, 19 nt, Artificial Sequence
  Description of Artificial Sequence: Synthetic oligonucleotide
  Antisense strand to SEQ ID NO: 1312574
agucgggagccgaauucgc

SEQ ID NO: 1312576 - RNA, 19 nt, Artificial Sequence
  Description of Artificial Sequence: Synthetic oligonucleotide
  Sense strand starting at position 693 of SEQ ID NO: 1241957
cuggguccucuaggaauga

SEQ ID NO: 1312577 - RNA, 19 nt, Artificial Sequence
  Description of Artificial Sequence: Synthetic oligonucleotide
  Antisense strand to SEQ ID NO: 1312576
ucauuccuagaggacccag

SEQ ID NO: 1312578 - RNA, 19 nt, Artificial Sequence
  Description of Artificial Sequence: Synthetic oligonucleotide
  Sense strand starting at position 1249 of SEQ ID NO: 1241957
acgugaccugcccaggauu

SEQ ID NO: 1312579 - RNA, 19 nt, Artificial Sequence
  Description of Artificial Sequence: Synthetic oligonucleotide
  Antisense strand to SEQ ID NO: 1312578
aauccugggcaggucacgu

SEQ ID NO: 1312580 - RNA, 19 nt, Artificial Sequence
  Description of Artificial Sequence: Synthetic oligonucleotide
  Sense strand starting at position 1285 of SEQ ID NO: 1241957
gcuugagcccuccaccuua

SEQ ID NO: 1312581 - RNA, 19 nt, Artificial Sequence
  Description of Artificial Sequence: Synthetic oligonucleotide
  Antisense strand to SEQ ID NO: 1312580
uaagguggagggcucaagc

SEQ ID NO: 1312582 - RNA, 19 nt, Artificial Sequence
  Description of Artificial Sequence: Synthetic oligonucleotide
  Sense strand starting at position 1510 of SEQ ID NO: 1241957
ccuuuauguccggucagcu

SEQ ID NO: 1312583 - RNA, 19 nt, Artificial Sequence
  Description of Artificial Sequence: Synthetic oligonucleotide
  Antisense strand to SEQ ID NO: 1312582
agcugaccggacauaaagg

SEQ ID NO: 1312584 - RNA, 19 nt, Artificial Sequence
  Description of Artificial Sequence: Synthetic oligonucleotide
  Sense strand starting at position 2806 of SEQ ID NO: 1241957
cuuuauucugcagacagca

SEQ ID NO: 1312585 - RNA, 19 nt, Artificial Sequence
  Description of Artificial Sequence: Synthetic oligonucleotide
  Antisense strand to SEQ ID NO: 1312584
ugcugucugcagaauaaag

SEQ ID NO: 1312586 - RNA, 19 nt, Artificial Sequence
  Description of Artificial Sequence: Synthetic oligonucleotide
  Sense strand starting at position 2856 of SEQ ID NO: 1241957
ggcaguugucgggucuguu

SEQ ID NO: 1312587 - RNA, 19 nt, Artificial Sequence
  Description of Artificial Sequence: Synthetic oligonucleotide
  Antisense strand to SEQ ID NO: 1312586
aacagacccgacaacugcc

SEQ ID NO: 1312588 - RNA, 19 nt, Artificial Sequence
  Description of Artificial Sequence: Synthetic oligonucleotide
  Sense strand starting at position 2857 of SEQ ID NO: 1241957
gcaguugucgggucuguuu

SEQ ID NO: 1312589 - RNA, 19 nt, Artificial Sequence
  Description of Artificial Sequence: Synthetic oligonucleotide
  Antisense strand to SEQ ID NO: 1312588
aaacagacccgacaacugc

SEQ ID NO: 1312590 - RNA, 19 nt, Artificial Sequence
  Description of Artificial Sequence: Synthetic oligonucleotide
  Sense strand starting at position 2952 of SEQ ID NO: 1241957
accagaguuuauugaacau

SEQ ID NO: 1312591 - RNA, 19 nt, Artificial Sequence
  Description of Artificial Sequence: Synthetic oligonucleotide
  Antisense strand to SEQ ID NO: 1312590
auguucaauaaacucuggu

SEQ ID NO: 1312592 - RNA, 19 nt, Artificial Sequence
  Description of Artificial Sequence: Synthetic oligonucleotide
  Sense strand starting at position 2982 of SEQ ID NO: 1241957
uuacaugugucauguuauc

SEQ ID NO: 1312593 - RNA, 19 nt, Artificial Sequence
  Description of Artificial Sequence: Synthetic oligonucleotide
  Antisense strand to SEQ ID NO: 1312592
gauaacaugacacauguaa

SEQ ID NO: 1312594 - RNA, 19 nt, Artificial Sequence
  Description of Artificial Sequence: Synthetic oligonucleotide
  Sense strand starting at position 2987 of SEQ ID NO: 1241957
ugugucauguuaucaugau

SEQ ID NO: 1312595 - RNA, 19 nt, Artificial Sequence
  Description of Artificial Sequence: Synthetic oligonucleotide
  Antisense strand to SEQ ID NO: 1312594
aucaugauaacaugacaca

SEQ ID NO: 1312596 - RNA, 19 nt, Artificial Sequence
  Description of Artificial Sequence: Synthetic oligonucleotide
  Sense strand starting at position 2988 of SEQ ID NO: 1241957
gugucauguuaucaugaua

SEQ ID NO: 1312597 - RNA, 19 nt, Artificial Sequence
  Description of Artificial Sequence: Synthetic oligonucleotide
  Antisense strand to SEQ ID NO: 1312596
uaucaugauaacaugacac

SEQ ID NO: 1312598 - RNA, 19 nt, Artificial Sequence
  Description of Artificial Sequence: Synthetic oligonucleotide
  Sense strand starting at position 3072 of SEQ ID NO: 1241957
cuuccugggcuugaucuaa

SEQ ID NO: 1312599 - RNA, 19 nt, Artificial Sequence
  Description of Artificial Sequence: Synthetic oligonucleotide
  Antisense strand to SEQ ID NO: 1312598
uuagaucaagcccaggaag

SEQ ID NO: 1312600 - RNA, 19 nt, Artificial Sequence
  Description of Artificial Sequence: Synthetic oligonucleotide
  Sense strand starting at position 3118 of SEQ ID NO: 1241957
gucaguuucugccugaggu

SEQ ID NO: 1312601 - RNA, 19 nt, Artificial Sequence
  Description of Artificial Sequence: Synthetic oligonucleotide
  Antisense strand to SEQ ID NO: 1312600
accucaggcagaaacugac

SEQ ID NO: 1312602 - RNA, 19 nt, Artificial Sequence
  Description of Artificial Sequence: Synthetic oligonucleotide
  Sense strand starting at position 3120 of SEQ ID NO: 1241957
caguuucugccugagguga

SEQ ID NO: 1312603 - RNA, 19 nt, Artificial Sequence
  Description of Artificial Sequence: Synthetic oligonucleotide
  Antisense strand to SEQ ID NO: 1312602
ucaccucaggcagaaacug

SEQ ID NO: 1312604 - RNA, 19 nt, Artificial Sequence
  Description of Artificial Sequence: Synthetic oligonucleotide
  Sense strand starting at position 3128 of SEQ ID NO: 1241957
gccugaggugauggagaaa

SEQ ID NO: 1312605 - RNA, 19 nt, Artificial Sequence
  Description of Artificial Sequence: Synthetic oligonucleotide
  Antisense strand to SEQ ID NO: 1312604
uuucuccaucaccucaggc

SEQ ID NO: 1312606 - RNA, 19 nt, Artificial Sequence
  Description of Artificial Sequence: Synthetic oligonucleotide
  Sense strand starting at position 3146 of SEQ ID NO: 1241957
agaggaagcugauauuaua

SEQ ID NO: 1312607 - RNA, 19 nt, Artificial Sequence
  Description of Artificial Sequence: Synthetic oligonucleotide
  Antisense strand to SEQ ID NO: 1312606
uauaauaucagcuuccucu

SEQ ID NO: 1312608 - RNA, 19 nt, Artificial Sequence
  Description of Artificial Sequence: Synthetic oligonucleotide
  Sense strand starting at position 3154 of SEQ ID NO: 1241957
cugauauuauagucuagug

SEQ ID NO: 1312609 - RNA, 19 nt, Artificial Sequence
  Description of Artificial Sequence: Synthetic oligonucleotide
  Antisense strand to SEQ ID NO: 1312608
cacuagacuauaauaucag

SEQ ID NO: 1312610 - RNA, 19 nt, Artificial Sequence
  Description of Artificial Sequence: Synthetic oligonucleotide
  Sense strand starting at position 3156 of SEQ ID NO: 1241957
gauauuauagucuaguguu

SEQ ID NO: 1312611 - RNA, 19 nt, Artificial Sequence
  Description of Artificial Sequence: Synthetic oligonucleotide
  Antisense strand to SEQ ID NO: 1312610
aacacuagacuauaauauc

SEQ ID NO: 1312612 - RNA, 19 nt, Artificial Sequence
  Description of Artificial Sequence: Synthetic oligonucleotide
  Sense strand starting at position 3196 of SEQ ID NO: 1241957
ggguggugagcauaagagu

SEQ ID NO: 1312613 - RNA, 19 nt, Artificial Sequence
  Description of Artificial Sequence: Synthetic oligonucleotide
  Antisense strand to SEQ ID NO: 1312612
acucuuaugcucaccaccc

SEQ ID NO: 1312614 - RNA, 19 nt, Artificial Sequence
  Description of Artificial Sequence: Synthetic oligonucleotide
  Sense strand starting at position 3269 of SEQ ID NO: 1241957
ggucuacuuacaggagcuu

SEQ ID NO: 1312615 - RNA, 19 nt, Artificial Sequence
  Description of Artificial Sequence: Synthetic oligonucleotide
  Antisense strand to SEQ ID NO: 1312614
aagcuccuguaaguagacc

SEQ ID NO: 1312616 - RNA, 19 nt, Artificial Sequence
  Description of Artificial Sequence: Synthetic oligonucleotide
  Sense strand starting at position 3375 of SEQ ID NO: 1241957
ccaugcuuucuccaggagu

SEQ ID NO: 1312617 - RNA, 19 nt, Artificial Sequence
  Description of Artificial Sequence: Synthetic oligonucleotide
  Antisense strand to SEQ ID NO: 1312616
acuccuggagaaagcaugg

SEQ ID NO: 1312618 - RNA, 19 nt, Artificial Sequence
  Description of Artificial Sequence: Synthetic oligonucleotide
  Sense strand starting at position 3377 of SEQ ID NO: 1241957
augcuuucuccaggaguag

SEQ ID NO: 1312619 - RNA, 19 nt, Artificial Sequence
  Description of Artificial Sequence: Synthetic oligonucleotide
  Antisense strand to SEQ ID NO: 1312618
cuacuccuggagaaagcau

SEQ ID NO: 1312620 - RNA, 19 nt, Artificial Sequence
  Description of Artificial Sequence: Synthetic oligonucleotide
  Sense strand starting at position 3386 of SEQ ID NO: 1241957
ccaggaguagccuacuuga

SEQ ID NO: 1312621 - RNA, 19 nt, Artificial Sequence
  Description of Artificial Sequence: Synthetic oligonucleotide
  Antisense strand to SEQ ID NO: 1312620
ucaaguaggcuacuccugg

SEQ ID NO: 1312622 - RNA, 19 nt, Artificial Sequence
  Description of Artificial Sequence: Synthetic oligonucleotide
  Sense strand starting at position 3708 of SEQ ID NO: 1241957
gccaguuugugaucccuga

SEQ ID NO: 1312623 - RNA, 19 nt, Artificial Sequence
  Description of Artificial Sequence: Synthetic oligonucleotide
  Antisense strand to SEQ ID NO: 1312622
ucagggaucacaaacuggc

SEQ ID NO: 1312624 - RNA, 19 nt, Artificial Sequence
  Description of Artificial Sequence: Synthetic oligonucleotide
  Sense strand starting at position 3712 of SEQ ID NO: 1241957
guuugugaucccugacauc

SEQ ID NO: 1312625 - RNA, 19 nt, Artificial Sequence
  Description of Artificial Sequence: Synthetic oligonucleotide
  Antisense strand to SEQ ID NO: 1312624
gaugucagggaucacaaac

SEQ ID NO: 1312626 - RNA, 19 nt, Artificial Sequence
  Description of Artificial Sequence: Synthetic oligonucleotide
  Sense strand starting at position 3715 of SEQ ID NO: 1241957
ugugaucccugacaucguu

SEQ ID NO: 1312627 - RNA, 19 nt, Artificial Sequence
  Description of Artificial Sequence: Synthetic oligonucleotide
  Antisense strand to SEQ ID NO: 1312626
aacgaugucagggaucaca

SEQ ID NO: 1312628 - RNA, 19 nt, Artificial Sequence
  Description of Artificial Sequence: Synthetic oligonucleotide
  Sense strand starting at position 3913 of SEQ ID NO: 1241957
cuuucuguugcagguaaua

SEQ ID NO: 1312629 - RNA, 19 nt, Artificial Sequence
  Description of Artificial Sequence: Synthetic oligonucleotide
  Antisense strand to SEQ ID NO: 1312628
uauuaccugcaacagaaag

SEQ ID NO: 1312630 - RNA, 19 nt, Artificial Sequence
  Description of Artificial Sequence: Synthetic oligonucleotide
  Sense strand starting at position 3918 of SEQ ID NO: 1241957
uguugcagguaauaauaau

SEQ ID NO: 1312631 - RNA, 19 nt, Artificial Sequence
  Description of Artificial Sequence: Synthetic oligonucleotide
  Antisense strand to SEQ ID NO: 1312630
auuauuauuaccugcaaca

SEQ ID NO: 1312632 - RNA, 19 nt, Artificial Sequence
  Description of Artificial Sequence: Synthetic oligonucleotide
  Sense strand starting at position 3957 of SEQ ID NO: 1241957
uuacugugcgcgugggaaa

SEQ ID NO: 1312633 - RNA, 19 nt, Artificial Sequence
  Description of Artificial Sequence: Synthetic oligonucleotide
  Antisense strand to SEQ ID NO: 1312632
uuucccacgcgcacaguaa

SEQ ID NO: 1312634 - RNA, 19 nt, Artificial Sequence
  Description of Artificial Sequence: Synthetic oligonucleotide
  Sense strand starting at position 3979 of SEQ ID NO: 1241957
uugagugcuuuaccuaugu

SEQ ID NO: 1312635 - RNA, 19 nt, Artificial Sequence
  Description of Artificial Sequence: Synthetic oligonucleotide
  Antisense strand to SEQ ID NO: 1312634
acauagguaaagcacucaa

SEQ ID NO: 1312636 - RNA, 19 nt, Artificial Sequence
  Description of Artificial Sequence: Synthetic oligonucleotide
  Sense strand starting at position 37 of SEQ ID NO: 1241958
aggucaaguacuuggcaca

SEQ ID NO: 1312637 - RNA, 19 nt, Artificial Sequence
  Description of Artificial Sequence: Synthetic oligonucleotide
  Antisense strand to SEQ ID NO: 1312636
ugugccaaguacuugaccu

SEQ ID NO: 1312638 - RNA, 19 nt, Artificial Sequence
  Description of Artificial Sequence: Synthetic oligonucleotide
  Sense strand starting at position 315 of SEQ ID NO: 1241958
agauuuaacuacgagugag

SEQ ID NO: 1312639 - RNA, 19 nt, Artificial Sequence
  Description of Artificial Sequence: Synthetic oligonucleotide
  Antisense strand to SEQ ID NO: 1312638
cucacucguaguuaaaucu

SEQ ID NO: 1312640 - RNA, 19 nt, Artificial Sequence
  Description of Artificial Sequence: Synthetic oligonucleotide
  Sense strand starting at position 318 of SEQ ID NO: 1241958
uuuaacuacgagugaguga

SEQ ID NO: 1312641 - RNA, 19 nt, Artificial Sequence
  Description of Artificial Sequence: Synthetic oligonucleotide
  Antisense strand to SEQ ID NO: 1312640
ucacucacucguaguuaaa

SEQ ID NO: 1312642 - RNA, 19 nt, Artificial Sequence
  Description of Artificial Sequence: Synthetic oligonucleotide
  Sense strand starting at position 323 of SEQ ID NO: 1241958
cuacgagugagugaaugaa

SEQ ID NO: 1312643 - RNA, 19 nt, Artificial Sequence
  Description of Artificial Sequence: Synthetic oligonucleotide
  Antisense strand to SEQ ID NO: 1312642
uucauucacucacucguag

SEQ ID NO: 1312644 - RNA, 19 nt, Artificial Sequence
  Description of Artificial Sequence: Synthetic oligonucleotide
  Sense strand starting at position 349 of SEQ ID NO: 1241958
acaaaugaaugagaaggaa

SEQ ID NO: 1312645 - RNA, 19 nt, Artificial Sequence
  Description of Artificial Sequence: Synthetic oligonucleotide
  Antisense strand to SEQ ID NO: 1312644
uuccuucucauucauuugu

SEQ ID NO: 1312646 - RNA, 19 nt, Artificial Sequence
  Description of Artificial Sequence: Synthetic oligonucleotide
  Sense strand starting at position 376 of SEQ ID NO: 1241958
ccaaauacccugugagucu

SEQ ID NO: 1312647 - RNA, 19 nt, Artificial Sequence
  Description of Artificial Sequence: Synthetic oligonucleotide
  Antisense strand to SEQ ID NO: 1312646
agacucacaggguauuugg

SEQ ID NO: 1312648 - RNA, 19 nt, Artificial Sequence
  Description of Artificial Sequence: Synthetic oligonucleotide
  Sense strand starting at position 625 of SEQ ID NO: 1241958
gguugaggucuucgaggga

SEQ ID NO: 1312649 - RNA, 19 nt, Artificial Sequence
  Description of Artificial Sequence: Synthetic oligonucleotide
  Antisense strand to SEQ ID NO: 1312648
ucccucgaagaccucaacc

SEQ ID NO: 1312650 - RNA, 19 nt, Artificial Sequence
  Description of Artificial Sequence: Synthetic oligonucleotide
  Sense strand starting at position 863 of SEQ ID NO: 1241958
gcuguucccucacugacaa

SEQ ID NO: 1312651 - RNA, 19 nt, Artificial Sequence
  Description of Artificial Sequence: Synthetic oligonucleotide
  Antisense strand to SEQ ID NO: 1312650
uugucagugagggaacagc

SEQ ID NO: 1312652 - RNA, 19 nt, Artificial Sequence
  Description of Artificial Sequence: Synthetic oligonucleotide
  Sense strand starting at position 947 of SEQ ID NO: 1241958
uuagguauauccuuaggua

SEQ ID NO: 1312653 - RNA, 19 nt, Artificial Sequence
  Description of Artificial Sequence: Synthetic oligonucleotide
  Antisense strand to SEQ ID NO: 1312652
uaccuaaggauauaccuaa

SEQ ID NO: 1312654 - RNA, 19 nt, Artificial Sequence
  Description of Artificial Sequence: Synthetic oligonucleotide
  Sense strand starting at position 948 of SEQ ID NO: 1241958
uagguauauccuuagguaa

SEQ ID NO: 1312655 - RNA, 19 nt, Artificial Sequence
  Description of Artificial Sequence: Synthetic oligonucleotide
  Antisense strand to SEQ ID NO: 1312654
uuaccuaaggauauaccua

SEQ ID NO: 1312656 - RNA, 19 nt, Artificial Sequence
  Description of Artificial Sequence: Synthetic oligonucleotide
  Sense strand starting at position 1022 of SEQ ID NO: 1241958
uguuaucaggauugagcga

SEQ ID NO: 1312657 - RNA, 19 nt, Artificial Sequence
  Description of Artificial Sequence: Synthetic oligonucleotide
  Antisense strand to SEQ ID NO: 1312656
ucgcucaauccugauaaca

SEQ ID NO: 1312658 - RNA, 19 nt, Artificial Sequence
  Description of Artificial Sequence: Synthetic oligonucleotide
  Sense strand starting at position 1023 of SEQ ID NO: 1241958
guuaucaggauugagcgaa

SEQ ID NO: 1312659 - RNA, 19 nt, Artificial Sequence
  Description of Artificial Sequence: Synthetic oligonucleotide
  Antisense strand to SEQ ID NO: 1312658
uucgcucaauccugauaac

SEQ ID NO: 1312660 - RNA, 19 nt, Artificial Sequence
  Description of Artificial Sequence: Synthetic oligonucleotide
  Sense strand starting at position 1047 of SEQ ID NO: 1241958
agcuaucauuuaugagacu

SEQ ID NO: 1312661 - RNA, 19 nt, Artificial Sequence
  Description of Artificial Sequence: Synthetic oligonucleotide
  Antisense strand to SEQ ID NO: 1312660
agucucauaaaugauagcu

SEQ ID NO: 1312662 - RNA, 19 nt, Artificial Sequence
  Description of Artificial Sequence: Synthetic oligonucleotide
  Sense strand starting at position 1048 of SEQ ID NO: 1241958
gcuaucauuuaugagacuu

SEQ ID NO: 1312663 - RNA, 19 nt, Artificial Sequence
  Description of Artificial Sequence: Synthetic oligonucleotide
  Antisense strand to SEQ ID NO: 1312662
aagucucauaaaugauagc

SEQ ID NO: 1312664 - RNA, 19 nt, Artificial Sequence
  Description of Artificial Sequence: Synthetic oligonucleotide
  Sense strand starting at position 1126 of SEQ ID NO: 1241958
auauacaaggcauguauua

SEQ ID NO: 1312665 - RNA, 19 nt, Artificial Sequence
  Description of Artificial Sequence: Synthetic oligonucleotide
  Antisense strand to SEQ ID NO: 1312664
uaauacaugccuuguauau

SEQ ID NO: 1312666 - RNA, 19 nt, Artificial Sequence
  Description of Artificial Sequence: Synthetic oligonucleotide
  Sense strand starting at position 1204 of SEQ ID NO: 1241958
gccuaaaguuauccagcua

SEQ ID NO: 1312667 - RNA, 19 nt, Artificial Sequence
  Description of Artificial Sequence: Synthetic oligonucleotide
  Antisense strand to SEQ ID NO: 1312666
uagcuggauaacuuuaggc

SEQ ID NO: 1312668 - RNA, 19 nt, Artificial Sequence
  Description of Artificial Sequence: Synthetic oligonucleotide
  Sense strand starting at position 1436 of SEQ ID NO: 1241958
ggauuaagggauuaucguu

SEQ ID NO: 1312669 - RNA, 19 nt, Artificial Sequence
  Description of Artificial Sequence: Synthetic oligonucleotide
  Antisense strand to SEQ ID NO: 1312668
aacgauaaucccuuaaucc

SEQ ID NO: 1312670 - RNA, 19 nt, Artificial Sequence
  Description of Artificial Sequence: Synthetic oligonucleotide
  Sense strand starting at position 1445 of SEQ ID NO: 1241958
gauuaucguuucgucagaa

SEQ ID NO: 1312671 - RNA, 19 nt, Artificial Sequence
  Description of Artificial Sequence: Synthetic oligonucleotide
  Antisense strand to SEQ ID NO: 1312670
uucugacgaaacgauaauc

SEQ ID NO: 1312672 - RNA, 19 nt, Artificial Sequence
  Description of Artificial Sequence: Synthetic oligonucleotide
  Sense strand starting at position 1446 of SEQ ID NO: 1241958
auuaucguuucgucagaaa

SEQ ID NO: 1312673 - RNA, 19 nt, Artificial Sequence
  Description of Artificial Sequence: Synthetic oligonucleotide
  Antisense strand to SEQ ID NO: 1312672
uuucugacgaaacgauaau

SEQ ID NO: 1312674 - RNA, 19 nt, Artificial Sequence
  Description of Artificial Sequence: Synthetic oligonucleotide
  Sense strand starting at position 1616 of SEQ ID NO: 1241958
cggucucuuaccgugucua

SEQ ID NO: 1312675 - RNA, 19 nt, Artificial Sequence
  Description of Artificial Sequence: Synthetic oligonucleotide
  Antisense strand to SEQ ID NO: 1312674
uagacacgguaagagaccg

SEQ ID NO: 1312676 - RNA, 19 nt, Artificial Sequence
  Description of Artificial Sequence: Synthetic oligonucleotide
  Sense strand starting at position 1620 of SEQ ID NO: 1241958
cucuuaccgugucuaggaa

SEQ ID NO: 1312677 - RNA, 19 nt, Artificial Sequence
  Description of Artificial Sequence: Synthetic oligonucleotide
  Antisense strand to SEQ ID NO: 1312676
uuccuagacacgguaagag

SEQ ID NO: 1312678 - RNA, 19 nt, Artificial Sequence
  Description of Artificial Sequence: Synthetic oligonucleotide
  Sense strand starting at position 1621 of SEQ ID NO: 1241958
ucuuaccgugucuaggaaa

SEQ ID NO: 1312679 - RNA, 19 nt, Artificial Sequence
  Description of Artificial Sequence: Synthetic oligonucleotide
  Antisense strand to SEQ ID NO: 1312678
uuuccuagacacgguaaga

SEQ ID NO: 1312680 - RNA, 19 nt, Artificial Sequence
  Description of Artificial Sequence: Synthetic oligonucleotide
  Sense strand starting at position 2473 of SEQ ID NO: 1241958
gggaaucccaguuaugguu

SEQ ID NO: 1312681 - RNA, 19 nt, Artificial Sequence
  Description of Artificial Sequence: Synthetic oligonucleotide
  Antisense strand to SEQ ID NO: 1312680
aaccauaacugggauuccc

SEQ ID NO: 1312682 - RNA, 19 nt, Artificial Sequence
  Description of Artificial Sequence: Synthetic oligonucleotide
  Sense strand starting at position 2567 of SEQ ID NO: 1241958
gagagagcugcucagugau

SEQ ID NO: 1312683 - RNA, 19 nt, Artificial Sequence
  Description of Artificial Sequence: Synthetic oligonucleotide
  Antisense strand to SEQ ID NO: 1312682
aucacugagcagcucucuc

SEQ ID NO: 1312684 - RNA, 19 nt, Artificial Sequence
  Description of Artificial Sequence: Synthetic oligonucleotide
  Sense strand starting at position 2618 of SEQ ID NO: 1241958
agacacugcucucuguuau

SEQ ID NO: 1312685 - RNA, 19 nt, Artificial Sequence
  Description of Artificial Sequence: Synthetic oligonucleotide
  Antisense strand to SEQ ID NO: 1312684
auaacagagagcagugucu

SEQ ID NO: 1312686 - RNA, 19 nt, Artificial Sequence
  Description of Artificial Sequence: Synthetic oligonucleotide
  Sense strand starting at position 2619 of SEQ ID NO: 1241958
gacacugcucucuguuaug

SEQ ID NO: 1312687 - RNA, 19 nt, Artificial Sequence
  Description of Artificial Sequence: Synthetic oligonucleotide
  Antisense strand to SEQ ID NO: 1312686
cauaacagagagcaguguc

SEQ ID NO: 1312688 - RNA, 19 nt, Artificial Sequence
  Description of Artificial Sequence: Synthetic oligonucleotide
  Sense strand starting at position 2626 of SEQ ID NO: 1241958
cucucuguuaugggugagu

SEQ ID NO: 1312689 - RNA, 19 nt, Artificial Sequence
  Description of Artificial Sequence: Synthetic oligonucleotide
  Antisense strand to SEQ ID NO: 1312688
acucacccauaacagagag

SEQ ID NO: 1312690 - RNA, 19 nt, Artificial Sequence
  Description of Artificial Sequence: Synthetic oligonucleotide
  Sense strand starting at position 2628 of SEQ ID NO: 1241958
cucuguuaugggugaguuu

SEQ ID NO: 1312691 - RNA, 19 nt, Artificial Sequence
  Description of Artificial Sequence: Synthetic oligonucleotide
  Antisense strand to SEQ ID NO: 1312690
aaacucacccauaacagag

SEQ ID NO: 1312692 - RNA, 19 nt, Artificial Sequence
  Description of Artificial Sequence: Synthetic oligonucleotide
  Sense strand starting at position 2683 of SEQ ID NO: 1241958
cuccauagucgaggguuca

SEQ ID NO: 1312693 - RNA, 19 nt, Artificial Sequence
  Description of Artificial Sequence: Synthetic oligonucleotide
  Antisense strand to SEQ ID NO: 1312692
ugaacccucgacuauggag

SEQ ID NO: 1312694 - RNA, 19 nt, Artificial Sequence
  Description of Artificial Sequence: Synthetic oligonucleotide
  Sense strand starting at position 2684 of SEQ ID NO: 1241958
uccauagucgaggguucaa

SEQ ID NO: 1312695 - RNA, 19 nt, Artificial Sequence
  Description of Artificial Sequence: Synthetic oligonucleotide
  Antisense strand to SEQ ID NO: 1312694
uugaacccucgacuaugga

SEQ ID NO: 1312696 - RNA, 19 nt, Artificial Sequence
  Description of Artificial Sequence: Synthetic oligonucleotide
  Sense strand starting at position 3376 of SEQ ID NO: 1241958
cugugagcauuucuaccuu

SEQ ID NO: 1312697 - RNA, 19 nt, Artificial Sequence
  Description of Artificial Sequence: Synthetic oligonucleotide
  Antisense strand to SEQ ID NO: 1312696
aagguagaaaugcucacag

SEQ ID NO: 1312698 - RNA, 19 nt, Artificial Sequence
  Description of Artificial Sequence: Synthetic oligonucleotide
  Sense strand starting at position 3382 of SEQ ID NO: 1241958
gcauuucuaccuugugcuu

SEQ ID NO: 1312699 - RNA, 19 nt, Artificial Sequence
  Description of Artificial Sequence: Synthetic oligonucleotide
  Antisense strand to SEQ ID NO: 1312698
aagcacaagguagaaaugc

SEQ ID NO: 1312700 - RNA, 19 nt, Artificial Sequence
  Description of Artificial Sequence: Synthetic oligonucleotide
  Sense strand starting at position 3452 of SEQ ID NO: 1241958
ggacucuucuugucuugaa

SEQ ID NO: 1312701 - RNA, 19 nt, Artificial Sequence
  Description of Artificial Sequence: Synthetic oligonucleotide
  Antisense strand to SEQ ID NO: 1312700
uucaagacaagaagagucc

SEQ ID NO: 1312702 - RNA, 19 nt, Artificial Sequence
  Description of Artificial Sequence: Synthetic oligonucleotide
  Sense strand starting at position 3735 of SEQ ID NO: 1241958
uuaccuaucuugucagggu

SEQ ID NO: 1312703 - RNA, 19 nt, Artificial Sequence
  Description of Artificial Sequence: Synthetic oligonucleotide
  Antisense strand to SEQ ID NO: 1312702
acccugacaagauagguaa

SEQ ID NO: 1312704 - RNA, 19 nt, Artificial Sequence
  Description of Artificial Sequence: Synthetic oligonucleotide
  Sense strand starting at position 3739 of SEQ ID NO: 1241958
cuaucuugucaggguggaa

SEQ ID NO: 1312705 - RNA, 19 nt, Artificial Sequence
  Description of Artificial Sequence: Synthetic oligonucleotide
  Antisense strand to SEQ ID NO: 1312704
uuccacccugacaagauag

SEQ ID NO: 1312706 - RNA, 19 nt, Artificial Sequence
  Description of Artificial Sequence: Synthetic oligonucleotide
  Sense strand starting at position 3828 of SEQ ID NO: 1241958
guguguucuccugcacucu

SEQ ID NO: 1312707 - RNA, 19 nt, Artificial Sequence
  Description of Artificial Sequence: Synthetic oligonucleotide
  Antisense strand to SEQ ID NO: 1312706
agagugcaggagaacacac

SEQ ID NO: 1312708 - RNA, 19 nt, Artificial Sequence
  Description of Artificial Sequence: Synthetic oligonucleotide
  Sense strand starting at position 3891 of SEQ ID NO: 1241958
gucaguuagaccuguguga

SEQ ID NO: 1312709 - RNA, 19 nt, Artificial Sequence
  Description of Artificial Sequence: Synthetic oligonucleotide
  Antisense strand to SEQ ID NO: 1312708
ucacacaggucuaacugac

SEQ ID NO: 1312710 - RNA, 19 nt, Artificial Sequence
  Description of Artificial Sequence: Synthetic oligonucleotide
  Sense strand starting at position 3893 of SEQ ID NO: 1241958
caguuagaccugugugagu

SEQ ID NO: 1312711 - RNA, 19 nt, Artificial Sequence
  Description of Artificial Sequence: Synthetic oligonucleotide
  Antisense strand to SEQ ID NO: 1312710
acucacacaggucuaacug

SEQ ID NO: 1312712 - RNA, 19 nt, Artificial Sequence
  Description of Artificial Sequence: Synthetic oligonucleotide
  Sense strand starting at position 3895 of SEQ ID NO: 1241958
guuagaccugugugaguga

SEQ ID NO: 1312713 - RNA, 19 nt, Artificial Sequence
  Description of Artificial Sequence: Synthetic oligonucleotide
  Antisense strand to SEQ ID NO: 1312712
ucacucacacaggucuaac

SEQ ID NO: 1312714 - RNA, 19 nt, Artificial Sequence
  Description of Artificial Sequence: Synthetic oligonucleotide
  Sense strand starting at position 3961 of SEQ ID NO: 1241958
ucaguagugcuuggugaga

SEQ ID NO: 1312715 - RNA, 19 nt, Artificial Sequence
  Description of Artificial Sequence: Synthetic oligonucleotide
  Antisense strand to SEQ ID NO: 1312714
ucucaccaagcacuacuga

SEQ ID NO: 1312716 - RNA, 19 nt, Artificial Sequence
  Description of Artificial Sequence: Synthetic oligonucleotide
  Sense strand starting at position 116 of SEQ ID NO: 1241959
ggagaucauuuccaggcua

SEQ ID NO: 1312717 - RNA, 19 nt, Artificial Sequence
  Description of Artificial Sequence: Synthetic oligonucleotide
  Antisense strand to SEQ ID NO: 1312716
uagccuggaaaugaucucc

SEQ ID NO: 1312718 - RNA, 19 nt, Artificial Sequence
  Description of Artificial Sequence: Synthetic oligonucleotide
  Sense strand starting at position 147 of SEQ ID NO: 1241959
agccaaagauugccuccua

SEQ ID NO: 1312719 - RNA, 19 nt, Artificial Sequence
  Description of Artificial Sequence: Synthetic oligonucleotide
  Antisense strand to SEQ ID NO: 1312718
uaggaggcaaucuuuggcu

SEQ ID NO: 1312720 - RNA, 19 nt, Artificial Sequence
  Description of Artificial Sequence: Synthetic oligonucleotide
  Sense strand starting at position 191 of SEQ ID NO: 1241959
guuucuuuguccuuccaag

SEQ ID NO: 1312721 - RNA, 19 nt, Artificial Sequence
  Description of Artificial Sequence: Synthetic oligonucleotide
  Antisense strand to SEQ ID NO: 1312720
cuuggaaggacaaagaaac

SEQ ID NO: 1312722 - RNA, 19 nt, Artificial Sequence
  Description of Artificial Sequence: Synthetic oligonucleotide
  Sense strand starting at position 225 of SEQ ID NO: 1241959
gucccauuccgagaucaga

SEQ ID NO: 1312723 - RNA, 19 nt, Artificial Sequence
  Description of Artificial Sequence: Synthetic oligonucleotide
  Antisense strand to SEQ ID NO: 1312722
ucugaucucggaaugggac

SEQ ID NO: 1312724 - RNA, 19 nt, Artificial Sequence
  Description of Artificial Sequence: Synthetic oligonucleotide
  Sense strand starting at position 247 of SEQ ID NO: 1241959
ggcacugcucaggaaaggu

SEQ ID NO: 1312725 - RNA, 19 nt, Artificial Sequence
  Description of Artificial Sequence: Synthetic oligonucleotide
  Antisense strand to SEQ ID NO: 1312724
accuuuccugagcagugcc

SEQ ID NO: 1312726 - RNA, 19 nt, Artificial Sequence
  Description of Artificial Sequence: Synthetic oligonucleotide
  Sense strand starting at position 338 of SEQ ID NO: 1241959
gggagacauucugucacuu

SEQ ID NO: 1312727 - RNA, 19 nt, Artificial Sequence
  Description of Artificial Sequence: Synthetic oligonucleotide
  Antisense strand to SEQ ID NO: 1312726
aagugacagaaugucuccc

SEQ ID NO: 1312728 - RNA, 19 nt, Artificial Sequence
  Description of Artificial Sequence: Synthetic oligonucleotide
  Sense strand starting at position 368 of SEQ ID NO: 1241959
gguagcaccggugauuauu

SEQ ID NO: 1312729 - RNA, 19 nt, Artificial Sequence
  Description of Artificial Sequence: Synthetic oligonucleotide
  Antisense strand to SEQ ID NO: 1312728
aauaaucaccggugcuacc

SEQ ID NO: 1312730 - RNA, 19 nt, Artificial Sequence
  Description of Artificial Sequence: Synthetic oligonucleotide
  Sense strand starting at position 473 of SEQ ID NO: 1241959
ggccgaugcauggagaaau

SEQ ID NO: 1312731 - RNA, 19 nt, Artificial Sequence
  Description of Artificial Sequence: Synthetic oligonucleotide
  Antisense strand to SEQ ID NO: 1312730
auuucuccaugcaucggcc

SEQ ID NO: 1312732 - RNA, 19 nt, Artificial Sequence
  Description of Artificial Sequence: Synthetic oligonucleotide
  Sense strand starting at position 628 of SEQ ID NO: 1241959
ggccaucgggacugcuaaa

SEQ ID NO: 1312733 - RNA, 19 nt, Artificial Sequence
  Description of Artificial Sequence: Synthetic oligonucleotide
  Antisense strand to SEQ ID NO: 1312732
uuuagcagucccgauggcc

SEQ ID NO: 1312734 - RNA, 19 nt, Artificial Sequence
  Description of Artificial Sequence: Synthetic oligonucleotide
  Sense strand starting at position 854 of SEQ ID NO: 1241959
ucuuuaagcgcggcuguua

SEQ ID NO: 1312735 - RNA, 19 nt, Artificial Sequence
  Description of Artificial Sequence: Synthetic oligonucleotide
  Antisense strand to SEQ ID NO: 1312734
uaacagccgcgcuuaaaga

SEQ ID NO: 1312736 - RNA, 19 nt, Artificial Sequence
  Description of Artificial Sequence: Synthetic oligonucleotide
  Sense strand starting at position 916 of SEQ ID NO: 1241959
agguaauacuuugucuuga

SEQ ID NO: 1312737 - RNA, 19 nt, Artificial Sequence
  Description of Artificial Sequence: Synthetic oligonucleotide
  Antisense strand to SEQ ID NO: 1312736
ucaagacaaaguauuaccu

SEQ ID NO: 1312738 - RNA, 19 nt, Artificial Sequence
  Description of Artificial Sequence: Synthetic oligonucleotide
  Sense strand starting at position 917 of SEQ ID NO: 1241959
gguaauacuuugucuugag

SEQ ID NO: 1312739 - RNA, 19 nt, Artificial Sequence
  Description of Artificial Sequence: Synthetic oligonucleotide
  Antisense strand to SEQ ID NO: 1312738
cucaagacaaaguauuacc

SEQ ID NO: 1312740 - RNA, 19 nt, Artificial Sequence
  Description of Artificial Sequence: Synthetic oligonucleotide
  Sense strand starting at position 1451 of SEQ ID NO: 1241959
aagugacuuuccucgaguu

SEQ ID NO: 1312741 - RNA, 19 nt, Artificial Sequence
  Description of Artificial Sequence: Synthetic oligonucleotide
  Antisense strand to SEQ ID NO: 1312740
aacucgaggaaagucacuu

SEQ ID NO: 1312742 - RNA, 19 nt, Artificial Sequence
  Description of Artificial Sequence: Synthetic oligonucleotide
  Sense strand starting at position 1461 of SEQ ID NO: 1241959
ccucgaguugcacagugaa

SEQ ID NO: 1312743 - RNA, 19 nt, Artificial Sequence
  Description of Artificial Sequence: Synthetic oligonucleotide
  Antisense strand to SEQ ID NO: 1312742
uucacugugcaacucgagg

SEQ ID NO: 1312744 - RNA, 19 nt, Artificial Sequence
  Description of Artificial Sequence: Synthetic oligonucleotide
  Sense strand starting at position 1464 of SEQ ID NO: 1241959
cgaguugcacagugaauuc

SEQ ID NO: 1312745 - RNA, 19 nt, Artificial Sequence
  Description of Artificial Sequence: Synthetic oligonucleotide
  Antisense strand to SEQ ID NO: 1312744
gaauucacugugcaacucg

SEQ ID NO: 1312746 - RNA, 19 nt, Artificial Sequence
  Description of Artificial Sequence: Synthetic oligonucleotide
  Sense strand starting at position 1473 of SEQ ID NO: 1241959
cagugaauucguggcagag

SEQ ID NO: 1312747 - RNA, 19 nt, Artificial Sequence
  Description of Artificial Sequence: Synthetic oligonucleotide
  Antisense strand to SEQ ID NO: 1312746
cucugccacgaauucacug

SEQ ID NO: 1312748 - RNA, 19 nt, Artificial Sequence
  Description of Artificial Sequence: Synthetic oligonucleotide
  Sense strand starting at position 1488 of SEQ ID NO: 1241959
agagccuggucccaaauuu

SEQ ID NO: 1312749 - RNA, 19 nt, Artificial Sequence
  Description of Artificial Sequence: Synthetic oligonucleotide
  Antisense strand to SEQ ID NO: 1312748
aaauuugggaccaggcucu

SEQ ID NO: 1312750 - RNA, 19 nt, Artificial Sequence
  Description of Artificial Sequence: Synthetic oligonucleotide
  Sense strand starting at position 1552 of SEQ ID NO: 1241959
cucuccucgcuaugaucua

SEQ ID NO: 1312751 - RNA, 19 nt, Artificial Sequence
  Description of Artificial Sequence: Synthetic oligonucleotide
  Antisense strand to SEQ ID NO: 1312750
uagaucauagcgaggagag

SEQ ID NO: 1312752 - RNA, 19 nt, Artificial Sequence
  Description of Artificial Sequence: Synthetic oligonucleotide
  Sense strand starting at position 1562 of SEQ ID NO: 1241959
uaugaucuagcacgagaua

SEQ ID NO: 1312753 - RNA, 19 nt, Artificial Sequence
  Description of Artificial Sequence: Synthetic oligonucleotide
  Antisense strand to SEQ ID NO: 1312752
uaucucgugcuagaucaua

SEQ ID NO: 1312754 - RNA, 19 nt, Artificial Sequence
  Description of Artificial Sequence: Synthetic oligonucleotide
  Sense strand starting at position 1575 of SEQ ID NO: 1241959
gagauaaaguccgcaccau

SEQ ID NO: 1312755 - RNA, 19 nt, Artificial Sequence
  Description of Artificial Sequence: Synthetic oligonucleotide
  Antisense strand to SEQ ID NO: 1312754
auggugcggacuuuaucuc

SEQ ID NO: 1312756 - RNA, 19 nt, Artificial Sequence
  Description of Artificial Sequence: Synthetic oligonucleotide
  Sense strand starting at position 2209 of SEQ ID NO: 1241959
gggagaggguuagcugaaa

SEQ ID NO: 1312757 - RNA, 19 nt, Artificial Sequence
  Description of Artificial Sequence: Synthetic oligonucleotide
  Antisense strand to SEQ ID NO: 1312756
uuucagcuaacccucuccc

SEQ ID NO: 1312758 - RNA, 19 nt, Artificial Sequence
  Description of Artificial Sequence: Synthetic oligonucleotide
  Sense strand starting at position 2269 of SEQ ID NO: 1241959
guggacuuggguuaugauu

SEQ ID NO: 1312759 - RNA, 19 nt, Artificial Sequence
  Description of Artificial Sequence: Synthetic oligonucleotide
  Antisense strand to SEQ ID NO: 1312758
aaucauaacccaaguccac

SEQ ID NO: 1312760 - RNA, 19 nt, Artificial Sequence
  Description of Artificial Sequence: Synthetic oligonucleotide
  Sense strand starting at position 2444 of SEQ ID NO: 1241959
ccgggauccuauucugaaa

SEQ ID NO: 1312761 - RNA, 19 nt, Artificial Sequence
  Description of Artificial Sequence: Synthetic oligonucleotide
  Antisense strand to SEQ ID NO: 1312760
uuucagaauaggaucccgg

SEQ ID NO: 1312762 - RNA, 19 nt, Artificial Sequence
  Description of Artificial Sequence: Synthetic oligonucleotide
  Sense strand starting at position 2746 of SEQ ID NO: 1241959
gaggaagucuucucccuuu

SEQ ID NO: 1312763 - RNA, 19 nt, Artificial Sequence
  Description of Artificial Sequence: Synthetic oligonucleotide
  Antisense strand to SEQ ID NO: 1312762
aaagggagaagacuuccuc

SEQ ID NO: 1312764 - RNA, 19 nt, Artificial Sequence
  Description of Artificial Sequence: Synthetic oligonucleotide
  Sense strand starting at position 2804 of SEQ ID NO: 1241959
cgguguuuccacuaaggga

SEQ ID NO: 1312765 - RNA, 19 nt, Artificial Sequence
  Description of Artificial Sequence: Synthetic oligonucleotide
  Antisense strand to SEQ ID NO: 1312764
ucccuuaguggaaacaccg

SEQ ID NO: 1312766 - RNA, 19 nt, Artificial Sequence
  Description of Artificial Sequence: Synthetic oligonucleotide
  Sense strand starting at position 2982 of SEQ ID NO: 1241959
auggcuucuuccuugaaug

SEQ ID NO: 1312767 - RNA, 19 nt, Artificial Sequence
  Description of Artificial Sequence: Synthetic oligonucleotide
  Antisense strand to SEQ ID NO: 1312766
cauucaaggaagaagccau

SEQ ID NO: 1312768 - RNA, 19 nt, Artificial Sequence
  Description of Artificial Sequence: Synthetic oligonucleotide
  Sense strand starting at position 3007 of SEQ ID NO: 1241959
uccucaucggguuaaucaa

SEQ ID NO: 1312769 - RNA, 19 nt, Artificial Sequence
  Description of Artificial Sequence: Synthetic oligonucleotide
  Antisense strand to SEQ ID NO: 1312768
uugauuaacccgaugagga

SEQ ID NO: 1312770 - RNA, 19 nt, Artificial Sequence
  Description of Artificial Sequence: Synthetic oligonucleotide
  Sense strand starting at position 3145 of SEQ ID NO: 1241959
ucaagucuucgcucugcua

SEQ ID NO: 1312771 - RNA, 19 nt, Artificial Sequence
  Description of Artificial Sequence: Synthetic oligonucleotide
  Antisense strand to SEQ ID NO: 1312770
uagcagagcgaagacuuga

SEQ ID NO: 1312772 - RNA, 19 nt, Artificial Sequence
  Description of Artificial Sequence: Synthetic oligonucleotide
  Sense strand starting at position 3146 of SEQ ID NO: 1241959
caagucuucgcucugcuau

SEQ ID NO: 1312773 - RNA, 19 nt, Artificial Sequence
  Description of Artificial Sequence: Synthetic oligonucleotide
  Antisense strand to SEQ ID NO: 1312772
auagcagagcgaagacuug

SEQ ID NO: 1312774 - RNA, 19 nt, Artificial Sequence
  Description of Artificial Sequence: Synthetic oligonucleotide
  Sense strand starting at position 3178 of SEQ ID NO: 1241959
ggagggcagugaucguuua

SEQ ID NO: 1312775 - RNA, 19 nt, Artificial Sequence
  Description of Artificial Sequence: Synthetic oligonucleotide
  Antisense strand to SEQ ID NO: 1312774
uaaacgaucacugcccucc

SEQ ID NO: 1312776 - RNA, 19 nt, Artificial Sequence
  Description of Artificial Sequence: Synthetic oligonucleotide
  Sense strand starting at position 3179 of SEQ ID NO: 1241959
gagggcagugaucguuuau

SEQ ID NO: 1312777 - RNA, 19 nt, Artificial Sequence
  Description of Artificial Sequence: Synthetic oligonucleotide
  Antisense strand to SEQ ID NO: 1312776
auaaacgaucacugcccuc

SEQ ID NO: 1312778 - RNA, 19 nt, Artificial Sequence
  Description of Artificial Sequence: Synthetic oligonucleotide
  Sense strand starting at position 3185 of SEQ ID NO: 1241959
agugaucguuuauccacuu

SEQ ID NO: 1312779 - RNA, 19 nt, Artificial Sequence
  Description of Artificial Sequence: Synthetic oligonucleotide
  Antisense strand to SEQ ID NO: 1312778
aaguggauaaacgaucacu

SEQ ID NO: 1312780 - RNA, 19 nt, Artificial Sequence
  Description of Artificial Sequence: Synthetic oligonucleotide
  Sense strand starting at position 3236 of SEQ ID NO: 1241959
cucgauaacugugcauuga

SEQ ID NO: 1312781 - RNA, 19 nt, Artificial Sequence
  Description of Artificial Sequence: Synthetic oligonucleotide
  Antisense strand to SEQ ID NO: 1312780
ucaaugcacaguuaucgag

SEQ ID NO: 1312782 - RNA, 19 nt, Artificial Sequence
  Description of Artificial Sequence: Synthetic oligonucleotide
  Sense strand starting at position 3237 of SEQ ID NO: 1241959
ucgauaacugugcauugau

SEQ ID NO: 1312783 - RNA, 19 nt, Artificial Sequence
  Description of Artificial Sequence: Synthetic oligonucleotide
  Antisense strand to SEQ ID NO: 1312782
aucaaugcacaguuaucga

SEQ ID NO: 1312784 - RNA, 19 nt, Artificial Sequence
  Description of Artificial Sequence: Synthetic oligonucleotide
  Sense strand starting at position 3516 of SEQ ID NO: 1241959
uuagaagggccugauaguu

SEQ ID NO: 1312785 - RNA, 19 nt, Artificial Sequence
  Description of Artificial Sequence: Synthetic oligonucleotide
  Antisense strand to SEQ ID NO: 1312784
aacuaucaggcccuucuaa

SEQ ID NO: 1312786 - RNA, 19 nt, Artificial Sequence
  Description of Artificial Sequence: Synthetic oligonucleotide
  Sense strand starting at position 3521 of SEQ ID NO: 1241959
agggccugauaguuagauu

SEQ ID NO: 1312787 - RNA, 19 nt, Artificial Sequence
  Description of Artificial Sequence: Synthetic oligonucleotide
  Antisense strand to SEQ ID NO: 1312786
aaucuaacuaucaggcccu

SEQ ID NO: 1312788 - RNA, 19 nt, Artificial Sequence
  Description of Artificial Sequence: Synthetic oligonucleotide
  Sense strand starting at position 3522 of SEQ ID NO: 1241959
gggccugauaguuagauug

SEQ ID NO: 1312789 - RNA, 19 nt, Artificial Sequence
  Description of Artificial Sequence: Synthetic oligonucleotide
  Antisense strand to SEQ ID NO: 1312788
caaucuaacuaucaggccc

SEQ ID NO: 1312790 - RNA, 19 nt, Artificial Sequence
  Description of Artificial Sequence: Synthetic oligonucleotide
  Sense strand starting at position 3554 of SEQ ID NO: 1241959
caggaaugcucugcuauug

SEQ ID NO: 1312791 - RNA, 19 nt, Artificial Sequence
  Description of Artificial Sequence: Synthetic oligonucleotide
  Antisense strand to SEQ ID NO: 1312790
caauagcagagcauuccug

SEQ ID NO: 1312792 - RNA, 19 nt, Artificial Sequence
  Description of Artificial Sequence: Synthetic oligonucleotide
  Sense strand starting at position 3574 of SEQ ID NO: 1241959
cagcuugaacgucagaaua

SEQ ID NO: 1312793 - RNA, 19 nt, Artificial Sequence
  Description of Artificial Sequence: Synthetic oligonucleotide
  Antisense strand to SEQ ID NO: 1312792
uauucugacguucaagcug

SEQ ID NO: 1312794 - RNA, 19 nt, Artificial Sequence
  Description of Artificial Sequence: Synthetic oligonucleotide
  Sense strand starting at position 3937 of SEQ ID NO: 1241959
ugcacugggaucugcaaau

SEQ ID NO: 1312795 - RNA, 19 nt, Artificial Sequence
  Description of Artificial Sequence: Synthetic oligonucleotide
  Antisense strand to SEQ ID NO: 1312794
auuugcagaucccagugca

SEQ ID NO: 1312796 - RNA, 19 nt, Artificial Sequence
  Description of Artificial Sequence: Synthetic oligonucleotide
  Sense strand starting at position 2 of SEQ ID NO: 1241960
ccucaccugucagggauau

SEQ ID NO: 1312797 - RNA, 19 nt, Artificial Sequence
  Description of Artificial Sequence: Synthetic oligonucleotide
  Antisense strand to SEQ ID NO: 1312796
auaucccugacaggugagg

SEQ ID NO: 1312798 - RNA, 19 nt, Artificial Sequence
  Description of Artificial Sequence: Synthetic oligonucleotide
  Sense strand starting at position 3 of SEQ ID NO: 1241960
cucaccugucagggauauu

SEQ ID NO: 1312799 - RNA, 19 nt, Artificial Sequence
  Description of Artificial Sequence: Synthetic oligonucleotide
  Antisense strand to SEQ ID NO: 1312798
aauaucccugacaggugag

SEQ ID NO: 1312800 - RNA, 19 nt, Artificial Sequence
  Description of Artificial Sequence: Synthetic oligonucleotide
  Sense strand starting at position 52 of SEQ ID NO: 1241960
uuggauccgccauagguau

SEQ ID NO: 1312801 - RNA, 19 nt, Artificial Sequence
  Description of Artificial Sequence: Synthetic oligonucleotide
  Antisense strand to SEQ ID NO: 1312800
auaccuauggcggauccaa

SEQ ID NO: 1312802 - RNA, 19 nt, Artificial Sequence
  Description of Artificial Sequence: Synthetic oligonucleotide
  Sense strand starting at position 83 of SEQ ID NO: 1241960
agugcauguauuuguacau

SEQ ID NO: 1312803 - RNA, 19 nt, Artificial Sequence
  Description of Artificial Sequence: Synthetic oligonucleotide
  Antisense strand to SEQ ID NO: 1312802
auguacaaauacaugcacu

SEQ ID NO: 1312804 - RNA, 19 nt, Artificial Sequence
  Description of Artificial Sequence: Synthetic oligonucleotide
  Sense strand starting at position 273 of SEQ ID NO: 1241960
gagugaagcugauagggua

SEQ ID NO: 1312805 - RNA, 19 nt, Artificial Sequence
  Description of Artificial Sequence: Synthetic oligonucleotide
  Antisense strand to SEQ ID NO: 1312804
uacccuaucagcuucacuc

SEQ ID NO: 1312806 - RNA, 19 nt, Artificial Sequence
  Description of Artificial Sequence: Synthetic oligonucleotide
  Sense strand starting at position 353 of SEQ ID NO: 1241960
ugugaacagaaauguaagu

SEQ ID NO: 1312807 - RNA, 19 nt, Artificial Sequence
  Description of Artificial Sequence: Synthetic oligonucleotide
  Antisense strand to SEQ ID NO: 1312806
acuuacauuucuguucaca

SEQ ID NO: 1312808 - RNA, 19 nt, Artificial Sequence
  Description of Artificial Sequence: Synthetic oligonucleotide
  Sense strand starting at position 433 of SEQ ID NO: 1241960
uggcaacugucaccuaauc

SEQ ID NO: 1312809 - RNA, 19 nt, Artificial Sequence
  Description of Artificial Sequence: Synthetic oligonucleotide
  Antisense strand to SEQ ID NO: 1312808
gauuaggugacaguugcca

SEQ ID NO: 1312810 - RNA, 19 nt, Artificial Sequence
  Description of Artificial Sequence: Synthetic oligonucleotide
  Sense strand starting at position 565 of SEQ ID NO: 1241960
guagcugucauguaggaau

SEQ ID NO: 1312811 - RNA, 19 nt, Artificial Sequence
  Description of Artificial Sequence: Synthetic oligonucleotide
  Antisense strand to SEQ ID NO: 1312810
auuccuacaugacagcuac

SEQ ID NO: 1312812 - RNA, 19 nt, Artificial Sequence
  Description of Artificial Sequence: Synthetic oligonucleotide
  Sense strand starting at position 587 of SEQ ID NO: 1241960
gaauuaguguuaccagguc

SEQ ID NO: 1312813 - RNA, 19 nt, Artificial Sequence
  Description of Artificial Sequence: Synthetic oligonucleotide
  Antisense strand to SEQ ID NO: 1312812
gaccugguaacacuaauuc

SEQ ID NO: 1312814 - RNA, 19 nt, Artificial Sequence
  Description of Artificial Sequence: Synthetic oligonucleotide
  Sense strand starting at position 595 of SEQ ID NO: 1241960
guuaccaggucucccaauu

SEQ ID NO: 1312815 - RNA, 19 nt, Artificial Sequence
  Description of Artificial Sequence: Synthetic oligonucleotide
  Antisense strand to SEQ ID NO: 1312814
aauugggagaccugguaac

SEQ ID NO: 1312816 - RNA, 19 nt, Artificial Sequence
  Description of Artificial Sequence: Synthetic oligonucleotide
  Sense strand starting at position 666 of SEQ ID NO: 1241960
guggaagucuuccaauuua

SEQ ID NO: 1312817 - RNA, 19 nt, Artificial Sequence
  Description of Artificial Sequence: Synthetic oligonucleotide
  Antisense strand to SEQ ID NO: 1312816
uaaauuggaagacuuccac

SEQ ID NO: 1312818 - RNA, 19 nt, Artificial Sequence
  Description of Artificial Sequence: Synthetic oligonucleotide
  Sense strand starting at position 1045 of SEQ ID NO: 1241960
cgacgcuugucaguucuca

SEQ ID NO: 1312819 - RNA, 19 nt, Artificial Sequence
  Description of Artificial Sequence: Synthetic oligonucleotide
  Antisense strand to SEQ ID NO: 1312818
ugagaacugacaagcgucg

SEQ ID NO: 1312820 - RNA, 19 nt, Artificial Sequence
  Description of Artificial Sequence: Synthetic oligonucleotide
  Sense strand starting at position 1049 of SEQ ID NO: 1241960
gcuugucaguucucacuaa

SEQ ID NO: 1312821 - RNA, 19 nt, Artificial Sequence
  Description of Artificial Sequence: Synthetic oligonucleotide
  Antisense strand to SEQ ID NO: 1312820
uuagugagaacugacaagc

SEQ ID NO: 1312822 - RNA, 19 nt, Artificial Sequence
  Description of Artificial Sequence: Synthetic oligonucleotide
  Sense strand starting at position 1050 of SEQ ID NO: 1241960
cuugucaguucucacuaaa

SEQ ID NO: 1312823 - RNA, 19 nt, Artificial Sequence
  Description of Artificial Sequence: Synthetic oligonucleotide
  Antisense strand to SEQ ID NO: 1312822
uuuagugagaacugacaag

SEQ ID NO: 1312824 - RNA, 19 nt, Artificial Sequence
  Description of Artificial Sequence: Synthetic oligonucleotide
  Sense strand starting at position 1053 of SEQ ID NO: 1241960
gucaguucucacuaaauau

SEQ ID NO: 1312825 - RNA, 19 nt, Artificial Sequence
  Description of Artificial Sequence: Synthetic oligonucleotide
  Antisense strand to SEQ ID NO: 1312824
auauuuagugagaacugac

SEQ ID NO: 1312826 - RNA, 19 nt, Artificial Sequence
  Description of Artificial Sequence: Synthetic oligonucleotide
  Sense strand starting at position 1064 of SEQ ID NO: 1241960
cuaaauaucccgggccgaa

SEQ ID NO: 1312827 - RNA, 19 nt, Artificial Sequence
  Description of Artificial Sequence: Synthetic oligonucleotide
  Antisense strand to SEQ ID NO: 1312826
uucggcccgggauauuuag

SEQ ID NO: 1312828 - RNA, 19 nt, Artificial Sequence
  Description of Artificial Sequence: Synthetic oligonucleotide
  Sense strand starting at position 1087 of SEQ ID NO: 1241960
guaaacuggacccgauaaa

SEQ ID NO: 1312829 - RNA, 19 nt, Artificial Sequence
  Description of Artificial Sequence: Synthetic oligonucleotide
  Antisense strand to SEQ ID NO: 1312828
uuuaucggguccaguuuac

SEQ ID NO: 1312830 - RNA, 19 nt, Artificial Sequence
  Description of Artificial Sequence: Synthetic oligonucleotide
  Sense strand starting at position 1341 of SEQ ID NO: 1241960
cuccgagcuguuugcgauu

SEQ ID NO: 1312831 - RNA, 19 nt, Artificial Sequence
  Description of Artificial Sequence: Synthetic oligonucleotide
  Antisense strand to SEQ ID NO: 1312830
aaucgcaaacagcucggag

SEQ ID NO: 1312832 - RNA, 19 nt, Artificial Sequence
  Description of Artificial Sequence: Synthetic oligonucleotide
  Sense strand starting at position 2479 of SEQ ID NO: 1241960
agcuguaucucggcuuuaa

SEQ ID NO: 1312833 - RNA, 19 nt, Artificial Sequence
  Description of Artificial Sequence: Synthetic oligonucleotide
  Antisense strand to SEQ ID NO: 1312832
uuaaagccgagauacagcu

SEQ ID NO: 1312834 - RNA, 19 nt, Artificial Sequence
  Description of Artificial Sequence: Synthetic oligonucleotide
  Sense strand starting at position 2660 of SEQ ID NO: 1241960
cgcucagccucagcgaauu

SEQ ID NO: 1312835 - RNA, 19 nt, Artificial Sequence
  Description of Artificial Sequence: Synthetic oligonucleotide
  Antisense strand to SEQ ID NO: 1312834
aauucgcugaggcugagcg

SEQ ID NO: 1312836 - RNA, 19 nt, Artificial Sequence
  Description of Artificial Sequence: Synthetic oligonucleotide
  Sense strand starting at position 2840 of SEQ ID NO: 1241960
ccggcuaguuuguaaaugu

SEQ ID NO: 1312837 - RNA, 19 nt, Artificial Sequence
  Description of Artificial Sequence: Synthetic oligonucleotide
  Antisense strand to SEQ ID NO: 1312836
acauuuacaaacuagccgg

SEQ ID NO: 1312838 - RNA, 19 nt, Artificial Sequence
  Description of Artificial Sequence: Synthetic oligonucleotide
  Sense strand starting at position 2992 of SEQ ID NO: 1241960
ggaguuuccucuuuggagu

SEQ ID NO: 1312839 - RNA, 19 nt, Artificial Sequence
  Description of Artificial Sequence: Synthetic oligonucleotide
  Antisense strand to SEQ ID NO: 1312838
acuccaaagaggaaacucc

SEQ ID NO: 1312840 - RNA, 19 nt, Artificial Sequence
  Description of Artificial Sequence: Synthetic oligonucleotide
  Sense strand starting at position 2993 of SEQ ID NO: 1241960
gaguuuccucuuuggaguc

SEQ ID NO: 1312841 - RNA, 19 nt, Artificial Sequence
  Description of Artificial Sequence: Synthetic oligonucleotide
  Antisense strand to SEQ ID NO: 1312840
gacuccaaagaggaaacuc

SEQ ID NO: 1312842 - RNA, 19 nt, Artificial Sequence
  Description of Artificial Sequence: Synthetic oligonucleotide
  Sense strand starting at position 3013 of SEQ ID NO: 1241960
agaagcuacucucagcaua

SEQ ID NO: 1312843 - RNA, 19 nt, Artificial Sequence
  Description of Artificial Sequence: Synthetic oligonucleotide
  Antisense strand to SEQ ID NO: 1312842
uaugcugagaguagcuucu

SEQ ID NO: 1312844 - RNA, 19 nt, Artificial Sequence
  Description of Artificial Sequence: Synthetic oligonucleotide
  Sense strand starting at position 3031 of SEQ ID NO: 1241960
aaauguugaugugcacaaa

SEQ ID NO: 1312845 - RNA, 19 nt, Artificial Sequence
  Description of Artificial Sequence: Synthetic oligonucleotide
  Antisense strand to SEQ ID NO: 1312844
uuugugcacaucaacauuu

SEQ ID NO: 1312846 - RNA, 19 nt, Artificial Sequence
  Description of Artificial Sequence: Synthetic oligonucleotide
  Sense strand starting at position 3034 of SEQ ID NO: 1241960
uguugaugugcacaaagau

SEQ ID NO: 1312847 - RNA, 19 nt, Artificial Sequence
  Description of Artificial Sequence: Synthetic oligonucleotide
  Antisense strand to SEQ ID NO: 1312846
aucuuugugcacaucaaca

SEQ ID NO: 1312848 - RNA, 19 nt, Artificial Sequence
  Description of Artificial Sequence: Synthetic oligonucleotide
  Sense strand starting at position 3070 of SEQ ID NO: 1241960
gcgugugucaguguucugu

SEQ ID NO: 1312849 - RNA, 19 nt, Artificial Sequence
  Description of Artificial Sequence: Synthetic oligonucleotide
  Antisense strand to SEQ ID NO: 1312848
acagaacacugacacacgc

SEQ ID NO: 1312850 - RNA, 19 nt, Artificial Sequence
  Description of Artificial Sequence: Synthetic oligonucleotide
  Sense strand starting at position 3072 of SEQ ID NO: 1241960
gugugucaguguucuguaa

SEQ ID NO: 1312851 - RNA, 19 nt, Artificial Sequence
  Description of Artificial Sequence: Synthetic oligonucleotide
  Antisense strand to SEQ ID NO: 1312850
uuacagaacacugacacac

SEQ ID NO: 1312852 - RNA, 19 nt, Artificial Sequence
  Description of Artificial Sequence: Synthetic oligonucleotide
  Sense strand starting at position 3074 of SEQ ID NO: 1241960
gugucaguguucuguaaag

SEQ ID NO: 1312853 - RNA, 19 nt, Artificial Sequence
  Description of Artificial Sequence: Synthetic oligonucleotide
  Antisense strand to SEQ ID NO: 1312852
cuuuacagaacacugacac

SEQ ID NO: 1312854 - RNA, 19 nt, Artificial Sequence
  Description of Artificial Sequence: Synthetic oligonucleotide
  Sense strand starting at position 3076 of SEQ ID NO: 1241960
gucaguguucuguaaagag

SEQ ID NO: 1312855 - RNA, 19 nt, Artificial Sequence
  Description of Artificial Sequence: Synthetic oligonucleotide
  Antisense strand to SEQ ID NO: 1312854
cucuuuacagaacacugac

SEQ ID NO: 1312856 - RNA, 19 nt, Artificial Sequence
  Description of Artificial Sequence: Synthetic oligonucleotide
  Sense strand starting at position 3080 of SEQ ID NO: 1241960
guguucuguaaagagggaa

SEQ ID NO: 1312857 - RNA, 19 nt, Artificial Sequence
  Description of Artificial Sequence: Synthetic oligonucleotide
  Antisense strand to SEQ ID NO: 1312856
uucccucuuuacagaacac

SEQ ID NO: 1312858 - RNA, 19 nt, Artificial Sequence
  Description of Artificial Sequence: Synthetic oligonucleotide
  Sense strand starting at position 3189 of SEQ ID NO: 1241960
gcugcauguacuugggauu

SEQ ID NO: 1312859 - RNA, 19 nt, Artificial Sequence
  Description of Artificial Sequence: Synthetic oligonucleotide
  Antisense strand to SEQ ID NO: 1312858
aaucccaaguacaugcagc

SEQ ID NO: 1312860 - RNA, 19 nt, Artificial Sequence
  Description of Artificial Sequence: Synthetic oligonucleotide
  Sense strand starting at position 3192 of SEQ ID NO: 1241960
gcauguacuugggauuuau

SEQ ID NO: 1312861 - RNA, 19 nt, Artificial Sequence
  Description of Artificial Sequence: Synthetic oligonucleotide
  Antisense strand to SEQ ID NO: 1312860
auaaaucccaaguacaugc

SEQ ID NO: 1312862 - RNA, 19 nt, Artificial Sequence
  Description of Artificial Sequence: Synthetic oligonucleotide
  Sense strand starting at position 3282 of SEQ ID NO: 1241960
gugcucaaguugguacaua

SEQ ID NO: 1312863 - RNA, 19 nt, Artificial Sequence
  Description of Artificial Sequence: Synthetic oligonucleotide
  Antisense strand to SEQ ID NO: 1312862
uauguaccaacuugagcac

SEQ ID NO: 1312864 - RNA, 19 nt, Artificial Sequence
  Description of Artificial Sequence: Synthetic oligonucleotide
  Sense strand starting at position 3283 of SEQ ID NO: 1241960
ugcucaaguugguacauau

SEQ ID NO: 1312865 - RNA, 19 nt, Artificial Sequence
  Description of Artificial Sequence: Synthetic oligonucleotide
  Antisense strand to SEQ ID NO: 1312864
auauguaccaacuugagca

SEQ ID NO: 1312866 - RNA, 19 nt, Artificial Sequence
  Description of Artificial Sequence: Synthetic oligonucleotide
  Sense strand starting at position 3349 of SEQ ID NO: 1241960
ccagcaaugcuauauggaa

SEQ ID NO: 1312867 - RNA, 19 nt, Artificial Sequence
  Description of Artificial Sequence: Synthetic oligonucleotide
  Antisense strand to SEQ ID NO: 1312866
uuccauauagcauugcugg

SEQ ID NO: 1312868 - RNA, 19 nt, Artificial Sequence
  Description of Artificial Sequence: Synthetic oligonucleotide
  Sense strand starting at position 3454 of SEQ ID NO: 1241960
gagauauauuugugucaau

SEQ ID NO: 1312869 - RNA, 19 nt, Artificial Sequence
  Description of Artificial Sequence: Synthetic oligonucleotide
  Antisense strand to SEQ ID NO: 1312868
auugacacaaauauaucuc

SEQ ID NO: 1312870 - RNA, 19 nt, Artificial Sequence
  Description of Artificial Sequence: Synthetic oligonucleotide
  Sense strand starting at position 3563 of SEQ ID NO: 1241960
auaucucuguuagcuagaa

SEQ ID NO: 1312871 - RNA, 19 nt, Artificial Sequence
  Description of Artificial Sequence: Synthetic oligonucleotide
  Antisense strand to SEQ ID NO: 1312870
uucuagcuaacagagauau

SEQ ID NO: 1312872 - RNA, 19 nt, Artificial Sequence
  Description of Artificial Sequence: Synthetic oligonucleotide
  Sense strand starting at position 3631 of SEQ ID NO: 1241960
uguguuauuuaccaugcuu

SEQ ID NO: 1312873 - RNA, 19 nt, Artificial Sequence
  Description of Artificial Sequence: Synthetic oligonucleotide
  Antisense strand to SEQ ID NO: 1312872
aagcaugguaaauaacaca

SEQ ID NO: 1312874 - RNA, 19 nt, Artificial Sequence
  Description of Artificial Sequence: Synthetic oligonucleotide
  Sense strand starting at position 75 of SEQ ID NO: 1241961
guacuaggagcuugaaaca

SEQ ID NO: 1312875 - RNA, 19 nt, Artificial Sequence
  Description of Artificial Sequence: Synthetic oligonucleotide
  Antisense strand to SEQ ID NO: 1312874
uguuucaagcuccuaguac

SEQ ID NO: 1312876 - RNA, 19 nt, Artificial Sequence
  Description of Artificial Sequence: Synthetic oligonucleotide
  Sense strand starting at position 757 of SEQ ID NO: 1241961
uggugcuaaugcuccguua

SEQ ID NO: 1312877 - RNA, 19 nt, Artificial Sequence
  Description of Artificial Sequence: Synthetic oligonucleotide
  Antisense strand to SEQ ID NO: 1312876
uaacggagcauuagcacca

SEQ ID NO: 1312878 - RNA, 19 nt, Artificial Sequence
  Description of Artificial Sequence: Synthetic oligonucleotide
  Sense strand starting at position 829 of SEQ ID NO: 1241961
uaggccuggucuucugaga

SEQ ID NO: 1312879 - RNA, 19 nt, Artificial Sequence
  Description of Artificial Sequence: Synthetic oligonucleotide
  Antisense strand to SEQ ID NO: 1312878
ucucagaagaccaggccua

SEQ ID NO: 1312880 - RNA, 19 nt, Artificial Sequence
  Description of Artificial Sequence: Synthetic oligonucleotide
  Sense strand starting at position 1181 of SEQ ID NO: 1241961
caauuuggguucugacagu

SEQ ID NO: 1312881 - RNA, 19 nt, Artificial Sequence
  Description of Artificial Sequence: Synthetic oligonucleotide
  Antisense strand to SEQ ID NO: 1312880
acugucagaacccaaauug

SEQ ID NO: 1312882 - RNA, 19 nt, Artificial Sequence
  Description of Artificial Sequence: Synthetic oligonucleotide
  Sense strand starting at position 1197 of SEQ ID NO: 1241961
aguggcuccugggagaauu

SEQ ID NO: 1312883 - RNA, 19 nt, Artificial Sequence
  Description of Artificial Sequence: Synthetic oligonucleotide
  Antisense strand to SEQ ID NO: 1312882
aauucucccaggagccacu

SEQ ID NO: 1312884 - RNA, 19 nt, Artificial Sequence
  Description of Artificial Sequence: Synthetic oligonucleotide
  Sense strand starting at position 1210 of SEQ ID NO: 1241961
agaauucgaacccgugcaa

SEQ ID NO: 1312885 - RNA, 19 nt, Artificial Sequence
  Description of Artificial Sequence: Synthetic oligonucleotide
  Antisense strand to SEQ ID NO: 1312884
uugcacggguucgaauucu

SEQ ID NO: 1312886 - RNA, 19 nt, Artificial Sequence
  Description of Artificial Sequence: Synthetic oligonucleotide
  Sense strand starting at position 2218 of SEQ ID NO: 1241961
gcagcuuucccgcugcaga

SEQ ID NO: 1312887 - RNA, 19 nt, Artificial Sequence
  Description of Artificial Sequence: Synthetic oligonucleotide
  Antisense strand to SEQ ID NO: 1312886
ucugcagcgggaaagcugc

SEQ ID NO: 1312888 - RNA, 19 nt, Artificial Sequence
  Description of Artificial Sequence: Synthetic oligonucleotide
  Sense strand starting at position 2219 of SEQ ID NO: 1241961
cagcuuucccgcugcagaa

SEQ ID NO: 1312889 - RNA, 19 nt, Artificial Sequence
  Description of Artificial Sequence: Synthetic oligonucleotide
  Antisense strand to SEQ ID NO: 1312888
uucugcagcgggaaagcug

SEQ ID NO: 1312890 - RNA, 19 nt, Artificial Sequence
  Description of Artificial Sequence: Synthetic oligonucleotide
  Sense strand starting at position 2268 of SEQ ID NO: 1241961
ucaggucuguuuguggaga

SEQ ID NO: 1312891 - RNA, 19 nt, Artificial Sequence
  Description of Artificial Sequence: Synthetic oligonucleotide
  Antisense strand to SEQ ID NO: 1312890
ucuccacaaacagaccuga

SEQ ID NO: 1312892 - RNA, 19 nt, Artificial Sequence
  Description of Artificial Sequence: Synthetic oligonucleotide
  Sense strand starting at position 2292 of SEQ ID NO: 1241961
ccugauucgcagcagaaag

SEQ ID NO: 1312893 - RNA, 19 nt, Artificial Sequence
  Description of Artificial Sequence: Synthetic oligonucleotide
  Antisense strand to SEQ ID NO: 1312892
cuuucugcugcgaaucagg

SEQ ID NO: 1312894 - RNA, 19 nt, Artificial Sequence
  Description of Artificial Sequence: Synthetic oligonucleotide
  Sense strand starting at position 2373 of SEQ ID NO: 1241961
gucuauuggcaagaccauu

SEQ ID NO: 1312895 - RNA, 19 nt, Artificial Sequence
  Description of Artificial Sequence: Synthetic oligonucleotide
  Antisense strand to SEQ ID NO: 1312894
aauggucuugccaauagac

SEQ ID NO: 1312896 - RNA, 19 nt, Artificial Sequence
  Description of Artificial Sequence: Synthetic oligonucleotide
  Sense strand starting at position 2607 of SEQ ID NO: 1241961
gguggcuucugggaucuaa

SEQ ID NO: 1312897 - RNA, 19 nt, Artificial Sequence
  Description of Artificial Sequence: Synthetic oligonucleotide
  Antisense strand to SEQ ID NO: 1312896
uuagaucccagaagccacc

SEQ ID NO: 1312898 - RNA, 19 nt, Artificial Sequence
  Description of Artificial Sequence: Synthetic oligonucleotide
  Sense strand starting at position 2675 of SEQ ID NO: 1241961
ggagauggguuccugcaaa

SEQ ID NO: 1312899 - RNA, 19 nt, Artificial Sequence
  Description of Artificial Sequence: Synthetic oligonucleotide
  Antisense strand to SEQ ID NO: 1312898
uuugcaggaacccaucucc

SEQ ID NO: 1312900 - RNA, 19 nt, Artificial Sequence
  Description of Artificial Sequence: Synthetic oligonucleotide
  Sense strand starting at position 2726 of SEQ ID NO: 1241961
ugggacuuucuuggaguuu

SEQ ID NO: 1312901 - RNA, 19 nt, Artificial Sequence
  Description of Artificial Sequence: Synthetic oligonucleotide
  Antisense strand to SEQ ID NO: 1312900
aaacuccaagaaaguccca

SEQ ID NO: 1312902 - RNA, 19 nt, Artificial Sequence
  Description of Artificial Sequence: Synthetic oligonucleotide
  Sense strand starting at position 2727 of SEQ ID NO: 1241961
gggacuuucuuggaguuua

SEQ ID NO: 1312903 - RNA, 19 nt, Artificial Sequence
  Description of Artificial Sequence: Synthetic oligonucleotide
  Antisense strand to SEQ ID NO: 1312902
uaaacuccaagaaaguccc

SEQ ID NO: 1312904 - RNA, 19 nt, Artificial Sequence
  Description of Artificial Sequence: Synthetic oligonucleotide
  Sense strand starting at position 2858 of SEQ ID NO: 1241961
ggcaccgacuucuuaaguu

SEQ ID NO: 1312905 - RNA, 19 nt, Artificial Sequence
  Description of Artificial Sequence: Synthetic oligonucleotide
  Antisense strand to SEQ ID NO: 1312904
aacuuaagaagucggugcc

SEQ ID NO: 1312906 - RNA, 19 nt, Artificial Sequence
  Description of Artificial Sequence: Synthetic oligonucleotide
  Sense strand starting at position 2899 of SEQ ID NO: 1241961
aguuaauacguuuaaagug

SEQ ID NO: 1312907 - RNA, 19 nt, Artificial Sequence
  Description of Artificial Sequence: Synthetic oligonucleotide
  Antisense strand to SEQ ID NO: 1312906
cacuuuaaacguauuaacu

SEQ ID NO: 1312908 - RNA, 19 nt, Artificial Sequence
  Description of Artificial Sequence: Synthetic oligonucleotide
  Sense strand starting at position 2907 of SEQ ID NO: 1241961
cguuuaaagugcuuaguau

SEQ ID NO: 1312909 - RNA, 19 nt, Artificial Sequence
  Description of Artificial Sequence: Synthetic oligonucleotide
  Antisense strand to SEQ ID NO: 1312908
auacuaagcacuuuaaacg

SEQ ID NO: 1312910 - RNA, 19 nt, Artificial Sequence
  Description of Artificial Sequence: Synthetic oligonucleotide
  Sense strand starting at position 2908 of SEQ ID NO: 1241961
guuuaaagugcuuaguaug

SEQ ID NO: 1312911 - RNA, 19 nt, Artificial Sequence
  Description of Artificial Sequence: Synthetic oligonucleotide
  Antisense strand to SEQ ID NO: 1312910
cauacuaagcacuuuaaac

SEQ ID NO: 1312912 - RNA, 19 nt, Artificial Sequence
  Description of Artificial Sequence: Synthetic oligonucleotide
  Sense strand starting at position 2913 of SEQ ID NO: 1241961
aagugcuuaguaugcagua

SEQ ID NO: 1312913 - RNA, 19 nt, Artificial Sequence
  Description of Artificial Sequence: Synthetic oligonucleotide
  Antisense strand to SEQ ID NO: 1312912
uacugcauacuaagcacuu

SEQ ID NO: 1312914 - RNA, 19 nt, Artificial Sequence
  Description of Artificial Sequence: Synthetic oligonucleotide
  Sense strand starting at position 2941 of SEQ ID NO: 1241961
ugaggagcccuccguuaag

SEQ ID NO: 1312915 - RNA, 19 nt, Artificial Sequence
  Description of Artificial Sequence: Synthetic oligonucleotide
  Antisense strand to SEQ ID NO: 1312914
cuuaacggagggcuccuca

SEQ ID NO: 1312916 - RNA, 19 nt, Artificial Sequence
  Description of Artificial Sequence: Synthetic oligonucleotide
  Sense strand starting at position 2944 of SEQ ID NO: 1241961
ggagcccuccguuaagcaa

SEQ ID NO: 1312917 - RNA, 19 nt, Artificial Sequence
  Description of Artificial Sequence: Synthetic oligonucleotide
  Antisense strand to SEQ ID NO: 1312916
uugcuuaacggagggcucc

SEQ ID NO: 1312918 - RNA, 19 nt, Artificial Sequence
  Description of Artificial Sequence: Synthetic oligonucleotide
  Sense strand starting at position 2965 of SEQ ID NO: 1241961
gcuguuacaucacuguuaa

SEQ ID NO: 1312919 - RNA, 19 nt, Artificial Sequence
  Description of Artificial Sequence: Synthetic oligonucleotide
  Antisense strand to SEQ ID NO: 1312918
uuaacagugauguaacagc

SEQ ID NO: 1312920 - RNA, 19 nt, Artificial Sequence
  Description of Artificial Sequence: Synthetic oligonucleotide
  Sense strand starting at position 2966 of SEQ ID NO: 1241961
cuguuacaucacuguuaac

SEQ ID NO: 1312921 - RNA, 19 nt, Artificial Sequence
  Description of Artificial Sequence: Synthetic oligonucleotide
  Antisense strand to SEQ ID NO: 1312920
guuaacagugauguaacag

SEQ ID NO: 1312922 - RNA, 19 nt, Artificial Sequence
  Description of Artificial Sequence: Synthetic oligonucleotide
  Sense strand starting at position 2969 of SEQ ID NO: 1241961
uuacaucacuguuaacgaa

SEQ ID NO: 1312923 - RNA, 19 nt, Artificial Sequence
  Description of Artificial Sequence: Synthetic oligonucleotide
  Antisense strand to SEQ ID NO: 1312922
uucguuaacagugauguaa

SEQ ID NO: 1312924 - RNA, 19 nt, Artificial Sequence
  Description of Artificial Sequence: Synthetic oligonucleotide
  Sense strand starting at position 3087 of SEQ ID NO: 1241961
ugcagugaugagggugaga

SEQ ID NO: 1312925 - RNA, 19 nt, Artificial Sequence
  Description of Artificial Sequence: Synthetic oligonucleotide
  Antisense strand to SEQ ID NO: 1312924
ucucacccucaucacugca

SEQ ID NO: 1312926 - RNA, 19 nt, Artificial Sequence
  Description of Artificial Sequence: Synthetic oligonucleotide
  Sense strand starting at position 3190 of SEQ ID NO: 1241961
gggacuagacccugaagca

SEQ ID NO: 1312927 - RNA, 19 nt, Artificial Sequence
  Description of Artificial Sequence: Synthetic oligonucleotide
  Antisense strand to SEQ ID NO: 1312926
ugcuucagggucuaguccc

SEQ ID NO: 1312928 - RNA, 19 nt, Artificial Sequence
  Description of Artificial Sequence: Synthetic oligonucleotide
  Sense strand starting at position 3276 of SEQ ID NO: 1241961
cugacaaagucuuggaaca

SEQ ID NO: 1312929 - RNA, 19 nt, Artificial Sequence
  Description of Artificial Sequence: Synthetic oligonucleotide
  Antisense strand to SEQ ID NO: 1312928
uguuccaagacuuugucag

SEQ ID NO: 1312930 - RNA, 19 nt, Artificial Sequence
  Description of Artificial Sequence: Synthetic oligonucleotide
  Sense strand starting at position 3278 of SEQ ID NO: 1241961
gacaaagucuuggaacaca

SEQ ID NO: 1312931 - RNA, 19 nt, Artificial Sequence
  Description of Artificial Sequence: Synthetic oligonucleotide
  Antisense strand to SEQ ID NO: 1312930
uguguuccaagacuuuguc

SEQ ID NO: 1312932 - RNA, 19 nt, Artificial Sequence
  Description of Artificial Sequence: Synthetic oligonucleotide
  Sense strand starting at position 3494 of SEQ ID NO: 1241961
agggauguccuuugaggag

SEQ ID NO: 1312933 - RNA, 19 nt, Artificial Sequence
  Description of Artificial Sequence: Synthetic oligonucleotide
  Antisense strand to SEQ ID NO: 1312932
cuccucaaaggacaucccu

SEQ ID NO: 1312934 - RNA, 19 nt, Artificial Sequence
  Description of Artificial Sequence: Synthetic oligonucleotide
  Sense strand starting at position 3497 of SEQ ID NO: 1241961
gauguccuuugaggagaca

SEQ ID NO: 1312935 - RNA, 19 nt, Artificial Sequence
  Description of Artificial Sequence: Synthetic oligonucleotide
  Antisense strand to SEQ ID NO: 1312934
ugucuccucaaaggacauc

SEQ ID NO: 1312936 - RNA, 19 nt, Artificial Sequence
  Description of Artificial Sequence: Synthetic oligonucleotide
  Sense strand starting at position 3509 of SEQ ID NO: 1241961
ggagacagccaguaaguuu

SEQ ID NO: 1312937 - RNA, 19 nt, Artificial Sequence
  Description of Artificial Sequence: Synthetic oligonucleotide
  Antisense strand to SEQ ID NO: 1312936
aaacuuacuggcugucucc

SEQ ID NO: 1312938 - RNA, 19 nt, Artificial Sequence
  Description of Artificial Sequence: Synthetic oligonucleotide
  Sense strand starting at position 3528 of SEQ ID NO: 1241961
cagagauagguguggugua

SEQ ID NO: 1312939 - RNA, 19 nt, Artificial Sequence
  Description of Artificial Sequence: Synthetic oligonucleotide
  Antisense strand to SEQ ID NO: 1312938
uacaccacaccuaucucug

SEQ ID NO: 1312940 - RNA, 19 nt, Artificial Sequence
  Description of Artificial Sequence: Synthetic oligonucleotide
  Sense strand starting at position 3533 of SEQ ID NO: 1241961
auaggugugguguaacaga

SEQ ID NO: 1312941 - RNA, 19 nt, Artificial Sequence
  Description of Artificial Sequence: Synthetic oligonucleotide
  Antisense strand to SEQ ID NO: 1312940
ucuguuacaccacaccuau

SEQ ID NO: 1312942 - RNA, 19 nt, Artificial Sequence
  Description of Artificial Sequence: Synthetic oligonucleotide
  Sense strand starting at position 3623 of SEQ ID NO: 1241961
gggcuaguuaccuaagguc

SEQ ID NO: 1312943 - RNA, 19 nt, Artificial Sequence
  Description of Artificial Sequence: Synthetic oligonucleotide
  Antisense strand to SEQ ID NO: 1312942
gaccuuagguaacuagccc

SEQ ID NO: 1312944 - RNA, 19 nt, Artificial Sequence
  Description of Artificial Sequence: Synthetic oligonucleotide
  Sense strand starting at position 3635 of SEQ ID NO: 1241961
uaaggucucugagcuguuu

SEQ ID NO: 1312945 - RNA, 19 nt, Artificial Sequence
  Description of Artificial Sequence: Synthetic oligonucleotide
  Antisense strand to SEQ ID NO: 1312944
aaacagcucagagaccuua

SEQ ID NO: 1312946 - RNA, 19 nt, Artificial Sequence
  Description of Artificial Sequence: Synthetic oligonucleotide
  Sense strand starting at position 3684 of SEQ ID NO: 1241961
cuucucucaugauagauag

SEQ ID NO: 1312947 - RNA, 19 nt, Artificial Sequence
  Description of Artificial Sequence: Synthetic oligonucleotide
  Antisense strand to SEQ ID NO: 1312946
cuaucuaucaugagagaag

SEQ ID NO: 1312948 - RNA, 19 nt, Artificial Sequence
  Description of Artificial Sequence: Synthetic oligonucleotide
  Sense strand starting at position 3866 of SEQ ID NO: 1241961
agccuucugggagggagaa

SEQ ID NO: 1312949 - RNA, 19 nt, Artificial Sequence
  Description of Artificial Sequence: Synthetic oligonucleotide
  Antisense strand to SEQ ID NO: 1312948
uucucccucccagaaggcu

SEQ ID NO: 1312950 - RNA, 19 nt, Artificial Sequence
  Description of Artificial Sequence: Synthetic oligonucleotide
  Sense strand starting at position 3867 of SEQ ID NO: 1241961
gccuucugggagggagaaa

SEQ ID NO: 1312951 - RNA, 19 nt, Artificial Sequence
  Description of Artificial Sequence: Synthetic oligonucleotide
  Antisense strand to SEQ ID NO: 1312950
uuucucccucccagaaggc

SEQ ID NO: 1312952 - RNA, 19 nt, Artificial Sequence
  Description of Artificial Sequence: Synthetic oligonucleotide
  Sense strand starting at position 3905 of SEQ ID NO: 1241961
ggcugaaucagcuagcaga

SEQ ID NO: 1312953 - RNA, 19 nt, Artificial Sequence
  Description of Artificial Sequence: Synthetic oligonucleotide
  Antisense strand to SEQ ID NO: 1312952
ucugcuagcugauucagcc

SEQ ID NO: 1312954 - RNA, 19 nt, Artificial Sequence
  Description of Artificial Sequence: Synthetic oligonucleotide
  Sense strand starting at position 136 of SEQ ID NO: 1241962
augugauguuaagauuuac

SEQ ID NO: 1312955 - RNA, 19 nt, Artificial Sequence
  Description of Artificial Sequence: Synthetic oligonucleotide
  Antisense strand to SEQ ID NO: 1312954
guaaaucuuaacaucacau

SEQ ID NO: 1312956 - RNA, 19 nt, Artificial Sequence
  Description of Artificial Sequence: Synthetic oligonucleotide
  Sense strand starting at position 178 of SEQ ID NO: 1241962
cguguuaauccauacuaua

SEQ ID NO: 1312957 - RNA, 19 nt, Artificial Sequence
  Description of Artificial Sequence: Synthetic oligonucleotide
  Antisense strand to SEQ ID NO: 1312956
uauaguauggauuaacacg

SEQ ID NO: 1312958 - RNA, 19 nt, Artificial Sequence
  Description of Artificial Sequence: Synthetic oligonucleotide
  Sense strand starting at position 291 of SEQ ID NO: 1241962
agaaacuacugauaacuga

SEQ ID NO: 1312959 - RNA, 19 nt, Artificial Sequence
  Description of Artificial Sequence: Synthetic oligonucleotide
  Antisense strand to SEQ ID NO: 1312958
ucaguuaucaguaguuucu

SEQ ID NO: 1312960 - RNA, 19 nt, Artificial Sequence
  Description of Artificial Sequence: Synthetic oligonucleotide
  Sense strand starting at position 313 of SEQ ID NO: 1241962
ucaugcuaccuacgaucaa

SEQ ID NO: 1312961 - RNA, 19 nt, Artificial Sequence
  Description of Artificial Sequence: Synthetic oligonucleotide
  Antisense strand to SEQ ID NO: 1312960
uugaucguagguagcauga

SEQ ID NO: 1312962 - RNA, 19 nt, Artificial Sequence
  Description of Artificial Sequence: Synthetic oligonucleotide
  Sense strand starting at position 323 of SEQ ID NO: 1241962
uacgaucaauuucgagaag

SEQ ID NO: 1312963 - RNA, 19 nt, Artificial Sequence
  Description of Artificial Sequence: Synthetic oligonucleotide
  Antisense strand to SEQ ID NO: 1312962
cuucucgaaauugaucgua

SEQ ID NO: 1312964 - RNA, 19 nt, Artificial Sequence
  Description of Artificial Sequence: Synthetic oligonucleotide
  Sense strand starting at position 324 of SEQ ID NO: 1241962
acgaucaauuucgagaaga

SEQ ID NO: 1312965 - RNA, 19 nt, Artificial Sequence
  Description of Artificial Sequence: Synthetic oligonucleotide
  Antisense strand to SEQ ID NO: 1312964
ucuucucgaaauugaucgu

SEQ ID NO: 1312966 - RNA, 19 nt, Artificial Sequence
  Description of Artificial Sequence: Synthetic oligonucleotide
  Sense strand starting at position 334 of SEQ ID NO: 1241962
ucgagaagacacugaaagu

SEQ ID NO: 1312967 - RNA, 19 nt, Artificial Sequence
  Description of Artificial Sequence: Synthetic oligonucleotide
  Antisense strand to SEQ ID NO: 1312966
acuuucagugucuucucga

SEQ ID NO: 1312968 - RNA, 19 nt, Artificial Sequence
  Description of Artificial Sequence: Synthetic oligonucleotide
  Sense strand starting at position 350 of SEQ ID NO: 1241962
aguccuauuguaugcauuu

SEQ ID NO: 1312969 - RNA, 19 nt, Artificial Sequence
  Description of Artificial Sequence: Synthetic oligonucleotide
  Antisense strand to SEQ ID NO: 1312968
aaaugcauacaauaggacu

SEQ ID NO: 1312970 - RNA, 19 nt, Artificial Sequence
  Description of Artificial Sequence: Synthetic oligonucleotide
  Sense strand starting at position 430 of SEQ ID NO: 1241962
cuugacuguguaugauuaa

SEQ ID NO: 1312971 - RNA, 19 nt, Artificial Sequence
  Description of Artificial Sequence: Synthetic oligonucleotide
  Antisense strand to SEQ ID NO: 1312970
uuaaucauacacagucaag

SEQ ID NO: 1312972 - RNA, 19 nt, Artificial Sequence
  Description of Artificial Sequence: Synthetic oligonucleotide
  Sense strand starting at position 473 of SEQ ID NO: 1241962
aaaggugguuccguuuaaa

SEQ ID NO: 1312973 - RNA, 19 nt, Artificial Sequence
  Description of Artificial Sequence: Synthetic oligonucleotide
  Antisense strand to SEQ ID NO: 1312972
uuuaaacggaaccaccuuu

SEQ ID NO: 1312974 - RNA, 19 nt, Artificial Sequence
  Description of Artificial Sequence: Synthetic oligonucleotide
  Sense strand starting at position 492 of SEQ ID NO: 1241962
augggauguuacuuauaau

SEQ ID NO: 1312975 - RNA, 19 nt, Artificial Sequence
  Description of Artificial Sequence: Synthetic oligonucleotide
  Antisense strand to SEQ ID NO: 1312974
auuauaaguaacaucccau

SEQ ID NO: 1312976 - RNA, 19 nt, Artificial Sequence
  Description of Artificial Sequence: Synthetic oligonucleotide
  Sense strand starting at position 649 of SEQ ID NO: 1241962
uccacuugaccgcaauuau

SEQ ID NO: 1312977 - RNA, 19 nt, Artificial Sequence
  Description of Artificial Sequence: Synthetic oligonucleotide
  Antisense strand to SEQ ID NO: 1312976
auaauugcggucaagugga

SEQ ID NO: 1312978 - RNA, 19 nt, Artificial Sequence
  Description of Artificial Sequence: Synthetic oligonucleotide
  Sense strand starting at position 727 of SEQ ID NO: 1241962
ucacauaucuguucugaga

SEQ ID NO: 1312979 - RNA, 19 nt, Artificial Sequence
  Description of Artificial Sequence: Synthetic oligonucleotide
  Antisense strand to SEQ ID NO: 1312978
ucucagaacagauauguga

SEQ ID NO: 1312980 - RNA, 19 nt, Artificial Sequence
  Description of Artificial Sequence: Synthetic oligonucleotide
  Sense strand starting at position 769 of SEQ ID NO: 1241962
ucagucacugauugaaaca

SEQ ID NO: 1312981 - RNA, 19 nt, Artificial Sequence
  Description of Artificial Sequence: Synthetic oligonucleotide
  Antisense strand to SEQ ID NO: 1312980
uguuucaaucagugacuga

SEQ ID NO: 1312982 - RNA, 19 nt, Artificial Sequence
  Description of Artificial Sequence: Synthetic oligonucleotide
  Sense strand starting at position 792 of SEQ ID NO: 1241962
ugaagaggaucuuucuacu

SEQ ID NO: 1312983 - RNA, 19 nt, Artificial Sequence
  Description of Artificial Sequence: Synthetic oligonucleotide
  Antisense strand to SEQ ID NO: 1312982
aguagaaagauccucuuca

SEQ ID NO: 1312984 - RNA, 19 nt, Artificial Sequence
  Description of Artificial Sequence: Synthetic oligonucleotide
  Sense strand starting at position 828 of SEQ ID NO: 1241962
gguuuacuggcagguaaga

SEQ ID NO: 1312985 - RNA, 19 nt, Artificial Sequence
  Description of Artificial Sequence: Synthetic oligonucleotide
  Antisense strand to SEQ ID NO: 1312984
ucuuaccugccaguaaacc

SEQ ID NO: 1312986 - RNA, 19 nt, Artificial Sequence
  Description of Artificial Sequence: Synthetic oligonucleotide
  Sense strand starting at position 872 of SEQ ID NO: 1241962
acaugucuugccuagaccu

SEQ ID NO: 1312987 - RNA, 19 nt, Artificial Sequence
  Description of Artificial Sequence: Synthetic oligonucleotide
  Antisense strand to SEQ ID NO: 1312986
aggucuaggcaagacaugu

SEQ ID NO: 1312988 - RNA, 19 nt, Artificial Sequence
  Description of Artificial Sequence: Synthetic oligonucleotide
  Sense strand starting at position 880 of SEQ ID NO: 1241962
ugccuagaccugugauaca

SEQ ID NO: 1312989 - RNA, 19 nt, Artificial Sequence
  Description of Artificial Sequence: Synthetic oligonucleotide
  Antisense strand to SEQ ID NO: 1312988
uguaucacaggucuaggca

SEQ ID NO: 1312990 - RNA, 19 nt, Artificial Sequence
  Description of Artificial Sequence: Synthetic oligonucleotide
  Sense strand starting at position 891 of SEQ ID NO: 1241962
gugauacaucuauaugguu

SEQ ID NO: 1312991 - RNA, 19 nt, Artificial Sequence
  Description of Artificial Sequence: Synthetic oligonucleotide
  Antisense strand to SEQ ID NO: 1312990
aaccauauagauguaucac

SEQ ID NO: 1312992 - RNA, 19 nt, Artificial Sequence
  Description of Artificial Sequence: Synthetic oligonucleotide
  Sense strand starting at position 1028 of SEQ ID NO: 1241962
uuaauaucgagcugggaga

SEQ ID NO: 1312993 - RNA, 19 nt, Artificial Sequence
  Description of Artificial Sequence: Synthetic oligonucleotide
  Antisense strand to SEQ ID NO: 1312992
ucucccagcucgauauuaa

SEQ ID NO: 1312994 - RNA, 19 nt, Artificial Sequence
  Description of Artificial Sequence: Synthetic oligonucleotide
  Sense strand starting at position 1039 of SEQ ID NO: 1241962
cugggagacuugguugaau

SEQ ID NO: 1312995 - RNA, 19 nt, Artificial Sequence
  Description of Artificial Sequence: Synthetic oligonucleotide
  Antisense strand to SEQ ID NO: 1312994
auucaaccaagucucccag

SEQ ID NO: 1312996 - RNA, 19 nt, Artificial Sequence
  Description of Artificial Sequence: Synthetic oligonucleotide
  Sense strand starting at position 1041 of SEQ ID NO: 1241962
gggagacuugguugaauau

SEQ ID NO: 1312997 - RNA, 19 nt, Artificial Sequence
  Description of Artificial Sequence: Synthetic oligonucleotide
  Antisense strand to SEQ ID NO: 1312996
auauucaaccaagucuccc

SEQ ID NO: 1312998 - RNA, 19 nt, Artificial Sequence
  Description of Artificial Sequence: Synthetic oligonucleotide
  Sense strand starting at position 1231 of SEQ ID NO: 1241962
aggaaagucucauuaccca

SEQ ID NO: 1312999 - RNA, 19 nt, Artificial Sequence
  Description of Artificial Sequence: Synthetic oligonucleotide
  Antisense strand to SEQ ID NO: 1312998
uggguaaugagacuuuccu

SEQ ID NO: 1313000 - RNA, 19 nt, Artificial Sequence
  Description of Artificial Sequence: Synthetic oligonucleotide
  Sense strand starting at position 1487 of SEQ ID NO: 1241962
uagagucaguuucucggaa

SEQ ID NO: 1313001 - RNA, 19 nt, Artificial Sequence
  Description of Artificial Sequence: Synthetic oligonucleotide
  Antisense strand to SEQ ID NO: 1313000
uuccgagaaacugacucua

SEQ ID NO: 1313002 - RNA, 19 nt, Artificial Sequence
  Description of Artificial Sequence: Synthetic oligonucleotide
  Sense strand starting at position 1737 of SEQ ID NO: 1241962
gcagauaccugguccagca

SEQ ID NO: 1313003 - RNA, 19 nt, Artificial Sequence
  Description of Artificial Sequence: Synthetic oligonucleotide
  Antisense strand to SEQ ID NO: 1313002
ugcuggaccagguaucugc

SEQ ID NO: 1313004 - RNA, 19 nt, Artificial Sequence
  Description of Artificial Sequence: Synthetic oligonucleotide
  Sense strand starting at position 2018 of SEQ ID NO: 1241962
ccaucacuuccggguuauc

SEQ ID NO: 1313005 - RNA, 19 nt, Artificial Sequence
  Description of Artificial Sequence: Synthetic oligonucleotide
  Antisense strand to SEQ ID NO: 1313004
gauaacccggaagugaugg

SEQ ID NO: 1313006 - RNA, 19 nt, Artificial Sequence
  Description of Artificial Sequence: Synthetic oligonucleotide
  Sense strand starting at position 2127 of SEQ ID NO: 1241962
agaagauauaucgggagca

SEQ ID NO: 1313007 - RNA, 19 nt, Artificial Sequence
  Description of Artificial Sequence: Synthetic oligonucleotide
  Antisense strand to SEQ ID NO: 1313006
ugcucccgauauaucuucu

SEQ ID NO: 1313008 - RNA, 19 nt, Artificial Sequence
  Description of Artificial Sequence: Synthetic oligonucleotide
  Sense strand starting at position 2357 of SEQ ID NO: 1241962
aggucccucgagggaauua

SEQ ID NO: 1313009 - RNA, 19 nt, Artificial Sequence
  Description of Artificial Sequence: Synthetic oligonucleotide
  Antisense strand to SEQ ID NO: 1313008
uaauucccucgagggaccu

SEQ ID NO: 1313010 - RNA, 19 nt, Artificial Sequence
  Description of Artificial Sequence: Synthetic oligonucleotide
  Sense strand starting at position 2358 of SEQ ID NO: 1241962
ggucccucgagggaauuau

SEQ ID NO: 1313011 - RNA, 19 nt, Artificial Sequence
  Description of Artificial Sequence: Synthetic oligonucleotide
  Antisense strand to SEQ ID NO: 1313010
auaauucccucgagggacc

SEQ ID NO: 1313012 - RNA, 19 nt, Artificial Sequence
  Description of Artificial Sequence: Synthetic oligonucleotide
  Sense strand starting at position 2502 of SEQ ID NO: 1241962
gaagccgaaugguuagaaa

SEQ ID NO: 1313013 - RNA, 19 nt, Artificial Sequence
  Description of Artificial Sequence: Synthetic oligonucleotide
  Antisense strand to SEQ ID NO: 1313012
uuucuaaccauucggcuuc

SEQ ID NO: 1313014 - RNA, 19 nt, Artificial Sequence
  Description of Artificial Sequence: Synthetic oligonucleotide
  Sense strand starting at position 2544 of SEQ ID NO: 1241962
guaagagcugcacauguuu

SEQ ID NO: 1313015 - RNA, 19 nt, Artificial Sequence
  Description of Artificial Sequence: Synthetic oligonucleotide
  Antisense strand to SEQ ID NO: 1313014
aaacaugugcagcucuuac

SEQ ID NO: 1313016 - RNA, 19 nt, Artificial Sequence
  Description of Artificial Sequence: Synthetic oligonucleotide
  Sense strand starting at position 2561 of SEQ ID NO: 1241962
uuguguaaggucuggaauu

SEQ ID NO: 1313017 - RNA, 19 nt, Artificial Sequence
  Description of Artificial Sequence: Synthetic oligonucleotide
  Antisense strand to SEQ ID NO: 1313016
aauuccagaccuuacacaa

SEQ ID NO: 1313018 - RNA, 19 nt, Artificial Sequence
  Description of Artificial Sequence: Synthetic oligonucleotide
  Sense strand starting at position 2563 of SEQ ID NO: 1241962
guguaaggucuggaauuaa

SEQ ID NO: 1313019 - RNA, 19 nt, Artificial Sequence
  Description of Artificial Sequence: Synthetic oligonucleotide
  Antisense strand to SEQ ID NO: 1313018
uuaauuccagaccuuacac

SEQ ID NO: 1313020 - RNA, 19 nt, Artificial Sequence
  Description of Artificial Sequence: Synthetic oligonucleotide
  Sense strand starting at position 2613 of SEQ ID NO: 1241962
aauguaacucgacaguuau

SEQ ID NO: 1313021 - RNA, 19 nt, Artificial Sequence
  Description of Artificial Sequence: Synthetic oligonucleotide
  Antisense strand to SEQ ID NO: 1313020
auaacugucgaguuacauu

SEQ ID NO: 1313022 - RNA, 19 nt, Artificial Sequence
  Description of Artificial Sequence: Synthetic oligonucleotide
  Sense strand starting at position 2743 of SEQ ID NO: 1241962
gggagcccauaaucaaauu

SEQ ID NO: 1313023 - RNA, 19 nt, Artificial Sequence
  Description of Artificial Sequence: Synthetic oligonucleotide
  Antisense strand to SEQ ID NO: 1313022
aauuugauuaugggcuccc

SEQ ID NO: 1313024 - RNA, 19 nt, Artificial Sequence
  Description of Artificial Sequence: Synthetic oligonucleotide
  Sense strand starting at position 2752 of SEQ ID NO: 1241962
uaaucaaauuugggaagga

SEQ ID NO: 1313025 - RNA, 19 nt, Artificial Sequence
  Description of Artificial Sequence: Synthetic oligonucleotide
  Antisense strand to SEQ ID NO: 1313024
uccuucccaaauuugauua

SEQ ID NO: 1313026 - RNA, 19 nt, Artificial Sequence
  Description of Artificial Sequence: Synthetic oligonucleotide
  Sense strand starting at position 3488 of SEQ ID NO: 1241962
auuuauugugucuggguga

SEQ ID NO: 1313027 - RNA, 19 nt, Artificial Sequence
  Description of Artificial Sequence: Synthetic oligonucleotide
  Antisense strand to SEQ ID NO: 1313026
ucacccagacacaauaaau

SEQ ID NO: 1313028 - RNA, 19 nt, Artificial Sequence
  Description of Artificial Sequence: Synthetic oligonucleotide
  Sense strand starting at position 3491 of SEQ ID NO: 1241962
uauugugucugggugauuu

SEQ ID NO: 1313029 - RNA, 19 nt, Artificial Sequence
  Description of Artificial Sequence: Synthetic oligonucleotide
  Antisense strand to SEQ ID NO: 1313028
aaaucacccagacacaaua

SEQ ID NO: 1313030 - RNA, 19 nt, Artificial Sequence
  Description of Artificial Sequence: Synthetic oligonucleotide
  Sense strand starting at position 3906 of SEQ ID NO: 1241962
aacccauaucguuauggca

SEQ ID NO: 1313031 - RNA, 19 nt, Artificial Sequence
  Description of Artificial Sequence: Synthetic oligonucleotide
  Antisense strand to SEQ ID NO: 1313030
ugccauaacgauauggguu

SEQ ID NO: 1313032 - RNA, 19 nt, Artificial Sequence
  Description of Artificial Sequence: Synthetic oligonucleotide
  Sense strand starting at position 3938 of SEQ ID NO: 1241962
gagaaaugcaguugggcau

SEQ ID NO: 1313033 - RNA, 19 nt, Artificial Sequence
  Description of Artificial Sequence: Synthetic oligonucleotide
  Antisense strand to SEQ ID NO: 1313032
augcccaacugcauuucuc

SEQ ID NO: 1313034 - RNA, 19 nt, Artificial Sequence
  Description of Artificial Sequence: Synthetic oligonucleotide
  Sense strand starting at position 165 of SEQ ID NO: 1241963
cuggccugugcucgaaaua

SEQ ID NO: 1313035 - RNA, 19 nt, Artificial Sequence
  Description of Artificial Sequence: Synthetic oligonucleotide
  Antisense strand to SEQ ID NO: 1313034
uauuucgagcacaggccag

SEQ ID NO: 1313036 - RNA, 19 nt, Artificial Sequence
  Description of Artificial Sequence: Synthetic oligonucleotide
  Sense strand starting at position 166 of SEQ ID NO: 1241963
uggccugugcucgaaauac

SEQ ID NO: 1313037 - RNA, 19 nt, Artificial Sequence
  Description of Artificial Sequence: Synthetic oligonucleotide
  Antisense strand to SEQ ID NO: 1313036
guauuucgagcacaggcca

SEQ ID NO: 1313038 - RNA, 19 nt, Artificial Sequence
  Description of Artificial Sequence: Synthetic oligonucleotide
  Sense strand starting at position 203 of SEQ ID NO: 1241963
uggccuuccugucucaaca

SEQ ID NO: 1313039 - RNA, 19 nt, Artificial Sequence
  Description of Artificial Sequence: Synthetic oligonucleotide
  Antisense strand to SEQ ID NO: 1313038
uguugagacaggaaggcca

SEQ ID NO: 1313040 - RNA, 19 nt, Artificial Sequence
  Description of Artificial Sequence: Synthetic oligonucleotide
  Sense strand starting at position 378 of SEQ ID NO: 1241963
uuugcuguuugagauuuaa

SEQ ID NO: 1313041 - RNA, 19 nt, Artificial Sequence
  Description of Artificial Sequence: Synthetic oligonucleotide
  Antisense strand to SEQ ID NO: 1313040
uuaaaucucaaacagcaaa

SEQ ID NO: 1313042 - RNA, 19 nt, Artificial Sequence
  Description of Artificial Sequence: Synthetic oligonucleotide
  Sense strand starting at position 779 of SEQ ID NO: 1241963
ggcuucuccaucugaagga

SEQ ID NO: 1313043 - RNA, 19 nt, Artificial Sequence
  Description of Artificial Sequence: Synthetic oligonucleotide
  Antisense strand to SEQ ID NO: 1313042
uccuucagauggagaagcc

SEQ ID NO: 1313044 - RNA, 19 nt, Artificial Sequence
  Description of Artificial Sequence: Synthetic oligonucleotide
  Sense strand starting at position 905 of SEQ ID NO: 1241963
guggguagugaugauggau

SEQ ID NO: 1313045 - RNA, 19 nt, Artificial Sequence
  Description of Artificial Sequence: Synthetic oligonucleotide
  Antisense strand to SEQ ID NO: 1313044
auccaucaucacuacccac

SEQ ID NO: 1313046 - RNA, 19 nt, Artificial Sequence
  Description of Artificial Sequence: Synthetic oligonucleotide
  Sense strand starting at position 940 of SEQ ID NO: 1241963
guucuuauggcauaacuag

SEQ ID NO: 1313047 - RNA, 19 nt, Artificial Sequence
  Description of Artificial Sequence: Synthetic oligonucleotide
  Antisense strand to SEQ ID NO: 1313046
cuaguuaugccauaagaac

SEQ ID NO: 1313048 - RNA, 19 nt, Artificial Sequence
  Description of Artificial Sequence: Synthetic oligonucleotide
  Sense strand starting at position 1077 of SEQ ID NO: 1241963
ggcaucagugcugggauga

SEQ ID NO: 1313049 - RNA, 19 nt, Artificial Sequence
  Description of Artificial Sequence: Synthetic oligonucleotide
  Antisense strand to SEQ ID NO: 1313048
ucaucccagcacugaugcc

SEQ ID NO: 1313050 - RNA, 19 nt, Artificial Sequence
  Description of Artificial Sequence: Synthetic oligonucleotide
  Sense strand starting at position 1118 of SEQ ID NO: 1241963
cagagcuaucuguaggaca

SEQ ID NO: 1313051 - RNA, 19 nt, Artificial Sequence
  Description of Artificial Sequence: Synthetic oligonucleotide
  Antisense strand to SEQ ID NO: 1313050
uguccuacagauagcucug

SEQ ID NO: 1313052 - RNA, 19 nt, Artificial Sequence
  Description of Artificial Sequence: Synthetic oligonucleotide
  Sense strand starting at position 1120 of SEQ ID NO: 1241963
gagcuaucuguaggacaag

SEQ ID NO: 1313053 - RNA, 19 nt, Artificial Sequence
  Description of Artificial Sequence: Synthetic oligonucleotide
  Antisense strand to SEQ ID NO: 1313052
cuuguccuacagauagcuc

SEQ ID NO: 1313054 - RNA, 19 nt, Artificial Sequence
  Description of Artificial Sequence: Synthetic oligonucleotide
  Sense strand starting at position 1470 of SEQ ID NO: 1241963
cccaaacuugccuggcaaa

SEQ ID NO: 1313055 - RNA, 19 nt, Artificial Sequence
  Description of Artificial Sequence: Synthetic oligonucleotide
  Antisense strand to SEQ ID NO: 1313054
uuugccaggcaaguuuggg

SEQ ID NO: 1313056 - RNA, 19 nt, Artificial Sequence
  Description of Artificial Sequence: Synthetic oligonucleotide
  Sense strand starting at position 1603 of SEQ ID NO: 1241963
agccuuggcuagcuagaaa

SEQ ID NO: 1313057 - RNA, 19 nt, Artificial Sequence
  Description of Artificial Sequence: Synthetic oligonucleotide
  Antisense strand to SEQ ID NO: 1313056
uuucuagcuagccaaggcu

SEQ ID NO: 1313058 - RNA, 19 nt, Artificial Sequence
  Description of Artificial Sequence: Synthetic oligonucleotide
  Sense strand starting at position 1826 of SEQ ID NO: 1241963
augcaagucuggccaacau

SEQ ID NO: 1313059 - RNA, 19 nt, Artificial Sequence
  Description of Artificial Sequence: Synthetic oligonucleotide
  Antisense strand to SEQ ID NO: 1313058
auguuggccagacuugcau

SEQ ID NO: 1313060 - RNA, 19 nt, Artificial Sequence
  Description of Artificial Sequence: Synthetic oligonucleotide
  Sense strand starting at position 1839 of SEQ ID NO: 1241963
caacauagucagggucaaa

SEQ ID NO: 1313061 - RNA, 19 nt, Artificial Sequence
  Description of Artificial Sequence: Synthetic oligonucleotide
  Antisense strand to SEQ ID NO: 1313060
uuugacccugacuauguug

SEQ ID NO: 1313062 - RNA, 19 nt, Artificial Sequence
  Description of Artificial Sequence: Synthetic oligonucleotide
  Sense strand starting at position 2206 of SEQ ID NO: 1241963
agaacaaagucauagagag

SEQ ID NO: 1313063 - RNA, 19 nt, Artificial Sequence
  Description of Artificial Sequence: Synthetic oligonucleotide
  Antisense strand to SEQ ID NO: 1313062
cucucuaugacuuuguucu

SEQ ID NO: 1313064 - RNA, 19 nt, Artificial Sequence
  Description of Artificial Sequence: Synthetic oligonucleotide
  Sense strand starting at position 2436 of SEQ ID NO: 1241963
cuaggaacuucuccagacu

SEQ ID NO: 1313065 - RNA, 19 nt, Artificial Sequence
  Description of Artificial Sequence: Synthetic oligonucleotide
  Antisense strand to SEQ ID NO: 1313064
agucuggagaaguuccuag

SEQ ID NO: 1313066 - RNA, 19 nt, Artificial Sequence
  Description of Artificial Sequence: Synthetic oligonucleotide
  Sense strand starting at position 2768 of SEQ ID NO: 1241963
ccugaauccggguguuuca

SEQ ID NO: 1313067 - RNA, 19 nt, Artificial Sequence
  Description of Artificial Sequence: Synthetic oligonucleotide
  Antisense strand to SEQ ID NO: 1313066
ugaaacacccggauucagg

SEQ ID NO: 1313068 - RNA, 19 nt, Artificial Sequence
  Description of Artificial Sequence: Synthetic oligonucleotide
  Sense strand starting at position 2821 of SEQ ID NO: 1241963
ggauuuggcuucuaccuaa

SEQ ID NO: 1313069 - RNA, 19 nt, Artificial Sequence
  Description of Artificial Sequence: Synthetic oligonucleotide
  Antisense strand to SEQ ID NO: 1313068
uuagguagaagccaaaucc

SEQ ID NO: 1313070 - RNA, 19 nt, Artificial Sequence
  Description of Artificial Sequence: Synthetic oligonucleotide
  Sense strand starting at position 2910 of SEQ ID NO: 1241963
gagaaagggcaauguuacu

SEQ ID NO: 1313071 - RNA, 19 nt, Artificial Sequence
  Description of Artificial Sequence: Synthetic oligonucleotide
  Antisense strand to SEQ ID NO: 1313070
aguaacauugcccuuucuc

SEQ ID NO: 1313072 - RNA, 19 nt, Artificial Sequence
  Description of Artificial Sequence: Synthetic oligonucleotide
  Sense strand starting at position 2916 of SEQ ID NO: 1241963
gggcaauguuacuuagcuu

SEQ ID NO: 1313073 - RNA, 19 nt, Artificial Sequence
  Description of Artificial Sequence: Synthetic oligonucleotide
  Antisense strand to SEQ ID NO: 1313072
aagcuaaguaacauugccc

SEQ ID NO: 1313074 - RNA, 19 nt, Artificial Sequence
  Description of Artificial Sequence: Synthetic oligonucleotide
  Sense strand starting at position 2944 of SEQ ID NO: 1241963
agaggaucugcguguucuc

SEQ ID NO: 1313075 - RNA, 19 nt, Artificial Sequence
  Description of Artificial Sequence: Synthetic oligonucleotide
  Antisense strand to SEQ ID NO: 1313074
gagaacacgcagauccucu

SEQ ID NO: 1313076 - RNA, 19 nt, Artificial Sequence
  Description of Artificial Sequence: Synthetic oligonucleotide
  Sense strand starting at position 2988 of SEQ ID NO: 1241963
uugguuuacuuccuccauu

SEQ ID NO: 1313077 - RNA, 19 nt, Artificial Sequence
  Description of Artificial Sequence: Synthetic oligonucleotide
  Antisense strand to SEQ ID NO: 1313076
aauggaggaaguaaaccaa

SEQ ID NO: 1313078 - RNA, 19 nt, Artificial Sequence
  Description of Artificial Sequence: Synthetic oligonucleotide
  Sense strand starting at position 3176 of SEQ ID NO: 1241963
ggagcuagucuacauagcu

SEQ ID NO: 1313079 - RNA, 19 nt, Artificial Sequence
  Description of Artificial Sequence: Synthetic oligonucleotide
  Antisense strand to SEQ ID NO: 1313078
agcuauguagacuagcucc

SEQ ID NO: 1313080 - RNA, 19 nt, Artificial Sequence
  Description of Artificial Sequence: Synthetic oligonucleotide
  Sense strand starting at position 3273 of SEQ ID NO: 1241963
aguauuggucuugaaacca

SEQ ID NO: 1313081 - RNA, 19 nt, Artificial Sequence
  Description of Artificial Sequence: Synthetic oligonucleotide
  Antisense strand to SEQ ID NO: 1313080
ugguuucaagaccaauacu

SEQ ID NO: 1313082 - RNA, 19 nt, Artificial Sequence
  Description of Artificial Sequence: Synthetic oligonucleotide
  Sense strand starting at position 3317 of SEQ ID NO: 1241963
ucccuuacuugguugucaa

SEQ ID NO: 1313083 - RNA, 19 nt, Artificial Sequence
  Description of Artificial Sequence: Synthetic oligonucleotide
  Antisense strand to SEQ ID NO: 1313082
uugacaaccaaguaaggga

SEQ ID NO: 1313084 - RNA, 19 nt, Artificial Sequence
  Description of Artificial Sequence: Synthetic oligonucleotide
  Sense strand starting at position 3318 of SEQ ID NO: 1241963
cccuuacuugguugucaaa

SEQ ID NO: 1313085 - RNA, 19 nt, Artificial Sequence
  Description of Artificial Sequence: Synthetic oligonucleotide
  Antisense strand to SEQ ID NO: 1313084
uuugacaaccaaguaaggg

SEQ ID NO: 1313086 - RNA, 19 nt, Artificial Sequence
  Description of Artificial Sequence: Synthetic oligonucleotide
  Sense strand starting at position 3328 of SEQ ID NO: 1241963
guugucaaaccuugaacaa

SEQ ID NO: 1313087 - RNA, 19 nt, Artificial Sequence
  Description of Artificial Sequence: Synthetic oligonucleotide
  Antisense strand to SEQ ID NO: 1313086
uuguucaagguuugacaac

SEQ ID NO: 1313088 - RNA, 19 nt, Artificial Sequence
  Description of Artificial Sequence: Synthetic oligonucleotide
  Sense strand starting at position 3408 of SEQ ID NO: 1241963
gcuuuaauguaccucaagu

SEQ ID NO: 1313089 - RNA, 19 nt, Artificial Sequence
  Description of Artificial Sequence: Synthetic oligonucleotide
  Antisense strand to SEQ ID NO: 1313088
acuugagguacauuaaagc

SEQ ID NO: 1313090 - RNA, 19 nt, Artificial Sequence
  Description of Artificial Sequence: Synthetic oligonucleotide
  Sense strand starting at position 3497 of SEQ ID NO: 1241963
ccugcacauucccugugau

SEQ ID NO: 1313091 - RNA, 19 nt, Artificial Sequence
  Description of Artificial Sequence: Synthetic oligonucleotide
  Antisense strand to SEQ ID NO: 1313090
aucacagggaaugugcagg

SEQ ID NO: 1313092 - RNA, 19 nt, Artificial Sequence
  Description of Artificial Sequence: Synthetic oligonucleotide
  Sense strand starting at position 3498 of SEQ ID NO: 1241963
cugcacauucccugugauu

SEQ ID NO: 1313093 - RNA, 19 nt, Artificial Sequence
  Description of Artificial Sequence: Synthetic oligonucleotide
  Antisense strand to SEQ ID NO: 1313092
aaucacagggaaugugcag

SEQ ID NO: 1313094 - RNA, 19 nt, Artificial Sequence
  Description of Artificial Sequence: Synthetic oligonucleotide
  Sense strand starting at position 3544 of SEQ ID NO: 1241963
ucaccucccuuguuguaaa

SEQ ID NO: 1313095 - RNA, 19 nt, Artificial Sequence
  Description of Artificial Sequence: Synthetic oligonucleotide
  Antisense strand to SEQ ID NO: 1313094
uuuacaacaagggagguga

SEQ ID NO: 1313096 - RNA, 19 nt, Artificial Sequence
  Description of Artificial Sequence: Synthetic oligonucleotide
  Sense strand starting at position 3554 of SEQ ID NO: 1241963
uguuguaaagcuugaacuu

SEQ ID NO: 1313097 - RNA, 19 nt, Artificial Sequence
  Description of Artificial Sequence: Synthetic oligonucleotide
  Antisense strand to SEQ ID NO: 1313096
aaguucaagcuuuacaaca

SEQ ID NO: 1313098 - RNA, 19 nt, Artificial Sequence
  Description of Artificial Sequence: Synthetic oligonucleotide
  Sense strand starting at position 3555 of SEQ ID NO: 1241963
guuguaaagcuugaacuuu

SEQ ID NO: 1313099 - RNA, 19 nt, Artificial Sequence
  Description of Artificial Sequence: Synthetic oligonucleotide
  Antisense strand to SEQ ID NO: 1313098
aaaguucaagcuuuacaac

SEQ ID NO: 1313100 - RNA, 19 nt, Artificial Sequence
  Description of Artificial Sequence: Synthetic oligonucleotide
  Sense strand starting at position 3606 of SEQ ID NO: 1241963
acaauaaaugccugcugua

SEQ ID NO: 1313101 - RNA, 19 nt, Artificial Sequence
  Description of Artificial Sequence: Synthetic oligonucleotide
  Antisense strand to SEQ ID NO: 1313100
uacagcaggcauuuauugu

SEQ ID NO: 1313102 - RNA, 19 nt, Artificial Sequence
  Description of Artificial Sequence: Synthetic oligonucleotide
  Sense strand starting at position 3615 of SEQ ID NO: 1241963
gccugcuguaguugacuaa

SEQ ID NO: 1313103 - RNA, 19 nt, Artificial Sequence
  Description of Artificial Sequence: Synthetic oligonucleotide
  Antisense strand to SEQ ID NO: 1313102
uuagucaacuacagcaggc

SEQ ID NO: 1313104 - RNA, 19 nt, Artificial Sequence
  Description of Artificial Sequence: Synthetic oligonucleotide
  Sense strand starting at position 3618 of SEQ ID NO: 1241963
ugcuguaguugacuaagaa

SEQ ID NO: 1313105 - RNA, 19 nt, Artificial Sequence
  Description of Artificial Sequence: Synthetic oligonucleotide
  Antisense strand to SEQ ID NO: 1313104
uucuuagucaacuacagca

SEQ ID NO: 1313106 - RNA, 19 nt, Artificial Sequence
  Description of Artificial Sequence: Synthetic oligonucleotide
  Sense strand starting at position 3619 of SEQ ID NO: 1241963
gcuguaguugacuaagaaa

SEQ ID NO: 1313107 - RNA, 19 nt, Artificial Sequence
  Description of Artificial Sequence: Synthetic oligonucleotide
  Antisense strand to SEQ ID NO: 1313106
uuucuuagucaacuacagc

SEQ ID NO: 1313108 - RNA, 19 nt, Artificial Sequence
  Description of Artificial Sequence: Synthetic oligonucleotide
  Sense strand starting at position 3622 of SEQ ID NO: 1241963
guaguugacuaagaaacca

SEQ ID NO: 1313109 - RNA, 19 nt, Artificial Sequence
  Description of Artificial Sequence: Synthetic oligonucleotide
  Antisense strand to SEQ ID NO: 1313108
ugguuucuuagucaacuac

SEQ ID NO: 1313110 - RNA, 19 nt, Artificial Sequence
  Description of Artificial Sequence: Synthetic oligonucleotide
  Sense strand starting at position 3644 of SEQ ID NO: 1241963
gcugcuguucuguagggau

SEQ ID NO: 1313111 - RNA, 19 nt, Artificial Sequence
  Description of Artificial Sequence: Synthetic oligonucleotide
  Antisense strand to SEQ ID NO: 1313110
aucccuacagaacagcagc

SEQ ID NO: 1313112 - RNA, 19 nt, Artificial Sequence
  Description of Artificial Sequence: Synthetic oligonucleotide
  Sense strand starting at position 3646 of SEQ ID NO: 1241963
ugcuguucuguagggauuu

SEQ ID NO: 1313113 - RNA, 19 nt, Artificial Sequence
  Description of Artificial Sequence: Synthetic oligonucleotide
  Antisense strand to SEQ ID NO: 1313112
aaaucccuacagaacagca

SEQ ID NO: 1313114 - RNA, 19 nt, Artificial Sequence
  Description of Artificial Sequence: Synthetic oligonucleotide
  Sense strand starting at position 12 of SEQ ID NO: 1241964
cccagacauuaugugauga

SEQ ID NO: 1313115 - RNA, 19 nt, Artificial Sequence
  Description of Artificial Sequence: Synthetic oligonucleotide
  Antisense strand to SEQ ID NO: 1313114
ucaucacauaaugucuggg

SEQ ID NO: 1313116 - RNA, 19 nt, Artificial Sequence
  Description of Artificial Sequence: Synthetic oligonucleotide
  Sense strand starting at position 256 of SEQ ID NO: 1241964
cugaauaccugucucgaau

SEQ ID NO: 1313117 - RNA, 19 nt, Artificial Sequence
  Description of Artificial Sequence: Synthetic oligonucleotide
  Antisense strand to SEQ ID NO: 1313116
auucgagacagguauucag

SEQ ID NO: 1313118 - RNA, 19 nt, Artificial Sequence
  Description of Artificial Sequence: Synthetic oligonucleotide
  Sense strand starting at position 262 of SEQ ID NO: 1241964
accugucucgaaugaauga

SEQ ID NO: 1313119 - RNA, 19 nt, Artificial Sequence
  Description of Artificial Sequence: Synthetic oligonucleotide
  Antisense strand to SEQ ID NO: 1313118
ucauucauucgagacaggu

SEQ ID NO: 1313120 - RNA, 19 nt, Artificial Sequence
  Description of Artificial Sequence: Synthetic oligonucleotide
  Sense strand starting at position 440 of SEQ ID NO: 1241964
aguucuaaaugguuuaaac

SEQ ID NO: 1313121 - RNA, 19 nt, Artificial Sequence
  Description of Artificial Sequence: Synthetic oligonucleotide
  Antisense strand to SEQ ID NO: 1313120
guuuaaaccauuuagaacu

SEQ ID NO: 1313122 - RNA, 19 nt, Artificial Sequence
  Description of Artificial Sequence: Synthetic oligonucleotide
  Sense strand starting at position 450 of SEQ ID NO: 1241964
gguuuaaacuggccaguau

SEQ ID NO: 1313123 - RNA, 19 nt, Artificial Sequence
  Description of Artificial Sequence: Synthetic oligonucleotide
  Antisense strand to SEQ ID NO: 1313122
auacuggccaguuuaaacc

SEQ ID NO: 1313124 - RNA, 19 nt, Artificial Sequence
  Description of Artificial Sequence: Synthetic oligonucleotide
  Sense strand starting at position 476 of SEQ ID NO: 1241964
agcuguuagaucgacuuaa

SEQ ID NO: 1313125 - RNA, 19 nt, Artificial Sequence
  Description of Artificial Sequence: Synthetic oligonucleotide
  Antisense strand to SEQ ID NO: 1313124
uuaagucgaucuaacagcu

SEQ ID NO: 1313126 - RNA, 19 nt, Artificial Sequence
  Description of Artificial Sequence: Synthetic oligonucleotide
  Sense strand starting at position 487 of SEQ ID NO: 1241964
cgacuuaauuuggacccau

SEQ ID NO: 1313127 - RNA, 19 nt, Artificial Sequence
  Description of Artificial Sequence: Synthetic oligonucleotide
  Antisense strand to SEQ ID NO: 1313126
auggguccaaauuaagucg

SEQ ID NO: 1313128 - RNA, 19 nt, Artificial Sequence
  Description of Artificial Sequence: Synthetic oligonucleotide
  Sense strand starting at position 500 of SEQ ID NO: 1241964
acccaugagacucgugaca

SEQ ID NO: 1313129 - RNA, 19 nt, Artificial Sequence
  Description of Artificial Sequence: Synthetic oligonucleotide
  Antisense strand to SEQ ID NO: 1313128
ugucacgagucucaugggu

SEQ ID NO: 1313130 - RNA, 19 nt, Artificial Sequence
  Description of Artificial Sequence: Synthetic oligonucleotide
  Sense strand starting at position 563 of SEQ ID NO: 1241964
aaaucuguuugaucaagug

SEQ ID NO: 1313131 - RNA, 19 nt, Artificial Sequence
  Description of Artificial Sequence: Synthetic oligonucleotide
  Antisense strand to SEQ ID NO: 1313130
cacuugaucaaacagauuu

SEQ ID NO: 1313132 - RNA, 19 nt, Artificial Sequence
  Description of Artificial Sequence: Synthetic oligonucleotide
  Sense strand starting at position 570 of SEQ ID NO: 1241964
uuugaucaaguguggaauu

SEQ ID NO: 1313133 - RNA, 19 nt, Artificial Sequence
  Description of Artificial Sequence: Synthetic oligonucleotide
  Antisense strand to SEQ ID NO: 1313132
aauuccacacuugaucaaa

SEQ ID NO: 1313134 - RNA, 19 nt, Artificial Sequence
  Description of Artificial Sequence: Synthetic oligonucleotide
  Sense strand starting at position 926 of SEQ ID NO: 1241964
gacugaaauuuagggaaac

SEQ ID NO: 1313135 - RNA, 19 nt, Artificial Sequence
  Description of Artificial Sequence: Synthetic oligonucleotide
  Antisense strand to SEQ ID NO: 1313134
guuucccuaaauuucaguc

SEQ ID NO: 1313136 - RNA, 19 nt, Artificial Sequence
  Description of Artificial Sequence: Synthetic oligonucleotide
  Sense strand starting at position 936 of SEQ ID NO: 1241964
uagggaaacgccuguaucu

SEQ ID NO: 1313137 - RNA, 19 nt, Artificial Sequence
  Description of Artificial Sequence: Synthetic oligonucleotide
  Antisense strand to SEQ ID NO: 1313136
agauacaggcguuucccua

SEQ ID NO: 1313138 - RNA, 19 nt, Artificial Sequence
  Description of Artificial Sequence: Synthetic oligonucleotide
  Sense strand starting at position 1004 of SEQ ID NO: 1241964
agagacaguuccucacagu

SEQ ID NO: 1313139 - RNA, 19 nt, Artificial Sequence
  Description of Artificial Sequence: Synthetic oligonucleotide
  Antisense strand to SEQ ID NO: 1313138
acugugaggaacugucucu

SEQ ID NO: 1313140 - RNA, 19 nt, Artificial Sequence
  Description of Artificial Sequence: Synthetic oligonucleotide
  Sense strand starting at position 1005 of SEQ ID NO: 1241964
gagacaguuccucacaguc

SEQ ID NO: 1313141 - RNA, 19 nt, Artificial Sequence
  Description of Artificial Sequence: Synthetic oligonucleotide
  Antisense strand to SEQ ID NO: 1313140
gacugugaggaacugucuc

SEQ ID NO: 1313142 - RNA, 19 nt, Artificial Sequence
  Description of Artificial Sequence: Synthetic oligonucleotide
  Sense strand starting at position 1052 of SEQ ID NO: 1241964
acaccuuggcucgaaugua

SEQ ID NO: 1313143 - RNA, 19 nt, Artificial Sequence
  Description of Artificial Sequence: Synthetic oligonucleotide
  Antisense strand to SEQ ID NO: 1313142
uacauucgagccaaggugu

SEQ ID NO: 1313144 - RNA, 19 nt, Artificial Sequence
  Description of Artificial Sequence: Synthetic oligonucleotide
  Sense strand starting at position 1057 of SEQ ID NO: 1241964
uuggcucgaauguaaagaa

SEQ ID NO: 1313145 - RNA, 19 nt, Artificial Sequence
  Description of Artificial Sequence: Synthetic oligonucleotide
  Antisense strand to SEQ ID NO: 1313144
uucuuuacauucgagccaa

SEQ ID NO: 1313146 - RNA, 19 nt, Artificial Sequence
  Description of Artificial Sequence: Synthetic oligonucleotide
  Sense strand starting at position 1555 of SEQ ID NO: 1241964
cggaauggcuguuccaaau

SEQ ID NO: 1313147 - RNA, 19 nt, Artificial Sequence
  Description of Artificial Sequence: Synthetic oligonucleotide
  Antisense strand to SEQ ID NO: 1313146
auuuggaacagccauuccg

SEQ ID NO: 1313148 - RNA, 19 nt, Artificial Sequence
  Description of Artificial Sequence: Synthetic oligonucleotide
  Sense strand starting at position 1635 of SEQ ID NO: 1241964
auaagaugaacgcggaauu

SEQ ID NO: 1313149 - RNA, 19 nt, Artificial Sequence
  Description of Artificial Sequence: Synthetic oligonucleotide
  Antisense strand to SEQ ID NO: 1313148
aauuccgcguucaucuuau

SEQ ID NO: 1313150 - RNA, 19 nt, Artificial Sequence
  Description of Artificial Sequence: Synthetic oligonucleotide
  Sense strand starting at position 2651 of SEQ ID NO: 1241964
cggucagcgcuccuugagu

SEQ ID NO: 1313151 - RNA, 19 nt, Artificial Sequence
  Description of Artificial Sequence: Synthetic oligonucleotide
  Antisense strand to SEQ ID NO: 1313150
acucaaggagcgcugaccg

SEQ ID NO: 1313152 - RNA, 19 nt, Artificial Sequence
  Description of Artificial Sequence: Synthetic oligonucleotide
  Sense strand starting at position 2860 of SEQ ID NO: 1241964
gcucuacagaucuggaagu

SEQ ID NO: 1313153 - RNA, 19 nt, Artificial Sequence
  Description of Artificial Sequence: Synthetic oligonucleotide
  Antisense strand to SEQ ID NO: 1313152
acuuccagaucuguagagc

SEQ ID NO: 1313154 - RNA, 19 nt, Artificial Sequence
  Description of Artificial Sequence: Synthetic oligonucleotide
  Sense strand starting at position 2948 of SEQ ID NO: 1241964
ccaccuaaguaucuggaau

SEQ ID NO: 1313155 - RNA, 19 nt, Artificial Sequence
  Description of Artificial Sequence: Synthetic oligonucleotide
  Antisense strand to SEQ ID NO: 1313154
auuccagauacuuaggugg

SEQ ID NO: 1313156 - RNA, 19 nt, Artificial Sequence
  Description of Artificial Sequence: Synthetic oligonucleotide
  Sense strand starting at position 3107 of SEQ ID NO: 1241964
gggcuaugagucuaaagcu

SEQ ID NO: 1313157 - RNA, 19 nt, Artificial Sequence
  Description of Artificial Sequence: Synthetic oligonucleotide
  Antisense strand to SEQ ID NO: 1313156
agcuuuagacucauagccc

SEQ ID NO: 1313158 - RNA, 19 nt, Artificial Sequence
  Description of Artificial Sequence: Synthetic oligonucleotide
  Sense strand starting at position 3131 of SEQ ID NO: 1241964
guggguagcaaucauugga

SEQ ID NO: 1313159 - RNA, 19 nt, Artificial Sequence
  Description of Artificial Sequence: Synthetic oligonucleotide
  Antisense strand to SEQ ID NO: 1313158
uccaaugauugcuacccac

SEQ ID NO: 1313160 - RNA, 19 nt, Artificial Sequence
  Description of Artificial Sequence: Synthetic oligonucleotide
  Sense strand starting at position 3198 of SEQ ID NO: 1241964
aaggaaucgccuuguccaa

SEQ ID NO: 1313161 - RNA, 19 nt, Artificial Sequence
  Description of Artificial Sequence: Synthetic oligonucleotide
  Antisense strand to SEQ ID NO: 1313160
uuggacaaggcgauuccuu

SEQ ID NO: 1313162 - RNA, 19 nt, Artificial Sequence
  Description of Artificial Sequence: Synthetic oligonucleotide
  Sense strand starting at position 3296 of SEQ ID NO: 1241964
gcgugucuucuacuugauu

SEQ ID NO: 1313163 - RNA, 19 nt, Artificial Sequence
  Description of Artificial Sequence: Synthetic oligonucleotide
  Antisense strand to SEQ ID NO: 1313162
aaucaaguagaagacacgc

SEQ ID NO: 1313164 - RNA, 19 nt, Artificial Sequence
  Description of Artificial Sequence: Synthetic oligonucleotide
  Sense strand starting at position 3317 of SEQ ID NO: 1241964
uauuguuggaggugaugga

SEQ ID NO: 1313165 - RNA, 19 nt, Artificial Sequence
  Description of Artificial Sequence: Synthetic oligonucleotide
  Antisense strand to SEQ ID NO: 1313164
uccaucaccuccaacaaua

SEQ ID NO: 1313166 - RNA, 19 nt, Artificial Sequence
  Description of Artificial Sequence: Synthetic oligonucleotide
  Sense strand starting at position 3330 of SEQ ID NO: 1241964
gauggaguaacugggcuua

SEQ ID NO: 1313167 - RNA, 19 nt, Artificial Sequence
  Description of Artificial Sequence: Synthetic oligonucleotide
  Antisense strand to SEQ ID NO: 1313166
uaagcccaguuacuccauc

SEQ ID NO: 1313168 - RNA, 19 nt, Artificial Sequence
  Description of Artificial Sequence: Synthetic oligonucleotide
  Sense strand starting at position 3352 of SEQ ID NO: 1241964
gggucuuacugggucucaa

SEQ ID NO: 1313169 - RNA, 19 nt, Artificial Sequence
  Description of Artificial Sequence: Synthetic oligonucleotide
  Antisense strand to SEQ ID NO: 1313168
uugagacccaguaagaccc

SEQ ID NO: 1313170 - RNA, 19 nt, Artificial Sequence
  Description of Artificial Sequence: Synthetic oligonucleotide
  Sense strand starting at position 3441 of SEQ ID NO: 1241964
uuggcaucauaguugaauu

SEQ ID NO: 1313171 - RNA, 19 nt, Artificial Sequence
  Description of Artificial Sequence: Synthetic oligonucleotide
  Antisense strand to SEQ ID NO: 1313170
aauucaacuaugaugccaa

SEQ ID NO: 1313172 - RNA, 19 nt, Artificial Sequence
  Description of Artificial Sequence: Synthetic oligonucleotide
  Sense strand starting at position 3449 of SEQ ID NO: 1241964
auaguugaauuccuuuaga

SEQ ID NO: 1313173 - RNA, 19 nt, Artificial Sequence
  Description of Artificial Sequence: Synthetic oligonucleotide
  Antisense strand to SEQ ID NO: 1313172
ucuaaaggaauucaacuau

SEQ ID NO: 1313174 - RNA, 19 nt, Artificial Sequence
  Description of Artificial Sequence: Synthetic oligonucleotide
  Sense strand starting at position 3568 of SEQ ID NO: 1241964
gaggucugggccugggaaa

SEQ ID NO: 1313175 - RNA, 19 nt, Artificial Sequence
  Description of Artificial Sequence: Synthetic oligonucleotide
  Antisense strand to SEQ ID NO: 1313174
uuucccaggcccagaccuc

SEQ ID NO: 1313176 - RNA, 19 nt, Artificial Sequence
  Description of Artificial Sequence: Synthetic oligonucleotide
  Sense strand starting at position 3581 of SEQ ID NO: 1241964
gggaaaugaguuuggguga

SEQ ID NO: 1313177 - RNA, 19 nt, Artificial Sequence
  Description of Artificial Sequence: Synthetic oligonucleotide
  Antisense strand to SEQ ID NO: 1313176
ucacccaaacucauuuccc

SEQ ID NO: 1313178 - RNA, 19 nt, Artificial Sequence
  Description of Artificial Sequence: Synthetic oligonucleotide
  Sense strand starting at position 3584 of SEQ ID NO: 1241964
aaaugaguuugggugauca

SEQ ID NO: 1313179 - RNA, 19 nt, Artificial Sequence
  Description of Artificial Sequence: Synthetic oligonucleotide
  Antisense strand to SEQ ID NO: 1313178
ugaucacccaaacucauuu

SEQ ID NO: 1313180 - RNA, 19 nt, Artificial Sequence
  Description of Artificial Sequence: Synthetic oligonucleotide
  Sense strand starting at position 3588 of SEQ ID NO: 1241964
gaguuugggugaucaggau

SEQ ID NO: 1313181 - RNA, 19 nt, Artificial Sequence
  Description of Artificial Sequence: Synthetic oligonucleotide
  Antisense strand to SEQ ID NO: 1313180
auccugaucacccaaacuc

SEQ ID NO: 1313182 - RNA, 19 nt, Artificial Sequence
  Description of Artificial Sequence: Synthetic oligonucleotide
  Sense strand starting at position 3659 of SEQ ID NO: 1241964
gccaguggaacucauguga

SEQ ID NO: 1313183 - RNA, 19 nt, Artificial Sequence
  Description of Artificial Sequence: Synthetic oligonucleotide
  Antisense strand to SEQ ID NO: 1313182
ucacaugaguuccacuggc

SEQ ID NO: 1313184 - RNA, 19 nt, Artificial Sequence
  Description of Artificial Sequence: Synthetic oligonucleotide
  Sense strand starting at position 3663 of SEQ ID NO: 1241964
guggaacucaugugaucuc

SEQ ID NO: 1313185 - RNA, 19 nt, Artificial Sequence
  Description of Artificial Sequence: Synthetic oligonucleotide
  Antisense strand to SEQ ID NO: 1313184
gagaucacaugaguuccac

SEQ ID NO: 1313186 - RNA, 19 nt, Artificial Sequence
  Description of Artificial Sequence: Synthetic oligonucleotide
  Sense strand starting at position 3763 of SEQ ID NO: 1241964
cuggcuguuagcgaaagaa

SEQ ID NO: 1313187 - RNA, 19 nt, Artificial Sequence
  Description of Artificial Sequence: Synthetic oligonucleotide
  Antisense strand to SEQ ID NO: 1313186
uucuuucgcuaacagccag

SEQ ID NO: 1313188 - RNA, 19 nt, Artificial Sequence
  Description of Artificial Sequence: Synthetic oligonucleotide
  Sense strand starting at position 3870 of SEQ ID NO: 1241964
ggagauugcaaucaguuau

SEQ ID NO: 1313189 - RNA, 19 nt, Artificial Sequence
  Description of Artificial Sequence: Synthetic oligonucleotide
  Antisense strand to SEQ ID NO: 1313188
auaacugauugcaaucucc

SEQ ID NO: 1313190 - RNA, 19 nt, Artificial Sequence
  Description of Artificial Sequence: Synthetic oligonucleotide
  Sense strand starting at position 3969 of SEQ ID NO: 1241964
gagucucaauguuuaaaug

SEQ ID NO: 1313191 - RNA, 19 nt, Artificial Sequence
  Description of Artificial Sequence: Synthetic oligonucleotide
  Antisense strand to SEQ ID NO: 1313190
cauuuaaacauugagacuc

SEQ ID NO: 1313192 - RNA, 19 nt, Artificial Sequence
  Description of Artificial Sequence: Synthetic oligonucleotide
  Sense strand starting at position 3970 of SEQ ID NO: 1241964
agucucaauguuuaaaugu

SEQ ID NO: 1313193 - RNA, 19 nt, Artificial Sequence
  Description of Artificial Sequence: Synthetic oligonucleotide
  Antisense strand to SEQ ID NO: 1313192
acauuuaaacauugagacu

SEQ ID NO: 1313194 - RNA, 19 nt, Artificial Sequence
  Description of Artificial Sequence: Synthetic oligonucleotide
  Sense strand starting at position 10 of SEQ ID NO: 1241965
uuaagaucccuuuaaguug

SEQ ID NO: 1313195 - RNA, 19 nt, Artificial Sequence
  Description of Artificial Sequence: Synthetic oligonucleotide
  Antisense strand to SEQ ID NO: 1313194
caacuuaaagggaucuuaa

SEQ ID NO: 1313196 - RNA, 19 nt, Artificial Sequence
  Description of Artificial Sequence: Synthetic oligonucleotide
  Sense strand starting at position 25 of SEQ ID NO: 1241965
guugcauauuuggcuccau

SEQ ID NO: 1313197 - RNA, 19 nt, Artificial Sequence
  Description of Artificial Sequence: Synthetic oligonucleotide
  Antisense strand to SEQ ID NO: 1313196
auggagccaaauaugcaac

SEQ ID NO: 1313198 - RNA, 19 nt, Artificial Sequence
  Description of Artificial Sequence: Synthetic oligonucleotide
  Sense strand starting at position 26 of SEQ ID NO: 1241965
uugcauauuuggcuccauu

SEQ ID NO: 1313199 - RNA, 19 nt, Artificial Sequence
  Description of Artificial Sequence: Synthetic oligonucleotide
  Antisense strand to SEQ ID NO: 1313198
aauggagccaaauaugcaa

SEQ ID NO: 1313200 - RNA, 19 nt, Artificial Sequence
  Description of Artificial Sequence: Synthetic oligonucleotide
  Sense strand starting at position 52 of SEQ ID NO: 1241965
uaaacugacucggcaagua

SEQ ID NO: 1313201 - RNA, 19 nt, Artificial Sequence
  Description of Artificial Sequence: Synthetic oligonucleotide
  Antisense strand to SEQ ID NO: 1313200
uacuugccgagucaguuua

SEQ ID NO: 1313202 - RNA, 19 nt, Artificial Sequence
  Description of Artificial Sequence: Synthetic oligonucleotide
  Sense strand starting at position 57 of SEQ ID NO: 1241965
ugacucggcaaguaguuaa

SEQ ID NO: 1313203 - RNA, 19 nt, Artificial Sequence
  Description of Artificial Sequence: Synthetic oligonucleotide
  Antisense strand to SEQ ID NO: 1313202
uuaacuacuugccgaguca

SEQ ID NO: 1313204 - RNA, 19 nt, Artificial Sequence
  Description of Artificial Sequence: Synthetic oligonucleotide
  Sense strand starting at position 67 of SEQ ID NO: 1241965
aguaguuaacgugccugua

SEQ ID NO: 1313205 - RNA, 19 nt, Artificial Sequence
  Description of Artificial Sequence: Synthetic oligonucleotide
  Antisense strand to SEQ ID NO: 1313204
uacaggcacguuaacuacu

SEQ ID NO: 1313206 - RNA, 19 nt, Artificial Sequence
  Description of Artificial Sequence: Synthetic oligonucleotide
  Sense strand starting at position 95 of SEQ ID NO: 1241965
uucuauucgccuuaggaaa

SEQ ID NO: 1313207 - RNA, 19 nt, Artificial Sequence
  Description of Artificial Sequence: Synthetic oligonucleotide
  Antisense strand to SEQ ID NO: 1313206
uuuccuaaggcgaauagaa

SEQ ID NO: 1313208 - RNA, 19 nt, Artificial Sequence
  Description of Artificial Sequence: Synthetic oligonucleotide
  Sense strand starting at position 225 of SEQ ID NO: 1241965
uuguguguuccuguuuauu

SEQ ID NO: 1313209 - RNA, 19 nt, Artificial Sequence
  Description of Artificial Sequence: Synthetic oligonucleotide
  Antisense strand to SEQ ID NO: 1313208
aauaaacaggaacacacaa

SEQ ID NO: 1313210 - RNA, 19 nt, Artificial Sequence
  Description of Artificial Sequence: Synthetic oligonucleotide
  Sense strand starting at position 230 of SEQ ID NO: 1241965
uguuccuguuuauuauuga

SEQ ID NO: 1313211 - RNA, 19 nt, Artificial Sequence
  Description of Artificial Sequence: Synthetic oligonucleotide
  Antisense strand to SEQ ID NO: 1313210
ucaauaauaaacaggaaca

SEQ ID NO: 1313212 - RNA, 19 nt, Artificial Sequence
  Description of Artificial Sequence: Synthetic oligonucleotide
  Sense strand starting at position 466 of SEQ ID NO: 1241965
augaacaauuggucugcaa

SEQ ID NO: 1313213 - RNA, 19 nt, Artificial Sequence
  Description of Artificial Sequence: Synthetic oligonucleotide
  Antisense strand to SEQ ID NO: 1313212
uugcagaccaauuguucau

SEQ ID NO: 1313214 - RNA, 19 nt, Artificial Sequence
  Description of Artificial Sequence: Synthetic oligonucleotide
  Sense strand starting at position 468 of SEQ ID NO: 1241965
gaacaauuggucugcaaug

SEQ ID NO: 1313215 - RNA, 19 nt, Artificial Sequence
  Description of Artificial Sequence: Synthetic oligonucleotide
  Antisense strand to SEQ ID NO: 1313214
cauugcagaccaauuguuc

SEQ ID NO: 1313216 - RNA, 19 nt, Artificial Sequence
  Description of Artificial Sequence: Synthetic oligonucleotide
  Sense strand starting at position 469 of SEQ ID NO: 1241965
aacaauuggucugcaaugu

SEQ ID NO: 1313217 - RNA, 19 nt, Artificial Sequence
  Description of Artificial Sequence: Synthetic oligonucleotide
  Antisense strand to SEQ ID NO: 1313216
acauugcagaccaauuguu

SEQ ID NO: 1313218 - RNA, 19 nt, Artificial Sequence
  Description of Artificial Sequence: Synthetic oligonucleotide
  Sense strand starting at position 470 of SEQ ID NO: 1241965
acaauuggucugcaaugua

SEQ ID NO: 1313219 - RNA, 19 nt, Artificial Sequence
  Description of Artificial Sequence: Synthetic oligonucleotide
  Antisense strand to SEQ ID NO: 1313218
uacauugcagaccaauugu

SEQ ID NO: 1313220 - RNA, 19 nt, Artificial Sequence
  Description of Artificial Sequence: Synthetic oligonucleotide
  Sense strand starting at position 473 of SEQ ID NO: 1241965
auuggucugcaauguaauu

SEQ ID NO: 1313221 - RNA, 19 nt, Artificial Sequence
  Description of Artificial Sequence: Synthetic oligonucleotide
  Antisense strand to SEQ ID NO: 1313220
aauuacauugcagaccaau

SEQ ID NO: 1313222 - RNA, 19 nt, Artificial Sequence
  Description of Artificial Sequence: Synthetic oligonucleotide
  Sense strand starting at position 674 of SEQ ID NO: 1241965
uuguauacccacugaagaa

SEQ ID NO: 1313223 - RNA, 19 nt, Artificial Sequence
  Description of Artificial Sequence: Synthetic oligonucleotide
  Antisense strand to SEQ ID NO: 1313222
uucuucaguggguauacaa

SEQ ID NO: 1313224 - RNA, 19 nt, Artificial Sequence
  Description of Artificial Sequence: Synthetic oligonucleotide
  Sense strand starting at position 799 of SEQ ID NO: 1241965
cuuagaucucuuuagguuu

SEQ ID NO: 1313225 - RNA, 19 nt, Artificial Sequence
  Description of Artificial Sequence: Synthetic oligonucleotide
  Antisense strand to SEQ ID NO: 1313224
aaaccuaaagagaucuaag

SEQ ID NO: 1313226 - RNA, 19 nt, Artificial Sequence
  Description of Artificial Sequence: Synthetic oligonucleotide
  Sense strand starting at position 828 of SEQ ID NO: 1241965
cgcugaaguguuuaacauc

SEQ ID NO: 1313227 - RNA, 19 nt, Artificial Sequence
  Description of Artificial Sequence: Synthetic oligonucleotide
  Antisense strand to SEQ ID NO: 1313226
gauguuaaacacuucagcg

SEQ ID NO: 1313228 - RNA, 19 nt, Artificial Sequence
  Description of Artificial Sequence: Synthetic oligonucleotide
  Sense strand starting at position 912 of SEQ ID NO: 1241965
accacagaacucuggucaa

SEQ ID NO: 1313229 - RNA, 19 nt, Artificial Sequence
  Description of Artificial Sequence: Synthetic oligonucleotide
  Antisense strand to SEQ ID NO: 1313228
uugaccagaguucuguggu

SEQ ID NO: 1313230 - RNA, 19 nt, Artificial Sequence
  Description of Artificial Sequence: Synthetic oligonucleotide
  Sense strand starting at position 976 of SEQ ID NO: 1241965
agcagagaauauuaaggau

SEQ ID NO: 1313231 - RNA, 19 nt, Artificial Sequence
  Description of Artificial Sequence: Synthetic oligonucleotide
  Antisense strand to SEQ ID NO: 1313230
auccuuaauauucucugcu

SEQ ID NO: 1313232 - RNA, 19 nt, Artificial Sequence
  Description of Artificial Sequence: Synthetic oligonucleotide
  Sense strand starting at position 2098 of SEQ ID NO: 1241965
ggaguaaagcguuaggagu

SEQ ID NO: 1313233 - RNA, 19 nt, Artificial Sequence
  Description of Artificial Sequence: Synthetic oligonucleotide
  Antisense strand to SEQ ID NO: 1313232
acuccuaacgcuuuacucc

SEQ ID NO: 1313234 - RNA, 19 nt, Artificial Sequence
  Description of Artificial Sequence: Synthetic oligonucleotide
  Sense strand starting at position 2373 of SEQ ID NO: 1241965
ggcgccuuuccugggauuu

SEQ ID NO: 1313235 - RNA, 19 nt, Artificial Sequence
  Description of Artificial Sequence: Synthetic oligonucleotide
  Antisense strand to SEQ ID NO: 1313234
aaaucccaggaaaggcgcc

SEQ ID NO: 1313236 - RNA, 19 nt, Artificial Sequence
  Description of Artificial Sequence: Synthetic oligonucleotide
  Sense strand starting at position 2495 of SEQ ID NO: 1241965
ggugauucugcagguugaa

SEQ ID NO: 1313237 - RNA, 19 nt, Artificial Sequence
  Description of Artificial Sequence: Synthetic oligonucleotide
  Antisense strand to SEQ ID NO: 1313236
uucaaccugcagaaucacc

SEQ ID NO: 1313238 - RNA, 19 nt, Artificial Sequence
  Description of Artificial Sequence: Synthetic oligonucleotide
  Sense strand starting at position 2590 of SEQ ID NO: 1241965
uguaucaguccagagaauc

SEQ ID NO: 1313239 - RNA, 19 nt, Artificial Sequence
  Description of Artificial Sequence: Synthetic oligonucleotide
  Antisense strand to SEQ ID NO: 1313238
gauucucuggacugauaca

SEQ ID NO: 1313240 - RNA, 19 nt, Artificial Sequence
  Description of Artificial Sequence: Synthetic oligonucleotide
  Sense strand starting at position 2635 of SEQ ID NO: 1241965
aagccuaguguuuggaaga

SEQ ID NO: 1313241 - RNA, 19 nt, Artificial Sequence
  Description of Artificial Sequence: Synthetic oligonucleotide
  Antisense strand to SEQ ID NO: 1313240
ucuuccaaacacuaggcuu

SEQ ID NO: 1313242 - RNA, 19 nt, Artificial Sequence
  Description of Artificial Sequence: Synthetic oligonucleotide
  Sense strand starting at position 3196 of SEQ ID NO: 1241965
ugggaagguuucguaagau

SEQ ID NO: 1313243 - RNA, 19 nt, Artificial Sequence
  Description of Artificial Sequence: Synthetic oligonucleotide
  Antisense strand to SEQ ID NO: 1313242
aucuuacgaaaccuuccca

SEQ ID NO: 1313244 - RNA, 19 nt, Artificial Sequence
  Description of Artificial Sequence: Synthetic oligonucleotide
  Sense strand starting at position 3202 of SEQ ID NO: 1241965
gguuucguaagauaacauc

SEQ ID NO: 1313245 - RNA, 19 nt, Artificial Sequence
  Description of Artificial Sequence: Synthetic oligonucleotide
  Antisense strand to SEQ ID NO: 1313244
gauguuaucuuacgaaacc

SEQ ID NO: 1313246 - RNA, 19 nt, Artificial Sequence
  Description of Artificial Sequence: Synthetic oligonucleotide
  Sense strand starting at position 3251 of SEQ ID NO: 1241965
gggaagagugucuggguaa

SEQ ID NO: 1313247 - RNA, 19 nt, Artificial Sequence
  Description of Artificial Sequence: Synthetic oligonucleotide
  Antisense strand to SEQ ID NO: 1313246
uuacccagacacucuuccc

SEQ ID NO: 1313248 - RNA, 19 nt, Artificial Sequence
  Description of Artificial Sequence: Synthetic oligonucleotide
  Sense strand starting at position 3307 of SEQ ID NO: 1241965
uguugagccauuggagaag

SEQ ID NO: 1313249 - RNA, 19 nt, Artificial Sequence
  Description of Artificial Sequence: Synthetic oligonucleotide
  Antisense strand to SEQ ID NO: 1313248
cuucuccaauggcucaaca

SEQ ID NO: 1313250 - RNA, 19 nt, Artificial Sequence
  Description of Artificial Sequence: Synthetic oligonucleotide
  Sense strand starting at position 3327 of SEQ ID NO: 1241965
aguucugugcgcuaagaaa

SEQ ID NO: 1313251 - RNA, 19 nt, Artificial Sequence
  Description of Artificial Sequence: Synthetic oligonucleotide
  Antisense strand to SEQ ID NO: 1313250
uuucuuagcgcacagaacu

SEQ ID NO: 1313252 - RNA, 19 nt, Artificial Sequence
  Description of Artificial Sequence: Synthetic oligonucleotide
  Sense strand starting at position 3400 of SEQ ID NO: 1241965
auaacauaccguugugaau

SEQ ID NO: 1313253 - RNA, 19 nt, Artificial Sequence
  Description of Artificial Sequence: Synthetic oligonucleotide
  Antisense strand to SEQ ID NO: 1313252
auucacaacgguauguuau

SEQ ID NO: 1313254 - RNA, 19 nt, Artificial Sequence
  Description of Artificial Sequence: Synthetic oligonucleotide
  Sense strand starting at position 3471 of SEQ ID NO: 1241965
acuacagauucuucuguca

SEQ ID NO: 1313255 - RNA, 19 nt, Artificial Sequence
  Description of Artificial Sequence: Synthetic oligonucleotide
  Antisense strand to SEQ ID NO: 1313254
ugacagaagaaucuguagu

SEQ ID NO: 1313256 - RNA, 19 nt, Artificial Sequence
  Description of Artificial Sequence: Synthetic oligonucleotide
  Sense strand starting at position 3474 of SEQ ID NO: 1241965
acagauucuucugucagag

SEQ ID NO: 1313257 - RNA, 19 nt, Artificial Sequence
  Description of Artificial Sequence: Synthetic oligonucleotide
  Antisense strand to SEQ ID NO: 1313256
cucugacagaagaaucugu

SEQ ID NO: 1313258 - RNA, 19 nt, Artificial Sequence
  Description of Artificial Sequence: Synthetic oligonucleotide
  Sense strand starting at position 3524 of SEQ ID NO: 1241965
aaaugcucugaaugcgaca

SEQ ID NO: 1313259 - RNA, 19 nt, Artificial Sequence
  Description of Artificial Sequence: Synthetic oligonucleotide
  Antisense strand to SEQ ID NO: 1313258
ugucgcauucagagcauuu

SEQ ID NO: 1313260 - RNA, 19 nt, Artificial Sequence
  Description of Artificial Sequence: Synthetic oligonucleotide
  Sense strand starting at position 3537 of SEQ ID NO: 1241965
gcgacauuuauugggagcu

SEQ ID NO: 1313261 - RNA, 19 nt, Artificial Sequence
  Description of Artificial Sequence: Synthetic oligonucleotide
  Antisense strand to SEQ ID NO: 1313260
agcucccaauaaaugucgc

SEQ ID NO: 1313262 - RNA, 19 nt, Artificial Sequence
  Description of Artificial Sequence: Synthetic oligonucleotide
  Sense strand starting at position 3642 of SEQ ID NO: 1241965
auaauuaguuuauccagag

SEQ ID NO: 1313263 - RNA, 19 nt, Artificial Sequence
  Description of Artificial Sequence: Synthetic oligonucleotide
  Antisense strand to SEQ ID NO: 1313262
cucuggauaaacuaauuau

SEQ ID NO: 1313264 - RNA, 19 nt, Artificial Sequence
  Description of Artificial Sequence: Synthetic oligonucleotide
  Sense strand starting at position 3646 of SEQ ID NO: 1241965
uuaguuuauccagagugua

SEQ ID NO: 1313265 - RNA, 19 nt, Artificial Sequence
  Description of Artificial Sequence: Synthetic oligonucleotide
  Antisense strand to SEQ ID NO: 1313264
uacacucuggauaaacuaa

SEQ ID NO: 1313266 - RNA, 19 nt, Artificial Sequence
  Description of Artificial Sequence: Synthetic oligonucleotide
  Sense strand starting at position 3649 of SEQ ID NO: 1241965
guuuauccagaguguauca

SEQ ID NO: 1313267 - RNA, 19 nt, Artificial Sequence
  Description of Artificial Sequence: Synthetic oligonucleotide
  Antisense strand to SEQ ID NO: 1313266
ugauacacucuggauaaac

SEQ ID NO: 1313268 - RNA, 19 nt, Artificial Sequence
  Description of Artificial Sequence: Synthetic oligonucleotide
  Sense strand starting at position 3658 of SEQ ID NO: 1241965
gaguguaucauggaaagca

SEQ ID NO: 1313269 - RNA, 19 nt, Artificial Sequence
  Description of Artificial Sequence: Synthetic oligonucleotide
  Antisense strand to SEQ ID NO: 1313268
ugcuuuccaugauacacuc

SEQ ID NO: 1313270 - RNA, 19 nt, Artificial Sequence
  Description of Artificial Sequence: Synthetic oligonucleotide
  Sense strand starting at position 3770 of SEQ ID NO: 1241965
ggcugaaguaauuaaagcu

SEQ ID NO: 1313271 - RNA, 19 nt, Artificial Sequence
  Description of Artificial Sequence: Synthetic oligonucleotide
  Antisense strand to SEQ ID NO: 1313270
agcuuuaauuacuucagcc

SEQ ID NO: 1313272 - RNA, 19 nt, Artificial Sequence
  Description of Artificial Sequence: Synthetic oligonucleotide
  Sense strand starting at position 3777 of SEQ ID NO: 1241965
guaauuaaagcucauugca

SEQ ID NO: 1313273 - RNA, 19 nt, Artificial Sequence
  Description of Artificial Sequence: Synthetic oligonucleotide
  Antisense strand to SEQ ID NO: 1313272
ugcaaugagcuuuaauuac

SEQ ID NO: 1313274 - RNA, 19 nt, Artificial Sequence
  Description of Artificial Sequence: Synthetic oligonucleotide
  Sense strand starting at position 14 of SEQ ID NO: 1241966
ccaguuugccucuggagag

SEQ ID NO: 1313275 - RNA, 19 nt, Artificial Sequence
  Description of Artificial Sequence: Synthetic oligonucleotide
  Antisense strand to SEQ ID NO: 1313274
cucuccagaggcaaacugg

SEQ ID NO: 1313276 - RNA, 19 nt, Artificial Sequence
  Description of Artificial Sequence: Synthetic oligonucleotide
  Sense strand starting at position 18 of SEQ ID NO: 1241966
uuugccucuggagagauua

SEQ ID NO: 1313277 - RNA, 19 nt, Artificial Sequence
  Description of Artificial Sequence: Synthetic oligonucleotide
  Antisense strand to SEQ ID NO: 1313276
uaaucucuccagaggcaaa

SEQ ID NO: 1313278 - RNA, 19 nt, Artificial Sequence
  Description of Artificial Sequence: Synthetic oligonucleotide
  Sense strand starting at position 20 of SEQ ID NO: 1241966
ugccucuggagagauuauu

SEQ ID NO: 1313279 - RNA, 19 nt, Artificial Sequence
  Description of Artificial Sequence: Synthetic oligonucleotide
  Antisense strand to SEQ ID NO: 1313278
aauaaucucuccagaggca

SEQ ID NO: 1313280 - RNA, 19 nt, Artificial Sequence
  Description of Artificial Sequence: Synthetic oligonucleotide
  Sense strand starting at position 44 of SEQ ID NO: 1241966
gccagaauaaucugcuggu

SEQ ID NO: 1313281 - RNA, 19 nt, Artificial Sequence
  Description of Artificial Sequence: Synthetic oligonucleotide
  Antisense strand to SEQ ID NO: 1313280
accagcagauuauucuggc

SEQ ID NO: 1313282 - RNA, 19 nt, Artificial Sequence
  Description of Artificial Sequence: Synthetic oligonucleotide
  Sense strand starting at position 47 of SEQ ID NO: 1241966
agaauaaucugcuggugaa

SEQ ID NO: 1313283 - RNA, 19 nt, Artificial Sequence
  Description of Artificial Sequence: Synthetic oligonucleotide
  Antisense strand to SEQ ID NO: 1313282
uucaccagcagauuauucu

SEQ ID NO: 1313284 - RNA, 19 nt, Artificial Sequence
  Description of Artificial Sequence: Synthetic oligonucleotide
  Sense strand starting at position 48 of SEQ ID NO: 1241966
gaauaaucugcuggugaac

SEQ ID NO: 1313285 - RNA, 19 nt, Artificial Sequence
  Description of Artificial Sequence: Synthetic oligonucleotide
  Antisense strand to SEQ ID NO: 1313284
guucaccagcagauuauuc

SEQ ID NO: 1313286 - RNA, 19 nt, Artificial Sequence
  Description of Artificial Sequence: Synthetic oligonucleotide
  Sense strand starting at position 57 of SEQ ID NO: 1241966
gcuggugaaccgugccuua

SEQ ID NO: 1313287 - RNA, 19 nt, Artificial Sequence
  Description of Artificial Sequence: Synthetic oligonucleotide
  Antisense strand to SEQ ID NO: 1313286
uaaggcacgguucaccagc

SEQ ID NO: 1313288 - RNA, 19 nt, Artificial Sequence
  Description of Artificial Sequence: Synthetic oligonucleotide
  Sense strand starting at position 94 of SEQ ID NO: 1241966
ccaaucuagucaggacuuu

SEQ ID NO: 1313289 - RNA, 19 nt, Artificial Sequence
  Description of Artificial Sequence: Synthetic oligonucleotide
  Antisense strand to SEQ ID NO: 1313288
aaaguccugacuagauugg

SEQ ID NO: 1313290 - RNA, 19 nt, Artificial Sequence
  Description of Artificial Sequence: Synthetic oligonucleotide
  Sense strand starting at position 122 of SEQ ID NO: 1241966
auaauaccuugccuggauu

SEQ ID NO: 1313291 - RNA, 19 nt, Artificial Sequence
  Description of Artificial Sequence: Synthetic oligonucleotide
  Antisense strand to SEQ ID NO: 1313290
aauccaggcaagguauuau

SEQ ID NO: 1313292 - RNA, 19 nt, Artificial Sequence
  Description of Artificial Sequence: Synthetic oligonucleotide
  Sense strand starting at position 380 of SEQ ID NO: 1241966
gaccuaaagugauccgacu

SEQ ID NO: 1313293 - RNA, 19 nt, Artificial Sequence
  Description of Artificial Sequence: Synthetic oligonucleotide
  Antisense strand to SEQ ID NO: 1313292
agucggaucacuuuagguc

SEQ ID NO: 1313294 - RNA, 19 nt, Artificial Sequence
  Description of Artificial Sequence: Synthetic oligonucleotide
  Sense strand starting at position 484 of SEQ ID NO: 1241966
acaaacgguuucuuacaau

SEQ ID NO: 1313295 - RNA, 19 nt, Artificial Sequence
  Description of Artificial Sequence: Synthetic oligonucleotide
  Antisense strand to SEQ ID NO: 1313294
auuguaagaaaccguuugu

SEQ ID NO: 1313296 - RNA, 19 nt, Artificial Sequence
  Description of Artificial Sequence: Synthetic oligonucleotide
  Sense strand starting at position 517 of SEQ ID NO: 1241966
agaaacauauuucguagca

SEQ ID NO: 1313297 - RNA, 19 nt, Artificial Sequence
  Description of Artificial Sequence: Synthetic oligonucleotide
  Antisense strand to SEQ ID NO: 1313296
ugcuacgaaauauguuucu

SEQ ID NO: 1313298 - RNA, 19 nt, Artificial Sequence
  Description of Artificial Sequence: Synthetic oligonucleotide
  Sense strand starting at position 619 of SEQ ID NO: 1241966
aucuaugguugcuaucaca

SEQ ID NO: 1313299 - RNA, 19 nt, Artificial Sequence
  Description of Artificial Sequence: Synthetic oligonucleotide
  Antisense strand to SEQ ID NO: 1313298
ugugauagcaaccauagau

SEQ ID NO: 1313300 - RNA, 19 nt, Artificial Sequence
  Description of Artificial Sequence: Synthetic oligonucleotide
  Sense strand starting at position 648 of SEQ ID NO: 1241966
agaguuaguaguugcuaca

SEQ ID NO: 1313301 - RNA, 19 nt, Artificial Sequence
  Description of Artificial Sequence: Synthetic oligonucleotide
  Antisense strand to SEQ ID NO: 1313300
uguagcaacuacuaacucu

SEQ ID NO: 1313302 - RNA, 19 nt, Artificial Sequence
  Description of Artificial Sequence: Synthetic oligonucleotide
  Sense strand starting at position 916 of SEQ ID NO: 1241966
cucagugaucucuguccca

SEQ ID NO: 1313303 - RNA, 19 nt, Artificial Sequence
  Description of Artificial Sequence: Synthetic oligonucleotide
  Antisense strand to SEQ ID NO: 1313302
ugggacagagaucacugag

SEQ ID NO: 1313304 - RNA, 19 nt, Artificial Sequence
  Description of Artificial Sequence: Synthetic oligonucleotide
  Sense strand starting at position 1018 of SEQ ID NO: 1241966
uuggguuguuucuuggcua

SEQ ID NO: 1313305 - RNA, 19 nt, Artificial Sequence
  Description of Artificial Sequence: Synthetic oligonucleotide
  Antisense strand to SEQ ID NO: 1313304
uagccaagaaacaacccaa

SEQ ID NO: 1313306 - RNA, 19 nt, Artificial Sequence
  Description of Artificial Sequence: Synthetic oligonucleotide
  Sense strand starting at position 1021 of SEQ ID NO: 1241966
gguuguuucuuggcuacuu

SEQ ID NO: 1313307 - RNA, 19 nt, Artificial Sequence
  Description of Artificial Sequence: Synthetic oligonucleotide
  Antisense strand to SEQ ID NO: 1313306
aaguagccaagaaacaacc

SEQ ID NO: 1313308 - RNA, 19 nt, Artificial Sequence
  Description of Artificial Sequence: Synthetic oligonucleotide
  Sense strand starting at position 1055 of SEQ ID NO: 1241966
gcagguggucuuuaaguuc

SEQ ID NO: 1313309 - RNA, 19 nt, Artificial Sequence
  Description of Artificial Sequence: Synthetic oligonucleotide
  Antisense strand to SEQ ID NO: 1313308
gaacuuaaagaccaccugc

SEQ ID NO: 1313310 - RNA, 19 nt, Artificial Sequence
  Description of Artificial Sequence: Synthetic oligonucleotide
  Sense strand starting at position 1058 of SEQ ID NO: 1241966
gguggucuuuaaguucaga

SEQ ID NO: 1313311 - RNA, 19 nt, Artificial Sequence
  Description of Artificial Sequence: Synthetic oligonucleotide
  Antisense strand to SEQ ID NO: 1313310
ucugaacuuaaagaccacc

SEQ ID NO: 1313312 - RNA, 19 nt, Artificial Sequence
  Description of Artificial Sequence: Synthetic oligonucleotide
  Sense strand starting at position 1473 of SEQ ID NO: 1241966
agaucagaguccucugugu

SEQ ID NO: 1313313 - RNA, 19 nt, Artificial Sequence
  Description of Artificial Sequence: Synthetic oligonucleotide
  Antisense strand to SEQ ID NO: 1313312
acacagaggacucugaucu

SEQ ID NO: 1313314 - RNA, 19 nt, Artificial Sequence
  Description of Artificial Sequence: Synthetic oligonucleotide
  Sense strand starting at position 1475 of SEQ ID NO: 1241966
aucagaguccucuguguga

SEQ ID NO: 1313315 - RNA, 19 nt, Artificial Sequence
  Description of Artificial Sequence: Synthetic oligonucleotide
  Antisense strand to SEQ ID NO: 1313314
ucacacagaggacucugau

SEQ ID NO: 1313316 - RNA, 19 nt, Artificial Sequence
  Description of Artificial Sequence: Synthetic oligonucleotide
  Sense strand starting at position 1477 of SEQ ID NO: 1241966
cagaguccucugugugaca

SEQ ID NO: 1313317 - RNA, 19 nt, Artificial Sequence
  Description of Artificial Sequence: Synthetic oligonucleotide
  Antisense strand to SEQ ID NO: 1313316
ugucacacagaggacucug

SEQ ID NO: 1313318 - RNA, 19 nt, Artificial Sequence
  Description of Artificial Sequence: Synthetic oligonucleotide
  Sense strand starting at position 1479 of SEQ ID NO: 1241966
gaguccucugugugacacu

SEQ ID NO: 1313319 - RNA, 19 nt, Artificial Sequence
  Description of Artificial Sequence: Synthetic oligonucleotide
  Antisense strand to SEQ ID NO: 1313318
agugucacacagaggacuc

SEQ ID NO: 1313320 - RNA, 19 nt, Artificial Sequence
  Description of Artificial Sequence: Synthetic oligonucleotide
  Sense strand starting at position 1533 of SEQ ID NO: 1241966
gggcuccuuugguauucua

SEQ ID NO: 1313321 - RNA, 19 nt, Artificial Sequence
  Description of Artificial Sequence: Synthetic oligonucleotide
  Antisense strand to SEQ ID NO: 1313320
uagaauaccaaaggagccc

SEQ ID NO: 1313322 - RNA, 19 nt, Artificial Sequence
  Description of Artificial Sequence: Synthetic oligonucleotide
  Sense strand starting at position 1680 of SEQ ID NO: 1241966
cagaguuccuggccucuca

SEQ ID NO: 1313323 - RNA, 19 nt, Artificial Sequence
  Description of Artificial Sequence: Synthetic oligonucleotide
  Antisense strand to SEQ ID NO: 1313322
ugagaggccaggaacucug

SEQ ID NO: 1313324 - RNA, 19 nt, Artificial Sequence
  Description of Artificial Sequence: Synthetic oligonucleotide
  Sense strand starting at position 2153 of SEQ ID NO: 1241966
ucccuuaucuccucuggga

SEQ ID NO: 1313325 - RNA, 19 nt, Artificial Sequence
  Description of Artificial Sequence: Synthetic oligonucleotide
  Antisense strand to SEQ ID NO: 1313324
ucccagaggagauaaggga

SEQ ID NO: 1313326 - RNA, 19 nt, Artificial Sequence
  Description of Artificial Sequence: Synthetic oligonucleotide
  Sense strand starting at position 2157 of SEQ ID NO: 1241966
uuaucuccucugggaggaa

SEQ ID NO: 1313327 - RNA, 19 nt, Artificial Sequence
  Description of Artificial Sequence: Synthetic oligonucleotide
  Antisense strand to SEQ ID NO: 1313326
uuccucccagaggagauaa

SEQ ID NO: 1313328 - RNA, 19 nt, Artificial Sequence
  Description of Artificial Sequence: Synthetic oligonucleotide
  Sense strand starting at position 2175 of SEQ ID NO: 1241966
agggcuuaucuggguauca

SEQ ID NO: 1313329 - RNA, 19 nt, Artificial Sequence
  Description of Artificial Sequence: Synthetic oligonucleotide
  Antisense strand to SEQ ID NO: 1313328
ugauacccagauaagcccu

SEQ ID NO: 1313330 - RNA, 19 nt, Artificial Sequence
  Description of Artificial Sequence: Synthetic oligonucleotide
  Sense strand starting at position 2176 of SEQ ID NO: 1241966
gggcuuaucuggguaucag

SEQ ID NO: 1313331 - RNA, 19 nt, Artificial Sequence
  Description of Artificial Sequence: Synthetic oligonucleotide
  Antisense strand to SEQ ID NO: 1313330
cugauacccagauaagccc

SEQ ID NO: 1313332 - RNA, 19 nt, Artificial Sequence
  Description of Artificial Sequence: Synthetic oligonucleotide
  Sense strand starting at position 3300 of SEQ ID NO: 1241966
agacgaccuccuugugaau

SEQ ID NO: 1313333 - RNA, 19 nt, Artificial Sequence
  Description of Artificial Sequence: Synthetic oligonucleotide
  Antisense strand to SEQ ID NO: 1313332
auucacaaggaggucgucu

SEQ ID NO: 1313334 - RNA, 19 nt, Artificial Sequence
  Description of Artificial Sequence: Synthetic oligonucleotide
  Sense strand starting at position 3345 of SEQ ID NO: 1241966
agucuuucugcugaggaag

SEQ ID NO: 1313335 - RNA, 19 nt, Artificial Sequence
  Description of Artificial Sequence: Synthetic oligonucleotide
  Antisense strand to SEQ ID NO: 1313334
cuuccucagcagaaagacu

SEQ ID NO: 1313336 - RNA, 19 nt, Artificial Sequence
  Description of Artificial Sequence: Synthetic oligonucleotide
  Sense strand starting at position 3380 of SEQ ID NO: 1241966
agggccauucucuguaguu

SEQ ID NO: 1313337 - RNA, 19 nt, Artificial Sequence
  Description of Artificial Sequence: Synthetic oligonucleotide
  Antisense strand to SEQ ID NO: 1313336
aacuacagagaauggcccu

SEQ ID NO: 1313338 - RNA, 19 nt, Artificial Sequence
  Description of Artificial Sequence: Synthetic oligonucleotide
  Sense strand starting at position 3381 of SEQ ID NO: 1241966
gggccauucucuguaguuu

SEQ ID NO: 1313339 - RNA, 19 nt, Artificial Sequence
  Description of Artificial Sequence: Synthetic oligonucleotide
  Antisense strand to SEQ ID NO: 1313338
aaacuacagagaauggccc

SEQ ID NO: 1313340 - RNA, 19 nt, Artificial Sequence
  Description of Artificial Sequence: Synthetic oligonucleotide
  Sense strand starting at position 3407 of SEQ ID NO: 1241966
uaaagaagaugguauguaa

SEQ ID NO: 1313341 - RNA, 19 nt, Artificial Sequence
  Description of Artificial Sequence: Synthetic oligonucleotide
  Antisense strand to SEQ ID NO: 1313340
uuacauaccaucuucuuua

SEQ ID NO: 1313342 - RNA, 19 nt, Artificial Sequence
  Description of Artificial Sequence: Synthetic oligonucleotide
  Sense strand starting at position 3487 of SEQ ID NO: 1241966
acugcuuugggugaggaga

SEQ ID NO: 1313343 - RNA, 19 nt, Artificial Sequence
  Description of Artificial Sequence: Synthetic oligonucleotide
  Antisense strand to SEQ ID NO: 1313342
ucuccucacccaaagcagu

SEQ ID NO: 1313344 - RNA, 19 nt, Artificial Sequence
  Description of Artificial Sequence: Synthetic oligonucleotide
  Sense strand starting at position 3533 of SEQ ID NO: 1241966
gccucaaaugcccagugau

SEQ ID NO: 1313345 - RNA, 19 nt, Artificial Sequence
  Description of Artificial Sequence: Synthetic oligonucleotide
  Antisense strand to SEQ ID NO: 1313344
aucacugggcauuugaggc

SEQ ID NO: 1313346 - RNA, 19 nt, Artificial Sequence
  Description of Artificial Sequence: Synthetic oligonucleotide
  Sense strand starting at position 3580 of SEQ ID NO: 1241966
ugcaaaguggcauguuguu

SEQ ID NO: 1313347 - RNA, 19 nt, Artificial Sequence
  Description of Artificial Sequence: Synthetic oligonucleotide
  Antisense strand to SEQ ID NO: 1313346
aacaacaugccacuuugca

SEQ ID NO: 1313348 - RNA, 19 nt, Artificial Sequence
  Description of Artificial Sequence: Synthetic oligonucleotide
  Sense strand starting at position 3635 of SEQ ID NO: 1241966
aagaguagaugguaacuuu

SEQ ID NO: 1313349 - RNA, 19 nt, Artificial Sequence
  Description of Artificial Sequence: Synthetic oligonucleotide
  Antisense strand to SEQ ID NO: 1313348
aaaguuaccaucuacucuu

SEQ ID NO: 1313350 - RNA, 19 nt, Artificial Sequence
  Description of Artificial Sequence: Synthetic oligonucleotide
  Sense strand starting at position 3798 of SEQ ID NO: 1241966
guuggaguucaguggcauc

SEQ ID NO: 1313351 - RNA, 19 nt, Artificial Sequence
  Description of Artificial Sequence: Synthetic oligonucleotide
  Antisense strand to SEQ ID NO: 1313350
gaugccacugaacuccaac

SEQ ID NO: 1313352 - RNA, 19 nt, Artificial Sequence
  Description of Artificial Sequence: Synthetic oligonucleotide
  Sense strand starting at position 3852 of SEQ ID NO: 1241966
aggagauccucccacauca

SEQ ID NO: 1313353 - RNA, 19 nt, Artificial Sequence
  Description of Artificial Sequence: Synthetic oligonucleotide
  Antisense strand to SEQ ID NO: 1313352
ugaugugggaggaucuccu

SEQ ID NO: 1313354 - RNA, 19 nt, Artificial Sequence
  Description of Artificial Sequence: Synthetic oligonucleotide
  Sense strand starting at position 403 of SEQ ID NO: 1241967
uggaauaaaugguuaggua

SEQ ID NO: 1313355 - RNA, 19 nt, Artificial Sequence
  Description of Artificial Sequence: Synthetic oligonucleotide
  Antisense strand to SEQ ID NO: 1313354
uaccuaaccauuuauucca

SEQ ID NO: 1313356 - RNA, 19 nt, Artificial Sequence
  Description of Artificial Sequence: Synthetic oligonucleotide
  Sense strand starting at position 430 of SEQ ID NO: 1241967
augaguaacuugguugaaa

SEQ ID NO: 1313357 - RNA, 19 nt, Artificial Sequence
  Description of Artificial Sequence: Synthetic oligonucleotide
  Antisense strand to SEQ ID NO: 1313356
uuucaaccaaguuacucau

SEQ ID NO: 1313358 - RNA, 19 nt, Artificial Sequence
  Description of Artificial Sequence: Synthetic oligonucleotide
  Sense strand starting at position 431 of SEQ ID NO: 1241967
ugaguaacuugguugaaag

SEQ ID NO: 1313359 - RNA, 19 nt, Artificial Sequence
  Description of Artificial Sequence: Synthetic oligonucleotide
  Antisense strand to SEQ ID NO: 1313358
cuuucaaccaaguuacuca

SEQ ID NO: 1313360 - RNA, 19 nt, Artificial Sequence
  Description of Artificial Sequence: Synthetic oligonucleotide
  Sense strand starting at position 433 of SEQ ID NO: 1241967
aguaacuugguugaaagua

SEQ ID NO: 1313361 - RNA, 19 nt, Artificial Sequence
  Description of Artificial Sequence: Synthetic oligonucleotide
  Antisense strand to SEQ ID NO: 1313360
uacuuucaaccaaguuacu

SEQ ID NO: 1313362 - RNA, 19 nt, Artificial Sequence
  Description of Artificial Sequence: Synthetic oligonucleotide
  Sense strand starting at position 465 of SEQ ID NO: 1241967
gcaauugucaggcaccaag

SEQ ID NO: 1313363 - RNA, 19 nt, Artificial Sequence
  Description of Artificial Sequence: Synthetic oligonucleotide
  Antisense strand to SEQ ID NO: 1313362
cuuggugccugacaauugc

SEQ ID NO: 1313364 - RNA, 19 nt, Artificial Sequence
  Description of Artificial Sequence: Synthetic oligonucleotide
  Sense strand starting at position 468 of SEQ ID NO: 1241967
auugucaggcaccaagauu

SEQ ID NO: 1313365 - RNA, 19 nt, Artificial Sequence
  Description of Artificial Sequence: Synthetic oligonucleotide
  Antisense strand to SEQ ID NO: 1313364
aaucuuggugccugacaau

SEQ ID NO: 1313366 - RNA, 19 nt, Artificial Sequence
  Description of Artificial Sequence: Synthetic oligonucleotide
  Sense strand starting at position 488 of SEQ ID NO: 1241967
cuaaguacugaugagucau

SEQ ID NO: 1313367 - RNA, 19 nt, Artificial Sequence
  Description of Artificial Sequence: Synthetic oligonucleotide
  Antisense strand to SEQ ID NO: 1313366
augacucaucaguacuuag

SEQ ID NO: 1313368 - RNA, 19 nt, Artificial Sequence
  Description of Artificial Sequence: Synthetic oligonucleotide
  Sense strand starting at position 490 of SEQ ID NO: 1241967
aaguacugaugagucauaa

SEQ ID NO: 1313369 - RNA, 19 nt, Artificial Sequence
  Description of Artificial Sequence: Synthetic oligonucleotide
  Antisense strand to SEQ ID NO: 1313368
uuaugacucaucaguacuu

SEQ ID NO: 1313370 - RNA, 19 nt, Artificial Sequence
  Description of Artificial Sequence: Synthetic oligonucleotide
  Sense strand starting at position 500 of SEQ ID NO: 1241967
gagucauaagauugggcca

SEQ ID NO: 1313371 - RNA, 19 nt, Artificial Sequence
  Description of Artificial Sequence: Synthetic oligonucleotide
  Antisense strand to SEQ ID NO: 1313370
uggcccaaucuuaugacuc

SEQ ID NO: 1313372 - RNA, 19 nt, Artificial Sequence
  Description of Artificial Sequence: Synthetic oligonucleotide
  Sense strand starting at position 568 of SEQ ID NO: 1241967
guaauuggcaacuaguaag

SEQ ID NO: 1313373 - RNA, 19 nt, Artificial Sequence
  Description of Artificial Sequence: Synthetic oligonucleotide
  Antisense strand to SEQ ID NO: 1313372
cuuacuaguugccaauuac

SEQ ID NO: 1313374 - RNA, 19 nt, Artificial Sequence
  Description of Artificial Sequence: Synthetic oligonucleotide
  Sense strand starting at position 601 of SEQ ID NO: 1241967
uuccuaugaucaguacuua

SEQ ID NO: 1313375 - RNA, 19 nt, Artificial Sequence
  Description of Artificial Sequence: Synthetic oligonucleotide
  Antisense strand to SEQ ID NO: 1313374
uaaguacugaucauaggaa

SEQ ID NO: 1313376 - RNA, 19 nt, Artificial Sequence
  Description of Artificial Sequence: Synthetic oligonucleotide
  Sense strand starting at position 691 of SEQ ID NO: 1241967
ucaugaauauuguuaguga

SEQ ID NO: 1313377 - RNA, 19 nt, Artificial Sequence
  Description of Artificial Sequence: Synthetic oligonucleotide
  Antisense strand to SEQ ID NO: 1313376
ucacuaacaauauucauga

SEQ ID NO: 1313378 - RNA, 19 nt, Artificial Sequence
  Description of Artificial Sequence: Synthetic oligonucleotide
  Sense strand starting at position 819 of SEQ ID NO: 1241967
guguguacccauuaaagaa

SEQ ID NO: 1313379 - RNA, 19 nt, Artificial Sequence
  Description of Artificial Sequence: Synthetic oligonucleotide
  Antisense strand to SEQ ID NO: 1313378
uucuuuaauggguacacac

SEQ ID NO: 1313380 - RNA, 19 nt, Artificial Sequence
  Description of Artificial Sequence: Synthetic oligonucleotide
  Sense strand starting at position 878 of SEQ ID NO: 1241967
cuuguuuauuucucuagua

SEQ ID NO: 1313381 - RNA, 19 nt, Artificial Sequence
  Description of Artificial Sequence: Synthetic oligonucleotide
  Antisense strand to SEQ ID NO: 1313380
uacuagagaaauaaacaag

SEQ ID NO: 1313382 - RNA, 19 nt, Artificial Sequence
  Description of Artificial Sequence: Synthetic oligonucleotide
  Sense strand starting at position 940 of SEQ ID NO: 1241967
ggaauaugauguucuaggu

SEQ ID NO: 1313383 - RNA, 19 nt, Artificial Sequence
  Description of Artificial Sequence: Synthetic oligonucleotide
  Antisense strand to SEQ ID NO: 1313382
accuagaacaucauauucc

SEQ ID NO: 1313384 - RNA, 19 nt, Artificial Sequence
  Description of Artificial Sequence: Synthetic oligonucleotide
  Sense strand starting at position 944 of SEQ ID NO: 1241967
uaugauguucuagguagaa

SEQ ID NO: 1313385 - RNA, 19 nt, Artificial Sequence
  Description of Artificial Sequence: Synthetic oligonucleotide
  Antisense strand to SEQ ID NO: 1313384
uucuaccuagaacaucaua

SEQ ID NO: 1313386 - RNA, 19 nt, Artificial Sequence
  Description of Artificial Sequence: Synthetic oligonucleotide
  Sense strand starting at position 948 of SEQ ID NO: 1241967
auguucuagguagaaagua

SEQ ID NO: 1313387 - RNA, 19 nt, Artificial Sequence
  Description of Artificial Sequence: Synthetic oligonucleotide
  Antisense strand to SEQ ID NO: 1313386
uacuuucuaccuagaacau

SEQ ID NO: 1313388 - RNA, 19 nt, Artificial Sequence
  Description of Artificial Sequence: Synthetic oligonucleotide
  Sense strand starting at position 968 of SEQ ID NO: 1241967
uuuagcacuggucauuaga

SEQ ID NO: 1313389 - RNA, 19 nt, Artificial Sequence
  Description of Artificial Sequence: Synthetic oligonucleotide
  Antisense strand to SEQ ID NO: 1313388
ucuaaugaccagugcuaaa

SEQ ID NO: 1313390 - RNA, 19 nt, Artificial Sequence
  Description of Artificial Sequence: Synthetic oligonucleotide
  Sense strand starting at position 971 of SEQ ID NO: 1241967
agcacuggucauuagauau

SEQ ID NO: 1313391 - RNA, 19 nt, Artificial Sequence
  Description of Artificial Sequence: Synthetic oligonucleotide
  Antisense strand to SEQ ID NO: 1313390
auaucuaaugaccagugcu

SEQ ID NO: 1313392 - RNA, 19 nt, Artificial Sequence
  Description of Artificial Sequence: Synthetic oligonucleotide
  Sense strand starting at position 1164 of SEQ ID NO: 1241967
agagguaguuaaucauuaa

SEQ ID NO: 1313393 - RNA, 19 nt, Artificial Sequence
  Description of Artificial Sequence: Synthetic oligonucleotide
  Antisense strand to SEQ ID NO: 1313392
uuaaugauuaacuaccucu

SEQ ID NO: 1313394 - RNA, 19 nt, Artificial Sequence
  Description of Artificial Sequence: Synthetic oligonucleotide
  Sense strand starting at position 1167 of SEQ ID NO: 1241967
gguaguuaaucauuaagaa

SEQ ID NO: 1313395 - RNA, 19 nt, Artificial Sequence
  Description of Artificial Sequence: Synthetic oligonucleotide
  Antisense strand to SEQ ID NO: 1313394
uucuuaaugauuaacuacc

SEQ ID NO: 1313396 - RNA, 19 nt, Artificial Sequence
  Description of Artificial Sequence: Synthetic oligonucleotide
  Sense strand starting at position 1182 of SEQ ID NO: 1241967
agaaucgaauguguuggaa

SEQ ID NO: 1313397 - RNA, 19 nt, Artificial Sequence
  Description of Artificial Sequence: Synthetic oligonucleotide
  Antisense strand to SEQ ID NO: 1313396
uuccaacacauucgauucu

SEQ ID NO: 1313398 - RNA, 19 nt, Artificial Sequence
  Description of Artificial Sequence: Synthetic oligonucleotide
  Sense strand starting at position 1264 of SEQ ID NO: 1241967
gggcuuuccagagauccca

SEQ ID NO: 1313399 - RNA, 19 nt, Artificial Sequence
  Description of Artificial Sequence: Synthetic oligonucleotide
  Antisense strand to SEQ ID NO: 1313398
ugggaucucuggaaagccc

SEQ ID NO: 1313400 - RNA, 19 nt, Artificial Sequence
  Description of Artificial Sequence: Synthetic oligonucleotide
  Sense strand starting at position 1284 of SEQ ID NO: 1241967
accuuaggaucugccagaa

SEQ ID NO: 1313401 - RNA, 19 nt, Artificial Sequence
  Description of Artificial Sequence: Synthetic oligonucleotide
  Antisense strand to SEQ ID NO: 1313400
uucuggcagauccuaaggu

SEQ ID NO: 1313402 - RNA, 19 nt, Artificial Sequence
  Description of Artificial Sequence: Synthetic oligonucleotide
  Sense strand starting at position 1353 of SEQ ID NO: 1241967
agaaucuuuggauggcuca

SEQ ID NO: 1313403 - RNA, 19 nt, Artificial Sequence
  Description of Artificial Sequence: Synthetic oligonucleotide
  Antisense strand to SEQ ID NO: 1313402
ugagccauccaaagauucu

SEQ ID NO: 1313404 - RNA, 19 nt, Artificial Sequence
  Description of Artificial Sequence: Synthetic oligonucleotide
  Sense strand starting at position 1354 of SEQ ID NO: 1241967
gaaucuuuggauggcucaa

SEQ ID NO: 1313405 - RNA, 19 nt, Artificial Sequence
  Description of Artificial Sequence: Synthetic oligonucleotide
  Antisense strand to SEQ ID NO: 1313404
uugagccauccaaagauuc

SEQ ID NO: 1313406 - RNA, 19 nt, Artificial Sequence
  Description of Artificial Sequence: Synthetic oligonucleotide
  Sense strand starting at position 1367 of SEQ ID NO: 1241967
gcucaaggacucugacacu

SEQ ID NO: 1313407 - RNA, 19 nt, Artificial Sequence
  Description of Artificial Sequence: Synthetic oligonucleotide
  Antisense strand to SEQ ID NO: 1313406
agugucagaguccuugagc

SEQ ID NO: 1313408 - RNA, 19 nt, Artificial Sequence
  Description of Artificial Sequence: Synthetic oligonucleotide
  Sense strand starting at position 1543 of SEQ ID NO: 1241967
ggagaagcaucagcaaucu

SEQ ID NO: 1313409 - RNA, 19 nt, Artificial Sequence
  Description of Artificial Sequence: Synthetic oligonucleotide
  Antisense strand to SEQ ID NO: 1313408
agauugcugaugcuucucc

SEQ ID NO: 1313410 - RNA, 19 nt, Artificial Sequence
  Description of Artificial Sequence: Synthetic oligonucleotide
  Sense strand starting at position 1762 of SEQ ID NO: 1241967
ucaguuaaugcggagggaa

SEQ ID NO: 1313411 - RNA, 19 nt, Artificial Sequence
  Description of Artificial Sequence: Synthetic oligonucleotide
  Antisense strand to SEQ ID NO: 1313410
uucccuccgcauuaacuga

SEQ ID NO: 1313412 - RNA, 19 nt, Artificial Sequence
  Description of Artificial Sequence: Synthetic oligonucleotide
  Sense strand starting at position 2077 of SEQ ID NO: 1241967
cgguguggcaguguguaaa

SEQ ID NO: 1313413 - RNA, 19 nt, Artificial Sequence
  Description of Artificial Sequence: Synthetic oligonucleotide
  Antisense strand to SEQ ID NO: 1313412
uuuacacacugccacaccg

SEQ ID NO: 1313414 - RNA, 19 nt, Artificial Sequence
  Description of Artificial Sequence: Synthetic oligonucleotide
  Sense strand starting at position 2277 of SEQ ID NO: 1241967
cacccugaagguuagcaau

SEQ ID NO: 1313415 - RNA, 19 nt, Artificial Sequence
  Description of Artificial Sequence: Synthetic oligonucleotide
  Antisense strand to SEQ ID NO: 1313414
auugcuaaccuucagggug

SEQ ID NO: 1313416 - RNA, 19 nt, Artificial Sequence
  Description of Artificial Sequence: Synthetic oligonucleotide
  Sense strand starting at position 2468 of SEQ ID NO: 1241967
cuucuuauccgguaaggaa

SEQ ID NO: 1313417 - RNA, 19 nt, Artificial Sequence
  Description of Artificial Sequence: Synthetic oligonucleotide
  Antisense strand to SEQ ID NO: 1313416
uuccuuaccggauaagaag

SEQ ID NO: 1313418 - RNA, 19 nt, Artificial Sequence
  Description of Artificial Sequence: Synthetic oligonucleotide
  Sense strand starting at position 2490 of SEQ ID NO: 1241967
ucaggagugaaagguguau

SEQ ID NO: 1313419 - RNA, 19 nt, Artificial Sequence
  Description of Artificial Sequence: Synthetic oligonucleotide
  Antisense strand to SEQ ID NO: 1313418
auacaccuuucacuccuga

SEQ ID NO: 1313420 - RNA, 19 nt, Artificial Sequence
  Description of Artificial Sequence: Synthetic oligonucleotide
  Sense strand starting at position 2494 of SEQ ID NO: 1241967
gagugaaagguguauugau

SEQ ID NO: 1313421 - RNA, 19 nt, Artificial Sequence
  Description of Artificial Sequence: Synthetic oligonucleotide
  Antisense strand to SEQ ID NO: 1313420
aucaauacaccuuucacuc

SEQ ID NO: 1313422 - RNA, 19 nt, Artificial Sequence
  Description of Artificial Sequence: Synthetic oligonucleotide
  Sense strand starting at position 2626 of SEQ ID NO: 1241967
gcuguccguagugcugaaa

SEQ ID NO: 1313423 - RNA, 19 nt, Artificial Sequence
  Description of Artificial Sequence: Synthetic oligonucleotide
  Antisense strand to SEQ ID NO: 1313422
uuucagcacuacggacagc

SEQ ID NO: 1313424 - RNA, 19 nt, Artificial Sequence
  Description of Artificial Sequence: Synthetic oligonucleotide
  Sense strand starting at position 2702 of SEQ ID NO: 1241967
caggaaacgcucugauaaa

SEQ ID NO: 1313425 - RNA, 19 nt, Artificial Sequence
  Description of Artificial Sequence: Synthetic oligonucleotide
  Antisense strand to SEQ ID NO: 1313424
uuuaucagagcguuuccug

SEQ ID NO: 1313426 - RNA, 19 nt, Artificial Sequence
  Description of Artificial Sequence: Synthetic oligonucleotide
  Sense strand starting at position 2757 of SEQ ID NO: 1241967
guugaauauguagauucua

SEQ ID NO: 1313427 - RNA, 19 nt, Artificial Sequence
  Description of Artificial Sequence: Synthetic oligonucleotide
  Antisense strand to SEQ ID NO: 1313426
uagaaucuacauauucaac

SEQ ID NO: 1313428 - RNA, 19 nt, Artificial Sequence
  Description of Artificial Sequence: Synthetic oligonucleotide
  Sense strand starting at position 3410 of SEQ ID NO: 1241967
guauaacaugcauaugaau

SEQ ID NO: 1313429 - RNA, 19 nt, Artificial Sequence
  Description of Artificial Sequence: Synthetic oligonucleotide
  Antisense strand to SEQ ID NO: 1313428
auucauaugcauguuauac

SEQ ID NO: 1313430 - RNA, 19 nt, Artificial Sequence
  Description of Artificial Sequence: Synthetic oligonucleotide
  Sense strand starting at position 3513 of SEQ ID NO: 1241967
ggugaugccagagauuacu

SEQ ID NO: 1313431 - RNA, 19 nt, Artificial Sequence
  Description of Artificial Sequence: Synthetic oligonucleotide
  Antisense strand to SEQ ID NO: 1313430
aguaaucucuggcaucacc

SEQ ID NO: 1313432 - RNA, 19 nt, Artificial Sequence
  Description of Artificial Sequence: Synthetic oligonucleotide
  Sense strand starting at position 3910 of SEQ ID NO: 1241967
ucagucauagauuguggga

SEQ ID NO: 1313433 - RNA, 19 nt, Artificial Sequence
  Description of Artificial Sequence: Synthetic oligonucleotide
  Antisense strand to SEQ ID NO: 1313432
ucccacaaucuaugacuga

SEQ ID NO: 1313434 - RNA, 19 nt, Artificial Sequence
  Description of Artificial Sequence: Synthetic oligonucleotide
  Sense strand starting at position 831 of SEQ ID NO: 1241968
aagggccauuucuaguauu

SEQ ID NO: 1313435 - RNA, 19 nt, Artificial Sequence
  Description of Artificial Sequence: Synthetic oligonucleotide
  Antisense strand to SEQ ID NO: 1313434
aauacuagaaauggcccuu

SEQ ID NO: 1313436 - RNA, 19 nt, Artificial Sequence
  Description of Artificial Sequence: Synthetic oligonucleotide
  Sense strand starting at position 834 of SEQ ID NO: 1241968
ggccauuucuaguauuuau

SEQ ID NO: 1313437 - RNA, 19 nt, Artificial Sequence
  Description of Artificial Sequence: Synthetic oligonucleotide
  Antisense strand to SEQ ID NO: 1313436
auaaauacuagaaauggcc

SEQ ID NO: 1313438 - RNA, 19 nt, Artificial Sequence
  Description of Artificial Sequence: Synthetic oligonucleotide
  Sense strand starting at position 844 of SEQ ID NO: 1241968
aguauuuaucaaugccugu

SEQ ID NO: 1313439 - RNA, 19 nt, Artificial Sequence
  Description of Artificial Sequence: Synthetic oligonucleotide
  Antisense strand to SEQ ID NO: 1313438
acaggcauugauaaauacu

SEQ ID NO: 1313440 - RNA, 19 nt, Artificial Sequence
  Description of Artificial Sequence: Synthetic oligonucleotide
  Sense strand starting at position 957 of SEQ ID NO: 1241968
cucaguuuauacccuugua

SEQ ID NO: 1313441 - RNA, 19 nt, Artificial Sequence
  Description of Artificial Sequence: Synthetic oligonucleotide
  Antisense strand to SEQ ID NO: 1313440
uacaaggguauaaacugag

SEQ ID NO: 1313442 - RNA, 19 nt, Artificial Sequence
  Description of Artificial Sequence: Synthetic oligonucleotide
  Sense strand starting at position 1165 of SEQ ID NO: 1241968
acugaaauuuaucaaguga

SEQ ID NO: 1313443 - RNA, 19 nt, Artificial Sequence
  Description of Artificial Sequence: Synthetic oligonucleotide
  Antisense strand to SEQ ID NO: 1313442
ucacuugauaaauuucagu

SEQ ID NO: 1313444 - RNA, 19 nt, Artificial Sequence
  Description of Artificial Sequence: Synthetic oligonucleotide
  Sense strand starting at position 1173 of SEQ ID NO: 1241968
uuaucaagugaguguagaa

SEQ ID NO: 1313445 - RNA, 19 nt, Artificial Sequence
  Description of Artificial Sequence: Synthetic oligonucleotide
  Antisense strand to SEQ ID NO: 1313444
uucuacacucacuugauaa

SEQ ID NO: 1313446 - RNA, 19 nt, Artificial Sequence
  Description of Artificial Sequence: Synthetic oligonucleotide
  Sense strand starting at position 1293 of SEQ ID NO: 1241968
cuagcaugguucucaccau

SEQ ID NO: 1313447 - RNA, 19 nt, Artificial Sequence
  Description of Artificial Sequence: Synthetic oligonucleotide
  Antisense strand to SEQ ID NO: 1313446
auggugagaaccaugcuag

SEQ ID NO: 1313448 - RNA, 19 nt, Artificial Sequence
  Description of Artificial Sequence: Synthetic oligonucleotide
  Sense strand starting at position 1299 of SEQ ID NO: 1241968
ugguucucaccauguaaag

SEQ ID NO: 1313449 - RNA, 19 nt, Artificial Sequence
  Description of Artificial Sequence: Synthetic oligonucleotide
  Antisense strand to SEQ ID NO: 1313448
cuuuacauggugagaacca

SEQ ID NO: 1313450 - RNA, 19 nt, Artificial Sequence
  Description of Artificial Sequence: Synthetic oligonucleotide
  Sense strand starting at position 1308 of SEQ ID NO: 1241968
ccauguaaagcuggauuau

SEQ ID NO: 1313451 - RNA, 19 nt, Artificial Sequence
  Description of Artificial Sequence: Synthetic oligonucleotide
  Antisense strand to SEQ ID NO: 1313450
auaauccagcuuuacaugg

SEQ ID NO: 1313452 - RNA, 19 nt, Artificial Sequence
  Description of Artificial Sequence: Synthetic oligonucleotide
  Sense strand starting at position 1309 of SEQ ID NO: 1241968
cauguaaagcuggauuauc

SEQ ID NO: 1313453 - RNA, 19 nt, Artificial Sequence
  Description of Artificial Sequence: Synthetic oligonucleotide
  Antisense strand to SEQ ID NO: 1313452
gauaauccagcuuuacaug

SEQ ID NO: 1313454 - RNA, 19 nt, Artificial Sequence
  Description of Artificial Sequence: Synthetic oligonucleotide
  Sense strand starting at position 1533 of SEQ ID NO: 1241968
ugccauaaacgucaagaga

SEQ ID NO: 1313455 - RNA, 19 nt, Artificial Sequence
  Description of Artificial Sequence: Synthetic oligonucleotide
  Antisense strand to SEQ ID NO: 1313454
ucucuugacguuuauggca

SEQ ID NO: 1313456 - RNA, 19 nt, Artificial Sequence
  Description of Artificial Sequence: Synthetic oligonucleotide
  Sense strand starting at position 1560 of SEQ ID NO: 1241968
augucuuaccaccaaaggu

SEQ ID NO: 1313457 - RNA, 19 nt, Artificial Sequence
  Description of Artificial Sequence: Synthetic oligonucleotide
  Antisense strand to SEQ ID NO: 1313456
accuuuggugguaagacau

SEQ ID NO: 1313458 - RNA, 19 nt, Artificial Sequence
  Description of Artificial Sequence: Synthetic oligonucleotide
  Sense strand starting at position 1597 of SEQ ID NO: 1241968
gcacgacugccucagaaac

SEQ ID NO: 1313459 - RNA, 19 nt, Artificial Sequence
  Description of Artificial Sequence: Synthetic oligonucleotide
  Antisense strand to SEQ ID NO: 1313458
guuucugaggcagucgugc

SEQ ID NO: 1313460 - RNA, 19 nt, Artificial Sequence
  Description of Artificial Sequence: Synthetic oligonucleotide
  Sense strand starting at position 1605 of SEQ ID NO: 1241968
gccucagaaacguguuaac

SEQ ID NO: 1313461 - RNA, 19 nt, Artificial Sequence
  Description of Artificial Sequence: Synthetic oligonucleotide
  Antisense strand to SEQ ID NO: 1313460
guuaacacguuucugaggc

SEQ ID NO: 1313462 - RNA, 19 nt, Artificial Sequence
  Description of Artificial Sequence: Synthetic oligonucleotide
  Sense strand starting at position 1753 of SEQ ID NO: 1241968
agacguuagucacucgaca

SEQ ID NO: 1313463 - RNA, 19 nt, Artificial Sequence
  Description of Artificial Sequence: Synthetic oligonucleotide
  Antisense strand to SEQ ID NO: 1313462
ugucgagugacuaacgucu

SEQ ID NO: 1313464 - RNA, 19 nt, Artificial Sequence
  Description of Artificial Sequence: Synthetic oligonucleotide
  Sense strand starting at position 1755 of SEQ ID NO: 1241968
acguuagucacucgacaca

SEQ ID NO: 1313465 - RNA, 19 nt, Artificial Sequence
  Description of Artificial Sequence: Synthetic oligonucleotide
  Antisense strand to SEQ ID NO: 1313464
ugugucgagugacuaacgu

SEQ ID NO: 1313466 - RNA, 19 nt, Artificial Sequence
  Description of Artificial Sequence: Synthetic oligonucleotide
  Sense strand starting at position 1890 of SEQ ID NO: 1241968
gcuggugacuuuccagaag

SEQ ID NO: 1313467 - RNA, 19 nt, Artificial Sequence
  Description of Artificial Sequence: Synthetic oligonucleotide
  Antisense strand to SEQ ID NO: 1313466
cuucuggaaagucaccagc

SEQ ID NO: 1313468 - RNA, 19 nt, Artificial Sequence
  Description of Artificial Sequence: Synthetic oligonucleotide
  Sense strand starting at position 1893 of SEQ ID NO: 1241968
ggugacuuuccagaagagu

SEQ ID NO: 1313469 - RNA, 19 nt, Artificial Sequence
  Description of Artificial Sequence: Synthetic oligonucleotide
  Antisense strand to SEQ ID NO: 1313468
acucuucuggaaagucacc

SEQ ID NO: 1313470 - RNA, 19 nt, Artificial Sequence
  Description of Artificial Sequence: Synthetic oligonucleotide
  Sense strand starting at position 1988 of SEQ ID NO: 1241968
uggauuaaaccggguguga

SEQ ID NO: 1313471 - RNA, 19 nt, Artificial Sequence
  Description of Artificial Sequence: Synthetic oligonucleotide
  Antisense strand to SEQ ID NO: 1313470
ucacacccgguuuaaucca

SEQ ID NO: 1313472 - RNA, 19 nt, Artificial Sequence
  Description of Artificial Sequence: Synthetic oligonucleotide
  Sense strand starting at position 1990 of SEQ ID NO: 1241968
gauuaaaccgggugugaaa

SEQ ID NO: 1313473 - RNA, 19 nt, Artificial Sequence
  Description of Artificial Sequence: Synthetic oligonucleotide
  Antisense strand to SEQ ID NO: 1313472
uuucacacccgguuuaauc

SEQ ID NO: 1313474 - RNA, 19 nt, Artificial Sequence
  Description of Artificial Sequence: Synthetic oligonucleotide
  Sense strand starting at position 1999 of SEQ ID NO: 1241968
gggugugaaagucgugaga

SEQ ID NO: 1313475 - RNA, 19 nt, Artificial Sequence
  Description of Artificial Sequence: Synthetic oligonucleotide
  Antisense strand to SEQ ID NO: 1313474
ucucacgacuuucacaccc

SEQ ID NO: 1313476 - RNA, 19 nt, Artificial Sequence
  Description of Artificial Sequence: Synthetic oligonucleotide
  Sense strand starting at position 2225 of SEQ ID NO: 1241968
gggaguugaaauggaguca

SEQ ID NO: 1313477 - RNA, 19 nt, Artificial Sequence
  Description of Artificial Sequence: Synthetic oligonucleotide
  Antisense strand to SEQ ID NO: 1313476
ugacuccauuucaacuccc

SEQ ID NO: 1313478 - RNA, 19 nt, Artificial Sequence
  Description of Artificial Sequence: Synthetic oligonucleotide
  Sense strand starting at position 2557 of SEQ ID NO: 1241968
gggucauugaagggcucau

SEQ ID NO: 1313479 - RNA, 19 nt, Artificial Sequence
  Description of Artificial Sequence: Synthetic oligonucleotide
  Antisense strand to SEQ ID NO: 1313478
augagcccuucaaugaccc

SEQ ID NO: 1313480 - RNA, 19 nt, Artificial Sequence
  Description of Artificial Sequence: Synthetic oligonucleotide
  Sense strand starting at position 2753 of SEQ ID NO: 1241968
cauggagggaugugguaau

SEQ ID NO: 1313481 - RNA, 19 nt, Artificial Sequence
  Description of Artificial Sequence: Synthetic oligonucleotide
  Antisense strand to SEQ ID NO: 1313480
auuaccacaucccuccaug

SEQ ID NO: 1313482 - RNA, 19 nt, Artificial Sequence
  Description of Artificial Sequence: Synthetic oligonucleotide
  Sense strand starting at position 2802 of SEQ ID NO: 1241968
gucugccuucuggagagua

SEQ ID NO: 1313483 - RNA, 19 nt, Artificial Sequence
  Description of Artificial Sequence: Synthetic oligonucleotide
  Antisense strand to SEQ ID NO: 1313482
uacucuccagaaggcagac

SEQ ID NO: 1313484 - RNA, 19 nt, Artificial Sequence
  Description of Artificial Sequence: Synthetic oligonucleotide
  Sense strand starting at position 2804 of SEQ ID NO: 1241968
cugccuucuggagaguauu

SEQ ID NO: 1313485 - RNA, 19 nt, Artificial Sequence
  Description of Artificial Sequence: Synthetic oligonucleotide
  Antisense strand to SEQ ID NO: 1313484
aauacucuccagaaggcag

SEQ ID NO: 1313486 - RNA, 19 nt, Artificial Sequence
  Description of Artificial Sequence: Synthetic oligonucleotide
  Sense strand starting at position 3030 of SEQ ID NO: 1241968
ucucucgacugguuuggaa

SEQ ID NO: 1313487 - RNA, 19 nt, Artificial Sequence
  Description of Artificial Sequence: Synthetic oligonucleotide
  Antisense strand to SEQ ID NO: 1313486
uuccaaaccagucgagaga

SEQ ID NO: 1313488 - RNA, 19 nt, Artificial Sequence
  Description of Artificial Sequence: Synthetic oligonucleotide
  Sense strand starting at position 3183 of SEQ ID NO: 1241968
ugacuuacuguccauuguu

SEQ ID NO: 1313489 - RNA, 19 nt, Artificial Sequence
  Description of Artificial Sequence: Synthetic oligonucleotide
  Antisense strand to SEQ ID NO: 1313488
aacaauggacaguaaguca

SEQ ID NO: 1313490 - RNA, 19 nt, Artificial Sequence
  Description of Artificial Sequence: Synthetic oligonucleotide
  Sense strand starting at position 3193 of SEQ ID NO: 1241968
uccauuguuuggguuaaua

SEQ ID NO: 1313491 - RNA, 19 nt, Artificial Sequence
  Description of Artificial Sequence: Synthetic oligonucleotide
  Antisense strand to SEQ ID NO: 1313490
uauuaacccaaacaaugga

SEQ ID NO: 1313492 - RNA, 19 nt, Artificial Sequence
  Description of Artificial Sequence: Synthetic oligonucleotide
  Sense strand starting at position 3195 of SEQ ID NO: 1241968
cauuguuuggguuaauaau

SEQ ID NO: 1313493 - RNA, 19 nt, Artificial Sequence
  Description of Artificial Sequence: Synthetic oligonucleotide
  Antisense strand to SEQ ID NO: 1313492
auuauuaacccaaacaaug

SEQ ID NO: 1313494 - RNA, 19 nt, Artificial Sequence
  Description of Artificial Sequence: Synthetic oligonucleotide
  Sense strand starting at position 3251 of SEQ ID NO: 1241968
agggcaucugaagguugaa

SEQ ID NO: 1313495 - RNA, 19 nt, Artificial Sequence
  Description of Artificial Sequence: Synthetic oligonucleotide
  Antisense strand to SEQ ID NO: 1313494
uucaaccuucagaugcccu

SEQ ID NO: 1313496 - RNA, 19 nt, Artificial Sequence
  Description of Artificial Sequence: Synthetic oligonucleotide
  Sense strand starting at position 3254 of SEQ ID NO: 1241968
gcaucugaagguugaagau

SEQ ID NO: 1313497 - RNA, 19 nt, Artificial Sequence
  Description of Artificial Sequence: Synthetic oligonucleotide
  Antisense strand to SEQ ID NO: 1313496
aucuucaaccuucagaugc

SEQ ID NO: 1313498 - RNA, 19 nt, Artificial Sequence
  Description of Artificial Sequence: Synthetic oligonucleotide
  Sense strand starting at position 3383 of SEQ ID NO: 1241968
ggaugacguucuucuucuu

SEQ ID NO: 1313499 - RNA, 19 nt, Artificial Sequence
  Description of Artificial Sequence: Synthetic oligonucleotide
  Antisense strand to SEQ ID NO: 1313498
aagaagaagaacgucaucc

SEQ ID NO: 1313500 - RNA, 19 nt, Artificial Sequence
  Description of Artificial Sequence: Synthetic oligonucleotide
  Sense strand starting at position 3704 of SEQ ID NO: 1241968
agccauagucaauggaacu

SEQ ID NO: 1313501 - RNA, 19 nt, Artificial Sequence
  Description of Artificial Sequence: Synthetic oligonucleotide
  Antisense strand to SEQ ID NO: 1313500
aguuccauugacuauggcu

SEQ ID NO: 1313502 - RNA, 19 nt, Artificial Sequence
  Description of Artificial Sequence: Synthetic oligonucleotide
  Sense strand starting at position 3770 of SEQ ID NO: 1241968
ggaugcaucugacucgaaa

SEQ ID NO: 1313503 - RNA, 19 nt, Artificial Sequence
  Description of Artificial Sequence: Synthetic oligonucleotide
  Antisense strand to SEQ ID NO: 1313502
uuucgagucagaugcaucc

SEQ ID NO: 1313504 - RNA, 19 nt, Artificial Sequence
  Description of Artificial Sequence: Synthetic oligonucleotide
  Sense strand starting at position 3886 of SEQ ID NO: 1241968
gaaguuacaagagguugua

SEQ ID NO: 1313505 - RNA, 19 nt, Artificial Sequence
  Description of Artificial Sequence: Synthetic oligonucleotide
  Antisense strand to SEQ ID NO: 1313504
uacaaccucuuguaacuuc

SEQ ID NO: 1313506 - RNA, 19 nt, Artificial Sequence
  Description of Artificial Sequence: Synthetic oligonucleotide
  Sense strand starting at position 3905 of SEQ ID NO: 1241968
guccaaaucccauauuguu

SEQ ID NO: 1313507 - RNA, 19 nt, Artificial Sequence
  Description of Artificial Sequence: Synthetic oligonucleotide
  Antisense strand to SEQ ID NO: 1313506
aacaauaugggauuuggac

SEQ ID NO: 1313508 - RNA, 19 nt, Artificial Sequence
  Description of Artificial Sequence: Synthetic oligonucleotide
  Sense strand starting at position 3933 of SEQ ID NO: 1241968
ggcgcagugaacuaccauu

SEQ ID NO: 1313509 - RNA, 19 nt, Artificial Sequence
  Description of Artificial Sequence: Synthetic oligonucleotide
  Antisense strand to SEQ ID NO: 1313508
aaugguaguucacugcgcc

SEQ ID NO: 1313510 - RNA, 19 nt, Artificial Sequence
  Description of Artificial Sequence: Synthetic oligonucleotide
  Sense strand starting at position 3964 of SEQ ID NO: 1241968
cuggaagacucugauggaa

SEQ ID NO: 1313511 - RNA, 19 nt, Artificial Sequence
  Description of Artificial Sequence: Synthetic oligonucleotide
  Antisense strand to SEQ ID NO: 1313510
uuccaucagagucuuccag

SEQ ID NO: 1313512 - RNA, 19 nt, Artificial Sequence
  Description of Artificial Sequence: Synthetic oligonucleotide
  Sense strand starting at position 3979 of SEQ ID NO: 1241968
ggaacauaauuacaugaca

SEQ ID NO: 1313513 - RNA, 19 nt, Artificial Sequence
  Description of Artificial Sequence: Synthetic oligonucleotide
  Antisense strand to SEQ ID NO: 1313512
ugucauguaauuauguucc

SEQ ID NO: 1313514 - RNA, 19 nt, Artificial Sequence
  Description of Artificial Sequence: Synthetic oligonucleotide
  Sense strand starting at position 3 of SEQ ID NO: 1241969
guguguacagacuauauau

SEQ ID NO: 1313515 - RNA, 19 nt, Artificial Sequence
  Description of Artificial Sequence: Synthetic oligonucleotide
  Antisense strand to SEQ ID NO: 1313514
auauauagucuguacacac

SEQ ID NO: 1313516 - RNA, 19 nt, Artificial Sequence
  Description of Artificial Sequence: Synthetic oligonucleotide
  Sense strand starting at position 28 of SEQ ID NO: 1241969
auguaaagauugcuaagau

SEQ ID NO: 1313517 - RNA, 19 nt, Artificial Sequence
  Description of Artificial Sequence: Synthetic oligonucleotide
  Antisense strand to SEQ ID NO: 1313516
aucuuagcaaucuuuacau

SEQ ID NO: 1313518 - RNA, 19 nt, Artificial Sequence
  Description of Artificial Sequence: Synthetic oligonucleotide
  Sense strand starting at position 37 of SEQ ID NO: 1241969
uugcuaagaucuuuaagua

SEQ ID NO: 1313519 - RNA, 19 nt, Artificial Sequence
  Description of Artificial Sequence: Synthetic oligonucleotide
  Antisense strand to SEQ ID NO: 1313518
uacuuaaagaucuuagcaa

SEQ ID NO: 1313520 - RNA, 19 nt, Artificial Sequence
  Description of Artificial Sequence: Synthetic oligonucleotide
  Sense strand starting at position 38 of SEQ ID NO: 1241969
ugcuaagaucuuuaaguaa

SEQ ID NO: 1313521 - RNA, 19 nt, Artificial Sequence
  Description of Artificial Sequence: Synthetic oligonucleotide
  Antisense strand to SEQ ID NO: 1313520
uuacuuaaagaucuuagca

SEQ ID NO: 1313522 - RNA, 19 nt, Artificial Sequence
  Description of Artificial Sequence: Synthetic oligonucleotide
  Sense strand starting at position 97 of SEQ ID NO: 1241969
gcaauaugaucucacuaug

SEQ ID NO: 1313523 - RNA, 19 nt, Artificial Sequence
  Description of Artificial Sequence: Synthetic oligonucleotide
  Antisense strand to SEQ ID NO: 1313522
cauagugagaucauauugc

SEQ ID NO: 1313524 - RNA, 19 nt, Artificial Sequence
  Description of Artificial Sequence: Synthetic oligonucleotide
  Sense strand starting at position 102 of SEQ ID NO: 1241969
augaucucacuauguuauu

SEQ ID NO: 1313525 - RNA, 19 nt, Artificial Sequence
  Description of Artificial Sequence: Synthetic oligonucleotide
  Antisense strand to SEQ ID NO: 1313524
aauaacauagugagaucau

SEQ ID NO: 1313526 - RNA, 19 nt, Artificial Sequence
  Description of Artificial Sequence: Synthetic oligonucleotide
  Sense strand starting at position 185 of SEQ ID NO: 1241969
uuuaguauacacgguucua

SEQ ID NO: 1313527 - RNA, 19 nt, Artificial Sequence
  Description of Artificial Sequence: Synthetic oligonucleotide
  Antisense strand to SEQ ID NO: 1313526
uagaaccguguauacuaaa

SEQ ID NO: 1313528 - RNA, 19 nt, Artificial Sequence
  Description of Artificial Sequence: Synthetic oligonucleotide
  Sense strand starting at position 360 of SEQ ID NO: 1241969
gccuuaugcuaagcgaaac

SEQ ID NO: 1313529 - RNA, 19 nt, Artificial Sequence
  Description of Artificial Sequence: Synthetic oligonucleotide
  Antisense strand to SEQ ID NO: 1313528
guuucgcuuagcauaaggc

SEQ ID NO: 1313530 - RNA, 19 nt, Artificial Sequence
  Description of Artificial Sequence: Synthetic oligonucleotide
  Sense strand starting at position 471 of SEQ ID NO: 1241969
gaggcugccuuccugagua

SEQ ID NO: 1313531 - RNA, 19 nt, Artificial Sequence
  Description of Artificial Sequence: Synthetic oligonucleotide
  Antisense strand to SEQ ID NO: 1313530
uacucaggaaggcagccuc

SEQ ID NO: 1313532 - RNA, 19 nt, Artificial Sequence
  Description of Artificial Sequence: Synthetic oligonucleotide
  Sense strand starting at position 641 of SEQ ID NO: 1241969
ccugucuuaacgcaggaaa

SEQ ID NO: 1313533 - RNA, 19 nt, Artificial Sequence
  Description of Artificial Sequence: Synthetic oligonucleotide
  Antisense strand to SEQ ID NO: 1313532
uuuccugcguuaagacagg

SEQ ID NO: 1313534 - RNA, 19 nt, Artificial Sequence
  Description of Artificial Sequence: Synthetic oligonucleotide
  Sense strand starting at position 644 of SEQ ID NO: 1241969
gucuuaacgcaggaaacgu

SEQ ID NO: 1313535 - RNA, 19 nt, Artificial Sequence
  Description of Artificial Sequence: Synthetic oligonucleotide
  Antisense strand to SEQ ID NO: 1313534
acguuuccugcguuaagac

SEQ ID NO: 1313536 - RNA, 19 nt, Artificial Sequence
  Description of Artificial Sequence: Synthetic oligonucleotide
  Sense strand starting at position 899 of SEQ ID NO: 1241969
agcugucaagcauagcaau

SEQ ID NO: 1313537 - RNA, 19 nt, Artificial Sequence
  Description of Artificial Sequence: Synthetic oligonucleotide
  Antisense strand to SEQ ID NO: 1313536
auugcuaugcuugacagcu

SEQ ID NO: 1313538 - RNA, 19 nt, Artificial Sequence
  Description of Artificial Sequence: Synthetic oligonucleotide
  Sense strand starting at position 1176 of SEQ ID NO: 1241969
ccguuucccgauuauucuu

SEQ ID NO: 1313539 - RNA, 19 nt, Artificial Sequence
  Description of Artificial Sequence: Synthetic oligonucleotide
  Antisense strand to SEQ ID NO: 1313538
aagaauaaucgggaaacgg

SEQ ID NO: 1313540 - RNA, 19 nt, Artificial Sequence
  Description of Artificial Sequence: Synthetic oligonucleotide
  Sense strand starting at position 1184 of SEQ ID NO: 1241969
cgauuauucuugcacccuu

SEQ ID NO: 1313541 - RNA, 19 nt, Artificial Sequence
  Description of Artificial Sequence: Synthetic oligonucleotide
  Antisense strand to SEQ ID NO: 1313540
aagggugcaagaauaaucg

SEQ ID NO: 1313542 - RNA, 19 nt, Artificial Sequence
  Description of Artificial Sequence: Synthetic oligonucleotide
  Sense strand starting at position 1212 of SEQ ID NO: 1241969
cccacaaugugcugcaaau

SEQ ID NO: 1313543 - RNA, 19 nt, Artificial Sequence
  Description of Artificial Sequence: Synthetic oligonucleotide
  Antisense strand to SEQ ID NO: 1313542
auuugcagcacauuguggg

SEQ ID NO: 1313544 - RNA, 19 nt, Artificial Sequence
  Description of Artificial Sequence: Synthetic oligonucleotide
  Sense strand starting at position 1225 of SEQ ID NO: 1241969
gcaaauuaagcucacgcau

SEQ ID NO: 1313545 - RNA, 19 nt, Artificial Sequence
  Description of Artificial Sequence: Synthetic oligonucleotide
  Antisense strand to SEQ ID NO: 1313544
augcgugagcuuaauuugc

SEQ ID NO: 1313546 - RNA, 19 nt, Artificial Sequence
  Description of Artificial Sequence: Synthetic oligonucleotide
  Sense strand starting at position 1281 of SEQ ID NO: 1241969
aacagugcugccuccguaa

SEQ ID NO: 1313547 - RNA, 19 nt, Artificial Sequence
  Description of Artificial Sequence: Synthetic oligonucleotide
  Antisense strand to SEQ ID NO: 1313546
uuacggaggcagcacuguu

SEQ ID NO: 1313548 - RNA, 19 nt, Artificial Sequence
  Description of Artificial Sequence: Synthetic oligonucleotide
  Sense strand starting at position 1297 of SEQ ID NO: 1241969
uaacgaucgcgccuccuua

SEQ ID NO: 1313549 - RNA, 19 nt, Artificial Sequence
  Description of Artificial Sequence: Synthetic oligonucleotide
  Antisense strand to SEQ ID NO: 1313548
uaaggaggcgcgaucguua

SEQ ID NO: 1313550 - RNA, 19 nt, Artificial Sequence
  Description of Artificial Sequence: Synthetic oligonucleotide
  Sense strand starting at position 1301 of SEQ ID NO: 1241969
gaucgcgccuccuuaacaa

SEQ ID NO: 1313551 - RNA, 19 nt, Artificial Sequence
  Description of Artificial Sequence: Synthetic oligonucleotide
  Antisense strand to SEQ ID NO: 1313550
uuguuaaggaggcgcgauc

SEQ ID NO: 1313552 - RNA, 19 nt, Artificial Sequence
  Description of Artificial Sequence: Synthetic oligonucleotide
  Sense strand starting at position 1425 of SEQ ID NO: 1241969
gcgaccuuagugcaacauu

SEQ ID NO: 1313553 - RNA, 19 nt, Artificial Sequence
  Description of Artificial Sequence: Synthetic oligonucleotide
  Antisense strand to SEQ ID NO: 1313552
aauguugcacuaaggucgc

SEQ ID NO: 1313554 - RNA, 19 nt, Artificial Sequence
  Description of Artificial Sequence: Synthetic oligonucleotide
  Sense strand starting at position 1489 of SEQ ID NO: 1241969
aagguauuccuucgccacu

SEQ ID NO: 1313555 - RNA, 19 nt, Artificial Sequence
  Description of Artificial Sequence: Synthetic oligonucleotide
  Antisense strand to SEQ ID NO: 1313554
aguggcgaaggaauaccuu

SEQ ID NO: 1313556 - RNA, 19 nt, Artificial Sequence
  Description of Artificial Sequence: Synthetic oligonucleotide
  Sense strand starting at position 2536 of SEQ ID NO: 1241969
cugauuugagcucgugcca

SEQ ID NO: 1313557 - RNA, 19 nt, Artificial Sequence
  Description of Artificial Sequence: Synthetic oligonucleotide
  Antisense strand to SEQ ID NO: 1313556
uggcacgagcucaaaucag

SEQ ID NO: 1313558 - RNA, 19 nt, Artificial Sequence
  Description of Artificial Sequence: Synthetic oligonucleotide
  Sense strand starting at position 2699 of SEQ ID NO: 1241969
ccugguucuuacggagaac

SEQ ID NO: 1313559 - RNA, 19 nt, Artificial Sequence
  Description of Artificial Sequence: Synthetic oligonucleotide
  Antisense strand to SEQ ID NO: 1313558
guucuccguaagaaccagg

SEQ ID NO: 1313560 - RNA, 19 nt, Artificial Sequence
  Description of Artificial Sequence: Synthetic oligonucleotide
  Sense strand starting at position 2700 of SEQ ID NO: 1241969
cugguucuuacggagaaca

SEQ ID NO: 1313561 - RNA, 19 nt, Artificial Sequence
  Description of Artificial Sequence: Synthetic oligonucleotide
  Antisense strand to SEQ ID NO: 1313560
uguucuccguaagaaccag

SEQ ID NO: 1313562 - RNA, 19 nt, Artificial Sequence
  Description of Artificial Sequence: Synthetic oligonucleotide
  Sense strand starting at position 2702 of SEQ ID NO: 1241969
gguucuuacggagaacagu

SEQ ID NO: 1313563 - RNA, 19 nt, Artificial Sequence
  Description of Artificial Sequence: Synthetic oligonucleotide
  Antisense strand to SEQ ID NO: 1313562
acuguucuccguaagaacc

SEQ ID NO: 1313564 - RNA, 19 nt, Artificial Sequence
  Description of Artificial Sequence: Synthetic oligonucleotide
  Sense strand starting at position 2733 of SEQ ID NO: 1241969
cagauauucuagucugguc

SEQ ID NO: 1313565 - RNA, 19 nt, Artificial Sequence
  Description of Artificial Sequence: Synthetic oligonucleotide
  Antisense strand to SEQ ID NO: 1313564
gaccagacuagaauaucug

SEQ ID NO: 1313566 - RNA, 19 nt, Artificial Sequence
  Description of Artificial Sequence: Synthetic oligonucleotide
  Sense strand starting at position 2741 of SEQ ID NO: 1241969
cuagucuggucucuagauu

SEQ ID NO: 1313567 - RNA, 19 nt, Artificial Sequence
  Description of Artificial Sequence: Synthetic oligonucleotide
  Antisense strand to SEQ ID NO: 1313566
aaucuagagaccagacuag

SEQ ID NO: 1313568 - RNA, 19 nt, Artificial Sequence
  Description of Artificial Sequence: Synthetic oligonucleotide
  Sense strand starting at position 2742 of SEQ ID NO: 1241969
uagucuggucucuagauua

SEQ ID NO: 1313569 - RNA, 19 nt, Artificial Sequence
  Description of Artificial Sequence: Synthetic oligonucleotide
  Antisense strand to SEQ ID NO: 1313568
uaaucuagagaccagacua

SEQ ID NO: 1313570 - RNA, 19 nt, Artificial Sequence
  Description of Artificial Sequence: Synthetic oligonucleotide
  Sense strand starting at position 2749 of SEQ ID NO: 1241969
gucucuagauuaugaaggu

SEQ ID NO: 1313571 - RNA, 19 nt, Artificial Sequence
  Description of Artificial Sequence: Synthetic oligonucleotide
  Antisense strand to SEQ ID NO: 1313570
accuucauaaucuagagac

SEQ ID NO: 1313572 - RNA, 19 nt, Artificial Sequence
  Description of Artificial Sequence: Synthetic oligonucleotide
  Sense strand starting at position 2750 of SEQ ID NO: 1241969
ucucuagauuaugaagguu

SEQ ID NO: 1313573 - RNA, 19 nt, Artificial Sequence
  Description of Artificial Sequence: Synthetic oligonucleotide
  Antisense strand to SEQ ID NO: 1313572
aaccuucauaaucuagaga

SEQ ID NO: 1313574 - RNA, 19 nt, Artificial Sequence
  Description of Artificial Sequence: Synthetic oligonucleotide
  Sense strand starting at position 2834 of SEQ ID NO: 1241969
gagacaaucuaccaguuga

SEQ ID NO: 1313575 - RNA, 19 nt, Artificial Sequence
  Description of Artificial Sequence: Synthetic oligonucleotide
  Antisense strand to SEQ ID NO: 1313574
ucaacugguagauugucuc

SEQ ID NO: 1313576 - RNA, 19 nt, Artificial Sequence
  Description of Artificial Sequence: Synthetic oligonucleotide
  Sense strand starting at position 2849 of SEQ ID NO: 1241969
uugacucaauauucggaua

SEQ ID NO: 1313577 - RNA, 19 nt, Artificial Sequence
  Description of Artificial Sequence: Synthetic oligonucleotide
  Antisense strand to SEQ ID NO: 1313576
uauccgaauauugagucaa

SEQ ID NO: 1313578 - RNA, 19 nt, Artificial Sequence
  Description of Artificial Sequence: Synthetic oligonucleotide
  Sense strand starting at position 2852 of SEQ ID NO: 1241969
acucaauauucggauauca

SEQ ID NO: 1313579 - RNA, 19 nt, Artificial Sequence
  Description of Artificial Sequence: Synthetic oligonucleotide
  Antisense strand to SEQ ID NO: 1313578
ugauauccgaauauugagu

SEQ ID NO: 1313580 - RNA, 19 nt, Artificial Sequence
  Description of Artificial Sequence: Synthetic oligonucleotide
  Sense strand starting at position 3003 of SEQ ID NO: 1241969
cauuguagaugacaugaua

SEQ ID NO: 1313581 - RNA, 19 nt, Artificial Sequence
  Description of Artificial Sequence: Synthetic oligonucleotide
  Antisense strand to SEQ ID NO: 1313580
uaucaugucaucuacaaug

SEQ ID NO: 1313582 - RNA, 19 nt, Artificial Sequence
  Description of Artificial Sequence: Synthetic oligonucleotide
  Sense strand starting at position 3503 of SEQ ID NO: 1241969
agagcaagcaguuagacuu

SEQ ID NO: 1313583 - RNA, 19 nt, Artificial Sequence
  Description of Artificial Sequence: Synthetic oligonucleotide
  Antisense strand to SEQ ID NO: 1313582
aagucuaacugcuugcucu

SEQ ID NO: 1313584 - RNA, 19 nt, Artificial Sequence
  Description of Artificial Sequence: Synthetic oligonucleotide
  Sense strand starting at position 3563 of SEQ ID NO: 1241969
auguaauccguuuacuaac

SEQ ID NO: 1313585 - RNA, 19 nt, Artificial Sequence
  Description of Artificial Sequence: Synthetic oligonucleotide
  Antisense strand to SEQ ID NO: 1313584
guuaguaaacggauuacau

SEQ ID NO: 1313586 - RNA, 19 nt, Artificial Sequence
  Description of Artificial Sequence: Synthetic oligonucleotide
  Sense strand starting at position 3569 of SEQ ID NO: 1241969
uccguuuacuaacuguaaa

SEQ ID NO: 1313587 - RNA, 19 nt, Artificial Sequence
  Description of Artificial Sequence: Synthetic oligonucleotide
  Antisense strand to SEQ ID NO: 1313586
uuuacaguuaguaaacgga

SEQ ID NO: 1313588 - RNA, 19 nt, Artificial Sequence
  Description of Artificial Sequence: Synthetic oligonucleotide
  Sense strand starting at position 3600 of SEQ ID NO: 1241969
cagaaauugucacauugga

SEQ ID NO: 1313589 - RNA, 19 nt, Artificial Sequence
  Description of Artificial Sequence: Synthetic oligonucleotide
  Antisense strand to SEQ ID NO: 1313588
uccaaugugacaauuucug

SEQ ID NO: 1313590 - RNA, 19 nt, Artificial Sequence
  Description of Artificial Sequence: Synthetic oligonucleotide
  Sense strand starting at position 3605 of SEQ ID NO: 1241969
auugucacauuggauuaaa

SEQ ID NO: 1313591 - RNA, 19 nt, Artificial Sequence
  Description of Artificial Sequence: Synthetic oligonucleotide
  Antisense strand to SEQ ID NO: 1313590
uuuaauccaaugugacaau

SEQ ID NO: 1313592 - RNA, 19 nt, Artificial Sequence
  Description of Artificial Sequence: Synthetic oligonucleotide
  Sense strand starting at position 3676 of SEQ ID NO: 1241969
agugacucaugccuguuaa

SEQ ID NO: 1313593 - RNA, 19 nt, Artificial Sequence
  Description of Artificial Sequence: Synthetic oligonucleotide
  Antisense strand to SEQ ID NO: 1313592
uuaacaggcaugagucacu

SEQ ID NO: 1313594 - RNA, 19 nt, Artificial Sequence
  Description of Artificial Sequence: Synthetic oligonucleotide
  Sense strand starting at position 447 of SEQ ID NO: 1241970
ggaggaaugcugggucugu

SEQ ID NO: 1313595 - RNA, 19 nt, Artificial Sequence
  Description of Artificial Sequence: Synthetic oligonucleotide
  Antisense strand to SEQ ID NO: 1313594
acagacccagcauuccucc

SEQ ID NO: 1313596 - RNA, 19 nt, Artificial Sequence
  Description of Artificial Sequence: Synthetic oligonucleotide
  Sense strand starting at position 1346 of SEQ ID NO: 1241970
aaaguagaugucugguuua

SEQ ID NO: 1313597 - RNA, 19 nt, Artificial Sequence
  Description of Artificial Sequence: Synthetic oligonucleotide
  Antisense strand to SEQ ID NO: 1313596
uaaaccagacaucuacuuu

SEQ ID NO: 1313598 - RNA, 19 nt, Artificial Sequence
  Description of Artificial Sequence: Synthetic oligonucleotide
  Sense strand starting at position 1349 of SEQ ID NO: 1241970
guagaugucugguuuagag

SEQ ID NO: 1313599 - RNA, 19 nt, Artificial Sequence
  Description of Artificial Sequence: Synthetic oligonucleotide
  Antisense strand to SEQ ID NO: 1313598
cucuaaaccagacaucuac

SEQ ID NO: 1313600 - RNA, 19 nt, Artificial Sequence
  Description of Artificial Sequence: Synthetic oligonucleotide
  Sense strand starting at position 1351 of SEQ ID NO: 1241970
agaugucugguuuagagua

SEQ ID NO: 1313601 - RNA, 19 nt, Artificial Sequence
  Description of Artificial Sequence: Synthetic oligonucleotide
  Antisense strand to SEQ ID NO: 1313600
uacucuaaaccagacaucu

SEQ ID NO: 1313602 - RNA, 19 nt, Artificial Sequence
  Description of Artificial Sequence: Synthetic oligonucleotide
  Sense strand starting at position 1356 of SEQ ID NO: 1241970
ucugguuuagaguacuuaa

SEQ ID NO: 1313603 - RNA, 19 nt, Artificial Sequence
  Description of Artificial Sequence: Synthetic oligonucleotide
  Antisense strand to SEQ ID NO: 1313602
uuaaguacucuaaaccaga

SEQ ID NO: 1313604 - RNA, 19 nt, Artificial Sequence
  Description of Artificial Sequence: Synthetic oligonucleotide
  Sense strand starting at position 1359 of SEQ ID NO: 1241970
gguuuagaguacuuaagac

SEQ ID NO: 1313605 - RNA, 19 nt, Artificial Sequence
  Description of Artificial Sequence: Synthetic oligonucleotide
  Antisense strand to SEQ ID NO: 1313604
gucuuaaguacucuaaacc

SEQ ID NO: 1313606 - RNA, 19 nt, Artificial Sequence
  Description of Artificial Sequence: Synthetic oligonucleotide
  Sense strand starting at position 1413 of SEQ ID NO: 1241970
cugauauauuucuguauug

SEQ ID NO: 1313607 - RNA, 19 nt, Artificial Sequence
  Description of Artificial Sequence: Synthetic oligonucleotide
  Antisense strand to SEQ ID NO: 1313606
caauacagaaauauaucag

SEQ ID NO: 1313608 - RNA, 19 nt, Artificial Sequence
  Description of Artificial Sequence: Synthetic oligonucleotide
  Sense strand starting at position 1578 of SEQ ID NO: 1241970
uguaaaucgggccauacuu

SEQ ID NO: 1313609 - RNA, 19 nt, Artificial Sequence
  Description of Artificial Sequence: Synthetic oligonucleotide
  Antisense strand to SEQ ID NO: 1313608
aaguauggcccgauuuaca

SEQ ID NO: 1313610 - RNA, 19 nt, Artificial Sequence
  Description of Artificial Sequence: Synthetic oligonucleotide
  Sense strand starting at position 1588 of SEQ ID NO: 1241970
gccauacuucuggaaauuc

SEQ ID NO: 1313611 - RNA, 19 nt, Artificial Sequence
  Description of Artificial Sequence: Synthetic oligonucleotide
  Antisense strand to SEQ ID NO: 1313610
gaauuuccagaaguauggc

SEQ ID NO: 1313612 - RNA, 19 nt, Artificial Sequence
  Description of Artificial Sequence: Synthetic oligonucleotide
  Sense strand starting at position 1596 of SEQ ID NO: 1241970
ucuggaaauucuggacaug

SEQ ID NO: 1313613 - RNA, 19 nt, Artificial Sequence
  Description of Artificial Sequence: Synthetic oligonucleotide
  Antisense strand to SEQ ID NO: 1313612
cauguccagaauuuccaga

SEQ ID NO: 1313614 - RNA, 19 nt, Artificial Sequence
  Description of Artificial Sequence: Synthetic oligonucleotide
  Sense strand starting at position 1637 of SEQ ID NO: 1241970
cccgucucccuccagaaau

SEQ ID NO: 1313615 - RNA, 19 nt, Artificial Sequence
  Description of Artificial Sequence: Synthetic oligonucleotide
  Antisense strand to SEQ ID NO: 1313614
auuucuggagggagacggg

SEQ ID NO: 1313616 - RNA, 19 nt, Artificial Sequence
  Description of Artificial Sequence: Synthetic oligonucleotide
  Sense strand starting at position 1671 of SEQ ID NO: 1241970
agccauugucaccaggaga

SEQ ID NO: 1313617 - RNA, 19 nt, Artificial Sequence
  Description of Artificial Sequence: Synthetic oligonucleotide
  Antisense strand to SEQ ID NO: 1313616
ucuccuggugacaauggcu

SEQ ID NO: 1313618 - RNA, 19 nt, Artificial Sequence
  Description of Artificial Sequence: Synthetic oligonucleotide
  Sense strand starting at position 1800 of SEQ ID NO: 1241970
agccuuugaccaggacuga

SEQ ID NO: 1313619 - RNA, 19 nt, Artificial Sequence
  Description of Artificial Sequence: Synthetic oligonucleotide
  Antisense strand to SEQ ID NO: 1313618
ucaguccuggucaaaggcu

SEQ ID NO: 1313620 - RNA, 19 nt, Artificial Sequence
  Description of Artificial Sequence: Synthetic oligonucleotide
  Sense strand starting at position 2117 of SEQ ID NO: 1241970
cuagcagacuccugaaaua

SEQ ID NO: 1313621 - RNA, 19 nt, Artificial Sequence
  Description of Artificial Sequence: Synthetic oligonucleotide
  Antisense strand to SEQ ID NO: 1313620
uauuucaggagucugcuag

SEQ ID NO: 1313622 - RNA, 19 nt, Artificial Sequence
  Description of Artificial Sequence: Synthetic oligonucleotide
  Sense strand starting at position 2130 of SEQ ID NO: 1241970
gaaauaucugccugugcuu

SEQ ID NO: 1313623 - RNA, 19 nt, Artificial Sequence
  Description of Artificial Sequence: Synthetic oligonucleotide
  Antisense strand to SEQ ID NO: 1313622
aagcacaggcagauauuuc

SEQ ID NO: 1313624 - RNA, 19 nt, Artificial Sequence
  Description of Artificial Sequence: Synthetic oligonucleotide
  Sense strand starting at position 2200 of SEQ ID NO: 1241970
gcagccauuggucaagacu

SEQ ID NO: 1313625 - RNA, 19 nt, Artificial Sequence
  Description of Artificial Sequence: Synthetic oligonucleotide
  Antisense strand to SEQ ID NO: 1313624
agucuugaccaauggcugc

SEQ ID NO: 1313626 - RNA, 19 nt, Artificial Sequence
  Description of Artificial Sequence: Synthetic oligonucleotide
  Sense strand starting at position 2254 of SEQ ID NO: 1241970
aagagaaggucagagcuau

SEQ ID NO: 1313627 - RNA, 19 nt, Artificial Sequence
  Description of Artificial Sequence: Synthetic oligonucleotide
  Antisense strand to SEQ ID NO: 1313626
auagcucugaccuucucuu

SEQ ID NO: 1313628 - RNA, 19 nt, Artificial Sequence
  Description of Artificial Sequence: Synthetic oligonucleotide
  Sense strand starting at position 2265 of SEQ ID NO: 1241970
agagcuaucuugccagcuu

SEQ ID NO: 1313629 - RNA, 19 nt, Artificial Sequence
  Description of Artificial Sequence: Synthetic oligonucleotide
  Antisense strand to SEQ ID NO: 1313628
aagcuggcaagauagcucu

SEQ ID NO: 1313630 - RNA, 19 nt, Artificial Sequence
  Description of Artificial Sequence: Synthetic oligonucleotide
  Sense strand starting at position 2594 of SEQ ID NO: 1241970
acucuaagaccuuggcaaa

SEQ ID NO: 1313631 - RNA, 19 nt, Artificial Sequence
  Description of Artificial Sequence: Synthetic oligonucleotide
  Antisense strand to SEQ ID NO: 1313630
uuugccaaggucuuagagu

SEQ ID NO: 1313632 - RNA, 19 nt, Artificial Sequence
  Description of Artificial Sequence: Synthetic oligonucleotide
  Sense strand starting at position 2595 of SEQ ID NO: 1241970
cucuaagaccuuggcaaau

SEQ ID NO: 1313633 - RNA, 19 nt, Artificial Sequence
  Description of Artificial Sequence: Synthetic oligonucleotide
  Antisense strand to SEQ ID NO: 1313632
auuugccaaggucuuagag

SEQ ID NO: 1313634 - RNA, 19 nt, Artificial Sequence
  Description of Artificial Sequence: Synthetic oligonucleotide
  Sense strand starting at position 2606 of SEQ ID NO: 1241970
uggcaaaucugguugccau

SEQ ID NO: 1313635 - RNA, 19 nt, Artificial Sequence
  Description of Artificial Sequence: Synthetic oligonucleotide
  Antisense strand to SEQ ID NO: 1313634
auggcaaccagauuugcca

SEQ ID NO: 1313636 - RNA, 19 nt, Artificial Sequence
  Description of Artificial Sequence: Synthetic oligonucleotide
  Sense strand starting at position 2607 of SEQ ID NO: 1241970
ggcaaaucugguugccaug

SEQ ID NO: 1313637 - RNA, 19 nt, Artificial Sequence
  Description of Artificial Sequence: Synthetic oligonucleotide
  Antisense strand to SEQ ID NO: 1313636
cauggcaaccagauuugcc

SEQ ID NO: 1313638 - RNA, 19 nt, Artificial Sequence
  Description of Artificial Sequence: Synthetic oligonucleotide
  Sense strand starting at position 2804 of SEQ ID NO: 1241970
gucagucaccuguagaguu

SEQ ID NO: 1313639 - RNA, 19 nt, Artificial Sequence
  Description of Artificial Sequence: Synthetic oligonucleotide
  Antisense strand to SEQ ID NO: 1313638
aacucuacaggugacugac

SEQ ID NO: 1313640 - RNA, 19 nt, Artificial Sequence
  Description of Artificial Sequence: Synthetic oligonucleotide
  Sense strand starting at position 2881 of SEQ ID NO: 1241970
auacaugugccauguagag

SEQ ID NO: 1313641 - RNA, 19 nt, Artificial Sequence
  Description of Artificial Sequence: Synthetic oligonucleotide
  Antisense strand to SEQ ID NO: 1313640
cucuacauggcacauguau

SEQ ID NO: 1313642 - RNA, 19 nt, Artificial Sequence
  Description of Artificial Sequence: Synthetic oligonucleotide
  Sense strand starting at position 2932 of SEQ ID NO: 1241970
uacuuaucauuggaaggua

SEQ ID NO: 1313643 - RNA, 19 nt, Artificial Sequence
  Description of Artificial Sequence: Synthetic oligonucleotide
  Antisense strand to SEQ ID NO: 1313642
uaccuuccaaugauaagua

SEQ ID NO: 1313644 - RNA, 19 nt, Artificial Sequence
  Description of Artificial Sequence: Synthetic oligonucleotide
  Sense strand starting at position 2935 of SEQ ID NO: 1241970
uuaucauuggaagguacaa

SEQ ID NO: 1313645 - RNA, 19 nt, Artificial Sequence
  Description of Artificial Sequence: Synthetic oligonucleotide
  Antisense strand to SEQ ID NO: 1313644
uuguaccuuccaaugauaa

SEQ ID NO: 1313646 - RNA, 19 nt, Artificial Sequence
  Description of Artificial Sequence: Synthetic oligonucleotide
  Sense strand starting at position 3080 of SEQ ID NO: 1241970
acauaaaguguguagggau

SEQ ID NO: 1313647 - RNA, 19 nt, Artificial Sequence
  Description of Artificial Sequence: Synthetic oligonucleotide
  Antisense strand to SEQ ID NO: 1313646
aucccuacacacuuuaugu

SEQ ID NO: 1313648 - RNA, 19 nt, Artificial Sequence
  Description of Artificial Sequence: Synthetic oligonucleotide
  Sense strand starting at position 3092 of SEQ ID NO: 1241970
uagggauucuuaggaugau

SEQ ID NO: 1313649 - RNA, 19 nt, Artificial Sequence
  Description of Artificial Sequence: Synthetic oligonucleotide
  Antisense strand to SEQ ID NO: 1313648
aucauccuaagaaucccua

SEQ ID NO: 1313650 - RNA, 19 nt, Artificial Sequence
  Description of Artificial Sequence: Synthetic oligonucleotide
  Sense strand starting at position 3093 of SEQ ID NO: 1241970
agggauucuuaggaugaug

SEQ ID NO: 1313651 - RNA, 19 nt, Artificial Sequence
  Description of Artificial Sequence: Synthetic oligonucleotide
  Antisense strand to SEQ ID NO: 1313650
caucauccuaagaaucccu

SEQ ID NO: 1313652 - RNA, 19 nt, Artificial Sequence
  Description of Artificial Sequence: Synthetic oligonucleotide
  Sense strand starting at position 3297 of SEQ ID NO: 1241970
uuguaugugucagcccaua

SEQ ID NO: 1313653 - RNA, 19 nt, Artificial Sequence
  Description of Artificial Sequence: Synthetic oligonucleotide
  Antisense strand to SEQ ID NO: 1313652
uaugggcugacacauacaa

SEQ ID NO: 1313654 - RNA, 19 nt, Artificial Sequence
  Description of Artificial Sequence: Synthetic oligonucleotide
  Sense strand starting at position 3302 of SEQ ID NO: 1241970
ugugucagcccauagauca

SEQ ID NO: 1313655 - RNA, 19 nt, Artificial Sequence
  Description of Artificial Sequence: Synthetic oligonucleotide
  Antisense strand to SEQ ID NO: 1313654
ugaucuaugggcugacaca

SEQ ID NO: 1313656 - RNA, 19 nt, Artificial Sequence
  Description of Artificial Sequence: Synthetic oligonucleotide
  Sense strand starting at position 3429 of SEQ ID NO: 1241970
aguacuuaucaagaguggu

SEQ ID NO: 1313657 - RNA, 19 nt, Artificial Sequence
  Description of Artificial Sequence: Synthetic oligonucleotide
  Antisense strand to SEQ ID NO: 1313656
accacucuugauaaguacu

SEQ ID NO: 1313658 - RNA, 19 nt, Artificial Sequence
  Description of Artificial Sequence: Synthetic oligonucleotide
  Sense strand starting at position 3433 of SEQ ID NO: 1241970
cuuaucaagagugguuguu

SEQ ID NO: 1313659 - RNA, 19 nt, Artificial Sequence
  Description of Artificial Sequence: Synthetic oligonucleotide
  Antisense strand to SEQ ID NO: 1313658
aacaaccacucuugauaag

SEQ ID NO: 1313660 - RNA, 19 nt, Artificial Sequence
  Description of Artificial Sequence: Synthetic oligonucleotide
  Sense strand starting at position 3501 of SEQ ID NO: 1241970
uaaagagaguauggagaaa

SEQ ID NO: 1313661 - RNA, 19 nt, Artificial Sequence
  Description of Artificial Sequence: Synthetic oligonucleotide
  Antisense strand to SEQ ID NO: 1313660
uuucuccauacucucuuua

SEQ ID NO: 1313662 - RNA, 19 nt, Artificial Sequence
  Description of Artificial Sequence: Synthetic oligonucleotide
  Sense strand starting at position 3540 of SEQ ID NO: 1241970
gaccuugagccuggaauga

SEQ ID NO: 1313663 - RNA, 19 nt, Artificial Sequence
  Description of Artificial Sequence: Synthetic oligonucleotide
  Antisense strand to SEQ ID NO: 1313662
ucauuccaggcucaagguc

SEQ ID NO: 1313664 - RNA, 19 nt, Artificial Sequence
  Description of Artificial Sequence: Synthetic oligonucleotide
  Sense strand starting at position 3658 of SEQ ID NO: 1241970
ucagcacugaggugacauu

SEQ ID NO: 1313665 - RNA, 19 nt, Artificial Sequence
  Description of Artificial Sequence: Synthetic oligonucleotide
  Antisense strand to SEQ ID NO: 1313664
aaugucaccucagugcuga

SEQ ID NO: 1313666 - RNA, 19 nt, Artificial Sequence
  Description of Artificial Sequence: Synthetic oligonucleotide
  Sense strand starting at position 3695 of SEQ ID NO: 1241970
agucaaucccauuguucua

SEQ ID NO: 1313667 - RNA, 19 nt, Artificial Sequence
  Description of Artificial Sequence: Synthetic oligonucleotide
  Antisense strand to SEQ ID NO: 1313666
uagaacaaugggauugacu

SEQ ID NO: 1313668 - RNA, 19 nt, Artificial Sequence
  Description of Artificial Sequence: Synthetic oligonucleotide
  Sense strand starting at position 3742 of SEQ ID NO: 1241970
agcccuaaucgauguggca

SEQ ID NO: 1313669 - RNA, 19 nt, Artificial Sequence
  Description of Artificial Sequence: Synthetic oligonucleotide
  Antisense strand to SEQ ID NO: 1313668
ugccacaucgauuagggcu

SEQ ID NO: 1313670 - RNA, 19 nt, Artificial Sequence
  Description of Artificial Sequence: Synthetic oligonucleotide
  Sense strand starting at position 3749 of SEQ ID NO: 1241970
aucgauguggcauggaaga

SEQ ID NO: 1313671 - RNA, 19 nt, Artificial Sequence
  Description of Artificial Sequence: Synthetic oligonucleotide
  Antisense strand to SEQ ID NO: 1313670
ucuuccaugccacaucgau

SEQ ID NO: 1313672 - RNA, 19 nt, Artificial Sequence
  Description of Artificial Sequence: Synthetic oligonucleotide
  Sense strand starting at position 3965 of SEQ ID NO: 1241970
uguggcuucugggagaaua

SEQ ID NO: 1313673 - RNA, 19 nt, Artificial Sequence
  Description of Artificial Sequence: Synthetic oligonucleotide
  Antisense strand to SEQ ID NO: 1313672
uauucucccagaagccaca

SEQ ID NO: 1313674 - RNA, 19 nt, Artificial Sequence
  Description of Artificial Sequence: Synthetic oligonucleotide
  Sense strand starting at position 156 of SEQ ID NO: 1241971
gggucugaagugugaagau

SEQ ID NO: 1313675 - RNA, 19 nt, Artificial Sequence
  Description of Artificial Sequence: Synthetic oligonucleotide
  Antisense strand to SEQ ID NO: 1313674
aucuucacacuucagaccc

SEQ ID NO: 1313676 - RNA, 19 nt, Artificial Sequence
  Description of Artificial Sequence: Synthetic oligonucleotide
  Sense strand starting at position 214 of SEQ ID NO: 1241971
uaggguguaugacuaugua

SEQ ID NO: 1313677 - RNA, 19 nt, Artificial Sequence
  Description of Artificial Sequence: Synthetic oligonucleotide
  Antisense strand to SEQ ID NO: 1313676
uacauagucauacacccua

SEQ ID NO: 1313678 - RNA, 19 nt, Artificial Sequence
  Description of Artificial Sequence: Synthetic oligonucleotide
  Sense strand starting at position 217 of SEQ ID NO: 1241971
gguguaugacuauguaacu

SEQ ID NO: 1313679 - RNA, 19 nt, Artificial Sequence
  Description of Artificial Sequence: Synthetic oligonucleotide
  Antisense strand to SEQ ID NO: 1313678
aguuacauagucauacacc

SEQ ID NO: 1313680 - RNA, 19 nt, Artificial Sequence
  Description of Artificial Sequence: Synthetic oligonucleotide
  Sense strand starting at position 218 of SEQ ID NO: 1241971
guguaugacuauguaacuu

SEQ ID NO: 1313681 - RNA, 19 nt, Artificial Sequence
  Description of Artificial Sequence: Synthetic oligonucleotide
  Antisense strand to SEQ ID NO: 1313680
aaguuacauagucauacac

SEQ ID NO: 1313682 - RNA, 19 nt, Artificial Sequence
  Description of Artificial Sequence: Synthetic oligonucleotide
  Sense strand starting at position 222 of SEQ ID NO: 1241971
augacuauguaacuugaau

SEQ ID NO: 1313683 - RNA, 19 nt, Artificial Sequence
  Description of Artificial Sequence: Synthetic oligonucleotide
  Antisense strand to SEQ ID NO: 1313682
auucaaguuacauagucau

SEQ ID NO: 1313684 - RNA, 19 nt, Artificial Sequence
  Description of Artificial Sequence: Synthetic oligonucleotide
  Sense strand starting at position 253 of SEQ ID NO: 1241971
ccauuuacauaagguguau

SEQ ID NO: 1313685 - RNA, 19 nt, Artificial Sequence
  Description of Artificial Sequence: Synthetic oligonucleotide
  Antisense strand to SEQ ID NO: 1313684
auacaccuuauguaaaugg

SEQ ID NO: 1313686 - RNA, 19 nt, Artificial Sequence
  Description of Artificial Sequence: Synthetic oligonucleotide
  Sense strand starting at position 257 of SEQ ID NO: 1241971
uuacauaagguguaucuga

SEQ ID NO: 1313687 - RNA, 19 nt, Artificial Sequence
  Description of Artificial Sequence: Synthetic oligonucleotide
  Antisense strand to SEQ ID NO: 1313686
ucagauacaccuuauguaa

SEQ ID NO: 1313688 - RNA, 19 nt, Artificial Sequence
  Description of Artificial Sequence: Synthetic oligonucleotide
  Sense strand starting at position 262 of SEQ ID NO: 1241971
uaagguguaucugaaguaa

SEQ ID NO: 1313689 - RNA, 19 nt, Artificial Sequence
  Description of Artificial Sequence: Synthetic oligonucleotide
  Antisense strand to SEQ ID NO: 1313688
uuacuucagauacaccuua

SEQ ID NO: 1313690 - RNA, 19 nt, Artificial Sequence
  Description of Artificial Sequence: Synthetic oligonucleotide
  Sense strand starting at position 362 of SEQ ID NO: 1241971
ugugguguguauguucauu

SEQ ID NO: 1313691 - RNA, 19 nt, Artificial Sequence
  Description of Artificial Sequence: Synthetic oligonucleotide
  Antisense strand to SEQ ID NO: 1313690
aaugaacauacacaccaca

SEQ ID NO: 1313692 - RNA, 19 nt, Artificial Sequence
  Description of Artificial Sequence: Synthetic oligonucleotide
  Sense strand starting at position 405 of SEQ ID NO: 1241971
cuuacuuugucugugcauu

SEQ ID NO: 1313693 - RNA, 19 nt, Artificial Sequence
  Description of Artificial Sequence: Synthetic oligonucleotide
  Antisense strand to SEQ ID NO: 1313692
aaugcacagacaaaguaag

SEQ ID NO: 1313694 - RNA, 19 nt, Artificial Sequence
  Description of Artificial Sequence: Synthetic oligonucleotide
  Sense strand starting at position 406 of SEQ ID NO: 1241971
uuacuuugucugugcauuu

SEQ ID NO: 1313695 - RNA, 19 nt, Artificial Sequence
  Description of Artificial Sequence: Synthetic oligonucleotide
  Antisense strand to SEQ ID NO: 1313694
aaaugcacagacaaaguaa

SEQ ID NO: 1313696 - RNA, 19 nt, Artificial Sequence
  Description of Artificial Sequence: Synthetic oligonucleotide
  Sense strand starting at position 512 of SEQ ID NO: 1241971
gggucuaggaaguggugaa

SEQ ID NO: 1313697 - RNA, 19 nt, Artificial Sequence
  Description of Artificial Sequence: Synthetic oligonucleotide
  Antisense strand to SEQ ID NO: 1313696
uucaccacuuccuagaccc

SEQ ID NO: 1313698 - RNA, 19 nt, Artificial Sequence
  Description of Artificial Sequence: Synthetic oligonucleotide
  Sense strand starting at position 513 of SEQ ID NO: 1241971
ggucuaggaaguggugaaa

SEQ ID NO: 1313699 - RNA, 19 nt, Artificial Sequence
  Description of Artificial Sequence: Synthetic oligonucleotide
  Antisense strand to SEQ ID NO: 1313698
uuucaccacuuccuagacc

SEQ ID NO: 1313700 - RNA, 19 nt, Artificial Sequence
  Description of Artificial Sequence: Synthetic oligonucleotide
  Sense strand starting at position 560 of SEQ ID NO: 1241971
uagagaucuaugugaagug

SEQ ID NO: 1313701 - RNA, 19 nt, Artificial Sequence
  Description of Artificial Sequence: Synthetic oligonucleotide
  Antisense strand to SEQ ID NO: 1313700
cacuucacauagaucucua

SEQ ID NO: 1313702 - RNA, 19 nt, Artificial Sequence
  Description of Artificial Sequence: Synthetic oligonucleotide
  Sense strand starting at position 561 of SEQ ID NO: 1241971
agagaucuaugugaaguga

SEQ ID NO: 1313703 - RNA, 19 nt, Artificial Sequence
  Description of Artificial Sequence: Synthetic oligonucleotide
  Antisense strand to SEQ ID NO: 1313702
ucacuucacauagaucucu

SEQ ID NO: 1313704 - RNA, 19 nt, Artificial Sequence
  Description of Artificial Sequence: Synthetic oligonucleotide
  Sense strand starting at position 741 of SEQ ID NO: 1241971
cuuuaaaggaguugugaga

SEQ ID NO: 1313705 - RNA, 19 nt, Artificial Sequence
  Description of Artificial Sequence: Synthetic oligonucleotide
  Antisense strand to SEQ ID NO: 1313704
ucucacaacuccuuuaaag

SEQ ID NO: 1313706 - RNA, 19 nt, Artificial Sequence
  Description of Artificial Sequence: Synthetic oligonucleotide
  Sense strand starting at position 873 of SEQ ID NO: 1241971
auuggaaugcucugaguug

SEQ ID NO: 1313707 - RNA, 19 nt, Artificial Sequence
  Description of Artificial Sequence: Synthetic oligonucleotide
  Antisense strand to SEQ ID NO: 1313706
caacucagagcauuccaau

SEQ ID NO: 1313708 - RNA, 19 nt, Artificial Sequence
  Description of Artificial Sequence: Synthetic oligonucleotide
  Sense strand starting at position 984 of SEQ ID NO: 1241971
accggacucuuagcaaaga

SEQ ID NO: 1313709 - RNA, 19 nt, Artificial Sequence
  Description of Artificial Sequence: Synthetic oligonucleotide
  Antisense strand to SEQ ID NO: 1313708
ucuuugcuaagaguccggu

SEQ ID NO: 1313710 - RNA, 19 nt, Artificial Sequence
  Description of Artificial Sequence: Synthetic oligonucleotide
  Sense strand starting at position 985 of SEQ ID NO: 1241971
ccggacucuuagcaaagaa

SEQ ID NO: 1313711 - RNA, 19 nt, Artificial Sequence
  Description of Artificial Sequence: Synthetic oligonucleotide
  Antisense strand to SEQ ID NO: 1313710
uucuuugcuaagaguccgg

SEQ ID NO: 1313712 - RNA, 19 nt, Artificial Sequence
  Description of Artificial Sequence: Synthetic oligonucleotide
  Sense strand starting at position 1133 of SEQ ID NO: 1241971
ggaagcaagcccgauucuu

SEQ ID NO: 1313713 - RNA, 19 nt, Artificial Sequence
  Description of Artificial Sequence: Synthetic oligonucleotide
  Antisense strand to SEQ ID NO: 1313712
aagaaucgggcuugcuucc

SEQ ID NO: 1313714 - RNA, 19 nt, Artificial Sequence
  Description of Artificial Sequence: Synthetic oligonucleotide
  Sense strand starting at position 1217 of SEQ ID NO: 1241971
caggaaucuagcuggguga

SEQ ID NO: 1313715 - RNA, 19 nt, Artificial Sequence
  Description of Artificial Sequence: Synthetic oligonucleotide
  Antisense strand to SEQ ID NO: 1313714
ucacccagcuagauuccug

SEQ ID NO: 1313716 - RNA, 19 nt, Artificial Sequence
  Description of Artificial Sequence: Synthetic oligonucleotide
  Sense strand starting at position 1331 of SEQ ID NO: 1241971
agggcuuguucucuaacca

SEQ ID NO: 1313717 - RNA, 19 nt, Artificial Sequence
  Description of Artificial Sequence: Synthetic oligonucleotide
  Antisense strand to SEQ ID NO: 1313716
ugguuagagaacaagcccu

SEQ ID NO: 1313718 - RNA, 19 nt, Artificial Sequence
  Description of Artificial Sequence: Synthetic oligonucleotide
  Sense strand starting at position 1332 of SEQ ID NO: 1241971
gggcuuguucucuaaccac

SEQ ID NO: 1313719 - RNA, 19 nt, Artificial Sequence
  Description of Artificial Sequence: Synthetic oligonucleotide
  Antisense strand to SEQ ID NO: 1313718
gugguuagagaacaagccc

SEQ ID NO: 1313720 - RNA, 19 nt, Artificial Sequence
  Description of Artificial Sequence: Synthetic oligonucleotide
  Sense strand starting at position 1975 of SEQ ID NO: 1241971
ggaggaaugcugggucugu

SEQ ID NO: 1313721 - RNA, 19 nt, Artificial Sequence
  Description of Artificial Sequence: Synthetic oligonucleotide
  Antisense strand to SEQ ID NO: 1313720
acagacccagcauuccucc

SEQ ID NO: 1313722 - RNA, 19 nt, Artificial Sequence
  Description of Artificial Sequence: Synthetic oligonucleotide
  Sense strand starting at position 2874 of SEQ ID NO: 1241971
aaaguagaugucugguuua

SEQ ID NO: 1313723 - RNA, 19 nt, Artificial Sequence
  Description of Artificial Sequence: Synthetic oligonucleotide
  Antisense strand to SEQ ID NO: 1313722
uaaaccagacaucuacuuu

SEQ ID NO: 1313724 - RNA, 19 nt, Artificial Sequence
  Description of Artificial Sequence: Synthetic oligonucleotide
  Sense strand starting at position 2877 of SEQ ID NO: 1241971
guagaugucugguuuagag

SEQ ID NO: 1313725 - RNA, 19 nt, Artificial Sequence
  Description of Artificial Sequence: Synthetic oligonucleotide
  Antisense strand to SEQ ID NO: 1313724
cucuaaaccagacaucuac

SEQ ID NO: 1313726 - RNA, 19 nt, Artificial Sequence
  Description of Artificial Sequence: Synthetic oligonucleotide
  Sense strand starting at position 2879 of SEQ ID NO: 1241971
agaugucugguuuagagua

SEQ ID NO: 1313727 - RNA, 19 nt, Artificial Sequence
  Description of Artificial Sequence: Synthetic oligonucleotide
  Antisense strand to SEQ ID NO: 1313726
uacucuaaaccagacaucu

SEQ ID NO: 1313728 - RNA, 19 nt, Artificial Sequence
  Description of Artificial Sequence: Synthetic oligonucleotide
  Sense strand starting at position 2884 of SEQ ID NO: 1241971
ucugguuuagaguacuuaa

SEQ ID NO: 1313729 - RNA, 19 nt, Artificial Sequence
  Description of Artificial Sequence: Synthetic oligonucleotide
  Antisense strand to SEQ ID NO: 1313728
uuaaguacucuaaaccaga

SEQ ID NO: 1313730 - RNA, 19 nt, Artificial Sequence
  Description of Artificial Sequence: Synthetic oligonucleotide
  Sense strand starting at position 2887 of SEQ ID NO: 1241971
gguuuagaguacuuaagac

SEQ ID NO: 1313731 - RNA, 19 nt, Artificial Sequence
  Description of Artificial Sequence: Synthetic oligonucleotide
  Antisense strand to SEQ ID NO: 1313730
gucuuaaguacucuaaacc

SEQ ID NO: 1313732 - RNA, 19 nt, Artificial Sequence
  Description of Artificial Sequence: Synthetic oligonucleotide
  Sense strand starting at position 2941 of SEQ ID NO: 1241971
cugauauauuucuguauug

SEQ ID NO: 1313733 - RNA, 19 nt, Artificial Sequence
  Description of Artificial Sequence: Synthetic oligonucleotide
  Antisense strand to SEQ ID NO: 1313732
caauacagaaauauaucag

SEQ ID NO: 1313734 - RNA, 19 nt, Artificial Sequence
  Description of Artificial Sequence: Synthetic oligonucleotide
  Sense strand starting at position 3106 of SEQ ID NO: 1241971
uguaaaucgggccauacuu

SEQ ID NO: 1313735 - RNA, 19 nt, Artificial Sequence
  Description of Artificial Sequence: Synthetic oligonucleotide
  Antisense strand to SEQ ID NO: 1313734
aaguauggcccgauuuaca

SEQ ID NO: 1313736 - RNA, 19 nt, Artificial Sequence
  Description of Artificial Sequence: Synthetic oligonucleotide
  Sense strand starting at position 3116 of SEQ ID NO: 1241971
gccauacuucuggaaauuc

SEQ ID NO: 1313737 - RNA, 19 nt, Artificial Sequence
  Description of Artificial Sequence: Synthetic oligonucleotide
  Antisense strand to SEQ ID NO: 1313736
gaauuuccagaaguauggc

SEQ ID NO: 1313738 - RNA, 19 nt, Artificial Sequence
  Description of Artificial Sequence: Synthetic oligonucleotide
  Sense strand starting at position 3124 of SEQ ID NO: 1241971
ucuggaaauucuggacaug

SEQ ID NO: 1313739 - RNA, 19 nt, Artificial Sequence
  Description of Artificial Sequence: Synthetic oligonucleotide
  Antisense strand to SEQ ID NO: 1313738
cauguccagaauuuccaga

SEQ ID NO: 1313740 - RNA, 19 nt, Artificial Sequence
  Description of Artificial Sequence: Synthetic oligonucleotide
  Sense strand starting at position 3165 of SEQ ID NO: 1241971
cccgucucccuccagaaau

SEQ ID NO: 1313741 - RNA, 19 nt, Artificial Sequence
  Description of Artificial Sequence: Synthetic oligonucleotide
  Antisense strand to SEQ ID NO: 1313740
auuucuggagggagacggg

SEQ ID NO: 1313742 - RNA, 19 nt, Artificial Sequence
  Description of Artificial Sequence: Synthetic oligonucleotide
  Sense strand starting at position 3199 of SEQ ID NO: 1241971
agccauugucaccaggaga

SEQ ID NO: 1313743 - RNA, 19 nt, Artificial Sequence
  Description of Artificial Sequence: Synthetic oligonucleotide
  Antisense strand to SEQ ID NO: 1313742
ucuccuggugacaauggcu

SEQ ID NO: 1313744 - RNA, 19 nt, Artificial Sequence
  Description of Artificial Sequence: Synthetic oligonucleotide
  Sense strand starting at position 3328 of SEQ ID NO: 1241971
agccuuugaccaggacuga

SEQ ID NO: 1313745 - RNA, 19 nt, Artificial Sequence
  Description of Artificial Sequence: Synthetic oligonucleotide
  Antisense strand to SEQ ID NO: 1313744
ucaguccuggucaaaggcu

SEQ ID NO: 1313746 - RNA, 19 nt, Artificial Sequence
  Description of Artificial Sequence: Synthetic oligonucleotide
  Sense strand starting at position 3658 of SEQ ID NO: 1241971
gaaauaucugccugugcuu

SEQ ID NO: 1313747 - RNA, 19 nt, Artificial Sequence
  Description of Artificial Sequence: Synthetic oligonucleotide
  Antisense strand to SEQ ID NO: 1313746
aagcacaggcagauauuuc

SEQ ID NO: 1313748 - RNA, 19 nt, Artificial Sequence
  Description of Artificial Sequence: Synthetic oligonucleotide
  Sense strand starting at position 3728 of SEQ ID NO: 1241971
gcagccauuggucaagacu

SEQ ID NO: 1313749 - RNA, 19 nt, Artificial Sequence
  Description of Artificial Sequence: Synthetic oligonucleotide
  Antisense strand to SEQ ID NO: 1313748
agucuugaccaauggcugc

SEQ ID NO: 1313750 - RNA, 19 nt, Artificial Sequence
  Description of Artificial Sequence: Synthetic oligonucleotide
  Sense strand starting at position 3782 of SEQ ID NO: 1241971
aagagaaggucagagcuau

SEQ ID NO: 1313751 - RNA, 19 nt, Artificial Sequence
  Description of Artificial Sequence: Synthetic oligonucleotide
  Antisense strand to SEQ ID NO: 1313750
auagcucugaccuucucuu

SEQ ID NO: 1313752 - RNA, 19 nt, Artificial Sequence
  Description of Artificial Sequence: Synthetic oligonucleotide
  Sense strand starting at position 3793 of SEQ ID NO: 1241971
agagcuaucuugccagcuu

SEQ ID NO: 1313753 - RNA, 19 nt, Artificial Sequence
  Description of Artificial Sequence: Synthetic oligonucleotide
  Antisense strand to SEQ ID NO: 1313752
aagcuggcaagauagcucu

SEQ ID NO: 1313754 - RNA, 19 nt, Artificial Sequence
  Description of Artificial Sequence: Synthetic oligonucleotide
  Sense strand starting at position 31 of SEQ ID NO: 1241972
gaagaaaugcuguggaacu

SEQ ID NO: 1313755 - RNA, 19 nt, Artificial Sequence
  Description of Artificial Sequence: Synthetic oligonucleotide
  Antisense strand to SEQ ID NO: 1313754
aguuccacagcauuucuuc

SEQ ID NO: 1313756 - RNA, 19 nt, Artificial Sequence
  Description of Artificial Sequence: Synthetic oligonucleotide
  Sense strand starting at position 83 of SEQ ID NO: 1241972
ucuccagagcccuaaaguu

SEQ ID NO: 1313757 - RNA, 19 nt, Artificial Sequence
  Description of Artificial Sequence: Synthetic oligonucleotide
  Antisense strand to SEQ ID NO: 1313756
aacuuuagggcucuggaga

SEQ ID NO: 1313758 - RNA, 19 nt, Artificial Sequence
  Description of Artificial Sequence: Synthetic oligonucleotide
  Sense strand starting at position 531 of SEQ ID NO: 1241972
aagugugauuagcuaauga

SEQ ID NO: 1313759 - RNA, 19 nt, Artificial Sequence
  Description of Artificial Sequence: Synthetic oligonucleotide
  Antisense strand to SEQ ID NO: 1313758
ucauuagcuaaucacacuu

SEQ ID NO: 1313760 - RNA, 19 nt, Artificial Sequence
  Description of Artificial Sequence: Synthetic oligonucleotide
  Sense strand starting at position 610 of SEQ ID NO: 1241972
aggucccugccuuaagaau

SEQ ID NO: 1313761 - RNA, 19 nt, Artificial Sequence
  Description of Artificial Sequence: Synthetic oligonucleotide
  Antisense strand to SEQ ID NO: 1313760
auucuuaaggcagggaccu

SEQ ID NO: 1313762 - RNA, 19 nt, Artificial Sequence
  Description of Artificial Sequence: Synthetic oligonucleotide
  Sense strand starting at position 616 of SEQ ID NO: 1241972
cugccuuaagaauauugua

SEQ ID NO: 1313763 - RNA, 19 nt, Artificial Sequence
  Description of Artificial Sequence: Synthetic oligonucleotide
  Antisense strand to SEQ ID NO: 1313762
uacaauauucuuaaggcag

SEQ ID NO: 1313764 - RNA, 19 nt, Artificial Sequence
  Description of Artificial Sequence: Synthetic oligonucleotide
  Sense strand starting at position 800 of SEQ ID NO: 1241972
auacaagugcuuuacaagu

SEQ ID NO: 1313765 - RNA, 19 nt, Artificial Sequence
  Description of Artificial Sequence: Synthetic oligonucleotide
  Antisense strand to SEQ ID NO: 1313764
acuuguaaagcacuuguau

SEQ ID NO: 1313766 - RNA, 19 nt, Artificial Sequence
  Description of Artificial Sequence: Synthetic oligonucleotide
  Sense strand starting at position 873 of SEQ ID NO: 1241972
uaaagaacuugaguagcau

SEQ ID NO: 1313767 - RNA, 19 nt, Artificial Sequence
  Description of Artificial Sequence: Synthetic oligonucleotide
  Antisense strand to SEQ ID NO: 1313766
augcuacucaaguucuuua

SEQ ID NO: 1313768 - RNA, 19 nt, Artificial Sequence
  Description of Artificial Sequence: Synthetic oligonucleotide
  Sense strand starting at position 879 of SEQ ID NO: 1241972
acuugaguagcauaucuaa

SEQ ID NO: 1313769 - RNA, 19 nt, Artificial Sequence
  Description of Artificial Sequence: Synthetic oligonucleotide
  Antisense strand to SEQ ID NO: 1313768
uuagauaugcuacucaagu

SEQ ID NO: 1313770 - RNA, 19 nt, Artificial Sequence
  Description of Artificial Sequence: Synthetic oligonucleotide
  Sense strand starting at position 1027 of SEQ ID NO: 1241972
ggaaggguacucggaguua

SEQ ID NO: 1313771 - RNA, 19 nt, Artificial Sequence
  Description of Artificial Sequence: Synthetic oligonucleotide
  Antisense strand to SEQ ID NO: 1313770
uaacuccgaguacccuucc

SEQ ID NO: 1313772 - RNA, 19 nt, Artificial Sequence
  Description of Artificial Sequence: Synthetic oligonucleotide
  Sense strand starting at position 1039 of SEQ ID NO: 1241972
ggaguuaggccuuaaagug

SEQ ID NO: 1313773 - RNA, 19 nt, Artificial Sequence
  Description of Artificial Sequence: Synthetic oligonucleotide
  Antisense strand to SEQ ID NO: 1313772
cacuuuaaggccuaacucc

SEQ ID NO: 1313774 - RNA, 19 nt, Artificial Sequence
  Description of Artificial Sequence: Synthetic oligonucleotide
  Sense strand starting at position 1067 of SEQ ID NO: 1241972
gaaauaggccagugaugga

SEQ ID NO: 1313775 - RNA, 19 nt, Artificial Sequence
  Description of Artificial Sequence: Synthetic oligonucleotide
  Antisense strand to SEQ ID NO: 1313774
uccaucacuggccuauuuc

SEQ ID NO: 1313776 - RNA, 19 nt, Artificial Sequence
  Description of Artificial Sequence: Synthetic oligonucleotide
  Sense strand starting at position 1071 of SEQ ID NO: 1241972
uaggccagugauggagaua

SEQ ID NO: 1313777 - RNA, 19 nt, Artificial Sequence
  Description of Artificial Sequence: Synthetic oligonucleotide
  Antisense strand to SEQ ID NO: 1313776
uaucuccaucacuggccua

SEQ ID NO: 1313778 - RNA, 19 nt, Artificial Sequence
  Description of Artificial Sequence: Synthetic oligonucleotide
  Sense strand starting at position 1184 of SEQ ID NO: 1241972
gccacuuuagggugagaga

SEQ ID NO: 1313779 - RNA, 19 nt, Artificial Sequence
  Description of Artificial Sequence: Synthetic oligonucleotide
  Antisense strand to SEQ ID NO: 1313778
ucucucacccuaaaguggc

SEQ ID NO: 1313780 - RNA, 19 nt, Artificial Sequence
  Description of Artificial Sequence: Synthetic oligonucleotide
  Sense strand starting at position 1204 of SEQ ID NO: 1241972
gagugaagaugucuaccuu

SEQ ID NO: 1313781 - RNA, 19 nt, Artificial Sequence
  Description of Artificial Sequence: Synthetic oligonucleotide
  Antisense strand to SEQ ID NO: 1313780
aagguagacaucuucacuc

SEQ ID NO: 1313782 - RNA, 19 nt, Artificial Sequence
  Description of Artificial Sequence: Synthetic oligonucleotide
  Sense strand starting at position 1208 of SEQ ID NO: 1241972
gaagaugucuaccuuguag

SEQ ID NO: 1313783 - RNA, 19 nt, Artificial Sequence
  Description of Artificial Sequence: Synthetic oligonucleotide
  Antisense strand to SEQ ID NO: 1313782
cuacaagguagacaucuuc

SEQ ID NO: 1313784 - RNA, 19 nt, Artificial Sequence
  Description of Artificial Sequence: Synthetic oligonucleotide
  Sense strand starting at position 1462 of SEQ ID NO: 1241972
ccugaaguugucuaauaga

SEQ ID NO: 1313785 - RNA, 19 nt, Artificial Sequence
  Description of Artificial Sequence: Synthetic oligonucleotide
  Antisense strand to SEQ ID NO: 1313784
ucuauuagacaacuucagg

SEQ ID NO: 1313786 - RNA, 19 nt, Artificial Sequence
  Description of Artificial Sequence: Synthetic oligonucleotide
  Sense strand starting at position 1636 of SEQ ID NO: 1241972
aguucuguggcauagaaca

SEQ ID NO: 1313787 - RNA, 19 nt, Artificial Sequence
  Description of Artificial Sequence: Synthetic oligonucleotide
  Antisense strand to SEQ ID NO: 1313786
uguucuaugccacagaacu

SEQ ID NO: 1313788 - RNA, 19 nt, Artificial Sequence
  Description of Artificial Sequence: Synthetic oligonucleotide
  Sense strand starting at position 1644 of SEQ ID NO: 1241972
ggcauagaacaguauaguu

SEQ ID NO: 1313789 - RNA, 19 nt, Artificial Sequence
  Description of Artificial Sequence: Synthetic oligonucleotide
  Antisense strand to SEQ ID NO: 1313788
aacuauacuguucuaugcc

SEQ ID NO: 1313790 - RNA, 19 nt, Artificial Sequence
  Description of Artificial Sequence: Synthetic oligonucleotide
  Sense strand starting at position 1742 of SEQ ID NO: 1241972
agaagacuucugcgaccaa

SEQ ID NO: 1313791 - RNA, 19 nt, Artificial Sequence
  Description of Artificial Sequence: Synthetic oligonucleotide
  Antisense strand to SEQ ID NO: 1313790
uuggucgcagaagucuucu

SEQ ID NO: 1313792 - RNA, 19 nt, Artificial Sequence
  Description of Artificial Sequence: Synthetic oligonucleotide
  Sense strand starting at position 1746 of SEQ ID NO: 1241972
gacuucugcgaccaaaugu

SEQ ID NO: 1313793 - RNA, 19 nt, Artificial Sequence
  Description of Artificial Sequence: Synthetic oligonucleotide
  Antisense strand to SEQ ID NO: 1313792
acauuuggucgcagaaguc

SEQ ID NO: 1313794 - RNA, 19 nt, Artificial Sequence
  Description of Artificial Sequence: Synthetic oligonucleotide
  Sense strand starting at position 1844 of SEQ ID NO: 1241972
aagagugucugaucccaca

SEQ ID NO: 1313795 - RNA, 19 nt, Artificial Sequence
  Description of Artificial Sequence: Synthetic oligonucleotide
  Antisense strand to SEQ ID NO: 1313794
ugugggaucagacacucuu

SEQ ID NO: 1313796 - RNA, 19 nt, Artificial Sequence
  Description of Artificial Sequence: Synthetic oligonucleotide
  Sense strand starting at position 2037 of SEQ ID NO: 1241972
uuuguuguccaugacugaa

SEQ ID NO: 1313797 - RNA, 19 nt, Artificial Sequence
  Description of Artificial Sequence: Synthetic oligonucleotide
  Antisense strand to SEQ ID NO: 1313796
uucagucauggacaacaaa

SEQ ID NO: 1313798 - RNA, 19 nt, Artificial Sequence
  Description of Artificial Sequence: Synthetic oligonucleotide
  Sense strand starting at position 2047 of SEQ ID NO: 1241972
augacugaagcaugugauu

SEQ ID NO: 1313799 - RNA, 19 nt, Artificial Sequence
  Description of Artificial Sequence: Synthetic oligonucleotide
  Antisense strand to SEQ ID NO: 1313798
aaucacaugcuucagucau

SEQ ID NO: 1313800 - RNA, 19 nt, Artificial Sequence
  Description of Artificial Sequence: Synthetic oligonucleotide
  Sense strand starting at position 2052 of SEQ ID NO: 1241972
ugaagcaugugauugaaca

SEQ ID NO: 1313801 - RNA, 19 nt, Artificial Sequence
  Description of Artificial Sequence: Synthetic oligonucleotide
  Antisense strand to SEQ ID NO: 1313800
uguucaaucacaugcuuca

SEQ ID NO: 1313802 - RNA, 19 nt, Artificial Sequence
  Description of Artificial Sequence: Synthetic oligonucleotide
  Sense strand starting at position 2053 of SEQ ID NO: 1241972
gaagcaugugauugaacaa

SEQ ID NO: 1313803 - RNA, 19 nt, Artificial Sequence
  Description of Artificial Sequence: Synthetic oligonucleotide
  Antisense strand to SEQ ID NO: 1313802
uuguucaaucacaugcuuc

SEQ ID NO: 1313804 - RNA, 19 nt, Artificial Sequence
  Description of Artificial Sequence: Synthetic oligonucleotide
  Sense strand starting at position 2096 of SEQ ID NO: 1241972
gaucuaaucucagcaaggu

SEQ ID NO: 1313805 - RNA, 19 nt, Artificial Sequence
  Description of Artificial Sequence: Synthetic oligonucleotide
  Antisense strand to SEQ ID NO: 1313804
accuugcugagauuagauc

SEQ ID NO: 1313806 - RNA, 19 nt, Artificial Sequence
  Description of Artificial Sequence: Synthetic oligonucleotide
  Sense strand starting at position 2228 of SEQ ID NO: 1241972
ccgccuuggguggaugaaa

SEQ ID NO: 1313807 - RNA, 19 nt, Artificial Sequence
  Description of Artificial Sequence: Synthetic oligonucleotide
  Antisense strand to SEQ ID NO: 1313806
uuucauccacccaaggcgg

SEQ ID NO: 1313808 - RNA, 19 nt, Artificial Sequence
  Description of Artificial Sequence: Synthetic oligonucleotide
  Sense strand starting at position 2576 of SEQ ID NO: 1241972
guggguauugcugagagau

SEQ ID NO: 1313809 - RNA, 19 nt, Artificial Sequence
  Description of Artificial Sequence: Synthetic oligonucleotide
  Antisense strand to SEQ ID NO: 1313808
aucucucagcaauacccac

SEQ ID NO: 1313810 - RNA, 19 nt, Artificial Sequence
  Description of Artificial Sequence: Synthetic oligonucleotide
  Sense strand starting at position 2731 of SEQ ID NO: 1241972
acaggaagugcucaguuaa

SEQ ID NO: 1313811 - RNA, 19 nt, Artificial Sequence
  Description of Artificial Sequence: Synthetic oligonucleotide
  Antisense strand to SEQ ID NO: 1313810
uuaacugagcacuuccugu

SEQ ID NO: 1313812 - RNA, 19 nt, Artificial Sequence
  Description of Artificial Sequence: Synthetic oligonucleotide
  Sense strand starting at position 2743 of SEQ ID NO: 1241972
caguuaaguguuuacugaa

SEQ ID NO: 1313813 - RNA, 19 nt, Artificial Sequence
  Description of Artificial Sequence: Synthetic oligonucleotide
  Antisense strand to SEQ ID NO: 1313812
uucaguaaacacuuaacug

SEQ ID NO: 1313814 - RNA, 19 nt, Artificial Sequence
  Description of Artificial Sequence: Synthetic oligonucleotide
  Sense strand starting at position 2767 of SEQ ID NO: 1241972
ugaagaucugaaugaugcu

SEQ ID NO: 1313815 - RNA, 19 nt, Artificial Sequence
  Description of Artificial Sequence: Synthetic oligonucleotide
  Antisense strand to SEQ ID NO: 1313814
agcaucauucagaucuuca

SEQ ID NO: 1313816 - RNA, 19 nt, Artificial Sequence
  Description of Artificial Sequence: Synthetic oligonucleotide
  Sense strand starting at position 3038 of SEQ ID NO: 1241972
aauacugaaguuggucaau

SEQ ID NO: 1313817 - RNA, 19 nt, Artificial Sequence
  Description of Artificial Sequence: Synthetic oligonucleotide
  Antisense strand to SEQ ID NO: 1313816
auugaccaacuucaguauu

SEQ ID NO: 1313818 - RNA, 19 nt, Artificial Sequence
  Description of Artificial Sequence: Synthetic oligonucleotide
  Sense strand starting at position 3041 of SEQ ID NO: 1241972
acugaaguuggucaauguu

SEQ ID NO: 1313819 - RNA, 19 nt, Artificial Sequence
  Description of Artificial Sequence: Synthetic oligonucleotide
  Antisense strand to SEQ ID NO: 1313818
aacauugaccaacuucagu

SEQ ID NO: 1313820 - RNA, 19 nt, Artificial Sequence
  Description of Artificial Sequence: Synthetic oligonucleotide
  Sense strand starting at position 3090 of SEQ ID NO: 1241972
cucagaauuucugauugag

SEQ ID NO: 1313821 - RNA, 19 nt, Artificial Sequence
  Description of Artificial Sequence: Synthetic oligonucleotide
  Antisense strand to SEQ ID NO: 1313820
cucaaucagaaauucugag

SEQ ID NO: 1313822 - RNA, 19 nt, Artificial Sequence
  Description of Artificial Sequence: Synthetic oligonucleotide
  Sense strand starting at position 3172 of SEQ ID NO: 1241972
gggcaagaagucugauacu

SEQ ID NO: 1313823 - RNA, 19 nt, Artificial Sequence
  Description of Artificial Sequence: Synthetic oligonucleotide
  Antisense strand to SEQ ID NO: 1313822
aguaucagacuucuugccc

SEQ ID NO: 1313824 - RNA, 19 nt, Artificial Sequence
  Description of Artificial Sequence: Synthetic oligonucleotide
  Sense strand starting at position 3229 of SEQ ID NO: 1241972
aagaauugguauguguauu

SEQ ID NO: 1313825 - RNA, 19 nt, Artificial Sequence
  Description of Artificial Sequence: Synthetic oligonucleotide
  Antisense strand to SEQ ID NO: 1313824
aauacacauaccaauucuu

SEQ ID NO: 1313826 - RNA, 19 nt, Artificial Sequence
  Description of Artificial Sequence: Synthetic oligonucleotide
  Sense strand starting at position 3670 of SEQ ID NO: 1241972
gggaguagaugguuacaga

SEQ ID NO: 1313827 - RNA, 19 nt, Artificial Sequence
  Description of Artificial Sequence: Synthetic oligonucleotide
  Antisense strand to SEQ ID NO: 1313826
ucuguaaccaucuacuccc

SEQ ID NO: 1313828 - RNA, 19 nt, Artificial Sequence
  Description of Artificial Sequence: Synthetic oligonucleotide
  Sense strand starting at position 3776 of SEQ ID NO: 1241972
ggaaguccuuucucuauaa

SEQ ID NO: 1313829 - RNA, 19 nt, Artificial Sequence
  Description of Artificial Sequence: Synthetic oligonucleotide
  Antisense strand to SEQ ID NO: 1313828
uuauagagaaaggacuucc

SEQ ID NO: 1313830 - RNA, 19 nt, Artificial Sequence
  Description of Artificial Sequence: Synthetic oligonucleotide
  Sense strand starting at position 3836 of SEQ ID NO: 1241972
gaguuauugggcuauggaa

SEQ ID NO: 1313831 - RNA, 19 nt, Artificial Sequence
  Description of Artificial Sequence: Synthetic oligonucleotide
  Antisense strand to SEQ ID NO: 1313830
uuccauagcccaauaacuc

SEQ ID NO: 1313832 - RNA, 19 nt, Artificial Sequence
  Description of Artificial Sequence: Synthetic oligonucleotide
  Sense strand starting at position 3838 of SEQ ID NO: 1241972
guuauugggcuauggaaac

SEQ ID NO: 1313833 - RNA, 19 nt, Artificial Sequence
  Description of Artificial Sequence: Synthetic oligonucleotide
  Antisense strand to SEQ ID NO: 1313832
guuuccauagcccaauaac

SEQ ID NO: 1313834 - RNA, 19 nt, Artificial Sequence
  Description of Artificial Sequence: Synthetic oligonucleotide
  Sense strand starting at position 101 of SEQ ID NO: 1241973
acacauaaucaagguguau

SEQ ID NO: 1313835 - RNA, 19 nt, Artificial Sequence
  Description of Artificial Sequence: Synthetic oligonucleotide
  Antisense strand to SEQ ID NO: 1313834
auacaccuugauuaugugu

SEQ ID NO: 1313836 - RNA, 19 nt, Artificial Sequence
  Description of Artificial Sequence: Synthetic oligonucleotide
  Sense strand starting at position 173 of SEQ ID NO: 1241973
gggaucaucugauccuuua

SEQ ID NO: 1313837 - RNA, 19 nt, Artificial Sequence
  Description of Artificial Sequence: Synthetic oligonucleotide
  Antisense strand to SEQ ID NO: 1313836
uaaaggaucagaugauccc

SEQ ID NO: 1313838 - RNA, 19 nt, Artificial Sequence
  Description of Artificial Sequence: Synthetic oligonucleotide
  Sense strand starting at position 239 of SEQ ID NO: 1241973
cccagcaaucagugacaga

SEQ ID NO: 1313839 - RNA, 19 nt, Artificial Sequence
  Description of Artificial Sequence: Synthetic oligonucleotide
  Antisense strand to SEQ ID NO: 1313838
ucugucacugauugcuggg

SEQ ID NO: 1313840 - RNA, 19 nt, Artificial Sequence
  Description of Artificial Sequence: Synthetic oligonucleotide
  Sense strand starting at position 279 of SEQ ID NO: 1241973
ggacacuucccuggaaauu

SEQ ID NO: 1313841 - RNA, 19 nt, Artificial Sequence
  Description of Artificial Sequence: Synthetic oligonucleotide
  Antisense strand to SEQ ID NO: 1313840
aauuuccagggaagugucc

SEQ ID NO: 1313842 - RNA, 19 nt, Artificial Sequence
  Description of Artificial Sequence: Synthetic oligonucleotide
  Sense strand starting at position 324 of SEQ ID NO: 1241973
uuugaagaguggucagauc

SEQ ID NO: 1313843 - RNA, 19 nt, Artificial Sequence
  Description of Artificial Sequence: Synthetic oligonucleotide
  Antisense strand to SEQ ID NO: 1313842
gaucugaccacucuucaaa

SEQ ID NO: 1313844 - RNA, 19 nt, Artificial Sequence
  Description of Artificial Sequence: Synthetic oligonucleotide
  Sense strand starting at position 529 of SEQ ID NO: 1241973
cagcuagauugagcucuuu

SEQ ID NO: 1313845 - RNA, 19 nt, Artificial Sequence
  Description of Artificial Sequence: Synthetic oligonucleotide
  Antisense strand to SEQ ID NO: 1313844
aaagagcucaaucuagcug

SEQ ID NO: 1313846 - RNA, 19 nt, Artificial Sequence
  Description of Artificial Sequence: Synthetic oligonucleotide
  Sense strand starting at position 535 of SEQ ID NO: 1241973
gauugagcucuuuagucag

SEQ ID NO: 1313847 - RNA, 19 nt, Artificial Sequence
  Description of Artificial Sequence: Synthetic oligonucleotide
  Antisense strand to SEQ ID NO: 1313846
cugacuaaagagcucaauc

SEQ ID NO: 1313848 - RNA, 19 nt, Artificial Sequence
  Description of Artificial Sequence: Synthetic oligonucleotide
  Sense strand starting at position 538 of SEQ ID NO: 1241973
ugagcucuuuagucagaga

SEQ ID NO: 1313849 - RNA, 19 nt, Artificial Sequence
  Description of Artificial Sequence: Synthetic oligonucleotide
  Antisense strand to SEQ ID NO: 1313848
ucucugacuaaagagcuca

SEQ ID NO: 1313850 - RNA, 19 nt, Artificial Sequence
  Description of Artificial Sequence: Synthetic oligonucleotide
  Sense strand starting at position 578 of SEQ ID NO: 1241973
uuggcucaauucucaauga

SEQ ID NO: 1313851 - RNA, 19 nt, Artificial Sequence
  Description of Artificial Sequence: Synthetic oligonucleotide
  Antisense strand to SEQ ID NO: 1313850
ucauugagaauugagccaa

SEQ ID NO: 1313852 - RNA, 19 nt, Artificial Sequence
  Description of Artificial Sequence: Synthetic oligonucleotide
  Sense strand starting at position 659 of SEQ ID NO: 1241973
cccacuaggcuguaagaaa

SEQ ID NO: 1313853 - RNA, 19 nt, Artificial Sequence
  Description of Artificial Sequence: Synthetic oligonucleotide
  Antisense strand to SEQ ID NO: 1313852
uuucuuacagccuaguggg

SEQ ID NO: 1313854 - RNA, 19 nt, Artificial Sequence
  Description of Artificial Sequence: Synthetic oligonucleotide
  Sense strand starting at position 732 of SEQ ID NO: 1241973
aggcaauacuuucucugua

SEQ ID NO: 1313855 - RNA, 19 nt, Artificial Sequence
  Description of Artificial Sequence: Synthetic oligonucleotide
  Antisense strand to SEQ ID NO: 1313854
uacagagaaaguauugccu

SEQ ID NO: 1313856 - RNA, 19 nt, Artificial Sequence
  Description of Artificial Sequence: Synthetic oligonucleotide
  Sense strand starting at position 733 of SEQ ID NO: 1241973
ggcaauacuuucucuguaa

SEQ ID NO: 1313857 - RNA, 19 nt, Artificial Sequence
  Description of Artificial Sequence: Synthetic oligonucleotide
  Antisense strand to SEQ ID NO: 1313856
uuacagagaaaguauugcc

SEQ ID NO: 1313858 - RNA, 19 nt, Artificial Sequence
  Description of Artificial Sequence: Synthetic oligonucleotide
  Sense strand starting at position 734 of SEQ ID NO: 1241973
gcaauacuuucucuguaag

SEQ ID NO: 1313859 - RNA, 19 nt, Artificial Sequence
  Description of Artificial Sequence: Synthetic oligonucleotide
  Antisense strand to SEQ ID NO: 1313858
cuuacagagaaaguauugc

SEQ ID NO: 1313860 - RNA, 19 nt, Artificial Sequence
  Description of Artificial Sequence: Synthetic oligonucleotide
  Sense strand starting at position 744 of SEQ ID NO: 1241973
cucuguaagcuugaccuaa

SEQ ID NO: 1313861 - RNA, 19 nt, Artificial Sequence
  Description of Artificial Sequence: Synthetic oligonucleotide
  Antisense strand to SEQ ID NO: 1313860
uuaggucaagcuuacagag

SEQ ID NO: 1313862 - RNA, 19 nt, Artificial Sequence
  Description of Artificial Sequence: Synthetic oligonucleotide
  Sense strand starting at position 815 of SEQ ID NO: 1241973
ccuguuacccuggacuaga

SEQ ID NO: 1313863 - RNA, 19 nt, Artificial Sequence
  Description of Artificial Sequence: Synthetic oligonucleotide
  Antisense strand to SEQ ID NO: 1313862
ucuaguccaggguaacagg

SEQ ID NO: 1313864 - RNA, 19 nt, Artificial Sequence
  Description of Artificial Sequence: Synthetic oligonucleotide
  Sense strand starting at position 845 of SEQ ID NO: 1241973
ccaacauucuagucaaagu

SEQ ID NO: 1313865 - RNA, 19 nt, Artificial Sequence
  Description of Artificial Sequence: Synthetic oligonucleotide
  Antisense strand to SEQ ID NO: 1313864
acuuugacuagaauguugg

SEQ ID NO: 1313866 - RNA, 19 nt, Artificial Sequence
  Description of Artificial Sequence: Synthetic oligonucleotide
  Sense strand starting at position 862 of SEQ ID NO: 1241973
gugaucuuggacugcacau

SEQ ID NO: 1313867 - RNA, 19 nt, Artificial Sequence
  Description of Artificial Sequence: Synthetic oligonucleotide
  Antisense strand to SEQ ID NO: 1313866
augugcaguccaagaucac

SEQ ID NO: 1313868 - RNA, 19 nt, Artificial Sequence
  Description of Artificial Sequence: Synthetic oligonucleotide
  Sense strand starting at position 997 of SEQ ID NO: 1241973
cugacagucuuaccaguua

SEQ ID NO: 1313869 - RNA, 19 nt, Artificial Sequence
  Description of Artificial Sequence: Synthetic oligonucleotide
  Antisense strand to SEQ ID NO: 1313868
uaacugguaagacugucag

SEQ ID NO: 1313870 - RNA, 19 nt, Artificial Sequence
  Description of Artificial Sequence: Synthetic oligonucleotide
  Sense strand starting at position 1026 of SEQ ID NO: 1241973
aggagaaccucacaagaca

SEQ ID NO: 1313871 - RNA, 19 nt, Artificial Sequence
  Description of Artificial Sequence: Synthetic oligonucleotide
  Antisense strand to SEQ ID NO: 1313870
ugucuugugagguucuccu

SEQ ID NO: 1313872 - RNA, 19 nt, Artificial Sequence
  Description of Artificial Sequence: Synthetic oligonucleotide
  Sense strand starting at position 1068 of SEQ ID NO: 1241973
aaguauuauaguggaggga

SEQ ID NO: 1313873 - RNA, 19 nt, Artificial Sequence
  Description of Artificial Sequence: Synthetic oligonucleotide
  Antisense strand to SEQ ID NO: 1313872
ucccuccacuauaauacuu

SEQ ID NO: 1313874 - RNA, 19 nt, Artificial Sequence
  Description of Artificial Sequence: Synthetic oligonucleotide
  Sense strand starting at position 1116 of SEQ ID NO: 1241973
acacuagaucccugaguca

SEQ ID NO: 1313875 - RNA, 19 nt, Artificial Sequence
  Description of Artificial Sequence: Synthetic oligonucleotide
  Antisense strand to SEQ ID NO: 1313874
ugacucagggaucuagugu

SEQ ID NO: 1313876 - RNA, 19 nt, Artificial Sequence
  Description of Artificial Sequence: Synthetic oligonucleotide
  Sense strand starting at position 1119 of SEQ ID NO: 1241973
cuagaucccugagucaaca

SEQ ID NO: 1313877 - RNA, 19 nt, Artificial Sequence
  Description of Artificial Sequence: Synthetic oligonucleotide
  Antisense strand to SEQ ID NO: 1313876
uguugacucagggaucuag

SEQ ID NO: 1313878 - RNA, 19 nt, Artificial Sequence
  Description of Artificial Sequence: Synthetic oligonucleotide
  Sense strand starting at position 1234 of SEQ ID NO: 1241973
ggagaugugacuggugagu

SEQ ID NO: 1313879 - RNA, 19 nt, Artificial Sequence
  Description of Artificial Sequence: Synthetic oligonucleotide
  Antisense strand to SEQ ID NO: 1313878
acucaccagucacaucucc

SEQ ID NO: 1313880 - RNA, 19 nt, Artificial Sequence
  Description of Artificial Sequence: Synthetic oligonucleotide
  Sense strand starting at position 1287 of SEQ ID NO: 1241973
ggcaaucugucacccugau

SEQ ID NO: 1313881 - RNA, 19 nt, Artificial Sequence
  Description of Artificial Sequence: Synthetic oligonucleotide
  Antisense strand to SEQ ID NO: 1313880
aucagggugacagauugcc

SEQ ID NO: 1313882 - RNA, 19 nt, Artificial Sequence
  Description of Artificial Sequence: Synthetic oligonucleotide
  Sense strand starting at position 1330 of SEQ ID NO: 1241973
gauggucaaugagauagga

SEQ ID NO: 1313883 - RNA, 19 nt, Artificial Sequence
  Description of Artificial Sequence: Synthetic oligonucleotide
  Antisense strand to SEQ ID NO: 1313882
uccuaucucauugaccauc

SEQ ID NO: 1313884 - RNA, 19 nt, Artificial Sequence
  Description of Artificial Sequence: Synthetic oligonucleotide
  Sense strand starting at position 1354 of SEQ ID NO: 1241973
cugggacuccugcacagau

SEQ ID NO: 1313885 - RNA, 19 nt, Artificial Sequence
  Description of Artificial Sequence: Synthetic oligonucleotide
  Antisense strand to SEQ ID NO: 1313884
aucugugcaggagucccag

SEQ ID NO: 1313886 - RNA, 19 nt, Artificial Sequence
  Description of Artificial Sequence: Synthetic oligonucleotide
  Sense strand starting at position 1762 of SEQ ID NO: 1241973
uagacugccuggucacuaa

SEQ ID NO: 1313887 - RNA, 19 nt, Artificial Sequence
  Description of Artificial Sequence: Synthetic oligonucleotide
  Antisense strand to SEQ ID NO: 1313886
uuagugaccaggcagucua

SEQ ID NO: 1313888 - RNA, 19 nt, Artificial Sequence
  Description of Artificial Sequence: Synthetic oligonucleotide
  Sense strand starting at position 1815 of SEQ ID NO: 1241973
acagguagcuaccuaagaa

SEQ ID NO: 1313889 - RNA, 19 nt, Artificial Sequence
  Description of Artificial Sequence: Synthetic oligonucleotide
  Antisense strand to SEQ ID NO: 1313888
uucuuagguagcuaccugu

SEQ ID NO: 1313890 - RNA, 19 nt, Artificial Sequence
  Description of Artificial Sequence: Synthetic oligonucleotide
  Sense strand starting at position 1827 of SEQ ID NO: 1241973
cuaagaaguccuggaggca

SEQ ID NO: 1313891 - RNA, 19 nt, Artificial Sequence
  Description of Artificial Sequence: Synthetic oligonucleotide
  Antisense strand to SEQ ID NO: 1313890
ugccuccaggacuucuuag

SEQ ID NO: 1313892 - RNA, 19 nt, Artificial Sequence
  Description of Artificial Sequence: Synthetic oligonucleotide
  Sense strand starting at position 2348 of SEQ ID NO: 1241973
ggacuccucuucgucauuu

SEQ ID NO: 1313893 - RNA, 19 nt, Artificial Sequence
  Description of Artificial Sequence: Synthetic oligonucleotide
  Antisense strand to SEQ ID NO: 1313892
aaaugacgaagaggagucc

SEQ ID NO: 1313894 - RNA, 19 nt, Artificial Sequence
  Description of Artificial Sequence: Synthetic oligonucleotide
  Sense strand starting at position 2591 of SEQ ID NO: 1241973
gagguucgcgccucuugau

SEQ ID NO: 1313895 - RNA, 19 nt, Artificial Sequence
  Description of Artificial Sequence: Synthetic oligonucleotide
  Antisense strand to SEQ ID NO: 1313894
aucaagaggcgcgaaccuc

SEQ ID NO: 1313896 - RNA, 19 nt, Artificial Sequence
  Description of Artificial Sequence: Synthetic oligonucleotide
  Sense strand starting at position 2599 of SEQ ID NO: 1241973
cgccucuugauugaaggau

SEQ ID NO: 1313897 - RNA, 19 nt, Artificial Sequence
  Description of Artificial Sequence: Synthetic oligonucleotide
  Antisense strand to SEQ ID NO: 1313896
auccuucaaucaagaggcg

SEQ ID NO: 1313898 - RNA, 19 nt, Artificial Sequence
  Description of Artificial Sequence: Synthetic oligonucleotide
  Sense strand starting at position 2772 of SEQ ID NO: 1241973
cuuugauuggcagagcaca

SEQ ID NO: 1313899 - RNA, 19 nt, Artificial Sequence
  Description of Artificial Sequence: Synthetic oligonucleotide
  Antisense strand to SEQ ID NO: 1313898
ugugcucugccaaucaaag

SEQ ID NO: 1313900 - RNA, 19 nt, Artificial Sequence
  Description of Artificial Sequence: Synthetic oligonucleotide
  Sense strand starting at position 2967 of SEQ ID NO: 1241973
aggcguugcgugagaagga

SEQ ID NO: 1313901 - RNA, 19 nt, Artificial Sequence
  Description of Artificial Sequence: Synthetic oligonucleotide
  Antisense strand to SEQ ID NO: 1313900
uccuucucacgcaacgccu

SEQ ID NO: 1313902 - RNA, 19 nt, Artificial Sequence
  Description of Artificial Sequence: Synthetic oligonucleotide
  Sense strand starting at position 3144 of SEQ ID NO: 1241973
gcgggugcgcgauugaaua

SEQ ID NO: 1313903 - RNA, 19 nt, Artificial Sequence
  Description of Artificial Sequence: Synthetic oligonucleotide
  Antisense strand to SEQ ID NO: 1313902
uauucaaucgcgcacccgc

SEQ ID NO: 1313904 - RNA, 19 nt, Artificial Sequence
  Description of Artificial Sequence: Synthetic oligonucleotide
  Sense strand starting at position 3514 of SEQ ID NO: 1241973
ucgugcauugcacaaauau

SEQ ID NO: 1313905 - RNA, 19 nt, Artificial Sequence
  Description of Artificial Sequence: Synthetic oligonucleotide
  Antisense strand to SEQ ID NO: 1313904
auauuugugcaaugcacga

SEQ ID NO: 1313906 - RNA, 19 nt, Artificial Sequence
  Description of Artificial Sequence: Synthetic oligonucleotide
  Sense strand starting at position 3613 of SEQ ID NO: 1241973
ccuaaucucguggaguuua

SEQ ID NO: 1313907 - RNA, 19 nt, Artificial Sequence
  Description of Artificial Sequence: Synthetic oligonucleotide
  Antisense strand to SEQ ID NO: 1313906
uaaacuccacgagauuagg

SEQ ID NO: 1313908 - RNA, 19 nt, Artificial Sequence
  Description of Artificial Sequence: Synthetic oligonucleotide
  Sense strand starting at position 3720 of SEQ ID NO: 1241973
aggcguacggauuauguga

SEQ ID NO: 1313909 - RNA, 19 nt, Artificial Sequence
  Description of Artificial Sequence: Synthetic oligonucleotide
  Antisense strand to SEQ ID NO: 1313908
ucacauaauccguacgccu

SEQ ID NO: 1313910 - RNA, 19 nt, Artificial Sequence
  Description of Artificial Sequence: Synthetic oligonucleotide
  Sense strand starting at position 3728 of SEQ ID NO: 1241973
ggauuaugugagggcagau

SEQ ID NO: 1313911 - RNA, 19 nt, Artificial Sequence
  Description of Artificial Sequence: Synthetic oligonucleotide
  Antisense strand to SEQ ID NO: 1313910
aucugcccucacauaaucc

SEQ ID NO: 1313912 - RNA, 19 nt, Artificial Sequence
  Description of Artificial Sequence: Synthetic oligonucleotide
  Sense strand starting at position 3817 of SEQ ID NO: 1241973
gugcauagauaucuggaua

SEQ ID NO: 1313913 - RNA, 19 nt, Artificial Sequence
  Description of Artificial Sequence: Synthetic oligonucleotide
  Antisense strand to SEQ ID NO: 1313912
uauccagauaucuaugcac

SEQ ID NO: 1313914 - RNA, 19 nt, Artificial Sequence
  Description of Artificial Sequence: Synthetic oligonucleotide
  Sense strand starting at position 265 of SEQ ID NO: 1241974
ccgggcucaccuugucaaa

SEQ ID NO: 1313915 - RNA, 19 nt, Artificial Sequence
  Description of Artificial Sequence: Synthetic oligonucleotide
  Antisense strand to SEQ ID NO: 1313914
uuugacaaggugagcccgg

SEQ ID NO: 1313916 - RNA, 19 nt, Artificial Sequence
  Description of Artificial Sequence: Synthetic oligonucleotide
  Sense strand starting at position 267 of SEQ ID NO: 1241974
gggcucaccuugucaaagu

SEQ ID NO: 1313917 - RNA, 19 nt, Artificial Sequence
  Description of Artificial Sequence: Synthetic oligonucleotide
  Antisense strand to SEQ ID NO: 1313916
acuuugacaaggugagccc

SEQ ID NO: 1313918 - RNA, 19 nt, Artificial Sequence
  Description of Artificial Sequence: Synthetic oligonucleotide
  Sense strand starting at position 1276 of SEQ ID NO: 1241974
gagcucacccuuugagcau

SEQ ID NO: 1313919 - RNA, 19 nt, Artificial Sequence
  Description of Artificial Sequence: Synthetic oligonucleotide
  Antisense strand to SEQ ID NO: 1313918
augcucaaagggugagcuc

SEQ ID NO: 1313920 - RNA, 19 nt, Artificial Sequence
  Description of Artificial Sequence: Synthetic oligonucleotide
  Sense strand starting at position 1283 of SEQ ID NO: 1241974
cccuuugagcaucacagaa

SEQ ID NO: 1313921 - RNA, 19 nt, Artificial Sequence
  Description of Artificial Sequence: Synthetic oligonucleotide
  Antisense strand to SEQ ID NO: 1313920
uucugugaugcucaaaggg

SEQ ID NO: 1313922 - RNA, 19 nt, Artificial Sequence
  Description of Artificial Sequence: Synthetic oligonucleotide
  Sense strand starting at position 1619 of SEQ ID NO: 1241974
gggcauucuuuaucaauac

SEQ ID NO: 1313923 - RNA, 19 nt, Artificial Sequence
  Description of Artificial Sequence: Synthetic oligonucleotide
  Antisense strand to SEQ ID NO: 1313922
guauugauaaagaaugccc

SEQ ID NO: 1313924 - RNA, 19 nt, Artificial Sequence
  Description of Artificial Sequence: Synthetic oligonucleotide
  Sense strand starting at position 1910 of SEQ ID NO: 1241974
gaucccagagauuguaaau

SEQ ID NO: 1313925 - RNA, 19 nt, Artificial Sequence
  Description of Artificial Sequence: Synthetic oligonucleotide
  Antisense strand to SEQ ID NO: 1313924
auuuacaaucucugggauc

SEQ ID NO: 1313926 - RNA, 19 nt, Artificial Sequence
  Description of Artificial Sequence: Synthetic oligonucleotide
  Sense strand starting at position 1919 of SEQ ID NO: 1241974
gauuguaaauuggucccaa

SEQ ID NO: 1313927 - RNA, 19 nt, Artificial Sequence
  Description of Artificial Sequence: Synthetic oligonucleotide
  Antisense strand to SEQ ID NO: 1313926
uugggaccaauuuacaauc

SEQ ID NO: 1313928 - RNA, 19 nt, Artificial Sequence
  Description of Artificial Sequence: Synthetic oligonucleotide
  Sense strand starting at position 1920 of SEQ ID NO: 1241974
auuguaaauuggucccaag

SEQ ID NO: 1313929 - RNA, 19 nt, Artificial Sequence
  Description of Artificial Sequence: Synthetic oligonucleotide
  Antisense strand to SEQ ID NO: 1313928
cuugggaccaauuuacaau

SEQ ID NO: 1313930 - RNA, 19 nt, Artificial Sequence
  Description of Artificial Sequence: Synthetic oligonucleotide
  Sense strand starting at position 1935 of SEQ ID NO: 1241974
caagaaagguaccuguaga

SEQ ID NO: 1313931 - RNA, 19 nt, Artificial Sequence
  Description of Artificial Sequence: Synthetic oligonucleotide
  Antisense strand to SEQ ID NO: 1313930
ucuacagguaccuuucuug

SEQ ID NO: 1313932 - RNA, 19 nt, Artificial Sequence
  Description of Artificial Sequence: Synthetic oligonucleotide
  Sense strand starting at position 2042 of SEQ ID NO: 1241974
aucagauuggccugguugu

SEQ ID NO: 1313933 - RNA, 19 nt, Artificial Sequence
  Description of Artificial Sequence: Synthetic oligonucleotide
  Antisense strand to SEQ ID NO: 1313932
acaaccaggccaaucugau

SEQ ID NO: 1313934 - RNA, 19 nt, Artificial Sequence
  Description of Artificial Sequence: Synthetic oligonucleotide
  Sense strand starting at position 2057 of SEQ ID NO: 1241974
uuguccugaucaccugaua

SEQ ID NO: 1313935 - RNA, 19 nt, Artificial Sequence
  Description of Artificial Sequence: Synthetic oligonucleotide
  Antisense strand to SEQ ID NO: 1313934
uaucaggugaucaggacaa

SEQ ID NO: 1313936 - RNA, 19 nt, Artificial Sequence
  Description of Artificial Sequence: Synthetic oligonucleotide
  Sense strand starting at position 2062 of SEQ ID NO: 1241974
cugaucaccugauaugaaa

SEQ ID NO: 1313937 - RNA, 19 nt, Artificial Sequence
  Description of Artificial Sequence: Synthetic oligonucleotide
  Antisense strand to SEQ ID NO: 1313936
uuucauaucaggugaucag

SEQ ID NO: 1313938 - RNA, 19 nt, Artificial Sequence
  Description of Artificial Sequence: Synthetic oligonucleotide
  Sense strand starting at position 2071 of SEQ ID NO: 1241974
ugauaugaaagcuggauca

SEQ ID NO: 1313939 - RNA, 19 nt, Artificial Sequence
  Description of Artificial Sequence: Synthetic oligonucleotide
  Antisense strand to SEQ ID NO: 1313938
ugauccagcuuucauauca

SEQ ID NO: 1313940 - RNA, 19 nt, Artificial Sequence
  Description of Artificial Sequence: Synthetic oligonucleotide
  Sense strand starting at position 2225 of SEQ ID NO: 1241974
gucuuuaggguucagggua

SEQ ID NO: 1313941 - RNA, 19 nt, Artificial Sequence
  Description of Artificial Sequence: Synthetic oligonucleotide
  Antisense strand to SEQ ID NO: 1313940
uacccugaacccuaaagac

SEQ ID NO: 1313942 - RNA, 19 nt, Artificial Sequence
  Description of Artificial Sequence: Synthetic oligonucleotide
  Sense strand starting at position 2248 of SEQ ID NO: 1241974
gccuauuucucugaagagu

SEQ ID NO: 1313943 - RNA, 19 nt, Artificial Sequence
  Description of Artificial Sequence: Synthetic oligonucleotide
  Antisense strand to SEQ ID NO: 1313942
acucuucagagaaauaggc

SEQ ID NO: 1313944 - RNA, 19 nt, Artificial Sequence
  Description of Artificial Sequence: Synthetic oligonucleotide
  Sense strand starting at position 2396 of SEQ ID NO: 1241974
ggauguucuucuguaguac

SEQ ID NO: 1313945 - RNA, 19 nt, Artificial Sequence
  Description of Artificial Sequence: Synthetic oligonucleotide
  Antisense strand to SEQ ID NO: 1313944
guacuacagaagaacaucc

SEQ ID NO: 1313946 - RNA, 19 nt, Artificial Sequence
  Description of Artificial Sequence: Synthetic oligonucleotide
  Sense strand starting at position 2440 of SEQ ID NO: 1241974
aguaaaugggcguguucca

SEQ ID NO: 1313947 - RNA, 19 nt, Artificial Sequence
  Description of Artificial Sequence: Synthetic oligonucleotide
  Antisense strand to SEQ ID NO: 1313946
uggaacacgcccauuuacu

SEQ ID NO: 1313948 - RNA, 19 nt, Artificial Sequence
  Description of Artificial Sequence: Synthetic oligonucleotide
  Sense strand starting at position 2582 of SEQ ID NO: 1241974
uuugcauuugauugccaua

SEQ ID NO: 1313949 - RNA, 19 nt, Artificial Sequence
  Description of Artificial Sequence: Synthetic oligonucleotide
  Antisense strand to SEQ ID NO: 1313948
uauggcaaucaaaugcaaa

SEQ ID NO: 1313950 - RNA, 19 nt, Artificial Sequence
  Description of Artificial Sequence: Synthetic oligonucleotide
  Sense strand starting at position 2594 of SEQ ID NO: 1241974
ugccauaucgauuggauau

SEQ ID NO: 1313951 - RNA, 19 nt, Artificial Sequence
  Description of Artificial Sequence: Synthetic oligonucleotide
  Antisense strand to SEQ ID NO: 1313950
auauccaaucgauauggca

SEQ ID NO: 1313952 - RNA, 19 nt, Artificial Sequence
  Description of Artificial Sequence: Synthetic oligonucleotide
  Sense strand starting at position 2595 of SEQ ID NO: 1241974
gccauaucgauuggauaug

SEQ ID NO: 1313953 - RNA, 19 nt, Artificial Sequence
  Description of Artificial Sequence: Synthetic oligonucleotide
  Antisense strand to SEQ ID NO: 1313952
cauauccaaucgauauggc

SEQ ID NO: 1313954 - RNA, 19 nt, Artificial Sequence
  Description of Artificial Sequence: Synthetic oligonucleotide
  Sense strand starting at position 2694 of SEQ ID NO: 1241974
agaugauauucuggaauaa

SEQ ID NO: 1313955 - RNA, 19 nt, Artificial Sequence
  Description of Artificial Sequence: Synthetic oligonucleotide
  Antisense strand to SEQ ID NO: 1313954
uuauuccagaauaucaucu

SEQ ID NO: 1313956 - RNA, 19 nt, Artificial Sequence
  Description of Artificial Sequence: Synthetic oligonucleotide
  Sense strand starting at position 2729 of SEQ ID NO: 1241974
gugugaacagagugucaug

SEQ ID NO: 1313957 - RNA, 19 nt, Artificial Sequence
  Description of Artificial Sequence: Synthetic oligonucleotide
  Antisense strand to SEQ ID NO: 1313956
caugacacucuguucacac

SEQ ID NO: 1313958 - RNA, 19 nt, Artificial Sequence
  Description of Artificial Sequence: Synthetic oligonucleotide
  Sense strand starting at position 2752 of SEQ ID NO: 1241974
gugggaguguauccuuauu

SEQ ID NO: 1313959 - RNA, 19 nt, Artificial Sequence
  Description of Artificial Sequence: Synthetic oligonucleotide
  Antisense strand to SEQ ID NO: 1313958
aauaaggauacacucccac

SEQ ID NO: 1313960 - RNA, 19 nt, Artificial Sequence
  Description of Artificial Sequence: Synthetic oligonucleotide
  Sense strand starting at position 2754 of SEQ ID NO: 1241974
gggaguguauccuuauucu

SEQ ID NO: 1313961 - RNA, 19 nt, Artificial Sequence
  Description of Artificial Sequence: Synthetic oligonucleotide
  Antisense strand to SEQ ID NO: 1313960
agaauaaggauacacuccc

SEQ ID NO: 1313962 - RNA, 19 nt, Artificial Sequence
  Description of Artificial Sequence: Synthetic oligonucleotide
  Sense strand starting at position 2757 of SEQ ID NO: 1241974
aguguauccuuauucuuag

SEQ ID NO: 1313963 - RNA, 19 nt, Artificial Sequence
  Description of Artificial Sequence: Synthetic oligonucleotide
  Antisense strand to SEQ ID NO: 1313962
cuaagaauaaggauacacu

SEQ ID NO: 1313964 - RNA, 19 nt, Artificial Sequence
  Description of Artificial Sequence: Synthetic oligonucleotide
  Sense strand starting at position 2777 of SEQ ID NO: 1241974
agauuaaugcuguagcaug

SEQ ID NO: 1313965 - RNA, 19 nt, Artificial Sequence
  Description of Artificial Sequence: Synthetic oligonucleotide
  Antisense strand to SEQ ID NO: 1313964
caugcuacagcauuaaucu

SEQ ID NO: 1313966 - RNA, 19 nt, Artificial Sequence
  Description of Artificial Sequence: Synthetic oligonucleotide
  Sense strand starting at position 3158 of SEQ ID NO: 1241974
accuuuaaagaguguaauu

SEQ ID NO: 1313967 - RNA, 19 nt, Artificial Sequence
  Description of Artificial Sequence: Synthetic oligonucleotide
  Antisense strand to SEQ ID NO: 1313966
aauuacacucuuuaaaggu

SEQ ID NO: 1313968 - RNA, 19 nt, Artificial Sequence
  Description of Artificial Sequence: Synthetic oligonucleotide
  Sense strand starting at position 3194 of SEQ ID NO: 1241974
aagguuuauccuugcuuga

SEQ ID NO: 1313969 - RNA, 19 nt, Artificial Sequence
  Description of Artificial Sequence: Synthetic oligonucleotide
  Antisense strand to SEQ ID NO: 1313968
ucaagcaaggauaaaccuu

SEQ ID NO: 1313970 - RNA, 19 nt, Artificial Sequence
  Description of Artificial Sequence: Synthetic oligonucleotide
  Sense strand starting at position 3196 of SEQ ID NO: 1241974
gguuuauccuugcuugagg

SEQ ID NO: 1313971 - RNA, 19 nt, Artificial Sequence
  Description of Artificial Sequence: Synthetic oligonucleotide
  Antisense strand to SEQ ID NO: 1313970
ccucaagcaaggauaaacc

SEQ ID NO: 1313972 - RNA, 19 nt, Artificial Sequence
  Description of Artificial Sequence: Synthetic oligonucleotide
  Sense strand starting at position 3357 of SEQ ID NO: 1241974
gaaaguagauaugagaaau

SEQ ID NO: 1313973 - RNA, 19 nt, Artificial Sequence
  Description of Artificial Sequence: Synthetic oligonucleotide
  Antisense strand to SEQ ID NO: 1313972
auuucucauaucuacuuuc

SEQ ID NO: 1313974 - RNA, 19 nt, Artificial Sequence
  Description of Artificial Sequence: Synthetic oligonucleotide
  Sense strand starting at position 3368 of SEQ ID NO: 1241974
ugagaaaugucagauauuc

SEQ ID NO: 1313975 - RNA, 19 nt, Artificial Sequence
  Description of Artificial Sequence: Synthetic oligonucleotide
  Antisense strand to SEQ ID NO: 1313974
gaauaucugacauuucuca

SEQ ID NO: 1313976 - RNA, 19 nt, Artificial Sequence
  Description of Artificial Sequence: Synthetic oligonucleotide
  Sense strand starting at position 3386 of SEQ ID NO: 1241974
cauggacuuacgugaggau

SEQ ID NO: 1313977 - RNA, 19 nt, Artificial Sequence
  Description of Artificial Sequence: Synthetic oligonucleotide
  Antisense strand to SEQ ID NO: 1313976
auccucacguaaguccaug

SEQ ID NO: 1313978 - RNA, 19 nt, Artificial Sequence
  Description of Artificial Sequence: Synthetic oligonucleotide
  Sense strand starting at position 3402 of SEQ ID NO: 1241974
gauauaugguguuuguugu

SEQ ID NO: 1313979 - RNA, 19 nt, Artificial Sequence
  Description of Artificial Sequence: Synthetic oligonucleotide
  Antisense strand to SEQ ID NO: 1313978
acaacaaacaccauauauc

SEQ ID NO: 1313980 - RNA, 19 nt, Artificial Sequence
  Description of Artificial Sequence: Synthetic oligonucleotide
  Sense strand starting at position 3403 of SEQ ID NO: 1241974
auauaugguguuuguugua

SEQ ID NO: 1313981 - RNA, 19 nt, Artificial Sequence
  Description of Artificial Sequence: Synthetic oligonucleotide
  Antisense strand to SEQ ID NO: 1313980
uacaacaaacaccauauau

SEQ ID NO: 1313982 - RNA, 19 nt, Artificial Sequence
  Description of Artificial Sequence: Synthetic oligonucleotide
  Sense strand starting at position 3426 of SEQ ID NO: 1241974
aggagucuuuaauauggac

SEQ ID NO: 1313983 - RNA, 19 nt, Artificial Sequence
  Description of Artificial Sequence: Synthetic oligonucleotide
  Antisense strand to SEQ ID NO: 1313982
guccauauuaaagacuccu

SEQ ID NO: 1313984 - RNA, 19 nt, Artificial Sequence
  Description of Artificial Sequence: Synthetic oligonucleotide
  Sense strand starting at position 3484 of SEQ ID NO: 1241974
ccuuaaauuggaugugaaa

SEQ ID NO: 1313985 - RNA, 19 nt, Artificial Sequence
  Description of Artificial Sequence: Synthetic oligonucleotide
  Antisense strand to SEQ ID NO: 1313984
uuucacauccaauuuaagg

SEQ ID NO: 1313986 - RNA, 19 nt, Artificial Sequence
  Description of Artificial Sequence: Synthetic oligonucleotide
  Sense strand starting at position 3501 of SEQ ID NO: 1241974
aaaggaaguuugcuaucuu

SEQ ID NO: 1313987 - RNA, 19 nt, Artificial Sequence
  Description of Artificial Sequence: Synthetic oligonucleotide
  Antisense strand to SEQ ID NO: 1313986
aagauagcaaacuuccuuu

SEQ ID NO: 1313988 - RNA, 19 nt, Artificial Sequence
  Description of Artificial Sequence: Synthetic oligonucleotide
  Sense strand starting at position 3899 of SEQ ID NO: 1241974
gugggaucaaccugugaag

SEQ ID NO: 1313989 - RNA, 19 nt, Artificial Sequence
  Description of Artificial Sequence: Synthetic oligonucleotide
  Antisense strand to SEQ ID NO: 1313988
cuucacagguugaucccac

SEQ ID NO: 1313990 - RNA, 19 nt, Artificial Sequence
  Description of Artificial Sequence: Synthetic oligonucleotide
  Sense strand starting at position 3902 of SEQ ID NO: 1241974
ggaucaaccugugaagaug

SEQ ID NO: 1313991 - RNA, 19 nt, Artificial Sequence
  Description of Artificial Sequence: Synthetic oligonucleotide
  Antisense strand to SEQ ID NO: 1313990
caucuucacagguugaucc

SEQ ID NO: 1313992 - RNA, 19 nt, Artificial Sequence
  Description of Artificial Sequence: Synthetic oligonucleotide
  Sense strand starting at position 3970 of SEQ ID NO: 1241974
ggccaugaaugggagaaga

SEQ ID NO: 1313993 - RNA, 19 nt, Artificial Sequence
  Description of Artificial Sequence: Synthetic oligonucleotide
  Antisense strand to SEQ ID NO: 1313992
ucuucucccauucauggcc

SEQ ID NO: 1313994 - RNA, 19 nt, Artificial Sequence
  Description of Artificial Sequence: Synthetic oligonucleotide
  Sense strand starting at position 89 of SEQ ID NO: 1241975
ccacguuauccauacuaua

SEQ ID NO: 1313995 - RNA, 19 nt, Artificial Sequence
  Description of Artificial Sequence: Synthetic oligonucleotide
  Antisense strand to SEQ ID NO: 1313994
uauaguauggauaacgugg

SEQ ID NO: 1313996 - RNA, 19 nt, Artificial Sequence
  Description of Artificial Sequence: Synthetic oligonucleotide
  Sense strand starting at position 111 of SEQ ID NO: 1241975
uggcguucuggguaagaau

SEQ ID NO: 1313997 - RNA, 19 nt, Artificial Sequence
  Description of Artificial Sequence: Synthetic oligonucleotide
  Antisense strand to SEQ ID NO: 1313996
auucuuacccagaacgcca

SEQ ID NO: 1313998 - RNA, 19 nt, Artificial Sequence
  Description of Artificial Sequence: Synthetic oligonucleotide
  Sense strand starting at position 358 of SEQ ID NO: 1241975
gugucuagggcuggaagau

SEQ ID NO: 1313999 - RNA, 19 nt, Artificial Sequence
  Description of Artificial Sequence: Synthetic oligonucleotide
  Antisense strand to SEQ ID NO: 1313998
aucuuccagcccuagacac

SEQ ID NO: 1314000 - RNA, 19 nt, Artificial Sequence
  Description of Artificial Sequence: Synthetic oligonucleotide
  Sense strand starting at position 367 of SEQ ID NO: 1241975
gcuggaagaucaccucaua

SEQ ID NO: 1314001 - RNA, 19 nt, Artificial Sequence
  Description of Artificial Sequence: Synthetic oligonucleotide
  Antisense strand to SEQ ID NO: 1314000
uaugaggugaucuuccagc

SEQ ID NO: 1314002 - RNA, 19 nt, Artificial Sequence
  Description of Artificial Sequence: Synthetic oligonucleotide
  Sense strand starting at position 664 of SEQ ID NO: 1241975
cacagucuccaaugaggaa

SEQ ID NO: 1314003 - RNA, 19 nt, Artificial Sequence
  Description of Artificial Sequence: Synthetic oligonucleotide
  Antisense strand to SEQ ID NO: 1314002
uuccucauuggagacugug

SEQ ID NO: 1314004 - RNA, 19 nt, Artificial Sequence
  Description of Artificial Sequence: Synthetic oligonucleotide
  Sense strand starting at position 912 of SEQ ID NO: 1241975
gcccaagucuccucugaag

SEQ ID NO: 1314005 - RNA, 19 nt, Artificial Sequence
  Description of Artificial Sequence: Synthetic oligonucleotide
  Antisense strand to SEQ ID NO: 1314004
cuucagaggagacuugggc

SEQ ID NO: 1314006 - RNA, 19 nt, Artificial Sequence
  Description of Artificial Sequence: Synthetic oligonucleotide
  Sense strand starting at position 914 of SEQ ID NO: 1241975
ccaagucuccucugaaggu

SEQ ID NO: 1314007 - RNA, 19 nt, Artificial Sequence
  Description of Artificial Sequence: Synthetic oligonucleotide
  Antisense strand to SEQ ID NO: 1314006
accuucagaggagacuugg

SEQ ID NO: 1314008 - RNA, 19 nt, Artificial Sequence
  Description of Artificial Sequence: Synthetic oligonucleotide
  Sense strand starting at position 924 of SEQ ID NO: 1241975
ucugaaggugcugaaucau

SEQ ID NO: 1314009 - RNA, 19 nt, Artificial Sequence
  Description of Artificial Sequence: Synthetic oligonucleotide
  Antisense strand to SEQ ID NO: 1314008
augauucagcaccuucaga

SEQ ID NO: 1314010 - RNA, 19 nt, Artificial Sequence
  Description of Artificial Sequence: Synthetic oligonucleotide
  Sense strand starting at position 1000 of SEQ ID NO: 1241975
aggacagggcugugaaguu

SEQ ID NO: 1314011 - RNA, 19 nt, Artificial Sequence
  Description of Artificial Sequence: Synthetic oligonucleotide
  Antisense strand to SEQ ID NO: 1314010
aacuucacagcccuguccu

SEQ ID NO: 1314012 - RNA, 19 nt, Artificial Sequence
  Description of Artificial Sequence: Synthetic oligonucleotide
  Sense strand starting at position 1012 of SEQ ID NO: 1241975
ugaaguuagcugugaagag

SEQ ID NO: 1314013 - RNA, 19 nt, Artificial Sequence
  Description of Artificial Sequence: Synthetic oligonucleotide
  Antisense strand to SEQ ID NO: 1314012
cucuucacagcuaacuuca

SEQ ID NO: 1314014 - RNA, 19 nt, Artificial Sequence
  Description of Artificial Sequence: Synthetic oligonucleotide
  Sense strand starting at position 1338 of SEQ ID NO: 1241975
gaggguuagccagaccuau

SEQ ID NO: 1314015 - RNA, 19 nt, Artificial Sequence
  Description of Artificial Sequence: Synthetic oligonucleotide
  Antisense strand to SEQ ID NO: 1314014
auaggucuggcuaacccuc

SEQ ID NO: 1314016 - RNA, 19 nt, Artificial Sequence
  Description of Artificial Sequence: Synthetic oligonucleotide
  Sense strand starting at position 1731 of SEQ ID NO: 1241975
cccugucucccaggucaaa

SEQ ID NO: 1314017 - RNA, 19 nt, Artificial Sequence
  Description of Artificial Sequence: Synthetic oligonucleotide
  Antisense strand to SEQ ID NO: 1314016
uuugaccugggagacaggg

SEQ ID NO: 1314018 - RNA, 19 nt, Artificial Sequence
  Description of Artificial Sequence: Synthetic oligonucleotide
  Sense strand starting at position 1855 of SEQ ID NO: 1241975
ccgggaucugcgagcgagu

SEQ ID NO: 1314019 - RNA, 19 nt, Artificial Sequence
  Description of Artificial Sequence: Synthetic oligonucleotide
  Antisense strand to SEQ ID NO: 1314018
acucgcucgcagaucccgg

SEQ ID NO: 1314020 - RNA, 19 nt, Artificial Sequence
  Description of Artificial Sequence: Synthetic oligonucleotide
  Sense strand starting at position 2446 of SEQ ID NO: 1241975
uuugaaugagcuuauacgu

SEQ ID NO: 1314021 - RNA, 19 nt, Artificial Sequence
  Description of Artificial Sequence: Synthetic oligonucleotide
  Antisense strand to SEQ ID NO: 1314020
acguauaagcucauucaaa

SEQ ID NO: 1314022 - RNA, 19 nt, Artificial Sequence
  Description of Artificial Sequence: Synthetic oligonucleotide
  Sense strand starting at position 2452 of SEQ ID NO: 1241975
ugagcuuauacguaugaca

SEQ ID NO: 1314023 - RNA, 19 nt, Artificial Sequence
  Description of Artificial Sequence: Synthetic oligonucleotide
  Antisense strand to SEQ ID NO: 1314022
ugucauacguauaagcuca

SEQ ID NO: 1314024 - RNA, 19 nt, Artificial Sequence
  Description of Artificial Sequence: Synthetic oligonucleotide
  Sense strand starting at position 2454 of SEQ ID NO: 1241975
agcuuauacguaugacaug

SEQ ID NO: 1314025 - RNA, 19 nt, Artificial Sequence
  Description of Artificial Sequence: Synthetic oligonucleotide
  Antisense strand to SEQ ID NO: 1314024
caugucauacguauaagcu

SEQ ID NO: 1314026 - RNA, 19 nt, Artificial Sequence
  Description of Artificial Sequence: Synthetic oligonucleotide
  Sense strand starting at position 2475 of SEQ ID NO: 1241975
cuggcacaauccucagaaa

SEQ ID NO: 1314027 - RNA, 19 nt, Artificial Sequence
  Description of Artificial Sequence: Synthetic oligonucleotide
  Antisense strand to SEQ ID NO: 1314026
uuucugaggauugugccag

SEQ ID NO: 1314028 - RNA, 19 nt, Artificial Sequence
  Description of Artificial Sequence: Synthetic oligonucleotide
  Sense strand starting at position 2762 of SEQ ID NO: 1241975
ucacgccuucucuaauaga

SEQ ID NO: 1314029 - RNA, 19 nt, Artificial Sequence
  Description of Artificial Sequence: Synthetic oligonucleotide
  Antisense strand to SEQ ID NO: 1314028
ucuauuagagaaggcguga

SEQ ID NO: 1314030 - RNA, 19 nt, Artificial Sequence
  Description of Artificial Sequence: Synthetic oligonucleotide
  Sense strand starting at position 2921 of SEQ ID NO: 1241975
ggcuguuuagaggaagcaa

SEQ ID NO: 1314031 - RNA, 19 nt, Artificial Sequence
  Description of Artificial Sequence: Synthetic oligonucleotide
  Antisense strand to SEQ ID NO: 1314030
uugcuuccucuaaacagcc

SEQ ID NO: 1314032 - RNA, 19 nt, Artificial Sequence
  Description of Artificial Sequence: Synthetic oligonucleotide
  Sense strand starting at position 3150 of SEQ ID NO: 1241975
ugagauggaguguguaaga

SEQ ID NO: 1314033 - RNA, 19 nt, Artificial Sequence
  Description of Artificial Sequence: Synthetic oligonucleotide
  Antisense strand to SEQ ID NO: 1314032
ucuuacacacuccaucuca

SEQ ID NO: 1314034 - RNA, 19 nt, Artificial Sequence
  Description of Artificial Sequence: Synthetic oligonucleotide
  Sense strand starting at position 3279 of SEQ ID NO: 1241975
ccaggacauccucggcaaa

SEQ ID NO: 1314035 - RNA, 19 nt, Artificial Sequence
  Description of Artificial Sequence: Synthetic oligonucleotide
  Antisense strand to SEQ ID NO: 1314034
uuugccgaggauguccugg

SEQ ID NO: 1314036 - RNA, 19 nt, Artificial Sequence
  Description of Artificial Sequence: Synthetic oligonucleotide
  Sense strand starting at position 3281 of SEQ ID NO: 1241975
aggacauccucggcaaaga

SEQ ID NO: 1314037 - RNA, 19 nt, Artificial Sequence
  Description of Artificial Sequence: Synthetic oligonucleotide
  Antisense strand to SEQ ID NO: 1314036
ucuuugccgaggauguccu

SEQ ID NO: 1314038 - RNA, 19 nt, Artificial Sequence
  Description of Artificial Sequence: Synthetic oligonucleotide
  Sense strand starting at position 3297 of SEQ ID NO: 1241975
agaguuccuuguuuauaaa

SEQ ID NO: 1314039 - RNA, 19 nt, Artificial Sequence
  Description of Artificial Sequence: Synthetic oligonucleotide
  Antisense strand to SEQ ID NO: 1314038
uuuauaaacaaggaacucu

SEQ ID NO: 1314040 - RNA, 19 nt, Artificial Sequence
  Description of Artificial Sequence: Synthetic oligonucleotide
  Sense strand starting at position 3357 of SEQ ID NO: 1241975
uccuaagagcagcaugaua

SEQ ID NO: 1314041 - RNA, 19 nt, Artificial Sequence
  Description of Artificial Sequence: Synthetic oligonucleotide
  Antisense strand to SEQ ID NO: 1314040
uaucaugcugcucuuagga

SEQ ID NO: 1314042 - RNA, 19 nt, Artificial Sequence
  Description of Artificial Sequence: Synthetic oligonucleotide
  Sense strand starting at position 3359 of SEQ ID NO: 1241975
cuaagagcagcaugauaua

SEQ ID NO: 1314043 - RNA, 19 nt, Artificial Sequence
  Description of Artificial Sequence: Synthetic oligonucleotide
  Antisense strand to SEQ ID NO: 1314042
uauaucaugcugcucuuag

SEQ ID NO: 1314044 - RNA, 19 nt, Artificial Sequence
  Description of Artificial Sequence: Synthetic oligonucleotide
  Sense strand starting at position 3578 of SEQ ID NO: 1241975
augcauucugagggacaga

SEQ ID NO: 1314045 - RNA, 19 nt, Artificial Sequence
  Description of Artificial Sequence: Synthetic oligonucleotide
  Antisense strand to SEQ ID NO: 1314044
ucugucccucagaaugcau

SEQ ID NO: 1314046 - RNA, 19 nt, Artificial Sequence
  Description of Artificial Sequence: Synthetic oligonucleotide
  Sense strand starting at position 3610 of SEQ ID NO: 1241975
caguguguauggcuuauuu

SEQ ID NO: 1314047 - RNA, 19 nt, Artificial Sequence
  Description of Artificial Sequence: Synthetic oligonucleotide
  Antisense strand to SEQ ID NO: 1314046
aaauaagccauacacacug

SEQ ID NO: 1314048 - RNA, 19 nt, Artificial Sequence
  Description of Artificial Sequence: Synthetic oligonucleotide
  Sense strand starting at position 3612 of SEQ ID NO: 1241975
guguguauggcuuauuucu

SEQ ID NO: 1314049 - RNA, 19 nt, Artificial Sequence
  Description of Artificial Sequence: Synthetic oligonucleotide
  Antisense strand to SEQ ID NO: 1314048
agaaauaagccauacacac

SEQ ID NO: 1314050 - RNA, 19 nt, Artificial Sequence
  Description of Artificial Sequence: Synthetic oligonucleotide
  Sense strand starting at position 3679 of SEQ ID NO: 1241975
gcugaaaucaucuggagau

SEQ ID NO: 1314051 - RNA, 19 nt, Artificial Sequence
  Description of Artificial Sequence: Synthetic oligonucleotide
  Antisense strand to SEQ ID NO: 1314050
aucuccagaugauuucagc

SEQ ID NO: 1314052 - RNA, 19 nt, Artificial Sequence
  Description of Artificial Sequence: Synthetic oligonucleotide
  Sense strand starting at position 3717 of SEQ ID NO: 1241975
guaccugggcugugaugaa

SEQ ID NO: 1314053 - RNA, 19 nt, Artificial Sequence
  Description of Artificial Sequence: Synthetic oligonucleotide
  Antisense strand to SEQ ID NO: 1314052
uucaucacagcccagguac

SEQ ID NO: 1314054 - RNA, 19 nt, Artificial Sequence
  Description of Artificial Sequence: Synthetic oligonucleotide
  Sense strand starting at position 3726 of SEQ ID NO: 1241975
cugugaugaauccaaggcu

SEQ ID NO: 1314055 - RNA, 19 nt, Artificial Sequence
  Description of Artificial Sequence: Synthetic oligonucleotide
  Antisense strand to SEQ ID NO: 1314054
agccuuggauucaucacag

SEQ ID NO: 1314056 - RNA, 19 nt, Artificial Sequence
  Description of Artificial Sequence: Synthetic oligonucleotide
  Sense strand starting at position 3856 of SEQ ID NO: 1241975
agagacauucuuggguuua

SEQ ID NO: 1314057 - RNA, 19 nt, Artificial Sequence
  Description of Artificial Sequence: Synthetic oligonucleotide
  Antisense strand to SEQ ID NO: 1314056
uaaacccaagaaugucucu

SEQ ID NO: 1314058 - RNA, 19 nt, Artificial Sequence
  Description of Artificial Sequence: Synthetic oligonucleotide
  Sense strand starting at position 3861 of SEQ ID NO: 1241975
cauucuuggguuuagcaau

SEQ ID NO: 1314059 - RNA, 19 nt, Artificial Sequence
  Description of Artificial Sequence: Synthetic oligonucleotide
  Antisense strand to SEQ ID NO: 1314058
auugcuaaacccaagaaug

SEQ ID NO: 1314060 - RNA, 19 nt, Artificial Sequence
  Description of Artificial Sequence: Synthetic oligonucleotide
  Sense strand starting at position 3868 of SEQ ID NO: 1241975
ggguuuagcaauugacaag

SEQ ID NO: 1314061 - RNA, 19 nt, Artificial Sequence
  Description of Artificial Sequence: Synthetic oligonucleotide
  Antisense strand to SEQ ID NO: 1314060
cuugucaauugcuaaaccc

SEQ ID NO: 1314062 - RNA, 19 nt, Artificial Sequence
  Description of Artificial Sequence: Synthetic oligonucleotide
  Sense strand starting at position 3869 of SEQ ID NO: 1241975
gguuuagcaauugacaagu

SEQ ID NO: 1314063 - RNA, 19 nt, Artificial Sequence
  Description of Artificial Sequence: Synthetic oligonucleotide
  Antisense strand to SEQ ID NO: 1314062
acuugucaauugcuaaacc

SEQ ID NO: 1314064 - RNA, 19 nt, Artificial Sequence
  Description of Artificial Sequence: Synthetic oligonucleotide
  Sense strand starting at position 3879 of SEQ ID NO: 1241975
uugacaaguuagucagagu

SEQ ID NO: 1314065 - RNA, 19 nt, Artificial Sequence
  Description of Artificial Sequence: Synthetic oligonucleotide
  Antisense strand to SEQ ID NO: 1314064
acucugacuaacuugucaa

SEQ ID NO: 1314066 - RNA, 19 nt, Artificial Sequence
  Description of Artificial Sequence: Synthetic oligonucleotide
  Sense strand starting at position 3880 of SEQ ID NO: 1241975
ugacaaguuagucagaguc

SEQ ID NO: 1314067 - RNA, 19 nt, Artificial Sequence
  Description of Artificial Sequence: Synthetic oligonucleotide
  Antisense strand to SEQ ID NO: 1314066
gacucugacuaacuuguca

SEQ ID NO: 1314068 - RNA, 19 nt, Artificial Sequence
  Description of Artificial Sequence: Synthetic oligonucleotide
  Sense strand starting at position 3907 of SEQ ID NO: 1241975
cuggaagggucauugucaa

SEQ ID NO: 1314069 - RNA, 19 nt, Artificial Sequence
  Description of Artificial Sequence: Synthetic oligonucleotide
  Antisense strand to SEQ ID NO: 1314068
uugacaaugacccuuccag

SEQ ID NO: 1314070 - RNA, 19 nt, Artificial Sequence
  Description of Artificial Sequence: Synthetic oligonucleotide
  Sense strand starting at position 3972 of SEQ ID NO: 1241975
ggaggugacuugcccaaca

SEQ ID NO: 1314071 - RNA, 19 nt, Artificial Sequence
  Description of Artificial Sequence: Synthetic oligonucleotide
  Antisense strand to SEQ ID NO: 1314070
uguugggcaagucaccucc

SEQ ID NO: 1314072 - RNA, 19 nt, Artificial Sequence
  Description of Artificial Sequence: Synthetic oligonucleotide
  Sense strand starting at position 3974 of SEQ ID NO: 1241975
aggugacuugcccaacauc

SEQ ID NO: 1314073 - RNA, 19 nt, Artificial Sequence
  Description of Artificial Sequence: Synthetic oligonucleotide
  Antisense strand to SEQ ID NO: 1314072
gauguugggcaagucaccu

SEQ ID NO: 1314074 - RNA, 19 nt, Artificial Sequence
  Description of Artificial Sequence: Synthetic oligonucleotide
  Sense strand starting at position 92 of SEQ ID NO: 1241976
ccaauuugcgacugguauc

SEQ ID NO: 1314075 - RNA, 19 nt, Artificial Sequence
  Description of Artificial Sequence: Synthetic oligonucleotide
  Antisense strand to SEQ ID NO: 1314074
gauaccagucgcaaauugg

SEQ ID NO: 1314076 - RNA, 19 nt, Artificial Sequence
  Description of Artificial Sequence: Synthetic oligonucleotide
  Sense strand starting at position 218 of SEQ ID NO: 1241976
gaaguaggucuauguuuaa

SEQ ID NO: 1314077 - RNA, 19 nt, Artificial Sequence
  Description of Artificial Sequence: Synthetic oligonucleotide
  Antisense strand to SEQ ID NO: 1314076
uuaaacauagaccuacuuc

SEQ ID NO: 1314078 - RNA, 19 nt, Artificial Sequence
  Description of Artificial Sequence: Synthetic oligonucleotide
  Sense strand starting at position 221 of SEQ ID NO: 1241976
guaggucuauguuuaauca

SEQ ID NO: 1314079 - RNA, 19 nt, Artificial Sequence
  Description of Artificial Sequence: Synthetic oligonucleotide
  Antisense strand to SEQ ID NO: 1314078
ugauuaaacauagaccuac

SEQ ID NO: 1314080 - RNA, 19 nt, Artificial Sequence
  Description of Artificial Sequence: Synthetic oligonucleotide
  Sense strand starting at position 510 of SEQ ID NO: 1241976
ugaauaacuugcucaagag

SEQ ID NO: 1314081 - RNA, 19 nt, Artificial Sequence
  Description of Artificial Sequence: Synthetic oligonucleotide
  Antisense strand to SEQ ID NO: 1314080
cucuugagcaaguuauuca

SEQ ID NO: 1314082 - RNA, 19 nt, Artificial Sequence
  Description of Artificial Sequence: Synthetic oligonucleotide
  Sense strand starting at position 520 of SEQ ID NO: 1241976
gcucaagaguccuuacuua

SEQ ID NO: 1314083 - RNA, 19 nt, Artificial Sequence
  Description of Artificial Sequence: Synthetic oligonucleotide
  Antisense strand to SEQ ID NO: 1314082
uaaguaaggacucuugagc

SEQ ID NO: 1314084 - RNA, 19 nt, Artificial Sequence
  Description of Artificial Sequence: Synthetic oligonucleotide
  Sense strand starting at position 886 of SEQ ID NO: 1241976
ccuguccugcuguugcaaa

SEQ ID NO: 1314085 - RNA, 19 nt, Artificial Sequence
  Description of Artificial Sequence: Synthetic oligonucleotide
  Antisense strand to SEQ ID NO: 1314084
uuugcaacagcaggacagg

SEQ ID NO: 1314086 - RNA, 19 nt, Artificial Sequence
  Description of Artificial Sequence: Synthetic oligonucleotide
  Sense strand starting at position 944 of SEQ ID NO: 1241976
cgguucuaggcguaaccau

SEQ ID NO: 1314087 - RNA, 19 nt, Artificial Sequence
  Description of Artificial Sequence: Synthetic oligonucleotide
  Antisense strand to SEQ ID NO: 1314086
augguuacgccuagaaccg

SEQ ID NO: 1314088 - RNA, 19 nt, Artificial Sequence
  Description of Artificial Sequence: Synthetic oligonucleotide
  Sense strand starting at position 1131 of SEQ ID NO: 1241976
ggugguaaccaggaacagu

SEQ ID NO: 1314089 - RNA, 19 nt, Artificial Sequence
  Description of Artificial Sequence: Synthetic oligonucleotide
  Antisense strand to SEQ ID NO: 1314088
acuguuccugguuaccacc

SEQ ID NO: 1314090 - RNA, 19 nt, Artificial Sequence
  Description of Artificial Sequence: Synthetic oligonucleotide
  Sense strand starting at position 1333 of SEQ ID NO: 1241976
gugggauuccgggaagcca

SEQ ID NO: 1314091 - RNA, 19 nt, Artificial Sequence
  Description of Artificial Sequence: Synthetic oligonucleotide
  Antisense strand to SEQ ID NO: 1314090
uggcuucccggaaucccac

SEQ ID NO: 1314092 - RNA, 19 nt, Artificial Sequence
  Description of Artificial Sequence: Synthetic oligonucleotide
  Sense strand starting at position 1575 of SEQ ID NO: 1241976
ggagcucucgggcggagau

SEQ ID NO: 1314093 - RNA, 19 nt, Artificial Sequence
  Description of Artificial Sequence: Synthetic oligonucleotide
  Antisense strand to SEQ ID NO: 1314092
aucuccgcccgagagcucc

SEQ ID NO: 1314094 - RNA, 19 nt, Artificial Sequence
  Description of Artificial Sequence: Synthetic oligonucleotide
  Sense strand starting at position 2138 of SEQ ID NO: 1241976
gggacuaagucgccuuagu

SEQ ID NO: 1314095 - RNA, 19 nt, Artificial Sequence
  Description of Artificial Sequence: Synthetic oligonucleotide
  Antisense strand to SEQ ID NO: 1314094
acuaaggcgacuuaguccc

SEQ ID NO: 1314096 - RNA, 19 nt, Artificial Sequence
  Description of Artificial Sequence: Synthetic oligonucleotide
  Sense strand starting at position 2359 of SEQ ID NO: 1241976
ucgucucagacuugcuaga

SEQ ID NO: 1314097 - RNA, 19 nt, Artificial Sequence
  Description of Artificial Sequence: Synthetic oligonucleotide
  Antisense strand to SEQ ID NO: 1314096
ucuagcaagucugagacga

SEQ ID NO: 1314098 - RNA, 19 nt, Artificial Sequence
  Description of Artificial Sequence: Synthetic oligonucleotide
  Sense strand starting at position 2361 of SEQ ID NO: 1241976
gucucagacuugcuagauc

SEQ ID NO: 1314099 - RNA, 19 nt, Artificial Sequence
  Description of Artificial Sequence: Synthetic oligonucleotide
  Antisense strand to SEQ ID NO: 1314098
gaucuagcaagucugagac

SEQ ID NO: 1314100 - RNA, 19 nt, Artificial Sequence
  Description of Artificial Sequence: Synthetic oligonucleotide
  Sense strand starting at position 2364 of SEQ ID NO: 1241976
ucagacuugcuagaucuga

SEQ ID NO: 1314101 - RNA, 19 nt, Artificial Sequence
  Description of Artificial Sequence: Synthetic oligonucleotide
  Antisense strand to SEQ ID NO: 1314100
ucagaucuagcaagucuga

SEQ ID NO: 1314102 - RNA, 19 nt, Artificial Sequence
  Description of Artificial Sequence: Synthetic oligonucleotide
  Sense strand starting at position 2399 of SEQ ID NO: 1241976
caccaagggugcucacauu

SEQ ID NO: 1314103 - RNA, 19 nt, Artificial Sequence
  Description of Artificial Sequence: Synthetic oligonucleotide
  Antisense strand to SEQ ID NO: 1314102
aaugugagcacccuuggug

SEQ ID NO: 1314104 - RNA, 19 nt, Artificial Sequence
  Description of Artificial Sequence: Synthetic oligonucleotide
  Sense strand starting at position 2409 of SEQ ID NO: 1241976
gcucacauucuccaggaaa

SEQ ID NO: 1314105 - RNA, 19 nt, Artificial Sequence
  Description of Artificial Sequence: Synthetic oligonucleotide
  Antisense strand to SEQ ID NO: 1314104
uuuccuggagaaugugagc

SEQ ID NO: 1314106 - RNA, 19 nt, Artificial Sequence
  Description of Artificial Sequence: Synthetic oligonucleotide
  Sense strand starting at position 2548 of SEQ ID NO: 1241976
ggugucgauuacuuuggau

SEQ ID NO: 1314107 - RNA, 19 nt, Artificial Sequence
  Description of Artificial Sequence: Synthetic oligonucleotide
  Antisense strand to SEQ ID NO: 1314106
auccaaaguaaucgacacc

SEQ ID NO: 1314108 - RNA, 19 nt, Artificial Sequence
  Description of Artificial Sequence: Synthetic oligonucleotide
  Sense strand starting at position 2550 of SEQ ID NO: 1241976
ugucgauuacuuuggauua

SEQ ID NO: 1314109 - RNA, 19 nt, Artificial Sequence
  Description of Artificial Sequence: Synthetic oligonucleotide
  Antisense strand to SEQ ID NO: 1314108
uaauccaaaguaaucgaca

SEQ ID NO: 1314110 - RNA, 19 nt, Artificial Sequence
  Description of Artificial Sequence: Synthetic oligonucleotide
  Sense strand starting at position 2570 of SEQ ID NO: 1241976
uuggauacggccuacuuaa

SEQ ID NO: 1314111 - RNA, 19 nt, Artificial Sequence
  Description of Artificial Sequence: Synthetic oligonucleotide
  Antisense strand to SEQ ID NO: 1314110
uuaaguaggccguauccaa

SEQ ID NO: 1314112 - RNA, 19 nt, Artificial Sequence
  Description of Artificial Sequence: Synthetic oligonucleotide
  Sense strand starting at position 2597 of SEQ ID NO: 1241976
guggcucuccaccauugau

SEQ ID NO: 1314113 - RNA, 19 nt, Artificial Sequence
  Description of Artificial Sequence: Synthetic oligonucleotide
  Antisense strand to SEQ ID NO: 1314112
aucaaugguggagagccac

SEQ ID NO: 1314114 - RNA, 19 nt, Artificial Sequence
  Description of Artificial Sequence: Synthetic oligonucleotide
  Sense strand starting at position 2617 of SEQ ID NO: 1241976
gcuguugacagaugagguu

SEQ ID NO: 1314115 - RNA, 19 nt, Artificial Sequence
  Description of Artificial Sequence: Synthetic oligonucleotide
  Antisense strand to SEQ ID NO: 1314114
aaccucaucugucaacagc

SEQ ID NO: 1314116 - RNA, 19 nt, Artificial Sequence
  Description of Artificial Sequence: Synthetic oligonucleotide
  Sense strand starting at position 2633 of SEQ ID NO: 1241976
guuaauaaagcuugauuac

SEQ ID NO: 1314117 - RNA, 19 nt, Artificial Sequence
  Description of Artificial Sequence: Synthetic oligonucleotide
  Antisense strand to SEQ ID NO: 1314116
guaaucaagcuuuauuaac

SEQ ID NO: 1314118 - RNA, 19 nt, Artificial Sequence
  Description of Artificial Sequence: Synthetic oligonucleotide
  Sense strand starting at position 2677 of SEQ ID NO: 1241976
auucuauaguaccugugaa

SEQ ID NO: 1314119 - RNA, 19 nt, Artificial Sequence
  Description of Artificial Sequence: Synthetic oligonucleotide
  Antisense strand to SEQ ID NO: 1314118
uucacagguacuauagaau

SEQ ID NO: 1314120 - RNA, 19 nt, Artificial Sequence
  Description of Artificial Sequence: Synthetic oligonucleotide
  Sense strand starting at position 2689 of SEQ ID NO: 1241976
cugugaaguacuuaguaua

SEQ ID NO: 1314121 - RNA, 19 nt, Artificial Sequence
  Description of Artificial Sequence: Synthetic oligonucleotide
  Antisense strand to SEQ ID NO: 1314120
uauacuaaguacuucacag

SEQ ID NO: 1314122 - RNA, 19 nt, Artificial Sequence
  Description of Artificial Sequence: Synthetic oligonucleotide
  Sense strand starting at position 2700 of SEQ ID NO: 1241976
uuaguauagugcuugaaag

SEQ ID NO: 1314123 - RNA, 19 nt, Artificial Sequence
  Description of Artificial Sequence: Synthetic oligonucleotide
  Antisense strand to SEQ ID NO: 1314122
cuuucaagcacuauacuaa

SEQ ID NO: 1314124 - RNA, 19 nt, Artificial Sequence
  Description of Artificial Sequence: Synthetic oligonucleotide
  Sense strand starting at position 2701 of SEQ ID NO: 1241976
uaguauagugcuugaaagu

SEQ ID NO: 1314125 - RNA, 19 nt, Artificial Sequence
  Description of Artificial Sequence: Synthetic oligonucleotide
  Antisense strand to SEQ ID NO: 1314124
acuuucaagcacuauacua

SEQ ID NO: 1314126 - RNA, 19 nt, Artificial Sequence
  Description of Artificial Sequence: Synthetic oligonucleotide
  Sense strand starting at position 2702 of SEQ ID NO: 1241976
aguauagugcuugaaagua

SEQ ID NO: 1314127 - RNA, 19 nt, Artificial Sequence
  Description of Artificial Sequence: Synthetic oligonucleotide
  Antisense strand to SEQ ID NO: 1314126
uacuuucaagcacuauacu

SEQ ID NO: 1314128 - RNA, 19 nt, Artificial Sequence
  Description of Artificial Sequence: Synthetic oligonucleotide
  Sense strand starting at position 3104 of SEQ ID NO: 1241976
ucagcuugagcucagaagu

SEQ ID NO: 1314129 - RNA, 19 nt, Artificial Sequence
  Description of Artificial Sequence: Synthetic oligonucleotide
  Antisense strand to SEQ ID NO: 1314128
acuucugagcucaagcuga

SEQ ID NO: 1314130 - RNA, 19 nt, Artificial Sequence
  Description of Artificial Sequence: Synthetic oligonucleotide
  Sense strand starting at position 3343 of SEQ ID NO: 1241976
aaucgaguugcauacuuua

SEQ ID NO: 1314131 - RNA, 19 nt, Artificial Sequence
  Description of Artificial Sequence: Synthetic oligonucleotide
  Antisense strand to SEQ ID NO: 1314130
uaaaguaugcaacucgauu

SEQ ID NO: 1314132 - RNA, 19 nt, Artificial Sequence
  Description of Artificial Sequence: Synthetic oligonucleotide
  Sense strand starting at position 3346 of SEQ ID NO: 1241976
cgaguugcauacuuuaaau

SEQ ID NO: 1314133 - RNA, 19 nt, Artificial Sequence
  Description of Artificial Sequence: Synthetic oligonucleotide
  Antisense strand to SEQ ID NO: 1314132
auuuaaaguaugcaacucg

SEQ ID NO: 1314134 - RNA, 19 nt, Artificial Sequence
  Description of Artificial Sequence: Synthetic oligonucleotide
  Sense strand starting at position 3368 of SEQ ID NO: 1241976
uguaguccucuguauguca

SEQ ID NO: 1314135 - RNA, 19 nt, Artificial Sequence
  Description of Artificial Sequence: Synthetic oligonucleotide
  Antisense strand to SEQ ID NO: 1314134
ugacauacagaggacuaca

SEQ ID NO: 1314136 - RNA, 19 nt, Artificial Sequence
  Description of Artificial Sequence: Synthetic oligonucleotide
  Sense strand starting at position 3375 of SEQ ID NO: 1241976
cucuguaugucaguuaaag

SEQ ID NO: 1314137 - RNA, 19 nt, Artificial Sequence
  Description of Artificial Sequence: Synthetic oligonucleotide
  Antisense strand to SEQ ID NO: 1314136
cuuuaacugacauacagag

SEQ ID NO: 1314138 - RNA, 19 nt, Artificial Sequence
  Description of Artificial Sequence: Synthetic oligonucleotide
  Sense strand starting at position 3377 of SEQ ID NO: 1241976
cuguaugucaguuaaagcu

SEQ ID NO: 1314139 - RNA, 19 nt, Artificial Sequence
  Description of Artificial Sequence: Synthetic oligonucleotide
  Antisense strand to SEQ ID NO: 1314138
agcuuuaacugacauacag

SEQ ID NO: 1314140 - RNA, 19 nt, Artificial Sequence
  Description of Artificial Sequence: Synthetic oligonucleotide
  Sense strand starting at position 3681 of SEQ ID NO: 1241976
gccauugugcccuaccuua

SEQ ID NO: 1314141 - RNA, 19 nt, Artificial Sequence
  Description of Artificial Sequence: Synthetic oligonucleotide
  Antisense strand to SEQ ID NO: 1314140
uaagguagggcacaauggc

SEQ ID NO: 1314142 - RNA, 19 nt, Artificial Sequence
  Description of Artificial Sequence: Synthetic oligonucleotide
  Sense strand starting at position 3801 of SEQ ID NO: 1241976
gucaauuccucuuuaagga

SEQ ID NO: 1314143 - RNA, 19 nt, Artificial Sequence
  Description of Artificial Sequence: Synthetic oligonucleotide
  Antisense strand to SEQ ID NO: 1314142
uccuuaaagaggaauugac

SEQ ID NO: 1314144 - RNA, 19 nt, Artificial Sequence
  Description of Artificial Sequence: Synthetic oligonucleotide
  Sense strand starting at position 3814 of SEQ ID NO: 1241976
uaaggaguagcuuggcaua

SEQ ID NO: 1314145 - RNA, 19 nt, Artificial Sequence
  Description of Artificial Sequence: Synthetic oligonucleotide
  Antisense strand to SEQ ID NO: 1314144
uaugccaagcuacuccuua

SEQ ID NO: 1314146 - RNA, 19 nt, Artificial Sequence
  Description of Artificial Sequence: Synthetic oligonucleotide
  Sense strand starting at position 3819 of SEQ ID NO: 1241976
aguagcuuggcauaucaaa

SEQ ID NO: 1314147 - RNA, 19 nt, Artificial Sequence
  Description of Artificial Sequence: Synthetic oligonucleotide
  Antisense strand to SEQ ID NO: 1314146
uuugauaugccaagcuacu

SEQ ID NO: 1314148 - RNA, 19 nt, Artificial Sequence
  Description of Artificial Sequence: Synthetic oligonucleotide
  Sense strand starting at position 3869 of SEQ ID NO: 1241976
guugguuauacauguauau

SEQ ID NO: 1314149 - RNA, 19 nt, Artificial Sequence
  Description of Artificial Sequence: Synthetic oligonucleotide
  Antisense strand to SEQ ID NO: 1314148
auauacauguauaaccaac

SEQ ID NO: 1314150 - RNA, 19 nt, Artificial Sequence
  Description of Artificial Sequence: Synthetic oligonucleotide
  Sense strand starting at position 3945 of SEQ ID NO: 1241976
auguuauauaguugcaugu

SEQ ID NO: 1314151 - RNA, 19 nt, Artificial Sequence
  Description of Artificial Sequence: Synthetic oligonucleotide
  Antisense strand to SEQ ID NO: 1314150
acaugcaacuauauaacau

SEQ ID NO: 1314152 - RNA, 19 nt, Artificial Sequence
  Description of Artificial Sequence: Synthetic oligonucleotide
  Sense strand starting at position 3949 of SEQ ID NO: 1241976
uauauaguugcauguagca

SEQ ID NO: 1314153 - RNA, 19 nt, Artificial Sequence
  Description of Artificial Sequence: Synthetic oligonucleotide
  Antisense strand to SEQ ID NO: 1314152
ugcuacaugcaacuauaua

SEQ ID NO: 1314154 - RNA, 19 nt, Artificial Sequence
  Description of Artificial Sequence: Synthetic oligonucleotide
  Sense strand starting at position 93 of SEQ ID NO: 1241977
uaagucaggacguguauuu

SEQ ID NO: 1314155 - RNA, 19 nt, Artificial Sequence
  Description of Artificial Sequence: Synthetic oligonucleotide
  Antisense strand to SEQ ID NO: 1314154
aaauacacguccugacuua

SEQ ID NO: 1314156 - RNA, 19 nt, Artificial Sequence
  Description of Artificial Sequence: Synthetic oligonucleotide
  Sense strand starting at position 336 of SEQ ID NO: 1241977
uuaccucuguccugggaau

SEQ ID NO: 1314157 - RNA, 19 nt, Artificial Sequence
  Description of Artificial Sequence: Synthetic oligonucleotide
  Antisense strand to SEQ ID NO: 1314156
auucccaggacagagguaa

SEQ ID NO: 1314158 - RNA, 19 nt, Artificial Sequence
  Description of Artificial Sequence: Synthetic oligonucleotide
  Sense strand starting at position 338 of SEQ ID NO: 1241977
accucuguccugggaauca

SEQ ID NO: 1314159 - RNA, 19 nt, Artificial Sequence
  Description of Artificial Sequence: Synthetic oligonucleotide
  Antisense strand to SEQ ID NO: 1314158
ugauucccaggacagaggu

SEQ ID NO: 1314160 - RNA, 19 nt, Artificial Sequence
  Description of Artificial Sequence: Synthetic oligonucleotide
  Sense strand starting at position 349 of SEQ ID NO: 1241977
gggaaucacccugacgcua

SEQ ID NO: 1314161 - RNA, 19 nt, Artificial Sequence
  Description of Artificial Sequence: Synthetic oligonucleotide
  Antisense strand to SEQ ID NO: 1314160
uagcgucagggugauuccc

SEQ ID NO: 1314162 - RNA, 19 nt, Artificial Sequence
  Description of Artificial Sequence: Synthetic oligonucleotide
  Sense strand starting at position 401 of SEQ ID NO: 1241977
auuggacauguguaaacuu

SEQ ID NO: 1314163 - RNA, 19 nt, Artificial Sequence
  Description of Artificial Sequence: Synthetic oligonucleotide
  Antisense strand to SEQ ID NO: 1314162
aaguuuacacauguccaau

SEQ ID NO: 1314164 - RNA, 19 nt, Artificial Sequence
  Description of Artificial Sequence: Synthetic oligonucleotide
  Sense strand starting at position 410 of SEQ ID NO: 1241977
guguaaacuuagccaccua

SEQ ID NO: 1314165 - RNA, 19 nt, Artificial Sequence
  Description of Artificial Sequence: Synthetic oligonucleotide
  Antisense strand to SEQ ID NO: 1314164
uagguggcuaaguuuacac

SEQ ID NO: 1314166 - RNA, 19 nt, Artificial Sequence
  Description of Artificial Sequence: Synthetic oligonucleotide
  Sense strand starting at position 456 of SEQ ID NO: 1241977
cgguaacucgugcuucuca

SEQ ID NO: 1314167 - RNA, 19 nt, Artificial Sequence
  Description of Artificial Sequence: Synthetic oligonucleotide
  Antisense strand to SEQ ID NO: 1314166
ugagaagcacgaguuaccg

SEQ ID NO: 1314168 - RNA, 19 nt, Artificial Sequence
  Description of Artificial Sequence: Synthetic oligonucleotide
  Sense strand starting at position 457 of SEQ ID NO: 1241977
gguaacucgugcuucucau

SEQ ID NO: 1314169 - RNA, 19 nt, Artificial Sequence
  Description of Artificial Sequence: Synthetic oligonucleotide
  Antisense strand to SEQ ID NO: 1314168
augagaagcacgaguuacc

SEQ ID NO: 1314170 - RNA, 19 nt, Artificial Sequence
  Description of Artificial Sequence: Synthetic oligonucleotide
  Sense strand starting at position 461 of SEQ ID NO: 1241977
acucgugcuucucauccua

SEQ ID NO: 1314171 - RNA, 19 nt, Artificial Sequence
  Description of Artificial Sequence: Synthetic oligonucleotide
  Antisense strand to SEQ ID NO: 1314170
uaggaugagaagcacgagu

SEQ ID NO: 1314172 - RNA, 19 nt, Artificial Sequence
  Description of Artificial Sequence: Synthetic oligonucleotide
  Sense strand starting at position 517 of SEQ ID NO: 1241977
auaauauuacggcauguca

SEQ ID NO: 1314173 - RNA, 19 nt, Artificial Sequence
  Description of Artificial Sequence: Synthetic oligonucleotide
  Antisense strand to SEQ ID NO: 1314172
ugacaugccguaauauuau

SEQ ID NO: 1314174 - RNA, 19 nt, Artificial Sequence
  Description of Artificial Sequence: Synthetic oligonucleotide
  Sense strand starting at position 524 of SEQ ID NO: 1241977
uacggcaugucauggaaau

SEQ ID NO: 1314175 - RNA, 19 nt, Artificial Sequence
  Description of Artificial Sequence: Synthetic oligonucleotide
  Antisense strand to SEQ ID NO: 1314174
auuuccaugacaugccgua

SEQ ID NO: 1314176 - RNA, 19 nt, Artificial Sequence
  Description of Artificial Sequence: Synthetic oligonucleotide
  Sense strand starting at position 525 of SEQ ID NO: 1241977
acggcaugucauggaaauu

SEQ ID NO: 1314177 - RNA, 19 nt, Artificial Sequence
  Description of Artificial Sequence: Synthetic oligonucleotide
  Antisense strand to SEQ ID NO: 1314176
aauuuccaugacaugccgu

SEQ ID NO: 1314178 - RNA, 19 nt, Artificial Sequence
  Description of Artificial Sequence: Synthetic oligonucleotide
  Sense strand starting at position 526 of SEQ ID NO: 1241977
cggcaugucauggaaauua

SEQ ID NO: 1314179 - RNA, 19 nt, Artificial Sequence
  Description of Artificial Sequence: Synthetic oligonucleotide
  Antisense strand to SEQ ID NO: 1314178
uaauuuccaugacaugccg

SEQ ID NO: 1314180 - RNA, 19 nt, Artificial Sequence
  Description of Artificial Sequence: Synthetic oligonucleotide
  Sense strand starting at position 656 of SEQ ID NO: 1241977
gccuuuaacugcucuaggu

SEQ ID NO: 1314181 - RNA, 19 nt, Artificial Sequence
  Description of Artificial Sequence: Synthetic oligonucleotide
  Antisense strand to SEQ ID NO: 1314180
accuagagcaguuaaaggc

SEQ ID NO: 1314182 - RNA, 19 nt, Artificial Sequence
  Description of Artificial Sequence: Synthetic oligonucleotide
  Sense strand starting at position 658 of SEQ ID NO: 1241977
cuuuaacugcucuagguga

SEQ ID NO: 1314183 - RNA, 19 nt, Artificial Sequence
  Description of Artificial Sequence: Synthetic oligonucleotide
  Antisense strand to SEQ ID NO: 1314182
ucaccuagagcaguuaaag

SEQ ID NO: 1314184 - RNA, 19 nt, Artificial Sequence
  Description of Artificial Sequence: Synthetic oligonucleotide
  Sense strand starting at position 759 of SEQ ID NO: 1241977
guucgagaauaucuagaua

SEQ ID NO: 1314185 - RNA, 19 nt, Artificial Sequence
  Description of Artificial Sequence: Synthetic oligonucleotide
  Antisense strand to SEQ ID NO: 1314184
uaucuagauauucucgaac

SEQ ID NO: 1314186 - RNA, 19 nt, Artificial Sequence
  Description of Artificial Sequence: Synthetic oligonucleotide
  Sense strand starting at position 904 of SEQ ID NO: 1241977
uuaggccuuguauauuaaa

SEQ ID NO: 1314187 - RNA, 19 nt, Artificial Sequence
  Description of Artificial Sequence: Synthetic oligonucleotide
  Antisense strand to SEQ ID NO: 1314186
uuuaauauacaaggccuaa

SEQ ID NO: 1314188 - RNA, 19 nt, Artificial Sequence
  Description of Artificial Sequence: Synthetic oligonucleotide
  Sense strand starting at position 1595 of SEQ ID NO: 1241977
ucaguuucccuaugggaga

SEQ ID NO: 1314189 - RNA, 19 nt, Artificial Sequence
  Description of Artificial Sequence: Synthetic oligonucleotide
  Antisense strand to SEQ ID NO: 1314188
ucucccauagggaaacuga

SEQ ID NO: 1314190 - RNA, 19 nt, Artificial Sequence
  Description of Artificial Sequence: Synthetic oligonucleotide
  Sense strand starting at position 1596 of SEQ ID NO: 1241977
caguuucccuaugggagaa

SEQ ID NO: 1314191 - RNA, 19 nt, Artificial Sequence
  Description of Artificial Sequence: Synthetic oligonucleotide
  Antisense strand to SEQ ID NO: 1314190
uucucccauagggaaacug

SEQ ID NO: 1314192 - RNA, 19 nt, Artificial Sequence
  Description of Artificial Sequence: Synthetic oligonucleotide
  Sense strand starting at position 1616 of SEQ ID NO: 1241977
gugcacaugucccucaauu

SEQ ID NO: 1314193 - RNA, 19 nt, Artificial Sequence
  Description of Artificial Sequence: Synthetic oligonucleotide
  Antisense strand to SEQ ID NO: 1314192
aauugagggacaugugcac

SEQ ID NO: 1314194 - RNA, 19 nt, Artificial Sequence
  Description of Artificial Sequence: Synthetic oligonucleotide
  Sense strand starting at position 2073 of SEQ ID NO: 1241977
acccuugugcccggaggaa

SEQ ID NO: 1314195 - RNA, 19 nt, Artificial Sequence
  Description of Artificial Sequence: Synthetic oligonucleotide
  Antisense strand to SEQ ID NO: 1314194
uuccuccgggcacaagggu

SEQ ID NO: 1314196 - RNA, 19 nt, Artificial Sequence
  Description of Artificial Sequence: Synthetic oligonucleotide
  Sense strand starting at position 2148 of SEQ ID NO: 1241977
ccuggcaaucucugugagu

SEQ ID NO: 1314197 - RNA, 19 nt, Artificial Sequence
  Description of Artificial Sequence: Synthetic oligonucleotide
  Antisense strand to SEQ ID NO: 1314196
acucacagagauugccagg

SEQ ID NO: 1314198 - RNA, 19 nt, Artificial Sequence
  Description of Artificial Sequence: Synthetic oligonucleotide
  Sense strand starting at position 2237 of SEQ ID NO: 1241977
uugauuagaugcugagaaa

SEQ ID NO: 1314199 - RNA, 19 nt, Artificial Sequence
  Description of Artificial Sequence: Synthetic oligonucleotide
  Antisense strand to SEQ ID NO: 1314198
uuucucagcaucuaaucaa

SEQ ID NO: 1314200 - RNA, 19 nt, Artificial Sequence
  Description of Artificial Sequence: Synthetic oligonucleotide
  Sense strand starting at position 2240 of SEQ ID NO: 1241977
auuagaugcugagaaacuu

SEQ ID NO: 1314201 - RNA, 19 nt, Artificial Sequence
  Description of Artificial Sequence: Synthetic oligonucleotide
  Antisense strand to SEQ ID NO: 1314200
aaguuucucagcaucuaau

SEQ ID NO: 1314202 - RNA, 19 nt, Artificial Sequence
  Description of Artificial Sequence: Synthetic oligonucleotide
  Sense strand starting at position 2249 of SEQ ID NO: 1241977
ugagaaacuuccuacucug

SEQ ID NO: 1314203 - RNA, 19 nt, Artificial Sequence
  Description of Artificial Sequence: Synthetic oligonucleotide
  Antisense strand to SEQ ID NO: 1314202
cagaguaggaaguuucuca

SEQ ID NO: 1314204 - RNA, 19 nt, Artificial Sequence
  Description of Artificial Sequence: Synthetic oligonucleotide
  Sense strand starting at position 2290 of SEQ ID NO: 1241977
cuugaagacugagauugua

SEQ ID NO: 1314205 - RNA, 19 nt, Artificial Sequence
  Description of Artificial Sequence: Synthetic oligonucleotide
  Antisense strand to SEQ ID NO: 1314204
uacaaucucagucuucaag

SEQ ID NO: 1314206 - RNA, 19 nt, Artificial Sequence
  Description of Artificial Sequence: Synthetic oligonucleotide
  Sense strand starting at position 2298 of SEQ ID NO: 1241977
cugagauuguauugaucau

SEQ ID NO: 1314207 - RNA, 19 nt, Artificial Sequence
  Description of Artificial Sequence: Synthetic oligonucleotide
  Antisense strand to SEQ ID NO: 1314206
augaucaauacaaucucag

SEQ ID NO: 1314208 - RNA, 19 nt, Artificial Sequence
  Description of Artificial Sequence: Synthetic oligonucleotide
  Sense strand starting at position 2304 of SEQ ID NO: 1241977
uuguauugaucaucucuga

SEQ ID NO: 1314209 - RNA, 19 nt, Artificial Sequence
  Description of Artificial Sequence: Synthetic oligonucleotide
  Antisense strand to SEQ ID NO: 1314208
ucagagaugaucaauacaa

SEQ ID NO: 1314210 - RNA, 19 nt, Artificial Sequence
  Description of Artificial Sequence: Synthetic oligonucleotide
  Sense strand starting at position 2329 of SEQ ID NO: 1241977
gggaauuugccuugcuagu

SEQ ID NO: 1314211 - RNA, 19 nt, Artificial Sequence
  Description of Artificial Sequence: Synthetic oligonucleotide
  Antisense strand to SEQ ID NO: 1314210
acuagcaaggcaaauuccc

SEQ ID NO: 1314212 - RNA, 19 nt, Artificial Sequence
  Description of Artificial Sequence: Synthetic oligonucleotide
  Sense strand starting at position 2331 of SEQ ID NO: 1241977
gaauuugccuugcuaguuu

SEQ ID NO: 1314213 - RNA, 19 nt, Artificial Sequence
  Description of Artificial Sequence: Synthetic oligonucleotide
  Antisense strand to SEQ ID NO: 1314212
aaacuagcaaggcaaauuc

SEQ ID NO: 1314214 - RNA, 19 nt, Artificial Sequence
  Description of Artificial Sequence: Synthetic oligonucleotide
  Sense strand starting at position 2480 of SEQ ID NO: 1241977
cccuuaggauggcuauaau

SEQ ID NO: 1314215 - RNA, 19 nt, Artificial Sequence
  Description of Artificial Sequence: Synthetic oligonucleotide
  Antisense strand to SEQ ID NO: 1314214
auuauagccauccuaaggg

SEQ ID NO: 1314216 - RNA, 19 nt, Artificial Sequence
  Description of Artificial Sequence: Synthetic oligonucleotide
  Sense strand starting at position 3465 of SEQ ID NO: 1241977
uggauagcaccuggagaua

SEQ ID NO: 1314217 - RNA, 19 nt, Artificial Sequence
  Description of Artificial Sequence: Synthetic oligonucleotide
  Antisense strand to SEQ ID NO: 1314216
uaucuccaggugcuaucca

SEQ ID NO: 1314218 - RNA, 19 nt, Artificial Sequence
  Description of Artificial Sequence: Synthetic oligonucleotide
  Sense strand starting at position 71 of SEQ ID NO: 1241978
aagaacguaugcuucugaa

SEQ ID NO: 1314219 - RNA, 19 nt, Artificial Sequence
  Description of Artificial Sequence: Synthetic oligonucleotide
  Antisense strand to SEQ ID NO: 1314218
uucagaagcauacguucuu

SEQ ID NO: 1314220 - RNA, 19 nt, Artificial Sequence
  Description of Artificial Sequence: Synthetic oligonucleotide
  Sense strand starting at position 223 of SEQ ID NO: 1241978
gcaguuuacuaaucuacag

SEQ ID NO: 1314221 - RNA, 19 nt, Artificial Sequence
  Description of Artificial Sequence: Synthetic oligonucleotide
  Antisense strand to SEQ ID NO: 1314220
cuguagauuaguaaacugc

SEQ ID NO: 1314222 - RNA, 19 nt, Artificial Sequence
  Description of Artificial Sequence: Synthetic oligonucleotide
  Sense strand starting at position 719 of SEQ ID NO: 1241978
agacaaaucuacuuuggua

SEQ ID NO: 1314223 - RNA, 19 nt, Artificial Sequence
  Description of Artificial Sequence: Synthetic oligonucleotide
  Antisense strand to SEQ ID NO: 1314222
uaccaaaguagauuugucu

SEQ ID NO: 1314224 - RNA, 19 nt, Artificial Sequence
  Description of Artificial Sequence: Synthetic oligonucleotide
  Sense strand starting at position 721 of SEQ ID NO: 1241978
acaaaucuacuuugguaga

SEQ ID NO: 1314225 - RNA, 19 nt, Artificial Sequence
  Description of Artificial Sequence: Synthetic oligonucleotide
  Antisense strand to SEQ ID NO: 1314224
ucuaccaaaguagauuugu

SEQ ID NO: 1314226 - RNA, 19 nt, Artificial Sequence
  Description of Artificial Sequence: Synthetic oligonucleotide
  Sense strand starting at position 892 of SEQ ID NO: 1241978
aguguuaacucaucauuga

SEQ ID NO: 1314227 - RNA, 19 nt, Artificial Sequence
  Description of Artificial Sequence: Synthetic oligonucleotide
  Antisense strand to SEQ ID NO: 1314226
ucaaugaugaguuaacacu

SEQ ID NO: 1314228 - RNA, 19 nt, Artificial Sequence
  Description of Artificial Sequence: Synthetic oligonucleotide
  Sense strand starting at position 893 of SEQ ID NO: 1241978
guguuaacucaucauugac

SEQ ID NO: 1314229 - RNA, 19 nt, Artificial Sequence
  Description of Artificial Sequence: Synthetic oligonucleotide
  Antisense strand to SEQ ID NO: 1314228
gucaaugaugaguuaacac

SEQ ID NO: 1314230 - RNA, 19 nt, Artificial Sequence
  Description of Artificial Sequence: Synthetic oligonucleotide
  Sense strand starting at position 952 of SEQ ID NO: 1241978
guguaugaugcccagcaau

SEQ ID NO: 1314231 - RNA, 19 nt, Artificial Sequence
  Description of Artificial Sequence: Synthetic oligonucleotide
  Antisense strand to SEQ ID NO: 1314230
auugcugggcaucauacac

SEQ ID NO: 1314232 - RNA, 19 nt, Artificial Sequence
  Description of Artificial Sequence: Synthetic oligonucleotide
  Sense strand starting at position 1096 of SEQ ID NO: 1241978
cugagagcugguuagccaa

SEQ ID NO: 1314233 - RNA, 19 nt, Artificial Sequence
  Description of Artificial Sequence: Synthetic oligonucleotide
  Antisense strand to SEQ ID NO: 1314232
uuggcuaaccagcucucag

SEQ ID NO: 1314234 - RNA, 19 nt, Artificial Sequence
  Description of Artificial Sequence: Synthetic oligonucleotide
  Sense strand starting at position 1158 of SEQ ID NO: 1241978
uccacacauucgcugacaa

SEQ ID NO: 1314235 - RNA, 19 nt, Artificial Sequence
  Description of Artificial Sequence: Synthetic oligonucleotide
  Antisense strand to SEQ ID NO: 1314234
uugucagcgaaugugugga

SEQ ID NO: 1314236 - RNA, 19 nt, Artificial Sequence
  Description of Artificial Sequence: Synthetic oligonucleotide
  Sense strand starting at position 1245 of SEQ ID NO: 1241978
acccuuguggccuagaaac

SEQ ID NO: 1314237 - RNA, 19 nt, Artificial Sequence
  Description of Artificial Sequence: Synthetic oligonucleotide
  Antisense strand to SEQ ID NO: 1314236
guuucuaggccacaagggu

SEQ ID NO: 1314238 - RNA, 19 nt, Artificial Sequence
  Description of Artificial Sequence: Synthetic oligonucleotide
  Sense strand starting at position 2345 of SEQ ID NO: 1241978
auacuaauaccggguaauu

SEQ ID NO: 1314239 - RNA, 19 nt, Artificial Sequence
  Description of Artificial Sequence: Synthetic oligonucleotide
  Antisense strand to SEQ ID NO: 1314238
aauuacccgguauuaguau

SEQ ID NO: 1314240 - RNA, 19 nt, Artificial Sequence
  Description of Artificial Sequence: Synthetic oligonucleotide
  Sense strand starting at position 2387 of SEQ ID NO: 1241978
gcuaucuccaaacgaggua

SEQ ID NO: 1314241 - RNA, 19 nt, Artificial Sequence
  Description of Artificial Sequence: Synthetic oligonucleotide
  Antisense strand to SEQ ID NO: 1314240
uaccucguuuggagauagc

SEQ ID NO: 1314242 - RNA, 19 nt, Artificial Sequence
  Description of Artificial Sequence: Synthetic oligonucleotide
  Sense strand starting at position 2881 of SEQ ID NO: 1241978
gucacucaugcuggaguau

SEQ ID NO: 1314243 - RNA, 19 nt, Artificial Sequence
  Description of Artificial Sequence: Synthetic oligonucleotide
  Antisense strand to SEQ ID NO: 1314242
auacuccagcaugagugac

SEQ ID NO: 1314244 - RNA, 19 nt, Artificial Sequence
  Description of Artificial Sequence: Synthetic oligonucleotide
  Sense strand starting at position 2894 of SEQ ID NO: 1241978
gaguauagugcaugaucau

SEQ ID NO: 1314245 - RNA, 19 nt, Artificial Sequence
  Description of Artificial Sequence: Synthetic oligonucleotide
  Antisense strand to SEQ ID NO: 1314244
augaucaugcacuauacuc

SEQ ID NO: 1314246 - RNA, 19 nt, Artificial Sequence
  Description of Artificial Sequence: Synthetic oligonucleotide
  Sense strand starting at position 2928 of SEQ ID NO: 1241978
ccgaacuucugggcacaaa

SEQ ID NO: 1314247 - RNA, 19 nt, Artificial Sequence
  Description of Artificial Sequence: Synthetic oligonucleotide
  Antisense strand to SEQ ID NO: 1314246
uuugugcccagaaguucgg

SEQ ID NO: 1314248 - RNA, 19 nt, Artificial Sequence
  Description of Artificial Sequence: Synthetic oligonucleotide
  Sense strand starting at position 3004 of SEQ ID NO: 1241978
uagagaugggagugucuca

SEQ ID NO: 1314249 - RNA, 19 nt, Artificial Sequence
  Description of Artificial Sequence: Synthetic oligonucleotide
  Antisense strand to SEQ ID NO: 1314248
ugagacacucccaucucua

SEQ ID NO: 1314250 - RNA, 19 nt, Artificial Sequence
  Description of Artificial Sequence: Synthetic oligonucleotide
  Sense strand starting at position 3123 of SEQ ID NO: 1241978
ccuguagcucuugauaaag

SEQ ID NO: 1314251 - RNA, 19 nt, Artificial Sequence
  Description of Artificial Sequence: Synthetic oligonucleotide
  Antisense strand to SEQ ID NO: 1314250
cuuuaucaagagcuacagg

SEQ ID NO: 1314252 - RNA, 19 nt, Artificial Sequence
  Description of Artificial Sequence: Synthetic oligonucleotide
  Sense strand starting at position 3242 of SEQ ID NO: 1241978
uuguauacgugucccauuu

SEQ ID NO: 1314253 - RNA, 19 nt, Artificial Sequence
  Description of Artificial Sequence: Synthetic oligonucleotide
  Antisense strand to SEQ ID NO: 1314252
aaaugggacacguauacaa

SEQ ID NO: 1314254 - RNA, 19 nt, Artificial Sequence
  Description of Artificial Sequence: Synthetic oligonucleotide
  Sense strand starting at position 3332 of SEQ ID NO: 1241978
aaguuaaguggccaagguu

SEQ ID NO: 1314255 - RNA, 19 nt, Artificial Sequence
  Description of Artificial Sequence: Synthetic oligonucleotide
  Antisense strand to SEQ ID NO: 1314254
aaccuuggccacuuaacuu

SEQ ID NO: 1314256 - RNA, 19 nt, Artificial Sequence
  Description of Artificial Sequence: Synthetic oligonucleotide
  Sense strand starting at position 3357 of SEQ ID NO: 1241978
uuauuaaguggugggauca

SEQ ID NO: 1314257 - RNA, 19 nt, Artificial Sequence
  Description of Artificial Sequence: Synthetic oligonucleotide
  Antisense strand to SEQ ID NO: 1314256
ugaucccaccacuuaauaa

SEQ ID NO: 1314258 - RNA, 19 nt, Artificial Sequence
  Description of Artificial Sequence: Synthetic oligonucleotide
  Sense strand starting at position 3358 of SEQ ID NO: 1241978
uauuaaguggugggaucaa

SEQ ID NO: 1314259 - RNA, 19 nt, Artificial Sequence
  Description of Artificial Sequence: Synthetic oligonucleotide
  Antisense strand to SEQ ID NO: 1314258
uugaucccaccacuuaaua

SEQ ID NO: 1314260 - RNA, 19 nt, Artificial Sequence
  Description of Artificial Sequence: Synthetic oligonucleotide
  Sense strand starting at position 3384 of SEQ ID NO: 1241978
gccagaaucugacugaauu

SEQ ID NO: 1314261 - RNA, 19 nt, Artificial Sequence
  Description of Artificial Sequence: Synthetic oligonucleotide
  Antisense strand to SEQ ID NO: 1314260
aauucagucagauucuggc

SEQ ID NO: 1314262 - RNA, 19 nt, Artificial Sequence
  Description of Artificial Sequence: Synthetic oligonucleotide
  Sense strand starting at position 3385 of SEQ ID NO: 1241978
ccagaaucugacugaauuc

SEQ ID NO: 1314263 - RNA, 19 nt, Artificial Sequence
  Description of Artificial Sequence: Synthetic oligonucleotide
  Antisense strand to SEQ ID NO: 1314262
gaauucagucagauucugg

SEQ ID NO: 1314264 - RNA, 19 nt, Artificial Sequence
  Description of Artificial Sequence: Synthetic oligonucleotide
  Sense strand starting at position 3468 of SEQ ID NO: 1241978
gagacuuuauagucugcuu

SEQ ID NO: 1314265 - RNA, 19 nt, Artificial Sequence
  Description of Artificial Sequence: Synthetic oligonucleotide
  Antisense strand to SEQ ID NO: 1314264
aagcagacuauaaagucuc

SEQ ID NO: 1314266 - RNA, 19 nt, Artificial Sequence
  Description of Artificial Sequence: Synthetic oligonucleotide
  Sense strand starting at position 3484 of SEQ ID NO: 1241978
cuuggugagcuccaguuaa

SEQ ID NO: 1314267 - RNA, 19 nt, Artificial Sequence
  Description of Artificial Sequence: Synthetic oligonucleotide
  Antisense strand to SEQ ID NO: 1314266
uuaacuggagcucaccaag

SEQ ID NO: 1314268 - RNA, 19 nt, Artificial Sequence
  Description of Artificial Sequence: Synthetic oligonucleotide
  Sense strand starting at position 3527 of SEQ ID NO: 1241978
acaucagacuuccugugau

SEQ ID NO: 1314269 - RNA, 19 nt, Artificial Sequence
  Description of Artificial Sequence: Synthetic oligonucleotide
  Antisense strand to SEQ ID NO: 1314268
aucacaggaagucugaugu

SEQ ID NO: 1314270 - RNA, 19 nt, Artificial Sequence
  Description of Artificial Sequence: Synthetic oligonucleotide
  Sense strand starting at position 3530 of SEQ ID NO: 1241978
ucagacuuccugugaugcu

SEQ ID NO: 1314271 - RNA, 19 nt, Artificial Sequence
  Description of Artificial Sequence: Synthetic oligonucleotide
  Antisense strand to SEQ ID NO: 1314270
agcaucacaggaagucuga

SEQ ID NO: 1314272 - RNA, 19 nt, Artificial Sequence
  Description of Artificial Sequence: Synthetic oligonucleotide
  Sense strand starting at position 3563 of SEQ ID NO: 1241978
ugaggaugcucuguuggau

SEQ ID NO: 1314273 - RNA, 19 nt, Artificial Sequence
  Description of Artificial Sequence: Synthetic oligonucleotide
  Antisense strand to SEQ ID NO: 1314272
auccaacagagcauccuca

SEQ ID NO: 1314274 - RNA, 19 nt, Artificial Sequence
  Description of Artificial Sequence: Synthetic oligonucleotide
  Sense strand starting at position 3586 of SEQ ID NO: 1241978
cuugucacucuacaggaau

SEQ ID NO: 1314275 - RNA, 19 nt, Artificial Sequence
  Description of Artificial Sequence: Synthetic oligonucleotide
  Antisense strand to SEQ ID NO: 1314274
auuccuguagagugacaag

SEQ ID NO: 1314276 - RNA, 19 nt, Artificial Sequence
  Description of Artificial Sequence: Synthetic oligonucleotide
  Sense strand starting at position 3634 of SEQ ID NO: 1241978
auuguacuuccaugucaag

SEQ ID NO: 1314277 - RNA, 19 nt, Artificial Sequence
  Description of Artificial Sequence: Synthetic oligonucleotide
  Antisense strand to SEQ ID NO: 1314276
cuugacauggaaguacaau

SEQ ID NO: 1314278 - RNA, 19 nt, Artificial Sequence
  Description of Artificial Sequence: Synthetic oligonucleotide
  Sense strand starting at position 3668 of SEQ ID NO: 1241978
agcugaugugaaugagauc

SEQ ID NO: 1314279 - RNA, 19 nt, Artificial Sequence
  Description of Artificial Sequence: Synthetic oligonucleotide
  Antisense strand to SEQ ID NO: 1314278
gaucucauucacaucagcu

SEQ ID NO: 1314280 - RNA, 19 nt, Artificial Sequence
  Description of Artificial Sequence: Synthetic oligonucleotide
  Sense strand starting at position 3669 of SEQ ID NO: 1241978
gcugaugugaaugagaucu

SEQ ID NO: 1314281 - RNA, 19 nt, Artificial Sequence
  Description of Artificial Sequence: Synthetic oligonucleotide
  Antisense strand to SEQ ID NO: 1314280
agaucucauucacaucagc

SEQ ID NO: 1314282 - RNA, 19 nt, Artificial Sequence
  Description of Artificial Sequence: Synthetic oligonucleotide
  Sense strand starting at position 3675 of SEQ ID NO: 1241978
gugaaugagaucugaggug

SEQ ID NO: 1314283 - RNA, 19 nt, Artificial Sequence
  Description of Artificial Sequence: Synthetic oligonucleotide
  Antisense strand to SEQ ID NO: 1314282
caccucagaucucauucac

SEQ ID NO: 1314284 - RNA, 19 nt, Artificial Sequence
  Description of Artificial Sequence: Synthetic oligonucleotide
  Sense strand starting at position 3680 of SEQ ID NO: 1241978
ugagaucugagguggaauu

SEQ ID NO: 1314285 - RNA, 19 nt, Artificial Sequence
  Description of Artificial Sequence: Synthetic oligonucleotide
  Antisense strand to SEQ ID NO: 1314284
aauuccaccucagaucuca

SEQ ID NO: 1314286 - RNA, 19 nt, Artificial Sequence
  Description of Artificial Sequence: Synthetic oligonucleotide
  Sense strand starting at position 3690 of SEQ ID NO: 1241978
gguggaauugcacgaauua

SEQ ID NO: 1314287 - RNA, 19 nt, Artificial Sequence
  Description of Artificial Sequence: Synthetic oligonucleotide
  Antisense strand to SEQ ID NO: 1314286
uaauucgugcaauuccacc

SEQ ID NO: 1314288 - RNA, 19 nt, Artificial Sequence
  Description of Artificial Sequence: Synthetic oligonucleotide
  Sense strand starting at position 3691 of SEQ ID NO: 1241978
guggaauugcacgaauuag

SEQ ID NO: 1314289 - RNA, 19 nt, Artificial Sequence
  Description of Artificial Sequence: Synthetic oligonucleotide
  Antisense strand to SEQ ID NO: 1314288
cuaauucgugcaauuccac

SEQ ID NO: 1314290 - RNA, 19 nt, Artificial Sequence
  Description of Artificial Sequence: Synthetic oligonucleotide
  Sense strand starting at position 3749 of SEQ ID NO: 1241978
gcaggaggcugucccuaau

SEQ ID NO: 1314291 - RNA, 19 nt, Artificial Sequence
  Description of Artificial Sequence: Synthetic oligonucleotide
  Antisense strand to SEQ ID NO: 1314290
auuagggacagccuccugc

SEQ ID NO: 1314292 - RNA, 19 nt, Artificial Sequence
  Description of Artificial Sequence: Synthetic oligonucleotide
  Sense strand starting at position 3798 of SEQ ID NO: 1241978
acagucaaguugccagauu

SEQ ID NO: 1314293 - RNA, 19 nt, Artificial Sequence
  Description of Artificial Sequence: Synthetic oligonucleotide
  Antisense strand to SEQ ID NO: 1314292
aaucuggcaacuugacugu

SEQ ID NO: 1314294 - RNA, 19 nt, Artificial Sequence
  Description of Artificial Sequence: Synthetic oligonucleotide
  Sense strand starting at position 3896 of SEQ ID NO: 1241978
cugauuauaccagguuaug

SEQ ID NO: 1314295 - RNA, 19 nt, Artificial Sequence
  Description of Artificial Sequence: Synthetic oligonucleotide
  Antisense strand to SEQ ID NO: 1314294
cauaaccugguauaaucag

SEQ ID NO: 1314296 - RNA, 19 nt, Artificial Sequence
  Description of Artificial Sequence: Synthetic oligonucleotide
  Sense strand starting at position 3966 of SEQ ID NO: 1241978
agcacuugguagcuuuaaa

SEQ ID NO: 1314297 - RNA, 19 nt, Artificial Sequence
  Description of Artificial Sequence: Synthetic oligonucleotide
  Antisense strand to SEQ ID NO: 1314296
uuuaaagcuaccaagugcu

SEQ ID NO: 1314298 - RNA, 19 nt, Artificial Sequence
  Description of Artificial Sequence: Synthetic oligonucleotide
  Sense strand starting at position 432 of SEQ ID NO: 1241979
agacaaaucuacuuuggua

SEQ ID NO: 1314299 - RNA, 19 nt, Artificial Sequence
  Description of Artificial Sequence: Synthetic oligonucleotide
  Antisense strand to SEQ ID NO: 1314298
uaccaaaguagauuugucu

SEQ ID NO: 1314300 - RNA, 19 nt, Artificial Sequence
  Description of Artificial Sequence: Synthetic oligonucleotide
  Sense strand starting at position 434 of SEQ ID NO: 1241979
acaaaucuacuuugguaga

SEQ ID NO: 1314301 - RNA, 19 nt, Artificial Sequence
  Description of Artificial Sequence: Synthetic oligonucleotide
  Antisense strand to SEQ ID NO: 1314300
ucuaccaaaguagauuugu

SEQ ID NO: 1314302 - RNA, 19 nt, Artificial Sequence
  Description of Artificial Sequence: Synthetic oligonucleotide
  Sense strand starting at position 605 of SEQ ID NO: 1241979
aguguuaacucaucauuga

SEQ ID NO: 1314303 - RNA, 19 nt, Artificial Sequence
  Description of Artificial Sequence: Synthetic oligonucleotide
  Antisense strand to SEQ ID NO: 1314302
ucaaugaugaguuaacacu

SEQ ID NO: 1314304 - RNA, 19 nt, Artificial Sequence
  Description of Artificial Sequence: Synthetic oligonucleotide
  Sense strand starting at position 606 of SEQ ID NO: 1241979
guguuaacucaucauugac

SEQ ID NO: 1314305 - RNA, 19 nt, Artificial Sequence
  Description of Artificial Sequence: Synthetic oligonucleotide
  Antisense strand to SEQ ID NO: 1314304
gucaaugaugaguuaacac

SEQ ID NO: 1314306 - RNA, 19 nt, Artificial Sequence
  Description of Artificial Sequence: Synthetic oligonucleotide
  Sense strand starting at position 665 of SEQ ID NO: 1241979
guguaugaugcccagcaau

SEQ ID NO: 1314307 - RNA, 19 nt, Artificial Sequence
  Description of Artificial Sequence: Synthetic oligonucleotide
  Antisense strand to SEQ ID NO: 1314306
auugcugggcaucauacac

SEQ ID NO: 1314308 - RNA, 19 nt, Artificial Sequence
  Description of Artificial Sequence: Synthetic oligonucleotide
  Sense strand starting at position 809 of SEQ ID NO: 1241979
cugagagcugguuagccaa

SEQ ID NO: 1314309 - RNA, 19 nt, Artificial Sequence
  Description of Artificial Sequence: Synthetic oligonucleotide
  Antisense strand to SEQ ID NO: 1314308
uuggcuaaccagcucucag

SEQ ID NO: 1314310 - RNA, 19 nt, Artificial Sequence
  Description of Artificial Sequence: Synthetic oligonucleotide
  Sense strand starting at position 871 of SEQ ID NO: 1241979
uccacacauucgcugacaa

SEQ ID NO: 1314311 - RNA, 19 nt, Artificial Sequence
  Description of Artificial Sequence: Synthetic oligonucleotide
  Antisense strand to SEQ ID NO: 1314310
uugucagcgaaugugugga

SEQ ID NO: 1314312 - RNA, 19 nt, Artificial Sequence
  Description of Artificial Sequence: Synthetic oligonucleotide
  Sense strand starting at position 958 of SEQ ID NO: 1241979
acccuuguggccuagaaac

SEQ ID NO: 1314313 - RNA, 19 nt, Artificial Sequence
  Description of Artificial Sequence: Synthetic oligonucleotide
  Antisense strand to SEQ ID NO: 1314312
guuucuaggccacaagggu

SEQ ID NO: 1314314 - RNA, 19 nt, Artificial Sequence
  Description of Artificial Sequence: Synthetic oligonucleotide
  Sense strand starting at position 2058 of SEQ ID NO: 1241979
auacuaauaccggguaauu

SEQ ID NO: 1314315 - RNA, 19 nt, Artificial Sequence
  Description of Artificial Sequence: Synthetic oligonucleotide
  Antisense strand to SEQ ID NO: 1314314
aauuacccgguauuaguau

SEQ ID NO: 1314316 - RNA, 19 nt, Artificial Sequence
  Description of Artificial Sequence: Synthetic oligonucleotide
  Sense strand starting at position 2100 of SEQ ID NO: 1241979
gcuaucuccaaacgaggua

SEQ ID NO: 1314317 - RNA, 19 nt, Artificial Sequence
  Description of Artificial Sequence: Synthetic oligonucleotide
  Antisense strand to SEQ ID NO: 1314316
uaccucguuuggagauagc

SEQ ID NO: 1314318 - RNA, 19 nt, Artificial Sequence
  Description of Artificial Sequence: Synthetic oligonucleotide
  Sense strand starting at position 2607 of SEQ ID NO: 1241979
gaguauagugcaugaucau

SEQ ID NO: 1314319 - RNA, 19 nt, Artificial Sequence
  Description of Artificial Sequence: Synthetic oligonucleotide
  Antisense strand to SEQ ID NO: 1314318
augaucaugcacuauacuc

SEQ ID NO: 1314320 - RNA, 19 nt, Artificial Sequence
  Description of Artificial Sequence: Synthetic oligonucleotide
  Sense strand starting at position 2641 of SEQ ID NO: 1241979
ccgaacuucugggcacaaa

SEQ ID NO: 1314321 - RNA, 19 nt, Artificial Sequence
  Description of Artificial Sequence: Synthetic oligonucleotide
  Antisense strand to SEQ ID NO: 1314320
uuugugcccagaaguucgg

SEQ ID NO: 1314322 - RNA, 19 nt, Artificial Sequence
  Description of Artificial Sequence: Synthetic oligonucleotide
  Sense strand starting at position 2717 of SEQ ID NO: 1241979
uagagaugggagugucuca

SEQ ID NO: 1314323 - RNA, 19 nt, Artificial Sequence
  Description of Artificial Sequence: Synthetic oligonucleotide
  Antisense strand to SEQ ID NO: 1314322
ugagacacucccaucucua

SEQ ID NO: 1314324 - RNA, 19 nt, Artificial Sequence
  Description of Artificial Sequence: Synthetic oligonucleotide
  Sense strand starting at position 2836 of SEQ ID NO: 1241979
ccuguagcucuugauaaag

SEQ ID NO: 1314325 - RNA, 19 nt, Artificial Sequence
  Description of Artificial Sequence: Synthetic oligonucleotide
  Antisense strand to SEQ ID NO: 1314324
cuuuaucaagagcuacagg

SEQ ID NO: 1314326 - RNA, 19 nt, Artificial Sequence
  Description of Artificial Sequence: Synthetic oligonucleotide
  Sense strand starting at position 2955 of SEQ ID NO: 1241979
uuguauacgugucccauuu

SEQ ID NO: 1314327 - RNA, 19 nt, Artificial Sequence
  Description of Artificial Sequence: Synthetic oligonucleotide
  Antisense strand to SEQ ID NO: 1314326
aaaugggacacguauacaa

SEQ ID NO: 1314328 - RNA, 19 nt, Artificial Sequence
  Description of Artificial Sequence: Synthetic oligonucleotide
  Sense strand starting at position 3045 of SEQ ID NO: 1241979
aaguuaaguggccaagguu

SEQ ID NO: 1314329 - RNA, 19 nt, Artificial Sequence
  Description of Artificial Sequence: Synthetic oligonucleotide
  Antisense strand to SEQ ID NO: 1314328
aaccuuggccacuuaacuu

SEQ ID NO: 1314330 - RNA, 19 nt, Artificial Sequence
  Description of Artificial Sequence: Synthetic oligonucleotide
  Sense strand starting at position 3070 of SEQ ID NO: 1241979
uuauuaaguggugggauca

SEQ ID NO: 1314331 - RNA, 19 nt, Artificial Sequence
  Description of Artificial Sequence: Synthetic oligonucleotide
  Antisense strand to SEQ ID NO: 1314330
ugaucccaccacuuaauaa

SEQ ID NO: 1314332 - RNA, 19 nt, Artificial Sequence
  Description of Artificial Sequence: Synthetic oligonucleotide
  Sense strand starting at position 3071 of SEQ ID NO: 1241979
uauuaaguggugggaucaa

SEQ ID NO: 1314333 - RNA, 19 nt, Artificial Sequence
  Description of Artificial Sequence: Synthetic oligonucleotide
  Antisense strand to SEQ ID NO: 1314332
uugaucccaccacuuaaua

SEQ ID NO: 1314334 - RNA, 19 nt, Artificial Sequence
  Description of Artificial Sequence: Synthetic oligonucleotide
  Sense strand starting at position 3097 of SEQ ID NO: 1241979
gccagaaucugacugaauu

SEQ ID NO: 1314335 - RNA, 19 nt, Artificial Sequence
  Description of Artificial Sequence: Synthetic oligonucleotide
  Antisense strand to SEQ ID NO: 1314334
aauucagucagauucuggc

SEQ ID NO: 1314336 - RNA, 19 nt, Artificial Sequence
  Description of Artificial Sequence: Synthetic oligonucleotide
  Sense strand starting at position 3098 of SEQ ID NO: 1241979
ccagaaucugacugaauuc

SEQ ID NO: 1314337 - RNA, 19 nt, Artificial Sequence
  Description of Artificial Sequence: Synthetic oligonucleotide
  Antisense strand to SEQ ID NO: 1314336
gaauucagucagauucugg

SEQ ID NO: 1314338 - RNA, 19 nt, Artificial Sequence
  Description of Artificial Sequence: Synthetic oligonucleotide
  Sense strand starting at position 3181 of SEQ ID NO: 1241979
gagacuuuauagucugcuu

SEQ ID NO: 1314339 - RNA, 19 nt, Artificial Sequence
  Description of Artificial Sequence: Synthetic oligonucleotide
  Antisense strand to SEQ ID NO: 1314338
aagcagacuauaaagucuc

SEQ ID NO: 1314340 - RNA, 19 nt, Artificial Sequence
  Description of Artificial Sequence: Synthetic oligonucleotide
  Sense strand starting at position 3197 of SEQ ID NO: 1241979
cuuggugagcuccaguuaa

SEQ ID NO: 1314341 - RNA, 19 nt, Artificial Sequence
  Description of Artificial Sequence: Synthetic oligonucleotide
  Antisense strand to SEQ ID NO: 1314340
uuaacuggagcucaccaag

SEQ ID NO: 1314342 - RNA, 19 nt, Artificial Sequence
  Description of Artificial Sequence: Synthetic oligonucleotide
  Sense strand starting at position 3240 of SEQ ID NO: 1241979
acaucagacuuccugugau

SEQ ID NO: 1314343 - RNA, 19 nt, Artificial Sequence
  Description of Artificial Sequence: Synthetic oligonucleotide
  Antisense strand to SEQ ID NO: 1314342
aucacaggaagucugaugu

SEQ ID NO: 1314344 - RNA, 19 nt, Artificial Sequence
  Description of Artificial Sequence: Synthetic oligonucleotide
  Sense strand starting at position 3276 of SEQ ID NO: 1241979
ugaggaugcucuguuggau

SEQ ID NO: 1314345 - RNA, 19 nt, Artificial Sequence
  Description of Artificial Sequence: Synthetic oligonucleotide
  Antisense strand to SEQ ID NO: 1314344
auccaacagagcauccuca

SEQ ID NO: 1314346 - RNA, 19 nt, Artificial Sequence
  Description of Artificial Sequence: Synthetic oligonucleotide
  Sense strand starting at position 3299 of SEQ ID NO: 1241979
cuugucacucuacaggaau

SEQ ID NO: 1314347 - RNA, 19 nt, Artificial Sequence
  Description of Artificial Sequence: Synthetic oligonucleotide
  Antisense strand to SEQ ID NO: 1314346
auuccuguagagugacaag

SEQ ID NO: 1314348 - RNA, 19 nt, Artificial Sequence
  Description of Artificial Sequence: Synthetic oligonucleotide
  Sense strand starting at position 3347 of SEQ ID NO: 1241979
auuguacuuccaugucaag

SEQ ID NO: 1314349 - RNA, 19 nt, Artificial Sequence
  Description of Artificial Sequence: Synthetic oligonucleotide
  Antisense strand to SEQ ID NO: 1314348
cuugacauggaaguacaau

SEQ ID NO: 1314350 - RNA, 19 nt, Artificial Sequence
  Description of Artificial Sequence: Synthetic oligonucleotide
  Sense strand starting at position 3381 of SEQ ID NO: 1241979
agcugaugugaaugagauc

SEQ ID NO: 1314351 - RNA, 19 nt, Artificial Sequence
  Description of Artificial Sequence: Synthetic oligonucleotide
  Antisense strand to SEQ ID NO: 1314350
gaucucauucacaucagcu

SEQ ID NO: 1314352 - RNA, 19 nt, Artificial Sequence
  Description of Artificial Sequence: Synthetic oligonucleotide
  Sense strand starting at position 3382 of SEQ ID NO: 1241979
gcugaugugaaugagaucu

SEQ ID NO: 1314353 - RNA, 19 nt, Artificial Sequence
  Description of Artificial Sequence: Synthetic oligonucleotide
  Antisense strand to SEQ ID NO: 1314352
agaucucauucacaucagc

SEQ ID NO: 1314354 - RNA, 19 nt, Artificial Sequence
  Description of Artificial Sequence: Synthetic oligonucleotide
  Sense strand starting at position 3388 of SEQ ID NO: 1241979
gugaaugagaucugaggug

SEQ ID NO: 1314355 - RNA, 19 nt, Artificial Sequence
  Description of Artificial Sequence: Synthetic oligonucleotide
  Antisense strand to SEQ ID NO: 1314354
caccucagaucucauucac

SEQ ID NO: 1314356 - RNA, 19 nt, Artificial Sequence
  Description of Artificial Sequence: Synthetic oligonucleotide
  Sense strand starting at position 3393 of SEQ ID NO: 1241979
ugagaucugagguggaauu

SEQ ID NO: 1314357 - RNA, 19 nt, Artificial Sequence
  Description of Artificial Sequence: Synthetic oligonucleotide
  Antisense strand to SEQ ID NO: 1314356
aauuccaccucagaucuca

SEQ ID NO: 1314358 - RNA, 19 nt, Artificial Sequence
  Description of Artificial Sequence: Synthetic oligonucleotide
  Sense strand starting at position 3403 of SEQ ID NO: 1241979
gguggaauugcacgaauua

SEQ ID NO: 1314359 - RNA, 19 nt, Artificial Sequence
  Description of Artificial Sequence: Synthetic oligonucleotide
  Antisense strand to SEQ ID NO: 1314358
uaauucgugcaauuccacc

SEQ ID NO: 1314360 - RNA, 19 nt, Artificial Sequence
  Description of Artificial Sequence: Synthetic oligonucleotide
  Sense strand starting at position 3404 of SEQ ID NO: 1241979
guggaauugcacgaauuag

SEQ ID NO: 1314361 - RNA, 19 nt, Artificial Sequence
  Description of Artificial Sequence: Synthetic oligonucleotide
  Antisense strand to SEQ ID NO: 1314360
cuaauucgugcaauuccac

SEQ ID NO: 1314362 - RNA, 19 nt, Artificial Sequence
  Description of Artificial Sequence: Synthetic oligonucleotide
  Sense strand starting at position 3511 of SEQ ID NO: 1241979
acagucaaguugccagauu

SEQ ID NO: 1314363 - RNA, 19 nt, Artificial Sequence
  Description of Artificial Sequence: Synthetic oligonucleotide
  Antisense strand to SEQ ID NO: 1314362
aaucuggcaacuugacugu

SEQ ID NO: 1314364 - RNA, 19 nt, Artificial Sequence
  Description of Artificial Sequence: Synthetic oligonucleotide
  Sense strand starting at position 3609 of SEQ ID NO: 1241979
cugauuauaccagguuaug

SEQ ID NO: 1314365 - RNA, 19 nt, Artificial Sequence
  Description of Artificial Sequence: Synthetic oligonucleotide
  Antisense strand to SEQ ID NO: 1314364
cauaaccugguauaaucag

SEQ ID NO: 1314366 - RNA, 19 nt, Artificial Sequence
  Description of Artificial Sequence: Synthetic oligonucleotide
  Sense strand starting at position 3679 of SEQ ID NO: 1241979
agcacuugguagcuuuaaa

SEQ ID NO: 1314367 - RNA, 19 nt, Artificial Sequence
  Description of Artificial Sequence: Synthetic oligonucleotide
  Antisense strand to SEQ ID NO: 1314366
uuuaaagcuaccaagugcu

SEQ ID NO: 1314368 - RNA, 19 nt, Artificial Sequence
  Description of Artificial Sequence: Synthetic oligonucleotide
  Sense strand starting at position 3745 of SEQ ID NO: 1241979
uggaguucuauugaaaguu

SEQ ID NO: 1314369 - RNA, 19 nt, Artificial Sequence
  Description of Artificial Sequence: Synthetic oligonucleotide
  Antisense strand to SEQ ID NO: 1314368
aacuuucaauagaacucca

SEQ ID NO: 1314370 - RNA, 19 nt, Artificial Sequence
  Description of Artificial Sequence: Synthetic oligonucleotide
  Sense strand starting at position 3753 of SEQ ID NO: 1241979
uauugaaaguuggcuuuau

SEQ ID NO: 1314371 - RNA, 19 nt, Artificial Sequence
  Description of Artificial Sequence: Synthetic oligonucleotide
  Antisense strand to SEQ ID NO: 1314370
auaaagccaacuuucaaua

SEQ ID NO: 1314372 - RNA, 19 nt, Artificial Sequence
  Description of Artificial Sequence: Synthetic oligonucleotide
  Sense strand starting at position 3754 of SEQ ID NO: 1241979
auugaaaguuggcuuuauu

SEQ ID NO: 1314373 - RNA, 19 nt, Artificial Sequence
  Description of Artificial Sequence: Synthetic oligonucleotide
  Antisense strand to SEQ ID NO: 1314372
aauaaagccaacuuucaau

SEQ ID NO: 1314374 - RNA, 19 nt, Artificial Sequence
  Description of Artificial Sequence: Synthetic oligonucleotide
  Sense strand starting at position 3824 of SEQ ID NO: 1241979
ggcgauaauguauaaauua

SEQ ID NO: 1314375 - RNA, 19 nt, Artificial Sequence
  Description of Artificial Sequence: Synthetic oligonucleotide
  Antisense strand to SEQ ID NO: 1314374
uaauuuauacauuaucgcc

SEQ ID NO: 1314376 - RNA, 19 nt, Artificial Sequence
  Description of Artificial Sequence: Synthetic oligonucleotide
  Sense strand starting at position 3957 of SEQ ID NO: 1241979
ugaugccucuugccugaaa

SEQ ID NO: 1314377 - RNA, 19 nt, Artificial Sequence
  Description of Artificial Sequence: Synthetic oligonucleotide
  Antisense strand to SEQ ID NO: 1314376
uuucaggcaagaggcauca

SEQ ID NO: 1314378 - RNA, 19 nt, Artificial Sequence
  Description of Artificial Sequence: Synthetic oligonucleotide
  Sense strand starting at position 192 of SEQ ID NO: 1241980
uguauaucgcauuaacuau

SEQ ID NO: 1314379 - RNA, 19 nt, Artificial Sequence
  Description of Artificial Sequence: Synthetic oligonucleotide
  Antisense strand to SEQ ID NO: 1314378
auaguuaaugcgauauaca

SEQ ID NO: 1314380 - RNA, 19 nt, Artificial Sequence
  Description of Artificial Sequence: Synthetic oligonucleotide
  Sense strand starting at position 237 of SEQ ID NO: 1241980
aggugaacaucagugugau

SEQ ID NO: 1314381 - RNA, 19 nt, Artificial Sequence
  Description of Artificial Sequence: Synthetic oligonucleotide
  Antisense strand to SEQ ID NO: 1314380
aucacacugauguucaccu

SEQ ID NO: 1314382 - RNA, 19 nt, Artificial Sequence
  Description of Artificial Sequence: Synthetic oligonucleotide
  Sense strand starting at position 238 of SEQ ID NO: 1241980
ggugaacaucagugugauc

SEQ ID NO: 1314383 - RNA, 19 nt, Artificial Sequence
  Description of Artificial Sequence: Synthetic oligonucleotide
  Antisense strand to SEQ ID NO: 1314382
gaucacacugauguucacc

SEQ ID NO: 1314384 - RNA, 19 nt, Artificial Sequence
  Description of Artificial Sequence: Synthetic oligonucleotide
  Sense strand starting at position 243 of SEQ ID NO: 1241980
acaucagugugaucccaca

SEQ ID NO: 1314385 - RNA, 19 nt, Artificial Sequence
  Description of Artificial Sequence: Synthetic oligonucleotide
  Antisense strand to SEQ ID NO: 1314384
ugugggaucacacugaugu

SEQ ID NO: 1314386 - RNA, 19 nt, Artificial Sequence
  Description of Artificial Sequence: Synthetic oligonucleotide
  Sense strand starting at position 393 of SEQ ID NO: 1241980
gugaguuauucacugugua

SEQ ID NO: 1314387 - RNA, 19 nt, Artificial Sequence
  Description of Artificial Sequence: Synthetic oligonucleotide
  Antisense strand to SEQ ID NO: 1314386
uacacagugaauaacucac

SEQ ID NO: 1314388 - RNA, 19 nt, Artificial Sequence
  Description of Artificial Sequence: Synthetic oligonucleotide
  Sense strand starting at position 495 of SEQ ID NO: 1241980
ugucuauggucucuggaga

SEQ ID NO: 1314389 - RNA, 19 nt, Artificial Sequence
  Description of Artificial Sequence: Synthetic oligonucleotide
  Antisense strand to SEQ ID NO: 1314388
ucuccagagaccauagaca

SEQ ID NO: 1314390 - RNA, 19 nt, Artificial Sequence
  Description of Artificial Sequence: Synthetic oligonucleotide
  Sense strand starting at position 496 of SEQ ID NO: 1241980
gucuauggucucuggagaa

SEQ ID NO: 1314391 - RNA, 19 nt, Artificial Sequence
  Description of Artificial Sequence: Synthetic oligonucleotide
  Antisense strand to SEQ ID NO: 1314390
uucuccagagaccauagac

SEQ ID NO: 1314392 - RNA, 19 nt, Artificial Sequence
  Description of Artificial Sequence: Synthetic oligonucleotide
  Sense strand starting at position 598 of SEQ ID NO: 1241980
ggcugauccuuggcaagau

SEQ ID NO: 1314393 - RNA, 19 nt, Artificial Sequence
  Description of Artificial Sequence: Synthetic oligonucleotide
  Antisense strand to SEQ ID NO: 1314392
aucuugccaaggaucagcc

SEQ ID NO: 1314394 - RNA, 19 nt, Artificial Sequence
  Description of Artificial Sequence: Synthetic oligonucleotide
  Sense strand starting at position 608 of SEQ ID NO: 1241980
uggcaagauaucugagaca

SEQ ID NO: 1314395 - RNA, 19 nt, Artificial Sequence
  Description of Artificial Sequence: Synthetic oligonucleotide
  Antisense strand to SEQ ID NO: 1314394
ugucucagauaucuugcca

SEQ ID NO: 1314396 - RNA, 19 nt, Artificial Sequence
  Description of Artificial Sequence: Synthetic oligonucleotide
  Sense strand starting at position 726 of SEQ ID NO: 1241980
ggucccuggacuggugaau

SEQ ID NO: 1314397 - RNA, 19 nt, Artificial Sequence
  Description of Artificial Sequence: Synthetic oligonucleotide
  Antisense strand to SEQ ID NO: 1314396
auucaccaguccagggacc

SEQ ID NO: 1314398 - RNA, 19 nt, Artificial Sequence
  Description of Artificial Sequence: Synthetic oligonucleotide
  Sense strand starting at position 767 of SEQ ID NO: 1241980
ucuugaaggcuuugugacu

SEQ ID NO: 1314399 - RNA, 19 nt, Artificial Sequence
  Description of Artificial Sequence: Synthetic oligonucleotide
  Antisense strand to SEQ ID NO: 1314398
agucacaaagccuucaaga

SEQ ID NO: 1314400 - RNA, 19 nt, Artificial Sequence
  Description of Artificial Sequence: Synthetic oligonucleotide
  Sense strand starting at position 768 of SEQ ID NO: 1241980
cuugaaggcuuugugacuu

SEQ ID NO: 1314401 - RNA, 19 nt, Artificial Sequence
  Description of Artificial Sequence: Synthetic oligonucleotide
  Antisense strand to SEQ ID NO: 1314400
aagucacaaagccuucaag

SEQ ID NO: 1314402 - RNA, 19 nt, Artificial Sequence
  Description of Artificial Sequence: Synthetic oligonucleotide
  Sense strand starting at position 791 of SEQ ID NO: 1241980
acugaagaguggcuaaauc

SEQ ID NO: 1314403 - RNA, 19 nt, Artificial Sequence
  Description of Artificial Sequence: Synthetic oligonucleotide
  Antisense strand to SEQ ID NO: 1314402
gauuuagccacucuucagu

SEQ ID NO: 1314404 - RNA, 19 nt, Artificial Sequence
  Description of Artificial Sequence: Synthetic oligonucleotide
  Sense strand starting at position 801 of SEQ ID NO: 1241980
ggcuaaaucuauccaggcu

SEQ ID NO: 1314405 - RNA, 19 nt, Artificial Sequence
  Description of Artificial Sequence: Synthetic oligonucleotide
  Antisense strand to SEQ ID NO: 1314404
agccuggauagauuuagcc

SEQ ID NO: 1314406 - RNA, 19 nt, Artificial Sequence
  Description of Artificial Sequence: Synthetic oligonucleotide
  Sense strand starting at position 1039 of SEQ ID NO: 1241980
cagaaauugcgccauauug

SEQ ID NO: 1314407 - RNA, 19 nt, Artificial Sequence
  Description of Artificial Sequence: Synthetic oligonucleotide
  Antisense strand to SEQ ID NO: 1314406
caauauggcgcaauuucug

SEQ ID NO: 1314408 - RNA, 19 nt, Artificial Sequence
  Description of Artificial Sequence: Synthetic oligonucleotide
  Sense strand starting at position 1041 of SEQ ID NO: 1241980
gaaauugcgccauauugcu

SEQ ID NO: 1314409 - RNA, 19 nt, Artificial Sequence
  Description of Artificial Sequence: Synthetic oligonucleotide
  Antisense strand to SEQ ID NO: 1314408
agcaauauggcgcaauuuc

SEQ ID NO: 1314410 - RNA, 19 nt, Artificial Sequence
  Description of Artificial Sequence: Synthetic oligonucleotide
  Sense strand starting at position 1612 of SEQ ID NO: 1241980
ggaaauugacccggcagga

SEQ ID NO: 1314411 - RNA, 19 nt, Artificial Sequence
  Description of Artificial Sequence: Synthetic oligonucleotide
  Antisense strand to SEQ ID NO: 1314410
uccugccgggucaauuucc

SEQ ID NO: 1314412 - RNA, 19 nt, Artificial Sequence
  Description of Artificial Sequence: Synthetic oligonucleotide
  Sense strand starting at position 2093 of SEQ ID NO: 1241980
cggagcgcucugucucuaa

SEQ ID NO: 1314413 - RNA, 19 nt, Artificial Sequence
  Description of Artificial Sequence: Synthetic oligonucleotide
  Antisense strand to SEQ ID NO: 1314412
uuagagacagagcgcuccg

SEQ ID NO: 1314414 - RNA, 19 nt, Artificial Sequence
  Description of Artificial Sequence: Synthetic oligonucleotide
  Sense strand starting at position 2205 of SEQ ID NO: 1241980
ucggccuucccguaaggaa

SEQ ID NO: 1314415 - RNA, 19 nt, Artificial Sequence
  Description of Artificial Sequence: Synthetic oligonucleotide
  Antisense strand to SEQ ID NO: 1314414
uuccuuacgggaaggccga

SEQ ID NO: 1314416 - RNA, 19 nt, Artificial Sequence
  Description of Artificial Sequence: Synthetic oligonucleotide
  Sense strand starting at position 2482 of SEQ ID NO: 1241980
cccugacuccguuacucaa

SEQ ID NO: 1314417 - RNA, 19 nt, Artificial Sequence
  Description of Artificial Sequence: Synthetic oligonucleotide
  Antisense strand to SEQ ID NO: 1314416
uugaguaacggagucaggg

SEQ ID NO: 1314418 - RNA, 19 nt, Artificial Sequence
  Description of Artificial Sequence: Synthetic oligonucleotide
  Sense strand starting at position 2665 of SEQ ID NO: 1241980
gguauauugagugauccca

SEQ ID NO: 1314419 - RNA, 19 nt, Artificial Sequence
  Description of Artificial Sequence: Synthetic oligonucleotide
  Antisense strand to SEQ ID NO: 1314418
ugggaucacucaauauacc

SEQ ID NO: 1314420 - RNA, 19 nt, Artificial Sequence
  Description of Artificial Sequence: Synthetic oligonucleotide
  Sense strand starting at position 2667 of SEQ ID NO: 1241980
uauauugagugaucccaga

SEQ ID NO: 1314421 - RNA, 19 nt, Artificial Sequence
  Description of Artificial Sequence: Synthetic oligonucleotide
  Antisense strand to SEQ ID NO: 1314420
ucugggaucacucaauaua

SEQ ID NO: 1314422 - RNA, 19 nt, Artificial Sequence
  Description of Artificial Sequence: Synthetic oligonucleotide
  Sense strand starting at position 2888 of SEQ ID NO: 1241980
agauauuggcagugugaga

SEQ ID NO: 1314423 - RNA, 19 nt, Artificial Sequence
  Description of Artificial Sequence: Synthetic oligonucleotide
  Antisense strand to SEQ ID NO: 1314422
ucucacacugccaauaucu

SEQ ID NO: 1314424 - RNA, 19 nt, Artificial Sequence
  Description of Artificial Sequence: Synthetic oligonucleotide
  Sense strand starting at position 3009 of SEQ ID NO: 1241980
gggagaggccuugguugaa

SEQ ID NO: 1314425 - RNA, 19 nt, Artificial Sequence
  Description of Artificial Sequence: Synthetic oligonucleotide
  Antisense strand to SEQ ID NO: 1314424
uucaaccaaggccucuccc

SEQ ID NO: 1314426 - RNA, 19 nt, Artificial Sequence
  Description of Artificial Sequence: Synthetic oligonucleotide
  Sense strand starting at position 3101 of SEQ ID NO: 1241980
guguaagacacaggucaua

SEQ ID NO: 1314427 - RNA, 19 nt, Artificial Sequence
  Description of Artificial Sequence: Synthetic oligonucleotide
  Antisense strand to SEQ ID NO: 1314426
uaugaccugugucuuacac

SEQ ID NO: 1314428 - RNA, 19 nt, Artificial Sequence
  Description of Artificial Sequence: Synthetic oligonucleotide
  Sense strand starting at position 3106 of SEQ ID NO: 1241980
agacacaggucauaagaaa

SEQ ID NO: 1314429 - RNA, 19 nt, Artificial Sequence
  Description of Artificial Sequence: Synthetic oligonucleotide
  Antisense strand to SEQ ID NO: 1314428
uuucuuaugaccugugucu

SEQ ID NO: 1314430 - RNA, 19 nt, Artificial Sequence
  Description of Artificial Sequence: Synthetic oligonucleotide
  Sense strand starting at position 3129 of SEQ ID NO: 1241980
guggaagaaucuagaggug

SEQ ID NO: 1314431 - RNA, 19 nt, Artificial Sequence
  Description of Artificial Sequence: Synthetic oligonucleotide
  Antisense strand to SEQ ID NO: 1314430
caccucuagauucuuccac

SEQ ID NO: 1314432 - RNA, 19 nt, Artificial Sequence
  Description of Artificial Sequence: Synthetic oligonucleotide
  Sense strand starting at position 3132 of SEQ ID NO: 1241980
gaagaaucuagagguguag

SEQ ID NO: 1314433 - RNA, 19 nt, Artificial Sequence
  Description of Artificial Sequence: Synthetic oligonucleotide
  Antisense strand to SEQ ID NO: 1314432
cuacaccucuagauucuuc

SEQ ID NO: 1314434 - RNA, 19 nt, Artificial Sequence
  Description of Artificial Sequence: Synthetic oligonucleotide
  Sense strand starting at position 3136 of SEQ ID NO: 1241980
aaucuagagguguagaagu

SEQ ID NO: 1314435 - RNA, 19 nt, Artificial Sequence
  Description of Artificial Sequence: Synthetic oligonucleotide
  Antisense strand to SEQ ID NO: 1314434
acuucuacaccucuagauu

SEQ ID NO: 1314436 - RNA, 19 nt, Artificial Sequence
  Description of Artificial Sequence: Synthetic oligonucleotide
  Sense strand starting at position 3156 of SEQ ID NO: 1241980
uugggucugcccugaauag

SEQ ID NO: 1314437 - RNA, 19 nt, Artificial Sequence
  Description of Artificial Sequence: Synthetic oligonucleotide
  Antisense strand to SEQ ID NO: 1314436
cuauucagggcagacccaa

SEQ ID NO: 1314438 - RNA, 19 nt, Artificial Sequence
  Description of Artificial Sequence: Synthetic oligonucleotide
  Sense strand starting at position 3165 of SEQ ID NO: 1241980
cccugaauagcuuauaguu

SEQ ID NO: 1314439 - RNA, 19 nt, Artificial Sequence
  Description of Artificial Sequence: Synthetic oligonucleotide
  Antisense strand to SEQ ID NO: 1314438
aacuauaagcuauucaggg

SEQ ID NO: 1314440 - RNA, 19 nt, Artificial Sequence
  Description of Artificial Sequence: Synthetic oligonucleotide
  Sense strand starting at position 3175 of SEQ ID NO: 1241980
cuuauaguuugguuggaga

SEQ ID NO: 1314441 - RNA, 19 nt, Artificial Sequence
  Description of Artificial Sequence: Synthetic oligonucleotide
  Antisense strand to SEQ ID NO: 1314440
ucuccaaccaaacuauaag

SEQ ID NO: 1314442 - RNA, 19 nt, Artificial Sequence
  Description of Artificial Sequence: Synthetic oligonucleotide
  Sense strand starting at position 3177 of SEQ ID NO: 1241980
uauaguuugguuggagaga

SEQ ID NO: 1314443 - RNA, 19 nt, Artificial Sequence
  Description of Artificial Sequence: Synthetic oligonucleotide
  Antisense strand to SEQ ID NO: 1314442
ucucuccaaccaaacuaua

SEQ ID NO: 1314444 - RNA, 19 nt, Artificial Sequence
  Description of Artificial Sequence: Synthetic oligonucleotide
  Sense strand starting at position 3245 of SEQ ID NO: 1241980
ccaugaggugguugagaag

SEQ ID NO: 1314445 - RNA, 19 nt, Artificial Sequence
  Description of Artificial Sequence: Synthetic oligonucleotide
  Antisense strand to SEQ ID NO: 1314444
cuucucaaccaccucaugg

SEQ ID NO: 1314446 - RNA, 19 nt, Artificial Sequence
  Description of Artificial Sequence: Synthetic oligonucleotide
  Sense strand starting at position 3357 of SEQ ID NO: 1241980
aagggugggcuuugaaaug

SEQ ID NO: 1314447 - RNA, 19 nt, Artificial Sequence
  Description of Artificial Sequence: Synthetic oligonucleotide
  Antisense strand to SEQ ID NO: 1314446
cauuucaaagcccacccuu

SEQ ID NO: 1314448 - RNA, 19 nt, Artificial Sequence
  Description of Artificial Sequence: Synthetic oligonucleotide
  Sense strand starting at position 3368 of SEQ ID NO: 1241980
uugaaauguggagguagga

SEQ ID NO: 1314449 - RNA, 19 nt, Artificial Sequence
  Description of Artificial Sequence: Synthetic oligonucleotide
  Antisense strand to SEQ ID NO: 1314448
uccuaccuccacauuucaa

SEQ ID NO: 1314450 - RNA, 19 nt, Artificial Sequence
  Description of Artificial Sequence: Synthetic oligonucleotide
  Sense strand starting at position 3676 of SEQ ID NO: 1241980
uagugagcaccauggcauu

SEQ ID NO: 1314451 - RNA, 19 nt, Artificial Sequence
  Description of Artificial Sequence: Synthetic oligonucleotide
  Antisense strand to SEQ ID NO: 1314450
aaugccauggugcucacua

SEQ ID NO: 1314452 - RNA, 19 nt, Artificial Sequence
  Description of Artificial Sequence: Synthetic oligonucleotide
  Sense strand starting at position 3682 of SEQ ID NO: 1241980
gcaccauggcauuaagcuu

SEQ ID NO: 1314453 - RNA, 19 nt, Artificial Sequence
  Description of Artificial Sequence: Synthetic oligonucleotide
  Antisense strand to SEQ ID NO: 1314452
aagcuuaaugccauggugc

SEQ ID NO: 1314454 - RNA, 19 nt, Artificial Sequence
  Description of Artificial Sequence: Synthetic oligonucleotide
  Sense strand starting at position 3702 of SEQ ID NO: 1241980
ugagaaugccaggaugguu

SEQ ID NO: 1314455 - RNA, 19 nt, Artificial Sequence
  Description of Artificial Sequence: Synthetic oligonucleotide
  Antisense strand to SEQ ID NO: 1314454
aaccauccuggcauucuca

SEQ ID NO: 1314456 - RNA, 19 nt, Artificial Sequence
  Description of Artificial Sequence: Synthetic oligonucleotide
  Sense strand starting at position 3751 of SEQ ID NO: 1241980
acaacuggguccucugaca

SEQ ID NO: 1314457 - RNA, 19 nt, Artificial Sequence
  Description of Artificial Sequence: Synthetic oligonucleotide
  Antisense strand to SEQ ID NO: 1314456
ugucagaggacccaguugu

SEQ ID NO: 1314458 - RNA, 19 nt, Artificial Sequence
  Description of Artificial Sequence: Synthetic oligonucleotide
  Sense strand starting at position 68 of SEQ ID NO: 1241981
auagaaggauguuaagaua

SEQ ID NO: 1314459 - RNA, 19 nt, Artificial Sequence
  Description of Artificial Sequence: Synthetic oligonucleotide
  Antisense strand to SEQ ID NO: 1314458
uaucuuaacauccuucuau

SEQ ID NO: 1314460 - RNA, 19 nt, Artificial Sequence
  Description of Artificial Sequence: Synthetic oligonucleotide
  Sense strand starting at position 80 of SEQ ID NO: 1241981
uaagauaucccagggucuu

SEQ ID NO: 1314461 - RNA, 19 nt, Artificial Sequence
  Description of Artificial Sequence: Synthetic oligonucleotide
  Antisense strand to SEQ ID NO: 1314460
aagacccugggauaucuua

SEQ ID NO: 1314462 - RNA, 19 nt, Artificial Sequence
  Description of Artificial Sequence: Synthetic oligonucleotide
  Sense strand starting at position 81 of SEQ ID NO: 1241981
aagauaucccagggucuug

SEQ ID NO: 1314463 - RNA, 19 nt, Artificial Sequence
  Description of Artificial Sequence: Synthetic oligonucleotide
  Antisense strand to SEQ ID NO: 1314462
caagacccugggauaucuu

SEQ ID NO: 1314464 - RNA, 19 nt, Artificial Sequence
  Description of Artificial Sequence: Synthetic oligonucleotide
  Sense strand starting at position 267 of SEQ ID NO: 1241981
aagugagaauuguugugcu

SEQ ID NO: 1314465 - RNA, 19 nt, Artificial Sequence
  Description of Artificial Sequence: Synthetic oligonucleotide
  Antisense strand to SEQ ID NO: 1314464
agcacaacaauucucacuu

SEQ ID NO: 1314466 - RNA, 19 nt, Artificial Sequence
  Description of Artificial Sequence: Synthetic oligonucleotide
  Sense strand starting at position 270 of SEQ ID NO: 1241981
ugagaauuguugugcugcu

SEQ ID NO: 1314467 - RNA, 19 nt, Artificial Sequence
  Description of Artificial Sequence: Synthetic oligonucleotide
  Antisense strand to SEQ ID NO: 1314466
agcagcacaacaauucuca

SEQ ID NO: 1314468 - RNA, 19 nt, Artificial Sequence
  Description of Artificial Sequence: Synthetic oligonucleotide
  Sense strand starting at position 277 of SEQ ID NO: 1241981
uguugugcugcugaaauau

SEQ ID NO: 1314469 - RNA, 19 nt, Artificial Sequence
  Description of Artificial Sequence: Synthetic oligonucleotide
  Antisense strand to SEQ ID NO: 1314468
auauuucagcagcacaaca

SEQ ID NO: 1314470 - RNA, 19 nt, Artificial Sequence
  Description of Artificial Sequence: Synthetic oligonucleotide
  Sense strand starting at position 299 of SEQ ID NO: 1241981
uuuccucugugucagaaca

SEQ ID NO: 1314471 - RNA, 19 nt, Artificial Sequence
  Description of Artificial Sequence: Synthetic oligonucleotide
  Antisense strand to SEQ ID NO: 1314470
uguucugacacagaggaaa

SEQ ID NO: 1314472 - RNA, 19 nt, Artificial Sequence
  Description of Artificial Sequence: Synthetic oligonucleotide
  Sense strand starting at position 350 of SEQ ID NO: 1241981
agcggaauucgcgaaaggu

SEQ ID NO: 1314473 - RNA, 19 nt, Artificial Sequence
  Description of Artificial Sequence: Synthetic oligonucleotide
  Antisense strand to SEQ ID NO: 1314472
accuuucgcgaauuccgcu

SEQ ID NO: 1314474 - RNA, 19 nt, Artificial Sequence
  Description of Artificial Sequence: Synthetic oligonucleotide
  Sense strand starting at position 351 of SEQ ID NO: 1241981
gcggaauucgcgaaaggug

SEQ ID NO: 1314475 - RNA, 19 nt, Artificial Sequence
  Description of Artificial Sequence: Synthetic oligonucleotide
  Antisense strand to SEQ ID NO: 1314474
caccuuucgcgaauuccgc

SEQ ID NO: 1314476 - RNA, 19 nt, Artificial Sequence
  Description of Artificial Sequence: Synthetic oligonucleotide
  Sense strand starting at position 352 of SEQ ID NO: 1241981
cggaauucgcgaaaggugu

SEQ ID NO: 1314477 - RNA, 19 nt, Artificial Sequence
  Description of Artificial Sequence: Synthetic oligonucleotide
  Antisense strand to SEQ ID NO: 1314476
acaccuuucgcgaauuccg

SEQ ID NO: 1314478 - RNA, 19 nt, Artificial Sequence
  Description of Artificial Sequence: Synthetic oligonucleotide
  Sense strand starting at position 354 of SEQ ID NO: 1241981
gaauucgcgaaagguguaa

SEQ ID NO: 1314479 - RNA, 19 nt, Artificial Sequence
  Description of Artificial Sequence: Synthetic oligonucleotide
  Antisense strand to SEQ ID NO: 1314478
uuacaccuuucgcgaauuc

SEQ ID NO: 1314480 - RNA, 19 nt, Artificial Sequence
  Description of Artificial Sequence: Synthetic oligonucleotide
  Sense strand starting at position 467 of SEQ ID NO: 1241981
acgcaauugugcucugagu

SEQ ID NO: 1314481 - RNA, 19 nt, Artificial Sequence
  Description of Artificial Sequence: Synthetic oligonucleotide
  Antisense strand to SEQ ID NO: 1314480
acucagagcacaauugcgu

SEQ ID NO: 1314482 - RNA, 19 nt, Artificial Sequence
  Description of Artificial Sequence: Synthetic oligonucleotide
  Sense strand starting at position 468 of SEQ ID NO: 1241981
cgcaauugugcucugaguc

SEQ ID NO: 1314483 - RNA, 19 nt, Artificial Sequence
  Description of Artificial Sequence: Synthetic oligonucleotide
  Antisense strand to SEQ ID NO: 1314482
gacucagagcacaauugcg

SEQ ID NO: 1314484 - RNA, 19 nt, Artificial Sequence
  Description of Artificial Sequence: Synthetic oligonucleotide
  Sense strand starting at position 776 of SEQ ID NO: 1241981
ugcggcagccuguuuaauu

SEQ ID NO: 1314485 - RNA, 19 nt, Artificial Sequence
  Description of Artificial Sequence: Synthetic oligonucleotide
  Antisense strand to SEQ ID NO: 1314484
aauuaaacaggcugccgca

SEQ ID NO: 1314486 - RNA, 19 nt, Artificial Sequence
  Description of Artificial Sequence: Synthetic oligonucleotide
  Sense strand starting at position 777 of SEQ ID NO: 1241981
gcggcagccuguuuaauua

SEQ ID NO: 1314487 - RNA, 19 nt, Artificial Sequence
  Description of Artificial Sequence: Synthetic oligonucleotide
  Antisense strand to SEQ ID NO: 1314486
uaauuaaacaggcugccgc

SEQ ID NO: 1314488 - RNA, 19 nt, Artificial Sequence
  Description of Artificial Sequence: Synthetic oligonucleotide
  Sense strand starting at position 793 of SEQ ID NO: 1241981
uuaaucuaauugcaggauu

SEQ ID NO: 1314489 - RNA, 19 nt, Artificial Sequence
  Description of Artificial Sequence: Synthetic oligonucleotide
  Antisense strand to SEQ ID NO: 1314488
aauccugcaauuagauuaa

SEQ ID NO: 1314490 - RNA, 19 nt, Artificial Sequence
  Description of Artificial Sequence: Synthetic oligonucleotide
  Sense strand starting at position 962 of SEQ ID NO: 1241981
cccagagugguagguaaug

SEQ ID NO: 1314491 - RNA, 19 nt, Artificial Sequence
  Description of Artificial Sequence: Synthetic oligonucleotide
  Antisense strand to SEQ ID NO: 1314490
cauuaccuaccacucuggg

SEQ ID NO: 1314492 - RNA, 19 nt, Artificial Sequence
  Description of Artificial Sequence: Synthetic oligonucleotide
  Sense strand starting at position 1052 of SEQ ID NO: 1241981
ugggaucagucucaggaga

SEQ ID NO: 1314493 - RNA, 19 nt, Artificial Sequence
  Description of Artificial Sequence: Synthetic oligonucleotide
  Antisense strand to SEQ ID NO: 1314492
ucuccugagacugauccca

SEQ ID NO: 1314494 - RNA, 19 nt, Artificial Sequence
  Description of Artificial Sequence: Synthetic oligonucleotide
  Sense strand starting at position 1054 of SEQ ID NO: 1241981
ggaucagucucaggagaga

SEQ ID NO: 1314495 - RNA, 19 nt, Artificial Sequence
  Description of Artificial Sequence: Synthetic oligonucleotide
  Antisense strand to SEQ ID NO: 1314494
ucucuccugagacugaucc

SEQ ID NO: 1314496 - RNA, 19 nt, Artificial Sequence
  Description of Artificial Sequence: Synthetic oligonucleotide
  Sense strand starting at position 1591 of SEQ ID NO: 1241981
acguguuaccugcugccaa

SEQ ID NO: 1314497 - RNA, 19 nt, Artificial Sequence
  Description of Artificial Sequence: Synthetic oligonucleotide
  Antisense strand to SEQ ID NO: 1314496
uuggcagcagguaacacgu

SEQ ID NO: 1314498 - RNA, 19 nt, Artificial Sequence
  Description of Artificial Sequence: Synthetic oligonucleotide
  Sense strand starting at position 2047 of SEQ ID NO: 1241981
gccugucacucagacucau

SEQ ID NO: 1314499 - RNA, 19 nt, Artificial Sequence
  Description of Artificial Sequence: Synthetic oligonucleotide
  Antisense strand to SEQ ID NO: 1314498
augagucugagugacaggc

SEQ ID NO: 1314500 - RNA, 19 nt, Artificial Sequence
  Description of Artificial Sequence: Synthetic oligonucleotide
  Sense strand starting at position 2235 of SEQ ID NO: 1241981
ugaccaguccuccgugaug

SEQ ID NO: 1314501 - RNA, 19 nt, Artificial Sequence
  Description of Artificial Sequence: Synthetic oligonucleotide
  Antisense strand to SEQ ID NO: 1314500
caucacggaggacugguca

SEQ ID NO: 1314502 - RNA, 19 nt, Artificial Sequence
  Description of Artificial Sequence: Synthetic oligonucleotide
  Sense strand starting at position 2395 of SEQ ID NO: 1241981
gcgcuaguuaccuaguguu

SEQ ID NO: 1314503 - RNA, 19 nt, Artificial Sequence
  Description of Artificial Sequence: Synthetic oligonucleotide
  Antisense strand to SEQ ID NO: 1314502
aacacuagguaacuagcgc

SEQ ID NO: 1314504 - RNA, 19 nt, Artificial Sequence
  Description of Artificial Sequence: Synthetic oligonucleotide
  Sense strand starting at position 2398 of SEQ ID NO: 1241981
cuaguuaccuaguguucca

SEQ ID NO: 1314505 - RNA, 19 nt, Artificial Sequence
  Description of Artificial Sequence: Synthetic oligonucleotide
  Antisense strand to SEQ ID NO: 1314504
uggaacacuagguaacuag

SEQ ID NO: 1314506 - RNA, 19 nt, Artificial Sequence
  Description of Artificial Sequence: Synthetic oligonucleotide
  Sense strand starting at position 2401 of SEQ ID NO: 1241981
guuaccuaguguuccaaag

SEQ ID NO: 1314507 - RNA, 19 nt, Artificial Sequence
  Description of Artificial Sequence: Synthetic oligonucleotide
  Antisense strand to SEQ ID NO: 1314506
cuuuggaacacuagguaac

SEQ ID NO: 1314508 - RNA, 19 nt, Artificial Sequence
  Description of Artificial Sequence: Synthetic oligonucleotide
  Sense strand starting at position 2782 of SEQ ID NO: 1241981
gggcguggucccggaggua

SEQ ID NO: 1314509 - RNA, 19 nt, Artificial Sequence
  Description of Artificial Sequence: Synthetic oligonucleotide
  Antisense strand to SEQ ID NO: 1314508
uaccuccgggaccacgccc

SEQ ID NO: 1314510 - RNA, 19 nt, Artificial Sequence
  Description of Artificial Sequence: Synthetic oligonucleotide
  Sense strand starting at position 2812 of SEQ ID NO: 1241981
cguccucagcuguauggua

SEQ ID NO: 1314511 - RNA, 19 nt, Artificial Sequence
  Description of Artificial Sequence: Synthetic oligonucleotide
  Antisense strand to SEQ ID NO: 1314510
uaccauacagcugaggacg

SEQ ID NO: 1314512 - RNA, 19 nt, Artificial Sequence
  Description of Artificial Sequence: Synthetic oligonucleotide
  Sense strand starting at position 2814 of SEQ ID NO: 1241981
uccucagcuguaugguaau

SEQ ID NO: 1314513 - RNA, 19 nt, Artificial Sequence
  Description of Artificial Sequence: Synthetic oligonucleotide
  Antisense strand to SEQ ID NO: 1314512
auuaccauacagcugagga

SEQ ID NO: 1314514 - RNA, 19 nt, Artificial Sequence
  Description of Artificial Sequence: Synthetic oligonucleotide
  Sense strand starting at position 2820 of SEQ ID NO: 1241981
gcuguaugguaaugagguu

SEQ ID NO: 1314515 - RNA, 19 nt, Artificial Sequence
  Description of Artificial Sequence: Synthetic oligonucleotide
  Antisense strand to SEQ ID NO: 1314514
aaccucauuaccauacagc

SEQ ID NO: 1314516 - RNA, 19 nt, Artificial Sequence
  Description of Artificial Sequence: Synthetic oligonucleotide
  Sense strand starting at position 3080 of SEQ ID NO: 1241981
ugcggagcuguuugaguuu

SEQ ID NO: 1314517 - RNA, 19 nt, Artificial Sequence
  Description of Artificial Sequence: Synthetic oligonucleotide
  Antisense strand to SEQ ID NO: 1314516
aaacucaaacagcuccgca

SEQ ID NO: 1314518 - RNA, 19 nt, Artificial Sequence
  Description of Artificial Sequence: Synthetic oligonucleotide
  Sense strand starting at position 3325 of SEQ ID NO: 1241981
ggcuguagucgggcgguaa

SEQ ID NO: 1314519 - RNA, 19 nt, Artificial Sequence
  Description of Artificial Sequence: Synthetic oligonucleotide
  Antisense strand to SEQ ID NO: 1314518
uuaccgcccgacuacagcc

SEQ ID NO: 1314520 - RNA, 19 nt, Artificial Sequence
  Description of Artificial Sequence: Synthetic oligonucleotide
  Sense strand starting at position 3327 of SEQ ID NO: 1241981
cuguagucgggcgguaaga

SEQ ID NO: 1314521 - RNA, 19 nt, Artificial Sequence
  Description of Artificial Sequence: Synthetic oligonucleotide
  Antisense strand to SEQ ID NO: 1314520
ucuuaccgcccgacuacag

SEQ ID NO: 1314522 - RNA, 19 nt, Artificial Sequence
  Description of Artificial Sequence: Synthetic oligonucleotide
  Sense strand starting at position 3433 of SEQ ID NO: 1241981
ugccgagcauggucugauu

SEQ ID NO: 1314523 - RNA, 19 nt, Artificial Sequence
  Description of Artificial Sequence: Synthetic oligonucleotide
  Antisense strand to SEQ ID NO: 1314522
aaucagaccaugcucggca

SEQ ID NO: 1314524 - RNA, 19 nt, Artificial Sequence
  Description of Artificial Sequence: Synthetic oligonucleotide
  Sense strand starting at position 3673 of SEQ ID NO: 1241981
ggcugcgcucgggaguuaa

SEQ ID NO: 1314525 - RNA, 19 nt, Artificial Sequence
  Description of Artificial Sequence: Synthetic oligonucleotide
  Antisense strand to SEQ ID NO: 1314524
uuaacucccgagcgcagcc

SEQ ID NO: 1314526 - RNA, 19 nt, Artificial Sequence
  Description of Artificial Sequence: Synthetic oligonucleotide
  Sense strand starting at position 3677 of SEQ ID NO: 1241981
gcgcucgggaguuaaugua

SEQ ID NO: 1314527 - RNA, 19 nt, Artificial Sequence
  Description of Artificial Sequence: Synthetic oligonucleotide
  Antisense strand to SEQ ID NO: 1314526
uacauuaacucccgagcgc

SEQ ID NO: 1314528 - RNA, 19 nt, Artificial Sequence
  Description of Artificial Sequence: Synthetic oligonucleotide
  Sense strand starting at position 3684 of SEQ ID NO: 1241981
ggaguuaauguagguuaug

SEQ ID NO: 1314529 - RNA, 19 nt, Artificial Sequence
  Description of Artificial Sequence: Synthetic oligonucleotide
  Antisense strand to SEQ ID NO: 1314528
cauaaccuacauuaacucc

SEQ ID NO: 1314530 - RNA, 19 nt, Artificial Sequence
  Description of Artificial Sequence: Synthetic oligonucleotide
  Sense strand starting at position 3789 of SEQ ID NO: 1241981
ccgccuauacccuauggau

SEQ ID NO: 1314531 - RNA, 19 nt, Artificial Sequence
  Description of Artificial Sequence: Synthetic oligonucleotide
  Antisense strand to SEQ ID NO: 1314530
auccauaggguauaggcgg

SEQ ID NO: 1314532 - RNA, 19 nt, Artificial Sequence
  Description of Artificial Sequence: Synthetic oligonucleotide
  Sense strand starting at position 3812 of SEQ ID NO: 1241981
ggacuugccucucuaagau

SEQ ID NO: 1314533 - RNA, 19 nt, Artificial Sequence
  Description of Artificial Sequence: Synthetic oligonucleotide
  Antisense strand to SEQ ID NO: 1314532
aucuuagagaggcaagucc

SEQ ID NO: 1314534 - RNA, 19 nt, Artificial Sequence
  Description of Artificial Sequence: Synthetic oligonucleotide
  Sense strand starting at position 3903 of SEQ ID NO: 1241981
aauccuggcccaggaguua

SEQ ID NO: 1314535 - RNA, 19 nt, Artificial Sequence
  Description of Artificial Sequence: Synthetic oligonucleotide
  Antisense strand to SEQ ID NO: 1314534
uaacuccugggccaggauu

SEQ ID NO: 1314536 - RNA, 19 nt, Artificial Sequence
  Description of Artificial Sequence: Synthetic oligonucleotide
  Sense strand starting at position 3973 of SEQ ID NO: 1241981
ggagacaucuagucccaca

SEQ ID NO: 1314537 - RNA, 19 nt, Artificial Sequence
  Description of Artificial Sequence: Synthetic oligonucleotide
  Antisense strand to SEQ ID NO: 1314536
ugugggacuagaugucucc

SEQ ID NO: 1314538 - RNA, 19 nt, Artificial Sequence
  Description of Artificial Sequence: Synthetic oligonucleotide
  Sense strand starting at position 30 of SEQ ID NO: 1241982
uaagcaucuggucacaagu

SEQ ID NO: 1314539 - RNA, 19 nt, Artificial Sequence
  Description of Artificial Sequence: Synthetic oligonucleotide
  Antisense strand to SEQ ID NO: 1314538
acuugugaccagaugcuua

SEQ ID NO: 1314540 - RNA, 19 nt, Artificial Sequence
  Description of Artificial Sequence: Synthetic oligonucleotide
  Sense strand starting at position 120 of SEQ ID NO: 1241982
ccguuuauuuaguucuaca

SEQ ID NO: 1314541 - RNA, 19 nt, Artificial Sequence
  Description of Artificial Sequence: Synthetic oligonucleotide
  Antisense strand to SEQ ID NO: 1314540
uguagaacuaaauaaacgg

SEQ ID NO: 1314542 - RNA, 19 nt, Artificial Sequence
  Description of Artificial Sequence: Synthetic oligonucleotide
  Sense strand starting at position 258 of SEQ ID NO: 1241982
cucuucuaacccugaggaa

SEQ ID NO: 1314543 - RNA, 19 nt, Artificial Sequence
  Description of Artificial Sequence: Synthetic oligonucleotide
  Antisense strand to SEQ ID NO: 1314542
uuccucaggguuagaagag

SEQ ID NO: 1314544 - RNA, 19 nt, Artificial Sequence
  Description of Artificial Sequence: Synthetic oligonucleotide
  Sense strand starting at position 360 of SEQ ID NO: 1241982
agcucagcucuauaugaau

SEQ ID NO: 1314545 - RNA, 19 nt, Artificial Sequence
  Description of Artificial Sequence: Synthetic oligonucleotide
  Antisense strand to SEQ ID NO: 1314544
auucauauagagcugagcu

SEQ ID NO: 1314546 - RNA, 19 nt, Artificial Sequence
  Description of Artificial Sequence: Synthetic oligonucleotide
  Sense strand starting at position 440 of SEQ ID NO: 1241982
ggccaaguggauuacacua

SEQ ID NO: 1314547 - RNA, 19 nt, Artificial Sequence
  Description of Artificial Sequence: Synthetic oligonucleotide
  Antisense strand to SEQ ID NO: 1314546
uaguguaauccacuuggcc

SEQ ID NO: 1314548 - RNA, 19 nt, Artificial Sequence
  Description of Artificial Sequence: Synthetic oligonucleotide
  Sense strand starting at position 777 of SEQ ID NO: 1241982
augggagucuaucuaugag

SEQ ID NO: 1314549 - RNA, 19 nt, Artificial Sequence
  Description of Artificial Sequence: Synthetic oligonucleotide
  Antisense strand to SEQ ID NO: 1314548
cucauagauagacucccau

SEQ ID NO: 1314550 - RNA, 19 nt, Artificial Sequence
  Description of Artificial Sequence: Synthetic oligonucleotide
  Sense strand starting at position 780 of SEQ ID NO: 1241982
ggagucuaucuaugaguaa

SEQ ID NO: 1314551 - RNA, 19 nt, Artificial Sequence
  Description of Artificial Sequence: Synthetic oligonucleotide
  Antisense strand to SEQ ID NO: 1314550
uuacucauagauagacucc

SEQ ID NO: 1314552 - RNA, 19 nt, Artificial Sequence
  Description of Artificial Sequence: Synthetic oligonucleotide
  Sense strand starting at position 784 of SEQ ID NO: 1241982
ucuaucuaugaguaaacga

SEQ ID NO: 1314553 - RNA, 19 nt, Artificial Sequence
  Description of Artificial Sequence: Synthetic oligonucleotide
  Antisense strand to SEQ ID NO: 1314552
ucguuuacucauagauaga

SEQ ID NO: 1314554 - RNA, 19 nt, Artificial Sequence
  Description of Artificial Sequence: Synthetic oligonucleotide
  Sense strand starting at position 808 of SEQ ID NO: 1241982
caaggcuugguuuaaacau

SEQ ID NO: 1314555 - RNA, 19 nt, Artificial Sequence
  Description of Artificial Sequence: Synthetic oligonucleotide
  Antisense strand to SEQ ID NO: 1314554
auguuuaaaccaagccuug

SEQ ID NO: 1314556 - RNA, 19 nt, Artificial Sequence
  Description of Artificial Sequence: Synthetic oligonucleotide
  Sense strand starting at position 851 of SEQ ID NO: 1241982
aguccaaucuccuugagaa

SEQ ID NO: 1314557 - RNA, 19 nt, Artificial Sequence
  Description of Artificial Sequence: Synthetic oligonucleotide
  Antisense strand to SEQ ID NO: 1314556
uucucaaggagauuggacu

SEQ ID NO: 1314558 - RNA, 19 nt, Artificial Sequence
  Description of Artificial Sequence: Synthetic oligonucleotide
  Sense strand starting at position 852 of SEQ ID NO: 1241982
guccaaucuccuugagaaa

SEQ ID NO: 1314559 - RNA, 19 nt, Artificial Sequence
  Description of Artificial Sequence: Synthetic oligonucleotide
  Antisense strand to SEQ ID NO: 1314558
uuucucaaggagauuggac

SEQ ID NO: 1314560 - RNA, 19 nt, Artificial Sequence
  Description of Artificial Sequence: Synthetic oligonucleotide
  Sense strand starting at position 864 of SEQ ID NO: 1241982
ugagaaacaugucuacuuc

SEQ ID NO: 1314561 - RNA, 19 nt, Artificial Sequence
  Description of Artificial Sequence: Synthetic oligonucleotide
  Antisense strand to SEQ ID NO: 1314560
gaaguagacauguuucuca

SEQ ID NO: 1314562 - RNA, 19 nt, Artificial Sequence
  Description of Artificial Sequence: Synthetic oligonucleotide
  Sense strand starting at position 2550 of SEQ ID NO: 1241982
ucgaaagugcaguacauaa

SEQ ID NO: 1314563 - RNA, 19 nt, Artificial Sequence
  Description of Artificial Sequence: Synthetic oligonucleotide
  Antisense strand to SEQ ID NO: 1314562
uuauguacugcacuuucga

SEQ ID NO: 1314564 - RNA, 19 nt, Artificial Sequence
  Description of Artificial Sequence: Synthetic oligonucleotide
  Sense strand starting at position 2665 of SEQ ID NO: 1241982
acgguuauucuagacagca

SEQ ID NO: 1314565 - RNA, 19 nt, Artificial Sequence
  Description of Artificial Sequence: Synthetic oligonucleotide
  Antisense strand to SEQ ID NO: 1314564
ugcugucuagaauaaccgu

SEQ ID NO: 1314566 - RNA, 19 nt, Artificial Sequence
  Description of Artificial Sequence: Synthetic oligonucleotide
  Sense strand starting at position 2777 of SEQ ID NO: 1241982
cuaaacuuugaaugguuga

SEQ ID NO: 1314567 - RNA, 19 nt, Artificial Sequence
  Description of Artificial Sequence: Synthetic oligonucleotide
  Antisense strand to SEQ ID NO: 1314566
ucaaccauucaaaguuuag

SEQ ID NO: 1314568 - RNA, 19 nt, Artificial Sequence
  Description of Artificial Sequence: Synthetic oligonucleotide
  Sense strand starting at position 2859 of SEQ ID NO: 1241982
gcuuaaaucacaggguaag

SEQ ID NO: 1314569 - RNA, 19 nt, Artificial Sequence
  Description of Artificial Sequence: Synthetic oligonucleotide
  Antisense strand to SEQ ID NO: 1314568
cuuacccugugauuuaagc

SEQ ID NO: 1314570 - RNA, 19 nt, Artificial Sequence
  Description of Artificial Sequence: Synthetic oligonucleotide
  Sense strand starting at position 2931 of SEQ ID NO: 1241982
gguggugugauugagauau

SEQ ID NO: 1314571 - RNA, 19 nt, Artificial Sequence
  Description of Artificial Sequence: Synthetic oligonucleotide
  Antisense strand to SEQ ID NO: 1314570
auaucucaaucacaccacc

SEQ ID NO: 1314572 - RNA, 19 nt, Artificial Sequence
  Description of Artificial Sequence: Synthetic oligonucleotide
  Sense strand starting at position 2954 of SEQ ID NO: 1241982
gucuuuaugcaccacagaa

SEQ ID NO: 1314573 - RNA, 19 nt, Artificial Sequence
  Description of Artificial Sequence: Synthetic oligonucleotide
  Antisense strand to SEQ ID NO: 1314572
uucuguggugcauaaagac

SEQ ID NO: 1314574 - RNA, 19 nt, Artificial Sequence
  Description of Artificial Sequence: Synthetic oligonucleotide
  Sense strand starting at position 2988 of SEQ ID NO: 1241982
ugacuaagggcguggauaa

SEQ ID NO: 1314575 - RNA, 19 nt, Artificial Sequence
  Description of Artificial Sequence: Synthetic oligonucleotide
  Antisense strand to SEQ ID NO: 1314574
uuauccacgcccuuaguca

SEQ ID NO: 1314576 - RNA, 19 nt, Artificial Sequence
  Description of Artificial Sequence: Synthetic oligonucleotide
  Sense strand starting at position 3028 of SEQ ID NO: 1241982
gacauaaacgcugaguuua

SEQ ID NO: 1314577 - RNA, 19 nt, Artificial Sequence
  Description of Artificial Sequence: Synthetic oligonucleotide
  Antisense strand to SEQ ID NO: 1314576
uaaacucagcguuuauguc

SEQ ID NO: 1314578 - RNA, 19 nt, Artificial Sequence
  Description of Artificial Sequence: Synthetic oligonucleotide
  Sense strand starting at position 3120 of SEQ ID NO: 1241982
aagauuaauguuugaggca

SEQ ID NO: 1314579 - RNA, 19 nt, Artificial Sequence
  Description of Artificial Sequence: Synthetic oligonucleotide
  Antisense strand to SEQ ID NO: 1314578
ugccucaaacauuaaucuu

SEQ ID NO: 1314580 - RNA, 19 nt, Artificial Sequence
  Description of Artificial Sequence: Synthetic oligonucleotide
  Sense strand starting at position 3127 of SEQ ID NO: 1241982
auguuugaggcagaugauu

SEQ ID NO: 1314581 - RNA, 19 nt, Artificial Sequence
  Description of Artificial Sequence: Synthetic oligonucleotide
  Antisense strand to SEQ ID NO: 1314580
aaucaucugccucaaacau

SEQ ID NO: 1314582 - RNA, 19 nt, Artificial Sequence
  Description of Artificial Sequence: Synthetic oligonucleotide
  Sense strand starting at position 3234 of SEQ ID NO: 1241982
agucuugaaugcuccaaga

SEQ ID NO: 1314583 - RNA, 19 nt, Artificial Sequence
  Description of Artificial Sequence: Synthetic oligonucleotide
  Antisense strand to SEQ ID NO: 1314582
ucuuggagcauucaagacu

SEQ ID NO: 1314584 - RNA, 19 nt, Artificial Sequence
  Description of Artificial Sequence: Synthetic oligonucleotide
  Sense strand starting at position 3329 of SEQ ID NO: 1241982
uugggaagaugacuuugua

SEQ ID NO: 1314585 - RNA, 19 nt, Artificial Sequence
  Description of Artificial Sequence: Synthetic oligonucleotide
  Antisense strand to SEQ ID NO: 1314584
uacaaagucaucuucccaa

SEQ ID NO: 1314586 - RNA, 19 nt, Artificial Sequence
  Description of Artificial Sequence: Synthetic oligonucleotide
  Sense strand starting at position 3333 of SEQ ID NO: 1241982
gaagaugacuuuguagcau

SEQ ID NO: 1314587 - RNA, 19 nt, Artificial Sequence
  Description of Artificial Sequence: Synthetic oligonucleotide
  Antisense strand to SEQ ID NO: 1314586
augcuacaaagucaucuuc

SEQ ID NO: 1314588 - RNA, 19 nt, Artificial Sequence
  Description of Artificial Sequence: Synthetic oligonucleotide
  Sense strand starting at position 3558 of SEQ ID NO: 1241982
uuguuacuacuagauucua

SEQ ID NO: 1314589 - RNA, 19 nt, Artificial Sequence
  Description of Artificial Sequence: Synthetic oligonucleotide
  Antisense strand to SEQ ID NO: 1314588
uagaaucuaguaguaacaa

SEQ ID NO: 1314590 - RNA, 19 nt, Artificial Sequence
  Description of Artificial Sequence: Synthetic oligonucleotide
  Sense strand starting at position 3574 of SEQ ID NO: 1241982
cuagaugagucucuuaauc

SEQ ID NO: 1314591 - RNA, 19 nt, Artificial Sequence
  Description of Artificial Sequence: Synthetic oligonucleotide
  Antisense strand to SEQ ID NO: 1314590
gauuaagagacucaucuag

SEQ ID NO: 1314592 - RNA, 19 nt, Artificial Sequence
  Description of Artificial Sequence: Synthetic oligonucleotide
  Sense strand starting at position 3579 of SEQ ID NO: 1241982
ugagucucuuaaucuuuga

SEQ ID NO: 1314593 - RNA, 19 nt, Artificial Sequence
  Description of Artificial Sequence: Synthetic oligonucleotide
  Antisense strand to SEQ ID NO: 1314592
ucaaagauuaagagacuca

SEQ ID NO: 1314594 - RNA, 19 nt, Artificial Sequence
  Description of Artificial Sequence: Synthetic oligonucleotide
  Sense strand starting at position 3651 of SEQ ID NO: 1241982
ucagguuuccaagaguguu

SEQ ID NO: 1314595 - RNA, 19 nt, Artificial Sequence
  Description of Artificial Sequence: Synthetic oligonucleotide
  Antisense strand to SEQ ID NO: 1314594
aacacucuuggaaaccuga

SEQ ID NO: 1314596 - RNA, 19 nt, Artificial Sequence
  Description of Artificial Sequence: Synthetic oligonucleotide
  Sense strand starting at position 3659 of SEQ ID NO: 1241982
ccaagaguguuacuaauuc

SEQ ID NO: 1314597 - RNA, 19 nt, Artificial Sequence
  Description of Artificial Sequence: Synthetic oligonucleotide
  Antisense strand to SEQ ID NO: 1314596
gaauuaguaacacucuugg

SEQ ID NO: 1314598 - RNA, 19 nt, Artificial Sequence
  Description of Artificial Sequence: Synthetic oligonucleotide
  Sense strand starting at position 3715 of SEQ ID NO: 1241982
acagcauuccaugaaguuu

SEQ ID NO: 1314599 - RNA, 19 nt, Artificial Sequence
  Description of Artificial Sequence: Synthetic oligonucleotide
  Antisense strand to SEQ ID NO: 1314598
aaacuucauggaaugcugu

SEQ ID NO: 1314600 - RNA, 19 nt, Artificial Sequence
  Description of Artificial Sequence: Synthetic oligonucleotide
  Sense strand starting at position 3771 of SEQ ID NO: 1241982
ucuuccucucgguaucaaa

SEQ ID NO: 1314601 - RNA, 19 nt, Artificial Sequence
  Description of Artificial Sequence: Synthetic oligonucleotide
  Antisense strand to SEQ ID NO: 1314600
uuugauaccgagaggaaga

SEQ ID NO: 1314602 - RNA, 19 nt, Artificial Sequence
  Description of Artificial Sequence: Synthetic oligonucleotide
  Sense strand starting at position 3839 of SEQ ID NO: 1241982
uuaaauggcuucuugauag

SEQ ID NO: 1314603 - RNA, 19 nt, Artificial Sequence
  Description of Artificial Sequence: Synthetic oligonucleotide
  Antisense strand to SEQ ID NO: 1314602
cuaucaagaagccauuuaa

SEQ ID NO: 1314604 - RNA, 19 nt, Artificial Sequence
  Description of Artificial Sequence: Synthetic oligonucleotide
  Sense strand starting at position 3849 of SEQ ID NO: 1241982
ucuugauagcuguaucuua

SEQ ID NO: 1314605 - RNA, 19 nt, Artificial Sequence
  Description of Artificial Sequence: Synthetic oligonucleotide
  Antisense strand to SEQ ID NO: 1314604
uaagauacagcuaucaaga

SEQ ID NO: 1314606 - RNA, 19 nt, Artificial Sequence
  Description of Artificial Sequence: Synthetic oligonucleotide
  Sense strand starting at position 3869 of SEQ ID NO: 1241982
gguugcaaaugacuaauua

SEQ ID NO: 1314607 - RNA, 19 nt, Artificial Sequence
  Description of Artificial Sequence: Synthetic oligonucleotide
  Antisense strand to SEQ ID NO: 1314606
uaauuagucauuugcaacc

SEQ ID NO: 1314608 - RNA, 19 nt, Artificial Sequence
  Description of Artificial Sequence: Synthetic oligonucleotide
  Sense strand starting at position 3870 of SEQ ID NO: 1241982
guugcaaaugacuaauuaa

SEQ ID NO: 1314609 - RNA, 19 nt, Artificial Sequence
  Description of Artificial Sequence: Synthetic oligonucleotide
  Antisense strand to SEQ ID NO: 1314608
uuaauuagucauuugcaac

SEQ ID NO: 1314610 - RNA, 19 nt, Artificial Sequence
  Description of Artificial Sequence: Synthetic oligonucleotide
  Sense strand starting at position 3873 of SEQ ID NO: 1241982
gcaaaugacuaauuaaguc

SEQ ID NO: 1314611 - RNA, 19 nt, Artificial Sequence
  Description of Artificial Sequence: Synthetic oligonucleotide
  Antisense strand to SEQ ID NO: 1314610
gacuuaauuagucauuugc

SEQ ID NO: 1314612 - RNA, 19 nt, Artificial Sequence
  Description of Artificial Sequence: Synthetic oligonucleotide
  Sense strand starting at position 3881 of SEQ ID NO: 1241982
cuaauuaagucuccuggaa

SEQ ID NO: 1314613 - RNA, 19 nt, Artificial Sequence
  Description of Artificial Sequence: Synthetic oligonucleotide
  Antisense strand to SEQ ID NO: 1314612
uuccaggagacuuaauuag

SEQ ID NO: 1314614 - RNA, 19 nt, Artificial Sequence
  Description of Artificial Sequence: Synthetic oligonucleotide
  Sense strand starting at position 3885 of SEQ ID NO: 1241982
uuaagucuccuggaauuac

SEQ ID NO: 1314615 - RNA, 19 nt, Artificial Sequence
  Description of Artificial Sequence: Synthetic oligonucleotide
  Antisense strand to SEQ ID NO: 1314614
guaauuccaggagacuuaa

SEQ ID NO: 1314616 - RNA, 19 nt, Artificial Sequence
  Description of Artificial Sequence: Synthetic oligonucleotide
  Sense strand starting at position 3920 of SEQ ID NO: 1241982
guccaaucugaucagucaa

SEQ ID NO: 1314617 - RNA, 19 nt, Artificial Sequence
  Description of Artificial Sequence: Synthetic oligonucleotide
  Antisense strand to SEQ ID NO: 1314616
uugacugaucagauuggac

SEQ ID NO: 1314618 - RNA, 19 nt, Artificial Sequence
  Description of Artificial Sequence: Synthetic oligonucleotide
  Sense strand starting at position 73 of SEQ ID NO: 1241983
aggaaaguauuccuggcaa

SEQ ID NO: 1314619 - RNA, 19 nt, Artificial Sequence
  Description of Artificial Sequence: Synthetic oligonucleotide
  Antisense strand to SEQ ID NO: 1314618
uugccaggaauacuuuccu

SEQ ID NO: 1314620 - RNA, 19 nt, Artificial Sequence
  Description of Artificial Sequence: Synthetic oligonucleotide
  Sense strand starting at position 75 of SEQ ID NO: 1241983
gaaaguauuccuggcaaug

SEQ ID NO: 1314621 - RNA, 19 nt, Artificial Sequence
  Description of Artificial Sequence: Synthetic oligonucleotide
  Antisense strand to SEQ ID NO: 1314620
cauugccaggaauacuuuc

SEQ ID NO: 1314622 - RNA, 19 nt, Artificial Sequence
  Description of Artificial Sequence: Synthetic oligonucleotide
  Sense strand starting at position 154 of SEQ ID NO: 1241983
ccucauuuaugugacacua

SEQ ID NO: 1314623 - RNA, 19 nt, Artificial Sequence
  Description of Artificial Sequence: Synthetic oligonucleotide
  Antisense strand to SEQ ID NO: 1314622
uagugucacauaaaugagg

SEQ ID NO: 1314624 - RNA, 19 nt, Artificial Sequence
  Description of Artificial Sequence: Synthetic oligonucleotide
  Sense strand starting at position 177 of SEQ ID NO: 1241983
agugccuggcuaugaauaa

SEQ ID NO: 1314625 - RNA, 19 nt, Artificial Sequence
  Description of Artificial Sequence: Synthetic oligonucleotide
  Antisense strand to SEQ ID NO: 1314624
uuauucauagccaggcacu

SEQ ID NO: 1314626 - RNA, 19 nt, Artificial Sequence
  Description of Artificial Sequence: Synthetic oligonucleotide
  Sense strand starting at position 232 of SEQ ID NO: 1241983
cagguauagacagggugaa

SEQ ID NO: 1314627 - RNA, 19 nt, Artificial Sequence
  Description of Artificial Sequence: Synthetic oligonucleotide
  Antisense strand to SEQ ID NO: 1314626
uucacccugucuauaccug

SEQ ID NO: 1314628 - RNA, 19 nt, Artificial Sequence
  Description of Artificial Sequence: Synthetic oligonucleotide
  Sense strand starting at position 598 of SEQ ID NO: 1241983
gacaaauggucuuacagga

SEQ ID NO: 1314629 - RNA, 19 nt, Artificial Sequence
  Description of Artificial Sequence: Synthetic oligonucleotide
  Antisense strand to SEQ ID NO: 1314628
uccuguaagaccauuuguc

SEQ ID NO: 1314630 - RNA, 19 nt, Artificial Sequence
  Description of Artificial Sequence: Synthetic oligonucleotide
  Sense strand starting at position 646 of SEQ ID NO: 1241983
cagcacauguggcuaaaua

SEQ ID NO: 1314631 - RNA, 19 nt, Artificial Sequence
  Description of Artificial Sequence: Synthetic oligonucleotide
  Antisense strand to SEQ ID NO: 1314630
uauuuagccacaugugcug

SEQ ID NO: 1314632 - RNA, 19 nt, Artificial Sequence
  Description of Artificial Sequence: Synthetic oligonucleotide
  Sense strand starting at position 647 of SEQ ID NO: 1241983
agcacauguggcuaaauau

SEQ ID NO: 1314633 - RNA, 19 nt, Artificial Sequence
  Description of Artificial Sequence: Synthetic oligonucleotide
  Antisense strand to SEQ ID NO: 1314632
auauuuagccacaugugcu

SEQ ID NO: 1314634 - RNA, 19 nt, Artificial Sequence
  Description of Artificial Sequence: Synthetic oligonucleotide
  Sense strand starting at position 789 of SEQ ID NO: 1241983
gggugauuggugugguuuc

SEQ ID NO: 1314635 - RNA, 19 nt, Artificial Sequence
  Description of Artificial Sequence: Synthetic oligonucleotide
  Antisense strand to SEQ ID NO: 1314634
gaaaccacaccaaucaccc

SEQ ID NO: 1314636 - RNA, 19 nt, Artificial Sequence
  Description of Artificial Sequence: Synthetic oligonucleotide
  Sense strand starting at position 980 of SEQ ID NO: 1241983
ucaugagccucuuuagaga

SEQ ID NO: 1314637 - RNA, 19 nt, Artificial Sequence
  Description of Artificial Sequence: Synthetic oligonucleotide
  Antisense strand to SEQ ID NO: 1314636
ucucuaaagaggcucauga

SEQ ID NO: 1314638 - RNA, 19 nt, Artificial Sequence
  Description of Artificial Sequence: Synthetic oligonucleotide
  Sense strand starting at position 1005 of SEQ ID NO: 1241983
gcaaacuuucuguaaacag

SEQ ID NO: 1314639 - RNA, 19 nt, Artificial Sequence
  Description of Artificial Sequence: Synthetic oligonucleotide
  Antisense strand to SEQ ID NO: 1314638
cuguuuacagaaaguuugc

SEQ ID NO: 1314640 - RNA, 19 nt, Artificial Sequence
  Description of Artificial Sequence: Synthetic oligonucleotide
  Sense strand starting at position 1070 of SEQ ID NO: 1241983
agucuaugauugguacuua

SEQ ID NO: 1314641 - RNA, 19 nt, Artificial Sequence
  Description of Artificial Sequence: Synthetic oligonucleotide
  Antisense strand to SEQ ID NO: 1314640
uaaguaccaaucauagacu

SEQ ID NO: 1314642 - RNA, 19 nt, Artificial Sequence
  Description of Artificial Sequence: Synthetic oligonucleotide
  Sense strand starting at position 1074 of SEQ ID NO: 1241983
uaugauugguacuuaugau

SEQ ID NO: 1314643 - RNA, 19 nt, Artificial Sequence
  Description of Artificial Sequence: Synthetic oligonucleotide
  Antisense strand to SEQ ID NO: 1314642
aucauaaguaccaaucaua

SEQ ID NO: 1314644 - RNA, 19 nt, Artificial Sequence
  Description of Artificial Sequence: Synthetic oligonucleotide
  Sense strand starting at position 1081 of SEQ ID NO: 1241983
gguacuuaugaucaacugu

SEQ ID NO: 1314645 - RNA, 19 nt, Artificial Sequence
  Description of Artificial Sequence: Synthetic oligonucleotide
  Antisense strand to SEQ ID NO: 1314644
acaguugaucauaaguacc

SEQ ID NO: 1314646 - RNA, 19 nt, Artificial Sequence
  Description of Artificial Sequence: Synthetic oligonucleotide
  Sense strand starting at position 1087 of SEQ ID NO: 1241983
uaugaucaacuguguguca

SEQ ID NO: 1314647 - RNA, 19 nt, Artificial Sequence
  Description of Artificial Sequence: Synthetic oligonucleotide
  Antisense strand to SEQ ID NO: 1314646
ugacacacaguugaucaua

SEQ ID NO: 1314648 - RNA, 19 nt, Artificial Sequence
  Description of Artificial Sequence: Synthetic oligonucleotide
  Sense strand starting at position 1089 of SEQ ID NO: 1241983
ugaucaacugugugucacu

SEQ ID NO: 1314649 - RNA, 19 nt, Artificial Sequence
  Description of Artificial Sequence: Synthetic oligonucleotide
  Antisense strand to SEQ ID NO: 1314648
agugacacacaguugauca

SEQ ID NO: 1314650 - RNA, 19 nt, Artificial Sequence
  Description of Artificial Sequence: Synthetic oligonucleotide
  Sense strand starting at position 1090 of SEQ ID NO: 1241983
gaucaacugugugucacuu

SEQ ID NO: 1314651 - RNA, 19 nt, Artificial Sequence
  Description of Artificial Sequence: Synthetic oligonucleotide
  Antisense strand to SEQ ID NO: 1314650
aagugacacacaguugauc

SEQ ID NO: 1314652 - RNA, 19 nt, Artificial Sequence
  Description of Artificial Sequence: Synthetic oligonucleotide
  Sense strand starting at position 1094 of SEQ ID NO: 1241983
aacugugugucacuuguca

SEQ ID NO: 1314653 - RNA, 19 nt, Artificial Sequence
  Description of Artificial Sequence: Synthetic oligonucleotide
  Antisense strand to SEQ ID NO: 1314652
ugacaagugacacacaguu

SEQ ID NO: 1314654 - RNA, 19 nt, Artificial Sequence
  Description of Artificial Sequence: Synthetic oligonucleotide
  Sense strand starting at position 1158 of SEQ ID NO: 1241983
guccgugucccuguuuaau

SEQ ID NO: 1314655 - RNA, 19 nt, Artificial Sequence
  Description of Artificial Sequence: Synthetic oligonucleotide
  Antisense strand to SEQ ID NO: 1314654
auuaaacagggacacggac

SEQ ID NO: 1314656 - RNA, 19 nt, Artificial Sequence
  Description of Artificial Sequence: Synthetic oligonucleotide
  Sense strand starting at position 1161 of SEQ ID NO: 1241983
cgugucccuguuuaauaaa

SEQ ID NO: 1314657 - RNA, 19 nt, Artificial Sequence
  Description of Artificial Sequence: Synthetic oligonucleotide
  Antisense strand to SEQ ID NO: 1314656
uuuauuaaacagggacacg

SEQ ID NO: 1314658 - RNA, 19 nt, Artificial Sequence
  Description of Artificial Sequence: Synthetic oligonucleotide
  Sense strand starting at position 1281 of SEQ ID NO: 1241983
aagguaccagcucagauua

SEQ ID NO: 1314659 - RNA, 19 nt, Artificial Sequence
  Description of Artificial Sequence: Synthetic oligonucleotide
  Antisense strand to SEQ ID NO: 1314658
uaaucugagcugguaccuu

SEQ ID NO: 1314660 - RNA, 19 nt, Artificial Sequence
  Description of Artificial Sequence: Synthetic oligonucleotide
  Sense strand starting at position 1302 of SEQ ID NO: 1241983
gacacucaucccuaggguu

SEQ ID NO: 1314661 - RNA, 19 nt, Artificial Sequence
  Description of Artificial Sequence: Synthetic oligonucleotide
  Antisense strand to SEQ ID NO: 1314660
aacccuagggaugaguguc

SEQ ID NO: 1314662 - RNA, 19 nt, Artificial Sequence
  Description of Artificial Sequence: Synthetic oligonucleotide
  Sense strand starting at position 1316 of SEQ ID NO: 1241983
ggguuuaugcaucaacaga

SEQ ID NO: 1314663 - RNA, 19 nt, Artificial Sequence
  Description of Artificial Sequence: Synthetic oligonucleotide
  Antisense strand to SEQ ID NO: 1314662
ucuguugaugcauaaaccc

SEQ ID NO: 1314664 - RNA, 19 nt, Artificial Sequence
  Description of Artificial Sequence: Synthetic oligonucleotide
  Sense strand starting at position 1346 of SEQ ID NO: 1241983
agucguucccagcaaguaa

SEQ ID NO: 1314665 - RNA, 19 nt, Artificial Sequence
  Description of Artificial Sequence: Synthetic oligonucleotide
  Antisense strand to SEQ ID NO: 1314664
uuacuugcugggaacgacu

SEQ ID NO: 1314666 - RNA, 19 nt, Artificial Sequence
  Description of Artificial Sequence: Synthetic oligonucleotide
  Sense strand starting at position 2680 of SEQ ID NO: 1241983
uggccuuccaguugaggua

SEQ ID NO: 1314667 - RNA, 19 nt, Artificial Sequence
  Description of Artificial Sequence: Synthetic oligonucleotide
  Antisense strand to SEQ ID NO: 1314666
uaccucaacuggaaggcca

SEQ ID NO: 1314668 - RNA, 19 nt, Artificial Sequence
  Description of Artificial Sequence: Synthetic oligonucleotide
  Sense strand starting at position 2725 of SEQ ID NO: 1241983
uggacaguauccucucgaa

SEQ ID NO: 1314669 - RNA, 19 nt, Artificial Sequence
  Description of Artificial Sequence: Synthetic oligonucleotide
  Antisense strand to SEQ ID NO: 1314668
uucgagaggauacugucca

SEQ ID NO: 1314670 - RNA, 19 nt, Artificial Sequence
  Description of Artificial Sequence: Synthetic oligonucleotide
  Sense strand starting at position 2884 of SEQ ID NO: 1241983
gcacaucaucagugagcaa

SEQ ID NO: 1314671 - RNA, 19 nt, Artificial Sequence
  Description of Artificial Sequence: Synthetic oligonucleotide
  Antisense strand to SEQ ID NO: 1314670
uugcucacugaugaugugc

SEQ ID NO: 1314672 - RNA, 19 nt, Artificial Sequence
  Description of Artificial Sequence: Synthetic oligonucleotide
  Sense strand starting at position 2888 of SEQ ID NO: 1241983
aucaucagugagcaaacau

SEQ ID NO: 1314673 - RNA, 19 nt, Artificial Sequence
  Description of Artificial Sequence: Synthetic oligonucleotide
  Antisense strand to SEQ ID NO: 1314672
auguuugcucacugaugau

SEQ ID NO: 1314674 - RNA, 19 nt, Artificial Sequence
  Description of Artificial Sequence: Synthetic oligonucleotide
  Sense strand starting at position 2986 of SEQ ID NO: 1241983
caggaugcuugccuuggaa

SEQ ID NO: 1314675 - RNA, 19 nt, Artificial Sequence
  Description of Artificial Sequence: Synthetic oligonucleotide
  Antisense strand to SEQ ID NO: 1314674
uuccaaggcaagcauccug

SEQ ID NO: 1314676 - RNA, 19 nt, Artificial Sequence
  Description of Artificial Sequence: Synthetic oligonucleotide
  Sense strand starting at position 3073 of SEQ ID NO: 1241983
aucacaaaccguugcagaa

SEQ ID NO: 1314677 - RNA, 19 nt, Artificial Sequence
  Description of Artificial Sequence: Synthetic oligonucleotide
  Antisense strand to SEQ ID NO: 1314676
uucugcaacgguuugugau

SEQ ID NO: 1314678 - RNA, 19 nt, Artificial Sequence
  Description of Artificial Sequence: Synthetic oligonucleotide
  Sense strand starting at position 3173 of SEQ ID NO: 1241983
gggaacaguuugucagaaa

SEQ ID NO: 1314679 - RNA, 19 nt, Artificial Sequence
  Description of Artificial Sequence: Synthetic oligonucleotide
  Antisense strand to SEQ ID NO: 1314678
uuucugacaaacuguuccc

SEQ ID NO: 1314680 - RNA, 19 nt, Artificial Sequence
  Description of Artificial Sequence: Synthetic oligonucleotide
  Sense strand starting at position 3288 of SEQ ID NO: 1241983
ugagaagugacuuguacug

SEQ ID NO: 1314681 - RNA, 19 nt, Artificial Sequence
  Description of Artificial Sequence: Synthetic oligonucleotide
  Antisense strand to SEQ ID NO: 1314680
caguacaagucacuucuca

SEQ ID NO: 1314682 - RNA, 19 nt, Artificial Sequence
  Description of Artificial Sequence: Synthetic oligonucleotide
  Sense strand starting at position 3295 of SEQ ID NO: 1241983
ugacuuguacuguacaaga

SEQ ID NO: 1314683 - RNA, 19 nt, Artificial Sequence
  Description of Artificial Sequence: Synthetic oligonucleotide
  Antisense strand to SEQ ID NO: 1314682
ucuuguacaguacaaguca

SEQ ID NO: 1314684 - RNA, 19 nt, Artificial Sequence
  Description of Artificial Sequence: Synthetic oligonucleotide
  Sense strand starting at position 3357 of SEQ ID NO: 1241983
uaaauuaugccuuguagag

SEQ ID NO: 1314685 - RNA, 19 nt, Artificial Sequence
  Description of Artificial Sequence: Synthetic oligonucleotide
  Antisense strand to SEQ ID NO: 1314684
cucuacaaggcauaauuua

SEQ ID NO: 1314686 - RNA, 19 nt, Artificial Sequence
  Description of Artificial Sequence: Synthetic oligonucleotide
  Sense strand starting at position 3517 of SEQ ID NO: 1241983
gggcucuuauaagcaucaa

SEQ ID NO: 1314687 - RNA, 19 nt, Artificial Sequence
  Description of Artificial Sequence: Synthetic oligonucleotide
  Antisense strand to SEQ ID NO: 1314686
uugaugcuuauaagagccc

SEQ ID NO: 1314688 - RNA, 19 nt, Artificial Sequence
  Description of Artificial Sequence: Synthetic oligonucleotide
  Sense strand starting at position 3528 of SEQ ID NO: 1241983
agcaucaaaugggaugaua

SEQ ID NO: 1314689 - RNA, 19 nt, Artificial Sequence
  Description of Artificial Sequence: Synthetic oligonucleotide
  Antisense strand to SEQ ID NO: 1314688
uaucaucccauuugaugcu

SEQ ID NO: 1314690 - RNA, 19 nt, Artificial Sequence
  Description of Artificial Sequence: Synthetic oligonucleotide
  Sense strand starting at position 3540 of SEQ ID NO: 1241983
gaugauaacugugaagacu

SEQ ID NO: 1314691 - RNA, 19 nt, Artificial Sequence
  Description of Artificial Sequence: Synthetic oligonucleotide
  Antisense strand to SEQ ID NO: 1314690
agucuucacaguuaucauc

SEQ ID NO: 1314692 - RNA, 19 nt, Artificial Sequence
  Description of Artificial Sequence: Synthetic oligonucleotide
  Sense strand starting at position 3736 of SEQ ID NO: 1241983
gucacauacuuguccagau

SEQ ID NO: 1314693 - RNA, 19 nt, Artificial Sequence
  Description of Artificial Sequence: Synthetic oligonucleotide
  Antisense strand to SEQ ID NO: 1314692
aucuggacaaguaugugac

SEQ ID NO: 1314694 - RNA, 19 nt, Artificial Sequence
  Description of Artificial Sequence: Synthetic oligonucleotide
  Sense strand starting at position 3737 of SEQ ID NO: 1241983
ucacauacuuguccagauu

SEQ ID NO: 1314695 - RNA, 19 nt, Artificial Sequence
  Description of Artificial Sequence: Synthetic oligonucleotide
  Antisense strand to SEQ ID NO: 1314694
aaucuggacaaguauguga

SEQ ID NO: 1314696 - RNA, 19 nt, Artificial Sequence
  Description of Artificial Sequence: Synthetic oligonucleotide
  Sense strand starting at position 3754 of SEQ ID NO: 1241983
uuuaguacucgggaccaua

SEQ ID NO: 1314697 - RNA, 19 nt, Artificial Sequence
  Description of Artificial Sequence: Synthetic oligonucleotide
  Antisense strand to SEQ ID NO: 1314696
uauggucccgaguacuaaa

SEQ ID NO: 1314698 - RNA, 19 nt, Artificial Sequence
  Description of Artificial Sequence: Synthetic oligonucleotide
  Sense strand starting at position 7 of SEQ ID NO: 1241984
aggucaggacuagguaaau

SEQ ID NO: 1314699 - RNA, 19 nt, Artificial Sequence
  Description of Artificial Sequence: Synthetic oligonucleotide
  Antisense strand to SEQ ID NO: 1314698
auuuaccuaguccugaccu

SEQ ID NO: 1314700 - RNA, 19 nt, Artificial Sequence
  Description of Artificial Sequence: Synthetic oligonucleotide
  Sense strand starting at position 268 of SEQ ID NO: 1241984
agacgagugcuaugaugag

SEQ ID NO: 1314701 - RNA, 19 nt, Artificial Sequence
  Description of Artificial Sequence: Synthetic oligonucleotide
  Antisense strand to SEQ ID NO: 1314700
cucaucauagcacucgucu

SEQ ID NO: 1314702 - RNA, 19 nt, Artificial Sequence
  Description of Artificial Sequence: Synthetic oligonucleotide
  Sense strand starting at position 277 of SEQ ID NO: 1241984
cuaugaugagcuugccuuu

SEQ ID NO: 1314703 - RNA, 19 nt, Artificial Sequence
  Description of Artificial Sequence: Synthetic oligonucleotide
  Antisense strand to SEQ ID NO: 1314702
aaaggcaagcucaucauag

SEQ ID NO: 1314704 - RNA, 19 nt, Artificial Sequence
  Description of Artificial Sequence: Synthetic oligonucleotide
  Sense strand starting at position 302 of SEQ ID NO: 1241984
augaucauuugccacagaa

SEQ ID NO: 1314705 - RNA, 19 nt, Artificial Sequence
  Description of Artificial Sequence: Synthetic oligonucleotide
  Antisense strand to SEQ ID NO: 1314704
uucuguggcaaaugaucau

SEQ ID NO: 1314706 - RNA, 19 nt, Artificial Sequence
  Description of Artificial Sequence: Synthetic oligonucleotide
  Sense strand starting at position 356 of SEQ ID NO: 1241984
ggcuuugaagacuacguaa

SEQ ID NO: 1314707 - RNA, 19 nt, Artificial Sequence
  Description of Artificial Sequence: Synthetic oligonucleotide
  Antisense strand to SEQ ID NO: 1314706
uuacguagucuucaaagcc

SEQ ID NO: 1314708 - RNA, 19 nt, Artificial Sequence
  Description of Artificial Sequence: Synthetic oligonucleotide
  Sense strand starting at position 358 of SEQ ID NO: 1241984
cuuugaagacuacguaaca

SEQ ID NO: 1314709 - RNA, 19 nt, Artificial Sequence
  Description of Artificial Sequence: Synthetic oligonucleotide
  Antisense strand to SEQ ID NO: 1314708
uguuacguagucuucaaag

SEQ ID NO: 1314710 - RNA, 19 nt, Artificial Sequence
  Description of Artificial Sequence: Synthetic oligonucleotide
  Sense strand starting at position 359 of SEQ ID NO: 1241984
uuugaagacuacguaacaa

SEQ ID NO: 1314711 - RNA, 19 nt, Artificial Sequence
  Description of Artificial Sequence: Synthetic oligonucleotide
  Antisense strand to SEQ ID NO: 1314710
uuguuacguagucuucaaa

SEQ ID NO: 1314712 - RNA, 19 nt, Artificial Sequence
  Description of Artificial Sequence: Synthetic oligonucleotide
  Sense strand starting at position 439 of SEQ ID NO: 1241984
ucaggauggccauguauga

SEQ ID NO: 1314713 - RNA, 19 nt, Artificial Sequence
  Description of Artificial Sequence: Synthetic oligonucleotide
  Antisense strand to SEQ ID NO: 1314712
ucauacauggccauccuga

SEQ ID NO: 1314714 - RNA, 19 nt, Artificial Sequence
  Description of Artificial Sequence: Synthetic oligonucleotide
  Sense strand starting at position 446 of SEQ ID NO: 1241984
ggccauguaugaucauacu

SEQ ID NO: 1314715 - RNA, 19 nt, Artificial Sequence
  Description of Artificial Sequence: Synthetic oligonucleotide
  Antisense strand to SEQ ID NO: 1314714
aguaugaucauacauggcc

SEQ ID NO: 1314716 - RNA, 19 nt, Artificial Sequence
  Description of Artificial Sequence: Synthetic oligonucleotide
  Sense strand starting at position 483 of SEQ ID NO: 1241984
agcacagagugguuaggau

SEQ ID NO: 1314717 - RNA, 19 nt, Artificial Sequence
  Description of Artificial Sequence: Synthetic oligonucleotide
  Antisense strand to SEQ ID NO: 1314716
auccuaaccacucugugcu

SEQ ID NO: 1314718 - RNA, 19 nt, Artificial Sequence
  Description of Artificial Sequence: Synthetic oligonucleotide
  Sense strand starting at position 547 of SEQ ID NO: 1241984
augguuugcuauguucuga

SEQ ID NO: 1314719 - RNA, 19 nt, Artificial Sequence
  Description of Artificial Sequence: Synthetic oligonucleotide
  Antisense strand to SEQ ID NO: 1314718
ucagaacauagcaaaccau

SEQ ID NO: 1314720 - RNA, 19 nt, Artificial Sequence
  Description of Artificial Sequence: Synthetic oligonucleotide
  Sense strand starting at position 631 of SEQ ID NO: 1241984
ucaucucaacaggguaaua

SEQ ID NO: 1314721 - RNA, 19 nt, Artificial Sequence
  Description of Artificial Sequence: Synthetic oligonucleotide
  Antisense strand to SEQ ID NO: 1314720
uauuacccuguugagauga

SEQ ID NO: 1314722 - RNA, 19 nt, Artificial Sequence
  Description of Artificial Sequence: Synthetic oligonucleotide
  Sense strand starting at position 891 of SEQ ID NO: 1241984
aaagaacugguguagucua

SEQ ID NO: 1314723 - RNA, 19 nt, Artificial Sequence
  Description of Artificial Sequence: Synthetic oligonucleotide
  Antisense strand to SEQ ID NO: 1314722
uagacuacaccaguucuuu

SEQ ID NO: 1314724 - RNA, 19 nt, Artificial Sequence
  Description of Artificial Sequence: Synthetic oligonucleotide
  Sense strand starting at position 924 of SEQ ID NO: 1241984
uuaauaauacagugacgaa

SEQ ID NO: 1314725 - RNA, 19 nt, Artificial Sequence
  Description of Artificial Sequence: Synthetic oligonucleotide
  Antisense strand to SEQ ID NO: 1314724
uucgucacuguauuauuaa

SEQ ID NO: 1314726 - RNA, 19 nt, Artificial Sequence
  Description of Artificial Sequence: Synthetic oligonucleotide
  Sense strand starting at position 966 of SEQ ID NO: 1241984
agguucuaccugugauaaa

SEQ ID NO: 1314727 - RNA, 19 nt, Artificial Sequence
  Description of Artificial Sequence: Synthetic oligonucleotide
  Antisense strand to SEQ ID NO: 1314726
uuuaucacagguagaaccu

SEQ ID NO: 1314728 - RNA, 19 nt, Artificial Sequence
  Description of Artificial Sequence: Synthetic oligonucleotide
  Sense strand starting at position 1139 of SEQ ID NO: 1241984
ggagguauuuguugaauga

SEQ ID NO: 1314729 - RNA, 19 nt, Artificial Sequence
  Description of Artificial Sequence: Synthetic oligonucleotide
  Antisense strand to SEQ ID NO: 1314728
ucauucaacaaauaccucc

SEQ ID NO: 1314730 - RNA, 19 nt, Artificial Sequence
  Description of Artificial Sequence: Synthetic oligonucleotide
  Sense strand starting at position 1450 of SEQ ID NO: 1241984
uacauuauggcagguaaua

SEQ ID NO: 1314731 - RNA, 19 nt, Artificial Sequence
  Description of Artificial Sequence: Synthetic oligonucleotide
  Antisense strand to SEQ ID NO: 1314730
uauuaccugccauaaugua

SEQ ID NO: 1314732 - RNA, 19 nt, Artificial Sequence
  Description of Artificial Sequence: Synthetic oligonucleotide
  Sense strand starting at position 1463 of SEQ ID NO: 1241984
guaauacaguuaucaaaca

SEQ ID NO: 1314733 - RNA, 19 nt, Artificial Sequence
  Description of Artificial Sequence: Synthetic oligonucleotide
  Antisense strand to SEQ ID NO: 1314732
uguuugauaacuguauuac

SEQ ID NO: 1314734 - RNA, 19 nt, Artificial Sequence
  Description of Artificial Sequence: Synthetic oligonucleotide
  Sense strand starting at position 1555 of SEQ ID NO: 1241984
ugguucagucuaugaggca

SEQ ID NO: 1314735 - RNA, 19 nt, Artificial Sequence
  Description of Artificial Sequence: Synthetic oligonucleotide
  Antisense strand to SEQ ID NO: 1314734
ugccucauagacugaacca

SEQ ID NO: 1314736 - RNA, 19 nt, Artificial Sequence
  Description of Artificial Sequence: Synthetic oligonucleotide
  Sense strand starting at position 1644 of SEQ ID NO: 1241984
aggaaaguauuccuggcaa

SEQ ID NO: 1314737 - RNA, 19 nt, Artificial Sequence
  Description of Artificial Sequence: Synthetic oligonucleotide
  Antisense strand to SEQ ID NO: 1314736
uugccaggaauacuuuccu

SEQ ID NO: 1314738 - RNA, 19 nt, Artificial Sequence
  Description of Artificial Sequence: Synthetic oligonucleotide
  Sense strand starting at position 1646 of SEQ ID NO: 1241984
gaaaguauuccuggcaaug

SEQ ID NO: 1314739 - RNA, 19 nt, Artificial Sequence
  Description of Artificial Sequence: Synthetic oligonucleotide
  Antisense strand to SEQ ID NO: 1314738
cauugccaggaauacuuuc

SEQ ID NO: 1314740 - RNA, 19 nt, Artificial Sequence
  Description of Artificial Sequence: Synthetic oligonucleotide
  Sense strand starting at position 1725 of SEQ ID NO: 1241984
ccucauuuaugugacacua

SEQ ID NO: 1314741 - RNA, 19 nt, Artificial Sequence
  Description of Artificial Sequence: Synthetic oligonucleotide
  Antisense strand to SEQ ID NO: 1314740
uagugucacauaaaugagg

SEQ ID NO: 1314742 - RNA, 19 nt, Artificial Sequence
  Description of Artificial Sequence: Synthetic oligonucleotide
  Sense strand starting at position 1748 of SEQ ID NO: 1241984
agugccuggcuaugaauaa

SEQ ID NO: 1314743 - RNA, 19 nt, Artificial Sequence
  Description of Artificial Sequence: Synthetic oligonucleotide
  Antisense strand to SEQ ID NO: 1314742
uuauucauagccaggcacu

SEQ ID NO: 1314744 - RNA, 19 nt, Artificial Sequence
  Description of Artificial Sequence: Synthetic oligonucleotide
  Sense strand starting at position 1803 of SEQ ID NO: 1241984
cagguauagacagggugaa

SEQ ID NO: 1314745 - RNA, 19 nt, Artificial Sequence
  Description of Artificial Sequence: Synthetic oligonucleotide
  Antisense strand to SEQ ID NO: 1314744
uucacccugucuauaccug

SEQ ID NO: 1314746 - RNA, 19 nt, Artificial Sequence
  Description of Artificial Sequence: Synthetic oligonucleotide
  Sense strand starting at position 2217 of SEQ ID NO: 1241984
cagcacauguggcuaaaua

SEQ ID NO: 1314747 - RNA, 19 nt, Artificial Sequence
  Description of Artificial Sequence: Synthetic oligonucleotide
  Antisense strand to SEQ ID NO: 1314746
uauuuagccacaugugcug

SEQ ID NO: 1314748 - RNA, 19 nt, Artificial Sequence
  Description of Artificial Sequence: Synthetic oligonucleotide
  Sense strand starting at position 2218 of SEQ ID NO: 1241984
agcacauguggcuaaauau

SEQ ID NO: 1314749 - RNA, 19 nt, Artificial Sequence
  Description of Artificial Sequence: Synthetic oligonucleotide
  Antisense strand to SEQ ID NO: 1314748
auauuuagccacaugugcu

SEQ ID NO: 1314750 - RNA, 19 nt, Artificial Sequence
  Description of Artificial Sequence: Synthetic oligonucleotide
  Sense strand starting at position 2551 of SEQ ID NO: 1241984
ucaugagccucuuuagaga

SEQ ID NO: 1314751 - RNA, 19 nt, Artificial Sequence
  Description of Artificial Sequence: Synthetic oligonucleotide
  Antisense strand to SEQ ID NO: 1314750
ucucuaaagaggcucauga

SEQ ID NO: 1314752 - RNA, 19 nt, Artificial Sequence
  Description of Artificial Sequence: Synthetic oligonucleotide
  Sense strand starting at position 2576 of SEQ ID NO: 1241984
gcaaacuuucuguaaacag

SEQ ID NO: 1314753 - RNA, 19 nt, Artificial Sequence
  Description of Artificial Sequence: Synthetic oligonucleotide
  Antisense strand to SEQ ID NO: 1314752
cuguuuacagaaaguuugc

SEQ ID NO: 1314754 - RNA, 19 nt, Artificial Sequence
  Description of Artificial Sequence: Synthetic oligonucleotide
  Sense strand starting at position 2641 of SEQ ID NO: 1241984
agucuaugauugguacuua

SEQ ID NO: 1314755 - RNA, 19 nt, Artificial Sequence
  Description of Artificial Sequence: Synthetic oligonucleotide
  Antisense strand to SEQ ID NO: 1314754
uaaguaccaaucauagacu

SEQ ID NO: 1314756 - RNA, 19 nt, Artificial Sequence
  Description of Artificial Sequence: Synthetic oligonucleotide
  Sense strand starting at position 2645 of SEQ ID NO: 1241984
uaugauugguacuuaugau

SEQ ID NO: 1314757 - RNA, 19 nt, Artificial Sequence
  Description of Artificial Sequence: Synthetic oligonucleotide
  Antisense strand to SEQ ID NO: 1314756
aucauaaguaccaaucaua

SEQ ID NO: 1314758 - RNA, 19 nt, Artificial Sequence
  Description of Artificial Sequence: Synthetic oligonucleotide
  Sense strand starting at position 2652 of SEQ ID NO: 1241984
gguacuuaugaucaacugu

SEQ ID NO: 1314759 - RNA, 19 nt, Artificial Sequence
  Description of Artificial Sequence: Synthetic oligonucleotide
  Antisense strand to SEQ ID NO: 1314758
acaguugaucauaaguacc

SEQ ID NO: 1314760 - RNA, 19 nt, Artificial Sequence
  Description of Artificial Sequence: Synthetic oligonucleotide
  Sense strand starting at position 2658 of SEQ ID NO: 1241984
uaugaucaacuguguguca

SEQ ID NO: 1314761 - RNA, 19 nt, Artificial Sequence
  Description of Artificial Sequence: Synthetic oligonucleotide
  Antisense strand to SEQ ID NO: 1314760
ugacacacaguugaucaua

SEQ ID NO: 1314762 - RNA, 19 nt, Artificial Sequence
  Description of Artificial Sequence: Synthetic oligonucleotide
  Sense strand starting at position 2660 of SEQ ID NO: 1241984
ugaucaacugugugucacu

SEQ ID NO: 1314763 - RNA, 19 nt, Artificial Sequence
  Description of Artificial Sequence: Synthetic oligonucleotide
  Antisense strand to SEQ ID NO: 1314762
agugacacacaguugauca

SEQ ID NO: 1314764 - RNA, 19 nt, Artificial Sequence
  Description of Artificial Sequence: Synthetic oligonucleotide
  Sense strand starting at position 2661 of SEQ ID NO: 1241984
gaucaacugugugucacuu

SEQ ID NO: 1314765 - RNA, 19 nt, Artificial Sequence
  Description of Artificial Sequence: Synthetic oligonucleotide
  Antisense strand to SEQ ID NO: 1314764
aagugacacacaguugauc

SEQ ID NO: 1314766 - RNA, 19 nt, Artificial Sequence
  Description of Artificial Sequence: Synthetic oligonucleotide
  Sense strand starting at position 2729 of SEQ ID NO: 1241984
guccgugucccuguuuaau

SEQ ID NO: 1314767 - RNA, 19 nt, Artificial Sequence
  Description of Artificial Sequence: Synthetic oligonucleotide
  Antisense strand to SEQ ID NO: 1314766
auuaaacagggacacggac

SEQ ID NO: 1314768 - RNA, 19 nt, Artificial Sequence
  Description of Artificial Sequence: Synthetic oligonucleotide
  Sense strand starting at position 2732 of SEQ ID NO: 1241984
cgugucccuguuuaauaaa

SEQ ID NO: 1314769 - RNA, 19 nt, Artificial Sequence
  Description of Artificial Sequence: Synthetic oligonucleotide
  Antisense strand to SEQ ID NO: 1314768
uuuauuaaacagggacacg

SEQ ID NO: 1314770 - RNA, 19 nt, Artificial Sequence
  Description of Artificial Sequence: Synthetic oligonucleotide
  Sense strand starting at position 2852 of SEQ ID NO: 1241984
aagguaccagcucagauua

SEQ ID NO: 1314771 - RNA, 19 nt, Artificial Sequence
  Description of Artificial Sequence: Synthetic oligonucleotide
  Antisense strand to SEQ ID NO: 1314770
uaaucugagcugguaccuu

SEQ ID NO: 1314772 - RNA, 19 nt, Artificial Sequence
  Description of Artificial Sequence: Synthetic oligonucleotide
  Sense strand starting at position 2873 of SEQ ID NO: 1241984
gacacucaucccuaggguu

SEQ ID NO: 1314773 - RNA, 19 nt, Artificial Sequence
  Description of Artificial Sequence: Synthetic oligonucleotide
  Antisense strand to SEQ ID NO: 1314772
aacccuagggaugaguguc

SEQ ID NO: 1314774 - RNA, 19 nt, Artificial Sequence
  Description of Artificial Sequence: Synthetic oligonucleotide
  Sense strand starting at position 2887 of SEQ ID NO: 1241984
ggguuuaugcaucaacaga

SEQ ID NO: 1314775 - RNA, 19 nt, Artificial Sequence
  Description of Artificial Sequence: Synthetic oligonucleotide
  Antisense strand to SEQ ID NO: 1314774
ucuguugaugcauaaaccc

SEQ ID NO: 1314776 - RNA, 19 nt, Artificial Sequence
  Description of Artificial Sequence: Synthetic oligonucleotide
  Sense strand starting at position 2917 of SEQ ID NO: 1241984
agucguucccagcaaguaa

SEQ ID NO: 1314777 - RNA, 19 nt, Artificial Sequence
  Description of Artificial Sequence: Synthetic oligonucleotide
  Antisense strand to SEQ ID NO: 1314776
uuacuugcugggaacgacu

SEQ ID NO: 1314778 - RNA, 19 nt, Artificial Sequence
  Description of Artificial Sequence: Synthetic oligonucleotide
  Sense strand starting at position 96 of SEQ ID NO: 1241985
gacaaauggucuuacagga

SEQ ID NO: 1314779 - RNA, 19 nt, Artificial Sequence
  Description of Artificial Sequence: Synthetic oligonucleotide
  Antisense strand to SEQ ID NO: 1314778
uccuguaagaccauuuguc

SEQ ID NO: 1314780 - RNA, 19 nt, Artificial Sequence
  Description of Artificial Sequence: Synthetic oligonucleotide
  Sense strand starting at position 144 of SEQ ID NO: 1241985
cagcacauguggcuaaaua

SEQ ID NO: 1314781 - RNA, 19 nt, Artificial Sequence
  Description of Artificial Sequence: Synthetic oligonucleotide
  Antisense strand to SEQ ID NO: 1314780
uauuuagccacaugugcug

SEQ ID NO: 1314782 - RNA, 19 nt, Artificial Sequence
  Description of Artificial Sequence: Synthetic oligonucleotide
  Sense strand starting at position 145 of SEQ ID NO: 1241985
agcacauguggcuaaauau

SEQ ID NO: 1314783 - RNA, 19 nt, Artificial Sequence
  Description of Artificial Sequence: Synthetic oligonucleotide
  Antisense strand to SEQ ID NO: 1314782
auauuuagccacaugugcu

SEQ ID NO: 1314784 - RNA, 19 nt, Artificial Sequence
  Description of Artificial Sequence: Synthetic oligonucleotide
  Sense strand starting at position 478 of SEQ ID NO: 1241985
ucaugagccucuuuagaga

SEQ ID NO: 1314785 - RNA, 19 nt, Artificial Sequence
  Description of Artificial Sequence: Synthetic oligonucleotide
  Antisense strand to SEQ ID NO: 1314784
ucucuaaagaggcucauga

SEQ ID NO: 1314786 - RNA, 19 nt, Artificial Sequence
  Description of Artificial Sequence: Synthetic oligonucleotide
  Sense strand starting at position 503 of SEQ ID NO: 1241985
gcaaacuuucuguaaacag

SEQ ID NO: 1314787 - RNA, 19 nt, Artificial Sequence
  Description of Artificial Sequence: Synthetic oligonucleotide
  Antisense strand to SEQ ID NO: 1314786
cuguuuacagaaaguuugc

SEQ ID NO: 1314788 - RNA, 19 nt, Artificial Sequence
  Description of Artificial Sequence: Synthetic oligonucleotide
  Sense strand starting at position 568 of SEQ ID NO: 1241985
agucuaugauugguacuua

SEQ ID NO: 1314789 - RNA, 19 nt, Artificial Sequence
  Description of Artificial Sequence: Synthetic oligonucleotide
  Antisense strand to SEQ ID NO: 1314788
uaaguaccaaucauagacu

SEQ ID NO: 1314790 - RNA, 19 nt, Artificial Sequence
  Description of Artificial Sequence: Synthetic oligonucleotide
  Sense strand starting at position 572 of SEQ ID NO: 1241985
uaugauugguacuuaugau

SEQ ID NO: 1314791 - RNA, 19 nt, Artificial Sequence
  Description of Artificial Sequence: Synthetic oligonucleotide
  Antisense strand to SEQ ID NO: 1314790
aucauaaguaccaaucaua

SEQ ID NO: 1314792 - RNA, 19 nt, Artificial Sequence
  Description of Artificial Sequence: Synthetic oligonucleotide
  Sense strand starting at position 579 of SEQ ID NO: 1241985
gguacuuaugaucaacugu

SEQ ID NO: 1314793 - RNA, 19 nt, Artificial Sequence
  Description of Artificial Sequence: Synthetic oligonucleotide
  Antisense strand to SEQ ID NO: 1314792
acaguugaucauaaguacc

SEQ ID NO: 1314794 - RNA, 19 nt, Artificial Sequence
  Description of Artificial Sequence: Synthetic oligonucleotide
  Sense strand starting at position 585 of SEQ ID NO: 1241985
uaugaucaacuguguguca

SEQ ID NO: 1314795 - RNA, 19 nt, Artificial Sequence
  Description of Artificial Sequence: Synthetic oligonucleotide
  Antisense strand to SEQ ID NO: 1314794
ugacacacaguugaucaua

SEQ ID NO: 1314796 - RNA, 19 nt, Artificial Sequence
  Description of Artificial Sequence: Synthetic oligonucleotide
  Sense strand starting at position 587 of SEQ ID NO: 1241985
ugaucaacugugugucacu

SEQ ID NO: 1314797 - RNA, 19 nt, Artificial Sequence
  Description of Artificial Sequence: Synthetic oligonucleotide
  Antisense strand to SEQ ID NO: 1314796
agugacacacaguugauca

SEQ ID NO: 1314798 - RNA, 19 nt, Artificial Sequence
  Description of Artificial Sequence: Synthetic oligonucleotide
  Sense strand starting at position 588 of SEQ ID NO: 1241985
gaucaacugugugucacuu

SEQ ID NO: 1314799 - RNA, 19 nt, Artificial Sequence
  Description of Artificial Sequence: Synthetic oligonucleotide
  Antisense strand to SEQ ID NO: 1314798
aagugacacacaguugauc

SEQ ID NO: 1314800 - RNA, 19 nt, Artificial Sequence
  Description of Artificial Sequence: Synthetic oligonucleotide
  Sense strand starting at position 656 of SEQ ID NO: 1241985
guccgugucccuguuuaau

SEQ ID NO: 1314801 - RNA, 19 nt, Artificial Sequence
  Description of Artificial Sequence: Synthetic oligonucleotide
  Antisense strand to SEQ ID NO: 1314800
auuaaacagggacacggac

SEQ ID NO: 1314802 - RNA, 19 nt, Artificial Sequence
  Description of Artificial Sequence: Synthetic oligonucleotide
  Sense strand starting at position 659 of SEQ ID NO: 1241985
cgugucccuguuuaauaaa

SEQ ID NO: 1314803 - RNA, 19 nt, Artificial Sequence
  Description of Artificial Sequence: Synthetic oligonucleotide
  Antisense strand to SEQ ID NO: 1314802
uuuauuaaacagggacacg

SEQ ID NO: 1314804 - RNA, 19 nt, Artificial Sequence
  Description of Artificial Sequence: Synthetic oligonucleotide
  Sense strand starting at position 779 of SEQ ID NO: 1241985
aagguaccagcucagauua

SEQ ID NO: 1314805 - RNA, 19 nt, Artificial Sequence
  Description of Artificial Sequence: Synthetic oligonucleotide
  Antisense strand to SEQ ID NO: 1314804
uaaucugagcugguaccuu

SEQ ID NO: 1314806 - RNA, 19 nt, Artificial Sequence
  Description of Artificial Sequence: Synthetic oligonucleotide
  Sense strand starting at position 800 of SEQ ID NO: 1241985
gacacucaucccuaggguu

SEQ ID NO: 1314807 - RNA, 19 nt, Artificial Sequence
  Description of Artificial Sequence: Synthetic oligonucleotide
  Antisense strand to SEQ ID NO: 1314806
aacccuagggaugaguguc

SEQ ID NO: 1314808 - RNA, 19 nt, Artificial Sequence
  Description of Artificial Sequence: Synthetic oligonucleotide
  Sense strand starting at position 814 of SEQ ID NO: 1241985
ggguuuaugcaucaacaga

SEQ ID NO: 1314809 - RNA, 19 nt, Artificial Sequence
  Description of Artificial Sequence: Synthetic oligonucleotide
  Antisense strand to SEQ ID NO: 1314808
ucuguugaugcauaaaccc

SEQ ID NO: 1314810 - RNA, 19 nt, Artificial Sequence
  Description of Artificial Sequence: Synthetic oligonucleotide
  Sense strand starting at position 844 of SEQ ID NO: 1241985
agucguucccagcaaguaa

SEQ ID NO: 1314811 - RNA, 19 nt, Artificial Sequence
  Description of Artificial Sequence: Synthetic oligonucleotide
  Antisense strand to SEQ ID NO: 1314810
uuacuugcugggaacgacu

SEQ ID NO: 1314812 - RNA, 19 nt, Artificial Sequence
  Description of Artificial Sequence: Synthetic oligonucleotide
  Sense strand starting at position 2178 of SEQ ID NO: 1241985
uggccuuccaguugaggua

SEQ ID NO: 1314813 - RNA, 19 nt, Artificial Sequence
  Description of Artificial Sequence: Synthetic oligonucleotide
  Antisense strand to SEQ ID NO: 1314812
uaccucaacuggaaggcca

SEQ ID NO: 1314814 - RNA, 19 nt, Artificial Sequence
  Description of Artificial Sequence: Synthetic oligonucleotide
  Sense strand starting at position 2223 of SEQ ID NO: 1241985
uggacaguauccucucgaa

SEQ ID NO: 1314815 - RNA, 19 nt, Artificial Sequence
  Description of Artificial Sequence: Synthetic oligonucleotide
  Antisense strand to SEQ ID NO: 1314814
uucgagaggauacugucca

SEQ ID NO: 1314816 - RNA, 19 nt, Artificial Sequence
  Description of Artificial Sequence: Synthetic oligonucleotide
  Sense strand starting at position 2382 of SEQ ID NO: 1241985
gcacaucaucagugagcaa

SEQ ID NO: 1314817 - RNA, 19 nt, Artificial Sequence
  Description of Artificial Sequence: Synthetic oligonucleotide
  Antisense strand to SEQ ID NO: 1314816
uugcucacugaugaugugc

SEQ ID NO: 1314818 - RNA, 19 nt, Artificial Sequence
  Description of Artificial Sequence: Synthetic oligonucleotide
  Sense strand starting at position 2386 of SEQ ID NO: 1241985
aucaucagugagcaaacau

SEQ ID NO: 1314819 - RNA, 19 nt, Artificial Sequence
  Description of Artificial Sequence: Synthetic oligonucleotide
  Antisense strand to SEQ ID NO: 1314818
auguuugcucacugaugau

SEQ ID NO: 1314820 - RNA, 19 nt, Artificial Sequence
  Description of Artificial Sequence: Synthetic oligonucleotide
  Sense strand starting at position 2484 of SEQ ID NO: 1241985
caggaugcuugccuuggaa

SEQ ID NO: 1314821 - RNA, 19 nt, Artificial Sequence
  Description of Artificial Sequence: Synthetic oligonucleotide
  Antisense strand to SEQ ID NO: 1314820
uuccaaggcaagcauccug

SEQ ID NO: 1314822 - RNA, 19 nt, Artificial Sequence
  Description of Artificial Sequence: Synthetic oligonucleotide
  Sense strand starting at position 2571 of SEQ ID NO: 1241985
aucacaaaccguugcagaa

SEQ ID NO: 1314823 - RNA, 19 nt, Artificial Sequence
  Description of Artificial Sequence: Synthetic oligonucleotide
  Antisense strand to SEQ ID NO: 1314822
uucugcaacgguuugugau

SEQ ID NO: 1314824 - RNA, 19 nt, Artificial Sequence
  Description of Artificial Sequence: Synthetic oligonucleotide
  Sense strand starting at position 2671 of SEQ ID NO: 1241985
gggaacaguuugucagaaa

SEQ ID NO: 1314825 - RNA, 19 nt, Artificial Sequence
  Description of Artificial Sequence: Synthetic oligonucleotide
  Antisense strand to SEQ ID NO: 1314824
uuucugacaaacuguuccc

SEQ ID NO: 1314826 - RNA, 19 nt, Artificial Sequence
  Description of Artificial Sequence: Synthetic oligonucleotide
  Sense strand starting at position 2786 of SEQ ID NO: 1241985
ugagaagugacuuguacug

SEQ ID NO: 1314827 - RNA, 19 nt, Artificial Sequence
  Description of Artificial Sequence: Synthetic oligonucleotide
  Antisense strand to SEQ ID NO: 1314826
caguacaagucacuucuca

SEQ ID NO: 1314828 - RNA, 19 nt, Artificial Sequence
  Description of Artificial Sequence: Synthetic oligonucleotide
  Sense strand starting at position 2793 of SEQ ID NO: 1241985
ugacuuguacuguacaaga

SEQ ID NO: 1314829 - RNA, 19 nt, Artificial Sequence
  Description of Artificial Sequence: Synthetic oligonucleotide
  Antisense strand to SEQ ID NO: 1314828
ucuuguacaguacaaguca

SEQ ID NO: 1314830 - RNA, 19 nt, Artificial Sequence
  Description of Artificial Sequence: Synthetic oligonucleotide
  Sense strand starting at position 2855 of SEQ ID NO: 1241985
uaaauuaugccuuguagag

SEQ ID NO: 1314831 - RNA, 19 nt, Artificial Sequence
  Description of Artificial Sequence: Synthetic oligonucleotide
  Antisense strand to SEQ ID NO: 1314830
cucuacaaggcauaauuua

SEQ ID NO: 1314832 - RNA, 19 nt, Artificial Sequence
  Description of Artificial Sequence: Synthetic oligonucleotide
  Sense strand starting at position 3015 of SEQ ID NO: 1241985
gggcucuuauaagcaucaa

SEQ ID NO: 1314833 - RNA, 19 nt, Artificial Sequence
  Description of Artificial Sequence: Synthetic oligonucleotide
  Antisense strand to SEQ ID NO: 1314832
uugaugcuuauaagagccc

SEQ ID NO: 1314834 - RNA, 19 nt, Artificial Sequence
  Description of Artificial Sequence: Synthetic oligonucleotide
  Sense strand starting at position 3026 of SEQ ID NO: 1241985
agcaucaaaugggaugaua

SEQ ID NO: 1314835 - RNA, 19 nt, Artificial Sequence
  Description of Artificial Sequence: Synthetic oligonucleotide
  Antisense strand to SEQ ID NO: 1314834
uaucaucccauuugaugcu

SEQ ID NO: 1314836 - RNA, 19 nt, Artificial Sequence
  Description of Artificial Sequence: Synthetic oligonucleotide
  Sense strand starting at position 3038 of SEQ ID NO: 1241985
gaugauaacugugaagacu

SEQ ID NO: 1314837 - RNA, 19 nt, Artificial Sequence
  Description of Artificial Sequence: Synthetic oligonucleotide
  Antisense strand to SEQ ID NO: 1314836
agucuucacaguuaucauc

SEQ ID NO: 1314838 - RNA, 19 nt, Artificial Sequence
  Description of Artificial Sequence: Synthetic oligonucleotide
  Sense strand starting at position 3234 of SEQ ID NO: 1241985
gucacauacuuguccagau

SEQ ID NO: 1314839 - RNA, 19 nt, Artificial Sequence
  Description of Artificial Sequence: Synthetic oligonucleotide
  Antisense strand to SEQ ID NO: 1314838
aucuggacaaguaugugac

SEQ ID NO: 1314840 - RNA, 19 nt, Artificial Sequence
  Description of Artificial Sequence: Synthetic oligonucleotide
  Sense strand starting at position 3235 of SEQ ID NO: 1241985
ucacauacuuguccagauu

SEQ ID NO: 1314841 - RNA, 19 nt, Artificial Sequence
  Description of Artificial Sequence: Synthetic oligonucleotide
  Antisense strand to SEQ ID NO: 1314840
aaucuggacaaguauguga

SEQ ID NO: 1314842 - RNA, 19 nt, Artificial Sequence
  Description of Artificial Sequence: Synthetic oligonucleotide
  Sense strand starting at position 3252 of SEQ ID NO: 1241985
uuuaguacucgggaccaua

SEQ ID NO: 1314843 - RNA, 19 nt, Artificial Sequence
  Description of Artificial Sequence: Synthetic oligonucleotide
  Antisense strand to SEQ ID NO: 1314842
uauggucccgaguacuaaa

SEQ ID NO: 1314844 - RNA, 19 nt, Artificial Sequence
  Description of Artificial Sequence: Synthetic oligonucleotide
  Sense strand starting at position 3513 of SEQ ID NO: 1241985
ugugaaacaccugguauau

SEQ ID NO: 1314845 - RNA, 19 nt, Artificial Sequence
  Description of Artificial Sequence: Synthetic oligonucleotide
  Antisense strand to SEQ ID NO: 1314844
auauaccagguguuucaca

SEQ ID NO: 1314846 - RNA, 19 nt, Artificial Sequence
  Description of Artificial Sequence: Synthetic oligonucleotide
  Sense strand starting at position 3522 of SEQ ID NO: 1241985
ccugguauauagucacaau

SEQ ID NO: 1314847 - RNA, 19 nt, Artificial Sequence
  Description of Artificial Sequence: Synthetic oligonucleotide
  Antisense strand to SEQ ID NO: 1314846
auugugacuauauaccagg

SEQ ID NO: 1314848 - RNA, 19 nt, Artificial Sequence
  Description of Artificial Sequence: Synthetic oligonucleotide
  Sense strand starting at position 3582 of SEQ ID NO: 1241985
agguauagaagcugauagu

SEQ ID NO: 1314849 - RNA, 19 nt, Artificial Sequence
  Description of Artificial Sequence: Synthetic oligonucleotide
  Antisense strand to SEQ ID NO: 1314848
acuaucagcuucuauaccu

SEQ ID NO: 1314850 - RNA, 19 nt, Artificial Sequence
  Description of Artificial Sequence: Synthetic oligonucleotide
  Sense strand starting at position 3591 of SEQ ID NO: 1241985
agcugauagugauucucuu

SEQ ID NO: 1314851 - RNA, 19 nt, Artificial Sequence
  Description of Artificial Sequence: Synthetic oligonucleotide
  Antisense strand to SEQ ID NO: 1314850
aagagaaucacuaucagcu

SEQ ID NO: 1314852 - RNA, 19 nt, Artificial Sequence
  Description of Artificial Sequence: Synthetic oligonucleotide
  Sense strand starting at position 3595 of SEQ ID NO: 1241985
gauagugauucucuucuug

SEQ ID NO: 1314853 - RNA, 19 nt, Artificial Sequence
  Description of Artificial Sequence: Synthetic oligonucleotide
  Antisense strand to SEQ ID NO: 1314852
caagaagagaaucacuauc

SEQ ID NO: 1314854 - RNA, 19 nt, Artificial Sequence
  Description of Artificial Sequence: Synthetic oligonucleotide
  Sense strand starting at position 3713 of SEQ ID NO: 1241985
acgucacauccuuaagauc

SEQ ID NO: 1314855 - RNA, 19 nt, Artificial Sequence
  Description of Artificial Sequence: Synthetic oligonucleotide
  Antisense strand to SEQ ID NO: 1314854
gaucuuaaggaugugacgu

SEQ ID NO: 1314856 - RNA, 19 nt, Artificial Sequence
  Description of Artificial Sequence: Synthetic oligonucleotide
  Sense strand starting at position 3810 of SEQ ID NO: 1241985
gcaauaauucuaugaugaa

SEQ ID NO: 1314857 - RNA, 19 nt, Artificial Sequence
  Description of Artificial Sequence: Synthetic oligonucleotide
  Antisense strand to SEQ ID NO: 1314856
uucaucauagaauuauugc

SEQ ID NO: 1314858 - RNA, 19 nt, Artificial Sequence
  Description of Artificial Sequence: Synthetic oligonucleotide
  Sense strand starting at position 446 of SEQ ID NO: 1241986
uacugucuaggacauagua

SEQ ID NO: 1314859 - RNA, 19 nt, Artificial Sequence
  Description of Artificial Sequence: Synthetic oligonucleotide
  Antisense strand to SEQ ID NO: 1314858
uacuauguccuagacagua

SEQ ID NO: 1314860 - RNA, 19 nt, Artificial Sequence
  Description of Artificial Sequence: Synthetic oligonucleotide
  Sense strand starting at position 454 of SEQ ID NO: 1241986
aggacauaguaagcauuau

SEQ ID NO: 1314861 - RNA, 19 nt, Artificial Sequence
  Description of Artificial Sequence: Synthetic oligonucleotide
  Antisense strand to SEQ ID NO: 1314860
auaaugcuuacuauguccu

SEQ ID NO: 1314862 - RNA, 19 nt, Artificial Sequence
  Description of Artificial Sequence: Synthetic oligonucleotide
  Sense strand starting at position 466 of SEQ ID NO: 1241986
gcauuauacagauguuagg

SEQ ID NO: 1314863 - RNA, 19 nt, Artificial Sequence
  Description of Artificial Sequence: Synthetic oligonucleotide
  Antisense strand to SEQ ID NO: 1314862
ccuaacaucuguauaaugc

SEQ ID NO: 1314864 - RNA, 19 nt, Artificial Sequence
  Description of Artificial Sequence: Synthetic oligonucleotide
  Sense strand starting at position 701 of SEQ ID NO: 1241986
cccagaaguacugggacau

SEQ ID NO: 1314865 - RNA, 19 nt, Artificial Sequence
  Description of Artificial Sequence: Synthetic oligonucleotide
  Antisense strand to SEQ ID NO: 1314864
augucccaguacuucuggg

SEQ ID NO: 1314866 - RNA, 19 nt, Artificial Sequence
  Description of Artificial Sequence: Synthetic oligonucleotide
  Sense strand starting at position 702 of SEQ ID NO: 1241986
ccagaaguacugggacauu

SEQ ID NO: 1314867 - RNA, 19 nt, Artificial Sequence
  Description of Artificial Sequence: Synthetic oligonucleotide
  Antisense strand to SEQ ID NO: 1314866
aaugucccaguacuucugg

SEQ ID NO: 1314868 - RNA, 19 nt, Artificial Sequence
  Description of Artificial Sequence: Synthetic oligonucleotide
  Sense strand starting at position 713 of SEQ ID NO: 1241986
gggacauuagugggcacua

SEQ ID NO: 1314869 - RNA, 19 nt, Artificial Sequence
  Description of Artificial Sequence: Synthetic oligonucleotide
  Antisense strand to SEQ ID NO: 1314868
uagugcccacuaauguccc

SEQ ID NO: 1314870 - RNA, 19 nt, Artificial Sequence
  Description of Artificial Sequence: Synthetic oligonucleotide
  Sense strand starting at position 714 of SEQ ID NO: 1241986
ggacauuagugggcacuau

SEQ ID NO: 1314871 - RNA, 19 nt, Artificial Sequence
  Description of Artificial Sequence: Synthetic oligonucleotide
  Antisense strand to SEQ ID NO: 1314870
auagugcccacuaaugucc

SEQ ID NO: 1314872 - RNA, 19 nt, Artificial Sequence
  Description of Artificial Sequence: Synthetic oligonucleotide
  Sense strand starting at position 715 of SEQ ID NO: 1241986
gacauuagugggcacuauu

SEQ ID NO: 1314873 - RNA, 19 nt, Artificial Sequence
  Description of Artificial Sequence: Synthetic oligonucleotide
  Antisense strand to SEQ ID NO: 1314872
aauagugcccacuaauguc

SEQ ID NO: 1314874 - RNA, 19 nt, Artificial Sequence
  Description of Artificial Sequence: Synthetic oligonucleotide
  Sense strand starting at position 1034 of SEQ ID NO: 1241986
cggccuaguagacacuaau

SEQ ID NO: 1314875 - RNA, 19 nt, Artificial Sequence
  Description of Artificial Sequence: Synthetic oligonucleotide
  Antisense strand to SEQ ID NO: 1314874
auuagugucuacuaggccg

SEQ ID NO: 1314876 - RNA, 19 nt, Artificial Sequence
  Description of Artificial Sequence: Synthetic oligonucleotide
  Sense strand starting at position 1127 of SEQ ID NO: 1241986
ggcucaguugggcacuaau

SEQ ID NO: 1314877 - RNA, 19 nt, Artificial Sequence
  Description of Artificial Sequence: Synthetic oligonucleotide
  Antisense strand to SEQ ID NO: 1314876
auuagugcccaacugagcc

SEQ ID NO: 1314878 - RNA, 19 nt, Artificial Sequence
  Description of Artificial Sequence: Synthetic oligonucleotide
  Sense strand starting at position 1507 of SEQ ID NO: 1241986
auuaaaucagccugcagaa

SEQ ID NO: 1314879 - RNA, 19 nt, Artificial Sequence
  Description of Artificial Sequence: Synthetic oligonucleotide
  Antisense strand to SEQ ID NO: 1314878
uucugcaggcugauuuaau

SEQ ID NO: 1314880 - RNA, 19 nt, Artificial Sequence
  Description of Artificial Sequence: Synthetic oligonucleotide
  Sense strand starting at position 2457 of SEQ ID NO: 1241986
guccaaagacuuggucuua

SEQ ID NO: 1314881 - RNA, 19 nt, Artificial Sequence
  Description of Artificial Sequence: Synthetic oligonucleotide
  Antisense strand to SEQ ID NO: 1314880
uaagaccaagucuuuggac

SEQ ID NO: 1314882 - RNA, 19 nt, Artificial Sequence
  Description of Artificial Sequence: Synthetic oligonucleotide
  Sense strand starting at position 2501 of SEQ ID NO: 1241986
ugaugaagucauugauccu

SEQ ID NO: 1314883 - RNA, 19 nt, Artificial Sequence
  Description of Artificial Sequence: Synthetic oligonucleotide
  Antisense strand to SEQ ID NO: 1314882
aggaucaaugacuucauca

SEQ ID NO: 1314884 - RNA, 19 nt, Artificial Sequence
  Description of Artificial Sequence: Synthetic oligonucleotide
  Sense strand starting at position 2507 of SEQ ID NO: 1241986
agucauugauccucaguuu

SEQ ID NO: 1314885 - RNA, 19 nt, Artificial Sequence
  Description of Artificial Sequence: Synthetic oligonucleotide
  Antisense strand to SEQ ID NO: 1314884
aaacugaggaucaaugacu

SEQ ID NO: 1314886 - RNA, 19 nt, Artificial Sequence
  Description of Artificial Sequence: Synthetic oligonucleotide
  Sense strand starting at position 2508 of SEQ ID NO: 1241986
gucauugauccucaguuuc

SEQ ID NO: 1314887 - RNA, 19 nt, Artificial Sequence
  Description of Artificial Sequence: Synthetic oligonucleotide
  Antisense strand to SEQ ID NO: 1314886
gaaacugaggaucaaugac

SEQ ID NO: 1314888 - RNA, 19 nt, Artificial Sequence
  Description of Artificial Sequence: Synthetic oligonucleotide
  Sense strand starting at position 2558 of SEQ ID NO: 1241986
gcuuucaggguuuauguga

SEQ ID NO: 1314889 - RNA, 19 nt, Artificial Sequence
  Description of Artificial Sequence: Synthetic oligonucleotide
  Antisense strand to SEQ ID NO: 1314888
ucacauaaacccugaaagc

SEQ ID NO: 1314890 - RNA, 19 nt, Artificial Sequence
  Description of Artificial Sequence: Synthetic oligonucleotide
  Sense strand starting at position 2583 of SEQ ID NO: 1241986
acugaagugcuuuagguga

SEQ ID NO: 1314891 - RNA, 19 nt, Artificial Sequence
  Description of Artificial Sequence: Synthetic oligonucleotide
  Antisense strand to SEQ ID NO: 1314890
ucaccuaaagcacuucagu

SEQ ID NO: 1314892 - RNA, 19 nt, Artificial Sequence
  Description of Artificial Sequence: Synthetic oligonucleotide
  Sense strand starting at position 2588 of SEQ ID NO: 1241986
agugcuuuaggugagaguu

SEQ ID NO: 1314893 - RNA, 19 nt, Artificial Sequence
  Description of Artificial Sequence: Synthetic oligonucleotide
  Antisense strand to SEQ ID NO: 1314892
aacucucaccuaaagcacu

SEQ ID NO: 1314894 - RNA, 19 nt, Artificial Sequence
  Description of Artificial Sequence: Synthetic oligonucleotide
  Sense strand starting at position 2596 of SEQ ID NO: 1241986
aggugagaguucccuauaa

SEQ ID NO: 1314895 - RNA, 19 nt, Artificial Sequence
  Description of Artificial Sequence: Synthetic oligonucleotide
  Antisense strand to SEQ ID NO: 1314894
uuauagggaacucucaccu

SEQ ID NO: 1314896 - RNA, 19 nt, Artificial Sequence
  Description of Artificial Sequence: Synthetic oligonucleotide
  Sense strand starting at position 2598 of SEQ ID NO: 1241986
gugagaguucccuauaaac

SEQ ID NO: 1314897 - RNA, 19 nt, Artificial Sequence
  Description of Artificial Sequence: Synthetic oligonucleotide
  Antisense strand to SEQ ID NO: 1314896
guuuauagggaacucucac

SEQ ID NO: 1314898 - RNA, 19 nt, Artificial Sequence
  Description of Artificial Sequence: Synthetic oligonucleotide
  Sense strand starting at position 3019 of SEQ ID NO: 1241986
ggagucagcguucaaaucu

SEQ ID NO: 1314899 - RNA, 19 nt, Artificial Sequence
  Description of Artificial Sequence: Synthetic oligonucleotide
  Antisense strand to SEQ ID NO: 1314898
agauuugaacgcugacucc

SEQ ID NO: 1314900 - RNA, 19 nt, Artificial Sequence
  Description of Artificial Sequence: Synthetic oligonucleotide
  Sense strand starting at position 3074 of SEQ ID NO: 1241986
uggauaaguuauguaaccu

SEQ ID NO: 1314901 - RNA, 19 nt, Artificial Sequence
  Description of Artificial Sequence: Synthetic oligonucleotide
  Antisense strand to SEQ ID NO: 1314900
agguuacauaacuuaucca

SEQ ID NO: 1314902 - RNA, 19 nt, Artificial Sequence
  Description of Artificial Sequence: Synthetic oligonucleotide
  Sense strand starting at position 3120 of SEQ ID NO: 1241986
cacgguuggcaucaagauu

SEQ ID NO: 1314903 - RNA, 19 nt, Artificial Sequence
  Description of Artificial Sequence: Synthetic oligonucleotide
  Antisense strand to SEQ ID NO: 1314902
aaucuugaugccaaccgug

SEQ ID NO: 1314904 - RNA, 19 nt, Artificial Sequence
  Description of Artificial Sequence: Synthetic oligonucleotide
  Sense strand starting at position 3165 of SEQ ID NO: 1241986
aggaauaaaucacaugaug

SEQ ID NO: 1314905 - RNA, 19 nt, Artificial Sequence
  Description of Artificial Sequence: Synthetic oligonucleotide
  Antisense strand to SEQ ID NO: 1314904
caucaugugauuuauuccu

SEQ ID NO: 1314906 - RNA, 19 nt, Artificial Sequence
  Description of Artificial Sequence: Synthetic oligonucleotide
  Sense strand starting at position 3174 of SEQ ID NO: 1241986
ucacaugaugaauguuaag

SEQ ID NO: 1314907 - RNA, 19 nt, Artificial Sequence
  Description of Artificial Sequence: Synthetic oligonucleotide
  Antisense strand to SEQ ID NO: 1314906
cuuaacauucaucauguga

SEQ ID NO: 1314908 - RNA, 19 nt, Artificial Sequence
  Description of Artificial Sequence: Synthetic oligonucleotide
  Sense strand starting at position 3185 of SEQ ID NO: 1241986
auguuaaguacuggguuua

SEQ ID NO: 1314909 - RNA, 19 nt, Artificial Sequence
  Description of Artificial Sequence: Synthetic oligonucleotide
  Antisense strand to SEQ ID NO: 1314908
uaaacccaguacuuaacau

SEQ ID NO: 1314910 - RNA, 19 nt, Artificial Sequence
  Description of Artificial Sequence: Synthetic oligonucleotide
  Sense strand starting at position 3226 of SEQ ID NO: 1241986
uuaauaaauggaggcuauu

SEQ ID NO: 1314911 - RNA, 19 nt, Artificial Sequence
  Description of Artificial Sequence: Synthetic oligonucleotide
  Antisense strand to SEQ ID NO: 1314910
aauagccuccauuuauuaa

SEQ ID NO: 1314912 - RNA, 19 nt, Artificial Sequence
  Description of Artificial Sequence: Synthetic oligonucleotide
  Sense strand starting at position 3318 of SEQ ID NO: 1241986
cugauucuccuuuguggaa

SEQ ID NO: 1314913 - RNA, 19 nt, Artificial Sequence
  Description of Artificial Sequence: Synthetic oligonucleotide
  Antisense strand to SEQ ID NO: 1314912
uuccacaaaggagaaucag

SEQ ID NO: 1314914 - RNA, 19 nt, Artificial Sequence
  Description of Artificial Sequence: Synthetic oligonucleotide
  Sense strand starting at position 3322 of SEQ ID NO: 1241986
uucuccuuuguggaagagu

SEQ ID NO: 1314915 - RNA, 19 nt, Artificial Sequence
  Description of Artificial Sequence: Synthetic oligonucleotide
  Antisense strand to SEQ ID NO: 1314914
acucuuccacaaaggagaa

SEQ ID NO: 1314916 - RNA, 19 nt, Artificial Sequence
  Description of Artificial Sequence: Synthetic oligonucleotide
  Sense strand starting at position 3333 of SEQ ID NO: 1241986
ggaagagucaguggccuga

SEQ ID NO: 1314917 - RNA, 19 nt, Artificial Sequence
  Description of Artificial Sequence: Synthetic oligonucleotide
  Antisense strand to SEQ ID NO: 1314916
ucaggccacugacucuucc

SEQ ID NO: 1314918 - RNA, 19 nt, Artificial Sequence
  Description of Artificial Sequence: Synthetic oligonucleotide
  Sense strand starting at position 3335 of SEQ ID NO: 1241986
aagagucaguggccugaaa

SEQ ID NO: 1314919 - RNA, 19 nt, Artificial Sequence
  Description of Artificial Sequence: Synthetic oligonucleotide
  Antisense strand to SEQ ID NO: 1314918
uuucaggccacugacucuu

SEQ ID NO: 1314920 - RNA, 19 nt, Artificial Sequence
  Description of Artificial Sequence: Synthetic oligonucleotide
  Sense strand starting at position 3337 of SEQ ID NO: 1241986
gagucaguggccugaaaua

SEQ ID NO: 1314921 - RNA, 19 nt, Artificial Sequence
  Description of Artificial Sequence: Synthetic oligonucleotide
  Antisense strand to SEQ ID NO: 1314920
uauuucaggccacugacuc

SEQ ID NO: 1314922 - RNA, 19 nt, Artificial Sequence
  Description of Artificial Sequence: Synthetic oligonucleotide
  Sense strand starting at position 3347 of SEQ ID NO: 1241986
ccugaaauacugggcuuua

SEQ ID NO: 1314923 - RNA, 19 nt, Artificial Sequence
  Description of Artificial Sequence: Synthetic oligonucleotide
  Antisense strand to SEQ ID NO: 1314922
uaaagcccaguauuucagg

SEQ ID NO: 1314924 - RNA, 19 nt, Artificial Sequence
  Description of Artificial Sequence: Synthetic oligonucleotide
  Sense strand starting at position 3348 of SEQ ID NO: 1241986
cugaaauacugggcuuuau

SEQ ID NO: 1314925 - RNA, 19 nt, Artificial Sequence
  Description of Artificial Sequence: Synthetic oligonucleotide
  Antisense strand to SEQ ID NO: 1314924
auaaagcccaguauuucag

SEQ ID NO: 1314926 - RNA, 19 nt, Artificial Sequence
  Description of Artificial Sequence: Synthetic oligonucleotide
  Sense strand starting at position 3409 of SEQ ID NO: 1241986
gguagaaagcaugggaauu

SEQ ID NO: 1314927 - RNA, 19 nt, Artificial Sequence
  Description of Artificial Sequence: Synthetic oligonucleotide
  Antisense strand to SEQ ID NO: 1314926
aauucccaugcuuucuacc

SEQ ID NO: 1314928 - RNA, 19 nt, Artificial Sequence
  Description of Artificial Sequence: Synthetic oligonucleotide
  Sense strand starting at position 3472 of SEQ ID NO: 1241986
ggaauugcuuuacucacca

SEQ ID NO: 1314929 - RNA, 19 nt, Artificial Sequence
  Description of Artificial Sequence: Synthetic oligonucleotide
  Antisense strand to SEQ ID NO: 1314928
uggugaguaaagcaauucc

SEQ ID NO: 1314930 - RNA, 19 nt, Artificial Sequence
  Description of Artificial Sequence: Synthetic oligonucleotide
  Sense strand starting at position 3750 of SEQ ID NO: 1241986
agguccugaccagguaaga

SEQ ID NO: 1314931 - RNA, 19 nt, Artificial Sequence
  Description of Artificial Sequence: Synthetic oligonucleotide
  Antisense strand to SEQ ID NO: 1314930
ucuuaccuggucaggaccu

SEQ ID NO: 1314932 - RNA, 19 nt, Artificial Sequence
  Description of Artificial Sequence: Synthetic oligonucleotide
  Sense strand starting at position 3770 of SEQ ID NO: 1241986
gcaggcaugggugaaaguu

SEQ ID NO: 1314933 - RNA, 19 nt, Artificial Sequence
  Description of Artificial Sequence: Synthetic oligonucleotide
  Antisense strand to SEQ ID NO: 1314932
aacuuucacccaugccugc

SEQ ID NO: 1314934 - RNA, 19 nt, Artificial Sequence
  Description of Artificial Sequence: Synthetic oligonucleotide
  Sense strand starting at position 3854 of SEQ ID NO: 1241986
ccgaggaaguguuuggagu

SEQ ID NO: 1314935 - RNA, 19 nt, Artificial Sequence
  Description of Artificial Sequence: Synthetic oligonucleotide
  Antisense strand to SEQ ID NO: 1314934
acuccaaacacuuccucgg

SEQ ID NO: 1314936 - RNA, 19 nt, Artificial Sequence
  Description of Artificial Sequence: Synthetic oligonucleotide
  Sense strand starting at position 3974 of SEQ ID NO: 1241986
auaagaaguaagugcugaa

SEQ ID NO: 1314937 - RNA, 19 nt, Artificial Sequence
  Description of Artificial Sequence: Synthetic oligonucleotide
  Antisense strand to SEQ ID NO: 1314936
uucagcacuuacuucuuau

SEQ ID NO: 1314938 - RNA, 19 nt, Artificial Sequence
  Description of Artificial Sequence: Synthetic oligonucleotide
  Sense strand starting at position 17 of SEQ ID NO: 1241987
auggucugccuggauaauc

SEQ ID NO: 1314939 - RNA, 19 nt, Artificial Sequence
  Description of Artificial Sequence: Synthetic oligonucleotide
  Antisense strand to SEQ ID NO: 1314938
gauuauccaggcagaccau

SEQ ID NO: 1314940 - RNA, 19 nt, Artificial Sequence
  Description of Artificial Sequence: Synthetic oligonucleotide
  Sense strand starting at position 88 of SEQ ID NO: 1241987
aauaauguucuaugagagc

SEQ ID NO: 1314941 - RNA, 19 nt, Artificial Sequence
  Description of Artificial Sequence: Synthetic oligonucleotide
  Antisense strand to SEQ ID NO: 1314940
gcucucauagaacauuauu

SEQ ID NO: 1314942 - RNA, 19 nt, Artificial Sequence
  Description of Artificial Sequence: Synthetic oligonucleotide
  Sense strand starting at position 626 of SEQ ID NO: 1241987
guuuguugugcuuuacuuu

SEQ ID NO: 1314943 - RNA, 19 nt, Artificial Sequence
  Description of Artificial Sequence: Synthetic oligonucleotide
  Antisense strand to SEQ ID NO: 1314942
aaaguaaagcacaacaaac

SEQ ID NO: 1314944 - RNA, 19 nt, Artificial Sequence
  Description of Artificial Sequence: Synthetic oligonucleotide
  Sense strand starting at position 725 of SEQ ID NO: 1241987
augguuaaagcuuaaucau

SEQ ID NO: 1314945 - RNA, 19 nt, Artificial Sequence
  Description of Artificial Sequence: Synthetic oligonucleotide
  Antisense strand to SEQ ID NO: 1314944
augauuaagcuuuaaccau

SEQ ID NO: 1314946 - RNA, 19 nt, Artificial Sequence
  Description of Artificial Sequence: Synthetic oligonucleotide
  Sense strand starting at position 740 of SEQ ID NO: 1241987
ucauuuauguuacagagga

SEQ ID NO: 1314947 - RNA, 19 nt, Artificial Sequence
  Description of Artificial Sequence: Synthetic oligonucleotide
  Antisense strand to SEQ ID NO: 1314946
uccucuguaacauaaauga

SEQ ID NO: 1314948 - RNA, 19 nt, Artificial Sequence
  Description of Artificial Sequence: Synthetic oligonucleotide
  Sense strand starting at position 1069 of SEQ ID NO: 1241987
ucugccucaguuuauagau

SEQ ID NO: 1314949 - RNA, 19 nt, Artificial Sequence
  Description of Artificial Sequence: Synthetic oligonucleotide
  Antisense strand to SEQ ID NO: 1314948
aucuauaaacugaggcaga

SEQ ID NO: 1314950 - RNA, 19 nt, Artificial Sequence
  Description of Artificial Sequence: Synthetic oligonucleotide
  Sense strand starting at position 1076 of SEQ ID NO: 1241987
caguuuauagauugaguau

SEQ ID NO: 1314951 - RNA, 19 nt, Artificial Sequence
  Description of Artificial Sequence: Synthetic oligonucleotide
  Antisense strand to SEQ ID NO: 1314950
auacucaaucuauaaacug

SEQ ID NO: 1314952 - RNA, 19 nt, Artificial Sequence
  Description of Artificial Sequence: Synthetic oligonucleotide
  Sense strand starting at position 1120 of SEQ ID NO: 1241987
ugguuugucagucacagga

SEQ ID NO: 1314953 - RNA, 19 nt, Artificial Sequence
  Description of Artificial Sequence: Synthetic oligonucleotide
  Antisense strand to SEQ ID NO: 1314952
uccugugacugacaaacca

SEQ ID NO: 1314954 - RNA, 19 nt, Artificial Sequence
  Description of Artificial Sequence: Synthetic oligonucleotide
  Sense strand starting at position 1135 of SEQ ID NO: 1241987
aggacuuauuuagacacuu

SEQ ID NO: 1314955 - RNA, 19 nt, Artificial Sequence
  Description of Artificial Sequence: Synthetic oligonucleotide
  Antisense strand to SEQ ID NO: 1314954
aagugucuaaauaaguccu

SEQ ID NO: 1314956 - RNA, 19 nt, Artificial Sequence
  Description of Artificial Sequence: Synthetic oligonucleotide
  Sense strand starting at position 1208 of SEQ ID NO: 1241987
aggguaaggucacucuaaa

SEQ ID NO: 1314957 - RNA, 19 nt, Artificial Sequence
  Description of Artificial Sequence: Synthetic oligonucleotide
  Antisense strand to SEQ ID NO: 1314956
uuuagagugaccuuacccu

SEQ ID NO: 1314958 - RNA, 19 nt, Artificial Sequence
  Description of Artificial Sequence: Synthetic oligonucleotide
  Sense strand starting at position 1262 of SEQ ID NO: 1241987
cuagcauaagacuaguaca

SEQ ID NO: 1314959 - RNA, 19 nt, Artificial Sequence
  Description of Artificial Sequence: Synthetic oligonucleotide
  Antisense strand to SEQ ID NO: 1314958
uguacuagucuuaugcuag

SEQ ID NO: 1314960 - RNA, 19 nt, Artificial Sequence
  Description of Artificial Sequence: Synthetic oligonucleotide
  Sense strand starting at position 1298 of SEQ ID NO: 1241987
aagagagaucucuguacuu

SEQ ID NO: 1314961 - RNA, 19 nt, Artificial Sequence
  Description of Artificial Sequence: Synthetic oligonucleotide
  Antisense strand to SEQ ID NO: 1314960
aaguacagagaucucucuu

SEQ ID NO: 1314962 - RNA, 19 nt, Artificial Sequence
  Description of Artificial Sequence: Synthetic oligonucleotide
  Sense strand starting at position 1498 of SEQ ID NO: 1241987
gaggguuauuaacugaguu

SEQ ID NO: 1314963 - RNA, 19 nt, Artificial Sequence
  Description of Artificial Sequence: Synthetic oligonucleotide
  Antisense strand to SEQ ID NO: 1314962
aacucaguuaauaacccuc

SEQ ID NO: 1314964 - RNA, 19 nt, Artificial Sequence
  Description of Artificial Sequence: Synthetic oligonucleotide
  Sense strand starting at position 1499 of SEQ ID NO: 1241987
aggguuauuaacugaguug

SEQ ID NO: 1314965 - RNA, 19 nt, Artificial Sequence
  Description of Artificial Sequence: Synthetic oligonucleotide
  Antisense strand to SEQ ID NO: 1314964
caacucaguuaauaacccu

SEQ ID NO: 1314966 - RNA, 19 nt, Artificial Sequence
  Description of Artificial Sequence: Synthetic oligonucleotide
  Sense strand starting at position 1500 of SEQ ID NO: 1241987
ggguuauuaacugaguuga

SEQ ID NO: 1314967 - RNA, 19 nt, Artificial Sequence
  Description of Artificial Sequence: Synthetic oligonucleotide
  Antisense strand to SEQ ID NO: 1314966
ucaacucaguuaauaaccc

SEQ ID NO: 1314968 - RNA, 19 nt, Artificial Sequence
  Description of Artificial Sequence: Synthetic oligonucleotide
  Sense strand starting at position 1502 of SEQ ID NO: 1241987
guuauuaacugaguugaug

SEQ ID NO: 1314969 - RNA, 19 nt, Artificial Sequence
  Description of Artificial Sequence: Synthetic oligonucleotide
  Antisense strand to SEQ ID NO: 1314968
caucaacucaguuaauaac

SEQ ID NO: 1314970 - RNA, 19 nt, Artificial Sequence
  Description of Artificial Sequence: Synthetic oligonucleotide
  Sense strand starting at position 1586 of SEQ ID NO: 1241987
gucgcacagaaguaauuaa

SEQ ID NO: 1314971 - RNA, 19 nt, Artificial Sequence
  Description of Artificial Sequence: Synthetic oligonucleotide
  Antisense strand to SEQ ID NO: 1314970
uuaauuacuucugugcgac

SEQ ID NO: 1314972 - RNA, 19 nt, Artificial Sequence
  Description of Artificial Sequence: Synthetic oligonucleotide
  Sense strand starting at position 1906 of SEQ ID NO: 1241987
accgcauuaccugaucaga

SEQ ID NO: 1314973 - RNA, 19 nt, Artificial Sequence
  Description of Artificial Sequence: Synthetic oligonucleotide
  Antisense strand to SEQ ID NO: 1314972
ucugaucagguaaugcggu

SEQ ID NO: 1314974 - RNA, 19 nt, Artificial Sequence
  Description of Artificial Sequence: Synthetic oligonucleotide
  Sense strand starting at position 2601 of SEQ ID NO: 1241987
cuaaguuuauuugccaagu

SEQ ID NO: 1314975 - RNA, 19 nt, Artificial Sequence
  Description of Artificial Sequence: Synthetic oligonucleotide
  Antisense strand to SEQ ID NO: 1314974
acuuggcaaauaaacuuag

SEQ ID NO: 1314976 - RNA, 19 nt, Artificial Sequence
  Description of Artificial Sequence: Synthetic oligonucleotide
  Sense strand starting at position 2623 of SEQ ID NO: 1241987
uauugagugccuuucgugu

SEQ ID NO: 1314977 - RNA, 19 nt, Artificial Sequence
  Description of Artificial Sequence: Synthetic oligonucleotide
  Antisense strand to SEQ ID NO: 1314976
acacgaaaggcacucaaua

SEQ ID NO: 1314978 - RNA, 19 nt, Artificial Sequence
  Description of Artificial Sequence: Synthetic oligonucleotide
  Sense strand starting at position 2663 of SEQ ID NO: 1241987
uguggauacaaccguaaau

SEQ ID NO: 1314979 - RNA, 19 nt, Artificial Sequence
  Description of Artificial Sequence: Synthetic oligonucleotide
  Antisense strand to SEQ ID NO: 1314978
auuuacgguuguauccaca

SEQ ID NO: 1314980 - RNA, 19 nt, Artificial Sequence
  Description of Artificial Sequence: Synthetic oligonucleotide
  Sense strand starting at position 2753 of SEQ ID NO: 1241987
agguaaauagucuguugaa

SEQ ID NO: 1314981 - RNA, 19 nt, Artificial Sequence
  Description of Artificial Sequence: Synthetic oligonucleotide
  Antisense strand to SEQ ID NO: 1314980
uucaacagacuauuuaccu

SEQ ID NO: 1314982 - RNA, 19 nt, Artificial Sequence
  Description of Artificial Sequence: Synthetic oligonucleotide
  Sense strand starting at position 2754 of SEQ ID NO: 1241987
gguaaauagucuguugaag

SEQ ID NO: 1314983 - RNA, 19 nt, Artificial Sequence
  Description of Artificial Sequence: Synthetic oligonucleotide
  Antisense strand to SEQ ID NO: 1314982
cuucaacagacuauuuacc

SEQ ID NO: 1314984 - RNA, 19 nt, Artificial Sequence
  Description of Artificial Sequence: Synthetic oligonucleotide
  Sense strand starting at position 2760 of SEQ ID NO: 1241987
uagucuguugaagagugaa

SEQ ID NO: 1314985 - RNA, 19 nt, Artificial Sequence
  Description of Artificial Sequence: Synthetic oligonucleotide
  Antisense strand to SEQ ID NO: 1314984
uucacucuucaacagacua

SEQ ID NO: 1314986 - RNA, 19 nt, Artificial Sequence
  Description of Artificial Sequence: Synthetic oligonucleotide
  Sense strand starting at position 2866 of SEQ ID NO: 1241987
uaggccuuauugguaagau

SEQ ID NO: 1314987 - RNA, 19 nt, Artificial Sequence
  Description of Artificial Sequence: Synthetic oligonucleotide
  Antisense strand to SEQ ID NO: 1314986
aucuuaccaauaaggccua

SEQ ID NO: 1314988 - RNA, 19 nt, Artificial Sequence
  Description of Artificial Sequence: Synthetic oligonucleotide
  Sense strand starting at position 2933 of SEQ ID NO: 1241987
gggugugcuccagacaaga

SEQ ID NO: 1314989 - RNA, 19 nt, Artificial Sequence
  Description of Artificial Sequence: Synthetic oligonucleotide
  Antisense strand to SEQ ID NO: 1314988
ucuugucuggagcacaccc

SEQ ID NO: 1314990 - RNA, 19 nt, Artificial Sequence
  Description of Artificial Sequence: Synthetic oligonucleotide
  Sense strand starting at position 2935 of SEQ ID NO: 1241987
gugugcuccagacaagaaa

SEQ ID NO: 1314991 - RNA, 19 nt, Artificial Sequence
  Description of Artificial Sequence: Synthetic oligonucleotide
  Antisense strand to SEQ ID NO: 1314990
uuucuugucuggagcacac

SEQ ID NO: 1314992 - RNA, 19 nt, Artificial Sequence
  Description of Artificial Sequence: Synthetic oligonucleotide
  Sense strand starting at position 2982 of SEQ ID NO: 1241987
guguuuguggaagauuaag

SEQ ID NO: 1314993 - RNA, 19 nt, Artificial Sequence
  Description of Artificial Sequence: Synthetic oligonucleotide
  Antisense strand to SEQ ID NO: 1314992
cuuaaucuuccacaaacac

SEQ ID NO: 1314994 - RNA, 19 nt, Artificial Sequence
  Description of Artificial Sequence: Synthetic oligonucleotide
  Sense strand starting at position 3135 of SEQ ID NO: 1241987
aaaggauugcaguguugag

SEQ ID NO: 1314995 - RNA, 19 nt, Artificial Sequence
  Description of Artificial Sequence: Synthetic oligonucleotide
  Antisense strand to SEQ ID NO: 1314994
cucaacacugcaauccuuu

SEQ ID NO: 1314996 - RNA, 19 nt, Artificial Sequence
  Description of Artificial Sequence: Synthetic oligonucleotide
  Sense strand starting at position 3171 of SEQ ID NO: 1241987
gcuguuacaguguuccagu

SEQ ID NO: 1314997 - RNA, 19 nt, Artificial Sequence
  Description of Artificial Sequence: Synthetic oligonucleotide
  Antisense strand to SEQ ID NO: 1314996
acuggaacacuguaacagc

SEQ ID NO: 1314998 - RNA, 19 nt, Artificial Sequence
  Description of Artificial Sequence: Synthetic oligonucleotide
  Sense strand starting at position 3179 of SEQ ID NO: 1241987
aguguuccaguagagagau

SEQ ID NO: 1314999 - RNA, 19 nt, Artificial Sequence
  Description of Artificial Sequence: Synthetic oligonucleotide
  Antisense strand to SEQ ID NO: 1314998
aucucucuacuggaacacu

SEQ ID NO: 1315000 - RNA, 19 nt, Artificial Sequence
  Description of Artificial Sequence: Synthetic oligonucleotide
  Sense strand starting at position 3221 of SEQ ID NO: 1241987
ugaauuuggugagaaguaa

SEQ ID NO: 1315001 - RNA, 19 nt, Artificial Sequence
  Description of Artificial Sequence: Synthetic oligonucleotide
  Antisense strand to SEQ ID NO: 1315000
uuacuucucaccaaauuca

SEQ ID NO: 1315002 - RNA, 19 nt, Artificial Sequence
  Description of Artificial Sequence: Synthetic oligonucleotide
  Sense strand starting at position 3279 of SEQ ID NO: 1241987
ucaaauucgauaugggaua

SEQ ID NO: 1315003 - RNA, 19 nt, Artificial Sequence
  Description of Artificial Sequence: Synthetic oligonucleotide
  Antisense strand to SEQ ID NO: 1315002
uaucccauaucgaauuuga

SEQ ID NO: 1315004 - RNA, 19 nt, Artificial Sequence
  Description of Artificial Sequence: Synthetic oligonucleotide
  Sense strand starting at position 3324 of SEQ ID NO: 1241987
augccaaaggcaugaauua

SEQ ID NO: 1315005 - RNA, 19 nt, Artificial Sequence
  Description of Artificial Sequence: Synthetic oligonucleotide
  Antisense strand to SEQ ID NO: 1315004
uaauucaugccuuuggcau

SEQ ID NO: 1315006 - RNA, 19 nt, Artificial Sequence
  Description of Artificial Sequence: Synthetic oligonucleotide
  Sense strand starting at position 3325 of SEQ ID NO: 1241987
ugccaaaggcaugaauuaa

SEQ ID NO: 1315007 - RNA, 19 nt, Artificial Sequence
  Description of Artificial Sequence: Synthetic oligonucleotide
  Antisense strand to SEQ ID NO: 1315006
uuaauucaugccuuuggca

SEQ ID NO: 1315008 - RNA, 19 nt, Artificial Sequence
  Description of Artificial Sequence: Synthetic oligonucleotide
  Sense strand starting at position 3346 of SEQ ID NO: 1241987
aaguuaauauauguaggga

SEQ ID NO: 1315009 - RNA, 19 nt, Artificial Sequence
  Description of Artificial Sequence: Synthetic oligonucleotide
  Antisense strand to SEQ ID NO: 1315008
ucccuacauauauuaacuu

SEQ ID NO: 1315010 - RNA, 19 nt, Artificial Sequence
  Description of Artificial Sequence: Synthetic oligonucleotide
  Sense strand starting at position 3349 of SEQ ID NO: 1241987
uuaauauauguagggaacu

SEQ ID NO: 1315011 - RNA, 19 nt, Artificial Sequence
  Description of Artificial Sequence: Synthetic oligonucleotide
  Antisense strand to SEQ ID NO: 1315010
aguucccuacauauauuaa

SEQ ID NO: 1315012 - RNA, 19 nt, Artificial Sequence
  Description of Artificial Sequence: Synthetic oligonucleotide
  Sense strand starting at position 3446 of SEQ ID NO: 1241987
agugacagucuacauauca

SEQ ID NO: 1315013 - RNA, 19 nt, Artificial Sequence
  Description of Artificial Sequence: Synthetic oligonucleotide
  Antisense strand to SEQ ID NO: 1315012
ugauauguagacugucacu

SEQ ID NO: 1315014 - RNA, 19 nt, Artificial Sequence
  Description of Artificial Sequence: Synthetic oligonucleotide
  Sense strand starting at position 3736 of SEQ ID NO: 1241987
uguagagacacauggaagu

SEQ ID NO: 1315015 - RNA, 19 nt, Artificial Sequence
  Description of Artificial Sequence: Synthetic oligonucleotide
  Antisense strand to SEQ ID NO: 1315014
acuuccaugugucucuaca

SEQ ID NO: 1315016 - RNA, 19 nt, Artificial Sequence
  Description of Artificial Sequence: Synthetic oligonucleotide
  Sense strand starting at position 3828 of SEQ ID NO: 1241987
cggugucagauuugcauag

SEQ ID NO: 1315017 - RNA, 19 nt, Artificial Sequence
  Description of Artificial Sequence: Synthetic oligonucleotide
  Antisense strand to SEQ ID NO: 1315016
cuaugcaaaucugacaccg

SEQ ID NO: 1315018 - RNA, 19 nt, Artificial Sequence
  Description of Artificial Sequence: Synthetic oligonucleotide
  Sense strand starting at position 93 of SEQ ID NO: 1241988
gccugcucaccaggauaau

SEQ ID NO: 1315019 - RNA, 19 nt, Artificial Sequence
  Description of Artificial Sequence: Synthetic oligonucleotide
  Antisense strand to SEQ ID NO: 1315018
auuauccuggugagcaggc

SEQ ID NO: 1315020 - RNA, 19 nt, Artificial Sequence
  Description of Artificial Sequence: Synthetic oligonucleotide
  Sense strand starting at position 285 of SEQ ID NO: 1241988
agagauguguagcccaaua

SEQ ID NO: 1315021 - RNA, 19 nt, Artificial Sequence
  Description of Artificial Sequence: Synthetic oligonucleotide
  Antisense strand to SEQ ID NO: 1315020
uauugggcuacacaucucu

SEQ ID NO: 1315022 - RNA, 19 nt, Artificial Sequence
  Description of Artificial Sequence: Synthetic oligonucleotide
  Sense strand starting at position 287 of SEQ ID NO: 1241988
agauguguagcccaauaua

SEQ ID NO: 1315023 - RNA, 19 nt, Artificial Sequence
  Description of Artificial Sequence: Synthetic oligonucleotide
  Antisense strand to SEQ ID NO: 1315022
uauauugggcuacacaucu

SEQ ID NO: 1315024 - RNA, 19 nt, Artificial Sequence
  Description of Artificial Sequence: Synthetic oligonucleotide
  Sense strand starting at position 330 of SEQ ID NO: 1241988
aaacuuugguguccagaca

SEQ ID NO: 1315025 - RNA, 19 nt, Artificial Sequence
  Description of Artificial Sequence: Synthetic oligonucleotide
  Antisense strand to SEQ ID NO: 1315024
ugucuggacaccaaaguuu

SEQ ID NO: 1315026 - RNA, 19 nt, Artificial Sequence
  Description of Artificial Sequence: Synthetic oligonucleotide
  Sense strand starting at position 331 of SEQ ID NO: 1241988
aacuuugguguccagacaa

SEQ ID NO: 1315027 - RNA, 19 nt, Artificial Sequence
  Description of Artificial Sequence: Synthetic oligonucleotide
  Antisense strand to SEQ ID NO: 1315026
uugucuggacaccaaaguu

SEQ ID NO: 1315028 - RNA, 19 nt, Artificial Sequence
  Description of Artificial Sequence: Synthetic oligonucleotide
  Sense strand starting at position 386 of SEQ ID NO: 1241988
ggcauacagaugugaaguu

SEQ ID NO: 1315029 - RNA, 19 nt, Artificial Sequence
  Description of Artificial Sequence: Synthetic oligonucleotide
  Antisense strand to SEQ ID NO: 1315028
aacuucacaucuguaugcc

SEQ ID NO: 1315030 - RNA, 19 nt, Artificial Sequence
  Description of Artificial Sequence: Synthetic oligonucleotide
  Sense strand starting at position 395 of SEQ ID NO: 1241988
augugaaguuacucaguga

SEQ ID NO: 1315031 - RNA, 19 nt, Artificial Sequence
  Description of Artificial Sequence: Synthetic oligonucleotide
  Antisense strand to SEQ ID NO: 1315030
ucacugaguaacuucacau

SEQ ID NO: 1315032 - RNA, 19 nt, Artificial Sequence
  Description of Artificial Sequence: Synthetic oligonucleotide
  Sense strand starting at position 396 of SEQ ID NO: 1241988
ugugaaguuacucagugac

SEQ ID NO: 1315033 - RNA, 19 nt, Artificial Sequence
  Description of Artificial Sequence: Synthetic oligonucleotide
  Antisense strand to SEQ ID NO: 1315032
gucacugaguaacuucaca

SEQ ID NO: 1315034 - RNA, 19 nt, Artificial Sequence
  Description of Artificial Sequence: Synthetic oligonucleotide
  Sense strand starting at position 398 of SEQ ID NO: 1241988
ugaaguuacucagugacua

SEQ ID NO: 1315035 - RNA, 19 nt, Artificial Sequence
  Description of Artificial Sequence: Synthetic oligonucleotide
  Antisense strand to SEQ ID NO: 1315034
uagucacugaguaacuuca

SEQ ID NO: 1315036 - RNA, 19 nt, Artificial Sequence
  Description of Artificial Sequence: Synthetic oligonucleotide
  Sense strand starting at position 399 of SEQ ID NO: 1241988
gaaguuacucagugacuau

SEQ ID NO: 1315037 - RNA, 19 nt, Artificial Sequence
  Description of Artificial Sequence: Synthetic oligonucleotide
  Antisense strand to SEQ ID NO: 1315036
auagucacugaguaacuuc

SEQ ID NO: 1315038 - RNA, 19 nt, Artificial Sequence
  Description of Artificial Sequence: Synthetic oligonucleotide
  Sense strand starting at position 533 of SEQ ID NO: 1241988
gaggauagccaguaagagu

SEQ ID NO: 1315039 - RNA, 19 nt, Artificial Sequence
  Description of Artificial Sequence: Synthetic oligonucleotide
  Antisense strand to SEQ ID NO: 1315038
acucuuacuggcuauccuc

SEQ ID NO: 1315040 - RNA, 19 nt, Artificial Sequence
  Description of Artificial Sequence: Synthetic oligonucleotide
  Sense strand starting at position 544 of SEQ ID NO: 1241988
guaagaguuacaggccauu

SEQ ID NO: 1315041 - RNA, 19 nt, Artificial Sequence
  Description of Artificial Sequence: Synthetic oligonucleotide
  Antisense strand to SEQ ID NO: 1315040
aauggccuguaacucuuac

SEQ ID NO: 1315042 - RNA, 19 nt, Artificial Sequence
  Description of Artificial Sequence: Synthetic oligonucleotide
  Sense strand starting at position 656 of SEQ ID NO: 1241988
gcugcauuacucugagaau

SEQ ID NO: 1315043 - RNA, 19 nt, Artificial Sequence
  Description of Artificial Sequence: Synthetic oligonucleotide
  Antisense strand to SEQ ID NO: 1315042
auucucagaguaaugcagc

SEQ ID NO: 1315044 - RNA, 19 nt, Artificial Sequence
  Description of Artificial Sequence: Synthetic oligonucleotide
  Sense strand starting at position 707 of SEQ ID NO: 1241988
gcauuaaacuuguugaaau

SEQ ID NO: 1315045 - RNA, 19 nt, Artificial Sequence
  Description of Artificial Sequence: Synthetic oligonucleotide
  Antisense strand to SEQ ID NO: 1315044
auuucaacaaguuuaaugc

SEQ ID NO: 1315046 - RNA, 19 nt, Artificial Sequence
  Description of Artificial Sequence: Synthetic oligonucleotide
  Sense strand starting at position 719 of SEQ ID NO: 1241988
uugaaauucuggcuuagga

SEQ ID NO: 1315047 - RNA, 19 nt, Artificial Sequence
  Description of Artificial Sequence: Synthetic oligonucleotide
  Antisense strand to SEQ ID NO: 1315046
uccuaagccagaauuucaa

SEQ ID NO: 1315048 - RNA, 19 nt, Artificial Sequence
  Description of Artificial Sequence: Synthetic oligonucleotide
  Sense strand starting at position 747 of SEQ ID NO: 1241988
aaaggaaggucugcuauua

SEQ ID NO: 1315049 - RNA, 19 nt, Artificial Sequence
  Description of Artificial Sequence: Synthetic oligonucleotide
  Antisense strand to SEQ ID NO: 1315048
uaauagcagaccuuccuuu

SEQ ID NO: 1315050 - RNA, 19 nt, Artificial Sequence
  Description of Artificial Sequence: Synthetic oligonucleotide
  Sense strand starting at position 768 of SEQ ID NO: 1241988
ucuguuacucuauaaguuu

SEQ ID NO: 1315051 - RNA, 19 nt, Artificial Sequence
  Description of Artificial Sequence: Synthetic oligonucleotide
  Antisense strand to SEQ ID NO: 1315050
aaacuuauagaguaacaga

SEQ ID NO: 1315052 - RNA, 19 nt, Artificial Sequence
  Description of Artificial Sequence: Synthetic oligonucleotide
  Sense strand starting at position 943 of SEQ ID NO: 1241988
agagcauguugacucagaa

SEQ ID NO: 1315053 - RNA, 19 nt, Artificial Sequence
  Description of Artificial Sequence: Synthetic oligonucleotide
  Antisense strand to SEQ ID NO: 1315052
uucugagucaacaugcucu

SEQ ID NO: 1315054 - RNA, 19 nt, Artificial Sequence
  Description of Artificial Sequence: Synthetic oligonucleotide
  Sense strand starting at position 1177 of SEQ ID NO: 1241988
agagaauauugagaagaga

SEQ ID NO: 1315055 - RNA, 19 nt, Artificial Sequence
  Description of Artificial Sequence: Synthetic oligonucleotide
  Antisense strand to SEQ ID NO: 1315054
ucucuucucaauauucucu

SEQ ID NO: 1315056 - RNA, 19 nt, Artificial Sequence
  Description of Artificial Sequence: Synthetic oligonucleotide
  Sense strand starting at position 1447 of SEQ ID NO: 1241988
ucuguaagcgcugacaaua

SEQ ID NO: 1315057 - RNA, 19 nt, Artificial Sequence
  Description of Artificial Sequence: Synthetic oligonucleotide
  Antisense strand to SEQ ID NO: 1315056
uauugucagcgcuuacaga

SEQ ID NO: 1315058 - RNA, 19 nt, Artificial Sequence
  Description of Artificial Sequence: Synthetic oligonucleotide
  Sense strand starting at position 1558 of SEQ ID NO: 1241988
ggugguugacucggaaucu

SEQ ID NO: 1315059 - RNA, 19 nt, Artificial Sequence
  Description of Artificial Sequence: Synthetic oligonucleotide
  Antisense strand to SEQ ID NO: 1315058
agauuccgagucaaccacc

SEQ ID NO: 1315060 - RNA, 19 nt, Artificial Sequence
  Description of Artificial Sequence: Synthetic oligonucleotide
  Sense strand starting at position 2176 of SEQ ID NO: 1241988
cugaaagucacagggcaaa

SEQ ID NO: 1315061 - RNA, 19 nt, Artificial Sequence
  Description of Artificial Sequence: Synthetic oligonucleotide
  Antisense strand to SEQ ID NO: 1315060
uuugcccugugacuuucag

SEQ ID NO: 1315062 - RNA, 19 nt, Artificial Sequence
  Description of Artificial Sequence: Synthetic oligonucleotide
  Sense strand starting at position 2204 of SEQ ID NO: 1241988
gucuguagucaauaaauaa

SEQ ID NO: 1315063 - RNA, 19 nt, Artificial Sequence
  Description of Artificial Sequence: Synthetic oligonucleotide
  Antisense strand to SEQ ID NO: 1315062
uuauuuauugacuacagac

SEQ ID NO: 1315064 - RNA, 19 nt, Artificial Sequence
  Description of Artificial Sequence: Synthetic oligonucleotide
  Sense strand starting at position 2296 of SEQ ID NO: 1241988
ggagcaaaccaggguaaau

SEQ ID NO: 1315065 - RNA, 19 nt, Artificial Sequence
  Description of Artificial Sequence: Synthetic oligonucleotide
  Antisense strand to SEQ ID NO: 1315064
auuuacccugguuugcucc

SEQ ID NO: 1315066 - RNA, 19 nt, Artificial Sequence
  Description of Artificial Sequence: Synthetic oligonucleotide
  Sense strand starting at position 2331 of SEQ ID NO: 1241988
agaugauauugaggaaaga

SEQ ID NO: 1315067 - RNA, 19 nt, Artificial Sequence
  Description of Artificial Sequence: Synthetic oligonucleotide
  Antisense strand to SEQ ID NO: 1315066
ucuuuccucaauaucaucu

SEQ ID NO: 1315068 - RNA, 19 nt, Artificial Sequence
  Description of Artificial Sequence: Synthetic oligonucleotide
  Sense strand starting at position 2349 of SEQ ID NO: 1241988
agacuagggccuuggagau

SEQ ID NO: 1315069 - RNA, 19 nt, Artificial Sequence
  Description of Artificial Sequence: Synthetic oligonucleotide
  Antisense strand to SEQ ID NO: 1315068
aucuccaaggcccuagucu

SEQ ID NO: 1315070 - RNA, 19 nt, Artificial Sequence
  Description of Artificial Sequence: Synthetic oligonucleotide
  Sense strand starting at position 2375 of SEQ ID NO: 1241988
ucuccuugugguggaaaga

SEQ ID NO: 1315071 - RNA, 19 nt, Artificial Sequence
  Description of Artificial Sequence: Synthetic oligonucleotide
  Antisense strand to SEQ ID NO: 1315070
ucuuuccaccacaaggaga

SEQ ID NO: 1315072 - RNA, 19 nt, Artificial Sequence
  Description of Artificial Sequence: Synthetic oligonucleotide
  Sense strand starting at position 2376 of SEQ ID NO: 1241988
cuccuugugguggaaagaa

SEQ ID NO: 1315073 - RNA, 19 nt, Artificial Sequence
  Description of Artificial Sequence: Synthetic oligonucleotide
  Antisense strand to SEQ ID NO: 1315072
uucuuuccaccacaaggag

SEQ ID NO: 1315074 - RNA, 19 nt, Artificial Sequence
  Description of Artificial Sequence: Synthetic oligonucleotide
  Sense strand starting at position 2408 of SEQ ID NO: 1241988
guccgaaacuuggcucuaa

SEQ ID NO: 1315075 - RNA, 19 nt, Artificial Sequence
  Description of Artificial Sequence: Synthetic oligonucleotide
  Antisense strand to SEQ ID NO: 1315074
uuagagccaaguuucggac

SEQ ID NO: 1315076 - RNA, 19 nt, Artificial Sequence
  Description of Artificial Sequence: Synthetic oligonucleotide
  Sense strand starting at position 2409 of SEQ ID NO: 1241988
uccgaaacuuggcucuaau

SEQ ID NO: 1315077 - RNA, 19 nt, Artificial Sequence
  Description of Artificial Sequence: Synthetic oligonucleotide
  Antisense strand to SEQ ID NO: 1315076
auuagagccaaguuucgga

SEQ ID NO: 1315078 - RNA, 19 nt, Artificial Sequence
  Description of Artificial Sequence: Synthetic oligonucleotide
  Sense strand starting at position 2835 of SEQ ID NO: 1241988
agguaugcacuuuaacaca

SEQ ID NO: 1315079 - RNA, 19 nt, Artificial Sequence
  Description of Artificial Sequence: Synthetic oligonucleotide
  Antisense strand to SEQ ID NO: 1315078
uguguuaaagugcauaccu

SEQ ID NO: 1315080 - RNA, 19 nt, Artificial Sequence
  Description of Artificial Sequence: Synthetic oligonucleotide
  Sense strand starting at position 2883 of SEQ ID NO: 1241988
agaagugaaugacuuguua

SEQ ID NO: 1315081 - RNA, 19 nt, Artificial Sequence
  Description of Artificial Sequence: Synthetic oligonucleotide
  Antisense strand to SEQ ID NO: 1315080
uaacaagucauucacuucu

SEQ ID NO: 1315082 - RNA, 19 nt, Artificial Sequence
  Description of Artificial Sequence: Synthetic oligonucleotide
  Sense strand starting at position 2887 of SEQ ID NO: 1241988
gugaaugacuuguuauaau

SEQ ID NO: 1315083 - RNA, 19 nt, Artificial Sequence
  Description of Artificial Sequence: Synthetic oligonucleotide
  Antisense strand to SEQ ID NO: 1315082
auuauaacaagucauucac

SEQ ID NO: 1315084 - RNA, 19 nt, Artificial Sequence
  Description of Artificial Sequence: Synthetic oligonucleotide
  Sense strand starting at position 2944 of SEQ ID NO: 1241988
ccuggucuacacuguauau

SEQ ID NO: 1315085 - RNA, 19 nt, Artificial Sequence
  Description of Artificial Sequence: Synthetic oligonucleotide
  Antisense strand to SEQ ID NO: 1315084
auauacaguguagaccagg

SEQ ID NO: 1315086 - RNA, 19 nt, Artificial Sequence
  Description of Artificial Sequence: Synthetic oligonucleotide
  Sense strand starting at position 2953 of SEQ ID NO: 1241988
cacuguauauuggcugaga

SEQ ID NO: 1315087 - RNA, 19 nt, Artificial Sequence
  Description of Artificial Sequence: Synthetic oligonucleotide
  Antisense strand to SEQ ID NO: 1315086
ucucagccaauauacagug

SEQ ID NO: 1315088 - RNA, 19 nt, Artificial Sequence
  Description of Artificial Sequence: Synthetic oligonucleotide
  Sense strand starting at position 2954 of SEQ ID NO: 1241988
acuguauauuggcugagaa

SEQ ID NO: 1315089 - RNA, 19 nt, Artificial Sequence
  Description of Artificial Sequence: Synthetic oligonucleotide
  Antisense strand to SEQ ID NO: 1315088
uucucagccaauauacagu

SEQ ID NO: 1315090 - RNA, 19 nt, Artificial Sequence
  Description of Artificial Sequence: Synthetic oligonucleotide
  Sense strand starting at position 2955 of SEQ ID NO: 1241988
cuguauauuggcugagaaa

SEQ ID NO: 1315091 - RNA, 19 nt, Artificial Sequence
  Description of Artificial Sequence: Synthetic oligonucleotide
  Antisense strand to SEQ ID NO: 1315090
uuucucagccaauauacag

SEQ ID NO: 1315092 - RNA, 19 nt, Artificial Sequence
  Description of Artificial Sequence: Synthetic oligonucleotide
  Sense strand starting at position 2998 of SEQ ID NO: 1241988
gaaaguagcagguguacaa

SEQ ID NO: 1315093 - RNA, 19 nt, Artificial Sequence
  Description of Artificial Sequence: Synthetic oligonucleotide
  Antisense strand to SEQ ID NO: 1315092
uuguacaccugcuacuuuc

SEQ ID NO: 1315094 - RNA, 19 nt, Artificial Sequence
  Description of Artificial Sequence: Synthetic oligonucleotide
  Sense strand starting at position 3468 of SEQ ID NO: 1241988
ugcaguuuauagccuaaua

SEQ ID NO: 1315095 - RNA, 19 nt, Artificial Sequence
  Description of Artificial Sequence: Synthetic oligonucleotide
  Antisense strand to SEQ ID NO: 1315094
uauuaggcuauaaacugca

SEQ ID NO: 1315096 - RNA, 19 nt, Artificial Sequence
  Description of Artificial Sequence: Synthetic oligonucleotide
  Sense strand starting at position 3941 of SEQ ID NO: 1241988
cggccagaguucuugauuu

SEQ ID NO: 1315097 - RNA, 19 nt, Artificial Sequence
  Description of Artificial Sequence: Synthetic oligonucleotide
  Antisense strand to SEQ ID NO: 1315096
aaaucaagaacucuggccg

SEQ ID NO: 1315098 - RNA, 19 nt, Artificial Sequence
  Description of Artificial Sequence: Synthetic oligonucleotide
  Sense strand starting at position 24 of SEQ ID NO: 1241989
auuaucugguauuccugaa

SEQ ID NO: 1315099 - RNA, 19 nt, Artificial Sequence
  Description of Artificial Sequence: Synthetic oligonucleotide
  Antisense strand to SEQ ID NO: 1315098
uucaggaauaccagauaau

SEQ ID NO: 1315100 - RNA, 19 nt, Artificial Sequence
  Description of Artificial Sequence: Synthetic oligonucleotide
  Sense strand starting at position 28 of SEQ ID NO: 1241989
ucugguauuccugaaucgu

SEQ ID NO: 1315101 - RNA, 19 nt, Artificial Sequence
  Description of Artificial Sequence: Synthetic oligonucleotide
  Antisense strand to SEQ ID NO: 1315100
acgauucaggaauaccaga

SEQ ID NO: 1315102 - RNA, 19 nt, Artificial Sequence
  Description of Artificial Sequence: Synthetic oligonucleotide
  Sense strand starting at position 45 of SEQ ID NO: 1241989
guacuaagcccuggacacu

SEQ ID NO: 1315103 - RNA, 19 nt, Artificial Sequence
  Description of Artificial Sequence: Synthetic oligonucleotide
  Antisense strand to SEQ ID NO: 1315102
aguguccagggcuuaguac

SEQ ID NO: 1315104 - RNA, 19 nt, Artificial Sequence
  Description of Artificial Sequence: Synthetic oligonucleotide
  Sense strand starting at position 113 of SEQ ID NO: 1241989
uccaaaugauggucuccua

SEQ ID NO: 1315105 - RNA, 19 nt, Artificial Sequence
  Description of Artificial Sequence: Synthetic oligonucleotide
  Antisense strand to SEQ ID NO: 1315104
uaggagaccaucauuugga

SEQ ID NO: 1315106 - RNA, 19 nt, Artificial Sequence
  Description of Artificial Sequence: Synthetic oligonucleotide
  Sense strand starting at position 121 of SEQ ID NO: 1241989
auggucuccuauucuguaa

SEQ ID NO: 1315107 - RNA, 19 nt, Artificial Sequence
  Description of Artificial Sequence: Synthetic oligonucleotide
  Antisense strand to SEQ ID NO: 1315106
uuacagaauaggagaccau

SEQ ID NO: 1315108 - RNA, 19 nt, Artificial Sequence
  Description of Artificial Sequence: Synthetic oligonucleotide
  Sense strand starting at position 125 of SEQ ID NO: 1241989
ucuccuauucuguaaguuc

SEQ ID NO: 1315109 - RNA, 19 nt, Artificial Sequence
  Description of Artificial Sequence: Synthetic oligonucleotide
  Antisense strand to SEQ ID NO: 1315108
gaacuuacagaauaggaga

SEQ ID NO: 1315110 - RNA, 19 nt, Artificial Sequence
  Description of Artificial Sequence: Synthetic oligonucleotide
  Sense strand starting at position 196 of SEQ ID NO: 1241989
ugguaaucugugcagaugu

SEQ ID NO: 1315111 - RNA, 19 nt, Artificial Sequence
  Description of Artificial Sequence: Synthetic oligonucleotide
  Antisense strand to SEQ ID NO: 1315110
acaucugcacagauuacca

SEQ ID NO: 1315112 - RNA, 19 nt, Artificial Sequence
  Description of Artificial Sequence: Synthetic oligonucleotide
  Sense strand starting at position 206 of SEQ ID NO: 1241989
ugcagauguuugguaaaug

SEQ ID NO: 1315113 - RNA, 19 nt, Artificial Sequence
  Description of Artificial Sequence: Synthetic oligonucleotide
  Antisense strand to SEQ ID NO: 1315112
cauuuaccaaacaucugca

SEQ ID NO: 1315114 - RNA, 19 nt, Artificial Sequence
  Description of Artificial Sequence: Synthetic oligonucleotide
  Sense strand starting at position 519 of SEQ ID NO: 1241989
gccugcucaccaggauaau

SEQ ID NO: 1315115 - RNA, 19 nt, Artificial Sequence
  Description of Artificial Sequence: Synthetic oligonucleotide
  Antisense strand to SEQ ID NO: 1315114
auuauccuggugagcaggc

SEQ ID NO: 1315116 - RNA, 19 nt, Artificial Sequence
  Description of Artificial Sequence: Synthetic oligonucleotide
  Sense strand starting at position 711 of SEQ ID NO: 1241989
agagauguguagcccaaua

SEQ ID NO: 1315117 - RNA, 19 nt, Artificial Sequence
  Description of Artificial Sequence: Synthetic oligonucleotide
  Antisense strand to SEQ ID NO: 1315116
uauugggcuacacaucucu

SEQ ID NO: 1315118 - RNA, 19 nt, Artificial Sequence
  Description of Artificial Sequence: Synthetic oligonucleotide
  Sense strand starting at position 713 of SEQ ID NO: 1241989
agauguguagcccaauaua

SEQ ID NO: 1315119 - RNA, 19 nt, Artificial Sequence
  Description of Artificial Sequence: Synthetic oligonucleotide
  Antisense strand to SEQ ID NO: 1315118
uauauugggcuacacaucu

SEQ ID NO: 1315120 - RNA, 19 nt, Artificial Sequence
  Description of Artificial Sequence: Synthetic oligonucleotide
  Sense strand starting at position 756 of SEQ ID NO: 1241989
aaacuuugguguccagaca

SEQ ID NO: 1315121 - RNA, 19 nt, Artificial Sequence
  Description of Artificial Sequence: Synthetic oligonucleotide
  Antisense strand to SEQ ID NO: 1315120
ugucuggacaccaaaguuu

SEQ ID NO: 1315122 - RNA, 19 nt, Artificial Sequence
  Description of Artificial Sequence: Synthetic oligonucleotide
  Sense strand starting at position 757 of SEQ ID NO: 1241989
aacuuugguguccagacaa

SEQ ID NO: 1315123 - RNA, 19 nt, Artificial Sequence
  Description of Artificial Sequence: Synthetic oligonucleotide
  Antisense strand to SEQ ID NO: 1315122
uugucuggacaccaaaguu

SEQ ID NO: 1315124 - RNA, 19 nt, Artificial Sequence
  Description of Artificial Sequence: Synthetic oligonucleotide
  Sense strand starting at position 812 of SEQ ID NO: 1241989
ggcauacagaugugaaguu

SEQ ID NO: 1315125 - RNA, 19 nt, Artificial Sequence
  Description of Artificial Sequence: Synthetic oligonucleotide
  Antisense strand to SEQ ID NO: 1315124
aacuucacaucuguaugcc

SEQ ID NO: 1315126 - RNA, 19 nt, Artificial Sequence
  Description of Artificial Sequence: Synthetic oligonucleotide
  Sense strand starting at position 821 of SEQ ID NO: 1241989
augugaaguuacucaguga

SEQ ID NO: 1315127 - RNA, 19 nt, Artificial Sequence
  Description of Artificial Sequence: Synthetic oligonucleotide
  Antisense strand to SEQ ID NO: 1315126
ucacugaguaacuucacau

SEQ ID NO: 1315128 - RNA, 19 nt, Artificial Sequence
  Description of Artificial Sequence: Synthetic oligonucleotide
  Sense strand starting at position 822 of SEQ ID NO: 1241989
ugugaaguuacucagugac

SEQ ID NO: 1315129 - RNA, 19 nt, Artificial Sequence
  Description of Artificial Sequence: Synthetic oligonucleotide
  Antisense strand to SEQ ID NO: 1315128
gucacugaguaacuucaca

SEQ ID NO: 1315130 - RNA, 19 nt, Artificial Sequence
  Description of Artificial Sequence: Synthetic oligonucleotide
  Sense strand starting at position 824 of SEQ ID NO: 1241989
ugaaguuacucagugacua

SEQ ID NO: 1315131 - RNA, 19 nt, Artificial Sequence
  Description of Artificial Sequence: Synthetic oligonucleotide
  Antisense strand to SEQ ID NO: 1315130
uagucacugaguaacuuca

SEQ ID NO: 1315132 - RNA, 19 nt, Artificial Sequence
  Description of Artificial Sequence: Synthetic oligonucleotide
  Sense strand starting at position 825 of SEQ ID NO: 1241989
gaaguuacucagugacuau

SEQ ID NO: 1315133 - RNA, 19 nt, Artificial Sequence
  Description of Artificial Sequence: Synthetic oligonucleotide
  Antisense strand to SEQ ID NO: 1315132
auagucacugaguaacuuc

SEQ ID NO: 1315134 - RNA, 19 nt, Artificial Sequence
  Description of Artificial Sequence: Synthetic oligonucleotide
  Sense strand starting at position 959 of SEQ ID NO: 1241989
gaggauagccaguaagagu

SEQ ID NO: 1315135 - RNA, 19 nt, Artificial Sequence
  Description of Artificial Sequence: Synthetic oligonucleotide
  Antisense strand to SEQ ID NO: 1315134
acucuuacuggcuauccuc

SEQ ID NO: 1315136 - RNA, 19 nt, Artificial Sequence
  Description of Artificial Sequence: Synthetic oligonucleotide
  Sense strand starting at position 970 of SEQ ID NO: 1241989
guaagaguuacaggccauu

SEQ ID NO: 1315137 - RNA, 19 nt, Artificial Sequence
  Description of Artificial Sequence: Synthetic oligonucleotide
  Antisense strand to SEQ ID NO: 1315136
aauggccuguaacucuuac

SEQ ID NO: 1315138 - RNA, 19 nt, Artificial Sequence
  Description of Artificial Sequence: Synthetic oligonucleotide
  Sense strand starting at position 1133 of SEQ ID NO: 1241989
gcauuaaacuuguugaaau

SEQ ID NO: 1315139 - RNA, 19 nt, Artificial Sequence
  Description of Artificial Sequence: Synthetic oligonucleotide
  Antisense strand to SEQ ID NO: 1315138
auuucaacaaguuuaaugc

SEQ ID NO: 1315140 - RNA, 19 nt, Artificial Sequence
  Description of Artificial Sequence: Synthetic oligonucleotide
  Sense strand starting at position 1145 of SEQ ID NO: 1241989
uugaaauucuggcuuagga

SEQ ID NO: 1315141 - RNA, 19 nt, Artificial Sequence
  Description of Artificial Sequence: Synthetic oligonucleotide
  Antisense strand to SEQ ID NO: 1315140
uccuaagccagaauuucaa

SEQ ID NO: 1315142 - RNA, 19 nt, Artificial Sequence
  Description of Artificial Sequence: Synthetic oligonucleotide
  Sense strand starting at position 1173 of SEQ ID NO: 1241989
aaaggaaggucugcuauua

SEQ ID NO: 1315143 - RNA, 19 nt, Artificial Sequence
  Description of Artificial Sequence: Synthetic oligonucleotide
  Antisense strand to SEQ ID NO: 1315142
uaauagcagaccuuccuuu

SEQ ID NO: 1315144 - RNA, 19 nt, Artificial Sequence
  Description of Artificial Sequence: Synthetic oligonucleotide
  Sense strand starting at position 1194 of SEQ ID NO: 1241989
ucuguuacucuauaaguuu

SEQ ID NO: 1315145 - RNA, 19 nt, Artificial Sequence
  Description of Artificial Sequence: Synthetic oligonucleotide
  Antisense strand to SEQ ID NO: 1315144
aaacuuauagaguaacaga

SEQ ID NO: 1315146 - RNA, 19 nt, Artificial Sequence
  Description of Artificial Sequence: Synthetic oligonucleotide
  Sense strand starting at position 1369 of SEQ ID NO: 1241989
agagcauguugacucagaa

SEQ ID NO: 1315147 - RNA, 19 nt, Artificial Sequence
  Description of Artificial Sequence: Synthetic oligonucleotide
  Antisense strand to SEQ ID NO: 1315146
uucugagucaacaugcucu

SEQ ID NO: 1315148 - RNA, 19 nt, Artificial Sequence
  Description of Artificial Sequence: Synthetic oligonucleotide
  Sense strand starting at position 1603 of SEQ ID NO: 1241989
agagaauauugagaagaga

SEQ ID NO: 1315149 - RNA, 19 nt, Artificial Sequence
  Description of Artificial Sequence: Synthetic oligonucleotide
  Antisense strand to SEQ ID NO: 1315148
ucucuucucaauauucucu

SEQ ID NO: 1315150 - RNA, 19 nt, Artificial Sequence
  Description of Artificial Sequence: Synthetic oligonucleotide
  Sense strand starting at position 2602 of SEQ ID NO: 1241989
cugaaagucacagggcaaa

SEQ ID NO: 1315151 - RNA, 19 nt, Artificial Sequence
  Description of Artificial Sequence: Synthetic oligonucleotide
  Antisense strand to SEQ ID NO: 1315150
uuugcccugugacuuucag

SEQ ID NO: 1315152 - RNA, 19 nt, Artificial Sequence
  Description of Artificial Sequence: Synthetic oligonucleotide
  Sense strand starting at position 2630 of SEQ ID NO: 1241989
gucuguagucaauaaauaa

SEQ ID NO: 1315153 - RNA, 19 nt, Artificial Sequence
  Description of Artificial Sequence: Synthetic oligonucleotide
  Antisense strand to SEQ ID NO: 1315152
uuauuuauugacuacagac

SEQ ID NO: 1315154 - RNA, 19 nt, Artificial Sequence
  Description of Artificial Sequence: Synthetic oligonucleotide
  Sense strand starting at position 2722 of SEQ ID NO: 1241989
ggagcaaaccaggguaaau

SEQ ID NO: 1315155 - RNA, 19 nt, Artificial Sequence
  Description of Artificial Sequence: Synthetic oligonucleotide
  Antisense strand to SEQ ID NO: 1315154
auuuacccugguuugcucc

SEQ ID NO: 1315156 - RNA, 19 nt, Artificial Sequence
  Description of Artificial Sequence: Synthetic oligonucleotide
  Sense strand starting at position 2775 of SEQ ID NO: 1241989
agacuagggccuuggagau

SEQ ID NO: 1315157 - RNA, 19 nt, Artificial Sequence
  Description of Artificial Sequence: Synthetic oligonucleotide
  Antisense strand to SEQ ID NO: 1315156
aucuccaaggcccuagucu

SEQ ID NO: 1315158 - RNA, 19 nt, Artificial Sequence
  Description of Artificial Sequence: Synthetic oligonucleotide
  Sense strand starting at position 2801 of SEQ ID NO: 1241989
ucuccuugugguggaaaga

SEQ ID NO: 1315159 - RNA, 19 nt, Artificial Sequence
  Description of Artificial Sequence: Synthetic oligonucleotide
  Antisense strand to SEQ ID NO: 1315158
ucuuuccaccacaaggaga

SEQ ID NO: 1315160 - RNA, 19 nt, Artificial Sequence
  Description of Artificial Sequence: Synthetic oligonucleotide
  Sense strand starting at position 2802 of SEQ ID NO: 1241989
cuccuugugguggaaagaa

SEQ ID NO: 1315161 - RNA, 19 nt, Artificial Sequence
  Description of Artificial Sequence: Synthetic oligonucleotide
  Antisense strand to SEQ ID NO: 1315160
uucuuuccaccacaaggag

SEQ ID NO: 1315162 - RNA, 19 nt, Artificial Sequence
  Description of Artificial Sequence: Synthetic oligonucleotide
  Sense strand starting at position 2835 of SEQ ID NO: 1241989
uccgaaacuuggcucuaau

SEQ ID NO: 1315163 - RNA, 19 nt, Artificial Sequence
  Description of Artificial Sequence: Synthetic oligonucleotide
  Antisense strand to SEQ ID NO: 1315162
auuagagccaaguuucgga

SEQ ID NO: 1315164 - RNA, 19 nt, Artificial Sequence
  Description of Artificial Sequence: Synthetic oligonucleotide
  Sense strand starting at position 3261 of SEQ ID NO: 1241989
agguaugcacuuuaacaca

SEQ ID NO: 1315165 - RNA, 19 nt, Artificial Sequence
  Description of Artificial Sequence: Synthetic oligonucleotide
  Antisense strand to SEQ ID NO: 1315164
uguguuaaagugcauaccu

SEQ ID NO: 1315166 - RNA, 19 nt, Artificial Sequence
  Description of Artificial Sequence: Synthetic oligonucleotide
  Sense strand starting at position 3309 of SEQ ID NO: 1241989
agaagugaaugacuuguua

SEQ ID NO: 1315167 - RNA, 19 nt, Artificial Sequence
  Description of Artificial Sequence: Synthetic oligonucleotide
  Antisense strand to SEQ ID NO: 1315166
uaacaagucauucacuucu

SEQ ID NO: 1315168 - RNA, 19 nt, Artificial Sequence
  Description of Artificial Sequence: Synthetic oligonucleotide
  Sense strand starting at position 3313 of SEQ ID NO: 1241989
gugaaugacuuguuauaau

SEQ ID NO: 1315169 - RNA, 19 nt, Artificial Sequence
  Description of Artificial Sequence: Synthetic oligonucleotide
  Antisense strand to SEQ ID NO: 1315168
auuauaacaagucauucac

SEQ ID NO: 1315170 - RNA, 19 nt, Artificial Sequence
  Description of Artificial Sequence: Synthetic oligonucleotide
  Sense strand starting at position 3379 of SEQ ID NO: 1241989
cacuguauauuggcugaga

SEQ ID NO: 1315171 - RNA, 19 nt, Artificial Sequence
  Description of Artificial Sequence: Synthetic oligonucleotide
  Antisense strand to SEQ ID NO: 1315170
ucucagccaauauacagug

SEQ ID NO: 1315172 - RNA, 19 nt, Artificial Sequence
  Description of Artificial Sequence: Synthetic oligonucleotide
  Sense strand starting at position 3380 of SEQ ID NO: 1241989
acuguauauuggcugagaa

SEQ ID NO: 1315173 - RNA, 19 nt, Artificial Sequence
  Description of Artificial Sequence: Synthetic oligonucleotide
  Antisense strand to SEQ ID NO: 1315172
uucucagccaauauacagu

SEQ ID NO: 1315174 - RNA, 19 nt, Artificial Sequence
  Description of Artificial Sequence: Synthetic oligonucleotide
  Sense strand starting at position 3381 of SEQ ID NO: 1241989
cuguauauuggcugagaaa

SEQ ID NO: 1315175 - RNA, 19 nt, Artificial Sequence
  Description of Artificial Sequence: Synthetic oligonucleotide
  Antisense strand to SEQ ID NO: 1315174
uuucucagccaauauacag

SEQ ID NO: 1315176 - RNA, 19 nt, Artificial Sequence
  Description of Artificial Sequence: Synthetic oligonucleotide
  Sense strand starting at position 3424 of SEQ ID NO: 1241989
gaaaguagcagguguacaa

SEQ ID NO: 1315177 - RNA, 19 nt, Artificial Sequence
  Description of Artificial Sequence: Synthetic oligonucleotide
  Antisense strand to SEQ ID NO: 1315176
uuguacaccugcuacuuuc

SEQ ID NO: 1315178 - RNA, 19 nt, Artificial Sequence
  Description of Artificial Sequence: Synthetic oligonucleotide
  Sense strand starting at position 14 of SEQ ID NO: 1241990
gcauuccuccuagagauac

SEQ ID NO: 1315179 - RNA, 19 nt, Artificial Sequence
  Description of Artificial Sequence: Synthetic oligonucleotide
  Antisense strand to SEQ ID NO: 1315178
guaucucuaggaggaaugc

SEQ ID NO: 1315180 - RNA, 19 nt, Artificial Sequence
  Description of Artificial Sequence: Synthetic oligonucleotide
  Sense strand starting at position 82 of SEQ ID NO: 1241990
auggauauuagugaagcuu

SEQ ID NO: 1315181 - RNA, 19 nt, Artificial Sequence
  Description of Artificial Sequence: Synthetic oligonucleotide
  Antisense strand to SEQ ID NO: 1315180
aagcuucacuaauauccau

SEQ ID NO: 1315182 - RNA, 19 nt, Artificial Sequence
  Description of Artificial Sequence: Synthetic oligonucleotide
  Sense strand starting at position 407 of SEQ ID NO: 1241990
aaauaugugcaaggaagua

SEQ ID NO: 1315183 - RNA, 19 nt, Artificial Sequence
  Description of Artificial Sequence: Synthetic oligonucleotide
  Antisense strand to SEQ ID NO: 1315182
uacuuccuugcacauauuu

SEQ ID NO: 1315184 - RNA, 19 nt, Artificial Sequence
  Description of Artificial Sequence: Synthetic oligonucleotide
  Sense strand starting at position 464 of SEQ ID NO: 1241990
uaaagacuguuccuaagga

SEQ ID NO: 1315185 - RNA, 19 nt, Artificial Sequence
  Description of Artificial Sequence: Synthetic oligonucleotide
  Antisense strand to SEQ ID NO: 1315184
uccuuaggaacagucuuua

SEQ ID NO: 1315186 - RNA, 19 nt, Artificial Sequence
  Description of Artificial Sequence: Synthetic oligonucleotide
  Sense strand starting at position 730 of SEQ ID NO: 1241990
ccacauauuugacauggaa

SEQ ID NO: 1315187 - RNA, 19 nt, Artificial Sequence
  Description of Artificial Sequence: Synthetic oligonucleotide
  Antisense strand to SEQ ID NO: 1315186
uuccaugucaaauaugugg

SEQ ID NO: 1315188 - RNA, 19 nt, Artificial Sequence
  Description of Artificial Sequence: Synthetic oligonucleotide
  Sense strand starting at position 764 of SEQ ID NO: 1241990
ggagguacuuuagugaauc

SEQ ID NO: 1315189 - RNA, 19 nt, Artificial Sequence
  Description of Artificial Sequence: Synthetic oligonucleotide
  Antisense strand to SEQ ID NO: 1315188
gauucacuaaaguaccucc

SEQ ID NO: 1315190 - RNA, 19 nt, Artificial Sequence
  Description of Artificial Sequence: Synthetic oligonucleotide
  Sense strand starting at position 1091 of SEQ ID NO: 1241990
uccuauauuguggaccaau

SEQ ID NO: 1315191 - RNA, 19 nt, Artificial Sequence
  Description of Artificial Sequence: Synthetic oligonucleotide
  Antisense strand to SEQ ID NO: 1315190
auugguccacaauauagga

SEQ ID NO: 1315192 - RNA, 19 nt, Artificial Sequence
  Description of Artificial Sequence: Synthetic oligonucleotide
  Sense strand starting at position 1154 of SEQ ID NO: 1241990
uuaagaacuuggucacaua

SEQ ID NO: 1315193 - RNA, 19 nt, Artificial Sequence
  Description of Artificial Sequence: Synthetic oligonucleotide
  Antisense strand to SEQ ID NO: 1315192
uaugugaccaaguucuuaa

SEQ ID NO: 1315194 - RNA, 19 nt, Artificial Sequence
  Description of Artificial Sequence: Synthetic oligonucleotide
  Sense strand starting at position 1485 of SEQ ID NO: 1241990
acugcauggcaucacuaau

SEQ ID NO: 1315195 - RNA, 19 nt, Artificial Sequence
  Description of Artificial Sequence: Synthetic oligonucleotide
  Antisense strand to SEQ ID NO: 1315194
auuagugaugccaugcagu

SEQ ID NO: 1315196 - RNA, 19 nt, Artificial Sequence
  Description of Artificial Sequence: Synthetic oligonucleotide
  Sense strand starting at position 1606 of SEQ ID NO: 1241990
cugacuuugccaggacaua

SEQ ID NO: 1315197 - RNA, 19 nt, Artificial Sequence
  Description of Artificial Sequence: Synthetic oligonucleotide
  Antisense strand to SEQ ID NO: 1315196
uauguccuggcaaagucag

SEQ ID NO: 1315198 - RNA, 19 nt, Artificial Sequence
  Description of Artificial Sequence: Synthetic oligonucleotide
  Sense strand starting at position 1848 of SEQ ID NO: 1241990
gaccacuggucuccagaga

SEQ ID NO: 1315199 - RNA, 19 nt, Artificial Sequence
  Description of Artificial Sequence: Synthetic oligonucleotide
  Antisense strand to SEQ ID NO: 1315198
ucucuggagaccagugguc

SEQ ID NO: 1315200 - RNA, 19 nt, Artificial Sequence
  Description of Artificial Sequence: Synthetic oligonucleotide
  Sense strand starting at position 2319 of SEQ ID NO: 1241990
ggcguaguugcagugaguu

SEQ ID NO: 1315201 - RNA, 19 nt, Artificial Sequence
  Description of Artificial Sequence: Synthetic oligonucleotide
  Antisense strand to SEQ ID NO: 1315200
aacucacugcaacuacgcc

SEQ ID NO: 1315202 - RNA, 19 nt, Artificial Sequence
  Description of Artificial Sequence: Synthetic oligonucleotide
  Sense strand starting at position 2331 of SEQ ID NO: 1241990
gugaguugugaagaaaugu

SEQ ID NO: 1315203 - RNA, 19 nt, Artificial Sequence
  Description of Artificial Sequence: Synthetic oligonucleotide
  Antisense strand to SEQ ID NO: 1315202
acauuucuucacaacucac

SEQ ID NO: 1315204 - RNA, 19 nt, Artificial Sequence
  Description of Artificial Sequence: Synthetic oligonucleotide
  Sense strand starting at position 2398 of SEQ ID NO: 1241990
uugugagaacuugguuaca

SEQ ID NO: 1315205 - RNA, 19 nt, Artificial Sequence
  Description of Artificial Sequence: Synthetic oligonucleotide
  Antisense strand to SEQ ID NO: 1315204
uguaaccaaguucucacaa

SEQ ID NO: 1315206 - RNA, 19 nt, Artificial Sequence
  Description of Artificial Sequence: Synthetic oligonucleotide
  Sense strand starting at position 2400 of SEQ ID NO: 1241990
gugagaacuugguuacauu

SEQ ID NO: 1315207 - RNA, 19 nt, Artificial Sequence
  Description of Artificial Sequence: Synthetic oligonucleotide
  Antisense strand to SEQ ID NO: 1315206
aauguaaccaaguucucac

SEQ ID NO: 1315208 - RNA, 19 nt, Artificial Sequence
  Description of Artificial Sequence: Synthetic oligonucleotide
  Sense strand starting at position 2452 of SEQ ID NO: 1241990
gugugcugugugguaauga

SEQ ID NO: 1315209 - RNA, 19 nt, Artificial Sequence
  Description of Artificial Sequence: Synthetic oligonucleotide
  Antisense strand to SEQ ID NO: 1315208
ucauuaccacacagcacac

SEQ ID NO: 1315210 - RNA, 19 nt, Artificial Sequence
  Description of Artificial Sequence: Synthetic oligonucleotide
  Sense strand starting at position 2523 of SEQ ID NO: 1241990
cgcauauagaguuaagagu

SEQ ID NO: 1315211 - RNA, 19 nt, Artificial Sequence
  Description of Artificial Sequence: Synthetic oligonucleotide
  Antisense strand to SEQ ID NO: 1315210
acucuuaacucuauaugcg

SEQ ID NO: 1315212 - RNA, 19 nt, Artificial Sequence
  Description of Artificial Sequence: Synthetic oligonucleotide
  Sense strand starting at position 2561 of SEQ ID NO: 1241990
ugaaguauaauauguggau

SEQ ID NO: 1315213 - RNA, 19 nt, Artificial Sequence
  Description of Artificial Sequence: Synthetic oligonucleotide
  Antisense strand to SEQ ID NO: 1315212
auccacauauuauacuuca

SEQ ID NO: 1315214 - RNA, 19 nt, Artificial Sequence
  Description of Artificial Sequence: Synthetic oligonucleotide
  Sense strand starting at position 2562 of SEQ ID NO: 1241990
gaaguauaauauguggaua

SEQ ID NO: 1315215 - RNA, 19 nt, Artificial Sequence
  Description of Artificial Sequence: Synthetic oligonucleotide
  Antisense strand to SEQ ID NO: 1315214
uauccacauauuauacuuc

SEQ ID NO: 1315216 - RNA, 19 nt, Artificial Sequence
  Description of Artificial Sequence: Synthetic oligonucleotide
  Sense strand starting at position 2565 of SEQ ID NO: 1241990
guauaauauguggauaagu

SEQ ID NO: 1315217 - RNA, 19 nt, Artificial Sequence
  Description of Artificial Sequence: Synthetic oligonucleotide
  Antisense strand to SEQ ID NO: 1315216
acuuauccacauauuauac

SEQ ID NO: 1315218 - RNA, 19 nt, Artificial Sequence
  Description of Artificial Sequence: Synthetic oligonucleotide
  Sense strand starting at position 2574 of SEQ ID NO: 1241990
guggauaaguuauuagaac

SEQ ID NO: 1315219 - RNA, 19 nt, Artificial Sequence
  Description of Artificial Sequence: Synthetic oligonucleotide
  Antisense strand to SEQ ID NO: 1315218
guucuaauaacuuauccac

SEQ ID NO: 1315220 - RNA, 19 nt, Artificial Sequence
  Description of Artificial Sequence: Synthetic oligonucleotide
  Sense strand starting at position 2628 of SEQ ID NO: 1241990
ggaagugcacucuaacaac

SEQ ID NO: 1315221 - RNA, 19 nt, Artificial Sequence
  Description of Artificial Sequence: Synthetic oligonucleotide
  Antisense strand to SEQ ID NO: 1315220
guuguuagagugcacuucc

SEQ ID NO: 1315222 - RNA, 19 nt, Artificial Sequence
  Description of Artificial Sequence: Synthetic oligonucleotide
  Sense strand starting at position 2665 of SEQ ID NO: 1241990
uggucaaauguugagcaau

SEQ ID NO: 1315223 - RNA, 19 nt, Artificial Sequence
  Description of Artificial Sequence: Synthetic oligonucleotide
  Antisense strand to SEQ ID NO: 1315222
auugcucaacauuugacca

SEQ ID NO: 1315224 - RNA, 19 nt, Artificial Sequence
  Description of Artificial Sequence: Synthetic oligonucleotide
  Sense strand starting at position 2668 of SEQ ID NO: 1241990
ucaaauguugagcaauguu

SEQ ID NO: 1315225 - RNA, 19 nt, Artificial Sequence
  Description of Artificial Sequence: Synthetic oligonucleotide
  Antisense strand to SEQ ID NO: 1315224
aacauugcucaacauuuga

SEQ ID NO: 1315226 - RNA, 19 nt, Artificial Sequence
  Description of Artificial Sequence: Synthetic oligonucleotide
  Sense strand starting at position 2738 of SEQ ID NO: 1241990
ccuagaagugcucacgaua

SEQ ID NO: 1315227 - RNA, 19 nt, Artificial Sequence
  Description of Artificial Sequence: Synthetic oligonucleotide
  Antisense strand to SEQ ID NO: 1315226
uaucgugagcacuucuagg

SEQ ID NO: 1315228 - RNA, 19 nt, Artificial Sequence
  Description of Artificial Sequence: Synthetic oligonucleotide
  Sense strand starting at position 2741 of SEQ ID NO: 1241990
agaagugcucacgauauca

SEQ ID NO: 1315229 - RNA, 19 nt, Artificial Sequence
  Description of Artificial Sequence: Synthetic oligonucleotide
  Antisense strand to SEQ ID NO: 1315228
ugauaucgugagcacuucu

SEQ ID NO: 1315230 - RNA, 19 nt, Artificial Sequence
  Description of Artificial Sequence: Synthetic oligonucleotide
  Sense strand starting at position 2743 of SEQ ID NO: 1241990
aagugcucacgauaucaag

SEQ ID NO: 1315231 - RNA, 19 nt, Artificial Sequence
  Description of Artificial Sequence: Synthetic oligonucleotide
  Antisense strand to SEQ ID NO: 1315230
cuugauaucgugagcacuu

SEQ ID NO: 1315232 - RNA, 19 nt, Artificial Sequence
  Description of Artificial Sequence: Synthetic oligonucleotide
  Sense strand starting at position 2757 of SEQ ID NO: 1241990
ucaaguaaagcauguuaaa

SEQ ID NO: 1315233 - RNA, 19 nt, Artificial Sequence
  Description of Artificial Sequence: Synthetic oligonucleotide
  Antisense strand to SEQ ID NO: 1315232
uuuaacaugcuuuacuuga

SEQ ID NO: 1315234 - RNA, 19 nt, Artificial Sequence
  Description of Artificial Sequence: Synthetic oligonucleotide
  Sense strand starting at position 2854 of SEQ ID NO: 1241990
cugagaauggaguggucaa

SEQ ID NO: 1315235 - RNA, 19 nt, Artificial Sequence
  Description of Artificial Sequence: Synthetic oligonucleotide
  Antisense strand to SEQ ID NO: 1315234
uugaccacuccauucucag

SEQ ID NO: 1315236 - RNA, 19 nt, Artificial Sequence
  Description of Artificial Sequence: Synthetic oligonucleotide
  Sense strand starting at position 2855 of SEQ ID NO: 1241990
ugagaauggaguggucaau

SEQ ID NO: 1315237 - RNA, 19 nt, Artificial Sequence
  Description of Artificial Sequence: Synthetic oligonucleotide
  Antisense strand to SEQ ID NO: 1315236
auugaccacuccauucuca

SEQ ID NO: 1315238 - RNA, 19 nt, Artificial Sequence
  Description of Artificial Sequence: Synthetic oligonucleotide
  Sense strand starting at position 2894 of SEQ ID NO: 1241990
uggguaaggccuugaagaa

SEQ ID NO: 1315239 - RNA, 19 nt, Artificial Sequence
  Description of Artificial Sequence: Synthetic oligonucleotide
  Antisense strand to SEQ ID NO: 1315238
uucuucaaggccuuaccca

SEQ ID NO: 1315240 - RNA, 19 nt, Artificial Sequence
  Description of Artificial Sequence: Synthetic oligonucleotide
  Sense strand starting at position 2970 of SEQ ID NO: 1241990
aguggaggucuugacccau

SEQ ID NO: 1315241 - RNA, 19 nt, Artificial Sequence
  Description of Artificial Sequence: Synthetic oligonucleotide
  Antisense strand to SEQ ID NO: 1315240
augggucaagaccuccacu

SEQ ID NO: 1315242 - RNA, 19 nt, Artificial Sequence
  Description of Artificial Sequence: Synthetic oligonucleotide
  Sense strand starting at position 3041 of SEQ ID NO: 1241990
gaaauaucagcgcauguaa

SEQ ID NO: 1315243 - RNA, 19 nt, Artificial Sequence
  Description of Artificial Sequence: Synthetic oligonucleotide
  Antisense strand to SEQ ID NO: 1315242
uuacaugcgcugauauuuc

SEQ ID NO: 1315244 - RNA, 19 nt, Artificial Sequence
  Description of Artificial Sequence: Synthetic oligonucleotide
  Sense strand starting at position 3049 of SEQ ID NO: 1241990
agcgcauguaaguaaauuu

SEQ ID NO: 1315245 - RNA, 19 nt, Artificial Sequence
  Description of Artificial Sequence: Synthetic oligonucleotide
  Antisense strand to SEQ ID NO: 1315244
aaauuuacuuacaugcgcu

SEQ ID NO: 1315246 - RNA, 19 nt, Artificial Sequence
  Description of Artificial Sequence: Synthetic oligonucleotide
  Sense strand starting at position 3313 of SEQ ID NO: 1241990
aguuaaauugcacagauua

SEQ ID NO: 1315247 - RNA, 19 nt, Artificial Sequence
  Description of Artificial Sequence: Synthetic oligonucleotide
  Antisense strand to SEQ ID NO: 1315246
uaaucugugcaauuuaacu

SEQ ID NO: 1315248 - RNA, 19 nt, Artificial Sequence
  Description of Artificial Sequence: Synthetic oligonucleotide
  Sense strand starting at position 3447 of SEQ ID NO: 1241990
gucaauagggcauagucau

SEQ ID NO: 1315249 - RNA, 19 nt, Artificial Sequence
  Description of Artificial Sequence: Synthetic oligonucleotide
  Antisense strand to SEQ ID NO: 1315248
augacuaugcccuauugac

SEQ ID NO: 1315250 - RNA, 19 nt, Artificial Sequence
  Description of Artificial Sequence: Synthetic oligonucleotide
  Sense strand starting at position 3751 of SEQ ID NO: 1241990
uucucaaaggauuggcaaa

SEQ ID NO: 1315251 - RNA, 19 nt, Artificial Sequence
  Description of Artificial Sequence: Synthetic oligonucleotide
  Antisense strand to SEQ ID NO: 1315250
uuugccaauccuuugagaa

SEQ ID NO: 1315252 - RNA, 19 nt, Artificial Sequence
  Description of Artificial Sequence: Synthetic oligonucleotide
  Sense strand starting at position 3831 of SEQ ID NO: 1241990
aaauaucggugguuuaaua

SEQ ID NO: 1315253 - RNA, 19 nt, Artificial Sequence
  Description of Artificial Sequence: Synthetic oligonucleotide
  Antisense strand to SEQ ID NO: 1315252
uauuaaaccaccgauauuu

SEQ ID NO: 1315254 - RNA, 19 nt, Artificial Sequence
  Description of Artificial Sequence: Synthetic oligonucleotide
  Sense strand starting at position 3956 of SEQ ID NO: 1241990
aggacuagcuuguuugaca

SEQ ID NO: 1315255 - RNA, 19 nt, Artificial Sequence
  Description of Artificial Sequence: Synthetic oligonucleotide
  Antisense strand to SEQ ID NO: 1315254
ugucaaacaagcuaguccu

SEQ ID NO: 1315256 - RNA, 19 nt, Artificial Sequence
  Description of Artificial Sequence: Synthetic oligonucleotide
  Sense strand starting at position 3957 of SEQ ID NO: 1241990
ggacuagcuuguuugacaa

SEQ ID NO: 1315257 - RNA, 19 nt, Artificial Sequence
  Description of Artificial Sequence: Synthetic oligonucleotide
  Antisense strand to SEQ ID NO: 1315256
uugucaaacaagcuagucc

SEQ ID NO: 1315258 - RNA, 19 nt, Artificial Sequence
  Description of Artificial Sequence: Synthetic oligonucleotide
  Sense strand starting at position 226 of SEQ ID NO: 1241991
uuaauugauucggcaaaua

SEQ ID NO: 1315259 - RNA, 19 nt, Artificial Sequence
  Description of Artificial Sequence: Synthetic oligonucleotide
  Antisense strand to SEQ ID NO: 1315258
uauuugccgaaucaauuaa

SEQ ID NO: 1315260 - RNA, 19 nt, Artificial Sequence
  Description of Artificial Sequence: Synthetic oligonucleotide
  Sense strand starting at position 522 of SEQ ID NO: 1241991
cagcuaugggagcaaauau

SEQ ID NO: 1315261 - RNA, 19 nt, Artificial Sequence
  Description of Artificial Sequence: Synthetic oligonucleotide
  Antisense strand to SEQ ID NO: 1315260
auauuugcucccauagcug

SEQ ID NO: 1315262 - RNA, 19 nt, Artificial Sequence
  Description of Artificial Sequence: Synthetic oligonucleotide
  Sense strand starting at position 532 of SEQ ID NO: 1241991
agcaaauaugccugaacug

SEQ ID NO: 1315263 - RNA, 19 nt, Artificial Sequence
  Description of Artificial Sequence: Synthetic oligonucleotide
  Antisense strand to SEQ ID NO: 1315262
caguucaggcauauuugcu

SEQ ID NO: 1315264 - RNA, 19 nt, Artificial Sequence
  Description of Artificial Sequence: Synthetic oligonucleotide
  Sense strand starting at position 533 of SEQ ID NO: 1241991
gcaaauaugccugaacugu

SEQ ID NO: 1315265 - RNA, 19 nt, Artificial Sequence
  Description of Artificial Sequence: Synthetic oligonucleotide
  Antisense strand to SEQ ID NO: 1315264
acaguucaggcauauuugc

SEQ ID NO: 1315266 - RNA, 19 nt, Artificial Sequence
  Description of Artificial Sequence: Synthetic oligonucleotide
  Sense strand starting at position 541 of SEQ ID NO: 1241991
gccugaacuguuuacuucu

SEQ ID NO: 1315267 - RNA, 19 nt, Artificial Sequence
  Description of Artificial Sequence: Synthetic oligonucleotide
  Antisense strand to SEQ ID NO: 1315266
agaaguaaacaguucaggc

SEQ ID NO: 1315268 - RNA, 19 nt, Artificial Sequence
  Description of Artificial Sequence: Synthetic oligonucleotide
  Sense strand starting at position 559 of SEQ ID NO: 1241991
uaagcaugguugccagaau

SEQ ID NO: 1315269 - RNA, 19 nt, Artificial Sequence
  Description of Artificial Sequence: Synthetic oligonucleotide
  Antisense strand to SEQ ID NO: 1315268
auucuggcaaccaugcuua

SEQ ID NO: 1315270 - RNA, 19 nt, Artificial Sequence
  Description of Artificial Sequence: Synthetic oligonucleotide
  Sense strand starting at position 570 of SEQ ID NO: 1241991
gccagaaucaaaugugaga

SEQ ID NO: 1315271 - RNA, 19 nt, Artificial Sequence
  Description of Artificial Sequence: Synthetic oligonucleotide
  Antisense strand to SEQ ID NO: 1315270
ucucacauuugauucuggc

SEQ ID NO: 1315272 - RNA, 19 nt, Artificial Sequence
  Description of Artificial Sequence: Synthetic oligonucleotide
  Sense strand starting at position 581 of SEQ ID NO: 1241991
augugagaaggagguuuaa

SEQ ID NO: 1315273 - RNA, 19 nt, Artificial Sequence
  Description of Artificial Sequence: Synthetic oligonucleotide
  Antisense strand to SEQ ID NO: 1315272
uuaaaccuccuucucacau

SEQ ID NO: 1315274 - RNA, 19 nt, Artificial Sequence
  Description of Artificial Sequence: Synthetic oligonucleotide
  Sense strand starting at position 610 of SEQ ID NO: 1241991
gugacagguguugggcaaa

SEQ ID NO: 1315275 - RNA, 19 nt, Artificial Sequence
  Description of Artificial Sequence: Synthetic oligonucleotide
  Antisense strand to SEQ ID NO: 1315274
uuugcccaacaccugucac

SEQ ID NO: 1315276 - RNA, 19 nt, Artificial Sequence
  Description of Artificial Sequence: Synthetic oligonucleotide
  Sense strand starting at position 613 of SEQ ID NO: 1241991
acagguguugggcaaaugu

SEQ ID NO: 1315277 - RNA, 19 nt, Artificial Sequence
  Description of Artificial Sequence: Synthetic oligonucleotide
  Antisense strand to SEQ ID NO: 1315276
acauuugcccaacaccugu

SEQ ID NO: 1315278 - RNA, 19 nt, Artificial Sequence
  Description of Artificial Sequence: Synthetic oligonucleotide
  Sense strand starting at position 689 of SEQ ID NO: 1241991
cuaccaggugcucauguau

SEQ ID NO: 1315279 - RNA, 19 nt, Artificial Sequence
  Description of Artificial Sequence: Synthetic oligonucleotide
  Antisense strand to SEQ ID NO: 1315278
auacaugagcaccugguag

SEQ ID NO: 1315280 - RNA, 19 nt, Artificial Sequence
  Description of Artificial Sequence: Synthetic oligonucleotide
  Sense strand starting at position 702 of SEQ ID NO: 1241991
auguauuuagugcaagcuu

SEQ ID NO: 1315281 - RNA, 19 nt, Artificial Sequence
  Description of Artificial Sequence: Synthetic oligonucleotide
  Antisense strand to SEQ ID NO: 1315280
aagcuugcacuaaauacau

SEQ ID NO: 1315282 - RNA, 19 nt, Artificial Sequence
  Description of Artificial Sequence: Synthetic oligonucleotide
  Sense strand starting at position 796 of SEQ ID NO: 1241991
gcgaguaaggaguaccuaa

SEQ ID NO: 1315283 - RNA, 19 nt, Artificial Sequence
  Description of Artificial Sequence: Synthetic oligonucleotide
  Antisense strand to SEQ ID NO: 1315282
uuagguacuccuuacucgc

SEQ ID NO: 1315284 - RNA, 19 nt, Artificial Sequence
  Description of Artificial Sequence: Synthetic oligonucleotide
  Sense strand starting at position 921 of SEQ ID NO: 1241991
uggguugucuagaggagag

SEQ ID NO: 1315285 - RNA, 19 nt, Artificial Sequence
  Description of Artificial Sequence: Synthetic oligonucleotide
  Antisense strand to SEQ ID NO: 1315284
cucuccucuagacaaccca

SEQ ID NO: 1315286 - RNA, 19 nt, Artificial Sequence
  Description of Artificial Sequence: Synthetic oligonucleotide
  Sense strand starting at position 1060 of SEQ ID NO: 1241991
ccuuuaauagugcaugaag

SEQ ID NO: 1315287 - RNA, 19 nt, Artificial Sequence
  Description of Artificial Sequence: Synthetic oligonucleotide
  Antisense strand to SEQ ID NO: 1315286
cuucaugcacuauuaaagg

SEQ ID NO: 1315288 - RNA, 19 nt, Artificial Sequence
  Description of Artificial Sequence: Synthetic oligonucleotide
  Sense strand starting at position 1062 of SEQ ID NO: 1241991
uuuaauagugcaugaagag

SEQ ID NO: 1315289 - RNA, 19 nt, Artificial Sequence
  Description of Artificial Sequence: Synthetic oligonucleotide
  Antisense strand to SEQ ID NO: 1315288
cucuucaugcacuauuaaa

SEQ ID NO: 1315290 - RNA, 19 nt, Artificial Sequence
  Description of Artificial Sequence: Synthetic oligonucleotide
  Sense strand starting at position 1091 of SEQ ID NO: 1241991
gaugguugaagcuguaaag

SEQ ID NO: 1315291 - RNA, 19 nt, Artificial Sequence
  Description of Artificial Sequence: Synthetic oligonucleotide
  Antisense strand to SEQ ID NO: 1315290
cuuuacagcuucaaccauc

SEQ ID NO: 1315292 - RNA, 19 nt, Artificial Sequence
  Description of Artificial Sequence: Synthetic oligonucleotide
  Sense strand starting at position 1100 of SEQ ID NO: 1241991
agcuguaaagcuggauaua

SEQ ID NO: 1315293 - RNA, 19 nt, Artificial Sequence
  Description of Artificial Sequence: Synthetic oligonucleotide
  Antisense strand to SEQ ID NO: 1315292
uauauccagcuuuacagcu

SEQ ID NO: 1315294 - RNA, 19 nt, Artificial Sequence
  Description of Artificial Sequence: Synthetic oligonucleotide
  Sense strand starting at position 1101 of SEQ ID NO: 1241991
gcuguaaagcuggauauac

SEQ ID NO: 1315295 - RNA, 19 nt, Artificial Sequence
  Description of Artificial Sequence: Synthetic oligonucleotide
  Antisense strand to SEQ ID NO: 1315294
guauauccagcuuuacagc

SEQ ID NO: 1315296 - RNA, 19 nt, Artificial Sequence
  Description of Artificial Sequence: Synthetic oligonucleotide
  Sense strand starting at position 1142 of SEQ ID NO: 1241991
cccugaucccaagauguca

SEQ ID NO: 1315297 - RNA, 19 nt, Artificial Sequence
  Description of Artificial Sequence: Synthetic oligonucleotide
  Antisense strand to SEQ ID NO: 1315296
ugacaucuugggaucaggg

SEQ ID NO: 1315298 - RNA, 19 nt, Artificial Sequence
  Description of Artificial Sequence: Synthetic oligonucleotide
  Sense strand starting at position 1285 of SEQ ID NO: 1241991
gguggacaugcuuaauaac

SEQ ID NO: 1315299 - RNA, 19 nt, Artificial Sequence
  Description of Artificial Sequence: Synthetic oligonucleotide
  Antisense strand to SEQ ID NO: 1315298
guuauuaagcauguccacc

SEQ ID NO: 1315300 - RNA, 19 nt, Artificial Sequence
  Description of Artificial Sequence: Synthetic oligonucleotide
  Sense strand starting at position 1316 of SEQ ID NO: 1241991
guggguugcccuuaaugau

SEQ ID NO: 1315301 - RNA, 19 nt, Artificial Sequence
  Description of Artificial Sequence: Synthetic oligonucleotide
  Antisense strand to SEQ ID NO: 1315300
aucauuaagggcaacccac

SEQ ID NO: 1315302 - RNA, 19 nt, Artificial Sequence
  Description of Artificial Sequence: Synthetic oligonucleotide
  Sense strand starting at position 1349 of SEQ ID NO: 1241991
ggcaguaacuucucaacaa

SEQ ID NO: 1315303 - RNA, 19 nt, Artificial Sequence
  Description of Artificial Sequence: Synthetic oligonucleotide
  Antisense strand to SEQ ID NO: 1315302
uuguugagaaguuacugcc

SEQ ID NO: 1315304 - RNA, 19 nt, Artificial Sequence
  Description of Artificial Sequence: Synthetic oligonucleotide
  Sense strand starting at position 2300 of SEQ ID NO: 1241991
gggagacucuccucagauc

SEQ ID NO: 1315305 - RNA, 19 nt, Artificial Sequence
  Description of Artificial Sequence: Synthetic oligonucleotide
  Antisense strand to SEQ ID NO: 1315304
gaucugaggagagucuccc

SEQ ID NO: 1315306 - RNA, 19 nt, Artificial Sequence
  Description of Artificial Sequence: Synthetic oligonucleotide
  Sense strand starting at position 2711 of SEQ ID NO: 1241991
gucugagaaguuugggagu

SEQ ID NO: 1315307 - RNA, 19 nt, Artificial Sequence
  Description of Artificial Sequence: Synthetic oligonucleotide
  Antisense strand to SEQ ID NO: 1315306
acucccaaacuucucagac

SEQ ID NO: 1315308 - RNA, 19 nt, Artificial Sequence
  Description of Artificial Sequence: Synthetic oligonucleotide
  Sense strand starting at position 2724 of SEQ ID NO: 1241991
gggagugacuugaagagug

SEQ ID NO: 1315309 - RNA, 19 nt, Artificial Sequence
  Description of Artificial Sequence: Synthetic oligonucleotide
  Antisense strand to SEQ ID NO: 1315308
cacucuucaagucacuccc

SEQ ID NO: 1315310 - RNA, 19 nt, Artificial Sequence
  Description of Artificial Sequence: Synthetic oligonucleotide
  Sense strand starting at position 2786 of SEQ ID NO: 1241991
ccuuacgugaguuaggaga

SEQ ID NO: 1315311 - RNA, 19 nt, Artificial Sequence
  Description of Artificial Sequence: Synthetic oligonucleotide
  Antisense strand to SEQ ID NO: 1315310
ucuccuaacucacguaagg

SEQ ID NO: 1315312 - RNA, 19 nt, Artificial Sequence
  Description of Artificial Sequence: Synthetic oligonucleotide
  Sense strand starting at position 3195 of SEQ ID NO: 1241991
ccauaaaugccacaagguu

SEQ ID NO: 1315313 - RNA, 19 nt, Artificial Sequence
  Description of Artificial Sequence: Synthetic oligonucleotide
  Antisense strand to SEQ ID NO: 1315312
aaccuuguggcauuuaugg

SEQ ID NO: 1315314 - RNA, 19 nt, Artificial Sequence
  Description of Artificial Sequence: Synthetic oligonucleotide
  Sense strand starting at position 3611 of SEQ ID NO: 1241991
uggagaauuaguggcccuu

SEQ ID NO: 1315315 - RNA, 19 nt, Artificial Sequence
  Description of Artificial Sequence: Synthetic oligonucleotide
  Antisense strand to SEQ ID NO: 1315314
aagggccacuaauucucca

SEQ ID NO: 1315316 - RNA, 19 nt, Artificial Sequence
  Description of Artificial Sequence: Synthetic oligonucleotide
  Sense strand starting at position 3723 of SEQ ID NO: 1241991
agcacauaacuuugaauga

SEQ ID NO: 1315317 - RNA, 19 nt, Artificial Sequence
  Description of Artificial Sequence: Synthetic oligonucleotide
  Antisense strand to SEQ ID NO: 1315316
ucauucaaaguuaugugcu

SEQ ID NO: 1315318 - RNA, 19 nt, Artificial Sequence
  Description of Artificial Sequence: Synthetic oligonucleotide
  Sense strand starting at position 3751 of SEQ ID NO: 1241991
gagguuguucuaggcugaa

SEQ ID NO: 1315319 - RNA, 19 nt, Artificial Sequence
  Description of Artificial Sequence: Synthetic oligonucleotide
  Antisense strand to SEQ ID NO: 1315318
uucagccuagaacaaccuc

SEQ ID NO: 1315320 - RNA, 19 nt, Artificial Sequence
  Description of Artificial Sequence: Synthetic oligonucleotide
  Sense strand starting at position 3754 of SEQ ID NO: 1241991
guuguucuaggcugaauuu

SEQ ID NO: 1315321 - RNA, 19 nt, Artificial Sequence
  Description of Artificial Sequence: Synthetic oligonucleotide
  Antisense strand to SEQ ID NO: 1315320
aaauucagccuagaacaac

SEQ ID NO: 1315322 - RNA, 19 nt, Artificial Sequence
  Description of Artificial Sequence: Synthetic oligonucleotide
  Sense strand starting at position 3835 of SEQ ID NO: 1241991
accugugguagguaaggau

SEQ ID NO: 1315323 - RNA, 19 nt, Artificial Sequence
  Description of Artificial Sequence: Synthetic oligonucleotide
  Antisense strand to SEQ ID NO: 1315322
auccuuaccuaccacaggu

SEQ ID NO: 1315324 - RNA, 19 nt, Artificial Sequence
  Description of Artificial Sequence: Synthetic oligonucleotide
  Sense strand starting at position 3842 of SEQ ID NO: 1241991
guagguaaggauuggguaa

SEQ ID NO: 1315325 - RNA, 19 nt, Artificial Sequence
  Description of Artificial Sequence: Synthetic oligonucleotide
  Antisense strand to SEQ ID NO: 1315324
uuacccaauccuuaccuac

SEQ ID NO: 1315326 - RNA, 19 nt, Artificial Sequence
  Description of Artificial Sequence: Synthetic oligonucleotide
  Sense strand starting at position 3843 of SEQ ID NO: 1241991
uagguaaggauuggguaau

SEQ ID NO: 1315327 - RNA, 19 nt, Artificial Sequence
  Description of Artificial Sequence: Synthetic oligonucleotide
  Antisense strand to SEQ ID NO: 1315326
auuacccaauccuuaccua

SEQ ID NO: 1315328 - RNA, 19 nt, Artificial Sequence
  Description of Artificial Sequence: Synthetic oligonucleotide
  Sense strand starting at position 3855 of SEQ ID NO: 1241991
ggguaauugugucuauaau

SEQ ID NO: 1315329 - RNA, 19 nt, Artificial Sequence
  Description of Artificial Sequence: Synthetic oligonucleotide
  Antisense strand to SEQ ID NO: 1315328
auuauagacacaauuaccc

SEQ ID NO: 1315330 - RNA, 19 nt, Artificial Sequence
  Description of Artificial Sequence: Synthetic oligonucleotide
  Sense strand starting at position 3856 of SEQ ID NO: 1241991
gguaauugugucuauaaua

SEQ ID NO: 1315331 - RNA, 19 nt, Artificial Sequence
  Description of Artificial Sequence: Synthetic oligonucleotide
  Antisense strand to SEQ ID NO: 1315330
uauuauagacacaauuacc

SEQ ID NO: 1315332 - RNA, 19 nt, Artificial Sequence
  Description of Artificial Sequence: Synthetic oligonucleotide
  Sense strand starting at position 3867 of SEQ ID NO: 1241991
cuauaauaagauugagcau

SEQ ID NO: 1315333 - RNA, 19 nt, Artificial Sequence
  Description of Artificial Sequence: Synthetic oligonucleotide
  Antisense strand to SEQ ID NO: 1315332
augcucaaucuuauuauag

SEQ ID NO: 1315334 - RNA, 19 nt, Artificial Sequence
  Description of Artificial Sequence: Synthetic oligonucleotide
  Sense strand starting at position 3965 of SEQ ID NO: 1241991
gacccuaaagugugggaaa

SEQ ID NO: 1315335 - RNA, 19 nt, Artificial Sequence
  Description of Artificial Sequence: Synthetic oligonucleotide
  Antisense strand to SEQ ID NO: 1315334
uuucccacacuuuaggguc

SEQ ID NO: 1315336 - RNA, 19 nt, Artificial Sequence
  Description of Artificial Sequence: Synthetic oligonucleotide
  Sense strand starting at position 3967 of SEQ ID NO: 1241991
cccuaaagugugggaaacu

SEQ ID NO: 1315337 - RNA, 19 nt, Artificial Sequence
  Description of Artificial Sequence: Synthetic oligonucleotide
  Antisense strand to SEQ ID NO: 1315336
aguuucccacacuuuaggg

SEQ ID NO: 1315338 - RNA, 19 nt, Artificial Sequence
  Description of Artificial Sequence: Synthetic oligonucleotide
  Sense strand starting at position 128 of SEQ ID NO: 1241992
cucaguucccaagagcuau

SEQ ID NO: 1315339 - RNA, 19 nt, Artificial Sequence
  Description of Artificial Sequence: Synthetic oligonucleotide
  Antisense strand to SEQ ID NO: 1315338
auagcucuugggaacugag

SEQ ID NO: 1315340 - RNA, 19 nt, Artificial Sequence
  Description of Artificial Sequence: Synthetic oligonucleotide
  Sense strand starting at position 172 of SEQ ID NO: 1241992
guuggaauaaggcguaaga

SEQ ID NO: 1315341 - RNA, 19 nt, Artificial Sequence
  Description of Artificial Sequence: Synthetic oligonucleotide
  Antisense strand to SEQ ID NO: 1315340
ucuuacgccuuauuccaac

SEQ ID NO: 1315342 - RNA, 19 nt, Artificial Sequence
  Description of Artificial Sequence: Synthetic oligonucleotide
  Sense strand starting at position 183 of SEQ ID NO: 1241992
gcguaagagaaagguuaga

SEQ ID NO: 1315343 - RNA, 19 nt, Artificial Sequence
  Description of Artificial Sequence: Synthetic oligonucleotide
  Antisense strand to SEQ ID NO: 1315342
ucuaaccuuucucuuacgc

SEQ ID NO: 1315344 - RNA, 19 nt, Artificial Sequence
  Description of Artificial Sequence: Synthetic oligonucleotide
  Sense strand starting at position 259 of SEQ ID NO: 1241992
ucgaagugcugcguagaga

SEQ ID NO: 1315345 - RNA, 19 nt, Artificial Sequence
  Description of Artificial Sequence: Synthetic oligonucleotide
  Antisense strand to SEQ ID NO: 1315344
ucucuacgcagcacuucga

SEQ ID NO: 1315346 - RNA, 19 nt, Artificial Sequence
  Description of Artificial Sequence: Synthetic oligonucleotide
  Sense strand starting at position 275 of SEQ ID NO: 1241992
agaggaagugguugggagu

SEQ ID NO: 1315347 - RNA, 19 nt, Artificial Sequence
  Description of Artificial Sequence: Synthetic oligonucleotide
  Antisense strand to SEQ ID NO: 1315346
acucccaaccacuuccucu

SEQ ID NO: 1315348 - RNA, 19 nt, Artificial Sequence
  Description of Artificial Sequence: Synthetic oligonucleotide
  Sense strand starting at position 695 of SEQ ID NO: 1241992
gcauaagauugcgcugugu

SEQ ID NO: 1315349 - RNA, 19 nt, Artificial Sequence
  Description of Artificial Sequence: Synthetic oligonucleotide
  Antisense strand to SEQ ID NO: 1315348
acacagcgcaaucuuaugc

SEQ ID NO: 1315350 - RNA, 19 nt, Artificial Sequence
  Description of Artificial Sequence: Synthetic oligonucleotide
  Sense strand starting at position 697 of SEQ ID NO: 1241992
auaagauugcgcuguguag

SEQ ID NO: 1315351 - RNA, 19 nt, Artificial Sequence
  Description of Artificial Sequence: Synthetic oligonucleotide
  Antisense strand to SEQ ID NO: 1315350
cuacacagcgcaaucuuau

SEQ ID NO: 1315352 - RNA, 19 nt, Artificial Sequence
  Description of Artificial Sequence: Synthetic oligonucleotide
  Sense strand starting at position 844 of SEQ ID NO: 1241992
ggugccucagguuguuaaa

SEQ ID NO: 1315353 - RNA, 19 nt, Artificial Sequence
  Description of Artificial Sequence: Synthetic oligonucleotide
  Antisense strand to SEQ ID NO: 1315352
uuuaacaaccugaggcacc

SEQ ID NO: 1315354 - RNA, 19 nt, Artificial Sequence
  Description of Artificial Sequence: Synthetic oligonucleotide
  Sense strand starting at position 1159 of SEQ ID NO: 1241992
gcuagaggagccugauacu

SEQ ID NO: 1315355 - RNA, 19 nt, Artificial Sequence
  Description of Artificial Sequence: Synthetic oligonucleotide
  Antisense strand to SEQ ID NO: 1315354
aguaucaggcuccucuagc

SEQ ID NO: 1315356 - RNA, 19 nt, Artificial Sequence
  Description of Artificial Sequence: Synthetic oligonucleotide
  Sense strand starting at position 1168 of SEQ ID NO: 1241992
gccugauacuugcccgaug

SEQ ID NO: 1315357 - RNA, 19 nt, Artificial Sequence
  Description of Artificial Sequence: Synthetic oligonucleotide
  Antisense strand to SEQ ID NO: 1315356
caucgggcaaguaucaggc

SEQ ID NO: 1315358 - RNA, 19 nt, Artificial Sequence
  Description of Artificial Sequence: Synthetic oligonucleotide
  Sense strand starting at position 1170 of SEQ ID NO: 1241992
cugauacuugcccgaugga

SEQ ID NO: 1315359 - RNA, 19 nt, Artificial Sequence
  Description of Artificial Sequence: Synthetic oligonucleotide
  Antisense strand to SEQ ID NO: 1315358
uccaucgggcaaguaucag

SEQ ID NO: 1315360 - RNA, 19 nt, Artificial Sequence
  Description of Artificial Sequence: Synthetic oligonucleotide
  Sense strand starting at position 1285 of SEQ ID NO: 1241992
ugguaggugguaugcgaaa

SEQ ID NO: 1315361 - RNA, 19 nt, Artificial Sequence
  Description of Artificial Sequence: Synthetic oligonucleotide
  Antisense strand to SEQ ID NO: 1315360
uuucgcauaccaccuacca

SEQ ID NO: 1315362 - RNA, 19 nt, Artificial Sequence
  Description of Artificial Sequence: Synthetic oligonucleotide
  Sense strand starting at position 1376 of SEQ ID NO: 1241992
uuuccacuucuggaaggua

SEQ ID NO: 1315363 - RNA, 19 nt, Artificial Sequence
  Description of Artificial Sequence: Synthetic oligonucleotide
  Antisense strand to SEQ ID NO: 1315362
uaccuuccagaaguggaaa

SEQ ID NO: 1315364 - RNA, 19 nt, Artificial Sequence
  Description of Artificial Sequence: Synthetic oligonucleotide
  Sense strand starting at position 1385 of SEQ ID NO: 1241992
cuggaagguagcuguuaga

SEQ ID NO: 1315365 - RNA, 19 nt, Artificial Sequence
  Description of Artificial Sequence: Synthetic oligonucleotide
  Antisense strand to SEQ ID NO: 1315364
ucuaacagcuaccuuccag

SEQ ID NO: 1315366 - RNA, 19 nt, Artificial Sequence
  Description of Artificial Sequence: Synthetic oligonucleotide
  Sense strand starting at position 1590 of SEQ ID NO: 1241992
ugcccaaugucuccaaugu

SEQ ID NO: 1315367 - RNA, 19 nt, Artificial Sequence
  Description of Artificial Sequence: Synthetic oligonucleotide
  Antisense strand to SEQ ID NO: 1315366
acauuggagacauugggca

SEQ ID NO: 1315368 - RNA, 19 nt, Artificial Sequence
  Description of Artificial Sequence: Synthetic oligonucleotide
  Sense strand starting at position 1591 of SEQ ID NO: 1241992
gcccaaugucuccaauguu

SEQ ID NO: 1315369 - RNA, 19 nt, Artificial Sequence
  Description of Artificial Sequence: Synthetic oligonucleotide
  Antisense strand to SEQ ID NO: 1315368
aacauuggagacauugggc

SEQ ID NO: 1315370 - RNA, 19 nt, Artificial Sequence
  Description of Artificial Sequence: Synthetic oligonucleotide
  Sense strand starting at position 1674 of SEQ ID NO: 1241992
agguuacugaccugggagu

SEQ ID NO: 1315371 - RNA, 19 nt, Artificial Sequence
  Description of Artificial Sequence: Synthetic oligonucleotide
  Antisense strand to SEQ ID NO: 1315370
acucccaggucaguaaccu

SEQ ID NO: 1315372 - RNA, 19 nt, Artificial Sequence
  Description of Artificial Sequence: Synthetic oligonucleotide
  Sense strand starting at position 1803 of SEQ ID NO: 1241992
uggucuaaccugugguuua

SEQ ID NO: 1315373 - RNA, 19 nt, Artificial Sequence
  Description of Artificial Sequence: Synthetic oligonucleotide
  Antisense strand to SEQ ID NO: 1315372
uaaaccacagguuagacca

SEQ ID NO: 1315374 - RNA, 19 nt, Artificial Sequence
  Description of Artificial Sequence: Synthetic oligonucleotide
  Sense strand starting at position 1804 of SEQ ID NO: 1241992
ggucuaaccugugguuuag

SEQ ID NO: 1315375 - RNA, 19 nt, Artificial Sequence
  Description of Artificial Sequence: Synthetic oligonucleotide
  Antisense strand to SEQ ID NO: 1315374
cuaaaccacagguuagacc

SEQ ID NO: 1315376 - RNA, 19 nt, Artificial Sequence
  Description of Artificial Sequence: Synthetic oligonucleotide
  Sense strand starting at position 1825 of SEQ ID NO: 1241992
ugguguuggguucagaugu

SEQ ID NO: 1315377 - RNA, 19 nt, Artificial Sequence
  Description of Artificial Sequence: Synthetic oligonucleotide
  Antisense strand to SEQ ID NO: 1315376
acaucugaacccaacacca

SEQ ID NO: 1315378 - RNA, 19 nt, Artificial Sequence
  Description of Artificial Sequence: Synthetic oligonucleotide
  Sense strand starting at position 2008 of SEQ ID NO: 1241992
gugugagcaucuggaccua

SEQ ID NO: 1315379 - RNA, 19 nt, Artificial Sequence
  Description of Artificial Sequence: Synthetic oligonucleotide
  Antisense strand to SEQ ID NO: 1315378
uagguccagaugcucacac

SEQ ID NO: 1315380 - RNA, 19 nt, Artificial Sequence
  Description of Artificial Sequence: Synthetic oligonucleotide
  Sense strand starting at position 2590 of SEQ ID NO: 1241992
cgguaaggguguccucaua

SEQ ID NO: 1315381 - RNA, 19 nt, Artificial Sequence
  Description of Artificial Sequence: Synthetic oligonucleotide
  Antisense strand to SEQ ID NO: 1315380
uaugaggacacccuuaccg

SEQ ID NO: 1315382 - RNA, 19 nt, Artificial Sequence
  Description of Artificial Sequence: Synthetic oligonucleotide
  Sense strand starting at position 2626 of SEQ ID NO: 1241992
gaaggcucaugggcagauu

SEQ ID NO: 1315383 - RNA, 19 nt, Artificial Sequence
  Description of Artificial Sequence: Synthetic oligonucleotide
  Antisense strand to SEQ ID NO: 1315382
aaucugcccaugagccuuc

SEQ ID NO: 1315384 - RNA, 19 nt, Artificial Sequence
  Description of Artificial Sequence: Synthetic oligonucleotide
  Sense strand starting at position 2639 of SEQ ID NO: 1241992
cagauugucuccugaggga

SEQ ID NO: 1315385 - RNA, 19 nt, Artificial Sequence
  Description of Artificial Sequence: Synthetic oligonucleotide
  Antisense strand to SEQ ID NO: 1315384
ucccucaggagacaaucug

SEQ ID NO: 1315386 - RNA, 19 nt, Artificial Sequence
  Description of Artificial Sequence: Synthetic oligonucleotide
  Sense strand starting at position 2686 of SEQ ID NO: 1241992
cuccaugaauagucgaauu

SEQ ID NO: 1315387 - RNA, 19 nt, Artificial Sequence
  Description of Artificial Sequence: Synthetic oligonucleotide
  Antisense strand to SEQ ID NO: 1315386
aauucgacuauucauggag

SEQ ID NO: 1315388 - RNA, 19 nt, Artificial Sequence
  Description of Artificial Sequence: Synthetic oligonucleotide
  Sense strand starting at position 2849 of SEQ ID NO: 1241992
caguaauccugaggaacag

SEQ ID NO: 1315389 - RNA, 19 nt, Artificial Sequence
  Description of Artificial Sequence: Synthetic oligonucleotide
  Antisense strand to SEQ ID NO: 1315388
cuguuccucaggauuacug

SEQ ID NO: 1315390 - RNA, 19 nt, Artificial Sequence
  Description of Artificial Sequence: Synthetic oligonucleotide
  Sense strand starting at position 2861 of SEQ ID NO: 1241992
ggaacagucuaggcuucuu

SEQ ID NO: 1315391 - RNA, 19 nt, Artificial Sequence
  Description of Artificial Sequence: Synthetic oligonucleotide
  Antisense strand to SEQ ID NO: 1315390
aagaagccuagacuguucc

SEQ ID NO: 1315392 - RNA, 19 nt, Artificial Sequence
  Description of Artificial Sequence: Synthetic oligonucleotide
  Sense strand starting at position 3006 of SEQ ID NO: 1241992
gguugagacacauguguau

SEQ ID NO: 1315393 - RNA, 19 nt, Artificial Sequence
  Description of Artificial Sequence: Synthetic oligonucleotide
  Antisense strand to SEQ ID NO: 1315392
auacacaugugucucaacc

SEQ ID NO: 1315394 - RNA, 19 nt, Artificial Sequence
  Description of Artificial Sequence: Synthetic oligonucleotide
  Sense strand starting at position 3029 of SEQ ID NO: 1241992
gccucauccucaggacuga

SEQ ID NO: 1315395 - RNA, 19 nt, Artificial Sequence
  Description of Artificial Sequence: Synthetic oligonucleotide
  Antisense strand to SEQ ID NO: 1315394
ucaguccugaggaugaggc

SEQ ID NO: 1315396 - RNA, 19 nt, Artificial Sequence
  Description of Artificial Sequence: Synthetic oligonucleotide
  Sense strand starting at position 3080 of SEQ ID NO: 1241992
cugggugcauugucuuaga

SEQ ID NO: 1315397 - RNA, 19 nt, Artificial Sequence
  Description of Artificial Sequence: Synthetic oligonucleotide
  Antisense strand to SEQ ID NO: 1315396
ucuaagacaaugcacccag

SEQ ID NO: 1315398 - RNA, 19 nt, Artificial Sequence
  Description of Artificial Sequence: Synthetic oligonucleotide
  Sense strand starting at position 3083 of SEQ ID NO: 1241992
ggugcauugucuuagacuu

SEQ ID NO: 1315399 - RNA, 19 nt, Artificial Sequence
  Description of Artificial Sequence: Synthetic oligonucleotide
  Antisense strand to SEQ ID NO: 1315398
aagucuaagacaaugcacc

SEQ ID NO: 1315400 - RNA, 19 nt, Artificial Sequence
  Description of Artificial Sequence: Synthetic oligonucleotide
  Sense strand starting at position 3164 of SEQ ID NO: 1241992
aucuuaaucuguguugcuu

SEQ ID NO: 1315401 - RNA, 19 nt, Artificial Sequence
  Description of Artificial Sequence: Synthetic oligonucleotide
  Antisense strand to SEQ ID NO: 1315400
aagcaacacagauuaagau

SEQ ID NO: 1315402 - RNA, 19 nt, Artificial Sequence
  Description of Artificial Sequence: Synthetic oligonucleotide
  Sense strand starting at position 3173 of SEQ ID NO: 1241992
uguguugcuuucccuggaa

SEQ ID NO: 1315403 - RNA, 19 nt, Artificial Sequence
  Description of Artificial Sequence: Synthetic oligonucleotide
  Antisense strand to SEQ ID NO: 1315402
uuccagggaaagcaacaca

SEQ ID NO: 1315404 - RNA, 19 nt, Artificial Sequence
  Description of Artificial Sequence: Synthetic oligonucleotide
  Sense strand starting at position 3175 of SEQ ID NO: 1241992
uguugcuuucccuggaacu

SEQ ID NO: 1315405 - RNA, 19 nt, Artificial Sequence
  Description of Artificial Sequence: Synthetic oligonucleotide
  Antisense strand to SEQ ID NO: 1315404
aguuccagggaaagcaaca

SEQ ID NO: 1315406 - RNA, 19 nt, Artificial Sequence
  Description of Artificial Sequence: Synthetic oligonucleotide
  Sense strand starting at position 3450 of SEQ ID NO: 1241992
gugaaagugcguggucaca

SEQ ID NO: 1315407 - RNA, 19 nt, Artificial Sequence
  Description of Artificial Sequence: Synthetic oligonucleotide
  Antisense strand to SEQ ID NO: 1315406
ugugaccacgcacuuucac

SEQ ID NO: 1315408 - RNA, 19 nt, Artificial Sequence
  Description of Artificial Sequence: Synthetic oligonucleotide
  Sense strand starting at position 3452 of SEQ ID NO: 1241992
gaaagugcguggucacaaa

SEQ ID NO: 1315409 - RNA, 19 nt, Artificial Sequence
  Description of Artificial Sequence: Synthetic oligonucleotide
  Antisense strand to SEQ ID NO: 1315408
uuugugaccacgcacuuuc

SEQ ID NO: 1315410 - RNA, 19 nt, Artificial Sequence
  Description of Artificial Sequence: Synthetic oligonucleotide
  Sense strand starting at position 3681 of SEQ ID NO: 1241992
gcgcagaaauuguggguga

SEQ ID NO: 1315411 - RNA, 19 nt, Artificial Sequence
  Description of Artificial Sequence: Synthetic oligonucleotide
  Antisense strand to SEQ ID NO: 1315410
ucacccacaauuucugcgc

SEQ ID NO: 1315412 - RNA, 19 nt, Artificial Sequence
  Description of Artificial Sequence: Synthetic oligonucleotide
  Sense strand starting at position 3683 of SEQ ID NO: 1241992
gcagaaauugugggugagu

SEQ ID NO: 1315413 - RNA, 19 nt, Artificial Sequence
  Description of Artificial Sequence: Synthetic oligonucleotide
  Antisense strand to SEQ ID NO: 1315412
acucacccacaauuucugc

SEQ ID NO: 1315414 - RNA, 19 nt, Artificial Sequence
  Description of Artificial Sequence: Synthetic oligonucleotide
  Sense strand starting at position 3685 of SEQ ID NO: 1241992
agaaauugugggugagugu

SEQ ID NO: 1315415 - RNA, 19 nt, Artificial Sequence
  Description of Artificial Sequence: Synthetic oligonucleotide
  Antisense strand to SEQ ID NO: 1315414
acacucacccacaauuucu

SEQ ID NO: 1315416 - RNA, 19 nt, Artificial Sequence
  Description of Artificial Sequence: Synthetic oligonucleotide
  Sense strand starting at position 73 of SEQ ID NO: 1241993
cugucauucucaguaauau

SEQ ID NO: 1315417 - RNA, 19 nt, Artificial Sequence
  Description of Artificial Sequence: Synthetic oligonucleotide
  Antisense strand to SEQ ID NO: 1315416
auauuacugagaaugacag

SEQ ID NO: 1315418 - RNA, 19 nt, Artificial Sequence
  Description of Artificial Sequence: Synthetic oligonucleotide
  Sense strand starting at position 74 of SEQ ID NO: 1241993
ugucauucucaguaauaua

SEQ ID NO: 1315419 - RNA, 19 nt, Artificial Sequence
  Description of Artificial Sequence: Synthetic oligonucleotide
  Antisense strand to SEQ ID NO: 1315418
uauauuacugagaaugaca

SEQ ID NO: 1315420 - RNA, 19 nt, Artificial Sequence
  Description of Artificial Sequence: Synthetic oligonucleotide
  Sense strand starting at position 146 of SEQ ID NO: 1241993
gggaguuucccacacuuua

SEQ ID NO: 1315421 - RNA, 19 nt, Artificial Sequence
  Description of Artificial Sequence: Synthetic oligonucleotide
  Antisense strand to SEQ ID NO: 1315420
uaaagugugggaaacuccc

SEQ ID NO: 1315422 - RNA, 19 nt, Artificial Sequence
  Description of Artificial Sequence: Synthetic oligonucleotide
  Sense strand starting at position 235 of SEQ ID NO: 1241993
ugaagacuuuccuuaugcu

SEQ ID NO: 1315423 - RNA, 19 nt, Artificial Sequence
  Description of Artificial Sequence: Synthetic oligonucleotide
  Antisense strand to SEQ ID NO: 1315422
agcauaaggaaagucuuca

SEQ ID NO: 1315424 - RNA, 19 nt, Artificial Sequence
  Description of Artificial Sequence: Synthetic oligonucleotide
  Sense strand starting at position 310 of SEQ ID NO: 1241993
uuccuauguguguaugaga

SEQ ID NO: 1315425 - RNA, 19 nt, Artificial Sequence
  Description of Artificial Sequence: Synthetic oligonucleotide
  Antisense strand to SEQ ID NO: 1315424
ucucauacacacauaggaa

SEQ ID NO: 1315426 - RNA, 19 nt, Artificial Sequence
  Description of Artificial Sequence: Synthetic oligonucleotide
  Sense strand starting at position 319 of SEQ ID NO: 1241993
guguaugagagguggguaa

SEQ ID NO: 1315427 - RNA, 19 nt, Artificial Sequence
  Description of Artificial Sequence: Synthetic oligonucleotide
  Antisense strand to SEQ ID NO: 1315426
uuacccaccucucauacac

SEQ ID NO: 1315428 - RNA, 19 nt, Artificial Sequence
  Description of Artificial Sequence: Synthetic oligonucleotide
  Sense strand starting at position 536 of SEQ ID NO: 1241993
gggugacauggcuggaguu

SEQ ID NO: 1315429 - RNA, 19 nt, Artificial Sequence
  Description of Artificial Sequence: Synthetic oligonucleotide
  Antisense strand to SEQ ID NO: 1315428
aacuccagccaugucaccc

SEQ ID NO: 1315430 - RNA, 19 nt, Artificial Sequence
  Description of Artificial Sequence: Synthetic oligonucleotide
  Sense strand starting at position 557 of SEQ ID NO: 1241993
caagaccucugauugguaa

SEQ ID NO: 1315431 - RNA, 19 nt, Artificial Sequence
  Description of Artificial Sequence: Synthetic oligonucleotide
  Antisense strand to SEQ ID NO: 1315430
uuaccaaucagaggucuug

SEQ ID NO: 1315432 - RNA, 19 nt, Artificial Sequence
  Description of Artificial Sequence: Synthetic oligonucleotide
  Sense strand starting at position 558 of SEQ ID NO: 1241993
aagaccucugauugguaau

SEQ ID NO: 1315433 - RNA, 19 nt, Artificial Sequence
  Description of Artificial Sequence: Synthetic oligonucleotide
  Antisense strand to SEQ ID NO: 1315432
auuaccaaucagaggucuu

SEQ ID NO: 1315434 - RNA, 19 nt, Artificial Sequence
  Description of Artificial Sequence: Synthetic oligonucleotide
  Sense strand starting at position 559 of SEQ ID NO: 1241993
agaccucugauugguaaug

SEQ ID NO: 1315435 - RNA, 19 nt, Artificial Sequence
  Description of Artificial Sequence: Synthetic oligonucleotide
  Antisense strand to SEQ ID NO: 1315434
cauuaccaaucagaggucu

SEQ ID NO: 1315436 - RNA, 19 nt, Artificial Sequence
  Description of Artificial Sequence: Synthetic oligonucleotide
  Sense strand starting at position 624 of SEQ ID NO: 1241993
ccauuaaacguuuacagcu

SEQ ID NO: 1315437 - RNA, 19 nt, Artificial Sequence
  Description of Artificial Sequence: Synthetic oligonucleotide
  Antisense strand to SEQ ID NO: 1315436
agcuguaaacguuuaaugg

SEQ ID NO: 1315438 - RNA, 19 nt, Artificial Sequence
  Description of Artificial Sequence: Synthetic oligonucleotide
  Sense strand starting at position 666 of SEQ ID NO: 1241993
caggaacuccugugcuaga

SEQ ID NO: 1315439 - RNA, 19 nt, Artificial Sequence
  Description of Artificial Sequence: Synthetic oligonucleotide
  Antisense strand to SEQ ID NO: 1315438
ucuagcacaggaguuccug

SEQ ID NO: 1315440 - RNA, 19 nt, Artificial Sequence
  Description of Artificial Sequence: Synthetic oligonucleotide
  Sense strand starting at position 843 of SEQ ID NO: 1241993
ggaauucaagggugcagaa

SEQ ID NO: 1315441 - RNA, 19 nt, Artificial Sequence
  Description of Artificial Sequence: Synthetic oligonucleotide
  Antisense strand to SEQ ID NO: 1315440
uucugcacccuugaauucc

SEQ ID NO: 1315442 - RNA, 19 nt, Artificial Sequence
  Description of Artificial Sequence: Synthetic oligonucleotide
  Sense strand starting at position 875 of SEQ ID NO: 1241993
aguauccagacucgaguua

SEQ ID NO: 1315443 - RNA, 19 nt, Artificial Sequence
  Description of Artificial Sequence: Synthetic oligonucleotide
  Antisense strand to SEQ ID NO: 1315442
uaacucgagucuggauacu

SEQ ID NO: 1315444 - RNA, 19 nt, Artificial Sequence
  Description of Artificial Sequence: Synthetic oligonucleotide
  Sense strand starting at position 876 of SEQ ID NO: 1241993
guauccagacucgaguuaa

SEQ ID NO: 1315445 - RNA, 19 nt, Artificial Sequence
  Description of Artificial Sequence: Synthetic oligonucleotide
  Antisense strand to SEQ ID NO: 1315444
uuaacucgagucuggauac

SEQ ID NO: 1315446 - RNA, 19 nt, Artificial Sequence
  Description of Artificial Sequence: Synthetic oligonucleotide
  Sense strand starting at position 905 of SEQ ID NO: 1241993
cgauucgaugucuauaaac

SEQ ID NO: 1315447 - RNA, 19 nt, Artificial Sequence
  Description of Artificial Sequence: Synthetic oligonucleotide
  Antisense strand to SEQ ID NO: 1315446
guuuauagacaucgaaucg

SEQ ID NO: 1315448 - RNA, 19 nt, Artificial Sequence
  Description of Artificial Sequence: Synthetic oligonucleotide
  Sense strand starting at position 907 of SEQ ID NO: 1241993
auucgaugucuauaaaccu

SEQ ID NO: 1315449 - RNA, 19 nt, Artificial Sequence
  Description of Artificial Sequence: Synthetic oligonucleotide
  Antisense strand to SEQ ID NO: 1315448
agguuuauagacaucgaau

SEQ ID NO: 1315450 - RNA, 19 nt, Artificial Sequence
  Description of Artificial Sequence: Synthetic oligonucleotide
  Sense strand starting at position 1006 of SEQ ID NO: 1241993
auccgaacuuggucuggau

SEQ ID NO: 1315451 - RNA, 19 nt, Artificial Sequence
  Description of Artificial Sequence: Synthetic oligonucleotide
  Antisense strand to SEQ ID NO: 1315450
auccagaccaaguucggau

SEQ ID NO: 1315452 - RNA, 19 nt, Artificial Sequence
  Description of Artificial Sequence: Synthetic oligonucleotide
  Sense strand starting at position 1008 of SEQ ID NO: 1241993
ccgaacuuggucuggauga

SEQ ID NO: 1315453 - RNA, 19 nt, Artificial Sequence
  Description of Artificial Sequence: Synthetic oligonucleotide
  Antisense strand to SEQ ID NO: 1315452
ucauccagaccaaguucgg

SEQ ID NO: 1315454 - RNA, 19 nt, Artificial Sequence
  Description of Artificial Sequence: Synthetic oligonucleotide
  Sense strand starting at position 1239 of SEQ ID NO: 1241993
gggugugauuaaagaggga

SEQ ID NO: 1315455 - RNA, 19 nt, Artificial Sequence
  Description of Artificial Sequence: Synthetic oligonucleotide
  Antisense strand to SEQ ID NO: 1315454
ucccucuuuaaucacaccc

SEQ ID NO: 1315456 - RNA, 19 nt, Artificial Sequence
  Description of Artificial Sequence: Synthetic oligonucleotide
  Sense strand starting at position 2325 of SEQ ID NO: 1241993
gcuccuccacguuauggaa

SEQ ID NO: 1315457 - RNA, 19 nt, Artificial Sequence
  Description of Artificial Sequence: Synthetic oligonucleotide
  Antisense strand to SEQ ID NO: 1315456
uuccauaacguggaggagc

SEQ ID NO: 1315458 - RNA, 19 nt, Artificial Sequence
  Description of Artificial Sequence: Synthetic oligonucleotide
  Sense strand starting at position 2447 of SEQ ID NO: 1241993
uucuuugggaccugggaau

SEQ ID NO: 1315459 - RNA, 19 nt, Artificial Sequence
  Description of Artificial Sequence: Synthetic oligonucleotide
  Antisense strand to SEQ ID NO: 1315458
auucccaggucccaaagaa

SEQ ID NO: 1315460 - RNA, 19 nt, Artificial Sequence
  Description of Artificial Sequence: Synthetic oligonucleotide
  Sense strand starting at position 2460 of SEQ ID NO: 1241993
gggaauguuggguggccua

SEQ ID NO: 1315461 - RNA, 19 nt, Artificial Sequence
  Description of Artificial Sequence: Synthetic oligonucleotide
  Antisense strand to SEQ ID NO: 1315460
uaggccacccaacauuccc

SEQ ID NO: 1315462 - RNA, 19 nt, Artificial Sequence
  Description of Artificial Sequence: Synthetic oligonucleotide
  Sense strand starting at position 2542 of SEQ ID NO: 1241993
ggcuuuaggauccaagcuu

SEQ ID NO: 1315463 - RNA, 19 nt, Artificial Sequence
  Description of Artificial Sequence: Synthetic oligonucleotide
  Antisense strand to SEQ ID NO: 1315462
aagcuuggauccuaaagcc

SEQ ID NO: 1315464 - RNA, 19 nt, Artificial Sequence
  Description of Artificial Sequence: Synthetic oligonucleotide
  Sense strand starting at position 2758 of SEQ ID NO: 1241993
cugucaagguuguugagaa

SEQ ID NO: 1315465 - RNA, 19 nt, Artificial Sequence
  Description of Artificial Sequence: Synthetic oligonucleotide
  Antisense strand to SEQ ID NO: 1315464
uucucaacaaccuugacag

SEQ ID NO: 1315466 - RNA, 19 nt, Artificial Sequence
  Description of Artificial Sequence: Synthetic oligonucleotide
  Sense strand starting at position 2790 of SEQ ID NO: 1241993
cguuguguaaaucauuaag

SEQ ID NO: 1315467 - RNA, 19 nt, Artificial Sequence
  Description of Artificial Sequence: Synthetic oligonucleotide
  Antisense strand to SEQ ID NO: 1315466
cuuaaugauuuacacaacg

SEQ ID NO: 1315468 - RNA, 19 nt, Artificial Sequence
  Description of Artificial Sequence: Synthetic oligonucleotide
  Sense strand starting at position 2818 of SEQ ID NO: 1241993
cccacaaggagugguuauu

SEQ ID NO: 1315469 - RNA, 19 nt, Artificial Sequence
  Description of Artificial Sequence: Synthetic oligonucleotide
  Antisense strand to SEQ ID NO: 1315468
aauaaccacuccuuguggg

SEQ ID NO: 1315470 - RNA, 19 nt, Artificial Sequence
  Description of Artificial Sequence: Synthetic oligonucleotide
  Sense strand starting at position 2869 of SEQ ID NO: 1241993
cacacagccuggucugaaa

SEQ ID NO: 1315471 - RNA, 19 nt, Artificial Sequence
  Description of Artificial Sequence: Synthetic oligonucleotide
  Antisense strand to SEQ ID NO: 1315470
uuucagaccaggcugugug

SEQ ID NO: 1315472 - RNA, 19 nt, Artificial Sequence
  Description of Artificial Sequence: Synthetic oligonucleotide
  Sense strand starting at position 3083 of SEQ ID NO: 1241993
uggacagacucugugaaau

SEQ ID NO: 1315473 - RNA, 19 nt, Artificial Sequence
  Description of Artificial Sequence: Synthetic oligonucleotide
  Antisense strand to SEQ ID NO: 1315472
auuucacagagucugucca

SEQ ID NO: 1315474 - RNA, 19 nt, Artificial Sequence
  Description of Artificial Sequence: Synthetic oligonucleotide
  Sense strand starting at position 3096 of SEQ ID NO: 1241993
ugaaaugcagcaggugaua

SEQ ID NO: 1315475 - RNA, 19 nt, Artificial Sequence
  Description of Artificial Sequence: Synthetic oligonucleotide
  Antisense strand to SEQ ID NO: 1315474
uaucaccugcugcauuuca

SEQ ID NO: 1315476 - RNA, 19 nt, Artificial Sequence
  Description of Artificial Sequence: Synthetic oligonucleotide
  Sense strand starting at position 3105 of SEQ ID NO: 1241993
gcaggugauacugagcuuu

SEQ ID NO: 1315477 - RNA, 19 nt, Artificial Sequence
  Description of Artificial Sequence: Synthetic oligonucleotide
  Antisense strand to SEQ ID NO: 1315476
aaagcucaguaucaccugc

SEQ ID NO: 1315478 - RNA, 19 nt, Artificial Sequence
  Description of Artificial Sequence: Synthetic oligonucleotide
  Sense strand starting at position 3189 of SEQ ID NO: 1241993
uggguucucuccucuagac

SEQ ID NO: 1315479 - RNA, 19 nt, Artificial Sequence
  Description of Artificial Sequence: Synthetic oligonucleotide
  Antisense strand to SEQ ID NO: 1315478
gucuagaggagagaaccca

SEQ ID NO: 1315480 - RNA, 19 nt, Artificial Sequence
  Description of Artificial Sequence: Synthetic oligonucleotide
  Sense strand starting at position 3191 of SEQ ID NO: 1241993
gguucucuccucuagacaa

SEQ ID NO: 1315481 - RNA, 19 nt, Artificial Sequence
  Description of Artificial Sequence: Synthetic oligonucleotide
  Antisense strand to SEQ ID NO: 1315480
uugucuagaggagagaacc

SEQ ID NO: 1315482 - RNA, 19 nt, Artificial Sequence
  Description of Artificial Sequence: Synthetic oligonucleotide
  Sense strand starting at position 3382 of SEQ ID NO: 1241993
uguugacucuggguggaga

SEQ ID NO: 1315483 - RNA, 19 nt, Artificial Sequence
  Description of Artificial Sequence: Synthetic oligonucleotide
  Antisense strand to SEQ ID NO: 1315482
ucuccacccagagucaaca

SEQ ID NO: 1315484 - RNA, 19 nt, Artificial Sequence
  Description of Artificial Sequence: Synthetic oligonucleotide
  Sense strand starting at position 3412 of SEQ ID NO: 1241993
ggaagcuugcacuaaauac

SEQ ID NO: 1315485 - RNA, 19 nt, Artificial Sequence
  Description of Artificial Sequence: Synthetic oligonucleotide
  Antisense strand to SEQ ID NO: 1315484
guauuuagugcaagcuucc

SEQ ID NO: 1315486 - RNA, 19 nt, Artificial Sequence
  Description of Artificial Sequence: Synthetic oligonucleotide
  Sense strand starting at position 3562 of SEQ ID NO: 1241993
ggcaaccaugcuuagaagu

SEQ ID NO: 1315487 - RNA, 19 nt, Artificial Sequence
  Description of Artificial Sequence: Synthetic oligonucleotide
  Antisense strand to SEQ ID NO: 1315486
acuucuaagcaugguugcc

SEQ ID NO: 1315488 - RNA, 19 nt, Artificial Sequence
  Description of Artificial Sequence: Synthetic oligonucleotide
  Sense strand starting at position 3786 of SEQ ID NO: 1241993
gguaaaguccaugaaggua

SEQ ID NO: 1315489 - RNA, 19 nt, Artificial Sequence
  Description of Artificial Sequence: Synthetic oligonucleotide
  Antisense strand to SEQ ID NO: 1315488
uaccuucauggacuuuacc

SEQ ID NO: 1315490 - RNA, 19 nt, Artificial Sequence
  Description of Artificial Sequence: Synthetic oligonucleotide
  Sense strand starting at position 3871 of SEQ ID NO: 1241993
uguaguggugcucaugaag

SEQ ID NO: 1315491 - RNA, 19 nt, Artificial Sequence
  Description of Artificial Sequence: Synthetic oligonucleotide
  Antisense strand to SEQ ID NO: 1315490
cuucaugagcaccacuaca

SEQ ID NO: 1315492 - RNA, 19 nt, Artificial Sequence
  Description of Artificial Sequence: Synthetic oligonucleotide
  Sense strand starting at position 3874 of SEQ ID NO: 1241993
aguggugcucaugaaguau

SEQ ID NO: 1315493 - RNA, 19 nt, Artificial Sequence
  Description of Artificial Sequence: Synthetic oligonucleotide
  Antisense strand to SEQ ID NO: 1315492
auacuucaugagcaccacu

SEQ ID NO: 1315494 - RNA, 19 nt, Artificial Sequence
  Description of Artificial Sequence: Synthetic oligonucleotide
  Sense strand starting at position 3921 of SEQ ID NO: 1241993
aagagugagucucuugaac

SEQ ID NO: 1315495 - RNA, 19 nt, Artificial Sequence
  Description of Artificial Sequence: Synthetic oligonucleotide
  Antisense strand to SEQ ID NO: 1315494
guucaagagacucacucuu

SEQ ID NO: 1315496 - RNA, 19 nt, Artificial Sequence
  Description of Artificial Sequence: Synthetic oligonucleotide
  Sense strand starting at position 48 of SEQ ID NO: 1241994
gagugugauguugacucca

SEQ ID NO: 1315497 - RNA, 19 nt, Artificial Sequence
  Description of Artificial Sequence: Synthetic oligonucleotide
  Antisense strand to SEQ ID NO: 1315496
uggagucaacaucacacuc

SEQ ID NO: 1315498 - RNA, 19 nt, Artificial Sequence
  Description of Artificial Sequence: Synthetic oligonucleotide
  Sense strand starting at position 110 of SEQ ID NO: 1241994
aacugaaggccuuguauga

SEQ ID NO: 1315499 - RNA, 19 nt, Artificial Sequence
  Description of Artificial Sequence: Synthetic oligonucleotide
  Antisense strand to SEQ ID NO: 1315498
ucauacaaggccuucaguu

SEQ ID NO: 1315500 - RNA, 19 nt, Artificial Sequence
  Description of Artificial Sequence: Synthetic oligonucleotide
  Sense strand starting at position 208 of SEQ ID NO: 1241994
cucagagaugacugggcau

SEQ ID NO: 1315501 - RNA, 19 nt, Artificial Sequence
  Description of Artificial Sequence: Synthetic oligonucleotide
  Antisense strand to SEQ ID NO: 1315500
augcccagucaucucugag

SEQ ID NO: 1315502 - RNA, 19 nt, Artificial Sequence
  Description of Artificial Sequence: Synthetic oligonucleotide
  Sense strand starting at position 210 of SEQ ID NO: 1241994
cagagaugacugggcauua

SEQ ID NO: 1315503 - RNA, 19 nt, Artificial Sequence
  Description of Artificial Sequence: Synthetic oligonucleotide
  Antisense strand to SEQ ID NO: 1315502
uaaugcccagucaucucug

SEQ ID NO: 1315504 - RNA, 19 nt, Artificial Sequence
  Description of Artificial Sequence: Synthetic oligonucleotide
  Sense strand starting at position 220 of SEQ ID NO: 1241994
ugggcauuacuagguuaga

SEQ ID NO: 1315505 - RNA, 19 nt, Artificial Sequence
  Description of Artificial Sequence: Synthetic oligonucleotide
  Antisense strand to SEQ ID NO: 1315504
ucuaaccuaguaaugccca

SEQ ID NO: 1315506 - RNA, 19 nt, Artificial Sequence
  Description of Artificial Sequence: Synthetic oligonucleotide
  Sense strand starting at position 221 of SEQ ID NO: 1241994
gggcauuacuagguuagag

SEQ ID NO: 1315507 - RNA, 19 nt, Artificial Sequence
  Description of Artificial Sequence: Synthetic oligonucleotide
  Antisense strand to SEQ ID NO: 1315506
cucuaaccuaguaaugccc

SEQ ID NO: 1315508 - RNA, 19 nt, Artificial Sequence
  Description of Artificial Sequence: Synthetic oligonucleotide
  Sense strand starting at position 330 of SEQ ID NO: 1241994
caaccacaugugugggauu

SEQ ID NO: 1315509 - RNA, 19 nt, Artificial Sequence
  Description of Artificial Sequence: Synthetic oligonucleotide
  Antisense strand to SEQ ID NO: 1315508
aaucccacacaugugguug

SEQ ID NO: 1315510 - RNA, 19 nt, Artificial Sequence
  Description of Artificial Sequence: Synthetic oligonucleotide
  Sense strand starting at position 356 of SEQ ID NO: 1241994
gccauauucuguuuaccuc

SEQ ID NO: 1315511 - RNA, 19 nt, Artificial Sequence
  Description of Artificial Sequence: Synthetic oligonucleotide
  Antisense strand to SEQ ID NO: 1315510
gagguaaacagaauauggc

SEQ ID NO: 1315512 - RNA, 19 nt, Artificial Sequence
  Description of Artificial Sequence: Synthetic oligonucleotide
  Sense strand starting at position 911 of SEQ ID NO: 1241994
uuaggaagguugaggagau

SEQ ID NO: 1315513 - RNA, 19 nt, Artificial Sequence
  Description of Artificial Sequence: Synthetic oligonucleotide
  Antisense strand to SEQ ID NO: 1315512
aucuccucaaccuuccuaa

SEQ ID NO: 1315514 - RNA, 19 nt, Artificial Sequence
  Description of Artificial Sequence: Synthetic oligonucleotide
  Sense strand starting at position 1296 of SEQ ID NO: 1241994
cugagaucacuuggucaau

SEQ ID NO: 1315515 - RNA, 19 nt, Artificial Sequence
  Description of Artificial Sequence: Synthetic oligonucleotide
  Antisense strand to SEQ ID NO: 1315514
auugaccaagugaucucag

SEQ ID NO: 1315516 - RNA, 19 nt, Artificial Sequence
  Description of Artificial Sequence: Synthetic oligonucleotide
  Sense strand starting at position 1297 of SEQ ID NO: 1241994
ugagaucacuuggucaauu

SEQ ID NO: 1315517 - RNA, 19 nt, Artificial Sequence
  Description of Artificial Sequence: Synthetic oligonucleotide
  Antisense strand to SEQ ID NO: 1315516
aauugaccaagugaucuca

SEQ ID NO: 1315518 - RNA, 19 nt, Artificial Sequence
  Description of Artificial Sequence: Synthetic oligonucleotide
  Sense strand starting at position 1298 of SEQ ID NO: 1241994
gagaucacuuggucaauug

SEQ ID NO: 1315519 - RNA, 19 nt, Artificial Sequence
  Description of Artificial Sequence: Synthetic oligonucleotide
  Antisense strand to SEQ ID NO: 1315518
caauugaccaagugaucuc

SEQ ID NO: 1315520 - RNA, 19 nt, Artificial Sequence
  Description of Artificial Sequence: Synthetic oligonucleotide
  Sense strand starting at position 1343 of SEQ ID NO: 1241994
gugcuuauguauuuaugua

SEQ ID NO: 1315521 - RNA, 19 nt, Artificial Sequence
  Description of Artificial Sequence: Synthetic oligonucleotide
  Antisense strand to SEQ ID NO: 1315520
uacauaaauacauaagcac

SEQ ID NO: 1315522 - RNA, 19 nt, Artificial Sequence
  Description of Artificial Sequence: Synthetic oligonucleotide
  Sense strand starting at position 1885 of SEQ ID NO: 1241994
caugaugaugcuggccaaa

SEQ ID NO: 1315523 - RNA, 19 nt, Artificial Sequence
  Description of Artificial Sequence: Synthetic oligonucleotide
  Antisense strand to SEQ ID NO: 1315522
uuuggccagcaucaucaug

SEQ ID NO: 1315524 - RNA, 19 nt, Artificial Sequence
  Description of Artificial Sequence: Synthetic oligonucleotide
  Sense strand starting at position 1887 of SEQ ID NO: 1241994
ugaugaugcuggccaaagu

SEQ ID NO: 1315525 - RNA, 19 nt, Artificial Sequence
  Description of Artificial Sequence: Synthetic oligonucleotide
  Antisense strand to SEQ ID NO: 1315524
acuuuggccagcaucauca

SEQ ID NO: 1315526 - RNA, 19 nt, Artificial Sequence
  Description of Artificial Sequence: Synthetic oligonucleotide
  Sense strand starting at position 1903 of SEQ ID NO: 1241994
agugguguccaucgggaag

SEQ ID NO: 1315527 - RNA, 19 nt, Artificial Sequence
  Description of Artificial Sequence: Synthetic oligonucleotide
  Antisense strand to SEQ ID NO: 1315526
cuucccgauggacaccacu

SEQ ID NO: 1315528 - RNA, 19 nt, Artificial Sequence
  Description of Artificial Sequence: Synthetic oligonucleotide
  Sense strand starting at position 1906 of SEQ ID NO: 1241994
gguguccaucgggaagguu

SEQ ID NO: 1315529 - RNA, 19 nt, Artificial Sequence
  Description of Artificial Sequence: Synthetic oligonucleotide
  Antisense strand to SEQ ID NO: 1315528
aaccuucccgauggacacc

SEQ ID NO: 1315530 - RNA, 19 nt, Artificial Sequence
  Description of Artificial Sequence: Synthetic oligonucleotide
  Sense strand starting at position 1946 of SEQ ID NO: 1241994
gggaaugugugucccaaag

SEQ ID NO: 1315531 - RNA, 19 nt, Artificial Sequence
  Description of Artificial Sequence: Synthetic oligonucleotide
  Antisense strand to SEQ ID NO: 1315530
cuuugggacacacauuccc

SEQ ID NO: 1315532 - RNA, 19 nt, Artificial Sequence
  Description of Artificial Sequence: Synthetic oligonucleotide
  Sense strand starting at position 2024 of SEQ ID NO: 1241994
auugcaugcccucaaugua

SEQ ID NO: 1315533 - RNA, 19 nt, Artificial Sequence
  Description of Artificial Sequence: Synthetic oligonucleotide
  Antisense strand to SEQ ID NO: 1315532
uacauugagggcaugcaau

SEQ ID NO: 1315534 - RNA, 19 nt, Artificial Sequence
  Description of Artificial Sequence: Synthetic oligonucleotide
  Sense strand starting at position 2196 of SEQ ID NO: 1241994
gaaugagggucuuugccau

SEQ ID NO: 1315535 - RNA, 19 nt, Artificial Sequence
  Description of Artificial Sequence: Synthetic oligonucleotide
  Antisense strand to SEQ ID NO: 1315534
auggcaaagacccucauuc

SEQ ID NO: 1315536 - RNA, 19 nt, Artificial Sequence
  Description of Artificial Sequence: Synthetic oligonucleotide
  Sense strand starting at position 2354 of SEQ ID NO: 1241994
acagauagaucacagaaca

SEQ ID NO: 1315537 - RNA, 19 nt, Artificial Sequence
  Description of Artificial Sequence: Synthetic oligonucleotide
  Antisense strand to SEQ ID NO: 1315536
uguucugugaucuaucugu

SEQ ID NO: 1315538 - RNA, 19 nt, Artificial Sequence
  Description of Artificial Sequence: Synthetic oligonucleotide
  Sense strand starting at position 2477 of SEQ ID NO: 1241994
gcucucugcuaaguauaua

SEQ ID NO: 1315539 - RNA, 19 nt, Artificial Sequence
  Description of Artificial Sequence: Synthetic oligonucleotide
  Antisense strand to SEQ ID NO: 1315538
uauauacuuagcagagagc

SEQ ID NO: 1315540 - RNA, 19 nt, Artificial Sequence
  Description of Artificial Sequence: Synthetic oligonucleotide
  Sense strand starting at position 2787 of SEQ ID NO: 1241994
cugagaacuuguuugacuc

SEQ ID NO: 1315541 - RNA, 19 nt, Artificial Sequence
  Description of Artificial Sequence: Synthetic oligonucleotide
  Antisense strand to SEQ ID NO: 1315540
gagucaaacaaguucucag

SEQ ID NO: 1315542 - RNA, 19 nt, Artificial Sequence
  Description of Artificial Sequence: Synthetic oligonucleotide
  Sense strand starting at position 2788 of SEQ ID NO: 1241994
ugagaacuuguuugacucu

SEQ ID NO: 1315543 - RNA, 19 nt, Artificial Sequence
  Description of Artificial Sequence: Synthetic oligonucleotide
  Antisense strand to SEQ ID NO: 1315542
agagucaaacaaguucuca

SEQ ID NO: 1315544 - RNA, 19 nt, Artificial Sequence
  Description of Artificial Sequence: Synthetic oligonucleotide
  Sense strand starting at position 2797 of SEQ ID NO: 1241994
guuugacucuuauuuguuc

SEQ ID NO: 1315545 - RNA, 19 nt, Artificial Sequence
  Description of Artificial Sequence: Synthetic oligonucleotide
  Antisense strand to SEQ ID NO: 1315544
gaacaaauaagagucaaac

SEQ ID NO: 1315546 - RNA, 19 nt, Artificial Sequence
  Description of Artificial Sequence: Synthetic oligonucleotide
  Sense strand starting at position 2848 of SEQ ID NO: 1241994
ugaacuuaauguguuuagu

SEQ ID NO: 1315547 - RNA, 19 nt, Artificial Sequence
  Description of Artificial Sequence: Synthetic oligonucleotide
  Antisense strand to SEQ ID NO: 1315546
acuaaacacauuaaguuca

SEQ ID NO: 1315548 - RNA, 19 nt, Artificial Sequence
  Description of Artificial Sequence: Synthetic oligonucleotide
  Sense strand starting at position 2952 of SEQ ID NO: 1241994
gccaccauugcuggugaga

SEQ ID NO: 1315549 - RNA, 19 nt, Artificial Sequence
  Description of Artificial Sequence: Synthetic oligonucleotide
  Antisense strand to SEQ ID NO: 1315548
ucucaccagcaaugguggc

SEQ ID NO: 1315550 - RNA, 19 nt, Artificial Sequence
  Description of Artificial Sequence: Synthetic oligonucleotide
  Sense strand starting at position 2961 of SEQ ID NO: 1241994
gcuggugagauguaccuaa

SEQ ID NO: 1315551 - RNA, 19 nt, Artificial Sequence
  Description of Artificial Sequence: Synthetic oligonucleotide
  Antisense strand to SEQ ID NO: 1315550
uuagguacaucucaccagc

SEQ ID NO: 1315552 - RNA, 19 nt, Artificial Sequence
  Description of Artificial Sequence: Synthetic oligonucleotide
  Sense strand starting at position 3084 of SEQ ID NO: 1241994
cccagaaggcuccauaauu

SEQ ID NO: 1315553 - RNA, 19 nt, Artificial Sequence
  Description of Artificial Sequence: Synthetic oligonucleotide
  Antisense strand to SEQ ID NO: 1315552
aauuauggagccuucuggg

SEQ ID NO: 1315554 - RNA, 19 nt, Artificial Sequence
  Description of Artificial Sequence: Synthetic oligonucleotide
  Sense strand starting at position 3122 of SEQ ID NO: 1241994
cuuauuaagcguuauaaug

SEQ ID NO: 1315555 - RNA, 19 nt, Artificial Sequence
  Description of Artificial Sequence: Synthetic oligonucleotide
  Antisense strand to SEQ ID NO: 1315554
cauuauaacgcuuaauaag

SEQ ID NO: 1315556 - RNA, 19 nt, Artificial Sequence
  Description of Artificial Sequence: Synthetic oligonucleotide
  Sense strand starting at position 3141 of SEQ ID NO: 1241994
aaagaauaagcuugggagu

SEQ ID NO: 1315557 - RNA, 19 nt, Artificial Sequence
  Description of Artificial Sequence: Synthetic oligonucleotide
  Antisense strand to SEQ ID NO: 1315556
acucccaagcuuauucuuu

SEQ ID NO: 1315558 - RNA, 19 nt, Artificial Sequence
  Description of Artificial Sequence: Synthetic oligonucleotide
  Sense strand starting at position 3250 of SEQ ID NO: 1241994
aguaaugucuaucuuguaa

SEQ ID NO: 1315559 - RNA, 19 nt, Artificial Sequence
  Description of Artificial Sequence: Synthetic oligonucleotide
  Antisense strand to SEQ ID NO: 1315558
uuacaagauagacauuacu

SEQ ID NO: 1315560 - RNA, 19 nt, Artificial Sequence
  Description of Artificial Sequence: Synthetic oligonucleotide
  Sense strand starting at position 3269 of SEQ ID NO: 1241994
gcaucauugugagcaugaa

SEQ ID NO: 1315561 - RNA, 19 nt, Artificial Sequence
  Description of Artificial Sequence: Synthetic oligonucleotide
  Antisense strand to SEQ ID NO: 1315560
uucaugcucacaaugaugc

SEQ ID NO: 1315562 - RNA, 19 nt, Artificial Sequence
  Description of Artificial Sequence: Synthetic oligonucleotide
  Sense strand starting at position 3270 of SEQ ID NO: 1241994
caucauugugagcaugaaa

SEQ ID NO: 1315563 - RNA, 19 nt, Artificial Sequence
  Description of Artificial Sequence: Synthetic oligonucleotide
  Antisense strand to SEQ ID NO: 1315562
uuucaugcucacaaugaug

SEQ ID NO: 1315564 - RNA, 19 nt, Artificial Sequence
  Description of Artificial Sequence: Synthetic oligonucleotide
  Sense strand starting at position 3277 of SEQ ID NO: 1241994
gugagcaugaaaugagauu

SEQ ID NO: 1315565 - RNA, 19 nt, Artificial Sequence
  Description of Artificial Sequence: Synthetic oligonucleotide
  Antisense strand to SEQ ID NO: 1315564
aaucucauuucaugcucac

SEQ ID NO: 1315566 - RNA, 19 nt, Artificial Sequence
  Description of Artificial Sequence: Synthetic oligonucleotide
  Sense strand starting at position 3444 of SEQ ID NO: 1241994
uuaaguucuuauguuccau

SEQ ID NO: 1315567 - RNA, 19 nt, Artificial Sequence
  Description of Artificial Sequence: Synthetic oligonucleotide
  Antisense strand to SEQ ID NO: 1315566
auggaacauaagaacuuaa

SEQ ID NO: 1315568 - RNA, 19 nt, Artificial Sequence
  Description of Artificial Sequence: Synthetic oligonucleotide
  Sense strand starting at position 3820 of SEQ ID NO: 1241994
aguuucuguucuuuacuaa

SEQ ID NO: 1315569 - RNA, 19 nt, Artificial Sequence
  Description of Artificial Sequence: Synthetic oligonucleotide
  Antisense strand to SEQ ID NO: 1315568
uuaguaaagaacagaaacu

SEQ ID NO: 1315570 - RNA, 19 nt, Artificial Sequence
  Description of Artificial Sequence: Synthetic oligonucleotide
  Sense strand starting at position 3821 of SEQ ID NO: 1241994
guuucuguucuuuacuaau

SEQ ID NO: 1315571 - RNA, 19 nt, Artificial Sequence
  Description of Artificial Sequence: Synthetic oligonucleotide
  Antisense strand to SEQ ID NO: 1315570
auuaguaaagaacagaaac

SEQ ID NO: 1315572 - RNA, 19 nt, Artificial Sequence
  Description of Artificial Sequence: Synthetic oligonucleotide
  Sense strand starting at position 3868 of SEQ ID NO: 1241994
ccucuugaguccuugguuu

SEQ ID NO: 1315573 - RNA, 19 nt, Artificial Sequence
  Description of Artificial Sequence: Synthetic oligonucleotide
  Antisense strand to SEQ ID NO: 1315572
aaaccaaggacucaagagg

SEQ ID NO: 1315574 - RNA, 19 nt, Artificial Sequence
  Description of Artificial Sequence: Synthetic oligonucleotide
  Sense strand starting at position 3929 of SEQ ID NO: 1241994
guucuaaugcugggauccu

SEQ ID NO: 1315575 - RNA, 19 nt, Artificial Sequence
  Description of Artificial Sequence: Synthetic oligonucleotide
  Antisense strand to SEQ ID NO: 1315574
aggaucccagcauuagaac

SEQ ID NO: 1315576 - RNA, 19 nt, Artificial Sequence
  Description of Artificial Sequence: Synthetic oligonucleotide
  Sense strand starting at position 58 of SEQ ID NO: 1241995
cugucauucucaguaauau

SEQ ID NO: 1315577 - RNA, 19 nt, Artificial Sequence
  Description of Artificial Sequence: Synthetic oligonucleotide
  Antisense strand to SEQ ID NO: 1315576
auauuacugagaaugacag

SEQ ID NO: 1315578 - RNA, 19 nt, Artificial Sequence
  Description of Artificial Sequence: Synthetic oligonucleotide
  Sense strand starting at position 59 of SEQ ID NO: 1241995
ugucauucucaguaauaua

SEQ ID NO: 1315579 - RNA, 19 nt, Artificial Sequence
  Description of Artificial Sequence: Synthetic oligonucleotide
  Antisense strand to SEQ ID NO: 1315578
uauauuacugagaaugaca

SEQ ID NO: 1315580 - RNA, 19 nt, Artificial Sequence
  Description of Artificial Sequence: Synthetic oligonucleotide
  Sense strand starting at position 131 of SEQ ID NO: 1241995
gggaguuucccacacuuua

SEQ ID NO: 1315581 - RNA, 19 nt, Artificial Sequence
  Description of Artificial Sequence: Synthetic oligonucleotide
  Antisense strand to SEQ ID NO: 1315580
uaaagugugggaaacuccc

SEQ ID NO: 1315582 - RNA, 19 nt, Artificial Sequence
  Description of Artificial Sequence: Synthetic oligonucleotide
  Sense strand starting at position 220 of SEQ ID NO: 1241995
ugaagacuuuccuuaugcu

SEQ ID NO: 1315583 - RNA, 19 nt, Artificial Sequence
  Description of Artificial Sequence: Synthetic oligonucleotide
  Antisense strand to SEQ ID NO: 1315582
agcauaaggaaagucuuca

SEQ ID NO: 1315584 - RNA, 19 nt, Artificial Sequence
  Description of Artificial Sequence: Synthetic oligonucleotide
  Sense strand starting at position 295 of SEQ ID NO: 1241995
uuccuauguguguaugaga

SEQ ID NO: 1315585 - RNA, 19 nt, Artificial Sequence
  Description of Artificial Sequence: Synthetic oligonucleotide
  Antisense strand to SEQ ID NO: 1315584
ucucauacacacauaggaa

SEQ ID NO: 1315586 - RNA, 19 nt, Artificial Sequence
  Description of Artificial Sequence: Synthetic oligonucleotide
  Sense strand starting at position 304 of SEQ ID NO: 1241995
guguaugagagguggguaa

SEQ ID NO: 1315587 - RNA, 19 nt, Artificial Sequence
  Description of Artificial Sequence: Synthetic oligonucleotide
  Antisense strand to SEQ ID NO: 1315586
uuacccaccucucauacac

SEQ ID NO: 1315588 - RNA, 19 nt, Artificial Sequence
  Description of Artificial Sequence: Synthetic oligonucleotide
  Sense strand starting at position 521 of SEQ ID NO: 1241995
gggugacauggcuggaguu

SEQ ID NO: 1315589 - RNA, 19 nt, Artificial Sequence
  Description of Artificial Sequence: Synthetic oligonucleotide
  Antisense strand to SEQ ID NO: 1315588
aacuccagccaugucaccc

SEQ ID NO: 1315590 - RNA, 19 nt, Artificial Sequence
  Description of Artificial Sequence: Synthetic oligonucleotide
  Sense strand starting at position 542 of SEQ ID NO: 1241995
caagaccucugauugguaa

SEQ ID NO: 1315591 - RNA, 19 nt, Artificial Sequence
  Description of Artificial Sequence: Synthetic oligonucleotide
  Antisense strand to SEQ ID NO: 1315590
uuaccaaucagaggucuug

SEQ ID NO: 1315592 - RNA, 19 nt, Artificial Sequence
  Description of Artificial Sequence: Synthetic oligonucleotide
  Sense strand starting at position 543 of SEQ ID NO: 1241995
aagaccucugauugguaau

SEQ ID NO: 1315593 - RNA, 19 nt, Artificial Sequence
  Description of Artificial Sequence: Synthetic oligonucleotide
  Antisense strand to SEQ ID NO: 1315592
auuaccaaucagaggucuu

SEQ ID NO: 1315594 - RNA, 19 nt, Artificial Sequence
  Description of Artificial Sequence: Synthetic oligonucleotide
  Sense strand starting at position 544 of SEQ ID NO: 1241995
agaccucugauugguaaug

SEQ ID NO: 1315595 - RNA, 19 nt, Artificial Sequence
  Description of Artificial Sequence: Synthetic oligonucleotide
  Antisense strand to SEQ ID NO: 1315594
cauuaccaaucagaggucu

SEQ ID NO: 1315596 - RNA, 19 nt, Artificial Sequence
  Description of Artificial Sequence: Synthetic oligonucleotide
  Sense strand starting at position 609 of SEQ ID NO: 1241995
ccauuaaacguuuacagcu

SEQ ID NO: 1315597 - RNA, 19 nt, Artificial Sequence
  Description of Artificial Sequence: Synthetic oligonucleotide
  Antisense strand to SEQ ID NO: 1315596
agcuguaaacguuuaaugg

SEQ ID NO: 1315598 - RNA, 19 nt, Artificial Sequence
  Description of Artificial Sequence: Synthetic oligonucleotide
  Sense strand starting at position 651 of SEQ ID NO: 1241995
caggaacuccugugcuaga

SEQ ID NO: 1315599 - RNA, 19 nt, Artificial Sequence
  Description of Artificial Sequence: Synthetic oligonucleotide
  Antisense strand to SEQ ID NO: 1315598
ucuagcacaggaguuccug

SEQ ID NO: 1315600 - RNA, 19 nt, Artificial Sequence
  Description of Artificial Sequence: Synthetic oligonucleotide
  Sense strand starting at position 828 of SEQ ID NO: 1241995
ggaauucaagggugcagaa

SEQ ID NO: 1315601 - RNA, 19 nt, Artificial Sequence
  Description of Artificial Sequence: Synthetic oligonucleotide
  Antisense strand to SEQ ID NO: 1315600
uucugcacccuugaauucc

SEQ ID NO: 1315602 - RNA, 19 nt, Artificial Sequence
  Description of Artificial Sequence: Synthetic oligonucleotide
  Sense strand starting at position 860 of SEQ ID NO: 1241995
aguauccagacucgaguua

SEQ ID NO: 1315603 - RNA, 19 nt, Artificial Sequence
  Description of Artificial Sequence: Synthetic oligonucleotide
  Antisense strand to SEQ ID NO: 1315602
uaacucgagucuggauacu

SEQ ID NO: 1315604 - RNA, 19 nt, Artificial Sequence
  Description of Artificial Sequence: Synthetic oligonucleotide
  Sense strand starting at position 861 of SEQ ID NO: 1241995
guauccagacucgaguuaa

SEQ ID NO: 1315605 - RNA, 19 nt, Artificial Sequence
  Description of Artificial Sequence: Synthetic oligonucleotide
  Antisense strand to SEQ ID NO: 1315604
uuaacucgagucuggauac

SEQ ID NO: 1315606 - RNA, 19 nt, Artificial Sequence
  Description of Artificial Sequence: Synthetic oligonucleotide
  Sense strand starting at position 890 of SEQ ID NO: 1241995
cgauucgaugucuauaaac

SEQ ID NO: 1315607 - RNA, 19 nt, Artificial Sequence
  Description of Artificial Sequence: Synthetic oligonucleotide
  Antisense strand to SEQ ID NO: 1315606
guuuauagacaucgaaucg

SEQ ID NO: 1315608 - RNA, 19 nt, Artificial Sequence
  Description of Artificial Sequence: Synthetic oligonucleotide
  Sense strand starting at position 892 of SEQ ID NO: 1241995
auucgaugucuauaaaccu

SEQ ID NO: 1315609 - RNA, 19 nt, Artificial Sequence
  Description of Artificial Sequence: Synthetic oligonucleotide
  Antisense strand to SEQ ID NO: 1315608
agguuuauagacaucgaau

SEQ ID NO: 1315610 - RNA, 19 nt, Artificial Sequence
  Description of Artificial Sequence: Synthetic oligonucleotide
  Sense strand starting at position 991 of SEQ ID NO: 1241995
auccgaacuuggucuggau

SEQ ID NO: 1315611 - RNA, 19 nt, Artificial Sequence
  Description of Artificial Sequence: Synthetic oligonucleotide
  Antisense strand to SEQ ID NO: 1315610
auccagaccaaguucggau

SEQ ID NO: 1315612 - RNA, 19 nt, Artificial Sequence
  Description of Artificial Sequence: Synthetic oligonucleotide
  Sense strand starting at position 993 of SEQ ID NO: 1241995
ccgaacuuggucuggauga

SEQ ID NO: 1315613 - RNA, 19 nt, Artificial Sequence
  Description of Artificial Sequence: Synthetic oligonucleotide
  Antisense strand to SEQ ID NO: 1315612
ucauccagaccaaguucgg

SEQ ID NO: 1315614 - RNA, 19 nt, Artificial Sequence
  Description of Artificial Sequence: Synthetic oligonucleotide
  Sense strand starting at position 1224 of SEQ ID NO: 1241995
gggugugauuaaagaggga

SEQ ID NO: 1315615 - RNA, 19 nt, Artificial Sequence
  Description of Artificial Sequence: Synthetic oligonucleotide
  Antisense strand to SEQ ID NO: 1315614
ucccucuuuaaucacaccc

SEQ ID NO: 1315616 - RNA, 19 nt, Artificial Sequence
  Description of Artificial Sequence: Synthetic oligonucleotide
  Sense strand starting at position 2310 of SEQ ID NO: 1241995
gcuccuccacguuauggaa

SEQ ID NO: 1315617 - RNA, 19 nt, Artificial Sequence
  Description of Artificial Sequence: Synthetic oligonucleotide
  Antisense strand to SEQ ID NO: 1315616
uuccauaacguggaggagc

SEQ ID NO: 1315618 - RNA, 19 nt, Artificial Sequence
  Description of Artificial Sequence: Synthetic oligonucleotide
  Sense strand starting at position 2432 of SEQ ID NO: 1241995
uucuuugggaccugggaau

SEQ ID NO: 1315619 - RNA, 19 nt, Artificial Sequence
  Description of Artificial Sequence: Synthetic oligonucleotide
  Antisense strand to SEQ ID NO: 1315618
auucccaggucccaaagaa

SEQ ID NO: 1315620 - RNA, 19 nt, Artificial Sequence
  Description of Artificial Sequence: Synthetic oligonucleotide
  Sense strand starting at position 2445 of SEQ ID NO: 1241995
gggaauguuggguggccua

SEQ ID NO: 1315621 - RNA, 19 nt, Artificial Sequence
  Description of Artificial Sequence: Synthetic oligonucleotide
  Antisense strand to SEQ ID NO: 1315620
uaggccacccaacauuccc

SEQ ID NO: 1315622 - RNA, 19 nt, Artificial Sequence
  Description of Artificial Sequence: Synthetic oligonucleotide
  Sense strand starting at position 2527 of SEQ ID NO: 1241995
ggcuuuaggauccaagcuu

SEQ ID NO: 1315623 - RNA, 19 nt, Artificial Sequence
  Description of Artificial Sequence: Synthetic oligonucleotide
  Antisense strand to SEQ ID NO: 1315622
aagcuuggauccuaaagcc

SEQ ID NO: 1315624 - RNA, 19 nt, Artificial Sequence
  Description of Artificial Sequence: Synthetic oligonucleotide
  Sense strand starting at position 2743 of SEQ ID NO: 1241995
cugucaagguuguugagaa

SEQ ID NO: 1315625 - RNA, 19 nt, Artificial Sequence
  Description of Artificial Sequence: Synthetic oligonucleotide
  Antisense strand to SEQ ID NO: 1315624
uucucaacaaccuugacag

SEQ ID NO: 1315626 - RNA, 19 nt, Artificial Sequence
  Description of Artificial Sequence: Synthetic oligonucleotide
  Sense strand starting at position 2775 of SEQ ID NO: 1241995
cguuguguaaaucauuaag

SEQ ID NO: 1315627 - RNA, 19 nt, Artificial Sequence
  Description of Artificial Sequence: Synthetic oligonucleotide
  Antisense strand to SEQ ID NO: 1315626
cuuaaugauuuacacaacg

SEQ ID NO: 1315628 - RNA, 19 nt, Artificial Sequence
  Description of Artificial Sequence: Synthetic oligonucleotide
  Sense strand starting at position 2803 of SEQ ID NO: 1241995
cccacaaggagugguuauu

SEQ ID NO: 1315629 - RNA, 19 nt, Artificial Sequence
  Description of Artificial Sequence: Synthetic oligonucleotide
  Antisense strand to SEQ ID NO: 1315628
aauaaccacuccuuguggg

SEQ ID NO: 1315630 - RNA, 19 nt, Artificial Sequence
  Description of Artificial Sequence: Synthetic oligonucleotide
  Sense strand starting at position 2854 of SEQ ID NO: 1241995
cacacagccuggucugaaa

SEQ ID NO: 1315631 - RNA, 19 nt, Artificial Sequence
  Description of Artificial Sequence: Synthetic oligonucleotide
  Antisense strand to SEQ ID NO: 1315630
uuucagaccaggcugugug

SEQ ID NO: 1315632 - RNA, 19 nt, Artificial Sequence
  Description of Artificial Sequence: Synthetic oligonucleotide
  Sense strand starting at position 3068 of SEQ ID NO: 1241995
uggacagacucugugaaau

SEQ ID NO: 1315633 - RNA, 19 nt, Artificial Sequence
  Description of Artificial Sequence: Synthetic oligonucleotide
  Antisense strand to SEQ ID NO: 1315632
auuucacagagucugucca

SEQ ID NO: 1315634 - RNA, 19 nt, Artificial Sequence
  Description of Artificial Sequence: Synthetic oligonucleotide
  Sense strand starting at position 3081 of SEQ ID NO: 1241995
ugaaaugcagcaggugaua

SEQ ID NO: 1315635 - RNA, 19 nt, Artificial Sequence
  Description of Artificial Sequence: Synthetic oligonucleotide
  Antisense strand to SEQ ID NO: 1315634
uaucaccugcugcauuuca

SEQ ID NO: 1315636 - RNA, 19 nt, Artificial Sequence
  Description of Artificial Sequence: Synthetic oligonucleotide
  Sense strand starting at position 3090 of SEQ ID NO: 1241995
gcaggugauacugagcuuu

SEQ ID NO: 1315637 - RNA, 19 nt, Artificial Sequence
  Description of Artificial Sequence: Synthetic oligonucleotide
  Antisense strand to SEQ ID NO: 1315636
aaagcucaguaucaccugc

SEQ ID NO: 1315638 - RNA, 19 nt, Artificial Sequence
  Description of Artificial Sequence: Synthetic oligonucleotide
  Sense strand starting at position 3174 of SEQ ID NO: 1241995
uggguucucuccucuagac

SEQ ID NO: 1315639 - RNA, 19 nt, Artificial Sequence
  Description of Artificial Sequence: Synthetic oligonucleotide
  Antisense strand to SEQ ID NO: 1315638
gucuagaggagagaaccca

SEQ ID NO: 1315640 - RNA, 19 nt, Artificial Sequence
  Description of Artificial Sequence: Synthetic oligonucleotide
  Sense strand starting at position 3176 of SEQ ID NO: 1241995
gguucucuccucuagacaa

SEQ ID NO: 1315641 - RNA, 19 nt, Artificial Sequence
  Description of Artificial Sequence: Synthetic oligonucleotide
  Antisense strand to SEQ ID NO: 1315640
uugucuagaggagagaacc

SEQ ID NO: 1315642 - RNA, 19 nt, Artificial Sequence
  Description of Artificial Sequence: Synthetic oligonucleotide
  Sense strand starting at position 3367 of SEQ ID NO: 1241995
uguugacucuggguggaga

SEQ ID NO: 1315643 - RNA, 19 nt, Artificial Sequence
  Description of Artificial Sequence: Synthetic oligonucleotide
  Antisense strand to SEQ ID NO: 1315642
ucuccacccagagucaaca

SEQ ID NO: 1315644 - RNA, 19 nt, Artificial Sequence
  Description of Artificial Sequence: Synthetic oligonucleotide
  Sense strand starting at position 3397 of SEQ ID NO: 1241995
ggaagcuugcacuaaauac

SEQ ID NO: 1315645 - RNA, 19 nt, Artificial Sequence
  Description of Artificial Sequence: Synthetic oligonucleotide
  Antisense strand to SEQ ID NO: 1315644
guauuuagugcaagcuucc

SEQ ID NO: 1315646 - RNA, 19 nt, Artificial Sequence
  Description of Artificial Sequence: Synthetic oligonucleotide
  Sense strand starting at position 3547 of SEQ ID NO: 1241995
ggcaaccaugcuuagaagu

SEQ ID NO: 1315647 - RNA, 19 nt, Artificial Sequence
  Description of Artificial Sequence: Synthetic oligonucleotide
  Antisense strand to SEQ ID NO: 1315646
acuucuaagcaugguugcc

SEQ ID NO: 1315648 - RNA, 19 nt, Artificial Sequence
  Description of Artificial Sequence: Synthetic oligonucleotide
  Sense strand starting at position 3771 of SEQ ID NO: 1241995
gguaaaguccaugaaggua

SEQ ID NO: 1315649 - RNA, 19 nt, Artificial Sequence
  Description of Artificial Sequence: Synthetic oligonucleotide
  Antisense strand to SEQ ID NO: 1315648
uaccuucauggacuuuacc

SEQ ID NO: 1315650 - RNA, 19 nt, Artificial Sequence
  Description of Artificial Sequence: Synthetic oligonucleotide
  Sense strand starting at position 3856 of SEQ ID NO: 1241995
uguaguggugcucaugaag

SEQ ID NO: 1315651 - RNA, 19 nt, Artificial Sequence
  Description of Artificial Sequence: Synthetic oligonucleotide
  Antisense strand to SEQ ID NO: 1315650
cuucaugagcaccacuaca

SEQ ID NO: 1315652 - RNA, 19 nt, Artificial Sequence
  Description of Artificial Sequence: Synthetic oligonucleotide
  Sense strand starting at position 3859 of SEQ ID NO: 1241995
aguggugcucaugaaguau

SEQ ID NO: 1315653 - RNA, 19 nt, Artificial Sequence
  Description of Artificial Sequence: Synthetic oligonucleotide
  Antisense strand to SEQ ID NO: 1315652
auacuucaugagcaccacu

SEQ ID NO: 1315654 - RNA, 19 nt, Artificial Sequence
  Description of Artificial Sequence: Synthetic oligonucleotide
  Sense strand starting at position 3906 of SEQ ID NO: 1241995
aagagugagucucuugaac

SEQ ID NO: 1315655 - RNA, 19 nt, Artificial Sequence
  Description of Artificial Sequence: Synthetic oligonucleotide
  Antisense strand to SEQ ID NO: 1315654
guucaagagacucacucuu

SEQ ID NO: 1315656 - RNA, 19 nt, Artificial Sequence
  Description of Artificial Sequence: Synthetic oligonucleotide
  Sense strand starting at position 57 of SEQ ID NO: 1241996
cugucauucucaguaauau

SEQ ID NO: 1315657 - RNA, 19 nt, Artificial Sequence
  Description of Artificial Sequence: Synthetic oligonucleotide
  Antisense strand to SEQ ID NO: 1315656
auauuacugagaaugacag

SEQ ID NO: 1315658 - RNA, 19 nt, Artificial Sequence
  Description of Artificial Sequence: Synthetic oligonucleotide
  Sense strand starting at position 58 of SEQ ID NO: 1241996
ugucauucucaguaauaua

SEQ ID NO: 1315659 - RNA, 19 nt, Artificial Sequence
  Description of Artificial Sequence: Synthetic oligonucleotide
  Antisense strand to SEQ ID NO: 1315658
uauauuacugagaaugaca

SEQ ID NO: 1315660 - RNA, 19 nt, Artificial Sequence
  Description of Artificial Sequence: Synthetic oligonucleotide
  Sense strand starting at position 130 of SEQ ID NO: 1241996
gggaguuucccacacuuua

SEQ ID NO: 1315661 - RNA, 19 nt, Artificial Sequence
  Description of Artificial Sequence: Synthetic oligonucleotide
  Antisense strand to SEQ ID NO: 1315660
uaaagugugggaaacuccc

SEQ ID NO: 1315662 - RNA, 19 nt, Artificial Sequence
  Description of Artificial Sequence: Synthetic oligonucleotide
  Sense strand starting at position 219 of SEQ ID NO: 1241996
ugaagacuuuccuuaugcu

SEQ ID NO: 1315663 - RNA, 19 nt, Artificial Sequence
  Description of Artificial Sequence: Synthetic oligonucleotide
  Antisense strand to SEQ ID NO: 1315662
agcauaaggaaagucuuca

SEQ ID NO: 1315664 - RNA, 19 nt, Artificial Sequence
  Description of Artificial Sequence: Synthetic oligonucleotide
  Sense strand starting at position 294 of SEQ ID NO: 1241996
uuccuauguguguaugaga

SEQ ID NO: 1315665 - RNA, 19 nt, Artificial Sequence
  Description of Artificial Sequence: Synthetic oligonucleotide
  Antisense strand to SEQ ID NO: 1315664
ucucauacacacauaggaa

SEQ ID NO: 1315666 - RNA, 19 nt, Artificial Sequence
  Description of Artificial Sequence: Synthetic oligonucleotide
  Sense strand starting at position 303 of SEQ ID NO: 1241996
guguaugagagguggguaa

SEQ ID NO: 1315667 - RNA, 19 nt, Artificial Sequence
  Description of Artificial Sequence: Synthetic oligonucleotide
  Antisense strand to SEQ ID NO: 1315666
uuacccaccucucauacac

SEQ ID NO: 1315668 - RNA, 19 nt, Artificial Sequence
  Description of Artificial Sequence: Synthetic oligonucleotide
  Sense strand starting at position 520 of SEQ ID NO: 1241996
gggugacauggcuggaguu

SEQ ID NO: 1315669 - RNA, 19 nt, Artificial Sequence
  Description of Artificial Sequence: Synthetic oligonucleotide
  Antisense strand to SEQ ID NO: 1315668
aacuccagccaugucaccc

SEQ ID NO: 1315670 - RNA, 19 nt, Artificial Sequence
  Description of Artificial Sequence: Synthetic oligonucleotide
  Sense strand starting at position 541 of SEQ ID NO: 1241996
caagaccucugauugguaa

SEQ ID NO: 1315671 - RNA, 19 nt, Artificial Sequence
  Description of Artificial Sequence: Synthetic oligonucleotide
  Antisense strand to SEQ ID NO: 1315670
uuaccaaucagaggucuug

SEQ ID NO: 1315672 - RNA, 19 nt, Artificial Sequence
  Description of Artificial Sequence: Synthetic oligonucleotide
  Sense strand starting at position 542 of SEQ ID NO: 1241996
aagaccucugauugguaau

SEQ ID NO: 1315673 - RNA, 19 nt, Artificial Sequence
  Description of Artificial Sequence: Synthetic oligonucleotide
  Antisense strand to SEQ ID NO: 1315672
auuaccaaucagaggucuu

SEQ ID NO: 1315674 - RNA, 19 nt, Artificial Sequence
  Description of Artificial Sequence: Synthetic oligonucleotide
  Sense strand starting at position 543 of SEQ ID NO: 1241996
agaccucugauugguaaug

SEQ ID NO: 1315675 - RNA, 19 nt, Artificial Sequence
  Description of Artificial Sequence: Synthetic oligonucleotide
  Antisense strand to SEQ ID NO: 1315674
cauuaccaaucagaggucu

SEQ ID NO: 1315676 - RNA, 19 nt, Artificial Sequence
  Description of Artificial Sequence: Synthetic oligonucleotide
  Sense strand starting at position 608 of SEQ ID NO: 1241996
ccauuaaacguuuacagcu

SEQ ID NO: 1315677 - RNA, 19 nt, Artificial Sequence
  Description of Artificial Sequence: Synthetic oligonucleotide
  Antisense strand to SEQ ID NO: 1315676
agcuguaaacguuuaaugg

SEQ ID NO: 1315678 - RNA, 19 nt, Artificial Sequence
  Description of Artificial Sequence: Synthetic oligonucleotide
  Sense strand starting at position 650 of SEQ ID NO: 1241996
caggaacuccugugcuaga

SEQ ID NO: 1315679 - RNA, 19 nt, Artificial Sequence
  Description of Artificial Sequence: Synthetic oligonucleotide
  Antisense strand to SEQ ID NO: 1315678
ucuagcacaggaguuccug

SEQ ID NO: 1315680 - RNA, 19 nt, Artificial Sequence
  Description of Artificial Sequence: Synthetic oligonucleotide
  Sense strand starting at position 827 of SEQ ID NO: 1241996
ggaauucaagggugcagaa

SEQ ID NO: 1315681 - RNA, 19 nt, Artificial Sequence
  Description of Artificial Sequence: Synthetic oligonucleotide
  Antisense strand to SEQ ID NO: 1315680
uucugcacccuugaauucc

SEQ ID NO: 1315682 - RNA, 19 nt, Artificial Sequence
  Description of Artificial Sequence: Synthetic oligonucleotide
  Sense strand starting at position 859 of SEQ ID NO: 1241996
aguauccagacucgaguua

SEQ ID NO: 1315683 - RNA, 19 nt, Artificial Sequence
  Description of Artificial Sequence: Synthetic oligonucleotide
  Antisense strand to SEQ ID NO: 1315682
uaacucgagucuggauacu

SEQ ID NO: 1315684 - RNA, 19 nt, Artificial Sequence
  Description of Artificial Sequence: Synthetic oligonucleotide
  Sense strand starting at position 860 of SEQ ID NO: 1241996
guauccagacucgaguuaa

SEQ ID NO: 1315685 - RNA, 19 nt, Artificial Sequence
  Description of Artificial Sequence: Synthetic oligonucleotide
  Antisense strand to SEQ ID NO: 1315684
uuaacucgagucuggauac

SEQ ID NO: 1315686 - RNA, 19 nt, Artificial Sequence
  Description of Artificial Sequence: Synthetic oligonucleotide
  Sense strand starting at position 889 of SEQ ID NO: 1241996
cgauucgaugucuauaaac

SEQ ID NO: 1315687 - RNA, 19 nt, Artificial Sequence
  Description of Artificial Sequence: Synthetic oligonucleotide
  Antisense strand to SEQ ID NO: 1315686
guuuauagacaucgaaucg

SEQ ID NO: 1315688 - RNA, 19 nt, Artificial Sequence
  Description of Artificial Sequence: Synthetic oligonucleotide
  Sense strand starting at position 891 of SEQ ID NO: 1241996
auucgaugucuauaaaccu

SEQ ID NO: 1315689 - RNA, 19 nt, Artificial Sequence
  Description of Artificial Sequence: Synthetic oligonucleotide
  Antisense strand to SEQ ID NO: 1315688
agguuuauagacaucgaau

SEQ ID NO: 1315690 - RNA, 19 nt, Artificial Sequence
  Description of Artificial Sequence: Synthetic oligonucleotide
  Sense strand starting at position 990 of SEQ ID NO: 1241996
auccgaacuuggucuggau

SEQ ID NO: 1315691 - RNA, 19 nt, Artificial Sequence
  Description of Artificial Sequence: Synthetic oligonucleotide
  Antisense strand to SEQ ID NO: 1315690
auccagaccaaguucggau

SEQ ID NO: 1315692 - RNA, 19 nt, Artificial Sequence
  Description of Artificial Sequence: Synthetic oligonucleotide
  Sense strand starting at position 992 of SEQ ID NO: 1241996
ccgaacuuggucuggauga

SEQ ID NO: 1315693 - RNA, 19 nt, Artificial Sequence
  Description of Artificial Sequence: Synthetic oligonucleotide
  Antisense strand to SEQ ID NO: 1315692
ucauccagaccaaguucgg

SEQ ID NO: 1315694 - RNA, 19 nt, Artificial Sequence
  Description of Artificial Sequence: Synthetic oligonucleotide
  Sense strand starting at position 1223 of SEQ ID NO: 1241996
gggugugauuaaagaggga

SEQ ID NO: 1315695 - RNA, 19 nt, Artificial Sequence
  Description of Artificial Sequence: Synthetic oligonucleotide
  Antisense strand to SEQ ID NO: 1315694
ucccucuuuaaucacaccc

SEQ ID NO: 1315696 - RNA, 19 nt, Artificial Sequence
  Description of Artificial Sequence: Synthetic oligonucleotide
  Sense strand starting at position 2309 of SEQ ID NO: 1241996
gcuccuccacguuauggaa

SEQ ID NO: 1315697 - RNA, 19 nt, Artificial Sequence
  Description of Artificial Sequence: Synthetic oligonucleotide
  Antisense strand to SEQ ID NO: 1315696
uuccauaacguggaggagc

SEQ ID NO: 1315698 - RNA, 19 nt, Artificial Sequence
  Description of Artificial Sequence: Synthetic oligonucleotide
  Sense strand starting at position 2431 of SEQ ID NO: 1241996
uucuuugggaccugggaau

SEQ ID NO: 1315699 - RNA, 19 nt, Artificial Sequence
  Description of Artificial Sequence: Synthetic oligonucleotide
  Antisense strand to SEQ ID NO: 1315698
auucccaggucccaaagaa

SEQ ID NO: 1315700 - RNA, 19 nt, Artificial Sequence
  Description of Artificial Sequence: Synthetic oligonucleotide
  Sense strand starting at position 2444 of SEQ ID NO: 1241996
gggaauguuggguggccua

SEQ ID NO: 1315701 - RNA, 19 nt, Artificial Sequence
  Description of Artificial Sequence: Synthetic oligonucleotide
  Antisense strand to SEQ ID NO: 1315700
uaggccacccaacauuccc

SEQ ID NO: 1315702 - RNA, 19 nt, Artificial Sequence
  Description of Artificial Sequence: Synthetic oligonucleotide
  Sense strand starting at position 2526 of SEQ ID NO: 1241996
ggcuuuaggauccaagcuu

SEQ ID NO: 1315703 - RNA, 19 nt, Artificial Sequence
  Description of Artificial Sequence: Synthetic oligonucleotide
  Antisense strand to SEQ ID NO: 1315702
aagcuuggauccuaaagcc

SEQ ID NO: 1315704 - RNA, 19 nt, Artificial Sequence
  Description of Artificial Sequence: Synthetic oligonucleotide
  Sense strand starting at position 2742 of SEQ ID NO: 1241996
cugucaagguuguugagaa

SEQ ID NO: 1315705 - RNA, 19 nt, Artificial Sequence
  Description of Artificial Sequence: Synthetic oligonucleotide
  Antisense strand to SEQ ID NO: 1315704
uucucaacaaccuugacag

SEQ ID NO: 1315706 - RNA, 19 nt, Artificial Sequence
  Description of Artificial Sequence: Synthetic oligonucleotide
  Sense strand starting at position 2774 of SEQ ID NO: 1241996
cguuguguaaaucauuaag

SEQ ID NO: 1315707 - RNA, 19 nt, Artificial Sequence
  Description of Artificial Sequence: Synthetic oligonucleotide
  Antisense strand to SEQ ID NO: 1315706
cuuaaugauuuacacaacg

SEQ ID NO: 1315708 - RNA, 19 nt, Artificial Sequence
  Description of Artificial Sequence: Synthetic oligonucleotide
  Sense strand starting at position 2802 of SEQ ID NO: 1241996
cccacaaggagugguuauu

SEQ ID NO: 1315709 - RNA, 19 nt, Artificial Sequence
  Description of Artificial Sequence: Synthetic oligonucleotide
  Antisense strand to SEQ ID NO: 1315708
aauaaccacuccuuguggg

SEQ ID NO: 1315710 - RNA, 19 nt, Artificial Sequence
  Description of Artificial Sequence: Synthetic oligonucleotide
  Sense strand starting at position 2853 of SEQ ID NO: 1241996
cacacagccuggucugaaa

SEQ ID NO: 1315711 - RNA, 19 nt, Artificial Sequence
  Description of Artificial Sequence: Synthetic oligonucleotide
  Antisense strand to SEQ ID NO: 1315710
uuucagaccaggcugugug

SEQ ID NO: 1315712 - RNA, 19 nt, Artificial Sequence
  Description of Artificial Sequence: Synthetic oligonucleotide
  Sense strand starting at position 3067 of SEQ ID NO: 1241996
uggacagacucugugaaau

SEQ ID NO: 1315713 - RNA, 19 nt, Artificial Sequence
  Description of Artificial Sequence: Synthetic oligonucleotide
  Antisense strand to SEQ ID NO: 1315712
auuucacagagucugucca

SEQ ID NO: 1315714 - RNA, 19 nt, Artificial Sequence
  Description of Artificial Sequence: Synthetic oligonucleotide
  Sense strand starting at position 3080 of SEQ ID NO: 1241996
ugaaaugcagcaggugaua

SEQ ID NO: 1315715 - RNA, 19 nt, Artificial Sequence
  Description of Artificial Sequence: Synthetic oligonucleotide
  Antisense strand to SEQ ID NO: 1315714
uaucaccugcugcauuuca

SEQ ID NO: 1315716 - RNA, 19 nt, Artificial Sequence
  Description of Artificial Sequence: Synthetic oligonucleotide
  Sense strand starting at position 3089 of SEQ ID NO: 1241996
gcaggugauacugagcuuu

SEQ ID NO: 1315717 - RNA, 19 nt, Artificial Sequence
  Description of Artificial Sequence: Synthetic oligonucleotide
  Antisense strand to SEQ ID NO: 1315716
aaagcucaguaucaccugc

SEQ ID NO: 1315718 - RNA, 19 nt, Artificial Sequence
  Description of Artificial Sequence: Synthetic oligonucleotide
  Sense strand starting at position 3173 of SEQ ID NO: 1241996
uggguucucuccucuagac

SEQ ID NO: 1315719 - RNA, 19 nt, Artificial Sequence
  Description of Artificial Sequence: Synthetic oligonucleotide
  Antisense strand to SEQ ID NO: 1315718
gucuagaggagagaaccca

SEQ ID NO: 1315720 - RNA, 19 nt, Artificial Sequence
  Description of Artificial Sequence: Synthetic oligonucleotide
  Sense strand starting at position 3175 of SEQ ID NO: 1241996
gguucucuccucuagacaa

SEQ ID NO: 1315721 - RNA, 19 nt, Artificial Sequence
  Description of Artificial Sequence: Synthetic oligonucleotide
  Antisense strand to SEQ ID NO: 1315720
uugucuagaggagagaacc

SEQ ID NO: 1315722 - RNA, 19 nt, Artificial Sequence
  Description of Artificial Sequence: Synthetic oligonucleotide
  Sense strand starting at position 3366 of SEQ ID NO: 1241996
uguugacucuggguggaga

SEQ ID NO: 1315723 - RNA, 19 nt, Artificial Sequence
  Description of Artificial Sequence: Synthetic oligonucleotide
  Antisense strand to SEQ ID NO: 1315722
ucuccacccagagucaaca

SEQ ID NO: 1315724 - RNA, 19 nt, Artificial Sequence
  Description of Artificial Sequence: Synthetic oligonucleotide
  Sense strand starting at position 3396 of SEQ ID NO: 1241996
ggaagcuugcacuaaauac

SEQ ID NO: 1315725 - RNA, 19 nt, Artificial Sequence
  Description of Artificial Sequence: Synthetic oligonucleotide
  Antisense strand to SEQ ID NO: 1315724
guauuuagugcaagcuucc

SEQ ID NO: 1315726 - RNA, 19 nt, Artificial Sequence
  Description of Artificial Sequence: Synthetic oligonucleotide
  Sense strand starting at position 3546 of SEQ ID NO: 1241996
ggcaaccaugcuuagaagu

SEQ ID NO: 1315727 - RNA, 19 nt, Artificial Sequence
  Description of Artificial Sequence: Synthetic oligonucleotide
  Antisense strand to SEQ ID NO: 1315726
acuucuaagcaugguugcc

SEQ ID NO: 1315728 - RNA, 19 nt, Artificial Sequence
  Description of Artificial Sequence: Synthetic oligonucleotide
  Sense strand starting at position 3770 of SEQ ID NO: 1241996
gguaaaguccaugaaggua

SEQ ID NO: 1315729 - RNA, 19 nt, Artificial Sequence
  Description of Artificial Sequence: Synthetic oligonucleotide
  Antisense strand to SEQ ID NO: 1315728
uaccuucauggacuuuacc

SEQ ID NO: 1315730 - RNA, 19 nt, Artificial Sequence
  Description of Artificial Sequence: Synthetic oligonucleotide
  Sense strand starting at position 3855 of SEQ ID NO: 1241996
uguaguggugcucaugaag

SEQ ID NO: 1315731 - RNA, 19 nt, Artificial Sequence
  Description of Artificial Sequence: Synthetic oligonucleotide
  Antisense strand to SEQ ID NO: 1315730
cuucaugagcaccacuaca

SEQ ID NO: 1315732 - RNA, 19 nt, Artificial Sequence
  Description of Artificial Sequence: Synthetic oligonucleotide
  Sense strand starting at position 3858 of SEQ ID NO: 1241996
aguggugcucaugaaguau

SEQ ID NO: 1315733 - RNA, 19 nt, Artificial Sequence
  Description of Artificial Sequence: Synthetic oligonucleotide
  Antisense strand to SEQ ID NO: 1315732
auacuucaugagcaccacu

SEQ ID NO: 1315734 - RNA, 19 nt, Artificial Sequence
  Description of Artificial Sequence: Synthetic oligonucleotide
  Sense strand starting at position 3905 of SEQ ID NO: 1241996
aagagugagucucuugaac

SEQ ID NO: 1315735 - RNA, 19 nt, Artificial Sequence
  Description of Artificial Sequence: Synthetic oligonucleotide
  Antisense strand to SEQ ID NO: 1315734
guucaagagacucacucuu

SEQ ID NO: 1315736 - RNA, 19 nt, Artificial Sequence
  Description of Artificial Sequence: Synthetic oligonucleotide
  Sense strand starting at position 62 of SEQ ID NO: 1241997
ccucaccugugaguguaau

SEQ ID NO: 1315737 - RNA, 19 nt, Artificial Sequence
  Description of Artificial Sequence: Synthetic oligonucleotide
  Antisense strand to SEQ ID NO: 1315736
auuacacucacaggugagg

SEQ ID NO: 1315738 - RNA, 19 nt, Artificial Sequence
  Description of Artificial Sequence: Synthetic oligonucleotide
  Sense strand starting at position 63 of SEQ ID NO: 1241997
cucaccugugaguguaaua

SEQ ID NO: 1315739 - RNA, 19 nt, Artificial Sequence
  Description of Artificial Sequence: Synthetic oligonucleotide
  Antisense strand to SEQ ID NO: 1315738
uauuacacucacaggugag

SEQ ID NO: 1315740 - RNA, 19 nt, Artificial Sequence
  Description of Artificial Sequence: Synthetic oligonucleotide
  Sense strand starting at position 249 of SEQ ID NO: 1241997
ggaauuagagagugguaug

SEQ ID NO: 1315741 - RNA, 19 nt, Artificial Sequence
  Description of Artificial Sequence: Synthetic oligonucleotide
  Antisense strand to SEQ ID NO: 1315740
cauaccacucucuaauucc

SEQ ID NO: 1315742 - RNA, 19 nt, Artificial Sequence
  Description of Artificial Sequence: Synthetic oligonucleotide
  Sense strand starting at position 551 of SEQ ID NO: 1241997
aggccugagcccugccaaa

SEQ ID NO: 1315743 - RNA, 19 nt, Artificial Sequence
  Description of Artificial Sequence: Synthetic oligonucleotide
  Antisense strand to SEQ ID NO: 1315742
uuuggcagggcucaggccu

SEQ ID NO: 1315744 - RNA, 19 nt, Artificial Sequence
  Description of Artificial Sequence: Synthetic oligonucleotide
  Sense strand starting at position 602 of SEQ ID NO: 1241997
ucaccuggaucuuuaguua

SEQ ID NO: 1315745 - RNA, 19 nt, Artificial Sequence
  Description of Artificial Sequence: Synthetic oligonucleotide
  Antisense strand to SEQ ID NO: 1315744
uaacuaaagauccagguga

SEQ ID NO: 1315746 - RNA, 19 nt, Artificial Sequence
  Description of Artificial Sequence: Synthetic oligonucleotide
  Sense strand starting at position 605 of SEQ ID NO: 1241997
ccuggaucuuuaguuauau

SEQ ID NO: 1315747 - RNA, 19 nt, Artificial Sequence
  Description of Artificial Sequence: Synthetic oligonucleotide
  Antisense strand to SEQ ID NO: 1315746
auauaacuaaagauccagg

SEQ ID NO: 1315748 - RNA, 19 nt, Artificial Sequence
  Description of Artificial Sequence: Synthetic oligonucleotide
  Sense strand starting at position 606 of SEQ ID NO: 1241997
cuggaucuuuaguuauauc

SEQ ID NO: 1315749 - RNA, 19 nt, Artificial Sequence
  Description of Artificial Sequence: Synthetic oligonucleotide
  Antisense strand to SEQ ID NO: 1315748
gauauaacuaaagauccag

SEQ ID NO: 1315750 - RNA, 19 nt, Artificial Sequence
  Description of Artificial Sequence: Synthetic oligonucleotide
  Sense strand starting at position 678 of SEQ ID NO: 1241997
acuggcauuucugauauuu

SEQ ID NO: 1315751 - RNA, 19 nt, Artificial Sequence
  Description of Artificial Sequence: Synthetic oligonucleotide
  Antisense strand to SEQ ID NO: 1315750
aaauaucagaaaugccagu

SEQ ID NO: 1315752 - RNA, 19 nt, Artificial Sequence
  Description of Artificial Sequence: Synthetic oligonucleotide
  Sense strand starting at position 1060 of SEQ ID NO: 1241997
gggaaagucuaagacaaug

SEQ ID NO: 1315753 - RNA, 19 nt, Artificial Sequence
  Description of Artificial Sequence: Synthetic oligonucleotide
  Antisense strand to SEQ ID NO: 1315752
cauugucuuagacuuuccc

SEQ ID NO: 1315754 - RNA, 19 nt, Artificial Sequence
  Description of Artificial Sequence: Synthetic oligonucleotide
  Sense strand starting at position 1096 of SEQ ID NO: 1241997
cuucuaauccaauguggga

SEQ ID NO: 1315755 - RNA, 19 nt, Artificial Sequence
  Description of Artificial Sequence: Synthetic oligonucleotide
  Antisense strand to SEQ ID NO: 1315754
ucccacauuggauuagaag

SEQ ID NO: 1315756 - RNA, 19 nt, Artificial Sequence
  Description of Artificial Sequence: Synthetic oligonucleotide
  Sense strand starting at position 1109 of SEQ ID NO: 1241997
gugggagucucaguccuga

SEQ ID NO: 1315757 - RNA, 19 nt, Artificial Sequence
  Description of Artificial Sequence: Synthetic oligonucleotide
  Antisense strand to SEQ ID NO: 1315756
ucaggacugagacucccac

SEQ ID NO: 1315758 - RNA, 19 nt, Artificial Sequence
  Description of Artificial Sequence: Synthetic oligonucleotide
  Sense strand starting at position 1113 of SEQ ID NO: 1241997
gagucucaguccugaggau

SEQ ID NO: 1315759 - RNA, 19 nt, Artificial Sequence
  Description of Artificial Sequence: Synthetic oligonucleotide
  Antisense strand to SEQ ID NO: 1315758
auccucaggacugagacuc

SEQ ID NO: 1315760 - RNA, 19 nt, Artificial Sequence
  Description of Artificial Sequence: Synthetic oligonucleotide
  Sense strand starting at position 1248 of SEQ ID NO: 1241997
agcuuuaguccugggagag

SEQ ID NO: 1315761 - RNA, 19 nt, Artificial Sequence
  Description of Artificial Sequence: Synthetic oligonucleotide
  Antisense strand to SEQ ID NO: 1315760
cucucccaggacuaaagcu

SEQ ID NO: 1315762 - RNA, 19 nt, Artificial Sequence
  Description of Artificial Sequence: Synthetic oligonucleotide
  Sense strand starting at position 1249 of SEQ ID NO: 1241997
gcuuuaguccugggagagg

SEQ ID NO: 1315763 - RNA, 19 nt, Artificial Sequence
  Description of Artificial Sequence: Synthetic oligonucleotide
  Antisense strand to SEQ ID NO: 1315762
ccucucccaggacuaaagc

SEQ ID NO: 1315764 - RNA, 19 nt, Artificial Sequence
  Description of Artificial Sequence: Synthetic oligonucleotide
  Sense strand starting at position 1284 of SEQ ID NO: 1241997
acaagaagccuagacuguu

SEQ ID NO: 1315765 - RNA, 19 nt, Artificial Sequence
  Description of Artificial Sequence: Synthetic oligonucleotide
  Antisense strand to SEQ ID NO: 1315764
aacagucuaggcuucuugu

SEQ ID NO: 1315766 - RNA, 19 nt, Artificial Sequence
  Description of Artificial Sequence: Synthetic oligonucleotide
  Sense strand starting at position 1293 of SEQ ID NO: 1241997
cuagacuguuccucaggau

SEQ ID NO: 1315767 - RNA, 19 nt, Artificial Sequence
  Description of Artificial Sequence: Synthetic oligonucleotide
  Antisense strand to SEQ ID NO: 1315766
auccugaggaacagucuag

SEQ ID NO: 1315768 - RNA, 19 nt, Artificial Sequence
  Description of Artificial Sequence: Synthetic oligonucleotide
  Sense strand starting at position 1294 of SEQ ID NO: 1241997
uagacuguuccucaggauu

SEQ ID NO: 1315769 - RNA, 19 nt, Artificial Sequence
  Description of Artificial Sequence: Synthetic oligonucleotide
  Antisense strand to SEQ ID NO: 1315768
aauccugaggaacagucua

SEQ ID NO: 1315770 - RNA, 19 nt, Artificial Sequence
  Description of Artificial Sequence: Synthetic oligonucleotide
  Sense strand starting at position 1296 of SEQ ID NO: 1241997
gacuguuccucaggauuac

SEQ ID NO: 1315771 - RNA, 19 nt, Artificial Sequence
  Description of Artificial Sequence: Synthetic oligonucleotide
  Antisense strand to SEQ ID NO: 1315770
guaauccugaggaacaguc

SEQ ID NO: 1315772 - RNA, 19 nt, Artificial Sequence
  Description of Artificial Sequence: Synthetic oligonucleotide
  Sense strand starting at position 1297 of SEQ ID NO: 1241997
acuguuccucaggauuacu

SEQ ID NO: 1315773 - RNA, 19 nt, Artificial Sequence
  Description of Artificial Sequence: Synthetic oligonucleotide
  Antisense strand to SEQ ID NO: 1315772
aguaauccugaggaacagu

SEQ ID NO: 1315774 - RNA, 19 nt, Artificial Sequence
  Description of Artificial Sequence: Synthetic oligonucleotide
  Sense strand starting at position 1364 of SEQ ID NO: 1241997
gguccuucuccaggauauc

SEQ ID NO: 1315775 - RNA, 19 nt, Artificial Sequence
  Description of Artificial Sequence: Synthetic oligonucleotide
  Antisense strand to SEQ ID NO: 1315774
gauauccuggagaaggacc

SEQ ID NO: 1315776 - RNA, 19 nt, Artificial Sequence
  Description of Artificial Sequence: Synthetic oligonucleotide
  Sense strand starting at position 1390 of SEQ ID NO: 1241997
gggagcucucccuauccuu

SEQ ID NO: 1315777 - RNA, 19 nt, Artificial Sequence
  Description of Artificial Sequence: Synthetic oligonucleotide
  Antisense strand to SEQ ID NO: 1315776
aaggauagggagagcuccc

SEQ ID NO: 1315778 - RNA, 19 nt, Artificial Sequence
  Description of Artificial Sequence: Synthetic oligonucleotide
  Sense strand starting at position 2074 of SEQ ID NO: 1241997
gcuggucugagcuggaaga

SEQ ID NO: 1315779 - RNA, 19 nt, Artificial Sequence
  Description of Artificial Sequence: Synthetic oligonucleotide
  Antisense strand to SEQ ID NO: 1315778
ucuuccagcucagaccagc

SEQ ID NO: 1315780 - RNA, 19 nt, Artificial Sequence
  Description of Artificial Sequence: Synthetic oligonucleotide
  Sense strand starting at position 2084 of SEQ ID NO: 1241997
gcuggaagagguugugcaa

SEQ ID NO: 1315781 - RNA, 19 nt, Artificial Sequence
  Description of Artificial Sequence: Synthetic oligonucleotide
  Antisense strand to SEQ ID NO: 1315780
uugcacaaccucuuccagc

SEQ ID NO: 1315782 - RNA, 19 nt, Artificial Sequence
  Description of Artificial Sequence: Synthetic oligonucleotide
  Sense strand starting at position 2087 of SEQ ID NO: 1241997
ggaagagguugugcaaaua

SEQ ID NO: 1315783 - RNA, 19 nt, Artificial Sequence
  Description of Artificial Sequence: Synthetic oligonucleotide
  Antisense strand to SEQ ID NO: 1315782
uauuugcacaaccucuucc

SEQ ID NO: 1315784 - RNA, 19 nt, Artificial Sequence
  Description of Artificial Sequence: Synthetic oligonucleotide
  Sense strand starting at position 2400 of SEQ ID NO: 1241997
acaggcguucauugcagaa

SEQ ID NO: 1315785 - RNA, 19 nt, Artificial Sequence
  Description of Artificial Sequence: Synthetic oligonucleotide
  Antisense strand to SEQ ID NO: 1315784
uucugcaaugaacgccugu

SEQ ID NO: 1315786 - RNA, 19 nt, Artificial Sequence
  Description of Artificial Sequence: Synthetic oligonucleotide
  Sense strand starting at position 2551 of SEQ ID NO: 1241997
ggugaaacauuggagacau

SEQ ID NO: 1315787 - RNA, 19 nt, Artificial Sequence
  Description of Artificial Sequence: Synthetic oligonucleotide
  Antisense strand to SEQ ID NO: 1315786
augucuccaauguuucacc

SEQ ID NO: 1315788 - RNA, 19 nt, Artificial Sequence
  Description of Artificial Sequence: Synthetic oligonucleotide
  Sense strand starting at position 2711 of SEQ ID NO: 1241997
gccaauuguccuggaaaga

SEQ ID NO: 1315789 - RNA, 19 nt, Artificial Sequence
  Description of Artificial Sequence: Synthetic oligonucleotide
  Antisense strand to SEQ ID NO: 1315788
ucuuuccaggacaauuggc

SEQ ID NO: 1315790 - RNA, 19 nt, Artificial Sequence
  Description of Artificial Sequence: Synthetic oligonucleotide
  Sense strand starting at position 2726 of SEQ ID NO: 1241997
aagaguggcguuuggauga

SEQ ID NO: 1315791 - RNA, 19 nt, Artificial Sequence
  Description of Artificial Sequence: Synthetic oligonucleotide
  Antisense strand to SEQ ID NO: 1315790
ucauccaaacgccacucuu

SEQ ID NO: 1315792 - RNA, 19 nt, Artificial Sequence
  Description of Artificial Sequence: Synthetic oligonucleotide
  Sense strand starting at position 2739 of SEQ ID NO: 1241997
ggaugaagguccucgguga

SEQ ID NO: 1315793 - RNA, 19 nt, Artificial Sequence
  Description of Artificial Sequence: Synthetic oligonucleotide
  Antisense strand to SEQ ID NO: 1315792
ucaccgaggaccuucaucc

SEQ ID NO: 1315794 - RNA, 19 nt, Artificial Sequence
  Description of Artificial Sequence: Synthetic oligonucleotide
  Sense strand starting at position 2740 of SEQ ID NO: 1241997
gaugaagguccucggugau

SEQ ID NO: 1315795 - RNA, 19 nt, Artificial Sequence
  Description of Artificial Sequence: Synthetic oligonucleotide
  Antisense strand to SEQ ID NO: 1315794
aucaccgaggaccuucauc

SEQ ID NO: 1315796 - RNA, 19 nt, Artificial Sequence
  Description of Artificial Sequence: Synthetic oligonucleotide
  Sense strand starting at position 2766 of SEQ ID NO: 1241997
acagcuaccuuccagaagu

SEQ ID NO: 1315797 - RNA, 19 nt, Artificial Sequence
  Description of Artificial Sequence: Synthetic oligonucleotide
  Antisense strand to SEQ ID NO: 1315796
acuucuggaagguagcugu

SEQ ID NO: 1315798 - RNA, 19 nt, Artificial Sequence
  Description of Artificial Sequence: Synthetic oligonucleotide
  Sense strand starting at position 2806 of SEQ ID NO: 1241997
uccaguacuagcuguagga

SEQ ID NO: 1315799 - RNA, 19 nt, Artificial Sequence
  Description of Artificial Sequence: Synthetic oligonucleotide
  Antisense strand to SEQ ID NO: 1315798
uccuacagcuaguacugga

SEQ ID NO: 1315800 - RNA, 19 nt, Artificial Sequence
  Description of Artificial Sequence: Synthetic oligonucleotide
  Sense strand starting at position 2911 of SEQ ID NO: 1241997
uggcaugcuccgugcaaga

SEQ ID NO: 1315801 - RNA, 19 nt, Artificial Sequence
  Description of Artificial Sequence: Synthetic oligonucleotide
  Antisense strand to SEQ ID NO: 1315800
ucuugcacggagcaugcca

SEQ ID NO: 1315802 - RNA, 19 nt, Artificial Sequence
  Description of Artificial Sequence: Synthetic oligonucleotide
  Sense strand starting at position 2950 of SEQ ID NO: 1241997
gggagcucuucugacugga

SEQ ID NO: 1315803 - RNA, 19 nt, Artificial Sequence
  Description of Artificial Sequence: Synthetic oligonucleotide
  Antisense strand to SEQ ID NO: 1315802
uccagucagaagagcuccc

SEQ ID NO: 1315804 - RNA, 19 nt, Artificial Sequence
  Description of Artificial Sequence: Synthetic oligonucleotide
  Sense strand starting at position 2974 of SEQ ID NO: 1241997
ggguccaucgggcaaguau

SEQ ID NO: 1315805 - RNA, 19 nt, Artificial Sequence
  Description of Artificial Sequence: Synthetic oligonucleotide
  Antisense strand to SEQ ID NO: 1315804
auacuugcccgauggaccc

SEQ ID NO: 1315806 - RNA, 19 nt, Artificial Sequence
  Description of Artificial Sequence: Synthetic oligonucleotide
  Sense strand starting at position 3287 of SEQ ID NO: 1241997
gcgcuaugacggcugguuu

SEQ ID NO: 1315807 - RNA, 19 nt, Artificial Sequence
  Description of Artificial Sequence: Synthetic oligonucleotide
  Antisense strand to SEQ ID NO: 1315806
aaaccagccgucauagcgc

SEQ ID NO: 1315808 - RNA, 19 nt, Artificial Sequence
  Description of Artificial Sequence: Synthetic oligonucleotide
  Sense strand starting at position 3288 of SEQ ID NO: 1241997
cgcuaugacggcugguuua

SEQ ID NO: 1315809 - RNA, 19 nt, Artificial Sequence
  Description of Artificial Sequence: Synthetic oligonucleotide
  Antisense strand to SEQ ID NO: 1315808
uaaaccagccgucauagcg

SEQ ID NO: 1315810 - RNA, 19 nt, Artificial Sequence
  Description of Artificial Sequence: Synthetic oligonucleotide
  Sense strand starting at position 3499 of SEQ ID NO: 1241997
aagguucugucagugaagu

SEQ ID NO: 1315811 - RNA, 19 nt, Artificial Sequence
  Description of Artificial Sequence: Synthetic oligonucleotide
  Antisense strand to SEQ ID NO: 1315810
acuucacugacagaaccuu

SEQ ID NO: 1315812 - RNA, 19 nt, Artificial Sequence
  Description of Artificial Sequence: Synthetic oligonucleotide
  Sense strand starting at position 3500 of SEQ ID NO: 1241997
agguucugucagugaagug

SEQ ID NO: 1315813 - RNA, 19 nt, Artificial Sequence
  Description of Artificial Sequence: Synthetic oligonucleotide
  Antisense strand to SEQ ID NO: 1315812
cacuucacugacagaaccu

SEQ ID NO: 1315814 - RNA, 19 nt, Artificial Sequence
  Description of Artificial Sequence: Synthetic oligonucleotide
  Sense strand starting at position 3948 of SEQ ID NO: 1241997
agauauuugcucuguaucu

SEQ ID NO: 1315815 - RNA, 19 nt, Artificial Sequence
  Description of Artificial Sequence: Synthetic oligonucleotide
  Antisense strand to SEQ ID NO: 1315814
agauacagagcaaauaucu

SEQ ID NO: 1315816 - RNA, 19 nt, Artificial Sequence
  Description of Artificial Sequence: Synthetic oligonucleotide
  Sense strand starting at position 88 of SEQ ID NO: 1241998
aaauuaagagacuguaguu

SEQ ID NO: 1315817 - RNA, 19 nt, Artificial Sequence
  Description of Artificial Sequence: Synthetic oligonucleotide
  Antisense strand to SEQ ID NO: 1315816
aacuacagucucuuaauuu

SEQ ID NO: 1315818 - RNA, 19 nt, Artificial Sequence
  Description of Artificial Sequence: Synthetic oligonucleotide
  Sense strand starting at position 182 of SEQ ID NO: 1241998
uucuccugugcuuagacua

SEQ ID NO: 1315819 - RNA, 19 nt, Artificial Sequence
  Description of Artificial Sequence: Synthetic oligonucleotide
  Antisense strand to SEQ ID NO: 1315818
uagucuaagcacaggagaa

SEQ ID NO: 1315820 - RNA, 19 nt, Artificial Sequence
  Description of Artificial Sequence: Synthetic oligonucleotide
  Sense strand starting at position 187 of SEQ ID NO: 1241998
cugugcuuagacuaauagu

SEQ ID NO: 1315821 - RNA, 19 nt, Artificial Sequence
  Description of Artificial Sequence: Synthetic oligonucleotide
  Antisense strand to SEQ ID NO: 1315820
acuauuagucuaagcacag

SEQ ID NO: 1315822 - RNA, 19 nt, Artificial Sequence
  Description of Artificial Sequence: Synthetic oligonucleotide
  Sense strand starting at position 210 of SEQ ID NO: 1241998
auguuugaauuaucugaga

SEQ ID NO: 1315823 - RNA, 19 nt, Artificial Sequence
  Description of Artificial Sequence: Synthetic oligonucleotide
  Antisense strand to SEQ ID NO: 1315822
ucucagauaauucaaacau

SEQ ID NO: 1315824 - RNA, 19 nt, Artificial Sequence
  Description of Artificial Sequence: Synthetic oligonucleotide
  Sense strand starting at position 438 of SEQ ID NO: 1241998
aguaacacuuaucuaguua

SEQ ID NO: 1315825 - RNA, 19 nt, Artificial Sequence
  Description of Artificial Sequence: Synthetic oligonucleotide
  Antisense strand to SEQ ID NO: 1315824
uaacuagauaaguguuacu

SEQ ID NO: 1315826 - RNA, 19 nt, Artificial Sequence
  Description of Artificial Sequence: Synthetic oligonucleotide
  Sense strand starting at position 442 of SEQ ID NO: 1241998
acacuuaucuaguuaagga

SEQ ID NO: 1315827 - RNA, 19 nt, Artificial Sequence
  Description of Artificial Sequence: Synthetic oligonucleotide
  Antisense strand to SEQ ID NO: 1315826
uccuuaacuagauaagugu

SEQ ID NO: 1315828 - RNA, 19 nt, Artificial Sequence
  Description of Artificial Sequence: Synthetic oligonucleotide
  Sense strand starting at position 512 of SEQ ID NO: 1241998
aaacgugcuguagagauga

SEQ ID NO: 1315829 - RNA, 19 nt, Artificial Sequence
  Description of Artificial Sequence: Synthetic oligonucleotide
  Antisense strand to SEQ ID NO: 1315828
ucaucucuacagcacguuu

SEQ ID NO: 1315830 - RNA, 19 nt, Artificial Sequence
  Description of Artificial Sequence: Synthetic oligonucleotide
  Sense strand starting at position 514 of SEQ ID NO: 1241998
acgugcuguagagaugaaa

SEQ ID NO: 1315831 - RNA, 19 nt, Artificial Sequence
  Description of Artificial Sequence: Synthetic oligonucleotide
  Antisense strand to SEQ ID NO: 1315830
uuucaucucuacagcacgu

SEQ ID NO: 1315832 - RNA, 19 nt, Artificial Sequence
  Description of Artificial Sequence: Synthetic oligonucleotide
  Sense strand starting at position 522 of SEQ ID NO: 1241998
uagagaugaaaguguggua

SEQ ID NO: 1315833 - RNA, 19 nt, Artificial Sequence
  Description of Artificial Sequence: Synthetic oligonucleotide
  Antisense strand to SEQ ID NO: 1315832
uaccacacuuucaucucua

SEQ ID NO: 1315834 - RNA, 19 nt, Artificial Sequence
  Description of Artificial Sequence: Synthetic oligonucleotide
  Sense strand starting at position 588 of SEQ ID NO: 1241998
cgcccugggccggaugaau

SEQ ID NO: 1315835 - RNA, 19 nt, Artificial Sequence
  Description of Artificial Sequence: Synthetic oligonucleotide
  Antisense strand to SEQ ID NO: 1315834
auucauccggcccagggcg

SEQ ID NO: 1315836 - RNA, 19 nt, Artificial Sequence
  Description of Artificial Sequence: Synthetic oligonucleotide
  Sense strand starting at position 596 of SEQ ID NO: 1241998
gccggaugaauguauagaa

SEQ ID NO: 1315837 - RNA, 19 nt, Artificial Sequence
  Description of Artificial Sequence: Synthetic oligonucleotide
  Antisense strand to SEQ ID NO: 1315836
uucuauacauucauccggc

SEQ ID NO: 1315838 - RNA, 19 nt, Artificial Sequence
  Description of Artificial Sequence: Synthetic oligonucleotide
  Sense strand starting at position 790 of SEQ ID NO: 1241998
aaaguaacgccuugcuaga

SEQ ID NO: 1315839 - RNA, 19 nt, Artificial Sequence
  Description of Artificial Sequence: Synthetic oligonucleotide
  Antisense strand to SEQ ID NO: 1315838
ucuagcaaggcguuacuuu

SEQ ID NO: 1315840 - RNA, 19 nt, Artificial Sequence
  Description of Artificial Sequence: Synthetic oligonucleotide
  Sense strand starting at position 824 of SEQ ID NO: 1241998
uuacuuauucugcagucuu

SEQ ID NO: 1315841 - RNA, 19 nt, Artificial Sequence
  Description of Artificial Sequence: Synthetic oligonucleotide
  Antisense strand to SEQ ID NO: 1315840
aagacugcagaauaaguaa

SEQ ID NO: 1315842 - RNA, 19 nt, Artificial Sequence
  Description of Artificial Sequence: Synthetic oligonucleotide
  Sense strand starting at position 835 of SEQ ID NO: 1241998
gcagucuuugcccaaaucu

SEQ ID NO: 1315843 - RNA, 19 nt, Artificial Sequence
  Description of Artificial Sequence: Synthetic oligonucleotide
  Antisense strand to SEQ ID NO: 1315842
agauuugggcaaagacugc

SEQ ID NO: 1315844 - RNA, 19 nt, Artificial Sequence
  Description of Artificial Sequence: Synthetic oligonucleotide
  Sense strand starting at position 1372 of SEQ ID NO: 1241998
gcagguuugggaugggaaa

SEQ ID NO: 1315845 - RNA, 19 nt, Artificial Sequence
  Description of Artificial Sequence: Synthetic oligonucleotide
  Antisense strand to SEQ ID NO: 1315844
uuucccaucccaaaccugc

SEQ ID NO: 1315846 - RNA, 19 nt, Artificial Sequence
  Description of Artificial Sequence: Synthetic oligonucleotide
  Sense strand starting at position 2445 of SEQ ID NO: 1241998
cuaucacagguuugggaua

SEQ ID NO: 1315847 - RNA, 19 nt, Artificial Sequence
  Description of Artificial Sequence: Synthetic oligonucleotide
  Antisense strand to SEQ ID NO: 1315846
uaucccaaaccugugauag

SEQ ID NO: 1315848 - RNA, 19 nt, Artificial Sequence
  Description of Artificial Sequence: Synthetic oligonucleotide
  Sense strand starting at position 2551 of SEQ ID NO: 1241998
agcaguaacuuucuagaua

SEQ ID NO: 1315849 - RNA, 19 nt, Artificial Sequence
  Description of Artificial Sequence: Synthetic oligonucleotide
  Antisense strand to SEQ ID NO: 1315848
uaucuagaaaguuacugcu

SEQ ID NO: 1315850 - RNA, 19 nt, Artificial Sequence
  Description of Artificial Sequence: Synthetic oligonucleotide
  Sense strand starting at position 2554 of SEQ ID NO: 1241998
aguaacuuucuagauaguu

SEQ ID NO: 1315851 - RNA, 19 nt, Artificial Sequence
  Description of Artificial Sequence: Synthetic oligonucleotide
  Antisense strand to SEQ ID NO: 1315850
aacuaucuagaaaguuacu

SEQ ID NO: 1315852 - RNA, 19 nt, Artificial Sequence
  Description of Artificial Sequence: Synthetic oligonucleotide
  Sense strand starting at position 2559 of SEQ ID NO: 1241998
cuuucuagauaguuguuaa

SEQ ID NO: 1315853 - RNA, 19 nt, Artificial Sequence
  Description of Artificial Sequence: Synthetic oligonucleotide
  Antisense strand to SEQ ID NO: 1315852
uuaacaacuaucuagaaag

SEQ ID NO: 1315854 - RNA, 19 nt, Artificial Sequence
  Description of Artificial Sequence: Synthetic oligonucleotide
  Sense strand starting at position 2760 of SEQ ID NO: 1241998
guucgucuucguaguugga

SEQ ID NO: 1315855 - RNA, 19 nt, Artificial Sequence
  Description of Artificial Sequence: Synthetic oligonucleotide
  Antisense strand to SEQ ID NO: 1315854
uccaacuacgaagacgaac

SEQ ID NO: 1315856 - RNA, 19 nt, Artificial Sequence
  Description of Artificial Sequence: Synthetic oligonucleotide
  Sense strand starting at position 2774 of SEQ ID NO: 1241998
uuggaauuccuuugcauga

SEQ ID NO: 1315857 - RNA, 19 nt, Artificial Sequence
  Description of Artificial Sequence: Synthetic oligonucleotide
  Antisense strand to SEQ ID NO: 1315856
ucaugcaaaggaauuccaa

SEQ ID NO: 1315858 - RNA, 19 nt, Artificial Sequence
  Description of Artificial Sequence: Synthetic oligonucleotide
  Sense strand starting at position 2784 of SEQ ID NO: 1241998
uuugcaugaggcuauggaa

SEQ ID NO: 1315859 - RNA, 19 nt, Artificial Sequence
  Description of Artificial Sequence: Synthetic oligonucleotide
  Antisense strand to SEQ ID NO: 1315858
uuccauagccucaugcaaa

SEQ ID NO: 1315860 - RNA, 19 nt, Artificial Sequence
  Description of Artificial Sequence: Synthetic oligonucleotide
  Sense strand starting at position 2809 of SEQ ID NO: 1241998
cuaccuucucuggacguua

SEQ ID NO: 1315861 - RNA, 19 nt, Artificial Sequence
  Description of Artificial Sequence: Synthetic oligonucleotide
  Antisense strand to SEQ ID NO: 1315860
uaacguccagagaagguag

SEQ ID NO: 1315862 - RNA, 19 nt, Artificial Sequence
  Description of Artificial Sequence: Synthetic oligonucleotide
  Sense strand starting at position 2814 of SEQ ID NO: 1241998
uucucuggacguuaacuau

SEQ ID NO: 1315863 - RNA, 19 nt, Artificial Sequence
  Description of Artificial Sequence: Synthetic oligonucleotide
  Antisense strand to SEQ ID NO: 1315862
auaguuaacguccagagaa

SEQ ID NO: 1315864 - RNA, 19 nt, Artificial Sequence
  Description of Artificial Sequence: Synthetic oligonucleotide
  Sense strand starting at position 3147 of SEQ ID NO: 1241998
agucguuagccauauacuu

SEQ ID NO: 1315865 - RNA, 19 nt, Artificial Sequence
  Description of Artificial Sequence: Synthetic oligonucleotide
  Antisense strand to SEQ ID NO: 1315864
aaguauauggcuaacgacu

SEQ ID NO: 1315866 - RNA, 19 nt, Artificial Sequence
  Description of Artificial Sequence: Synthetic oligonucleotide
  Sense strand starting at position 3272 of SEQ ID NO: 1241998
uuacuuguuuggcuuauua

SEQ ID NO: 1315867 - RNA, 19 nt, Artificial Sequence
  Description of Artificial Sequence: Synthetic oligonucleotide
  Antisense strand to SEQ ID NO: 1315866
uaauaagccaaacaaguaa

SEQ ID NO: 1315868 - RNA, 19 nt, Artificial Sequence
  Description of Artificial Sequence: Synthetic oligonucleotide
  Sense strand starting at position 3274 of SEQ ID NO: 1241998
acuuguuuggcuuauuaca

SEQ ID NO: 1315869 - RNA, 19 nt, Artificial Sequence
  Description of Artificial Sequence: Synthetic oligonucleotide
  Antisense strand to SEQ ID NO: 1315868
uguaauaagccaaacaagu

SEQ ID NO: 1315870 - RNA, 19 nt, Artificial Sequence
  Description of Artificial Sequence: Synthetic oligonucleotide
  Sense strand starting at position 3276 of SEQ ID NO: 1241998
uuguuuggcuuauuacaau

SEQ ID NO: 1315871 - RNA, 19 nt, Artificial Sequence
  Description of Artificial Sequence: Synthetic oligonucleotide
  Antisense strand to SEQ ID NO: 1315870
auuguaauaagccaaacaa

SEQ ID NO: 1315872 - RNA, 19 nt, Artificial Sequence
  Description of Artificial Sequence: Synthetic oligonucleotide
  Sense strand starting at position 3327 of SEQ ID NO: 1241998
uguuguuaaucuguauaca

SEQ ID NO: 1315873 - RNA, 19 nt, Artificial Sequence
  Description of Artificial Sequence: Synthetic oligonucleotide
  Antisense strand to SEQ ID NO: 1315872
uguauacagauuaacaaca

SEQ ID NO: 1315874 - RNA, 19 nt, Artificial Sequence
  Description of Artificial Sequence: Synthetic oligonucleotide
  Sense strand starting at position 3328 of SEQ ID NO: 1241998
guuguuaaucuguauacau

SEQ ID NO: 1315875 - RNA, 19 nt, Artificial Sequence
  Description of Artificial Sequence: Synthetic oligonucleotide
  Antisense strand to SEQ ID NO: 1315874
auguauacagauuaacaac

SEQ ID NO: 1315876 - RNA, 19 nt, Artificial Sequence
  Description of Artificial Sequence: Synthetic oligonucleotide
  Sense strand starting at position 3401 of SEQ ID NO: 1241998
gccauaaucuaacuggcaa

SEQ ID NO: 1315877 - RNA, 19 nt, Artificial Sequence
  Description of Artificial Sequence: Synthetic oligonucleotide
  Antisense strand to SEQ ID NO: 1315876
uugccaguuagauuauggc

SEQ ID NO: 1315878 - RNA, 19 nt, Artificial Sequence
  Description of Artificial Sequence: Synthetic oligonucleotide
  Sense strand starting at position 3426 of SEQ ID NO: 1241998
auaggauucugagccagua

SEQ ID NO: 1315879 - RNA, 19 nt, Artificial Sequence
  Description of Artificial Sequence: Synthetic oligonucleotide
  Antisense strand to SEQ ID NO: 1315878
uacuggcucagaauccuau

SEQ ID NO: 1315880 - RNA, 19 nt, Artificial Sequence
  Description of Artificial Sequence: Synthetic oligonucleotide
  Sense strand starting at position 3452 of SEQ ID NO: 1241998
aauagaacguucuuuauga

SEQ ID NO: 1315881 - RNA, 19 nt, Artificial Sequence
  Description of Artificial Sequence: Synthetic oligonucleotide
  Antisense strand to SEQ ID NO: 1315880
ucauaaagaacguucuauu

SEQ ID NO: 1315882 - RNA, 19 nt, Artificial Sequence
  Description of Artificial Sequence: Synthetic oligonucleotide
  Sense strand starting at position 3453 of SEQ ID NO: 1241998
auagaacguucuuuaugac

SEQ ID NO: 1315883 - RNA, 19 nt, Artificial Sequence
  Description of Artificial Sequence: Synthetic oligonucleotide
  Antisense strand to SEQ ID NO: 1315882
gucauaaagaacguucuau

SEQ ID NO: 1315884 - RNA, 19 nt, Artificial Sequence
  Description of Artificial Sequence: Synthetic oligonucleotide
  Sense strand starting at position 3454 of SEQ ID NO: 1241998
uagaacguucuuuaugaca

SEQ ID NO: 1315885 - RNA, 19 nt, Artificial Sequence
  Description of Artificial Sequence: Synthetic oligonucleotide
  Antisense strand to SEQ ID NO: 1315884
ugucauaaagaacguucua

SEQ ID NO: 1315886 - RNA, 19 nt, Artificial Sequence
  Description of Artificial Sequence: Synthetic oligonucleotide
  Sense strand starting at position 3857 of SEQ ID NO: 1241998
ucuuuaucagacuauaguu

SEQ ID NO: 1315887 - RNA, 19 nt, Artificial Sequence
  Description of Artificial Sequence: Synthetic oligonucleotide
  Antisense strand to SEQ ID NO: 1315886
aacuauagucugauaaaga

SEQ ID NO: 1315888 - RNA, 19 nt, Artificial Sequence
  Description of Artificial Sequence: Synthetic oligonucleotide
  Sense strand starting at position 3865 of SEQ ID NO: 1241998
agacuauaguuauccuauc

SEQ ID NO: 1315889 - RNA, 19 nt, Artificial Sequence
  Description of Artificial Sequence: Synthetic oligonucleotide
  Antisense strand to SEQ ID NO: 1315888
gauaggauaacuauagucu

SEQ ID NO: 1315890 - RNA, 19 nt, Artificial Sequence
  Description of Artificial Sequence: Synthetic oligonucleotide
  Sense strand starting at position 3881 of SEQ ID NO: 1241998
aucagucaugcugauuaau

SEQ ID NO: 1315891 - RNA, 19 nt, Artificial Sequence
  Description of Artificial Sequence: Synthetic oligonucleotide
  Antisense strand to SEQ ID NO: 1315890
auuaaucagcaugacugau

SEQ ID NO: 1315892 - RNA, 19 nt, Artificial Sequence
  Description of Artificial Sequence: Synthetic oligonucleotide
  Sense strand starting at position 3900 of SEQ ID NO: 1241998
ucaauuaccuaagucuagu

SEQ ID NO: 1315893 - RNA, 19 nt, Artificial Sequence
  Description of Artificial Sequence: Synthetic oligonucleotide
  Antisense strand to SEQ ID NO: 1315892
acuagacuuagguaauuga

SEQ ID NO: 1315894 - RNA, 19 nt, Artificial Sequence
  Description of Artificial Sequence: Synthetic oligonucleotide
  Sense strand starting at position 3939 of SEQ ID NO: 1241998
aaugcaagucaguacuuga

SEQ ID NO: 1315895 - RNA, 19 nt, Artificial Sequence
  Description of Artificial Sequence: Synthetic oligonucleotide
  Antisense strand to SEQ ID NO: 1315894
ucaaguacugacuugcauu

SEQ ID NO: 1315896 - RNA, 19 nt, Artificial Sequence
  Description of Artificial Sequence: Synthetic oligonucleotide
  Sense strand starting at position 11 of SEQ ID NO: 1241999
agaugucaacauuguaaau

SEQ ID NO: 1315897 - RNA, 19 nt, Artificial Sequence
  Description of Artificial Sequence: Synthetic oligonucleotide
  Antisense strand to SEQ ID NO: 1315896
auuuacaauguugacaucu

SEQ ID NO: 1315898 - RNA, 19 nt, Artificial Sequence
  Description of Artificial Sequence: Synthetic oligonucleotide
  Sense strand starting at position 66 of SEQ ID NO: 1241999
uacuuaucagcgugaaagg

SEQ ID NO: 1315899 - RNA, 19 nt, Artificial Sequence
  Description of Artificial Sequence: Synthetic oligonucleotide
  Antisense strand to SEQ ID NO: 1315898
ccuuucacgcugauaagua

SEQ ID NO: 1315900 - RNA, 19 nt, Artificial Sequence
  Description of Artificial Sequence: Synthetic oligonucleotide
  Sense strand starting at position 104 of SEQ ID NO: 1241999
aaagguggaugcuuuacaa

SEQ ID NO: 1315901 - RNA, 19 nt, Artificial Sequence
  Description of Artificial Sequence: Synthetic oligonucleotide
  Antisense strand to SEQ ID NO: 1315900
uuguaaagcauccaccuuu

SEQ ID NO: 1315902 - RNA, 19 nt, Artificial Sequence
  Description of Artificial Sequence: Synthetic oligonucleotide
  Sense strand starting at position 229 of SEQ ID NO: 1241999
aguucuaauugguuuacau

SEQ ID NO: 1315903 - RNA, 19 nt, Artificial Sequence
  Description of Artificial Sequence: Synthetic oligonucleotide
  Antisense strand to SEQ ID NO: 1315902
auguaaaccaauuagaacu

SEQ ID NO: 1315904 - RNA, 19 nt, Artificial Sequence
  Description of Artificial Sequence: Synthetic oligonucleotide
  Sense strand starting at position 267 of SEQ ID NO: 1241999
ucacaaugaucugugugau

SEQ ID NO: 1315905 - RNA, 19 nt, Artificial Sequence
  Description of Artificial Sequence: Synthetic oligonucleotide
  Antisense strand to SEQ ID NO: 1315904
aucacacagaucauuguga

SEQ ID NO: 1315906 - RNA, 19 nt, Artificial Sequence
  Description of Artificial Sequence: Synthetic oligonucleotide
  Sense strand starting at position 268 of SEQ ID NO: 1241999
cacaaugaucugugugauu

SEQ ID NO: 1315907 - RNA, 19 nt, Artificial Sequence
  Description of Artificial Sequence: Synthetic oligonucleotide
  Antisense strand to SEQ ID NO: 1315906
aaucacacagaucauugug

SEQ ID NO: 1315908 - RNA, 19 nt, Artificial Sequence
  Description of Artificial Sequence: Synthetic oligonucleotide
  Sense strand starting at position 270 of SEQ ID NO: 1241999
caaugaucugugugauuag

SEQ ID NO: 1315909 - RNA, 19 nt, Artificial Sequence
  Description of Artificial Sequence: Synthetic oligonucleotide
  Antisense strand to SEQ ID NO: 1315908
cuaaucacacagaucauug

SEQ ID NO: 1315910 - RNA, 19 nt, Artificial Sequence
  Description of Artificial Sequence: Synthetic oligonucleotide
  Sense strand starting at position 273 of SEQ ID NO: 1241999
ugaucugugugauuaggga

SEQ ID NO: 1315911 - RNA, 19 nt, Artificial Sequence
  Description of Artificial Sequence: Synthetic oligonucleotide
  Antisense strand to SEQ ID NO: 1315910
ucccuaaucacacagauca

SEQ ID NO: 1315912 - RNA, 19 nt, Artificial Sequence
  Description of Artificial Sequence: Synthetic oligonucleotide
  Sense strand starting at position 336 of SEQ ID NO: 1241999
gauaaagaacuguguugua

SEQ ID NO: 1315913 - RNA, 19 nt, Artificial Sequence
  Description of Artificial Sequence: Synthetic oligonucleotide
  Antisense strand to SEQ ID NO: 1315912
uacaacacaguucuuuauc

SEQ ID NO: 1315914 - RNA, 19 nt, Artificial Sequence
  Description of Artificial Sequence: Synthetic oligonucleotide
  Sense strand starting at position 381 of SEQ ID NO: 1241999
ccaagcuuaggcuaugaau

SEQ ID NO: 1315915 - RNA, 19 nt, Artificial Sequence
  Description of Artificial Sequence: Synthetic oligonucleotide
  Antisense strand to SEQ ID NO: 1315914
auucauagccuaagcuugg

SEQ ID NO: 1315916 - RNA, 19 nt, Artificial Sequence
  Description of Artificial Sequence: Synthetic oligonucleotide
  Sense strand starting at position 445 of SEQ ID NO: 1241999
gauggaccuugcuuaggaa

SEQ ID NO: 1315917 - RNA, 19 nt, Artificial Sequence
  Description of Artificial Sequence: Synthetic oligonucleotide
  Antisense strand to SEQ ID NO: 1315916
uuccuaagcaagguccauc

SEQ ID NO: 1315918 - RNA, 19 nt, Artificial Sequence
  Description of Artificial Sequence: Synthetic oligonucleotide
  Sense strand starting at position 494 of SEQ ID NO: 1241999
gcugcuacucuugauauua

SEQ ID NO: 1315919 - RNA, 19 nt, Artificial Sequence
  Description of Artificial Sequence: Synthetic oligonucleotide
  Antisense strand to SEQ ID NO: 1315918
uaauaucaagaguagcagc

SEQ ID NO: 1315920 - RNA, 19 nt, Artificial Sequence
  Description of Artificial Sequence: Synthetic oligonucleotide
  Sense strand starting at position 517 of SEQ ID NO: 1241999
ggcccucuccuggguagaa

SEQ ID NO: 1315921 - RNA, 19 nt, Artificial Sequence
  Description of Artificial Sequence: Synthetic oligonucleotide
  Antisense strand to SEQ ID NO: 1315920
uucuacccaggagagggcc

SEQ ID NO: 1315922 - RNA, 19 nt, Artificial Sequence
  Description of Artificial Sequence: Synthetic oligonucleotide
  Sense strand starting at position 518 of SEQ ID NO: 1241999
gcccucuccuggguagaaa

SEQ ID NO: 1315923 - RNA, 19 nt, Artificial Sequence
  Description of Artificial Sequence: Synthetic oligonucleotide
  Antisense strand to SEQ ID NO: 1315922
uuucuacccaggagagggc

SEQ ID NO: 1315924 - RNA, 19 nt, Artificial Sequence
  Description of Artificial Sequence: Synthetic oligonucleotide
  Sense strand starting at position 519 of SEQ ID NO: 1241999
cccucuccuggguagaaau

SEQ ID NO: 1315925 - RNA, 19 nt, Artificial Sequence
  Description of Artificial Sequence: Synthetic oligonucleotide
  Antisense strand to SEQ ID NO: 1315924
auuucuacccaggagaggg

SEQ ID NO: 1315926 - RNA, 19 nt, Artificial Sequence
  Description of Artificial Sequence: Synthetic oligonucleotide
  Sense strand starting at position 565 of SEQ ID NO: 1241999
ggaaguuuacuuuggagac

SEQ ID NO: 1315927 - RNA, 19 nt, Artificial Sequence
  Description of Artificial Sequence: Synthetic oligonucleotide
  Antisense strand to SEQ ID NO: 1315926
gucuccaaaguaaacuucc

SEQ ID NO: 1315928 - RNA, 19 nt, Artificial Sequence
  Description of Artificial Sequence: Synthetic oligonucleotide
  Sense strand starting at position 698 of SEQ ID NO: 1241999
gaaagucaccuguguuuau

SEQ ID NO: 1315929 - RNA, 19 nt, Artificial Sequence
  Description of Artificial Sequence: Synthetic oligonucleotide
  Antisense strand to SEQ ID NO: 1315928
auaaacacaggugacuuuc

SEQ ID NO: 1315930 - RNA, 19 nt, Artificial Sequence
  Description of Artificial Sequence: Synthetic oligonucleotide
  Sense strand starting at position 716 of SEQ ID NO: 1241999
uuaggagucuacuuaaggu

SEQ ID NO: 1315931 - RNA, 19 nt, Artificial Sequence
  Description of Artificial Sequence: Synthetic oligonucleotide
  Antisense strand to SEQ ID NO: 1315930
accuuaaguagacuccuaa

SEQ ID NO: 1315932 - RNA, 19 nt, Artificial Sequence
  Description of Artificial Sequence: Synthetic oligonucleotide
  Sense strand starting at position 832 of SEQ ID NO: 1241999
aaauuaagagacuguaguu

SEQ ID NO: 1315933 - RNA, 19 nt, Artificial Sequence
  Description of Artificial Sequence: Synthetic oligonucleotide
  Antisense strand to SEQ ID NO: 1315932
aacuacagucucuuaauuu

SEQ ID NO: 1315934 - RNA, 19 nt, Artificial Sequence
  Description of Artificial Sequence: Synthetic oligonucleotide
  Sense strand starting at position 926 of SEQ ID NO: 1241999
uucuccugugcuuagacua

SEQ ID NO: 1315935 - RNA, 19 nt, Artificial Sequence
  Description of Artificial Sequence: Synthetic oligonucleotide
  Antisense strand to SEQ ID NO: 1315934
uagucuaagcacaggagaa

SEQ ID NO: 1315936 - RNA, 19 nt, Artificial Sequence
  Description of Artificial Sequence: Synthetic oligonucleotide
  Sense strand starting at position 931 of SEQ ID NO: 1241999
cugugcuuagacuaauagu

SEQ ID NO: 1315937 - RNA, 19 nt, Artificial Sequence
  Description of Artificial Sequence: Synthetic oligonucleotide
  Antisense strand to SEQ ID NO: 1315936
acuauuagucuaagcacag

SEQ ID NO: 1315938 - RNA, 19 nt, Artificial Sequence
  Description of Artificial Sequence: Synthetic oligonucleotide
  Sense strand starting at position 954 of SEQ ID NO: 1241999
auguuugaauuaucugaga

SEQ ID NO: 1315939 - RNA, 19 nt, Artificial Sequence
  Description of Artificial Sequence: Synthetic oligonucleotide
  Antisense strand to SEQ ID NO: 1315938
ucucagauaauucaaacau

SEQ ID NO: 1315940 - RNA, 19 nt, Artificial Sequence
  Description of Artificial Sequence: Synthetic oligonucleotide
  Sense strand starting at position 1182 of SEQ ID NO: 1241999
aguaacacuuaucuaguua

SEQ ID NO: 1315941 - RNA, 19 nt, Artificial Sequence
  Description of Artificial Sequence: Synthetic oligonucleotide
  Antisense strand to SEQ ID NO: 1315940
uaacuagauaaguguuacu

SEQ ID NO: 1315942 - RNA, 19 nt, Artificial Sequence
  Description of Artificial Sequence: Synthetic oligonucleotide
  Sense strand starting at position 1186 of SEQ ID NO: 1241999
acacuuaucuaguuaagga

SEQ ID NO: 1315943 - RNA, 19 nt, Artificial Sequence
  Description of Artificial Sequence: Synthetic oligonucleotide
  Antisense strand to SEQ ID NO: 1315942
uccuuaacuagauaagugu

SEQ ID NO: 1315944 - RNA, 19 nt, Artificial Sequence
  Description of Artificial Sequence: Synthetic oligonucleotide
  Sense strand starting at position 1256 of SEQ ID NO: 1241999
aaacgugcuguagagauga

SEQ ID NO: 1315945 - RNA, 19 nt, Artificial Sequence
  Description of Artificial Sequence: Synthetic oligonucleotide
  Antisense strand to SEQ ID NO: 1315944
ucaucucuacagcacguuu

SEQ ID NO: 1315946 - RNA, 19 nt, Artificial Sequence
  Description of Artificial Sequence: Synthetic oligonucleotide
  Sense strand starting at position 1258 of SEQ ID NO: 1241999
acgugcuguagagaugaaa

SEQ ID NO: 1315947 - RNA, 19 nt, Artificial Sequence
  Description of Artificial Sequence: Synthetic oligonucleotide
  Antisense strand to SEQ ID NO: 1315946
uuucaucucuacagcacgu

SEQ ID NO: 1315948 - RNA, 19 nt, Artificial Sequence
  Description of Artificial Sequence: Synthetic oligonucleotide
  Sense strand starting at position 1266 of SEQ ID NO: 1241999
uagagaugaaaguguggua

SEQ ID NO: 1315949 - RNA, 19 nt, Artificial Sequence
  Description of Artificial Sequence: Synthetic oligonucleotide
  Antisense strand to SEQ ID NO: 1315948
uaccacacuuucaucucua

SEQ ID NO: 1315950 - RNA, 19 nt, Artificial Sequence
  Description of Artificial Sequence: Synthetic oligonucleotide
  Sense strand starting at position 1340 of SEQ ID NO: 1241999
gccggaugaauguauagaa

SEQ ID NO: 1315951 - RNA, 19 nt, Artificial Sequence
  Description of Artificial Sequence: Synthetic oligonucleotide
  Antisense strand to SEQ ID NO: 1315950
uucuauacauucauccggc

SEQ ID NO: 1315952 - RNA, 19 nt, Artificial Sequence
  Description of Artificial Sequence: Synthetic oligonucleotide
  Sense strand starting at position 1568 of SEQ ID NO: 1241999
uuacuuauucugcagucuu

SEQ ID NO: 1315953 - RNA, 19 nt, Artificial Sequence
  Description of Artificial Sequence: Synthetic oligonucleotide
  Antisense strand to SEQ ID NO: 1315952
aagacugcagaauaaguaa

SEQ ID NO: 1315954 - RNA, 19 nt, Artificial Sequence
  Description of Artificial Sequence: Synthetic oligonucleotide
  Sense strand starting at position 1579 of SEQ ID NO: 1241999
gcagucuuugcccaaaucu

SEQ ID NO: 1315955 - RNA, 19 nt, Artificial Sequence
  Description of Artificial Sequence: Synthetic oligonucleotide
  Antisense strand to SEQ ID NO: 1315954
agauuugggcaaagacugc

SEQ ID NO: 1315956 - RNA, 19 nt, Artificial Sequence
  Description of Artificial Sequence: Synthetic oligonucleotide
  Sense strand starting at position 2116 of SEQ ID NO: 1241999
gcagguuugggaugggaaa

SEQ ID NO: 1315957 - RNA, 19 nt, Artificial Sequence
  Description of Artificial Sequence: Synthetic oligonucleotide
  Antisense strand to SEQ ID NO: 1315956
uuucccaucccaaaccugc

SEQ ID NO: 1315958 - RNA, 19 nt, Artificial Sequence
  Description of Artificial Sequence: Synthetic oligonucleotide
  Sense strand starting at position 3189 of SEQ ID NO: 1241999
cuaucacagguuugggaua

SEQ ID NO: 1315959 - RNA, 19 nt, Artificial Sequence
  Description of Artificial Sequence: Synthetic oligonucleotide
  Antisense strand to SEQ ID NO: 1315958
uaucccaaaccugugauag

SEQ ID NO: 1315960 - RNA, 19 nt, Artificial Sequence
  Description of Artificial Sequence: Synthetic oligonucleotide
  Sense strand starting at position 3295 of SEQ ID NO: 1241999
agcaguaacuuucuagaua

SEQ ID NO: 1315961 - RNA, 19 nt, Artificial Sequence
  Description of Artificial Sequence: Synthetic oligonucleotide
  Antisense strand to SEQ ID NO: 1315960
uaucuagaaaguuacugcu

SEQ ID NO: 1315962 - RNA, 19 nt, Artificial Sequence
  Description of Artificial Sequence: Synthetic oligonucleotide
  Sense strand starting at position 3298 of SEQ ID NO: 1241999
aguaacuuucuagauaguu

SEQ ID NO: 1315963 - RNA, 19 nt, Artificial Sequence
  Description of Artificial Sequence: Synthetic oligonucleotide
  Antisense strand to SEQ ID NO: 1315962
aacuaucuagaaaguuacu

SEQ ID NO: 1315964 - RNA, 19 nt, Artificial Sequence
  Description of Artificial Sequence: Synthetic oligonucleotide
  Sense strand starting at position 3303 of SEQ ID NO: 1241999
cuuucuagauaguuguuaa

SEQ ID NO: 1315965 - RNA, 19 nt, Artificial Sequence
  Description of Artificial Sequence: Synthetic oligonucleotide
  Antisense strand to SEQ ID NO: 1315964
uuaacaacuaucuagaaag

SEQ ID NO: 1315966 - RNA, 19 nt, Artificial Sequence
  Description of Artificial Sequence: Synthetic oligonucleotide
  Sense strand starting at position 3504 of SEQ ID NO: 1241999
guucgucuucguaguugga

SEQ ID NO: 1315967 - RNA, 19 nt, Artificial Sequence
  Description of Artificial Sequence: Synthetic oligonucleotide
  Antisense strand to SEQ ID NO: 1315966
uccaacuacgaagacgaac

SEQ ID NO: 1315968 - RNA, 19 nt, Artificial Sequence
  Description of Artificial Sequence: Synthetic oligonucleotide
  Sense strand starting at position 3518 of SEQ ID NO: 1241999
uuggaauuccuuugcauga

SEQ ID NO: 1315969 - RNA, 19 nt, Artificial Sequence
  Description of Artificial Sequence: Synthetic oligonucleotide
  Antisense strand to SEQ ID NO: 1315968
ucaugcaaaggaauuccaa

SEQ ID NO: 1315970 - RNA, 19 nt, Artificial Sequence
  Description of Artificial Sequence: Synthetic oligonucleotide
  Sense strand starting at position 3528 of SEQ ID NO: 1241999
uuugcaugaggcuauggaa

SEQ ID NO: 1315971 - RNA, 19 nt, Artificial Sequence
  Description of Artificial Sequence: Synthetic oligonucleotide
  Antisense strand to SEQ ID NO: 1315970
uuccauagccucaugcaaa

SEQ ID NO: 1315972 - RNA, 19 nt, Artificial Sequence
  Description of Artificial Sequence: Synthetic oligonucleotide
  Sense strand starting at position 3553 of SEQ ID NO: 1241999
cuaccuucucuggacguua

SEQ ID NO: 1315973 - RNA, 19 nt, Artificial Sequence
  Description of Artificial Sequence: Synthetic oligonucleotide
  Antisense strand to SEQ ID NO: 1315972
uaacguccagagaagguag

SEQ ID NO: 1315974 - RNA, 19 nt, Artificial Sequence
  Description of Artificial Sequence: Synthetic oligonucleotide
  Sense strand starting at position 3558 of SEQ ID NO: 1241999
uucucuggacguuaacuau

SEQ ID NO: 1315975 - RNA, 19 nt, Artificial Sequence
  Description of Artificial Sequence: Synthetic oligonucleotide
  Antisense strand to SEQ ID NO: 1315974
auaguuaacguccagagaa

SEQ ID NO: 1315976 - RNA, 19 nt, Artificial Sequence
  Description of Artificial Sequence: Synthetic oligonucleotide
  Sense strand starting at position 19 of SEQ ID NO: 1242000
ggcaaauuggcauaaucuu

SEQ ID NO: 1315977 - RNA, 19 nt, Artificial Sequence
  Description of Artificial Sequence: Synthetic oligonucleotide
  Antisense strand to SEQ ID NO: 1315976
aagauuaugccaauuugcc

SEQ ID NO: 1315978 - RNA, 19 nt, Artificial Sequence
  Description of Artificial Sequence: Synthetic oligonucleotide
  Sense strand starting at position 27 of SEQ ID NO: 1242000
ggcauaaucuuauuaaugu

SEQ ID NO: 1315979 - RNA, 19 nt, Artificial Sequence
  Description of Artificial Sequence: Synthetic oligonucleotide
  Antisense strand to SEQ ID NO: 1315978
acauuaauaagauuaugcc

SEQ ID NO: 1315980 - RNA, 19 nt, Artificial Sequence
  Description of Artificial Sequence: Synthetic oligonucleotide
  Sense strand starting at position 82 of SEQ ID NO: 1242000
cuauguaucuaucuuagag

SEQ ID NO: 1315981 - RNA, 19 nt, Artificial Sequence
  Description of Artificial Sequence: Synthetic oligonucleotide
  Antisense strand to SEQ ID NO: 1315980
cucuaagauagauacauag

SEQ ID NO: 1315982 - RNA, 19 nt, Artificial Sequence
  Description of Artificial Sequence: Synthetic oligonucleotide
  Sense strand starting at position 86 of SEQ ID NO: 1242000
guaucuaucuuagagauuu

SEQ ID NO: 1315983 - RNA, 19 nt, Artificial Sequence
  Description of Artificial Sequence: Synthetic oligonucleotide
  Antisense strand to SEQ ID NO: 1315982
aaaucucuaagauagauac

SEQ ID NO: 1315984 - RNA, 19 nt, Artificial Sequence
  Description of Artificial Sequence: Synthetic oligonucleotide
  Sense strand starting at position 94 of SEQ ID NO: 1242000
cuuagagauuucuagcaag

SEQ ID NO: 1315985 - RNA, 19 nt, Artificial Sequence
  Description of Artificial Sequence: Synthetic oligonucleotide
  Antisense strand to SEQ ID NO: 1315984
cuugcuagaaaucucuaag

SEQ ID NO: 1315986 - RNA, 19 nt, Artificial Sequence
  Description of Artificial Sequence: Synthetic oligonucleotide
  Sense strand starting at position 182 of SEQ ID NO: 1242000
acauuauaggcuggaucau

SEQ ID NO: 1315987 - RNA, 19 nt, Artificial Sequence
  Description of Artificial Sequence: Synthetic oligonucleotide
  Antisense strand to SEQ ID NO: 1315986
augauccagccuauaaugu

SEQ ID NO: 1315988 - RNA, 19 nt, Artificial Sequence
  Description of Artificial Sequence: Synthetic oligonucleotide
  Sense strand starting at position 183 of SEQ ID NO: 1242000
cauuauaggcuggaucauu

SEQ ID NO: 1315989 - RNA, 19 nt, Artificial Sequence
  Description of Artificial Sequence: Synthetic oligonucleotide
  Antisense strand to SEQ ID NO: 1315988
aaugauccagccuauaaug

SEQ ID NO: 1315990 - RNA, 19 nt, Artificial Sequence
  Description of Artificial Sequence: Synthetic oligonucleotide
  Sense strand starting at position 518 of SEQ ID NO: 1242000
agugaaugauagcuauaca

SEQ ID NO: 1315991 - RNA, 19 nt, Artificial Sequence
  Description of Artificial Sequence: Synthetic oligonucleotide
  Antisense strand to SEQ ID NO: 1315990
uguauagcuaucauucacu

SEQ ID NO: 1315992 - RNA, 19 nt, Artificial Sequence
  Description of Artificial Sequence: Synthetic oligonucleotide
  Sense strand starting at position 957 of SEQ ID NO: 1242000
uaaggauuccuagguaugu

SEQ ID NO: 1315993 - RNA, 19 nt, Artificial Sequence
  Description of Artificial Sequence: Synthetic oligonucleotide
  Antisense strand to SEQ ID NO: 1315992
acauaccuaggaauccuua

SEQ ID NO: 1315994 - RNA, 19 nt, Artificial Sequence
  Description of Artificial Sequence: Synthetic oligonucleotide
  Sense strand starting at position 962 of SEQ ID NO: 1242000
auuccuagguaugugguaa

SEQ ID NO: 1315995 - RNA, 19 nt, Artificial Sequence
  Description of Artificial Sequence: Synthetic oligonucleotide
  Antisense strand to SEQ ID NO: 1315994
uuaccacauaccuaggaau

SEQ ID NO: 1315996 - RNA, 19 nt, Artificial Sequence
  Description of Artificial Sequence: Synthetic oligonucleotide
  Sense strand starting at position 1011 of SEQ ID NO: 1242000
ugguuaccuccugauaaac

SEQ ID NO: 1315997 - RNA, 19 nt, Artificial Sequence
  Description of Artificial Sequence: Synthetic oligonucleotide
  Antisense strand to SEQ ID NO: 1315996
guuuaucaggagguaacca

SEQ ID NO: 1315998 - RNA, 19 nt, Artificial Sequence
  Description of Artificial Sequence: Synthetic oligonucleotide
  Sense strand starting at position 1187 of SEQ ID NO: 1242000
ugucuaauauacccuguaa

SEQ ID NO: 1315999 - RNA, 19 nt, Artificial Sequence
  Description of Artificial Sequence: Synthetic oligonucleotide
  Antisense strand to SEQ ID NO: 1315998
uuacaggguauauuagaca

SEQ ID NO: 1316000 - RNA, 19 nt, Artificial Sequence
  Description of Artificial Sequence: Synthetic oligonucleotide
  Sense strand starting at position 1258 of SEQ ID NO: 1242000
acagcaugguuucuacuga

SEQ ID NO: 1316001 - RNA, 19 nt, Artificial Sequence
  Description of Artificial Sequence: Synthetic oligonucleotide
  Antisense strand to SEQ ID NO: 1316000
ucaguagaaaccaugcugu

SEQ ID NO: 1316002 - RNA, 19 nt, Artificial Sequence
  Description of Artificial Sequence: Synthetic oligonucleotide
  Sense strand starting at position 1369 of SEQ ID NO: 1242000
gagagugguuaacucuuau

SEQ ID NO: 1316003 - RNA, 19 nt, Artificial Sequence
  Description of Artificial Sequence: Synthetic oligonucleotide
  Antisense strand to SEQ ID NO: 1316002
auaagaguuaaccacucuc

SEQ ID NO: 1316004 - RNA, 19 nt, Artificial Sequence
  Description of Artificial Sequence: Synthetic oligonucleotide
  Sense strand starting at position 1442 of SEQ ID NO: 1242000
auagucacacuguaugaau

SEQ ID NO: 1316005 - RNA, 19 nt, Artificial Sequence
  Description of Artificial Sequence: Synthetic oligonucleotide
  Antisense strand to SEQ ID NO: 1316004
auucauacagugugacuau

SEQ ID NO: 1316006 - RNA, 19 nt, Artificial Sequence
  Description of Artificial Sequence: Synthetic oligonucleotide
  Sense strand starting at position 1444 of SEQ ID NO: 1242000
agucacacuguaugaauua

SEQ ID NO: 1316007 - RNA, 19 nt, Artificial Sequence
  Description of Artificial Sequence: Synthetic oligonucleotide
  Antisense strand to SEQ ID NO: 1316006
uaauucauacagugugacu

SEQ ID NO: 1316008 - RNA, 19 nt, Artificial Sequence
  Description of Artificial Sequence: Synthetic oligonucleotide
  Sense strand starting at position 1736 of SEQ ID NO: 1242000
agucuccuucuagaucuau

SEQ ID NO: 1316009 - RNA, 19 nt, Artificial Sequence
  Description of Artificial Sequence: Synthetic oligonucleotide
  Antisense strand to SEQ ID NO: 1316008
auagaucuagaaggagacu

SEQ ID NO: 1316010 - RNA, 19 nt, Artificial Sequence
  Description of Artificial Sequence: Synthetic oligonucleotide
  Sense strand starting at position 1955 of SEQ ID NO: 1242000
aguagucugcuggauccau

SEQ ID NO: 1316011 - RNA, 19 nt, Artificial Sequence
  Description of Artificial Sequence: Synthetic oligonucleotide
  Antisense strand to SEQ ID NO: 1316010
auggauccagcagacuacu

SEQ ID NO: 1316012 - RNA, 19 nt, Artificial Sequence
  Description of Artificial Sequence: Synthetic oligonucleotide
  Sense strand starting at position 2010 of SEQ ID NO: 1242000
ucuuguugcucuccuauuu

SEQ ID NO: 1316013 - RNA, 19 nt, Artificial Sequence
  Description of Artificial Sequence: Synthetic oligonucleotide
  Antisense strand to SEQ ID NO: 1316012
aaauaggagagcaacaaga

SEQ ID NO: 1316014 - RNA, 19 nt, Artificial Sequence
  Description of Artificial Sequence: Synthetic oligonucleotide
  Sense strand starting at position 2440 of SEQ ID NO: 1242000
ucuggagaccuugggucaa

SEQ ID NO: 1316015 - RNA, 19 nt, Artificial Sequence
  Description of Artificial Sequence: Synthetic oligonucleotide
  Antisense strand to SEQ ID NO: 1316014
uugacccaaggucuccaga

SEQ ID NO: 1316016 - RNA, 19 nt, Artificial Sequence
  Description of Artificial Sequence: Synthetic oligonucleotide
  Sense strand starting at position 2460 of SEQ ID NO: 1242000
cagaaaguuguuggaacuu

SEQ ID NO: 1316017 - RNA, 19 nt, Artificial Sequence
  Description of Artificial Sequence: Synthetic oligonucleotide
  Antisense strand to SEQ ID NO: 1316016
aaguuccaacaacuuucug

SEQ ID NO: 1316018 - RNA, 19 nt, Artificial Sequence
  Description of Artificial Sequence: Synthetic oligonucleotide
  Sense strand starting at position 2469 of SEQ ID NO: 1242000
guuggaacuuguguuggaa

SEQ ID NO: 1316019 - RNA, 19 nt, Artificial Sequence
  Description of Artificial Sequence: Synthetic oligonucleotide
  Antisense strand to SEQ ID NO: 1316018
uuccaacacaaguuccaac

SEQ ID NO: 1316020 - RNA, 19 nt, Artificial Sequence
  Description of Artificial Sequence: Synthetic oligonucleotide
  Sense strand starting at position 2472 of SEQ ID NO: 1242000
ggaacuuguguuggaagaa

SEQ ID NO: 1316021 - RNA, 19 nt, Artificial Sequence
  Description of Artificial Sequence: Synthetic oligonucleotide
  Antisense strand to SEQ ID NO: 1316020
uucuuccaacacaaguucc

SEQ ID NO: 1316022 - RNA, 19 nt, Artificial Sequence
  Description of Artificial Sequence: Synthetic oligonucleotide
  Sense strand starting at position 2481 of SEQ ID NO: 1242000
guuggaagaaacuguccau

SEQ ID NO: 1316023 - RNA, 19 nt, Artificial Sequence
  Description of Artificial Sequence: Synthetic oligonucleotide
  Antisense strand to SEQ ID NO: 1316022
auggacaguuucuuccaac

SEQ ID NO: 1316024 - RNA, 19 nt, Artificial Sequence
  Description of Artificial Sequence: Synthetic oligonucleotide
  Sense strand starting at position 2657 of SEQ ID NO: 1242000
aggagacugacagguguau

SEQ ID NO: 1316025 - RNA, 19 nt, Artificial Sequence
  Description of Artificial Sequence: Synthetic oligonucleotide
  Antisense strand to SEQ ID NO: 1316024
auacaccugucagucuccu

SEQ ID NO: 1316026 - RNA, 19 nt, Artificial Sequence
  Description of Artificial Sequence: Synthetic oligonucleotide
  Sense strand starting at position 2659 of SEQ ID NO: 1242000
gagacugacagguguauua

SEQ ID NO: 1316027 - RNA, 19 nt, Artificial Sequence
  Description of Artificial Sequence: Synthetic oligonucleotide
  Antisense strand to SEQ ID NO: 1316026
uaauacaccugucagucuc

SEQ ID NO: 1316028 - RNA, 19 nt, Artificial Sequence
  Description of Artificial Sequence: Synthetic oligonucleotide
  Sense strand starting at position 2661 of SEQ ID NO: 1242000
gacugacagguguauuagu

SEQ ID NO: 1316029 - RNA, 19 nt, Artificial Sequence
  Description of Artificial Sequence: Synthetic oligonucleotide
  Antisense strand to SEQ ID NO: 1316028
acuaauacaccugucaguc

SEQ ID NO: 1316030 - RNA, 19 nt, Artificial Sequence
  Description of Artificial Sequence: Synthetic oligonucleotide
  Sense strand starting at position 2706 of SEQ ID NO: 1242000
uacccaagacuggguuaua

SEQ ID NO: 1316031 - RNA, 19 nt, Artificial Sequence
  Description of Artificial Sequence: Synthetic oligonucleotide
  Antisense strand to SEQ ID NO: 1316030
uauaacccagucuugggua

SEQ ID NO: 1316032 - RNA, 19 nt, Artificial Sequence
  Description of Artificial Sequence: Synthetic oligonucleotide
  Sense strand starting at position 2707 of SEQ ID NO: 1242000
acccaagacuggguuauaa

SEQ ID NO: 1316033 - RNA, 19 nt, Artificial Sequence
  Description of Artificial Sequence: Synthetic oligonucleotide
  Antisense strand to SEQ ID NO: 1316032
uuauaacccagucuugggu

SEQ ID NO: 1316034 - RNA, 19 nt, Artificial Sequence
  Description of Artificial Sequence: Synthetic oligonucleotide
  Sense strand starting at position 2780 of SEQ ID NO: 1242000
ucuuacaaucuugguggaa

SEQ ID NO: 1316035 - RNA, 19 nt, Artificial Sequence
  Description of Artificial Sequence: Synthetic oligonucleotide
  Antisense strand to SEQ ID NO: 1316034
uuccaccaagauuguaaga

SEQ ID NO: 1316036 - RNA, 19 nt, Artificial Sequence
  Description of Artificial Sequence: Synthetic oligonucleotide
  Sense strand starting at position 2938 of SEQ ID NO: 1242000
ccaugauucgguuaucacc

SEQ ID NO: 1316037 - RNA, 19 nt, Artificial Sequence
  Description of Artificial Sequence: Synthetic oligonucleotide
  Antisense strand to SEQ ID NO: 1316036
ggugauaaccgaaucaugg

SEQ ID NO: 1316038 - RNA, 19 nt, Artificial Sequence
  Description of Artificial Sequence: Synthetic oligonucleotide
  Sense strand starting at position 2967 of SEQ ID NO: 1242000
ccacguugggauuauggga

SEQ ID NO: 1316039 - RNA, 19 nt, Artificial Sequence
  Description of Artificial Sequence: Synthetic oligonucleotide
  Antisense strand to SEQ ID NO: 1316038
ucccauaaucccaacgugg

SEQ ID NO: 1316040 - RNA, 19 nt, Artificial Sequence
  Description of Artificial Sequence: Synthetic oligonucleotide
  Sense strand starting at position 3224 of SEQ ID NO: 1242000
gagguucuuagagagugua

SEQ ID NO: 1316041 - RNA, 19 nt, Artificial Sequence
  Description of Artificial Sequence: Synthetic oligonucleotide
  Antisense strand to SEQ ID NO: 1316040
uacacucucuaagaaccuc

SEQ ID NO: 1316042 - RNA, 19 nt, Artificial Sequence
  Description of Artificial Sequence: Synthetic oligonucleotide
  Sense strand starting at position 3428 of SEQ ID NO: 1242000
guagcaagaucacuuaggu

SEQ ID NO: 1316043 - RNA, 19 nt, Artificial Sequence
  Description of Artificial Sequence: Synthetic oligonucleotide
  Antisense strand to SEQ ID NO: 1316042
accuaagugaucuugcuac

SEQ ID NO: 1316044 - RNA, 19 nt, Artificial Sequence
  Description of Artificial Sequence: Synthetic oligonucleotide
  Sense strand starting at position 3520 of SEQ ID NO: 1242000
aguggagaauagcuuuaca

SEQ ID NO: 1316045 - RNA, 19 nt, Artificial Sequence
  Description of Artificial Sequence: Synthetic oligonucleotide
  Antisense strand to SEQ ID NO: 1316044
uguaaagcuauucuccacu

SEQ ID NO: 1316046 - RNA, 19 nt, Artificial Sequence
  Description of Artificial Sequence: Synthetic oligonucleotide
  Sense strand starting at position 3557 of SEQ ID NO: 1242000
agguguuaaaugcauuagu

SEQ ID NO: 1316047 - RNA, 19 nt, Artificial Sequence
  Description of Artificial Sequence: Synthetic oligonucleotide
  Antisense strand to SEQ ID NO: 1316046
acuaaugcauuuaacaccu

SEQ ID NO: 1316048 - RNA, 19 nt, Artificial Sequence
  Description of Artificial Sequence: Synthetic oligonucleotide
  Sense strand starting at position 3597 of SEQ ID NO: 1242000
ggcuuucggaaaugauaau

SEQ ID NO: 1316049 - RNA, 19 nt, Artificial Sequence
  Description of Artificial Sequence: Synthetic oligonucleotide
  Antisense strand to SEQ ID NO: 1316048
auuaucauuuccgaaagcc

SEQ ID NO: 1316050 - RNA, 19 nt, Artificial Sequence
  Description of Artificial Sequence: Synthetic oligonucleotide
  Sense strand starting at position 3650 of SEQ ID NO: 1242000
ggucauguagaaugugaag

SEQ ID NO: 1316051 - RNA, 19 nt, Artificial Sequence
  Description of Artificial Sequence: Synthetic oligonucleotide
  Antisense strand to SEQ ID NO: 1316050
cuucacauucuacaugacc

SEQ ID NO: 1316052 - RNA, 19 nt, Artificial Sequence
  Description of Artificial Sequence: Synthetic oligonucleotide
  Sense strand starting at position 3697 of SEQ ID NO: 1242000
ggguccuaauaucuuagau

SEQ ID NO: 1316053 - RNA, 19 nt, Artificial Sequence
  Description of Artificial Sequence: Synthetic oligonucleotide
  Antisense strand to SEQ ID NO: 1316052
aucuaagauauuaggaccc

SEQ ID NO: 1316054 - RNA, 19 nt, Artificial Sequence
  Description of Artificial Sequence: Synthetic oligonucleotide
  Sense strand starting at position 3727 of SEQ ID NO: 1242000
ggguaugagcuugauuguu

SEQ ID NO: 1316055 - RNA, 19 nt, Artificial Sequence
  Description of Artificial Sequence: Synthetic oligonucleotide
  Antisense strand to SEQ ID NO: 1316054
aacaaucaagcucauaccc

SEQ ID NO: 1316056 - RNA, 19 nt, Artificial Sequence
  Description of Artificial Sequence: Synthetic oligonucleotide
  Sense strand starting at position 43 of SEQ ID NO: 1242001
uguuguucuggcugaauuu

SEQ ID NO: 1316057 - RNA, 19 nt, Artificial Sequence
  Description of Artificial Sequence: Synthetic oligonucleotide
  Antisense strand to SEQ ID NO: 1316056
aaauucagccagaacaaca

SEQ ID NO: 1316058 - RNA, 19 nt, Artificial Sequence
  Description of Artificial Sequence: Synthetic oligonucleotide
  Sense strand starting at position 74 of SEQ ID NO: 1242001
guaagcccuucucuggaua

SEQ ID NO: 1316059 - RNA, 19 nt, Artificial Sequence
  Description of Artificial Sequence: Synthetic oligonucleotide
  Antisense strand to SEQ ID NO: 1316058
uauccagagaagggcuuac

SEQ ID NO: 1316060 - RNA, 19 nt, Artificial Sequence
  Description of Artificial Sequence: Synthetic oligonucleotide
  Sense strand starting at position 77 of SEQ ID NO: 1242001
agcccuucucuggauaaga

SEQ ID NO: 1316061 - RNA, 19 nt, Artificial Sequence
  Description of Artificial Sequence: Synthetic oligonucleotide
  Antisense strand to SEQ ID NO: 1316060
ucuuauccagagaagggcu

SEQ ID NO: 1316062 - RNA, 19 nt, Artificial Sequence
  Description of Artificial Sequence: Synthetic oligonucleotide
  Sense strand starting at position 244 of SEQ ID NO: 1242001
ucggcccuagucuaauauu

SEQ ID NO: 1316063 - RNA, 19 nt, Artificial Sequence
  Description of Artificial Sequence: Synthetic oligonucleotide
  Antisense strand to SEQ ID NO: 1316062
aauauuagacuagggccga

SEQ ID NO: 1316064 - RNA, 19 nt, Artificial Sequence
  Description of Artificial Sequence: Synthetic oligonucleotide
  Sense strand starting at position 283 of SEQ ID NO: 1242001
ugagaaguuuaguucuugu

SEQ ID NO: 1316065 - RNA, 19 nt, Artificial Sequence
  Description of Artificial Sequence: Synthetic oligonucleotide
  Antisense strand to SEQ ID NO: 1316064
acaagaacuaaacuucuca

SEQ ID NO: 1316066 - RNA, 19 nt, Artificial Sequence
  Description of Artificial Sequence: Synthetic oligonucleotide
  Sense strand starting at position 575 of SEQ ID NO: 1242001
acuauacgucaugaccuau

SEQ ID NO: 1316067 - RNA, 19 nt, Artificial Sequence
  Description of Artificial Sequence: Synthetic oligonucleotide
  Antisense strand to SEQ ID NO: 1316066
auaggucaugacguauagu

SEQ ID NO: 1316068 - RNA, 19 nt, Artificial Sequence
  Description of Artificial Sequence: Synthetic oligonucleotide
  Sense strand starting at position 640 of SEQ ID NO: 1242001
agugcaucuucuguagaaa

SEQ ID NO: 1316069 - RNA, 19 nt, Artificial Sequence
  Description of Artificial Sequence: Synthetic oligonucleotide
  Antisense strand to SEQ ID NO: 1316068
uuucuacagaagaugcacu

SEQ ID NO: 1316070 - RNA, 19 nt, Artificial Sequence
  Description of Artificial Sequence: Synthetic oligonucleotide
  Sense strand starting at position 641 of SEQ ID NO: 1242001
gugcaucuucuguagaaag

SEQ ID NO: 1316071 - RNA, 19 nt, Artificial Sequence
  Description of Artificial Sequence: Synthetic oligonucleotide
  Antisense strand to SEQ ID NO: 1316070
cuuucuacagaagaugcac

SEQ ID NO: 1316072 - RNA, 19 nt, Artificial Sequence
  Description of Artificial Sequence: Synthetic oligonucleotide
  Sense strand starting at position 960 of SEQ ID NO: 1242001
auacuaaacugcuuggaga

SEQ ID NO: 1316073 - RNA, 19 nt, Artificial Sequence
  Description of Artificial Sequence: Synthetic oligonucleotide
  Antisense strand to SEQ ID NO: 1316072
ucuccaagcaguuuaguau

SEQ ID NO: 1316074 - RNA, 19 nt, Artificial Sequence
  Description of Artificial Sequence: Synthetic oligonucleotide
  Sense strand starting at position 1007 of SEQ ID NO: 1242001
accuguauuugagacagca

SEQ ID NO: 1316075 - RNA, 19 nt, Artificial Sequence
  Description of Artificial Sequence: Synthetic oligonucleotide
  Antisense strand to SEQ ID NO: 1316074
ugcugucucaaauacaggu

SEQ ID NO: 1316076 - RNA, 19 nt, Artificial Sequence
  Description of Artificial Sequence: Synthetic oligonucleotide
  Sense strand starting at position 1153 of SEQ ID NO: 1242001
ugaagaguuaggcgaagca

SEQ ID NO: 1316077 - RNA, 19 nt, Artificial Sequence
  Description of Artificial Sequence: Synthetic oligonucleotide
  Antisense strand to SEQ ID NO: 1316076
ugcuucgccuaacucuuca

SEQ ID NO: 1316078 - RNA, 19 nt, Artificial Sequence
  Description of Artificial Sequence: Synthetic oligonucleotide
  Sense strand starting at position 1169 of SEQ ID NO: 1242001
gcaauugcuauugggagau

SEQ ID NO: 1316079 - RNA, 19 nt, Artificial Sequence
  Description of Artificial Sequence: Synthetic oligonucleotide
  Antisense strand to SEQ ID NO: 1316078
aucucccaauagcaauugc

SEQ ID NO: 1316080 - RNA, 19 nt, Artificial Sequence
  Description of Artificial Sequence: Synthetic oligonucleotide
  Sense strand starting at position 1348 of SEQ ID NO: 1242001
ggauaacuuccugggauuc

SEQ ID NO: 1316081 - RNA, 19 nt, Artificial Sequence
  Description of Artificial Sequence: Synthetic oligonucleotide
  Antisense strand to SEQ ID NO: 1316080
gaaucccaggaaguuaucc

SEQ ID NO: 1316082 - RNA, 19 nt, Artificial Sequence
  Description of Artificial Sequence: Synthetic oligonucleotide
  Sense strand starting at position 1354 of SEQ ID NO: 1242001
cuuccugggauucgaagau

SEQ ID NO: 1316083 - RNA, 19 nt, Artificial Sequence
  Description of Artificial Sequence: Synthetic oligonucleotide
  Antisense strand to SEQ ID NO: 1316082
aucuucgaaucccaggaag

SEQ ID NO: 1316084 - RNA, 19 nt, Artificial Sequence
  Description of Artificial Sequence: Synthetic oligonucleotide
  Sense strand starting at position 1372 of SEQ ID NO: 1242001
ugugaccugguagguauaa

SEQ ID NO: 1316085 - RNA, 19 nt, Artificial Sequence
  Description of Artificial Sequence: Synthetic oligonucleotide
  Antisense strand to SEQ ID NO: 1316084
uuauaccuaccaggucaca

SEQ ID NO: 1316086 - RNA, 19 nt, Artificial Sequence
  Description of Artificial Sequence: Synthetic oligonucleotide
  Sense strand starting at position 1373 of SEQ ID NO: 1242001
gugaccugguagguauaaa

SEQ ID NO: 1316087 - RNA, 19 nt, Artificial Sequence
  Description of Artificial Sequence: Synthetic oligonucleotide
  Antisense strand to SEQ ID NO: 1316086
uuuauaccuaccaggucac

SEQ ID NO: 1316088 - RNA, 19 nt, Artificial Sequence
  Description of Artificial Sequence: Synthetic oligonucleotide
  Sense strand starting at position 1481 of SEQ ID NO: 1242001
accguaucucauuaugcaa

SEQ ID NO: 1316089 - RNA, 19 nt, Artificial Sequence
  Description of Artificial Sequence: Synthetic oligonucleotide
  Antisense strand to SEQ ID NO: 1316088
uugcauaaugagauacggu

SEQ ID NO: 1316090 - RNA, 19 nt, Artificial Sequence
  Description of Artificial Sequence: Synthetic oligonucleotide
  Sense strand starting at position 2086 of SEQ ID NO: 1242001
ucccuucggccuuacagaa

SEQ ID NO: 1316091 - RNA, 19 nt, Artificial Sequence
  Description of Artificial Sequence: Synthetic oligonucleotide
  Antisense strand to SEQ ID NO: 1316090
uucuguaaggccgaaggga

SEQ ID NO: 1316092 - RNA, 19 nt, Artificial Sequence
  Description of Artificial Sequence: Synthetic oligonucleotide
  Sense strand starting at position 2214 of SEQ ID NO: 1242001
ucuugcaggcucgaugaaa

SEQ ID NO: 1316093 - RNA, 19 nt, Artificial Sequence
  Description of Artificial Sequence: Synthetic oligonucleotide
  Antisense strand to SEQ ID NO: 1316092
uuucaucgagccugcaaga

SEQ ID NO: 1316094 - RNA, 19 nt, Artificial Sequence
  Description of Artificial Sequence: Synthetic oligonucleotide
  Sense strand starting at position 2343 of SEQ ID NO: 1242001
ggacuuaauaagugcgaca

SEQ ID NO: 1316095 - RNA, 19 nt, Artificial Sequence
  Description of Artificial Sequence: Synthetic oligonucleotide
  Antisense strand to SEQ ID NO: 1316094
ugucgcacuuauuaagucc

SEQ ID NO: 1316096 - RNA, 19 nt, Artificial Sequence
  Description of Artificial Sequence: Synthetic oligonucleotide
  Sense strand starting at position 2396 of SEQ ID NO: 1242001
ugccguggucgaucuucaa

SEQ ID NO: 1316097 - RNA, 19 nt, Artificial Sequence
  Description of Artificial Sequence: Synthetic oligonucleotide
  Antisense strand to SEQ ID NO: 1316096
uugaagaucgaccacggca

SEQ ID NO: 1316098 - RNA, 19 nt, Artificial Sequence
  Description of Artificial Sequence: Synthetic oligonucleotide
  Sense strand starting at position 2580 of SEQ ID NO: 1242001
ccguguaaugaggaauauu

SEQ ID NO: 1316099 - RNA, 19 nt, Artificial Sequence
  Description of Artificial Sequence: Synthetic oligonucleotide
  Antisense strand to SEQ ID NO: 1316098
aauauuccucauuacacgg

SEQ ID NO: 1316100 - RNA, 19 nt, Artificial Sequence
  Description of Artificial Sequence: Synthetic oligonucleotide
  Sense strand starting at position 2632 of SEQ ID NO: 1242001
accacuacuugggcgaaua

SEQ ID NO: 1316101 - RNA, 19 nt, Artificial Sequence
  Description of Artificial Sequence: Synthetic oligonucleotide
  Antisense strand to SEQ ID NO: 1316100
uauucgcccaaguaguggu

SEQ ID NO: 1316102 - RNA, 19 nt, Artificial Sequence
  Description of Artificial Sequence: Synthetic oligonucleotide
  Sense strand starting at position 2642 of SEQ ID NO: 1242001
gggcgaauagcauagagua

SEQ ID NO: 1316103 - RNA, 19 nt, Artificial Sequence
  Description of Artificial Sequence: Synthetic oligonucleotide
  Antisense strand to SEQ ID NO: 1316102
uacucuaugcuauucgccc

SEQ ID NO: 1316104 - RNA, 19 nt, Artificial Sequence
  Description of Artificial Sequence: Synthetic oligonucleotide
  Sense strand starting at position 2759 of SEQ ID NO: 1242001
agagauucccuaggucaga

SEQ ID NO: 1316105 - RNA, 19 nt, Artificial Sequence
  Description of Artificial Sequence: Synthetic oligonucleotide
  Antisense strand to SEQ ID NO: 1316104
ucugaccuagggaaucucu

SEQ ID NO: 1316106 - RNA, 19 nt, Artificial Sequence
  Description of Artificial Sequence: Synthetic oligonucleotide
  Sense strand starting at position 2760 of SEQ ID NO: 1242001
gagauucccuaggucagaa

SEQ ID NO: 1316107 - RNA, 19 nt, Artificial Sequence
  Description of Artificial Sequence: Synthetic oligonucleotide
  Antisense strand to SEQ ID NO: 1316106
uucugaccuagggaaucuc

SEQ ID NO: 1316108 - RNA, 19 nt, Artificial Sequence
  Description of Artificial Sequence: Synthetic oligonucleotide
  Sense strand starting at position 2937 of SEQ ID NO: 1242001
ugguacauuugguaacaau

SEQ ID NO: 1316109 - RNA, 19 nt, Artificial Sequence
  Description of Artificial Sequence: Synthetic oligonucleotide
  Antisense strand to SEQ ID NO: 1316108
auuguuaccaaauguacca

SEQ ID NO: 1316110 - RNA, 19 nt, Artificial Sequence
  Description of Artificial Sequence: Synthetic oligonucleotide
  Sense strand starting at position 3077 of SEQ ID NO: 1242001
ugguaucauacacgauagu

SEQ ID NO: 1316111 - RNA, 19 nt, Artificial Sequence
  Description of Artificial Sequence: Synthetic oligonucleotide
  Antisense strand to SEQ ID NO: 1316110
acuaucguguaugauacca

SEQ ID NO: 1316112 - RNA, 19 nt, Artificial Sequence
  Description of Artificial Sequence: Synthetic oligonucleotide
  Sense strand starting at position 3078 of SEQ ID NO: 1242001
gguaucauacacgauaguu

SEQ ID NO: 1316113 - RNA, 19 nt, Artificial Sequence
  Description of Artificial Sequence: Synthetic oligonucleotide
  Antisense strand to SEQ ID NO: 1316112
aacuaucguguaugauacc

SEQ ID NO: 1316114 - RNA, 19 nt, Artificial Sequence
  Description of Artificial Sequence: Synthetic oligonucleotide
  Sense strand starting at position 3115 of SEQ ID NO: 1242001
ucuguccucugccuauuua

SEQ ID NO: 1316115 - RNA, 19 nt, Artificial Sequence
  Description of Artificial Sequence: Synthetic oligonucleotide
  Antisense strand to SEQ ID NO: 1316114
uaaauaggcagaggacaga

SEQ ID NO: 1316116 - RNA, 19 nt, Artificial Sequence
  Description of Artificial Sequence: Synthetic oligonucleotide
  Sense strand starting at position 3116 of SEQ ID NO: 1242001
cuguccucugccuauuuau

SEQ ID NO: 1316117 - RNA, 19 nt, Artificial Sequence
  Description of Artificial Sequence: Synthetic oligonucleotide
  Antisense strand to SEQ ID NO: 1316116
auaaauaggcagaggacag

SEQ ID NO: 1316118 - RNA, 19 nt, Artificial Sequence
  Description of Artificial Sequence: Synthetic oligonucleotide
  Sense strand starting at position 3206 of SEQ ID NO: 1242001
ucccauauaguuggaauca

SEQ ID NO: 1316119 - RNA, 19 nt, Artificial Sequence
  Description of Artificial Sequence: Synthetic oligonucleotide
  Antisense strand to SEQ ID NO: 1316118
ugauuccaacuauauggga

SEQ ID NO: 1316120 - RNA, 19 nt, Artificial Sequence
  Description of Artificial Sequence: Synthetic oligonucleotide
  Sense strand starting at position 3267 of SEQ ID NO: 1242001
acuuaaaguucuuccaugu

SEQ ID NO: 1316121 - RNA, 19 nt, Artificial Sequence
  Description of Artificial Sequence: Synthetic oligonucleotide
  Antisense strand to SEQ ID NO: 1316120
acauggaagaacuuuaagu

SEQ ID NO: 1316122 - RNA, 19 nt, Artificial Sequence
  Description of Artificial Sequence: Synthetic oligonucleotide
  Sense strand starting at position 3499 of SEQ ID NO: 1242001
gcuggauuggaugguauau

SEQ ID NO: 1316123 - RNA, 19 nt, Artificial Sequence
  Description of Artificial Sequence: Synthetic oligonucleotide
  Antisense strand to SEQ ID NO: 1316122
auauaccauccaauccagc

SEQ ID NO: 1316124 - RNA, 19 nt, Artificial Sequence
  Description of Artificial Sequence: Synthetic oligonucleotide
  Sense strand starting at position 3501 of SEQ ID NO: 1242001
uggauuggaugguauauuu

SEQ ID NO: 1316125 - RNA, 19 nt, Artificial Sequence
  Description of Artificial Sequence: Synthetic oligonucleotide
  Antisense strand to SEQ ID NO: 1316124
aaauauaccauccaaucca

SEQ ID NO: 1316126 - RNA, 19 nt, Artificial Sequence
  Description of Artificial Sequence: Synthetic oligonucleotide
  Sense strand starting at position 3817 of SEQ ID NO: 1242001
uuaagaguucuggguauau

SEQ ID NO: 1316127 - RNA, 19 nt, Artificial Sequence
  Description of Artificial Sequence: Synthetic oligonucleotide
  Antisense strand to SEQ ID NO: 1316126
auauacccagaacucuuaa

SEQ ID NO: 1316128 - RNA, 19 nt, Artificial Sequence
  Description of Artificial Sequence: Synthetic oligonucleotide
  Sense strand starting at position 3819 of SEQ ID NO: 1242001
aagaguucuggguauauug

SEQ ID NO: 1316129 - RNA, 19 nt, Artificial Sequence
  Description of Artificial Sequence: Synthetic oligonucleotide
  Antisense strand to SEQ ID NO: 1316128
caauauacccagaacucuu

SEQ ID NO: 1316130 - RNA, 19 nt, Artificial Sequence
  Description of Artificial Sequence: Synthetic oligonucleotide
  Sense strand starting at position 3821 of SEQ ID NO: 1242001
gaguucuggguauauugua

SEQ ID NO: 1316131 - RNA, 19 nt, Artificial Sequence
  Description of Artificial Sequence: Synthetic oligonucleotide
  Antisense strand to SEQ ID NO: 1316130
uacaauauacccagaacuc

SEQ ID NO: 1316132 - RNA, 19 nt, Artificial Sequence
  Description of Artificial Sequence: Synthetic oligonucleotide
  Sense strand starting at position 3830 of SEQ ID NO: 1242001
guauauuguagauaacagu

SEQ ID NO: 1316133 - RNA, 19 nt, Artificial Sequence
  Description of Artificial Sequence: Synthetic oligonucleotide
  Antisense strand to SEQ ID NO: 1316132
acuguuaucuacaauauac

SEQ ID NO: 1316134 - RNA, 19 nt, Artificial Sequence
  Description of Artificial Sequence: Synthetic oligonucleotide
  Sense strand starting at position 3983 of SEQ ID NO: 1242001
uugguauugcccuaaaguc

SEQ ID NO: 1316135 - RNA, 19 nt, Artificial Sequence
  Description of Artificial Sequence: Synthetic oligonucleotide
  Antisense strand to SEQ ID NO: 1316134
gacuuuagggcaauaccaa

SEQ ID NO: 1316136 - RNA, 19 nt, Artificial Sequence
  Description of Artificial Sequence: Synthetic oligonucleotide
  Sense strand starting at position 25 of SEQ ID NO: 1242002
ugagcagcucuaugagaua

SEQ ID NO: 1316137 - RNA, 19 nt, Artificial Sequence
  Description of Artificial Sequence: Synthetic oligonucleotide
  Antisense strand to SEQ ID NO: 1316136
uaucucauagagcugcuca

SEQ ID NO: 1316138 - RNA, 19 nt, Artificial Sequence
  Description of Artificial Sequence: Synthetic oligonucleotide
  Sense strand starting at position 152 of SEQ ID NO: 1242002
uaccaagagguuugaaauc

SEQ ID NO: 1316139 - RNA, 19 nt, Artificial Sequence
  Description of Artificial Sequence: Synthetic oligonucleotide
  Antisense strand to SEQ ID NO: 1316138
gauuucaaaccucuuggua

SEQ ID NO: 1316140 - RNA, 19 nt, Artificial Sequence
  Description of Artificial Sequence: Synthetic oligonucleotide
  Sense strand starting at position 172 of SEQ ID NO: 1242002
agaggaggcuuagcaugaa

SEQ ID NO: 1316141 - RNA, 19 nt, Artificial Sequence
  Description of Artificial Sequence: Synthetic oligonucleotide
  Antisense strand to SEQ ID NO: 1316140
uucaugcuaagccuccucu

SEQ ID NO: 1316142 - RNA, 19 nt, Artificial Sequence
  Description of Artificial Sequence: Synthetic oligonucleotide
  Sense strand starting at position 175 of SEQ ID NO: 1242002
ggaggcuuagcaugaagga

SEQ ID NO: 1316143 - RNA, 19 nt, Artificial Sequence
  Description of Artificial Sequence: Synthetic oligonucleotide
  Antisense strand to SEQ ID NO: 1316142
uccuucaugcuaagccucc

SEQ ID NO: 1316144 - RNA, 19 nt, Artificial Sequence
  Description of Artificial Sequence: Synthetic oligonucleotide
  Sense strand starting at position 202 of SEQ ID NO: 1242002
gaguuacagcaguaucugu

SEQ ID NO: 1316145 - RNA, 19 nt, Artificial Sequence
  Description of Artificial Sequence: Synthetic oligonucleotide
  Antisense strand to SEQ ID NO: 1316144
acagauacugcuguaacuc

SEQ ID NO: 1316146 - RNA, 19 nt, Artificial Sequence
  Description of Artificial Sequence: Synthetic oligonucleotide
  Sense strand starting at position 207 of SEQ ID NO: 1242002
acagcaguaucugucagaa

SEQ ID NO: 1316147 - RNA, 19 nt, Artificial Sequence
  Description of Artificial Sequence: Synthetic oligonucleotide
  Antisense strand to SEQ ID NO: 1316146
uucugacagauacugcugu

SEQ ID NO: 1316148 - RNA, 19 nt, Artificial Sequence
  Description of Artificial Sequence: Synthetic oligonucleotide
  Sense strand starting at position 258 of SEQ ID NO: 1242002
cccauauacugggcuuuga

SEQ ID NO: 1316149 - RNA, 19 nt, Artificial Sequence
  Description of Artificial Sequence: Synthetic oligonucleotide
  Antisense strand to SEQ ID NO: 1316148
ucaaagcccaguauauggg

SEQ ID NO: 1316150 - RNA, 19 nt, Artificial Sequence
  Description of Artificial Sequence: Synthetic oligonucleotide
  Sense strand starting at position 266 of SEQ ID NO: 1242002
cugggcuuugaccacauau

SEQ ID NO: 1316151 - RNA, 19 nt, Artificial Sequence
  Description of Artificial Sequence: Synthetic oligonucleotide
  Antisense strand to SEQ ID NO: 1316150
auauguggucaaagcccag

SEQ ID NO: 1316152 - RNA, 19 nt, Artificial Sequence
  Description of Artificial Sequence: Synthetic oligonucleotide
  Sense strand starting at position 268 of SEQ ID NO: 1242002
gggcuuugaccacauauau

SEQ ID NO: 1316153 - RNA, 19 nt, Artificial Sequence
  Description of Artificial Sequence: Synthetic oligonucleotide
  Antisense strand to SEQ ID NO: 1316152
auauauguggucaaagccc

SEQ ID NO: 1316154 - RNA, 19 nt, Artificial Sequence
  Description of Artificial Sequence: Synthetic oligonucleotide
  Sense strand starting at position 452 of SEQ ID NO: 1242002
ucucuuguuugucucauuu

SEQ ID NO: 1316155 - RNA, 19 nt, Artificial Sequence
  Description of Artificial Sequence: Synthetic oligonucleotide
  Antisense strand to SEQ ID NO: 1316154
aaaugagacaaacaagaga

SEQ ID NO: 1316156 - RNA, 19 nt, Artificial Sequence
  Description of Artificial Sequence: Synthetic oligonucleotide
  Sense strand starting at position 559 of SEQ ID NO: 1242002
uuaacagacguuugauaaa

SEQ ID NO: 1316157 - RNA, 19 nt, Artificial Sequence
  Description of Artificial Sequence: Synthetic oligonucleotide
  Antisense strand to SEQ ID NO: 1316156
uuuaucaaacgucuguuaa

SEQ ID NO: 1316158 - RNA, 19 nt, Artificial Sequence
  Description of Artificial Sequence: Synthetic oligonucleotide
  Sense strand starting at position 720 of SEQ ID NO: 1242002
gaaugcuacucacuaggua

SEQ ID NO: 1316159 - RNA, 19 nt, Artificial Sequence
  Description of Artificial Sequence: Synthetic oligonucleotide
  Antisense strand to SEQ ID NO: 1316158
uaccuagugaguagcauuc

SEQ ID NO: 1316160 - RNA, 19 nt, Artificial Sequence
  Description of Artificial Sequence: Synthetic oligonucleotide
  Sense strand starting at position 915 of SEQ ID NO: 1242002
guauucuuaccauggucaa

SEQ ID NO: 1316161 - RNA, 19 nt, Artificial Sequence
  Description of Artificial Sequence: Synthetic oligonucleotide
  Antisense strand to SEQ ID NO: 1316160
uugaccaugguaagaauac

SEQ ID NO: 1316162 - RNA, 19 nt, Artificial Sequence
  Description of Artificial Sequence: Synthetic oligonucleotide
  Sense strand starting at position 979 of SEQ ID NO: 1242002
ggaguugaaucaucuuauc

SEQ ID NO: 1316163 - RNA, 19 nt, Artificial Sequence
  Description of Artificial Sequence: Synthetic oligonucleotide
  Antisense strand to SEQ ID NO: 1316162
gauaagaugauucaacucc

SEQ ID NO: 1316164 - RNA, 19 nt, Artificial Sequence
  Description of Artificial Sequence: Synthetic oligonucleotide
  Sense strand starting at position 1001 of SEQ ID NO: 1242002
acuguugagcaccaugauu

SEQ ID NO: 1316165 - RNA, 19 nt, Artificial Sequence
  Description of Artificial Sequence: Synthetic oligonucleotide
  Antisense strand to SEQ ID NO: 1316164
aaucauggugcucaacagu

SEQ ID NO: 1316166 - RNA, 19 nt, Artificial Sequence
  Description of Artificial Sequence: Synthetic oligonucleotide
  Sense strand starting at position 1003 of SEQ ID NO: 1242002
uguugagcaccaugauuac

SEQ ID NO: 1316167 - RNA, 19 nt, Artificial Sequence
  Description of Artificial Sequence: Synthetic oligonucleotide
  Antisense strand to SEQ ID NO: 1316166
guaaucauggugcucaaca

SEQ ID NO: 1316168 - RNA, 19 nt, Artificial Sequence
  Description of Artificial Sequence: Synthetic oligonucleotide
  Sense strand starting at position 1142 of SEQ ID NO: 1242002
ccaagaacccagugaaugu

SEQ ID NO: 1316169 - RNA, 19 nt, Artificial Sequence
  Description of Artificial Sequence: Synthetic oligonucleotide
  Antisense strand to SEQ ID NO: 1316168
acauucacuggguucuugg

SEQ ID NO: 1316170 - RNA, 19 nt, Artificial Sequence
  Description of Artificial Sequence: Synthetic oligonucleotide
  Sense strand starting at position 1146 of SEQ ID NO: 1242002
gaacccagugaauguuuau

SEQ ID NO: 1316171 - RNA, 19 nt, Artificial Sequence
  Description of Artificial Sequence: Synthetic oligonucleotide
  Antisense strand to SEQ ID NO: 1316170
auaaacauucacuggguuc

SEQ ID NO: 1316172 - RNA, 19 nt, Artificial Sequence
  Description of Artificial Sequence: Synthetic oligonucleotide
  Sense strand starting at position 1149 of SEQ ID NO: 1242002
cccagugaauguuuauuga

SEQ ID NO: 1316173 - RNA, 19 nt, Artificial Sequence
  Description of Artificial Sequence: Synthetic oligonucleotide
  Antisense strand to SEQ ID NO: 1316172
ucaauaaacauucacuggg

SEQ ID NO: 1316174 - RNA, 19 nt, Artificial Sequence
  Description of Artificial Sequence: Synthetic oligonucleotide
  Sense strand starting at position 1152 of SEQ ID NO: 1242002
agugaauguuuauugauga

SEQ ID NO: 1316175 - RNA, 19 nt, Artificial Sequence
  Description of Artificial Sequence: Synthetic oligonucleotide
  Antisense strand to SEQ ID NO: 1316174
ucaucaauaaacauucacu

SEQ ID NO: 1316176 - RNA, 19 nt, Artificial Sequence
  Description of Artificial Sequence: Synthetic oligonucleotide
  Sense strand starting at position 1214 of SEQ ID NO: 1242002
guauccuaccacgauuaca

SEQ ID NO: 1316177 - RNA, 19 nt, Artificial Sequence
  Description of Artificial Sequence: Synthetic oligonucleotide
  Antisense strand to SEQ ID NO: 1316176
uguaaucgugguaggauac

SEQ ID NO: 1316178 - RNA, 19 nt, Artificial Sequence
  Description of Artificial Sequence: Synthetic oligonucleotide
  Sense strand starting at position 1232 of SEQ ID NO: 1242002
acuuaaggaguuugcucau

SEQ ID NO: 1316179 - RNA, 19 nt, Artificial Sequence
  Description of Artificial Sequence: Synthetic oligonucleotide
  Antisense strand to SEQ ID NO: 1316178
augagcaaacuccuuaagu

SEQ ID NO: 1316180 - RNA, 19 nt, Artificial Sequence
  Description of Artificial Sequence: Synthetic oligonucleotide
  Sense strand starting at position 2419 of SEQ ID NO: 1242002
gggccagguaaguaauaua

SEQ ID NO: 1316181 - RNA, 19 nt, Artificial Sequence
  Description of Artificial Sequence: Synthetic oligonucleotide
  Antisense strand to SEQ ID NO: 1316180
uauauuacuuaccuggccc

SEQ ID NO: 1316182 - RNA, 19 nt, Artificial Sequence
  Description of Artificial Sequence: Synthetic oligonucleotide
  Sense strand starting at position 2426 of SEQ ID NO: 1242002
guaaguaauauaugugaag

SEQ ID NO: 1316183 - RNA, 19 nt, Artificial Sequence
  Description of Artificial Sequence: Synthetic oligonucleotide
  Antisense strand to SEQ ID NO: 1316182
cuucacauauauuacuuac

SEQ ID NO: 1316184 - RNA, 19 nt, Artificial Sequence
  Description of Artificial Sequence: Synthetic oligonucleotide
  Sense strand starting at position 2452 of SEQ ID NO: 1242002
gggauauaacgcuggugag

SEQ ID NO: 1316185 - RNA, 19 nt, Artificial Sequence
  Description of Artificial Sequence: Synthetic oligonucleotide
  Antisense strand to SEQ ID NO: 1316184
cucaccagcguuauauccc

SEQ ID NO: 1316186 - RNA, 19 nt, Artificial Sequence
  Description of Artificial Sequence: Synthetic oligonucleotide
  Sense strand starting at position 2467 of SEQ ID NO: 1242002
ugaguagugggaugugauc

SEQ ID NO: 1316187 - RNA, 19 nt, Artificial Sequence
  Description of Artificial Sequence: Synthetic oligonucleotide
  Antisense strand to SEQ ID NO: 1316186
gaucacaucccacuacuca

SEQ ID NO: 1316188 - RNA, 19 nt, Artificial Sequence
  Description of Artificial Sequence: Synthetic oligonucleotide
  Sense strand starting at position 2478 of SEQ ID NO: 1242002
augugauccgacugggaga

SEQ ID NO: 1316189 - RNA, 19 nt, Artificial Sequence
  Description of Artificial Sequence: Synthetic oligonucleotide
  Antisense strand to SEQ ID NO: 1316188
ucucccagucggaucacau

SEQ ID NO: 1316190 - RNA, 19 nt, Artificial Sequence
  Description of Artificial Sequence: Synthetic oligonucleotide
  Sense strand starting at position 2533 of SEQ ID NO: 1242002
gagaaagaacagugcucaa

SEQ ID NO: 1316191 - RNA, 19 nt, Artificial Sequence
  Description of Artificial Sequence: Synthetic oligonucleotide
  Antisense strand to SEQ ID NO: 1316190
uugagcacuguucuuucuc

SEQ ID NO: 1316192 - RNA, 19 nt, Artificial Sequence
  Description of Artificial Sequence: Synthetic oligonucleotide
  Sense strand starting at position 2679 of SEQ ID NO: 1242002
aguagucccuacccugaaa

SEQ ID NO: 1316193 - RNA, 19 nt, Artificial Sequence
  Description of Artificial Sequence: Synthetic oligonucleotide
  Antisense strand to SEQ ID NO: 1316192
uuucaggguagggacuacu

SEQ ID NO: 1316194 - RNA, 19 nt, Artificial Sequence
  Description of Artificial Sequence: Synthetic oligonucleotide
  Sense strand starting at position 2712 of SEQ ID NO: 1242002
gugaguccugccuaacaac

SEQ ID NO: 1316195 - RNA, 19 nt, Artificial Sequence
  Description of Artificial Sequence: Synthetic oligonucleotide
  Antisense strand to SEQ ID NO: 1316194
guuguuaggcaggacucac

SEQ ID NO: 1316196 - RNA, 19 nt, Artificial Sequence
  Description of Artificial Sequence: Synthetic oligonucleotide
  Sense strand starting at position 2810 of SEQ ID NO: 1242002
aaauaugaacguugucaau

SEQ ID NO: 1316197 - RNA, 19 nt, Artificial Sequence
  Description of Artificial Sequence: Synthetic oligonucleotide
  Antisense strand to SEQ ID NO: 1316196
auugacaacguucauauuu

SEQ ID NO: 1316198 - RNA, 19 nt, Artificial Sequence
  Description of Artificial Sequence: Synthetic oligonucleotide
  Sense strand starting at position 2834 of SEQ ID NO: 1242002
guguauuuguaaucccauu

SEQ ID NO: 1316199 - RNA, 19 nt, Artificial Sequence
  Description of Artificial Sequence: Synthetic oligonucleotide
  Antisense strand to SEQ ID NO: 1316198
aaugggauuacaaauacac

SEQ ID NO: 1316200 - RNA, 19 nt, Artificial Sequence
  Description of Artificial Sequence: Synthetic oligonucleotide
  Sense strand starting at position 2948 of SEQ ID NO: 1242002
auuaacuuuggguguauga

SEQ ID NO: 1316201 - RNA, 19 nt, Artificial Sequence
  Description of Artificial Sequence: Synthetic oligonucleotide
  Antisense strand to SEQ ID NO: 1316200
ucauacacccaaaguuaau

SEQ ID NO: 1316202 - RNA, 19 nt, Artificial Sequence
  Description of Artificial Sequence: Synthetic oligonucleotide
  Sense strand starting at position 2950 of SEQ ID NO: 1242002
uaacuuuggguguaugaau

SEQ ID NO: 1316203 - RNA, 19 nt, Artificial Sequence
  Description of Artificial Sequence: Synthetic oligonucleotide
  Antisense strand to SEQ ID NO: 1316202
auucauacacccaaaguua

SEQ ID NO: 1316204 - RNA, 19 nt, Artificial Sequence
  Description of Artificial Sequence: Synthetic oligonucleotide
  Sense strand starting at position 2959 of SEQ ID NO: 1242002
guguaugaauccucagacu

SEQ ID NO: 1316205 - RNA, 19 nt, Artificial Sequence
  Description of Artificial Sequence: Synthetic oligonucleotide
  Antisense strand to SEQ ID NO: 1316204
agucugaggauucauacac

SEQ ID NO: 1316206 - RNA, 19 nt, Artificial Sequence
  Description of Artificial Sequence: Synthetic oligonucleotide
  Sense strand starting at position 3632 of SEQ ID NO: 1242002
agaauauucugagcauacu

SEQ ID NO: 1316207 - RNA, 19 nt, Artificial Sequence
  Description of Artificial Sequence: Synthetic oligonucleotide
  Antisense strand to SEQ ID NO: 1316206
aguaugcucagaauauucu

SEQ ID NO: 1316208 - RNA, 19 nt, Artificial Sequence
  Description of Artificial Sequence: Synthetic oligonucleotide
  Sense strand starting at position 3755 of SEQ ID NO: 1242002
augauauauuggucaaggu

SEQ ID NO: 1316209 - RNA, 19 nt, Artificial Sequence
  Description of Artificial Sequence: Synthetic oligonucleotide
  Antisense strand to SEQ ID NO: 1316208
accuugaccaauauaucau

SEQ ID NO: 1316210 - RNA, 19 nt, Artificial Sequence
  Description of Artificial Sequence: Synthetic oligonucleotide
  Sense strand starting at position 3756 of SEQ ID NO: 1242002
ugauauauuggucaagguu

SEQ ID NO: 1316211 - RNA, 19 nt, Artificial Sequence
  Description of Artificial Sequence: Synthetic oligonucleotide
  Antisense strand to SEQ ID NO: 1316210
aaccuugaccaauauauca

SEQ ID NO: 1316212 - RNA, 19 nt, Artificial Sequence
  Description of Artificial Sequence: Synthetic oligonucleotide
  Sense strand starting at position 3775 of SEQ ID NO: 1242002
cuuaguuguggauaacgua

SEQ ID NO: 1316213 - RNA, 19 nt, Artificial Sequence
  Description of Artificial Sequence: Synthetic oligonucleotide
  Antisense strand to SEQ ID NO: 1316212
uacguuauccacaacuaag

SEQ ID NO: 1316214 - RNA, 19 nt, Artificial Sequence
  Description of Artificial Sequence: Synthetic oligonucleotide
  Sense strand starting at position 3855 of SEQ ID NO: 1242002
ggaagaacuuaagaaauca

SEQ ID NO: 1316215 - RNA, 19 nt, Artificial Sequence
  Description of Artificial Sequence: Synthetic oligonucleotide
  Antisense strand to SEQ ID NO: 1316214
ugauuucuuaaguucuucc

SEQ ID NO: 1316216 - RNA, 19 nt, Artificial Sequence
  Description of Artificial Sequence: Synthetic oligonucleotide
  Sense strand starting at position 17 of SEQ ID NO: 1242003
cuuccugggaguugauaau

SEQ ID NO: 1316217 - RNA, 19 nt, Artificial Sequence
  Description of Artificial Sequence: Synthetic oligonucleotide
  Antisense strand to SEQ ID NO: 1316216
auuaucaacucccaggaag

SEQ ID NO: 1316218 - RNA, 19 nt, Artificial Sequence
  Description of Artificial Sequence: Synthetic oligonucleotide
  Sense strand starting at position 23 of SEQ ID NO: 1242003
gggaguugauaaucaggcu

SEQ ID NO: 1316219 - RNA, 19 nt, Artificial Sequence
  Description of Artificial Sequence: Synthetic oligonucleotide
  Antisense strand to SEQ ID NO: 1316218
agccugauuaucaacuccc

SEQ ID NO: 1316220 - RNA, 19 nt, Artificial Sequence
  Description of Artificial Sequence: Synthetic oligonucleotide
  Sense strand starting at position 68 of SEQ ID NO: 1242003
gagagagggcugcauuauc

SEQ ID NO: 1316221 - RNA, 19 nt, Artificial Sequence
  Description of Artificial Sequence: Synthetic oligonucleotide
  Antisense strand to SEQ ID NO: 1316220
gauaaugcagcccucucuc

SEQ ID NO: 1316222 - RNA, 19 nt, Artificial Sequence
  Description of Artificial Sequence: Synthetic oligonucleotide
  Sense strand starting at position 326 of SEQ ID NO: 1242003
ccuuaaaugugacauuugu

SEQ ID NO: 1316223 - RNA, 19 nt, Artificial Sequence
  Description of Artificial Sequence: Synthetic oligonucleotide
  Antisense strand to SEQ ID NO: 1316222
acaaaugucacauuuaagg

SEQ ID NO: 1316224 - RNA, 19 nt, Artificial Sequence
  Description of Artificial Sequence: Synthetic oligonucleotide
  Sense strand starting at position 397 of SEQ ID NO: 1242003
cugggugacggugacauau

SEQ ID NO: 1316225 - RNA, 19 nt, Artificial Sequence
  Description of Artificial Sequence: Synthetic oligonucleotide
  Antisense strand to SEQ ID NO: 1316224
auaugucaccgucacccag

SEQ ID NO: 1316226 - RNA, 19 nt, Artificial Sequence
  Description of Artificial Sequence: Synthetic oligonucleotide
  Sense strand starting at position 428 of SEQ ID NO: 1242003
uugucuuguccauaagcac

SEQ ID NO: 1316227 - RNA, 19 nt, Artificial Sequence
  Description of Artificial Sequence: Synthetic oligonucleotide
  Antisense strand to SEQ ID NO: 1316226
gugcuuauggacaagacaa

SEQ ID NO: 1316228 - RNA, 19 nt, Artificial Sequence
  Description of Artificial Sequence: Synthetic oligonucleotide
  Sense strand starting at position 593 of SEQ ID NO: 1242003
cucuauuuguaggaacuau

SEQ ID NO: 1316229 - RNA, 19 nt, Artificial Sequence
  Description of Artificial Sequence: Synthetic oligonucleotide
  Antisense strand to SEQ ID NO: 1316228
auaguuccuacaaauagag

SEQ ID NO: 1316230 - RNA, 19 nt, Artificial Sequence
  Description of Artificial Sequence: Synthetic oligonucleotide
  Sense strand starting at position 881 of SEQ ID NO: 1242003
aucuguuucugucuaaaua

SEQ ID NO: 1316231 - RNA, 19 nt, Artificial Sequence
  Description of Artificial Sequence: Synthetic oligonucleotide
  Antisense strand to SEQ ID NO: 1316230
uauuuagacagaaacagau

SEQ ID NO: 1316232 - RNA, 19 nt, Artificial Sequence
  Description of Artificial Sequence: Synthetic oligonucleotide
  Sense strand starting at position 882 of SEQ ID NO: 1242003
ucuguuucugucuaaauaa

SEQ ID NO: 1316233 - RNA, 19 nt, Artificial Sequence
  Description of Artificial Sequence: Synthetic oligonucleotide
  Antisense strand to SEQ ID NO: 1316232
uuauuuagacagaaacaga

SEQ ID NO: 1316234 - RNA, 19 nt, Artificial Sequence
  Description of Artificial Sequence: Synthetic oligonucleotide
  Sense strand starting at position 981 of SEQ ID NO: 1242003
cacgguaagcaugacaaau

SEQ ID NO: 1316235 - RNA, 19 nt, Artificial Sequence
  Description of Artificial Sequence: Synthetic oligonucleotide
  Antisense strand to SEQ ID NO: 1316234
auuugucaugcuuaccgug

SEQ ID NO: 1316236 - RNA, 19 nt, Artificial Sequence
  Description of Artificial Sequence: Synthetic oligonucleotide
  Sense strand starting at position 1003 of SEQ ID NO: 1242003
uucaguugucaaggguaag

SEQ ID NO: 1316237 - RNA, 19 nt, Artificial Sequence
  Description of Artificial Sequence: Synthetic oligonucleotide
  Antisense strand to SEQ ID NO: 1316236
cuuacccuugacaacugaa

SEQ ID NO: 1316238 - RNA, 19 nt, Artificial Sequence
  Description of Artificial Sequence: Synthetic oligonucleotide
  Sense strand starting at position 1367 of SEQ ID NO: 1242003
aucacucccucgucaagaa

SEQ ID NO: 1316239 - RNA, 19 nt, Artificial Sequence
  Description of Artificial Sequence: Synthetic oligonucleotide
  Antisense strand to SEQ ID NO: 1316238
uucuugacgagggagugau

SEQ ID NO: 1316240 - RNA, 19 nt, Artificial Sequence
  Description of Artificial Sequence: Synthetic oligonucleotide
  Sense strand starting at position 1368 of SEQ ID NO: 1242003
ucacucccucgucaagaau

SEQ ID NO: 1316241 - RNA, 19 nt, Artificial Sequence
  Description of Artificial Sequence: Synthetic oligonucleotide
  Antisense strand to SEQ ID NO: 1316240
auucuugacgagggaguga

SEQ ID NO: 1316242 - RNA, 19 nt, Artificial Sequence
  Description of Artificial Sequence: Synthetic oligonucleotide
  Sense strand starting at position 1376 of SEQ ID NO: 1242003
ucgucaagaauaugcugau

SEQ ID NO: 1316243 - RNA, 19 nt, Artificial Sequence
  Description of Artificial Sequence: Synthetic oligonucleotide
  Antisense strand to SEQ ID NO: 1316242
aucagcauauucuugacga

SEQ ID NO: 1316244 - RNA, 19 nt, Artificial Sequence
  Description of Artificial Sequence: Synthetic oligonucleotide
  Sense strand starting at position 1377 of SEQ ID NO: 1242003
cgucaagaauaugcugauu

SEQ ID NO: 1316245 - RNA, 19 nt, Artificial Sequence
  Description of Artificial Sequence: Synthetic oligonucleotide
  Antisense strand to SEQ ID NO: 1316244
aaucagcauauucuugacg

SEQ ID NO: 1316246 - RNA, 19 nt, Artificial Sequence
  Description of Artificial Sequence: Synthetic oligonucleotide
  Sense strand starting at position 1691 of SEQ ID NO: 1242003
ggugacgguaccugaugaa

SEQ ID NO: 1316247 - RNA, 19 nt, Artificial Sequence
  Description of Artificial Sequence: Synthetic oligonucleotide
  Antisense strand to SEQ ID NO: 1316246
uucaucagguaccgucacc

SEQ ID NO: 1316248 - RNA, 19 nt, Artificial Sequence
  Description of Artificial Sequence: Synthetic oligonucleotide
  Sense strand starting at position 2117 of SEQ ID NO: 1242003
gguccuuccugauuggauc

SEQ ID NO: 1316249 - RNA, 19 nt, Artificial Sequence
  Description of Artificial Sequence: Synthetic oligonucleotide
  Antisense strand to SEQ ID NO: 1316248
gauccaaucaggaaggacc

SEQ ID NO: 1316250 - RNA, 19 nt, Artificial Sequence
  Description of Artificial Sequence: Synthetic oligonucleotide
  Sense strand starting at position 2161 of SEQ ID NO: 1242003
agccaauugagaggagguu

SEQ ID NO: 1316251 - RNA, 19 nt, Artificial Sequence
  Description of Artificial Sequence: Synthetic oligonucleotide
  Antisense strand to SEQ ID NO: 1316250
aaccuccucucaauuggcu

SEQ ID NO: 1316252 - RNA, 19 nt, Artificial Sequence
  Description of Artificial Sequence: Synthetic oligonucleotide
  Sense strand starting at position 2188 of SEQ ID NO: 1242003
auuauugaugacggaguca

SEQ ID NO: 1316253 - RNA, 19 nt, Artificial Sequence
  Description of Artificial Sequence: Synthetic oligonucleotide
  Antisense strand to SEQ ID NO: 1316252
ugacuccgucaucaauaau

SEQ ID NO: 1316254 - RNA, 19 nt, Artificial Sequence
  Description of Artificial Sequence: Synthetic oligonucleotide
  Sense strand starting at position 2193 of SEQ ID NO: 1242003
ugaugacggagucauucua

SEQ ID NO: 1316255 - RNA, 19 nt, Artificial Sequence
  Description of Artificial Sequence: Synthetic oligonucleotide
  Antisense strand to SEQ ID NO: 1316254
uagaaugacuccgucauca

SEQ ID NO: 1316256 - RNA, 19 nt, Artificial Sequence
  Description of Artificial Sequence: Synthetic oligonucleotide
  Sense strand starting at position 2501 of SEQ ID NO: 1242003
caggcucacgggcauaauu

SEQ ID NO: 1316257 - RNA, 19 nt, Artificial Sequence
  Description of Artificial Sequence: Synthetic oligonucleotide
  Antisense strand to SEQ ID NO: 1316256
aauuaugcccgugagccug

SEQ ID NO: 1316258 - RNA, 19 nt, Artificial Sequence
  Description of Artificial Sequence: Synthetic oligonucleotide
  Sense strand starting at position 2725 of SEQ ID NO: 1242003
acaugugagucauugucac

SEQ ID NO: 1316259 - RNA, 19 nt, Artificial Sequence
  Description of Artificial Sequence: Synthetic oligonucleotide
  Antisense strand to SEQ ID NO: 1316258
gugacaaugacucacaugu

SEQ ID NO: 1316260 - RNA, 19 nt, Artificial Sequence
  Description of Artificial Sequence: Synthetic oligonucleotide
  Sense strand starting at position 3088 of SEQ ID NO: 1242003
ucacuuaucuaaguugaga

SEQ ID NO: 1316261 - RNA, 19 nt, Artificial Sequence
  Description of Artificial Sequence: Synthetic oligonucleotide
  Antisense strand to SEQ ID NO: 1316260
ucucaacuuagauaaguga

SEQ ID NO: 1316262 - RNA, 19 nt, Artificial Sequence
  Description of Artificial Sequence: Synthetic oligonucleotide
  Sense strand starting at position 3133 of SEQ ID NO: 1242003
ccuugauuguagcuuagga

SEQ ID NO: 1316263 - RNA, 19 nt, Artificial Sequence
  Description of Artificial Sequence: Synthetic oligonucleotide
  Antisense strand to SEQ ID NO: 1316262
uccuaagcuacaaucaagg

SEQ ID NO: 1316264 - RNA, 19 nt, Artificial Sequence
  Description of Artificial Sequence: Synthetic oligonucleotide
  Sense strand starting at position 3135 of SEQ ID NO: 1242003
uugauuguagcuuaggaau

SEQ ID NO: 1316265 - RNA, 19 nt, Artificial Sequence
  Description of Artificial Sequence: Synthetic oligonucleotide
  Antisense strand to SEQ ID NO: 1316264
auuccuaagcuacaaucaa

SEQ ID NO: 1316266 - RNA, 19 nt, Artificial Sequence
  Description of Artificial Sequence: Synthetic oligonucleotide
  Sense strand starting at position 3148 of SEQ ID NO: 1242003
aggaauauuucuuaguugu

SEQ ID NO: 1316267 - RNA, 19 nt, Artificial Sequence
  Description of Artificial Sequence: Synthetic oligonucleotide
  Antisense strand to SEQ ID NO: 1316266
acaacuaagaaauauuccu

SEQ ID NO: 1316268 - RNA, 19 nt, Artificial Sequence
  Description of Artificial Sequence: Synthetic oligonucleotide
  Sense strand starting at position 3390 of SEQ ID NO: 1242003
gauucugauucgguaggua

SEQ ID NO: 1316269 - RNA, 19 nt, Artificial Sequence
  Description of Artificial Sequence: Synthetic oligonucleotide
  Antisense strand to SEQ ID NO: 1316268
uaccuaccgaaucagaauc

SEQ ID NO: 1316270 - RNA, 19 nt, Artificial Sequence
  Description of Artificial Sequence: Synthetic oligonucleotide
  Sense strand starting at position 3474 of SEQ ID NO: 1242003
uggaccauacuuggaguau

SEQ ID NO: 1316271 - RNA, 19 nt, Artificial Sequence
  Description of Artificial Sequence: Synthetic oligonucleotide
  Antisense strand to SEQ ID NO: 1316270
auacuccaaguauggucca

SEQ ID NO: 1316272 - RNA, 19 nt, Artificial Sequence
  Description of Artificial Sequence: Synthetic oligonucleotide
  Sense strand starting at position 3523 of SEQ ID NO: 1242003
ggguuugaaccuugacuau

SEQ ID NO: 1316273 - RNA, 19 nt, Artificial Sequence
  Description of Artificial Sequence: Synthetic oligonucleotide
  Antisense strand to SEQ ID NO: 1316272
auagucaagguucaaaccc

SEQ ID NO: 1316274 - RNA, 19 nt, Artificial Sequence
  Description of Artificial Sequence: Synthetic oligonucleotide
  Sense strand starting at position 3526 of SEQ ID NO: 1242003
uuugaaccuugacuaugua

SEQ ID NO: 1316275 - RNA, 19 nt, Artificial Sequence
  Description of Artificial Sequence: Synthetic oligonucleotide
  Antisense strand to SEQ ID NO: 1316274
uacauagucaagguucaaa

SEQ ID NO: 1316276 - RNA, 19 nt, Artificial Sequence
  Description of Artificial Sequence: Synthetic oligonucleotide
  Sense strand starting at position 3545 of SEQ ID NO: 1242003
aauuaauggcugugugauu

SEQ ID NO: 1316277 - RNA, 19 nt, Artificial Sequence
  Description of Artificial Sequence: Synthetic oligonucleotide
  Antisense strand to SEQ ID NO: 1316276
aaucacacagccauuaauu

SEQ ID NO: 1316278 - RNA, 19 nt, Artificial Sequence
  Description of Artificial Sequence: Synthetic oligonucleotide
  Sense strand starting at position 3546 of SEQ ID NO: 1242003
auuaauggcugugugauuu

SEQ ID NO: 1316279 - RNA, 19 nt, Artificial Sequence
  Description of Artificial Sequence: Synthetic oligonucleotide
  Antisense strand to SEQ ID NO: 1316278
aaaucacacagccauuaau

SEQ ID NO: 1316280 - RNA, 19 nt, Artificial Sequence
  Description of Artificial Sequence: Synthetic oligonucleotide
  Sense strand starting at position 3587 of SEQ ID NO: 1242003
ugcccuaguuuccuuaaga

SEQ ID NO: 1316281 - RNA, 19 nt, Artificial Sequence
  Description of Artificial Sequence: Synthetic oligonucleotide
  Antisense strand to SEQ ID NO: 1316280
ucuuaaggaaacuagggca

SEQ ID NO: 1316282 - RNA, 19 nt, Artificial Sequence
  Description of Artificial Sequence: Synthetic oligonucleotide
  Sense strand starting at position 3588 of SEQ ID NO: 1242003
gcccuaguuuccuuaagag

SEQ ID NO: 1316283 - RNA, 19 nt, Artificial Sequence
  Description of Artificial Sequence: Synthetic oligonucleotide
  Antisense strand to SEQ ID NO: 1316282
cucuuaaggaaacuagggc

SEQ ID NO: 1316284 - RNA, 19 nt, Artificial Sequence
  Description of Artificial Sequence: Synthetic oligonucleotide
  Sense strand starting at position 3612 of SEQ ID NO: 1242003
uggaaacuccuuuggaguu

SEQ ID NO: 1316285 - RNA, 19 nt, Artificial Sequence
  Description of Artificial Sequence: Synthetic oligonucleotide
  Antisense strand to SEQ ID NO: 1316284
aacuccaaaggaguuucca

SEQ ID NO: 1316286 - RNA, 19 nt, Artificial Sequence
  Description of Artificial Sequence: Synthetic oligonucleotide
  Sense strand starting at position 3652 of SEQ ID NO: 1242003
gagggaauuguauguaacu

SEQ ID NO: 1316287 - RNA, 19 nt, Artificial Sequence
  Description of Artificial Sequence: Synthetic oligonucleotide
  Antisense strand to SEQ ID NO: 1316286
aguuacauacaauucccuc

SEQ ID NO: 1316288 - RNA, 19 nt, Artificial Sequence
  Description of Artificial Sequence: Synthetic oligonucleotide
  Sense strand starting at position 3653 of SEQ ID NO: 1242003
agggaauuguauguaacua

SEQ ID NO: 1316289 - RNA, 19 nt, Artificial Sequence
  Description of Artificial Sequence: Synthetic oligonucleotide
  Antisense strand to SEQ ID NO: 1316288
uaguuacauacaauucccu

SEQ ID NO: 1316290 - RNA, 19 nt, Artificial Sequence
  Description of Artificial Sequence: Synthetic oligonucleotide
  Sense strand starting at position 3852 of SEQ ID NO: 1242003
gaaagcaaaggcugacaua

SEQ ID NO: 1316291 - RNA, 19 nt, Artificial Sequence
  Description of Artificial Sequence: Synthetic oligonucleotide
  Antisense strand to SEQ ID NO: 1316290
uaugucagccuuugcuuuc

SEQ ID NO: 1316292 - RNA, 19 nt, Artificial Sequence
  Description of Artificial Sequence: Synthetic oligonucleotide
  Sense strand starting at position 3855 of SEQ ID NO: 1242003
agcaaaggcugacauauuu

SEQ ID NO: 1316293 - RNA, 19 nt, Artificial Sequence
  Description of Artificial Sequence: Synthetic oligonucleotide
  Antisense strand to SEQ ID NO: 1316292
aaauaugucagccuuugcu

SEQ ID NO: 1316294 - RNA, 19 nt, Artificial Sequence
  Description of Artificial Sequence: Synthetic oligonucleotide
  Sense strand starting at position 3862 of SEQ ID NO: 1242003
gcugacauauuugacaaca

SEQ ID NO: 1316295 - RNA, 19 nt, Artificial Sequence
  Description of Artificial Sequence: Synthetic oligonucleotide
  Antisense strand to SEQ ID NO: 1316294
uguugucaaauaugucagc

SEQ ID NO: 1316296 - RNA, 19 nt, Artificial Sequence
  Description of Artificial Sequence: Synthetic oligonucleotide
  Sense strand starting at position 2072 of SEQ ID NO: 1242004
guuggaguagcucaguguu

SEQ ID NO: 1316297 - RNA, 19 nt, Artificial Sequence
  Description of Artificial Sequence: Synthetic oligonucleotide
  Antisense strand to SEQ ID NO: 1316296
aacacugagcuacuccaac

SEQ ID NO: 1316298 - RNA, 19 nt, Artificial Sequence
  Description of Artificial Sequence: Synthetic oligonucleotide
  Sense strand starting at position 2162 of SEQ ID NO: 1242004
caugcaagagcguaacagu

SEQ ID NO: 1316299 - RNA, 19 nt, Artificial Sequence
  Description of Artificial Sequence: Synthetic oligonucleotide
  Antisense strand to SEQ ID NO: 1316298
acuguuacgcucuugcaug

SEQ ID NO: 1316300 - RNA, 19 nt, Artificial Sequence
  Description of Artificial Sequence: Synthetic oligonucleotide
  Sense strand starting at position 2173 of SEQ ID NO: 1242004
guaacaguuucuguguuac

SEQ ID NO: 1316301 - RNA, 19 nt, Artificial Sequence
  Description of Artificial Sequence: Synthetic oligonucleotide
  Antisense strand to SEQ ID NO: 1316300
guaacacagaaacuguuac

SEQ ID NO: 1316302 - RNA, 19 nt, Artificial Sequence
  Description of Artificial Sequence: Synthetic oligonucleotide
  Sense strand starting at position 2236 of SEQ ID NO: 1242004
uuacauggccuucguaaca

SEQ ID NO: 1316303 - RNA, 19 nt, Artificial Sequence
  Description of Artificial Sequence: Synthetic oligonucleotide
  Antisense strand to SEQ ID NO: 1316302
uguuacgaaggccauguaa

SEQ ID NO: 1316304 - RNA, 19 nt, Artificial Sequence
  Description of Artificial Sequence: Synthetic oligonucleotide
  Sense strand starting at position 2241 of SEQ ID NO: 1242004
uggccuucguaacauuuaa

SEQ ID NO: 1316305 - RNA, 19 nt, Artificial Sequence
  Description of Artificial Sequence: Synthetic oligonucleotide
  Antisense strand to SEQ ID NO: 1316304
uuaaauguuacgaaggcca

SEQ ID NO: 1316306 - RNA, 19 nt, Artificial Sequence
  Description of Artificial Sequence: Synthetic oligonucleotide
  Sense strand starting at position 2287 of SEQ ID NO: 1242004
ugggcaauuuaccgaugua

SEQ ID NO: 1316307 - RNA, 19 nt, Artificial Sequence
  Description of Artificial Sequence: Synthetic oligonucleotide
  Antisense strand to SEQ ID NO: 1316306
uacaucgguaaauugccca

SEQ ID NO: 1316308 - RNA, 19 nt, Artificial Sequence
  Description of Artificial Sequence: Synthetic oligonucleotide
  Sense strand starting at position 2290 of SEQ ID NO: 1242004
gcaauuuaccgauguacug

SEQ ID NO: 1316309 - RNA, 19 nt, Artificial Sequence
  Description of Artificial Sequence: Synthetic oligonucleotide
  Antisense strand to SEQ ID NO: 1316308
caguacaucgguaaauugc

SEQ ID NO: 1316310 - RNA, 19 nt, Artificial Sequence
  Description of Artificial Sequence: Synthetic oligonucleotide
  Sense strand starting at position 2301 of SEQ ID NO: 1242004
auguacugaugacuuguaa

SEQ ID NO: 1316311 - RNA, 19 nt, Artificial Sequence
  Description of Artificial Sequence: Synthetic oligonucleotide
  Antisense strand to SEQ ID NO: 1316310
uuacaagucaucaguacau

SEQ ID NO: 1316312 - RNA, 19 nt, Artificial Sequence
  Description of Artificial Sequence: Synthetic oligonucleotide
  Sense strand starting at position 2498 of SEQ ID NO: 1242004
ggagguaucuuuccacuau

SEQ ID NO: 1316313 - RNA, 19 nt, Artificial Sequence
  Description of Artificial Sequence: Synthetic oligonucleotide
  Antisense strand to SEQ ID NO: 1316312
auaguggaaagauaccucc

SEQ ID NO: 1316314 - RNA, 19 nt, Artificial Sequence
  Description of Artificial Sequence: Synthetic oligonucleotide
  Sense strand starting at position 2502 of SEQ ID NO: 1242004
guaucuuuccacuauuagc

SEQ ID NO: 1316315 - RNA, 19 nt, Artificial Sequence
  Description of Artificial Sequence: Synthetic oligonucleotide
  Antisense strand to SEQ ID NO: 1316314
gcuaauaguggaaagauac

SEQ ID NO: 1316316 - RNA, 19 nt, Artificial Sequence
  Description of Artificial Sequence: Synthetic oligonucleotide
  Sense strand starting at position 2517 of SEQ ID NO: 1242004
uagcaaugcgguguguauu

SEQ ID NO: 1316317 - RNA, 19 nt, Artificial Sequence
  Description of Artificial Sequence: Synthetic oligonucleotide
  Antisense strand to SEQ ID NO: 1316316
aauacacaccgcauugcua

SEQ ID NO: 1316318 - RNA, 19 nt, Artificial Sequence
  Description of Artificial Sequence: Synthetic oligonucleotide
  Sense strand starting at position 2525 of SEQ ID NO: 1242004
cgguguguauucuuugaau

SEQ ID NO: 1316319 - RNA, 19 nt, Artificial Sequence
  Description of Artificial Sequence: Synthetic oligonucleotide
  Antisense strand to SEQ ID NO: 1316318
auucaaagaauacacaccg

SEQ ID NO: 1316320 - RNA, 19 nt, Artificial Sequence
  Description of Artificial Sequence: Synthetic oligonucleotide
  Sense strand starting at position 2527 of SEQ ID NO: 1242004
guguguauucuuugaauuc

SEQ ID NO: 1316321 - RNA, 19 nt, Artificial Sequence
  Description of Artificial Sequence: Synthetic oligonucleotide
  Antisense strand to SEQ ID NO: 1316320
gaauucaaagaauacacac

SEQ ID NO: 1316322 - RNA, 19 nt, Artificial Sequence
  Description of Artificial Sequence: Synthetic oligonucleotide
  Sense strand starting at position 2678 of SEQ ID NO: 1242004
ugaauuauaugacugugua

SEQ ID NO: 1316323 - RNA, 19 nt, Artificial Sequence
  Description of Artificial Sequence: Synthetic oligonucleotide
  Antisense strand to SEQ ID NO: 1316322
uacacagucauauaauuca

SEQ ID NO: 1316324 - RNA, 19 nt, Artificial Sequence
  Description of Artificial Sequence: Synthetic oligonucleotide
  Sense strand starting at position 2679 of SEQ ID NO: 1242004
gaauuauaugacuguguau

SEQ ID NO: 1316325 - RNA, 19 nt, Artificial Sequence
  Description of Artificial Sequence: Synthetic oligonucleotide
  Antisense strand to SEQ ID NO: 1316324
auacacagucauauaauuc

SEQ ID NO: 1316326 - RNA, 19 nt, Artificial Sequence
  Description of Artificial Sequence: Synthetic oligonucleotide
  Sense strand starting at position 2681 of SEQ ID NO: 1242004
auuauaugacuguguauac

SEQ ID NO: 1316327 - RNA, 19 nt, Artificial Sequence
  Description of Artificial Sequence: Synthetic oligonucleotide
  Antisense strand to SEQ ID NO: 1316326
guauacacagucauauaau

SEQ ID NO: 1316328 - RNA, 19 nt, Artificial Sequence
  Description of Artificial Sequence: Synthetic oligonucleotide
  Sense strand starting at position 2682 of SEQ ID NO: 1242004
uuauaugacuguguauacu

SEQ ID NO: 1316329 - RNA, 19 nt, Artificial Sequence
  Description of Artificial Sequence: Synthetic oligonucleotide
  Antisense strand to SEQ ID NO: 1316328
aguauacacagucauauaa

SEQ ID NO: 1316330 - RNA, 19 nt, Artificial Sequence
  Description of Artificial Sequence: Synthetic oligonucleotide
  Sense strand starting at position 2870 of SEQ ID NO: 1242004
cgagguguguuccuuaugu

SEQ ID NO: 1316331 - RNA, 19 nt, Artificial Sequence
  Description of Artificial Sequence: Synthetic oligonucleotide
  Antisense strand to SEQ ID NO: 1316330
acauaaggaacacaccucg

SEQ ID NO: 1316332 - RNA, 19 nt, Artificial Sequence
  Description of Artificial Sequence: Synthetic oligonucleotide
  Sense strand starting at position 2878 of SEQ ID NO: 1242004
guuccuuauguccggucua

SEQ ID NO: 1316333 - RNA, 19 nt, Artificial Sequence
  Description of Artificial Sequence: Synthetic oligonucleotide
  Antisense strand to SEQ ID NO: 1316332
uagaccggacauaaggaac

SEQ ID NO: 1316334 - RNA, 19 nt, Artificial Sequence
  Description of Artificial Sequence: Synthetic oligonucleotide
  Sense strand starting at position 2889 of SEQ ID NO: 1242004
ccggucuauucuguaaucu

SEQ ID NO: 1316335 - RNA, 19 nt, Artificial Sequence
  Description of Artificial Sequence: Synthetic oligonucleotide
  Antisense strand to SEQ ID NO: 1316334
agauuacagaauagaccgg

SEQ ID NO: 1316336 - RNA, 19 nt, Artificial Sequence
  Description of Artificial Sequence: Synthetic oligonucleotide
  Sense strand starting at position 2890 of SEQ ID NO: 1242004
cggucuauucuguaaucuc

SEQ ID NO: 1316337 - RNA, 19 nt, Artificial Sequence
  Description of Artificial Sequence: Synthetic oligonucleotide
  Antisense strand to SEQ ID NO: 1316336
gagauuacagaauagaccg

SEQ ID NO: 1316338 - RNA, 19 nt, Artificial Sequence
  Description of Artificial Sequence: Synthetic oligonucleotide
  Sense strand starting at position 3003 of SEQ ID NO: 1242004
gauguuccgccuugacuuu

SEQ ID NO: 1316339 - RNA, 19 nt, Artificial Sequence
  Description of Artificial Sequence: Synthetic oligonucleotide
  Antisense strand to SEQ ID NO: 1316338
aaagucaaggcggaacauc

SEQ ID NO: 1316340 - RNA, 19 nt, Artificial Sequence
  Description of Artificial Sequence: Synthetic oligonucleotide
  Sense strand starting at position 3009 of SEQ ID NO: 1242004
ccgccuugacuuuaaucga

SEQ ID NO: 1316341 - RNA, 19 nt, Artificial Sequence
  Description of Artificial Sequence: Synthetic oligonucleotide
  Antisense strand to SEQ ID NO: 1316340
ucgauuaaagucaaggcgg

SEQ ID NO: 1316342 - RNA, 19 nt, Artificial Sequence
  Description of Artificial Sequence: Synthetic oligonucleotide
  Sense strand starting at position 3012 of SEQ ID NO: 1242004
ccuugacuuuaaucgagaa

SEQ ID NO: 1316343 - RNA, 19 nt, Artificial Sequence
  Description of Artificial Sequence: Synthetic oligonucleotide
  Antisense strand to SEQ ID NO: 1316342
uucucgauuaaagucaagg

SEQ ID NO: 1316344 - RNA, 19 nt, Artificial Sequence
  Description of Artificial Sequence: Synthetic oligonucleotide
  Sense strand starting at position 3016 of SEQ ID NO: 1242004
gacuuuaaucgagaacgua

SEQ ID NO: 1316345 - RNA, 19 nt, Artificial Sequence
  Description of Artificial Sequence: Synthetic oligonucleotide
  Antisense strand to SEQ ID NO: 1316344
uacguucucgauuaaaguc

SEQ ID NO: 1316346 - RNA, 19 nt, Artificial Sequence
  Description of Artificial Sequence: Synthetic oligonucleotide
  Sense strand starting at position 3102 of SEQ ID NO: 1242004
ccucuucuagcguggacaa

SEQ ID NO: 1316347 - RNA, 19 nt, Artificial Sequence
  Description of Artificial Sequence: Synthetic oligonucleotide
  Antisense strand to SEQ ID NO: 1316346
uuguccacgcuagaagagg

SEQ ID NO: 1316348 - RNA, 19 nt, Artificial Sequence
  Description of Artificial Sequence: Synthetic oligonucleotide
  Sense strand starting at position 3103 of SEQ ID NO: 1242004
cucuucuagcguggacaaa

SEQ ID NO: 1316349 - RNA, 19 nt, Artificial Sequence
  Description of Artificial Sequence: Synthetic oligonucleotide
  Antisense strand to SEQ ID NO: 1316348
uuuguccacgcuagaagag

SEQ ID NO: 1316350 - RNA, 19 nt, Artificial Sequence
  Description of Artificial Sequence: Synthetic oligonucleotide
  Sense strand starting at position 3174 of SEQ ID NO: 1242004
guggaugagaagugugaug

SEQ ID NO: 1316351 - RNA, 19 nt, Artificial Sequence
  Description of Artificial Sequence: Synthetic oligonucleotide
  Antisense strand to SEQ ID NO: 1316350
caucacacuucucauccac

SEQ ID NO: 1316352 - RNA, 19 nt, Artificial Sequence
  Description of Artificial Sequence: Synthetic oligonucleotide
  Sense strand starting at position 3176 of SEQ ID NO: 1242004
ggaugagaagugugauggu

SEQ ID NO: 1316353 - RNA, 19 nt, Artificial Sequence
  Description of Artificial Sequence: Synthetic oligonucleotide
  Antisense strand to SEQ ID NO: 1316352
accaucacacuucucaucc

SEQ ID NO: 1316354 - RNA, 19 nt, Artificial Sequence
  Description of Artificial Sequence: Synthetic oligonucleotide
  Sense strand starting at position 3230 of SEQ ID NO: 1242004
acaaguauugaucauuggu

SEQ ID NO: 1316355 - RNA, 19 nt, Artificial Sequence
  Description of Artificial Sequence: Synthetic oligonucleotide
  Antisense strand to SEQ ID NO: 1316354
accaaugaucaauacuugu

SEQ ID NO: 1316356 - RNA, 19 nt, Artificial Sequence
  Description of Artificial Sequence: Synthetic oligonucleotide
  Sense strand starting at position 3232 of SEQ ID NO: 1242004
aaguauugaucauuggugu

SEQ ID NO: 1316357 - RNA, 19 nt, Artificial Sequence
  Description of Artificial Sequence: Synthetic oligonucleotide
  Antisense strand to SEQ ID NO: 1316356
acaccaaugaucaauacuu

SEQ ID NO: 1316358 - RNA, 19 nt, Artificial Sequence
  Description of Artificial Sequence: Synthetic oligonucleotide
  Sense strand starting at position 3238 of SEQ ID NO: 1242004
ugaucauuggugugucugu

SEQ ID NO: 1316359 - RNA, 19 nt, Artificial Sequence
  Description of Artificial Sequence: Synthetic oligonucleotide
  Antisense strand to SEQ ID NO: 1316358
acagacacaccaaugauca

SEQ ID NO: 1316360 - RNA, 19 nt, Artificial Sequence
  Description of Artificial Sequence: Synthetic oligonucleotide
  Sense strand starting at position 3547 of SEQ ID NO: 1242004
gugaguuaauacuuaguga

SEQ ID NO: 1316361 - RNA, 19 nt, Artificial Sequence
  Description of Artificial Sequence: Synthetic oligonucleotide
  Antisense strand to SEQ ID NO: 1316360
ucacuaaguauuaacucac

SEQ ID NO: 1316362 - RNA, 19 nt, Artificial Sequence
  Description of Artificial Sequence: Synthetic oligonucleotide
  Sense strand starting at position 3550 of SEQ ID NO: 1242004
aguuaauacuuagugaacu

SEQ ID NO: 1316363 - RNA, 19 nt, Artificial Sequence
  Description of Artificial Sequence: Synthetic oligonucleotide
  Antisense strand to SEQ ID NO: 1316362
aguucacuaaguauuaacu

SEQ ID NO: 1316364 - RNA, 19 nt, Artificial Sequence
  Description of Artificial Sequence: Synthetic oligonucleotide
  Sense strand starting at position 3661 of SEQ ID NO: 1242004
ccauuaguucugugcuucu

SEQ ID NO: 1316365 - RNA, 19 nt, Artificial Sequence
  Description of Artificial Sequence: Synthetic oligonucleotide
  Antisense strand to SEQ ID NO: 1316364
agaagcacagaacuaaugg

SEQ ID NO: 1316366 - RNA, 19 nt, Artificial Sequence
  Description of Artificial Sequence: Synthetic oligonucleotide
  Sense strand starting at position 3792 of SEQ ID NO: 1242004
ucugcuaauguuugaaaug

SEQ ID NO: 1316367 - RNA, 19 nt, Artificial Sequence
  Description of Artificial Sequence: Synthetic oligonucleotide
  Antisense strand to SEQ ID NO: 1316366
cauuucaaacauuagcaga

SEQ ID NO: 1316368 - RNA, 19 nt, Artificial Sequence
  Description of Artificial Sequence: Synthetic oligonucleotide
  Sense strand starting at position 3895 of SEQ ID NO: 1242004
guuguuguucgucccugaa

SEQ ID NO: 1316369 - RNA, 19 nt, Artificial Sequence
  Description of Artificial Sequence: Synthetic oligonucleotide
  Antisense strand to SEQ ID NO: 1316368
uucagggacgaacaacaac

SEQ ID NO: 1316370 - RNA, 19 nt, Artificial Sequence
  Description of Artificial Sequence: Synthetic oligonucleotide
  Sense strand starting at position 3899 of SEQ ID NO: 1242004
uuguucgucccugaaguga

SEQ ID NO: 1316371 - RNA, 19 nt, Artificial Sequence
  Description of Artificial Sequence: Synthetic oligonucleotide
  Antisense strand to SEQ ID NO: 1316370
ucacuucagggacgaacaa

SEQ ID NO: 1316372 - RNA, 19 nt, Artificial Sequence
  Description of Artificial Sequence: Synthetic oligonucleotide
  Sense strand starting at position 3919 of SEQ ID NO: 1242004
agaguucacugagcagguu

SEQ ID NO: 1316373 - RNA, 19 nt, Artificial Sequence
  Description of Artificial Sequence: Synthetic oligonucleotide
  Antisense strand to SEQ ID NO: 1316372
aaccugcucagugaacucu

SEQ ID NO: 1316374 - RNA, 19 nt, Artificial Sequence
  Description of Artificial Sequence: Synthetic oligonucleotide
  Sense strand starting at position 3925 of SEQ ID NO: 1242004
cacugagcagguugaauau

SEQ ID NO: 1316375 - RNA, 19 nt, Artificial Sequence
  Description of Artificial Sequence: Synthetic oligonucleotide
  Antisense strand to SEQ ID NO: 1316374
auauucaaccugcucagug

SEQ ID NO: 1316376 - RNA, 19 nt, Artificial Sequence
  Description of Artificial Sequence: Synthetic oligonucleotide
  Sense strand starting at position 107 of SEQ ID NO: 1242005
ccauguacacuuugagaca

SEQ ID NO: 1316377 - RNA, 19 nt, Artificial Sequence
  Description of Artificial Sequence: Synthetic oligonucleotide
  Antisense strand to SEQ ID NO: 1316376
ugucucaaaguguacaugg

SEQ ID NO: 1316378 - RNA, 19 nt, Artificial Sequence
  Description of Artificial Sequence: Synthetic oligonucleotide
  Sense strand starting at position 364 of SEQ ID NO: 1242005
gaagaagcacccugaguuu

SEQ ID NO: 1316379 - RNA, 19 nt, Artificial Sequence
  Description of Artificial Sequence: Synthetic oligonucleotide
  Antisense strand to SEQ ID NO: 1316378
aaacucagggugcuucuuc

SEQ ID NO: 1316380 - RNA, 19 nt, Artificial Sequence
  Description of Artificial Sequence: Synthetic oligonucleotide
  Sense strand starting at position 370 of SEQ ID NO: 1242005
gcacccugaguuugagaga

SEQ ID NO: 1316381 - RNA, 19 nt, Artificial Sequence
  Description of Artificial Sequence: Synthetic oligonucleotide
  Antisense strand to SEQ ID NO: 1316380
ucucucaaacucagggugc

SEQ ID NO: 1316382 - RNA, 19 nt, Artificial Sequence
  Description of Artificial Sequence: Synthetic oligonucleotide
  Sense strand starting at position 416 of SEQ ID NO: 1242005
gaugguauuucuugaggaa

SEQ ID NO: 1316383 - RNA, 19 nt, Artificial Sequence
  Description of Artificial Sequence: Synthetic oligonucleotide
  Antisense strand to SEQ ID NO: 1316382
uuccucaagaaauaccauc

SEQ ID NO: 1316384 - RNA, 19 nt, Artificial Sequence
  Description of Artificial Sequence: Synthetic oligonucleotide
  Sense strand starting at position 428 of SEQ ID NO: 1242005
ugaggaaauccuggaugug

SEQ ID NO: 1316385 - RNA, 19 nt, Artificial Sequence
  Description of Artificial Sequence: Synthetic oligonucleotide
  Antisense strand to SEQ ID NO: 1316384
cacauccaggauuuccuca

SEQ ID NO: 1316386 - RNA, 19 nt, Artificial Sequence
  Description of Artificial Sequence: Synthetic oligonucleotide
  Sense strand starting at position 431 of SEQ ID NO: 1242005
ggaaauccuggauguguag

SEQ ID NO: 1316387 - RNA, 19 nt, Artificial Sequence
  Description of Artificial Sequence: Synthetic oligonucleotide
  Antisense strand to SEQ ID NO: 1316386
cuacacauccaggauuucc

SEQ ID NO: 1316388 - RNA, 19 nt, Artificial Sequence
  Description of Artificial Sequence: Synthetic oligonucleotide
  Sense strand starting at position 434 of SEQ ID NO: 1242005
aauccuggauguguagaua

SEQ ID NO: 1316389 - RNA, 19 nt, Artificial Sequence
  Description of Artificial Sequence: Synthetic oligonucleotide
  Antisense strand to SEQ ID NO: 1316388
uaucuacacauccaggauu

SEQ ID NO: 1316390 - RNA, 19 nt, Artificial Sequence
  Description of Artificial Sequence: Synthetic oligonucleotide
  Sense strand starting at position 833 of SEQ ID NO: 1242005
ucagaaauaguuugguaga

SEQ ID NO: 1316391 - RNA, 19 nt, Artificial Sequence
  Description of Artificial Sequence: Synthetic oligonucleotide
  Antisense strand to SEQ ID NO: 1316390
ucuaccaaacuauuucuga

SEQ ID NO: 1316392 - RNA, 19 nt, Artificial Sequence
  Description of Artificial Sequence: Synthetic oligonucleotide
  Sense strand starting at position 835 of SEQ ID NO: 1242005
agaaauaguuugguagauc

SEQ ID NO: 1316393 - RNA, 19 nt, Artificial Sequence
  Description of Artificial Sequence: Synthetic oligonucleotide
  Antisense strand to SEQ ID NO: 1316392
gaucuaccaaacuauuucu

SEQ ID NO: 1316394 - RNA, 19 nt, Artificial Sequence
  Description of Artificial Sequence: Synthetic oligonucleotide
  Sense strand starting at position 1157 of SEQ ID NO: 1242005
ucucuagacucagucuaga

SEQ ID NO: 1316395 - RNA, 19 nt, Artificial Sequence
  Description of Artificial Sequence: Synthetic oligonucleotide
  Antisense strand to SEQ ID NO: 1316394
ucuagacugagucuagaga

SEQ ID NO: 1316396 - RNA, 19 nt, Artificial Sequence
  Description of Artificial Sequence: Synthetic oligonucleotide
  Sense strand starting at position 1194 of SEQ ID NO: 1242005
cuaagaugaaugugugcuu

SEQ ID NO: 1316397 - RNA, 19 nt, Artificial Sequence
  Description of Artificial Sequence: Synthetic oligonucleotide
  Antisense strand to SEQ ID NO: 1316396
aagcacacauucaucuuag

SEQ ID NO: 1316398 - RNA, 19 nt, Artificial Sequence
  Description of Artificial Sequence: Synthetic oligonucleotide
  Sense strand starting at position 1197 of SEQ ID NO: 1242005
agaugaaugugugcuuuau

SEQ ID NO: 1316399 - RNA, 19 nt, Artificial Sequence
  Description of Artificial Sequence: Synthetic oligonucleotide
  Antisense strand to SEQ ID NO: 1316398
auaaagcacacauucaucu

SEQ ID NO: 1316400 - RNA, 19 nt, Artificial Sequence
  Description of Artificial Sequence: Synthetic oligonucleotide
  Sense strand starting at position 1201 of SEQ ID NO: 1242005
gaaugugugcuuuauucug

SEQ ID NO: 1316401 - RNA, 19 nt, Artificial Sequence
  Description of Artificial Sequence: Synthetic oligonucleotide
  Antisense strand to SEQ ID NO: 1316400
cagaauaaagcacacauuc

SEQ ID NO: 1316402 - RNA, 19 nt, Artificial Sequence
  Description of Artificial Sequence: Synthetic oligonucleotide
  Sense strand starting at position 1209 of SEQ ID NO: 1242005
gcuuuauucugagcuaaau

SEQ ID NO: 1316403 - RNA, 19 nt, Artificial Sequence
  Description of Artificial Sequence: Synthetic oligonucleotide
  Antisense strand to SEQ ID NO: 1316402
auuuagcucagaauaaagc

SEQ ID NO: 1316404 - RNA, 19 nt, Artificial Sequence
  Description of Artificial Sequence: Synthetic oligonucleotide
  Sense strand starting at position 1218 of SEQ ID NO: 1242005
ugagcuaaaugucuuagag

SEQ ID NO: 1316405 - RNA, 19 nt, Artificial Sequence
  Description of Artificial Sequence: Synthetic oligonucleotide
  Antisense strand to SEQ ID NO: 1316404
cucuaagacauuuagcuca

SEQ ID NO: 1316406 - RNA, 19 nt, Artificial Sequence
  Description of Artificial Sequence: Synthetic oligonucleotide
  Sense strand starting at position 1242 of SEQ ID NO: 1242005
ugcagagguauggaaaguu

SEQ ID NO: 1316407 - RNA, 19 nt, Artificial Sequence
  Description of Artificial Sequence: Synthetic oligonucleotide
  Antisense strand to SEQ ID NO: 1316406
aacuuuccauaccucugca

SEQ ID NO: 1316408 - RNA, 19 nt, Artificial Sequence
  Description of Artificial Sequence: Synthetic oligonucleotide
  Sense strand starting at position 1251 of SEQ ID NO: 1242005
auggaaaguuccuccauac

SEQ ID NO: 1316409 - RNA, 19 nt, Artificial Sequence
  Description of Artificial Sequence: Synthetic oligonucleotide
  Antisense strand to SEQ ID NO: 1316408
guauggaggaacuuuccau

SEQ ID NO: 1316410 - RNA, 19 nt, Artificial Sequence
  Description of Artificial Sequence: Synthetic oligonucleotide
  Sense strand starting at position 1310 of SEQ ID NO: 1242005
uuauguggcgugcagauuu

SEQ ID NO: 1316411 - RNA, 19 nt, Artificial Sequence
  Description of Artificial Sequence: Synthetic oligonucleotide
  Antisense strand to SEQ ID NO: 1316410
aaaucugcacgccacauaa

SEQ ID NO: 1316412 - RNA, 19 nt, Artificial Sequence
  Description of Artificial Sequence: Synthetic oligonucleotide
  Sense strand starting at position 1393 of SEQ ID NO: 1242005
gcguucucagaacaaagua

SEQ ID NO: 1316413 - RNA, 19 nt, Artificial Sequence
  Description of Artificial Sequence: Synthetic oligonucleotide
  Antisense strand to SEQ ID NO: 1316412
uacuuuguucugagaacgc

SEQ ID NO: 1316414 - RNA, 19 nt, Artificial Sequence
  Description of Artificial Sequence: Synthetic oligonucleotide
  Sense strand starting at position 1482 of SEQ ID NO: 1242005
gaaggaggcaguuauguua

SEQ ID NO: 1316415 - RNA, 19 nt, Artificial Sequence
  Description of Artificial Sequence: Synthetic oligonucleotide
  Antisense strand to SEQ ID NO: 1316414
uaacauaacugccuccuuc

SEQ ID NO: 1316416 - RNA, 19 nt, Artificial Sequence
  Description of Artificial Sequence: Synthetic oligonucleotide
  Sense strand starting at position 1491 of SEQ ID NO: 1242005
aguuauguuaugggaugua

SEQ ID NO: 1316417 - RNA, 19 nt, Artificial Sequence
  Description of Artificial Sequence: Synthetic oligonucleotide
  Antisense strand to SEQ ID NO: 1316416
uacaucccauaacauaacu

SEQ ID NO: 1316418 - RNA, 19 nt, Artificial Sequence
  Description of Artificial Sequence: Synthetic oligonucleotide
  Sense strand starting at position 1521 of SEQ ID NO: 1242005
gaagcagugccagguaaga

SEQ ID NO: 1316419 - RNA, 19 nt, Artificial Sequence
  Description of Artificial Sequence: Synthetic oligonucleotide
  Antisense strand to SEQ ID NO: 1316418
ucuuaccuggcacugcuuc

SEQ ID NO: 1316420 - RNA, 19 nt, Artificial Sequence
  Description of Artificial Sequence: Synthetic oligonucleotide
  Sense strand starting at position 1587 of SEQ ID NO: 1242005
uguagaagaauucggccua

SEQ ID NO: 1316421 - RNA, 19 nt, Artificial Sequence
  Description of Artificial Sequence: Synthetic oligonucleotide
  Antisense strand to SEQ ID NO: 1316420
uaggccgaauucuucuaca

SEQ ID NO: 1316422 - RNA, 19 nt, Artificial Sequence
  Description of Artificial Sequence: Synthetic oligonucleotide
  Sense strand starting at position 2026 of SEQ ID NO: 1242005
gcgguguuccacgcuggaa

SEQ ID NO: 1316423 - RNA, 19 nt, Artificial Sequence
  Description of Artificial Sequence: Synthetic oligonucleotide
  Antisense strand to SEQ ID NO: 1316422
uuccagcguggaacaccgc

SEQ ID NO: 1316424 - RNA, 19 nt, Artificial Sequence
  Description of Artificial Sequence: Synthetic oligonucleotide
  Sense strand starting at position 2211 of SEQ ID NO: 1242005
agaaaugaaucacagauag

SEQ ID NO: 1316425 - RNA, 19 nt, Artificial Sequence
  Description of Artificial Sequence: Synthetic oligonucleotide
  Antisense strand to SEQ ID NO: 1316424
cuaucugugauucauuucu

SEQ ID NO: 1316426 - RNA, 19 nt, Artificial Sequence
  Description of Artificial Sequence: Synthetic oligonucleotide
  Sense strand starting at position 2276 of SEQ ID NO: 1242005
aacagaagugcuugcugga

SEQ ID NO: 1316427 - RNA, 19 nt, Artificial Sequence
  Description of Artificial Sequence: Synthetic oligonucleotide
  Antisense strand to SEQ ID NO: 1316426
uccagcaagcacuucuguu

SEQ ID NO: 1316428 - RNA, 19 nt, Artificial Sequence
  Description of Artificial Sequence: Synthetic oligonucleotide
  Sense strand starting at position 2697 of SEQ ID NO: 1242005
acaagacuaccgggaguaa

SEQ ID NO: 1316429 - RNA, 19 nt, Artificial Sequence
  Description of Artificial Sequence: Synthetic oligonucleotide
  Antisense strand to SEQ ID NO: 1316428
uuacucccgguagucuugu

SEQ ID NO: 1316430 - RNA, 19 nt, Artificial Sequence
  Description of Artificial Sequence: Synthetic oligonucleotide
  Sense strand starting at position 2893 of SEQ ID NO: 1242005
ugagcuaccuucccaugaa

SEQ ID NO: 1316431 - RNA, 19 nt, Artificial Sequence
  Description of Artificial Sequence: Synthetic oligonucleotide
  Antisense strand to SEQ ID NO: 1316430
uucaugggaagguagcuca

SEQ ID NO: 1316432 - RNA, 19 nt, Artificial Sequence
  Description of Artificial Sequence: Synthetic oligonucleotide
  Sense strand starting at position 3018 of SEQ ID NO: 1242005
cuacccagacauuguuauu

SEQ ID NO: 1316433 - RNA, 19 nt, Artificial Sequence
  Description of Artificial Sequence: Synthetic oligonucleotide
  Antisense strand to SEQ ID NO: 1316432
aauaacaaugucuggguag

SEQ ID NO: 1316434 - RNA, 19 nt, Artificial Sequence
  Description of Artificial Sequence: Synthetic oligonucleotide
  Sense strand starting at position 3101 of SEQ ID NO: 1242005
ccaaguuagguuuaaguga

SEQ ID NO: 1316435 - RNA, 19 nt, Artificial Sequence
  Description of Artificial Sequence: Synthetic oligonucleotide
  Antisense strand to SEQ ID NO: 1316434
ucacuuaaaccuaacuugg

SEQ ID NO: 1316436 - RNA, 19 nt, Artificial Sequence
  Description of Artificial Sequence: Synthetic oligonucleotide
  Sense strand starting at position 3290 of SEQ ID NO: 1242005
uccagugaucucugacuag

SEQ ID NO: 1316437 - RNA, 19 nt, Artificial Sequence
  Description of Artificial Sequence: Synthetic oligonucleotide
  Antisense strand to SEQ ID NO: 1316436
cuagucagagaucacugga

SEQ ID NO: 1316438 - RNA, 19 nt, Artificial Sequence
  Description of Artificial Sequence: Synthetic oligonucleotide
  Sense strand starting at position 3293 of SEQ ID NO: 1242005
agugaucucugacuaggua

SEQ ID NO: 1316439 - RNA, 19 nt, Artificial Sequence
  Description of Artificial Sequence: Synthetic oligonucleotide
  Antisense strand to SEQ ID NO: 1316438
uaccuagucagagaucacu

SEQ ID NO: 1316440 - RNA, 19 nt, Artificial Sequence
  Description of Artificial Sequence: Synthetic oligonucleotide
  Sense strand starting at position 3294 of SEQ ID NO: 1242005
gugaucucugacuagguaa

SEQ ID NO: 1316441 - RNA, 19 nt, Artificial Sequence
  Description of Artificial Sequence: Synthetic oligonucleotide
  Antisense strand to SEQ ID NO: 1316440
uuaccuagucagagaucac

SEQ ID NO: 1316442 - RNA, 19 nt, Artificial Sequence
  Description of Artificial Sequence: Synthetic oligonucleotide
  Sense strand starting at position 3296 of SEQ ID NO: 1242005
gaucucugacuagguaaau

SEQ ID NO: 1316443 - RNA, 19 nt, Artificial Sequence
  Description of Artificial Sequence: Synthetic oligonucleotide
  Antisense strand to SEQ ID NO: 1316442
auuuaccuagucagagauc

SEQ ID NO: 1316444 - RNA, 19 nt, Artificial Sequence
  Description of Artificial Sequence: Synthetic oligonucleotide
  Sense strand starting at position 3325 of SEQ ID NO: 1242005
aacugagugugauucugaa

SEQ ID NO: 1316445 - RNA, 19 nt, Artificial Sequence
  Description of Artificial Sequence: Synthetic oligonucleotide
  Antisense strand to SEQ ID NO: 1316444
uucagaaucacacucaguu

SEQ ID NO: 1316446 - RNA, 19 nt, Artificial Sequence
  Description of Artificial Sequence: Synthetic oligonucleotide
  Sense strand starting at position 3436 of SEQ ID NO: 1242005
ucaccaauucccuggguua

SEQ ID NO: 1316447 - RNA, 19 nt, Artificial Sequence
  Description of Artificial Sequence: Synthetic oligonucleotide
  Antisense strand to SEQ ID NO: 1316446
uaacccagggaauugguga

SEQ ID NO: 1316448 - RNA, 19 nt, Artificial Sequence
  Description of Artificial Sequence: Synthetic oligonucleotide
  Sense strand starting at position 3438 of SEQ ID NO: 1242005
accaauucccuggguuacu

SEQ ID NO: 1316449 - RNA, 19 nt, Artificial Sequence
  Description of Artificial Sequence: Synthetic oligonucleotide
  Antisense strand to SEQ ID NO: 1316448
aguaacccagggaauuggu

SEQ ID NO: 1316450 - RNA, 19 nt, Artificial Sequence
  Description of Artificial Sequence: Synthetic oligonucleotide
  Sense strand starting at position 3439 of SEQ ID NO: 1242005
ccaauucccuggguuacuu

SEQ ID NO: 1316451 - RNA, 19 nt, Artificial Sequence
  Description of Artificial Sequence: Synthetic oligonucleotide
  Antisense strand to SEQ ID NO: 1316450
aaguaacccagggaauugg

SEQ ID NO: 1316452 - RNA, 19 nt, Artificial Sequence
  Description of Artificial Sequence: Synthetic oligonucleotide
  Sense strand starting at position 3654 of SEQ ID NO: 1242005
aguaaacuccucuguacuc

SEQ ID NO: 1316453 - RNA, 19 nt, Artificial Sequence
  Description of Artificial Sequence: Synthetic oligonucleotide
  Antisense strand to SEQ ID NO: 1316452
gaguacagaggaguuuacu

SEQ ID NO: 1316454 - RNA, 19 nt, Artificial Sequence
  Description of Artificial Sequence: Synthetic oligonucleotide
  Sense strand starting at position 3655 of SEQ ID NO: 1242005
guaaacuccucuguacuca

SEQ ID NO: 1316455 - RNA, 19 nt, Artificial Sequence
  Description of Artificial Sequence: Synthetic oligonucleotide
  Antisense strand to SEQ ID NO: 1316454
ugaguacagaggaguuuac

SEQ ID NO: 1316456 - RNA, 19 nt, Artificial Sequence
  Description of Artificial Sequence: Synthetic oligonucleotide
  Sense strand starting at position 78 of SEQ ID NO: 1242006
ccuuaaucccaaggaaguu

SEQ ID NO: 1316457 - RNA, 19 nt, Artificial Sequence
  Description of Artificial Sequence: Synthetic oligonucleotide
  Antisense strand to SEQ ID NO: 1316456
aacuuccuugggauuaagg

SEQ ID NO: 1316458 - RNA, 19 nt, Artificial Sequence
  Description of Artificial Sequence: Synthetic oligonucleotide
  Sense strand starting at position 87 of SEQ ID NO: 1242006
caaggaaguuauuccauga

SEQ ID NO: 1316459 - RNA, 19 nt, Artificial Sequence
  Description of Artificial Sequence: Synthetic oligonucleotide
  Antisense strand to SEQ ID NO: 1316458
ucauggaauaacuuccuug

SEQ ID NO: 1316460 - RNA, 19 nt, Artificial Sequence
  Description of Artificial Sequence: Synthetic oligonucleotide
  Sense strand starting at position 100 of SEQ ID NO: 1242006
ccaugacauuagucuagac

SEQ ID NO: 1316461 - RNA, 19 nt, Artificial Sequence
  Description of Artificial Sequence: Synthetic oligonucleotide
  Antisense strand to SEQ ID NO: 1316460
gucuagacuaaugucaugg

SEQ ID NO: 1316462 - RNA, 19 nt, Artificial Sequence
  Description of Artificial Sequence: Synthetic oligonucleotide
  Sense strand starting at position 306 of SEQ ID NO: 1242006
gguaacuaauaucuuguaa

SEQ ID NO: 1316463 - RNA, 19 nt, Artificial Sequence
  Description of Artificial Sequence: Synthetic oligonucleotide
  Antisense strand to SEQ ID NO: 1316462
uuacaagauauuaguuacc

SEQ ID NO: 1316464 - RNA, 19 nt, Artificial Sequence
  Description of Artificial Sequence: Synthetic oligonucleotide
  Sense strand starting at position 317 of SEQ ID NO: 1242006
ucuuguaaugcggcuggua

SEQ ID NO: 1316465 - RNA, 19 nt, Artificial Sequence
  Description of Artificial Sequence: Synthetic oligonucleotide
  Antisense strand to SEQ ID NO: 1316464
uaccagccgcauuacaaga

SEQ ID NO: 1316466 - RNA, 19 nt, Artificial Sequence
  Description of Artificial Sequence: Synthetic oligonucleotide
  Sense strand starting at position 371 of SEQ ID NO: 1242006
uaaagcaucugagugucuu

SEQ ID NO: 1316467 - RNA, 19 nt, Artificial Sequence
  Description of Artificial Sequence: Synthetic oligonucleotide
  Antisense strand to SEQ ID NO: 1316466
aagacacucagaugcuuua

SEQ ID NO: 1316468 - RNA, 19 nt, Artificial Sequence
  Description of Artificial Sequence: Synthetic oligonucleotide
  Sense strand starting at position 547 of SEQ ID NO: 1242006
gugauuaucuagcuuaaac

SEQ ID NO: 1316469 - RNA, 19 nt, Artificial Sequence
  Description of Artificial Sequence: Synthetic oligonucleotide
  Antisense strand to SEQ ID NO: 1316468
guuuaagcuagauaaucac

SEQ ID NO: 1316470 - RNA, 19 nt, Artificial Sequence
  Description of Artificial Sequence: Synthetic oligonucleotide
  Sense strand starting at position 588 of SEQ ID NO: 1242006
uaggguucuccguuugugu

SEQ ID NO: 1316471 - RNA, 19 nt, Artificial Sequence
  Description of Artificial Sequence: Synthetic oligonucleotide
  Antisense strand to SEQ ID NO: 1316470
acacaaacggagaacccua

SEQ ID NO: 1316472 - RNA, 19 nt, Artificial Sequence
  Description of Artificial Sequence: Synthetic oligonucleotide
  Sense strand starting at position 589 of SEQ ID NO: 1242006
aggguucuccguuuguguu

SEQ ID NO: 1316473 - RNA, 19 nt, Artificial Sequence
  Description of Artificial Sequence: Synthetic oligonucleotide
  Antisense strand to SEQ ID NO: 1316472
aacacaaacggagaacccu

SEQ ID NO: 1316474 - RNA, 19 nt, Artificial Sequence
  Description of Artificial Sequence: Synthetic oligonucleotide
  Sense strand starting at position 596 of SEQ ID NO: 1242006
uccguuuguguuuauaaau

SEQ ID NO: 1316475 - RNA, 19 nt, Artificial Sequence
  Description of Artificial Sequence: Synthetic oligonucleotide
  Antisense strand to SEQ ID NO: 1316474
auuuauaaacacaaacgga

SEQ ID NO: 1316476 - RNA, 19 nt, Artificial Sequence
  Description of Artificial Sequence: Synthetic oligonucleotide
  Sense strand starting at position 743 of SEQ ID NO: 1242006
uugagacuucuguaacuac

SEQ ID NO: 1316477 - RNA, 19 nt, Artificial Sequence
  Description of Artificial Sequence: Synthetic oligonucleotide
  Antisense strand to SEQ ID NO: 1316476
guaguuacagaagucucaa

SEQ ID NO: 1316478 - RNA, 19 nt, Artificial Sequence
  Description of Artificial Sequence: Synthetic oligonucleotide
  Sense strand starting at position 800 of SEQ ID NO: 1242006
cuuacagcuguauaaugaa

SEQ ID NO: 1316479 - RNA, 19 nt, Artificial Sequence
  Description of Artificial Sequence: Synthetic oligonucleotide
  Antisense strand to SEQ ID NO: 1316478
uucauuauacagcuguaag

SEQ ID NO: 1316480 - RNA, 19 nt, Artificial Sequence
  Description of Artificial Sequence: Synthetic oligonucleotide
  Sense strand starting at position 812 of SEQ ID NO: 1242006
uaaugaacccuucggaguu

SEQ ID NO: 1316481 - RNA, 19 nt, Artificial Sequence
  Description of Artificial Sequence: Synthetic oligonucleotide
  Antisense strand to SEQ ID NO: 1316480
aacuccgaaggguucauua

SEQ ID NO: 1316482 - RNA, 19 nt, Artificial Sequence
  Description of Artificial Sequence: Synthetic oligonucleotide
  Sense strand starting at position 835 of SEQ ID NO: 1242006
aaaucaaacgacugaggua

SEQ ID NO: 1316483 - RNA, 19 nt, Artificial Sequence
  Description of Artificial Sequence: Synthetic oligonucleotide
  Antisense strand to SEQ ID NO: 1316482
uaccucagucguuugauuu

SEQ ID NO: 1316484 - RNA, 19 nt, Artificial Sequence
  Description of Artificial Sequence: Synthetic oligonucleotide
  Sense strand starting at position 957 of SEQ ID NO: 1242006
cguauguguguaguugagu

SEQ ID NO: 1316485 - RNA, 19 nt, Artificial Sequence
  Description of Artificial Sequence: Synthetic oligonucleotide
  Antisense strand to SEQ ID NO: 1316484
acucaacuacacacauacg

SEQ ID NO: 1316486 - RNA, 19 nt, Artificial Sequence
  Description of Artificial Sequence: Synthetic oligonucleotide
  Sense strand starting at position 963 of SEQ ID NO: 1242006
uguguaguugaguaacugu

SEQ ID NO: 1316487 - RNA, 19 nt, Artificial Sequence
  Description of Artificial Sequence: Synthetic oligonucleotide
  Antisense strand to SEQ ID NO: 1316486
acaguuacucaacuacaca

SEQ ID NO: 1316488 - RNA, 19 nt, Artificial Sequence
  Description of Artificial Sequence: Synthetic oligonucleotide
  Sense strand starting at position 1006 of SEQ ID NO: 1242006
gugugaacuaccuggguuu

SEQ ID NO: 1316489 - RNA, 19 nt, Artificial Sequence
  Description of Artificial Sequence: Synthetic oligonucleotide
  Antisense strand to SEQ ID NO: 1316488
aaacccagguaguucacac

SEQ ID NO: 1316490 - RNA, 19 nt, Artificial Sequence
  Description of Artificial Sequence: Synthetic oligonucleotide
  Sense strand starting at position 1017 of SEQ ID NO: 1242006
cuggguuucuguccacuaa

SEQ ID NO: 1316491 - RNA, 19 nt, Artificial Sequence
  Description of Artificial Sequence: Synthetic oligonucleotide
  Antisense strand to SEQ ID NO: 1316490
uuaguggacagaaacccag

SEQ ID NO: 1316492 - RNA, 19 nt, Artificial Sequence
  Description of Artificial Sequence: Synthetic oligonucleotide
  Sense strand starting at position 1040 of SEQ ID NO: 1242006
gggcuaucucaguggucag

SEQ ID NO: 1316493 - RNA, 19 nt, Artificial Sequence
  Description of Artificial Sequence: Synthetic oligonucleotide
  Antisense strand to SEQ ID NO: 1316492
cugaccacugagauagccc

SEQ ID NO: 1316494 - RNA, 19 nt, Artificial Sequence
  Description of Artificial Sequence: Synthetic oligonucleotide
  Sense strand starting at position 1185 of SEQ ID NO: 1242006
ucgaacaaacuguauaagu

SEQ ID NO: 1316495 - RNA, 19 nt, Artificial Sequence
  Description of Artificial Sequence: Synthetic oligonucleotide
  Antisense strand to SEQ ID NO: 1316494
acuuauacaguuuguucga

SEQ ID NO: 1316496 - RNA, 19 nt, Artificial Sequence
  Description of Artificial Sequence: Synthetic oligonucleotide
  Sense strand starting at position 1201 of SEQ ID NO: 1242006
aguagaccucagggucaua

SEQ ID NO: 1316497 - RNA, 19 nt, Artificial Sequence
  Description of Artificial Sequence: Synthetic oligonucleotide
  Antisense strand to SEQ ID NO: 1316496
uaugacccugaggucuacu

SEQ ID NO: 1316498 - RNA, 19 nt, Artificial Sequence
  Description of Artificial Sequence: Synthetic oligonucleotide
  Sense strand starting at position 1277 of SEQ ID NO: 1242006
uuuccauauggauaagcua

SEQ ID NO: 1316499 - RNA, 19 nt, Artificial Sequence
  Description of Artificial Sequence: Synthetic oligonucleotide
  Antisense strand to SEQ ID NO: 1316498
uagcuuauccauauggaaa

SEQ ID NO: 1316500 - RNA, 19 nt, Artificial Sequence
  Description of Artificial Sequence: Synthetic oligonucleotide
  Sense strand starting at position 1320 of SEQ ID NO: 1242006
gucucauuccugcgagagg

SEQ ID NO: 1316501 - RNA, 19 nt, Artificial Sequence
  Description of Artificial Sequence: Synthetic oligonucleotide
  Antisense strand to SEQ ID NO: 1316500
ccucucgcaggaaugagac

SEQ ID NO: 1316502 - RNA, 19 nt, Artificial Sequence
  Description of Artificial Sequence: Synthetic oligonucleotide
  Sense strand starting at position 2597 of SEQ ID NO: 1242006
cauguuugccucgaguuag

SEQ ID NO: 1316503 - RNA, 19 nt, Artificial Sequence
  Description of Artificial Sequence: Synthetic oligonucleotide
  Antisense strand to SEQ ID NO: 1316502
cuaacucgaggcaaacaug

SEQ ID NO: 1316504 - RNA, 19 nt, Artificial Sequence
  Description of Artificial Sequence: Synthetic oligonucleotide
  Sense strand starting at position 2600 of SEQ ID NO: 1242006
guuugccucgaguuaguca

SEQ ID NO: 1316505 - RNA, 19 nt, Artificial Sequence
  Description of Artificial Sequence: Synthetic oligonucleotide
  Antisense strand to SEQ ID NO: 1316504
ugacuaacucgaggcaaac

SEQ ID NO: 1316506 - RNA, 19 nt, Artificial Sequence
  Description of Artificial Sequence: Synthetic oligonucleotide
  Sense strand starting at position 2605 of SEQ ID NO: 1242006
ccucgaguuagucacgaag

SEQ ID NO: 1316507 - RNA, 19 nt, Artificial Sequence
  Description of Artificial Sequence: Synthetic oligonucleotide
  Antisense strand to SEQ ID NO: 1316506
cuucgugacuaacucgagg

SEQ ID NO: 1316508 - RNA, 19 nt, Artificial Sequence
  Description of Artificial Sequence: Synthetic oligonucleotide
  Sense strand starting at position 2608 of SEQ ID NO: 1242006
cgaguuagucacgaaggaa

SEQ ID NO: 1316509 - RNA, 19 nt, Artificial Sequence
  Description of Artificial Sequence: Synthetic oligonucleotide
  Antisense strand to SEQ ID NO: 1316508
uuccuucgugacuaacucg

SEQ ID NO: 1316510 - RNA, 19 nt, Artificial Sequence
  Description of Artificial Sequence: Synthetic oligonucleotide
  Sense strand starting at position 2628 of SEQ ID NO: 1242006
cgaagagagccuuagucuu

SEQ ID NO: 1316511 - RNA, 19 nt, Artificial Sequence
  Description of Artificial Sequence: Synthetic oligonucleotide
  Antisense strand to SEQ ID NO: 1316510
aagacuaaggcucucuucg

SEQ ID NO: 1316512 - RNA, 19 nt, Artificial Sequence
  Description of Artificial Sequence: Synthetic oligonucleotide
  Sense strand starting at position 2730 of SEQ ID NO: 1242006
gggucuaugcuagguauga

SEQ ID NO: 1316513 - RNA, 19 nt, Artificial Sequence
  Description of Artificial Sequence: Synthetic oligonucleotide
  Antisense strand to SEQ ID NO: 1316512
ucauaccuagcauagaccc

SEQ ID NO: 1316514 - RNA, 19 nt, Artificial Sequence
  Description of Artificial Sequence: Synthetic oligonucleotide
  Sense strand starting at position 2731 of SEQ ID NO: 1242006
ggucuaugcuagguaugag

SEQ ID NO: 1316515 - RNA, 19 nt, Artificial Sequence
  Description of Artificial Sequence: Synthetic oligonucleotide
  Antisense strand to SEQ ID NO: 1316514
cucauaccuagcauagacc

SEQ ID NO: 1316516 - RNA, 19 nt, Artificial Sequence
  Description of Artificial Sequence: Synthetic oligonucleotide
  Sense strand starting at position 2739 of SEQ ID NO: 1242006
cuagguaugagguguaucu

SEQ ID NO: 1316517 - RNA, 19 nt, Artificial Sequence
  Description of Artificial Sequence: Synthetic oligonucleotide
  Antisense strand to SEQ ID NO: 1316516
agauacaccucauaccuag

SEQ ID NO: 1316518 - RNA, 19 nt, Artificial Sequence
  Description of Artificial Sequence: Synthetic oligonucleotide
  Sense strand starting at position 2741 of SEQ ID NO: 1242006
agguaugagguguaucuuu

SEQ ID NO: 1316519 - RNA, 19 nt, Artificial Sequence
  Description of Artificial Sequence: Synthetic oligonucleotide
  Antisense strand to SEQ ID NO: 1316518
aaagauacaccucauaccu

SEQ ID NO: 1316520 - RNA, 19 nt, Artificial Sequence
  Description of Artificial Sequence: Synthetic oligonucleotide
  Sense strand starting at position 2804 of SEQ ID NO: 1242006
cacugugaugacugccaca

SEQ ID NO: 1316521 - RNA, 19 nt, Artificial Sequence
  Description of Artificial Sequence: Synthetic oligonucleotide
  Antisense strand to SEQ ID NO: 1316520
uguggcagucaucacagug

SEQ ID NO: 1316522 - RNA, 19 nt, Artificial Sequence
  Description of Artificial Sequence: Synthetic oligonucleotide
  Sense strand starting at position 2830 of SEQ ID NO: 1242006
gcauuaugagguugaaugu

SEQ ID NO: 1316523 - RNA, 19 nt, Artificial Sequence
  Description of Artificial Sequence: Synthetic oligonucleotide
  Antisense strand to SEQ ID NO: 1316522
acauucaaccucauaaugc

SEQ ID NO: 1316524 - RNA, 19 nt, Artificial Sequence
  Description of Artificial Sequence: Synthetic oligonucleotide
  Sense strand starting at position 2910 of SEQ ID NO: 1242006
gcugguugaaacugaaguu

SEQ ID NO: 1316525 - RNA, 19 nt, Artificial Sequence
  Description of Artificial Sequence: Synthetic oligonucleotide
  Antisense strand to SEQ ID NO: 1316524
aacuucaguuucaaccagc

SEQ ID NO: 1316526 - RNA, 19 nt, Artificial Sequence
  Description of Artificial Sequence: Synthetic oligonucleotide
  Sense strand starting at position 2998 of SEQ ID NO: 1242006
aguggcgcagucagagaua

SEQ ID NO: 1316527 - RNA, 19 nt, Artificial Sequence
  Description of Artificial Sequence: Synthetic oligonucleotide
  Antisense strand to SEQ ID NO: 1316526
uaucucugacugcgccacu

SEQ ID NO: 1316528 - RNA, 19 nt, Artificial Sequence
  Description of Artificial Sequence: Synthetic oligonucleotide
  Sense strand starting at position 3001 of SEQ ID NO: 1242006
ggcgcagucagagauaaau

SEQ ID NO: 1316529 - RNA, 19 nt, Artificial Sequence
  Description of Artificial Sequence: Synthetic oligonucleotide
  Antisense strand to SEQ ID NO: 1316528
auuuaucucugacugcgcc

SEQ ID NO: 1316530 - RNA, 19 nt, Artificial Sequence
  Description of Artificial Sequence: Synthetic oligonucleotide
  Sense strand starting at position 3154 of SEQ ID NO: 1242006
auauguaauacgcgaacuu

SEQ ID NO: 1316531 - RNA, 19 nt, Artificial Sequence
  Description of Artificial Sequence: Synthetic oligonucleotide
  Antisense strand to SEQ ID NO: 1316530
aaguucgcguauuacauau

SEQ ID NO: 1316532 - RNA, 19 nt, Artificial Sequence
  Description of Artificial Sequence: Synthetic oligonucleotide
  Sense strand starting at position 3165 of SEQ ID NO: 1242006
gcgaacuugguacaacauu

SEQ ID NO: 1316533 - RNA, 19 nt, Artificial Sequence
  Description of Artificial Sequence: Synthetic oligonucleotide
  Antisense strand to SEQ ID NO: 1316532
aauguuguaccaaguucgc

SEQ ID NO: 1316534 - RNA, 19 nt, Artificial Sequence
  Description of Artificial Sequence: Synthetic oligonucleotide
  Sense strand starting at position 3263 of SEQ ID NO: 1242006
ggcggaucauuugcuguca

SEQ ID NO: 1316535 - RNA, 19 nt, Artificial Sequence
  Description of Artificial Sequence: Synthetic oligonucleotide
  Antisense strand to SEQ ID NO: 1316534
ugacagcaaaugauccgcc

SEQ ID NO: 1316536 - RNA, 19 nt, Artificial Sequence
  Description of Artificial Sequence: Synthetic oligonucleotide
  Sense strand starting at position 10 of SEQ ID NO: 1242007
gacguuuccggcuggcaga

SEQ ID NO: 1316537 - RNA, 19 nt, Artificial Sequence
  Description of Artificial Sequence: Synthetic oligonucleotide
  Antisense strand to SEQ ID NO: 1316536
ucugccagccggaaacguc

SEQ ID NO: 1316538 - RNA, 19 nt, Artificial Sequence
  Description of Artificial Sequence: Synthetic oligonucleotide
  Sense strand starting at position 47 of SEQ ID NO: 1242007
agguucucuguuuggaaca

SEQ ID NO: 1316539 - RNA, 19 nt, Artificial Sequence
  Description of Artificial Sequence: Synthetic oligonucleotide
  Antisense strand to SEQ ID NO: 1316538
uguuccaaacagagaaccu

SEQ ID NO: 1316540 - RNA, 19 nt, Artificial Sequence
  Description of Artificial Sequence: Synthetic oligonucleotide
  Sense strand starting at position 67 of SEQ ID NO: 1242007
gggucuggcuucuaggaua

SEQ ID NO: 1316541 - RNA, 19 nt, Artificial Sequence
  Description of Artificial Sequence: Synthetic oligonucleotide
  Antisense strand to SEQ ID NO: 1316540
uauccuagaagccagaccc

SEQ ID NO: 1316542 - RNA, 19 nt, Artificial Sequence
  Description of Artificial Sequence: Synthetic oligonucleotide
  Sense strand starting at position 70 of SEQ ID NO: 1242007
ucuggcuucuaggauauuu

SEQ ID NO: 1316543 - RNA, 19 nt, Artificial Sequence
  Description of Artificial Sequence: Synthetic oligonucleotide
  Antisense strand to SEQ ID NO: 1316542
aaauauccuagaagccaga

SEQ ID NO: 1316544 - RNA, 19 nt, Artificial Sequence
  Description of Artificial Sequence: Synthetic oligonucleotide
  Sense strand starting at position 247 of SEQ ID NO: 1242007
ccuugaggauccugggagu

SEQ ID NO: 1316545 - RNA, 19 nt, Artificial Sequence
  Description of Artificial Sequence: Synthetic oligonucleotide
  Antisense strand to SEQ ID NO: 1316544
acucccaggauccucaagg

SEQ ID NO: 1316546 - RNA, 19 nt, Artificial Sequence
  Description of Artificial Sequence: Synthetic oligonucleotide
  Sense strand starting at position 262 of SEQ ID NO: 1242007
gagugacuguccuugguug

SEQ ID NO: 1316547 - RNA, 19 nt, Artificial Sequence
  Description of Artificial Sequence: Synthetic oligonucleotide
  Antisense strand to SEQ ID NO: 1316546
caaccaaggacagucacuc

SEQ ID NO: 1316548 - RNA, 19 nt, Artificial Sequence
  Description of Artificial Sequence: Synthetic oligonucleotide
  Sense strand starting at position 331 of SEQ ID NO: 1242007
cuugguucccuggaguacu

SEQ ID NO: 1316549 - RNA, 19 nt, Artificial Sequence
  Description of Artificial Sequence: Synthetic oligonucleotide
  Antisense strand to SEQ ID NO: 1316548
aguacuccagggaaccaag

SEQ ID NO: 1316550 - RNA, 19 nt, Artificial Sequence
  Description of Artificial Sequence: Synthetic oligonucleotide
  Sense strand starting at position 511 of SEQ ID NO: 1242007
cagguugugucccugaacu

SEQ ID NO: 1316551 - RNA, 19 nt, Artificial Sequence
  Description of Artificial Sequence: Synthetic oligonucleotide
  Antisense strand to SEQ ID NO: 1316550
aguucagggacacaaccug

SEQ ID NO: 1316552 - RNA, 19 nt, Artificial Sequence
  Description of Artificial Sequence: Synthetic oligonucleotide
  Sense strand starting at position 513 of SEQ ID NO: 1242007
gguugugucccugaacuga

SEQ ID NO: 1316553 - RNA, 19 nt, Artificial Sequence
  Description of Artificial Sequence: Synthetic oligonucleotide
  Antisense strand to SEQ ID NO: 1316552
ucaguucagggacacaacc

SEQ ID NO: 1316554 - RNA, 19 nt, Artificial Sequence
  Description of Artificial Sequence: Synthetic oligonucleotide
  Sense strand starting at position 550 of SEQ ID NO: 1242007
auccauggcugcccaaaua

SEQ ID NO: 1316555 - RNA, 19 nt, Artificial Sequence
  Description of Artificial Sequence: Synthetic oligonucleotide
  Antisense strand to SEQ ID NO: 1316554
uauuugggcagccauggau

SEQ ID NO: 1316556 - RNA, 19 nt, Artificial Sequence
  Description of Artificial Sequence: Synthetic oligonucleotide
  Sense strand starting at position 918 of SEQ ID NO: 1242007
ggagccaguccguaaguaa

SEQ ID NO: 1316557 - RNA, 19 nt, Artificial Sequence
  Description of Artificial Sequence: Synthetic oligonucleotide
  Antisense strand to SEQ ID NO: 1316556
uuacuuacggacuggcucc

SEQ ID NO: 1316558 - RNA, 19 nt, Artificial Sequence
  Description of Artificial Sequence: Synthetic oligonucleotide
  Sense strand starting at position 1072 of SEQ ID NO: 1242007
ggaguucaguuaucggaac

SEQ ID NO: 1316559 - RNA, 19 nt, Artificial Sequence
  Description of Artificial Sequence: Synthetic oligonucleotide
  Antisense strand to SEQ ID NO: 1316558
guuccgauaacugaacucc

SEQ ID NO: 1316560 - RNA, 19 nt, Artificial Sequence
  Description of Artificial Sequence: Synthetic oligonucleotide
  Sense strand starting at position 1507 of SEQ ID NO: 1242007
cguugagccugagcaguaa

SEQ ID NO: 1316561 - RNA, 19 nt, Artificial Sequence
  Description of Artificial Sequence: Synthetic oligonucleotide
  Antisense strand to SEQ ID NO: 1316560
uuacugcucaggcucaacg

SEQ ID NO: 1316562 - RNA, 19 nt, Artificial Sequence
  Description of Artificial Sequence: Synthetic oligonucleotide
  Sense strand starting at position 1539 of SEQ ID NO: 1242007
gcagcuugcgugaagcaga

SEQ ID NO: 1316563 - RNA, 19 nt, Artificial Sequence
  Description of Artificial Sequence: Synthetic oligonucleotide
  Antisense strand to SEQ ID NO: 1316562
ucugcuucacgcaagcugc

SEQ ID NO: 1316564 - RNA, 19 nt, Artificial Sequence
  Description of Artificial Sequence: Synthetic oligonucleotide
  Sense strand starting at position 2229 of SEQ ID NO: 1242007
cagugaaaguuggcuguca

SEQ ID NO: 1316565 - RNA, 19 nt, Artificial Sequence
  Description of Artificial Sequence: Synthetic oligonucleotide
  Antisense strand to SEQ ID NO: 1316564
ugacagccaacuuucacug

SEQ ID NO: 1316566 - RNA, 19 nt, Artificial Sequence
  Description of Artificial Sequence: Synthetic oligonucleotide
  Sense strand starting at position 2290 of SEQ ID NO: 1242007
ggguaguggcaggaaaguu

SEQ ID NO: 1316567 - RNA, 19 nt, Artificial Sequence
  Description of Artificial Sequence: Synthetic oligonucleotide
  Antisense strand to SEQ ID NO: 1316566
aacuuuccugccacuaccc

SEQ ID NO: 1316568 - RNA, 19 nt, Artificial Sequence
  Description of Artificial Sequence: Synthetic oligonucleotide
  Sense strand starting at position 2406 of SEQ ID NO: 1242007
ccaugaagucgccaggcau

SEQ ID NO: 1316569 - RNA, 19 nt, Artificial Sequence
  Description of Artificial Sequence: Synthetic oligonucleotide
  Antisense strand to SEQ ID NO: 1316568
augccuggcgacuucaugg

SEQ ID NO: 1316570 - RNA, 19 nt, Artificial Sequence
  Description of Artificial Sequence: Synthetic oligonucleotide
  Sense strand starting at position 2492 of SEQ ID NO: 1242007
acuuguuccuguuugauua

SEQ ID NO: 1316571 - RNA, 19 nt, Artificial Sequence
  Description of Artificial Sequence: Synthetic oligonucleotide
  Antisense strand to SEQ ID NO: 1316570
uaaucaaacaggaacaagu

SEQ ID NO: 1316572 - RNA, 19 nt, Artificial Sequence
  Description of Artificial Sequence: Synthetic oligonucleotide
  Sense strand starting at position 2493 of SEQ ID NO: 1242007
cuuguuccuguuugauuau

SEQ ID NO: 1316573 - RNA, 19 nt, Artificial Sequence
  Description of Artificial Sequence: Synthetic oligonucleotide
  Antisense strand to SEQ ID NO: 1316572
auaaucaaacaggaacaag

SEQ ID NO: 1316574 - RNA, 19 nt, Artificial Sequence
  Description of Artificial Sequence: Synthetic oligonucleotide
  Sense strand starting at position 2496 of SEQ ID NO: 1242007
guuccuguuugauuauguu

SEQ ID NO: 1316575 - RNA, 19 nt, Artificial Sequence
  Description of Artificial Sequence: Synthetic oligonucleotide
  Antisense strand to SEQ ID NO: 1316574
aacauaaucaaacaggaac

SEQ ID NO: 1316576 - RNA, 19 nt, Artificial Sequence
  Description of Artificial Sequence: Synthetic oligonucleotide
  Sense strand starting at position 2502 of SEQ ID NO: 1242007
guuugauuauguuucccaa

SEQ ID NO: 1316577 - RNA, 19 nt, Artificial Sequence
  Description of Artificial Sequence: Synthetic oligonucleotide
  Antisense strand to SEQ ID NO: 1316576
uugggaaacauaaucaaac

SEQ ID NO: 1316578 - RNA, 19 nt, Artificial Sequence
  Description of Artificial Sequence: Synthetic oligonucleotide
  Sense strand starting at position 2504 of SEQ ID NO: 1242007
uugauuauguuucccaaga

SEQ ID NO: 1316579 - RNA, 19 nt, Artificial Sequence
  Description of Artificial Sequence: Synthetic oligonucleotide
  Antisense strand to SEQ ID NO: 1316578
ucuugggaaacauaaucaa

SEQ ID NO: 1316580 - RNA, 19 nt, Artificial Sequence
  Description of Artificial Sequence: Synthetic oligonucleotide
  Sense strand starting at position 2505 of SEQ ID NO: 1242007
ugauuauguuucccaagag

SEQ ID NO: 1316581 - RNA, 19 nt, Artificial Sequence
  Description of Artificial Sequence: Synthetic oligonucleotide
  Antisense strand to SEQ ID NO: 1316580
cucuugggaaacauaauca

SEQ ID NO: 1316582 - RNA, 19 nt, Artificial Sequence
  Description of Artificial Sequence: Synthetic oligonucleotide
  Sense strand starting at position 2506 of SEQ ID NO: 1242007
gauuauguuucccaagagc

SEQ ID NO: 1316583 - RNA, 19 nt, Artificial Sequence
  Description of Artificial Sequence: Synthetic oligonucleotide
  Antisense strand to SEQ ID NO: 1316582
gcucuugggaaacauaauc

SEQ ID NO: 1316584 - RNA, 19 nt, Artificial Sequence
  Description of Artificial Sequence: Synthetic oligonucleotide
  Sense strand starting at position 2532 of SEQ ID NO: 1242007
uuguccuguuuccuaaaca

SEQ ID NO: 1316585 - RNA, 19 nt, Artificial Sequence
  Description of Artificial Sequence: Synthetic oligonucleotide
  Antisense strand to SEQ ID NO: 1316584
uguuuaggaaacaggacaa

SEQ ID NO: 1316586 - RNA, 19 nt, Artificial Sequence
  Description of Artificial Sequence: Synthetic oligonucleotide
  Sense strand starting at position 2548 of SEQ ID NO: 1242007
acaggaucccucuguuaaa

SEQ ID NO: 1316587 - RNA, 19 nt, Artificial Sequence
  Description of Artificial Sequence: Synthetic oligonucleotide
  Antisense strand to SEQ ID NO: 1316586
uuuaacagagggauccugu

SEQ ID NO: 1316588 - RNA, 19 nt, Artificial Sequence
  Description of Artificial Sequence: Synthetic oligonucleotide
  Sense strand starting at position 2559 of SEQ ID NO: 1242007
cuguuaaaucccuggaccu

SEQ ID NO: 1316589 - RNA, 19 nt, Artificial Sequence
  Description of Artificial Sequence: Synthetic oligonucleotide
  Antisense strand to SEQ ID NO: 1316588
agguccagggauuuaacag

SEQ ID NO: 1316590 - RNA, 19 nt, Artificial Sequence
  Description of Artificial Sequence: Synthetic oligonucleotide
  Sense strand starting at position 3023 of SEQ ID NO: 1242007
uucuguuucucugcggcaa

SEQ ID NO: 1316591 - RNA, 19 nt, Artificial Sequence
  Description of Artificial Sequence: Synthetic oligonucleotide
  Antisense strand to SEQ ID NO: 1316590
uugccgcagagaaacagaa

SEQ ID NO: 1316592 - RNA, 19 nt, Artificial Sequence
  Description of Artificial Sequence: Synthetic oligonucleotide
  Sense strand starting at position 3024 of SEQ ID NO: 1242007
ucuguuucucugcggcaau

SEQ ID NO: 1316593 - RNA, 19 nt, Artificial Sequence
  Description of Artificial Sequence: Synthetic oligonucleotide
  Antisense strand to SEQ ID NO: 1316592
auugccgcagagaaacaga

SEQ ID NO: 1316594 - RNA, 19 nt, Artificial Sequence
  Description of Artificial Sequence: Synthetic oligonucleotide
  Sense strand starting at position 3026 of SEQ ID NO: 1242007
uguuucucugcggcaauau

SEQ ID NO: 1316595 - RNA, 19 nt, Artificial Sequence
  Description of Artificial Sequence: Synthetic oligonucleotide
  Antisense strand to SEQ ID NO: 1316594
auauugccgcagagaaaca

SEQ ID NO: 1316596 - RNA, 19 nt, Artificial Sequence
  Description of Artificial Sequence: Synthetic oligonucleotide
  Sense strand starting at position 3060 of SEQ ID NO: 1242007
aguugugguaauggauaaa

SEQ ID NO: 1316597 - RNA, 19 nt, Artificial Sequence
  Description of Artificial Sequence: Synthetic oligonucleotide
  Antisense strand to SEQ ID NO: 1316596
uuuauccauuaccacaacu

SEQ ID NO: 1316598 - RNA, 19 nt, Artificial Sequence
  Description of Artificial Sequence: Synthetic oligonucleotide
  Sense strand starting at position 3063 of SEQ ID NO: 1242007
ugugguaauggauaaagcu

SEQ ID NO: 1316599 - RNA, 19 nt, Artificial Sequence
  Description of Artificial Sequence: Synthetic oligonucleotide
  Antisense strand to SEQ ID NO: 1316598
agcuuuauccauuaccaca

SEQ ID NO: 1316600 - RNA, 19 nt, Artificial Sequence
  Description of Artificial Sequence: Synthetic oligonucleotide
  Sense strand starting at position 3072 of SEQ ID NO: 1242007
ggauaaagcuggucucuua

SEQ ID NO: 1316601 - RNA, 19 nt, Artificial Sequence
  Description of Artificial Sequence: Synthetic oligonucleotide
  Antisense strand to SEQ ID NO: 1316600
uaagagaccagcuuuaucc

SEQ ID NO: 1316602 - RNA, 19 nt, Artificial Sequence
  Description of Artificial Sequence: Synthetic oligonucleotide
  Sense strand starting at position 3638 of SEQ ID NO: 1242007
gggagucaugguggaggaa

SEQ ID NO: 1316603 - RNA, 19 nt, Artificial Sequence
  Description of Artificial Sequence: Synthetic oligonucleotide
  Antisense strand to SEQ ID NO: 1316602
uuccuccaccaugacuccc

SEQ ID NO: 1316604 - RNA, 19 nt, Artificial Sequence
  Description of Artificial Sequence: Synthetic oligonucleotide
  Sense strand starting at position 3641 of SEQ ID NO: 1242007
agucaugguggaggaaaua

SEQ ID NO: 1316605 - RNA, 19 nt, Artificial Sequence
  Description of Artificial Sequence: Synthetic oligonucleotide
  Antisense strand to SEQ ID NO: 1316604
uauuuccuccaccaugacu

SEQ ID NO: 1316606 - RNA, 19 nt, Artificial Sequence
  Description of Artificial Sequence: Synthetic oligonucleotide
  Sense strand starting at position 3684 of SEQ ID NO: 1242007
ggagaaauagcauguucca

SEQ ID NO: 1316607 - RNA, 19 nt, Artificial Sequence
  Description of Artificial Sequence: Synthetic oligonucleotide
  Antisense strand to SEQ ID NO: 1316606
uggaacaugcuauuucucc

SEQ ID NO: 1316608 - RNA, 19 nt, Artificial Sequence
  Description of Artificial Sequence: Synthetic oligonucleotide
  Sense strand starting at position 3698 of SEQ ID NO: 1242007
uuccauguugacggaaaua

SEQ ID NO: 1316609 - RNA, 19 nt, Artificial Sequence
  Description of Artificial Sequence: Synthetic oligonucleotide
  Antisense strand to SEQ ID NO: 1316608
uauuuccgucaacauggaa

SEQ ID NO: 1316610 - RNA, 19 nt, Artificial Sequence
  Description of Artificial Sequence: Synthetic oligonucleotide
  Sense strand starting at position 3782 of SEQ ID NO: 1242007
guuugaggucaugagaucu

SEQ ID NO: 1316611 - RNA, 19 nt, Artificial Sequence
  Description of Artificial Sequence: Synthetic oligonucleotide
  Antisense strand to SEQ ID NO: 1316610
agaucucaugaccucaaac

SEQ ID NO: 1316612 - RNA, 19 nt, Artificial Sequence
  Description of Artificial Sequence: Synthetic oligonucleotide
  Sense strand starting at position 3877 of SEQ ID NO: 1242007
ggguguaaguguagagguu

SEQ ID NO: 1316613 - RNA, 19 nt, Artificial Sequence
  Description of Artificial Sequence: Synthetic oligonucleotide
  Antisense strand to SEQ ID NO: 1316612
aaccucuacacuuacaccc

SEQ ID NO: 1316614 - RNA, 19 nt, Artificial Sequence
  Description of Artificial Sequence: Synthetic oligonucleotide
  Sense strand starting at position 3878 of SEQ ID NO: 1242007
gguguaaguguagagguua

SEQ ID NO: 1316615 - RNA, 19 nt, Artificial Sequence
  Description of Artificial Sequence: Synthetic oligonucleotide
  Antisense strand to SEQ ID NO: 1316614
uaaccucuacacuuacacc

SEQ ID NO: 1316616 - RNA, 19 nt, Artificial Sequence
  Description of Artificial Sequence: Synthetic oligonucleotide
  Sense strand starting at position 968 of SEQ ID NO: 1242008
gaaggaugguggcuuggau

SEQ ID NO: 1316617 - RNA, 19 nt, Artificial Sequence
  Description of Artificial Sequence: Synthetic oligonucleotide
  Antisense strand to SEQ ID NO: 1316616
auccaagccaccauccuuc

SEQ ID NO: 1316618 - RNA, 19 nt, Artificial Sequence
  Description of Artificial Sequence: Synthetic oligonucleotide
  Sense strand starting at position 1049 of SEQ ID NO: 1242008
ggauaugugguguaaggga

SEQ ID NO: 1316619 - RNA, 19 nt, Artificial Sequence
  Description of Artificial Sequence: Synthetic oligonucleotide
  Antisense strand to SEQ ID NO: 1316618
ucccuuacaccacauaucc

SEQ ID NO: 1316620 - RNA, 19 nt, Artificial Sequence
  Description of Artificial Sequence: Synthetic oligonucleotide
  Sense strand starting at position 1254 of SEQ ID NO: 1242008
aagagcuaucuacguuaac

SEQ ID NO: 1316621 - RNA, 19 nt, Artificial Sequence
  Description of Artificial Sequence: Synthetic oligonucleotide
  Antisense strand to SEQ ID NO: 1316620
guuaacguagauagcucuu

SEQ ID NO: 1316622 - RNA, 19 nt, Artificial Sequence
  Description of Artificial Sequence: Synthetic oligonucleotide
  Sense strand starting at position 1255 of SEQ ID NO: 1242008
agagcuaucuacguuaacu

SEQ ID NO: 1316623 - RNA, 19 nt, Artificial Sequence
  Description of Artificial Sequence: Synthetic oligonucleotide
  Antisense strand to SEQ ID NO: 1316622
aguuaacguagauagcucu

SEQ ID NO: 1316624 - RNA, 19 nt, Artificial Sequence
  Description of Artificial Sequence: Synthetic oligonucleotide
  Sense strand starting at position 1286 of SEQ ID NO: 1242008
agaggaugaguguguaacu

SEQ ID NO: 1316625 - RNA, 19 nt, Artificial Sequence
  Description of Artificial Sequence: Synthetic oligonucleotide
  Antisense strand to SEQ ID NO: 1316624
aguuacacacucauccucu

SEQ ID NO: 1316626 - RNA, 19 nt, Artificial Sequence
  Description of Artificial Sequence: Synthetic oligonucleotide
  Sense strand starting at position 1293 of SEQ ID NO: 1242008
gaguguguaacucaggacu

SEQ ID NO: 1316627 - RNA, 19 nt, Artificial Sequence
  Description of Artificial Sequence: Synthetic oligonucleotide
  Antisense strand to SEQ ID NO: 1316626
aguccugaguuacacacuc

SEQ ID NO: 1316628 - RNA, 19 nt, Artificial Sequence
  Description of Artificial Sequence: Synthetic oligonucleotide
  Sense strand starting at position 1555 of SEQ ID NO: 1242008
agaugcaccuacucagauu

SEQ ID NO: 1316629 - RNA, 19 nt, Artificial Sequence
  Description of Artificial Sequence: Synthetic oligonucleotide
  Antisense strand to SEQ ID NO: 1316628
aaucugaguaggugcaucu

SEQ ID NO: 1316630 - RNA, 19 nt, Artificial Sequence
  Description of Artificial Sequence: Synthetic oligonucleotide
  Sense strand starting at position 1595 of SEQ ID NO: 1242008
uccucaguccuuugacuua

SEQ ID NO: 1316631 - RNA, 19 nt, Artificial Sequence
  Description of Artificial Sequence: Synthetic oligonucleotide
  Antisense strand to SEQ ID NO: 1316630
uaagucaaaggacugagga

SEQ ID NO: 1316632 - RNA, 19 nt, Artificial Sequence
  Description of Artificial Sequence: Synthetic oligonucleotide
  Sense strand starting at position 1624 of SEQ ID NO: 1242008
ugauguaagcauuguuuga

SEQ ID NO: 1316633 - RNA, 19 nt, Artificial Sequence
  Description of Artificial Sequence: Synthetic oligonucleotide
  Antisense strand to SEQ ID NO: 1316632
ucaaacaaugcuuacauca

SEQ ID NO: 1316634 - RNA, 19 nt, Artificial Sequence
  Description of Artificial Sequence: Synthetic oligonucleotide
  Sense strand starting at position 1631 of SEQ ID NO: 1242008
agcauuguuugagcagaga

SEQ ID NO: 1316635 - RNA, 19 nt, Artificial Sequence
  Description of Artificial Sequence: Synthetic oligonucleotide
  Antisense strand to SEQ ID NO: 1316634
ucucugcucaaacaaugcu

SEQ ID NO: 1316636 - RNA, 19 nt, Artificial Sequence
  Description of Artificial Sequence: Synthetic oligonucleotide
  Sense strand starting at position 1646 of SEQ ID NO: 1242008
gagaaacuuccacggcaga

SEQ ID NO: 1316637 - RNA, 19 nt, Artificial Sequence
  Description of Artificial Sequence: Synthetic oligonucleotide
  Antisense strand to SEQ ID NO: 1316636
ucugccguggaaguuucuc

SEQ ID NO: 1316638 - RNA, 19 nt, Artificial Sequence
  Description of Artificial Sequence: Synthetic oligonucleotide
  Sense strand starting at position 1647 of SEQ ID NO: 1242008
agaaacuuccacggcagaa

SEQ ID NO: 1316639 - RNA, 19 nt, Artificial Sequence
  Description of Artificial Sequence: Synthetic oligonucleotide
  Antisense strand to SEQ ID NO: 1316638
uucugccguggaaguuucu

SEQ ID NO: 1316640 - RNA, 19 nt, Artificial Sequence
  Description of Artificial Sequence: Synthetic oligonucleotide
  Sense strand starting at position 1713 of SEQ ID NO: 1242008
agaguuaugccugagggcu

SEQ ID NO: 1316641 - RNA, 19 nt, Artificial Sequence
  Description of Artificial Sequence: Synthetic oligonucleotide
  Antisense strand to SEQ ID NO: 1316640
agcccucaggcauaacucu

SEQ ID NO: 1316642 - RNA, 19 nt, Artificial Sequence
  Description of Artificial Sequence: Synthetic oligonucleotide
  Sense strand starting at position 1748 of SEQ ID NO: 1242008
ggugcaguucugggaugaa

SEQ ID NO: 1316643 - RNA, 19 nt, Artificial Sequence
  Description of Artificial Sequence: Synthetic oligonucleotide
  Antisense strand to SEQ ID NO: 1316642
uucaucccagaacugcacc

SEQ ID NO: 1316644 - RNA, 19 nt, Artificial Sequence
  Description of Artificial Sequence: Synthetic oligonucleotide
  Sense strand starting at position 1751 of SEQ ID NO: 1242008
gcaguucugggaugaacag

SEQ ID NO: 1316645 - RNA, 19 nt, Artificial Sequence
  Description of Artificial Sequence: Synthetic oligonucleotide
  Antisense strand to SEQ ID NO: 1316644
cuguucaucccagaacugc

SEQ ID NO: 1316646 - RNA, 19 nt, Artificial Sequence
  Description of Artificial Sequence: Synthetic oligonucleotide
  Sense strand starting at position 1758 of SEQ ID NO: 1242008
ugggaugaacagugaugua

SEQ ID NO: 1316647 - RNA, 19 nt, Artificial Sequence
  Description of Artificial Sequence: Synthetic oligonucleotide
  Antisense strand to SEQ ID NO: 1316646
uacaucacuguucauccca

SEQ ID NO: 1316648 - RNA, 19 nt, Artificial Sequence
  Description of Artificial Sequence: Synthetic oligonucleotide
  Sense strand starting at position 2006 of SEQ ID NO: 1242008
ucauuuccgcccuggaaau

SEQ ID NO: 1316649 - RNA, 19 nt, Artificial Sequence
  Description of Artificial Sequence: Synthetic oligonucleotide
  Antisense strand to SEQ ID NO: 1316648
auuuccagggcggaaauga

SEQ ID NO: 1316650 - RNA, 19 nt, Artificial Sequence
  Description of Artificial Sequence: Synthetic oligonucleotide
  Sense strand starting at position 2133 of SEQ ID NO: 1242008
uuugaauguccuuguuaug

SEQ ID NO: 1316651 - RNA, 19 nt, Artificial Sequence
  Description of Artificial Sequence: Synthetic oligonucleotide
  Antisense strand to SEQ ID NO: 1316650
cauaacaaggacauucaaa

SEQ ID NO: 1316652 - RNA, 19 nt, Artificial Sequence
  Description of Artificial Sequence: Synthetic oligonucleotide
  Sense strand starting at position 2198 of SEQ ID NO: 1242008
cauacugacucagcguuaa

SEQ ID NO: 1316653 - RNA, 19 nt, Artificial Sequence
  Description of Artificial Sequence: Synthetic oligonucleotide
  Antisense strand to SEQ ID NO: 1316652
uuaacgcugagucaguaug

SEQ ID NO: 1316654 - RNA, 19 nt, Artificial Sequence
  Description of Artificial Sequence: Synthetic oligonucleotide
  Sense strand starting at position 2202 of SEQ ID NO: 1242008
cugacucagcguuaagaau

SEQ ID NO: 1316655 - RNA, 19 nt, Artificial Sequence
  Description of Artificial Sequence: Synthetic oligonucleotide
  Antisense strand to SEQ ID NO: 1316654
auucuuaacgcugagucag

SEQ ID NO: 1316656 - RNA, 19 nt, Artificial Sequence
  Description of Artificial Sequence: Synthetic oligonucleotide
  Sense strand starting at position 2214 of SEQ ID NO: 1242008
uaagaauuggugggcggau

SEQ ID NO: 1316657 - RNA, 19 nt, Artificial Sequence
  Description of Artificial Sequence: Synthetic oligonucleotide
  Antisense strand to SEQ ID NO: 1316656
auccgcccaccaauucuua

SEQ ID NO: 1316658 - RNA, 19 nt, Artificial Sequence
  Description of Artificial Sequence: Synthetic oligonucleotide
  Sense strand starting at position 2555 of SEQ ID NO: 1242008
gagcgaguuacuuaguagu

SEQ ID NO: 1316659 - RNA, 19 nt, Artificial Sequence
  Description of Artificial Sequence: Synthetic oligonucleotide
  Antisense strand to SEQ ID NO: 1316658
acuacuaaguaacucgcuc

SEQ ID NO: 1316660 - RNA, 19 nt, Artificial Sequence
  Description of Artificial Sequence: Synthetic oligonucleotide
  Sense strand starting at position 2561 of SEQ ID NO: 1242008
guuacuuaguaguuucuga

SEQ ID NO: 1316661 - RNA, 19 nt, Artificial Sequence
  Description of Artificial Sequence: Synthetic oligonucleotide
  Antisense strand to SEQ ID NO: 1316660
ucagaaacuacuaaguaac

SEQ ID NO: 1316662 - RNA, 19 nt, Artificial Sequence
  Description of Artificial Sequence: Synthetic oligonucleotide
  Sense strand starting at position 2568 of SEQ ID NO: 1242008
aguaguuucugaguauuga

SEQ ID NO: 1316663 - RNA, 19 nt, Artificial Sequence
  Description of Artificial Sequence: Synthetic oligonucleotide
  Antisense strand to SEQ ID NO: 1316662
ucaauacucagaaacuacu

SEQ ID NO: 1316664 - RNA, 19 nt, Artificial Sequence
  Description of Artificial Sequence: Synthetic oligonucleotide
  Sense strand starting at position 2569 of SEQ ID NO: 1242008
guaguuucugaguauugaa

SEQ ID NO: 1316665 - RNA, 19 nt, Artificial Sequence
  Description of Artificial Sequence: Synthetic oligonucleotide
  Antisense strand to SEQ ID NO: 1316664
uucaauacucagaaacuac

SEQ ID NO: 1316666 - RNA, 19 nt, Artificial Sequence
  Description of Artificial Sequence: Synthetic oligonucleotide
  Sense strand starting at position 2583 of SEQ ID NO: 1242008
uugaauguccacuguguca

SEQ ID NO: 1316667 - RNA, 19 nt, Artificial Sequence
  Description of Artificial Sequence: Synthetic oligonucleotide
  Antisense strand to SEQ ID NO: 1316666
ugacacaguggacauucaa

SEQ ID NO: 1316668 - RNA, 19 nt, Artificial Sequence
  Description of Artificial Sequence: Synthetic oligonucleotide
  Sense strand starting at position 2628 of SEQ ID NO: 1242008
guaaccuugcgagguaaac

SEQ ID NO: 1316669 - RNA, 19 nt, Artificial Sequence
  Description of Artificial Sequence: Synthetic oligonucleotide
  Antisense strand to SEQ ID NO: 1316668
guuuaccucgcaagguuac

SEQ ID NO: 1316670 - RNA, 19 nt, Artificial Sequence
  Description of Artificial Sequence: Synthetic oligonucleotide
  Sense strand starting at position 2678 of SEQ ID NO: 1242008
cagcauugugggcauggaa

SEQ ID NO: 1316671 - RNA, 19 nt, Artificial Sequence
  Description of Artificial Sequence: Synthetic oligonucleotide
  Antisense strand to SEQ ID NO: 1316670
uuccaugcccacaaugcug

SEQ ID NO: 1316672 - RNA, 19 nt, Artificial Sequence
  Description of Artificial Sequence: Synthetic oligonucleotide
  Sense strand starting at position 2698 of SEQ ID NO: 1242008
gggacaugggcucgguauu

SEQ ID NO: 1316673 - RNA, 19 nt, Artificial Sequence
  Description of Artificial Sequence: Synthetic oligonucleotide
  Antisense strand to SEQ ID NO: 1316672
aauaccgagcccauguccc

SEQ ID NO: 1316674 - RNA, 19 nt, Artificial Sequence
  Description of Artificial Sequence: Synthetic oligonucleotide
  Sense strand starting at position 3188 of SEQ ID NO: 1242008
gagauuagugcccaccaca

SEQ ID NO: 1316675 - RNA, 19 nt, Artificial Sequence
  Description of Artificial Sequence: Synthetic oligonucleotide
  Antisense strand to SEQ ID NO: 1316674
uguggugggcacuaaucuc

SEQ ID NO: 1316676 - RNA, 19 nt, Artificial Sequence
  Description of Artificial Sequence: Synthetic oligonucleotide
  Sense strand starting at position 3479 of SEQ ID NO: 1242008
cccaaagugcuagguuaug

SEQ ID NO: 1316677 - RNA, 19 nt, Artificial Sequence
  Description of Artificial Sequence: Synthetic oligonucleotide
  Antisense strand to SEQ ID NO: 1316676
cauaaccuagcacuuuggg

SEQ ID NO: 1316678 - RNA, 19 nt, Artificial Sequence
  Description of Artificial Sequence: Synthetic oligonucleotide
  Sense strand starting at position 3554 of SEQ ID NO: 1242008
aaugacgugucauuaaaua

SEQ ID NO: 1316679 - RNA, 19 nt, Artificial Sequence
  Description of Artificial Sequence: Synthetic oligonucleotide
  Antisense strand to SEQ ID NO: 1316678
uauuuaaugacacgucauu

SEQ ID NO: 1316680 - RNA, 19 nt, Artificial Sequence
  Description of Artificial Sequence: Synthetic oligonucleotide
  Sense strand starting at position 3575 of SEQ ID NO: 1242008
guaugucauucuuuaaagu

SEQ ID NO: 1316681 - RNA, 19 nt, Artificial Sequence
  Description of Artificial Sequence: Synthetic oligonucleotide
  Antisense strand to SEQ ID NO: 1316680
acuuuaaagaaugacauac

SEQ ID NO: 1316682 - RNA, 19 nt, Artificial Sequence
  Description of Artificial Sequence: Synthetic oligonucleotide
  Sense strand starting at position 3584 of SEQ ID NO: 1242008
ucuuuaaagugauuggguu

SEQ ID NO: 1316683 - RNA, 19 nt, Artificial Sequence
  Description of Artificial Sequence: Synthetic oligonucleotide
  Antisense strand to SEQ ID NO: 1316682
aacccaaucacuuuaaaga

SEQ ID NO: 1316684 - RNA, 19 nt, Artificial Sequence
  Description of Artificial Sequence: Synthetic oligonucleotide
  Sense strand starting at position 3585 of SEQ ID NO: 1242008
cuuuaaagugauuggguuu

SEQ ID NO: 1316685 - RNA, 19 nt, Artificial Sequence
  Description of Artificial Sequence: Synthetic oligonucleotide
  Antisense strand to SEQ ID NO: 1316684
aaacccaaucacuuuaaag

SEQ ID NO: 1316686 - RNA, 19 nt, Artificial Sequence
  Description of Artificial Sequence: Synthetic oligonucleotide
  Sense strand starting at position 3630 of SEQ ID NO: 1242008
agccuauuauuggacauuu

SEQ ID NO: 1316687 - RNA, 19 nt, Artificial Sequence
  Description of Artificial Sequence: Synthetic oligonucleotide
  Antisense strand to SEQ ID NO: 1316686
aaauguccaauaauaggcu

SEQ ID NO: 1316688 - RNA, 19 nt, Artificial Sequence
  Description of Artificial Sequence: Synthetic oligonucleotide
  Sense strand starting at position 3689 of SEQ ID NO: 1242008
cugugaacauaucuguaug

SEQ ID NO: 1316689 - RNA, 19 nt, Artificial Sequence
  Description of Artificial Sequence: Synthetic oligonucleotide
  Antisense strand to SEQ ID NO: 1316688
cauacagauauguucacag

SEQ ID NO: 1316690 - RNA, 19 nt, Artificial Sequence
  Description of Artificial Sequence: Synthetic oligonucleotide
  Sense strand starting at position 3692 of SEQ ID NO: 1242008
ugaacauaucuguaugucu

SEQ ID NO: 1316691 - RNA, 19 nt, Artificial Sequence
  Description of Artificial Sequence: Synthetic oligonucleotide
  Antisense strand to SEQ ID NO: 1316690
agacauacagauauguuca

SEQ ID NO: 1316692 - RNA, 19 nt, Artificial Sequence
  Description of Artificial Sequence: Synthetic oligonucleotide
  Sense strand starting at position 3727 of SEQ ID NO: 1242008
guuauaguccuagaaguga

SEQ ID NO: 1316693 - RNA, 19 nt, Artificial Sequence
  Description of Artificial Sequence: Synthetic oligonucleotide
  Antisense strand to SEQ ID NO: 1316692
ucacuucuaggacuauaac

SEQ ID NO: 1316694 - RNA, 19 nt, Artificial Sequence
  Description of Artificial Sequence: Synthetic oligonucleotide
  Sense strand starting at position 3747 of SEQ ID NO: 1242008
auuggaguugcuggaucaa

SEQ ID NO: 1316695 - RNA, 19 nt, Artificial Sequence
  Description of Artificial Sequence: Synthetic oligonucleotide
  Antisense strand to SEQ ID NO: 1316694
uugauccagcaacuccaau

SEQ ID NO: 1316696 - RNA, 19 nt, Artificial Sequence
  Description of Artificial Sequence: Synthetic oligonucleotide
  Sense strand starting at position 13 of SEQ ID NO: 1242009
aaaguaagauuacagguau

SEQ ID NO: 1316697 - RNA, 19 nt, Artificial Sequence
  Description of Artificial Sequence: Synthetic oligonucleotide
  Antisense strand to SEQ ID NO: 1316696
auaccuguaaucuuacuuu

SEQ ID NO: 1316698 - RNA, 19 nt, Artificial Sequence
  Description of Artificial Sequence: Synthetic oligonucleotide
  Sense strand starting at position 258 of SEQ ID NO: 1242009
gcagaaauaucacuugagg

SEQ ID NO: 1316699 - RNA, 19 nt, Artificial Sequence
  Description of Artificial Sequence: Synthetic oligonucleotide
  Antisense strand to SEQ ID NO: 1316698
ccucaagugauauuucugc

SEQ ID NO: 1316700 - RNA, 19 nt, Artificial Sequence
  Description of Artificial Sequence: Synthetic oligonucleotide
  Sense strand starting at position 368 of SEQ ID NO: 1242009
aguccuaucuacugaggag

SEQ ID NO: 1316701 - RNA, 19 nt, Artificial Sequence
  Description of Artificial Sequence: Synthetic oligonucleotide
  Antisense strand to SEQ ID NO: 1316700
cuccucaguagauaggacu

SEQ ID NO: 1316702 - RNA, 19 nt, Artificial Sequence
  Description of Artificial Sequence: Synthetic oligonucleotide
  Sense strand starting at position 421 of SEQ ID NO: 1242009
cgaagcugccaugaacuau

SEQ ID NO: 1316703 - RNA, 19 nt, Artificial Sequence
  Description of Artificial Sequence: Synthetic oligonucleotide
  Antisense strand to SEQ ID NO: 1316702
auaguucauggcagcuucg

SEQ ID NO: 1316704 - RNA, 19 nt, Artificial Sequence
  Description of Artificial Sequence: Synthetic oligonucleotide
  Sense strand starting at position 605 of SEQ ID NO: 1242009
guggccaaauggucaauua

SEQ ID NO: 1316705 - RNA, 19 nt, Artificial Sequence
  Description of Artificial Sequence: Synthetic oligonucleotide
  Antisense strand to SEQ ID NO: 1316704
uaauugaccauuuggccac

SEQ ID NO: 1316706 - RNA, 19 nt, Artificial Sequence
  Description of Artificial Sequence: Synthetic oligonucleotide
  Sense strand starting at position 606 of SEQ ID NO: 1242009
uggccaaauggucaauuaa

SEQ ID NO: 1316707 - RNA, 19 nt, Artificial Sequence
  Description of Artificial Sequence: Synthetic oligonucleotide
  Antisense strand to SEQ ID NO: 1316706
uuaauugaccauuuggcca

SEQ ID NO: 1316708 - RNA, 19 nt, Artificial Sequence
  Description of Artificial Sequence: Synthetic oligonucleotide
  Sense strand starting at position 633 of SEQ ID NO: 1242009
ccuaaagcuuaaugagaac

SEQ ID NO: 1316709 - RNA, 19 nt, Artificial Sequence
  Description of Artificial Sequence: Synthetic oligonucleotide
  Antisense strand to SEQ ID NO: 1316708
guucucauuaagcuuuagg

SEQ ID NO: 1316710 - RNA, 19 nt, Artificial Sequence
  Description of Artificial Sequence: Synthetic oligonucleotide
  Sense strand starting at position 666 of SEQ ID NO: 1242009
aucauuaauuaggguaaac

SEQ ID NO: 1316711 - RNA, 19 nt, Artificial Sequence
  Description of Artificial Sequence: Synthetic oligonucleotide
  Antisense strand to SEQ ID NO: 1316710
guuuacccuaauuaaugau

SEQ ID NO: 1316712 - RNA, 19 nt, Artificial Sequence
  Description of Artificial Sequence: Synthetic oligonucleotide
  Sense strand starting at position 695 of SEQ ID NO: 1242009
gcccuaaugccagauucuu

SEQ ID NO: 1316713 - RNA, 19 nt, Artificial Sequence
  Description of Artificial Sequence: Synthetic oligonucleotide
  Antisense strand to SEQ ID NO: 1316712
aagaaucuggcauuagggc

SEQ ID NO: 1316714 - RNA, 19 nt, Artificial Sequence
  Description of Artificial Sequence: Synthetic oligonucleotide
  Sense strand starting at position 701 of SEQ ID NO: 1242009
augccagauucuuaaugac

SEQ ID NO: 1316715 - RNA, 19 nt, Artificial Sequence
  Description of Artificial Sequence: Synthetic oligonucleotide
  Antisense strand to SEQ ID NO: 1316714
gucauuaagaaucuggcau

SEQ ID NO: 1316716 - RNA, 19 nt, Artificial Sequence
  Description of Artificial Sequence: Synthetic oligonucleotide
  Sense strand starting at position 704 of SEQ ID NO: 1242009
ccagauucuuaaugacaga

SEQ ID NO: 1316717 - RNA, 19 nt, Artificial Sequence
  Description of Artificial Sequence: Synthetic oligonucleotide
  Antisense strand to SEQ ID NO: 1316716
ucugucauuaagaaucugg

SEQ ID NO: 1316718 - RNA, 19 nt, Artificial Sequence
  Description of Artificial Sequence: Synthetic oligonucleotide
  Sense strand starting at position 739 of SEQ ID NO: 1242009
guuguaaauuugucacuau

SEQ ID NO: 1316719 - RNA, 19 nt, Artificial Sequence
  Description of Artificial Sequence: Synthetic oligonucleotide
  Antisense strand to SEQ ID NO: 1316718
auagugacaaauuuacaac

SEQ ID NO: 1316720 - RNA, 19 nt, Artificial Sequence
  Description of Artificial Sequence: Synthetic oligonucleotide
  Sense strand starting at position 756 of SEQ ID NO: 1242009
auuuauuaaucugagguug

SEQ ID NO: 1316721 - RNA, 19 nt, Artificial Sequence
  Description of Artificial Sequence: Synthetic oligonucleotide
  Antisense strand to SEQ ID NO: 1316720
caaccucagauuaauaaau

SEQ ID NO: 1316722 - RNA, 19 nt, Artificial Sequence
  Description of Artificial Sequence: Synthetic oligonucleotide
  Sense strand starting at position 758 of SEQ ID NO: 1242009
uuauuaaucugagguugaa

SEQ ID NO: 1316723 - RNA, 19 nt, Artificial Sequence
  Description of Artificial Sequence: Synthetic oligonucleotide
  Antisense strand to SEQ ID NO: 1316722
uucaaccucagauuaauaa

SEQ ID NO: 1316724 - RNA, 19 nt, Artificial Sequence
  Description of Artificial Sequence: Synthetic oligonucleotide
  Sense strand starting at position 761 of SEQ ID NO: 1242009
uuaaucugagguugaauaa

SEQ ID NO: 1316725 - RNA, 19 nt, Artificial Sequence
  Description of Artificial Sequence: Synthetic oligonucleotide
  Antisense strand to SEQ ID NO: 1316724
uuauucaaccucagauuaa

SEQ ID NO: 1316726 - RNA, 19 nt, Artificial Sequence
  Description of Artificial Sequence: Synthetic oligonucleotide
  Sense strand starting at position 790 of SEQ ID NO: 1242009
gcacuuagaugaucugaac

SEQ ID NO: 1316727 - RNA, 19 nt, Artificial Sequence
  Description of Artificial Sequence: Synthetic oligonucleotide
  Antisense strand to SEQ ID NO: 1316726
guucagaucaucuaagugc

SEQ ID NO: 1316728 - RNA, 19 nt, Artificial Sequence
  Description of Artificial Sequence: Synthetic oligonucleotide
  Sense strand starting at position 793 of SEQ ID NO: 1242009
cuuagaugaucugaacaaa

SEQ ID NO: 1316729 - RNA, 19 nt, Artificial Sequence
  Description of Artificial Sequence: Synthetic oligonucleotide
  Antisense strand to SEQ ID NO: 1316728
uuuguucagaucaucuaag

SEQ ID NO: 1316730 - RNA, 19 nt, Artificial Sequence
  Description of Artificial Sequence: Synthetic oligonucleotide
  Sense strand starting at position 865 of SEQ ID NO: 1242009
gauaccauuugcuggugua

SEQ ID NO: 1316731 - RNA, 19 nt, Artificial Sequence
  Description of Artificial Sequence: Synthetic oligonucleotide
  Antisense strand to SEQ ID NO: 1316730
uacaccagcaaaugguauc

SEQ ID NO: 1316732 - RNA, 19 nt, Artificial Sequence
  Description of Artificial Sequence: Synthetic oligonucleotide
  Sense strand starting at position 868 of SEQ ID NO: 1242009
accauuugcugguguacga

SEQ ID NO: 1316733 - RNA, 19 nt, Artificial Sequence
  Description of Artificial Sequence: Synthetic oligonucleotide
  Antisense strand to SEQ ID NO: 1316732
ucguacaccagcaaauggu

SEQ ID NO: 1316734 - RNA, 19 nt, Artificial Sequence
  Description of Artificial Sequence: Synthetic oligonucleotide
  Sense strand starting at position 1104 of SEQ ID NO: 1242009
gaggaacccuagucucaca

SEQ ID NO: 1316735 - RNA, 19 nt, Artificial Sequence
  Description of Artificial Sequence: Synthetic oligonucleotide
  Antisense strand to SEQ ID NO: 1316734
ugugagacuaggguuccuc

SEQ ID NO: 1316736 - RNA, 19 nt, Artificial Sequence
  Description of Artificial Sequence: Synthetic oligonucleotide
  Sense strand starting at position 1127 of SEQ ID NO: 1242009
ugacaagugugauauagca

SEQ ID NO: 1316737 - RNA, 19 nt, Artificial Sequence
  Description of Artificial Sequence: Synthetic oligonucleotide
  Antisense strand to SEQ ID NO: 1316736
ugcuauaucacacuuguca

SEQ ID NO: 1316738 - RNA, 19 nt, Artificial Sequence
  Description of Artificial Sequence: Synthetic oligonucleotide
  Sense strand starting at position 1142 of SEQ ID NO: 1242009
agcaaaucucucgaugaau

SEQ ID NO: 1316739 - RNA, 19 nt, Artificial Sequence
  Description of Artificial Sequence: Synthetic oligonucleotide
  Antisense strand to SEQ ID NO: 1316738
auucaucgagagauuugcu

SEQ ID NO: 1316740 - RNA, 19 nt, Artificial Sequence
  Description of Artificial Sequence: Synthetic oligonucleotide
  Sense strand starting at position 1217 of SEQ ID NO: 1242009
aagugcuuugauuagggau

SEQ ID NO: 1316741 - RNA, 19 nt, Artificial Sequence
  Description of Artificial Sequence: Synthetic oligonucleotide
  Antisense strand to SEQ ID NO: 1316740
aucccuaaucaaagcacuu

SEQ ID NO: 1316742 - RNA, 19 nt, Artificial Sequence
  Description of Artificial Sequence: Synthetic oligonucleotide
  Sense strand starting at position 1219 of SEQ ID NO: 1242009
gugcuuugauuagggauuu

SEQ ID NO: 1316743 - RNA, 19 nt, Artificial Sequence
  Description of Artificial Sequence: Synthetic oligonucleotide
  Antisense strand to SEQ ID NO: 1316742
aaaucccuaaucaaagcac

SEQ ID NO: 1316744 - RNA, 19 nt, Artificial Sequence
  Description of Artificial Sequence: Synthetic oligonucleotide
  Sense strand starting at position 1278 of SEQ ID NO: 1242009
agucuaugucgucacuaga

SEQ ID NO: 1316745 - RNA, 19 nt, Artificial Sequence
  Description of Artificial Sequence: Synthetic oligonucleotide
  Antisense strand to SEQ ID NO: 1316744
ucuagugacgacauagacu

SEQ ID NO: 1316746 - RNA, 19 nt, Artificial Sequence
  Description of Artificial Sequence: Synthetic oligonucleotide
  Sense strand starting at position 1320 of SEQ ID NO: 1242009
ccacuugugucgcaucuuu

SEQ ID NO: 1316747 - RNA, 19 nt, Artificial Sequence
  Description of Artificial Sequence: Synthetic oligonucleotide
  Antisense strand to SEQ ID NO: 1316746
aaagaugcgacacaagugg

SEQ ID NO: 1316748 - RNA, 19 nt, Artificial Sequence
  Description of Artificial Sequence: Synthetic oligonucleotide
  Sense strand starting at position 1327 of SEQ ID NO: 1242009
ugucgcaucuuucuacaua

SEQ ID NO: 1316749 - RNA, 19 nt, Artificial Sequence
  Description of Artificial Sequence: Synthetic oligonucleotide
  Antisense strand to SEQ ID NO: 1316748
uauguagaaagaugcgaca

SEQ ID NO: 1316750 - RNA, 19 nt, Artificial Sequence
  Description of Artificial Sequence: Synthetic oligonucleotide
  Sense strand starting at position 1328 of SEQ ID NO: 1242009
gucgcaucuuucuacauaa

SEQ ID NO: 1316751 - RNA, 19 nt, Artificial Sequence
  Description of Artificial Sequence: Synthetic oligonucleotide
  Antisense strand to SEQ ID NO: 1316750
uuauguagaaagaugcgac

SEQ ID NO: 1316752 - RNA, 19 nt, Artificial Sequence
  Description of Artificial Sequence: Synthetic oligonucleotide
  Sense strand starting at position 1383 of SEQ ID NO: 1242009
acgacuagguucuagggaa

SEQ ID NO: 1316753 - RNA, 19 nt, Artificial Sequence
  Description of Artificial Sequence: Synthetic oligonucleotide
  Antisense strand to SEQ ID NO: 1316752
uucccuagaaccuagucgu

SEQ ID NO: 1316754 - RNA, 19 nt, Artificial Sequence
  Description of Artificial Sequence: Synthetic oligonucleotide
  Sense strand starting at position 1554 of SEQ ID NO: 1242009
gcucauuccagagguacag

SEQ ID NO: 1316755 - RNA, 19 nt, Artificial Sequence
  Description of Artificial Sequence: Synthetic oligonucleotide
  Antisense strand to SEQ ID NO: 1316754
cuguaccucuggaaugagc

SEQ ID NO: 1316756 - RNA, 19 nt, Artificial Sequence
  Description of Artificial Sequence: Synthetic oligonucleotide
  Sense strand starting at position 2059 of SEQ ID NO: 1242009
ggcggcuugauguugucau

SEQ ID NO: 1316757 - RNA, 19 nt, Artificial Sequence
  Description of Artificial Sequence: Synthetic oligonucleotide
  Antisense strand to SEQ ID NO: 1316756
augacaacaucaagccgcc

SEQ ID NO: 1316758 - RNA, 19 nt, Artificial Sequence
  Description of Artificial Sequence: Synthetic oligonucleotide
  Sense strand starting at position 2063 of SEQ ID NO: 1242009
gcuugauguugucaucacu

SEQ ID NO: 1316759 - RNA, 19 nt, Artificial Sequence
  Description of Artificial Sequence: Synthetic oligonucleotide
  Antisense strand to SEQ ID NO: 1316758
agugaugacaacaucaagc

SEQ ID NO: 1316760 - RNA, 19 nt, Artificial Sequence
  Description of Artificial Sequence: Synthetic oligonucleotide
  Sense strand starting at position 2084 of SEQ ID NO: 1242009
gcgcccguuucugucauaa

SEQ ID NO: 1316761 - RNA, 19 nt, Artificial Sequence
  Description of Artificial Sequence: Synthetic oligonucleotide
  Antisense strand to SEQ ID NO: 1316760
uuaugacagaaacgggcgc

SEQ ID NO: 1316762 - RNA, 19 nt, Artificial Sequence
  Description of Artificial Sequence: Synthetic oligonucleotide
  Sense strand starting at position 2095 of SEQ ID NO: 1242009
ugucauaagcugugggauc

SEQ ID NO: 1316763 - RNA, 19 nt, Artificial Sequence
  Description of Artificial Sequence: Synthetic oligonucleotide
  Antisense strand to SEQ ID NO: 1316762
gaucccacagcuuaugaca

SEQ ID NO: 1316764 - RNA, 19 nt, Artificial Sequence
  Description of Artificial Sequence: Synthetic oligonucleotide
  Sense strand starting at position 2123 of SEQ ID NO: 1242009
ggaagagaucauggccgau

SEQ ID NO: 1316765 - RNA, 19 nt, Artificial Sequence
  Description of Artificial Sequence: Synthetic oligonucleotide
  Antisense strand to SEQ ID NO: 1316764
aucggccaugaucucuucc

SEQ ID NO: 1316766 - RNA, 19 nt, Artificial Sequence
  Description of Artificial Sequence: Synthetic oligonucleotide
  Sense strand starting at position 2188 of SEQ ID NO: 1242009
ggcacucuggauuggaaga

SEQ ID NO: 1316767 - RNA, 19 nt, Artificial Sequence
  Description of Artificial Sequence: Synthetic oligonucleotide
  Antisense strand to SEQ ID NO: 1316766
ucuuccaauccagagugcc

SEQ ID NO: 1316768 - RNA, 19 nt, Artificial Sequence
  Description of Artificial Sequence: Synthetic oligonucleotide
  Sense strand starting at position 2218 of SEQ ID NO: 1242009
gccugugucaagugccuau

SEQ ID NO: 1316769 - RNA, 19 nt, Artificial Sequence
  Description of Artificial Sequence: Synthetic oligonucleotide
  Antisense strand to SEQ ID NO: 1316768
auaggcacuugacacaggc

SEQ ID NO: 1316770 - RNA, 19 nt, Artificial Sequence
  Description of Artificial Sequence: Synthetic oligonucleotide
  Sense strand starting at position 170 of SEQ ID NO: 1242010
aagugaugaguuuagagua

SEQ ID NO: 1316771 - RNA, 19 nt, Artificial Sequence
  Description of Artificial Sequence: Synthetic oligonucleotide
  Antisense strand to SEQ ID NO: 1316770
uacucuaaacucaucacuu

SEQ ID NO: 1316772 - RNA, 19 nt, Artificial Sequence
  Description of Artificial Sequence: Synthetic oligonucleotide
  Sense strand starting at position 175 of SEQ ID NO: 1242010
augaguuuagaguacuuau

SEQ ID NO: 1316773 - RNA, 19 nt, Artificial Sequence
  Description of Artificial Sequence: Synthetic oligonucleotide
  Antisense strand to SEQ ID NO: 1316772
auaaguacucuaaacucau

SEQ ID NO: 1316774 - RNA, 19 nt, Artificial Sequence
  Description of Artificial Sequence: Synthetic oligonucleotide
  Sense strand starting at position 249 of SEQ ID NO: 1242010
aauaaugccuguguuuaag

SEQ ID NO: 1316775 - RNA, 19 nt, Artificial Sequence
  Description of Artificial Sequence: Synthetic oligonucleotide
  Antisense strand to SEQ ID NO: 1316774
cuuaaacacaggcauuauu

SEQ ID NO: 1316776 - RNA, 19 nt, Artificial Sequence
  Description of Artificial Sequence: Synthetic oligonucleotide
  Sense strand starting at position 251 of SEQ ID NO: 1242010
uaaugccuguguuuaagaa

SEQ ID NO: 1316777 - RNA, 19 nt, Artificial Sequence
  Description of Artificial Sequence: Synthetic oligonucleotide
  Antisense strand to SEQ ID NO: 1316776
uucuuaaacacaggcauua

SEQ ID NO: 1316778 - RNA, 19 nt, Artificial Sequence
  Description of Artificial Sequence: Synthetic oligonucleotide
  Sense strand starting at position 363 of SEQ ID NO: 1242010
cagugauucucaucuggug

SEQ ID NO: 1316779 - RNA, 19 nt, Artificial Sequence
  Description of Artificial Sequence: Synthetic oligonucleotide
  Antisense strand to SEQ ID NO: 1316778
caccagaugagaaucacug

SEQ ID NO: 1316780 - RNA, 19 nt, Artificial Sequence
  Description of Artificial Sequence: Synthetic oligonucleotide
  Sense strand starting at position 480 of SEQ ID NO: 1242010
uguuucucugauugaguag

SEQ ID NO: 1316781 - RNA, 19 nt, Artificial Sequence
  Description of Artificial Sequence: Synthetic oligonucleotide
  Antisense strand to SEQ ID NO: 1316780
cuacucaaucagagaaaca

SEQ ID NO: 1316782 - RNA, 19 nt, Artificial Sequence
  Description of Artificial Sequence: Synthetic oligonucleotide
  Sense strand starting at position 481 of SEQ ID NO: 1242010
guuucucugauugaguaga

SEQ ID NO: 1316783 - RNA, 19 nt, Artificial Sequence
  Description of Artificial Sequence: Synthetic oligonucleotide
  Antisense strand to SEQ ID NO: 1316782
ucuacucaaucagagaaac

SEQ ID NO: 1316784 - RNA, 19 nt, Artificial Sequence
  Description of Artificial Sequence: Synthetic oligonucleotide
  Sense strand starting at position 483 of SEQ ID NO: 1242010
uucucugauugaguagauu

SEQ ID NO: 1316785 - RNA, 19 nt, Artificial Sequence
  Description of Artificial Sequence: Synthetic oligonucleotide
  Antisense strand to SEQ ID NO: 1316784
aaucuacucaaucagagaa

SEQ ID NO: 1316786 - RNA, 19 nt, Artificial Sequence
  Description of Artificial Sequence: Synthetic oligonucleotide
  Sense strand starting at position 507 of SEQ ID NO: 1242010
uugucuggucucuacagaa

SEQ ID NO: 1316787 - RNA, 19 nt, Artificial Sequence
  Description of Artificial Sequence: Synthetic oligonucleotide
  Antisense strand to SEQ ID NO: 1316786
uucuguagagaccagacaa

SEQ ID NO: 1316788 - RNA, 19 nt, Artificial Sequence
  Description of Artificial Sequence: Synthetic oligonucleotide
  Sense strand starting at position 845 of SEQ ID NO: 1242010
auuggugucugcccuauuu

SEQ ID NO: 1316789 - RNA, 19 nt, Artificial Sequence
  Description of Artificial Sequence: Synthetic oligonucleotide
  Antisense strand to SEQ ID NO: 1316788
aaauagggcagacaccaau

SEQ ID NO: 1316790 - RNA, 19 nt, Artificial Sequence
  Description of Artificial Sequence: Synthetic oligonucleotide
  Sense strand starting at position 866 of SEQ ID NO: 1242010
acaagacguggcugagauu

SEQ ID NO: 1316791 - RNA, 19 nt, Artificial Sequence
  Description of Artificial Sequence: Synthetic oligonucleotide
  Antisense strand to SEQ ID NO: 1316790
aaucucagccacgucuugu

SEQ ID NO: 1316792 - RNA, 19 nt, Artificial Sequence
  Description of Artificial Sequence: Synthetic oligonucleotide
  Sense strand starting at position 867 of SEQ ID NO: 1242010
caagacguggcugagauua

SEQ ID NO: 1316793 - RNA, 19 nt, Artificial Sequence
  Description of Artificial Sequence: Synthetic oligonucleotide
  Antisense strand to SEQ ID NO: 1316792
uaaucucagccacgucuug

SEQ ID NO: 1316794 - RNA, 19 nt, Artificial Sequence
  Description of Artificial Sequence: Synthetic oligonucleotide
  Sense strand starting at position 1065 of SEQ ID NO: 1242010
uugcuucucccaggacaca

SEQ ID NO: 1316795 - RNA, 19 nt, Artificial Sequence
  Description of Artificial Sequence: Synthetic oligonucleotide
  Antisense strand to SEQ ID NO: 1316794
uguguccugggagaagcaa

SEQ ID NO: 1316796 - RNA, 19 nt, Artificial Sequence
  Description of Artificial Sequence: Synthetic oligonucleotide
  Sense strand starting at position 1266 of SEQ ID NO: 1242010
gggugucucucauuuguau

SEQ ID NO: 1316797 - RNA, 19 nt, Artificial Sequence
  Description of Artificial Sequence: Synthetic oligonucleotide
  Antisense strand to SEQ ID NO: 1316796
auacaaaugagagacaccc

SEQ ID NO: 1316798 - RNA, 19 nt, Artificial Sequence
  Description of Artificial Sequence: Synthetic oligonucleotide
  Sense strand starting at position 1275 of SEQ ID NO: 1242010
ucauuuguaucaguaagcu

SEQ ID NO: 1316799 - RNA, 19 nt, Artificial Sequence
  Description of Artificial Sequence: Synthetic oligonucleotide
  Antisense strand to SEQ ID NO: 1316798
agcuuacugauacaaauga

SEQ ID NO: 1316800 - RNA, 19 nt, Artificial Sequence
  Description of Artificial Sequence: Synthetic oligonucleotide
  Sense strand starting at position 1287 of SEQ ID NO: 1242010
guaagcugugaacacuuau

SEQ ID NO: 1316801 - RNA, 19 nt, Artificial Sequence
  Description of Artificial Sequence: Synthetic oligonucleotide
  Antisense strand to SEQ ID NO: 1316800
auaaguguucacagcuuac

SEQ ID NO: 1316802 - RNA, 19 nt, Artificial Sequence
  Description of Artificial Sequence: Synthetic oligonucleotide
  Sense strand starting at position 1294 of SEQ ID NO: 1242010
gugaacacuuaugcuauga

SEQ ID NO: 1316803 - RNA, 19 nt, Artificial Sequence
  Description of Artificial Sequence: Synthetic oligonucleotide
  Antisense strand to SEQ ID NO: 1316802
ucauagcauaaguguucac

SEQ ID NO: 1316804 - RNA, 19 nt, Artificial Sequence
  Description of Artificial Sequence: Synthetic oligonucleotide
  Sense strand starting at position 1298 of SEQ ID NO: 1242010
acacuuaugcuaugaugac

SEQ ID NO: 1316805 - RNA, 19 nt, Artificial Sequence
  Description of Artificial Sequence: Synthetic oligonucleotide
  Antisense strand to SEQ ID NO: 1316804
gucaucauagcauaagugu

SEQ ID NO: 1316806 - RNA, 19 nt, Artificial Sequence
  Description of Artificial Sequence: Synthetic oligonucleotide
  Sense strand starting at position 1781 of SEQ ID NO: 1242010
uucugucuuccagacagaa

SEQ ID NO: 1316807 - RNA, 19 nt, Artificial Sequence
  Description of Artificial Sequence: Synthetic oligonucleotide
  Antisense strand to SEQ ID NO: 1316806
uucugucuggaagacagaa

SEQ ID NO: 1316808 - RNA, 19 nt, Artificial Sequence
  Description of Artificial Sequence: Synthetic oligonucleotide
  Sense strand starting at position 1907 of SEQ ID NO: 1242010
ugguaucuccuggaccagu

SEQ ID NO: 1316809 - RNA, 19 nt, Artificial Sequence
  Description of Artificial Sequence: Synthetic oligonucleotide
  Antisense strand to SEQ ID NO: 1316808
acugguccaggagauacca

SEQ ID NO: 1316810 - RNA, 19 nt, Artificial Sequence
  Description of Artificial Sequence: Synthetic oligonucleotide
  Sense strand starting at position 1918 of SEQ ID NO: 1242010
ggaccaguuacugggagua

SEQ ID NO: 1316811 - RNA, 19 nt, Artificial Sequence
  Description of Artificial Sequence: Synthetic oligonucleotide
  Antisense strand to SEQ ID NO: 1316810
uacucccaguaacuggucc

SEQ ID NO: 1316812 - RNA, 19 nt, Artificial Sequence
  Description of Artificial Sequence: Synthetic oligonucleotide
  Sense strand starting at position 2088 of SEQ ID NO: 1242010
cagagauguuaucuggacu

SEQ ID NO: 1316813 - RNA, 19 nt, Artificial Sequence
  Description of Artificial Sequence: Synthetic oligonucleotide
  Antisense strand to SEQ ID NO: 1316812
aguccagauaacaucucug

SEQ ID NO: 1316814 - RNA, 19 nt, Artificial Sequence
  Description of Artificial Sequence: Synthetic oligonucleotide
  Sense strand starting at position 2089 of SEQ ID NO: 1242010
agagauguuaucuggacug

SEQ ID NO: 1316815 - RNA, 19 nt, Artificial Sequence
  Description of Artificial Sequence: Synthetic oligonucleotide
  Antisense strand to SEQ ID NO: 1316814
caguccagauaacaucucu

SEQ ID NO: 1316816 - RNA, 19 nt, Artificial Sequence
  Description of Artificial Sequence: Synthetic oligonucleotide
  Sense strand starting at position 2091 of SEQ ID NO: 1242010
agauguuaucuggacugca

SEQ ID NO: 1316817 - RNA, 19 nt, Artificial Sequence
  Description of Artificial Sequence: Synthetic oligonucleotide
  Antisense strand to SEQ ID NO: 1316816
ugcaguccagauaacaucu

SEQ ID NO: 1316818 - RNA, 19 nt, Artificial Sequence
  Description of Artificial Sequence: Synthetic oligonucleotide
  Sense strand starting at position 2248 of SEQ ID NO: 1242010
ugcaauuuaucugugugaa

SEQ ID NO: 1316819 - RNA, 19 nt, Artificial Sequence
  Description of Artificial Sequence: Synthetic oligonucleotide
  Antisense strand to SEQ ID NO: 1316818
uucacacagauaaauugca

SEQ ID NO: 1316820 - RNA, 19 nt, Artificial Sequence
  Description of Artificial Sequence: Synthetic oligonucleotide
  Sense strand starting at position 2445 of SEQ ID NO: 1242010
agagaaggaucucauauuu

SEQ ID NO: 1316821 - RNA, 19 nt, Artificial Sequence
  Description of Artificial Sequence: Synthetic oligonucleotide
  Antisense strand to SEQ ID NO: 1316820
aaauaugagauccuucucu

SEQ ID NO: 1316822 - RNA, 19 nt, Artificial Sequence
  Description of Artificial Sequence: Synthetic oligonucleotide
  Sense strand starting at position 2467 of SEQ ID NO: 1242010
ccuaccugggcuugugaaa

SEQ ID NO: 1316823 - RNA, 19 nt, Artificial Sequence
  Description of Artificial Sequence: Synthetic oligonucleotide
  Antisense strand to SEQ ID NO: 1316822
uuucacaagcccagguagg

SEQ ID NO: 1316824 - RNA, 19 nt, Artificial Sequence
  Description of Artificial Sequence: Synthetic oligonucleotide
  Sense strand starting at position 2482 of SEQ ID NO: 1242010
gaaacuguguuaccagaag

SEQ ID NO: 1316825 - RNA, 19 nt, Artificial Sequence
  Description of Artificial Sequence: Synthetic oligonucleotide
  Antisense strand to SEQ ID NO: 1316824
cuucugguaacacaguuuc

SEQ ID NO: 1316826 - RNA, 19 nt, Artificial Sequence
  Description of Artificial Sequence: Synthetic oligonucleotide
  Sense strand starting at position 2517 of SEQ ID NO: 1242010
guacuugcugcauauacau

SEQ ID NO: 1316827 - RNA, 19 nt, Artificial Sequence
  Description of Artificial Sequence: Synthetic oligonucleotide
  Antisense strand to SEQ ID NO: 1316826
auguauaugcagcaaguac

SEQ ID NO: 1316828 - RNA, 19 nt, Artificial Sequence
  Description of Artificial Sequence: Synthetic oligonucleotide
  Sense strand starting at position 2539 of SEQ ID NO: 1242010
acgucuauagaaugauaua

SEQ ID NO: 1316829 - RNA, 19 nt, Artificial Sequence
  Description of Artificial Sequence: Synthetic oligonucleotide
  Antisense strand to SEQ ID NO: 1316828
uauaucauucuauagacgu

SEQ ID NO: 1316830 - RNA, 19 nt, Artificial Sequence
  Description of Artificial Sequence: Synthetic oligonucleotide
  Sense strand starting at position 2612 of SEQ ID NO: 1242010
guagaaagguuaucuuucu

SEQ ID NO: 1316831 - RNA, 19 nt, Artificial Sequence
  Description of Artificial Sequence: Synthetic oligonucleotide
  Antisense strand to SEQ ID NO: 1316830
agaaagauaaccuuucuac

SEQ ID NO: 1316832 - RNA, 19 nt, Artificial Sequence
  Description of Artificial Sequence: Synthetic oligonucleotide
  Sense strand starting at position 2668 of SEQ ID NO: 1242010
uugaacucauuugaaggau

SEQ ID NO: 1316833 - RNA, 19 nt, Artificial Sequence
  Description of Artificial Sequence: Synthetic oligonucleotide
  Antisense strand to SEQ ID NO: 1316832
auccuucaaaugaguucaa

SEQ ID NO: 1316834 - RNA, 19 nt, Artificial Sequence
  Description of Artificial Sequence: Synthetic oligonucleotide
  Sense strand starting at position 3242 of SEQ ID NO: 1242010
aggugaaauuucuagaaau

SEQ ID NO: 1316835 - RNA, 19 nt, Artificial Sequence
  Description of Artificial Sequence: Synthetic oligonucleotide
  Antisense strand to SEQ ID NO: 1316834
auuucuagaaauuucaccu

SEQ ID NO: 1316836 - RNA, 19 nt, Artificial Sequence
  Description of Artificial Sequence: Synthetic oligonucleotide
  Sense strand starting at position 3385 of SEQ ID NO: 1242010
agcggucauuucuucccaa

SEQ ID NO: 1316837 - RNA, 19 nt, Artificial Sequence
  Description of Artificial Sequence: Synthetic oligonucleotide
  Antisense strand to SEQ ID NO: 1316836
uugggaagaaaugaccgcu

SEQ ID NO: 1316838 - RNA, 19 nt, Artificial Sequence
  Description of Artificial Sequence: Synthetic oligonucleotide
  Sense strand starting at position 3388 of SEQ ID NO: 1242010
ggucauuucuucccaaguu

SEQ ID NO: 1316839 - RNA, 19 nt, Artificial Sequence
  Description of Artificial Sequence: Synthetic oligonucleotide
  Antisense strand to SEQ ID NO: 1316838
aacuugggaagaaaugacc

SEQ ID NO: 1316840 - RNA, 19 nt, Artificial Sequence
  Description of Artificial Sequence: Synthetic oligonucleotide
  Sense strand starting at position 3460 of SEQ ID NO: 1242010
uagguaaacugauucuaag

SEQ ID NO: 1316841 - RNA, 19 nt, Artificial Sequence
  Description of Artificial Sequence: Synthetic oligonucleotide
  Antisense strand to SEQ ID NO: 1316840
cuuagaaucaguuuaccua

SEQ ID NO: 1316842 - RNA, 19 nt, Artificial Sequence
  Description of Artificial Sequence: Synthetic oligonucleotide
  Sense strand starting at position 3514 of SEQ ID NO: 1242010
ugaccagccuuccuagaua

SEQ ID NO: 1316843 - RNA, 19 nt, Artificial Sequence
  Description of Artificial Sequence: Synthetic oligonucleotide
  Antisense strand to SEQ ID NO: 1316842
uaucuaggaaggcugguca

SEQ ID NO: 1316844 - RNA, 19 nt, Artificial Sequence
  Description of Artificial Sequence: Synthetic oligonucleotide
  Sense strand starting at position 3517 of SEQ ID NO: 1242010
ccagccuuccuagauauga

SEQ ID NO: 1316845 - RNA, 19 nt, Artificial Sequence
  Description of Artificial Sequence: Synthetic oligonucleotide
  Antisense strand to SEQ ID NO: 1316844
ucauaucuaggaaggcugg

SEQ ID NO: 1316846 - RNA, 19 nt, Artificial Sequence
  Description of Artificial Sequence: Synthetic oligonucleotide
  Sense strand starting at position 3659 of SEQ ID NO: 1242010
ggacaacuagcuugucaaa

SEQ ID NO: 1316847 - RNA, 19 nt, Artificial Sequence
  Description of Artificial Sequence: Synthetic oligonucleotide
  Antisense strand to SEQ ID NO: 1316846
uuugacaagcuaguugucc

SEQ ID NO: 1316848 - RNA, 19 nt, Artificial Sequence
  Description of Artificial Sequence: Synthetic oligonucleotide
  Sense strand starting at position 3771 of SEQ ID NO: 1242010
ugagacacuucuucuuaag

SEQ ID NO: 1316849 - RNA, 19 nt, Artificial Sequence
  Description of Artificial Sequence: Synthetic oligonucleotide
  Antisense strand to SEQ ID NO: 1316848
cuuaagaagaagugucuca

SEQ ID NO: 1316850 - RNA, 19 nt, Artificial Sequence
  Description of Artificial Sequence: Synthetic oligonucleotide
  Sense strand starting at position 55 of SEQ ID NO: 1242011
aggucaaagucuuuggcaa

SEQ ID NO: 1316851 - RNA, 19 nt, Artificial Sequence
  Description of Artificial Sequence: Synthetic oligonucleotide
  Antisense strand to SEQ ID NO: 1316850
uugccaaagacuuugaccu

SEQ ID NO: 1316852 - RNA, 19 nt, Artificial Sequence
  Description of Artificial Sequence: Synthetic oligonucleotide
  Sense strand starting at position 56 of SEQ ID NO: 1242011
ggucaaagucuuuggcaaa

SEQ ID NO: 1316853 - RNA, 19 nt, Artificial Sequence
  Description of Artificial Sequence: Synthetic oligonucleotide
  Antisense strand to SEQ ID NO: 1316852
uuugccaaagacuuugacc

SEQ ID NO: 1316854 - RNA, 19 nt, Artificial Sequence
  Description of Artificial Sequence: Synthetic oligonucleotide
  Sense strand starting at position 231 of SEQ ID NO: 1242011
cuuguaaucuguccacaaa

SEQ ID NO: 1316855 - RNA, 19 nt, Artificial Sequence
  Description of Artificial Sequence: Synthetic oligonucleotide
  Antisense strand to SEQ ID NO: 1316854
uuuguggacagauuacaag

SEQ ID NO: 1316856 - RNA, 19 nt, Artificial Sequence
  Description of Artificial Sequence: Synthetic oligonucleotide
  Sense strand starting at position 324 of SEQ ID NO: 1242011
ucacuuguuuaugucuaga

SEQ ID NO: 1316857 - RNA, 19 nt, Artificial Sequence
  Description of Artificial Sequence: Synthetic oligonucleotide
  Antisense strand to SEQ ID NO: 1316856
ucuagacauaaacaaguga

SEQ ID NO: 1316858 - RNA, 19 nt, Artificial Sequence
  Description of Artificial Sequence: Synthetic oligonucleotide
  Sense strand starting at position 326 of SEQ ID NO: 1242011
acuuguuuaugucuagauc

SEQ ID NO: 1316859 - RNA, 19 nt, Artificial Sequence
  Description of Artificial Sequence: Synthetic oligonucleotide
  Antisense strand to SEQ ID NO: 1316858
gaucuagacauaaacaagu

SEQ ID NO: 1316860 - RNA, 19 nt, Artificial Sequence
  Description of Artificial Sequence: Synthetic oligonucleotide
  Sense strand starting at position 389 of SEQ ID NO: 1242011
accugaaagacauggguuu

SEQ ID NO: 1316861 - RNA, 19 nt, Artificial Sequence
  Description of Artificial Sequence: Synthetic oligonucleotide
  Antisense strand to SEQ ID NO: 1316860
aaacccaugucuuucaggu

SEQ ID NO: 1316862 - RNA, 19 nt, Artificial Sequence
  Description of Artificial Sequence: Synthetic oligonucleotide
  Sense strand starting at position 812 of SEQ ID NO: 1242011
gucuaaugucuacagacau

SEQ ID NO: 1316863 - RNA, 19 nt, Artificial Sequence
  Description of Artificial Sequence: Synthetic oligonucleotide
  Antisense strand to SEQ ID NO: 1316862
augucuguagacauuagac

SEQ ID NO: 1316864 - RNA, 19 nt, Artificial Sequence
  Description of Artificial Sequence: Synthetic oligonucleotide
  Sense strand starting at position 843 of SEQ ID NO: 1242011
ccagcuaugccucagagag

SEQ ID NO: 1316865 - RNA, 19 nt, Artificial Sequence
  Description of Artificial Sequence: Synthetic oligonucleotide
  Antisense strand to SEQ ID NO: 1316864
cucucugaggcauagcugg

SEQ ID NO: 1316866 - RNA, 19 nt, Artificial Sequence
  Description of Artificial Sequence: Synthetic oligonucleotide
  Sense strand starting at position 947 of SEQ ID NO: 1242011
guaaguuucugacccaagu

SEQ ID NO: 1316867 - RNA, 19 nt, Artificial Sequence
  Description of Artificial Sequence: Synthetic oligonucleotide
  Antisense strand to SEQ ID NO: 1316866
acuugggucagaaacuuac

SEQ ID NO: 1316868 - RNA, 19 nt, Artificial Sequence
  Description of Artificial Sequence: Synthetic oligonucleotide
  Sense strand starting at position 1034 of SEQ ID NO: 1242011
auuguuacuugacuuguga

SEQ ID NO: 1316869 - RNA, 19 nt, Artificial Sequence
  Description of Artificial Sequence: Synthetic oligonucleotide
  Antisense strand to SEQ ID NO: 1316868
ucacaagucaaguaacaau

SEQ ID NO: 1316870 - RNA, 19 nt, Artificial Sequence
  Description of Artificial Sequence: Synthetic oligonucleotide
  Sense strand starting at position 1052 of SEQ ID NO: 1242011
acuggucagucuccaaaua

SEQ ID NO: 1316871 - RNA, 19 nt, Artificial Sequence
  Description of Artificial Sequence: Synthetic oligonucleotide
  Antisense strand to SEQ ID NO: 1316870
uauuuggagacugaccagu

SEQ ID NO: 1316872 - RNA, 19 nt, Artificial Sequence
  Description of Artificial Sequence: Synthetic oligonucleotide
  Sense strand starting at position 1132 of SEQ ID NO: 1242011
agagaaaugugguuuguca

SEQ ID NO: 1316873 - RNA, 19 nt, Artificial Sequence
  Description of Artificial Sequence: Synthetic oligonucleotide
  Antisense strand to SEQ ID NO: 1316872
ugacaaaccacauuucucu

SEQ ID NO: 1316874 - RNA, 19 nt, Artificial Sequence
  Description of Artificial Sequence: Synthetic oligonucleotide
  Sense strand starting at position 1134 of SEQ ID NO: 1242011
agaaaugugguuugucacu

SEQ ID NO: 1316875 - RNA, 19 nt, Artificial Sequence
  Description of Artificial Sequence: Synthetic oligonucleotide
  Antisense strand to SEQ ID NO: 1316874
agugacaaaccacauuucu

SEQ ID NO: 1316876 - RNA, 19 nt, Artificial Sequence
  Description of Artificial Sequence: Synthetic oligonucleotide
  Sense strand starting at position 1136 of SEQ ID NO: 1242011
aaaugugguuugucacuaa

SEQ ID NO: 1316877 - RNA, 19 nt, Artificial Sequence
  Description of Artificial Sequence: Synthetic oligonucleotide
  Antisense strand to SEQ ID NO: 1316876
uuagugacaaaccacauuu

SEQ ID NO: 1316878 - RNA, 19 nt, Artificial Sequence
  Description of Artificial Sequence: Synthetic oligonucleotide
  Sense strand starting at position 1140 of SEQ ID NO: 1242011
gugguuugucacuaaugaa

SEQ ID NO: 1316879 - RNA, 19 nt, Artificial Sequence
  Description of Artificial Sequence: Synthetic oligonucleotide
  Antisense strand to SEQ ID NO: 1316878
uucauuagugacaaaccac

SEQ ID NO: 1316880 - RNA, 19 nt, Artificial Sequence
  Description of Artificial Sequence: Synthetic oligonucleotide
  Sense strand starting at position 1196 of SEQ ID NO: 1242011
cuacaaucugcugguuaaa

SEQ ID NO: 1316881 - RNA, 19 nt, Artificial Sequence
  Description of Artificial Sequence: Synthetic oligonucleotide
  Antisense strand to SEQ ID NO: 1316880
uuuaaccagcagauuguag

SEQ ID NO: 1316882 - RNA, 19 nt, Artificial Sequence
  Description of Artificial Sequence: Synthetic oligonucleotide
  Sense strand starting at position 1427 of SEQ ID NO: 1242011
gcgcccaaaguguuuaauu

SEQ ID NO: 1316883 - RNA, 19 nt, Artificial Sequence
  Description of Artificial Sequence: Synthetic oligonucleotide
  Antisense strand to SEQ ID NO: 1316882
aauuaaacacuuugggcgc

SEQ ID NO: 1316884 - RNA, 19 nt, Artificial Sequence
  Description of Artificial Sequence: Synthetic oligonucleotide
  Sense strand starting at position 1429 of SEQ ID NO: 1242011
gcccaaaguguuuaauucu

SEQ ID NO: 1316885 - RNA, 19 nt, Artificial Sequence
  Description of Artificial Sequence: Synthetic oligonucleotide
  Antisense strand to SEQ ID NO: 1316884
agaauuaaacacuuugggc

SEQ ID NO: 1316886 - RNA, 19 nt, Artificial Sequence
  Description of Artificial Sequence: Synthetic oligonucleotide
  Sense strand starting at position 1435 of SEQ ID NO: 1242011
aguguuuaauucuuccaga

SEQ ID NO: 1316887 - RNA, 19 nt, Artificial Sequence
  Description of Artificial Sequence: Synthetic oligonucleotide
  Antisense strand to SEQ ID NO: 1316886
ucuggaagaauuaaacacu

SEQ ID NO: 1316888 - RNA, 19 nt, Artificial Sequence
  Description of Artificial Sequence: Synthetic oligonucleotide
  Sense strand starting at position 1436 of SEQ ID NO: 1242011
guguuuaauucuuccagaa

SEQ ID NO: 1316889 - RNA, 19 nt, Artificial Sequence
  Description of Artificial Sequence: Synthetic oligonucleotide
  Antisense strand to SEQ ID NO: 1316888
uucuggaagaauuaaacac

SEQ ID NO: 1316890 - RNA, 19 nt, Artificial Sequence
  Description of Artificial Sequence: Synthetic oligonucleotide
  Sense strand starting at position 1465 of SEQ ID NO: 1242011
ccgggaggaaucuagguuu

SEQ ID NO: 1316891 - RNA, 19 nt, Artificial Sequence
  Description of Artificial Sequence: Synthetic oligonucleotide
  Antisense strand to SEQ ID NO: 1316890
aaaccuagauuccucccgg

SEQ ID NO: 1316892 - RNA, 19 nt, Artificial Sequence
  Description of Artificial Sequence: Synthetic oligonucleotide
  Sense strand starting at position 1471 of SEQ ID NO: 1242011
ggaaucuagguuugaaacu

SEQ ID NO: 1316893 - RNA, 19 nt, Artificial Sequence
  Description of Artificial Sequence: Synthetic oligonucleotide
  Antisense strand to SEQ ID NO: 1316892
aguuucaaaccuagauucc

SEQ ID NO: 1316894 - RNA, 19 nt, Artificial Sequence
  Description of Artificial Sequence: Synthetic oligonucleotide
  Sense strand starting at position 1771 of SEQ ID NO: 1242011
gcgcgagggcuggucgaau

SEQ ID NO: 1316895 - RNA, 19 nt, Artificial Sequence
  Description of Artificial Sequence: Synthetic oligonucleotide
  Antisense strand to SEQ ID NO: 1316894
auucgaccagcccucgcgc

SEQ ID NO: 1316896 - RNA, 19 nt, Artificial Sequence
  Description of Artificial Sequence: Synthetic oligonucleotide
  Sense strand starting at position 2383 of SEQ ID NO: 1242011
ugucacauggguuguaaua

SEQ ID NO: 1316897 - RNA, 19 nt, Artificial Sequence
  Description of Artificial Sequence: Synthetic oligonucleotide
  Antisense strand to SEQ ID NO: 1316896
uauuacaacccaugugaca

SEQ ID NO: 1316898 - RNA, 19 nt, Artificial Sequence
  Description of Artificial Sequence: Synthetic oligonucleotide
  Sense strand starting at position 2414 of SEQ ID NO: 1242011
gucugugucacccaucuga

SEQ ID NO: 1316899 - RNA, 19 nt, Artificial Sequence
  Description of Artificial Sequence: Synthetic oligonucleotide
  Antisense strand to SEQ ID NO: 1316898
ucagaugggugacacagac

SEQ ID NO: 1316900 - RNA, 19 nt, Artificial Sequence
  Description of Artificial Sequence: Synthetic oligonucleotide
  Sense strand starting at position 2871 of SEQ ID NO: 1242011
ugaauaaaugacugcuaau

SEQ ID NO: 1316901 - RNA, 19 nt, Artificial Sequence
  Description of Artificial Sequence: Synthetic oligonucleotide
  Antisense strand to SEQ ID NO: 1316900
auuagcagucauuuauuca

SEQ ID NO: 1316902 - RNA, 19 nt, Artificial Sequence
  Description of Artificial Sequence: Synthetic oligonucleotide
  Sense strand starting at position 2883 of SEQ ID NO: 1242011
ugcuaaugagucuggacuu

SEQ ID NO: 1316903 - RNA, 19 nt, Artificial Sequence
  Description of Artificial Sequence: Synthetic oligonucleotide
  Antisense strand to SEQ ID NO: 1316902
aaguccagacucauuagca

SEQ ID NO: 1316904 - RNA, 19 nt, Artificial Sequence
  Description of Artificial Sequence: Synthetic oligonucleotide
  Sense strand starting at position 2982 of SEQ ID NO: 1242011
uguuaucuagucuaucaac

SEQ ID NO: 1316905 - RNA, 19 nt, Artificial Sequence
  Description of Artificial Sequence: Synthetic oligonucleotide
  Antisense strand to SEQ ID NO: 1316904
guugauagacuagauaaca

SEQ ID NO: 1316906 - RNA, 19 nt, Artificial Sequence
  Description of Artificial Sequence: Synthetic oligonucleotide
  Sense strand starting at position 3103 of SEQ ID NO: 1242011
cucucucgccuggaucauu

SEQ ID NO: 1316907 - RNA, 19 nt, Artificial Sequence
  Description of Artificial Sequence: Synthetic oligonucleotide
  Antisense strand to SEQ ID NO: 1316906
aaugauccaggcgagagag

SEQ ID NO: 1316908 - RNA, 19 nt, Artificial Sequence
  Description of Artificial Sequence: Synthetic oligonucleotide
  Sense strand starting at position 3273 of SEQ ID NO: 1242011
aggccuucuugagcacaca

SEQ ID NO: 1316909 - RNA, 19 nt, Artificial Sequence
  Description of Artificial Sequence: Synthetic oligonucleotide
  Antisense strand to SEQ ID NO: 1316908
ugugugcucaagaaggccu

SEQ ID NO: 1316910 - RNA, 19 nt, Artificial Sequence
  Description of Artificial Sequence: Synthetic oligonucleotide
  Sense strand starting at position 3274 of SEQ ID NO: 1242011
ggccuucuugagcacacaa

SEQ ID NO: 1316911 - RNA, 19 nt, Artificial Sequence
  Description of Artificial Sequence: Synthetic oligonucleotide
  Antisense strand to SEQ ID NO: 1316910
uugugugcucaagaaggcc

SEQ ID NO: 1316912 - RNA, 19 nt, Artificial Sequence
  Description of Artificial Sequence: Synthetic oligonucleotide
  Sense strand starting at position 3471 of SEQ ID NO: 1242011
ccuaucaccuuguuugauu

SEQ ID NO: 1316913 - RNA, 19 nt, Artificial Sequence
  Description of Artificial Sequence: Synthetic oligonucleotide
  Antisense strand to SEQ ID NO: 1316912
aaucaaacaaggugauagg

SEQ ID NO: 1316914 - RNA, 19 nt, Artificial Sequence
  Description of Artificial Sequence: Synthetic oligonucleotide
  Sense strand starting at position 3498 of SEQ ID NO: 1242011
uggcauuuaucacugccua

SEQ ID NO: 1316915 - RNA, 19 nt, Artificial Sequence
  Description of Artificial Sequence: Synthetic oligonucleotide
  Antisense strand to SEQ ID NO: 1316914
uaggcagugauaaaugcca

SEQ ID NO: 1316916 - RNA, 19 nt, Artificial Sequence
  Description of Artificial Sequence: Synthetic oligonucleotide
  Sense strand starting at position 3499 of SEQ ID NO: 1242011
ggcauuuaucacugccuaa

SEQ ID NO: 1316917 - RNA, 19 nt, Artificial Sequence
  Description of Artificial Sequence: Synthetic oligonucleotide
  Antisense strand to SEQ ID NO: 1316916
uuaggcagugauaaaugcc

SEQ ID NO: 1316918 - RNA, 19 nt, Artificial Sequence
  Description of Artificial Sequence: Synthetic oligonucleotide
  Sense strand starting at position 3532 of SEQ ID NO: 1242011
uuguuuauugcugaucuca

SEQ ID NO: 1316919 - RNA, 19 nt, Artificial Sequence
  Description of Artificial Sequence: Synthetic oligonucleotide
  Antisense strand to SEQ ID NO: 1316918
ugagaucagcaauaaacaa

SEQ ID NO: 1316920 - RNA, 19 nt, Artificial Sequence
  Description of Artificial Sequence: Synthetic oligonucleotide
  Sense strand starting at position 3550 of SEQ ID NO: 1242011
acugcauuggaguguaaau

SEQ ID NO: 1316921 - RNA, 19 nt, Artificial Sequence
  Description of Artificial Sequence: Synthetic oligonucleotide
  Antisense strand to SEQ ID NO: 1316920
auuuacacuccaaugcagu

SEQ ID NO: 1316922 - RNA, 19 nt, Artificial Sequence
  Description of Artificial Sequence: Synthetic oligonucleotide
  Sense strand starting at position 3559 of SEQ ID NO: 1242011
gaguguaaauucccugaag

SEQ ID NO: 1316923 - RNA, 19 nt, Artificial Sequence
  Description of Artificial Sequence: Synthetic oligonucleotide
  Antisense strand to SEQ ID NO: 1316922
cuucagggaauuuacacuc

SEQ ID NO: 1316924 - RNA, 19 nt, Artificial Sequence
  Description of Artificial Sequence: Synthetic oligonucleotide
  Sense strand starting at position 3561 of SEQ ID NO: 1242011
guguaaauucccugaagca

SEQ ID NO: 1316925 - RNA, 19 nt, Artificial Sequence
  Description of Artificial Sequence: Synthetic oligonucleotide
  Antisense strand to SEQ ID NO: 1316924
ugcuucagggaauuuacac

SEQ ID NO: 1316926 - RNA, 19 nt, Artificial Sequence
  Description of Artificial Sequence: Synthetic oligonucleotide
  Sense strand starting at position 3562 of SEQ ID NO: 1242011
uguaaauucccugaagcaa

SEQ ID NO: 1316927 - RNA, 19 nt, Artificial Sequence
  Description of Artificial Sequence: Synthetic oligonucleotide
  Antisense strand to SEQ ID NO: 1316926
uugcuucagggaauuuaca

SEQ ID NO: 1316928 - RNA, 19 nt, Artificial Sequence
  Description of Artificial Sequence: Synthetic oligonucleotide
  Sense strand starting at position 3579 of SEQ ID NO: 1242011
aagagcuuugucugaacua

SEQ ID NO: 1316929 - RNA, 19 nt, Artificial Sequence
  Description of Artificial Sequence: Synthetic oligonucleotide
  Antisense strand to SEQ ID NO: 1316928
uaguucagacaaagcucuu

SEQ ID NO: 1316930 - RNA, 19 nt, Artificial Sequence
  Description of Artificial Sequence: Synthetic oligonucleotide
  Sense strand starting at position 166 of SEQ ID NO: 1242012
aaagaaagcuuugacugga

SEQ ID NO: 1316931 - RNA, 19 nt, Artificial Sequence
  Description of Artificial Sequence: Synthetic oligonucleotide
  Antisense strand to SEQ ID NO: 1316930
uccagucaaagcuuucuuu

SEQ ID NO: 1316932 - RNA, 19 nt, Artificial Sequence
  Description of Artificial Sequence: Synthetic oligonucleotide
  Sense strand starting at position 188 of SEQ ID NO: 1242012
agcugcaaacacuaagauu

SEQ ID NO: 1316933 - RNA, 19 nt, Artificial Sequence
  Description of Artificial Sequence: Synthetic oligonucleotide
  Antisense strand to SEQ ID NO: 1316932
aaucuuaguguuugcagcu

SEQ ID NO: 1316934 - RNA, 19 nt, Artificial Sequence
  Description of Artificial Sequence: Synthetic oligonucleotide
  Sense strand starting at position 224 of SEQ ID NO: 1242012
aaaguaaggucagcaucaa

SEQ ID NO: 1316935 - RNA, 19 nt, Artificial Sequence
  Description of Artificial Sequence: Synthetic oligonucleotide
  Antisense strand to SEQ ID NO: 1316934
uugaugcugaccuuacuuu

SEQ ID NO: 1316936 - RNA, 19 nt, Artificial Sequence
  Description of Artificial Sequence: Synthetic oligonucleotide
  Sense strand starting at position 345 of SEQ ID NO: 1242012
agcucuuagacgggcauau

SEQ ID NO: 1316937 - RNA, 19 nt, Artificial Sequence
  Description of Artificial Sequence: Synthetic oligonucleotide
  Antisense strand to SEQ ID NO: 1316936
auaugcccgucuaagagcu

SEQ ID NO: 1316938 - RNA, 19 nt, Artificial Sequence
  Description of Artificial Sequence: Synthetic oligonucleotide
  Sense strand starting at position 403 of SEQ ID NO: 1242012
uagacaagugcacgacaau

SEQ ID NO: 1316939 - RNA, 19 nt, Artificial Sequence
  Description of Artificial Sequence: Synthetic oligonucleotide
  Antisense strand to SEQ ID NO: 1316938
auugucgugcacuugucua

SEQ ID NO: 1316940 - RNA, 19 nt, Artificial Sequence
  Description of Artificial Sequence: Synthetic oligonucleotide
  Sense strand starting at position 676 of SEQ ID NO: 1242012
cagugaucaggccauugca

SEQ ID NO: 1316941 - RNA, 19 nt, Artificial Sequence
  Description of Artificial Sequence: Synthetic oligonucleotide
  Antisense strand to SEQ ID NO: 1316940
ugcaauggccugaucacug

SEQ ID NO: 1316942 - RNA, 19 nt, Artificial Sequence
  Description of Artificial Sequence: Synthetic oligonucleotide
  Sense strand starting at position 1101 of SEQ ID NO: 1242012
gcuguaaagccuuagguaa

SEQ ID NO: 1316943 - RNA, 19 nt, Artificial Sequence
  Description of Artificial Sequence: Synthetic oligonucleotide
  Antisense strand to SEQ ID NO: 1316942
uuaccuaaggcuuuacagc

SEQ ID NO: 1316944 - RNA, 19 nt, Artificial Sequence
  Description of Artificial Sequence: Synthetic oligonucleotide
  Sense strand starting at position 1175 of SEQ ID NO: 1242012
ccugguacuuggguacuaa

SEQ ID NO: 1316945 - RNA, 19 nt, Artificial Sequence
  Description of Artificial Sequence: Synthetic oligonucleotide
  Antisense strand to SEQ ID NO: 1316944
uuaguacccaaguaccagg

SEQ ID NO: 1316946 - RNA, 19 nt, Artificial Sequence
  Description of Artificial Sequence: Synthetic oligonucleotide
  Sense strand starting at position 1202 of SEQ ID NO: 1242012
agaauucgguucuuccuua

SEQ ID NO: 1316947 - RNA, 19 nt, Artificial Sequence
  Description of Artificial Sequence: Synthetic oligonucleotide
  Antisense strand to SEQ ID NO: 1316946
uaaggaagaaccgaauucu

SEQ ID NO: 1316948 - RNA, 19 nt, Artificial Sequence
  Description of Artificial Sequence: Synthetic oligonucleotide
  Sense strand starting at position 1203 of SEQ ID NO: 1242012
gaauucgguucuuccuuau

SEQ ID NO: 1316949 - RNA, 19 nt, Artificial Sequence
  Description of Artificial Sequence: Synthetic oligonucleotide
  Antisense strand to SEQ ID NO: 1316948
auaaggaagaaccgaauuc

SEQ ID NO: 1316950 - RNA, 19 nt, Artificial Sequence
  Description of Artificial Sequence: Synthetic oligonucleotide
  Sense strand starting at position 1206 of SEQ ID NO: 1242012
uucgguucuuccuuaucuu

SEQ ID NO: 1316951 - RNA, 19 nt, Artificial Sequence
  Description of Artificial Sequence: Synthetic oligonucleotide
  Antisense strand to SEQ ID NO: 1316950
aagauaaggaagaaccgaa

SEQ ID NO: 1316952 - RNA, 19 nt, Artificial Sequence
  Description of Artificial Sequence: Synthetic oligonucleotide
  Sense strand starting at position 1207 of SEQ ID NO: 1242012
ucgguucuuccuuaucuua

SEQ ID NO: 1316953 - RNA, 19 nt, Artificial Sequence
  Description of Artificial Sequence: Synthetic oligonucleotide
  Antisense strand to SEQ ID NO: 1316952
uaagauaaggaagaaccga

SEQ ID NO: 1316954 - RNA, 19 nt, Artificial Sequence
  Description of Artificial Sequence: Synthetic oligonucleotide
  Sense strand starting at position 1209 of SEQ ID NO: 1242012
gguucuuccuuaucuuaua

SEQ ID NO: 1316955 - RNA, 19 nt, Artificial Sequence
  Description of Artificial Sequence: Synthetic oligonucleotide
  Antisense strand to SEQ ID NO: 1316954
uauaagauaaggaagaacc

SEQ ID NO: 1316956 - RNA, 19 nt, Artificial Sequence
  Description of Artificial Sequence: Synthetic oligonucleotide
  Sense strand starting at position 1769 of SEQ ID NO: 1242012
gaaggaaguuugggaaauc

SEQ ID NO: 1316957 - RNA, 19 nt, Artificial Sequence
  Description of Artificial Sequence: Synthetic oligonucleotide
  Antisense strand to SEQ ID NO: 1316956
gauuucccaaacuuccuuc

SEQ ID NO: 1316958 - RNA, 19 nt, Artificial Sequence
  Description of Artificial Sequence: Synthetic oligonucleotide
  Sense strand starting at position 1770 of SEQ ID NO: 1242012
aaggaaguuugggaaaucu

SEQ ID NO: 1316959 - RNA, 19 nt, Artificial Sequence
  Description of Artificial Sequence: Synthetic oligonucleotide
  Antisense strand to SEQ ID NO: 1316958
agauuucccaaacuuccuu

SEQ ID NO: 1316960 - RNA, 19 nt, Artificial Sequence
  Description of Artificial Sequence: Synthetic oligonucleotide
  Sense strand starting at position 2140 of SEQ ID NO: 1242012
cgaaguuucucuccgcaau

SEQ ID NO: 1316961 - RNA, 19 nt, Artificial Sequence
  Description of Artificial Sequence: Synthetic oligonucleotide
  Antisense strand to SEQ ID NO: 1316960
auugcggagagaaacuucg

SEQ ID NO: 1316962 - RNA, 19 nt, Artificial Sequence
  Description of Artificial Sequence: Synthetic oligonucleotide
  Sense strand starting at position 2141 of SEQ ID NO: 1242012
gaaguuucucuccgcaauc

SEQ ID NO: 1316963 - RNA, 19 nt, Artificial Sequence
  Description of Artificial Sequence: Synthetic oligonucleotide
  Antisense strand to SEQ ID NO: 1316962
gauugcggagagaaacuuc

SEQ ID NO: 1316964 - RNA, 19 nt, Artificial Sequence
  Description of Artificial Sequence: Synthetic oligonucleotide
  Sense strand starting at position 2164 of SEQ ID NO: 1242012
ccaccuaucgaguaggauu

SEQ ID NO: 1316965 - RNA, 19 nt, Artificial Sequence
  Description of Artificial Sequence: Synthetic oligonucleotide
  Antisense strand to SEQ ID NO: 1316964
aauccuacucgauaggugg

SEQ ID NO: 1316966 - RNA, 19 nt, Artificial Sequence
  Description of Artificial Sequence: Synthetic oligonucleotide
  Sense strand starting at position 2172 of SEQ ID NO: 1242012
cgaguaggauuccuagugu

SEQ ID NO: 1316967 - RNA, 19 nt, Artificial Sequence
  Description of Artificial Sequence: Synthetic oligonucleotide
  Antisense strand to SEQ ID NO: 1316966
acacuaggaauccuacucg

SEQ ID NO: 1316968 - RNA, 19 nt, Artificial Sequence
  Description of Artificial Sequence: Synthetic oligonucleotide
  Sense strand starting at position 2189 of SEQ ID NO: 1242012
guucgauuccugugagaaa

SEQ ID NO: 1316969 - RNA, 19 nt, Artificial Sequence
  Description of Artificial Sequence: Synthetic oligonucleotide
  Antisense strand to SEQ ID NO: 1316968
uuucucacaggaaucgaac

SEQ ID NO: 1316970 - RNA, 19 nt, Artificial Sequence
  Description of Artificial Sequence: Synthetic oligonucleotide
  Sense strand starting at position 2229 of SEQ ID NO: 1242012
gcagguuaguuuguuguaa

SEQ ID NO: 1316971 - RNA, 19 nt, Artificial Sequence
  Description of Artificial Sequence: Synthetic oligonucleotide
  Antisense strand to SEQ ID NO: 1316970
uuacaacaaacuaaccugc

SEQ ID NO: 1316972 - RNA, 19 nt, Artificial Sequence
  Description of Artificial Sequence: Synthetic oligonucleotide
  Sense strand starting at position 2230 of SEQ ID NO: 1242012
cagguuaguuuguuguaaa

SEQ ID NO: 1316973 - RNA, 19 nt, Artificial Sequence
  Description of Artificial Sequence: Synthetic oligonucleotide
  Antisense strand to SEQ ID NO: 1316972
uuuacaacaaacuaaccug

SEQ ID NO: 1316974 - RNA, 19 nt, Artificial Sequence
  Description of Artificial Sequence: Synthetic oligonucleotide
  Sense strand starting at position 3090 of SEQ ID NO: 1242012
auccguuucuggguaagga

SEQ ID NO: 1316975 - RNA, 19 nt, Artificial Sequence
  Description of Artificial Sequence: Synthetic oligonucleotide
  Antisense strand to SEQ ID NO: 1316974
uccuuacccagaaacggau

SEQ ID NO: 1316976 - RNA, 19 nt, Artificial Sequence
  Description of Artificial Sequence: Synthetic oligonucleotide
  Sense strand starting at position 3118 of SEQ ID NO: 1242012
ucugacaacuaugggaaau

SEQ ID NO: 1316977 - RNA, 19 nt, Artificial Sequence
  Description of Artificial Sequence: Synthetic oligonucleotide
  Antisense strand to SEQ ID NO: 1316976
auuucccauaguugucaga

SEQ ID NO: 1316978 - RNA, 19 nt, Artificial Sequence
  Description of Artificial Sequence: Synthetic oligonucleotide
  Sense strand starting at position 3120 of SEQ ID NO: 1242012
ugacaacuaugggaaauua

SEQ ID NO: 1316979 - RNA, 19 nt, Artificial Sequence
  Description of Artificial Sequence: Synthetic oligonucleotide
  Antisense strand to SEQ ID NO: 1316978
uaauuucccauaguuguca

SEQ ID NO: 1316980 - RNA, 19 nt, Artificial Sequence
  Description of Artificial Sequence: Synthetic oligonucleotide
  Sense strand starting at position 3177 of SEQ ID NO: 1242012
aaagcaagaccguguagua

SEQ ID NO: 1316981 - RNA, 19 nt, Artificial Sequence
  Description of Artificial Sequence: Synthetic oligonucleotide
  Antisense strand to SEQ ID NO: 1316980
uacuacacggucuugcuuu

SEQ ID NO: 1316982 - RNA, 19 nt, Artificial Sequence
  Description of Artificial Sequence: Synthetic oligonucleotide
  Sense strand starting at position 3190 of SEQ ID NO: 1242012
guaguaaggcuuugggaga

SEQ ID NO: 1316983 - RNA, 19 nt, Artificial Sequence
  Description of Artificial Sequence: Synthetic oligonucleotide
  Antisense strand to SEQ ID NO: 1316982
ucucccaaagccuuacuac

SEQ ID NO: 1316984 - RNA, 19 nt, Artificial Sequence
  Description of Artificial Sequence: Synthetic oligonucleotide
  Sense strand starting at position 3357 of SEQ ID NO: 1242012
uguauugauuucuacuaug

SEQ ID NO: 1316985 - RNA, 19 nt, Artificial Sequence
  Description of Artificial Sequence: Synthetic oligonucleotide
  Antisense strand to SEQ ID NO: 1316984
cauaguagaaaucaauaca

SEQ ID NO: 1316986 - RNA, 19 nt, Artificial Sequence
  Description of Artificial Sequence: Synthetic oligonucleotide
  Sense strand starting at position 3401 of SEQ ID NO: 1242012
gaaauuggaugugcuccaa

SEQ ID NO: 1316987 - RNA, 19 nt, Artificial Sequence
  Description of Artificial Sequence: Synthetic oligonucleotide
  Antisense strand to SEQ ID NO: 1316986
uuggagcacauccaauuuc

SEQ ID NO: 1316988 - RNA, 19 nt, Artificial Sequence
  Description of Artificial Sequence: Synthetic oligonucleotide
  Sense strand starting at position 3430 of SEQ ID NO: 1242012
gugaauuuguacuaggaac

SEQ ID NO: 1316989 - RNA, 19 nt, Artificial Sequence
  Description of Artificial Sequence: Synthetic oligonucleotide
  Antisense strand to SEQ ID NO: 1316988
guuccuaguacaaauucac

SEQ ID NO: 1316990 - RNA, 19 nt, Artificial Sequence
  Description of Artificial Sequence: Synthetic oligonucleotide
  Sense strand starting at position 3774 of SEQ ID NO: 1242012
aguccagucucuuccucau

SEQ ID NO: 1316991 - RNA, 19 nt, Artificial Sequence
  Description of Artificial Sequence: Synthetic oligonucleotide
  Antisense strand to SEQ ID NO: 1316990
augaggaagagacuggacu

SEQ ID NO: 1316992 - RNA, 19 nt, Artificial Sequence
  Description of Artificial Sequence: Synthetic oligonucleotide
  Sense strand starting at position 3780 of SEQ ID NO: 1242012
gucucuuccucauuagucu

SEQ ID NO: 1316993 - RNA, 19 nt, Artificial Sequence
  Description of Artificial Sequence: Synthetic oligonucleotide
  Antisense strand to SEQ ID NO: 1316992
agacuaaugaggaagagac

SEQ ID NO: 1316994 - RNA, 19 nt, Artificial Sequence
  Description of Artificial Sequence: Synthetic oligonucleotide
  Sense strand starting at position 3821 of SEQ ID NO: 1242012
gggauucugaagcgcugua

SEQ ID NO: 1316995 - RNA, 19 nt, Artificial Sequence
  Description of Artificial Sequence: Synthetic oligonucleotide
  Antisense strand to SEQ ID NO: 1316994
uacagcgcuucagaauccc

SEQ ID NO: 1316996 - RNA, 19 nt, Artificial Sequence
  Description of Artificial Sequence: Synthetic oligonucleotide
  Sense strand starting at position 3855 of SEQ ID NO: 1242012
uuugaauaguccuugauaa

SEQ ID NO: 1316997 - RNA, 19 nt, Artificial Sequence
  Description of Artificial Sequence: Synthetic oligonucleotide
  Antisense strand to SEQ ID NO: 1316996
uuaucaaggacuauucaaa

SEQ ID NO: 1316998 - RNA, 19 nt, Artificial Sequence
  Description of Artificial Sequence: Synthetic oligonucleotide
  Sense strand starting at position 3856 of SEQ ID NO: 1242012
uugaauaguccuugauaau

SEQ ID NO: 1316999 - RNA, 19 nt, Artificial Sequence
  Description of Artificial Sequence: Synthetic oligonucleotide
  Antisense strand to SEQ ID NO: 1316998
auuaucaaggacuauucaa

SEQ ID NO: 1317000 - RNA, 19 nt, Artificial Sequence
  Description of Artificial Sequence: Synthetic oligonucleotide
  Sense strand starting at position 3867 of SEQ ID NO: 1242012
uugauaaugcaauguauga

SEQ ID NO: 1317001 - RNA, 19 nt, Artificial Sequence
  Description of Artificial Sequence: Synthetic oligonucleotide
  Antisense strand to SEQ ID NO: 1317000
ucauacauugcauuaucaa

SEQ ID NO: 1317002 - RNA, 19 nt, Artificial Sequence
  Description of Artificial Sequence: Synthetic oligonucleotide
  Sense strand starting at position 3892 of SEQ ID NO: 1242012
uguauugaugcauacaaua

SEQ ID NO: 1317003 - RNA, 19 nt, Artificial Sequence
  Description of Artificial Sequence: Synthetic oligonucleotide
  Antisense strand to SEQ ID NO: 1317002
uauuguaugcaucaauaca

SEQ ID NO: 1317004 - RNA, 19 nt, Artificial Sequence
  Description of Artificial Sequence: Synthetic oligonucleotide
  Sense strand starting at position 3930 of SEQ ID NO: 1242012
cuuuaugauucuuauugag

SEQ ID NO: 1317005 - RNA, 19 nt, Artificial Sequence
  Description of Artificial Sequence: Synthetic oligonucleotide
  Antisense strand to SEQ ID NO: 1317004
cucaauaagaaucauaaag

SEQ ID NO: 1317006 - RNA, 19 nt, Artificial Sequence
  Description of Artificial Sequence: Synthetic oligonucleotide
  Sense strand starting at position 3936 of SEQ ID NO: 1242012
gauucuuauugaguuaaug

SEQ ID NO: 1317007 - RNA, 19 nt, Artificial Sequence
  Description of Artificial Sequence: Synthetic oligonucleotide
  Antisense strand to SEQ ID NO: 1317006
cauuaacucaauaagaauc

SEQ ID NO: 1317008 - RNA, 19 nt, Artificial Sequence
  Description of Artificial Sequence: Synthetic oligonucleotide
  Sense strand starting at position 3983 of SEQ ID NO: 1242012
ucaucauacuugucuuuga

SEQ ID NO: 1317009 - RNA, 19 nt, Artificial Sequence
  Description of Artificial Sequence: Synthetic oligonucleotide
  Antisense strand to SEQ ID NO: 1317008
ucaaagacaaguaugauga

SEQ ID NO: 1317010 - RNA, 19 nt, Artificial Sequence
  Description of Artificial Sequence: Synthetic oligonucleotide
  Sense strand starting at position 153 of SEQ ID NO: 1242013
auaagcauucgcugaauaa

SEQ ID NO: 1317011 - RNA, 19 nt, Artificial Sequence
  Description of Artificial Sequence: Synthetic oligonucleotide
  Antisense strand to SEQ ID NO: 1317010
uuauucagcgaaugcuuau

SEQ ID NO: 1317012 - RNA, 19 nt, Artificial Sequence
  Description of Artificial Sequence: Synthetic oligonucleotide
  Sense strand starting at position 309 of SEQ ID NO: 1242013
guccaaugccugcagagaa

SEQ ID NO: 1317013 - RNA, 19 nt, Artificial Sequence
  Description of Artificial Sequence: Synthetic oligonucleotide
  Antisense strand to SEQ ID NO: 1317012
uucucugcaggcauuggac

SEQ ID NO: 1317014 - RNA, 19 nt, Artificial Sequence
  Description of Artificial Sequence: Synthetic oligonucleotide
  Sense strand starting at position 504 of SEQ ID NO: 1242013
aacggauauuaauucgauu

SEQ ID NO: 1317015 - RNA, 19 nt, Artificial Sequence
  Description of Artificial Sequence: Synthetic oligonucleotide
  Antisense strand to SEQ ID NO: 1317014
aaucgaauuaauauccguu

SEQ ID NO: 1317016 - RNA, 19 nt, Artificial Sequence
  Description of Artificial Sequence: Synthetic oligonucleotide
  Sense strand starting at position 570 of SEQ ID NO: 1242013
ucacaaauguuucugucua

SEQ ID NO: 1317017 - RNA, 19 nt, Artificial Sequence
  Description of Artificial Sequence: Synthetic oligonucleotide
  Antisense strand to SEQ ID NO: 1317016
uagacagaaacauuuguga

SEQ ID NO: 1317018 - RNA, 19 nt, Artificial Sequence
  Description of Artificial Sequence: Synthetic oligonucleotide
  Sense strand starting at position 572 of SEQ ID NO: 1242013
acaaauguuucugucuaau

SEQ ID NO: 1317019 - RNA, 19 nt, Artificial Sequence
  Description of Artificial Sequence: Synthetic oligonucleotide
  Antisense strand to SEQ ID NO: 1317018
auuagacagaaacauuugu

SEQ ID NO: 1317020 - RNA, 19 nt, Artificial Sequence
  Description of Artificial Sequence: Synthetic oligonucleotide
  Sense strand starting at position 575 of SEQ ID NO: 1242013
aauguuucugucuaaugga

SEQ ID NO: 1317021 - RNA, 19 nt, Artificial Sequence
  Description of Artificial Sequence: Synthetic oligonucleotide
  Antisense strand to SEQ ID NO: 1317020
uccauuagacagaaacauu

SEQ ID NO: 1317022 - RNA, 19 nt, Artificial Sequence
  Description of Artificial Sequence: Synthetic oligonucleotide
  Sense strand starting at position 595 of SEQ ID NO: 1242013
uugugcucccaggaaaggu

SEQ ID NO: 1317023 - RNA, 19 nt, Artificial Sequence
  Description of Artificial Sequence: Synthetic oligonucleotide
  Antisense strand to SEQ ID NO: 1317022
accuuuccugggagcacaa

SEQ ID NO: 1317024 - RNA, 19 nt, Artificial Sequence
  Description of Artificial Sequence: Synthetic oligonucleotide
  Sense strand starting at position 634 of SEQ ID NO: 1242013
agggcaaaguguuugagga

SEQ ID NO: 1317025 - RNA, 19 nt, Artificial Sequence
  Description of Artificial Sequence: Synthetic oligonucleotide
  Antisense strand to SEQ ID NO: 1317024
uccucaaacacuuugcccu

SEQ ID NO: 1317026 - RNA, 19 nt, Artificial Sequence
  Description of Artificial Sequence: Synthetic oligonucleotide
  Sense strand starting at position 663 of SEQ ID NO: 1242013
agggcucugucugcagaaa

SEQ ID NO: 1317027 - RNA, 19 nt, Artificial Sequence
  Description of Artificial Sequence: Synthetic oligonucleotide
  Antisense strand to SEQ ID NO: 1317026
uuucugcagacagagcccu

SEQ ID NO: 1317028 - RNA, 19 nt, Artificial Sequence
  Description of Artificial Sequence: Synthetic oligonucleotide
  Sense strand starting at position 664 of SEQ ID NO: 1242013
gggcucugucugcagaaag

SEQ ID NO: 1317029 - RNA, 19 nt, Artificial Sequence
  Description of Artificial Sequence: Synthetic oligonucleotide
  Antisense strand to SEQ ID NO: 1317028
cuuucugcagacagagccc

SEQ ID NO: 1317030 - RNA, 19 nt, Artificial Sequence
  Description of Artificial Sequence: Synthetic oligonucleotide
  Sense strand starting at position 680 of SEQ ID NO: 1242013
aagguuguuggccaucaca

SEQ ID NO: 1317031 - RNA, 19 nt, Artificial Sequence
  Description of Artificial Sequence: Synthetic oligonucleotide
  Antisense strand to SEQ ID NO: 1317030
ugugauggccaacaaccuu

SEQ ID NO: 1317032 - RNA, 19 nt, Artificial Sequence
  Description of Artificial Sequence: Synthetic oligonucleotide
  Sense strand starting at position 707 of SEQ ID NO: 1242013
uuuaaugugccucagauug

SEQ ID NO: 1317033 - RNA, 19 nt, Artificial Sequence
  Description of Artificial Sequence: Synthetic oligonucleotide
  Antisense strand to SEQ ID NO: 1317032
caaucugaggcacauuaaa

SEQ ID NO: 1317034 - RNA, 19 nt, Artificial Sequence
  Description of Artificial Sequence: Synthetic oligonucleotide
  Sense strand starting at position 736 of SEQ ID NO: 1242013
gggauugaguguccacuuu

SEQ ID NO: 1317035 - RNA, 19 nt, Artificial Sequence
  Description of Artificial Sequence: Synthetic oligonucleotide
  Antisense strand to SEQ ID NO: 1317034
aaaguggacacucaauccc

SEQ ID NO: 1317036 - RNA, 19 nt, Artificial Sequence
  Description of Artificial Sequence: Synthetic oligonucleotide
  Sense strand starting at position 960 of SEQ ID NO: 1242013
gguucuauggcuuacagag

SEQ ID NO: 1317037 - RNA, 19 nt, Artificial Sequence
  Description of Artificial Sequence: Synthetic oligonucleotide
  Antisense strand to SEQ ID NO: 1317036
cucuguaagccauagaacc

SEQ ID NO: 1317038 - RNA, 19 nt, Artificial Sequence
  Description of Artificial Sequence: Synthetic oligonucleotide
  Sense strand starting at position 968 of SEQ ID NO: 1242013
ggcuuacagagaugaauca

SEQ ID NO: 1317039 - RNA, 19 nt, Artificial Sequence
  Description of Artificial Sequence: Synthetic oligonucleotide
  Antisense strand to SEQ ID NO: 1317038
ugauucaucucuguaagcc

SEQ ID NO: 1317040 - RNA, 19 nt, Artificial Sequence
  Description of Artificial Sequence: Synthetic oligonucleotide
  Sense strand starting at position 984 of SEQ ID NO: 1242013
ucaggaguuuaccuuuaaa

SEQ ID NO: 1317041 - RNA, 19 nt, Artificial Sequence
  Description of Artificial Sequence: Synthetic oligonucleotide
  Antisense strand to SEQ ID NO: 1317040
uuuaaagguaaacuccuga

SEQ ID NO: 1317042 - RNA, 19 nt, Artificial Sequence
  Description of Artificial Sequence: Synthetic oligonucleotide
  Sense strand starting at position 987 of SEQ ID NO: 1242013
ggaguuuaccuuuaaaguu

SEQ ID NO: 1317043 - RNA, 19 nt, Artificial Sequence
  Description of Artificial Sequence: Synthetic oligonucleotide
  Antisense strand to SEQ ID NO: 1317042
aacuuuaaagguaaacucc

SEQ ID NO: 1317044 - RNA, 19 nt, Artificial Sequence
  Description of Artificial Sequence: Synthetic oligonucleotide
  Sense strand starting at position 1070 of SEQ ID NO: 1242013
gggaaccucuuauuaucua

SEQ ID NO: 1317045 - RNA, 19 nt, Artificial Sequence
  Description of Artificial Sequence: Synthetic oligonucleotide
  Antisense strand to SEQ ID NO: 1317044
uagauaauaagagguuccc

SEQ ID NO: 1317046 - RNA, 19 nt, Artificial Sequence
  Description of Artificial Sequence: Synthetic oligonucleotide
  Sense strand starting at position 1321 of SEQ ID NO: 1242013
uuaucauuucccggguucu

SEQ ID NO: 1317047 - RNA, 19 nt, Artificial Sequence
  Description of Artificial Sequence: Synthetic oligonucleotide
  Antisense strand to SEQ ID NO: 1317046
agaacccgggaaaugauaa

SEQ ID NO: 1317048 - RNA, 19 nt, Artificial Sequence
  Description of Artificial Sequence: Synthetic oligonucleotide
  Sense strand starting at position 1322 of SEQ ID NO: 1242013
uaucauuucccggguucua

SEQ ID NO: 1317049 - RNA, 19 nt, Artificial Sequence
  Description of Artificial Sequence: Synthetic oligonucleotide
  Antisense strand to SEQ ID NO: 1317048
uagaacccgggaaaugaua

SEQ ID NO: 1317050 - RNA, 19 nt, Artificial Sequence
  Description of Artificial Sequence: Synthetic oligonucleotide
  Sense strand starting at position 1348 of SEQ ID NO: 1242013
gggcuauccagcgagauga

SEQ ID NO: 1317051 - RNA, 19 nt, Artificial Sequence
  Description of Artificial Sequence: Synthetic oligonucleotide
  Antisense strand to SEQ ID NO: 1317050
ucaucucgcuggauagccc

SEQ ID NO: 1317052 - RNA, 19 nt, Artificial Sequence
  Description of Artificial Sequence: Synthetic oligonucleotide
  Sense strand starting at position 1384 of SEQ ID NO: 1242013
ggccucuugggcgagagaa

SEQ ID NO: 1317053 - RNA, 19 nt, Artificial Sequence
  Description of Artificial Sequence: Synthetic oligonucleotide
  Antisense strand to SEQ ID NO: 1317052
uucucucgcccaagaggcc

SEQ ID NO: 1317054 - RNA, 19 nt, Artificial Sequence
  Description of Artificial Sequence: Synthetic oligonucleotide
  Sense strand starting at position 1607 of SEQ ID NO: 1242013
ggcacucucacggaacgaa

SEQ ID NO: 1317055 - RNA, 19 nt, Artificial Sequence
  Description of Artificial Sequence: Synthetic oligonucleotide
  Antisense strand to SEQ ID NO: 1317054
uucguuccgugagagugcc

SEQ ID NO: 1317056 - RNA, 19 nt, Artificial Sequence
  Description of Artificial Sequence: Synthetic oligonucleotide
  Sense strand starting at position 2488 of SEQ ID NO: 1242013
ugguccuaccgagagcaaa

SEQ ID NO: 1317057 - RNA, 19 nt, Artificial Sequence
  Description of Artificial Sequence: Synthetic oligonucleotide
  Antisense strand to SEQ ID NO: 1317056
uuugcucucgguaggacca

SEQ ID NO: 1317058 - RNA, 19 nt, Artificial Sequence
  Description of Artificial Sequence: Synthetic oligonucleotide
  Sense strand starting at position 2708 of SEQ ID NO: 1242013
cuuccacuuguaugucaga

SEQ ID NO: 1317059 - RNA, 19 nt, Artificial Sequence
  Description of Artificial Sequence: Synthetic oligonucleotide
  Antisense strand to SEQ ID NO: 1317058
ucugacauacaaguggaag

SEQ ID NO: 1317060 - RNA, 19 nt, Artificial Sequence
  Description of Artificial Sequence: Synthetic oligonucleotide
  Sense strand starting at position 2828 of SEQ ID NO: 1242013
ugacaagaugcucaaccuu

SEQ ID NO: 1317061 - RNA, 19 nt, Artificial Sequence
  Description of Artificial Sequence: Synthetic oligonucleotide
  Antisense strand to SEQ ID NO: 1317060
aagguugagcaucuuguca

SEQ ID NO: 1317062 - RNA, 19 nt, Artificial Sequence
  Description of Artificial Sequence: Synthetic oligonucleotide
  Sense strand starting at position 2880 of SEQ ID NO: 1242013
uccuucucuguauaauguu

SEQ ID NO: 1317063 - RNA, 19 nt, Artificial Sequence
  Description of Artificial Sequence: Synthetic oligonucleotide
  Antisense strand to SEQ ID NO: 1317062
aacauuauacagagaagga

SEQ ID NO: 1317064 - RNA, 19 nt, Artificial Sequence
  Description of Artificial Sequence: Synthetic oligonucleotide
  Sense strand starting at position 2887 of SEQ ID NO: 1242013
cuguauaauguugaugaua

SEQ ID NO: 1317065 - RNA, 19 nt, Artificial Sequence
  Description of Artificial Sequence: Synthetic oligonucleotide
  Antisense strand to SEQ ID NO: 1317064
uaucaucaacauuauacag

SEQ ID NO: 1317066 - RNA, 19 nt, Artificial Sequence
  Description of Artificial Sequence: Synthetic oligonucleotide
  Sense strand starting at position 3157 of SEQ ID NO: 1242013
gguguuaucuaaucacuca

SEQ ID NO: 1317067 - RNA, 19 nt, Artificial Sequence
  Description of Artificial Sequence: Synthetic oligonucleotide
  Antisense strand to SEQ ID NO: 1317066
ugagugauuagauaacacc

SEQ ID NO: 1317068 - RNA, 19 nt, Artificial Sequence
  Description of Artificial Sequence: Synthetic oligonucleotide
  Sense strand starting at position 3160 of SEQ ID NO: 1242013
guuaucuaaucacucaugu

SEQ ID NO: 1317069 - RNA, 19 nt, Artificial Sequence
  Description of Artificial Sequence: Synthetic oligonucleotide
  Antisense strand to SEQ ID NO: 1317068
acaugagugauuagauaac

SEQ ID NO: 1317070 - RNA, 19 nt, Artificial Sequence
  Description of Artificial Sequence: Synthetic oligonucleotide
  Sense strand starting at position 3235 of SEQ ID NO: 1242013
ggagagugugucguugugu

SEQ ID NO: 1317071 - RNA, 19 nt, Artificial Sequence
  Description of Artificial Sequence: Synthetic oligonucleotide
  Antisense strand to SEQ ID NO: 1317070
acacaacgacacacucucc

SEQ ID NO: 1317072 - RNA, 19 nt, Artificial Sequence
  Description of Artificial Sequence: Synthetic oligonucleotide
  Sense strand starting at position 3238 of SEQ ID NO: 1242013
gagugugucguuguguuau

SEQ ID NO: 1317073 - RNA, 19 nt, Artificial Sequence
  Description of Artificial Sequence: Synthetic oligonucleotide
  Antisense strand to SEQ ID NO: 1317072
auaacacaacgacacacuc

SEQ ID NO: 1317074 - RNA, 19 nt, Artificial Sequence
  Description of Artificial Sequence: Synthetic oligonucleotide
  Sense strand starting at position 3260 of SEQ ID NO: 1242013
uggugugaaugauucaggu

SEQ ID NO: 1317075 - RNA, 19 nt, Artificial Sequence
  Description of Artificial Sequence: Synthetic oligonucleotide
  Antisense strand to SEQ ID NO: 1317074
accugaaucauucacacca

SEQ ID NO: 1317076 - RNA, 19 nt, Artificial Sequence
  Description of Artificial Sequence: Synthetic oligonucleotide
  Sense strand starting at position 3353 of SEQ ID NO: 1242013
auccuugaggaaugugaca

SEQ ID NO: 1317077 - RNA, 19 nt, Artificial Sequence
  Description of Artificial Sequence: Synthetic oligonucleotide
  Antisense strand to SEQ ID NO: 1317076
ugucacauuccucaaggau

SEQ ID NO: 1317078 - RNA, 19 nt, Artificial Sequence
  Description of Artificial Sequence: Synthetic oligonucleotide
  Sense strand starting at position 3355 of SEQ ID NO: 1242013
ccuugaggaaugugacaca

SEQ ID NO: 1317079 - RNA, 19 nt, Artificial Sequence
  Description of Artificial Sequence: Synthetic oligonucleotide
  Antisense strand to SEQ ID NO: 1317078
ugugucacauuccucaagg

SEQ ID NO: 1317080 - RNA, 19 nt, Artificial Sequence
  Description of Artificial Sequence: Synthetic oligonucleotide
  Sense strand starting at position 3438 of SEQ ID NO: 1242013
aggauaaugugagcuaagu

SEQ ID NO: 1317081 - RNA, 19 nt, Artificial Sequence
  Description of Artificial Sequence: Synthetic oligonucleotide
  Antisense strand to SEQ ID NO: 1317080
acuuagcucacauuauccu

SEQ ID NO: 1317082 - RNA, 19 nt, Artificial Sequence
  Description of Artificial Sequence: Synthetic oligonucleotide
  Sense strand starting at position 3580 of SEQ ID NO: 1242013
cccaguaaggaguguaauc

SEQ ID NO: 1317083 - RNA, 19 nt, Artificial Sequence
  Description of Artificial Sequence: Synthetic oligonucleotide
  Antisense strand to SEQ ID NO: 1317082
gauuacacuccuuacuggg

SEQ ID NO: 1317084 - RNA, 19 nt, Artificial Sequence
  Description of Artificial Sequence: Synthetic oligonucleotide
  Sense strand starting at position 3589 of SEQ ID NO: 1242013
gaguguaaucugggcacag

SEQ ID NO: 1317085 - RNA, 19 nt, Artificial Sequence
  Description of Artificial Sequence: Synthetic oligonucleotide
  Antisense strand to SEQ ID NO: 1317084
cugugcccagauuacacuc

SEQ ID NO: 1317086 - RNA, 19 nt, Artificial Sequence
  Description of Artificial Sequence: Synthetic oligonucleotide
  Sense strand starting at position 3686 of SEQ ID NO: 1242013
gaaugaagguggucugauu

SEQ ID NO: 1317087 - RNA, 19 nt, Artificial Sequence
  Description of Artificial Sequence: Synthetic oligonucleotide
  Antisense strand to SEQ ID NO: 1317086
aaucagaccaccuucauuc

SEQ ID NO: 1317088 - RNA, 19 nt, Artificial Sequence
  Description of Artificial Sequence: Synthetic oligonucleotide
  Sense strand starting at position 3749 of SEQ ID NO: 1242013
ccaacuugguggccuuaua

SEQ ID NO: 1317089 - RNA, 19 nt, Artificial Sequence
  Description of Artificial Sequence: Synthetic oligonucleotide
  Antisense strand to SEQ ID NO: 1317088
uauaaggccaccaaguugg

SEQ ID NO: 1317090 - RNA, 19 nt, Artificial Sequence
  Description of Artificial Sequence: Synthetic oligonucleotide
  Sense strand starting at position 515 of SEQ ID NO: 1242014
ugugucugggauuggcaaa

SEQ ID NO: 1317091 - RNA, 19 nt, Artificial Sequence
  Description of Artificial Sequence: Synthetic oligonucleotide
  Antisense strand to SEQ ID NO: 1317090
uuugccaaucccagacaca

SEQ ID NO: 1317092 - RNA, 19 nt, Artificial Sequence
  Description of Artificial Sequence: Synthetic oligonucleotide
  Sense strand starting at position 761 of SEQ ID NO: 1242014
uguauuauuacugagaacg

SEQ ID NO: 1317093 - RNA, 19 nt, Artificial Sequence
  Description of Artificial Sequence: Synthetic oligonucleotide
  Antisense strand to SEQ ID NO: 1317092
cguucucaguaauaauaca

SEQ ID NO: 1317094 - RNA, 19 nt, Artificial Sequence
  Description of Artificial Sequence: Synthetic oligonucleotide
  Sense strand starting at position 858 of SEQ ID NO: 1242014
guuguuuaaaucuguggga

SEQ ID NO: 1317095 - RNA, 19 nt, Artificial Sequence
  Description of Artificial Sequence: Synthetic oligonucleotide
  Antisense strand to SEQ ID NO: 1317094
ucccacagauuuaaacaac

SEQ ID NO: 1317096 - RNA, 19 nt, Artificial Sequence
  Description of Artificial Sequence: Synthetic oligonucleotide
  Sense strand starting at position 860 of SEQ ID NO: 1242014
uguuuaaaucugugggagg

SEQ ID NO: 1317097 - RNA, 19 nt, Artificial Sequence
  Description of Artificial Sequence: Synthetic oligonucleotide
  Antisense strand to SEQ ID NO: 1317096
ccucccacagauuuaaaca

SEQ ID NO: 1317098 - RNA, 19 nt, Artificial Sequence
  Description of Artificial Sequence: Synthetic oligonucleotide
  Sense strand starting at position 959 of SEQ ID NO: 1242014
aggaaagaauuggaguaaa

SEQ ID NO: 1317099 - RNA, 19 nt, Artificial Sequence
  Description of Artificial Sequence: Synthetic oligonucleotide
  Antisense strand to SEQ ID NO: 1317098
uuuacuccaauucuuuccu

SEQ ID NO: 1317100 - RNA, 19 nt, Artificial Sequence
  Description of Artificial Sequence: Synthetic oligonucleotide
  Sense strand starting at position 1505 of SEQ ID NO: 1242014
ggcgacuaacccuggaaau

SEQ ID NO: 1317101 - RNA, 19 nt, Artificial Sequence
  Description of Artificial Sequence: Synthetic oligonucleotide
  Antisense strand to SEQ ID NO: 1317100
auuuccaggguuagucgcc

SEQ ID NO: 1317102 - RNA, 19 nt, Artificial Sequence
  Description of Artificial Sequence: Synthetic oligonucleotide
  Sense strand starting at position 1506 of SEQ ID NO: 1242014
gcgacuaacccuggaaaua

SEQ ID NO: 1317103 - RNA, 19 nt, Artificial Sequence
  Description of Artificial Sequence: Synthetic oligonucleotide
  Antisense strand to SEQ ID NO: 1317102
uauuuccaggguuagucgc

SEQ ID NO: 1317104 - RNA, 19 nt, Artificial Sequence
  Description of Artificial Sequence: Synthetic oligonucleotide
  Sense strand starting at position 1654 of SEQ ID NO: 1242014
cagauuugcucccuuccga

SEQ ID NO: 1317105 - RNA, 19 nt, Artificial Sequence
  Description of Artificial Sequence: Synthetic oligonucleotide
  Antisense strand to SEQ ID NO: 1317104
ucggaagggagcaaaucug

SEQ ID NO: 1317106 - RNA, 19 nt, Artificial Sequence
  Description of Artificial Sequence: Synthetic oligonucleotide
  Sense strand starting at position 1697 of SEQ ID NO: 1242014
gggaaauuaugggccguga

SEQ ID NO: 1317107 - RNA, 19 nt, Artificial Sequence
  Description of Artificial Sequence: Synthetic oligonucleotide
  Antisense strand to SEQ ID NO: 1317106
ucacggcccauaauuuccc

SEQ ID NO: 1317108 - RNA, 19 nt, Artificial Sequence
  Description of Artificial Sequence: Synthetic oligonucleotide
  Sense strand starting at position 1699 of SEQ ID NO: 1242014
gaaauuaugggccgugaga

SEQ ID NO: 1317109 - RNA, 19 nt, Artificial Sequence
  Description of Artificial Sequence: Synthetic oligonucleotide
  Antisense strand to SEQ ID NO: 1317108
ucucacggcccauaauuuc

SEQ ID NO: 1317110 - RNA, 19 nt, Artificial Sequence
  Description of Artificial Sequence: Synthetic oligonucleotide
  Sense strand starting at position 1701 of SEQ ID NO: 1242014
aauuaugggccgugagaag

SEQ ID NO: 1317111 - RNA, 19 nt, Artificial Sequence
  Description of Artificial Sequence: Synthetic oligonucleotide
  Antisense strand to SEQ ID NO: 1317110
cuucucacggcccauaauu

SEQ ID NO: 1317112 - RNA, 19 nt, Artificial Sequence
  Description of Artificial Sequence: Synthetic oligonucleotide
  Sense strand starting at position 2034 of SEQ ID NO: 1242014
caagucucgcgauaacuaa

SEQ ID NO: 1317113 - RNA, 19 nt, Artificial Sequence
  Description of Artificial Sequence: Synthetic oligonucleotide
  Antisense strand to SEQ ID NO: 1317112
uuaguuaucgcgagacuug

SEQ ID NO: 1317114 - RNA, 19 nt, Artificial Sequence
  Description of Artificial Sequence: Synthetic oligonucleotide
  Sense strand starting at position 2132 of SEQ ID NO: 1242014
caaguagcugucuaaaggu

SEQ ID NO: 1317115 - RNA, 19 nt, Artificial Sequence
  Description of Artificial Sequence: Synthetic oligonucleotide
  Antisense strand to SEQ ID NO: 1317114
accuuuagacagcuacuug

SEQ ID NO: 1317116 - RNA, 19 nt, Artificial Sequence
  Description of Artificial Sequence: Synthetic oligonucleotide
  Sense strand starting at position 2138 of SEQ ID NO: 1242014
gcugucuaaagguggauga

SEQ ID NO: 1317117 - RNA, 19 nt, Artificial Sequence
  Description of Artificial Sequence: Synthetic oligonucleotide
  Antisense strand to SEQ ID NO: 1317116
ucauccaccuuuagacagc

SEQ ID NO: 1317118 - RNA, 19 nt, Artificial Sequence
  Description of Artificial Sequence: Synthetic oligonucleotide
  Sense strand starting at position 2201 of SEQ ID NO: 1242014
aaacgucgccgucuauuaa

SEQ ID NO: 1317119 - RNA, 19 nt, Artificial Sequence
  Description of Artificial Sequence: Synthetic oligonucleotide
  Antisense strand to SEQ ID NO: 1317118
uuaauagacggcgacguuu

SEQ ID NO: 1317120 - RNA, 19 nt, Artificial Sequence
  Description of Artificial Sequence: Synthetic oligonucleotide
  Sense strand starting at position 2253 of SEQ ID NO: 1242014
acggaaguucugggaauca

SEQ ID NO: 1317121 - RNA, 19 nt, Artificial Sequence
  Description of Artificial Sequence: Synthetic oligonucleotide
  Antisense strand to SEQ ID NO: 1317120
ugauucccagaacuuccgu

SEQ ID NO: 1317122 - RNA, 19 nt, Artificial Sequence
  Description of Artificial Sequence: Synthetic oligonucleotide
  Sense strand starting at position 2418 of SEQ ID NO: 1242014
guaguaagauuuccguagu

SEQ ID NO: 1317123 - RNA, 19 nt, Artificial Sequence
  Description of Artificial Sequence: Synthetic oligonucleotide
  Antisense strand to SEQ ID NO: 1317122
acuacggaaaucuuacuac

SEQ ID NO: 1317124 - RNA, 19 nt, Artificial Sequence
  Description of Artificial Sequence: Synthetic oligonucleotide
  Sense strand starting at position 2421 of SEQ ID NO: 1242014
guaagauuuccguaguccg

SEQ ID NO: 1317125 - RNA, 19 nt, Artificial Sequence
  Description of Artificial Sequence: Synthetic oligonucleotide
  Antisense strand to SEQ ID NO: 1317124
cggacuacggaaaucuuac

SEQ ID NO: 1317126 - RNA, 19 nt, Artificial Sequence
  Description of Artificial Sequence: Synthetic oligonucleotide
  Sense strand starting at position 2480 of SEQ ID NO: 1242014
ccagcuucagucgucagua

SEQ ID NO: 1317127 - RNA, 19 nt, Artificial Sequence
  Description of Artificial Sequence: Synthetic oligonucleotide
  Antisense strand to SEQ ID NO: 1317126
uacugacgacugaagcugg

SEQ ID NO: 1317128 - RNA, 19 nt, Artificial Sequence
  Description of Artificial Sequence: Synthetic oligonucleotide
  Sense strand starting at position 2502 of SEQ ID NO: 1242014
agcuacuuccaagagucuu

SEQ ID NO: 1317129 - RNA, 19 nt, Artificial Sequence
  Description of Artificial Sequence: Synthetic oligonucleotide
  Antisense strand to SEQ ID NO: 1317128
aagacucuuggaaguagcu

SEQ ID NO: 1317130 - RNA, 19 nt, Artificial Sequence
  Description of Artificial Sequence: Synthetic oligonucleotide
  Sense strand starting at position 2512 of SEQ ID NO: 1242014
aagagucuugcccaugucu

SEQ ID NO: 1317131 - RNA, 19 nt, Artificial Sequence
  Description of Artificial Sequence: Synthetic oligonucleotide
  Antisense strand to SEQ ID NO: 1317130
agacaugggcaagacucuu

SEQ ID NO: 1317132 - RNA, 19 nt, Artificial Sequence
  Description of Artificial Sequence: Synthetic oligonucleotide
  Sense strand starting at position 2532 of SEQ ID NO: 1242014
gugggauguucagcaaaug

SEQ ID NO: 1317133 - RNA, 19 nt, Artificial Sequence
  Description of Artificial Sequence: Synthetic oligonucleotide
  Antisense strand to SEQ ID NO: 1317132
cauuugcugaacaucccac

SEQ ID NO: 1317134 - RNA, 19 nt, Artificial Sequence
  Description of Artificial Sequence: Synthetic oligonucleotide
  Sense strand starting at position 2533 of SEQ ID NO: 1242014
ugggauguucagcaaaugu

SEQ ID NO: 1317135 - RNA, 19 nt, Artificial Sequence
  Description of Artificial Sequence: Synthetic oligonucleotide
  Antisense strand to SEQ ID NO: 1317134
acauuugcugaacauccca

SEQ ID NO: 1317136 - RNA, 19 nt, Artificial Sequence
  Description of Artificial Sequence: Synthetic oligonucleotide
  Sense strand starting at position 2560 of SEQ ID NO: 1242014
uuaauaucccgacaaagcu

SEQ ID NO: 1317137 - RNA, 19 nt, Artificial Sequence
  Description of Artificial Sequence: Synthetic oligonucleotide
  Antisense strand to SEQ ID NO: 1317136
agcuuugucgggauauuaa

SEQ ID NO: 1317138 - RNA, 19 nt, Artificial Sequence
  Description of Artificial Sequence: Synthetic oligonucleotide
  Sense strand starting at position 2950 of SEQ ID NO: 1242014
aggucaaguuuauuaacuu

SEQ ID NO: 1317139 - RNA, 19 nt, Artificial Sequence
  Description of Artificial Sequence: Synthetic oligonucleotide
  Antisense strand to SEQ ID NO: 1317138
aaguuaauaaacuugaccu

SEQ ID NO: 1317140 - RNA, 19 nt, Artificial Sequence
  Description of Artificial Sequence: Synthetic oligonucleotide
  Sense strand starting at position 3012 of SEQ ID NO: 1242014
ucccucagucagugguaaa

SEQ ID NO: 1317141 - RNA, 19 nt, Artificial Sequence
  Description of Artificial Sequence: Synthetic oligonucleotide
  Antisense strand to SEQ ID NO: 1317140
uuuaccacugacugaggga

SEQ ID NO: 1317142 - RNA, 19 nt, Artificial Sequence
  Description of Artificial Sequence: Synthetic oligonucleotide
  Sense strand starting at position 3013 of SEQ ID NO: 1242014
cccucagucagugguaaac

SEQ ID NO: 1317143 - RNA, 19 nt, Artificial Sequence
  Description of Artificial Sequence: Synthetic oligonucleotide
  Antisense strand to SEQ ID NO: 1317142
guuuaccacugacugaggg

SEQ ID NO: 1317144 - RNA, 19 nt, Artificial Sequence
  Description of Artificial Sequence: Synthetic oligonucleotide
  Sense strand starting at position 3045 of SEQ ID NO: 1242014
guacgucaugcauaaauua

SEQ ID NO: 1317145 - RNA, 19 nt, Artificial Sequence
  Description of Artificial Sequence: Synthetic oligonucleotide
  Antisense strand to SEQ ID NO: 1317144
uaauuuaugcaugacguac

SEQ ID NO: 1317146 - RNA, 19 nt, Artificial Sequence
  Description of Artificial Sequence: Synthetic oligonucleotide
  Sense strand starting at position 3085 of SEQ ID NO: 1242014
augucccuugcaugaaaua

SEQ ID NO: 1317147 - RNA, 19 nt, Artificial Sequence
  Description of Artificial Sequence: Synthetic oligonucleotide
  Antisense strand to SEQ ID NO: 1317146
uauuucaugcaagggacau

SEQ ID NO: 1317148 - RNA, 19 nt, Artificial Sequence
  Description of Artificial Sequence: Synthetic oligonucleotide
  Sense strand starting at position 3328 of SEQ ID NO: 1242014
uucuacauucuggagugua

SEQ ID NO: 1317149 - RNA, 19 nt, Artificial Sequence
  Description of Artificial Sequence: Synthetic oligonucleotide
  Antisense strand to SEQ ID NO: 1317148
uacacuccagaauguagaa

SEQ ID NO: 1317150 - RNA, 19 nt, Artificial Sequence
  Description of Artificial Sequence: Synthetic oligonucleotide
  Sense strand starting at position 3331 of SEQ ID NO: 1242014
uacauucuggaguguauaa

SEQ ID NO: 1317151 - RNA, 19 nt, Artificial Sequence
  Description of Artificial Sequence: Synthetic oligonucleotide
  Antisense strand to SEQ ID NO: 1317150
uuauacacuccagaaugua

SEQ ID NO: 1317152 - RNA, 19 nt, Artificial Sequence
  Description of Artificial Sequence: Synthetic oligonucleotide
  Sense strand starting at position 3333 of SEQ ID NO: 1242014
cauucuggaguguauaaca

SEQ ID NO: 1317153 - RNA, 19 nt, Artificial Sequence
  Description of Artificial Sequence: Synthetic oligonucleotide
  Antisense strand to SEQ ID NO: 1317152
uguuauacacuccagaaug

SEQ ID NO: 1317154 - RNA, 19 nt, Artificial Sequence
  Description of Artificial Sequence: Synthetic oligonucleotide
  Sense strand starting at position 3687 of SEQ ID NO: 1242014
ugacguuagcacugaauaa

SEQ ID NO: 1317155 - RNA, 19 nt, Artificial Sequence
  Description of Artificial Sequence: Synthetic oligonucleotide
  Antisense strand to SEQ ID NO: 1317154
uuauucagugcuaacguca

SEQ ID NO: 1317156 - RNA, 19 nt, Artificial Sequence
  Description of Artificial Sequence: Synthetic oligonucleotide
  Sense strand starting at position 3698 of SEQ ID NO: 1242014
cugaauaaauguuugugga

SEQ ID NO: 1317157 - RNA, 19 nt, Artificial Sequence
  Description of Artificial Sequence: Synthetic oligonucleotide
  Antisense strand to SEQ ID NO: 1317156
uccacaaacauuuauucag

SEQ ID NO: 1317158 - RNA, 19 nt, Artificial Sequence
  Description of Artificial Sequence: Synthetic oligonucleotide
  Sense strand starting at position 3699 of SEQ ID NO: 1242014
ugaauaaauguuuguggaa

SEQ ID NO: 1317159 - RNA, 19 nt, Artificial Sequence
  Description of Artificial Sequence: Synthetic oligonucleotide
  Antisense strand to SEQ ID NO: 1317158
uuccacaaacauuuauuca

SEQ ID NO: 1317160 - RNA, 19 nt, Artificial Sequence
  Description of Artificial Sequence: Synthetic oligonucleotide
  Sense strand starting at position 3700 of SEQ ID NO: 1242014
gaauaaauguuuguggaau

SEQ ID NO: 1317161 - RNA, 19 nt, Artificial Sequence
  Description of Artificial Sequence: Synthetic oligonucleotide
  Antisense strand to SEQ ID NO: 1317160
auuccacaaacauuuauuc

SEQ ID NO: 1317162 - RNA, 19 nt, Artificial Sequence
  Description of Artificial Sequence: Synthetic oligonucleotide
  Sense strand starting at position 3713 of SEQ ID NO: 1242014
uggaaugaaugauagaacu

SEQ ID NO: 1317163 - RNA, 19 nt, Artificial Sequence
  Description of Artificial Sequence: Synthetic oligonucleotide
  Antisense strand to SEQ ID NO: 1317162
aguucuaucauucauucca

SEQ ID NO: 1317164 - RNA, 19 nt, Artificial Sequence
  Description of Artificial Sequence: Synthetic oligonucleotide
  Sense strand starting at position 3812 of SEQ ID NO: 1242014
cuugguguuggguaguaaa

SEQ ID NO: 1317165 - RNA, 19 nt, Artificial Sequence
  Description of Artificial Sequence: Synthetic oligonucleotide
  Antisense strand to SEQ ID NO: 1317164
uuuacuacccaacaccaag

SEQ ID NO: 1317166 - RNA, 19 nt, Artificial Sequence
  Description of Artificial Sequence: Synthetic oligonucleotide
  Sense strand starting at position 3819 of SEQ ID NO: 1242014
uuggguaguaaagguaaga

SEQ ID NO: 1317167 - RNA, 19 nt, Artificial Sequence
  Description of Artificial Sequence: Synthetic oligonucleotide
  Antisense strand to SEQ ID NO: 1317166
ucuuaccuuuacuacccaa

SEQ ID NO: 1317168 - RNA, 19 nt, Artificial Sequence
  Description of Artificial Sequence: Synthetic oligonucleotide
  Sense strand starting at position 3828 of SEQ ID NO: 1242014
aaagguaagagguguaaca

SEQ ID NO: 1317169 - RNA, 19 nt, Artificial Sequence
  Description of Artificial Sequence: Synthetic oligonucleotide
  Antisense strand to SEQ ID NO: 1317168
uguuacaccucuuaccuuu

SEQ ID NO: 1317170 - RNA, 19 nt, Artificial Sequence
  Description of Artificial Sequence: Synthetic oligonucleotide
  Sense strand starting at position 54 of SEQ ID NO: 1242015
ggaagagacgagugauucu

SEQ ID NO: 1317171 - RNA, 19 nt, Artificial Sequence
  Description of Artificial Sequence: Synthetic oligonucleotide
  Antisense strand to SEQ ID NO: 1317170
agaaucacucgucucuucc

SEQ ID NO: 1317172 - RNA, 19 nt, Artificial Sequence
  Description of Artificial Sequence: Synthetic oligonucleotide
  Sense strand starting at position 249 of SEQ ID NO: 1242015
aggagauuacguuauccac

SEQ ID NO: 1317173 - RNA, 19 nt, Artificial Sequence
  Description of Artificial Sequence: Synthetic oligonucleotide
  Antisense strand to SEQ ID NO: 1317172
guggauaacguaaucuccu

SEQ ID NO: 1317174 - RNA, 19 nt, Artificial Sequence
  Description of Artificial Sequence: Synthetic oligonucleotide
  Sense strand starting at position 251 of SEQ ID NO: 1242015
gagauuacguuauccacaa

SEQ ID NO: 1317175 - RNA, 19 nt, Artificial Sequence
  Description of Artificial Sequence: Synthetic oligonucleotide
  Antisense strand to SEQ ID NO: 1317174
uuguggauaacguaaucuc

SEQ ID NO: 1317176 - RNA, 19 nt, Artificial Sequence
  Description of Artificial Sequence: Synthetic oligonucleotide
  Sense strand starting at position 321 of SEQ ID NO: 1242015
agagaaugaggguggucuu

SEQ ID NO: 1317177 - RNA, 19 nt, Artificial Sequence
  Description of Artificial Sequence: Synthetic oligonucleotide
  Antisense strand to SEQ ID NO: 1317176
aagaccacccucauucucu

SEQ ID NO: 1317178 - RNA, 19 nt, Artificial Sequence
  Description of Artificial Sequence: Synthetic oligonucleotide
  Sense strand starting at position 322 of SEQ ID NO: 1242015
gagaaugaggguggucuuu

SEQ ID NO: 1317179 - RNA, 19 nt, Artificial Sequence
  Description of Artificial Sequence: Synthetic oligonucleotide
  Antisense strand to SEQ ID NO: 1317178
aaagaccacccucauucuc

SEQ ID NO: 1317180 - RNA, 19 nt, Artificial Sequence
  Description of Artificial Sequence: Synthetic oligonucleotide
  Sense strand starting at position 324 of SEQ ID NO: 1242015
gaaugaggguggucuuuau

SEQ ID NO: 1317181 - RNA, 19 nt, Artificial Sequence
  Description of Artificial Sequence: Synthetic oligonucleotide
  Antisense strand to SEQ ID NO: 1317180
auaaagaccacccucauuc

SEQ ID NO: 1317182 - RNA, 19 nt, Artificial Sequence
  Description of Artificial Sequence: Synthetic oligonucleotide
  Sense strand starting at position 340 of SEQ ID NO: 1242015
uaugcaugaucauuggaag

SEQ ID NO: 1317183 - RNA, 19 nt, Artificial Sequence
  Description of Artificial Sequence: Synthetic oligonucleotide
  Antisense strand to SEQ ID NO: 1317182
cuuccaaugaucaugcaua

SEQ ID NO: 1317184 - RNA, 19 nt, Artificial Sequence
  Description of Artificial Sequence: Synthetic oligonucleotide
  Sense strand starting at position 394 of SEQ ID NO: 1242015
agaauaguaugcucagaau

SEQ ID NO: 1317185 - RNA, 19 nt, Artificial Sequence
  Description of Artificial Sequence: Synthetic oligonucleotide
  Antisense strand to SEQ ID NO: 1317184
auucugagcauacuauucu

SEQ ID NO: 1317186 - RNA, 19 nt, Artificial Sequence
  Description of Artificial Sequence: Synthetic oligonucleotide
  Sense strand starting at position 778 of SEQ ID NO: 1242015
uuguuaucuguggaagaua

SEQ ID NO: 1317187 - RNA, 19 nt, Artificial Sequence
  Description of Artificial Sequence: Synthetic oligonucleotide
  Antisense strand to SEQ ID NO: 1317186
uaucuuccacagauaacaa

SEQ ID NO: 1317188 - RNA, 19 nt, Artificial Sequence
  Description of Artificial Sequence: Synthetic oligonucleotide
  Sense strand starting at position 963 of SEQ ID NO: 1242015
aaugguggcccucaacaua

SEQ ID NO: 1317189 - RNA, 19 nt, Artificial Sequence
  Description of Artificial Sequence: Synthetic oligonucleotide
  Antisense strand to SEQ ID NO: 1317188
uauguugagggccaccauu

SEQ ID NO: 1317190 - RNA, 19 nt, Artificial Sequence
  Description of Artificial Sequence: Synthetic oligonucleotide
  Sense strand starting at position 1017 of SEQ ID NO: 1242015
ggaacuugcguugaauaua

SEQ ID NO: 1317191 - RNA, 19 nt, Artificial Sequence
  Description of Artificial Sequence: Synthetic oligonucleotide
  Antisense strand to SEQ ID NO: 1317190
uauauucaacgcaaguucc

SEQ ID NO: 1317192 - RNA, 19 nt, Artificial Sequence
  Description of Artificial Sequence: Synthetic oligonucleotide
  Sense strand starting at position 1020 of SEQ ID NO: 1242015
acuugcguugaauauaaau

SEQ ID NO: 1317193 - RNA, 19 nt, Artificial Sequence
  Description of Artificial Sequence: Synthetic oligonucleotide
  Antisense strand to SEQ ID NO: 1317192
auuuauauucaacgcaagu

SEQ ID NO: 1317194 - RNA, 19 nt, Artificial Sequence
  Description of Artificial Sequence: Synthetic oligonucleotide
  Sense strand starting at position 1217 of SEQ ID NO: 1242015
agggauugacaacguucau

SEQ ID NO: 1317195 - RNA, 19 nt, Artificial Sequence
  Description of Artificial Sequence: Synthetic oligonucleotide
  Antisense strand to SEQ ID NO: 1317194
augaacguugucaaucccu

SEQ ID NO: 1317196 - RNA, 19 nt, Artificial Sequence
  Description of Artificial Sequence: Synthetic oligonucleotide
  Sense strand starting at position 1254 of SEQ ID NO: 1242015
gaucuaaucccugggucaa

SEQ ID NO: 1317197 - RNA, 19 nt, Artificial Sequence
  Description of Artificial Sequence: Synthetic oligonucleotide
  Antisense strand to SEQ ID NO: 1317196
uugacccagggauuagauc

SEQ ID NO: 1317198 - RNA, 19 nt, Artificial Sequence
  Description of Artificial Sequence: Synthetic oligonucleotide
  Sense strand starting at position 1255 of SEQ ID NO: 1242015
aucuaaucccugggucaau

SEQ ID NO: 1317199 - RNA, 19 nt, Artificial Sequence
  Description of Artificial Sequence: Synthetic oligonucleotide
  Antisense strand to SEQ ID NO: 1317198
auugacccagggauuagau

SEQ ID NO: 1317200 - RNA, 19 nt, Artificial Sequence
  Description of Artificial Sequence: Synthetic oligonucleotide
  Sense strand starting at position 1256 of SEQ ID NO: 1242015
ucuaaucccugggucaaua

SEQ ID NO: 1317201 - RNA, 19 nt, Artificial Sequence
  Description of Artificial Sequence: Synthetic oligonucleotide
  Antisense strand to SEQ ID NO: 1317200
uauugacccagggauuaga

SEQ ID NO: 1317202 - RNA, 19 nt, Artificial Sequence
  Description of Artificial Sequence: Synthetic oligonucleotide
  Sense strand starting at position 1286 of SEQ ID NO: 1242015
gaaggagaggacuguguuu

SEQ ID NO: 1317203 - RNA, 19 nt, Artificial Sequence
  Description of Artificial Sequence: Synthetic oligonucleotide
  Antisense strand to SEQ ID NO: 1317202
aaacacaguccucuccuuc

SEQ ID NO: 1317204 - RNA, 19 nt, Artificial Sequence
  Description of Artificial Sequence: Synthetic oligonucleotide
  Sense strand starting at position 1288 of SEQ ID NO: 1242015
aggagaggacuguguuuac

SEQ ID NO: 1317205 - RNA, 19 nt, Artificial Sequence
  Description of Artificial Sequence: Synthetic oligonucleotide
  Antisense strand to SEQ ID NO: 1317204
guaaacacaguccucuccu

SEQ ID NO: 1317206 - RNA, 19 nt, Artificial Sequence
  Description of Artificial Sequence: Synthetic oligonucleotide
  Sense strand starting at position 1299 of SEQ ID NO: 1242015
guguuuacaggugauggaa

SEQ ID NO: 1317207 - RNA, 19 nt, Artificial Sequence
  Description of Artificial Sequence: Synthetic oligonucleotide
  Antisense strand to SEQ ID NO: 1317206
uuccaucaccuguaaacac

SEQ ID NO: 1317208 - RNA, 19 nt, Artificial Sequence
  Description of Artificial Sequence: Synthetic oligonucleotide
  Sense strand starting at position 1719 of SEQ ID NO: 1242015
gaguauucgcggagcggga

SEQ ID NO: 1317209 - RNA, 19 nt, Artificial Sequence
  Description of Artificial Sequence: Synthetic oligonucleotide
  Antisense strand to SEQ ID NO: 1317208
ucccgcuccgcgaauacuc

SEQ ID NO: 1317210 - RNA, 19 nt, Artificial Sequence
  Description of Artificial Sequence: Synthetic oligonucleotide
  Sense strand starting at position 2541 of SEQ ID NO: 1242015
aggaauaaagcuggguauu

SEQ ID NO: 1317211 - RNA, 19 nt, Artificial Sequence
  Description of Artificial Sequence: Synthetic oligonucleotide
  Antisense strand to SEQ ID NO: 1317210
aauacccagcuuuauuccu

SEQ ID NO: 1317212 - RNA, 19 nt, Artificial Sequence
  Description of Artificial Sequence: Synthetic oligonucleotide
  Sense strand starting at position 2693 of SEQ ID NO: 1242015
uggagauguuuacuggagu

SEQ ID NO: 1317213 - RNA, 19 nt, Artificial Sequence
  Description of Artificial Sequence: Synthetic oligonucleotide
  Antisense strand to SEQ ID NO: 1317212
acuccaguaaacaucucca

SEQ ID NO: 1317214 - RNA, 19 nt, Artificial Sequence
  Description of Artificial Sequence: Synthetic oligonucleotide
  Sense strand starting at position 2696 of SEQ ID NO: 1242015
agauguuuacuggaguacu

SEQ ID NO: 1317215 - RNA, 19 nt, Artificial Sequence
  Description of Artificial Sequence: Synthetic oligonucleotide
  Antisense strand to SEQ ID NO: 1317214
aguacuccaguaaacaucu

SEQ ID NO: 1317216 - RNA, 19 nt, Artificial Sequence
  Description of Artificial Sequence: Synthetic oligonucleotide
  Sense strand starting at position 2801 of SEQ ID NO: 1242015
gagcaaacuccuuaagugu

SEQ ID NO: 1317217 - RNA, 19 nt, Artificial Sequence
  Description of Artificial Sequence: Synthetic oligonucleotide
  Antisense strand to SEQ ID NO: 1317216
acacuuaaggaguuugcuc

SEQ ID NO: 1317218 - RNA, 19 nt, Artificial Sequence
  Description of Artificial Sequence: Synthetic oligonucleotide
  Sense strand starting at position 2827 of SEQ ID NO: 1242015
guaggauacugacuuuagu

SEQ ID NO: 1317219 - RNA, 19 nt, Artificial Sequence
  Description of Artificial Sequence: Synthetic oligonucleotide
  Antisense strand to SEQ ID NO: 1317218
acuaaagucaguauccuac

SEQ ID NO: 1317220 - RNA, 19 nt, Artificial Sequence
  Description of Artificial Sequence: Synthetic oligonucleotide
  Sense strand starting at position 3020 of SEQ ID NO: 1242015
ggaaauaaguaaucauggu

SEQ ID NO: 1317221 - RNA, 19 nt, Artificial Sequence
  Description of Artificial Sequence: Synthetic oligonucleotide
  Antisense strand to SEQ ID NO: 1317220
accaugauuacuuauuucc

SEQ ID NO: 1317222 - RNA, 19 nt, Artificial Sequence
  Description of Artificial Sequence: Synthetic oligonucleotide
  Sense strand starting at position 3030 of SEQ ID NO: 1242015
aaucauggugcucaacagu

SEQ ID NO: 1317223 - RNA, 19 nt, Artificial Sequence
  Description of Artificial Sequence: Synthetic oligonucleotide
  Antisense strand to SEQ ID NO: 1317222
acuguugagcaccaugauu

SEQ ID NO: 1317224 - RNA, 19 nt, Artificial Sequence
  Description of Artificial Sequence: Synthetic oligonucleotide
  Sense strand starting at position 3112 of SEQ ID NO: 1242015
cauguugaccaugguaaga

SEQ ID NO: 1317225 - RNA, 19 nt, Artificial Sequence
  Description of Artificial Sequence: Synthetic oligonucleotide
  Antisense strand to SEQ ID NO: 1317224
ucuuaccauggucaacaug

SEQ ID NO: 1317226 - RNA, 19 nt, Artificial Sequence
  Description of Artificial Sequence: Synthetic oligonucleotide
  Sense strand starting at position 3205 of SEQ ID NO: 1242015
acagcugagagugauguuu

SEQ ID NO: 1317227 - RNA, 19 nt, Artificial Sequence
  Description of Artificial Sequence: Synthetic oligonucleotide
  Antisense strand to SEQ ID NO: 1317226
aaacaucacucucagcugu

SEQ ID NO: 1317228 - RNA, 19 nt, Artificial Sequence
  Description of Artificial Sequence: Synthetic oligonucleotide
  Sense strand starting at position 3383 of SEQ ID NO: 1242015
uugaaauggcuuuacauau

SEQ ID NO: 1317229 - RNA, 19 nt, Artificial Sequence
  Description of Artificial Sequence: Synthetic oligonucleotide
  Antisense strand to SEQ ID NO: 1317228
auauguaaagccauuucaa

SEQ ID NO: 1317230 - RNA, 19 nt, Artificial Sequence
  Description of Artificial Sequence: Synthetic oligonucleotide
  Sense strand starting at position 3417 of SEQ ID NO: 1242015
uugacauaauguccuuaga

SEQ ID NO: 1317231 - RNA, 19 nt, Artificial Sequence
  Description of Artificial Sequence: Synthetic oligonucleotide
  Antisense strand to SEQ ID NO: 1317230
ucuaaggacauuaugucaa

SEQ ID NO: 1317232 - RNA, 19 nt, Artificial Sequence
  Description of Artificial Sequence: Synthetic oligonucleotide
  Sense strand starting at position 3419 of SEQ ID NO: 1242015
gacauaauguccuuagagu

SEQ ID NO: 1317233 - RNA, 19 nt, Artificial Sequence
  Description of Artificial Sequence: Synthetic oligonucleotide
  Antisense strand to SEQ ID NO: 1317232
acucuaaggacauuauguc

SEQ ID NO: 1317234 - RNA, 19 nt, Artificial Sequence
  Description of Artificial Sequence: Synthetic oligonucleotide
  Sense strand starting at position 3420 of SEQ ID NO: 1242015
acauaauguccuuagaguc

SEQ ID NO: 1317235 - RNA, 19 nt, Artificial Sequence
  Description of Artificial Sequence: Synthetic oligonucleotide
  Antisense strand to SEQ ID NO: 1317234
gacucuaaggacauuaugu

SEQ ID NO: 1317236 - RNA, 19 nt, Artificial Sequence
  Description of Artificial Sequence: Synthetic oligonucleotide
  Sense strand starting at position 3512 of SEQ ID NO: 1242015
augucugaagguggagauu

SEQ ID NO: 1317237 - RNA, 19 nt, Artificial Sequence
  Description of Artificial Sequence: Synthetic oligonucleotide
  Antisense strand to SEQ ID NO: 1317236
aaucuccaccuucagacau

SEQ ID NO: 1317238 - RNA, 19 nt, Artificial Sequence
  Description of Artificial Sequence: Synthetic oligonucleotide
  Sense strand starting at position 3735 of SEQ ID NO: 1242015
gggaaugugucaucaaggg

SEQ ID NO: 1317239 - RNA, 19 nt, Artificial Sequence
  Description of Artificial Sequence: Synthetic oligonucleotide
  Antisense strand to SEQ ID NO: 1317238
cccuugaugacacauuccc

SEQ ID NO: 1317240 - RNA, 19 nt, Artificial Sequence
  Description of Artificial Sequence: Synthetic oligonucleotide
  Sense strand starting at position 3757 of SEQ ID NO: 1242015
agggaaauauaugugguca

SEQ ID NO: 1317241 - RNA, 19 nt, Artificial Sequence
  Description of Artificial Sequence: Synthetic oligonucleotide
  Antisense strand to SEQ ID NO: 1317240
ugaccacauauauuucccu

SEQ ID NO: 1317242 - RNA, 19 nt, Artificial Sequence
  Description of Artificial Sequence: Synthetic oligonucleotide
  Sense strand starting at position 3758 of SEQ ID NO: 1242015
gggaaauauauguggucaa

SEQ ID NO: 1317243 - RNA, 19 nt, Artificial Sequence
  Description of Artificial Sequence: Synthetic oligonucleotide
  Antisense strand to SEQ ID NO: 1317242
uugaccacauauauuuccc

SEQ ID NO: 1317244 - RNA, 19 nt, Artificial Sequence
  Description of Artificial Sequence: Synthetic oligonucleotide
  Sense strand starting at position 3910 of SEQ ID NO: 1242015
acagcaaagugauugggau

SEQ ID NO: 1317245 - RNA, 19 nt, Artificial Sequence
  Description of Artificial Sequence: Synthetic oligonucleotide
  Antisense strand to SEQ ID NO: 1317244
aucccaaucacuuugcugu

SEQ ID NO: 1317246 - RNA, 19 nt, Artificial Sequence
  Description of Artificial Sequence: Synthetic oligonucleotide
  Sense strand starting at position 3916 of SEQ ID NO: 1242015
aagugauugggaugggcau

SEQ ID NO: 1317247 - RNA, 19 nt, Artificial Sequence
  Description of Artificial Sequence: Synthetic oligonucleotide
  Antisense strand to SEQ ID NO: 1317246
augcccaucccaaucacuu

SEQ ID NO: 1317248 - RNA, 19 nt, Artificial Sequence
  Description of Artificial Sequence: Synthetic oligonucleotide
  Sense strand starting at position 3917 of SEQ ID NO: 1242015
agugauugggaugggcaua

SEQ ID NO: 1317249 - RNA, 19 nt, Artificial Sequence
  Description of Artificial Sequence: Synthetic oligonucleotide
  Antisense strand to SEQ ID NO: 1317248
uaugcccaucccaaucacu

SEQ ID NO: 1317250 - RNA, 19 nt, Artificial Sequence
  Description of Artificial Sequence: Synthetic oligonucleotide
  Sense strand starting at position 31 of SEQ ID NO: 1242016
ggcaucauuugcuauaauu

SEQ ID NO: 1317251 - RNA, 19 nt, Artificial Sequence
  Description of Artificial Sequence: Synthetic oligonucleotide
  Antisense strand to SEQ ID NO: 1317250
aauuauagcaaaugaugcc

SEQ ID NO: 1317252 - RNA, 19 nt, Artificial Sequence
  Description of Artificial Sequence: Synthetic oligonucleotide
  Sense strand starting at position 169 of SEQ ID NO: 1242016
ggcauauuggcaggaagca

SEQ ID NO: 1317253 - RNA, 19 nt, Artificial Sequence
  Description of Artificial Sequence: Synthetic oligonucleotide
  Antisense strand to SEQ ID NO: 1317252
ugcuuccugccaauaugcc

SEQ ID NO: 1317254 - RNA, 19 nt, Artificial Sequence
  Description of Artificial Sequence: Synthetic oligonucleotide
  Sense strand starting at position 170 of SEQ ID NO: 1242016
gcauauuggcaggaagcaa

SEQ ID NO: 1317255 - RNA, 19 nt, Artificial Sequence
  Description of Artificial Sequence: Synthetic oligonucleotide
  Antisense strand to SEQ ID NO: 1317254
uugcuuccugccaauaugc

SEQ ID NO: 1317256 - RNA, 19 nt, Artificial Sequence
  Description of Artificial Sequence: Synthetic oligonucleotide
  Sense strand starting at position 340 of SEQ ID NO: 1242016
gcauuccuucucuaaagug

SEQ ID NO: 1317257 - RNA, 19 nt, Artificial Sequence
  Description of Artificial Sequence: Synthetic oligonucleotide
  Antisense strand to SEQ ID NO: 1317256
cacuuuagagaaggaaugc

SEQ ID NO: 1317258 - RNA, 19 nt, Artificial Sequence
  Description of Artificial Sequence: Synthetic oligonucleotide
  Sense strand starting at position 356 of SEQ ID NO: 1242016
gugaaauagcccuaguuuc

SEQ ID NO: 1317259 - RNA, 19 nt, Artificial Sequence
  Description of Artificial Sequence: Synthetic oligonucleotide
  Antisense strand to SEQ ID NO: 1317258
gaaacuagggcuauuucac

SEQ ID NO: 1317260 - RNA, 19 nt, Artificial Sequence
  Description of Artificial Sequence: Synthetic oligonucleotide
  Sense strand starting at position 422 of SEQ ID NO: 1242016
auuacucuccauggauaag

SEQ ID NO: 1317261 - RNA, 19 nt, Artificial Sequence
  Description of Artificial Sequence: Synthetic oligonucleotide
  Antisense strand to SEQ ID NO: 1317260
cuuauccauggagaguaau

SEQ ID NO: 1317262 - RNA, 19 nt, Artificial Sequence
  Description of Artificial Sequence: Synthetic oligonucleotide
  Sense strand starting at position 659 of SEQ ID NO: 1242016
ggcaguuuggaucaguaua

SEQ ID NO: 1317263 - RNA, 19 nt, Artificial Sequence
  Description of Artificial Sequence: Synthetic oligonucleotide
  Antisense strand to SEQ ID NO: 1317262
uauacugauccaaacugcc

SEQ ID NO: 1317264 - RNA, 19 nt, Artificial Sequence
  Description of Artificial Sequence: Synthetic oligonucleotide
  Sense strand starting at position 661 of SEQ ID NO: 1242016
caguuuggaucaguauaag

SEQ ID NO: 1317265 - RNA, 19 nt, Artificial Sequence
  Description of Artificial Sequence: Synthetic oligonucleotide
  Antisense strand to SEQ ID NO: 1317264
cuuauacugauccaaacug

SEQ ID NO: 1317266 - RNA, 19 nt, Artificial Sequence
  Description of Artificial Sequence: Synthetic oligonucleotide
  Sense strand starting at position 667 of SEQ ID NO: 1242016
ggaucaguauaaggaacaa

SEQ ID NO: 1317267 - RNA, 19 nt, Artificial Sequence
  Description of Artificial Sequence: Synthetic oligonucleotide
  Antisense strand to SEQ ID NO: 1317266
uuguuccuuauacugaucc

SEQ ID NO: 1317268 - RNA, 19 nt, Artificial Sequence
  Description of Artificial Sequence: Synthetic oligonucleotide
  Sense strand starting at position 1260 of SEQ ID NO: 1242016
gcaucagauuuccugccau

SEQ ID NO: 1317269 - RNA, 19 nt, Artificial Sequence
  Description of Artificial Sequence: Synthetic oligonucleotide
  Antisense strand to SEQ ID NO: 1317268
auggcaggaaaucugaugc

SEQ ID NO: 1317270 - RNA, 19 nt, Artificial Sequence
  Description of Artificial Sequence: Synthetic oligonucleotide
  Sense strand starting at position 1300 of SEQ ID NO: 1242016
ugucuugugaaguagguaa

SEQ ID NO: 1317271 - RNA, 19 nt, Artificial Sequence
  Description of Artificial Sequence: Synthetic oligonucleotide
  Antisense strand to SEQ ID NO: 1317270
uuaccuacuucacaagaca

SEQ ID NO: 1317272 - RNA, 19 nt, Artificial Sequence
  Description of Artificial Sequence: Synthetic oligonucleotide
  Sense strand starting at position 1312 of SEQ ID NO: 1242016
uagguaagcuguuuccauu

SEQ ID NO: 1317273 - RNA, 19 nt, Artificial Sequence
  Description of Artificial Sequence: Synthetic oligonucleotide
  Antisense strand to SEQ ID NO: 1317272
aauggaaacagcuuaccua

SEQ ID NO: 1317274 - RNA, 19 nt, Artificial Sequence
  Description of Artificial Sequence: Synthetic oligonucleotide
  Sense strand starting at position 1346 of SEQ ID NO: 1242016
ccgacucucaaagagguua

SEQ ID NO: 1317275 - RNA, 19 nt, Artificial Sequence
  Description of Artificial Sequence: Synthetic oligonucleotide
  Antisense strand to SEQ ID NO: 1317274
uaaccucuuugagagucgg

SEQ ID NO: 1317276 - RNA, 19 nt, Artificial Sequence
  Description of Artificial Sequence: Synthetic oligonucleotide
  Sense strand starting at position 1687 of SEQ ID NO: 1242016
agcugaaguccuugcaaag

SEQ ID NO: 1317277 - RNA, 19 nt, Artificial Sequence
  Description of Artificial Sequence: Synthetic oligonucleotide
  Antisense strand to SEQ ID NO: 1317276
cuuugcaaggacuucagcu

SEQ ID NO: 1317278 - RNA, 19 nt, Artificial Sequence
  Description of Artificial Sequence: Synthetic oligonucleotide
  Sense strand starting at position 1963 of SEQ ID NO: 1242016
ucacaauuccaggauguuu

SEQ ID NO: 1317279 - RNA, 19 nt, Artificial Sequence
  Description of Artificial Sequence: Synthetic oligonucleotide
  Antisense strand to SEQ ID NO: 1317278
aaacauccuggaauuguga

SEQ ID NO: 1317280 - RNA, 19 nt, Artificial Sequence
  Description of Artificial Sequence: Synthetic oligonucleotide
  Sense strand starting at position 2172 of SEQ ID NO: 1242016
agcauucuccacggucaca

SEQ ID NO: 1317281 - RNA, 19 nt, Artificial Sequence
  Description of Artificial Sequence: Synthetic oligonucleotide
  Antisense strand to SEQ ID NO: 1317280
ugugaccguggagaaugcu

SEQ ID NO: 1317282 - RNA, 19 nt, Artificial Sequence
  Description of Artificial Sequence: Synthetic oligonucleotide
  Sense strand starting at position 2210 of SEQ ID NO: 1242016
ugacacauuugucaaagcu

SEQ ID NO: 1317283 - RNA, 19 nt, Artificial Sequence
  Description of Artificial Sequence: Synthetic oligonucleotide
  Antisense strand to SEQ ID NO: 1317282
agcuuugacaaauguguca

SEQ ID NO: 1317284 - RNA, 19 nt, Artificial Sequence
  Description of Artificial Sequence: Synthetic oligonucleotide
  Sense strand starting at position 2218 of SEQ ID NO: 1242016
uugucaaagcugugaagag

SEQ ID NO: 1317285 - RNA, 19 nt, Artificial Sequence
  Description of Artificial Sequence: Synthetic oligonucleotide
  Antisense strand to SEQ ID NO: 1317284
cucuucacagcuuugacaa

SEQ ID NO: 1317286 - RNA, 19 nt, Artificial Sequence
  Description of Artificial Sequence: Synthetic oligonucleotide
  Sense strand starting at position 2286 of SEQ ID NO: 1242016
agacaugcucuggaaaugu

SEQ ID NO: 1317287 - RNA, 19 nt, Artificial Sequence
  Description of Artificial Sequence: Synthetic oligonucleotide
  Antisense strand to SEQ ID NO: 1317286
acauuuccagagcaugucu

SEQ ID NO: 1317288 - RNA, 19 nt, Artificial Sequence
  Description of Artificial Sequence: Synthetic oligonucleotide
  Sense strand starting at position 2303 of SEQ ID NO: 1242016
gugcgauguguuugggaaa

SEQ ID NO: 1317289 - RNA, 19 nt, Artificial Sequence
  Description of Artificial Sequence: Synthetic oligonucleotide
  Antisense strand to SEQ ID NO: 1317288
uuucccaaacacaucgcac

SEQ ID NO: 1317290 - RNA, 19 nt, Artificial Sequence
  Description of Artificial Sequence: Synthetic oligonucleotide
  Sense strand starting at position 2486 of SEQ ID NO: 1242016
acgaaugguccauagugag

SEQ ID NO: 1317291 - RNA, 19 nt, Artificial Sequence
  Description of Artificial Sequence: Synthetic oligonucleotide
  Antisense strand to SEQ ID NO: 1317290
cucacuauggaccauucgu

SEQ ID NO: 1317292 - RNA, 19 nt, Artificial Sequence
  Description of Artificial Sequence: Synthetic oligonucleotide
  Sense strand starting at position 2494 of SEQ ID NO: 1242016
uccauagugagaugucuug

SEQ ID NO: 1317293 - RNA, 19 nt, Artificial Sequence
  Description of Artificial Sequence: Synthetic oligonucleotide
  Antisense strand to SEQ ID NO: 1317292
caagacaucucacuaugga

SEQ ID NO: 1317294 - RNA, 19 nt, Artificial Sequence
  Description of Artificial Sequence: Synthetic oligonucleotide
  Sense strand starting at position 2500 of SEQ ID NO: 1242016
gugagaugucuuggagcuu

SEQ ID NO: 1317295 - RNA, 19 nt, Artificial Sequence
  Description of Artificial Sequence: Synthetic oligonucleotide
  Antisense strand to SEQ ID NO: 1317294
aagcuccaagacaucucac

SEQ ID NO: 1317296 - RNA, 19 nt, Artificial Sequence
  Description of Artificial Sequence: Synthetic oligonucleotide
  Sense strand starting at position 2506 of SEQ ID NO: 1242016
ugucuuggagcuuaugaau

SEQ ID NO: 1317297 - RNA, 19 nt, Artificial Sequence
  Description of Artificial Sequence: Synthetic oligonucleotide
  Antisense strand to SEQ ID NO: 1317296
auucauaagcuccaagaca

SEQ ID NO: 1317298 - RNA, 19 nt, Artificial Sequence
  Description of Artificial Sequence: Synthetic oligonucleotide
  Sense strand starting at position 2581 of SEQ ID NO: 1242016
gaaacagauuuauaagagu

SEQ ID NO: 1317299 - RNA, 19 nt, Artificial Sequence
  Description of Artificial Sequence: Synthetic oligonucleotide
  Antisense strand to SEQ ID NO: 1317298
acucuuauaaaucuguuuc

SEQ ID NO: 1317300 - RNA, 19 nt, Artificial Sequence
  Description of Artificial Sequence: Synthetic oligonucleotide
  Sense strand starting at position 2590 of SEQ ID NO: 1242016
uuauaagagucagucauau

SEQ ID NO: 1317301 - RNA, 19 nt, Artificial Sequence
  Description of Artificial Sequence: Synthetic oligonucleotide
  Antisense strand to SEQ ID NO: 1317300
auaugacugacucuuauaa

SEQ ID NO: 1317302 - RNA, 19 nt, Artificial Sequence
  Description of Artificial Sequence: Synthetic oligonucleotide
  Sense strand starting at position 2592 of SEQ ID NO: 1242016
auaagagucagucauaugu

SEQ ID NO: 1317303 - RNA, 19 nt, Artificial Sequence
  Description of Artificial Sequence: Synthetic oligonucleotide
  Antisense strand to SEQ ID NO: 1317302
acauaugacugacucuuau

SEQ ID NO: 1317304 - RNA, 19 nt, Artificial Sequence
  Description of Artificial Sequence: Synthetic oligonucleotide
  Sense strand starting at position 2619 of SEQ ID NO: 1242016
ugcaaauuguaguuaaaga

SEQ ID NO: 1317305 - RNA, 19 nt, Artificial Sequence
  Description of Artificial Sequence: Synthetic oligonucleotide
  Antisense strand to SEQ ID NO: 1317304
ucuuuaacuacaauuugca

SEQ ID NO: 1317306 - RNA, 19 nt, Artificial Sequence
  Description of Artificial Sequence: Synthetic oligonucleotide
  Sense strand starting at position 2713 of SEQ ID NO: 1242016
ggcaaacaauauucuuaga

SEQ ID NO: 1317307 - RNA, 19 nt, Artificial Sequence
  Description of Artificial Sequence: Synthetic oligonucleotide
  Antisense strand to SEQ ID NO: 1317306
ucuaagaauauuguuugcc

SEQ ID NO: 1317308 - RNA, 19 nt, Artificial Sequence
  Description of Artificial Sequence: Synthetic oligonucleotide
  Sense strand starting at position 2736 of SEQ ID NO: 1242016
uugacaaucugugcacuga

SEQ ID NO: 1317309 - RNA, 19 nt, Artificial Sequence
  Description of Artificial Sequence: Synthetic oligonucleotide
  Antisense strand to SEQ ID NO: 1317308
ucagugcacagauugucaa

SEQ ID NO: 1317310 - RNA, 19 nt, Artificial Sequence
  Description of Artificial Sequence: Synthetic oligonucleotide
  Sense strand starting at position 2737 of SEQ ID NO: 1242016
ugacaaucugugcacugaa

SEQ ID NO: 1317311 - RNA, 19 nt, Artificial Sequence
  Description of Artificial Sequence: Synthetic oligonucleotide
  Antisense strand to SEQ ID NO: 1317310
uucagugcacagauuguca

SEQ ID NO: 1317312 - RNA, 19 nt, Artificial Sequence
  Description of Artificial Sequence: Synthetic oligonucleotide
  Sense strand starting at position 2765 of SEQ ID NO: 1242016
uggguacaucuugguacuu

SEQ ID NO: 1317313 - RNA, 19 nt, Artificial Sequence
  Description of Artificial Sequence: Synthetic oligonucleotide
  Antisense strand to SEQ ID NO: 1317312
aaguaccaagauguaccca

SEQ ID NO: 1317314 - RNA, 19 nt, Artificial Sequence
  Description of Artificial Sequence: Synthetic oligonucleotide
  Sense strand starting at position 2766 of SEQ ID NO: 1242016
ggguacaucuugguacuuu

SEQ ID NO: 1317315 - RNA, 19 nt, Artificial Sequence
  Description of Artificial Sequence: Synthetic oligonucleotide
  Antisense strand to SEQ ID NO: 1317314
aaaguaccaagauguaccc

SEQ ID NO: 1317316 - RNA, 19 nt, Artificial Sequence
  Description of Artificial Sequence: Synthetic oligonucleotide
  Sense strand starting at position 2820 of SEQ ID NO: 1242016
auaucaaaggccugagguu

SEQ ID NO: 1317317 - RNA, 19 nt, Artificial Sequence
  Description of Artificial Sequence: Synthetic oligonucleotide
  Antisense strand to SEQ ID NO: 1317316
aaccucaggccuuugauau

SEQ ID NO: 1317318 - RNA, 19 nt, Artificial Sequence
  Description of Artificial Sequence: Synthetic oligonucleotide
  Sense strand starting at position 3073 of SEQ ID NO: 1242016
caccuugggcuuugugaca

SEQ ID NO: 1317319 - RNA, 19 nt, Artificial Sequence
  Description of Artificial Sequence: Synthetic oligonucleotide
  Antisense strand to SEQ ID NO: 1317318
ugucacaaagcccaaggug

SEQ ID NO: 1317320 - RNA, 19 nt, Artificial Sequence
  Description of Artificial Sequence: Synthetic oligonucleotide
  Sense strand starting at position 3147 of SEQ ID NO: 1242016
ggcaaaggucuaugucuaa

SEQ ID NO: 1317321 - RNA, 19 nt, Artificial Sequence
  Description of Artificial Sequence: Synthetic oligonucleotide
  Antisense strand to SEQ ID NO: 1317320
uuagacauagaccuuugcc

SEQ ID NO: 1317322 - RNA, 19 nt, Artificial Sequence
  Description of Artificial Sequence: Synthetic oligonucleotide
  Sense strand starting at position 3150 of SEQ ID NO: 1242016
aaaggucuaugucuaagga

SEQ ID NO: 1317323 - RNA, 19 nt, Artificial Sequence
  Description of Artificial Sequence: Synthetic oligonucleotide
  Antisense strand to SEQ ID NO: 1317322
uccuuagacauagaccuuu

SEQ ID NO: 1317324 - RNA, 19 nt, Artificial Sequence
  Description of Artificial Sequence: Synthetic oligonucleotide
  Sense strand starting at position 3525 of SEQ ID NO: 1242016
caaggcagucaggaucauu

SEQ ID NO: 1317325 - RNA, 19 nt, Artificial Sequence
  Description of Artificial Sequence: Synthetic oligonucleotide
  Antisense strand to SEQ ID NO: 1317324
aaugauccugacugccuug

SEQ ID NO: 1317326 - RNA, 19 nt, Artificial Sequence
  Description of Artificial Sequence: Synthetic oligonucleotide
  Sense strand starting at position 3533 of SEQ ID NO: 1242016
ucaggaucauuugagauca

SEQ ID NO: 1317327 - RNA, 19 nt, Artificial Sequence
  Description of Artificial Sequence: Synthetic oligonucleotide
  Antisense strand to SEQ ID NO: 1317326
ugaucucaaaugauccuga

SEQ ID NO: 1317328 - RNA, 19 nt, Artificial Sequence
  Description of Artificial Sequence: Synthetic oligonucleotide
  Sense strand starting at position 3867 of SEQ ID NO: 1242016
agaccagguuggucaacau

SEQ ID NO: 1317329 - RNA, 19 nt, Artificial Sequence
  Description of Artificial Sequence: Synthetic oligonucleotide
  Antisense strand to SEQ ID NO: 1317328
auguugaccaaccuggucu

SEQ ID NO: 1317330 - RNA, 19 nt, Artificial Sequence
  Description of Artificial Sequence: Synthetic oligonucleotide
  Sense strand starting at position 96 of SEQ ID NO: 1242017
cagguauugccaugccuag

SEQ ID NO: 1317331 - RNA, 19 nt, Artificial Sequence
  Description of Artificial Sequence: Synthetic oligonucleotide
  Antisense strand to SEQ ID NO: 1317330
cuaggcauggcaauaccug

SEQ ID NO: 1317332 - RNA, 19 nt, Artificial Sequence
  Description of Artificial Sequence: Synthetic oligonucleotide
  Sense strand starting at position 132 of SEQ ID NO: 1242017
cugcuagaguuuguaaaca

SEQ ID NO: 1317333 - RNA, 19 nt, Artificial Sequence
  Description of Artificial Sequence: Synthetic oligonucleotide
  Antisense strand to SEQ ID NO: 1317332
uguuuacaaacucuagcag

SEQ ID NO: 1317334 - RNA, 19 nt, Artificial Sequence
  Description of Artificial Sequence: Synthetic oligonucleotide
  Sense strand starting at position 234 of SEQ ID NO: 1242017
aacgauguggccugagaca

SEQ ID NO: 1317335 - RNA, 19 nt, Artificial Sequence
  Description of Artificial Sequence: Synthetic oligonucleotide
  Antisense strand to SEQ ID NO: 1317334
ugucucaggccacaucguu

SEQ ID NO: 1317336 - RNA, 19 nt, Artificial Sequence
  Description of Artificial Sequence: Synthetic oligonucleotide
  Sense strand starting at position 388 of SEQ ID NO: 1242017
auacauagauggcuccuaa

SEQ ID NO: 1317337 - RNA, 19 nt, Artificial Sequence
  Description of Artificial Sequence: Synthetic oligonucleotide
  Antisense strand to SEQ ID NO: 1317336
uuaggagccaucuauguau

SEQ ID NO: 1317338 - RNA, 19 nt, Artificial Sequence
  Description of Artificial Sequence: Synthetic oligonucleotide
  Sense strand starting at position 591 of SEQ ID NO: 1242017
aggacagguuugguucauu

SEQ ID NO: 1317339 - RNA, 19 nt, Artificial Sequence
  Description of Artificial Sequence: Synthetic oligonucleotide
  Antisense strand to SEQ ID NO: 1317338
aaugaaccaaaccuguccu

SEQ ID NO: 1317340 - RNA, 19 nt, Artificial Sequence
  Description of Artificial Sequence: Synthetic oligonucleotide
  Sense strand starting at position 640 of SEQ ID NO: 1242017
aaggaaauguccuugcauu

SEQ ID NO: 1317341 - RNA, 19 nt, Artificial Sequence
  Description of Artificial Sequence: Synthetic oligonucleotide
  Antisense strand to SEQ ID NO: 1317340
aaugcaaggacauuuccuu

SEQ ID NO: 1317342 - RNA, 19 nt, Artificial Sequence
  Description of Artificial Sequence: Synthetic oligonucleotide
  Sense strand starting at position 726 of SEQ ID NO: 1242017
acacuuuaucccugaacgu

SEQ ID NO: 1317343 - RNA, 19 nt, Artificial Sequence
  Description of Artificial Sequence: Synthetic oligonucleotide
  Antisense strand to SEQ ID NO: 1317342
acguucagggauaaagugu

SEQ ID NO: 1317344 - RNA, 19 nt, Artificial Sequence
  Description of Artificial Sequence: Synthetic oligonucleotide
  Sense strand starting at position 927 of SEQ ID NO: 1242017
agcguaauucuggaggcaa

SEQ ID NO: 1317345 - RNA, 19 nt, Artificial Sequence
  Description of Artificial Sequence: Synthetic oligonucleotide
  Antisense strand to SEQ ID NO: 1317344
uugccuccagaauuacgcu

SEQ ID NO: 1317346 - RNA, 19 nt, Artificial Sequence
  Description of Artificial Sequence: Synthetic oligonucleotide
  Sense strand starting at position 929 of SEQ ID NO: 1242017
cguaauucuggaggcaauu

SEQ ID NO: 1317347 - RNA, 19 nt, Artificial Sequence
  Description of Artificial Sequence: Synthetic oligonucleotide
  Antisense strand to SEQ ID NO: 1317346
aauugccuccagaauuacg

SEQ ID NO: 1317348 - RNA, 19 nt, Artificial Sequence
  Description of Artificial Sequence: Synthetic oligonucleotide
  Sense strand starting at position 2033 of SEQ ID NO: 1242017
guugcaaggagucauucga

SEQ ID NO: 1317349 - RNA, 19 nt, Artificial Sequence
  Description of Artificial Sequence: Synthetic oligonucleotide
  Antisense strand to SEQ ID NO: 1317348
ucgaaugacuccuugcaac

SEQ ID NO: 1317350 - RNA, 19 nt, Artificial Sequence
  Description of Artificial Sequence: Synthetic oligonucleotide
  Sense strand starting at position 2125 of SEQ ID NO: 1242017
ccaauuccucgggacuuga

SEQ ID NO: 1317351 - RNA, 19 nt, Artificial Sequence
  Description of Artificial Sequence: Synthetic oligonucleotide
  Antisense strand to SEQ ID NO: 1317350
ucaagucccgaggaauugg

SEQ ID NO: 1317352 - RNA, 19 nt, Artificial Sequence
  Description of Artificial Sequence: Synthetic oligonucleotide
  Sense strand starting at position 2247 of SEQ ID NO: 1242017
gaagacagguauucuguua

SEQ ID NO: 1317353 - RNA, 19 nt, Artificial Sequence
  Description of Artificial Sequence: Synthetic oligonucleotide
  Antisense strand to SEQ ID NO: 1317352
uaacagaauaccugucuuc

SEQ ID NO: 1317354 - RNA, 19 nt, Artificial Sequence
  Description of Artificial Sequence: Synthetic oligonucleotide
  Sense strand starting at position 2254 of SEQ ID NO: 1242017
gguauucuguuacccacau

SEQ ID NO: 1317355 - RNA, 19 nt, Artificial Sequence
  Description of Artificial Sequence: Synthetic oligonucleotide
  Antisense strand to SEQ ID NO: 1317354
auguggguaacagaauacc

SEQ ID NO: 1317356 - RNA, 19 nt, Artificial Sequence
  Description of Artificial Sequence: Synthetic oligonucleotide
  Sense strand starting at position 2255 of SEQ ID NO: 1242017
guauucuguuacccacauu

SEQ ID NO: 1317357 - RNA, 19 nt, Artificial Sequence
  Description of Artificial Sequence: Synthetic oligonucleotide
  Antisense strand to SEQ ID NO: 1317356
aauguggguaacagaauac

SEQ ID NO: 1317358 - RNA, 19 nt, Artificial Sequence
  Description of Artificial Sequence: Synthetic oligonucleotide
  Sense strand starting at position 2396 of SEQ ID NO: 1242017
cagugaagugguugccuga

SEQ ID NO: 1317359 - RNA, 19 nt, Artificial Sequence
  Description of Artificial Sequence: Synthetic oligonucleotide
  Antisense strand to SEQ ID NO: 1317358
ucaggcaaccacuucacug

SEQ ID NO: 1317360 - RNA, 19 nt, Artificial Sequence
  Description of Artificial Sequence: Synthetic oligonucleotide
  Sense strand starting at position 2503 of SEQ ID NO: 1242017
accggacugggaugugaau

SEQ ID NO: 1317361 - RNA, 19 nt, Artificial Sequence
  Description of Artificial Sequence: Synthetic oligonucleotide
  Antisense strand to SEQ ID NO: 1317360
auucacaucccaguccggu

SEQ ID NO: 1317362 - RNA, 19 nt, Artificial Sequence
  Description of Artificial Sequence: Synthetic oligonucleotide
  Sense strand starting at position 2516 of SEQ ID NO: 1242017
gugaaucucugccucucau

SEQ ID NO: 1317363 - RNA, 19 nt, Artificial Sequence
  Description of Artificial Sequence: Synthetic oligonucleotide
  Antisense strand to SEQ ID NO: 1317362
augagaggcagagauucac

SEQ ID NO: 1317364 - RNA, 19 nt, Artificial Sequence
  Description of Artificial Sequence: Synthetic oligonucleotide
  Sense strand starting at position 2619 of SEQ ID NO: 1242017
ucugguuuguaagcuaaau

SEQ ID NO: 1317365 - RNA, 19 nt, Artificial Sequence
  Description of Artificial Sequence: Synthetic oligonucleotide
  Antisense strand to SEQ ID NO: 1317364
auuuagcuuacaaaccaga

SEQ ID NO: 1317366 - RNA, 19 nt, Artificial Sequence
  Description of Artificial Sequence: Synthetic oligonucleotide
  Sense strand starting at position 2621 of SEQ ID NO: 1242017
ugguuuguaagcuaaauga

SEQ ID NO: 1317367 - RNA, 19 nt, Artificial Sequence
  Description of Artificial Sequence: Synthetic oligonucleotide
  Antisense strand to SEQ ID NO: 1317366
ucauuuagcuuacaaacca

SEQ ID NO: 1317368 - RNA, 19 nt, Artificial Sequence
  Description of Artificial Sequence: Synthetic oligonucleotide
  Sense strand starting at position 2902 of SEQ ID NO: 1242017
guauuaguugucuacugca

SEQ ID NO: 1317369 - RNA, 19 nt, Artificial Sequence
  Description of Artificial Sequence: Synthetic oligonucleotide
  Antisense strand to SEQ ID NO: 1317368
ugcaguagacaacuaauac

SEQ ID NO: 1317370 - RNA, 19 nt, Artificial Sequence
  Description of Artificial Sequence: Synthetic oligonucleotide
  Sense strand starting at position 2907 of SEQ ID NO: 1242017
aguugucuacugcagcaua

SEQ ID NO: 1317371 - RNA, 19 nt, Artificial Sequence
  Description of Artificial Sequence: Synthetic oligonucleotide
  Antisense strand to SEQ ID NO: 1317370
uaugcugcaguagacaacu

SEQ ID NO: 1317372 - RNA, 19 nt, Artificial Sequence
  Description of Artificial Sequence: Synthetic oligonucleotide
  Sense strand starting at position 2959 of SEQ ID NO: 1242017
acaugcauuuaguaucuca

SEQ ID NO: 1317373 - RNA, 19 nt, Artificial Sequence
  Description of Artificial Sequence: Synthetic oligonucleotide
  Antisense strand to SEQ ID NO: 1317372
ugagauacuaaaugcaugu

SEQ ID NO: 1317374 - RNA, 19 nt, Artificial Sequence
  Description of Artificial Sequence: Synthetic oligonucleotide
  Sense strand starting at position 2978 of SEQ ID NO: 1242017
cagucugugggucaggaaa

SEQ ID NO: 1317375 - RNA, 19 nt, Artificial Sequence
  Description of Artificial Sequence: Synthetic oligonucleotide
  Antisense strand to SEQ ID NO: 1317374
uuuccugacccacagacug

SEQ ID NO: 1317376 - RNA, 19 nt, Artificial Sequence
  Description of Artificial Sequence: Synthetic oligonucleotide
  Sense strand starting at position 3042 of SEQ ID NO: 1242017
aggugcaaucaagguguca

SEQ ID NO: 1317377 - RNA, 19 nt, Artificial Sequence
  Description of Artificial Sequence: Synthetic oligonucleotide
  Antisense strand to SEQ ID NO: 1317376
ugacaccuugauugcaccu

SEQ ID NO: 1317378 - RNA, 19 nt, Artificial Sequence
  Description of Artificial Sequence: Synthetic oligonucleotide
  Sense strand starting at position 3297 of SEQ ID NO: 1242017
gacagaagucacugucuua

SEQ ID NO: 1317379 - RNA, 19 nt, Artificial Sequence
  Description of Artificial Sequence: Synthetic oligonucleotide
  Antisense strand to SEQ ID NO: 1317378
uaagacagugacuucuguc

SEQ ID NO: 1317380 - RNA, 19 nt, Artificial Sequence
  Description of Artificial Sequence: Synthetic oligonucleotide
  Sense strand starting at position 3300 of SEQ ID NO: 1242017
agaagucacugucuuauga

SEQ ID NO: 1317381 - RNA, 19 nt, Artificial Sequence
  Description of Artificial Sequence: Synthetic oligonucleotide
  Antisense strand to SEQ ID NO: 1317380
ucauaagacagugacuucu

SEQ ID NO: 1317382 - RNA, 19 nt, Artificial Sequence
  Description of Artificial Sequence: Synthetic oligonucleotide
  Sense strand starting at position 3471 of SEQ ID NO: 1242017
ugccaccuacaguguaauu

SEQ ID NO: 1317383 - RNA, 19 nt, Artificial Sequence
  Description of Artificial Sequence: Synthetic oligonucleotide
  Antisense strand to SEQ ID NO: 1317382
aauuacacuguagguggca

SEQ ID NO: 1317384 - RNA, 19 nt, Artificial Sequence
  Description of Artificial Sequence: Synthetic oligonucleotide
  Sense strand starting at position 3509 of SEQ ID NO: 1242017
ggacaacaaucagauuauc

SEQ ID NO: 1317385 - RNA, 19 nt, Artificial Sequence
  Description of Artificial Sequence: Synthetic oligonucleotide
  Antisense strand to SEQ ID NO: 1317384
gauaaucugauuguugucc

SEQ ID NO: 1317386 - RNA, 19 nt, Artificial Sequence
  Description of Artificial Sequence: Synthetic oligonucleotide
  Sense strand starting at position 3517 of SEQ ID NO: 1242017
aucagauuaucagaaguca

SEQ ID NO: 1317387 - RNA, 19 nt, Artificial Sequence
  Description of Artificial Sequence: Synthetic oligonucleotide
  Antisense strand to SEQ ID NO: 1317386
ugacuucugauaaucugau

SEQ ID NO: 1317388 - RNA, 19 nt, Artificial Sequence
  Description of Artificial Sequence: Synthetic oligonucleotide
  Sense strand starting at position 3551 of SEQ ID NO: 1242017
uucugaaaugcauguuaaa

SEQ ID NO: 1317389 - RNA, 19 nt, Artificial Sequence
  Description of Artificial Sequence: Synthetic oligonucleotide
  Antisense strand to SEQ ID NO: 1317388
uuuaacaugcauuucagaa

SEQ ID NO: 1317390 - RNA, 19 nt, Artificial Sequence
  Description of Artificial Sequence: Synthetic oligonucleotide
  Sense strand starting at position 3609 of SEQ ID NO: 1242017
auggauagaucacaugauu

SEQ ID NO: 1317391 - RNA, 19 nt, Artificial Sequence
  Description of Artificial Sequence: Synthetic oligonucleotide
  Antisense strand to SEQ ID NO: 1317390
aaucaugugaucuauccau

SEQ ID NO: 1317392 - RNA, 19 nt, Artificial Sequence
  Description of Artificial Sequence: Synthetic oligonucleotide
  Sense strand starting at position 3630 of SEQ ID NO: 1242017
ggucucuucuaacucugaa

SEQ ID NO: 1317393 - RNA, 19 nt, Artificial Sequence
  Description of Artificial Sequence: Synthetic oligonucleotide
  Antisense strand to SEQ ID NO: 1317392
uucagaguuagaagagacc

SEQ ID NO: 1317394 - RNA, 19 nt, Artificial Sequence
  Description of Artificial Sequence: Synthetic oligonucleotide
  Sense strand starting at position 3672 of SEQ ID NO: 1242017
aauguugcauuaguagaga

SEQ ID NO: 1317395 - RNA, 19 nt, Artificial Sequence
  Description of Artificial Sequence: Synthetic oligonucleotide
  Antisense strand to SEQ ID NO: 1317394
ucucuacuaaugcaacauu

SEQ ID NO: 1317396 - RNA, 19 nt, Artificial Sequence
  Description of Artificial Sequence: Synthetic oligonucleotide
  Sense strand starting at position 3677 of SEQ ID NO: 1242017
ugcauuaguagagagucaa

SEQ ID NO: 1317397 - RNA, 19 nt, Artificial Sequence
  Description of Artificial Sequence: Synthetic oligonucleotide
  Antisense strand to SEQ ID NO: 1317396
uugacucucuacuaaugca

SEQ ID NO: 1317398 - RNA, 19 nt, Artificial Sequence
  Description of Artificial Sequence: Synthetic oligonucleotide
  Sense strand starting at position 3697 of SEQ ID NO: 1242017
aucaucauaucaguaugau

SEQ ID NO: 1317399 - RNA, 19 nt, Artificial Sequence
  Description of Artificial Sequence: Synthetic oligonucleotide
  Antisense strand to SEQ ID NO: 1317398
aucauacugauaugaugau

SEQ ID NO: 1317400 - RNA, 19 nt, Artificial Sequence
  Description of Artificial Sequence: Synthetic oligonucleotide
  Sense strand starting at position 3769 of SEQ ID NO: 1242017
agaacuguucuccaaggca

SEQ ID NO: 1317401 - RNA, 19 nt, Artificial Sequence
  Description of Artificial Sequence: Synthetic oligonucleotide
  Antisense strand to SEQ ID NO: 1317400
ugccuuggagaacaguucu

SEQ ID NO: 1317402 - RNA, 19 nt, Artificial Sequence
  Description of Artificial Sequence: Synthetic oligonucleotide
  Sense strand starting at position 3772 of SEQ ID NO: 1242017
acuguucuccaaggcauaa

SEQ ID NO: 1317403 - RNA, 19 nt, Artificial Sequence
  Description of Artificial Sequence: Synthetic oligonucleotide
  Antisense strand to SEQ ID NO: 1317402
uuaugccuuggagaacagu

SEQ ID NO: 1317404 - RNA, 19 nt, Artificial Sequence
  Description of Artificial Sequence: Synthetic oligonucleotide
  Sense strand starting at position 3783 of SEQ ID NO: 1242017
aggcauaaaccucagcuau

SEQ ID NO: 1317405 - RNA, 19 nt, Artificial Sequence
  Description of Artificial Sequence: Synthetic oligonucleotide
  Antisense strand to SEQ ID NO: 1317404
auagcugagguuuaugccu

SEQ ID NO: 1317406 - RNA, 19 nt, Artificial Sequence
  Description of Artificial Sequence: Synthetic oligonucleotide
  Sense strand starting at position 3849 of SEQ ID NO: 1242017
caaagagguccugggcuuu

SEQ ID NO: 1317407 - RNA, 19 nt, Artificial Sequence
  Description of Artificial Sequence: Synthetic oligonucleotide
  Antisense strand to SEQ ID NO: 1317406
aaagcccaggaccucuuug

SEQ ID NO: 1317408 - RNA, 19 nt, Artificial Sequence
  Description of Artificial Sequence: Synthetic oligonucleotide
  Sense strand starting at position 3870 of SEQ ID NO: 1242017
gccucuuagccaggaugaa

SEQ ID NO: 1317409 - RNA, 19 nt, Artificial Sequence
  Description of Artificial Sequence: Synthetic oligonucleotide
  Antisense strand to SEQ ID NO: 1317408
uucauccuggcuaagaggc

SEQ ID NO: 1317410 - RNA, 19 nt, Artificial Sequence
  Description of Artificial Sequence: Synthetic oligonucleotide
  Sense strand starting at position 15 of SEQ ID NO: 1242018
auagguuagagcuguugaa

SEQ ID NO: 1317411 - RNA, 19 nt, Artificial Sequence
  Description of Artificial Sequence: Synthetic oligonucleotide
  Antisense strand to SEQ ID NO: 1317410
uucaacagcucuaaccuau

SEQ ID NO: 1317412 - RNA, 19 nt, Artificial Sequence
  Description of Artificial Sequence: Synthetic oligonucleotide
  Sense strand starting at position 19 of SEQ ID NO: 1242018
guuagagcuguugaagaga

SEQ ID NO: 1317413 - RNA, 19 nt, Artificial Sequence
  Description of Artificial Sequence: Synthetic oligonucleotide
  Antisense strand to SEQ ID NO: 1317412
ucucuucaacagcucuaac

SEQ ID NO: 1317414 - RNA, 19 nt, Artificial Sequence
  Description of Artificial Sequence: Synthetic oligonucleotide
  Sense strand starting at position 140 of SEQ ID NO: 1242018
uucuacuguguccaauuaa

SEQ ID NO: 1317415 - RNA, 19 nt, Artificial Sequence
  Description of Artificial Sequence: Synthetic oligonucleotide
  Antisense strand to SEQ ID NO: 1317414
uuaauuggacacaguagaa

SEQ ID NO: 1317416 - RNA, 19 nt, Artificial Sequence
  Description of Artificial Sequence: Synthetic oligonucleotide
  Sense strand starting at position 294 of SEQ ID NO: 1242018
cugguuccagcagacuuaa

SEQ ID NO: 1317417 - RNA, 19 nt, Artificial Sequence
  Description of Artificial Sequence: Synthetic oligonucleotide
  Antisense strand to SEQ ID NO: 1317416
uuaagucugcuggaaccag

SEQ ID NO: 1317418 - RNA, 19 nt, Artificial Sequence
  Description of Artificial Sequence: Synthetic oligonucleotide
  Sense strand starting at position 369 of SEQ ID NO: 1242018
cugagcaauagauguguga

SEQ ID NO: 1317419 - RNA, 19 nt, Artificial Sequence
  Description of Artificial Sequence: Synthetic oligonucleotide
  Antisense strand to SEQ ID NO: 1317418
ucacacaucuauugcucag

SEQ ID NO: 1317420 - RNA, 19 nt, Artificial Sequence
  Description of Artificial Sequence: Synthetic oligonucleotide
  Sense strand starting at position 509 of SEQ ID NO: 1242018
aggcucacccuugaucuaa

SEQ ID NO: 1317421 - RNA, 19 nt, Artificial Sequence
  Description of Artificial Sequence: Synthetic oligonucleotide
  Antisense strand to SEQ ID NO: 1317420
uuagaucaagggugagccu

SEQ ID NO: 1317422 - RNA, 19 nt, Artificial Sequence
  Description of Artificial Sequence: Synthetic oligonucleotide
  Sense strand starting at position 584 of SEQ ID NO: 1242018
cgagguguuccagaggcaa

SEQ ID NO: 1317423 - RNA, 19 nt, Artificial Sequence
  Description of Artificial Sequence: Synthetic oligonucleotide
  Antisense strand to SEQ ID NO: 1317422
uugccucuggaacaccucg

SEQ ID NO: 1317424 - RNA, 19 nt, Artificial Sequence
  Description of Artificial Sequence: Synthetic oligonucleotide
  Sense strand starting at position 586 of SEQ ID NO: 1242018
agguguuccagaggcaauu

SEQ ID NO: 1317425 - RNA, 19 nt, Artificial Sequence
  Description of Artificial Sequence: Synthetic oligonucleotide
  Antisense strand to SEQ ID NO: 1317424
aauugccucuggaacaccu

SEQ ID NO: 1317426 - RNA, 19 nt, Artificial Sequence
  Description of Artificial Sequence: Synthetic oligonucleotide
  Sense strand starting at position 789 of SEQ ID NO: 1242018
aagccuaugcgauguauuu

SEQ ID NO: 1317427 - RNA, 19 nt, Artificial Sequence
  Description of Artificial Sequence: Synthetic oligonucleotide
  Antisense strand to SEQ ID NO: 1317426
aaauacaucgcauaggcuu

SEQ ID NO: 1317428 - RNA, 19 nt, Artificial Sequence
  Description of Artificial Sequence: Synthetic oligonucleotide
  Sense strand starting at position 798 of SEQ ID NO: 1242018
cgauguauuucagcacgau

SEQ ID NO: 1317429 - RNA, 19 nt, Artificial Sequence
  Description of Artificial Sequence: Synthetic oligonucleotide
  Antisense strand to SEQ ID NO: 1317428
aucgugcugaaauacaucg

SEQ ID NO: 1317430 - RNA, 19 nt, Artificial Sequence
  Description of Artificial Sequence: Synthetic oligonucleotide
  Sense strand starting at position 825 of SEQ ID NO: 1242018
ugcaguuacagaugucaag

SEQ ID NO: 1317431 - RNA, 19 nt, Artificial Sequence
  Description of Artificial Sequence: Synthetic oligonucleotide
  Antisense strand to SEQ ID NO: 1317430
cuugacaucuguaacugca

SEQ ID NO: 1317432 - RNA, 19 nt, Artificial Sequence
  Description of Artificial Sequence: Synthetic oligonucleotide
  Sense strand starting at position 831 of SEQ ID NO: 1242018
uacagaugucaagaguucu

SEQ ID NO: 1317433 - RNA, 19 nt, Artificial Sequence
  Description of Artificial Sequence: Synthetic oligonucleotide
  Antisense strand to SEQ ID NO: 1317432
agaacucuugacaucugua

SEQ ID NO: 1317434 - RNA, 19 nt, Artificial Sequence
  Description of Artificial Sequence: Synthetic oligonucleotide
  Sense strand starting at position 837 of SEQ ID NO: 1242018
ugucaagaguucucagaac

SEQ ID NO: 1317435 - RNA, 19 nt, Artificial Sequence
  Description of Artificial Sequence: Synthetic oligonucleotide
  Antisense strand to SEQ ID NO: 1317434
guucugagaacucuugaca

SEQ ID NO: 1317436 - RNA, 19 nt, Artificial Sequence
  Description of Artificial Sequence: Synthetic oligonucleotide
  Sense strand starting at position 993 of SEQ ID NO: 1242018
gucacuuuaaucgagacgu

SEQ ID NO: 1317437 - RNA, 19 nt, Artificial Sequence
  Description of Artificial Sequence: Synthetic oligonucleotide
  Antisense strand to SEQ ID NO: 1317436
acgucucgauuaaagugac

SEQ ID NO: 1317438 - RNA, 19 nt, Artificial Sequence
  Description of Artificial Sequence: Synthetic oligonucleotide
  Sense strand starting at position 995 of SEQ ID NO: 1242018
cacuuuaaucgagacgucu

SEQ ID NO: 1317439 - RNA, 19 nt, Artificial Sequence
  Description of Artificial Sequence: Synthetic oligonucleotide
  Antisense strand to SEQ ID NO: 1317438
agacgucucgauuaaagug

SEQ ID NO: 1317440 - RNA, 19 nt, Artificial Sequence
  Description of Artificial Sequence: Synthetic oligonucleotide
  Sense strand starting at position 1010 of SEQ ID NO: 1242018
gucuuucuucuauggagau

SEQ ID NO: 1317441 - RNA, 19 nt, Artificial Sequence
  Description of Artificial Sequence: Synthetic oligonucleotide
  Antisense strand to SEQ ID NO: 1317440
aucuccauagaagaaagac

SEQ ID NO: 1317442 - RNA, 19 nt, Artificial Sequence
  Description of Artificial Sequence: Synthetic oligonucleotide
  Sense strand starting at position 1035 of SEQ ID NO: 1242018
accacuggcuucucugauu

SEQ ID NO: 1317443 - RNA, 19 nt, Artificial Sequence
  Description of Artificial Sequence: Synthetic oligonucleotide
  Antisense strand to SEQ ID NO: 1317442
aaucagagaagccaguggu

SEQ ID NO: 1317444 - RNA, 19 nt, Artificial Sequence
  Description of Artificial Sequence: Synthetic oligonucleotide
  Sense strand starting at position 1543 of SEQ ID NO: 1242018
aaaguaacuccgggaauca

SEQ ID NO: 1317445 - RNA, 19 nt, Artificial Sequence
  Description of Artificial Sequence: Synthetic oligonucleotide
  Antisense strand to SEQ ID NO: 1317444
ugauucccggaguuacuuu

SEQ ID NO: 1317446 - RNA, 19 nt, Artificial Sequence
  Description of Artificial Sequence: Synthetic oligonucleotide
  Sense strand starting at position 2791 of SEQ ID NO: 1242018
caagccauccgcugagaga

SEQ ID NO: 1317447 - RNA, 19 nt, Artificial Sequence
  Description of Artificial Sequence: Synthetic oligonucleotide
  Antisense strand to SEQ ID NO: 1317446
ucucucagcggauggcuug

SEQ ID NO: 1317448 - RNA, 19 nt, Artificial Sequence
  Description of Artificial Sequence: Synthetic oligonucleotide
  Sense strand starting at position 2792 of SEQ ID NO: 1242018
aagccauccgcugagagaa

SEQ ID NO: 1317449 - RNA, 19 nt, Artificial Sequence
  Description of Artificial Sequence: Synthetic oligonucleotide
  Antisense strand to SEQ ID NO: 1317448
uucucucagcggauggcuu

SEQ ID NO: 1317450 - RNA, 19 nt, Artificial Sequence
  Description of Artificial Sequence: Synthetic oligonucleotide
  Sense strand starting at position 2833 of SEQ ID NO: 1242018
agaacauugccaggacaca

SEQ ID NO: 1317451 - RNA, 19 nt, Artificial Sequence
  Description of Artificial Sequence: Synthetic oligonucleotide
  Antisense strand to SEQ ID NO: 1317450
uguguccuggcaauguucu

SEQ ID NO: 1317452 - RNA, 19 nt, Artificial Sequence
  Description of Artificial Sequence: Synthetic oligonucleotide
  Sense strand starting at position 2939 of SEQ ID NO: 1242018
uuaaaugcgcaauaucauu

SEQ ID NO: 1317453 - RNA, 19 nt, Artificial Sequence
  Description of Artificial Sequence: Synthetic oligonucleotide
  Antisense strand to SEQ ID NO: 1317452
aaugauauugcgcauuuaa

SEQ ID NO: 1317454 - RNA, 19 nt, Artificial Sequence
  Description of Artificial Sequence: Synthetic oligonucleotide
  Sense strand starting at position 2944 of SEQ ID NO: 1242018
ugcgcaauaucauuaauaa

SEQ ID NO: 1317455 - RNA, 19 nt, Artificial Sequence
  Description of Artificial Sequence: Synthetic oligonucleotide
  Antisense strand to SEQ ID NO: 1317454
uuauuaaugauauugcgca

SEQ ID NO: 1317456 - RNA, 19 nt, Artificial Sequence
  Description of Artificial Sequence: Synthetic oligonucleotide
  Sense strand starting at position 2945 of SEQ ID NO: 1242018
gcgcaauaucauuaauaac

SEQ ID NO: 1317457 - RNA, 19 nt, Artificial Sequence
  Description of Artificial Sequence: Synthetic oligonucleotide
  Antisense strand to SEQ ID NO: 1317456
guuauuaaugauauugcgc

SEQ ID NO: 1317458 - RNA, 19 nt, Artificial Sequence
  Description of Artificial Sequence: Synthetic oligonucleotide
  Sense strand starting at position 3027 of SEQ ID NO: 1242018
cuuggaauaccgggaaauc

SEQ ID NO: 1317459 - RNA, 19 nt, Artificial Sequence
  Description of Artificial Sequence: Synthetic oligonucleotide
  Antisense strand to SEQ ID NO: 1317458
gauuucccgguauuccaag

SEQ ID NO: 1317460 - RNA, 19 nt, Artificial Sequence
  Description of Artificial Sequence: Synthetic oligonucleotide
  Sense strand starting at position 3037 of SEQ ID NO: 1242018
cgggaaauccugcaaguuu

SEQ ID NO: 1317461 - RNA, 19 nt, Artificial Sequence
  Description of Artificial Sequence: Synthetic oligonucleotide
  Antisense strand to SEQ ID NO: 1317460
aaacuugcaggauuucccg

SEQ ID NO: 1317462 - RNA, 19 nt, Artificial Sequence
  Description of Artificial Sequence: Synthetic oligonucleotide
  Sense strand starting at position 3124 of SEQ ID NO: 1242018
gcugcauugacagauuaag

SEQ ID NO: 1317463 - RNA, 19 nt, Artificial Sequence
  Description of Artificial Sequence: Synthetic oligonucleotide
  Antisense strand to SEQ ID NO: 1317462
cuuaaucugucaaugcagc

SEQ ID NO: 1317464 - RNA, 19 nt, Artificial Sequence
  Description of Artificial Sequence: Synthetic oligonucleotide
  Sense strand starting at position 3138 of SEQ ID NO: 1242018
uuaagagaucaccagcguu

SEQ ID NO: 1317465 - RNA, 19 nt, Artificial Sequence
  Description of Artificial Sequence: Synthetic oligonucleotide
  Antisense strand to SEQ ID NO: 1317464
aacgcuggugaucucuuaa

SEQ ID NO: 1317466 - RNA, 19 nt, Artificial Sequence
  Description of Artificial Sequence: Synthetic oligonucleotide
  Sense strand starting at position 3219 of SEQ ID NO: 1242018
gucauuuccugagaccauu

SEQ ID NO: 1317467 - RNA, 19 nt, Artificial Sequence
  Description of Artificial Sequence: Synthetic oligonucleotide
  Antisense strand to SEQ ID NO: 1317466
aauggucucaggaaaugac

SEQ ID NO: 1317468 - RNA, 19 nt, Artificial Sequence
  Description of Artificial Sequence: Synthetic oligonucleotide
  Sense strand starting at position 3245 of SEQ ID NO: 1242018
gucuuucuagcagaccuua

SEQ ID NO: 1317469 - RNA, 19 nt, Artificial Sequence
  Description of Artificial Sequence: Synthetic oligonucleotide
  Antisense strand to SEQ ID NO: 1317468
uaaggucugcuagaaagac

SEQ ID NO: 1317470 - RNA, 19 nt, Artificial Sequence
  Description of Artificial Sequence: Synthetic oligonucleotide
  Sense strand starting at position 3260 of SEQ ID NO: 1242018
cuuacuguuggaugagaaa

SEQ ID NO: 1317471 - RNA, 19 nt, Artificial Sequence
  Description of Artificial Sequence: Synthetic oligonucleotide
  Antisense strand to SEQ ID NO: 1317470
uuucucauccaacaguaag

SEQ ID NO: 1317472 - RNA, 19 nt, Artificial Sequence
  Description of Artificial Sequence: Synthetic oligonucleotide
  Sense strand starting at position 3282 of SEQ ID NO: 1242018
uagagaguguagucccaaa

SEQ ID NO: 1317473 - RNA, 19 nt, Artificial Sequence
  Description of Artificial Sequence: Synthetic oligonucleotide
  Antisense strand to SEQ ID NO: 1317472
uuugggacuacacucucua

SEQ ID NO: 1317474 - RNA, 19 nt, Artificial Sequence
  Description of Artificial Sequence: Synthetic oligonucleotide
  Sense strand starting at position 3505 of SEQ ID NO: 1242018
uagagugacugaucucaaa

SEQ ID NO: 1317475 - RNA, 19 nt, Artificial Sequence
  Description of Artificial Sequence: Synthetic oligonucleotide
  Antisense strand to SEQ ID NO: 1317474
uuugagaucagucacucua

SEQ ID NO: 1317476 - RNA, 19 nt, Artificial Sequence
  Description of Artificial Sequence: Synthetic oligonucleotide
  Sense strand starting at position 3620 of SEQ ID NO: 1242018
auuccaauuuccuggagac

SEQ ID NO: 1317477 - RNA, 19 nt, Artificial Sequence
  Description of Artificial Sequence: Synthetic oligonucleotide
  Antisense strand to SEQ ID NO: 1317476
gucuccaggaaauuggaau

SEQ ID NO: 1317478 - RNA, 19 nt, Artificial Sequence
  Description of Artificial Sequence: Synthetic oligonucleotide
  Sense strand starting at position 3715 of SEQ ID NO: 1242018
ggaaguuauguucgcauuu

SEQ ID NO: 1317479 - RNA, 19 nt, Artificial Sequence
  Description of Artificial Sequence: Synthetic oligonucleotide
  Antisense strand to SEQ ID NO: 1317478
aaaugcgaacauaacuucc

SEQ ID NO: 1317480 - RNA, 19 nt, Artificial Sequence
  Description of Artificial Sequence: Synthetic oligonucleotide
  Sense strand starting at position 3716 of SEQ ID NO: 1242018
gaaguuauguucgcauuug

SEQ ID NO: 1317481 - RNA, 19 nt, Artificial Sequence
  Description of Artificial Sequence: Synthetic oligonucleotide
  Antisense strand to SEQ ID NO: 1317480
caaaugcgaacauaacuuc

SEQ ID NO: 1317482 - RNA, 19 nt, Artificial Sequence
  Description of Artificial Sequence: Synthetic oligonucleotide
  Sense strand starting at position 3802 of SEQ ID NO: 1242018
agagcucucuaaucauaag

SEQ ID NO: 1317483 - RNA, 19 nt, Artificial Sequence
  Description of Artificial Sequence: Synthetic oligonucleotide
  Antisense strand to SEQ ID NO: 1317482
cuuaugauuagagagcucu

SEQ ID NO: 1317484 - RNA, 19 nt, Artificial Sequence
  Description of Artificial Sequence: Synthetic oligonucleotide
  Sense strand starting at position 3843 of SEQ ID NO: 1242018
uaggguacaucagugaaca

SEQ ID NO: 1317485 - RNA, 19 nt, Artificial Sequence
  Description of Artificial Sequence: Synthetic oligonucleotide
  Antisense strand to SEQ ID NO: 1317484
uguucacugauguacccua

SEQ ID NO: 1317486 - RNA, 19 nt, Artificial Sequence
  Description of Artificial Sequence: Synthetic oligonucleotide
  Sense strand starting at position 3844 of SEQ ID NO: 1242018
aggguacaucagugaacaa

SEQ ID NO: 1317487 - RNA, 19 nt, Artificial Sequence
  Description of Artificial Sequence: Synthetic oligonucleotide
  Antisense strand to SEQ ID NO: 1317486
uuguucacugauguacccu

SEQ ID NO: 1317488 - RNA, 19 nt, Artificial Sequence
  Description of Artificial Sequence: Synthetic oligonucleotide
  Sense strand starting at position 3936 of SEQ ID NO: 1242018
guuuauugacauuguauac

SEQ ID NO: 1317489 - RNA, 19 nt, Artificial Sequence
  Description of Artificial Sequence: Synthetic oligonucleotide
  Antisense strand to SEQ ID NO: 1317488
guauacaaugucaauaaac

SEQ ID NO: 1317490 - RNA, 19 nt, Artificial Sequence
  Description of Artificial Sequence: Synthetic oligonucleotide
  Sense strand starting at position 216 of SEQ ID NO: 1242019
aagugagugcuuuauauug

SEQ ID NO: 1317491 - RNA, 19 nt, Artificial Sequence
  Description of Artificial Sequence: Synthetic oligonucleotide
  Antisense strand to SEQ ID NO: 1317490
caauauaaagcacucacuu

SEQ ID NO: 1317492 - RNA, 19 nt, Artificial Sequence
  Description of Artificial Sequence: Synthetic oligonucleotide
  Sense strand starting at position 568 of SEQ ID NO: 1242019
uguuaagacuuucuaauga

SEQ ID NO: 1317493 - RNA, 19 nt, Artificial Sequence
  Description of Artificial Sequence: Synthetic oligonucleotide
  Antisense strand to SEQ ID NO: 1317492
ucauuagaaagucuuaaca

SEQ ID NO: 1317494 - RNA, 19 nt, Artificial Sequence
  Description of Artificial Sequence: Synthetic oligonucleotide
  Sense strand starting at position 633 of SEQ ID NO: 1242019
acuauauaguuuguagaga

SEQ ID NO: 1317495 - RNA, 19 nt, Artificial Sequence
  Description of Artificial Sequence: Synthetic oligonucleotide
  Antisense strand to SEQ ID NO: 1317494
ucucuacaaacuauauagu

SEQ ID NO: 1317496 - RNA, 19 nt, Artificial Sequence
  Description of Artificial Sequence: Synthetic oligonucleotide
  Sense strand starting at position 701 of SEQ ID NO: 1242019
gacauacaucacugaguga

SEQ ID NO: 1317497 - RNA, 19 nt, Artificial Sequence
  Description of Artificial Sequence: Synthetic oligonucleotide
  Antisense strand to SEQ ID NO: 1317496
ucacucagugauguauguc

SEQ ID NO: 1317498 - RNA, 19 nt, Artificial Sequence
  Description of Artificial Sequence: Synthetic oligonucleotide
  Sense strand starting at position 704 of SEQ ID NO: 1242019
auacaucacugagugaacu

SEQ ID NO: 1317499 - RNA, 19 nt, Artificial Sequence
  Description of Artificial Sequence: Synthetic oligonucleotide
  Antisense strand to SEQ ID NO: 1317498
aguucacucagugauguau

SEQ ID NO: 1317500 - RNA, 19 nt, Artificial Sequence
  Description of Artificial Sequence: Synthetic oligonucleotide
  Sense strand starting at position 769 of SEQ ID NO: 1242019
uuauuagcucaauacggau

SEQ ID NO: 1317501 - RNA, 19 nt, Artificial Sequence
  Description of Artificial Sequence: Synthetic oligonucleotide
  Antisense strand to SEQ ID NO: 1317500
auccguauugagcuaauaa

SEQ ID NO: 1317502 - RNA, 19 nt, Artificial Sequence
  Description of Artificial Sequence: Synthetic oligonucleotide
  Sense strand starting at position 876 of SEQ ID NO: 1242019
cacaguauuugagaaagau

SEQ ID NO: 1317503 - RNA, 19 nt, Artificial Sequence
  Description of Artificial Sequence: Synthetic oligonucleotide
  Antisense strand to SEQ ID NO: 1317502
aucuuucucaaauacugug

SEQ ID NO: 1317504 - RNA, 19 nt, Artificial Sequence
  Description of Artificial Sequence: Synthetic oligonucleotide
  Sense strand starting at position 1057 of SEQ ID NO: 1242019
aguauuaacuaagucagau

SEQ ID NO: 1317505 - RNA, 19 nt, Artificial Sequence
  Description of Artificial Sequence: Synthetic oligonucleotide
  Antisense strand to SEQ ID NO: 1317504
aucugacuuaguuaauacu

SEQ ID NO: 1317506 - RNA, 19 nt, Artificial Sequence
  Description of Artificial Sequence: Synthetic oligonucleotide
  Sense strand starting at position 1116 of SEQ ID NO: 1242019
auacuaguuuaaccuugua

SEQ ID NO: 1317507 - RNA, 19 nt, Artificial Sequence
  Description of Artificial Sequence: Synthetic oligonucleotide
  Antisense strand to SEQ ID NO: 1317506
uacaagguuaaacuaguau

SEQ ID NO: 1317508 - RNA, 19 nt, Artificial Sequence
  Description of Artificial Sequence: Synthetic oligonucleotide
  Sense strand starting at position 1168 of SEQ ID NO: 1242019
cuauauggauguuuaauag

SEQ ID NO: 1317509 - RNA, 19 nt, Artificial Sequence
  Description of Artificial Sequence: Synthetic oligonucleotide
  Antisense strand to SEQ ID NO: 1317508
cuauuaaacauccauauag

SEQ ID NO: 1317510 - RNA, 19 nt, Artificial Sequence
  Description of Artificial Sequence: Synthetic oligonucleotide
  Sense strand starting at position 1198 of SEQ ID NO: 1242019
gacuuugcgguugaauuau

SEQ ID NO: 1317511 - RNA, 19 nt, Artificial Sequence
  Description of Artificial Sequence: Synthetic oligonucleotide
  Antisense strand to SEQ ID NO: 1317510
auaauucaaccgcaaaguc

SEQ ID NO: 1317512 - RNA, 19 nt, Artificial Sequence
  Description of Artificial Sequence: Synthetic oligonucleotide
  Sense strand starting at position 1545 of SEQ ID NO: 1242019
ccauuaaagugagcacauu

SEQ ID NO: 1317513 - RNA, 19 nt, Artificial Sequence
  Description of Artificial Sequence: Synthetic oligonucleotide
  Antisense strand to SEQ ID NO: 1317512
aaugugcucacuuuaaugg

SEQ ID NO: 1317514 - RNA, 19 nt, Artificial Sequence
  Description of Artificial Sequence: Synthetic oligonucleotide
  Sense strand starting at position 1887 of SEQ ID NO: 1242019
ucuggcuaucaauagcuau

SEQ ID NO: 1317515 - RNA, 19 nt, Artificial Sequence
  Description of Artificial Sequence: Synthetic oligonucleotide
  Antisense strand to SEQ ID NO: 1317514
auagcuauugauagccaga

SEQ ID NO: 1317516 - RNA, 19 nt, Artificial Sequence
  Description of Artificial Sequence: Synthetic oligonucleotide
  Sense strand starting at position 1890 of SEQ ID NO: 1242019
ggcuaucaauagcuauacu

SEQ ID NO: 1317517 - RNA, 19 nt, Artificial Sequence
  Description of Artificial Sequence: Synthetic oligonucleotide
  Antisense strand to SEQ ID NO: 1317516
aguauagcuauugauagcc

SEQ ID NO: 1317518 - RNA, 19 nt, Artificial Sequence
  Description of Artificial Sequence: Synthetic oligonucleotide
  Sense strand starting at position 1901 of SEQ ID NO: 1242019
gcuauacuaucaguaacug

SEQ ID NO: 1317519 - RNA, 19 nt, Artificial Sequence
  Description of Artificial Sequence: Synthetic oligonucleotide
  Antisense strand to SEQ ID NO: 1317518
caguuacugauaguauagc

SEQ ID NO: 1317520 - RNA, 19 nt, Artificial Sequence
  Description of Artificial Sequence: Synthetic oligonucleotide
  Sense strand starting at position 2286 of SEQ ID NO: 1242019
guuagugaugcacauaaac

SEQ ID NO: 1317521 - RNA, 19 nt, Artificial Sequence
  Description of Artificial Sequence: Synthetic oligonucleotide
  Antisense strand to SEQ ID NO: 1317520
guuuaugugcaucacuaac

SEQ ID NO: 1317522 - RNA, 19 nt, Artificial Sequence
  Description of Artificial Sequence: Synthetic oligonucleotide
  Sense strand starting at position 2417 of SEQ ID NO: 1242019
agaauaaagcauugucaac

SEQ ID NO: 1317523 - RNA, 19 nt, Artificial Sequence
  Description of Artificial Sequence: Synthetic oligonucleotide
  Antisense strand to SEQ ID NO: 1317522
guugacaaugcuuuauucu

SEQ ID NO: 1317524 - RNA, 19 nt, Artificial Sequence
  Description of Artificial Sequence: Synthetic oligonucleotide
  Sense strand starting at position 2533 of SEQ ID NO: 1242019
cugaaauggucucuccuca

SEQ ID NO: 1317525 - RNA, 19 nt, Artificial Sequence
  Description of Artificial Sequence: Synthetic oligonucleotide
  Antisense strand to SEQ ID NO: 1317524
ugaggagagaccauuucag

SEQ ID NO: 1317526 - RNA, 19 nt, Artificial Sequence
  Description of Artificial Sequence: Synthetic oligonucleotide
  Sense strand starting at position 2631 of SEQ ID NO: 1242019
aucaguuacuuaguaaucu

SEQ ID NO: 1317527 - RNA, 19 nt, Artificial Sequence
  Description of Artificial Sequence: Synthetic oligonucleotide
  Antisense strand to SEQ ID NO: 1317526
agauuacuaaguaacugau

SEQ ID NO: 1317528 - RNA, 19 nt, Artificial Sequence
  Description of Artificial Sequence: Synthetic oligonucleotide
  Sense strand starting at position 2635 of SEQ ID NO: 1242019
guuacuuaguaaucucuga

SEQ ID NO: 1317529 - RNA, 19 nt, Artificial Sequence
  Description of Artificial Sequence: Synthetic oligonucleotide
  Antisense strand to SEQ ID NO: 1317528
ucagagauuacuaaguaac

SEQ ID NO: 1317530 - RNA, 19 nt, Artificial Sequence
  Description of Artificial Sequence: Synthetic oligonucleotide
  Sense strand starting at position 2705 of SEQ ID NO: 1242019
aacaaugacguuuagcuua

SEQ ID NO: 1317531 - RNA, 19 nt, Artificial Sequence
  Description of Artificial Sequence: Synthetic oligonucleotide
  Antisense strand to SEQ ID NO: 1317530
uaagcuaaacgucauuguu

SEQ ID NO: 1317532 - RNA, 19 nt, Artificial Sequence
  Description of Artificial Sequence: Synthetic oligonucleotide
  Sense strand starting at position 2707 of SEQ ID NO: 1242019
caaugacguuuagcuuaaa

SEQ ID NO: 1317533 - RNA, 19 nt, Artificial Sequence
  Description of Artificial Sequence: Synthetic oligonucleotide
  Antisense strand to SEQ ID NO: 1317532
uuuaagcuaaacgucauug

SEQ ID NO: 1317534 - RNA, 19 nt, Artificial Sequence
  Description of Artificial Sequence: Synthetic oligonucleotide
  Sense strand starting at position 2710 of SEQ ID NO: 1242019
ugacguuuagcuuaaauuc

SEQ ID NO: 1317535 - RNA, 19 nt, Artificial Sequence
  Description of Artificial Sequence: Synthetic oligonucleotide
  Antisense strand to SEQ ID NO: 1317534
gaauuuaagcuaaacguca

SEQ ID NO: 1317536 - RNA, 19 nt, Artificial Sequence
  Description of Artificial Sequence: Synthetic oligonucleotide
  Sense strand starting at position 2864 of SEQ ID NO: 1242019
uacaaagcuguuugggaga

SEQ ID NO: 1317537 - RNA, 19 nt, Artificial Sequence
  Description of Artificial Sequence: Synthetic oligonucleotide
  Antisense strand to SEQ ID NO: 1317536
ucucccaaacagcuuugua

SEQ ID NO: 1317538 - RNA, 19 nt, Artificial Sequence
  Description of Artificial Sequence: Synthetic oligonucleotide
  Sense strand starting at position 2988 of SEQ ID NO: 1242019
cguuuaaagcaauggaacu

SEQ ID NO: 1317539 - RNA, 19 nt, Artificial Sequence
  Description of Artificial Sequence: Synthetic oligonucleotide
  Antisense strand to SEQ ID NO: 1317538
aguuccauugcuuuaaacg

SEQ ID NO: 1317540 - RNA, 19 nt, Artificial Sequence
  Description of Artificial Sequence: Synthetic oligonucleotide
  Sense strand starting at position 3064 of SEQ ID NO: 1242019
acaggaaagguuuguggga

SEQ ID NO: 1317541 - RNA, 19 nt, Artificial Sequence
  Description of Artificial Sequence: Synthetic oligonucleotide
  Antisense strand to SEQ ID NO: 1317540
ucccacaaaccuuuccugu

SEQ ID NO: 1317542 - RNA, 19 nt, Artificial Sequence
  Description of Artificial Sequence: Synthetic oligonucleotide
  Sense strand starting at position 3117 of SEQ ID NO: 1242019
uuacucagaucuuuguuua

SEQ ID NO: 1317543 - RNA, 19 nt, Artificial Sequence
  Description of Artificial Sequence: Synthetic oligonucleotide
  Antisense strand to SEQ ID NO: 1317542
uaaacaaagaucugaguaa

SEQ ID NO: 1317544 - RNA, 19 nt, Artificial Sequence
  Description of Artificial Sequence: Synthetic oligonucleotide
  Sense strand starting at position 3156 of SEQ ID NO: 1242019
gggaguggagucugaugga

SEQ ID NO: 1317545 - RNA, 19 nt, Artificial Sequence
  Description of Artificial Sequence: Synthetic oligonucleotide
  Antisense strand to SEQ ID NO: 1317544
uccaucagacuccacuccc

SEQ ID NO: 1317546 - RNA, 19 nt, Artificial Sequence
  Description of Artificial Sequence: Synthetic oligonucleotide
  Sense strand starting at position 3162 of SEQ ID NO: 1242019
ggagucugauggaaguguu

SEQ ID NO: 1317547 - RNA, 19 nt, Artificial Sequence
  Description of Artificial Sequence: Synthetic oligonucleotide
  Antisense strand to SEQ ID NO: 1317546
aacacuuccaucagacucc

SEQ ID NO: 1317548 - RNA, 19 nt, Artificial Sequence
  Description of Artificial Sequence: Synthetic oligonucleotide
  Sense strand starting at position 3165 of SEQ ID NO: 1242019
gucugauggaaguguugga

SEQ ID NO: 1317549 - RNA, 19 nt, Artificial Sequence
  Description of Artificial Sequence: Synthetic oligonucleotide
  Antisense strand to SEQ ID NO: 1317548
uccaacacuuccaucagac

SEQ ID NO: 1317550 - RNA, 19 nt, Artificial Sequence
  Description of Artificial Sequence: Synthetic oligonucleotide
  Sense strand starting at position 3169 of SEQ ID NO: 1242019
gauggaaguguuggaguua

SEQ ID NO: 1317551 - RNA, 19 nt, Artificial Sequence
  Description of Artificial Sequence: Synthetic oligonucleotide
  Antisense strand to SEQ ID NO: 1317550
uaacuccaacacuuccauc

SEQ ID NO: 1317552 - RNA, 19 nt, Artificial Sequence
  Description of Artificial Sequence: Synthetic oligonucleotide
  Sense strand starting at position 3299 of SEQ ID NO: 1242019
cuaggauuccuggaguucu

SEQ ID NO: 1317553 - RNA, 19 nt, Artificial Sequence
  Description of Artificial Sequence: Synthetic oligonucleotide
  Antisense strand to SEQ ID NO: 1317552
agaacuccaggaauccuag

SEQ ID NO: 1317554 - RNA, 19 nt, Artificial Sequence
  Description of Artificial Sequence: Synthetic oligonucleotide
  Sense strand starting at position 3307 of SEQ ID NO: 1242019
ccuggaguucuauaguaca

SEQ ID NO: 1317555 - RNA, 19 nt, Artificial Sequence
  Description of Artificial Sequence: Synthetic oligonucleotide
  Antisense strand to SEQ ID NO: 1317554
uguacuauagaacuccagg

SEQ ID NO: 1317556 - RNA, 19 nt, Artificial Sequence
  Description of Artificial Sequence: Synthetic oligonucleotide
  Sense strand starting at position 3341 of SEQ ID NO: 1242019
ggaagaggcuuauugcuuu

SEQ ID NO: 1317557 - RNA, 19 nt, Artificial Sequence
  Description of Artificial Sequence: Synthetic oligonucleotide
  Antisense strand to SEQ ID NO: 1317556
aaagcaauaagccucuucc

SEQ ID NO: 1317558 - RNA, 19 nt, Artificial Sequence
  Description of Artificial Sequence: Synthetic oligonucleotide
  Sense strand starting at position 3344 of SEQ ID NO: 1242019
agaggcuuauugcuuuaaa

SEQ ID NO: 1317559 - RNA, 19 nt, Artificial Sequence
  Description of Artificial Sequence: Synthetic oligonucleotide
  Antisense strand to SEQ ID NO: 1317558
uuuaaagcaauaagccucu

SEQ ID NO: 1317560 - RNA, 19 nt, Artificial Sequence
  Description of Artificial Sequence: Synthetic oligonucleotide
  Sense strand starting at position 3345 of SEQ ID NO: 1242019
gaggcuuauugcuuuaaag

SEQ ID NO: 1317561 - RNA, 19 nt, Artificial Sequence
  Description of Artificial Sequence: Synthetic oligonucleotide
  Antisense strand to SEQ ID NO: 1317560
cuuuaaagcaauaagccuc

SEQ ID NO: 1317562 - RNA, 19 nt, Artificial Sequence
  Description of Artificial Sequence: Synthetic oligonucleotide
  Sense strand starting at position 3455 of SEQ ID NO: 1242019
acacaauaagccugaggua

SEQ ID NO: 1317563 - RNA, 19 nt, Artificial Sequence
  Description of Artificial Sequence: Synthetic oligonucleotide
  Antisense strand to SEQ ID NO: 1317562
uaccucaggcuuauugugu

SEQ ID NO: 1317564 - RNA, 19 nt, Artificial Sequence
  Description of Artificial Sequence: Synthetic oligonucleotide
  Sense strand starting at position 3763 of SEQ ID NO: 1242019
agguacuaugucuacuuaa

SEQ ID NO: 1317565 - RNA, 19 nt, Artificial Sequence
  Description of Artificial Sequence: Synthetic oligonucleotide
  Antisense strand to SEQ ID NO: 1317564
uuaaguagacauaguaccu

SEQ ID NO: 1317566 - RNA, 19 nt, Artificial Sequence
  Description of Artificial Sequence: Synthetic oligonucleotide
  Sense strand starting at position 3859 of SEQ ID NO: 1242019
gugcaaguagaacaucuua

SEQ ID NO: 1317567 - RNA, 19 nt, Artificial Sequence
  Description of Artificial Sequence: Synthetic oligonucleotide
  Antisense strand to SEQ ID NO: 1317566
uaagauguucuacuugcac

SEQ ID NO: 1317568 - RNA, 19 nt, Artificial Sequence
  Description of Artificial Sequence: Synthetic oligonucleotide
  Sense strand starting at position 3864 of SEQ ID NO: 1242019
aguagaacaucuuauuuga

SEQ ID NO: 1317569 - RNA, 19 nt, Artificial Sequence
  Description of Artificial Sequence: Synthetic oligonucleotide
  Antisense strand to SEQ ID NO: 1317568
ucaaauaagauguucuacu

SEQ ID NO: 1317570 - RNA, 19 nt, Artificial Sequence
  Description of Artificial Sequence: Synthetic oligonucleotide
  Sense strand starting at position 52 of SEQ ID NO: 1242020
ucuauaucaguacguaacu

SEQ ID NO: 1317571 - RNA, 19 nt, Artificial Sequence
  Description of Artificial Sequence: Synthetic oligonucleotide
  Antisense strand to SEQ ID NO: 1317570
aguuacguacugauauaga

SEQ ID NO: 1317572 - RNA, 19 nt, Artificial Sequence
  Description of Artificial Sequence: Synthetic oligonucleotide
  Sense strand starting at position 53 of SEQ ID NO: 1242020
cuauaucaguacguaacua

SEQ ID NO: 1317573 - RNA, 19 nt, Artificial Sequence
  Description of Artificial Sequence: Synthetic oligonucleotide
  Antisense strand to SEQ ID NO: 1317572
uaguuacguacugauauag

SEQ ID NO: 1317574 - RNA, 19 nt, Artificial Sequence
  Description of Artificial Sequence: Synthetic oligonucleotide
  Sense strand starting at position 123 of SEQ ID NO: 1242020
acugcuuaugacuguaaag

SEQ ID NO: 1317575 - RNA, 19 nt, Artificial Sequence
  Description of Artificial Sequence: Synthetic oligonucleotide
  Antisense strand to SEQ ID NO: 1317574
cuuuacagucauaagcagu

SEQ ID NO: 1317576 - RNA, 19 nt, Artificial Sequence
  Description of Artificial Sequence: Synthetic oligonucleotide
  Sense strand starting at position 125 of SEQ ID NO: 1242020
ugcuuaugacuguaaagca

SEQ ID NO: 1317577 - RNA, 19 nt, Artificial Sequence
  Description of Artificial Sequence: Synthetic oligonucleotide
  Antisense strand to SEQ ID NO: 1317576
ugcuuuacagucauaagca

SEQ ID NO: 1317578 - RNA, 19 nt, Artificial Sequence
  Description of Artificial Sequence: Synthetic oligonucleotide
  Sense strand starting at position 187 of SEQ ID NO: 1242020
uugcuuguuuauucugaga

SEQ ID NO: 1317579 - RNA, 19 nt, Artificial Sequence
  Description of Artificial Sequence: Synthetic oligonucleotide
  Antisense strand to SEQ ID NO: 1317578
ucucagaauaaacaagcaa

SEQ ID NO: 1317580 - RNA, 19 nt, Artificial Sequence
  Description of Artificial Sequence: Synthetic oligonucleotide
  Sense strand starting at position 231 of SEQ ID NO: 1242020
uuuccaaagugauugaugu

SEQ ID NO: 1317581 - RNA, 19 nt, Artificial Sequence
  Description of Artificial Sequence: Synthetic oligonucleotide
  Antisense strand to SEQ ID NO: 1317580
acaucaaucacuuuggaaa

SEQ ID NO: 1317582 - RNA, 19 nt, Artificial Sequence
  Description of Artificial Sequence: Synthetic oligonucleotide
  Sense strand starting at position 232 of SEQ ID NO: 1242020
uuccaaagugauugaugua

SEQ ID NO: 1317583 - RNA, 19 nt, Artificial Sequence
  Description of Artificial Sequence: Synthetic oligonucleotide
  Antisense strand to SEQ ID NO: 1317582
uacaucaaucacuuuggaa

SEQ ID NO: 1317584 - RNA, 19 nt, Artificial Sequence
  Description of Artificial Sequence: Synthetic oligonucleotide
  Sense strand starting at position 284 of SEQ ID NO: 1242020
gaaccugcucaggagcaau

SEQ ID NO: 1317585 - RNA, 19 nt, Artificial Sequence
  Description of Artificial Sequence: Synthetic oligonucleotide
  Antisense strand to SEQ ID NO: 1317584
auugcuccugagcagguuc

SEQ ID NO: 1317586 - RNA, 19 nt, Artificial Sequence
  Description of Artificial Sequence: Synthetic oligonucleotide
  Sense strand starting at position 337 of SEQ ID NO: 1242020
gccugauuguauguaauag

SEQ ID NO: 1317587 - RNA, 19 nt, Artificial Sequence
  Description of Artificial Sequence: Synthetic oligonucleotide
  Antisense strand to SEQ ID NO: 1317586
cuauuacauacaaucaggc

SEQ ID NO: 1317588 - RNA, 19 nt, Artificial Sequence
  Description of Artificial Sequence: Synthetic oligonucleotide
  Sense strand starting at position 516 of SEQ ID NO: 1242020
agcaucuaauucguaggau

SEQ ID NO: 1317589 - RNA, 19 nt, Artificial Sequence
  Description of Artificial Sequence: Synthetic oligonucleotide
  Antisense strand to SEQ ID NO: 1317588
auccuacgaauuagaugcu

SEQ ID NO: 1317590 - RNA, 19 nt, Artificial Sequence
  Description of Artificial Sequence: Synthetic oligonucleotide
  Sense strand starting at position 519 of SEQ ID NO: 1242020
aucuaauucguaggauaaa

SEQ ID NO: 1317591 - RNA, 19 nt, Artificial Sequence
  Description of Artificial Sequence: Synthetic oligonucleotide
  Antisense strand to SEQ ID NO: 1317590
uuuauccuacgaauuagau

SEQ ID NO: 1317592 - RNA, 19 nt, Artificial Sequence
  Description of Artificial Sequence: Synthetic oligonucleotide
  Sense strand starting at position 573 of SEQ ID NO: 1242020
ggaaaucugucaucuaguc

SEQ ID NO: 1317593 - RNA, 19 nt, Artificial Sequence
  Description of Artificial Sequence: Synthetic oligonucleotide
  Antisense strand to SEQ ID NO: 1317592
gacuagaugacagauuucc

SEQ ID NO: 1317594 - RNA, 19 nt, Artificial Sequence
  Description of Artificial Sequence: Synthetic oligonucleotide
  Sense strand starting at position 623 of SEQ ID NO: 1242020
ucacaauguuccuuggaau

SEQ ID NO: 1317595 - RNA, 19 nt, Artificial Sequence
  Description of Artificial Sequence: Synthetic oligonucleotide
  Antisense strand to SEQ ID NO: 1317594
auuccaaggaacauuguga

SEQ ID NO: 1317596 - RNA, 19 nt, Artificial Sequence
  Description of Artificial Sequence: Synthetic oligonucleotide
  Sense strand starting at position 707 of SEQ ID NO: 1242020
gguucuugccauuaaucag

SEQ ID NO: 1317597 - RNA, 19 nt, Artificial Sequence
  Description of Artificial Sequence: Synthetic oligonucleotide
  Antisense strand to SEQ ID NO: 1317596
cugauuaauggcaagaacc

SEQ ID NO: 1317598 - RNA, 19 nt, Artificial Sequence
  Description of Artificial Sequence: Synthetic oligonucleotide
  Sense strand starting at position 722 of SEQ ID NO: 1242020
ucagaagacugauaaagaa

SEQ ID NO: 1317599 - RNA, 19 nt, Artificial Sequence
  Description of Artificial Sequence: Synthetic oligonucleotide
  Antisense strand to SEQ ID NO: 1317598
uucuuuaucagucuucuga

SEQ ID NO: 1317600 - RNA, 19 nt, Artificial Sequence
  Description of Artificial Sequence: Synthetic oligonucleotide
  Sense strand starting at position 854 of SEQ ID NO: 1242020
uguccauaugcugguauau

SEQ ID NO: 1317601 - RNA, 19 nt, Artificial Sequence
  Description of Artificial Sequence: Synthetic oligonucleotide
  Antisense strand to SEQ ID NO: 1317600
auauaccagcauauggaca

SEQ ID NO: 1317602 - RNA, 19 nt, Artificial Sequence
  Description of Artificial Sequence: Synthetic oligonucleotide
  Sense strand starting at position 878 of SEQ ID NO: 1242020
acuggaguacucugcaaac

SEQ ID NO: 1317603 - RNA, 19 nt, Artificial Sequence
  Description of Artificial Sequence: Synthetic oligonucleotide
  Antisense strand to SEQ ID NO: 1317602
guuugcagaguacuccagu

SEQ ID NO: 1317604 - RNA, 19 nt, Artificial Sequence
  Description of Artificial Sequence: Synthetic oligonucleotide
  Sense strand starting at position 880 of SEQ ID NO: 1242020
uggaguacucugcaaacuu

SEQ ID NO: 1317605 - RNA, 19 nt, Artificial Sequence
  Description of Artificial Sequence: Synthetic oligonucleotide
  Antisense strand to SEQ ID NO: 1317604
aaguuugcagaguacucca

SEQ ID NO: 1317606 - RNA, 19 nt, Artificial Sequence
  Description of Artificial Sequence: Synthetic oligonucleotide
  Sense strand starting at position 1079 of SEQ ID NO: 1242020
aaaugauaccuguauugug

SEQ ID NO: 1317607 - RNA, 19 nt, Artificial Sequence
  Description of Artificial Sequence: Synthetic oligonucleotide
  Antisense strand to SEQ ID NO: 1317606
cacaauacagguaucauuu

SEQ ID NO: 1317608 - RNA, 19 nt, Artificial Sequence
  Description of Artificial Sequence: Synthetic oligonucleotide
  Sense strand starting at position 1144 of SEQ ID NO: 1242020
agaaucucucuugaagcua

SEQ ID NO: 1317609 - RNA, 19 nt, Artificial Sequence
  Description of Artificial Sequence: Synthetic oligonucleotide
  Antisense strand to SEQ ID NO: 1317608
uagcuucaagagagauucu

SEQ ID NO: 1317610 - RNA, 19 nt, Artificial Sequence
  Description of Artificial Sequence: Synthetic oligonucleotide
  Sense strand starting at position 1270 of SEQ ID NO: 1242020
agaaauaguugauccuacu

SEQ ID NO: 1317611 - RNA, 19 nt, Artificial Sequence
  Description of Artificial Sequence: Synthetic oligonucleotide
  Antisense strand to SEQ ID NO: 1317610
aguaggaucaacuauuucu

SEQ ID NO: 1317612 - RNA, 19 nt, Artificial Sequence
  Description of Artificial Sequence: Synthetic oligonucleotide
  Sense strand starting at position 1278 of SEQ ID NO: 1242020
uugauccuacugcagaauu

SEQ ID NO: 1317613 - RNA, 19 nt, Artificial Sequence
  Description of Artificial Sequence: Synthetic oligonucleotide
  Antisense strand to SEQ ID NO: 1317612
aauucugcaguaggaucaa

SEQ ID NO: 1317614 - RNA, 19 nt, Artificial Sequence
  Description of Artificial Sequence: Synthetic oligonucleotide
  Sense strand starting at position 1289 of SEQ ID NO: 1242020
gcagaauuagguuaacacu

SEQ ID NO: 1317615 - RNA, 19 nt, Artificial Sequence
  Description of Artificial Sequence: Synthetic oligonucleotide
  Antisense strand to SEQ ID NO: 1317614
aguguuaaccuaauucugc

SEQ ID NO: 1317616 - RNA, 19 nt, Artificial Sequence
  Description of Artificial Sequence: Synthetic oligonucleotide
  Sense strand starting at position 1406 of SEQ ID NO: 1242020
cccagagugcugugaaaug

SEQ ID NO: 1317617 - RNA, 19 nt, Artificial Sequence
  Description of Artificial Sequence: Synthetic oligonucleotide
  Antisense strand to SEQ ID NO: 1317616
cauuucacagcacucuggg

SEQ ID NO: 1317618 - RNA, 19 nt, Artificial Sequence
  Description of Artificial Sequence: Synthetic oligonucleotide
  Sense strand starting at position 1417 of SEQ ID NO: 1242020
gugaaaugcaccugugggu

SEQ ID NO: 1317619 - RNA, 19 nt, Artificial Sequence
  Description of Artificial Sequence: Synthetic oligonucleotide
  Antisense strand to SEQ ID NO: 1317618
acccacaggugcauuucac

SEQ ID NO: 1317620 - RNA, 19 nt, Artificial Sequence
  Description of Artificial Sequence: Synthetic oligonucleotide
  Sense strand starting at position 1930 of SEQ ID NO: 1242020
ggccucaccuguguaauua

SEQ ID NO: 1317621 - RNA, 19 nt, Artificial Sequence
  Description of Artificial Sequence: Synthetic oligonucleotide
  Antisense strand to SEQ ID NO: 1317620
uaauuacacaggugaggcc

SEQ ID NO: 1317622 - RNA, 19 nt, Artificial Sequence
  Description of Artificial Sequence: Synthetic oligonucleotide
  Sense strand starting at position 1931 of SEQ ID NO: 1242020
gccucaccuguguaauuac

SEQ ID NO: 1317623 - RNA, 19 nt, Artificial Sequence
  Description of Artificial Sequence: Synthetic oligonucleotide
  Antisense strand to SEQ ID NO: 1317622
guaauuacacaggugaggc

SEQ ID NO: 1317624 - RNA, 19 nt, Artificial Sequence
  Description of Artificial Sequence: Synthetic oligonucleotide
  Sense strand starting at position 3044 of SEQ ID NO: 1242020
gcuauuagagcgcagggua

SEQ ID NO: 1317625 - RNA, 19 nt, Artificial Sequence
  Description of Artificial Sequence: Synthetic oligonucleotide
  Antisense strand to SEQ ID NO: 1317624
uacccugcgcucuaauagc

SEQ ID NO: 1317626 - RNA, 19 nt, Artificial Sequence
  Description of Artificial Sequence: Synthetic oligonucleotide
  Sense strand starting at position 3091 of SEQ ID NO: 1242020
cccagacguggaggauaau

SEQ ID NO: 1317627 - RNA, 19 nt, Artificial Sequence
  Description of Artificial Sequence: Synthetic oligonucleotide
  Antisense strand to SEQ ID NO: 1317626
auuauccuccacgucuggg

SEQ ID NO: 1317628 - RNA, 19 nt, Artificial Sequence
  Description of Artificial Sequence: Synthetic oligonucleotide
  Sense strand starting at position 3097 of SEQ ID NO: 1242020
cguggaggauaauuauagu

SEQ ID NO: 1317629 - RNA, 19 nt, Artificial Sequence
  Description of Artificial Sequence: Synthetic oligonucleotide
  Antisense strand to SEQ ID NO: 1317628
acuauaauuauccuccacg

SEQ ID NO: 1317630 - RNA, 19 nt, Artificial Sequence
  Description of Artificial Sequence: Synthetic oligonucleotide
  Sense strand starting at position 3472 of SEQ ID NO: 1242020
acacuuugacagcauguua

SEQ ID NO: 1317631 - RNA, 19 nt, Artificial Sequence
  Description of Artificial Sequence: Synthetic oligonucleotide
  Antisense strand to SEQ ID NO: 1317630
uaacaugcugucaaagugu

SEQ ID NO: 1317632 - RNA, 19 nt, Artificial Sequence
  Description of Artificial Sequence: Synthetic oligonucleotide
  Sense strand starting at position 3518 of SEQ ID NO: 1242020
gugcuauagcaaugugaca

SEQ ID NO: 1317633 - RNA, 19 nt, Artificial Sequence
  Description of Artificial Sequence: Synthetic oligonucleotide
  Antisense strand to SEQ ID NO: 1317632
ugucacauugcuauagcac

SEQ ID NO: 1317634 - RNA, 19 nt, Artificial Sequence
  Description of Artificial Sequence: Synthetic oligonucleotide
  Sense strand starting at position 3520 of SEQ ID NO: 1242020
gcuauagcaaugugacaug

SEQ ID NO: 1317635 - RNA, 19 nt, Artificial Sequence
  Description of Artificial Sequence: Synthetic oligonucleotide
  Antisense strand to SEQ ID NO: 1317634
caugucacauugcuauagc

SEQ ID NO: 1317636 - RNA, 19 nt, Artificial Sequence
  Description of Artificial Sequence: Synthetic oligonucleotide
  Sense strand starting at position 3589 of SEQ ID NO: 1242020
aggaaucugcuguacuuaa

SEQ ID NO: 1317637 - RNA, 19 nt, Artificial Sequence
  Description of Artificial Sequence: Synthetic oligonucleotide
  Antisense strand to SEQ ID NO: 1317636
uuaaguacagcagauuccu

SEQ ID NO: 1317638 - RNA, 19 nt, Artificial Sequence
  Description of Artificial Sequence: Synthetic oligonucleotide
  Sense strand starting at position 3640 of SEQ ID NO: 1242020
auuagcuacucagucuaua

SEQ ID NO: 1317639 - RNA, 19 nt, Artificial Sequence
  Description of Artificial Sequence: Synthetic oligonucleotide
  Antisense strand to SEQ ID NO: 1317638
uauagacugaguagcuaau

SEQ ID NO: 1317640 - RNA, 19 nt, Artificial Sequence
  Description of Artificial Sequence: Synthetic oligonucleotide
  Sense strand starting at position 3772 of SEQ ID NO: 1242020
acaggaaaguauuaggaca

SEQ ID NO: 1317641 - RNA, 19 nt, Artificial Sequence
  Description of Artificial Sequence: Synthetic oligonucleotide
  Antisense strand to SEQ ID NO: 1317640
uguccuaauacuuuccugu

SEQ ID NO: 1317642 - RNA, 19 nt, Artificial Sequence
  Description of Artificial Sequence: Synthetic oligonucleotide
  Sense strand starting at position 3907 of SEQ ID NO: 1242020
uuuggccucagguaaaguu

SEQ ID NO: 1317643 - RNA, 19 nt, Artificial Sequence
  Description of Artificial Sequence: Synthetic oligonucleotide
  Antisense strand to SEQ ID NO: 1317642
aacuuuaccugaggccaaa

SEQ ID NO: 1317644 - RNA, 19 nt, Artificial Sequence
  Description of Artificial Sequence: Synthetic oligonucleotide
  Sense strand starting at position 3915 of SEQ ID NO: 1242020
cagguaaaguucuuaugaa

SEQ ID NO: 1317645 - RNA, 19 nt, Artificial Sequence
  Description of Artificial Sequence: Synthetic oligonucleotide
  Antisense strand to SEQ ID NO: 1317644
uucauaagaacuuuaccug

SEQ ID NO: 1317646 - RNA, 19 nt, Artificial Sequence
  Description of Artificial Sequence: Synthetic oligonucleotide
  Sense strand starting at position 3968 of SEQ ID NO: 1242020
agugcuuagauauguacag

SEQ ID NO: 1317647 - RNA, 19 nt, Artificial Sequence
  Description of Artificial Sequence: Synthetic oligonucleotide
  Antisense strand to SEQ ID NO: 1317646
cuguacauaucuaagcacu

SEQ ID NO: 1317648 - RNA, 19 nt, Artificial Sequence
  Description of Artificial Sequence: Synthetic oligonucleotide
  Sense strand starting at position 3969 of SEQ ID NO: 1242020
gugcuuagauauguacagu

SEQ ID NO: 1317649 - RNA, 19 nt, Artificial Sequence
  Description of Artificial Sequence: Synthetic oligonucleotide
  Antisense strand to SEQ ID NO: 1317648
acuguacauaucuaagcac

SEQ ID NO: 1317650 - RNA, 19 nt, Artificial Sequence
  Description of Artificial Sequence: Synthetic oligonucleotide
  Sense strand starting at position 22 of SEQ ID NO: 1242021
ggagcacucaccugucaga

SEQ ID NO: 1317651 - RNA, 19 nt, Artificial Sequence
  Description of Artificial Sequence: Synthetic oligonucleotide
  Antisense strand to SEQ ID NO: 1317650
ucugacaggugagugcucc

SEQ ID NO: 1317652 - RNA, 19 nt, Artificial Sequence
  Description of Artificial Sequence: Synthetic oligonucleotide
  Sense strand starting at position 178 of SEQ ID NO: 1242021
gaguccucgcccugaagga

SEQ ID NO: 1317653 - RNA, 19 nt, Artificial Sequence
  Description of Artificial Sequence: Synthetic oligonucleotide
  Antisense strand to SEQ ID NO: 1317652
uccuucagggcgaggacuc

SEQ ID NO: 1317654 - RNA, 19 nt, Artificial Sequence
  Description of Artificial Sequence: Synthetic oligonucleotide
  Sense strand starting at position 271 of SEQ ID NO: 1242021
gcuacagugccucagaaug

SEQ ID NO: 1317655 - RNA, 19 nt, Artificial Sequence
  Description of Artificial Sequence: Synthetic oligonucleotide
  Antisense strand to SEQ ID NO: 1317654
cauucugaggcacuguagc

SEQ ID NO: 1317656 - RNA, 19 nt, Artificial Sequence
  Description of Artificial Sequence: Synthetic oligonucleotide
  Sense strand starting at position 283 of SEQ ID NO: 1242021
cagaauguguauguucuca

SEQ ID NO: 1317657 - RNA, 19 nt, Artificial Sequence
  Description of Artificial Sequence: Synthetic oligonucleotide
  Antisense strand to SEQ ID NO: 1317656
ugagaacauacacauucug

SEQ ID NO: 1317658 - RNA, 19 nt, Artificial Sequence
  Description of Artificial Sequence: Synthetic oligonucleotide
  Sense strand starting at position 285 of SEQ ID NO: 1242021
gaauguguauguucucauu

SEQ ID NO: 1317659 - RNA, 19 nt, Artificial Sequence
  Description of Artificial Sequence: Synthetic oligonucleotide
  Antisense strand to SEQ ID NO: 1317658
aaugagaacauacacauuc

SEQ ID NO: 1317660 - RNA, 19 nt, Artificial Sequence
  Description of Artificial Sequence: Synthetic oligonucleotide
  Sense strand starting at position 670 of SEQ ID NO: 1242021
cuuauuuaaucagaggaca

SEQ ID NO: 1317661 - RNA, 19 nt, Artificial Sequence
  Description of Artificial Sequence: Synthetic oligonucleotide
  Antisense strand to SEQ ID NO: 1317660
uguccucugauuaaauaag

SEQ ID NO: 1317662 - RNA, 19 nt, Artificial Sequence
  Description of Artificial Sequence: Synthetic oligonucleotide
  Sense strand starting at position 693 of SEQ ID NO: 1242021
aacugcaagucuuugggua

SEQ ID NO: 1317663 - RNA, 19 nt, Artificial Sequence
  Description of Artificial Sequence: Synthetic oligonucleotide
  Antisense strand to SEQ ID NO: 1317662
uacccaaagacuugcaguu

SEQ ID NO: 1317664 - RNA, 19 nt, Artificial Sequence
  Description of Artificial Sequence: Synthetic oligonucleotide
  Sense strand starting at position 694 of SEQ ID NO: 1242021
acugcaagucuuuggguaa

SEQ ID NO: 1317665 - RNA, 19 nt, Artificial Sequence
  Description of Artificial Sequence: Synthetic oligonucleotide
  Antisense strand to SEQ ID NO: 1317664
uuacccaaagacuugcagu

SEQ ID NO: 1317666 - RNA, 19 nt, Artificial Sequence
  Description of Artificial Sequence: Synthetic oligonucleotide
  Sense strand starting at position 780 of SEQ ID NO: 1242021
guucuaugcagcuccgagu

SEQ ID NO: 1317667 - RNA, 19 nt, Artificial Sequence
  Description of Artificial Sequence: Synthetic oligonucleotide
  Antisense strand to SEQ ID NO: 1317666
acucggagcugcauagaac

SEQ ID NO: 1317668 - RNA, 19 nt, Artificial Sequence
  Description of Artificial Sequence: Synthetic oligonucleotide
  Sense strand starting at position 794 of SEQ ID NO: 1242021
cgaguuuacuauucuguua

SEQ ID NO: 1317669 - RNA, 19 nt, Artificial Sequence
  Description of Artificial Sequence: Synthetic oligonucleotide
  Antisense strand to SEQ ID NO: 1317668
uaacagaauaguaaacucg

SEQ ID NO: 1317670 - RNA, 19 nt, Artificial Sequence
  Description of Artificial Sequence: Synthetic oligonucleotide
  Sense strand starting at position 906 of SEQ ID NO: 1242021
ggaggagaaugauagugaa

SEQ ID NO: 1317671 - RNA, 19 nt, Artificial Sequence
  Description of Artificial Sequence: Synthetic oligonucleotide
  Antisense strand to SEQ ID NO: 1317670
uucacuaucauucuccucc

SEQ ID NO: 1317672 - RNA, 19 nt, Artificial Sequence
  Description of Artificial Sequence: Synthetic oligonucleotide
  Sense strand starting at position 996 of SEQ ID NO: 1242021
aagagagauuguuccucuu

SEQ ID NO: 1317673 - RNA, 19 nt, Artificial Sequence
  Description of Artificial Sequence: Synthetic oligonucleotide
  Antisense strand to SEQ ID NO: 1317672
aagaggaacaaucucucuu

SEQ ID NO: 1317674 - RNA, 19 nt, Artificial Sequence
  Description of Artificial Sequence: Synthetic oligonucleotide
  Sense strand starting at position 1058 of SEQ ID NO: 1242021
ucgcuagcucggccuuaaa

SEQ ID NO: 1317675 - RNA, 19 nt, Artificial Sequence
  Description of Artificial Sequence: Synthetic oligonucleotide
  Antisense strand to SEQ ID NO: 1317674
uuuaaggccgagcuagcga

SEQ ID NO: 1317676 - RNA, 19 nt, Artificial Sequence
  Description of Artificial Sequence: Synthetic oligonucleotide
  Sense strand starting at position 1236 of SEQ ID NO: 1242021
ggugcuucucuggaaguua

SEQ ID NO: 1317677 - RNA, 19 nt, Artificial Sequence
  Description of Artificial Sequence: Synthetic oligonucleotide
  Antisense strand to SEQ ID NO: 1317676
uaacuuccagagaagcacc

SEQ ID NO: 1317678 - RNA, 19 nt, Artificial Sequence
  Description of Artificial Sequence: Synthetic oligonucleotide
  Sense strand starting at position 1315 of SEQ ID NO: 1242021
gcucuuuccgaacggauuu

SEQ ID NO: 1317679 - RNA, 19 nt, Artificial Sequence
  Description of Artificial Sequence: Synthetic oligonucleotide
  Antisense strand to SEQ ID NO: 1317678
aaauccguucggaaagagc

SEQ ID NO: 1317680 - RNA, 19 nt, Artificial Sequence
  Description of Artificial Sequence: Synthetic oligonucleotide
  Sense strand starting at position 1799 of SEQ ID NO: 1242021
ggagcucuccgguucggua

SEQ ID NO: 1317681 - RNA, 19 nt, Artificial Sequence
  Description of Artificial Sequence: Synthetic oligonucleotide
  Antisense strand to SEQ ID NO: 1317680
uaccgaaccggagagcucc

SEQ ID NO: 1317682 - RNA, 19 nt, Artificial Sequence
  Description of Artificial Sequence: Synthetic oligonucleotide
  Sense strand starting at position 1821 of SEQ ID NO: 1242021
ugaggacuuggccgaaaug

SEQ ID NO: 1317683 - RNA, 19 nt, Artificial Sequence
  Description of Artificial Sequence: Synthetic oligonucleotide
  Antisense strand to SEQ ID NO: 1317682
cauuucggccaaguccuca

SEQ ID NO: 1317684 - RNA, 19 nt, Artificial Sequence
  Description of Artificial Sequence: Synthetic oligonucleotide
  Sense strand starting at position 1822 of SEQ ID NO: 1242021
gaggacuuggccgaaaugu

SEQ ID NO: 1317685 - RNA, 19 nt, Artificial Sequence
  Description of Artificial Sequence: Synthetic oligonucleotide
  Antisense strand to SEQ ID NO: 1317684
acauuucggccaaguccuc

SEQ ID NO: 1317686 - RNA, 19 nt, Artificial Sequence
  Description of Artificial Sequence: Synthetic oligonucleotide
  Sense strand starting at position 1910 of SEQ ID NO: 1242021
gaugguuaggcuuaguucu

SEQ ID NO: 1317687 - RNA, 19 nt, Artificial Sequence
  Description of Artificial Sequence: Synthetic oligonucleotide
  Antisense strand to SEQ ID NO: 1317686
agaacuaagccuaaccauc

SEQ ID NO: 1317688 - RNA, 19 nt, Artificial Sequence
  Description of Artificial Sequence: Synthetic oligonucleotide
  Sense strand starting at position 1922 of SEQ ID NO: 1242021
uaguucugucucuagugga

SEQ ID NO: 1317689 - RNA, 19 nt, Artificial Sequence
  Description of Artificial Sequence: Synthetic oligonucleotide
  Antisense strand to SEQ ID NO: 1317688
uccacuagagacagaacua

SEQ ID NO: 1317690 - RNA, 19 nt, Artificial Sequence
  Description of Artificial Sequence: Synthetic oligonucleotide
  Sense strand starting at position 1927 of SEQ ID NO: 1242021
cugucucuaguggaaauua

SEQ ID NO: 1317691 - RNA, 19 nt, Artificial Sequence
  Description of Artificial Sequence: Synthetic oligonucleotide
  Antisense strand to SEQ ID NO: 1317690
uaauuuccacuagagacag

SEQ ID NO: 1317692 - RNA, 19 nt, Artificial Sequence
  Description of Artificial Sequence: Synthetic oligonucleotide
  Sense strand starting at position 2154 of SEQ ID NO: 1242021
guuaaagaaccuugugaag

SEQ ID NO: 1317693 - RNA, 19 nt, Artificial Sequence
  Description of Artificial Sequence: Synthetic oligonucleotide
  Antisense strand to SEQ ID NO: 1317692
cuucacaagguucuuuaac

SEQ ID NO: 1317694 - RNA, 19 nt, Artificial Sequence
  Description of Artificial Sequence: Synthetic oligonucleotide
  Sense strand starting at position 2160 of SEQ ID NO: 1242021
gaaccuugugaaggugaca

SEQ ID NO: 1317695 - RNA, 19 nt, Artificial Sequence
  Description of Artificial Sequence: Synthetic oligonucleotide
  Antisense strand to SEQ ID NO: 1317694
ugucaccuucacaagguuc

SEQ ID NO: 1317696 - RNA, 19 nt, Artificial Sequence
  Description of Artificial Sequence: Synthetic oligonucleotide
  Sense strand starting at position 2239 of SEQ ID NO: 1242021
ccaauuggugccugugaca

SEQ ID NO: 1317697 - RNA, 19 nt, Artificial Sequence
  Description of Artificial Sequence: Synthetic oligonucleotide
  Antisense strand to SEQ ID NO: 1317696
ugucacaggcaccaauugg

SEQ ID NO: 1317698 - RNA, 19 nt, Artificial Sequence
  Description of Artificial Sequence: Synthetic oligonucleotide
  Sense strand starting at position 2315 of SEQ ID NO: 1242021
ugucacuacucauuguaca

SEQ ID NO: 1317699 - RNA, 19 nt, Artificial Sequence
  Description of Artificial Sequence: Synthetic oligonucleotide
  Antisense strand to SEQ ID NO: 1317698
uguacaaugaguagugaca

SEQ ID NO: 1317700 - RNA, 19 nt, Artificial Sequence
  Description of Artificial Sequence: Synthetic oligonucleotide
  Sense strand starting at position 2429 of SEQ ID NO: 1242021
aagggaugugcuugugacu

SEQ ID NO: 1317701 - RNA, 19 nt, Artificial Sequence
  Description of Artificial Sequence: Synthetic oligonucleotide
  Antisense strand to SEQ ID NO: 1317700
agucacaagcacaucccuu

SEQ ID NO: 1317702 - RNA, 19 nt, Artificial Sequence
  Description of Artificial Sequence: Synthetic oligonucleotide
  Sense strand starting at position 2438 of SEQ ID NO: 1242021
gcuugugacuggcuggaaa

SEQ ID NO: 1317703 - RNA, 19 nt, Artificial Sequence
  Description of Artificial Sequence: Synthetic oligonucleotide
  Antisense strand to SEQ ID NO: 1317702
uuuccagccagucacaagc

SEQ ID NO: 1317704 - RNA, 19 nt, Artificial Sequence
  Description of Artificial Sequence: Synthetic oligonucleotide
  Sense strand starting at position 2493 of SEQ ID NO: 1242021
gaggcugucccuugacuaa

SEQ ID NO: 1317705 - RNA, 19 nt, Artificial Sequence
  Description of Artificial Sequence: Synthetic oligonucleotide
  Antisense strand to SEQ ID NO: 1317704
uuagucaagggacagccuc

SEQ ID NO: 1317706 - RNA, 19 nt, Artificial Sequence
  Description of Artificial Sequence: Synthetic oligonucleotide
  Sense strand starting at position 2615 of SEQ ID NO: 1242021
ggaagaauuuagggcugaa

SEQ ID NO: 1317707 - RNA, 19 nt, Artificial Sequence
  Description of Artificial Sequence: Synthetic oligonucleotide
  Antisense strand to SEQ ID NO: 1317706
uucagcccuaaauucuucc

SEQ ID NO: 1317708 - RNA, 19 nt, Artificial Sequence
  Description of Artificial Sequence: Synthetic oligonucleotide
  Sense strand starting at position 2809 of SEQ ID NO: 1242021
agcuuagacuuggucaagu

SEQ ID NO: 1317709 - RNA, 19 nt, Artificial Sequence
  Description of Artificial Sequence: Synthetic oligonucleotide
  Antisense strand to SEQ ID NO: 1317708
acuugaccaagucuaagcu

SEQ ID NO: 1317710 - RNA, 19 nt, Artificial Sequence
  Description of Artificial Sequence: Synthetic oligonucleotide
  Sense strand starting at position 2811 of SEQ ID NO: 1242021
cuuagacuuggucaaguuu

SEQ ID NO: 1317711 - RNA, 19 nt, Artificial Sequence
  Description of Artificial Sequence: Synthetic oligonucleotide
  Antisense strand to SEQ ID NO: 1317710
aaacuugaccaagucuaag

SEQ ID NO: 1317712 - RNA, 19 nt, Artificial Sequence
  Description of Artificial Sequence: Synthetic oligonucleotide
  Sense strand starting at position 2819 of SEQ ID NO: 1242021
uggucaaguuuaccaguua

SEQ ID NO: 1317713 - RNA, 19 nt, Artificial Sequence
  Description of Artificial Sequence: Synthetic oligonucleotide
  Antisense strand to SEQ ID NO: 1317712
uaacugguaaacuugacca

SEQ ID NO: 1317714 - RNA, 19 nt, Artificial Sequence
  Description of Artificial Sequence: Synthetic oligonucleotide
  Sense strand starting at position 2827 of SEQ ID NO: 1242021
uuuaccaguuaagugauaa

SEQ ID NO: 1317715 - RNA, 19 nt, Artificial Sequence
  Description of Artificial Sequence: Synthetic oligonucleotide
  Antisense strand to SEQ ID NO: 1317714
uuaucacuuaacugguaaa

SEQ ID NO: 1317716 - RNA, 19 nt, Artificial Sequence
  Description of Artificial Sequence: Synthetic oligonucleotide
  Sense strand starting at position 2867 of SEQ ID NO: 1242021
gccuguggacuccaaagaa

SEQ ID NO: 1317717 - RNA, 19 nt, Artificial Sequence
  Description of Artificial Sequence: Synthetic oligonucleotide
  Antisense strand to SEQ ID NO: 1317716
uucuuuggaguccacaggc

SEQ ID NO: 1317718 - RNA, 19 nt, Artificial Sequence
  Description of Artificial Sequence: Synthetic oligonucleotide
  Sense strand starting at position 3622 of SEQ ID NO: 1242021
gcugcuauaugacucuaau

SEQ ID NO: 1317719 - RNA, 19 nt, Artificial Sequence
  Description of Artificial Sequence: Synthetic oligonucleotide
  Antisense strand to SEQ ID NO: 1317718
auuagagucauauagcagc

SEQ ID NO: 1317720 - RNA, 19 nt, Artificial Sequence
  Description of Artificial Sequence: Synthetic oligonucleotide
  Sense strand starting at position 3871 of SEQ ID NO: 1242021
cuguuaacugcugacugau

SEQ ID NO: 1317721 - RNA, 19 nt, Artificial Sequence
  Description of Artificial Sequence: Synthetic oligonucleotide
  Antisense strand to SEQ ID NO: 1317720
aucagucagcaguuaacag

SEQ ID NO: 1317722 - RNA, 19 nt, Artificial Sequence
  Description of Artificial Sequence: Synthetic oligonucleotide
  Sense strand starting at position 3874 of SEQ ID NO: 1242021
uuaacugcugacugauuga

SEQ ID NO: 1317723 - RNA, 19 nt, Artificial Sequence
  Description of Artificial Sequence: Synthetic oligonucleotide
  Antisense strand to SEQ ID NO: 1317722
ucaaucagucagcaguuaa

SEQ ID NO: 1317724 - RNA, 19 nt, Artificial Sequence
  Description of Artificial Sequence: Synthetic oligonucleotide
  Sense strand starting at position 3877 of SEQ ID NO: 1242021
acugcugacugauugaaca

SEQ ID NO: 1317725 - RNA, 19 nt, Artificial Sequence
  Description of Artificial Sequence: Synthetic oligonucleotide
  Antisense strand to SEQ ID NO: 1317724
uguucaaucagucagcagu

SEQ ID NO: 1317726 - RNA, 19 nt, Artificial Sequence
  Description of Artificial Sequence: Synthetic oligonucleotide
  Sense strand starting at position 3907 of SEQ ID NO: 1242021
gccaaauuauuugcucugu

SEQ ID NO: 1317727 - RNA, 19 nt, Artificial Sequence
  Description of Artificial Sequence: Synthetic oligonucleotide
  Antisense strand to SEQ ID NO: 1317726
acagagcaaauaauuuggc

SEQ ID NO: 1317728 - RNA, 19 nt, Artificial Sequence
  Description of Artificial Sequence: Synthetic oligonucleotide
  Sense strand starting at position 3966 of SEQ ID NO: 1242021
ucuuuagcuaaguggagau

SEQ ID NO: 1317729 - RNA, 19 nt, Artificial Sequence
  Description of Artificial Sequence: Synthetic oligonucleotide
  Antisense strand to SEQ ID NO: 1317728
aucuccacuuagcuaaaga

SEQ ID NO: 1317730 - RNA, 19 nt, Artificial Sequence
  Description of Artificial Sequence: Synthetic oligonucleotide
  Sense strand starting at position 97 of SEQ ID NO: 1242022
uagaguuaaccuuggguaa

SEQ ID NO: 1317731 - RNA, 19 nt, Artificial Sequence
  Description of Artificial Sequence: Synthetic oligonucleotide
  Antisense strand to SEQ ID NO: 1317730
uuacccaagguuaacucua

SEQ ID NO: 1317732 - RNA, 19 nt, Artificial Sequence
  Description of Artificial Sequence: Synthetic oligonucleotide
  Sense strand starting at position 98 of SEQ ID NO: 1242022
agaguuaaccuuggguaau

SEQ ID NO: 1317733 - RNA, 19 nt, Artificial Sequence
  Description of Artificial Sequence: Synthetic oligonucleotide
  Antisense strand to SEQ ID NO: 1317732
auuacccaagguuaacucu

SEQ ID NO: 1317734 - RNA, 19 nt, Artificial Sequence
  Description of Artificial Sequence: Synthetic oligonucleotide
  Sense strand starting at position 201 of SEQ ID NO: 1242022
aacauuucgucugccuaga

SEQ ID NO: 1317735 - RNA, 19 nt, Artificial Sequence
  Description of Artificial Sequence: Synthetic oligonucleotide
  Antisense strand to SEQ ID NO: 1317734
ucuaggcagacgaaauguu

SEQ ID NO: 1317736 - RNA, 19 nt, Artificial Sequence
  Description of Artificial Sequence: Synthetic oligonucleotide
  Sense strand starting at position 203 of SEQ ID NO: 1242022
cauuucgucugccuagaaa

SEQ ID NO: 1317737 - RNA, 19 nt, Artificial Sequence
  Description of Artificial Sequence: Synthetic oligonucleotide
  Antisense strand to SEQ ID NO: 1317736
uuucuaggcagacgaaaug

SEQ ID NO: 1317738 - RNA, 19 nt, Artificial Sequence
  Description of Artificial Sequence: Synthetic oligonucleotide
  Sense strand starting at position 341 of SEQ ID NO: 1242022
uugccaauccuuugagaag

SEQ ID NO: 1317739 - RNA, 19 nt, Artificial Sequence
  Description of Artificial Sequence: Synthetic oligonucleotide
  Antisense strand to SEQ ID NO: 1317738
cuucucaaaggauuggcaa

SEQ ID NO: 1317740 - RNA, 19 nt, Artificial Sequence
  Description of Artificial Sequence: Synthetic oligonucleotide
  Sense strand starting at position 390 of SEQ ID NO: 1242022
acaggacuuugacacauuu

SEQ ID NO: 1317741 - RNA, 19 nt, Artificial Sequence
  Description of Artificial Sequence: Synthetic oligonucleotide
  Antisense strand to SEQ ID NO: 1317740
aaaugugucaaaguccugu

SEQ ID NO: 1317742 - RNA, 19 nt, Artificial Sequence
  Description of Artificial Sequence: Synthetic oligonucleotide
  Sense strand starting at position 570 of SEQ ID NO: 1242022
cggccauauaguuacagaa

SEQ ID NO: 1317743 - RNA, 19 nt, Artificial Sequence
  Description of Artificial Sequence: Synthetic oligonucleotide
  Antisense strand to SEQ ID NO: 1317742
uucuguaacuauauggccg

SEQ ID NO: 1317744 - RNA, 19 nt, Artificial Sequence
  Description of Artificial Sequence: Synthetic oligonucleotide
  Sense strand starting at position 713 of SEQ ID NO: 1242022
ggaguaauuuauuacauac

SEQ ID NO: 1317745 - RNA, 19 nt, Artificial Sequence
  Description of Artificial Sequence: Synthetic oligonucleotide
  Antisense strand to SEQ ID NO: 1317744
guauguaauaaauuacucc

SEQ ID NO: 1317746 - RNA, 19 nt, Artificial Sequence
  Description of Artificial Sequence: Synthetic oligonucleotide
  Sense strand starting at position 1049 of SEQ ID NO: 1242022
cuuacaugcgcugauauuu

SEQ ID NO: 1317747 - RNA, 19 nt, Artificial Sequence
  Description of Artificial Sequence: Synthetic oligonucleotide
  Antisense strand to SEQ ID NO: 1317746
aaauaucagcgcauguaag

SEQ ID NO: 1317748 - RNA, 19 nt, Artificial Sequence
  Description of Artificial Sequence: Synthetic oligonucleotide
  Sense strand starting at position 1054 of SEQ ID NO: 1242022
augcgcugauauuuccaau

SEQ ID NO: 1317749 - RNA, 19 nt, Artificial Sequence
  Description of Artificial Sequence: Synthetic oligonucleotide
  Antisense strand to SEQ ID NO: 1317748
auuggaaauaucagcgcau

SEQ ID NO: 1317750 - RNA, 19 nt, Artificial Sequence
  Description of Artificial Sequence: Synthetic oligonucleotide
  Sense strand starting at position 1507 of SEQ ID NO: 1242022
acggacaaauguucuaaua

SEQ ID NO: 1317751 - RNA, 19 nt, Artificial Sequence
  Description of Artificial Sequence: Synthetic oligonucleotide
  Antisense strand to SEQ ID NO: 1317750
uauuagaacauuuguccgu

SEQ ID NO: 1317752 - RNA, 19 nt, Artificial Sequence
  Description of Artificial Sequence: Synthetic oligonucleotide
  Sense strand starting at position 1670 of SEQ ID NO: 1242022
uugauauagccacgaaaga

SEQ ID NO: 1317753 - RNA, 19 nt, Artificial Sequence
  Description of Artificial Sequence: Synthetic oligonucleotide
  Antisense strand to SEQ ID NO: 1317752
ucuuucguggcuauaucaa

SEQ ID NO: 1317754 - RNA, 19 nt, Artificial Sequence
  Description of Artificial Sequence: Synthetic oligonucleotide
  Sense strand starting at position 1686 of SEQ ID NO: 1242022
agacuaauguaaccaaguu

SEQ ID NO: 1317755 - RNA, 19 nt, Artificial Sequence
  Description of Artificial Sequence: Synthetic oligonucleotide
  Antisense strand to SEQ ID NO: 1317754
aacuugguuacauuagucu

SEQ ID NO: 1317756 - RNA, 19 nt, Artificial Sequence
  Description of Artificial Sequence: Synthetic oligonucleotide
  Sense strand starting at position 1914 of SEQ ID NO: 1242022
ggagccucucgggagaagu

SEQ ID NO: 1317757 - RNA, 19 nt, Artificial Sequence
  Description of Artificial Sequence: Synthetic oligonucleotide
  Antisense strand to SEQ ID NO: 1317756
acuucucccgagaggcucc

SEQ ID NO: 1317758 - RNA, 19 nt, Artificial Sequence
  Description of Artificial Sequence: Synthetic oligonucleotide
  Sense strand starting at position 2289 of SEQ ID NO: 1242022
uggacauucuuugucagga

SEQ ID NO: 1317759 - RNA, 19 nt, Artificial Sequence
  Description of Artificial Sequence: Synthetic oligonucleotide
  Antisense strand to SEQ ID NO: 1317758
uccugacaaagaaugucca

SEQ ID NO: 1317760 - RNA, 19 nt, Artificial Sequence
  Description of Artificial Sequence: Synthetic oligonucleotide
  Sense strand starting at position 2290 of SEQ ID NO: 1242022
ggacauucuuugucaggac

SEQ ID NO: 1317761 - RNA, 19 nt, Artificial Sequence
  Description of Artificial Sequence: Synthetic oligonucleotide
  Antisense strand to SEQ ID NO: 1317760
guccugacaaagaaugucc

SEQ ID NO: 1317762 - RNA, 19 nt, Artificial Sequence
  Description of Artificial Sequence: Synthetic oligonucleotide
  Sense strand starting at position 2294 of SEQ ID NO: 1242022
auucuuugucaggacccua

SEQ ID NO: 1317763 - RNA, 19 nt, Artificial Sequence
  Description of Artificial Sequence: Synthetic oligonucleotide
  Antisense strand to SEQ ID NO: 1317762
uaggguccugacaaagaau

SEQ ID NO: 1317764 - RNA, 19 nt, Artificial Sequence
  Description of Artificial Sequence: Synthetic oligonucleotide
  Sense strand starting at position 2496 of SEQ ID NO: 1242022
aaagucaguucccuaggaa

SEQ ID NO: 1317765 - RNA, 19 nt, Artificial Sequence
  Description of Artificial Sequence: Synthetic oligonucleotide
  Antisense strand to SEQ ID NO: 1317764
uuccuagggaacugacuuu

SEQ ID NO: 1317766 - RNA, 19 nt, Artificial Sequence
  Description of Artificial Sequence: Synthetic oligonucleotide
  Sense strand starting at position 2497 of SEQ ID NO: 1242022
aagucaguucccuaggaac

SEQ ID NO: 1317767 - RNA, 19 nt, Artificial Sequence
  Description of Artificial Sequence: Synthetic oligonucleotide
  Antisense strand to SEQ ID NO: 1317766
guuccuagggaacugacuu

SEQ ID NO: 1317768 - RNA, 19 nt, Artificial Sequence
  Description of Artificial Sequence: Synthetic oligonucleotide
  Sense strand starting at position 2590 of SEQ ID NO: 1242022
guaguacagacguagaauu

SEQ ID NO: 1317769 - RNA, 19 nt, Artificial Sequence
  Description of Artificial Sequence: Synthetic oligonucleotide
  Antisense strand to SEQ ID NO: 1317768
aauucuacgucuguacuac

SEQ ID NO: 1317770 - RNA, 19 nt, Artificial Sequence
  Description of Artificial Sequence: Synthetic oligonucleotide
  Sense strand starting at position 2614 of SEQ ID NO: 1242022
ugccaugcaguguauuuaa

SEQ ID NO: 1317771 - RNA, 19 nt, Artificial Sequence
  Description of Artificial Sequence: Synthetic oligonucleotide
  Antisense strand to SEQ ID NO: 1317770
uuaaauacacugcauggca

SEQ ID NO: 1317772 - RNA, 19 nt, Artificial Sequence
  Description of Artificial Sequence: Synthetic oligonucleotide
  Sense strand starting at position 2638 of SEQ ID NO: 1242022
ugagguugugguuacauaa

SEQ ID NO: 1317773 - RNA, 19 nt, Artificial Sequence
  Description of Artificial Sequence: Synthetic oligonucleotide
  Antisense strand to SEQ ID NO: 1317772
uuauguaaccacaaccuca

SEQ ID NO: 1317774 - RNA, 19 nt, Artificial Sequence
  Description of Artificial Sequence: Synthetic oligonucleotide
  Sense strand starting at position 2748 of SEQ ID NO: 1242022
cacaaaguuggaugguaaa

SEQ ID NO: 1317775 - RNA, 19 nt, Artificial Sequence
  Description of Artificial Sequence: Synthetic oligonucleotide
  Antisense strand to SEQ ID NO: 1317774
uuuaccauccaacuuugug

SEQ ID NO: 1317776 - RNA, 19 nt, Artificial Sequence
  Description of Artificial Sequence: Synthetic oligonucleotide
  Sense strand starting at position 2858 of SEQ ID NO: 1242022
gggagaggccauugauccu

SEQ ID NO: 1317777 - RNA, 19 nt, Artificial Sequence
  Description of Artificial Sequence: Synthetic oligonucleotide
  Antisense strand to SEQ ID NO: 1317776
aggaucaauggccucuccc

SEQ ID NO: 1317778 - RNA, 19 nt, Artificial Sequence
  Description of Artificial Sequence: Synthetic oligonucleotide
  Sense strand starting at position 2861 of SEQ ID NO: 1242022
agaggccauugauccuaua

SEQ ID NO: 1317779 - RNA, 19 nt, Artificial Sequence
  Description of Artificial Sequence: Synthetic oligonucleotide
  Antisense strand to SEQ ID NO: 1317778
uauaggaucaauggccucu

SEQ ID NO: 1317780 - RNA, 19 nt, Artificial Sequence
  Description of Artificial Sequence: Synthetic oligonucleotide
  Sense strand starting at position 2889 of SEQ ID NO: 1242022
guacuacuaccuuggauua

SEQ ID NO: 1317781 - RNA, 19 nt, Artificial Sequence
  Description of Artificial Sequence: Synthetic oligonucleotide
  Antisense strand to SEQ ID NO: 1317780
uaauccaagguaguaguac

SEQ ID NO: 1317782 - RNA, 19 nt, Artificial Sequence
  Description of Artificial Sequence: Synthetic oligonucleotide
  Sense strand starting at position 3054 of SEQ ID NO: 1242022
gucagcuuacaauaaugga

SEQ ID NO: 1317783 - RNA, 19 nt, Artificial Sequence
  Description of Artificial Sequence: Synthetic oligonucleotide
  Antisense strand to SEQ ID NO: 1317782
uccauuauuguaagcugac

SEQ ID NO: 1317784 - RNA, 19 nt, Artificial Sequence
  Description of Artificial Sequence: Synthetic oligonucleotide
  Sense strand starting at position 3154 of SEQ ID NO: 1242022
aaagguaguuugucagaua

SEQ ID NO: 1317785 - RNA, 19 nt, Artificial Sequence
  Description of Artificial Sequence: Synthetic oligonucleotide
  Antisense strand to SEQ ID NO: 1317784
uaucugacaaacuaccuuu

SEQ ID NO: 1317786 - RNA, 19 nt, Artificial Sequence
  Description of Artificial Sequence: Synthetic oligonucleotide
  Sense strand starting at position 3179 of SEQ ID NO: 1242022
uagugagaugcuuacugga

SEQ ID NO: 1317787 - RNA, 19 nt, Artificial Sequence
  Description of Artificial Sequence: Synthetic oligonucleotide
  Antisense strand to SEQ ID NO: 1317786
uccaguaagcaucucacua

SEQ ID NO: 1317788 - RNA, 19 nt, Artificial Sequence
  Description of Artificial Sequence: Synthetic oligonucleotide
  Sense strand starting at position 3451 of SEQ ID NO: 1242022
uuagaauccugacuuugag

SEQ ID NO: 1317789 - RNA, 19 nt, Artificial Sequence
  Description of Artificial Sequence: Synthetic oligonucleotide
  Antisense strand to SEQ ID NO: 1317788
cucaaagucaggauucuaa

SEQ ID NO: 1317790 - RNA, 19 nt, Artificial Sequence
  Description of Artificial Sequence: Synthetic oligonucleotide
  Sense strand starting at position 3454 of SEQ ID NO: 1242022
gaauccugacuuugagagu

SEQ ID NO: 1317791 - RNA, 19 nt, Artificial Sequence
  Description of Artificial Sequence: Synthetic oligonucleotide
  Antisense strand to SEQ ID NO: 1317790
acucucaaagucaggauuc

SEQ ID NO: 1317792 - RNA, 19 nt, Artificial Sequence
  Description of Artificial Sequence: Synthetic oligonucleotide
  Sense strand starting at position 3500 of SEQ ID NO: 1242022
augcaacuuggugaguaua

SEQ ID NO: 1317793 - RNA, 19 nt, Artificial Sequence
  Description of Artificial Sequence: Synthetic oligonucleotide
  Antisense strand to SEQ ID NO: 1317792
uauacucaccaaguugcau

SEQ ID NO: 1317794 - RNA, 19 nt, Artificial Sequence
  Description of Artificial Sequence: Synthetic oligonucleotide
  Sense strand starting at position 3503 of SEQ ID NO: 1242022
caacuuggugaguauaauu

SEQ ID NO: 1317795 - RNA, 19 nt, Artificial Sequence
  Description of Artificial Sequence: Synthetic oligonucleotide
  Antisense strand to SEQ ID NO: 1317794
aauuauacucaccaaguug

SEQ ID NO: 1317796 - RNA, 19 nt, Artificial Sequence
  Description of Artificial Sequence: Synthetic oligonucleotide
  Sense strand starting at position 3619 of SEQ ID NO: 1242022
uuguuaguuccuuaggaac

SEQ ID NO: 1317797 - RNA, 19 nt, Artificial Sequence
  Description of Artificial Sequence: Synthetic oligonucleotide
  Antisense strand to SEQ ID NO: 1317796
guuccuaaggaacuaacaa

SEQ ID NO: 1317798 - RNA, 19 nt, Artificial Sequence
  Description of Artificial Sequence: Synthetic oligonucleotide
  Sense strand starting at position 3632 of SEQ ID NO: 1242022
aggaacagucuuuauguuu

SEQ ID NO: 1317799 - RNA, 19 nt, Artificial Sequence
  Description of Artificial Sequence: Synthetic oligonucleotide
  Antisense strand to SEQ ID NO: 1317798
aaacauaaagacuguuccu

SEQ ID NO: 1317800 - RNA, 19 nt, Artificial Sequence
  Description of Artificial Sequence: Synthetic oligonucleotide
  Sense strand starting at position 3842 of SEQ ID NO: 1242022
gagggagcugcccaugauu

SEQ ID NO: 1317801 - RNA, 19 nt, Artificial Sequence
  Description of Artificial Sequence: Synthetic oligonucleotide
  Antisense strand to SEQ ID NO: 1317800
aaucaugggcagcucccuc

SEQ ID NO: 1317802 - RNA, 19 nt, Artificial Sequence
  Description of Artificial Sequence: Synthetic oligonucleotide
  Sense strand starting at position 3887 of SEQ ID NO: 1242022
ccaccucagccauaaguga

SEQ ID NO: 1317803 - RNA, 19 nt, Artificial Sequence
  Description of Artificial Sequence: Synthetic oligonucleotide
  Antisense strand to SEQ ID NO: 1317802
ucacuuauggcugaggugg

SEQ ID NO: 1317804 - RNA, 19 nt, Artificial Sequence
  Description of Artificial Sequence: Synthetic oligonucleotide
  Sense strand starting at position 3904 of SEQ ID NO: 1242022
gagaguauauaggugaacu

SEQ ID NO: 1317805 - RNA, 19 nt, Artificial Sequence
  Description of Artificial Sequence: Synthetic oligonucleotide
  Antisense strand to SEQ ID NO: 1317804
aguucaccuauauacucuc

SEQ ID NO: 1317806 - RNA, 19 nt, Artificial Sequence
  Description of Artificial Sequence: Synthetic oligonucleotide
  Sense strand starting at position 3905 of SEQ ID NO: 1242022
agaguauauaggugaacua

SEQ ID NO: 1317807 - RNA, 19 nt, Artificial Sequence
  Description of Artificial Sequence: Synthetic oligonucleotide
  Antisense strand to SEQ ID NO: 1317806
uaguucaccuauauacucu

SEQ ID NO: 1317808 - RNA, 19 nt, Artificial Sequence
  Description of Artificial Sequence: Synthetic oligonucleotide
  Sense strand starting at position 3964 of SEQ ID NO: 1242022
gguauuuguggugguugau

SEQ ID NO: 1317809 - RNA, 19 nt, Artificial Sequence
  Description of Artificial Sequence: Synthetic oligonucleotide
  Antisense strand to SEQ ID NO: 1317808
aucaaccaccacaaauacc

SEQ ID NO: 1317810 - RNA, 19 nt, Artificial Sequence
  Description of Artificial Sequence: Synthetic oligonucleotide
  Sense strand starting at position 185 of SEQ ID NO: 1242023
cgcucugaguccucaacau

SEQ ID NO: 1317811 - RNA, 19 nt, Artificial Sequence
  Description of Artificial Sequence: Synthetic oligonucleotide
  Antisense strand to SEQ ID NO: 1317810
auguugaggacucagagcg

SEQ ID NO: 1317812 - RNA, 19 nt, Artificial Sequence
  Description of Artificial Sequence: Synthetic oligonucleotide
  Sense strand starting at position 302 of SEQ ID NO: 1242023
gaugcaugguuacugguaa

SEQ ID NO: 1317813 - RNA, 19 nt, Artificial Sequence
  Description of Artificial Sequence: Synthetic oligonucleotide
  Antisense strand to SEQ ID NO: 1317812
uuaccaguaaccaugcauc

SEQ ID NO: 1317814 - RNA, 19 nt, Artificial Sequence
  Description of Artificial Sequence: Synthetic oligonucleotide
  Sense strand starting at position 557 of SEQ ID NO: 1242023
ccaugauaucacggauuga

SEQ ID NO: 1317815 - RNA, 19 nt, Artificial Sequence
  Description of Artificial Sequence: Synthetic oligonucleotide
  Antisense strand to SEQ ID NO: 1317814
ucaauccgugauaucaugg

SEQ ID NO: 1317816 - RNA, 19 nt, Artificial Sequence
  Description of Artificial Sequence: Synthetic oligonucleotide
  Sense strand starting at position 570 of SEQ ID NO: 1242023
gauugaugguaacuucuga

SEQ ID NO: 1317817 - RNA, 19 nt, Artificial Sequence
  Description of Artificial Sequence: Synthetic oligonucleotide
  Antisense strand to SEQ ID NO: 1317816
ucagaaguuaccaucaauc

SEQ ID NO: 1317818 - RNA, 19 nt, Artificial Sequence
  Description of Artificial Sequence: Synthetic oligonucleotide
  Sense strand starting at position 623 of SEQ ID NO: 1242023
augugauaaggucaguaag

SEQ ID NO: 1317819 - RNA, 19 nt, Artificial Sequence
  Description of Artificial Sequence: Synthetic oligonucleotide
  Antisense strand to SEQ ID NO: 1317818
cuuacugaccuuaucacau

SEQ ID NO: 1317820 - RNA, 19 nt, Artificial Sequence
  Description of Artificial Sequence: Synthetic oligonucleotide
  Sense strand starting at position 625 of SEQ ID NO: 1242023
gugauaaggucaguaagaa

SEQ ID NO: 1317821 - RNA, 19 nt, Artificial Sequence
  Description of Artificial Sequence: Synthetic oligonucleotide
  Antisense strand to SEQ ID NO: 1317820
uucuuacugaccuuaucac

SEQ ID NO: 1317822 - RNA, 19 nt, Artificial Sequence
  Description of Artificial Sequence: Synthetic oligonucleotide
  Sense strand starting at position 699 of SEQ ID NO: 1242023
ucuuguuucuaaguguauc

SEQ ID NO: 1317823 - RNA, 19 nt, Artificial Sequence
  Description of Artificial Sequence: Synthetic oligonucleotide
  Antisense strand to SEQ ID NO: 1317822
gauacacuuagaaacaaga

SEQ ID NO: 1317824 - RNA, 19 nt, Artificial Sequence
  Description of Artificial Sequence: Synthetic oligonucleotide
  Sense strand starting at position 711 of SEQ ID NO: 1242023
guguaucaaccacaauuga

SEQ ID NO: 1317825 - RNA, 19 nt, Artificial Sequence
  Description of Artificial Sequence: Synthetic oligonucleotide
  Antisense strand to SEQ ID NO: 1317824
ucaauugugguugauacac

SEQ ID NO: 1317826 - RNA, 19 nt, Artificial Sequence
  Description of Artificial Sequence: Synthetic oligonucleotide
  Sense strand starting at position 815 of SEQ ID NO: 1242023
auggaagucuuggaaugaa

SEQ ID NO: 1317827 - RNA, 19 nt, Artificial Sequence
  Description of Artificial Sequence: Synthetic oligonucleotide
  Antisense strand to SEQ ID NO: 1317826
uucauuccaagacuuccau

SEQ ID NO: 1317828 - RNA, 19 nt, Artificial Sequence
  Description of Artificial Sequence: Synthetic oligonucleotide
  Sense strand starting at position 851 of SEQ ID NO: 1242023
acugaugaaugaggaaaga

SEQ ID NO: 1317829 - RNA, 19 nt, Artificial Sequence
  Description of Artificial Sequence: Synthetic oligonucleotide
  Antisense strand to SEQ ID NO: 1317828
ucuuuccucauucaucagu

SEQ ID NO: 1317830 - RNA, 19 nt, Artificial Sequence
  Description of Artificial Sequence: Synthetic oligonucleotide
  Sense strand starting at position 940 of SEQ ID NO: 1242023
uagaaagcugcagaaugua

SEQ ID NO: 1317831 - RNA, 19 nt, Artificial Sequence
  Description of Artificial Sequence: Synthetic oligonucleotide
  Antisense strand to SEQ ID NO: 1317830
uacauucugcagcuuucua

SEQ ID NO: 1317832 - RNA, 19 nt, Artificial Sequence
  Description of Artificial Sequence: Synthetic oligonucleotide
  Sense strand starting at position 2210 of SEQ ID NO: 1242023
uugugugcggcuucuuuaa

SEQ ID NO: 1317833 - RNA, 19 nt, Artificial Sequence
  Description of Artificial Sequence: Synthetic oligonucleotide
  Antisense strand to SEQ ID NO: 1317832
uuaaagaagccgcacacaa

SEQ ID NO: 1317834 - RNA, 19 nt, Artificial Sequence
  Description of Artificial Sequence: Synthetic oligonucleotide
  Sense strand starting at position 2317 of SEQ ID NO: 1242023
guuggaggugguuguagua

SEQ ID NO: 1317835 - RNA, 19 nt, Artificial Sequence
  Description of Artificial Sequence: Synthetic oligonucleotide
  Antisense strand to SEQ ID NO: 1317834
uacuacaaccaccuccaac

SEQ ID NO: 1317836 - RNA, 19 nt, Artificial Sequence
  Description of Artificial Sequence: Synthetic oligonucleotide
  Sense strand starting at position 2320 of SEQ ID NO: 1242023
ggaggugguuguaguauuu

SEQ ID NO: 1317837 - RNA, 19 nt, Artificial Sequence
  Description of Artificial Sequence: Synthetic oligonucleotide
  Antisense strand to SEQ ID NO: 1317836
aaauacuacaaccaccucc

SEQ ID NO: 1317838 - RNA, 19 nt, Artificial Sequence
  Description of Artificial Sequence: Synthetic oligonucleotide
  Sense strand starting at position 2372 of SEQ ID NO: 1242023
cuugguuucucagcuccua

SEQ ID NO: 1317839 - RNA, 19 nt, Artificial Sequence
  Description of Artificial Sequence: Synthetic oligonucleotide
  Antisense strand to SEQ ID NO: 1317838
uaggagcugagaaaccaag

SEQ ID NO: 1317840 - RNA, 19 nt, Artificial Sequence
  Description of Artificial Sequence: Synthetic oligonucleotide
  Sense strand starting at position 2402 of SEQ ID NO: 1242023
uaaggcauuucuuacgaga

SEQ ID NO: 1317841 - RNA, 19 nt, Artificial Sequence
  Description of Artificial Sequence: Synthetic oligonucleotide
  Antisense strand to SEQ ID NO: 1317840
ucucguaagaaaugccuua

SEQ ID NO: 1317842 - RNA, 19 nt, Artificial Sequence
  Description of Artificial Sequence: Synthetic oligonucleotide
  Sense strand starting at position 2409 of SEQ ID NO: 1242023
uuucuuacgagaugcagau

SEQ ID NO: 1317843 - RNA, 19 nt, Artificial Sequence
  Description of Artificial Sequence: Synthetic oligonucleotide
  Antisense strand to SEQ ID NO: 1317842
aucugcaucucguaagaaa

SEQ ID NO: 1317844 - RNA, 19 nt, Artificial Sequence
  Description of Artificial Sequence: Synthetic oligonucleotide
  Sense strand starting at position 2446 of SEQ ID NO: 1242023
acucgacggcuuuggauua

SEQ ID NO: 1317845 - RNA, 19 nt, Artificial Sequence
  Description of Artificial Sequence: Synthetic oligonucleotide
  Antisense strand to SEQ ID NO: 1317844
uaauccaaagccgucgagu

SEQ ID NO: 1317846 - RNA, 19 nt, Artificial Sequence
  Description of Artificial Sequence: Synthetic oligonucleotide
  Sense strand starting at position 2459 of SEQ ID NO: 1242023
ggauuacugcacugcacaa

SEQ ID NO: 1317847 - RNA, 19 nt, Artificial Sequence
  Description of Artificial Sequence: Synthetic oligonucleotide
  Antisense strand to SEQ ID NO: 1317846
uugugcagugcaguaaucc

SEQ ID NO: 1317848 - RNA, 19 nt, Artificial Sequence
  Description of Artificial Sequence: Synthetic oligonucleotide
  Sense strand starting at position 2523 of SEQ ID NO: 1242023
ccagcuacuggugagacau

SEQ ID NO: 1317849 - RNA, 19 nt, Artificial Sequence
  Description of Artificial Sequence: Synthetic oligonucleotide
  Antisense strand to SEQ ID NO: 1317848
augucucaccaguagcugg

SEQ ID NO: 1317850 - RNA, 19 nt, Artificial Sequence
  Description of Artificial Sequence: Synthetic oligonucleotide
  Sense strand starting at position 2531 of SEQ ID NO: 1242023
uggugagacauucgcccua

SEQ ID NO: 1317851 - RNA, 19 nt, Artificial Sequence
  Description of Artificial Sequence: Synthetic oligonucleotide
  Antisense strand to SEQ ID NO: 1317850
uagggcgaaugucucacca

SEQ ID NO: 1317852 - RNA, 19 nt, Artificial Sequence
  Description of Artificial Sequence: Synthetic oligonucleotide
  Sense strand starting at position 2533 of SEQ ID NO: 1242023
gugagacauucgcccuaca

SEQ ID NO: 1317853 - RNA, 19 nt, Artificial Sequence
  Description of Artificial Sequence: Synthetic oligonucleotide
  Antisense strand to SEQ ID NO: 1317852
uguagggcgaaugucucac

SEQ ID NO: 1317854 - RNA, 19 nt, Artificial Sequence
  Description of Artificial Sequence: Synthetic oligonucleotide
  Sense strand starting at position 2536 of SEQ ID NO: 1242023
agacauucgcccuacagga

SEQ ID NO: 1317855 - RNA, 19 nt, Artificial Sequence
  Description of Artificial Sequence: Synthetic oligonucleotide
  Antisense strand to SEQ ID NO: 1317854
uccuguagggcgaaugucu

SEQ ID NO: 1317856 - RNA, 19 nt, Artificial Sequence
  Description of Artificial Sequence: Synthetic oligonucleotide
  Sense strand starting at position 2550 of SEQ ID NO: 1242023
caggaaagggucgguauga

SEQ ID NO: 1317857 - RNA, 19 nt, Artificial Sequence
  Description of Artificial Sequence: Synthetic oligonucleotide
  Antisense strand to SEQ ID NO: 1317856
ucauaccgacccuuuccug

SEQ ID NO: 1317858 - RNA, 19 nt, Artificial Sequence
  Description of Artificial Sequence: Synthetic oligonucleotide
  Sense strand starting at position 2551 of SEQ ID NO: 1242023
aggaaagggucgguaugau

SEQ ID NO: 1317859 - RNA, 19 nt, Artificial Sequence
  Description of Artificial Sequence: Synthetic oligonucleotide
  Antisense strand to SEQ ID NO: 1317858
aucauaccgacccuuuccu

SEQ ID NO: 1317860 - RNA, 19 nt, Artificial Sequence
  Description of Artificial Sequence: Synthetic oligonucleotide
  Sense strand starting at position 2552 of SEQ ID NO: 1242023
ggaaagggucgguaugauu

SEQ ID NO: 1317861 - RNA, 19 nt, Artificial Sequence
  Description of Artificial Sequence: Synthetic oligonucleotide
  Antisense strand to SEQ ID NO: 1317860
aaucauaccgacccuuucc

SEQ ID NO: 1317862 - RNA, 19 nt, Artificial Sequence
  Description of Artificial Sequence: Synthetic oligonucleotide
  Sense strand starting at position 2576 of SEQ ID NO: 1242023
cauugacaugcguagcaaa

SEQ ID NO: 1317863 - RNA, 19 nt, Artificial Sequence
  Description of Artificial Sequence: Synthetic oligonucleotide
  Antisense strand to SEQ ID NO: 1317862
uuugcuacgcaugucaaug

SEQ ID NO: 1317864 - RNA, 19 nt, Artificial Sequence
  Description of Artificial Sequence: Synthetic oligonucleotide
  Sense strand starting at position 2601 of SEQ ID NO: 1242023
uggcuaauuugcgccaaua

SEQ ID NO: 1317865 - RNA, 19 nt, Artificial Sequence
  Description of Artificial Sequence: Synthetic oligonucleotide
  Antisense strand to SEQ ID NO: 1317864
uauuggcgcaaauuagcca

SEQ ID NO: 1317866 - RNA, 19 nt, Artificial Sequence
  Description of Artificial Sequence: Synthetic oligonucleotide
  Sense strand starting at position 2603 of SEQ ID NO: 1242023
gcuaauuugcgccaauaau

SEQ ID NO: 1317867 - RNA, 19 nt, Artificial Sequence
  Description of Artificial Sequence: Synthetic oligonucleotide
  Antisense strand to SEQ ID NO: 1317866
auuauuggcgcaaauuagc

SEQ ID NO: 1317868 - RNA, 19 nt, Artificial Sequence
  Description of Artificial Sequence: Synthetic oligonucleotide
  Sense strand starting at position 2805 of SEQ ID NO: 1242023
aaauguauguggguccuau

SEQ ID NO: 1317869 - RNA, 19 nt, Artificial Sequence
  Description of Artificial Sequence: Synthetic oligonucleotide
  Antisense strand to SEQ ID NO: 1317868
auaggacccacauacauuu

SEQ ID NO: 1317870 - RNA, 19 nt, Artificial Sequence
  Description of Artificial Sequence: Synthetic oligonucleotide
  Sense strand starting at position 2817 of SEQ ID NO: 1242023
guccuauucuaacuuguua

SEQ ID NO: 1317871 - RNA, 19 nt, Artificial Sequence
  Description of Artificial Sequence: Synthetic oligonucleotide
  Antisense strand to SEQ ID NO: 1317870
uaacaaguuagaauaggac

SEQ ID NO: 1317872 - RNA, 19 nt, Artificial Sequence
  Description of Artificial Sequence: Synthetic oligonucleotide
  Sense strand starting at position 2911 of SEQ ID NO: 1242023
aggucuuccuucgcagaca

SEQ ID NO: 1317873 - RNA, 19 nt, Artificial Sequence
  Description of Artificial Sequence: Synthetic oligonucleotide
  Antisense strand to SEQ ID NO: 1317872
ugucugcgaaggaagaccu

SEQ ID NO: 1317874 - RNA, 19 nt, Artificial Sequence
  Description of Artificial Sequence: Synthetic oligonucleotide
  Sense strand starting at position 2914 of SEQ ID NO: 1242023
ucuuccuucgcagacauau

SEQ ID NO: 1317875 - RNA, 19 nt, Artificial Sequence
  Description of Artificial Sequence: Synthetic oligonucleotide
  Antisense strand to SEQ ID NO: 1317874
auaugucugcgaaggaaga

SEQ ID NO: 1317876 - RNA, 19 nt, Artificial Sequence
  Description of Artificial Sequence: Synthetic oligonucleotide
  Sense strand starting at position 2969 of SEQ ID NO: 1242023
caccucuguugguuagaga

SEQ ID NO: 1317877 - RNA, 19 nt, Artificial Sequence
  Description of Artificial Sequence: Synthetic oligonucleotide
  Antisense strand to SEQ ID NO: 1317876
ucucuaaccaacagaggug

SEQ ID NO: 1317878 - RNA, 19 nt, Artificial Sequence
  Description of Artificial Sequence: Synthetic oligonucleotide
  Sense strand starting at position 2970 of SEQ ID NO: 1242023
accucuguugguuagagaa

SEQ ID NO: 1317879 - RNA, 19 nt, Artificial Sequence
  Description of Artificial Sequence: Synthetic oligonucleotide
  Antisense strand to SEQ ID NO: 1317878
uucucuaaccaacagaggu

SEQ ID NO: 1317880 - RNA, 19 nt, Artificial Sequence
  Description of Artificial Sequence: Synthetic oligonucleotide
  Sense strand starting at position 3060 of SEQ ID NO: 1242023
ugcugucugucacuggaga

SEQ ID NO: 1317881 - RNA, 19 nt, Artificial Sequence
  Description of Artificial Sequence: Synthetic oligonucleotide
  Antisense strand to SEQ ID NO: 1317880
ucuccagugacagacagca

SEQ ID NO: 1317882 - RNA, 19 nt, Artificial Sequence
  Description of Artificial Sequence: Synthetic oligonucleotide
  Sense strand starting at position 3061 of SEQ ID NO: 1242023
gcugucugucacuggagau

SEQ ID NO: 1317883 - RNA, 19 nt, Artificial Sequence
  Description of Artificial Sequence: Synthetic oligonucleotide
  Antisense strand to SEQ ID NO: 1317882
aucuccagugacagacagc

SEQ ID NO: 1317884 - RNA, 19 nt, Artificial Sequence
  Description of Artificial Sequence: Synthetic oligonucleotide
  Sense strand starting at position 3062 of SEQ ID NO: 1242023
cugucugucacuggagaug

SEQ ID NO: 1317885 - RNA, 19 nt, Artificial Sequence
  Description of Artificial Sequence: Synthetic oligonucleotide
  Antisense strand to SEQ ID NO: 1317884
caucuccagugacagacag

SEQ ID NO: 1317886 - RNA, 19 nt, Artificial Sequence
  Description of Artificial Sequence: Synthetic oligonucleotide
  Sense strand starting at position 3693 of SEQ ID NO: 1242023
ggauacuuauauucuuguu

SEQ ID NO: 1317887 - RNA, 19 nt, Artificial Sequence
  Description of Artificial Sequence: Synthetic oligonucleotide
  Antisense strand to SEQ ID NO: 1317886
aacaagaauauaaguaucc

SEQ ID NO: 1317888 - RNA, 19 nt, Artificial Sequence
  Description of Artificial Sequence: Synthetic oligonucleotide
  Sense strand starting at position 3703 of SEQ ID NO: 1242023
auucuuguuuaccugagaa

SEQ ID NO: 1317889 - RNA, 19 nt, Artificial Sequence
  Description of Artificial Sequence: Synthetic oligonucleotide
  Antisense strand to SEQ ID NO: 1317888
uucucagguaaacaagaau

SEQ ID NO: 1317890 - RNA, 19 nt, Artificial Sequence
  Description of Artificial Sequence: Synthetic oligonucleotide
  Sense strand starting at position 59 of SEQ ID NO: 1242024
aggagacuugguuggugau

SEQ ID NO: 1317891 - RNA, 19 nt, Artificial Sequence
  Description of Artificial Sequence: Synthetic oligonucleotide
  Antisense strand to SEQ ID NO: 1317890
aucaccaaccaagucuccu

SEQ ID NO: 1317892 - RNA, 19 nt, Artificial Sequence
  Description of Artificial Sequence: Synthetic oligonucleotide
  Sense strand starting at position 159 of SEQ ID NO: 1242024
ggcucuucugcggcaaguu

SEQ ID NO: 1317893 - RNA, 19 nt, Artificial Sequence
  Description of Artificial Sequence: Synthetic oligonucleotide
  Antisense strand to SEQ ID NO: 1317892
aacuugccgcagaagagcc

SEQ ID NO: 1317894 - RNA, 19 nt, Artificial Sequence
  Description of Artificial Sequence: Synthetic oligonucleotide
  Sense strand starting at position 190 of SEQ ID NO: 1242024
ucuggugcucgggagagaa

SEQ ID NO: 1317895 - RNA, 19 nt, Artificial Sequence
  Description of Artificial Sequence: Synthetic oligonucleotide
  Antisense strand to SEQ ID NO: 1317894
uucucucccgagcaccaga

SEQ ID NO: 1317896 - RNA, 19 nt, Artificial Sequence
  Description of Artificial Sequence: Synthetic oligonucleotide
  Sense strand starting at position 327 of SEQ ID NO: 1242024
ugaauaaugcgcuaauaac

SEQ ID NO: 1317897 - RNA, 19 nt, Artificial Sequence
  Description of Artificial Sequence: Synthetic oligonucleotide
  Antisense strand to SEQ ID NO: 1317896
guuauuagcgcauuauuca

SEQ ID NO: 1317898 - RNA, 19 nt, Artificial Sequence
  Description of Artificial Sequence: Synthetic oligonucleotide
  Sense strand starting at position 360 of SEQ ID NO: 1242024
uguaguguggcucauuaaa

SEQ ID NO: 1317899 - RNA, 19 nt, Artificial Sequence
  Description of Artificial Sequence: Synthetic oligonucleotide
  Antisense strand to SEQ ID NO: 1317898
uuuaaugagccacacuaca

SEQ ID NO: 1317900 - RNA, 19 nt, Artificial Sequence
  Description of Artificial Sequence: Synthetic oligonucleotide
  Sense strand starting at position 387 of SEQ ID NO: 1242024
agggcuucaugguugaauu

SEQ ID NO: 1317901 - RNA, 19 nt, Artificial Sequence
  Description of Artificial Sequence: Synthetic oligonucleotide
  Antisense strand to SEQ ID NO: 1317900
aauucaaccaugaagcccu

SEQ ID NO: 1317902 - RNA, 19 nt, Artificial Sequence
  Description of Artificial Sequence: Synthetic oligonucleotide
  Sense strand starting at position 397 of SEQ ID NO: 1242024
gguugaauuccuggacacu

SEQ ID NO: 1317903 - RNA, 19 nt, Artificial Sequence
  Description of Artificial Sequence: Synthetic oligonucleotide
  Antisense strand to SEQ ID NO: 1317902
aguguccaggaauucaacc

SEQ ID NO: 1317904 - RNA, 19 nt, Artificial Sequence
  Description of Artificial Sequence: Synthetic oligonucleotide
  Sense strand starting at position 470 of SEQ ID NO: 1242024
uuauuaagcccucagguaa

SEQ ID NO: 1317905 - RNA, 19 nt, Artificial Sequence
  Description of Artificial Sequence: Synthetic oligonucleotide
  Antisense strand to SEQ ID NO: 1317904
uuaccugagggcuuaauaa

SEQ ID NO: 1317906 - RNA, 19 nt, Artificial Sequence
  Description of Artificial Sequence: Synthetic oligonucleotide
  Sense strand starting at position 484 of SEQ ID NO: 1242024
gguaaacaagcuugcagaa

SEQ ID NO: 1317907 - RNA, 19 nt, Artificial Sequence
  Description of Artificial Sequence: Synthetic oligonucleotide
  Antisense strand to SEQ ID NO: 1317906
uucugcaagcuuguuuacc

SEQ ID NO: 1317908 - RNA, 19 nt, Artificial Sequence
  Description of Artificial Sequence: Synthetic oligonucleotide
  Sense strand starting at position 584 of SEQ ID NO: 1242024
gguagcuuuaaguagaaag

SEQ ID NO: 1317909 - RNA, 19 nt, Artificial Sequence
  Description of Artificial Sequence: Synthetic oligonucleotide
  Antisense strand to SEQ ID NO: 1317908
cuuucuacuuaaagcuacc

SEQ ID NO: 1317910 - RNA, 19 nt, Artificial Sequence
  Description of Artificial Sequence: Synthetic oligonucleotide
  Sense strand starting at position 670 of SEQ ID NO: 1242024
guuuauagacaguggauau

SEQ ID NO: 1317911 - RNA, 19 nt, Artificial Sequence
  Description of Artificial Sequence: Synthetic oligonucleotide
  Antisense strand to SEQ ID NO: 1317910
auauccacugucuauaaac

SEQ ID NO: 1317912 - RNA, 19 nt, Artificial Sequence
  Description of Artificial Sequence: Synthetic oligonucleotide
  Sense strand starting at position 940 of SEQ ID NO: 1242024
guggauucgaaucauucua

SEQ ID NO: 1317913 - RNA, 19 nt, Artificial Sequence
  Description of Artificial Sequence: Synthetic oligonucleotide
  Antisense strand to SEQ ID NO: 1317912
uagaaugauucgaauccac

SEQ ID NO: 1317914 - RNA, 19 nt, Artificial Sequence
  Description of Artificial Sequence: Synthetic oligonucleotide
  Sense strand starting at position 956 of SEQ ID NO: 1242024
cuagcauuauuucugguua

SEQ ID NO: 1317915 - RNA, 19 nt, Artificial Sequence
  Description of Artificial Sequence: Synthetic oligonucleotide
  Antisense strand to SEQ ID NO: 1317914
uaaccagaaauaaugcuag

SEQ ID NO: 1317916 - RNA, 19 nt, Artificial Sequence
  Description of Artificial Sequence: Synthetic oligonucleotide
  Sense strand starting at position 969 of SEQ ID NO: 1242024
ugguuacuccuaugaaaua

SEQ ID NO: 1317917 - RNA, 19 nt, Artificial Sequence
  Description of Artificial Sequence: Synthetic oligonucleotide
  Antisense strand to SEQ ID NO: 1317916
uauuucauaggaguaacca

SEQ ID NO: 1317918 - RNA, 19 nt, Artificial Sequence
  Description of Artificial Sequence: Synthetic oligonucleotide
  Sense strand starting at position 1227 of SEQ ID NO: 1242024
augucuuuagggcaccaaa

SEQ ID NO: 1317919 - RNA, 19 nt, Artificial Sequence
  Description of Artificial Sequence: Synthetic oligonucleotide
  Antisense strand to SEQ ID NO: 1317918
uuuggugcccuaaagacau

SEQ ID NO: 1317920 - RNA, 19 nt, Artificial Sequence
  Description of Artificial Sequence: Synthetic oligonucleotide
  Sense strand starting at position 1403 of SEQ ID NO: 1242024
ccugcagaaccguacuuua

SEQ ID NO: 1317921 - RNA, 19 nt, Artificial Sequence
  Description of Artificial Sequence: Synthetic oligonucleotide
  Antisense strand to SEQ ID NO: 1317920
uaaaguacgguucugcagg

SEQ ID NO: 1317922 - RNA, 19 nt, Artificial Sequence
  Description of Artificial Sequence: Synthetic oligonucleotide
  Sense strand starting at position 1490 of SEQ ID NO: 1242024
ucguuugaaagaugagaaa

SEQ ID NO: 1317923 - RNA, 19 nt, Artificial Sequence
  Description of Artificial Sequence: Synthetic oligonucleotide
  Antisense strand to SEQ ID NO: 1317922
uuucucaucuuucaaacga

SEQ ID NO: 1317924 - RNA, 19 nt, Artificial Sequence
  Description of Artificial Sequence: Synthetic oligonucleotide
  Sense strand starting at position 2322 of SEQ ID NO: 1242024
uguuguagggaugguugau

SEQ ID NO: 1317925 - RNA, 19 nt, Artificial Sequence
  Description of Artificial Sequence: Synthetic oligonucleotide
  Antisense strand to SEQ ID NO: 1317924
aucaaccaucccuacaaca

SEQ ID NO: 1317926 - RNA, 19 nt, Artificial Sequence
  Description of Artificial Sequence: Synthetic oligonucleotide
  Sense strand starting at position 2353 of SEQ ID NO: 1242024
ugaaauggugccugacgga

SEQ ID NO: 1317927 - RNA, 19 nt, Artificial Sequence
  Description of Artificial Sequence: Synthetic oligonucleotide
  Antisense strand to SEQ ID NO: 1317926
uccgucaggcaccauuuca

SEQ ID NO: 1317928 - RNA, 19 nt, Artificial Sequence
  Description of Artificial Sequence: Synthetic oligonucleotide
  Sense strand starting at position 2360 of SEQ ID NO: 1242024
gugccugacggagaucaua

SEQ ID NO: 1317929 - RNA, 19 nt, Artificial Sequence
  Description of Artificial Sequence: Synthetic oligonucleotide
  Antisense strand to SEQ ID NO: 1317928
uaugaucuccgucaggcac

SEQ ID NO: 1317930 - RNA, 19 nt, Artificial Sequence
  Description of Artificial Sequence: Synthetic oligonucleotide
  Sense strand starting at position 2549 of SEQ ID NO: 1242024
ugccaugugucauuuacug

SEQ ID NO: 1317931 - RNA, 19 nt, Artificial Sequence
  Description of Artificial Sequence: Synthetic oligonucleotide
  Antisense strand to SEQ ID NO: 1317930
caguaaaugacacauggca

SEQ ID NO: 1317932 - RNA, 19 nt, Artificial Sequence
  Description of Artificial Sequence: Synthetic oligonucleotide
  Sense strand starting at position 2666 of SEQ ID NO: 1242024
uuucuucucccgucagcuu

SEQ ID NO: 1317933 - RNA, 19 nt, Artificial Sequence
  Description of Artificial Sequence: Synthetic oligonucleotide
  Antisense strand to SEQ ID NO: 1317932
aagcugacgggagaagaaa

SEQ ID NO: 1317934 - RNA, 19 nt, Artificial Sequence
  Description of Artificial Sequence: Synthetic oligonucleotide
  Sense strand starting at position 2730 of SEQ ID NO: 1242024
uuuggauucucaucaggac

SEQ ID NO: 1317935 - RNA, 19 nt, Artificial Sequence
  Description of Artificial Sequence: Synthetic oligonucleotide
  Antisense strand to SEQ ID NO: 1317934
guccugaugagaauccaaa

SEQ ID NO: 1317936 - RNA, 19 nt, Artificial Sequence
  Description of Artificial Sequence: Synthetic oligonucleotide
  Sense strand starting at position 2790 of SEQ ID NO: 1242024
gcaggauuucagcggaguu

SEQ ID NO: 1317937 - RNA, 19 nt, Artificial Sequence
  Description of Artificial Sequence: Synthetic oligonucleotide
  Antisense strand to SEQ ID NO: 1317936
aacuccgcugaaauccugc

SEQ ID NO: 1317938 - RNA, 19 nt, Artificial Sequence
  Description of Artificial Sequence: Synthetic oligonucleotide
  Sense strand starting at position 3029 of SEQ ID NO: 1242024
aguauuaaggacuguuauu

SEQ ID NO: 1317939 - RNA, 19 nt, Artificial Sequence
  Description of Artificial Sequence: Synthetic oligonucleotide
  Antisense strand to SEQ ID NO: 1317938
aauaacaguccuuaauacu

SEQ ID NO: 1317940 - RNA, 19 nt, Artificial Sequence
  Description of Artificial Sequence: Synthetic oligonucleotide
  Sense strand starting at position 3049 of SEQ ID NO: 1242024
gugugugaucuuugaaaua

SEQ ID NO: 1317941 - RNA, 19 nt, Artificial Sequence
  Description of Artificial Sequence: Synthetic oligonucleotide
  Antisense strand to SEQ ID NO: 1317940
uauuucaaagaucacacac

SEQ ID NO: 1317942 - RNA, 19 nt, Artificial Sequence
  Description of Artificial Sequence: Synthetic oligonucleotide
  Sense strand starting at position 3085 of SEQ ID NO: 1242024
acuguuuccucaccaguaa

SEQ ID NO: 1317943 - RNA, 19 nt, Artificial Sequence
  Description of Artificial Sequence: Synthetic oligonucleotide
  Antisense strand to SEQ ID NO: 1317942
uuacuggugaggaaacagu

SEQ ID NO: 1317944 - RNA, 19 nt, Artificial Sequence
  Description of Artificial Sequence: Synthetic oligonucleotide
  Sense strand starting at position 3126 of SEQ ID NO: 1242024
agcgcuaacgcaucuguaa

SEQ ID NO: 1317945 - RNA, 19 nt, Artificial Sequence
  Description of Artificial Sequence: Synthetic oligonucleotide
  Antisense strand to SEQ ID NO: 1317944
uuacagaugcguuagcgcu

SEQ ID NO: 1317946 - RNA, 19 nt, Artificial Sequence
  Description of Artificial Sequence: Synthetic oligonucleotide
  Sense strand starting at position 3178 of SEQ ID NO: 1242024
ugccaagugcuagaaacua

SEQ ID NO: 1317947 - RNA, 19 nt, Artificial Sequence
  Description of Artificial Sequence: Synthetic oligonucleotide
  Antisense strand to SEQ ID NO: 1317946
uaguuucuagcacuuggca

SEQ ID NO: 1317948 - RNA, 19 nt, Artificial Sequence
  Description of Artificial Sequence: Synthetic oligonucleotide
  Sense strand starting at position 3312 of SEQ ID NO: 1242024
ugccguugugaccaggaga

SEQ ID NO: 1317949 - RNA, 19 nt, Artificial Sequence
  Description of Artificial Sequence: Synthetic oligonucleotide
  Antisense strand to SEQ ID NO: 1317948
ucuccuggucacaacggca

SEQ ID NO: 1317950 - RNA, 19 nt, Artificial Sequence
  Description of Artificial Sequence: Synthetic oligonucleotide
  Sense strand starting at position 3315 of SEQ ID NO: 1242024
cguugugaccaggagagua

SEQ ID NO: 1317951 - RNA, 19 nt, Artificial Sequence
  Description of Artificial Sequence: Synthetic oligonucleotide
  Antisense strand to SEQ ID NO: 1317950
uacucuccuggucacaacg

SEQ ID NO: 1317952 - RNA, 19 nt, Artificial Sequence
  Description of Artificial Sequence: Synthetic oligonucleotide
  Sense strand starting at position 3330 of SEQ ID NO: 1242024
aguaauggccuugagucuu

SEQ ID NO: 1317953 - RNA, 19 nt, Artificial Sequence
  Description of Artificial Sequence: Synthetic oligonucleotide
  Antisense strand to SEQ ID NO: 1317952
aagacucaaggccauuacu

SEQ ID NO: 1317954 - RNA, 19 nt, Artificial Sequence
  Description of Artificial Sequence: Synthetic oligonucleotide
  Sense strand starting at position 3345 of SEQ ID NO: 1242024
ucuugugauguguagaucu

SEQ ID NO: 1317955 - RNA, 19 nt, Artificial Sequence
  Description of Artificial Sequence: Synthetic oligonucleotide
  Antisense strand to SEQ ID NO: 1317954
agaucuacacaucacaaga

SEQ ID NO: 1317956 - RNA, 19 nt, Artificial Sequence
  Description of Artificial Sequence: Synthetic oligonucleotide
  Sense strand starting at position 3412 of SEQ ID NO: 1242024
uccuuucucgguuagauuc

SEQ ID NO: 1317957 - RNA, 19 nt, Artificial Sequence
  Description of Artificial Sequence: Synthetic oligonucleotide
  Antisense strand to SEQ ID NO: 1317956
gaaucuaaccgagaaagga

SEQ ID NO: 1317958 - RNA, 19 nt, Artificial Sequence
  Description of Artificial Sequence: Synthetic oligonucleotide
  Sense strand starting at position 3446 of SEQ ID NO: 1242024
ugguauguacuagguaaau

SEQ ID NO: 1317959 - RNA, 19 nt, Artificial Sequence
  Description of Artificial Sequence: Synthetic oligonucleotide
  Antisense strand to SEQ ID NO: 1317958
auuuaccuaguacauacca

SEQ ID NO: 1317960 - RNA, 19 nt, Artificial Sequence
  Description of Artificial Sequence: Synthetic oligonucleotide
  Sense strand starting at position 3448 of SEQ ID NO: 1242024
guauguacuagguaaauac

SEQ ID NO: 1317961 - RNA, 19 nt, Artificial Sequence
  Description of Artificial Sequence: Synthetic oligonucleotide
  Antisense strand to SEQ ID NO: 1317960
guauuuaccuaguacauac

SEQ ID NO: 1317962 - RNA, 19 nt, Artificial Sequence
  Description of Artificial Sequence: Synthetic oligonucleotide
  Sense strand starting at position 3479 of SEQ ID NO: 1242024
auccuaugucauggugaug

SEQ ID NO: 1317963 - RNA, 19 nt, Artificial Sequence
  Description of Artificial Sequence: Synthetic oligonucleotide
  Antisense strand to SEQ ID NO: 1317962
caucaccaugacauaggau

SEQ ID NO: 1317964 - RNA, 19 nt, Artificial Sequence
  Description of Artificial Sequence: Synthetic oligonucleotide
  Sense strand starting at position 3482 of SEQ ID NO: 1242024
cuaugucauggugaugaca

SEQ ID NO: 1317965 - RNA, 19 nt, Artificial Sequence
  Description of Artificial Sequence: Synthetic oligonucleotide
  Antisense strand to SEQ ID NO: 1317964
ugucaucaccaugacauag

SEQ ID NO: 1317966 - RNA, 19 nt, Artificial Sequence
  Description of Artificial Sequence: Synthetic oligonucleotide
  Sense strand starting at position 3490 of SEQ ID NO: 1242024
uggugaugacacugucacu

SEQ ID NO: 1317967 - RNA, 19 nt, Artificial Sequence
  Description of Artificial Sequence: Synthetic oligonucleotide
  Antisense strand to SEQ ID NO: 1317966
agugacagugucaucacca

SEQ ID NO: 1317968 - RNA, 19 nt, Artificial Sequence
  Description of Artificial Sequence: Synthetic oligonucleotide
  Sense strand starting at position 3821 of SEQ ID NO: 1242024
uuccuaggagagugauagu

SEQ ID NO: 1317969 - RNA, 19 nt, Artificial Sequence
  Description of Artificial Sequence: Synthetic oligonucleotide
  Antisense strand to SEQ ID NO: 1317968
acuaucacucuccuaggaa

SEQ ID NO: 1317970 - RNA, 19 nt, Artificial Sequence
  Description of Artificial Sequence: Synthetic oligonucleotide
  Sense strand starting at position 27 of SEQ ID NO: 1242025
gccugauuaccagagugag

SEQ ID NO: 1317971 - RNA, 19 nt, Artificial Sequence
  Description of Artificial Sequence: Synthetic oligonucleotide
  Antisense strand to SEQ ID NO: 1317970
cucacucugguaaucaggc

SEQ ID NO: 1317972 - RNA, 19 nt, Artificial Sequence
  Description of Artificial Sequence: Synthetic oligonucleotide
  Sense strand starting at position 523 of SEQ ID NO: 1242025
agacuagagucacucucuu

SEQ ID NO: 1317973 - RNA, 19 nt, Artificial Sequence
  Description of Artificial Sequence: Synthetic oligonucleotide
  Antisense strand to SEQ ID NO: 1317972
aagagagugacucuagucu

SEQ ID NO: 1317974 - RNA, 19 nt, Artificial Sequence
  Description of Artificial Sequence: Synthetic oligonucleotide
  Sense strand starting at position 615 of SEQ ID NO: 1242025
cugcuuuguggagaucauu

SEQ ID NO: 1317975 - RNA, 19 nt, Artificial Sequence
  Description of Artificial Sequence: Synthetic oligonucleotide
  Antisense strand to SEQ ID NO: 1317974
aaugaucuccacaaagcag

SEQ ID NO: 1317976 - RNA, 19 nt, Artificial Sequence
  Description of Artificial Sequence: Synthetic oligonucleotide
  Sense strand starting at position 746 of SEQ ID NO: 1242025
ggccuauaauccuuacuug

SEQ ID NO: 1317977 - RNA, 19 nt, Artificial Sequence
  Description of Artificial Sequence: Synthetic oligonucleotide
  Antisense strand to SEQ ID NO: 1317976
caaguaaggauuauaggcc

SEQ ID NO: 1317978 - RNA, 19 nt, Artificial Sequence
  Description of Artificial Sequence: Synthetic oligonucleotide
  Sense strand starting at position 775 of SEQ ID NO: 1242025
guauucuaugguuagaucu

SEQ ID NO: 1317979 - RNA, 19 nt, Artificial Sequence
  Description of Artificial Sequence: Synthetic oligonucleotide
  Antisense strand to SEQ ID NO: 1317978
agaucuaaccauagaauac

SEQ ID NO: 1317980 - RNA, 19 nt, Artificial Sequence
  Description of Artificial Sequence: Synthetic oligonucleotide
  Sense strand starting at position 782 of SEQ ID NO: 1242025
augguuagaucucucaaua

SEQ ID NO: 1317981 - RNA, 19 nt, Artificial Sequence
  Description of Artificial Sequence: Synthetic oligonucleotide
  Antisense strand to SEQ ID NO: 1317980
uauugagagaucuaaccau

SEQ ID NO: 1317982 - RNA, 19 nt, Artificial Sequence
  Description of Artificial Sequence: Synthetic oligonucleotide
  Sense strand starting at position 984 of SEQ ID NO: 1242025
uuuguuuccucauuuguac

SEQ ID NO: 1317983 - RNA, 19 nt, Artificial Sequence
  Description of Artificial Sequence: Synthetic oligonucleotide
  Antisense strand to SEQ ID NO: 1317982
guacaaaugaggaaacaaa

SEQ ID NO: 1317984 - RNA, 19 nt, Artificial Sequence
  Description of Artificial Sequence: Synthetic oligonucleotide
  Sense strand starting at position 1149 of SEQ ID NO: 1242025
acugacuuugccggauaga

SEQ ID NO: 1317985 - RNA, 19 nt, Artificial Sequence
  Description of Artificial Sequence: Synthetic oligonucleotide
  Antisense strand to SEQ ID NO: 1317984
ucuauccggcaaagucagu

SEQ ID NO: 1317986 - RNA, 19 nt, Artificial Sequence
  Description of Artificial Sequence: Synthetic oligonucleotide
  Sense strand starting at position 1150 of SEQ ID NO: 1242025
cugacuuugccggauagag

SEQ ID NO: 1317987 - RNA, 19 nt, Artificial Sequence
  Description of Artificial Sequence: Synthetic oligonucleotide
  Antisense strand to SEQ ID NO: 1317986
cucuauccggcaaagucag

SEQ ID NO: 1317988 - RNA, 19 nt, Artificial Sequence
  Description of Artificial Sequence: Synthetic oligonucleotide
  Sense strand starting at position 1152 of SEQ ID NO: 1242025
gacuuugccggauagagug

SEQ ID NO: 1317989 - RNA, 19 nt, Artificial Sequence
  Description of Artificial Sequence: Synthetic oligonucleotide
  Antisense strand to SEQ ID NO: 1317988
cacucuauccggcaaaguc

SEQ ID NO: 1317990 - RNA, 19 nt, Artificial Sequence
  Description of Artificial Sequence: Synthetic oligonucleotide
  Sense strand starting at position 1814 of SEQ ID NO: 1242025
cagccucgggauugaucaa

SEQ ID NO: 1317991 - RNA, 19 nt, Artificial Sequence
  Description of Artificial Sequence: Synthetic oligonucleotide
  Antisense strand to SEQ ID NO: 1317990
uugaucaaucccgaggcug

SEQ ID NO: 1317992 - RNA, 19 nt, Artificial Sequence
  Description of Artificial Sequence: Synthetic oligonucleotide
  Sense strand starting at position 1963 of SEQ ID NO: 1242025
cucgauuucggcgggacaa

SEQ ID NO: 1317993 - RNA, 19 nt, Artificial Sequence
  Description of Artificial Sequence: Synthetic oligonucleotide
  Antisense strand to SEQ ID NO: 1317992
uugucccgccgaaaucgag

SEQ ID NO: 1317994 - RNA, 19 nt, Artificial Sequence
  Description of Artificial Sequence: Synthetic oligonucleotide
  Sense strand starting at position 1964 of SEQ ID NO: 1242025
ucgauuucggcgggacaaa

SEQ ID NO: 1317995 - RNA, 19 nt, Artificial Sequence
  Description of Artificial Sequence: Synthetic oligonucleotide
  Antisense strand to SEQ ID NO: 1317994
uuugucccgccgaaaucga

SEQ ID NO: 1317996 - RNA, 19 nt, Artificial Sequence
  Description of Artificial Sequence: Synthetic oligonucleotide
  Sense strand starting at position 2016 of SEQ ID NO: 1242025
cugggaugcgugagcuauu

SEQ ID NO: 1317997 - RNA, 19 nt, Artificial Sequence
  Description of Artificial Sequence: Synthetic oligonucleotide
  Antisense strand to SEQ ID NO: 1317996
aauagcucacgcaucccag

SEQ ID NO: 1317998 - RNA, 19 nt, Artificial Sequence
  Description of Artificial Sequence: Synthetic oligonucleotide
  Sense strand starting at position 2017 of SEQ ID NO: 1242025
ugggaugcgugagcuauuu

SEQ ID NO: 1317999 - RNA, 19 nt, Artificial Sequence
  Description of Artificial Sequence: Synthetic oligonucleotide
  Antisense strand to SEQ ID NO: 1317998
aaauagcucacgcauccca

SEQ ID NO: 1318000 - RNA, 19 nt, Artificial Sequence
  Description of Artificial Sequence: Synthetic oligonucleotide
  Sense strand starting at position 2052 of SEQ ID NO: 1242025
aauuguauucugggacuug

SEQ ID NO: 1318001 - RNA, 19 nt, Artificial Sequence
  Description of Artificial Sequence: Synthetic oligonucleotide
  Antisense strand to SEQ ID NO: 1318000
caagucccagaauacaauu

SEQ ID NO: 1318002 - RNA, 19 nt, Artificial Sequence
  Description of Artificial Sequence: Synthetic oligonucleotide
  Sense strand starting at position 2081 of SEQ ID NO: 1242025
cugguagaaguggauguaa

SEQ ID NO: 1318003 - RNA, 19 nt, Artificial Sequence
  Description of Artificial Sequence: Synthetic oligonucleotide
  Antisense strand to SEQ ID NO: 1318002
uuacauccacuucuaccag

SEQ ID NO: 1318004 - RNA, 19 nt, Artificial Sequence
  Description of Artificial Sequence: Synthetic oligonucleotide
  Sense strand starting at position 2209 of SEQ ID NO: 1242025
caauuauuucuccgcggga

SEQ ID NO: 1318005 - RNA, 19 nt, Artificial Sequence
  Description of Artificial Sequence: Synthetic oligonucleotide
  Antisense strand to SEQ ID NO: 1318004
ucccgcggagaaauaauug

SEQ ID NO: 1318006 - RNA, 19 nt, Artificial Sequence
  Description of Artificial Sequence: Synthetic oligonucleotide
  Sense strand starting at position 2210 of SEQ ID NO: 1242025
aauuauuucuccgcgggau

SEQ ID NO: 1318007 - RNA, 19 nt, Artificial Sequence
  Description of Artificial Sequence: Synthetic oligonucleotide
  Antisense strand to SEQ ID NO: 1318006
aucccgcggagaaauaauu

SEQ ID NO: 1318008 - RNA, 19 nt, Artificial Sequence
  Description of Artificial Sequence: Synthetic oligonucleotide
  Sense strand starting at position 2211 of SEQ ID NO: 1242025
auuauuucuccgcgggauc

SEQ ID NO: 1318009 - RNA, 19 nt, Artificial Sequence
  Description of Artificial Sequence: Synthetic oligonucleotide
  Antisense strand to SEQ ID NO: 1318008
gaucccgcggagaaauaau

SEQ ID NO: 1318010 - RNA, 19 nt, Artificial Sequence
  Description of Artificial Sequence: Synthetic oligonucleotide
  Sense strand starting at position 2248 of SEQ ID NO: 1242025
uucuuacuuccugaucgga

SEQ ID NO: 1318011 - RNA, 19 nt, Artificial Sequence
  Description of Artificial Sequence: Synthetic oligonucleotide
  Antisense strand to SEQ ID NO: 1318010
uccgaucaggaaguaagaa

SEQ ID NO: 1318012 - RNA, 19 nt, Artificial Sequence
  Description of Artificial Sequence: Synthetic oligonucleotide
  Sense strand starting at position 2250 of SEQ ID NO: 1242025
cuuacuuccugaucggaca

SEQ ID NO: 1318013 - RNA, 19 nt, Artificial Sequence
  Description of Artificial Sequence: Synthetic oligonucleotide
  Antisense strand to SEQ ID NO: 1318012
uguccgaucaggaaguaag

SEQ ID NO: 1318014 - RNA, 19 nt, Artificial Sequence
  Description of Artificial Sequence: Synthetic oligonucleotide
  Sense strand starting at position 2313 of SEQ ID NO: 1242025
cagugagguagucagguau

SEQ ID NO: 1318015 - RNA, 19 nt, Artificial Sequence
  Description of Artificial Sequence: Synthetic oligonucleotide
  Antisense strand to SEQ ID NO: 1318014
auaccugacuaccucacug

SEQ ID NO: 1318016 - RNA, 19 nt, Artificial Sequence
  Description of Artificial Sequence: Synthetic oligonucleotide
  Sense strand starting at position 2317 of SEQ ID NO: 1242025
gagguagucagguauggca

SEQ ID NO: 1318017 - RNA, 19 nt, Artificial Sequence
  Description of Artificial Sequence: Synthetic oligonucleotide
  Antisense strand to SEQ ID NO: 1318016
ugccauaccugacuaccuc

SEQ ID NO: 1318018 - RNA, 19 nt, Artificial Sequence
  Description of Artificial Sequence: Synthetic oligonucleotide
  Sense strand starting at position 2391 of SEQ ID NO: 1242025
cccaccuuugaacgaauau

SEQ ID NO: 1318019 - RNA, 19 nt, Artificial Sequence
  Description of Artificial Sequence: Synthetic oligonucleotide
  Antisense strand to SEQ ID NO: 1318018
auauucguucaaagguggg

SEQ ID NO: 1318020 - RNA, 19 nt, Artificial Sequence
  Description of Artificial Sequence: Synthetic oligonucleotide
  Sense strand starting at position 2464 of SEQ ID NO: 1242025
guguacaguggugacauaa

SEQ ID NO: 1318021 - RNA, 19 nt, Artificial Sequence
  Description of Artificial Sequence: Synthetic oligonucleotide
  Antisense strand to SEQ ID NO: 1318020
uuaugucaccacuguacac

SEQ ID NO: 1318022 - RNA, 19 nt, Artificial Sequence
  Description of Artificial Sequence: Synthetic oligonucleotide
  Sense strand starting at position 2481 of SEQ ID NO: 1242025
aauggagaucgccauccuu

SEQ ID NO: 1318023 - RNA, 19 nt, Artificial Sequence
  Description of Artificial Sequence: Synthetic oligonucleotide
  Antisense strand to SEQ ID NO: 1318022
aaggauggcgaucuccauu

SEQ ID NO: 1318024 - RNA, 19 nt, Artificial Sequence
  Description of Artificial Sequence: Synthetic oligonucleotide
  Sense strand starting at position 2926 of SEQ ID NO: 1242025
auaggugauccauaggcau

SEQ ID NO: 1318025 - RNA, 19 nt, Artificial Sequence
  Description of Artificial Sequence: Synthetic oligonucleotide
  Antisense strand to SEQ ID NO: 1318024
augccuauggaucaccuau

SEQ ID NO: 1318026 - RNA, 19 nt, Artificial Sequence
  Description of Artificial Sequence: Synthetic oligonucleotide
  Sense strand starting at position 2933 of SEQ ID NO: 1242025
auccauaggcauggaagau

SEQ ID NO: 1318027 - RNA, 19 nt, Artificial Sequence
  Description of Artificial Sequence: Synthetic oligonucleotide
  Antisense strand to SEQ ID NO: 1318026
aucuuccaugccuauggau

SEQ ID NO: 1318028 - RNA, 19 nt, Artificial Sequence
  Description of Artificial Sequence: Synthetic oligonucleotide
  Sense strand starting at position 2987 of SEQ ID NO: 1242025
ucacaugaccugugaggga

SEQ ID NO: 1318029 - RNA, 19 nt, Artificial Sequence
  Description of Artificial Sequence: Synthetic oligonucleotide
  Antisense strand to SEQ ID NO: 1318028
ucccucacaggucauguga

SEQ ID NO: 1318030 - RNA, 19 nt, Artificial Sequence
  Description of Artificial Sequence: Synthetic oligonucleotide
  Sense strand starting at position 3002 of SEQ ID NO: 1242025
gggaguccaucccugaauu

SEQ ID NO: 1318031 - RNA, 19 nt, Artificial Sequence
  Description of Artificial Sequence: Synthetic oligonucleotide
  Antisense strand to SEQ ID NO: 1318030
aauucagggauggacuccc

SEQ ID NO: 1318032 - RNA, 19 nt, Artificial Sequence
  Description of Artificial Sequence: Synthetic oligonucleotide
  Sense strand starting at position 3041 of SEQ ID NO: 1242025
cuaaaccucuugucaaagu

SEQ ID NO: 1318033 - RNA, 19 nt, Artificial Sequence
  Description of Artificial Sequence: Synthetic oligonucleotide
  Antisense strand to SEQ ID NO: 1318032
acuuugacaagagguuuag

SEQ ID NO: 1318034 - RNA, 19 nt, Artificial Sequence
  Description of Artificial Sequence: Synthetic oligonucleotide
  Sense strand starting at position 3052 of SEQ ID NO: 1242025
gucaaaguuggugacaaau

SEQ ID NO: 1318035 - RNA, 19 nt, Artificial Sequence
  Description of Artificial Sequence: Synthetic oligonucleotide
  Antisense strand to SEQ ID NO: 1318034
auuugucaccaacuuugac

SEQ ID NO: 1318036 - RNA, 19 nt, Artificial Sequence
  Description of Artificial Sequence: Synthetic oligonucleotide
  Sense strand starting at position 3093 of SEQ ID NO: 1242025
gauuaucuugcagaauugu

SEQ ID NO: 1318037 - RNA, 19 nt, Artificial Sequence
  Description of Artificial Sequence: Synthetic oligonucleotide
  Antisense strand to SEQ ID NO: 1318036
acaauucugcaagauaauc

SEQ ID NO: 1318038 - RNA, 19 nt, Artificial Sequence
  Description of Artificial Sequence: Synthetic oligonucleotide
  Sense strand starting at position 3359 of SEQ ID NO: 1242025
agcagaauugauuaucucu

SEQ ID NO: 1318039 - RNA, 19 nt, Artificial Sequence
  Description of Artificial Sequence: Synthetic oligonucleotide
  Antisense strand to SEQ ID NO: 1318038
agagauaaucaauucugcu

SEQ ID NO: 1318040 - RNA, 19 nt, Artificial Sequence
  Description of Artificial Sequence: Synthetic oligonucleotide
  Sense strand starting at position 3397 of SEQ ID NO: 1242025
gcaccauagcauugaacau

SEQ ID NO: 1318041 - RNA, 19 nt, Artificial Sequence
  Description of Artificial Sequence: Synthetic oligonucleotide
  Antisense strand to SEQ ID NO: 1318040
auguucaaugcuauggugc

SEQ ID NO: 1318042 - RNA, 19 nt, Artificial Sequence
  Description of Artificial Sequence: Synthetic oligonucleotide
  Sense strand starting at position 3415 of SEQ ID NO: 1242025
ugucgaacugucgauuaaa

SEQ ID NO: 1318043 - RNA, 19 nt, Artificial Sequence
  Description of Artificial Sequence: Synthetic oligonucleotide
  Antisense strand to SEQ ID NO: 1318042
uuuaaucgacaguucgaca

SEQ ID NO: 1318044 - RNA, 19 nt, Artificial Sequence
  Description of Artificial Sequence: Synthetic oligonucleotide
  Sense strand starting at position 3418 of SEQ ID NO: 1242025
cgaacugucgauuaaauac

SEQ ID NO: 1318045 - RNA, 19 nt, Artificial Sequence
  Description of Artificial Sequence: Synthetic oligonucleotide
  Antisense strand to SEQ ID NO: 1318044
guauuuaaucgacaguucg

SEQ ID NO: 1318046 - RNA, 19 nt, Artificial Sequence
  Description of Artificial Sequence: Synthetic oligonucleotide
  Sense strand starting at position 3516 of SEQ ID NO: 1242025
acugaauguugcucaagga

SEQ ID NO: 1318047 - RNA, 19 nt, Artificial Sequence
  Description of Artificial Sequence: Synthetic oligonucleotide
  Antisense strand to SEQ ID NO: 1318046
uccuugagcaacauucagu

SEQ ID NO: 1318048 - RNA, 19 nt, Artificial Sequence
  Description of Artificial Sequence: Synthetic oligonucleotide
  Sense strand starting at position 3532 of SEQ ID NO: 1242025
ggaauaaguggugaagcuu

SEQ ID NO: 1318049 - RNA, 19 nt, Artificial Sequence
  Description of Artificial Sequence: Synthetic oligonucleotide
  Antisense strand to SEQ ID NO: 1318048
aagcuucaccacuuauucc

SEQ ID NO: 1318050 - RNA, 19 nt, Artificial Sequence
  Description of Artificial Sequence: Synthetic oligonucleotide
  Sense strand starting at position 43 of SEQ ID NO: 1242026
ugaaguaccuuugcugaua

SEQ ID NO: 1318051 - RNA, 19 nt, Artificial Sequence
  Description of Artificial Sequence: Synthetic oligonucleotide
  Antisense strand to SEQ ID NO: 1318050
uaucagcaaagguacuuca

SEQ ID NO: 1318052 - RNA, 19 nt, Artificial Sequence
  Description of Artificial Sequence: Synthetic oligonucleotide
  Sense strand starting at position 44 of SEQ ID NO: 1242026
gaaguaccuuugcugauau

SEQ ID NO: 1318053 - RNA, 19 nt, Artificial Sequence
  Description of Artificial Sequence: Synthetic oligonucleotide
  Antisense strand to SEQ ID NO: 1318052
auaucagcaaagguacuuc

SEQ ID NO: 1318054 - RNA, 19 nt, Artificial Sequence
  Description of Artificial Sequence: Synthetic oligonucleotide
  Sense strand starting at position 169 of SEQ ID NO: 1242026
cguauuaucauaggagaau

SEQ ID NO: 1318055 - RNA, 19 nt, Artificial Sequence
  Description of Artificial Sequence: Synthetic oligonucleotide
  Antisense strand to SEQ ID NO: 1318054
auucuccuaugauaauacg

SEQ ID NO: 1318056 - RNA, 19 nt, Artificial Sequence
  Description of Artificial Sequence: Synthetic oligonucleotide
  Sense strand starting at position 207 of SEQ ID NO: 1242026
ccucauaguuauuccagga

SEQ ID NO: 1318057 - RNA, 19 nt, Artificial Sequence
  Description of Artificial Sequence: Synthetic oligonucleotide
  Antisense strand to SEQ ID NO: 1318056
uccuggaauaacuaugagg

SEQ ID NO: 1318058 - RNA, 19 nt, Artificial Sequence
  Description of Artificial Sequence: Synthetic oligonucleotide
  Sense strand starting at position 450 of SEQ ID NO: 1242026
cuguuuggagccuaaauaa

SEQ ID NO: 1318059 - RNA, 19 nt, Artificial Sequence
  Description of Artificial Sequence: Synthetic oligonucleotide
  Antisense strand to SEQ ID NO: 1318058
uuauuuaggcuccaaacag

SEQ ID NO: 1318060 - RNA, 19 nt, Artificial Sequence
  Description of Artificial Sequence: Synthetic oligonucleotide
  Sense strand starting at position 725 of SEQ ID NO: 1242026
gggugugggauugguucaa

SEQ ID NO: 1318061 - RNA, 19 nt, Artificial Sequence
  Description of Artificial Sequence: Synthetic oligonucleotide
  Antisense strand to SEQ ID NO: 1318060
uugaaccaaucccacaccc

SEQ ID NO: 1318062 - RNA, 19 nt, Artificial Sequence
  Description of Artificial Sequence: Synthetic oligonucleotide
  Sense strand starting at position 729 of SEQ ID NO: 1242026
gugggauugguucaagcuu

SEQ ID NO: 1318063 - RNA, 19 nt, Artificial Sequence
  Description of Artificial Sequence: Synthetic oligonucleotide
  Antisense strand to SEQ ID NO: 1318062
aagcuugaaccaaucccac

SEQ ID NO: 1318064 - RNA, 19 nt, Artificial Sequence
  Description of Artificial Sequence: Synthetic oligonucleotide
  Sense strand starting at position 889 of SEQ ID NO: 1242026
uggacucuucucuaagcuu

SEQ ID NO: 1318065 - RNA, 19 nt, Artificial Sequence
  Description of Artificial Sequence: Synthetic oligonucleotide
  Antisense strand to SEQ ID NO: 1318064
aagcuuagagaagagucca

SEQ ID NO: 1318066 - RNA, 19 nt, Artificial Sequence
  Description of Artificial Sequence: Synthetic oligonucleotide
  Sense strand starting at position 1111 of SEQ ID NO: 1242026
ggacaagagcuguguggaa

SEQ ID NO: 1318067 - RNA, 19 nt, Artificial Sequence
  Description of Artificial Sequence: Synthetic oligonucleotide
  Antisense strand to SEQ ID NO: 1318066
uuccacacagcucuugucc

SEQ ID NO: 1318068 - RNA, 19 nt, Artificial Sequence
  Description of Artificial Sequence: Synthetic oligonucleotide
  Sense strand starting at position 1164 of SEQ ID NO: 1242026
ccaccacacuuguuaagua

SEQ ID NO: 1318069 - RNA, 19 nt, Artificial Sequence
  Description of Artificial Sequence: Synthetic oligonucleotide
  Antisense strand to SEQ ID NO: 1318068
uacuuaacaaguguggugg

SEQ ID NO: 1318070 - RNA, 19 nt, Artificial Sequence
  Description of Artificial Sequence: Synthetic oligonucleotide
  Sense strand starting at position 1277 of SEQ ID NO: 1242026
uauguaagccaagaguaau

SEQ ID NO: 1318071 - RNA, 19 nt, Artificial Sequence
  Description of Artificial Sequence: Synthetic oligonucleotide
  Antisense strand to SEQ ID NO: 1318070
auuacucuuggcuuacaua

SEQ ID NO: 1318072 - RNA, 19 nt, Artificial Sequence
  Description of Artificial Sequence: Synthetic oligonucleotide
  Sense strand starting at position 1283 of SEQ ID NO: 1242026
agccaagaguaaucugaaa

SEQ ID NO: 1318073 - RNA, 19 nt, Artificial Sequence
  Description of Artificial Sequence: Synthetic oligonucleotide
  Antisense strand to SEQ ID NO: 1318072
uuucagauuacucuuggcu

SEQ ID NO: 1318074 - RNA, 19 nt, Artificial Sequence
  Description of Artificial Sequence: Synthetic oligonucleotide
  Sense strand starting at position 1368 of SEQ ID NO: 1242026
uaauauacacguugacgaa

SEQ ID NO: 1318075 - RNA, 19 nt, Artificial Sequence
  Description of Artificial Sequence: Synthetic oligonucleotide
  Antisense strand to SEQ ID NO: 1318074
uucgucaacguguauauua

SEQ ID NO: 1318076 - RNA, 19 nt, Artificial Sequence
  Description of Artificial Sequence: Synthetic oligonucleotide
  Sense strand starting at position 1407 of SEQ ID NO: 1242026
acgaacucgcaaugaacua

SEQ ID NO: 1318077 - RNA, 19 nt, Artificial Sequence
  Description of Artificial Sequence: Synthetic oligonucleotide
  Antisense strand to SEQ ID NO: 1318076
uaguucauugcgaguucgu

SEQ ID NO: 1318078 - RNA, 19 nt, Artificial Sequence
  Description of Artificial Sequence: Synthetic oligonucleotide
  Sense strand starting at position 1430 of SEQ ID NO: 1242026
acuuucuccggucaaagua

SEQ ID NO: 1318079 - RNA, 19 nt, Artificial Sequence
  Description of Artificial Sequence: Synthetic oligonucleotide
  Antisense strand to SEQ ID NO: 1318078
uacuuugaccggagaaagu

SEQ ID NO: 1318080 - RNA, 19 nt, Artificial Sequence
  Description of Artificial Sequence: Synthetic oligonucleotide
  Sense strand starting at position 1482 of SEQ ID NO: 1242026
caaguuguacauuguagga

SEQ ID NO: 1318081 - RNA, 19 nt, Artificial Sequence
  Description of Artificial Sequence: Synthetic oligonucleotide
  Antisense strand to SEQ ID NO: 1318080
uccuacaauguacaacuug

SEQ ID NO: 1318082 - RNA, 19 nt, Artificial Sequence
  Description of Artificial Sequence: Synthetic oligonucleotide
  Sense strand starting at position 1634 of SEQ ID NO: 1242026
ggcggauuccugcaacaga

SEQ ID NO: 1318083 - RNA, 19 nt, Artificial Sequence
  Description of Artificial Sequence: Synthetic oligonucleotide
  Antisense strand to SEQ ID NO: 1318082
ucuguugcaggaauccgcc

SEQ ID NO: 1318084 - RNA, 19 nt, Artificial Sequence
  Description of Artificial Sequence: Synthetic oligonucleotide
  Sense strand starting at position 1637 of SEQ ID NO: 1242026
ggauuccugcaacagaguu

SEQ ID NO: 1318085 - RNA, 19 nt, Artificial Sequence
  Description of Artificial Sequence: Synthetic oligonucleotide
  Antisense strand to SEQ ID NO: 1318084
aacucuguugcaggaaucc

SEQ ID NO: 1318086 - RNA, 19 nt, Artificial Sequence
  Description of Artificial Sequence: Synthetic oligonucleotide
  Sense strand starting at position 1650 of SEQ ID NO: 1242026
agaguuucgaggcaagaag

SEQ ID NO: 1318087 - RNA, 19 nt, Artificial Sequence
  Description of Artificial Sequence: Synthetic oligonucleotide
  Antisense strand to SEQ ID NO: 1318086
cuucuugccucgaaacucu

SEQ ID NO: 1318088 - RNA, 19 nt, Artificial Sequence
  Description of Artificial Sequence: Synthetic oligonucleotide
  Sense strand starting at position 2493 of SEQ ID NO: 1242026
ugcaucuaucuauguagaa

SEQ ID NO: 1318089 - RNA, 19 nt, Artificial Sequence
  Description of Artificial Sequence: Synthetic oligonucleotide
  Antisense strand to SEQ ID NO: 1318088
uucuacauagauagaugca

SEQ ID NO: 1318090 - RNA, 19 nt, Artificial Sequence
  Description of Artificial Sequence: Synthetic oligonucleotide
  Sense strand starting at position 2494 of SEQ ID NO: 1242026
gcaucuaucuauguagaau

SEQ ID NO: 1318091 - RNA, 19 nt, Artificial Sequence
  Description of Artificial Sequence: Synthetic oligonucleotide
  Antisense strand to SEQ ID NO: 1318090
auucuacauagauagaugc

SEQ ID NO: 1318092 - RNA, 19 nt, Artificial Sequence
  Description of Artificial Sequence: Synthetic oligonucleotide
  Sense strand starting at position 2551 of SEQ ID NO: 1242026
gacaaagcauuaguuguau

SEQ ID NO: 1318093 - RNA, 19 nt, Artificial Sequence
  Description of Artificial Sequence: Synthetic oligonucleotide
  Antisense strand to SEQ ID NO: 1318092
auacaacuaaugcuuuguc

SEQ ID NO: 1318094 - RNA, 19 nt, Artificial Sequence
  Description of Artificial Sequence: Synthetic oligonucleotide
  Sense strand starting at position 2560 of SEQ ID NO: 1242026
uuaguuguauaagcaacaa

SEQ ID NO: 1318095 - RNA, 19 nt, Artificial Sequence
  Description of Artificial Sequence: Synthetic oligonucleotide
  Antisense strand to SEQ ID NO: 1318094
uuguugcuuauacaacuaa

SEQ ID NO: 1318096 - RNA, 19 nt, Artificial Sequence
  Description of Artificial Sequence: Synthetic oligonucleotide
  Sense strand starting at position 2676 of SEQ ID NO: 1242026
guguacuauccaugaagaa

SEQ ID NO: 1318097 - RNA, 19 nt, Artificial Sequence
  Description of Artificial Sequence: Synthetic oligonucleotide
  Antisense strand to SEQ ID NO: 1318096
uucuucauggauaguacac

SEQ ID NO: 1318098 - RNA, 19 nt, Artificial Sequence
  Description of Artificial Sequence: Synthetic oligonucleotide
  Sense strand starting at position 2751 of SEQ ID NO: 1242026
guacuaagaguauaagguu

SEQ ID NO: 1318099 - RNA, 19 nt, Artificial Sequence
  Description of Artificial Sequence: Synthetic oligonucleotide
  Antisense strand to SEQ ID NO: 1318098
aaccuuauacucuuaguac

SEQ ID NO: 1318100 - RNA, 19 nt, Artificial Sequence
  Description of Artificial Sequence: Synthetic oligonucleotide
  Sense strand starting at position 2764 of SEQ ID NO: 1242026
aagguuagaucauuauuag

SEQ ID NO: 1318101 - RNA, 19 nt, Artificial Sequence
  Description of Artificial Sequence: Synthetic oligonucleotide
  Antisense strand to SEQ ID NO: 1318100
cuaauaaugaucuaaccuu

SEQ ID NO: 1318102 - RNA, 19 nt, Artificial Sequence
  Description of Artificial Sequence: Synthetic oligonucleotide
  Sense strand starting at position 2765 of SEQ ID NO: 1242026
agguuagaucauuauuagc

SEQ ID NO: 1318103 - RNA, 19 nt, Artificial Sequence
  Description of Artificial Sequence: Synthetic oligonucleotide
  Antisense strand to SEQ ID NO: 1318102
gcuaauaaugaucuaaccu

SEQ ID NO: 1318104 - RNA, 19 nt, Artificial Sequence
  Description of Artificial Sequence: Synthetic oligonucleotide
  Sense strand starting at position 2767 of SEQ ID NO: 1242026
guuagaucauuauuagcag

SEQ ID NO: 1318105 - RNA, 19 nt, Artificial Sequence
  Description of Artificial Sequence: Synthetic oligonucleotide
  Antisense strand to SEQ ID NO: 1318104
cugcuaauaaugaucuaac

SEQ ID NO: 1318106 - RNA, 19 nt, Artificial Sequence
  Description of Artificial Sequence: Synthetic oligonucleotide
  Sense strand starting at position 2786 of SEQ ID NO: 1242026
gcaugucaccuacaugaau

SEQ ID NO: 1318107 - RNA, 19 nt, Artificial Sequence
  Description of Artificial Sequence: Synthetic oligonucleotide
  Antisense strand to SEQ ID NO: 1318106
auucauguaggugacaugc

SEQ ID NO: 1318108 - RNA, 19 nt, Artificial Sequence
  Description of Artificial Sequence: Synthetic oligonucleotide
  Sense strand starting at position 2810 of SEQ ID NO: 1242026
agcagaacuguuggaaauc

SEQ ID NO: 1318109 - RNA, 19 nt, Artificial Sequence
  Description of Artificial Sequence: Synthetic oligonucleotide
  Antisense strand to SEQ ID NO: 1318108
gauuuccaacaguucugcu

SEQ ID NO: 1318110 - RNA, 19 nt, Artificial Sequence
  Description of Artificial Sequence: Synthetic oligonucleotide
  Sense strand starting at position 2822 of SEQ ID NO: 1242026
ggaaauccugcaugaagua

SEQ ID NO: 1318111 - RNA, 19 nt, Artificial Sequence
  Description of Artificial Sequence: Synthetic oligonucleotide
  Antisense strand to SEQ ID NO: 1318110
uacuucaugcaggauuucc

SEQ ID NO: 1318112 - RNA, 19 nt, Artificial Sequence
  Description of Artificial Sequence: Synthetic oligonucleotide
  Sense strand starting at position 2823 of SEQ ID NO: 1242026
gaaauccugcaugaaguau

SEQ ID NO: 1318113 - RNA, 19 nt, Artificial Sequence
  Description of Artificial Sequence: Synthetic oligonucleotide
  Antisense strand to SEQ ID NO: 1318112
auacuucaugcaggauuuc

SEQ ID NO: 1318114 - RNA, 19 nt, Artificial Sequence
  Description of Artificial Sequence: Synthetic oligonucleotide
  Sense strand starting at position 2829 of SEQ ID NO: 1242026
cugcaugaaguauaacuau

SEQ ID NO: 1318115 - RNA, 19 nt, Artificial Sequence
  Description of Artificial Sequence: Synthetic oligonucleotide
  Antisense strand to SEQ ID NO: 1318114
auaguuauacuucaugcag

SEQ ID NO: 1318116 - RNA, 19 nt, Artificial Sequence
  Description of Artificial Sequence: Synthetic oligonucleotide
  Sense strand starting at position 2918 of SEQ ID NO: 1242026
ccaguaaugcucucgccuu

SEQ ID NO: 1318117 - RNA, 19 nt, Artificial Sequence
  Description of Artificial Sequence: Synthetic oligonucleotide
  Antisense strand to SEQ ID NO: 1318116
aaggcgagagcauuacugg

SEQ ID NO: 1318118 - RNA, 19 nt, Artificial Sequence
  Description of Artificial Sequence: Synthetic oligonucleotide
  Sense strand starting at position 2988 of SEQ ID NO: 1242026
aaagguaagcuguaguagu

SEQ ID NO: 1318119 - RNA, 19 nt, Artificial Sequence
  Description of Artificial Sequence: Synthetic oligonucleotide
  Antisense strand to SEQ ID NO: 1318118
acuacuacagcuuaccuuu

SEQ ID NO: 1318120 - RNA, 19 nt, Artificial Sequence
  Description of Artificial Sequence: Synthetic oligonucleotide
  Sense strand starting at position 3186 of SEQ ID NO: 1242026
ucacguggccggaguaaga

SEQ ID NO: 1318121 - RNA, 19 nt, Artificial Sequence
  Description of Artificial Sequence: Synthetic oligonucleotide
  Antisense strand to SEQ ID NO: 1318120
ucuuacuccggccacguga

SEQ ID NO: 1318122 - RNA, 19 nt, Artificial Sequence
  Description of Artificial Sequence: Synthetic oligonucleotide
  Sense strand starting at position 3747 of SEQ ID NO: 1242026
uuacuugcaguuuaaugua

SEQ ID NO: 1318123 - RNA, 19 nt, Artificial Sequence
  Description of Artificial Sequence: Synthetic oligonucleotide
  Antisense strand to SEQ ID NO: 1318122
uacauuaaacugcaaguaa

SEQ ID NO: 1318124 - RNA, 19 nt, Artificial Sequence
  Description of Artificial Sequence: Synthetic oligonucleotide
  Sense strand starting at position 3796 of SEQ ID NO: 1242026
gaauguauauuagugguua

SEQ ID NO: 1318125 - RNA, 19 nt, Artificial Sequence
  Description of Artificial Sequence: Synthetic oligonucleotide
  Antisense strand to SEQ ID NO: 1318124
uaaccacuaauauacauuc

SEQ ID NO: 1318126 - RNA, 19 nt, Artificial Sequence
  Description of Artificial Sequence: Synthetic oligonucleotide
  Sense strand starting at position 3835 of SEQ ID NO: 1242026
ggugucauagaagguacua

SEQ ID NO: 1318127 - RNA, 19 nt, Artificial Sequence
  Description of Artificial Sequence: Synthetic oligonucleotide
  Antisense strand to SEQ ID NO: 1318126
uaguaccuucuaugacacc

SEQ ID NO: 1318128 - RNA, 19 nt, Artificial Sequence
  Description of Artificial Sequence: Synthetic oligonucleotide
  Sense strand starting at position 3902 of SEQ ID NO: 1242026
agguaacuguucuuuauua

SEQ ID NO: 1318129 - RNA, 19 nt, Artificial Sequence
  Description of Artificial Sequence: Synthetic oligonucleotide
  Antisense strand to SEQ ID NO: 1318128
uaauaaagaacaguuaccu

SEQ ID NO: 1318130 - RNA, 19 nt, Artificial Sequence
  Description of Artificial Sequence: Synthetic oligonucleotide
  Sense strand starting at position 1422 of SEQ ID NO: 1242027
cgaacucugaaacguuuaa

SEQ ID NO: 1318131 - RNA, 19 nt, Artificial Sequence
  Description of Artificial Sequence: Synthetic oligonucleotide
  Antisense strand to SEQ ID NO: 1318130
uuaaacguuucagaguucg

SEQ ID NO: 1318132 - RNA, 19 nt, Artificial Sequence
  Description of Artificial Sequence: Synthetic oligonucleotide
  Sense strand starting at position 1440 of SEQ ID NO: 1242027
agagcaaggucuccuguaa

SEQ ID NO: 1318133 - RNA, 19 nt, Artificial Sequence
  Description of Artificial Sequence: Synthetic oligonucleotide
  Antisense strand to SEQ ID NO: 1318132
uuacaggagaccuugcucu

SEQ ID NO: 1318134 - RNA, 19 nt, Artificial Sequence
  Description of Artificial Sequence: Synthetic oligonucleotide
  Sense strand starting at position 1509 of SEQ ID NO: 1242027
cucuguacgcgaucuuagu

SEQ ID NO: 1318135 - RNA, 19 nt, Artificial Sequence
  Description of Artificial Sequence: Synthetic oligonucleotide
  Antisense strand to SEQ ID NO: 1318134
acuaagaucgcguacagag

SEQ ID NO: 1318136 - RNA, 19 nt, Artificial Sequence
  Description of Artificial Sequence: Synthetic oligonucleotide
  Sense strand starting at position 1522 of SEQ ID NO: 1242027
cuuagugucccuuacuaua

SEQ ID NO: 1318137 - RNA, 19 nt, Artificial Sequence
  Description of Artificial Sequence: Synthetic oligonucleotide
  Antisense strand to SEQ ID NO: 1318136
uauaguaagggacacuaag

SEQ ID NO: 1318138 - RNA, 19 nt, Artificial Sequence
  Description of Artificial Sequence: Synthetic oligonucleotide
  Sense strand starting at position 1562 of SEQ ID NO: 1242027
aaggguaauuucuaggaca

SEQ ID NO: 1318139 - RNA, 19 nt, Artificial Sequence
  Description of Artificial Sequence: Synthetic oligonucleotide
  Antisense strand to SEQ ID NO: 1318138
uguccuagaaauuacccuu

SEQ ID NO: 1318140 - RNA, 19 nt, Artificial Sequence
  Description of Artificial Sequence: Synthetic oligonucleotide
  Sense strand starting at position 1565 of SEQ ID NO: 1242027
gguaauuucuaggacaucu

SEQ ID NO: 1318141 - RNA, 19 nt, Artificial Sequence
  Description of Artificial Sequence: Synthetic oligonucleotide
  Antisense strand to SEQ ID NO: 1318140
agauguccuagaaauuacc

SEQ ID NO: 1318142 - RNA, 19 nt, Artificial Sequence
  Description of Artificial Sequence: Synthetic oligonucleotide
  Sense strand starting at position 1640 of SEQ ID NO: 1242027
uuacaagaccacuguauga

SEQ ID NO: 1318143 - RNA, 19 nt, Artificial Sequence
  Description of Artificial Sequence: Synthetic oligonucleotide
  Antisense strand to SEQ ID NO: 1318142
ucauacaguggucuuguaa

SEQ ID NO: 1318144 - RNA, 19 nt, Artificial Sequence
  Description of Artificial Sequence: Synthetic oligonucleotide
  Sense strand starting at position 1644 of SEQ ID NO: 1242027
aagaccacuguaugaguaa

SEQ ID NO: 1318145 - RNA, 19 nt, Artificial Sequence
  Description of Artificial Sequence: Synthetic oligonucleotide
  Antisense strand to SEQ ID NO: 1318144
uuacucauacaguggucuu

SEQ ID NO: 1318146 - RNA, 19 nt, Artificial Sequence
  Description of Artificial Sequence: Synthetic oligonucleotide
  Sense strand starting at position 2060 of SEQ ID NO: 1242027
ggaggcucgagugaucgau

SEQ ID NO: 1318147 - RNA, 19 nt, Artificial Sequence
  Description of Artificial Sequence: Synthetic oligonucleotide
  Antisense strand to SEQ ID NO: 1318146
aucgaucacucgagccucc

SEQ ID NO: 1318148 - RNA, 19 nt, Artificial Sequence
  Description of Artificial Sequence: Synthetic oligonucleotide
  Sense strand starting at position 2229 of SEQ ID NO: 1242027
gacugugcacucugagacu

SEQ ID NO: 1318149 - RNA, 19 nt, Artificial Sequence
  Description of Artificial Sequence: Synthetic oligonucleotide
  Antisense strand to SEQ ID NO: 1318148
agucucagagugcacaguc

SEQ ID NO: 1318150 - RNA, 19 nt, Artificial Sequence
  Description of Artificial Sequence: Synthetic oligonucleotide
  Sense strand starting at position 2297 of SEQ ID NO: 1242027
gggagcauucagugucaaa

SEQ ID NO: 1318151 - RNA, 19 nt, Artificial Sequence
  Description of Artificial Sequence: Synthetic oligonucleotide
  Antisense strand to SEQ ID NO: 1318150
uuugacacugaaugcuccc

SEQ ID NO: 1318152 - RNA, 19 nt, Artificial Sequence
  Description of Artificial Sequence: Synthetic oligonucleotide
  Sense strand starting at position 2345 of SEQ ID NO: 1242027
aggcgacuucugcaaccaa

SEQ ID NO: 1318153 - RNA, 19 nt, Artificial Sequence
  Description of Artificial Sequence: Synthetic oligonucleotide
  Antisense strand to SEQ ID NO: 1318152
uugguugcagaagucgccu

SEQ ID NO: 1318154 - RNA, 19 nt, Artificial Sequence
  Description of Artificial Sequence: Synthetic oligonucleotide
  Sense strand starting at position 2405 of SEQ ID NO: 1242027
gagggaguuucaguuggaa

SEQ ID NO: 1318155 - RNA, 19 nt, Artificial Sequence
  Description of Artificial Sequence: Synthetic oligonucleotide
  Antisense strand to SEQ ID NO: 1318154
uuccaacugaaacucccuc

SEQ ID NO: 1318156 - RNA, 19 nt, Artificial Sequence
  Description of Artificial Sequence: Synthetic oligonucleotide
  Sense strand starting at position 2456 of SEQ ID NO: 1242027
cuaaucaccgguuaucuga

SEQ ID NO: 1318157 - RNA, 19 nt, Artificial Sequence
  Description of Artificial Sequence: Synthetic oligonucleotide
  Antisense strand to SEQ ID NO: 1318156
ucagauaaccggugauuag

SEQ ID NO: 1318158 - RNA, 19 nt, Artificial Sequence
  Description of Artificial Sequence: Synthetic oligonucleotide
  Sense strand starting at position 2458 of SEQ ID NO: 1242027
aaucaccgguuaucugaua

SEQ ID NO: 1318159 - RNA, 19 nt, Artificial Sequence
  Description of Artificial Sequence: Synthetic oligonucleotide
  Antisense strand to SEQ ID NO: 1318158
uaucagauaaccggugauu

SEQ ID NO: 1318160 - RNA, 19 nt, Artificial Sequence
  Description of Artificial Sequence: Synthetic oligonucleotide
  Sense strand starting at position 2466 of SEQ ID NO: 1242027
guuaucugauacccuugaa

SEQ ID NO: 1318161 - RNA, 19 nt, Artificial Sequence
  Description of Artificial Sequence: Synthetic oligonucleotide
  Antisense strand to SEQ ID NO: 1318160
uucaaggguaucagauaac

SEQ ID NO: 1318162 - RNA, 19 nt, Artificial Sequence
  Description of Artificial Sequence: Synthetic oligonucleotide
  Sense strand starting at position 2532 of SEQ ID NO: 1242027
augcgucuugaguauuuau

SEQ ID NO: 1318163 - RNA, 19 nt, Artificial Sequence
  Description of Artificial Sequence: Synthetic oligonucleotide
  Antisense strand to SEQ ID NO: 1318162
auaaauacucaagacgcau

SEQ ID NO: 1318164 - RNA, 19 nt, Artificial Sequence
  Description of Artificial Sequence: Synthetic oligonucleotide
  Sense strand starting at position 2535 of SEQ ID NO: 1242027
cgucuugaguauuuaugac

SEQ ID NO: 1318165 - RNA, 19 nt, Artificial Sequence
  Description of Artificial Sequence: Synthetic oligonucleotide
  Antisense strand to SEQ ID NO: 1318164
gucauaaauacucaagacg

SEQ ID NO: 1318166 - RNA, 19 nt, Artificial Sequence
  Description of Artificial Sequence: Synthetic oligonucleotide
  Sense strand starting at position 2936 of SEQ ID NO: 1242027
agccuaacaccugaaaguu

SEQ ID NO: 1318167 - RNA, 19 nt, Artificial Sequence
  Description of Artificial Sequence: Synthetic oligonucleotide
  Antisense strand to SEQ ID NO: 1318166
aacuuucagguguuaggcu

SEQ ID NO: 1318168 - RNA, 19 nt, Artificial Sequence
  Description of Artificial Sequence: Synthetic oligonucleotide
  Sense strand starting at position 3042 of SEQ ID NO: 1242027
gugcuuguugccuuuacua

SEQ ID NO: 1318169 - RNA, 19 nt, Artificial Sequence
  Description of Artificial Sequence: Synthetic oligonucleotide
  Antisense strand to SEQ ID NO: 1318168
uaguaaaggcaacaagcac

SEQ ID NO: 1318170 - RNA, 19 nt, Artificial Sequence
  Description of Artificial Sequence: Synthetic oligonucleotide
  Sense strand starting at position 3084 of SEQ ID NO: 1242027
guggcuagcguuguguaau

SEQ ID NO: 1318171 - RNA, 19 nt, Artificial Sequence
  Description of Artificial Sequence: Synthetic oligonucleotide
  Antisense strand to SEQ ID NO: 1318170
auuacacaacgcuagccac

SEQ ID NO: 1318172 - RNA, 19 nt, Artificial Sequence
  Description of Artificial Sequence: Synthetic oligonucleotide
  Sense strand starting at position 3127 of SEQ ID NO: 1242027
gugcauaaaugagcaaacu

SEQ ID NO: 1318173 - RNA, 19 nt, Artificial Sequence
  Description of Artificial Sequence: Synthetic oligonucleotide
  Antisense strand to SEQ ID NO: 1318172
aguuugcucauuuaugcac

SEQ ID NO: 1318174 - RNA, 19 nt, Artificial Sequence
  Description of Artificial Sequence: Synthetic oligonucleotide
  Sense strand starting at position 3234 of SEQ ID NO: 1242027
auauguggcagugaacaau

SEQ ID NO: 1318175 - RNA, 19 nt, Artificial Sequence
  Description of Artificial Sequence: Synthetic oligonucleotide
  Antisense strand to SEQ ID NO: 1318174
auuguucacugccacauau

SEQ ID NO: 1318176 - RNA, 19 nt, Artificial Sequence
  Description of Artificial Sequence: Synthetic oligonucleotide
  Sense strand starting at position 3338 of SEQ ID NO: 1242027
aaaguaaacuaugugguga

SEQ ID NO: 1318177 - RNA, 19 nt, Artificial Sequence
  Description of Artificial Sequence: Synthetic oligonucleotide
  Antisense strand to SEQ ID NO: 1318176
ucaccacauaguuuacuuu

SEQ ID NO: 1318178 - RNA, 19 nt, Artificial Sequence
  Description of Artificial Sequence: Synthetic oligonucleotide
  Sense strand starting at position 3381 of SEQ ID NO: 1242027
acaucuuaggguugagguu

SEQ ID NO: 1318179 - RNA, 19 nt, Artificial Sequence
  Description of Artificial Sequence: Synthetic oligonucleotide
  Antisense strand to SEQ ID NO: 1318178
aaccucaacccuaagaugu

SEQ ID NO: 1318180 - RNA, 19 nt, Artificial Sequence
  Description of Artificial Sequence: Synthetic oligonucleotide
  Sense strand starting at position 3382 of SEQ ID NO: 1242027
caucuuaggguugagguua

SEQ ID NO: 1318181 - RNA, 19 nt, Artificial Sequence
  Description of Artificial Sequence: Synthetic oligonucleotide
  Antisense strand to SEQ ID NO: 1318180
uaaccucaacccuaagaug

SEQ ID NO: 1318182 - RNA, 19 nt, Artificial Sequence
  Description of Artificial Sequence: Synthetic oligonucleotide
  Sense strand starting at position 3387 of SEQ ID NO: 1242027
uaggguugagguuacaauu

SEQ ID NO: 1318183 - RNA, 19 nt, Artificial Sequence
  Description of Artificial Sequence: Synthetic oligonucleotide
  Antisense strand to SEQ ID NO: 1318182
aauuguaaccucaacccua

SEQ ID NO: 1318184 - RNA, 19 nt, Artificial Sequence
  Description of Artificial Sequence: Synthetic oligonucleotide
  Sense strand starting at position 3454 of SEQ ID NO: 1242027
uugacauuggccugaagga

SEQ ID NO: 1318185 - RNA, 19 nt, Artificial Sequence
  Description of Artificial Sequence: Synthetic oligonucleotide
  Antisense strand to SEQ ID NO: 1318184
uccuucaggccaaugucaa

SEQ ID NO: 1318186 - RNA, 19 nt, Artificial Sequence
  Description of Artificial Sequence: Synthetic oligonucleotide
  Sense strand starting at position 3463 of SEQ ID NO: 1242027
gccugaaggagguaacagu

SEQ ID NO: 1318187 - RNA, 19 nt, Artificial Sequence
  Description of Artificial Sequence: Synthetic oligonucleotide
  Antisense strand to SEQ ID NO: 1318186
acuguuaccuccuucaggc

SEQ ID NO: 1318188 - RNA, 19 nt, Artificial Sequence
  Description of Artificial Sequence: Synthetic oligonucleotide
  Sense strand starting at position 3476 of SEQ ID NO: 1242027
aacaguguggacugagaga

SEQ ID NO: 1318189 - RNA, 19 nt, Artificial Sequence
  Description of Artificial Sequence: Synthetic oligonucleotide
  Antisense strand to SEQ ID NO: 1318188
ucucucaguccacacuguu

SEQ ID NO: 1318190 - RNA, 19 nt, Artificial Sequence
  Description of Artificial Sequence: Synthetic oligonucleotide
  Sense strand starting at position 3535 of SEQ ID NO: 1242027
agccgucaggcagaagauu

SEQ ID NO: 1318191 - RNA, 19 nt, Artificial Sequence
  Description of Artificial Sequence: Synthetic oligonucleotide
  Antisense strand to SEQ ID NO: 1318190
aaucuucugccugacggcu

SEQ ID NO: 1318192 - RNA, 19 nt, Artificial Sequence
  Description of Artificial Sequence: Synthetic oligonucleotide
  Sense strand starting at position 3543 of SEQ ID NO: 1242027
ggcagaagauuaucuagca

SEQ ID NO: 1318193 - RNA, 19 nt, Artificial Sequence
  Description of Artificial Sequence: Synthetic oligonucleotide
  Antisense strand to SEQ ID NO: 1318192
ugcuagauaaucuucugcc

SEQ ID NO: 1318194 - RNA, 19 nt, Artificial Sequence
  Description of Artificial Sequence: Synthetic oligonucleotide
  Sense strand starting at position 3639 of SEQ ID NO: 1242027
uuagcaaauuuguuccgua

SEQ ID NO: 1318195 - RNA, 19 nt, Artificial Sequence
  Description of Artificial Sequence: Synthetic oligonucleotide
  Antisense strand to SEQ ID NO: 1318194
uacggaacaaauuugcuaa

SEQ ID NO: 1318196 - RNA, 19 nt, Artificial Sequence
  Description of Artificial Sequence: Synthetic oligonucleotide
  Sense strand starting at position 3640 of SEQ ID NO: 1242027
uagcaaauuuguuccguaa

SEQ ID NO: 1318197 - RNA, 19 nt, Artificial Sequence
  Description of Artificial Sequence: Synthetic oligonucleotide
  Antisense strand to SEQ ID NO: 1318196
uuacggaacaaauuugcua

SEQ ID NO: 1318198 - RNA, 19 nt, Artificial Sequence
  Description of Artificial Sequence: Synthetic oligonucleotide
  Sense strand starting at position 3667 of SEQ ID NO: 1242027
ggaguaaauguuugaggcu

SEQ ID NO: 1318199 - RNA, 19 nt, Artificial Sequence
  Description of Artificial Sequence: Synthetic oligonucleotide
  Antisense strand to SEQ ID NO: 1318198
agccucaaacauuuacucc

SEQ ID NO: 1318200 - RNA, 19 nt, Artificial Sequence
  Description of Artificial Sequence: Synthetic oligonucleotide
  Sense strand starting at position 3693 of SEQ ID NO: 1242027
ccauguggccuccaucaua

SEQ ID NO: 1318201 - RNA, 19 nt, Artificial Sequence
  Description of Artificial Sequence: Synthetic oligonucleotide
  Antisense strand to SEQ ID NO: 1318200
uaugauggaggccacaugg

SEQ ID NO: 1318202 - RNA, 19 nt, Artificial Sequence
  Description of Artificial Sequence: Synthetic oligonucleotide
  Sense strand starting at position 3755 of SEQ ID NO: 1242027
auauguaacauaugagugu

SEQ ID NO: 1318203 - RNA, 19 nt, Artificial Sequence
  Description of Artificial Sequence: Synthetic oligonucleotide
  Antisense strand to SEQ ID NO: 1318202
acacucauauguuacauau

SEQ ID NO: 1318204 - RNA, 19 nt, Artificial Sequence
  Description of Artificial Sequence: Synthetic oligonucleotide
  Sense strand starting at position 3882 of SEQ ID NO: 1242027
gagcauugacuuugaguga

SEQ ID NO: 1318205 - RNA, 19 nt, Artificial Sequence
  Description of Artificial Sequence: Synthetic oligonucleotide
  Antisense strand to SEQ ID NO: 1318204
ucacucaaagucaaugcuc

SEQ ID NO: 1318206 - RNA, 19 nt, Artificial Sequence
  Description of Artificial Sequence: Synthetic oligonucleotide
  Sense strand starting at position 3885 of SEQ ID NO: 1242027
cauugacuuugagugagau

SEQ ID NO: 1318207 - RNA, 19 nt, Artificial Sequence
  Description of Artificial Sequence: Synthetic oligonucleotide
  Antisense strand to SEQ ID NO: 1318206
aucucacucaaagucaaug

SEQ ID NO: 1318208 - RNA, 19 nt, Artificial Sequence
  Description of Artificial Sequence: Synthetic oligonucleotide
  Sense strand starting at position 3886 of SEQ ID NO: 1242027
auugacuuugagugagaug

SEQ ID NO: 1318209 - RNA, 19 nt, Artificial Sequence
  Description of Artificial Sequence: Synthetic oligonucleotide
  Antisense strand to SEQ ID NO: 1318208
caucucacucaaagucaau

SEQ ID NO: 1318210 - RNA, 19 nt, Artificial Sequence
  Description of Artificial Sequence: Synthetic oligonucleotide
  Sense strand starting at position 1401 of SEQ ID NO: 1242028
cgaacucugaaacguuuaa

SEQ ID NO: 1318211 - RNA, 19 nt, Artificial Sequence
  Description of Artificial Sequence: Synthetic oligonucleotide
  Antisense strand to SEQ ID NO: 1318210
uuaaacguuucagaguucg

SEQ ID NO: 1318212 - RNA, 19 nt, Artificial Sequence
  Description of Artificial Sequence: Synthetic oligonucleotide
  Sense strand starting at position 1419 of SEQ ID NO: 1242028
agagcaaggucuccuguaa

SEQ ID NO: 1318213 - RNA, 19 nt, Artificial Sequence
  Description of Artificial Sequence: Synthetic oligonucleotide
  Antisense strand to SEQ ID NO: 1318212
uuacaggagaccuugcucu

SEQ ID NO: 1318214 - RNA, 19 nt, Artificial Sequence
  Description of Artificial Sequence: Synthetic oligonucleotide
  Sense strand starting at position 1488 of SEQ ID NO: 1242028
cucuguacgcgaucuuagu

SEQ ID NO: 1318215 - RNA, 19 nt, Artificial Sequence
  Description of Artificial Sequence: Synthetic oligonucleotide
  Antisense strand to SEQ ID NO: 1318214
acuaagaucgcguacagag

SEQ ID NO: 1318216 - RNA, 19 nt, Artificial Sequence
  Description of Artificial Sequence: Synthetic oligonucleotide
  Sense strand starting at position 1501 of SEQ ID NO: 1242028
cuuagugucccuuacuaua

SEQ ID NO: 1318217 - RNA, 19 nt, Artificial Sequence
  Description of Artificial Sequence: Synthetic oligonucleotide
  Antisense strand to SEQ ID NO: 1318216
uauaguaagggacacuaag

SEQ ID NO: 1318218 - RNA, 19 nt, Artificial Sequence
  Description of Artificial Sequence: Synthetic oligonucleotide
  Sense strand starting at position 1541 of SEQ ID NO: 1242028
aaggguaauuucuaggaca

SEQ ID NO: 1318219 - RNA, 19 nt, Artificial Sequence
  Description of Artificial Sequence: Synthetic oligonucleotide
  Antisense strand to SEQ ID NO: 1318218
uguccuagaaauuacccuu

SEQ ID NO: 1318220 - RNA, 19 nt, Artificial Sequence
  Description of Artificial Sequence: Synthetic oligonucleotide
  Sense strand starting at position 1544 of SEQ ID NO: 1242028
gguaauuucuaggacaucu

SEQ ID NO: 1318221 - RNA, 19 nt, Artificial Sequence
  Description of Artificial Sequence: Synthetic oligonucleotide
  Antisense strand to SEQ ID NO: 1318220
agauguccuagaaauuacc

SEQ ID NO: 1318222 - RNA, 19 nt, Artificial Sequence
  Description of Artificial Sequence: Synthetic oligonucleotide
  Sense strand starting at position 1619 of SEQ ID NO: 1242028
uuacaagaccacuguauga

SEQ ID NO: 1318223 - RNA, 19 nt, Artificial Sequence
  Description of Artificial Sequence: Synthetic oligonucleotide
  Antisense strand to SEQ ID NO: 1318222
ucauacaguggucuuguaa

SEQ ID NO: 1318224 - RNA, 19 nt, Artificial Sequence
  Description of Artificial Sequence: Synthetic oligonucleotide
  Sense strand starting at position 1623 of SEQ ID NO: 1242028
aagaccacuguaugaguaa

SEQ ID NO: 1318225 - RNA, 19 nt, Artificial Sequence
  Description of Artificial Sequence: Synthetic oligonucleotide
  Antisense strand to SEQ ID NO: 1318224
uuacucauacaguggucuu

SEQ ID NO: 1318226 - RNA, 19 nt, Artificial Sequence
  Description of Artificial Sequence: Synthetic oligonucleotide
  Sense strand starting at position 2039 of SEQ ID NO: 1242028
ggaggcucgagugaucgau

SEQ ID NO: 1318227 - RNA, 19 nt, Artificial Sequence
  Description of Artificial Sequence: Synthetic oligonucleotide
  Antisense strand to SEQ ID NO: 1318226
aucgaucacucgagccucc

SEQ ID NO: 1318228 - RNA, 19 nt, Artificial Sequence
  Description of Artificial Sequence: Synthetic oligonucleotide
  Sense strand starting at position 2208 of SEQ ID NO: 1242028
gacugugcacucugagacu

SEQ ID NO: 1318229 - RNA, 19 nt, Artificial Sequence
  Description of Artificial Sequence: Synthetic oligonucleotide
  Antisense strand to SEQ ID NO: 1318228
agucucagagugcacaguc

SEQ ID NO: 1318230 - RNA, 19 nt, Artificial Sequence
  Description of Artificial Sequence: Synthetic oligonucleotide
  Sense strand starting at position 2276 of SEQ ID NO: 1242028
gggagcauucagugucaaa

SEQ ID NO: 1318231 - RNA, 19 nt, Artificial Sequence
  Description of Artificial Sequence: Synthetic oligonucleotide
  Antisense strand to SEQ ID NO: 1318230
uuugacacugaaugcuccc

SEQ ID NO: 1318232 - RNA, 19 nt, Artificial Sequence
  Description of Artificial Sequence: Synthetic oligonucleotide
  Sense strand starting at position 2324 of SEQ ID NO: 1242028
aggcgacuucugcaaccaa

SEQ ID NO: 1318233 - RNA, 19 nt, Artificial Sequence
  Description of Artificial Sequence: Synthetic oligonucleotide
  Antisense strand to SEQ ID NO: 1318232
uugguugcagaagucgccu

SEQ ID NO: 1318234 - RNA, 19 nt, Artificial Sequence
  Description of Artificial Sequence: Synthetic oligonucleotide
  Sense strand starting at position 2384 of SEQ ID NO: 1242028
gagggaguuucaguuggaa

SEQ ID NO: 1318235 - RNA, 19 nt, Artificial Sequence
  Description of Artificial Sequence: Synthetic oligonucleotide
  Antisense strand to SEQ ID NO: 1318234
uuccaacugaaacucccuc

SEQ ID NO: 1318236 - RNA, 19 nt, Artificial Sequence
  Description of Artificial Sequence: Synthetic oligonucleotide
  Sense strand starting at position 2435 of SEQ ID NO: 1242028
cuaaucaccgguuaucuga

SEQ ID NO: 1318237 - RNA, 19 nt, Artificial Sequence
  Description of Artificial Sequence: Synthetic oligonucleotide
  Antisense strand to SEQ ID NO: 1318236
ucagauaaccggugauuag

SEQ ID NO: 1318238 - RNA, 19 nt, Artificial Sequence
  Description of Artificial Sequence: Synthetic oligonucleotide
  Sense strand starting at position 2437 of SEQ ID NO: 1242028
aaucaccgguuaucugaua

SEQ ID NO: 1318239 - RNA, 19 nt, Artificial Sequence
  Description of Artificial Sequence: Synthetic oligonucleotide
  Antisense strand to SEQ ID NO: 1318238
uaucagauaaccggugauu

SEQ ID NO: 1318240 - RNA, 19 nt, Artificial Sequence
  Description of Artificial Sequence: Synthetic oligonucleotide
  Sense strand starting at position 2445 of SEQ ID NO: 1242028
guuaucugauacccuugaa

SEQ ID NO: 1318241 - RNA, 19 nt, Artificial Sequence
  Description of Artificial Sequence: Synthetic oligonucleotide
  Antisense strand to SEQ ID NO: 1318240
uucaaggguaucagauaac

SEQ ID NO: 1318242 - RNA, 19 nt, Artificial Sequence
  Description of Artificial Sequence: Synthetic oligonucleotide
  Sense strand starting at position 2511 of SEQ ID NO: 1242028
augcgucuugaguauuuau

SEQ ID NO: 1318243 - RNA, 19 nt, Artificial Sequence
  Description of Artificial Sequence: Synthetic oligonucleotide
  Antisense strand to SEQ ID NO: 1318242
auaaauacucaagacgcau

SEQ ID NO: 1318244 - RNA, 19 nt, Artificial Sequence
  Description of Artificial Sequence: Synthetic oligonucleotide
  Sense strand starting at position 2514 of SEQ ID NO: 1242028
cgucuugaguauuuaugac

SEQ ID NO: 1318245 - RNA, 19 nt, Artificial Sequence
  Description of Artificial Sequence: Synthetic oligonucleotide
  Antisense strand to SEQ ID NO: 1318244
gucauaaauacucaagacg

SEQ ID NO: 1318246 - RNA, 19 nt, Artificial Sequence
  Description of Artificial Sequence: Synthetic oligonucleotide
  Sense strand starting at position 2915 of SEQ ID NO: 1242028
agccuaacaccugaaaguu

SEQ ID NO: 1318247 - RNA, 19 nt, Artificial Sequence
  Description of Artificial Sequence: Synthetic oligonucleotide
  Antisense strand to SEQ ID NO: 1318246
aacuuucagguguuaggcu

SEQ ID NO: 1318248 - RNA, 19 nt, Artificial Sequence
  Description of Artificial Sequence: Synthetic oligonucleotide
  Sense strand starting at position 3021 of SEQ ID NO: 1242028
gugcuuguugccuuuacua

SEQ ID NO: 1318249 - RNA, 19 nt, Artificial Sequence
  Description of Artificial Sequence: Synthetic oligonucleotide
  Antisense strand to SEQ ID NO: 1318248
uaguaaaggcaacaagcac

SEQ ID NO: 1318250 - RNA, 19 nt, Artificial Sequence
  Description of Artificial Sequence: Synthetic oligonucleotide
  Sense strand starting at position 3063 of SEQ ID NO: 1242028
guggcuagcguuguguaau

SEQ ID NO: 1318251 - RNA, 19 nt, Artificial Sequence
  Description of Artificial Sequence: Synthetic oligonucleotide
  Antisense strand to SEQ ID NO: 1318250
auuacacaacgcuagccac

SEQ ID NO: 1318252 - RNA, 19 nt, Artificial Sequence
  Description of Artificial Sequence: Synthetic oligonucleotide
  Sense strand starting at position 3106 of SEQ ID NO: 1242028
gugcauaaaugagcaaacu

SEQ ID NO: 1318253 - RNA, 19 nt, Artificial Sequence
  Description of Artificial Sequence: Synthetic oligonucleotide
  Antisense strand to SEQ ID NO: 1318252
aguuugcucauuuaugcac

SEQ ID NO: 1318254 - RNA, 19 nt, Artificial Sequence
  Description of Artificial Sequence: Synthetic oligonucleotide
  Sense strand starting at position 3213 of SEQ ID NO: 1242028
auauguggcagugaacaau

SEQ ID NO: 1318255 - RNA, 19 nt, Artificial Sequence
  Description of Artificial Sequence: Synthetic oligonucleotide
  Antisense strand to SEQ ID NO: 1318254
auuguucacugccacauau

SEQ ID NO: 1318256 - RNA, 19 nt, Artificial Sequence
  Description of Artificial Sequence: Synthetic oligonucleotide
  Sense strand starting at position 3317 of SEQ ID NO: 1242028
aaaguaaacuaugugguga

SEQ ID NO: 1318257 - RNA, 19 nt, Artificial Sequence
  Description of Artificial Sequence: Synthetic oligonucleotide
  Antisense strand to SEQ ID NO: 1318256
ucaccacauaguuuacuuu

SEQ ID NO: 1318258 - RNA, 19 nt, Artificial Sequence
  Description of Artificial Sequence: Synthetic oligonucleotide
  Sense strand starting at position 3360 of SEQ ID NO: 1242028
acaucuuaggguugagguu

SEQ ID NO: 1318259 - RNA, 19 nt, Artificial Sequence
  Description of Artificial Sequence: Synthetic oligonucleotide
  Antisense strand to SEQ ID NO: 1318258
aaccucaacccuaagaugu

SEQ ID NO: 1318260 - RNA, 19 nt, Artificial Sequence
  Description of Artificial Sequence: Synthetic oligonucleotide
  Sense strand starting at position 3361 of SEQ ID NO: 1242028
caucuuaggguugagguua

SEQ ID NO: 1318261 - RNA, 19 nt, Artificial Sequence
  Description of Artificial Sequence: Synthetic oligonucleotide
  Antisense strand to SEQ ID NO: 1318260
uaaccucaacccuaagaug

SEQ ID NO: 1318262 - RNA, 19 nt, Artificial Sequence
  Description of Artificial Sequence: Synthetic oligonucleotide
  Sense strand starting at position 3366 of SEQ ID NO: 1242028
uaggguugagguuacaauu

SEQ ID NO: 1318263 - RNA, 19 nt, Artificial Sequence
  Description of Artificial Sequence: Synthetic oligonucleotide
  Antisense strand to SEQ ID NO: 1318262
aauuguaaccucaacccua

SEQ ID NO: 1318264 - RNA, 19 nt, Artificial Sequence
  Description of Artificial Sequence: Synthetic oligonucleotide
  Sense strand starting at position 3433 of SEQ ID NO: 1242028
uugacauuggccugaagga

SEQ ID NO: 1318265 - RNA, 19 nt, Artificial Sequence
  Description of Artificial Sequence: Synthetic oligonucleotide
  Antisense strand to SEQ ID NO: 1318264
uccuucaggccaaugucaa

SEQ ID NO: 1318266 - RNA, 19 nt, Artificial Sequence
  Description of Artificial Sequence: Synthetic oligonucleotide
  Sense strand starting at position 3442 of SEQ ID NO: 1242028
gccugaaggagguaacagu

SEQ ID NO: 1318267 - RNA, 19 nt, Artificial Sequence
  Description of Artificial Sequence: Synthetic oligonucleotide
  Antisense strand to SEQ ID NO: 1318266
acuguuaccuccuucaggc

SEQ ID NO: 1318268 - RNA, 19 nt, Artificial Sequence
  Description of Artificial Sequence: Synthetic oligonucleotide
  Sense strand starting at position 3455 of SEQ ID NO: 1242028
aacaguguggacugagaga

SEQ ID NO: 1318269 - RNA, 19 nt, Artificial Sequence
  Description of Artificial Sequence: Synthetic oligonucleotide
  Antisense strand to SEQ ID NO: 1318268
ucucucaguccacacuguu

SEQ ID NO: 1318270 - RNA, 19 nt, Artificial Sequence
  Description of Artificial Sequence: Synthetic oligonucleotide
  Sense strand starting at position 3514 of SEQ ID NO: 1242028
agccgucaggcagaagauu

SEQ ID NO: 1318271 - RNA, 19 nt, Artificial Sequence
  Description of Artificial Sequence: Synthetic oligonucleotide
  Antisense strand to SEQ ID NO: 1318270
aaucuucugccugacggcu

SEQ ID NO: 1318272 - RNA, 19 nt, Artificial Sequence
  Description of Artificial Sequence: Synthetic oligonucleotide
  Sense strand starting at position 3522 of SEQ ID NO: 1242028
ggcagaagauuaucuagca

SEQ ID NO: 1318273 - RNA, 19 nt, Artificial Sequence
  Description of Artificial Sequence: Synthetic oligonucleotide
  Antisense strand to SEQ ID NO: 1318272
ugcuagauaaucuucugcc

SEQ ID NO: 1318274 - RNA, 19 nt, Artificial Sequence
  Description of Artificial Sequence: Synthetic oligonucleotide
  Sense strand starting at position 3618 of SEQ ID NO: 1242028
uuagcaaauuuguuccgua

SEQ ID NO: 1318275 - RNA, 19 nt, Artificial Sequence
  Description of Artificial Sequence: Synthetic oligonucleotide
  Antisense strand to SEQ ID NO: 1318274
uacggaacaaauuugcuaa

SEQ ID NO: 1318276 - RNA, 19 nt, Artificial Sequence
  Description of Artificial Sequence: Synthetic oligonucleotide
  Sense strand starting at position 3619 of SEQ ID NO: 1242028
uagcaaauuuguuccguaa

SEQ ID NO: 1318277 - RNA, 19 nt, Artificial Sequence
  Description of Artificial Sequence: Synthetic oligonucleotide
  Antisense strand to SEQ ID NO: 1318276
uuacggaacaaauuugcua

SEQ ID NO: 1318278 - RNA, 19 nt, Artificial Sequence
  Description of Artificial Sequence: Synthetic oligonucleotide
  Sense strand starting at position 3646 of SEQ ID NO: 1242028
ggaguaaauguuugaggcu

SEQ ID NO: 1318279 - RNA, 19 nt, Artificial Sequence
  Description of Artificial Sequence: Synthetic oligonucleotide
  Antisense strand to SEQ ID NO: 1318278
agccucaaacauuuacucc

SEQ ID NO: 1318280 - RNA, 19 nt, Artificial Sequence
  Description of Artificial Sequence: Synthetic oligonucleotide
  Sense strand starting at position 3672 of SEQ ID NO: 1242028
ccauguggccuccaucaua

SEQ ID NO: 1318281 - RNA, 19 nt, Artificial Sequence
  Description of Artificial Sequence: Synthetic oligonucleotide
  Antisense strand to SEQ ID NO: 1318280
uaugauggaggccacaugg

SEQ ID NO: 1318282 - RNA, 19 nt, Artificial Sequence
  Description of Artificial Sequence: Synthetic oligonucleotide
  Sense strand starting at position 3734 of SEQ ID NO: 1242028
auauguaacauaugagugu

SEQ ID NO: 1318283 - RNA, 19 nt, Artificial Sequence
  Description of Artificial Sequence: Synthetic oligonucleotide
  Antisense strand to SEQ ID NO: 1318282
acacucauauguuacauau

SEQ ID NO: 1318284 - RNA, 19 nt, Artificial Sequence
  Description of Artificial Sequence: Synthetic oligonucleotide
  Sense strand starting at position 3861 of SEQ ID NO: 1242028
gagcauugacuuugaguga

SEQ ID NO: 1318285 - RNA, 19 nt, Artificial Sequence
  Description of Artificial Sequence: Synthetic oligonucleotide
  Antisense strand to SEQ ID NO: 1318284
ucacucaaagucaaugcuc

SEQ ID NO: 1318286 - RNA, 19 nt, Artificial Sequence
  Description of Artificial Sequence: Synthetic oligonucleotide
  Sense strand starting at position 3864 of SEQ ID NO: 1242028
cauugacuuugagugagau

SEQ ID NO: 1318287 - RNA, 19 nt, Artificial Sequence
  Description of Artificial Sequence: Synthetic oligonucleotide
  Antisense strand to SEQ ID NO: 1318286
aucucacucaaagucaaug

SEQ ID NO: 1318288 - RNA, 19 nt, Artificial Sequence
  Description of Artificial Sequence: Synthetic oligonucleotide
  Sense strand starting at position 3865 of SEQ ID NO: 1242028
auugacuuugagugagaug

SEQ ID NO: 1318289 - RNA, 19 nt, Artificial Sequence
  Description of Artificial Sequence: Synthetic oligonucleotide
  Antisense strand to SEQ ID NO: 1318288
caucucacucaaagucaau

SEQ ID NO: 1318290 - RNA, 19 nt, Artificial Sequence
  Description of Artificial Sequence: Synthetic oligonucleotide
  Sense strand starting at position 125 of SEQ ID NO: 1242029
cugauuaugugacuuaucu

SEQ ID NO: 1318291 - RNA, 19 nt, Artificial Sequence
  Description of Artificial Sequence: Synthetic oligonucleotide
  Antisense strand to SEQ ID NO: 1318290
agauaagucacauaaucag

SEQ ID NO: 1318292 - RNA, 19 nt, Artificial Sequence
  Description of Artificial Sequence: Synthetic oligonucleotide
  Sense strand starting at position 343 of SEQ ID NO: 1242029
uguuuccaucuggaacuua

SEQ ID NO: 1318293 - RNA, 19 nt, Artificial Sequence
  Description of Artificial Sequence: Synthetic oligonucleotide
  Antisense strand to SEQ ID NO: 1318292
uaaguuccagauggaaaca

SEQ ID NO: 1318294 - RNA, 19 nt, Artificial Sequence
  Description of Artificial Sequence: Synthetic oligonucleotide
  Sense strand starting at position 808 of SEQ ID NO: 1242029
cucaguauagguuguuaaa

SEQ ID NO: 1318295 - RNA, 19 nt, Artificial Sequence
  Description of Artificial Sequence: Synthetic oligonucleotide
  Antisense strand to SEQ ID NO: 1318294
uuuaacaaccuauacugag

SEQ ID NO: 1318296 - RNA, 19 nt, Artificial Sequence
  Description of Artificial Sequence: Synthetic oligonucleotide
  Sense strand starting at position 844 of SEQ ID NO: 1242029
cucucauggcaccaguaaa

SEQ ID NO: 1318297 - RNA, 19 nt, Artificial Sequence
  Description of Artificial Sequence: Synthetic oligonucleotide
  Antisense strand to SEQ ID NO: 1318296
uuuacuggugccaugagag

SEQ ID NO: 1318298 - RNA, 19 nt, Artificial Sequence
  Description of Artificial Sequence: Synthetic oligonucleotide
  Sense strand starting at position 923 of SEQ ID NO: 1242029
guuaucucccacuagacua

SEQ ID NO: 1318299 - RNA, 19 nt, Artificial Sequence
  Description of Artificial Sequence: Synthetic oligonucleotide
  Antisense strand to SEQ ID NO: 1318298
uagucuagugggagauaac

SEQ ID NO: 1318300 - RNA, 19 nt, Artificial Sequence
  Description of Artificial Sequence: Synthetic oligonucleotide
  Sense strand starting at position 1026 of SEQ ID NO: 1242029
guaacaaauguuuguugaa

SEQ ID NO: 1318301 - RNA, 19 nt, Artificial Sequence
  Description of Artificial Sequence: Synthetic oligonucleotide
  Antisense strand to SEQ ID NO: 1318300
uucaacaaacauuuguuac

SEQ ID NO: 1318302 - RNA, 19 nt, Artificial Sequence
  Description of Artificial Sequence: Synthetic oligonucleotide
  Sense strand starting at position 1123 of SEQ ID NO: 1242029
ccuacuagguagguguaau

SEQ ID NO: 1318303 - RNA, 19 nt, Artificial Sequence
  Description of Artificial Sequence: Synthetic oligonucleotide
  Antisense strand to SEQ ID NO: 1318302
auuacaccuaccuaguagg

SEQ ID NO: 1318304 - RNA, 19 nt, Artificial Sequence
  Description of Artificial Sequence: Synthetic oligonucleotide
  Sense strand starting at position 1124 of SEQ ID NO: 1242029
cuacuagguagguguaaua

SEQ ID NO: 1318305 - RNA, 19 nt, Artificial Sequence
  Description of Artificial Sequence: Synthetic oligonucleotide
  Antisense strand to SEQ ID NO: 1318304
uauuacaccuaccuaguag

SEQ ID NO: 1318306 - RNA, 19 nt, Artificial Sequence
  Description of Artificial Sequence: Synthetic oligonucleotide
  Sense strand starting at position 1426 of SEQ ID NO: 1242029
ggcugugaauucccugaac

SEQ ID NO: 1318307 - RNA, 19 nt, Artificial Sequence
  Description of Artificial Sequence: Synthetic oligonucleotide
  Antisense strand to SEQ ID NO: 1318306
guucagggaauucacagcc

SEQ ID NO: 1318308 - RNA, 19 nt, Artificial Sequence
  Description of Artificial Sequence: Synthetic oligonucleotide
  Sense strand starting at position 1446 of SEQ ID NO: 1242029
cgaaguagauuccuugcca

SEQ ID NO: 1318309 - RNA, 19 nt, Artificial Sequence
  Description of Artificial Sequence: Synthetic oligonucleotide
  Antisense strand to SEQ ID NO: 1318308
uggcaaggaaucuacuucg

SEQ ID NO: 1318310 - RNA, 19 nt, Artificial Sequence
  Description of Artificial Sequence: Synthetic oligonucleotide
  Sense strand starting at position 1447 of SEQ ID NO: 1242029
gaaguagauuccuugccaa

SEQ ID NO: 1318311 - RNA, 19 nt, Artificial Sequence
  Description of Artificial Sequence: Synthetic oligonucleotide
  Antisense strand to SEQ ID NO: 1318310
uuggcaaggaaucuacuuc

SEQ ID NO: 1318312 - RNA, 19 nt, Artificial Sequence
  Description of Artificial Sequence: Synthetic oligonucleotide
  Sense strand starting at position 1450 of SEQ ID NO: 1242029
guagauuccuugccaagag

SEQ ID NO: 1318313 - RNA, 19 nt, Artificial Sequence
  Description of Artificial Sequence: Synthetic oligonucleotide
  Antisense strand to SEQ ID NO: 1318312
cucuuggcaaggaaucuac

SEQ ID NO: 1318314 - RNA, 19 nt, Artificial Sequence
  Description of Artificial Sequence: Synthetic oligonucleotide
  Sense strand starting at position 1655 of SEQ ID NO: 1242029
agggaaauuucucagaagu

SEQ ID NO: 1318315 - RNA, 19 nt, Artificial Sequence
  Description of Artificial Sequence: Synthetic oligonucleotide
  Antisense strand to SEQ ID NO: 1318314
acuucugagaaauuucccu

SEQ ID NO: 1318316 - RNA, 19 nt, Artificial Sequence
  Description of Artificial Sequence: Synthetic oligonucleotide
  Sense strand starting at position 1657 of SEQ ID NO: 1242029
ggaaauuucucagaaguaa

SEQ ID NO: 1318317 - RNA, 19 nt, Artificial Sequence
  Description of Artificial Sequence: Synthetic oligonucleotide
  Antisense strand to SEQ ID NO: 1318316
uuacuucugagaaauuucc

SEQ ID NO: 1318318 - RNA, 19 nt, Artificial Sequence
  Description of Artificial Sequence: Synthetic oligonucleotide
  Sense strand starting at position 2478 of SEQ ID NO: 1242029
agcagcgaauauuuguuaa

SEQ ID NO: 1318319 - RNA, 19 nt, Artificial Sequence
  Description of Artificial Sequence: Synthetic oligonucleotide
  Antisense strand to SEQ ID NO: 1318318
uuaacaaauauucgcugcu

SEQ ID NO: 1318320 - RNA, 19 nt, Artificial Sequence
  Description of Artificial Sequence: Synthetic oligonucleotide
  Sense strand starting at position 2482 of SEQ ID NO: 1242029
gcgaauauuuguuaaauga

SEQ ID NO: 1318321 - RNA, 19 nt, Artificial Sequence
  Description of Artificial Sequence: Synthetic oligonucleotide
  Antisense strand to SEQ ID NO: 1318320
ucauuuaacaaauauucgc

SEQ ID NO: 1318322 - RNA, 19 nt, Artificial Sequence
  Description of Artificial Sequence: Synthetic oligonucleotide
  Sense strand starting at position 2816 of SEQ ID NO: 1242029
cccuuagaagacuguaagu

SEQ ID NO: 1318323 - RNA, 19 nt, Artificial Sequence
  Description of Artificial Sequence: Synthetic oligonucleotide
  Antisense strand to SEQ ID NO: 1318322
acuuacagucuucuaaggg

SEQ ID NO: 1318324 - RNA, 19 nt, Artificial Sequence
  Description of Artificial Sequence: Synthetic oligonucleotide
  Sense strand starting at position 2825 of SEQ ID NO: 1242029
gacuguaaguugucccaaa

SEQ ID NO: 1318325 - RNA, 19 nt, Artificial Sequence
  Description of Artificial Sequence: Synthetic oligonucleotide
  Antisense strand to SEQ ID NO: 1318324
uuugggacaacuuacaguc

SEQ ID NO: 1318326 - RNA, 19 nt, Artificial Sequence
  Description of Artificial Sequence: Synthetic oligonucleotide
  Sense strand starting at position 2826 of SEQ ID NO: 1242029
acuguaaguugucccaaag

SEQ ID NO: 1318327 - RNA, 19 nt, Artificial Sequence
  Description of Artificial Sequence: Synthetic oligonucleotide
  Antisense strand to SEQ ID NO: 1318326
cuuugggacaacuuacagu

SEQ ID NO: 1318328 - RNA, 19 nt, Artificial Sequence
  Description of Artificial Sequence: Synthetic oligonucleotide
  Sense strand starting at position 2832 of SEQ ID NO: 1242029
aguugucccaaagauaggu

SEQ ID NO: 1318329 - RNA, 19 nt, Artificial Sequence
  Description of Artificial Sequence: Synthetic oligonucleotide
  Antisense strand to SEQ ID NO: 1318328
accuaucuuugggacaacu

SEQ ID NO: 1318330 - RNA, 19 nt, Artificial Sequence
  Description of Artificial Sequence: Synthetic oligonucleotide
  Sense strand starting at position 2893 of SEQ ID NO: 1242029
ccgcaugugaaagagauua

SEQ ID NO: 1318331 - RNA, 19 nt, Artificial Sequence
  Description of Artificial Sequence: Synthetic oligonucleotide
  Antisense strand to SEQ ID NO: 1318330
uaaucucuuucacaugcgg

SEQ ID NO: 1318332 - RNA, 19 nt, Artificial Sequence
  Description of Artificial Sequence: Synthetic oligonucleotide
  Sense strand starting at position 2957 of SEQ ID NO: 1242029
gugggcguuguugaggaau

SEQ ID NO: 1318333 - RNA, 19 nt, Artificial Sequence
  Description of Artificial Sequence: Synthetic oligonucleotide
  Antisense strand to SEQ ID NO: 1318332
auuccucaacaacgcccac

SEQ ID NO: 1318334 - RNA, 19 nt, Artificial Sequence
  Description of Artificial Sequence: Synthetic oligonucleotide
  Sense strand starting at position 3010 of SEQ ID NO: 1242029
gaguuaauccugcaguuga

SEQ ID NO: 1318335 - RNA, 19 nt, Artificial Sequence
  Description of Artificial Sequence: Synthetic oligonucleotide
  Antisense strand to SEQ ID NO: 1318334
ucaacugcaggauuaacuc

SEQ ID NO: 1318336 - RNA, 19 nt, Artificial Sequence
  Description of Artificial Sequence: Synthetic oligonucleotide
  Sense strand starting at position 3130 of SEQ ID NO: 1242029
ugcuaagaucagggagcau

SEQ ID NO: 1318337 - RNA, 19 nt, Artificial Sequence
  Description of Artificial Sequence: Synthetic oligonucleotide
  Antisense strand to SEQ ID NO: 1318336
augcucccugaucuuagca

SEQ ID NO: 1318338 - RNA, 19 nt, Artificial Sequence
  Description of Artificial Sequence: Synthetic oligonucleotide
  Sense strand starting at position 3195 of SEQ ID NO: 1242029
ggucuacauggccaguuau

SEQ ID NO: 1318339 - RNA, 19 nt, Artificial Sequence
  Description of Artificial Sequence: Synthetic oligonucleotide
  Antisense strand to SEQ ID NO: 1318338
auaacuggccauguagacc

SEQ ID NO: 1318340 - RNA, 19 nt, Artificial Sequence
  Description of Artificial Sequence: Synthetic oligonucleotide
  Sense strand starting at position 3201 of SEQ ID NO: 1242029
cauggccaguuauugaaga

SEQ ID NO: 1318341 - RNA, 19 nt, Artificial Sequence
  Description of Artificial Sequence: Synthetic oligonucleotide
  Antisense strand to SEQ ID NO: 1318340
ucuucaauaacuggccaug

SEQ ID NO: 1318342 - RNA, 19 nt, Artificial Sequence
  Description of Artificial Sequence: Synthetic oligonucleotide
  Sense strand starting at position 3235 of SEQ ID NO: 1242029
ggagaaugguuccucucag

SEQ ID NO: 1318343 - RNA, 19 nt, Artificial Sequence
  Description of Artificial Sequence: Synthetic oligonucleotide
  Antisense strand to SEQ ID NO: 1318342
cugagaggaaccauucucc

SEQ ID NO: 1318344 - RNA, 19 nt, Artificial Sequence
  Description of Artificial Sequence: Synthetic oligonucleotide
  Sense strand starting at position 3236 of SEQ ID NO: 1242029
gagaaugguuccucucagc

SEQ ID NO: 1318345 - RNA, 19 nt, Artificial Sequence
  Description of Artificial Sequence: Synthetic oligonucleotide
  Antisense strand to SEQ ID NO: 1318344
gcugagaggaaccauucuc

SEQ ID NO: 1318346 - RNA, 19 nt, Artificial Sequence
  Description of Artificial Sequence: Synthetic oligonucleotide
  Sense strand starting at position 3313 of SEQ ID NO: 1242029
ucccaauacugagcuguga

SEQ ID NO: 1318347 - RNA, 19 nt, Artificial Sequence
  Description of Artificial Sequence: Synthetic oligonucleotide
  Antisense strand to SEQ ID NO: 1318346
ucacagcucaguauuggga

SEQ ID NO: 1318348 - RNA, 19 nt, Artificial Sequence
  Description of Artificial Sequence: Synthetic oligonucleotide
  Sense strand starting at position 3317 of SEQ ID NO: 1242029
aauacugagcugugauguu

SEQ ID NO: 1318349 - RNA, 19 nt, Artificial Sequence
  Description of Artificial Sequence: Synthetic oligonucleotide
  Antisense strand to SEQ ID NO: 1318348
aacaucacagcucaguauu

SEQ ID NO: 1318350 - RNA, 19 nt, Artificial Sequence
  Description of Artificial Sequence: Synthetic oligonucleotide
  Sense strand starting at position 3348 of SEQ ID NO: 1242029
ggcagcuugagguagaaga

SEQ ID NO: 1318351 - RNA, 19 nt, Artificial Sequence
  Description of Artificial Sequence: Synthetic oligonucleotide
  Antisense strand to SEQ ID NO: 1318350
ucuucuaccucaagcugcc

SEQ ID NO: 1318352 - RNA, 19 nt, Artificial Sequence
  Description of Artificial Sequence: Synthetic oligonucleotide
  Sense strand starting at position 3387 of SEQ ID NO: 1242029
uuaccuugccaaggaagua

SEQ ID NO: 1318353 - RNA, 19 nt, Artificial Sequence
  Description of Artificial Sequence: Synthetic oligonucleotide
  Antisense strand to SEQ ID NO: 1318352
uacuuccuuggcaagguaa

SEQ ID NO: 1318354 - RNA, 19 nt, Artificial Sequence
  Description of Artificial Sequence: Synthetic oligonucleotide
  Sense strand starting at position 3402 of SEQ ID NO: 1242029
aguagaugacuuugccuca

SEQ ID NO: 1318355 - RNA, 19 nt, Artificial Sequence
  Description of Artificial Sequence: Synthetic oligonucleotide
  Antisense strand to SEQ ID NO: 1318354
ugaggcaaagucaucuacu

SEQ ID NO: 1318356 - RNA, 19 nt, Artificial Sequence
  Description of Artificial Sequence: Synthetic oligonucleotide
  Sense strand starting at position 3403 of SEQ ID NO: 1242029
guagaugacuuugccucau

SEQ ID NO: 1318357 - RNA, 19 nt, Artificial Sequence
  Description of Artificial Sequence: Synthetic oligonucleotide
  Antisense strand to SEQ ID NO: 1318356
augaggcaaagucaucuac

SEQ ID NO: 1318358 - RNA, 19 nt, Artificial Sequence
  Description of Artificial Sequence: Synthetic oligonucleotide
  Sense strand starting at position 3603 of SEQ ID NO: 1242029
gcacgaaugcaucaucugu

SEQ ID NO: 1318359 - RNA, 19 nt, Artificial Sequence
  Description of Artificial Sequence: Synthetic oligonucleotide
  Antisense strand to SEQ ID NO: 1318358
acagaugaugcauucgugc

SEQ ID NO: 1318360 - RNA, 19 nt, Artificial Sequence
  Description of Artificial Sequence: Synthetic oligonucleotide
  Sense strand starting at position 3731 of SEQ ID NO: 1242029
gagcaaaucuuauccgucu

SEQ ID NO: 1318361 - RNA, 19 nt, Artificial Sequence
  Description of Artificial Sequence: Synthetic oligonucleotide
  Antisense strand to SEQ ID NO: 1318360
agacggauaagauuugcuc

SEQ ID NO: 1318362 - RNA, 19 nt, Artificial Sequence
  Description of Artificial Sequence: Synthetic oligonucleotide
  Sense strand starting at position 3785 of SEQ ID NO: 1242029
gugauacacugauucuaga

SEQ ID NO: 1318363 - RNA, 19 nt, Artificial Sequence
  Description of Artificial Sequence: Synthetic oligonucleotide
  Antisense strand to SEQ ID NO: 1318362
ucuagaaucaguguaucac

SEQ ID NO: 1318364 - RNA, 19 nt, Artificial Sequence
  Description of Artificial Sequence: Synthetic oligonucleotide
  Sense strand starting at position 3855 of SEQ ID NO: 1242029
agaccuugucaauaguacu

SEQ ID NO: 1318365 - RNA, 19 nt, Artificial Sequence
  Description of Artificial Sequence: Synthetic oligonucleotide
  Antisense strand to SEQ ID NO: 1318364
aguacuauugacaaggucu

SEQ ID NO: 1318366 - RNA, 19 nt, Artificial Sequence
  Description of Artificial Sequence: Synthetic oligonucleotide
  Sense strand starting at position 3861 of SEQ ID NO: 1242029
ugucaauaguacuuguuua

SEQ ID NO: 1318367 - RNA, 19 nt, Artificial Sequence
  Description of Artificial Sequence: Synthetic oligonucleotide
  Antisense strand to SEQ ID NO: 1318366
uaaacaaguacuauugaca

SEQ ID NO: 1318368 - RNA, 19 nt, Artificial Sequence
  Description of Artificial Sequence: Synthetic oligonucleotide
  Sense strand starting at position 3869 of SEQ ID NO: 1242029
guacuuguuuaucuuaaca

SEQ ID NO: 1318369 - RNA, 19 nt, Artificial Sequence
  Description of Artificial Sequence: Synthetic oligonucleotide
  Antisense strand to SEQ ID NO: 1318368
uguuaagauaaacaaguac

SEQ ID NO: 1318370 - RNA, 19 nt, Artificial Sequence
  Description of Artificial Sequence: Synthetic oligonucleotide
  Sense strand starting at position 22 of SEQ ID NO: 1242030
ggaaauguauucccacugu

SEQ ID NO: 1318371 - RNA, 19 nt, Artificial Sequence
  Description of Artificial Sequence: Synthetic oligonucleotide
  Antisense strand to SEQ ID NO: 1318370
acagugggaauacauuucc

SEQ ID NO: 1318372 - RNA, 19 nt, Artificial Sequence
  Description of Artificial Sequence: Synthetic oligonucleotide
  Sense strand starting at position 58 of SEQ ID NO: 1242030
ugacaacccuuagucaagu

SEQ ID NO: 1318373 - RNA, 19 nt, Artificial Sequence
  Description of Artificial Sequence: Synthetic oligonucleotide
  Antisense strand to SEQ ID NO: 1318372
acuugacuaaggguuguca

SEQ ID NO: 1318374 - RNA, 19 nt, Artificial Sequence
  Description of Artificial Sequence: Synthetic oligonucleotide
  Sense strand starting at position 95 of SEQ ID NO: 1242030
gcugaaacaucuguaacag

SEQ ID NO: 1318375 - RNA, 19 nt, Artificial Sequence
  Description of Artificial Sequence: Synthetic oligonucleotide
  Antisense strand to SEQ ID NO: 1318374
cuguuacagauguuucagc

SEQ ID NO: 1318376 - RNA, 19 nt, Artificial Sequence
  Description of Artificial Sequence: Synthetic oligonucleotide
  Sense strand starting at position 129 of SEQ ID NO: 1242030
gugaaauggucaguugcau

SEQ ID NO: 1318377 - RNA, 19 nt, Artificial Sequence
  Description of Artificial Sequence: Synthetic oligonucleotide
  Antisense strand to SEQ ID NO: 1318376
augcaacugaccauuucac

SEQ ID NO: 1318378 - RNA, 19 nt, Artificial Sequence
  Description of Artificial Sequence: Synthetic oligonucleotide
  Sense strand starting at position 137 of SEQ ID NO: 1242030
gucaguugcauguacacaa

SEQ ID NO: 1318379 - RNA, 19 nt, Artificial Sequence
  Description of Artificial Sequence: Synthetic oligonucleotide
  Antisense strand to SEQ ID NO: 1318378
uuguguacaugcaacugac

SEQ ID NO: 1318380 - RNA, 19 nt, Artificial Sequence
  Description of Artificial Sequence: Synthetic oligonucleotide
  Sense strand starting at position 338 of SEQ ID NO: 1242030
aagcauaauuuacggaaga

SEQ ID NO: 1318381 - RNA, 19 nt, Artificial Sequence
  Description of Artificial Sequence: Synthetic oligonucleotide
  Antisense strand to SEQ ID NO: 1318380
ucuuccguaaauuaugcuu

SEQ ID NO: 1318382 - RNA, 19 nt, Artificial Sequence
  Description of Artificial Sequence: Synthetic oligonucleotide
  Sense strand starting at position 356 of SEQ ID NO: 1242030
agucaacuacugugugauu

SEQ ID NO: 1318383 - RNA, 19 nt, Artificial Sequence
  Description of Artificial Sequence: Synthetic oligonucleotide
  Antisense strand to SEQ ID NO: 1318382
aaucacacaguaguugacu

SEQ ID NO: 1318384 - RNA, 19 nt, Artificial Sequence
  Description of Artificial Sequence: Synthetic oligonucleotide
  Sense strand starting at position 357 of SEQ ID NO: 1242030
gucaacuacugugugauuu

SEQ ID NO: 1318385 - RNA, 19 nt, Artificial Sequence
  Description of Artificial Sequence: Synthetic oligonucleotide
  Antisense strand to SEQ ID NO: 1318384
aaaucacacaguaguugac

SEQ ID NO: 1318386 - RNA, 19 nt, Artificial Sequence
  Description of Artificial Sequence: Synthetic oligonucleotide
  Sense strand starting at position 588 of SEQ ID NO: 1242030
ggcccaagauuccauuuaa

SEQ ID NO: 1318387 - RNA, 19 nt, Artificial Sequence
  Description of Artificial Sequence: Synthetic oligonucleotide
  Antisense strand to SEQ ID NO: 1318386
uuaaauggaaucuugggcc

SEQ ID NO: 1318388 - RNA, 19 nt, Artificial Sequence
  Description of Artificial Sequence: Synthetic oligonucleotide
  Sense strand starting at position 625 of SEQ ID NO: 1242030
ggcagaaaucucugggagu

SEQ ID NO: 1318389 - RNA, 19 nt, Artificial Sequence
  Description of Artificial Sequence: Synthetic oligonucleotide
  Antisense strand to SEQ ID NO: 1318388
acucccagagauuucugcc

SEQ ID NO: 1318390 - RNA, 19 nt, Artificial Sequence
  Description of Artificial Sequence: Synthetic oligonucleotide
  Sense strand starting at position 650 of SEQ ID NO: 1242030
aagguaguuuaaccacgaa

SEQ ID NO: 1318391 - RNA, 19 nt, Artificial Sequence
  Description of Artificial Sequence: Synthetic oligonucleotide
  Antisense strand to SEQ ID NO: 1318390
uucgugguuaaacuaccuu

SEQ ID NO: 1318392 - RNA, 19 nt, Artificial Sequence
  Description of Artificial Sequence: Synthetic oligonucleotide
  Sense strand starting at position 716 of SEQ ID NO: 1242030
ggucuugccaaggagucuu

SEQ ID NO: 1318393 - RNA, 19 nt, Artificial Sequence
  Description of Artificial Sequence: Synthetic oligonucleotide
  Antisense strand to SEQ ID NO: 1318392
aagacuccuuggcaagacc

SEQ ID NO: 1318394 - RNA, 19 nt, Artificial Sequence
  Description of Artificial Sequence: Synthetic oligonucleotide
  Sense strand starting at position 728 of SEQ ID NO: 1242030
gagucuuccacagggagag

SEQ ID NO: 1318395 - RNA, 19 nt, Artificial Sequence
  Description of Artificial Sequence: Synthetic oligonucleotide
  Antisense strand to SEQ ID NO: 1318394
cucucccuguggaagacuc

SEQ ID NO: 1318396 - RNA, 19 nt, Artificial Sequence
  Description of Artificial Sequence: Synthetic oligonucleotide
  Sense strand starting at position 1978 of SEQ ID NO: 1242030
cgguuucucgcgagagaaa

SEQ ID NO: 1318397 - RNA, 19 nt, Artificial Sequence
  Description of Artificial Sequence: Synthetic oligonucleotide
  Antisense strand to SEQ ID NO: 1318396
uuucucucgcgagaaaccg

SEQ ID NO: 1318398 - RNA, 19 nt, Artificial Sequence
  Description of Artificial Sequence: Synthetic oligonucleotide
  Sense strand starting at position 1979 of SEQ ID NO: 1242030
gguuucucgcgagagaaau

SEQ ID NO: 1318399 - RNA, 19 nt, Artificial Sequence
  Description of Artificial Sequence: Synthetic oligonucleotide
  Antisense strand to SEQ ID NO: 1318398
auuucucucgcgagaaacc

SEQ ID NO: 1318400 - RNA, 19 nt, Artificial Sequence
  Description of Artificial Sequence: Synthetic oligonucleotide
  Sense strand starting at position 2260 of SEQ ID NO: 1242030
gcggcugcgagguuuagau

SEQ ID NO: 1318401 - RNA, 19 nt, Artificial Sequence
  Description of Artificial Sequence: Synthetic oligonucleotide
  Antisense strand to SEQ ID NO: 1318400
aucuaaaccucgcagccgc

SEQ ID NO: 1318402 - RNA, 19 nt, Artificial Sequence
  Description of Artificial Sequence: Synthetic oligonucleotide
  Sense strand starting at position 2268 of SEQ ID NO: 1242030
gagguuuagauccgagauu

SEQ ID NO: 1318403 - RNA, 19 nt, Artificial Sequence
  Description of Artificial Sequence: Synthetic oligonucleotide
  Antisense strand to SEQ ID NO: 1318402
aaucucggaucuaaaccuc

SEQ ID NO: 1318404 - RNA, 19 nt, Artificial Sequence
  Description of Artificial Sequence: Synthetic oligonucleotide
  Sense strand starting at position 2749 of SEQ ID NO: 1242030
gguucaucuggaggacucu

SEQ ID NO: 1318405 - RNA, 19 nt, Artificial Sequence
  Description of Artificial Sequence: Synthetic oligonucleotide
  Antisense strand to SEQ ID NO: 1318404
agaguccuccagaugaacc

SEQ ID NO: 1318406 - RNA, 19 nt, Artificial Sequence
  Description of Artificial Sequence: Synthetic oligonucleotide
  Sense strand starting at position 2847 of SEQ ID NO: 1242030
guggcuuugaaagguauag

SEQ ID NO: 1318407 - RNA, 19 nt, Artificial Sequence
  Description of Artificial Sequence: Synthetic oligonucleotide
  Antisense strand to SEQ ID NO: 1318406
cuauaccuuucaaagccac

SEQ ID NO: 1318408 - RNA, 19 nt, Artificial Sequence
  Description of Artificial Sequence: Synthetic oligonucleotide
  Sense strand starting at position 2849 of SEQ ID NO: 1242030
ggcuuugaaagguauagua

SEQ ID NO: 1318409 - RNA, 19 nt, Artificial Sequence
  Description of Artificial Sequence: Synthetic oligonucleotide
  Antisense strand to SEQ ID NO: 1318408
uacuauaccuuucaaagcc

SEQ ID NO: 1318410 - RNA, 19 nt, Artificial Sequence
  Description of Artificial Sequence: Synthetic oligonucleotide
  Sense strand starting at position 2851 of SEQ ID NO: 1242030
cuuugaaagguauaguauu

SEQ ID NO: 1318411 - RNA, 19 nt, Artificial Sequence
  Description of Artificial Sequence: Synthetic oligonucleotide
  Antisense strand to SEQ ID NO: 1318410
aauacuauaccuuucaaag

SEQ ID NO: 1318412 - RNA, 19 nt, Artificial Sequence
  Description of Artificial Sequence: Synthetic oligonucleotide
  Sense strand starting at position 2858 of SEQ ID NO: 1242030
agguauaguauuuguggca

SEQ ID NO: 1318413 - RNA, 19 nt, Artificial Sequence
  Description of Artificial Sequence: Synthetic oligonucleotide
  Antisense strand to SEQ ID NO: 1318412
ugccacaaauacuauaccu

SEQ ID NO: 1318414 - RNA, 19 nt, Artificial Sequence
  Description of Artificial Sequence: Synthetic oligonucleotide
  Sense strand starting at position 2859 of SEQ ID NO: 1242030
gguauaguauuuguggcau

SEQ ID NO: 1318415 - RNA, 19 nt, Artificial Sequence
  Description of Artificial Sequence: Synthetic oligonucleotide
  Antisense strand to SEQ ID NO: 1318414
augccacaaauacuauacc

SEQ ID NO: 1318416 - RNA, 19 nt, Artificial Sequence
  Description of Artificial Sequence: Synthetic oligonucleotide
  Sense strand starting at position 3052 of SEQ ID NO: 1242030
gaauguaucuuguugaaag

SEQ ID NO: 1318417 - RNA, 19 nt, Artificial Sequence
  Description of Artificial Sequence: Synthetic oligonucleotide
  Antisense strand to SEQ ID NO: 1318416
cuuucaacaagauacauuc

SEQ ID NO: 1318418 - RNA, 19 nt, Artificial Sequence
  Description of Artificial Sequence: Synthetic oligonucleotide
  Sense strand starting at position 3168 of SEQ ID NO: 1242030
acuuguaguguccaccaca

SEQ ID NO: 1318419 - RNA, 19 nt, Artificial Sequence
  Description of Artificial Sequence: Synthetic oligonucleotide
  Antisense strand to SEQ ID NO: 1318418
ugugguggacacuacaagu

SEQ ID NO: 1318420 - RNA, 19 nt, Artificial Sequence
  Description of Artificial Sequence: Synthetic oligonucleotide
  Sense strand starting at position 3214 of SEQ ID NO: 1242030
gcugaacugcugugauaca

SEQ ID NO: 1318421 - RNA, 19 nt, Artificial Sequence
  Description of Artificial Sequence: Synthetic oligonucleotide
  Antisense strand to SEQ ID NO: 1318420
uguaucacagcaguucagc

SEQ ID NO: 1318422 - RNA, 19 nt, Artificial Sequence
  Description of Artificial Sequence: Synthetic oligonucleotide
  Sense strand starting at position 3221 of SEQ ID NO: 1242030
ugcugugauacaugaagau

SEQ ID NO: 1318423 - RNA, 19 nt, Artificial Sequence
  Description of Artificial Sequence: Synthetic oligonucleotide
  Antisense strand to SEQ ID NO: 1318422
aucuucauguaucacagca

SEQ ID NO: 1318424 - RNA, 19 nt, Artificial Sequence
  Description of Artificial Sequence: Synthetic oligonucleotide
  Sense strand starting at position 3257 of SEQ ID NO: 1242030
ggaacuaugagcugaucua

SEQ ID NO: 1318425 - RNA, 19 nt, Artificial Sequence
  Description of Artificial Sequence: Synthetic oligonucleotide
  Antisense strand to SEQ ID NO: 1318424
uagaucagcucauaguucc

SEQ ID NO: 1318426 - RNA, 19 nt, Artificial Sequence
  Description of Artificial Sequence: Synthetic oligonucleotide
  Sense strand starting at position 3278 of SEQ ID NO: 1242030
gccauaguccuguaaguau

SEQ ID NO: 1318427 - RNA, 19 nt, Artificial Sequence
  Description of Artificial Sequence: Synthetic oligonucleotide
  Antisense strand to SEQ ID NO: 1318426
auacuuacaggacuauggc

SEQ ID NO: 1318428 - RNA, 19 nt, Artificial Sequence
  Description of Artificial Sequence: Synthetic oligonucleotide
  Sense strand starting at position 3295 of SEQ ID NO: 1242030
auguaugugguguacuuua

SEQ ID NO: 1318429 - RNA, 19 nt, Artificial Sequence
  Description of Artificial Sequence: Synthetic oligonucleotide
  Antisense strand to SEQ ID NO: 1318428
uaaaguacaccacauacau

SEQ ID NO: 1318430 - RNA, 19 nt, Artificial Sequence
  Description of Artificial Sequence: Synthetic oligonucleotide
  Sense strand starting at position 3328 of SEQ ID NO: 1242030
aaaggucucuuagcagauu

SEQ ID NO: 1318431 - RNA, 19 nt, Artificial Sequence
  Description of Artificial Sequence: Synthetic oligonucleotide
  Antisense strand to SEQ ID NO: 1318430
aaucugcuaagagaccuuu

SEQ ID NO: 1318432 - RNA, 19 nt, Artificial Sequence
  Description of Artificial Sequence: Synthetic oligonucleotide
  Sense strand starting at position 3350 of SEQ ID NO: 1242030
gaaugagagccuuggucac

SEQ ID NO: 1318433 - RNA, 19 nt, Artificial Sequence
  Description of Artificial Sequence: Synthetic oligonucleotide
  Antisense strand to SEQ ID NO: 1318432
gugaccaaggcucucauuc

SEQ ID NO: 1318434 - RNA, 19 nt, Artificial Sequence
  Description of Artificial Sequence: Synthetic oligonucleotide
  Sense strand starting at position 3368 of SEQ ID NO: 1242030
cacacuccuggcugaguaa

SEQ ID NO: 1318435 - RNA, 19 nt, Artificial Sequence
  Description of Artificial Sequence: Synthetic oligonucleotide
  Antisense strand to SEQ ID NO: 1318434
uuacucagccaggagugug

SEQ ID NO: 1318436 - RNA, 19 nt, Artificial Sequence
  Description of Artificial Sequence: Synthetic oligonucleotide
  Sense strand starting at position 3369 of SEQ ID NO: 1242030
acacuccuggcugaguaaa

SEQ ID NO: 1318437 - RNA, 19 nt, Artificial Sequence
  Description of Artificial Sequence: Synthetic oligonucleotide
  Antisense strand to SEQ ID NO: 1318436
uuuacucagccaggagugu

SEQ ID NO: 1318438 - RNA, 19 nt, Artificial Sequence
  Description of Artificial Sequence: Synthetic oligonucleotide
  Sense strand starting at position 3417 of SEQ ID NO: 1242030
gagcacgaacuguguacua

SEQ ID NO: 1318439 - RNA, 19 nt, Artificial Sequence
  Description of Artificial Sequence: Synthetic oligonucleotide
  Antisense strand to SEQ ID NO: 1318438
uaguacacaguucgugcuc

SEQ ID NO: 1318440 - RNA, 19 nt, Artificial Sequence
  Description of Artificial Sequence: Synthetic oligonucleotide
  Sense strand starting at position 3419 of SEQ ID NO: 1242030
gcacgaacuguguacuacu

SEQ ID NO: 1318441 - RNA, 19 nt, Artificial Sequence
  Description of Artificial Sequence: Synthetic oligonucleotide
  Antisense strand to SEQ ID NO: 1318440
aguaguacacaguucgugc

SEQ ID NO: 1318442 - RNA, 19 nt, Artificial Sequence
  Description of Artificial Sequence: Synthetic oligonucleotide
  Sense strand starting at position 3426 of SEQ ID NO: 1242030
cuguguacuacuuagugca

SEQ ID NO: 1318443 - RNA, 19 nt, Artificial Sequence
  Description of Artificial Sequence: Synthetic oligonucleotide
  Antisense strand to SEQ ID NO: 1318442
ugcacuaaguaguacacag

SEQ ID NO: 1318444 - RNA, 19 nt, Artificial Sequence
  Description of Artificial Sequence: Synthetic oligonucleotide
  Sense strand starting at position 3434 of SEQ ID NO: 1242030
uacuuagugcauuguugaa

SEQ ID NO: 1318445 - RNA, 19 nt, Artificial Sequence
  Description of Artificial Sequence: Synthetic oligonucleotide
  Antisense strand to SEQ ID NO: 1318444
uucaacaaugcacuaagua

SEQ ID NO: 1318446 - RNA, 19 nt, Artificial Sequence
  Description of Artificial Sequence: Synthetic oligonucleotide
  Sense strand starting at position 3617 of SEQ ID NO: 1242030
ggauaaguacugggugcuu

SEQ ID NO: 1318447 - RNA, 19 nt, Artificial Sequence
  Description of Artificial Sequence: Synthetic oligonucleotide
  Antisense strand to SEQ ID NO: 1318446
aagcacccaguacuuaucc

SEQ ID NO: 1318448 - RNA, 19 nt, Artificial Sequence
  Description of Artificial Sequence: Synthetic oligonucleotide
  Sense strand starting at position 3632 of SEQ ID NO: 1242030
gcuugcuuggaggauauau

SEQ ID NO: 1318449 - RNA, 19 nt, Artificial Sequence
  Description of Artificial Sequence: Synthetic oligonucleotide
  Antisense strand to SEQ ID NO: 1318448
auauauccuccaagcaagc

SEQ ID NO: 1318450 - RNA, 19 nt, Artificial Sequence
  Description of Artificial Sequence: Synthetic oligonucleotide
  Sense strand starting at position 32 of SEQ ID NO: 1242031
uggaauaauucugauacag

SEQ ID NO: 1318451 - RNA, 19 nt, Artificial Sequence
  Description of Artificial Sequence: Synthetic oligonucleotide
  Antisense strand to SEQ ID NO: 1318450
cuguaucagaauuauucca

SEQ ID NO: 1318452 - RNA, 19 nt, Artificial Sequence
  Description of Artificial Sequence: Synthetic oligonucleotide
  Sense strand starting at position 34 of SEQ ID NO: 1242031
gaauaauucugauacaggg

SEQ ID NO: 1318453 - RNA, 19 nt, Artificial Sequence
  Description of Artificial Sequence: Synthetic oligonucleotide
  Antisense strand to SEQ ID NO: 1318452
cccuguaucagaauuauuc

SEQ ID NO: 1318454 - RNA, 19 nt, Artificial Sequence
  Description of Artificial Sequence: Synthetic oligonucleotide
  Sense strand starting at position 137 of SEQ ID NO: 1242031
ucaguagacguucaucagu

SEQ ID NO: 1318455 - RNA, 19 nt, Artificial Sequence
  Description of Artificial Sequence: Synthetic oligonucleotide
  Antisense strand to SEQ ID NO: 1318454
acugaugaacgucuacuga

SEQ ID NO: 1318456 - RNA, 19 nt, Artificial Sequence
  Description of Artificial Sequence: Synthetic oligonucleotide
  Sense strand starting at position 174 of SEQ ID NO: 1242031
gccacugugucauuuaauc

SEQ ID NO: 1318457 - RNA, 19 nt, Artificial Sequence
  Description of Artificial Sequence: Synthetic oligonucleotide
  Antisense strand to SEQ ID NO: 1318456
gauuaaaugacacaguggc

SEQ ID NO: 1318458 - RNA, 19 nt, Artificial Sequence
  Description of Artificial Sequence: Synthetic oligonucleotide
  Sense strand starting at position 248 of SEQ ID NO: 1242031
guugcaagaguuugaagua

SEQ ID NO: 1318459 - RNA, 19 nt, Artificial Sequence
  Description of Artificial Sequence: Synthetic oligonucleotide
  Antisense strand to SEQ ID NO: 1318458
uacuucaaacucuugcaac

SEQ ID NO: 1318460 - RNA, 19 nt, Artificial Sequence
  Description of Artificial Sequence: Synthetic oligonucleotide
  Sense strand starting at position 257 of SEQ ID NO: 1242031
guuugaaguauuugagcug

SEQ ID NO: 1318461 - RNA, 19 nt, Artificial Sequence
  Description of Artificial Sequence: Synthetic oligonucleotide
  Antisense strand to SEQ ID NO: 1318460
cagcucaaauacuucaaac

SEQ ID NO: 1318462 - RNA, 19 nt, Artificial Sequence
  Description of Artificial Sequence: Synthetic oligonucleotide
  Sense strand starting at position 328 of SEQ ID NO: 1242031
cccuuugcucuuuauguga

SEQ ID NO: 1318463 - RNA, 19 nt, Artificial Sequence
  Description of Artificial Sequence: Synthetic oligonucleotide
  Antisense strand to SEQ ID NO: 1318462
ucacauaaagagcaaaggg

SEQ ID NO: 1318464 - RNA, 19 nt, Artificial Sequence
  Description of Artificial Sequence: Synthetic oligonucleotide
  Sense strand starting at position 426 of SEQ ID NO: 1242031
guucucuuacaguaagaau

SEQ ID NO: 1318465 - RNA, 19 nt, Artificial Sequence
  Description of Artificial Sequence: Synthetic oligonucleotide
  Antisense strand to SEQ ID NO: 1318464
auucuuacuguaagagaac

SEQ ID NO: 1318466 - RNA, 19 nt, Artificial Sequence
  Description of Artificial Sequence: Synthetic oligonucleotide
  Sense strand starting at position 496 of SEQ ID NO: 1242031
augucacucuagucuaauu

SEQ ID NO: 1318467 - RNA, 19 nt, Artificial Sequence
  Description of Artificial Sequence: Synthetic oligonucleotide
  Antisense strand to SEQ ID NO: 1318466
aauuagacuagagugacau

SEQ ID NO: 1318468 - RNA, 19 nt, Artificial Sequence
  Description of Artificial Sequence: Synthetic oligonucleotide
  Sense strand starting at position 785 of SEQ ID NO: 1242031
cagugagaggcugguugaa

SEQ ID NO: 1318469 - RNA, 19 nt, Artificial Sequence
  Description of Artificial Sequence: Synthetic oligonucleotide
  Antisense strand to SEQ ID NO: 1318468
uucaaccagccucucacug

SEQ ID NO: 1318470 - RNA, 19 nt, Artificial Sequence
  Description of Artificial Sequence: Synthetic oligonucleotide
  Sense strand starting at position 787 of SEQ ID NO: 1242031
gugagaggcugguugaaua

SEQ ID NO: 1318471 - RNA, 19 nt, Artificial Sequence
  Description of Artificial Sequence: Synthetic oligonucleotide
  Antisense strand to SEQ ID NO: 1318470
uauucaaccagccucucac

SEQ ID NO: 1318472 - RNA, 19 nt, Artificial Sequence
  Description of Artificial Sequence: Synthetic oligonucleotide
  Sense strand starting at position 920 of SEQ ID NO: 1242031
caagauguauuugggacau

SEQ ID NO: 1318473 - RNA, 19 nt, Artificial Sequence
  Description of Artificial Sequence: Synthetic oligonucleotide
  Antisense strand to SEQ ID NO: 1318472
augucccaaauacaucuug

SEQ ID NO: 1318474 - RNA, 19 nt, Artificial Sequence
  Description of Artificial Sequence: Synthetic oligonucleotide
  Sense strand starting at position 922 of SEQ ID NO: 1242031
agauguauuugggacauac

SEQ ID NO: 1318475 - RNA, 19 nt, Artificial Sequence
  Description of Artificial Sequence: Synthetic oligonucleotide
  Antisense strand to SEQ ID NO: 1318474
guaugucccaaauacaucu

SEQ ID NO: 1318476 - RNA, 19 nt, Artificial Sequence
  Description of Artificial Sequence: Synthetic oligonucleotide
  Sense strand starting at position 1050 of SEQ ID NO: 1242031
ggagcaucaguuugcuaau

SEQ ID NO: 1318477 - RNA, 19 nt, Artificial Sequence
  Description of Artificial Sequence: Synthetic oligonucleotide
  Antisense strand to SEQ ID NO: 1318476
auuagcaaacugaugcucc

SEQ ID NO: 1318478 - RNA, 19 nt, Artificial Sequence
  Description of Artificial Sequence: Synthetic oligonucleotide
  Sense strand starting at position 1096 of SEQ ID NO: 1242031
uuaggaauacuguguaaau

SEQ ID NO: 1318479 - RNA, 19 nt, Artificial Sequence
  Description of Artificial Sequence: Synthetic oligonucleotide
  Antisense strand to SEQ ID NO: 1318478
auuuacacaguauuccuaa

SEQ ID NO: 1318480 - RNA, 19 nt, Artificial Sequence
  Description of Artificial Sequence: Synthetic oligonucleotide
  Sense strand starting at position 1097 of SEQ ID NO: 1242031
uaggaauacuguguaaauc

SEQ ID NO: 1318481 - RNA, 19 nt, Artificial Sequence
  Description of Artificial Sequence: Synthetic oligonucleotide
  Antisense strand to SEQ ID NO: 1318480
gauuuacacaguauuccua

SEQ ID NO: 1318482 - RNA, 19 nt, Artificial Sequence
  Description of Artificial Sequence: Synthetic oligonucleotide
  Sense strand starting at position 1122 of SEQ ID NO: 1242031
ucaucuacuccuggagucu

SEQ ID NO: 1318483 - RNA, 19 nt, Artificial Sequence
  Description of Artificial Sequence: Synthetic oligonucleotide
  Antisense strand to SEQ ID NO: 1318482
agacuccaggaguagauga

SEQ ID NO: 1318484 - RNA, 19 nt, Artificial Sequence
  Description of Artificial Sequence: Synthetic oligonucleotide
  Sense strand starting at position 1232 of SEQ ID NO: 1242031
gcuugcuaggccuaaugga

SEQ ID NO: 1318485 - RNA, 19 nt, Artificial Sequence
  Description of Artificial Sequence: Synthetic oligonucleotide
  Antisense strand to SEQ ID NO: 1318484
uccauuaggccuagcaagc

SEQ ID NO: 1318486 - RNA, 19 nt, Artificial Sequence
  Description of Artificial Sequence: Synthetic oligonucleotide
  Sense strand starting at position 1416 of SEQ ID NO: 1242031
gcaauuguuucccucauga

SEQ ID NO: 1318487 - RNA, 19 nt, Artificial Sequence
  Description of Artificial Sequence: Synthetic oligonucleotide
  Antisense strand to SEQ ID NO: 1318486
ucaugagggaaacaauugc

SEQ ID NO: 1318488 - RNA, 19 nt, Artificial Sequence
  Description of Artificial Sequence: Synthetic oligonucleotide
  Sense strand starting at position 2164 of SEQ ID NO: 1242031
auuggagguccuggcagaa

SEQ ID NO: 1318489 - RNA, 19 nt, Artificial Sequence
  Description of Artificial Sequence: Synthetic oligonucleotide
  Antisense strand to SEQ ID NO: 1318488
uucugccaggaccuccaau

SEQ ID NO: 1318490 - RNA, 19 nt, Artificial Sequence
  Description of Artificial Sequence: Synthetic oligonucleotide
  Sense strand starting at position 2238 of SEQ ID NO: 1242031
gacaaugguguuuagcagu

SEQ ID NO: 1318491 - RNA, 19 nt, Artificial Sequence
  Description of Artificial Sequence: Synthetic oligonucleotide
  Antisense strand to SEQ ID NO: 1318490
acugcuaaacaccauuguc

SEQ ID NO: 1318492 - RNA, 19 nt, Artificial Sequence
  Description of Artificial Sequence: Synthetic oligonucleotide
  Sense strand starting at position 2346 of SEQ ID NO: 1242031
gaaggaguguaauuguaaa

SEQ ID NO: 1318493 - RNA, 19 nt, Artificial Sequence
  Description of Artificial Sequence: Synthetic oligonucleotide
  Antisense strand to SEQ ID NO: 1318492
uuuacaauuacacuccuuc

SEQ ID NO: 1318494 - RNA, 19 nt, Artificial Sequence
  Description of Artificial Sequence: Synthetic oligonucleotide
  Sense strand starting at position 2383 of SEQ ID NO: 1242031
ucuaguacaucagugugaa

SEQ ID NO: 1318495 - RNA, 19 nt, Artificial Sequence
  Description of Artificial Sequence: Synthetic oligonucleotide
  Antisense strand to SEQ ID NO: 1318494
uucacacugauguacuaga

SEQ ID NO: 1318496 - RNA, 19 nt, Artificial Sequence
  Description of Artificial Sequence: Synthetic oligonucleotide
  Sense strand starting at position 2384 of SEQ ID NO: 1242031
cuaguacaucagugugaau

SEQ ID NO: 1318497 - RNA, 19 nt, Artificial Sequence
  Description of Artificial Sequence: Synthetic oligonucleotide
  Antisense strand to SEQ ID NO: 1318496
auucacacugauguacuag

SEQ ID NO: 1318498 - RNA, 19 nt, Artificial Sequence
  Description of Artificial Sequence: Synthetic oligonucleotide
  Sense strand starting at position 2386 of SEQ ID NO: 1242031
aguacaucagugugaaucu

SEQ ID NO: 1318499 - RNA, 19 nt, Artificial Sequence
  Description of Artificial Sequence: Synthetic oligonucleotide
  Antisense strand to SEQ ID NO: 1318498
agauucacacugauguacu

SEQ ID NO: 1318500 - RNA, 19 nt, Artificial Sequence
  Description of Artificial Sequence: Synthetic oligonucleotide
  Sense strand starting at position 2522 of SEQ ID NO: 1242031
aguaauugucuccaggcua

SEQ ID NO: 1318501 - RNA, 19 nt, Artificial Sequence
  Description of Artificial Sequence: Synthetic oligonucleotide
  Antisense strand to SEQ ID NO: 1318500
uagccuggagacaauuacu

SEQ ID NO: 1318502 - RNA, 19 nt, Artificial Sequence
  Description of Artificial Sequence: Synthetic oligonucleotide
  Sense strand starting at position 2665 of SEQ ID NO: 1242031
caaaguugugugucugugu

SEQ ID NO: 1318503 - RNA, 19 nt, Artificial Sequence
  Description of Artificial Sequence: Synthetic oligonucleotide
  Antisense strand to SEQ ID NO: 1318502
acacagacacacaacuuug

SEQ ID NO: 1318504 - RNA, 19 nt, Artificial Sequence
  Description of Artificial Sequence: Synthetic oligonucleotide
  Sense strand starting at position 2792 of SEQ ID NO: 1242031
cugauaaggccuuguacua

SEQ ID NO: 1318505 - RNA, 19 nt, Artificial Sequence
  Description of Artificial Sequence: Synthetic oligonucleotide
  Antisense strand to SEQ ID NO: 1318504
uaguacaaggccuuaucag

SEQ ID NO: 1318506 - RNA, 19 nt, Artificial Sequence
  Description of Artificial Sequence: Synthetic oligonucleotide
  Sense strand starting at position 2799 of SEQ ID NO: 1242031
ggccuuguacuauguauaa

SEQ ID NO: 1318507 - RNA, 19 nt, Artificial Sequence
  Description of Artificial Sequence: Synthetic oligonucleotide
  Antisense strand to SEQ ID NO: 1318506
uuauacauaguacaaggcc

SEQ ID NO: 1318508 - RNA, 19 nt, Artificial Sequence
  Description of Artificial Sequence: Synthetic oligonucleotide
  Sense strand starting at position 2860 of SEQ ID NO: 1242031
augugaaacugcuugaaac

SEQ ID NO: 1318509 - RNA, 19 nt, Artificial Sequence
  Description of Artificial Sequence: Synthetic oligonucleotide
  Antisense strand to SEQ ID NO: 1318508
guuucaagcaguuucacau

SEQ ID NO: 1318510 - RNA, 19 nt, Artificial Sequence
  Description of Artificial Sequence: Synthetic oligonucleotide
  Sense strand starting at position 2861 of SEQ ID NO: 1242031
ugugaaacugcuugaaaca

SEQ ID NO: 1318511 - RNA, 19 nt, Artificial Sequence
  Description of Artificial Sequence: Synthetic oligonucleotide
  Antisense strand to SEQ ID NO: 1318510
uguuucaagcaguuucaca

SEQ ID NO: 1318512 - RNA, 19 nt, Artificial Sequence
  Description of Artificial Sequence: Synthetic oligonucleotide
  Sense strand starting at position 3020 of SEQ ID NO: 1242031
ggagguacuauccgugaag

SEQ ID NO: 1318513 - RNA, 19 nt, Artificial Sequence
  Description of Artificial Sequence: Synthetic oligonucleotide
  Antisense strand to SEQ ID NO: 1318512
cuucacggauaguaccucc

SEQ ID NO: 1318514 - RNA, 19 nt, Artificial Sequence
  Description of Artificial Sequence: Synthetic oligonucleotide
  Sense strand starting at position 3023 of SEQ ID NO: 1242031
gguacuauccgugaagcuc

SEQ ID NO: 1318515 - RNA, 19 nt, Artificial Sequence
  Description of Artificial Sequence: Synthetic oligonucleotide
  Antisense strand to SEQ ID NO: 1318514
gagcuucacggauaguacc

SEQ ID NO: 1318516 - RNA, 19 nt, Artificial Sequence
  Description of Artificial Sequence: Synthetic oligonucleotide
  Sense strand starting at position 3280 of SEQ ID NO: 1242031
ucuguuuguucucccauuu

SEQ ID NO: 1318517 - RNA, 19 nt, Artificial Sequence
  Description of Artificial Sequence: Synthetic oligonucleotide
  Antisense strand to SEQ ID NO: 1318516
aaaugggagaacaaacaga

SEQ ID NO: 1318518 - RNA, 19 nt, Artificial Sequence
  Description of Artificial Sequence: Synthetic oligonucleotide
  Sense strand starting at position 3570 of SEQ ID NO: 1242031
ggaagcauuucccaaggaa

SEQ ID NO: 1318519 - RNA, 19 nt, Artificial Sequence
  Description of Artificial Sequence: Synthetic oligonucleotide
  Antisense strand to SEQ ID NO: 1318518
uuccuugggaaaugcuucc

SEQ ID NO: 1318520 - RNA, 19 nt, Artificial Sequence
  Description of Artificial Sequence: Synthetic oligonucleotide
  Sense strand starting at position 3619 of SEQ ID NO: 1242031
ucaucaauguaguucugaa

SEQ ID NO: 1318521 - RNA, 19 nt, Artificial Sequence
  Description of Artificial Sequence: Synthetic oligonucleotide
  Antisense strand to SEQ ID NO: 1318520
uucagaacuacauugauga

SEQ ID NO: 1318522 - RNA, 19 nt, Artificial Sequence
  Description of Artificial Sequence: Synthetic oligonucleotide
  Sense strand starting at position 3670 of SEQ ID NO: 1242031
agguguacuucuccacuua

SEQ ID NO: 1318523 - RNA, 19 nt, Artificial Sequence
  Description of Artificial Sequence: Synthetic oligonucleotide
  Antisense strand to SEQ ID NO: 1318522
uaaguggagaaguacaccu

SEQ ID NO: 1318524 - RNA, 19 nt, Artificial Sequence
  Description of Artificial Sequence: Synthetic oligonucleotide
  Sense strand starting at position 3671 of SEQ ID NO: 1242031
gguguacuucuccacuuaa

SEQ ID NO: 1318525 - RNA, 19 nt, Artificial Sequence
  Description of Artificial Sequence: Synthetic oligonucleotide
  Antisense strand to SEQ ID NO: 1318524
uuaaguggagaaguacacc

SEQ ID NO: 1318526 - RNA, 19 nt, Artificial Sequence
  Description of Artificial Sequence: Synthetic oligonucleotide
  Sense strand starting at position 3843 of SEQ ID NO: 1242031
gugccuuccacugaguaag

SEQ ID NO: 1318527 - RNA, 19 nt, Artificial Sequence
  Description of Artificial Sequence: Synthetic oligonucleotide
  Antisense strand to SEQ ID NO: 1318526
cuuacucaguggaaggcac

SEQ ID NO: 1318528 - RNA, 19 nt, Artificial Sequence
  Description of Artificial Sequence: Synthetic oligonucleotide
  Sense strand starting at position 3933 of SEQ ID NO: 1242031
ggagaacauuuagagcauu

SEQ ID NO: 1318529 - RNA, 19 nt, Artificial Sequence
  Description of Artificial Sequence: Synthetic oligonucleotide
  Antisense strand to SEQ ID NO: 1318528
aaugcucuaaauguucucc

SEQ ID NO: 1318530 - RNA, 19 nt, Artificial Sequence
  Description of Artificial Sequence: Synthetic oligonucleotide
  Sense strand starting at position 49 of SEQ ID NO: 1242032
agcaucacuucugugauua

SEQ ID NO: 1318531 - RNA, 19 nt, Artificial Sequence
  Description of Artificial Sequence: Synthetic oligonucleotide
  Antisense strand to SEQ ID NO: 1318530
uaaucacagaagugaugcu

SEQ ID NO: 1318532 - RNA, 19 nt, Artificial Sequence
  Description of Artificial Sequence: Synthetic oligonucleotide
  Sense strand starting at position 59 of SEQ ID NO: 1242032
cugugauuauuuccugcca

SEQ ID NO: 1318533 - RNA, 19 nt, Artificial Sequence
  Description of Artificial Sequence: Synthetic oligonucleotide
  Antisense strand to SEQ ID NO: 1318532
uggcaggaaauaaucacag

SEQ ID NO: 1318534 - RNA, 19 nt, Artificial Sequence
  Description of Artificial Sequence: Synthetic oligonucleotide
  Sense strand starting at position 60 of SEQ ID NO: 1242032
ugugauuauuuccugccaa

SEQ ID NO: 1318535 - RNA, 19 nt, Artificial Sequence
  Description of Artificial Sequence: Synthetic oligonucleotide
  Antisense strand to SEQ ID NO: 1318534
uuggcaggaaauaaucaca

SEQ ID NO: 1318536 - RNA, 19 nt, Artificial Sequence
  Description of Artificial Sequence: Synthetic oligonucleotide
  Sense strand starting at position 80 of SEQ ID NO: 1242032
gacacaauugauggauguu

SEQ ID NO: 1318537 - RNA, 19 nt, Artificial Sequence
  Description of Artificial Sequence: Synthetic oligonucleotide
  Antisense strand to SEQ ID NO: 1318536
aacauccaucaauuguguc

SEQ ID NO: 1318538 - RNA, 19 nt, Artificial Sequence
  Description of Artificial Sequence: Synthetic oligonucleotide
  Sense strand starting at position 83 of SEQ ID NO: 1242032
acaauugauggauguucua

SEQ ID NO: 1318539 - RNA, 19 nt, Artificial Sequence
  Description of Artificial Sequence: Synthetic oligonucleotide
  Antisense strand to SEQ ID NO: 1318538
uagaacauccaucaauugu

SEQ ID NO: 1318540 - RNA, 19 nt, Artificial Sequence
  Description of Artificial Sequence: Synthetic oligonucleotide
  Sense strand starting at position 86 of SEQ ID NO: 1242032
auugauggauguucuacaa

SEQ ID NO: 1318541 - RNA, 19 nt, Artificial Sequence
  Description of Artificial Sequence: Synthetic oligonucleotide
  Antisense strand to SEQ ID NO: 1318540
uuguagaacauccaucaau

SEQ ID NO: 1318542 - RNA, 19 nt, Artificial Sequence
  Description of Artificial Sequence: Synthetic oligonucleotide
  Sense strand starting at position 145 of SEQ ID NO: 1242032
ucaagcaaagcuugagaaa

SEQ ID NO: 1318543 - RNA, 19 nt, Artificial Sequence
  Description of Artificial Sequence: Synthetic oligonucleotide
  Antisense strand to SEQ ID NO: 1318542
uuucucaagcuuugcuuga

SEQ ID NO: 1318544 - RNA, 19 nt, Artificial Sequence
  Description of Artificial Sequence: Synthetic oligonucleotide
  Sense strand starting at position 156 of SEQ ID NO: 1242032
uugagaaacuguuccagau

SEQ ID NO: 1318545 - RNA, 19 nt, Artificial Sequence
  Description of Artificial Sequence: Synthetic oligonucleotide
  Antisense strand to SEQ ID NO: 1318544
aucuggaacaguuucucaa

SEQ ID NO: 1318546 - RNA, 19 nt, Artificial Sequence
  Description of Artificial Sequence: Synthetic oligonucleotide
  Sense strand starting at position 294 of SEQ ID NO: 1242032
augguagaaauguaucagu

SEQ ID NO: 1318547 - RNA, 19 nt, Artificial Sequence
  Description of Artificial Sequence: Synthetic oligonucleotide
  Antisense strand to SEQ ID NO: 1318546
acugauacauuucuaccau

SEQ ID NO: 1318548 - RNA, 19 nt, Artificial Sequence
  Description of Artificial Sequence: Synthetic oligonucleotide
  Sense strand starting at position 303 of SEQ ID NO: 1242032
auguaucagugauaauuuc

SEQ ID NO: 1318549 - RNA, 19 nt, Artificial Sequence
  Description of Artificial Sequence: Synthetic oligonucleotide
  Antisense strand to SEQ ID NO: 1318548
gaaauuaucacugauacau

SEQ ID NO: 1318550 - RNA, 19 nt, Artificial Sequence
  Description of Artificial Sequence: Synthetic oligonucleotide
  Sense strand starting at position 411 of SEQ ID NO: 1242032
gucaaaugguucccuucca

SEQ ID NO: 1318551 - RNA, 19 nt, Artificial Sequence
  Description of Artificial Sequence: Synthetic oligonucleotide
  Antisense strand to SEQ ID NO: 1318550
uggaagggaaccauuugac

SEQ ID NO: 1318552 - RNA, 19 nt, Artificial Sequence
  Description of Artificial Sequence: Synthetic oligonucleotide
  Sense strand starting at position 1195 of SEQ ID NO: 1242032
ugcaaaugacugugcauga

SEQ ID NO: 1318553 - RNA, 19 nt, Artificial Sequence
  Description of Artificial Sequence: Synthetic oligonucleotide
  Antisense strand to SEQ ID NO: 1318552
ucaugcacagucauuugca

SEQ ID NO: 1318554 - RNA, 19 nt, Artificial Sequence
  Description of Artificial Sequence: Synthetic oligonucleotide
  Sense strand starting at position 2058 of SEQ ID NO: 1242032
gcccguacuccgaggugua

SEQ ID NO: 1318555 - RNA, 19 nt, Artificial Sequence
  Description of Artificial Sequence: Synthetic oligonucleotide
  Antisense strand to SEQ ID NO: 1318554
uacaccucggaguacgggc

SEQ ID NO: 1318556 - RNA, 19 nt, Artificial Sequence
  Description of Artificial Sequence: Synthetic oligonucleotide
  Sense strand starting at position 2070 of SEQ ID NO: 1242032
agguguacuccguuccgua

SEQ ID NO: 1318557 - RNA, 19 nt, Artificial Sequence
  Description of Artificial Sequence: Synthetic oligonucleotide
  Antisense strand to SEQ ID NO: 1318556
uacggaacggaguacaccu

SEQ ID NO: 1318558 - RNA, 19 nt, Artificial Sequence
  Description of Artificial Sequence: Synthetic oligonucleotide
  Sense strand starting at position 2071 of SEQ ID NO: 1242032
gguguacuccguuccguaa

SEQ ID NO: 1318559 - RNA, 19 nt, Artificial Sequence
  Description of Artificial Sequence: Synthetic oligonucleotide
  Antisense strand to SEQ ID NO: 1318558
uuacggaacggaguacacc

SEQ ID NO: 1318560 - RNA, 19 nt, Artificial Sequence
  Description of Artificial Sequence: Synthetic oligonucleotide
  Sense strand starting at position 2072 of SEQ ID NO: 1242032
guguacuccguuccguaau

SEQ ID NO: 1318561 - RNA, 19 nt, Artificial Sequence
  Description of Artificial Sequence: Synthetic oligonucleotide
  Antisense strand to SEQ ID NO: 1318560
auuacggaacggaguacac

SEQ ID NO: 1318562 - RNA, 19 nt, Artificial Sequence
  Description of Artificial Sequence: Synthetic oligonucleotide
  Sense strand starting at position 2117 of SEQ ID NO: 1242032
ugagauugggucuaaugcu

SEQ ID NO: 1318563 - RNA, 19 nt, Artificial Sequence
  Description of Artificial Sequence: Synthetic oligonucleotide
  Antisense strand to SEQ ID NO: 1318562
agcauuagacccaaucuca

SEQ ID NO: 1318564 - RNA, 19 nt, Artificial Sequence
  Description of Artificial Sequence: Synthetic oligonucleotide
  Sense strand starting at position 2555 of SEQ ID NO: 1242032
auagcauaagcucgauuua

SEQ ID NO: 1318565 - RNA, 19 nt, Artificial Sequence
  Description of Artificial Sequence: Synthetic oligonucleotide
  Antisense strand to SEQ ID NO: 1318564
uaaaucgagcuuaugcuau

SEQ ID NO: 1318566 - RNA, 19 nt, Artificial Sequence
  Description of Artificial Sequence: Synthetic oligonucleotide
  Sense strand starting at position 2567 of SEQ ID NO: 1242032
cgauuuauaaacggacguu

SEQ ID NO: 1318567 - RNA, 19 nt, Artificial Sequence
  Description of Artificial Sequence: Synthetic oligonucleotide
  Antisense strand to SEQ ID NO: 1318566
aacguccguuuauaaaucg

SEQ ID NO: 1318568 - RNA, 19 nt, Artificial Sequence
  Description of Artificial Sequence: Synthetic oligonucleotide
  Sense strand starting at position 2633 of SEQ ID NO: 1242032
cuuguaaacuuaguuaacu

SEQ ID NO: 1318569 - RNA, 19 nt, Artificial Sequence
  Description of Artificial Sequence: Synthetic oligonucleotide
  Antisense strand to SEQ ID NO: 1318568
aguuaacuaaguuuacaag

SEQ ID NO: 1318570 - RNA, 19 nt, Artificial Sequence
  Description of Artificial Sequence: Synthetic oligonucleotide
  Sense strand starting at position 2670 of SEQ ID NO: 1242032
uaaaguuucgaaugaguaa

SEQ ID NO: 1318571 - RNA, 19 nt, Artificial Sequence
  Description of Artificial Sequence: Synthetic oligonucleotide
  Antisense strand to SEQ ID NO: 1318570
uuacucauucgaaacuuua

SEQ ID NO: 1318572 - RNA, 19 nt, Artificial Sequence
  Description of Artificial Sequence: Synthetic oligonucleotide
  Sense strand starting at position 2715 of SEQ ID NO: 1242032
uaagguagcugagugagau

SEQ ID NO: 1318573 - RNA, 19 nt, Artificial Sequence
  Description of Artificial Sequence: Synthetic oligonucleotide
  Antisense strand to SEQ ID NO: 1318572
aucucacucagcuaccuua

SEQ ID NO: 1318574 - RNA, 19 nt, Artificial Sequence
  Description of Artificial Sequence: Synthetic oligonucleotide
  Sense strand starting at position 2727 of SEQ ID NO: 1242032
gugagaugauugcugugaa

SEQ ID NO: 1318575 - RNA, 19 nt, Artificial Sequence
  Description of Artificial Sequence: Synthetic oligonucleotide
  Antisense strand to SEQ ID NO: 1318574
uucacagcaaucaucucac

SEQ ID NO: 1318576 - RNA, 19 nt, Artificial Sequence
  Description of Artificial Sequence: Synthetic oligonucleotide
  Sense strand starting at position 2730 of SEQ ID NO: 1242032
agaugauugcugugaagca

SEQ ID NO: 1318577 - RNA, 19 nt, Artificial Sequence
  Description of Artificial Sequence: Synthetic oligonucleotide
  Antisense strand to SEQ ID NO: 1318576
ugcuucacagcaaucaucu

SEQ ID NO: 1318578 - RNA, 19 nt, Artificial Sequence
  Description of Artificial Sequence: Synthetic oligonucleotide
  Sense strand starting at position 2902 of SEQ ID NO: 1242032
ucugaugcaugcucaaacu

SEQ ID NO: 1318579 - RNA, 19 nt, Artificial Sequence
  Description of Artificial Sequence: Synthetic oligonucleotide
  Antisense strand to SEQ ID NO: 1318578
aguuugagcaugcaucaga

SEQ ID NO: 1318580 - RNA, 19 nt, Artificial Sequence
  Description of Artificial Sequence: Synthetic oligonucleotide
  Sense strand starting at position 3021 of SEQ ID NO: 1242032
gccagaucuugggcagaaa

SEQ ID NO: 1318581 - RNA, 19 nt, Artificial Sequence
  Description of Artificial Sequence: Synthetic oligonucleotide
  Antisense strand to SEQ ID NO: 1318580
uuucugcccaagaucuggc

SEQ ID NO: 1318582 - RNA, 19 nt, Artificial Sequence
  Description of Artificial Sequence: Synthetic oligonucleotide
  Sense strand starting at position 3030 of SEQ ID NO: 1242032
ugggcagaaacuuggucua

SEQ ID NO: 1318583 - RNA, 19 nt, Artificial Sequence
  Description of Artificial Sequence: Synthetic oligonucleotide
  Antisense strand to SEQ ID NO: 1318582
uagaccaaguuucugccca

SEQ ID NO: 1318584 - RNA, 19 nt, Artificial Sequence
  Description of Artificial Sequence: Synthetic oligonucleotide
  Sense strand starting at position 3032 of SEQ ID NO: 1242032
ggcagaaacuuggucuaaa

SEQ ID NO: 1318585 - RNA, 19 nt, Artificial Sequence
  Description of Artificial Sequence: Synthetic oligonucleotide
  Antisense strand to SEQ ID NO: 1318584
uuuagaccaaguuucugcc

SEQ ID NO: 1318586 - RNA, 19 nt, Artificial Sequence
  Description of Artificial Sequence: Synthetic oligonucleotide
  Sense strand starting at position 3033 of SEQ ID NO: 1242032
gcagaaacuuggucuaaau

SEQ ID NO: 1318587 - RNA, 19 nt, Artificial Sequence
  Description of Artificial Sequence: Synthetic oligonucleotide
  Antisense strand to SEQ ID NO: 1318586
auuuagaccaaguuucugc

SEQ ID NO: 1318588 - RNA, 19 nt, Artificial Sequence
  Description of Artificial Sequence: Synthetic oligonucleotide
  Sense strand starting at position 3095 of SEQ ID NO: 1242032
uauugacacgaccaauagu

SEQ ID NO: 1318589 - RNA, 19 nt, Artificial Sequence
  Description of Artificial Sequence: Synthetic oligonucleotide
  Antisense strand to SEQ ID NO: 1318588
acuauuggucgugucaaua

SEQ ID NO: 1318590 - RNA, 19 nt, Artificial Sequence
  Description of Artificial Sequence: Synthetic oligonucleotide
  Sense strand starting at position 3098 of SEQ ID NO: 1242032
ugacacgaccaauaguuua

SEQ ID NO: 1318591 - RNA, 19 nt, Artificial Sequence
  Description of Artificial Sequence: Synthetic oligonucleotide
  Antisense strand to SEQ ID NO: 1318590
uaaacuauuggucguguca

SEQ ID NO: 1318592 - RNA, 19 nt, Artificial Sequence
  Description of Artificial Sequence: Synthetic oligonucleotide
  Sense strand starting at position 3103 of SEQ ID NO: 1242032
cgaccaauaguuuaugugu

SEQ ID NO: 1318593 - RNA, 19 nt, Artificial Sequence
  Description of Artificial Sequence: Synthetic oligonucleotide
  Antisense strand to SEQ ID NO: 1318592
acacauaaacuauuggucg

SEQ ID NO: 1318594 - RNA, 19 nt, Artificial Sequence
  Description of Artificial Sequence: Synthetic oligonucleotide
  Sense strand starting at position 3118 of SEQ ID NO: 1242032
guguguuaugacuaucaau

SEQ ID NO: 1318595 - RNA, 19 nt, Artificial Sequence
  Description of Artificial Sequence: Synthetic oligonucleotide
  Antisense strand to SEQ ID NO: 1318594
auugauagucauaacacac

SEQ ID NO: 1318596 - RNA, 19 nt, Artificial Sequence
  Description of Artificial Sequence: Synthetic oligonucleotide
  Sense strand starting at position 3267 of SEQ ID NO: 1242032
auaguaugacauugucagu

SEQ ID NO: 1318597 - RNA, 19 nt, Artificial Sequence
  Description of Artificial Sequence: Synthetic oligonucleotide
  Antisense strand to SEQ ID NO: 1318596
acugacaaugucauacuau

SEQ ID NO: 1318598 - RNA, 19 nt, Artificial Sequence
  Description of Artificial Sequence: Synthetic oligonucleotide
  Sense strand starting at position 3273 of SEQ ID NO: 1242032
ugacauugucaguggcaua

SEQ ID NO: 1318599 - RNA, 19 nt, Artificial Sequence
  Description of Artificial Sequence: Synthetic oligonucleotide
  Antisense strand to SEQ ID NO: 1318598
uaugccacugacaauguca

SEQ ID NO: 1318600 - RNA, 19 nt, Artificial Sequence
  Description of Artificial Sequence: Synthetic oligonucleotide
  Sense strand starting at position 3621 of SEQ ID NO: 1242032
gcaucuuacgaacauggau

SEQ ID NO: 1318601 - RNA, 19 nt, Artificial Sequence
  Description of Artificial Sequence: Synthetic oligonucleotide
  Antisense strand to SEQ ID NO: 1318600
auccauguucguaagaugc

SEQ ID NO: 1318602 - RNA, 19 nt, Artificial Sequence
  Description of Artificial Sequence: Synthetic oligonucleotide
  Sense strand starting at position 3747 of SEQ ID NO: 1242032
cucccaucccucugggaga

SEQ ID NO: 1318603 - RNA, 19 nt, Artificial Sequence
  Description of Artificial Sequence: Synthetic oligonucleotide
  Antisense strand to SEQ ID NO: 1318602
ucucccagagggaugggag

SEQ ID NO: 1318604 - RNA, 19 nt, Artificial Sequence
  Description of Artificial Sequence: Synthetic oligonucleotide
  Sense strand starting at position 3760 of SEQ ID NO: 1242032
gggagaaggugccuuuaga

SEQ ID NO: 1318605 - RNA, 19 nt, Artificial Sequence
  Description of Artificial Sequence: Synthetic oligonucleotide
  Antisense strand to SEQ ID NO: 1318604
ucuaaaggcaccuucuccc

SEQ ID NO: 1318606 - RNA, 19 nt, Artificial Sequence
  Description of Artificial Sequence: Synthetic oligonucleotide
  Sense strand starting at position 3796 of SEQ ID NO: 1242032
ccauucucuggcuacugaa

SEQ ID NO: 1318607 - RNA, 19 nt, Artificial Sequence
  Description of Artificial Sequence: Synthetic oligonucleotide
  Antisense strand to SEQ ID NO: 1318606
uucaguagccagagaaugg

SEQ ID NO: 1318608 - RNA, 19 nt, Artificial Sequence
  Description of Artificial Sequence: Synthetic oligonucleotide
  Sense strand starting at position 3848 of SEQ ID NO: 1242032
uucuuuguggcugauauaa

SEQ ID NO: 1318609 - RNA, 19 nt, Artificial Sequence
  Description of Artificial Sequence: Synthetic oligonucleotide
  Antisense strand to SEQ ID NO: 1318608
uuauaucagccacaaagaa

SEQ ID NO: 1318610 - RNA, 19 nt, Artificial Sequence
  Description of Artificial Sequence: Synthetic oligonucleotide
  Sense strand starting at position 2 of SEQ ID NO: 1242033
gauguaaugcuaugaauau

SEQ ID NO: 1318611 - RNA, 19 nt, Artificial Sequence
  Description of Artificial Sequence: Synthetic oligonucleotide
  Antisense strand to SEQ ID NO: 1318610
auauucauagcauuacauc

SEQ ID NO: 1318612 - RNA, 19 nt, Artificial Sequence
  Description of Artificial Sequence: Synthetic oligonucleotide
  Sense strand starting at position 146 of SEQ ID NO: 1242033
ggcaguuucuaaucaccaa

SEQ ID NO: 1318613 - RNA, 19 nt, Artificial Sequence
  Description of Artificial Sequence: Synthetic oligonucleotide
  Antisense strand to SEQ ID NO: 1318612
uuggugauuagaaacugcc

SEQ ID NO: 1318614 - RNA, 19 nt, Artificial Sequence
  Description of Artificial Sequence: Synthetic oligonucleotide
  Sense strand starting at position 346 of SEQ ID NO: 1242033
ugacaauucuggucaaaua

SEQ ID NO: 1318615 - RNA, 19 nt, Artificial Sequence
  Description of Artificial Sequence: Synthetic oligonucleotide
  Antisense strand to SEQ ID NO: 1318614
uauuugaccagaauuguca

SEQ ID NO: 1318616 - RNA, 19 nt, Artificial Sequence
  Description of Artificial Sequence: Synthetic oligonucleotide
  Sense strand starting at position 394 of SEQ ID NO: 1242033
ggcaaaucuuaggcauaac

SEQ ID NO: 1318617 - RNA, 19 nt, Artificial Sequence
  Description of Artificial Sequence: Synthetic oligonucleotide
  Antisense strand to SEQ ID NO: 1318616
guuaugccuaagauuugcc

SEQ ID NO: 1318618 - RNA, 19 nt, Artificial Sequence
  Description of Artificial Sequence: Synthetic oligonucleotide
  Sense strand starting at position 445 of SEQ ID NO: 1242033
acaguaaaugaucaagcuu

SEQ ID NO: 1318619 - RNA, 19 nt, Artificial Sequence
  Description of Artificial Sequence: Synthetic oligonucleotide
  Antisense strand to SEQ ID NO: 1318618
aagcuugaucauuuacugu

SEQ ID NO: 1318620 - RNA, 19 nt, Artificial Sequence
  Description of Artificial Sequence: Synthetic oligonucleotide
  Sense strand starting at position 544 of SEQ ID NO: 1242033
auauaucuacaccgagcaa

SEQ ID NO: 1318621 - RNA, 19 nt, Artificial Sequence
  Description of Artificial Sequence: Synthetic oligonucleotide
  Antisense strand to SEQ ID NO: 1318620
uugcucgguguagauauau

SEQ ID NO: 1318622 - RNA, 19 nt, Artificial Sequence
  Description of Artificial Sequence: Synthetic oligonucleotide
  Sense strand starting at position 573 of SEQ ID NO: 1242033
ucagaaucaugucuugaga

SEQ ID NO: 1318623 - RNA, 19 nt, Artificial Sequence
  Description of Artificial Sequence: Synthetic oligonucleotide
  Antisense strand to SEQ ID NO: 1318622
ucucaagacaugauucuga

SEQ ID NO: 1318624 - RNA, 19 nt, Artificial Sequence
  Description of Artificial Sequence: Synthetic oligonucleotide
  Sense strand starting at position 576 of SEQ ID NO: 1242033
gaaucaugucuugagaugu

SEQ ID NO: 1318625 - RNA, 19 nt, Artificial Sequence
  Description of Artificial Sequence: Synthetic oligonucleotide
  Antisense strand to SEQ ID NO: 1318624
acaucucaagacaugauuc

SEQ ID NO: 1318626 - RNA, 19 nt, Artificial Sequence
  Description of Artificial Sequence: Synthetic oligonucleotide
  Sense strand starting at position 586 of SEQ ID NO: 1242033
uugagaugucuggcugcgu

SEQ ID NO: 1318627 - RNA, 19 nt, Artificial Sequence
  Description of Artificial Sequence: Synthetic oligonucleotide
  Antisense strand to SEQ ID NO: 1318626
acgcagccagacaucucaa

SEQ ID NO: 1318628 - RNA, 19 nt, Artificial Sequence
  Description of Artificial Sequence: Synthetic oligonucleotide
  Sense strand starting at position 868 of SEQ ID NO: 1242033
gaagacgacuauuagauuu

SEQ ID NO: 1318629 - RNA, 19 nt, Artificial Sequence
  Description of Artificial Sequence: Synthetic oligonucleotide
  Antisense strand to SEQ ID NO: 1318628
aaaucuaauagucgucuuc

SEQ ID NO: 1318630 - RNA, 19 nt, Artificial Sequence
  Description of Artificial Sequence: Synthetic oligonucleotide
  Sense strand starting at position 900 of SEQ ID NO: 1242033
gugguuaucuucccacaga

SEQ ID NO: 1318631 - RNA, 19 nt, Artificial Sequence
  Description of Artificial Sequence: Synthetic oligonucleotide
  Antisense strand to SEQ ID NO: 1318630
ucugugggaagauaaccac

SEQ ID NO: 1318632 - RNA, 19 nt, Artificial Sequence
  Description of Artificial Sequence: Synthetic oligonucleotide
  Sense strand starting at position 968 of SEQ ID NO: 1242033
gauuauuagcccuggaaga

SEQ ID NO: 1318633 - RNA, 19 nt, Artificial Sequence
  Description of Artificial Sequence: Synthetic oligonucleotide
  Antisense strand to SEQ ID NO: 1318632
ucuuccagggcuaauaauc

SEQ ID NO: 1318634 - RNA, 19 nt, Artificial Sequence
  Description of Artificial Sequence: Synthetic oligonucleotide
  Sense strand starting at position 969 of SEQ ID NO: 1242033
auuauuagcccuggaagau

SEQ ID NO: 1318635 - RNA, 19 nt, Artificial Sequence
  Description of Artificial Sequence: Synthetic oligonucleotide
  Antisense strand to SEQ ID NO: 1318634
aucuuccagggcuaauaau

SEQ ID NO: 1318636 - RNA, 19 nt, Artificial Sequence
  Description of Artificial Sequence: Synthetic oligonucleotide
  Sense strand starting at position 984 of SEQ ID NO: 1242033
agaugaagugggcauuagu

SEQ ID NO: 1318637 - RNA, 19 nt, Artificial Sequence
  Description of Artificial Sequence: Synthetic oligonucleotide
  Antisense strand to SEQ ID NO: 1318636
acuaaugcccacuucaucu

SEQ ID NO: 1318638 - RNA, 19 nt, Artificial Sequence
  Description of Artificial Sequence: Synthetic oligonucleotide
  Sense strand starting at position 2397 of SEQ ID NO: 1242033
ggcguuucugaguucccga

SEQ ID NO: 1318639 - RNA, 19 nt, Artificial Sequence
  Description of Artificial Sequence: Synthetic oligonucleotide
  Antisense strand to SEQ ID NO: 1318638
ucgggaacucagaaacgcc

SEQ ID NO: 1318640 - RNA, 19 nt, Artificial Sequence
  Description of Artificial Sequence: Synthetic oligonucleotide
  Sense strand starting at position 2398 of SEQ ID NO: 1242033
gcguuucugaguucccgaa

SEQ ID NO: 1318641 - RNA, 19 nt, Artificial Sequence
  Description of Artificial Sequence: Synthetic oligonucleotide
  Antisense strand to SEQ ID NO: 1318640
uucgggaacucagaaacgc

SEQ ID NO: 1318642 - RNA, 19 nt, Artificial Sequence
  Description of Artificial Sequence: Synthetic oligonucleotide
  Sense strand starting at position 2402 of SEQ ID NO: 1242033
uucugaguucccgaaaugu

SEQ ID NO: 1318643 - RNA, 19 nt, Artificial Sequence
  Description of Artificial Sequence: Synthetic oligonucleotide
  Antisense strand to SEQ ID NO: 1318642
acauuucgggaacucagaa

SEQ ID NO: 1318644 - RNA, 19 nt, Artificial Sequence
  Description of Artificial Sequence: Synthetic oligonucleotide
  Sense strand starting at position 2474 of SEQ ID NO: 1242033
ccugacuuucccggagaaa

SEQ ID NO: 1318645 - RNA, 19 nt, Artificial Sequence
  Description of Artificial Sequence: Synthetic oligonucleotide
  Antisense strand to SEQ ID NO: 1318644
uuucuccgggaaagucagg

SEQ ID NO: 1318646 - RNA, 19 nt, Artificial Sequence
  Description of Artificial Sequence: Synthetic oligonucleotide
  Sense strand starting at position 2552 of SEQ ID NO: 1242033
cgagguauccugggaagga

SEQ ID NO: 1318647 - RNA, 19 nt, Artificial Sequence
  Description of Artificial Sequence: Synthetic oligonucleotide
  Antisense strand to SEQ ID NO: 1318646
uccuucccaggauaccucg

SEQ ID NO: 1318648 - RNA, 19 nt, Artificial Sequence
  Description of Artificial Sequence: Synthetic oligonucleotide
  Sense strand starting at position 2595 of SEQ ID NO: 1242033
gcaggaaucucauccugag

SEQ ID NO: 1318649 - RNA, 19 nt, Artificial Sequence
  Description of Artificial Sequence: Synthetic oligonucleotide
  Antisense strand to SEQ ID NO: 1318648
cucaggaugagauuccugc

SEQ ID NO: 1318650 - RNA, 19 nt, Artificial Sequence
  Description of Artificial Sequence: Synthetic oligonucleotide
  Sense strand starting at position 2649 of SEQ ID NO: 1242033
gauuguuguuaggauuuga

SEQ ID NO: 1318651 - RNA, 19 nt, Artificial Sequence
  Description of Artificial Sequence: Synthetic oligonucleotide
  Antisense strand to SEQ ID NO: 1318650
ucaaauccuaacaacaauc

SEQ ID NO: 1318652 - RNA, 19 nt, Artificial Sequence
  Description of Artificial Sequence: Synthetic oligonucleotide
  Sense strand starting at position 2654 of SEQ ID NO: 1242033
uuguuaggauuugaaacga

SEQ ID NO: 1318653 - RNA, 19 nt, Artificial Sequence
  Description of Artificial Sequence: Synthetic oligonucleotide
  Antisense strand to SEQ ID NO: 1318652
ucguuucaaauccuaacaa

SEQ ID NO: 1318654 - RNA, 19 nt, Artificial Sequence
  Description of Artificial Sequence: Synthetic oligonucleotide
  Sense strand starting at position 2669 of SEQ ID NO: 1242033
acgaucguuuauccaauga

SEQ ID NO: 1318655 - RNA, 19 nt, Artificial Sequence
  Description of Artificial Sequence: Synthetic oligonucleotide
  Antisense strand to SEQ ID NO: 1318654
ucauuggauaaacgaucgu

SEQ ID NO: 1318656 - RNA, 19 nt, Artificial Sequence
  Description of Artificial Sequence: Synthetic oligonucleotide
  Sense strand starting at position 2673 of SEQ ID NO: 1242033
ucguuuauccaaugaauau

SEQ ID NO: 1318657 - RNA, 19 nt, Artificial Sequence
  Description of Artificial Sequence: Synthetic oligonucleotide
  Antisense strand to SEQ ID NO: 1318656
auauucauuggauaaacga

SEQ ID NO: 1318658 - RNA, 19 nt, Artificial Sequence
  Description of Artificial Sequence: Synthetic oligonucleotide
  Sense strand starting at position 2715 of SEQ ID NO: 1242033
ucugcuuagcacuagggau

SEQ ID NO: 1318659 - RNA, 19 nt, Artificial Sequence
  Description of Artificial Sequence: Synthetic oligonucleotide
  Antisense strand to SEQ ID NO: 1318658
aucccuagugcuaagcaga

SEQ ID NO: 1318660 - RNA, 19 nt, Artificial Sequence
  Description of Artificial Sequence: Synthetic oligonucleotide
  Sense strand starting at position 2839 of SEQ ID NO: 1242033
uuuaguuugggugaucaga

SEQ ID NO: 1318661 - RNA, 19 nt, Artificial Sequence
  Description of Artificial Sequence: Synthetic oligonucleotide
  Antisense strand to SEQ ID NO: 1318660
ucugaucacccaaacuaaa

SEQ ID NO: 1318662 - RNA, 19 nt, Artificial Sequence
  Description of Artificial Sequence: Synthetic oligonucleotide
  Sense strand starting at position 2841 of SEQ ID NO: 1242033
uaguuugggugaucagaca

SEQ ID NO: 1318663 - RNA, 19 nt, Artificial Sequence
  Description of Artificial Sequence: Synthetic oligonucleotide
  Antisense strand to SEQ ID NO: 1318662
ugucugaucacccaaacua

SEQ ID NO: 1318664 - RNA, 19 nt, Artificial Sequence
  Description of Artificial Sequence: Synthetic oligonucleotide
  Sense strand starting at position 2887 of SEQ ID NO: 1242033
gacgguauucuaggcaaag

SEQ ID NO: 1318665 - RNA, 19 nt, Artificial Sequence
  Description of Artificial Sequence: Synthetic oligonucleotide
  Antisense strand to SEQ ID NO: 1318664
cuuugccuagaauaccguc

SEQ ID NO: 1318666 - RNA, 19 nt, Artificial Sequence
  Description of Artificial Sequence: Synthetic oligonucleotide
  Sense strand starting at position 2942 of SEQ ID NO: 1242033
ucuggugagcucggaaaca

SEQ ID NO: 1318667 - RNA, 19 nt, Artificial Sequence
  Description of Artificial Sequence: Synthetic oligonucleotide
  Antisense strand to SEQ ID NO: 1318666
uguuuccgagcucaccaga

SEQ ID NO: 1318668 - RNA, 19 nt, Artificial Sequence
  Description of Artificial Sequence: Synthetic oligonucleotide
  Sense strand starting at position 3114 of SEQ ID NO: 1242033
acaagaugcuauuuguguu

SEQ ID NO: 1318669 - RNA, 19 nt, Artificial Sequence
  Description of Artificial Sequence: Synthetic oligonucleotide
  Antisense strand to SEQ ID NO: 1318668
aacacaaauagcaucuugu

SEQ ID NO: 1318670 - RNA, 19 nt, Artificial Sequence
  Description of Artificial Sequence: Synthetic oligonucleotide
  Sense strand starting at position 3223 of SEQ ID NO: 1242033
gagugaaugguaggugaug

SEQ ID NO: 1318671 - RNA, 19 nt, Artificial Sequence
  Description of Artificial Sequence: Synthetic oligonucleotide
  Antisense strand to SEQ ID NO: 1318670
caucaccuaccauucacuc

SEQ ID NO: 1318672 - RNA, 19 nt, Artificial Sequence
  Description of Artificial Sequence: Synthetic oligonucleotide
  Sense strand starting at position 3224 of SEQ ID NO: 1242033
agugaaugguaggugauga

SEQ ID NO: 1318673 - RNA, 19 nt, Artificial Sequence
  Description of Artificial Sequence: Synthetic oligonucleotide
  Antisense strand to SEQ ID NO: 1318672
ucaucaccuaccauucacu

SEQ ID NO: 1318674 - RNA, 19 nt, Artificial Sequence
  Description of Artificial Sequence: Synthetic oligonucleotide
  Sense strand starting at position 3225 of SEQ ID NO: 1242033
gugaaugguaggugaugaa

SEQ ID NO: 1318675 - RNA, 19 nt, Artificial Sequence
  Description of Artificial Sequence: Synthetic oligonucleotide
  Antisense strand to SEQ ID NO: 1318674
uucaucaccuaccauucac

SEQ ID NO: 1318676 - RNA, 19 nt, Artificial Sequence
  Description of Artificial Sequence: Synthetic oligonucleotide
  Sense strand starting at position 3342 of SEQ ID NO: 1242033
gcauuuauguggcuccaag

SEQ ID NO: 1318677 - RNA, 19 nt, Artificial Sequence
  Description of Artificial Sequence: Synthetic oligonucleotide
  Antisense strand to SEQ ID NO: 1318676
cuuggagccacauaaaugc

SEQ ID NO: 1318678 - RNA, 19 nt, Artificial Sequence
  Description of Artificial Sequence: Synthetic oligonucleotide
  Sense strand starting at position 3414 of SEQ ID NO: 1242033
auuccaauucuaggaggua

SEQ ID NO: 1318679 - RNA, 19 nt, Artificial Sequence
  Description of Artificial Sequence: Synthetic oligonucleotide
  Antisense strand to SEQ ID NO: 1318678
uaccuccuagaauuggaau

SEQ ID NO: 1318680 - RNA, 19 nt, Artificial Sequence
  Description of Artificial Sequence: Synthetic oligonucleotide
  Sense strand starting at position 3468 of SEQ ID NO: 1242033
gugggucacuucucaaauu

SEQ ID NO: 1318681 - RNA, 19 nt, Artificial Sequence
  Description of Artificial Sequence: Synthetic oligonucleotide
  Antisense strand to SEQ ID NO: 1318680
aauuugagaagugacccac

SEQ ID NO: 1318682 - RNA, 19 nt, Artificial Sequence
  Description of Artificial Sequence: Synthetic oligonucleotide
  Sense strand starting at position 3581 of SEQ ID NO: 1242033
gcaauaagggcugaaggua

SEQ ID NO: 1318683 - RNA, 19 nt, Artificial Sequence
  Description of Artificial Sequence: Synthetic oligonucleotide
  Antisense strand to SEQ ID NO: 1318682
uaccuucagcccuuauugc

SEQ ID NO: 1318684 - RNA, 19 nt, Artificial Sequence
  Description of Artificial Sequence: Synthetic oligonucleotide
  Sense strand starting at position 3646 of SEQ ID NO: 1242033
gaagcuggcugguuuauuu

SEQ ID NO: 1318685 - RNA, 19 nt, Artificial Sequence
  Description of Artificial Sequence: Synthetic oligonucleotide
  Antisense strand to SEQ ID NO: 1318684
aaauaaaccagccagcuuc

SEQ ID NO: 1318686 - RNA, 19 nt, Artificial Sequence
  Description of Artificial Sequence: Synthetic oligonucleotide
  Sense strand starting at position 3887 of SEQ ID NO: 1242033
cuuugauuaccugggcaca

SEQ ID NO: 1318687 - RNA, 19 nt, Artificial Sequence
  Description of Artificial Sequence: Synthetic oligonucleotide
  Antisense strand to SEQ ID NO: 1318686
ugugcccagguaaucaaag

SEQ ID NO: 1318688 - RNA, 19 nt, Artificial Sequence
  Description of Artificial Sequence: Synthetic oligonucleotide
  Sense strand starting at position 3888 of SEQ ID NO: 1242033
uuugauuaccugggcacaa

SEQ ID NO: 1318689 - RNA, 19 nt, Artificial Sequence
  Description of Artificial Sequence: Synthetic oligonucleotide
  Antisense strand to SEQ ID NO: 1318688
uugugcccagguaaucaaa

SEQ ID NO: 1318690 - RNA, 19 nt, Artificial Sequence
  Description of Artificial Sequence: Synthetic oligonucleotide
  Sense strand starting at position 126 of SEQ ID NO: 1242034
ccaguuguggaagauucuu

SEQ ID NO: 1318691 - RNA, 19 nt, Artificial Sequence
  Description of Artificial Sequence: Synthetic oligonucleotide
  Antisense strand to SEQ ID NO: 1318690
aagaaucuuccacaacugg

SEQ ID NO: 1318692 - RNA, 19 nt, Artificial Sequence
  Description of Artificial Sequence: Synthetic oligonucleotide
  Sense strand starting at position 194 of SEQ ID NO: 1242034
ggagacuucugggaaagcu

SEQ ID NO: 1318693 - RNA, 19 nt, Artificial Sequence
  Description of Artificial Sequence: Synthetic oligonucleotide
  Antisense strand to SEQ ID NO: 1318692
agcuuucccagaagucucc

SEQ ID NO: 1318694 - RNA, 19 nt, Artificial Sequence
  Description of Artificial Sequence: Synthetic oligonucleotide
  Sense strand starting at position 219 of SEQ ID NO: 1242034
ugacgugagagucaaagau

SEQ ID NO: 1318695 - RNA, 19 nt, Artificial Sequence
  Description of Artificial Sequence: Synthetic oligonucleotide
  Antisense strand to SEQ ID NO: 1318694
aucuuugacucucacguca

SEQ ID NO: 1318696 - RNA, 19 nt, Artificial Sequence
  Description of Artificial Sequence: Synthetic oligonucleotide
  Sense strand starting at position 238 of SEQ ID NO: 1242034
cagagagccuguuaaagac

SEQ ID NO: 1318697 - RNA, 19 nt, Artificial Sequence
  Description of Artificial Sequence: Synthetic oligonucleotide
  Antisense strand to SEQ ID NO: 1318696
gucuuuaacaggcucucug

SEQ ID NO: 1318698 - RNA, 19 nt, Artificial Sequence
  Description of Artificial Sequence: Synthetic oligonucleotide
  Sense strand starting at position 432 of SEQ ID NO: 1242034
ccuggaaauuccuagcaau

SEQ ID NO: 1318699 - RNA, 19 nt, Artificial Sequence
  Description of Artificial Sequence: Synthetic oligonucleotide
  Antisense strand to SEQ ID NO: 1318698
auugcuaggaauuuccagg

SEQ ID NO: 1318700 - RNA, 19 nt, Artificial Sequence
  Description of Artificial Sequence: Synthetic oligonucleotide
  Sense strand starting at position 435 of SEQ ID NO: 1242034
ggaaauuccuagcaaucuu

SEQ ID NO: 1318701 - RNA, 19 nt, Artificial Sequence
  Description of Artificial Sequence: Synthetic oligonucleotide
  Antisense strand to SEQ ID NO: 1318700
aagauugcuaggaauuucc

SEQ ID NO: 1318702 - RNA, 19 nt, Artificial Sequence
  Description of Artificial Sequence: Synthetic oligonucleotide
  Sense strand starting at position 496 of SEQ ID NO: 1242034
aaauuauguucuuggcagu

SEQ ID NO: 1318703 - RNA, 19 nt, Artificial Sequence
  Description of Artificial Sequence: Synthetic oligonucleotide
  Antisense strand to SEQ ID NO: 1318702
acugccaagaacauaauuu

SEQ ID NO: 1318704 - RNA, 19 nt, Artificial Sequence
  Description of Artificial Sequence: Synthetic oligonucleotide
  Sense strand starting at position 497 of SEQ ID NO: 1242034
aauuauguucuuggcagua

SEQ ID NO: 1318705 - RNA, 19 nt, Artificial Sequence
  Description of Artificial Sequence: Synthetic oligonucleotide
  Antisense strand to SEQ ID NO: 1318704
uacugccaagaacauaauu

SEQ ID NO: 1318706 - RNA, 19 nt, Artificial Sequence
  Description of Artificial Sequence: Synthetic oligonucleotide
  Sense strand starting at position 529 of SEQ ID NO: 1242034
gcccgagaucaguguucuc

SEQ ID NO: 1318707 - RNA, 19 nt, Artificial Sequence
  Description of Artificial Sequence: Synthetic oligonucleotide
  Antisense strand to SEQ ID NO: 1318706
gagaacacugaucucgggc

SEQ ID NO: 1318708 - RNA, 19 nt, Artificial Sequence
  Description of Artificial Sequence: Synthetic oligonucleotide
  Sense strand starting at position 538 of SEQ ID NO: 1242034
caguguucucgucccaguu

SEQ ID NO: 1318709 - RNA, 19 nt, Artificial Sequence
  Description of Artificial Sequence: Synthetic oligonucleotide
  Antisense strand to SEQ ID NO: 1318708
aacugggacgagaacacug

SEQ ID NO: 1318710 - RNA, 19 nt, Artificial Sequence
  Description of Artificial Sequence: Synthetic oligonucleotide
  Sense strand starting at position 560 of SEQ ID NO: 1242034
cuguuuaugugcugggaua

SEQ ID NO: 1318711 - RNA, 19 nt, Artificial Sequence
  Description of Artificial Sequence: Synthetic oligonucleotide
  Antisense strand to SEQ ID NO: 1318710
uaucccagcacauaaacag

SEQ ID NO: 1318712 - RNA, 19 nt, Artificial Sequence
  Description of Artificial Sequence: Synthetic oligonucleotide
  Sense strand starting at position 561 of SEQ ID NO: 1242034
uguuuaugugcugggauau

SEQ ID NO: 1318713 - RNA, 19 nt, Artificial Sequence
  Description of Artificial Sequence: Synthetic oligonucleotide
  Antisense strand to SEQ ID NO: 1318712
auaucccagcacauaaaca

SEQ ID NO: 1318714 - RNA, 19 nt, Artificial Sequence
  Description of Artificial Sequence: Synthetic oligonucleotide
  Sense strand starting at position 562 of SEQ ID NO: 1242034
guuuaugugcugggauaug

SEQ ID NO: 1318715 - RNA, 19 nt, Artificial Sequence
  Description of Artificial Sequence: Synthetic oligonucleotide
  Antisense strand to SEQ ID NO: 1318714
cauaucccagcacauaaac

SEQ ID NO: 1318716 - RNA, 19 nt, Artificial Sequence
  Description of Artificial Sequence: Synthetic oligonucleotide
  Sense strand starting at position 610 of SEQ ID NO: 1242034
aucuguaacugagcuagau

SEQ ID NO: 1318717 - RNA, 19 nt, Artificial Sequence
  Description of Artificial Sequence: Synthetic oligonucleotide
  Antisense strand to SEQ ID NO: 1318716
aucuagcucaguuacagau

SEQ ID NO: 1318718 - RNA, 19 nt, Artificial Sequence
  Description of Artificial Sequence: Synthetic oligonucleotide
  Sense strand starting at position 619 of SEQ ID NO: 1242034
ugagcuagauuccucgacu

SEQ ID NO: 1318719 - RNA, 19 nt, Artificial Sequence
  Description of Artificial Sequence: Synthetic oligonucleotide
  Antisense strand to SEQ ID NO: 1318718
agucgaggaaucuagcuca

SEQ ID NO: 1318720 - RNA, 19 nt, Artificial Sequence
  Description of Artificial Sequence: Synthetic oligonucleotide
  Sense strand starting at position 620 of SEQ ID NO: 1242034
gagcuagauuccucgacua

SEQ ID NO: 1318721 - RNA, 19 nt, Artificial Sequence
  Description of Artificial Sequence: Synthetic oligonucleotide
  Antisense strand to SEQ ID NO: 1318720
uagucgaggaaucuagcuc

SEQ ID NO: 1318722 - RNA, 19 nt, Artificial Sequence
  Description of Artificial Sequence: Synthetic oligonucleotide
  Sense strand starting at position 622 of SEQ ID NO: 1242034
gcuagauuccucgacuaga

SEQ ID NO: 1318723 - RNA, 19 nt, Artificial Sequence
  Description of Artificial Sequence: Synthetic oligonucleotide
  Antisense strand to SEQ ID NO: 1318722
ucuagucgaggaaucuagc

SEQ ID NO: 1318724 - RNA, 19 nt, Artificial Sequence
  Description of Artificial Sequence: Synthetic oligonucleotide
  Sense strand starting at position 724 of SEQ ID NO: 1242034
cugucauuguagucacaga

SEQ ID NO: 1318725 - RNA, 19 nt, Artificial Sequence
  Description of Artificial Sequence: Synthetic oligonucleotide
  Antisense strand to SEQ ID NO: 1318724
ucugugacuacaaugacag

SEQ ID NO: 1318726 - RNA, 19 nt, Artificial Sequence
  Description of Artificial Sequence: Synthetic oligonucleotide
  Sense strand starting at position 763 of SEQ ID NO: 1242034
auagcuguguuccagcaaa

SEQ ID NO: 1318727 - RNA, 19 nt, Artificial Sequence
  Description of Artificial Sequence: Synthetic oligonucleotide
  Antisense strand to SEQ ID NO: 1318726
uuugcuggaacacagcuau

SEQ ID NO: 1318728 - RNA, 19 nt, Artificial Sequence
  Description of Artificial Sequence: Synthetic oligonucleotide
  Sense strand starting at position 801 of SEQ ID NO: 1242034
acccuugaaucagaugauc

SEQ ID NO: 1318729 - RNA, 19 nt, Artificial Sequence
  Description of Artificial Sequence: Synthetic oligonucleotide
  Antisense strand to SEQ ID NO: 1318728
gaucaucugauucaagggu

SEQ ID NO: 1318730 - RNA, 19 nt, Artificial Sequence
  Description of Artificial Sequence: Synthetic oligonucleotide
  Sense strand starting at position 883 of SEQ ID NO: 1242034
gggcucugcacuugaggaa

SEQ ID NO: 1318731 - RNA, 19 nt, Artificial Sequence
  Description of Artificial Sequence: Synthetic oligonucleotide
  Antisense strand to SEQ ID NO: 1318730
uuccucaagugcagagccc

SEQ ID NO: 1318732 - RNA, 19 nt, Artificial Sequence
  Description of Artificial Sequence: Synthetic oligonucleotide
  Sense strand starting at position 943 of SEQ ID NO: 1242034
gcacuaggcucccagauaa

SEQ ID NO: 1318733 - RNA, 19 nt, Artificial Sequence
  Description of Artificial Sequence: Synthetic oligonucleotide
  Antisense strand to SEQ ID NO: 1318732
uuaucugggagccuagugc

SEQ ID NO: 1318734 - RNA, 19 nt, Artificial Sequence
  Description of Artificial Sequence: Synthetic oligonucleotide
  Sense strand starting at position 1218 of SEQ ID NO: 1242034
ggucacucauccuuacacu

SEQ ID NO: 1318735 - RNA, 19 nt, Artificial Sequence
  Description of Artificial Sequence: Synthetic oligonucleotide
  Antisense strand to SEQ ID NO: 1318734
aguguaaggaugagugacc

SEQ ID NO: 1318736 - RNA, 19 nt, Artificial Sequence
  Description of Artificial Sequence: Synthetic oligonucleotide
  Sense strand starting at position 1683 of SEQ ID NO: 1242034
caagcauuggccugccaga

SEQ ID NO: 1318737 - RNA, 19 nt, Artificial Sequence
  Description of Artificial Sequence: Synthetic oligonucleotide
  Antisense strand to SEQ ID NO: 1318736
ucuggcaggccaaugcuug

SEQ ID NO: 1318738 - RNA, 19 nt, Artificial Sequence
  Description of Artificial Sequence: Synthetic oligonucleotide
  Sense strand starting at position 3079 of SEQ ID NO: 1242034
agagacugcuucucggaua

SEQ ID NO: 1318739 - RNA, 19 nt, Artificial Sequence
  Description of Artificial Sequence: Synthetic oligonucleotide
  Antisense strand to SEQ ID NO: 1318738
uauccgagaagcagucucu

SEQ ID NO: 1318740 - RNA, 19 nt, Artificial Sequence
  Description of Artificial Sequence: Synthetic oligonucleotide
  Sense strand starting at position 3082 of SEQ ID NO: 1242034
gacugcuucucggauacag

SEQ ID NO: 1318741 - RNA, 19 nt, Artificial Sequence
  Description of Artificial Sequence: Synthetic oligonucleotide
  Antisense strand to SEQ ID NO: 1318740
cuguauccgagaagcaguc

SEQ ID NO: 1318742 - RNA, 19 nt, Artificial Sequence
  Description of Artificial Sequence: Synthetic oligonucleotide
  Sense strand starting at position 3084 of SEQ ID NO: 1242034
cugcuucucggauacagau

SEQ ID NO: 1318743 - RNA, 19 nt, Artificial Sequence
  Description of Artificial Sequence: Synthetic oligonucleotide
  Antisense strand to SEQ ID NO: 1318742
aucuguauccgagaagcag

SEQ ID NO: 1318744 - RNA, 19 nt, Artificial Sequence
  Description of Artificial Sequence: Synthetic oligonucleotide
  Sense strand starting at position 3361 of SEQ ID NO: 1242034
ccaggacuuugggaguuua

SEQ ID NO: 1318745 - RNA, 19 nt, Artificial Sequence
  Description of Artificial Sequence: Synthetic oligonucleotide
  Antisense strand to SEQ ID NO: 1318744
uaaacucccaaaguccugg

SEQ ID NO: 1318746 - RNA, 19 nt, Artificial Sequence
  Description of Artificial Sequence: Synthetic oligonucleotide
  Sense strand starting at position 3372 of SEQ ID NO: 1242034
ggaguuuagugcucagcuc

SEQ ID NO: 1318747 - RNA, 19 nt, Artificial Sequence
  Description of Artificial Sequence: Synthetic oligonucleotide
  Antisense strand to SEQ ID NO: 1318746
gagcugagcacuaaacucc

SEQ ID NO: 1318748 - RNA, 19 nt, Artificial Sequence
  Description of Artificial Sequence: Synthetic oligonucleotide
  Sense strand starting at position 8 of SEQ ID NO: 1242035
ugagcuagauuccucgacu

SEQ ID NO: 1318749 - RNA, 19 nt, Artificial Sequence
  Description of Artificial Sequence: Synthetic oligonucleotide
  Antisense strand to SEQ ID NO: 1318748
agucgaggaaucuagcuca

SEQ ID NO: 1318750 - RNA, 19 nt, Artificial Sequence
  Description of Artificial Sequence: Synthetic oligonucleotide
  Sense strand starting at position 9 of SEQ ID NO: 1242035
gagcuagauuccucgacua

SEQ ID NO: 1318751 - RNA, 19 nt, Artificial Sequence
  Description of Artificial Sequence: Synthetic oligonucleotide
  Antisense strand to SEQ ID NO: 1318750
uagucgaggaaucuagcuc

SEQ ID NO: 1318752 - RNA, 19 nt, Artificial Sequence
  Description of Artificial Sequence: Synthetic oligonucleotide
  Sense strand starting at position 11 of SEQ ID NO: 1242035
gcuagauuccucgacuaga

SEQ ID NO: 1318753 - RNA, 19 nt, Artificial Sequence
  Description of Artificial Sequence: Synthetic oligonucleotide
  Antisense strand to SEQ ID NO: 1318752
ucuagucgaggaaucuagc

SEQ ID NO: 1318754 - RNA, 19 nt, Artificial Sequence
  Description of Artificial Sequence: Synthetic oligonucleotide
  Sense strand starting at position 113 of SEQ ID NO: 1242035
cugucauuguagucacaga

SEQ ID NO: 1318755 - RNA, 19 nt, Artificial Sequence
  Description of Artificial Sequence: Synthetic oligonucleotide
  Antisense strand to SEQ ID NO: 1318754
ucugugacuacaaugacag

SEQ ID NO: 1318756 - RNA, 19 nt, Artificial Sequence
  Description of Artificial Sequence: Synthetic oligonucleotide
  Sense strand starting at position 152 of SEQ ID NO: 1242035
auagcuguguuccagcaaa

SEQ ID NO: 1318757 - RNA, 19 nt, Artificial Sequence
  Description of Artificial Sequence: Synthetic oligonucleotide
  Antisense strand to SEQ ID NO: 1318756
uuugcuggaacacagcuau

SEQ ID NO: 1318758 - RNA, 19 nt, Artificial Sequence
  Description of Artificial Sequence: Synthetic oligonucleotide
  Sense strand starting at position 190 of SEQ ID NO: 1242035
acccuugaaucagaugauc

SEQ ID NO: 1318759 - RNA, 19 nt, Artificial Sequence
  Description of Artificial Sequence: Synthetic oligonucleotide
  Antisense strand to SEQ ID NO: 1318758
gaucaucugauucaagggu

SEQ ID NO: 1318760 - RNA, 19 nt, Artificial Sequence
  Description of Artificial Sequence: Synthetic oligonucleotide
  Sense strand starting at position 272 of SEQ ID NO: 1242035
gggcucugcacuugaggaa

SEQ ID NO: 1318761 - RNA, 19 nt, Artificial Sequence
  Description of Artificial Sequence: Synthetic oligonucleotide
  Antisense strand to SEQ ID NO: 1318760
uuccucaagugcagagccc

SEQ ID NO: 1318762 - RNA, 19 nt, Artificial Sequence
  Description of Artificial Sequence: Synthetic oligonucleotide
  Sense strand starting at position 332 of SEQ ID NO: 1242035
gcacuaggcucccagauaa

SEQ ID NO: 1318763 - RNA, 19 nt, Artificial Sequence
  Description of Artificial Sequence: Synthetic oligonucleotide
  Antisense strand to SEQ ID NO: 1318762
uuaucugggagccuagugc

SEQ ID NO: 1318764 - RNA, 19 nt, Artificial Sequence
  Description of Artificial Sequence: Synthetic oligonucleotide
  Sense strand starting at position 607 of SEQ ID NO: 1242035
ggucacucauccuuacacu

SEQ ID NO: 1318765 - RNA, 19 nt, Artificial Sequence
  Description of Artificial Sequence: Synthetic oligonucleotide
  Antisense strand to SEQ ID NO: 1318764
aguguaaggaugagugacc

SEQ ID NO: 1318766 - RNA, 19 nt, Artificial Sequence
  Description of Artificial Sequence: Synthetic oligonucleotide
  Sense strand starting at position 1072 of SEQ ID NO: 1242035
caagcauuggccugccaga

SEQ ID NO: 1318767 - RNA, 19 nt, Artificial Sequence
  Description of Artificial Sequence: Synthetic oligonucleotide
  Antisense strand to SEQ ID NO: 1318766
ucuggcaggccaaugcuug

SEQ ID NO: 1318768 - RNA, 19 nt, Artificial Sequence
  Description of Artificial Sequence: Synthetic oligonucleotide
  Sense strand starting at position 2468 of SEQ ID NO: 1242035
agagacugcuucucggaua

SEQ ID NO: 1318769 - RNA, 19 nt, Artificial Sequence
  Description of Artificial Sequence: Synthetic oligonucleotide
  Antisense strand to SEQ ID NO: 1318768
uauccgagaagcagucucu

SEQ ID NO: 1318770 - RNA, 19 nt, Artificial Sequence
  Description of Artificial Sequence: Synthetic oligonucleotide
  Sense strand starting at position 2471 of SEQ ID NO: 1242035
gacugcuucucggauacag

SEQ ID NO: 1318771 - RNA, 19 nt, Artificial Sequence
  Description of Artificial Sequence: Synthetic oligonucleotide
  Antisense strand to SEQ ID NO: 1318770
cuguauccgagaagcaguc

SEQ ID NO: 1318772 - RNA, 19 nt, Artificial Sequence
  Description of Artificial Sequence: Synthetic oligonucleotide
  Sense strand starting at position 2473 of SEQ ID NO: 1242035
cugcuucucggauacagau

SEQ ID NO: 1318773 - RNA, 19 nt, Artificial Sequence
  Description of Artificial Sequence: Synthetic oligonucleotide
  Antisense strand to SEQ ID NO: 1318772
aucuguauccgagaagcag

SEQ ID NO: 1318774 - RNA, 19 nt, Artificial Sequence
  Description of Artificial Sequence: Synthetic oligonucleotide
  Sense strand starting at position 2750 of SEQ ID NO: 1242035
ccaggacuuugggaguuua

SEQ ID NO: 1318775 - RNA, 19 nt, Artificial Sequence
  Description of Artificial Sequence: Synthetic oligonucleotide
  Antisense strand to SEQ ID NO: 1318774
uaaacucccaaaguccugg

SEQ ID NO: 1318776 - RNA, 19 nt, Artificial Sequence
  Description of Artificial Sequence: Synthetic oligonucleotide
  Sense strand starting at position 2761 of SEQ ID NO: 1242035
ggaguuuagugcucagcuc

SEQ ID NO: 1318777 - RNA, 19 nt, Artificial Sequence
  Description of Artificial Sequence: Synthetic oligonucleotide
  Antisense strand to SEQ ID NO: 1318776
gagcugagcacuaaacucc

SEQ ID NO: 1318778 - RNA, 19 nt, Artificial Sequence
  Description of Artificial Sequence: Synthetic oligonucleotide
  Sense strand starting at position 22 of SEQ ID NO: 1242036
aucuguaacugagcuagau

SEQ ID NO: 1318779 - RNA, 19 nt, Artificial Sequence
  Description of Artificial Sequence: Synthetic oligonucleotide
  Antisense strand to SEQ ID NO: 1318778
aucuagcucaguuacagau

SEQ ID NO: 1318780 - RNA, 19 nt, Artificial Sequence
  Description of Artificial Sequence: Synthetic oligonucleotide
  Sense strand starting at position 31 of SEQ ID NO: 1242036
ugagcuagauuccucgacu

SEQ ID NO: 1318781 - RNA, 19 nt, Artificial Sequence
  Description of Artificial Sequence: Synthetic oligonucleotide
  Antisense strand to SEQ ID NO: 1318780
agucgaggaaucuagcuca

SEQ ID NO: 1318782 - RNA, 19 nt, Artificial Sequence
  Description of Artificial Sequence: Synthetic oligonucleotide
  Sense strand starting at position 32 of SEQ ID NO: 1242036
gagcuagauuccucgacua

SEQ ID NO: 1318783 - RNA, 19 nt, Artificial Sequence
  Description of Artificial Sequence: Synthetic oligonucleotide
  Antisense strand to SEQ ID NO: 1318782
uagucgaggaaucuagcuc

SEQ ID NO: 1318784 - RNA, 19 nt, Artificial Sequence
  Description of Artificial Sequence: Synthetic oligonucleotide
  Sense strand starting at position 34 of SEQ ID NO: 1242036
gcuagauuccucgacuaga

SEQ ID NO: 1318785 - RNA, 19 nt, Artificial Sequence
  Description of Artificial Sequence: Synthetic oligonucleotide
  Antisense strand to SEQ ID NO: 1318784
ucuagucgaggaaucuagc

SEQ ID NO: 1318786 - RNA, 19 nt, Artificial Sequence
  Description of Artificial Sequence: Synthetic oligonucleotide
  Sense strand starting at position 136 of SEQ ID NO: 1242036
cugucauuguagucacaga

SEQ ID NO: 1318787 - RNA, 19 nt, Artificial Sequence
  Description of Artificial Sequence: Synthetic oligonucleotide
  Antisense strand to SEQ ID NO: 1318786
ucugugacuacaaugacag

SEQ ID NO: 1318788 - RNA, 19 nt, Artificial Sequence
  Description of Artificial Sequence: Synthetic oligonucleotide
  Sense strand starting at position 175 of SEQ ID NO: 1242036
auagcuguguuccagcaaa

SEQ ID NO: 1318789 - RNA, 19 nt, Artificial Sequence
  Description of Artificial Sequence: Synthetic oligonucleotide
  Antisense strand to SEQ ID NO: 1318788
uuugcuggaacacagcuau

SEQ ID NO: 1318790 - RNA, 19 nt, Artificial Sequence
  Description of Artificial Sequence: Synthetic oligonucleotide
  Sense strand starting at position 213 of SEQ ID NO: 1242036
acccuugaaucagaugauc

SEQ ID NO: 1318791 - RNA, 19 nt, Artificial Sequence
  Description of Artificial Sequence: Synthetic oligonucleotide
  Antisense strand to SEQ ID NO: 1318790
gaucaucugauucaagggu

SEQ ID NO: 1318792 - RNA, 19 nt, Artificial Sequence
  Description of Artificial Sequence: Synthetic oligonucleotide
  Sense strand starting at position 295 of SEQ ID NO: 1242036
gggcucugcacuugaggaa

SEQ ID NO: 1318793 - RNA, 19 nt, Artificial Sequence
  Description of Artificial Sequence: Synthetic oligonucleotide
  Antisense strand to SEQ ID NO: 1318792
uuccucaagugcagagccc

SEQ ID NO: 1318794 - RNA, 19 nt, Artificial Sequence
  Description of Artificial Sequence: Synthetic oligonucleotide
  Sense strand starting at position 355 of SEQ ID NO: 1242036
gcacuaggcucccagauaa

SEQ ID NO: 1318795 - RNA, 19 nt, Artificial Sequence
  Description of Artificial Sequence: Synthetic oligonucleotide
  Antisense strand to SEQ ID NO: 1318794
uuaucugggagccuagugc

SEQ ID NO: 1318796 - RNA, 19 nt, Artificial Sequence
  Description of Artificial Sequence: Synthetic oligonucleotide
  Sense strand starting at position 630 of SEQ ID NO: 1242036
ggucacucauccuuacacu

SEQ ID NO: 1318797 - RNA, 19 nt, Artificial Sequence
  Description of Artificial Sequence: Synthetic oligonucleotide
  Antisense strand to SEQ ID NO: 1318796
aguguaaggaugagugacc

SEQ ID NO: 1318798 - RNA, 19 nt, Artificial Sequence
  Description of Artificial Sequence: Synthetic oligonucleotide
  Sense strand starting at position 1095 of SEQ ID NO: 1242036
caagcauuggccugccaga

SEQ ID NO: 1318799 - RNA, 19 nt, Artificial Sequence
  Description of Artificial Sequence: Synthetic oligonucleotide
  Antisense strand to SEQ ID NO: 1318798
ucuggcaggccaaugcuug

SEQ ID NO: 1318800 - RNA, 19 nt, Artificial Sequence
  Description of Artificial Sequence: Synthetic oligonucleotide
  Sense strand starting at position 2491 of SEQ ID NO: 1242036
agagacugcuucucggaua

SEQ ID NO: 1318801 - RNA, 19 nt, Artificial Sequence
  Description of Artificial Sequence: Synthetic oligonucleotide
  Antisense strand to SEQ ID NO: 1318800
uauccgagaagcagucucu

SEQ ID NO: 1318802 - RNA, 19 nt, Artificial Sequence
  Description of Artificial Sequence: Synthetic oligonucleotide
  Sense strand starting at position 2494 of SEQ ID NO: 1242036
gacugcuucucggauacag

SEQ ID NO: 1318803 - RNA, 19 nt, Artificial Sequence
  Description of Artificial Sequence: Synthetic oligonucleotide
  Antisense strand to SEQ ID NO: 1318802
cuguauccgagaagcaguc

SEQ ID NO: 1318804 - RNA, 19 nt, Artificial Sequence
  Description of Artificial Sequence: Synthetic oligonucleotide
  Sense strand starting at position 2496 of SEQ ID NO: 1242036
cugcuucucggauacagau

SEQ ID NO: 1318805 - RNA, 19 nt, Artificial Sequence
  Description of Artificial Sequence: Synthetic oligonucleotide
  Antisense strand to SEQ ID NO: 1318804
aucuguauccgagaagcag

SEQ ID NO: 1318806 - RNA, 19 nt, Artificial Sequence
  Description of Artificial Sequence: Synthetic oligonucleotide
  Sense strand starting at position 2773 of SEQ ID NO: 1242036
ccaggacuuugggaguuua

SEQ ID NO: 1318807 - RNA, 19 nt, Artificial Sequence
  Description of Artificial Sequence: Synthetic oligonucleotide
  Antisense strand to SEQ ID NO: 1318806
uaaacucccaaaguccugg

SEQ ID NO: 1318808 - RNA, 19 nt, Artificial Sequence
  Description of Artificial Sequence: Synthetic oligonucleotide
  Sense strand starting at position 2784 of SEQ ID NO: 1242036
ggaguuuagugcucagcuc

SEQ ID NO: 1318809 - RNA, 19 nt, Artificial Sequence
  Description of Artificial Sequence: Synthetic oligonucleotide
  Antisense strand to SEQ ID NO: 1318808
gagcugagcacuaaacucc

SEQ ID NO: 1318810 - RNA, 19 nt, Artificial Sequence
  Description of Artificial Sequence: Synthetic oligonucleotide
  Sense strand starting at position 8 of SEQ ID NO: 1242037
cuaaguugauaagucauca

SEQ ID NO: 1318811 - RNA, 19 nt, Artificial Sequence
  Description of Artificial Sequence: Synthetic oligonucleotide
  Antisense strand to SEQ ID NO: 1318810
ugaugacuuaucaacuuag

SEQ ID NO: 1318812 - RNA, 19 nt, Artificial Sequence
  Description of Artificial Sequence: Synthetic oligonucleotide
  Sense strand starting at position 368 of SEQ ID NO: 1242037
ucaaauuggcuuggauuau

SEQ ID NO: 1318813 - RNA, 19 nt, Artificial Sequence
  Description of Artificial Sequence: Synthetic oligonucleotide
  Antisense strand to SEQ ID NO: 1318812
auaauccaagccaauuuga

SEQ ID NO: 1318814 - RNA, 19 nt, Artificial Sequence
  Description of Artificial Sequence: Synthetic oligonucleotide
  Sense strand starting at position 407 of SEQ ID NO: 1242037
guagauuugcccuguuaaa

SEQ ID NO: 1318815 - RNA, 19 nt, Artificial Sequence
  Description of Artificial Sequence: Synthetic oligonucleotide
  Antisense strand to SEQ ID NO: 1318814
uuuaacagggcaaaucuac

SEQ ID NO: 1318816 - RNA, 19 nt, Artificial Sequence
  Description of Artificial Sequence: Synthetic oligonucleotide
  Sense strand starting at position 548 of SEQ ID NO: 1242037
ccauuaacagauugcuaag

SEQ ID NO: 1318817 - RNA, 19 nt, Artificial Sequence
  Description of Artificial Sequence: Synthetic oligonucleotide
  Antisense strand to SEQ ID NO: 1318816
cuuagcaaucuguuaaugg

SEQ ID NO: 1318818 - RNA, 19 nt, Artificial Sequence
  Description of Artificial Sequence: Synthetic oligonucleotide
  Sense strand starting at position 1147 of SEQ ID NO: 1242037
ucuguuugcaaugagagau

SEQ ID NO: 1318819 - RNA, 19 nt, Artificial Sequence
  Description of Artificial Sequence: Synthetic oligonucleotide
  Antisense strand to SEQ ID NO: 1318818
aucucucauugcaaacaga

SEQ ID NO: 1318820 - RNA, 19 nt, Artificial Sequence
  Description of Artificial Sequence: Synthetic oligonucleotide
  Sense strand starting at position 1232 of SEQ ID NO: 1242037
guagcauuagaauacagua

SEQ ID NO: 1318821 - RNA, 19 nt, Artificial Sequence
  Description of Artificial Sequence: Synthetic oligonucleotide
  Antisense strand to SEQ ID NO: 1318820
uacuguauucuaaugcuac

SEQ ID NO: 1318822 - RNA, 19 nt, Artificial Sequence
  Description of Artificial Sequence: Synthetic oligonucleotide
  Sense strand starting at position 1250 of SEQ ID NO: 1242037
auagguuauucuuugaaga

SEQ ID NO: 1318823 - RNA, 19 nt, Artificial Sequence
  Description of Artificial Sequence: Synthetic oligonucleotide
  Antisense strand to SEQ ID NO: 1318822
ucuucaaagaauaaccuau

SEQ ID NO: 1318824 - RNA, 19 nt, Artificial Sequence
  Description of Artificial Sequence: Synthetic oligonucleotide
  Sense strand starting at position 1251 of SEQ ID NO: 1242037
uagguuauucuuugaagau

SEQ ID NO: 1318825 - RNA, 19 nt, Artificial Sequence
  Description of Artificial Sequence: Synthetic oligonucleotide
  Antisense strand to SEQ ID NO: 1318824
aucuucaaagaauaaccua

SEQ ID NO: 1318826 - RNA, 19 nt, Artificial Sequence
  Description of Artificial Sequence: Synthetic oligonucleotide
  Sense strand starting at position 1553 of SEQ ID NO: 1242037
guuaaaugucaggauugcu

SEQ ID NO: 1318827 - RNA, 19 nt, Artificial Sequence
  Description of Artificial Sequence: Synthetic oligonucleotide
  Antisense strand to SEQ ID NO: 1318826
agcaauccugacauuuaac

SEQ ID NO: 1318828 - RNA, 19 nt, Artificial Sequence
  Description of Artificial Sequence: Synthetic oligonucleotide
  Sense strand starting at position 1561 of SEQ ID NO: 1242037
ucaggauugcucuggagaa

SEQ ID NO: 1318829 - RNA, 19 nt, Artificial Sequence
  Description of Artificial Sequence: Synthetic oligonucleotide
  Antisense strand to SEQ ID NO: 1318828
uucuccagagcaauccuga

SEQ ID NO: 1318830 - RNA, 19 nt, Artificial Sequence
  Description of Artificial Sequence: Synthetic oligonucleotide
  Sense strand starting at position 2013 of SEQ ID NO: 1242037
cuguuaguugaauacaaca

SEQ ID NO: 1318831 - RNA, 19 nt, Artificial Sequence
  Description of Artificial Sequence: Synthetic oligonucleotide
  Antisense strand to SEQ ID NO: 1318830
uguuguauucaacuaacag

SEQ ID NO: 1318832 - RNA, 19 nt, Artificial Sequence
  Description of Artificial Sequence: Synthetic oligonucleotide
  Sense strand starting at position 2021 of SEQ ID NO: 1242037
ugaauacaacagcgagaau

SEQ ID NO: 1318833 - RNA, 19 nt, Artificial Sequence
  Description of Artificial Sequence: Synthetic oligonucleotide
  Antisense strand to SEQ ID NO: 1318832
auucucgcuguuguauuca

SEQ ID NO: 1318834 - RNA, 19 nt, Artificial Sequence
  Description of Artificial Sequence: Synthetic oligonucleotide
  Sense strand starting at position 2076 of SEQ ID NO: 1242037
gggagcuaugaacauguuu

SEQ ID NO: 1318835 - RNA, 19 nt, Artificial Sequence
  Description of Artificial Sequence: Synthetic oligonucleotide
  Antisense strand to SEQ ID NO: 1318834
aaacauguucauagcuccc

SEQ ID NO: 1318836 - RNA, 19 nt, Artificial Sequence
  Description of Artificial Sequence: Synthetic oligonucleotide
  Sense strand starting at position 2114 of SEQ ID NO: 1242037
ggguaccuacuuuguagaa

SEQ ID NO: 1318837 - RNA, 19 nt, Artificial Sequence
  Description of Artificial Sequence: Synthetic oligonucleotide
  Antisense strand to SEQ ID NO: 1318836
uucuacaaaguagguaccc

SEQ ID NO: 1318838 - RNA, 19 nt, Artificial Sequence
  Description of Artificial Sequence: Synthetic oligonucleotide
  Sense strand starting at position 2115 of SEQ ID NO: 1242037
gguaccuacuuuguagaaa

SEQ ID NO: 1318839 - RNA, 19 nt, Artificial Sequence
  Description of Artificial Sequence: Synthetic oligonucleotide
  Antisense strand to SEQ ID NO: 1318838
uuucuacaaaguagguacc

SEQ ID NO: 1318840 - RNA, 19 nt, Artificial Sequence
  Description of Artificial Sequence: Synthetic oligonucleotide
  Sense strand starting at position 2130 of SEQ ID NO: 1242037
gaaacagaucucugguucu

SEQ ID NO: 1318841 - RNA, 19 nt, Artificial Sequence
  Description of Artificial Sequence: Synthetic oligonucleotide
  Antisense strand to SEQ ID NO: 1318840
agaaccagagaucuguuuc

SEQ ID NO: 1318842 - RNA, 19 nt, Artificial Sequence
  Description of Artificial Sequence: Synthetic oligonucleotide
  Sense strand starting at position 2133 of SEQ ID NO: 1242037
acagaucucugguucugaa

SEQ ID NO: 1318843 - RNA, 19 nt, Artificial Sequence
  Description of Artificial Sequence: Synthetic oligonucleotide
  Antisense strand to SEQ ID NO: 1318842
uucagaaccagagaucugu

SEQ ID NO: 1318844 - RNA, 19 nt, Artificial Sequence
  Description of Artificial Sequence: Synthetic oligonucleotide
  Sense strand starting at position 2202 of SEQ ID NO: 1242037
guuguauuauacuuggaaa

SEQ ID NO: 1318845 - RNA, 19 nt, Artificial Sequence
  Description of Artificial Sequence: Synthetic oligonucleotide
  Antisense strand to SEQ ID NO: 1318844
uuuccaaguauaauacaac

SEQ ID NO: 1318846 - RNA, 19 nt, Artificial Sequence
  Description of Artificial Sequence: Synthetic oligonucleotide
  Sense strand starting at position 2354 of SEQ ID NO: 1242037
acauaugagugccuuaaag

SEQ ID NO: 1318847 - RNA, 19 nt, Artificial Sequence
  Description of Artificial Sequence: Synthetic oligonucleotide
  Antisense strand to SEQ ID NO: 1318846
cuuuaaggcacucauaugu

SEQ ID NO: 1318848 - RNA, 19 nt, Artificial Sequence
  Description of Artificial Sequence: Synthetic oligonucleotide
  Sense strand starting at position 2356 of SEQ ID NO: 1242037
auaugagugccuuaaagca

SEQ ID NO: 1318849 - RNA, 19 nt, Artificial Sequence
  Description of Artificial Sequence: Synthetic oligonucleotide
  Antisense strand to SEQ ID NO: 1318848
ugcuuuaaggcacucauau

SEQ ID NO: 1318850 - RNA, 19 nt, Artificial Sequence
  Description of Artificial Sequence: Synthetic oligonucleotide
  Sense strand starting at position 2368 of SEQ ID NO: 1242037
uaaagcacuguguagauaa

SEQ ID NO: 1318851 - RNA, 19 nt, Artificial Sequence
  Description of Artificial Sequence: Synthetic oligonucleotide
  Antisense strand to SEQ ID NO: 1318850
uuaucuacacagugcuuua

SEQ ID NO: 1318852 - RNA, 19 nt, Artificial Sequence
  Description of Artificial Sequence: Synthetic oligonucleotide
  Sense strand starting at position 2452 of SEQ ID NO: 1242037
auuauauuccuaggcugaa

SEQ ID NO: 1318853 - RNA, 19 nt, Artificial Sequence
  Description of Artificial Sequence: Synthetic oligonucleotide
  Antisense strand to SEQ ID NO: 1318852
uucagccuaggaauauaau

SEQ ID NO: 1318854 - RNA, 19 nt, Artificial Sequence
  Description of Artificial Sequence: Synthetic oligonucleotide
  Sense strand starting at position 2453 of SEQ ID NO: 1242037
uuauauuccuaggcugaaa

SEQ ID NO: 1318855 - RNA, 19 nt, Artificial Sequence
  Description of Artificial Sequence: Synthetic oligonucleotide
  Antisense strand to SEQ ID NO: 1318854
uuucagccuaggaauauaa

SEQ ID NO: 1318856 - RNA, 19 nt, Artificial Sequence
  Description of Artificial Sequence: Synthetic oligonucleotide
  Sense strand starting at position 2481 of SEQ ID NO: 1242037
ucuagauucuuauuugugu

SEQ ID NO: 1318857 - RNA, 19 nt, Artificial Sequence
  Description of Artificial Sequence: Synthetic oligonucleotide
  Antisense strand to SEQ ID NO: 1318856
acacaaauaagaaucuaga

SEQ ID NO: 1318858 - RNA, 19 nt, Artificial Sequence
  Description of Artificial Sequence: Synthetic oligonucleotide
  Sense strand starting at position 2482 of SEQ ID NO: 1242037
cuagauucuuauuuguguu

SEQ ID NO: 1318859 - RNA, 19 nt, Artificial Sequence
  Description of Artificial Sequence: Synthetic oligonucleotide
  Antisense strand to SEQ ID NO: 1318858
aacacaaauaagaaucuag

SEQ ID NO: 1318860 - RNA, 19 nt, Artificial Sequence
  Description of Artificial Sequence: Synthetic oligonucleotide
  Sense strand starting at position 2518 of SEQ ID NO: 1242037
uaugacuucgggcaaguua

SEQ ID NO: 1318861 - RNA, 19 nt, Artificial Sequence
  Description of Artificial Sequence: Synthetic oligonucleotide
  Antisense strand to SEQ ID NO: 1318860
uaacuugcccgaagucaua

SEQ ID NO: 1318862 - RNA, 19 nt, Artificial Sequence
  Description of Artificial Sequence: Synthetic oligonucleotide
  Sense strand starting at position 2890 of SEQ ID NO: 1242037
auuagauucuugguguaga

SEQ ID NO: 1318863 - RNA, 19 nt, Artificial Sequence
  Description of Artificial Sequence: Synthetic oligonucleotide
  Antisense strand to SEQ ID NO: 1318862
ucuacaccaagaaucuaau

SEQ ID NO: 1318864 - RNA, 19 nt, Artificial Sequence
  Description of Artificial Sequence: Synthetic oligonucleotide
  Sense strand starting at position 2895 of SEQ ID NO: 1242037
auucuugguguagaauaau

SEQ ID NO: 1318865 - RNA, 19 nt, Artificial Sequence
  Description of Artificial Sequence: Synthetic oligonucleotide
  Antisense strand to SEQ ID NO: 1318864
auuauucuacaccaagaau

SEQ ID NO: 1318866 - RNA, 19 nt, Artificial Sequence
  Description of Artificial Sequence: Synthetic oligonucleotide
  Sense strand starting at position 3060 of SEQ ID NO: 1242037
ugugaaaugcacuacuuua

SEQ ID NO: 1318867 - RNA, 19 nt, Artificial Sequence
  Description of Artificial Sequence: Synthetic oligonucleotide
  Antisense strand to SEQ ID NO: 1318866
uaaaguagugcauuucaca

SEQ ID NO: 1318868 - RNA, 19 nt, Artificial Sequence
  Description of Artificial Sequence: Synthetic oligonucleotide
  Sense strand starting at position 3133 of SEQ ID NO: 1242037
uggauuauaguuuauguga

SEQ ID NO: 1318869 - RNA, 19 nt, Artificial Sequence
  Description of Artificial Sequence: Synthetic oligonucleotide
  Antisense strand to SEQ ID NO: 1318868
ucacauaaacuauaaucca

SEQ ID NO: 1318870 - RNA, 19 nt, Artificial Sequence
  Description of Artificial Sequence: Synthetic oligonucleotide
  Sense strand starting at position 3144 of SEQ ID NO: 1242037
uuaugugauuucucuuugu

SEQ ID NO: 1318871 - RNA, 19 nt, Artificial Sequence
  Description of Artificial Sequence: Synthetic oligonucleotide
  Antisense strand to SEQ ID NO: 1318870
acaaagagaaaucacauaa

SEQ ID NO: 1318872 - RNA, 19 nt, Artificial Sequence
  Description of Artificial Sequence: Synthetic oligonucleotide
  Sense strand starting at position 3147 of SEQ ID NO: 1242037
ugugauuucucuuuguauc

SEQ ID NO: 1318873 - RNA, 19 nt, Artificial Sequence
  Description of Artificial Sequence: Synthetic oligonucleotide
  Antisense strand to SEQ ID NO: 1318872
gauacaaagagaaaucaca

SEQ ID NO: 1318874 - RNA, 19 nt, Artificial Sequence
  Description of Artificial Sequence: Synthetic oligonucleotide
  Sense strand starting at position 3295 of SEQ ID NO: 1242037
uguugaaagcuagaaagcu

SEQ ID NO: 1318875 - RNA, 19 nt, Artificial Sequence
  Description of Artificial Sequence: Synthetic oligonucleotide
  Antisense strand to SEQ ID NO: 1318874
agcuuucuagcuuucaaca

SEQ ID NO: 1318876 - RNA, 19 nt, Artificial Sequence
  Description of Artificial Sequence: Synthetic oligonucleotide
  Sense strand starting at position 3431 of SEQ ID NO: 1242037
ucagaauuccuaggacuua

SEQ ID NO: 1318877 - RNA, 19 nt, Artificial Sequence
  Description of Artificial Sequence: Synthetic oligonucleotide
  Antisense strand to SEQ ID NO: 1318876
uaaguccuaggaauucuga

SEQ ID NO: 1318878 - RNA, 19 nt, Artificial Sequence
  Description of Artificial Sequence: Synthetic oligonucleotide
  Sense strand starting at position 3486 of SEQ ID NO: 1242037
aaguuuacaguguaaagau

SEQ ID NO: 1318879 - RNA, 19 nt, Artificial Sequence
  Description of Artificial Sequence: Synthetic oligonucleotide
  Antisense strand to SEQ ID NO: 1318878
aucuuuacacuguaaacuu

SEQ ID NO: 1318880 - RNA, 19 nt, Artificial Sequence
  Description of Artificial Sequence: Synthetic oligonucleotide
  Sense strand starting at position 3618 of SEQ ID NO: 1242037
agaaauggauaguuuguua

SEQ ID NO: 1318881 - RNA, 19 nt, Artificial Sequence
  Description of Artificial Sequence: Synthetic oligonucleotide
  Antisense strand to SEQ ID NO: 1318880
uaacaaacuauccauuucu

SEQ ID NO: 1318882 - RNA, 19 nt, Artificial Sequence
  Description of Artificial Sequence: Synthetic oligonucleotide
  Sense strand starting at position 3644 of SEQ ID NO: 1242037
gugcuuagugccuccuuaa

SEQ ID NO: 1318883 - RNA, 19 nt, Artificial Sequence
  Description of Artificial Sequence: Synthetic oligonucleotide
  Antisense strand to SEQ ID NO: 1318882
uuaaggaggcacuaagcac

SEQ ID NO: 1318884 - RNA, 19 nt, Artificial Sequence
  Description of Artificial Sequence: Synthetic oligonucleotide
  Sense strand starting at position 3709 of SEQ ID NO: 1242037
aauugugaucuaugaaagu

SEQ ID NO: 1318885 - RNA, 19 nt, Artificial Sequence
  Description of Artificial Sequence: Synthetic oligonucleotide
  Antisense strand to SEQ ID NO: 1318884
acuuucauagaucacaauu

SEQ ID NO: 1318886 - RNA, 19 nt, Artificial Sequence
  Description of Artificial Sequence: Synthetic oligonucleotide
  Sense strand starting at position 3755 of SEQ ID NO: 1242037
uuggaaauaugauccaagu

SEQ ID NO: 1318887 - RNA, 19 nt, Artificial Sequence
  Description of Artificial Sequence: Synthetic oligonucleotide
  Antisense strand to SEQ ID NO: 1318886
acuuggaucauauuuccaa

SEQ ID NO: 1318888 - RNA, 19 nt, Artificial Sequence
  Description of Artificial Sequence: Synthetic oligonucleotide
  Sense strand starting at position 3810 of SEQ ID NO: 1242037
guaucaaugguuuaaauuc

SEQ ID NO: 1318889 - RNA, 19 nt, Artificial Sequence
  Description of Artificial Sequence: Synthetic oligonucleotide
  Antisense strand to SEQ ID NO: 1318888
gaauuuaaaccauugauac

SEQ ID NO: 1318890 - RNA, 19 nt, Artificial Sequence
  Description of Artificial Sequence: Synthetic oligonucleotide
  Sense strand starting at position 2 of SEQ ID NO: 1242038
gcucuaaaucuggaagccu

SEQ ID NO: 1318891 - RNA, 19 nt, Artificial Sequence
  Description of Artificial Sequence: Synthetic oligonucleotide
  Antisense strand to SEQ ID NO: 1318890
aggcuuccagauuuagagc

SEQ ID NO: 1318892 - RNA, 19 nt, Artificial Sequence
  Description of Artificial Sequence: Synthetic oligonucleotide
  Sense strand starting at position 96 of SEQ ID NO: 1242038
agacuuucugcggagguau

SEQ ID NO: 1318893 - RNA, 19 nt, Artificial Sequence
  Description of Artificial Sequence: Synthetic oligonucleotide
  Antisense strand to SEQ ID NO: 1318892
auaccuccgcagaaagucu

SEQ ID NO: 1318894 - RNA, 19 nt, Artificial Sequence
  Description of Artificial Sequence: Synthetic oligonucleotide
  Sense strand starting at position 98 of SEQ ID NO: 1242038
acuuucugcggagguauaa

SEQ ID NO: 1318895 - RNA, 19 nt, Artificial Sequence
  Description of Artificial Sequence: Synthetic oligonucleotide
  Antisense strand to SEQ ID NO: 1318894
uuauaccuccgcagaaagu

SEQ ID NO: 1318896 - RNA, 19 nt, Artificial Sequence
  Description of Artificial Sequence: Synthetic oligonucleotide
  Sense strand starting at position 133 of SEQ ID NO: 1242038
cccuguaaaccugggcuau

SEQ ID NO: 1318897 - RNA, 19 nt, Artificial Sequence
  Description of Artificial Sequence: Synthetic oligonucleotide
  Antisense strand to SEQ ID NO: 1318896
auagcccagguuuacaggg

SEQ ID NO: 1318898 - RNA, 19 nt, Artificial Sequence
  Description of Artificial Sequence: Synthetic oligonucleotide
  Sense strand starting at position 134 of SEQ ID NO: 1242038
ccuguaaaccugggcuaua

SEQ ID NO: 1318899 - RNA, 19 nt, Artificial Sequence
  Description of Artificial Sequence: Synthetic oligonucleotide
  Antisense strand to SEQ ID NO: 1318898
uauagcccagguuuacagg

SEQ ID NO: 1318900 - RNA, 19 nt, Artificial Sequence
  Description of Artificial Sequence: Synthetic oligonucleotide
  Sense strand starting at position 195 of SEQ ID NO: 1242038
gugcguuuaccaucaacgu

SEQ ID NO: 1318901 - RNA, 19 nt, Artificial Sequence
  Description of Artificial Sequence: Synthetic oligonucleotide
  Antisense strand to SEQ ID NO: 1318900
acguugaugguaaacgcac

SEQ ID NO: 1318902 - RNA, 19 nt, Artificial Sequence
  Description of Artificial Sequence: Synthetic oligonucleotide
  Sense strand starting at position 199 of SEQ ID NO: 1242038
guuuaccaucaacguuuaa

SEQ ID NO: 1318903 - RNA, 19 nt, Artificial Sequence
  Description of Artificial Sequence: Synthetic oligonucleotide
  Antisense strand to SEQ ID NO: 1318902
uuaaacguugaugguaaac

SEQ ID NO: 1318904 - RNA, 19 nt, Artificial Sequence
  Description of Artificial Sequence: Synthetic oligonucleotide
  Sense strand starting at position 797 of SEQ ID NO: 1242038
gucaauguugagcagcaga

SEQ ID NO: 1318905 - RNA, 19 nt, Artificial Sequence
  Description of Artificial Sequence: Synthetic oligonucleotide
  Antisense strand to SEQ ID NO: 1318904
ucugcugcucaacauugac

SEQ ID NO: 1318906 - RNA, 19 nt, Artificial Sequence
  Description of Artificial Sequence: Synthetic oligonucleotide
  Sense strand starting at position 836 of SEQ ID NO: 1242038
gggaguggccuucggauca

SEQ ID NO: 1318907 - RNA, 19 nt, Artificial Sequence
  Description of Artificial Sequence: Synthetic oligonucleotide
  Antisense strand to SEQ ID NO: 1318906
ugauccgaaggccacuccc

SEQ ID NO: 1318908 - RNA, 19 nt, Artificial Sequence
  Description of Artificial Sequence: Synthetic oligonucleotide
  Sense strand starting at position 952 of SEQ ID NO: 1242038
uugguuuaauuuccgugau

SEQ ID NO: 1318909 - RNA, 19 nt, Artificial Sequence
  Description of Artificial Sequence: Synthetic oligonucleotide
  Antisense strand to SEQ ID NO: 1318908
aucacggaaauuaaaccaa

SEQ ID NO: 1318910 - RNA, 19 nt, Artificial Sequence
  Description of Artificial Sequence: Synthetic oligonucleotide
  Sense strand starting at position 954 of SEQ ID NO: 1242038
gguuuaauuuccgugaugg

SEQ ID NO: 1318911 - RNA, 19 nt, Artificial Sequence
  Description of Artificial Sequence: Synthetic oligonucleotide
  Antisense strand to SEQ ID NO: 1318910
ccaucacggaaauuaaacc

SEQ ID NO: 1318912 - RNA, 19 nt, Artificial Sequence
  Description of Artificial Sequence: Synthetic oligonucleotide
  Sense strand starting at position 955 of SEQ ID NO: 1242038
guuuaauuuccgugauggu

SEQ ID NO: 1318913 - RNA, 19 nt, Artificial Sequence
  Description of Artificial Sequence: Synthetic oligonucleotide
  Antisense strand to SEQ ID NO: 1318912
accaucacggaaauuaaac

SEQ ID NO: 1318914 - RNA, 19 nt, Artificial Sequence
  Description of Artificial Sequence: Synthetic oligonucleotide
  Sense strand starting at position 1074 of SEQ ID NO: 1242038
gaggcacucucagugauac

SEQ ID NO: 1318915 - RNA, 19 nt, Artificial Sequence
  Description of Artificial Sequence: Synthetic oligonucleotide
  Antisense strand to SEQ ID NO: 1318914
guaucacugagagugccuc

SEQ ID NO: 1318916 - RNA, 19 nt, Artificial Sequence
  Description of Artificial Sequence: Synthetic oligonucleotide
  Sense strand starting at position 1084 of SEQ ID NO: 1242038
cagugauaccaacacucga

SEQ ID NO: 1318917 - RNA, 19 nt, Artificial Sequence
  Description of Artificial Sequence: Synthetic oligonucleotide
  Antisense strand to SEQ ID NO: 1318916
ucgaguguugguaucacug

SEQ ID NO: 1318918 - RNA, 19 nt, Artificial Sequence
  Description of Artificial Sequence: Synthetic oligonucleotide
  Sense strand starting at position 1211 of SEQ ID NO: 1242038
gcucaucucagguggaauc

SEQ ID NO: 1318919 - RNA, 19 nt, Artificial Sequence
  Description of Artificial Sequence: Synthetic oligonucleotide
  Antisense strand to SEQ ID NO: 1318918
gauuccaccugagaugagc

SEQ ID NO: 1318920 - RNA, 19 nt, Artificial Sequence
  Description of Artificial Sequence: Synthetic oligonucleotide
  Sense strand starting at position 1221 of SEQ ID NO: 1242038
gguggaauccuuugaggau

SEQ ID NO: 1318921 - RNA, 19 nt, Artificial Sequence
  Description of Artificial Sequence: Synthetic oligonucleotide
  Antisense strand to SEQ ID NO: 1318920
auccucaaaggauuccacc

SEQ ID NO: 1318922 - RNA, 19 nt, Artificial Sequence
  Description of Artificial Sequence: Synthetic oligonucleotide
  Sense strand starting at position 1233 of SEQ ID NO: 1242038
ugaggaucuucugcacaga

SEQ ID NO: 1318923 - RNA, 19 nt, Artificial Sequence
  Description of Artificial Sequence: Synthetic oligonucleotide
  Antisense strand to SEQ ID NO: 1318922
ucugugcagaagauccuca

SEQ ID NO: 1318924 - RNA, 19 nt, Artificial Sequence
  Description of Artificial Sequence: Synthetic oligonucleotide
  Sense strand starting at position 1505 of SEQ ID NO: 1242038
gagagaugucccugcuucu

SEQ ID NO: 1318925 - RNA, 19 nt, Artificial Sequence
  Description of Artificial Sequence: Synthetic oligonucleotide
  Antisense strand to SEQ ID NO: 1318924
agaagcagggacaucucuc

SEQ ID NO: 1318926 - RNA, 19 nt, Artificial Sequence
  Description of Artificial Sequence: Synthetic oligonucleotide
  Sense strand starting at position 1639 of SEQ ID NO: 1242038
ccugcugagaugugggauu

SEQ ID NO: 1318927 - RNA, 19 nt, Artificial Sequence
  Description of Artificial Sequence: Synthetic oligonucleotide
  Antisense strand to SEQ ID NO: 1318926
aaucccacaucucagcagg

SEQ ID NO: 1318928 - RNA, 19 nt, Artificial Sequence
  Description of Artificial Sequence: Synthetic oligonucleotide
  Sense strand starting at position 1641 of SEQ ID NO: 1242038
ugcugagaugugggauuca

SEQ ID NO: 1318929 - RNA, 19 nt, Artificial Sequence
  Description of Artificial Sequence: Synthetic oligonucleotide
  Antisense strand to SEQ ID NO: 1318928
ugaaucccacaucucagca

SEQ ID NO: 1318930 - RNA, 19 nt, Artificial Sequence
  Description of Artificial Sequence: Synthetic oligonucleotide
  Sense strand starting at position 1689 of SEQ ID NO: 1242038
gcaucuuccucuucuggau

SEQ ID NO: 1318931 - RNA, 19 nt, Artificial Sequence
  Description of Artificial Sequence: Synthetic oligonucleotide
  Antisense strand to SEQ ID NO: 1318930
auccagaagaggaagaugc

SEQ ID NO: 1318932 - RNA, 19 nt, Artificial Sequence
  Description of Artificial Sequence: Synthetic oligonucleotide
  Sense strand starting at position 1827 of SEQ ID NO: 1242038
uccagagaauuaucaacgu

SEQ ID NO: 1318933 - RNA, 19 nt, Artificial Sequence
  Description of Artificial Sequence: Synthetic oligonucleotide
  Antisense strand to SEQ ID NO: 1318932
acguugauaauucucugga

SEQ ID NO: 1318934 - RNA, 19 nt, Artificial Sequence
  Description of Artificial Sequence: Synthetic oligonucleotide
  Sense strand starting at position 1831 of SEQ ID NO: 1242038
gagaauuaucaacguucuc

SEQ ID NO: 1318935 - RNA, 19 nt, Artificial Sequence
  Description of Artificial Sequence: Synthetic oligonucleotide
  Antisense strand to SEQ ID NO: 1318934
gagaacguugauaauucuc

SEQ ID NO: 1318936 - RNA, 19 nt, Artificial Sequence
  Description of Artificial Sequence: Synthetic oligonucleotide
  Sense strand starting at position 1857 of SEQ ID NO: 1242038
caguaaugcccuuggugga

SEQ ID NO: 1318937 - RNA, 19 nt, Artificial Sequence
  Description of Artificial Sequence: Synthetic oligonucleotide
  Antisense strand to SEQ ID NO: 1318936
uccaccaagggcauuacug

SEQ ID NO: 1318938 - RNA, 19 nt, Artificial Sequence
  Description of Artificial Sequence: Synthetic oligonucleotide
  Sense strand starting at position 1858 of SEQ ID NO: 1242038
aguaaugcccuugguggaa

SEQ ID NO: 1318939 - RNA, 19 nt, Artificial Sequence
  Description of Artificial Sequence: Synthetic oligonucleotide
  Antisense strand to SEQ ID NO: 1318938
uuccaccaagggcauuacu

SEQ ID NO: 1318940 - RNA, 19 nt, Artificial Sequence
  Description of Artificial Sequence: Synthetic oligonucleotide
  Sense strand starting at position 1928 of SEQ ID NO: 1242038
gcucuuaauuuacaggaca

SEQ ID NO: 1318941 - RNA, 19 nt, Artificial Sequence
  Description of Artificial Sequence: Synthetic oligonucleotide
  Antisense strand to SEQ ID NO: 1318940
uguccuguaaauuaagagc

SEQ ID NO: 1318942 - RNA, 19 nt, Artificial Sequence
  Description of Artificial Sequence: Synthetic oligonucleotide
  Sense strand starting at position 2041 of SEQ ID NO: 1242038
ugauguguuccagggcaac

SEQ ID NO: 1318943 - RNA, 19 nt, Artificial Sequence
  Description of Artificial Sequence: Synthetic oligonucleotide
  Antisense strand to SEQ ID NO: 1318942
guugcccuggaacacauca

SEQ ID NO: 1318944 - RNA, 19 nt, Artificial Sequence
  Description of Artificial Sequence: Synthetic oligonucleotide
  Sense strand starting at position 2270 of SEQ ID NO: 1242038
ucaacuuccucauugguga

SEQ ID NO: 1318945 - RNA, 19 nt, Artificial Sequence
  Description of Artificial Sequence: Synthetic oligonucleotide
  Antisense strand to SEQ ID NO: 1318944
ucaccaaugaggaaguuga

SEQ ID NO: 1318946 - RNA, 19 nt, Artificial Sequence
  Description of Artificial Sequence: Synthetic oligonucleotide
  Sense strand starting at position 2278 of SEQ ID NO: 1242038
cucauuggugagcaaguga

SEQ ID NO: 1318947 - RNA, 19 nt, Artificial Sequence
  Description of Artificial Sequence: Synthetic oligonucleotide
  Antisense strand to SEQ ID NO: 1318946
ucacuugcucaccaaugag

SEQ ID NO: 1318948 - RNA, 19 nt, Artificial Sequence
  Description of Artificial Sequence: Synthetic oligonucleotide
  Sense strand starting at position 2728 of SEQ ID NO: 1242038
gucucagugcucuacaaac

SEQ ID NO: 1318949 - RNA, 19 nt, Artificial Sequence
  Description of Artificial Sequence: Synthetic oligonucleotide
  Antisense strand to SEQ ID NO: 1318948
guuuguagagcacugagac

SEQ ID NO: 1318950 - RNA, 19 nt, Artificial Sequence
  Description of Artificial Sequence: Synthetic oligonucleotide
  Sense strand starting at position 3030 of SEQ ID NO: 1242038
ggauccacguucuccuaaa

SEQ ID NO: 1318951 - RNA, 19 nt, Artificial Sequence
  Description of Artificial Sequence: Synthetic oligonucleotide
  Antisense strand to SEQ ID NO: 1318950
uuuaggagaacguggaucc

SEQ ID NO: 1318952 - RNA, 19 nt, Artificial Sequence
  Description of Artificial Sequence: Synthetic oligonucleotide
  Sense strand starting at position 3169 of SEQ ID NO: 1242038
cuauuuauaugcugggaaa

SEQ ID NO: 1318953 - RNA, 19 nt, Artificial Sequence
  Description of Artificial Sequence: Synthetic oligonucleotide
  Antisense strand to SEQ ID NO: 1318952
uuucccagcauauaaauag

SEQ ID NO: 1318954 - RNA, 19 nt, Artificial Sequence
  Description of Artificial Sequence: Synthetic oligonucleotide
  Sense strand starting at position 3249 of SEQ ID NO: 1242038
ugggacagcucccuaucua

SEQ ID NO: 1318955 - RNA, 19 nt, Artificial Sequence
  Description of Artificial Sequence: Synthetic oligonucleotide
  Antisense strand to SEQ ID NO: 1318954
uagauagggagcuguccca

SEQ ID NO: 1318956 - RNA, 19 nt, Artificial Sequence
  Description of Artificial Sequence: Synthetic oligonucleotide
  Sense strand starting at position 3414 of SEQ ID NO: 1242038
agaagauuguggucaagug

SEQ ID NO: 1318957 - RNA, 19 nt, Artificial Sequence
  Description of Artificial Sequence: Synthetic oligonucleotide
  Antisense strand to SEQ ID NO: 1318956
cacuugaccacaaucuucu

SEQ ID NO: 1318958 - RNA, 19 nt, Artificial Sequence
  Description of Artificial Sequence: Synthetic oligonucleotide
  Sense strand starting at position 3415 of SEQ ID NO: 1242038
gaagauuguggucaagugu

SEQ ID NO: 1318959 - RNA, 19 nt, Artificial Sequence
  Description of Artificial Sequence: Synthetic oligonucleotide
  Antisense strand to SEQ ID NO: 1318958
acacuugaccacaaucuuc

SEQ ID NO: 1318960 - RNA, 19 nt, Artificial Sequence
  Description of Artificial Sequence: Synthetic oligonucleotide
  Sense strand starting at position 3464 of SEQ ID NO: 1242038
uggaaaugguagccauaag

SEQ ID NO: 1318961 - RNA, 19 nt, Artificial Sequence
  Description of Artificial Sequence: Synthetic oligonucleotide
  Antisense strand to SEQ ID NO: 1318960
cuuauggcuaccauuucca

SEQ ID NO: 1318962 - RNA, 19 nt, Artificial Sequence
  Description of Artificial Sequence: Synthetic oligonucleotide
  Sense strand starting at position 3487 of SEQ ID NO: 1242038
augacagucuugcuuuauc

SEQ ID NO: 1318963 - RNA, 19 nt, Artificial Sequence
  Description of Artificial Sequence: Synthetic oligonucleotide
  Antisense strand to SEQ ID NO: 1318962
gauaaagcaagacugucau

SEQ ID NO: 1318964 - RNA, 19 nt, Artificial Sequence
  Description of Artificial Sequence: Synthetic oligonucleotide
  Sense strand starting at position 3744 of SEQ ID NO: 1242038
cuguuugcuccugaucaua

SEQ ID NO: 1318965 - RNA, 19 nt, Artificial Sequence
  Description of Artificial Sequence: Synthetic oligonucleotide
  Antisense strand to SEQ ID NO: 1318964
uaugaucaggagcaaacag

SEQ ID NO: 1318966 - RNA, 19 nt, Artificial Sequence
  Description of Artificial Sequence: Synthetic oligonucleotide
  Sense strand starting at position 3849 of SEQ ID NO: 1242038
agaacaagauucuugucua

SEQ ID NO: 1318967 - RNA, 19 nt, Artificial Sequence
  Description of Artificial Sequence: Synthetic oligonucleotide
  Antisense strand to SEQ ID NO: 1318966
uagacaagaaucuuguucu

SEQ ID NO: 1318968 - RNA, 19 nt, Artificial Sequence
  Description of Artificial Sequence: Synthetic oligonucleotide
  Sense strand starting at position 3852 of SEQ ID NO: 1242038
acaagauucuugucuagag

SEQ ID NO: 1318969 - RNA, 19 nt, Artificial Sequence
  Description of Artificial Sequence: Synthetic oligonucleotide
  Antisense strand to SEQ ID NO: 1318968
cucuagacaagaaucuugu

SEQ ID NO: 1318970 - RNA, 19 nt, Artificial Sequence
  Description of Artificial Sequence: Synthetic oligonucleotide
  Sense strand starting at position 15 of SEQ ID NO: 1242039
gaacgagacuggccuuuau

SEQ ID NO: 1318971 - RNA, 19 nt, Artificial Sequence
  Description of Artificial Sequence: Synthetic oligonucleotide
  Antisense strand to SEQ ID NO: 1318970
auaaaggccagucucguuc

SEQ ID NO: 1318972 - RNA, 19 nt, Artificial Sequence
  Description of Artificial Sequence: Synthetic oligonucleotide
  Sense strand starting at position 19 of SEQ ID NO: 1242039
gagacuggccuuuauuauc

SEQ ID NO: 1318973 - RNA, 19 nt, Artificial Sequence
  Description of Artificial Sequence: Synthetic oligonucleotide
  Antisense strand to SEQ ID NO: 1318972
gauaauaaaggccagucuc

SEQ ID NO: 1318974 - RNA, 19 nt, Artificial Sequence
  Description of Artificial Sequence: Synthetic oligonucleotide
  Sense strand starting at position 35 of SEQ ID NO: 1242039
auccuucuugacuaguauu

SEQ ID NO: 1318975 - RNA, 19 nt, Artificial Sequence
  Description of Artificial Sequence: Synthetic oligonucleotide
  Antisense strand to SEQ ID NO: 1318974
aauacuagucaagaaggau

SEQ ID NO: 1318976 - RNA, 19 nt, Artificial Sequence
  Description of Artificial Sequence: Synthetic oligonucleotide
  Sense strand starting at position 81 of SEQ ID NO: 1242039
acuuaugugccagaaacua

SEQ ID NO: 1318977 - RNA, 19 nt, Artificial Sequence
  Description of Artificial Sequence: Synthetic oligonucleotide
  Antisense strand to SEQ ID NO: 1318976
uaguuucuggcacauaagu

SEQ ID NO: 1318978 - RNA, 19 nt, Artificial Sequence
  Description of Artificial Sequence: Synthetic oligonucleotide
  Sense strand starting at position 144 of SEQ ID NO: 1242039
uccuaagagacagguagua

SEQ ID NO: 1318979 - RNA, 19 nt, Artificial Sequence
  Description of Artificial Sequence: Synthetic oligonucleotide
  Antisense strand to SEQ ID NO: 1318978
uacuaccugucucuuagga

SEQ ID NO: 1318980 - RNA, 19 nt, Artificial Sequence
  Description of Artificial Sequence: Synthetic oligonucleotide
  Sense strand starting at position 261 of SEQ ID NO: 1242039
gucugacagguuuaugagu

SEQ ID NO: 1318981 - RNA, 19 nt, Artificial Sequence
  Description of Artificial Sequence: Synthetic oligonucleotide
  Antisense strand to SEQ ID NO: 1318980
acucauaaaccugucagac

SEQ ID NO: 1318982 - RNA, 19 nt, Artificial Sequence
  Description of Artificial Sequence: Synthetic oligonucleotide
  Sense strand starting at position 414 of SEQ ID NO: 1242039
ggagacuaguguuuagaua

SEQ ID NO: 1318983 - RNA, 19 nt, Artificial Sequence
  Description of Artificial Sequence: Synthetic oligonucleotide
  Antisense strand to SEQ ID NO: 1318982
uaucuaaacacuagucucc

SEQ ID NO: 1318984 - RNA, 19 nt, Artificial Sequence
  Description of Artificial Sequence: Synthetic oligonucleotide
  Sense strand starting at position 422 of SEQ ID NO: 1242039
guguuuagauaucugauca

SEQ ID NO: 1318985 - RNA, 19 nt, Artificial Sequence
  Description of Artificial Sequence: Synthetic oligonucleotide
  Antisense strand to SEQ ID NO: 1318984
ugaucagauaucuaaacac

SEQ ID NO: 1318986 - RNA, 19 nt, Artificial Sequence
  Description of Artificial Sequence: Synthetic oligonucleotide
  Sense strand starting at position 548 of SEQ ID NO: 1242039
uuaauaagucugugaucca

SEQ ID NO: 1318987 - RNA, 19 nt, Artificial Sequence
  Description of Artificial Sequence: Synthetic oligonucleotide
  Antisense strand to SEQ ID NO: 1318986
uggaucacagacuuauuaa

SEQ ID NO: 1318988 - RNA, 19 nt, Artificial Sequence
  Description of Artificial Sequence: Synthetic oligonucleotide
  Sense strand starting at position 551 of SEQ ID NO: 1242039
auaagucugugauccaaga

SEQ ID NO: 1318989 - RNA, 19 nt, Artificial Sequence
  Description of Artificial Sequence: Synthetic oligonucleotide
  Antisense strand to SEQ ID NO: 1318988
ucuuggaucacagacuuau

SEQ ID NO: 1318990 - RNA, 19 nt, Artificial Sequence
  Description of Artificial Sequence: Synthetic oligonucleotide
  Sense strand starting at position 574 of SEQ ID NO: 1242039
ugcaguaagcccuagaaac

SEQ ID NO: 1318991 - RNA, 19 nt, Artificial Sequence
  Description of Artificial Sequence: Synthetic oligonucleotide
  Antisense strand to SEQ ID NO: 1318990
guuucuagggcuuacugca

SEQ ID NO: 1318992 - RNA, 19 nt, Artificial Sequence
  Description of Artificial Sequence: Synthetic oligonucleotide
  Sense strand starting at position 769 of SEQ ID NO: 1242039
guaaacaugcuuuaguaca

SEQ ID NO: 1318993 - RNA, 19 nt, Artificial Sequence
  Description of Artificial Sequence: Synthetic oligonucleotide
  Antisense strand to SEQ ID NO: 1318992
uguacuaaagcauguuuac

SEQ ID NO: 1318994 - RNA, 19 nt, Artificial Sequence
  Description of Artificial Sequence: Synthetic oligonucleotide
  Sense strand starting at position 844 of SEQ ID NO: 1242039
aaggauugggucuggacau

SEQ ID NO: 1318995 - RNA, 19 nt, Artificial Sequence
  Description of Artificial Sequence: Synthetic oligonucleotide
  Antisense strand to SEQ ID NO: 1318994
auguccagacccaauccuu

SEQ ID NO: 1318996 - RNA, 19 nt, Artificial Sequence
  Description of Artificial Sequence: Synthetic oligonucleotide
  Sense strand starting at position 1068 of SEQ ID NO: 1242039
cuacuuguucuugaguuaa

SEQ ID NO: 1318997 - RNA, 19 nt, Artificial Sequence
  Description of Artificial Sequence: Synthetic oligonucleotide
  Antisense strand to SEQ ID NO: 1318996
uuaacucaagaacaaguag

SEQ ID NO: 1318998 - RNA, 19 nt, Artificial Sequence
  Description of Artificial Sequence: Synthetic oligonucleotide
  Sense strand starting at position 1117 of SEQ ID NO: 1242039
agagcacuguucguuauuu

SEQ ID NO: 1318999 - RNA, 19 nt, Artificial Sequence
  Description of Artificial Sequence: Synthetic oligonucleotide
  Antisense strand to SEQ ID NO: 1318998
aaauaacgaacagugcucu

SEQ ID NO: 1319000 - RNA, 19 nt, Artificial Sequence
  Description of Artificial Sequence: Synthetic oligonucleotide
  Sense strand starting at position 1118 of SEQ ID NO: 1242039
gagcacuguucguuauuug

SEQ ID NO: 1319001 - RNA, 19 nt, Artificial Sequence
  Description of Artificial Sequence: Synthetic oligonucleotide
  Antisense strand to SEQ ID NO: 1319000
caaauaacgaacagugcuc

SEQ ID NO: 1319002 - RNA, 19 nt, Artificial Sequence
  Description of Artificial Sequence: Synthetic oligonucleotide
  Sense strand starting at position 1171 of SEQ ID NO: 1242039
cuuacaugccuuuagagaa

SEQ ID NO: 1319003 - RNA, 19 nt, Artificial Sequence
  Description of Artificial Sequence: Synthetic oligonucleotide
  Antisense strand to SEQ ID NO: 1319002
uucucuaaaggcauguaag

SEQ ID NO: 1319004 - RNA, 19 nt, Artificial Sequence
  Description of Artificial Sequence: Synthetic oligonucleotide
  Sense strand starting at position 1315 of SEQ ID NO: 1242039
ugguaaaugucaucuauaa

SEQ ID NO: 1319005 - RNA, 19 nt, Artificial Sequence
  Description of Artificial Sequence: Synthetic oligonucleotide
  Antisense strand to SEQ ID NO: 1319004
uuauagaugacauuuacca

SEQ ID NO: 1319006 - RNA, 19 nt, Artificial Sequence
  Description of Artificial Sequence: Synthetic oligonucleotide
  Sense strand starting at position 1353 of SEQ ID NO: 1242039
acagauaccuuucuaguca

SEQ ID NO: 1319007 - RNA, 19 nt, Artificial Sequence
  Description of Artificial Sequence: Synthetic oligonucleotide
  Antisense strand to SEQ ID NO: 1319006
ugacuagaaagguaucugu

SEQ ID NO: 1319008 - RNA, 19 nt, Artificial Sequence
  Description of Artificial Sequence: Synthetic oligonucleotide
  Sense strand starting at position 1600 of SEQ ID NO: 1242039
acaggaguucuguagugag

SEQ ID NO: 1319009 - RNA, 19 nt, Artificial Sequence
  Description of Artificial Sequence: Synthetic oligonucleotide
  Antisense strand to SEQ ID NO: 1319008
cucacuacagaacuccugu

SEQ ID NO: 1319010 - RNA, 19 nt, Artificial Sequence
  Description of Artificial Sequence: Synthetic oligonucleotide
  Sense strand starting at position 1784 of SEQ ID NO: 1242039
gccuuuggucgggaagaag

SEQ ID NO: 1319011 - RNA, 19 nt, Artificial Sequence
  Description of Artificial Sequence: Synthetic oligonucleotide
  Antisense strand to SEQ ID NO: 1319010
cuucuucccgaccaaaggc

SEQ ID NO: 1319012 - RNA, 19 nt, Artificial Sequence
  Description of Artificial Sequence: Synthetic oligonucleotide
  Sense strand starting at position 2381 of SEQ ID NO: 1242039
agggaacuggucuggaacu

SEQ ID NO: 1319013 - RNA, 19 nt, Artificial Sequence
  Description of Artificial Sequence: Synthetic oligonucleotide
  Antisense strand to SEQ ID NO: 1319012
aguuccagaccaguucccu

SEQ ID NO: 1319014 - RNA, 19 nt, Artificial Sequence
  Description of Artificial Sequence: Synthetic oligonucleotide
  Sense strand starting at position 2479 of SEQ ID NO: 1242039
cagccuagccguucuugau

SEQ ID NO: 1319015 - RNA, 19 nt, Artificial Sequence
  Description of Artificial Sequence: Synthetic oligonucleotide
  Antisense strand to SEQ ID NO: 1319014
aucaagaacggcuaggcug

SEQ ID NO: 1319016 - RNA, 19 nt, Artificial Sequence
  Description of Artificial Sequence: Synthetic oligonucleotide
  Sense strand starting at position 2633 of SEQ ID NO: 1242039
uacuuugacugguuugaau

SEQ ID NO: 1319017 - RNA, 19 nt, Artificial Sequence
  Description of Artificial Sequence: Synthetic oligonucleotide
  Antisense strand to SEQ ID NO: 1319016
auucaaaccagucaaagua

SEQ ID NO: 1319018 - RNA, 19 nt, Artificial Sequence
  Description of Artificial Sequence: Synthetic oligonucleotide
  Sense strand starting at position 2635 of SEQ ID NO: 1242039
cuuugacugguuugaauua

SEQ ID NO: 1319019 - RNA, 19 nt, Artificial Sequence
  Description of Artificial Sequence: Synthetic oligonucleotide
  Antisense strand to SEQ ID NO: 1319018
uaauucaaaccagucaaag

SEQ ID NO: 1319020 - RNA, 19 nt, Artificial Sequence
  Description of Artificial Sequence: Synthetic oligonucleotide
  Sense strand starting at position 2662 of SEQ ID NO: 1242039
auagguuuaggcugagaaa

SEQ ID NO: 1319021 - RNA, 19 nt, Artificial Sequence
  Description of Artificial Sequence: Synthetic oligonucleotide
  Antisense strand to SEQ ID NO: 1319020
uuucucagccuaaaccuau

SEQ ID NO: 1319022 - RNA, 19 nt, Artificial Sequence
  Description of Artificial Sequence: Synthetic oligonucleotide
  Sense strand starting at position 2752 of SEQ ID NO: 1242039
gaguuugucugcuuauuug

SEQ ID NO: 1319023 - RNA, 19 nt, Artificial Sequence
  Description of Artificial Sequence: Synthetic oligonucleotide
  Antisense strand to SEQ ID NO: 1319022
caaauaagcagacaaacuc

SEQ ID NO: 1319024 - RNA, 19 nt, Artificial Sequence
  Description of Artificial Sequence: Synthetic oligonucleotide
  Sense strand starting at position 2756 of SEQ ID NO: 1242039
uugucugcuuauuugaaca

SEQ ID NO: 1319025 - RNA, 19 nt, Artificial Sequence
  Description of Artificial Sequence: Synthetic oligonucleotide
  Antisense strand to SEQ ID NO: 1319024
uguucaaauaagcagacaa

SEQ ID NO: 1319026 - RNA, 19 nt, Artificial Sequence
  Description of Artificial Sequence: Synthetic oligonucleotide
  Sense strand starting at position 2802 of SEQ ID NO: 1242039
uauuucugugcuggugaau

SEQ ID NO: 1319027 - RNA, 19 nt, Artificial Sequence
  Description of Artificial Sequence: Synthetic oligonucleotide
  Antisense strand to SEQ ID NO: 1319026
auucaccagcacagaaaua

SEQ ID NO: 1319028 - RNA, 19 nt, Artificial Sequence
  Description of Artificial Sequence: Synthetic oligonucleotide
  Sense strand starting at position 2811 of SEQ ID NO: 1242039
gcuggugaaucaguacaga

SEQ ID NO: 1319029 - RNA, 19 nt, Artificial Sequence
  Description of Artificial Sequence: Synthetic oligonucleotide
  Antisense strand to SEQ ID NO: 1319028
ucuguacugauucaccagc

SEQ ID NO: 1319030 - RNA, 19 nt, Artificial Sequence
  Description of Artificial Sequence: Synthetic oligonucleotide
  Sense strand starting at position 2857 of SEQ ID NO: 1242039
ccaagugucuaaucauuac

SEQ ID NO: 1319031 - RNA, 19 nt, Artificial Sequence
  Description of Artificial Sequence: Synthetic oligonucleotide
  Antisense strand to SEQ ID NO: 1319030
guaaugauuagacacuugg

SEQ ID NO: 1319032 - RNA, 19 nt, Artificial Sequence
  Description of Artificial Sequence: Synthetic oligonucleotide
  Sense strand starting at position 2860 of SEQ ID NO: 1242039
agugucuaaucauuacuga

SEQ ID NO: 1319033 - RNA, 19 nt, Artificial Sequence
  Description of Artificial Sequence: Synthetic oligonucleotide
  Antisense strand to SEQ ID NO: 1319032
ucaguaaugauuagacacu

SEQ ID NO: 1319034 - RNA, 19 nt, Artificial Sequence
  Description of Artificial Sequence: Synthetic oligonucleotide
  Sense strand starting at position 2861 of SEQ ID NO: 1242039
gugucuaaucauuacugaa

SEQ ID NO: 1319035 - RNA, 19 nt, Artificial Sequence
  Description of Artificial Sequence: Synthetic oligonucleotide
  Antisense strand to SEQ ID NO: 1319034
uucaguaaugauuagacac

SEQ ID NO: 1319036 - RNA, 19 nt, Artificial Sequence
  Description of Artificial Sequence: Synthetic oligonucleotide
  Sense strand starting at position 3492 of SEQ ID NO: 1242039
cgagauuacaguugugaag

SEQ ID NO: 1319037 - RNA, 19 nt, Artificial Sequence
  Description of Artificial Sequence: Synthetic oligonucleotide
  Antisense strand to SEQ ID NO: 1319036
cuucacaacuguaaucucg

SEQ ID NO: 1319038 - RNA, 19 nt, Artificial Sequence
  Description of Artificial Sequence: Synthetic oligonucleotide
  Sense strand starting at position 3834 of SEQ ID NO: 1242039
caccuuuaagagugaagug

SEQ ID NO: 1319039 - RNA, 19 nt, Artificial Sequence
  Description of Artificial Sequence: Synthetic oligonucleotide
  Antisense strand to SEQ ID NO: 1319038
cacuucacucuuaaaggug

SEQ ID NO: 1319040 - RNA, 19 nt, Artificial Sequence
  Description of Artificial Sequence: Synthetic oligonucleotide
  Sense strand starting at position 3835 of SEQ ID NO: 1242039
accuuuaagagugaagugu

SEQ ID NO: 1319041 - RNA, 19 nt, Artificial Sequence
  Description of Artificial Sequence: Synthetic oligonucleotide
  Antisense strand to SEQ ID NO: 1319040
acacuucacucuuaaaggu

SEQ ID NO: 1319042 - RNA, 19 nt, Artificial Sequence
  Description of Artificial Sequence: Synthetic oligonucleotide
  Sense strand starting at position 3848 of SEQ ID NO: 1242039
aagugucaccucugacaug

SEQ ID NO: 1319043 - RNA, 19 nt, Artificial Sequence
  Description of Artificial Sequence: Synthetic oligonucleotide
  Antisense strand to SEQ ID NO: 1319042
caugucagaggugacacuu

SEQ ID NO: 1319044 - RNA, 19 nt, Artificial Sequence
  Description of Artificial Sequence: Synthetic oligonucleotide
  Sense strand starting at position 3885 of SEQ ID NO: 1242039
gucaacuuugcucauagaa

SEQ ID NO: 1319045 - RNA, 19 nt, Artificial Sequence
  Description of Artificial Sequence: Synthetic oligonucleotide
  Antisense strand to SEQ ID NO: 1319044
uucuaugagcaaaguugac

SEQ ID NO: 1319046 - RNA, 19 nt, Artificial Sequence
  Description of Artificial Sequence: Synthetic oligonucleotide
  Sense strand starting at position 3898 of SEQ ID NO: 1242039
auagaagggagcugugauu

SEQ ID NO: 1319047 - RNA, 19 nt, Artificial Sequence
  Description of Artificial Sequence: Synthetic oligonucleotide
  Antisense strand to SEQ ID NO: 1319046
aaucacagcucccuucuau

SEQ ID NO: 1319048 - RNA, 19 nt, Artificial Sequence
  Description of Artificial Sequence: Synthetic oligonucleotide
  Sense strand starting at position 3920 of SEQ ID NO: 1242039
uauuguugggaaggaagua

SEQ ID NO: 1319049 - RNA, 19 nt, Artificial Sequence
  Description of Artificial Sequence: Synthetic oligonucleotide
  Antisense strand to SEQ ID NO: 1319048
uacuuccuucccaacaaua

SEQ ID NO: 1319050 - RNA, 19 nt, Artificial Sequence
  Description of Artificial Sequence: Synthetic oligonucleotide
  Sense strand starting at position 112 of SEQ ID NO: 1242040
uuggucuccuggguccaaa

SEQ ID NO: 1319051 - RNA, 19 nt, Artificial Sequence
  Description of Artificial Sequence: Synthetic oligonucleotide
  Antisense strand to SEQ ID NO: 1319050
uuuggacccaggagaccaa

SEQ ID NO: 1319052 - RNA, 19 nt, Artificial Sequence
  Description of Artificial Sequence: Synthetic oligonucleotide
  Sense strand starting at position 1445 of SEQ ID NO: 1242040
ggacucuuucgccagcaac

SEQ ID NO: 1319053 - RNA, 19 nt, Artificial Sequence
  Description of Artificial Sequence: Synthetic oligonucleotide
  Antisense strand to SEQ ID NO: 1319052
guugcuggcgaaagagucc

SEQ ID NO: 1319054 - RNA, 19 nt, Artificial Sequence
  Description of Artificial Sequence: Synthetic oligonucleotide
  Sense strand starting at position 1459 of SEQ ID NO: 1242040
gcaacuuugcgggcuuagu

SEQ ID NO: 1319055 - RNA, 19 nt, Artificial Sequence
  Description of Artificial Sequence: Synthetic oligonucleotide
  Antisense strand to SEQ ID NO: 1319054
acuaagcccgcaaaguugc

SEQ ID NO: 1319056 - RNA, 19 nt, Artificial Sequence
  Description of Artificial Sequence: Synthetic oligonucleotide
  Sense strand starting at position 1508 of SEQ ID NO: 1242040
cgaggauagccgggaagua

SEQ ID NO: 1319057 - RNA, 19 nt, Artificial Sequence
  Description of Artificial Sequence: Synthetic oligonucleotide
  Antisense strand to SEQ ID NO: 1319056
uacuucccggcuauccucg

SEQ ID NO: 1319058 - RNA, 19 nt, Artificial Sequence
  Description of Artificial Sequence: Synthetic oligonucleotide
  Sense strand starting at position 1565 of SEQ ID NO: 1242040
cagagagcugcucaccuua

SEQ ID NO: 1319059 - RNA, 19 nt, Artificial Sequence
  Description of Artificial Sequence: Synthetic oligonucleotide
  Antisense strand to SEQ ID NO: 1319058
uaaggugagcagcucucug

SEQ ID NO: 1319060 - RNA, 19 nt, Artificial Sequence
  Description of Artificial Sequence: Synthetic oligonucleotide
  Sense strand starting at position 1570 of SEQ ID NO: 1242040
agcugcucaccuuaaaguu

SEQ ID NO: 1319061 - RNA, 19 nt, Artificial Sequence
  Description of Artificial Sequence: Synthetic oligonucleotide
  Antisense strand to SEQ ID NO: 1319060
aacuuuaaggugagcagcu

SEQ ID NO: 1319062 - RNA, 19 nt, Artificial Sequence
  Description of Artificial Sequence: Synthetic oligonucleotide
  Sense strand starting at position 2206 of SEQ ID NO: 1242040
cgugugaagguaugaggaa

SEQ ID NO: 1319063 - RNA, 19 nt, Artificial Sequence
  Description of Artificial Sequence: Synthetic oligonucleotide
  Antisense strand to SEQ ID NO: 1319062
uuccucauaccuucacacg

SEQ ID NO: 1319064 - RNA, 19 nt, Artificial Sequence
  Description of Artificial Sequence: Synthetic oligonucleotide
  Sense strand starting at position 2284 of SEQ ID NO: 1242040
gcggaugauguuugacaug

SEQ ID NO: 1319065 - RNA, 19 nt, Artificial Sequence
  Description of Artificial Sequence: Synthetic oligonucleotide
  Antisense strand to SEQ ID NO: 1319064
caugucaaacaucauccgc

SEQ ID NO: 1319066 - RNA, 19 nt, Artificial Sequence
  Description of Artificial Sequence: Synthetic oligonucleotide
  Sense strand starting at position 2289 of SEQ ID NO: 1242040
ugauguuugacauggaaau

SEQ ID NO: 1319067 - RNA, 19 nt, Artificial Sequence
  Description of Artificial Sequence: Synthetic oligonucleotide
  Antisense strand to SEQ ID NO: 1319066
auuuccaugucaaacauca

SEQ ID NO: 1319068 - RNA, 19 nt, Artificial Sequence
  Description of Artificial Sequence: Synthetic oligonucleotide
  Sense strand starting at position 2290 of SEQ ID NO: 1242040
gauguuugacauggaaauu

SEQ ID NO: 1319069 - RNA, 19 nt, Artificial Sequence
  Description of Artificial Sequence: Synthetic oligonucleotide
  Antisense strand to SEQ ID NO: 1319068
aauuuccaugucaaacauc

SEQ ID NO: 1319070 - RNA, 19 nt, Artificial Sequence
  Description of Artificial Sequence: Synthetic oligonucleotide
  Sense strand starting at position 2336 of SEQ ID NO: 1242040
gcguuguauccgguuugua

SEQ ID NO: 1319071 - RNA, 19 nt, Artificial Sequence
  Description of Artificial Sequence: Synthetic oligonucleotide
  Antisense strand to SEQ ID NO: 1319070
uacaaaccggauacaacgc

SEQ ID NO: 1319072 - RNA, 19 nt, Artificial Sequence
  Description of Artificial Sequence: Synthetic oligonucleotide
  Sense strand starting at position 2337 of SEQ ID NO: 1242040
cguuguauccgguuuguau

SEQ ID NO: 1319073 - RNA, 19 nt, Artificial Sequence
  Description of Artificial Sequence: Synthetic oligonucleotide
  Antisense strand to SEQ ID NO: 1319072
auacaaaccggauacaacg

SEQ ID NO: 1319074 - RNA, 19 nt, Artificial Sequence
  Description of Artificial Sequence: Synthetic oligonucleotide
  Sense strand starting at position 2338 of SEQ ID NO: 1242040
guuguauccgguuuguauc

SEQ ID NO: 1319075 - RNA, 19 nt, Artificial Sequence
  Description of Artificial Sequence: Synthetic oligonucleotide
  Antisense strand to SEQ ID NO: 1319074
gauacaaaccggauacaac

SEQ ID NO: 1319076 - RNA, 19 nt, Artificial Sequence
  Description of Artificial Sequence: Synthetic oligonucleotide
  Sense strand starting at position 2345 of SEQ ID NO: 1242040
ccgguuuguaucguuaggu

SEQ ID NO: 1319077 - RNA, 19 nt, Artificial Sequence
  Description of Artificial Sequence: Synthetic oligonucleotide
  Antisense strand to SEQ ID NO: 1319076
accuaacgauacaaaccgg

SEQ ID NO: 1319078 - RNA, 19 nt, Artificial Sequence
  Description of Artificial Sequence: Synthetic oligonucleotide
  Sense strand starting at position 2351 of SEQ ID NO: 1242040
uguaucguuagguaacuuu

SEQ ID NO: 1319079 - RNA, 19 nt, Artificial Sequence
  Description of Artificial Sequence: Synthetic oligonucleotide
  Antisense strand to SEQ ID NO: 1319078
aaaguuaccuaacgauaca

SEQ ID NO: 1319080 - RNA, 19 nt, Artificial Sequence
  Description of Artificial Sequence: Synthetic oligonucleotide
  Sense strand starting at position 2425 of SEQ ID NO: 1242040
uugguugcauggguuauaa

SEQ ID NO: 1319081 - RNA, 19 nt, Artificial Sequence
  Description of Artificial Sequence: Synthetic oligonucleotide
  Antisense strand to SEQ ID NO: 1319080
uuauaacccaugcaaccaa

SEQ ID NO: 1319082 - RNA, 19 nt, Artificial Sequence
  Description of Artificial Sequence: Synthetic oligonucleotide
  Sense strand starting at position 2427 of SEQ ID NO: 1242040
gguugcauggguuauaaua

SEQ ID NO: 1319083 - RNA, 19 nt, Artificial Sequence
  Description of Artificial Sequence: Synthetic oligonucleotide
  Antisense strand to SEQ ID NO: 1319082
uauuauaacccaugcaacc

SEQ ID NO: 1319084 - RNA, 19 nt, Artificial Sequence
  Description of Artificial Sequence: Synthetic oligonucleotide
  Sense strand starting at position 2474 of SEQ ID NO: 1242040
ccggagaguuaggucgaaa

SEQ ID NO: 1319085 - RNA, 19 nt, Artificial Sequence
  Description of Artificial Sequence: Synthetic oligonucleotide
  Antisense strand to SEQ ID NO: 1319084
uuucgaccuaacucuccgg

SEQ ID NO: 1319086 - RNA, 19 nt, Artificial Sequence
  Description of Artificial Sequence: Synthetic oligonucleotide
  Sense strand starting at position 2656 of SEQ ID NO: 1242040
uaguguaucugggcgaaga

SEQ ID NO: 1319087 - RNA, 19 nt, Artificial Sequence
  Description of Artificial Sequence: Synthetic oligonucleotide
  Antisense strand to SEQ ID NO: 1319086
ucuucgcccagauacacua

SEQ ID NO: 1319088 - RNA, 19 nt, Artificial Sequence
  Description of Artificial Sequence: Synthetic oligonucleotide
  Sense strand starting at position 2658 of SEQ ID NO: 1242040
guguaucugggcgaagagu

SEQ ID NO: 1319089 - RNA, 19 nt, Artificial Sequence
  Description of Artificial Sequence: Synthetic oligonucleotide
  Antisense strand to SEQ ID NO: 1319088
acucuucgcccagauacac

SEQ ID NO: 1319090 - RNA, 19 nt, Artificial Sequence
  Description of Artificial Sequence: Synthetic oligonucleotide
  Sense strand starting at position 2666 of SEQ ID NO: 1242040
gggcgaagaguccagguau

SEQ ID NO: 1319091 - RNA, 19 nt, Artificial Sequence
  Description of Artificial Sequence: Synthetic oligonucleotide
  Antisense strand to SEQ ID NO: 1319090
auaccuggacucuucgccc

SEQ ID NO: 1319092 - RNA, 19 nt, Artificial Sequence
  Description of Artificial Sequence: Synthetic oligonucleotide
  Sense strand starting at position 2779 of SEQ ID NO: 1242040
guuuguuugacacaguuua

SEQ ID NO: 1319093 - RNA, 19 nt, Artificial Sequence
  Description of Artificial Sequence: Synthetic oligonucleotide
  Antisense strand to SEQ ID NO: 1319092
uaaacugugucaaacaaac

SEQ ID NO: 1319094 - RNA, 19 nt, Artificial Sequence
  Description of Artificial Sequence: Synthetic oligonucleotide
  Sense strand starting at position 2790 of SEQ ID NO: 1242040
acaguuuaucaccagguaa

SEQ ID NO: 1319095 - RNA, 19 nt, Artificial Sequence
  Description of Artificial Sequence: Synthetic oligonucleotide
  Antisense strand to SEQ ID NO: 1319094
uuaccuggugauaaacugu

SEQ ID NO: 1319096 - RNA, 19 nt, Artificial Sequence
  Description of Artificial Sequence: Synthetic oligonucleotide
  Sense strand starting at position 2827 of SEQ ID NO: 1242040
uuucccaggugguuugaaa

SEQ ID NO: 1319097 - RNA, 19 nt, Artificial Sequence
  Description of Artificial Sequence: Synthetic oligonucleotide
  Antisense strand to SEQ ID NO: 1319096
uuucaaaccaccugggaaa

SEQ ID NO: 1319098 - RNA, 19 nt, Artificial Sequence
  Description of Artificial Sequence: Synthetic oligonucleotide
  Sense strand starting at position 2857 of SEQ ID NO: 1242040
aggcacauccuggaaguuu

SEQ ID NO: 1319099 - RNA, 19 nt, Artificial Sequence
  Description of Artificial Sequence: Synthetic oligonucleotide
  Antisense strand to SEQ ID NO: 1319098
aaacuuccaggaugugccu

SEQ ID NO: 1319100 - RNA, 19 nt, Artificial Sequence
  Description of Artificial Sequence: Synthetic oligonucleotide
  Sense strand starting at position 3003 of SEQ ID NO: 1242040
cugcgaucccacuaagaca

SEQ ID NO: 1319101 - RNA, 19 nt, Artificial Sequence
  Description of Artificial Sequence: Synthetic oligonucleotide
  Antisense strand to SEQ ID NO: 1319100
ugucuuagugggaucgcag

SEQ ID NO: 1319102 - RNA, 19 nt, Artificial Sequence
  Description of Artificial Sequence: Synthetic oligonucleotide
  Sense strand starting at position 3078 of SEQ ID NO: 1242040
gggaaugugccuuggguca

SEQ ID NO: 1319103 - RNA, 19 nt, Artificial Sequence
  Description of Artificial Sequence: Synthetic oligonucleotide
  Antisense strand to SEQ ID NO: 1319102
ugacccaaggcacauuccc

SEQ ID NO: 1319104 - RNA, 19 nt, Artificial Sequence
  Description of Artificial Sequence: Synthetic oligonucleotide
  Sense strand starting at position 3137 of SEQ ID NO: 1242040
ucgccuuggaaggguuaaa

SEQ ID NO: 1319105 - RNA, 19 nt, Artificial Sequence
  Description of Artificial Sequence: Synthetic oligonucleotide
  Antisense strand to SEQ ID NO: 1319104
uuuaacccuuccaaggcga

SEQ ID NO: 1319106 - RNA, 19 nt, Artificial Sequence
  Description of Artificial Sequence: Synthetic oligonucleotide
  Sense strand starting at position 3433 of SEQ ID NO: 1242040
cguggugaucguagagaau

SEQ ID NO: 1319107 - RNA, 19 nt, Artificial Sequence
  Description of Artificial Sequence: Synthetic oligonucleotide
  Antisense strand to SEQ ID NO: 1319106
auucucuacgaucaccacg

SEQ ID NO: 1319108 - RNA, 19 nt, Artificial Sequence
  Description of Artificial Sequence: Synthetic oligonucleotide
  Sense strand starting at position 3436 of SEQ ID NO: 1242040
ggugaucguagagaauucu

SEQ ID NO: 1319109 - RNA, 19 nt, Artificial Sequence
  Description of Artificial Sequence: Synthetic oligonucleotide
  Antisense strand to SEQ ID NO: 1319108
agaauucucuacgaucacc

SEQ ID NO: 1319110 - RNA, 19 nt, Artificial Sequence
  Description of Artificial Sequence: Synthetic oligonucleotide
  Sense strand starting at position 3444 of SEQ ID NO: 1242040
uagagaauucuggguguua

SEQ ID NO: 1319111 - RNA, 19 nt, Artificial Sequence
  Description of Artificial Sequence: Synthetic oligonucleotide
  Antisense strand to SEQ ID NO: 1319110
uaacacccagaauucucua

SEQ ID NO: 1319112 - RNA, 19 nt, Artificial Sequence
  Description of Artificial Sequence: Synthetic oligonucleotide
  Sense strand starting at position 3445 of SEQ ID NO: 1242040
agagaauucuggguguuaa

SEQ ID NO: 1319113 - RNA, 19 nt, Artificial Sequence
  Description of Artificial Sequence: Synthetic oligonucleotide
  Antisense strand to SEQ ID NO: 1319112
uuaacacccagaauucucu

SEQ ID NO: 1319114 - RNA, 19 nt, Artificial Sequence
  Description of Artificial Sequence: Synthetic oligonucleotide
  Sense strand starting at position 3446 of SEQ ID NO: 1242040
gagaauucuggguguuaag

SEQ ID NO: 1319115 - RNA, 19 nt, Artificial Sequence
  Description of Artificial Sequence: Synthetic oligonucleotide
  Antisense strand to SEQ ID NO: 1319114
cuuaacacccagaauucuc

SEQ ID NO: 1319116 - RNA, 19 nt, Artificial Sequence
  Description of Artificial Sequence: Synthetic oligonucleotide
  Sense strand starting at position 3479 of SEQ ID NO: 1242040
gugauauuagagcauuauu

SEQ ID NO: 1319117 - RNA, 19 nt, Artificial Sequence
  Description of Artificial Sequence: Synthetic oligonucleotide
  Antisense strand to SEQ ID NO: 1319116
aauaaugcucuaauaucac

SEQ ID NO: 1319118 - RNA, 19 nt, Artificial Sequence
  Description of Artificial Sequence: Synthetic oligonucleotide
  Sense strand starting at position 3490 of SEQ ID NO: 1242040
gcauuauuaguggagcugu

SEQ ID NO: 1319119 - RNA, 19 nt, Artificial Sequence
  Description of Artificial Sequence: Synthetic oligonucleotide
  Antisense strand to SEQ ID NO: 1319118
acagcuccacuaauaaugc

SEQ ID NO: 1319120 - RNA, 19 nt, Artificial Sequence
  Description of Artificial Sequence: Synthetic oligonucleotide
  Sense strand starting at position 3634 of SEQ ID NO: 1242040
cgaugaauuuaggagauua

SEQ ID NO: 1319121 - RNA, 19 nt, Artificial Sequence
  Description of Artificial Sequence: Synthetic oligonucleotide
  Antisense strand to SEQ ID NO: 1319120
uaaucuccuaaauucaucg

SEQ ID NO: 1319122 - RNA, 19 nt, Artificial Sequence
  Description of Artificial Sequence: Synthetic oligonucleotide
  Sense strand starting at position 3730 of SEQ ID NO: 1242040
aacagaagugcuugaagaa

SEQ ID NO: 1319123 - RNA, 19 nt, Artificial Sequence
  Description of Artificial Sequence: Synthetic oligonucleotide
  Antisense strand to SEQ ID NO: 1319122
uucuucaagcacuucuguu

SEQ ID NO: 1319124 - RNA, 19 nt, Artificial Sequence
  Description of Artificial Sequence: Synthetic oligonucleotide
  Sense strand starting at position 3759 of SEQ ID NO: 1242040
ucaccuucuuaauucggaa

SEQ ID NO: 1319125 - RNA, 19 nt, Artificial Sequence
  Description of Artificial Sequence: Synthetic oligonucleotide
  Antisense strand to SEQ ID NO: 1319124
uuccgaauuaagaagguga

SEQ ID NO: 1319126 - RNA, 19 nt, Artificial Sequence
  Description of Artificial Sequence: Synthetic oligonucleotide
  Sense strand starting at position 3818 of SEQ ID NO: 1242040
gagggauguugaccugucu

SEQ ID NO: 1319127 - RNA, 19 nt, Artificial Sequence
  Description of Artificial Sequence: Synthetic oligonucleotide
  Antisense strand to SEQ ID NO: 1319126
agacaggucaacaucccuc

SEQ ID NO: 1319128 - RNA, 19 nt, Artificial Sequence
  Description of Artificial Sequence: Synthetic oligonucleotide
  Sense strand starting at position 3873 of SEQ ID NO: 1242040
ugcccuucucagcagauaa

SEQ ID NO: 1319129 - RNA, 19 nt, Artificial Sequence
  Description of Artificial Sequence: Synthetic oligonucleotide
  Antisense strand to SEQ ID NO: 1319128
uuaucugcugagaagggca

SEQ ID NO: 1319130 - RNA, 19 nt, Artificial Sequence
  Description of Artificial Sequence: Synthetic oligonucleotide
  Sense strand starting at position 47 of SEQ ID NO: 1242041
ugggaauauugcuuaaccu

SEQ ID NO: 1319131 - RNA, 19 nt, Artificial Sequence
  Description of Artificial Sequence: Synthetic oligonucleotide
  Antisense strand to SEQ ID NO: 1319130
agguuaagcaauauuccca

SEQ ID NO: 1319132 - RNA, 19 nt, Artificial Sequence
  Description of Artificial Sequence: Synthetic oligonucleotide
  Sense strand starting at position 56 of SEQ ID NO: 1242041
ugcuuaaccuaauaagaag

SEQ ID NO: 1319133 - RNA, 19 nt, Artificial Sequence
  Description of Artificial Sequence: Synthetic oligonucleotide
  Antisense strand to SEQ ID NO: 1319132
cuucuuauuagguuaagca

SEQ ID NO: 1319134 - RNA, 19 nt, Artificial Sequence
  Description of Artificial Sequence: Synthetic oligonucleotide
  Sense strand starting at position 104 of SEQ ID NO: 1242041
agauccuaugcccaguauu

SEQ ID NO: 1319135 - RNA, 19 nt, Artificial Sequence
  Description of Artificial Sequence: Synthetic oligonucleotide
  Antisense strand to SEQ ID NO: 1319134
aauacugggcauaggaucu

SEQ ID NO: 1319136 - RNA, 19 nt, Artificial Sequence
  Description of Artificial Sequence: Synthetic oligonucleotide
  Sense strand starting at position 316 of SEQ ID NO: 1242041
gccaaagaaugacaacauu

SEQ ID NO: 1319137 - RNA, 19 nt, Artificial Sequence
  Description of Artificial Sequence: Synthetic oligonucleotide
  Antisense strand to SEQ ID NO: 1319136
aauguugucauucuuuggc

SEQ ID NO: 1319138 - RNA, 19 nt, Artificial Sequence
  Description of Artificial Sequence: Synthetic oligonucleotide
  Sense strand starting at position 341 of SEQ ID NO: 1242041
acuuaacaaucccuguguu

SEQ ID NO: 1319139 - RNA, 19 nt, Artificial Sequence
  Description of Artificial Sequence: Synthetic oligonucleotide
  Antisense strand to SEQ ID NO: 1319138
aacacagggauuguuaagu

SEQ ID NO: 1319140 - RNA, 19 nt, Artificial Sequence
  Description of Artificial Sequence: Synthetic oligonucleotide
  Sense strand starting at position 351 of SEQ ID NO: 1242041
cccuguguucuuuagauuc

SEQ ID NO: 1319141 - RNA, 19 nt, Artificial Sequence
  Description of Artificial Sequence: Synthetic oligonucleotide
  Antisense strand to SEQ ID NO: 1319140
gaaucuaaagaacacaggg

SEQ ID NO: 1319142 - RNA, 19 nt, Artificial Sequence
  Description of Artificial Sequence: Synthetic oligonucleotide
  Sense strand starting at position 422 of SEQ ID NO: 1242041
acuacaguguggccauauu

SEQ ID NO: 1319143 - RNA, 19 nt, Artificial Sequence
  Description of Artificial Sequence: Synthetic oligonucleotide
  Antisense strand to SEQ ID NO: 1319142
aauauggccacacuguagu

SEQ ID NO: 1319144 - RNA, 19 nt, Artificial Sequence
  Description of Artificial Sequence: Synthetic oligonucleotide
  Sense strand starting at position 527 of SEQ ID NO: 1242041
acagcuauagugggauaua

SEQ ID NO: 1319145 - RNA, 19 nt, Artificial Sequence
  Description of Artificial Sequence: Synthetic oligonucleotide
  Antisense strand to SEQ ID NO: 1319144
uauaucccacuauagcugu

SEQ ID NO: 1319146 - RNA, 19 nt, Artificial Sequence
  Description of Artificial Sequence: Synthetic oligonucleotide
  Sense strand starting at position 530 of SEQ ID NO: 1242041
gcuauagugggauauagca

SEQ ID NO: 1319147 - RNA, 19 nt, Artificial Sequence
  Description of Artificial Sequence: Synthetic oligonucleotide
  Antisense strand to SEQ ID NO: 1319146
ugcuauaucccacuauagc

SEQ ID NO: 1319148 - RNA, 19 nt, Artificial Sequence
  Description of Artificial Sequence: Synthetic oligonucleotide
  Sense strand starting at position 648 of SEQ ID NO: 1242041
gguuccacuaacugggaaa

SEQ ID NO: 1319149 - RNA, 19 nt, Artificial Sequence
  Description of Artificial Sequence: Synthetic oligonucleotide
  Antisense strand to SEQ ID NO: 1319148
uuucccaguuaguggaacc

SEQ ID NO: 1319150 - RNA, 19 nt, Artificial Sequence
  Description of Artificial Sequence: Synthetic oligonucleotide
  Sense strand starting at position 720 of SEQ ID NO: 1242041
uuucuagcgaaauggugau

SEQ ID NO: 1319151 - RNA, 19 nt, Artificial Sequence
  Description of Artificial Sequence: Synthetic oligonucleotide
  Antisense strand to SEQ ID NO: 1319150
aucaccauuucgcuagaaa

SEQ ID NO: 1319152 - RNA, 19 nt, Artificial Sequence
  Description of Artificial Sequence: Synthetic oligonucleotide
  Sense strand starting at position 724 of SEQ ID NO: 1242041
uagcgaaauggugauguga

SEQ ID NO: 1319153 - RNA, 19 nt, Artificial Sequence
  Description of Artificial Sequence: Synthetic oligonucleotide
  Antisense strand to SEQ ID NO: 1319152
ucacaucaccauuucgcua

SEQ ID NO: 1319154 - RNA, 19 nt, Artificial Sequence
  Description of Artificial Sequence: Synthetic oligonucleotide
  Sense strand starting at position 733 of SEQ ID NO: 1242041
ggugaugugaauuguguuu

SEQ ID NO: 1319155 - RNA, 19 nt, Artificial Sequence
  Description of Artificial Sequence: Synthetic oligonucleotide
  Antisense strand to SEQ ID NO: 1319154
aaacacaauucacaucacc

SEQ ID NO: 1319156 - RNA, 19 nt, Artificial Sequence
  Description of Artificial Sequence: Synthetic oligonucleotide
  Sense strand starting at position 781 of SEQ ID NO: 1242041
aaugaccugccucggaaau

SEQ ID NO: 1319157 - RNA, 19 nt, Artificial Sequence
  Description of Artificial Sequence: Synthetic oligonucleotide
  Antisense strand to SEQ ID NO: 1319156
auuuccgaggcaggucauu

SEQ ID NO: 1319158 - RNA, 19 nt, Artificial Sequence
  Description of Artificial Sequence: Synthetic oligonucleotide
  Sense strand starting at position 782 of SEQ ID NO: 1242041
augaccugccucggaaauu

SEQ ID NO: 1319159 - RNA, 19 nt, Artificial Sequence
  Description of Artificial Sequence: Synthetic oligonucleotide
  Antisense strand to SEQ ID NO: 1319158
aauuuccgaggcaggucau

SEQ ID NO: 1319160 - RNA, 19 nt, Artificial Sequence
  Description of Artificial Sequence: Synthetic oligonucleotide
  Sense strand starting at position 941 of SEQ ID NO: 1242041
uggugaagauaucaacuca

SEQ ID NO: 1319161 - RNA, 19 nt, Artificial Sequence
  Description of Artificial Sequence: Synthetic oligonucleotide
  Antisense strand to SEQ ID NO: 1319160
ugaguugauaucuucacca

SEQ ID NO: 1319162 - RNA, 19 nt, Artificial Sequence
  Description of Artificial Sequence: Synthetic oligonucleotide
  Sense strand starting at position 1009 of SEQ ID NO: 1242041
auggcacaaugauacaaua

SEQ ID NO: 1319163 - RNA, 19 nt, Artificial Sequence
  Description of Artificial Sequence: Synthetic oligonucleotide
  Antisense strand to SEQ ID NO: 1319162
uauuguaucauugugccau

SEQ ID NO: 1319164 - RNA, 19 nt, Artificial Sequence
  Description of Artificial Sequence: Synthetic oligonucleotide
  Sense strand starting at position 1118 of SEQ ID NO: 1242041
uggcuagcaucuuuaugac

SEQ ID NO: 1319165 - RNA, 19 nt, Artificial Sequence
  Description of Artificial Sequence: Synthetic oligonucleotide
  Antisense strand to SEQ ID NO: 1319164
gucauaaagaugcuagcca

SEQ ID NO: 1319166 - RNA, 19 nt, Artificial Sequence
  Description of Artificial Sequence: Synthetic oligonucleotide
  Sense strand starting at position 1124 of SEQ ID NO: 1242041
gcaucuuuaugacugcuua

SEQ ID NO: 1319167 - RNA, 19 nt, Artificial Sequence
  Description of Artificial Sequence: Synthetic oligonucleotide
  Antisense strand to SEQ ID NO: 1319166
uaagcagucauaaagaugc

SEQ ID NO: 1319168 - RNA, 19 nt, Artificial Sequence
  Description of Artificial Sequence: Synthetic oligonucleotide
  Sense strand starting at position 1134 of SEQ ID NO: 1242041
gacugcuuagucuguauuu

SEQ ID NO: 1319169 - RNA, 19 nt, Artificial Sequence
  Description of Artificial Sequence: Synthetic oligonucleotide
  Antisense strand to SEQ ID NO: 1319168
aaauacagacuaagcaguc

SEQ ID NO: 1319170 - RNA, 19 nt, Artificial Sequence
  Description of Artificial Sequence: Synthetic oligonucleotide
  Sense strand starting at position 1135 of SEQ ID NO: 1242041
acugcuuagucuguauuua

SEQ ID NO: 1319171 - RNA, 19 nt, Artificial Sequence
  Description of Artificial Sequence: Synthetic oligonucleotide
  Antisense strand to SEQ ID NO: 1319170
uaaauacagacuaagcagu

SEQ ID NO: 1319172 - RNA, 19 nt, Artificial Sequence
  Description of Artificial Sequence: Synthetic oligonucleotide
  Sense strand starting at position 1139 of SEQ ID NO: 1242041
cuuagucuguauuuaagua

SEQ ID NO: 1319173 - RNA, 19 nt, Artificial Sequence
  Description of Artificial Sequence: Synthetic oligonucleotide
  Antisense strand to SEQ ID NO: 1319172
uacuuaaauacagacuaag

SEQ ID NO: 1319174 - RNA, 19 nt, Artificial Sequence
  Description of Artificial Sequence: Synthetic oligonucleotide
  Sense strand starting at position 1297 of SEQ ID NO: 1242041
gagaccagcugcucucaua

SEQ ID NO: 1319175 - RNA, 19 nt, Artificial Sequence
  Description of Artificial Sequence: Synthetic oligonucleotide
  Antisense strand to SEQ ID NO: 1319174
uaugagagcagcuggucuc

SEQ ID NO: 1319176 - RNA, 19 nt, Artificial Sequence
  Description of Artificial Sequence: Synthetic oligonucleotide
  Sense strand starting at position 1443 of SEQ ID NO: 1242041
ugucacaucugagccagaa

SEQ ID NO: 1319177 - RNA, 19 nt, Artificial Sequence
  Description of Artificial Sequence: Synthetic oligonucleotide
  Antisense strand to SEQ ID NO: 1319176
uucuggcucagaugugaca

SEQ ID NO: 1319178 - RNA, 19 nt, Artificial Sequence
  Description of Artificial Sequence: Synthetic oligonucleotide
  Sense strand starting at position 1568 of SEQ ID NO: 1242041
gauccuccuggcugaugaa

SEQ ID NO: 1319179 - RNA, 19 nt, Artificial Sequence
  Description of Artificial Sequence: Synthetic oligonucleotide
  Antisense strand to SEQ ID NO: 1319178
uucaucagccaggaggauc

SEQ ID NO: 1319180 - RNA, 19 nt, Artificial Sequence
  Description of Artificial Sequence: Synthetic oligonucleotide
  Sense strand starting at position 1593 of SEQ ID NO: 1242041
acgggagcauugucaaugu

SEQ ID NO: 1319181 - RNA, 19 nt, Artificial Sequence
  Description of Artificial Sequence: Synthetic oligonucleotide
  Antisense strand to SEQ ID NO: 1319180
acauugacaaugcucccgu

SEQ ID NO: 1319182 - RNA, 19 nt, Artificial Sequence
  Description of Artificial Sequence: Synthetic oligonucleotide
  Sense strand starting at position 1655 of SEQ ID NO: 1242041
acugcauucccgggaaaga

SEQ ID NO: 1319183 - RNA, 19 nt, Artificial Sequence
  Description of Artificial Sequence: Synthetic oligonucleotide
  Antisense strand to SEQ ID NO: 1319182
ucuuucccgggaaugcagu

SEQ ID NO: 1319184 - RNA, 19 nt, Artificial Sequence
  Description of Artificial Sequence: Synthetic oligonucleotide
  Sense strand starting at position 1745 of SEQ ID NO: 1242041
auaccagguucugaaagaa

SEQ ID NO: 1319185 - RNA, 19 nt, Artificial Sequence
  Description of Artificial Sequence: Synthetic oligonucleotide
  Antisense strand to SEQ ID NO: 1319184
uucuuucagaaccugguau

SEQ ID NO: 1319186 - RNA, 19 nt, Artificial Sequence
  Description of Artificial Sequence: Synthetic oligonucleotide
  Sense strand starting at position 1760 of SEQ ID NO: 1242041
agaaaugcuguugagcauu

SEQ ID NO: 1319187 - RNA, 19 nt, Artificial Sequence
  Description of Artificial Sequence: Synthetic oligonucleotide
  Antisense strand to SEQ ID NO: 1319186
aaugcucaacagcauuucu

SEQ ID NO: 1319188 - RNA, 19 nt, Artificial Sequence
  Description of Artificial Sequence: Synthetic oligonucleotide
  Sense strand starting at position 1766 of SEQ ID NO: 1242041
gcuguugagcauuaccgua

SEQ ID NO: 1319189 - RNA, 19 nt, Artificial Sequence
  Description of Artificial Sequence: Synthetic oligonucleotide
  Antisense strand to SEQ ID NO: 1319188
uacgguaaugcucaacagc

SEQ ID NO: 1319190 - RNA, 19 nt, Artificial Sequence
  Description of Artificial Sequence: Synthetic oligonucleotide
  Sense strand starting at position 1771 of SEQ ID NO: 1242041
ugagcauuaccguauuguu

SEQ ID NO: 1319191 - RNA, 19 nt, Artificial Sequence
  Description of Artificial Sequence: Synthetic oligonucleotide
  Antisense strand to SEQ ID NO: 1319190
aacaauacgguaaugcuca

SEQ ID NO: 1319192 - RNA, 19 nt, Artificial Sequence
  Description of Artificial Sequence: Synthetic oligonucleotide
  Sense strand starting at position 1798 of SEQ ID NO: 1242041
uccuaagucgccgauucuu

SEQ ID NO: 1319193 - RNA, 19 nt, Artificial Sequence
  Description of Artificial Sequence: Synthetic oligonucleotide
  Antisense strand to SEQ ID NO: 1319192
aagaaucggcgacuuagga

SEQ ID NO: 1319194 - RNA, 19 nt, Artificial Sequence
  Description of Artificial Sequence: Synthetic oligonucleotide
  Sense strand starting at position 1844 of SEQ ID NO: 1242041
ugggacuuguugcuaaauc

SEQ ID NO: 1319195 - RNA, 19 nt, Artificial Sequence
  Description of Artificial Sequence: Synthetic oligonucleotide
  Antisense strand to SEQ ID NO: 1319194
gauuuagcaacaaguccca

SEQ ID NO: 1319196 - RNA, 19 nt, Artificial Sequence
  Description of Artificial Sequence: Synthetic oligonucleotide
  Sense strand starting at position 1987 of SEQ ID NO: 1242041
gcgcguucaguucuaccuu

SEQ ID NO: 1319197 - RNA, 19 nt, Artificial Sequence
  Description of Artificial Sequence: Synthetic oligonucleotide
  Antisense strand to SEQ ID NO: 1319196
aagguagaacugaacgcgc

SEQ ID NO: 1319198 - RNA, 19 nt, Artificial Sequence
  Description of Artificial Sequence: Synthetic oligonucleotide
  Sense strand starting at position 2929 of SEQ ID NO: 1242041
agccaaucgagauagagua

SEQ ID NO: 1319199 - RNA, 19 nt, Artificial Sequence
  Description of Artificial Sequence: Synthetic oligonucleotide
  Antisense strand to SEQ ID NO: 1319198
uacucuaucucgauuggcu

SEQ ID NO: 1319200 - RNA, 19 nt, Artificial Sequence
  Description of Artificial Sequence: Synthetic oligonucleotide
  Sense strand starting at position 2950 of SEQ ID NO: 1242041
gggaugaugggcgggauaa

SEQ ID NO: 1319201 - RNA, 19 nt, Artificial Sequence
  Description of Artificial Sequence: Synthetic oligonucleotide
  Antisense strand to SEQ ID NO: 1319200
uuaucccgcccaucauccc

SEQ ID NO: 1319202 - RNA, 19 nt, Artificial Sequence
  Description of Artificial Sequence: Synthetic oligonucleotide
  Sense strand starting at position 2951 of SEQ ID NO: 1242041
ggaugaugggcgggauaaa

SEQ ID NO: 1319203 - RNA, 19 nt, Artificial Sequence
  Description of Artificial Sequence: Synthetic oligonucleotide
  Antisense strand to SEQ ID NO: 1319202
uuuaucccgcccaucaucc

SEQ ID NO: 1319204 - RNA, 19 nt, Artificial Sequence
  Description of Artificial Sequence: Synthetic oligonucleotide
  Sense strand starting at position 3256 of SEQ ID NO: 1242041
ggauaccucucgcuccaga

SEQ ID NO: 1319205 - RNA, 19 nt, Artificial Sequence
  Description of Artificial Sequence: Synthetic oligonucleotide
  Antisense strand to SEQ ID NO: 1319204
ucuggagcgagagguaucc

SEQ ID NO: 1319206 - RNA, 19 nt, Artificial Sequence
  Description of Artificial Sequence: Synthetic oligonucleotide
  Sense strand starting at position 3580 of SEQ ID NO: 1242041
auaguaugucaggagguau

SEQ ID NO: 1319207 - RNA, 19 nt, Artificial Sequence
  Description of Artificial Sequence: Synthetic oligonucleotide
  Antisense strand to SEQ ID NO: 1319206
auaccuccugacauacuau

SEQ ID NO: 1319208 - RNA, 19 nt, Artificial Sequence
  Description of Artificial Sequence: Synthetic oligonucleotide
  Sense strand starting at position 3593 of SEQ ID NO: 1242041
agguauacaucacaaagaa

SEQ ID NO: 1319209 - RNA, 19 nt, Artificial Sequence
  Description of Artificial Sequence: Synthetic oligonucleotide
  Antisense strand to SEQ ID NO: 1319208
uucuuugugauguauaccu

SEQ ID NO: 1319210 - RNA, 19 nt, Artificial Sequence
  Description of Artificial Sequence: Synthetic oligonucleotide
  Sense strand starting at position 93 of SEQ ID NO: 1242042
uggugaagauaucaacuca

SEQ ID NO: 1319211 - RNA, 19 nt, Artificial Sequence
  Description of Artificial Sequence: Synthetic oligonucleotide
  Antisense strand to SEQ ID NO: 1319210
ugaguugauaucuucacca

SEQ ID NO: 1319212 - RNA, 19 nt, Artificial Sequence
  Description of Artificial Sequence: Synthetic oligonucleotide
  Sense strand starting at position 161 of SEQ ID NO: 1242042
auggcacaaugauacaaua

SEQ ID NO: 1319213 - RNA, 19 nt, Artificial Sequence
  Description of Artificial Sequence: Synthetic oligonucleotide
  Antisense strand to SEQ ID NO: 1319212
uauuguaucauugugccau

SEQ ID NO: 1319214 - RNA, 19 nt, Artificial Sequence
  Description of Artificial Sequence: Synthetic oligonucleotide
  Sense strand starting at position 270 of SEQ ID NO: 1242042
uggcuagcaucuuuaugac

SEQ ID NO: 1319215 - RNA, 19 nt, Artificial Sequence
  Description of Artificial Sequence: Synthetic oligonucleotide
  Antisense strand to SEQ ID NO: 1319214
gucauaaagaugcuagcca

SEQ ID NO: 1319216 - RNA, 19 nt, Artificial Sequence
  Description of Artificial Sequence: Synthetic oligonucleotide
  Sense strand starting at position 276 of SEQ ID NO: 1242042
gcaucuuuaugacugcuua

SEQ ID NO: 1319217 - RNA, 19 nt, Artificial Sequence
  Description of Artificial Sequence: Synthetic oligonucleotide
  Antisense strand to SEQ ID NO: 1319216
uaagcagucauaaagaugc

SEQ ID NO: 1319218 - RNA, 19 nt, Artificial Sequence
  Description of Artificial Sequence: Synthetic oligonucleotide
  Sense strand starting at position 286 of SEQ ID NO: 1242042
gacugcuuagucuguauuu

SEQ ID NO: 1319219 - RNA, 19 nt, Artificial Sequence
  Description of Artificial Sequence: Synthetic oligonucleotide
  Antisense strand to SEQ ID NO: 1319218
aaauacagacuaagcaguc

SEQ ID NO: 1319220 - RNA, 19 nt, Artificial Sequence
  Description of Artificial Sequence: Synthetic oligonucleotide
  Sense strand starting at position 287 of SEQ ID NO: 1242042
acugcuuagucuguauuua

SEQ ID NO: 1319221 - RNA, 19 nt, Artificial Sequence
  Description of Artificial Sequence: Synthetic oligonucleotide
  Antisense strand to SEQ ID NO: 1319220
uaaauacagacuaagcagu

SEQ ID NO: 1319222 - RNA, 19 nt, Artificial Sequence
  Description of Artificial Sequence: Synthetic oligonucleotide
  Sense strand starting at position 291 of SEQ ID NO: 1242042
cuuagucuguauuuaagua

SEQ ID NO: 1319223 - RNA, 19 nt, Artificial Sequence
  Description of Artificial Sequence: Synthetic oligonucleotide
  Antisense strand to SEQ ID NO: 1319222
uacuuaaauacagacuaag

SEQ ID NO: 1319224 - RNA, 19 nt, Artificial Sequence
  Description of Artificial Sequence: Synthetic oligonucleotide
  Sense strand starting at position 449 of SEQ ID NO: 1242042
gagaccagcugcucucaua

SEQ ID NO: 1319225 - RNA, 19 nt, Artificial Sequence
  Description of Artificial Sequence: Synthetic oligonucleotide
  Antisense strand to SEQ ID NO: 1319224
uaugagagcagcuggucuc

SEQ ID NO: 1319226 - RNA, 19 nt, Artificial Sequence
  Description of Artificial Sequence: Synthetic oligonucleotide
  Sense strand starting at position 595 of SEQ ID NO: 1242042
ugucacaucugagccagaa

SEQ ID NO: 1319227 - RNA, 19 nt, Artificial Sequence
  Description of Artificial Sequence: Synthetic oligonucleotide
  Antisense strand to SEQ ID NO: 1319226
uucuggcucagaugugaca

SEQ ID NO: 1319228 - RNA, 19 nt, Artificial Sequence
  Description of Artificial Sequence: Synthetic oligonucleotide
  Sense strand starting at position 720 of SEQ ID NO: 1242042
gauccuccuggcugaugaa

SEQ ID NO: 1319229 - RNA, 19 nt, Artificial Sequence
  Description of Artificial Sequence: Synthetic oligonucleotide
  Antisense strand to SEQ ID NO: 1319228
uucaucagccaggaggauc

SEQ ID NO: 1319230 - RNA, 19 nt, Artificial Sequence
  Description of Artificial Sequence: Synthetic oligonucleotide
  Sense strand starting at position 745 of SEQ ID NO: 1242042
acgggagcauugucaaugu

SEQ ID NO: 1319231 - RNA, 19 nt, Artificial Sequence
  Description of Artificial Sequence: Synthetic oligonucleotide
  Antisense strand to SEQ ID NO: 1319230
acauugacaaugcucccgu

SEQ ID NO: 1319232 - RNA, 19 nt, Artificial Sequence
  Description of Artificial Sequence: Synthetic oligonucleotide
  Sense strand starting at position 807 of SEQ ID NO: 1242042
acugcauucccgggaaaga

SEQ ID NO: 1319233 - RNA, 19 nt, Artificial Sequence
  Description of Artificial Sequence: Synthetic oligonucleotide
  Antisense strand to SEQ ID NO: 1319232
ucuuucccgggaaugcagu

SEQ ID NO: 1319234 - RNA, 19 nt, Artificial Sequence
  Description of Artificial Sequence: Synthetic oligonucleotide
  Sense strand starting at position 897 of SEQ ID NO: 1242042
auaccagguucugaaagaa

SEQ ID NO: 1319235 - RNA, 19 nt, Artificial Sequence
  Description of Artificial Sequence: Synthetic oligonucleotide
  Antisense strand to SEQ ID NO: 1319234
uucuuucagaaccugguau

SEQ ID NO: 1319236 - RNA, 19 nt, Artificial Sequence
  Description of Artificial Sequence: Synthetic oligonucleotide
  Sense strand starting at position 912 of SEQ ID NO: 1242042
agaaaugcuguugagcauu

SEQ ID NO: 1319237 - RNA, 19 nt, Artificial Sequence
  Description of Artificial Sequence: Synthetic oligonucleotide
  Antisense strand to SEQ ID NO: 1319236
aaugcucaacagcauuucu

SEQ ID NO: 1319238 - RNA, 19 nt, Artificial Sequence
  Description of Artificial Sequence: Synthetic oligonucleotide
  Sense strand starting at position 918 of SEQ ID NO: 1242042
gcuguugagcauuaccgua

SEQ ID NO: 1319239 - RNA, 19 nt, Artificial Sequence
  Description of Artificial Sequence: Synthetic oligonucleotide
  Antisense strand to SEQ ID NO: 1319238
uacgguaaugcucaacagc

SEQ ID NO: 1319240 - RNA, 19 nt, Artificial Sequence
  Description of Artificial Sequence: Synthetic oligonucleotide
  Sense strand starting at position 920 of SEQ ID NO: 1242042
uguugagcauuaccguauu

SEQ ID NO: 1319241 - RNA, 19 nt, Artificial Sequence
  Description of Artificial Sequence: Synthetic oligonucleotide
  Antisense strand to SEQ ID NO: 1319240
aauacgguaaugcucaaca

SEQ ID NO: 1319242 - RNA, 19 nt, Artificial Sequence
  Description of Artificial Sequence: Synthetic oligonucleotide
  Sense strand starting at position 923 of SEQ ID NO: 1242042
ugagcauuaccguauuguu

SEQ ID NO: 1319243 - RNA, 19 nt, Artificial Sequence
  Description of Artificial Sequence: Synthetic oligonucleotide
  Antisense strand to SEQ ID NO: 1319242
aacaauacgguaaugcuca

SEQ ID NO: 1319244 - RNA, 19 nt, Artificial Sequence
  Description of Artificial Sequence: Synthetic oligonucleotide
  Sense strand starting at position 950 of SEQ ID NO: 1242042
uccuaagucgccgauucuu

SEQ ID NO: 1319245 - RNA, 19 nt, Artificial Sequence
  Description of Artificial Sequence: Synthetic oligonucleotide
  Antisense strand to SEQ ID NO: 1319244
aagaaucggcgacuuagga

SEQ ID NO: 1319246 - RNA, 19 nt, Artificial Sequence
  Description of Artificial Sequence: Synthetic oligonucleotide
  Sense strand starting at position 996 of SEQ ID NO: 1242042
ugggacuuguugcuaaauc

SEQ ID NO: 1319247 - RNA, 19 nt, Artificial Sequence
  Description of Artificial Sequence: Synthetic oligonucleotide
  Antisense strand to SEQ ID NO: 1319246
gauuuagcaacaaguccca

SEQ ID NO: 1319248 - RNA, 19 nt, Artificial Sequence
  Description of Artificial Sequence: Synthetic oligonucleotide
  Sense strand starting at position 1139 of SEQ ID NO: 1242042
gcgcguucaguucuaccuu

SEQ ID NO: 1319249 - RNA, 19 nt, Artificial Sequence
  Description of Artificial Sequence: Synthetic oligonucleotide
  Antisense strand to SEQ ID NO: 1319248
aagguagaacugaacgcgc

SEQ ID NO: 1319250 - RNA, 19 nt, Artificial Sequence
  Description of Artificial Sequence: Synthetic oligonucleotide
  Sense strand starting at position 2081 of SEQ ID NO: 1242042
agccaaucgagauagagua

SEQ ID NO: 1319251 - RNA, 19 nt, Artificial Sequence
  Description of Artificial Sequence: Synthetic oligonucleotide
  Antisense strand to SEQ ID NO: 1319250
uacucuaucucgauuggcu

SEQ ID NO: 1319252 - RNA, 19 nt, Artificial Sequence
  Description of Artificial Sequence: Synthetic oligonucleotide
  Sense strand starting at position 2102 of SEQ ID NO: 1242042
gggaugaugggcgggauaa

SEQ ID NO: 1319253 - RNA, 19 nt, Artificial Sequence
  Description of Artificial Sequence: Synthetic oligonucleotide
  Antisense strand to SEQ ID NO: 1319252
uuaucccgcccaucauccc

SEQ ID NO: 1319254 - RNA, 19 nt, Artificial Sequence
  Description of Artificial Sequence: Synthetic oligonucleotide
  Sense strand starting at position 2103 of SEQ ID NO: 1242042
ggaugaugggcgggauaaa

SEQ ID NO: 1319255 - RNA, 19 nt, Artificial Sequence
  Description of Artificial Sequence: Synthetic oligonucleotide
  Antisense strand to SEQ ID NO: 1319254
uuuaucccgcccaucaucc

SEQ ID NO: 1319256 - RNA, 19 nt, Artificial Sequence
  Description of Artificial Sequence: Synthetic oligonucleotide
  Sense strand starting at position 2408 of SEQ ID NO: 1242042
ggauaccucucgcuccaga

SEQ ID NO: 1319257 - RNA, 19 nt, Artificial Sequence
  Description of Artificial Sequence: Synthetic oligonucleotide
  Antisense strand to SEQ ID NO: 1319256
ucuggagcgagagguaucc

SEQ ID NO: 1319258 - RNA, 19 nt, Artificial Sequence
  Description of Artificial Sequence: Synthetic oligonucleotide
  Sense strand starting at position 2732 of SEQ ID NO: 1242042
auaguaugucaggagguau

SEQ ID NO: 1319259 - RNA, 19 nt, Artificial Sequence
  Description of Artificial Sequence: Synthetic oligonucleotide
  Antisense strand to SEQ ID NO: 1319258
auaccuccugacauacuau

SEQ ID NO: 1319260 - RNA, 19 nt, Artificial Sequence
  Description of Artificial Sequence: Synthetic oligonucleotide
  Sense strand starting at position 2745 of SEQ ID NO: 1242042
agguauacaucacaaagaa

SEQ ID NO: 1319261 - RNA, 19 nt, Artificial Sequence
  Description of Artificial Sequence: Synthetic oligonucleotide
  Antisense strand to SEQ ID NO: 1319260
uucuuugugauguauaccu

SEQ ID NO: 1319262 - RNA, 19 nt, Artificial Sequence
  Description of Artificial Sequence: Synthetic oligonucleotide
  Sense strand starting at position 3288 of SEQ ID NO: 1242042
uagguauaauguguaacaa

SEQ ID NO: 1319263 - RNA, 19 nt, Artificial Sequence
  Description of Artificial Sequence: Synthetic oligonucleotide
  Antisense strand to SEQ ID NO: 1319262
uuguuacacauuauaccua

SEQ ID NO: 1319264 - RNA, 19 nt, Artificial Sequence
  Description of Artificial Sequence: Synthetic oligonucleotide
  Sense strand starting at position 3335 of SEQ ID NO: 1242042
cuaucccgccuuuaaagua

SEQ ID NO: 1319265 - RNA, 19 nt, Artificial Sequence
  Description of Artificial Sequence: Synthetic oligonucleotide
  Antisense strand to SEQ ID NO: 1319264
uacuuuaaaggcgggauag

SEQ ID NO: 1319266 - RNA, 19 nt, Artificial Sequence
  Description of Artificial Sequence: Synthetic oligonucleotide
  Sense strand starting at position 3361 of SEQ ID NO: 1242042
ucccuagugucuuuggauu

SEQ ID NO: 1319267 - RNA, 19 nt, Artificial Sequence
  Description of Artificial Sequence: Synthetic oligonucleotide
  Antisense strand to SEQ ID NO: 1319266
aauccaaagacacuaggga

SEQ ID NO: 1319268 - RNA, 19 nt, Artificial Sequence
  Description of Artificial Sequence: Synthetic oligonucleotide
  Sense strand starting at position 3535 of SEQ ID NO: 1242042
gcucuuaauugguugcauu

SEQ ID NO: 1319269 - RNA, 19 nt, Artificial Sequence
  Description of Artificial Sequence: Synthetic oligonucleotide
  Antisense strand to SEQ ID NO: 1319268
aaugcaaccaauuaagagc

SEQ ID NO: 1319270 - RNA, 19 nt, Artificial Sequence
  Description of Artificial Sequence: Synthetic oligonucleotide
  Sense strand starting at position 3606 of SEQ ID NO: 1242042
uuuggauggaguuaguuau

SEQ ID NO: 1319271 - RNA, 19 nt, Artificial Sequence
  Description of Artificial Sequence: Synthetic oligonucleotide
  Antisense strand to SEQ ID NO: 1319270
auaacuaacuccauccaaa

SEQ ID NO: 1319272 - RNA, 19 nt, Artificial Sequence
  Description of Artificial Sequence: Synthetic oligonucleotide
  Sense strand starting at position 3610 of SEQ ID NO: 1242042
gauggaguuaguuaugagu

SEQ ID NO: 1319273 - RNA, 19 nt, Artificial Sequence
  Description of Artificial Sequence: Synthetic oligonucleotide
  Antisense strand to SEQ ID NO: 1319272
acucauaacuaacuccauc

SEQ ID NO: 1319274 - RNA, 19 nt, Artificial Sequence
  Description of Artificial Sequence: Synthetic oligonucleotide
  Sense strand starting at position 3618 of SEQ ID NO: 1242042
uaguuaugagucuagaacu

SEQ ID NO: 1319275 - RNA, 19 nt, Artificial Sequence
  Description of Artificial Sequence: Synthetic oligonucleotide
  Antisense strand to SEQ ID NO: 1319274
aguucuagacucauaacua

SEQ ID NO: 1319276 - RNA, 19 nt, Artificial Sequence
  Description of Artificial Sequence: Synthetic oligonucleotide
  Sense strand starting at position 3643 of SEQ ID NO: 1242042
ucaaguguuccaggcauaa

SEQ ID NO: 1319277 - RNA, 19 nt, Artificial Sequence
  Description of Artificial Sequence: Synthetic oligonucleotide
  Antisense strand to SEQ ID NO: 1319276
uuaugccuggaacacuuga

SEQ ID NO: 1319278 - RNA, 19 nt, Artificial Sequence
  Description of Artificial Sequence: Synthetic oligonucleotide
  Sense strand starting at position 3700 of SEQ ID NO: 1242042
guagucugaugccugaaac

SEQ ID NO: 1319279 - RNA, 19 nt, Artificial Sequence
  Description of Artificial Sequence: Synthetic oligonucleotide
  Antisense strand to SEQ ID NO: 1319278
guuucaggcaucagacuac

SEQ ID NO: 1319280 - RNA, 19 nt, Artificial Sequence
  Description of Artificial Sequence: Synthetic oligonucleotide
  Sense strand starting at position 3701 of SEQ ID NO: 1242042
uagucugaugccugaaaca

SEQ ID NO: 1319281 - RNA, 19 nt, Artificial Sequence
  Description of Artificial Sequence: Synthetic oligonucleotide
  Antisense strand to SEQ ID NO: 1319280
uguuucaggcaucagacua

SEQ ID NO: 1319282 - RNA, 19 nt, Artificial Sequence
  Description of Artificial Sequence: Synthetic oligonucleotide
  Sense strand starting at position 3711 of SEQ ID NO: 1242042
ccugaaacauaauagguau

SEQ ID NO: 1319283 - RNA, 19 nt, Artificial Sequence
  Description of Artificial Sequence: Synthetic oligonucleotide
  Antisense strand to SEQ ID NO: 1319282
auaccuauuauguuucagg

SEQ ID NO: 1319284 - RNA, 19 nt, Artificial Sequence
  Description of Artificial Sequence: Synthetic oligonucleotide
  Sense strand starting at position 3938 of SEQ ID NO: 1242042
ggaauugacagguguucua

SEQ ID NO: 1319285 - RNA, 19 nt, Artificial Sequence
  Description of Artificial Sequence: Synthetic oligonucleotide
  Antisense strand to SEQ ID NO: 1319284
uagaacaccugucaauucc

SEQ ID NO: 1319286 - RNA, 19 nt, Artificial Sequence
  Description of Artificial Sequence: Synthetic oligonucleotide
  Sense strand starting at position 3945 of SEQ ID NO: 1242042
acagguguucuacagcacu

SEQ ID NO: 1319287 - RNA, 19 nt, Artificial Sequence
  Description of Artificial Sequence: Synthetic oligonucleotide
  Antisense strand to SEQ ID NO: 1319286
agugcuguagaacaccugu

SEQ ID NO: 1319288 - RNA, 19 nt, Artificial Sequence
  Description of Artificial Sequence: Synthetic oligonucleotide
  Sense strand starting at position 3948 of SEQ ID NO: 1242042
gguguucuacagcacuuaa

SEQ ID NO: 1319289 - RNA, 19 nt, Artificial Sequence
  Description of Artificial Sequence: Synthetic oligonucleotide
  Antisense strand to SEQ ID NO: 1319288
uuaagugcuguagaacacc

SEQ ID NO: 1319290 - RNA, 19 nt, Artificial Sequence
  Description of Artificial Sequence: Synthetic oligonucleotide
  Sense strand starting at position 44 of SEQ ID NO: 1242043
cuagucacucauggagagu

SEQ ID NO: 1319291 - RNA, 19 nt, Artificial Sequence
  Description of Artificial Sequence: Synthetic oligonucleotide
  Antisense strand to SEQ ID NO: 1319290
acucuccaugagugacuag

SEQ ID NO: 1319292 - RNA, 19 nt, Artificial Sequence
  Description of Artificial Sequence: Synthetic oligonucleotide
  Sense strand starting at position 74 of SEQ ID NO: 1242043
uguggaaucauccauggcu

SEQ ID NO: 1319293 - RNA, 19 nt, Artificial Sequence
  Description of Artificial Sequence: Synthetic oligonucleotide
  Antisense strand to SEQ ID NO: 1319292
agccauggaugauuccaca

SEQ ID NO: 1319294 - RNA, 19 nt, Artificial Sequence
  Description of Artificial Sequence: Synthetic oligonucleotide
  Sense strand starting at position 77 of SEQ ID NO: 1242043
ggaaucauccauggcuacu

SEQ ID NO: 1319295 - RNA, 19 nt, Artificial Sequence
  Description of Artificial Sequence: Synthetic oligonucleotide
  Antisense strand to SEQ ID NO: 1319294
aguagccauggaugauucc

SEQ ID NO: 1319296 - RNA, 19 nt, Artificial Sequence
  Description of Artificial Sequence: Synthetic oligonucleotide
  Sense strand starting at position 87 of SEQ ID NO: 1242043
auggcuacugugggaauau

SEQ ID NO: 1319297 - RNA, 19 nt, Artificial Sequence
  Description of Artificial Sequence: Synthetic oligonucleotide
  Antisense strand to SEQ ID NO: 1319296
auauucccacaguagccau

SEQ ID NO: 1319298 - RNA, 19 nt, Artificial Sequence
  Description of Artificial Sequence: Synthetic oligonucleotide
  Sense strand starting at position 171 of SEQ ID NO: 1242043
agacaucagcuaugagauc

SEQ ID NO: 1319299 - RNA, 19 nt, Artificial Sequence
  Description of Artificial Sequence: Synthetic oligonucleotide
  Antisense strand to SEQ ID NO: 1319298
gaucucauagcugaugucu

SEQ ID NO: 1319300 - RNA, 19 nt, Artificial Sequence
  Description of Artificial Sequence: Synthetic oligonucleotide
  Sense strand starting at position 344 of SEQ ID NO: 1242043
ggauaaaggacuugcuuau

SEQ ID NO: 1319301 - RNA, 19 nt, Artificial Sequence
  Description of Artificial Sequence: Synthetic oligonucleotide
  Antisense strand to SEQ ID NO: 1319300
auaagcaaguccuuuaucc

SEQ ID NO: 1319302 - RNA, 19 nt, Artificial Sequence
  Description of Artificial Sequence: Synthetic oligonucleotide
  Sense strand starting at position 390 of SEQ ID NO: 1242043
cugggcuacucuguauuua

SEQ ID NO: 1319303 - RNA, 19 nt, Artificial Sequence
  Description of Artificial Sequence: Synthetic oligonucleotide
  Antisense strand to SEQ ID NO: 1319302
uaaauacagaguagcccag

SEQ ID NO: 1319304 - RNA, 19 nt, Artificial Sequence
  Description of Artificial Sequence: Synthetic oligonucleotide
  Sense strand starting at position 403 of SEQ ID NO: 1242043
uauuuagcccugugcuuga

SEQ ID NO: 1319305 - RNA, 19 nt, Artificial Sequence
  Description of Artificial Sequence: Synthetic oligonucleotide
  Antisense strand to SEQ ID NO: 1319304
ucaagcacagggcuaaaua

SEQ ID NO: 1319306 - RNA, 19 nt, Artificial Sequence
  Description of Artificial Sequence: Synthetic oligonucleotide
  Sense strand starting at position 455 of SEQ ID NO: 1242043
ggugaagagcuuggauuca

SEQ ID NO: 1319307 - RNA, 19 nt, Artificial Sequence
  Description of Artificial Sequence: Synthetic oligonucleotide
  Antisense strand to SEQ ID NO: 1319306
ugaauccaagcucuucacc

SEQ ID NO: 1319308 - RNA, 19 nt, Artificial Sequence
  Description of Artificial Sequence: Synthetic oligonucleotide
  Sense strand starting at position 548 of SEQ ID NO: 1242043
gugcuacccaaagggaaau

SEQ ID NO: 1319309 - RNA, 19 nt, Artificial Sequence
  Description of Artificial Sequence: Synthetic oligonucleotide
  Antisense strand to SEQ ID NO: 1319308
auuucccuuuggguagcac

SEQ ID NO: 1319310 - RNA, 19 nt, Artificial Sequence
  Description of Artificial Sequence: Synthetic oligonucleotide
  Sense strand starting at position 560 of SEQ ID NO: 1242043
gggaaauagccaggauucu

SEQ ID NO: 1319311 - RNA, 19 nt, Artificial Sequence
  Description of Artificial Sequence: Synthetic oligonucleotide
  Antisense strand to SEQ ID NO: 1319310
agaauccuggcuauuuccc

SEQ ID NO: 1319312 - RNA, 19 nt, Artificial Sequence
  Description of Artificial Sequence: Synthetic oligonucleotide
  Sense strand starting at position 570 of SEQ ID NO: 1242043
caggauucuguaugaccaa

SEQ ID NO: 1319313 - RNA, 19 nt, Artificial Sequence
  Description of Artificial Sequence: Synthetic oligonucleotide
  Antisense strand to SEQ ID NO: 1319312
uuggucauacagaauccug

SEQ ID NO: 1319314 - RNA, 19 nt, Artificial Sequence
  Description of Artificial Sequence: Synthetic oligonucleotide
  Sense strand starting at position 905 of SEQ ID NO: 1242043
agcuuagagaaguaaagca

SEQ ID NO: 1319315 - RNA, 19 nt, Artificial Sequence
  Description of Artificial Sequence: Synthetic oligonucleotide
  Antisense strand to SEQ ID NO: 1319314
ugcuuuacuucucuaagcu

SEQ ID NO: 1319316 - RNA, 19 nt, Artificial Sequence
  Description of Artificial Sequence: Synthetic oligonucleotide
  Sense strand starting at position 928 of SEQ ID NO: 1242043
gucauaguccauuaugaau

SEQ ID NO: 1319317 - RNA, 19 nt, Artificial Sequence
  Description of Artificial Sequence: Synthetic oligonucleotide
  Antisense strand to SEQ ID NO: 1319316
auucauaauggacuaugac

SEQ ID NO: 1319318 - RNA, 19 nt, Artificial Sequence
  Description of Artificial Sequence: Synthetic oligonucleotide
  Sense strand starting at position 1221 of SEQ ID NO: 1242043
ugugaauucucuucccaga

SEQ ID NO: 1319319 - RNA, 19 nt, Artificial Sequence
  Description of Artificial Sequence: Synthetic oligonucleotide
  Antisense strand to SEQ ID NO: 1319318
ucugggaagagaauucaca

SEQ ID NO: 1319320 - RNA, 19 nt, Artificial Sequence
  Description of Artificial Sequence: Synthetic oligonucleotide
  Sense strand starting at position 1223 of SEQ ID NO: 1242043
ugaauucucuucccagaag

SEQ ID NO: 1319321 - RNA, 19 nt, Artificial Sequence
  Description of Artificial Sequence: Synthetic oligonucleotide
  Antisense strand to SEQ ID NO: 1319320
cuucugggaagagaauuca

SEQ ID NO: 1319322 - RNA, 19 nt, Artificial Sequence
  Description of Artificial Sequence: Synthetic oligonucleotide
  Sense strand starting at position 1226 of SEQ ID NO: 1242043
auucucuucccagaaguga

SEQ ID NO: 1319323 - RNA, 19 nt, Artificial Sequence
  Description of Artificial Sequence: Synthetic oligonucleotide
  Antisense strand to SEQ ID NO: 1319322
ucacuucugggaagagaau

SEQ ID NO: 1319324 - RNA, 19 nt, Artificial Sequence
  Description of Artificial Sequence: Synthetic oligonucleotide
  Sense strand starting at position 1258 of SEQ ID NO: 1242043
ggaacauaacuuugccuau

SEQ ID NO: 1319325 - RNA, 19 nt, Artificial Sequence
  Description of Artificial Sequence: Synthetic oligonucleotide
  Antisense strand to SEQ ID NO: 1319324
auaggcaaaguuauguucc

SEQ ID NO: 1319326 - RNA, 19 nt, Artificial Sequence
  Description of Artificial Sequence: Synthetic oligonucleotide
  Sense strand starting at position 1330 of SEQ ID NO: 1242043
gaaagcuugccuuaaagug

SEQ ID NO: 1319327 - RNA, 19 nt, Artificial Sequence
  Description of Artificial Sequence: Synthetic oligonucleotide
  Antisense strand to SEQ ID NO: 1319326
cacuuuaaggcaagcuuuc

SEQ ID NO: 1319328 - RNA, 19 nt, Artificial Sequence
  Description of Artificial Sequence: Synthetic oligonucleotide
  Sense strand starting at position 1348 of SEQ ID NO: 1242043
guuacagugauaugaaaug

SEQ ID NO: 1319329 - RNA, 19 nt, Artificial Sequence
  Description of Artificial Sequence: Synthetic oligonucleotide
  Antisense strand to SEQ ID NO: 1319328
cauuucauaucacuguaac

SEQ ID NO: 1319330 - RNA, 19 nt, Artificial Sequence
  Description of Artificial Sequence: Synthetic oligonucleotide
  Sense strand starting at position 1418 of SEQ ID NO: 1242043
ggaggcuguaugcauaaca

SEQ ID NO: 1319331 - RNA, 19 nt, Artificial Sequence
  Description of Artificial Sequence: Synthetic oligonucleotide
  Antisense strand to SEQ ID NO: 1319330
uguuaugcauacagccucc

SEQ ID NO: 1319332 - RNA, 19 nt, Artificial Sequence
  Description of Artificial Sequence: Synthetic oligonucleotide
  Sense strand starting at position 1836 of SEQ ID NO: 1242043
agcauugaguuucuaauaa

SEQ ID NO: 1319333 - RNA, 19 nt, Artificial Sequence
  Description of Artificial Sequence: Synthetic oligonucleotide
  Antisense strand to SEQ ID NO: 1319332
uuauuagaaacucaaugcu

SEQ ID NO: 1319334 - RNA, 19 nt, Artificial Sequence
  Description of Artificial Sequence: Synthetic oligonucleotide
  Sense strand starting at position 1894 of SEQ ID NO: 1242043
gccugcuaagcguccauaa

SEQ ID NO: 1319335 - RNA, 19 nt, Artificial Sequence
  Description of Artificial Sequence: Synthetic oligonucleotide
  Antisense strand to SEQ ID NO: 1319334
uuauggacgcuuagcaggc

SEQ ID NO: 1319336 - RNA, 19 nt, Artificial Sequence
  Description of Artificial Sequence: Synthetic oligonucleotide
  Sense strand starting at position 2190 of SEQ ID NO: 1242043
ccgugcucugaguuacuuu

SEQ ID NO: 1319337 - RNA, 19 nt, Artificial Sequence
  Description of Artificial Sequence: Synthetic oligonucleotide
  Antisense strand to SEQ ID NO: 1319336
aaaguaacucagagcacgg

SEQ ID NO: 1319338 - RNA, 19 nt, Artificial Sequence
  Description of Artificial Sequence: Synthetic oligonucleotide
  Sense strand starting at position 2327 of SEQ ID NO: 1242043
uuaagugaaugaguuucua

SEQ ID NO: 1319339 - RNA, 19 nt, Artificial Sequence
  Description of Artificial Sequence: Synthetic oligonucleotide
  Antisense strand to SEQ ID NO: 1319338
uagaaacucauucacuuaa

SEQ ID NO: 1319340 - RNA, 19 nt, Artificial Sequence
  Description of Artificial Sequence: Synthetic oligonucleotide
  Sense strand starting at position 2421 of SEQ ID NO: 1242043
cucagaggugcucaugaac

SEQ ID NO: 1319341 - RNA, 19 nt, Artificial Sequence
  Description of Artificial Sequence: Synthetic oligonucleotide
  Antisense strand to SEQ ID NO: 1319340
guucaugagcaccucugag

SEQ ID NO: 1319342 - RNA, 19 nt, Artificial Sequence
  Description of Artificial Sequence: Synthetic oligonucleotide
  Sense strand starting at position 2424 of SEQ ID NO: 1242043
agaggugcucaugaaccau

SEQ ID NO: 1319343 - RNA, 19 nt, Artificial Sequence
  Description of Artificial Sequence: Synthetic oligonucleotide
  Antisense strand to SEQ ID NO: 1319342
augguucaugagcaccucu

SEQ ID NO: 1319344 - RNA, 19 nt, Artificial Sequence
  Description of Artificial Sequence: Synthetic oligonucleotide
  Sense strand starting at position 2587 of SEQ ID NO: 1242043
ccuuauggacuaugauuga

SEQ ID NO: 1319345 - RNA, 19 nt, Artificial Sequence
  Description of Artificial Sequence: Synthetic oligonucleotide
  Antisense strand to SEQ ID NO: 1319344
ucaaucauaguccauaagg

SEQ ID NO: 1319346 - RNA, 19 nt, Artificial Sequence
  Description of Artificial Sequence: Synthetic oligonucleotide
  Sense strand starting at position 2685 of SEQ ID NO: 1242043
cuguuaagaaguugaaaga

SEQ ID NO: 1319347 - RNA, 19 nt, Artificial Sequence
  Description of Artificial Sequence: Synthetic oligonucleotide
  Antisense strand to SEQ ID NO: 1319346
ucuuucaacuucuuaacag

SEQ ID NO: 1319348 - RNA, 19 nt, Artificial Sequence
  Description of Artificial Sequence: Synthetic oligonucleotide
  Sense strand starting at position 2695 of SEQ ID NO: 1242043
guugaaagagucuaggugu

SEQ ID NO: 1319349 - RNA, 19 nt, Artificial Sequence
  Description of Artificial Sequence: Synthetic oligonucleotide
  Antisense strand to SEQ ID NO: 1319348
acaccuagacucuuucaac

SEQ ID NO: 1319350 - RNA, 19 nt, Artificial Sequence
  Description of Artificial Sequence: Synthetic oligonucleotide
  Sense strand starting at position 2698 of SEQ ID NO: 1242043
gaaagagucuagguguuga

SEQ ID NO: 1319351 - RNA, 19 nt, Artificial Sequence
  Description of Artificial Sequence: Synthetic oligonucleotide
  Antisense strand to SEQ ID NO: 1319350
ucaacaccuagacucuuuc

SEQ ID NO: 1319352 - RNA, 19 nt, Artificial Sequence
  Description of Artificial Sequence: Synthetic oligonucleotide
  Sense strand starting at position 2703 of SEQ ID NO: 1242043
agucuagguguugaggaaa

SEQ ID NO: 1319353 - RNA, 19 nt, Artificial Sequence
  Description of Artificial Sequence: Synthetic oligonucleotide
  Antisense strand to SEQ ID NO: 1319352
uuuccucaacaccuagacu

SEQ ID NO: 1319354 - RNA, 19 nt, Artificial Sequence
  Description of Artificial Sequence: Synthetic oligonucleotide
  Sense strand starting at position 2938 of SEQ ID NO: 1242043
ugacucauguaauuaugaa

SEQ ID NO: 1319355 - RNA, 19 nt, Artificial Sequence
  Description of Artificial Sequence: Synthetic oligonucleotide
  Antisense strand to SEQ ID NO: 1319354
uucauaauuacaugaguca

SEQ ID NO: 1319356 - RNA, 19 nt, Artificial Sequence
  Description of Artificial Sequence: Synthetic oligonucleotide
  Sense strand starting at position 3113 of SEQ ID NO: 1242043
ggcaguuaggcaggaagaa

SEQ ID NO: 1319357 - RNA, 19 nt, Artificial Sequence
  Description of Artificial Sequence: Synthetic oligonucleotide
  Antisense strand to SEQ ID NO: 1319356
uucuuccugccuaacugcc

SEQ ID NO: 1319358 - RNA, 19 nt, Artificial Sequence
  Description of Artificial Sequence: Synthetic oligonucleotide
  Sense strand starting at position 3114 of SEQ ID NO: 1242043
gcaguuaggcaggaagaau

SEQ ID NO: 1319359 - RNA, 19 nt, Artificial Sequence
  Description of Artificial Sequence: Synthetic oligonucleotide
  Antisense strand to SEQ ID NO: 1319358
auucuuccugccuaacugc

SEQ ID NO: 1319360 - RNA, 19 nt, Artificial Sequence
  Description of Artificial Sequence: Synthetic oligonucleotide
  Sense strand starting at position 3275 of SEQ ID NO: 1242043
ccagaauaaugucugacua

SEQ ID NO: 1319361 - RNA, 19 nt, Artificial Sequence
  Description of Artificial Sequence: Synthetic oligonucleotide
  Antisense strand to SEQ ID NO: 1319360
uagucagacauuauucugg

SEQ ID NO: 1319362 - RNA, 19 nt, Artificial Sequence
  Description of Artificial Sequence: Synthetic oligonucleotide
  Sense strand starting at position 3461 of SEQ ID NO: 1242043
gcaagcccucaugaauaaa

SEQ ID NO: 1319363 - RNA, 19 nt, Artificial Sequence
  Description of Artificial Sequence: Synthetic oligonucleotide
  Antisense strand to SEQ ID NO: 1319362
uuuauucaugagggcuugc

SEQ ID NO: 1319364 - RNA, 19 nt, Artificial Sequence
  Description of Artificial Sequence: Synthetic oligonucleotide
  Sense strand starting at position 3508 of SEQ ID NO: 1242043
agagcucuuccaugugaag

SEQ ID NO: 1319365 - RNA, 19 nt, Artificial Sequence
  Description of Artificial Sequence: Synthetic oligonucleotide
  Antisense strand to SEQ ID NO: 1319364
cuucacauggaagagcucu

SEQ ID NO: 1319366 - RNA, 19 nt, Artificial Sequence
  Description of Artificial Sequence: Synthetic oligonucleotide
  Sense strand starting at position 3529 of SEQ ID NO: 1242043
gcaguaagaauacagguau

SEQ ID NO: 1319367 - RNA, 19 nt, Artificial Sequence
  Description of Artificial Sequence: Synthetic oligonucleotide
  Antisense strand to SEQ ID NO: 1319366
auaccuguauucuuacugc

SEQ ID NO: 1319368 - RNA, 19 nt, Artificial Sequence
  Description of Artificial Sequence: Synthetic oligonucleotide
  Sense strand starting at position 3536 of SEQ ID NO: 1242043
gaauacagguaucuacgaa

SEQ ID NO: 1319369 - RNA, 19 nt, Artificial Sequence
  Description of Artificial Sequence: Synthetic oligonucleotide
  Antisense strand to SEQ ID NO: 1319368
uucguagauaccuguauuc

SEQ ID NO: 1319370 - RNA, 19 nt, Artificial Sequence
  Description of Artificial Sequence: Synthetic oligonucleotide
  Sense strand starting at position 729 of SEQ ID NO: 1242044
ccaaauaugccucaaguag

SEQ ID NO: 1319371 - RNA, 19 nt, Artificial Sequence
  Description of Artificial Sequence: Synthetic oligonucleotide
  Antisense strand to SEQ ID NO: 1319370
cuacuugaggcauauuugg

SEQ ID NO: 1319372 - RNA, 19 nt, Artificial Sequence
  Description of Artificial Sequence: Synthetic oligonucleotide
  Sense strand starting at position 766 of SEQ ID NO: 1242044
accguagauccauacaaug

SEQ ID NO: 1319373 - RNA, 19 nt, Artificial Sequence
  Description of Artificial Sequence: Synthetic oligonucleotide
  Antisense strand to SEQ ID NO: 1319372
cauuguauggaucuacggu

SEQ ID NO: 1319374 - RNA, 19 nt, Artificial Sequence
  Description of Artificial Sequence: Synthetic oligonucleotide
  Sense strand starting at position 891 of SEQ ID NO: 1242044
guuugcuuccaucaauaug

SEQ ID NO: 1319375 - RNA, 19 nt, Artificial Sequence
  Description of Artificial Sequence: Synthetic oligonucleotide
  Antisense strand to SEQ ID NO: 1319374
cauauugauggaagcaaac

SEQ ID NO: 1319376 - RNA, 19 nt, Artificial Sequence
  Description of Artificial Sequence: Synthetic oligonucleotide
  Sense strand starting at position 1021 of SEQ ID NO: 1242044
augaaacuuccguaugcug

SEQ ID NO: 1319377 - RNA, 19 nt, Artificial Sequence
  Description of Artificial Sequence: Synthetic oligonucleotide
  Antisense strand to SEQ ID NO: 1319376
cagcauacggaaguuucau

SEQ ID NO: 1319378 - RNA, 19 nt, Artificial Sequence
  Description of Artificial Sequence: Synthetic oligonucleotide
  Sense strand starting at position 1045 of SEQ ID NO: 1242044
ggugguugguaauuacaua

SEQ ID NO: 1319379 - RNA, 19 nt, Artificial Sequence
  Description of Artificial Sequence: Synthetic oligonucleotide
  Antisense strand to SEQ ID NO: 1319378
uauguaauuaccaaccacc

SEQ ID NO: 1319380 - RNA, 19 nt, Artificial Sequence
  Description of Artificial Sequence: Synthetic oligonucleotide
  Sense strand starting at position 1046 of SEQ ID NO: 1242044
gugguugguaauuacauaa

SEQ ID NO: 1319381 - RNA, 19 nt, Artificial Sequence
  Description of Artificial Sequence: Synthetic oligonucleotide
  Antisense strand to SEQ ID NO: 1319380
uuauguaauuaccaaccac

SEQ ID NO: 1319382 - RNA, 19 nt, Artificial Sequence
  Description of Artificial Sequence: Synthetic oligonucleotide
  Sense strand starting at position 1097 of SEQ ID NO: 1242044
agauuaaaugggugaggcu

SEQ ID NO: 1319383 - RNA, 19 nt, Artificial Sequence
  Description of Artificial Sequence: Synthetic oligonucleotide
  Antisense strand to SEQ ID NO: 1319382
agccucacccauuuaaucu

SEQ ID NO: 1319384 - RNA, 19 nt, Artificial Sequence
  Description of Artificial Sequence: Synthetic oligonucleotide
  Sense strand starting at position 1098 of SEQ ID NO: 1242044
gauuaaaugggugaggcuu

SEQ ID NO: 1319385 - RNA, 19 nt, Artificial Sequence
  Description of Artificial Sequence: Synthetic oligonucleotide
  Antisense strand to SEQ ID NO: 1319384
aagccucacccauuuaauc

SEQ ID NO: 1319386 - RNA, 19 nt, Artificial Sequence
  Description of Artificial Sequence: Synthetic oligonucleotide
  Sense strand starting at position 1104 of SEQ ID NO: 1242044
augggugaggcuuaccaua

SEQ ID NO: 1319387 - RNA, 19 nt, Artificial Sequence
  Description of Artificial Sequence: Synthetic oligonucleotide
  Antisense strand to SEQ ID NO: 1319386
uaugguaagccucacccau

SEQ ID NO: 1319388 - RNA, 19 nt, Artificial Sequence
  Description of Artificial Sequence: Synthetic oligonucleotide
  Sense strand starting at position 1106 of SEQ ID NO: 1242044
gggugaggcuuaccauaag

SEQ ID NO: 1319389 - RNA, 19 nt, Artificial Sequence
  Description of Artificial Sequence: Synthetic oligonucleotide
  Antisense strand to SEQ ID NO: 1319388
cuuaugguaagccucaccc

SEQ ID NO: 1319390 - RNA, 19 nt, Artificial Sequence
  Description of Artificial Sequence: Synthetic oligonucleotide
  Sense strand starting at position 1109 of SEQ ID NO: 1242044
ugaggcuuaccauaaguaa

SEQ ID NO: 1319391 - RNA, 19 nt, Artificial Sequence
  Description of Artificial Sequence: Synthetic oligonucleotide
  Antisense strand to SEQ ID NO: 1319390
uuacuuaugguaagccuca

SEQ ID NO: 1319392 - RNA, 19 nt, Artificial Sequence
  Description of Artificial Sequence: Synthetic oligonucleotide
  Sense strand starting at position 1171 of SEQ ID NO: 1242044
uuuaguuaugcucauacau

SEQ ID NO: 1319393 - RNA, 19 nt, Artificial Sequence
  Description of Artificial Sequence: Synthetic oligonucleotide
  Antisense strand to SEQ ID NO: 1319392
auguaugagcauaacuaaa

SEQ ID NO: 1319394 - RNA, 19 nt, Artificial Sequence
  Description of Artificial Sequence: Synthetic oligonucleotide
  Sense strand starting at position 1201 of SEQ ID NO: 1242044
auuagaauugcugagucaa

SEQ ID NO: 1319395 - RNA, 19 nt, Artificial Sequence
  Description of Artificial Sequence: Synthetic oligonucleotide
  Antisense strand to SEQ ID NO: 1319394
uugacucagcaauucuaau

SEQ ID NO: 1319396 - RNA, 19 nt, Artificial Sequence
  Description of Artificial Sequence: Synthetic oligonucleotide
  Sense strand starting at position 1347 of SEQ ID NO: 1242044
ccagucucauagguguaaa

SEQ ID NO: 1319397 - RNA, 19 nt, Artificial Sequence
  Description of Artificial Sequence: Synthetic oligonucleotide
  Antisense strand to SEQ ID NO: 1319396
uuuacaccuaugagacugg

SEQ ID NO: 1319398 - RNA, 19 nt, Artificial Sequence
  Description of Artificial Sequence: Synthetic oligonucleotide
  Sense strand starting at position 1364 of SEQ ID NO: 1242044
aaagguaucugugaauuug

SEQ ID NO: 1319399 - RNA, 19 nt, Artificial Sequence
  Description of Artificial Sequence: Synthetic oligonucleotide
  Antisense strand to SEQ ID NO: 1319398
caaauucacagauaccuuu

SEQ ID NO: 1319400 - RNA, 19 nt, Artificial Sequence
  Description of Artificial Sequence: Synthetic oligonucleotide
  Sense strand starting at position 1407 of SEQ ID NO: 1242044
uugagucucuaaucaauug

SEQ ID NO: 1319401 - RNA, 19 nt, Artificial Sequence
  Description of Artificial Sequence: Synthetic oligonucleotide
  Antisense strand to SEQ ID NO: 1319400
caauugauuagagacucaa

SEQ ID NO: 1319402 - RNA, 19 nt, Artificial Sequence
  Description of Artificial Sequence: Synthetic oligonucleotide
  Sense strand starting at position 1478 of SEQ ID NO: 1242044
ugccguuuacggucuaguu

SEQ ID NO: 1319403 - RNA, 19 nt, Artificial Sequence
  Description of Artificial Sequence: Synthetic oligonucleotide
  Antisense strand to SEQ ID NO: 1319402
aacuagaccguaaacggca

SEQ ID NO: 1319404 - RNA, 19 nt, Artificial Sequence
  Description of Artificial Sequence: Synthetic oligonucleotide
  Sense strand starting at position 1479 of SEQ ID NO: 1242044
gccguuuacggucuaguuu

SEQ ID NO: 1319405 - RNA, 19 nt, Artificial Sequence
  Description of Artificial Sequence: Synthetic oligonucleotide
  Antisense strand to SEQ ID NO: 1319404
aaacuagaccguaaacggc

SEQ ID NO: 1319406 - RNA, 19 nt, Artificial Sequence
  Description of Artificial Sequence: Synthetic oligonucleotide
  Sense strand starting at position 1508 of SEQ ID NO: 1242044
ugaucaguucuagaucuug

SEQ ID NO: 1319407 - RNA, 19 nt, Artificial Sequence
  Description of Artificial Sequence: Synthetic oligonucleotide
  Antisense strand to SEQ ID NO: 1319406
caagaucuagaacugauca

SEQ ID NO: 1319408 - RNA, 19 nt, Artificial Sequence
  Description of Artificial Sequence: Synthetic oligonucleotide
  Sense strand starting at position 1514 of SEQ ID NO: 1242044
guucuagaucuugguggga

SEQ ID NO: 1319409 - RNA, 19 nt, Artificial Sequence
  Description of Artificial Sequence: Synthetic oligonucleotide
  Antisense strand to SEQ ID NO: 1319408
ucccaccaagaucuagaac

SEQ ID NO: 1319410 - RNA, 19 nt, Artificial Sequence
  Description of Artificial Sequence: Synthetic oligonucleotide
  Sense strand starting at position 1517 of SEQ ID NO: 1242044
cuagaucuuggugggaaga

SEQ ID NO: 1319411 - RNA, 19 nt, Artificial Sequence
  Description of Artificial Sequence: Synthetic oligonucleotide
  Antisense strand to SEQ ID NO: 1319410
ucuucccaccaagaucuag

SEQ ID NO: 1319412 - RNA, 19 nt, Artificial Sequence
  Description of Artificial Sequence: Synthetic oligonucleotide
  Sense strand starting at position 1518 of SEQ ID NO: 1242044
uagaucuuggugggaagau

SEQ ID NO: 1319413 - RNA, 19 nt, Artificial Sequence
  Description of Artificial Sequence: Synthetic oligonucleotide
  Antisense strand to SEQ ID NO: 1319412
aucuucccaccaagaucua

SEQ ID NO: 1319414 - RNA, 19 nt, Artificial Sequence
  Description of Artificial Sequence: Synthetic oligonucleotide
  Sense strand starting at position 1922 of SEQ ID NO: 1242044
cucucugguaguggaagaa

SEQ ID NO: 1319415 - RNA, 19 nt, Artificial Sequence
  Description of Artificial Sequence: Synthetic oligonucleotide
  Antisense strand to SEQ ID NO: 1319414
uucuuccacuaccagagag

SEQ ID NO: 1319416 - RNA, 19 nt, Artificial Sequence
  Description of Artificial Sequence: Synthetic oligonucleotide
  Sense strand starting at position 2451 of SEQ ID NO: 1242044
uaauucucagugcacgaaa

SEQ ID NO: 1319417 - RNA, 19 nt, Artificial Sequence
  Description of Artificial Sequence: Synthetic oligonucleotide
  Antisense strand to SEQ ID NO: 1319416
uuucgugcacugagaauua

SEQ ID NO: 1319418 - RNA, 19 nt, Artificial Sequence
  Description of Artificial Sequence: Synthetic oligonucleotide
  Sense strand starting at position 2648 of SEQ ID NO: 1242044
ggcugaguugccgaaagaa

SEQ ID NO: 1319419 - RNA, 19 nt, Artificial Sequence
  Description of Artificial Sequence: Synthetic oligonucleotide
  Antisense strand to SEQ ID NO: 1319418
uucuuucggcaacucagcc

SEQ ID NO: 1319420 - RNA, 19 nt, Artificial Sequence
  Description of Artificial Sequence: Synthetic oligonucleotide
  Sense strand starting at position 2809 of SEQ ID NO: 1242044
cacuuagauguguaagcau

SEQ ID NO: 1319421 - RNA, 19 nt, Artificial Sequence
  Description of Artificial Sequence: Synthetic oligonucleotide
  Antisense strand to SEQ ID NO: 1319420
augcuuacacaucuaagug

SEQ ID NO: 1319422 - RNA, 19 nt, Artificial Sequence
  Description of Artificial Sequence: Synthetic oligonucleotide
  Sense strand starting at position 2934 of SEQ ID NO: 1242044
uggagucauccucaauucu

SEQ ID NO: 1319423 - RNA, 19 nt, Artificial Sequence
  Description of Artificial Sequence: Synthetic oligonucleotide
  Antisense strand to SEQ ID NO: 1319422
agaauugaggaugacucca

SEQ ID NO: 1319424 - RNA, 19 nt, Artificial Sequence
  Description of Artificial Sequence: Synthetic oligonucleotide
  Sense strand starting at position 3170 of SEQ ID NO: 1242044
uguuucugugcagggauuu

SEQ ID NO: 1319425 - RNA, 19 nt, Artificial Sequence
  Description of Artificial Sequence: Synthetic oligonucleotide
  Antisense strand to SEQ ID NO: 1319424
aaaucccugcacagaaaca

SEQ ID NO: 1319426 - RNA, 19 nt, Artificial Sequence
  Description of Artificial Sequence: Synthetic oligonucleotide
  Sense strand starting at position 3307 of SEQ ID NO: 1242044
agccgaccuagagauguua

SEQ ID NO: 1319427 - RNA, 19 nt, Artificial Sequence
  Description of Artificial Sequence: Synthetic oligonucleotide
  Antisense strand to SEQ ID NO: 1319426
uaacaucucuaggucggcu

SEQ ID NO: 1319428 - RNA, 19 nt, Artificial Sequence
  Description of Artificial Sequence: Synthetic oligonucleotide
  Sense strand starting at position 3309 of SEQ ID NO: 1242044
ccgaccuagagauguuacu

SEQ ID NO: 1319429 - RNA, 19 nt, Artificial Sequence
  Description of Artificial Sequence: Synthetic oligonucleotide
  Antisense strand to SEQ ID NO: 1319428
aguaacaucucuaggucgg

SEQ ID NO: 1319430 - RNA, 19 nt, Artificial Sequence
  Description of Artificial Sequence: Synthetic oligonucleotide
  Sense strand starting at position 3379 of SEQ ID NO: 1242044
cgagguugaggugaacauu

SEQ ID NO: 1319431 - RNA, 19 nt, Artificial Sequence
  Description of Artificial Sequence: Synthetic oligonucleotide
  Antisense strand to SEQ ID NO: 1319430
aauguucaccucaaccucg

SEQ ID NO: 1319432 - RNA, 19 nt, Artificial Sequence
  Description of Artificial Sequence: Synthetic oligonucleotide
  Sense strand starting at position 3541 of SEQ ID NO: 1242044
auagguugauacucauugu

SEQ ID NO: 1319433 - RNA, 19 nt, Artificial Sequence
  Description of Artificial Sequence: Synthetic oligonucleotide
  Antisense strand to SEQ ID NO: 1319432
acaaugaguaucaaccuau

SEQ ID NO: 1319434 - RNA, 19 nt, Artificial Sequence
  Description of Artificial Sequence: Synthetic oligonucleotide
  Sense strand starting at position 3544 of SEQ ID NO: 1242044
gguugauacucauuguaua

SEQ ID NO: 1319435 - RNA, 19 nt, Artificial Sequence
  Description of Artificial Sequence: Synthetic oligonucleotide
  Antisense strand to SEQ ID NO: 1319434
uauacaaugaguaucaacc

SEQ ID NO: 1319436 - RNA, 19 nt, Artificial Sequence
  Description of Artificial Sequence: Synthetic oligonucleotide
  Sense strand starting at position 3545 of SEQ ID NO: 1242044
guugauacucauuguauac

SEQ ID NO: 1319437 - RNA, 19 nt, Artificial Sequence
  Description of Artificial Sequence: Synthetic oligonucleotide
  Antisense strand to SEQ ID NO: 1319436
guauacaaugaguaucaac

SEQ ID NO: 1319438 - RNA, 19 nt, Artificial Sequence
  Description of Artificial Sequence: Synthetic oligonucleotide
  Sense strand starting at position 3567 of SEQ ID NO: 1242044
auacaaauucuaugagcag

SEQ ID NO: 1319439 - RNA, 19 nt, Artificial Sequence
  Description of Artificial Sequence: Synthetic oligonucleotide
  Antisense strand to SEQ ID NO: 1319438
cugcucauagaauuuguau

SEQ ID NO: 1319440 - RNA, 19 nt, Artificial Sequence
  Description of Artificial Sequence: Synthetic oligonucleotide
  Sense strand starting at position 3571 of SEQ ID NO: 1242044
aaauucuaugagcaguguu

SEQ ID NO: 1319441 - RNA, 19 nt, Artificial Sequence
  Description of Artificial Sequence: Synthetic oligonucleotide
  Antisense strand to SEQ ID NO: 1319440
aacacugcucauagaauuu

SEQ ID NO: 1319442 - RNA, 19 nt, Artificial Sequence
  Description of Artificial Sequence: Synthetic oligonucleotide
  Sense strand starting at position 3646 of SEQ ID NO: 1242044
ccaugauucuggguaguac

SEQ ID NO: 1319443 - RNA, 19 nt, Artificial Sequence
  Description of Artificial Sequence: Synthetic oligonucleotide
  Antisense strand to SEQ ID NO: 1319442
guacuacccagaaucaugg

SEQ ID NO: 1319444 - RNA, 19 nt, Artificial Sequence
  Description of Artificial Sequence: Synthetic oligonucleotide
  Sense strand starting at position 3647 of SEQ ID NO: 1242044
caugauucuggguaguaca

SEQ ID NO: 1319445 - RNA, 19 nt, Artificial Sequence
  Description of Artificial Sequence: Synthetic oligonucleotide
  Antisense strand to SEQ ID NO: 1319444
uguacuacccagaaucaug

SEQ ID NO: 1319446 - RNA, 19 nt, Artificial Sequence
  Description of Artificial Sequence: Synthetic oligonucleotide
  Sense strand starting at position 3871 of SEQ ID NO: 1242044
uugagaacagcugguaauu

SEQ ID NO: 1319447 - RNA, 19 nt, Artificial Sequence
  Description of Artificial Sequence: Synthetic oligonucleotide
  Antisense strand to SEQ ID NO: 1319446
aauuaccagcuguucucaa

SEQ ID NO: 1319448 - RNA, 19 nt, Artificial Sequence
  Description of Artificial Sequence: Synthetic oligonucleotide
  Sense strand starting at position 3915 of SEQ ID NO: 1242044
agaucaguaucugucagga

SEQ ID NO: 1319449 - RNA, 19 nt, Artificial Sequence
  Description of Artificial Sequence: Synthetic oligonucleotide
  Antisense strand to SEQ ID NO: 1319448
uccugacagauacugaucu

SEQ ID NO: 1319450 - RNA, 19 nt, Artificial Sequence
  Description of Artificial Sequence: Synthetic oligonucleotide
  Sense strand starting at position 13 of SEQ ID NO: 1242045
ggguccagaugucaugcaa

SEQ ID NO: 1319451 - RNA, 19 nt, Artificial Sequence
  Description of Artificial Sequence: Synthetic oligonucleotide
  Antisense strand to SEQ ID NO: 1319450
uugcaugacaucuggaccc

SEQ ID NO: 1319452 - RNA, 19 nt, Artificial Sequence
  Description of Artificial Sequence: Synthetic oligonucleotide
  Sense strand starting at position 111 of SEQ ID NO: 1242045
gggucuagcccagauucca

SEQ ID NO: 1319453 - RNA, 19 nt, Artificial Sequence
  Description of Artificial Sequence: Synthetic oligonucleotide
  Antisense strand to SEQ ID NO: 1319452
uggaaucugggcuagaccc

SEQ ID NO: 1319454 - RNA, 19 nt, Artificial Sequence
  Description of Artificial Sequence: Synthetic oligonucleotide
  Sense strand starting at position 652 of SEQ ID NO: 1242045
gacugcuguuucccagaca

SEQ ID NO: 1319455 - RNA, 19 nt, Artificial Sequence
  Description of Artificial Sequence: Synthetic oligonucleotide
  Antisense strand to SEQ ID NO: 1319454
ugucugggaaacagcaguc

SEQ ID NO: 1319456 - RNA, 19 nt, Artificial Sequence
  Description of Artificial Sequence: Synthetic oligonucleotide
  Sense strand starting at position 820 of SEQ ID NO: 1242045
cccacuauuugcuggauga

SEQ ID NO: 1319457 - RNA, 19 nt, Artificial Sequence
  Description of Artificial Sequence: Synthetic oligonucleotide
  Antisense strand to SEQ ID NO: 1319456
ucauccagcaaauaguggg

SEQ ID NO: 1319458 - RNA, 19 nt, Artificial Sequence
  Description of Artificial Sequence: Synthetic oligonucleotide
  Sense strand starting at position 830 of SEQ ID NO: 1242045
gcuggaugaucuuaacaag

SEQ ID NO: 1319459 - RNA, 19 nt, Artificial Sequence
  Description of Artificial Sequence: Synthetic oligonucleotide
  Antisense strand to SEQ ID NO: 1319458
cuuguuaagaucauccagc

SEQ ID NO: 1319460 - RNA, 19 nt, Artificial Sequence
  Description of Artificial Sequence: Synthetic oligonucleotide
  Sense strand starting at position 833 of SEQ ID NO: 1242045
ggaugaucuuaacaaguca

SEQ ID NO: 1319461 - RNA, 19 nt, Artificial Sequence
  Description of Artificial Sequence: Synthetic oligonucleotide
  Antisense strand to SEQ ID NO: 1319460
ugacuuguuaagaucaucc

SEQ ID NO: 1319462 - RNA, 19 nt, Artificial Sequence
  Description of Artificial Sequence: Synthetic oligonucleotide
  Sense strand starting at position 946 of SEQ ID NO: 1242045
aucaaaugcuccguagaag

SEQ ID NO: 1319463 - RNA, 19 nt, Artificial Sequence
  Description of Artificial Sequence: Synthetic oligonucleotide
  Antisense strand to SEQ ID NO: 1319462
cuucuacggagcauuugau

SEQ ID NO: 1319464 - RNA, 19 nt, Artificial Sequence
  Description of Artificial Sequence: Synthetic oligonucleotide
  Sense strand starting at position 955 of SEQ ID NO: 1242045
uccguagaagcccaauaua

SEQ ID NO: 1319465 - RNA, 19 nt, Artificial Sequence
  Description of Artificial Sequence: Synthetic oligonucleotide
  Antisense strand to SEQ ID NO: 1319464
uauauugggcuucuacgga

SEQ ID NO: 1319466 - RNA, 19 nt, Artificial Sequence
  Description of Artificial Sequence: Synthetic oligonucleotide
  Sense strand starting at position 1008 of SEQ ID NO: 1242045
agaggucaggcuuggcuaa

SEQ ID NO: 1319467 - RNA, 19 nt, Artificial Sequence
  Description of Artificial Sequence: Synthetic oligonucleotide
  Antisense strand to SEQ ID NO: 1319466
uuagccaagccugaccucu

SEQ ID NO: 1319468 - RNA, 19 nt, Artificial Sequence
  Description of Artificial Sequence: Synthetic oligonucleotide
  Sense strand starting at position 1009 of SEQ ID NO: 1242045
gaggucaggcuuggcuaau

SEQ ID NO: 1319469 - RNA, 19 nt, Artificial Sequence
  Description of Artificial Sequence: Synthetic oligonucleotide
  Antisense strand to SEQ ID NO: 1319468
auuagccaagccugaccuc

SEQ ID NO: 1319470 - RNA, 19 nt, Artificial Sequence
  Description of Artificial Sequence: Synthetic oligonucleotide
  Sense strand starting at position 1185 of SEQ ID NO: 1242045
gcggguucugaccagacaa

SEQ ID NO: 1319471 - RNA, 19 nt, Artificial Sequence
  Description of Artificial Sequence: Synthetic oligonucleotide
  Antisense strand to SEQ ID NO: 1319470
uugucuggucagaacccgc

SEQ ID NO: 1319472 - RNA, 19 nt, Artificial Sequence
  Description of Artificial Sequence: Synthetic oligonucleotide
  Sense strand starting at position 1187 of SEQ ID NO: 1242045
ggguucugaccagacaagu

SEQ ID NO: 1319473 - RNA, 19 nt, Artificial Sequence
  Description of Artificial Sequence: Synthetic oligonucleotide
  Antisense strand to SEQ ID NO: 1319472
acuugucuggucagaaccc

SEQ ID NO: 1319474 - RNA, 19 nt, Artificial Sequence
  Description of Artificial Sequence: Synthetic oligonucleotide
  Sense strand starting at position 2478 of SEQ ID NO: 1242045
ggccuacuguuagaggagu

SEQ ID NO: 1319475 - RNA, 19 nt, Artificial Sequence
  Description of Artificial Sequence: Synthetic oligonucleotide
  Antisense strand to SEQ ID NO: 1319474
acuccucuaacaguaggcc

SEQ ID NO: 1319476 - RNA, 19 nt, Artificial Sequence
  Description of Artificial Sequence: Synthetic oligonucleotide
  Sense strand starting at position 2480 of SEQ ID NO: 1242045
ccuacuguuagaggaguca

SEQ ID NO: 1319477 - RNA, 19 nt, Artificial Sequence
  Description of Artificial Sequence: Synthetic oligonucleotide
  Antisense strand to SEQ ID NO: 1319476
ugacuccucuaacaguagg

SEQ ID NO: 1319478 - RNA, 19 nt, Artificial Sequence
  Description of Artificial Sequence: Synthetic oligonucleotide
  Sense strand starting at position 2497 of SEQ ID NO: 1242045
cacgacuucgucugcauuu

SEQ ID NO: 1319479 - RNA, 19 nt, Artificial Sequence
  Description of Artificial Sequence: Synthetic oligonucleotide
  Antisense strand to SEQ ID NO: 1319478
aaaugcagacgaagucgug

SEQ ID NO: 1319480 - RNA, 19 nt, Artificial Sequence
  Description of Artificial Sequence: Synthetic oligonucleotide
  Sense strand starting at position 2504 of SEQ ID NO: 1242045
ucgucugcauuuguauaga

SEQ ID NO: 1319481 - RNA, 19 nt, Artificial Sequence
  Description of Artificial Sequence: Synthetic oligonucleotide
  Antisense strand to SEQ ID NO: 1319480
ucuauacaaaugcagacga

SEQ ID NO: 1319482 - RNA, 19 nt, Artificial Sequence
  Description of Artificial Sequence: Synthetic oligonucleotide
  Sense strand starting at position 2513 of SEQ ID NO: 1242045
uuuguauagacagguggau

SEQ ID NO: 1319483 - RNA, 19 nt, Artificial Sequence
  Description of Artificial Sequence: Synthetic oligonucleotide
  Antisense strand to SEQ ID NO: 1319482
auccaccugucuauacaaa

SEQ ID NO: 1319484 - RNA, 19 nt, Artificial Sequence
  Description of Artificial Sequence: Synthetic oligonucleotide
  Sense strand starting at position 2515 of SEQ ID NO: 1242045
uguauagacagguggauau

SEQ ID NO: 1319485 - RNA, 19 nt, Artificial Sequence
  Description of Artificial Sequence: Synthetic oligonucleotide
  Antisense strand to SEQ ID NO: 1319484
auauccaccugucuauaca

SEQ ID NO: 1319486 - RNA, 19 nt, Artificial Sequence
  Description of Artificial Sequence: Synthetic oligonucleotide
  Sense strand starting at position 2526 of SEQ ID NO: 1242045
guggauauaugagcagaag

SEQ ID NO: 1319487 - RNA, 19 nt, Artificial Sequence
  Description of Artificial Sequence: Synthetic oligonucleotide
  Antisense strand to SEQ ID NO: 1319486
cuucugcucauauauccac

SEQ ID NO: 1319488 - RNA, 19 nt, Artificial Sequence
  Description of Artificial Sequence: Synthetic oligonucleotide
  Sense strand starting at position 2635 of SEQ ID NO: 1242045
ccuucuuauguacaugauu

SEQ ID NO: 1319489 - RNA, 19 nt, Artificial Sequence
  Description of Artificial Sequence: Synthetic oligonucleotide
  Antisense strand to SEQ ID NO: 1319488
aaucauguacauaagaagg

SEQ ID NO: 1319490 - RNA, 19 nt, Artificial Sequence
  Description of Artificial Sequence: Synthetic oligonucleotide
  Sense strand starting at position 2716 of SEQ ID NO: 1242045
gcgcacaacguuuaaauaa

SEQ ID NO: 1319491 - RNA, 19 nt, Artificial Sequence
  Description of Artificial Sequence: Synthetic oligonucleotide
  Antisense strand to SEQ ID NO: 1319490
uuauuuaaacguugugcgc

SEQ ID NO: 1319492 - RNA, 19 nt, Artificial Sequence
  Description of Artificial Sequence: Synthetic oligonucleotide
  Sense strand starting at position 2887 of SEQ ID NO: 1242045
cgcugcuugagcugagaaa

SEQ ID NO: 1319493 - RNA, 19 nt, Artificial Sequence
  Description of Artificial Sequence: Synthetic oligonucleotide
  Antisense strand to SEQ ID NO: 1319492
uuucucagcucaagcagcg

SEQ ID NO: 1319494 - RNA, 19 nt, Artificial Sequence
  Description of Artificial Sequence: Synthetic oligonucleotide
  Sense strand starting at position 2888 of SEQ ID NO: 1242045
gcugcuugagcugagaaag

SEQ ID NO: 1319495 - RNA, 19 nt, Artificial Sequence
  Description of Artificial Sequence: Synthetic oligonucleotide
  Antisense strand to SEQ ID NO: 1319494
cuuucucagcucaagcagc

SEQ ID NO: 1319496 - RNA, 19 nt, Artificial Sequence
  Description of Artificial Sequence: Synthetic oligonucleotide
  Sense strand starting at position 2943 of SEQ ID NO: 1242045
ggguuauuccaaggucgca

SEQ ID NO: 1319497 - RNA, 19 nt, Artificial Sequence
  Description of Artificial Sequence: Synthetic oligonucleotide
  Antisense strand to SEQ ID NO: 1319496
ugcgaccuuggaauaaccc

SEQ ID NO: 1319498 - RNA, 19 nt, Artificial Sequence
  Description of Artificial Sequence: Synthetic oligonucleotide
  Sense strand starting at position 2983 of SEQ ID NO: 1242045
ucucgcucccugugagaua

SEQ ID NO: 1319499 - RNA, 19 nt, Artificial Sequence
  Description of Artificial Sequence: Synthetic oligonucleotide
  Antisense strand to SEQ ID NO: 1319498
uaucucacagggagcgaga

SEQ ID NO: 1319500 - RNA, 19 nt, Artificial Sequence
  Description of Artificial Sequence: Synthetic oligonucleotide
  Sense strand starting at position 2994 of SEQ ID NO: 1242045
gugagauaaccuggcugca

SEQ ID NO: 1319501 - RNA, 19 nt, Artificial Sequence
  Description of Artificial Sequence: Synthetic oligonucleotide
  Antisense strand to SEQ ID NO: 1319500
ugcagccagguuaucucac

SEQ ID NO: 1319502 - RNA, 19 nt, Artificial Sequence
  Description of Artificial Sequence: Synthetic oligonucleotide
  Sense strand starting at position 2996 of SEQ ID NO: 1242045
gagauaaccuggcugcaca

SEQ ID NO: 1319503 - RNA, 19 nt, Artificial Sequence
  Description of Artificial Sequence: Synthetic oligonucleotide
  Antisense strand to SEQ ID NO: 1319502
ugugcagccagguuaucuc

SEQ ID NO: 1319504 - RNA, 19 nt, Artificial Sequence
  Description of Artificial Sequence: Synthetic oligonucleotide
  Sense strand starting at position 3177 of SEQ ID NO: 1242045
uuaaguaccuuugauguau

SEQ ID NO: 1319505 - RNA, 19 nt, Artificial Sequence
  Description of Artificial Sequence: Synthetic oligonucleotide
  Antisense strand to SEQ ID NO: 1319504
auacaucaaagguacuuaa

SEQ ID NO: 1319506 - RNA, 19 nt, Artificial Sequence
  Description of Artificial Sequence: Synthetic oligonucleotide
  Sense strand starting at position 3190 of SEQ ID NO: 1242045
auguaucacugucugcauu

SEQ ID NO: 1319507 - RNA, 19 nt, Artificial Sequence
  Description of Artificial Sequence: Synthetic oligonucleotide
  Antisense strand to SEQ ID NO: 1319506
aaugcagacagugauacau

SEQ ID NO: 1319508 - RNA, 19 nt, Artificial Sequence
  Description of Artificial Sequence: Synthetic oligonucleotide
  Sense strand starting at position 3236 of SEQ ID NO: 1242045
gagguuaaaucaugauaau

SEQ ID NO: 1319509 - RNA, 19 nt, Artificial Sequence
  Description of Artificial Sequence: Synthetic oligonucleotide
  Antisense strand to SEQ ID NO: 1319508
auuaucaugauuuaaccuc

SEQ ID NO: 1319510 - RNA, 19 nt, Artificial Sequence
  Description of Artificial Sequence: Synthetic oligonucleotide
  Sense strand starting at position 3336 of SEQ ID NO: 1242045
aaguuaauuucucagggac

SEQ ID NO: 1319511 - RNA, 19 nt, Artificial Sequence
  Description of Artificial Sequence: Synthetic oligonucleotide
  Antisense strand to SEQ ID NO: 1319510
gucccugagaaauuaacuu

SEQ ID NO: 1319512 - RNA, 19 nt, Artificial Sequence
  Description of Artificial Sequence: Synthetic oligonucleotide
  Sense strand starting at position 3338 of SEQ ID NO: 1242045
guuaauuucucagggacuu

SEQ ID NO: 1319513 - RNA, 19 nt, Artificial Sequence
  Description of Artificial Sequence: Synthetic oligonucleotide
  Antisense strand to SEQ ID NO: 1319512
aagucccugagaaauuaac

SEQ ID NO: 1319514 - RNA, 19 nt, Artificial Sequence
  Description of Artificial Sequence: Synthetic oligonucleotide
  Sense strand starting at position 3384 of SEQ ID NO: 1242045
gauaauauuuagugaaugg

SEQ ID NO: 1319515 - RNA, 19 nt, Artificial Sequence
  Description of Artificial Sequence: Synthetic oligonucleotide
  Antisense strand to SEQ ID NO: 1319514
ccauucacuaaauauuauc

SEQ ID NO: 1319516 - RNA, 19 nt, Artificial Sequence
  Description of Artificial Sequence: Synthetic oligonucleotide
  Sense strand starting at position 3409 of SEQ ID NO: 1242045
guacgauucgggcaccuuu

SEQ ID NO: 1319517 - RNA, 19 nt, Artificial Sequence
  Description of Artificial Sequence: Synthetic oligonucleotide
  Antisense strand to SEQ ID NO: 1319516
aaaggugcccgaaucguac

SEQ ID NO: 1319518 - RNA, 19 nt, Artificial Sequence
  Description of Artificial Sequence: Synthetic oligonucleotide
  Sense strand starting at position 3461 of SEQ ID NO: 1242045
aaugcuggguccucaaagu

SEQ ID NO: 1319519 - RNA, 19 nt, Artificial Sequence
  Description of Artificial Sequence: Synthetic oligonucleotide
  Antisense strand to SEQ ID NO: 1319518
acuuugaggacccagcauu

SEQ ID NO: 1319520 - RNA, 19 nt, Artificial Sequence
  Description of Artificial Sequence: Synthetic oligonucleotide
  Sense strand starting at position 3474 of SEQ ID NO: 1242045
caaaguugagcgggaagau

SEQ ID NO: 1319521 - RNA, 19 nt, Artificial Sequence
  Description of Artificial Sequence: Synthetic oligonucleotide
  Antisense strand to SEQ ID NO: 1319520
aucuucccgcucaacuuug

SEQ ID NO: 1319522 - RNA, 19 nt, Artificial Sequence
  Description of Artificial Sequence: Synthetic oligonucleotide
  Sense strand starting at position 3638 of SEQ ID NO: 1242045
uuccuuaggcugugagcaa

SEQ ID NO: 1319523 - RNA, 19 nt, Artificial Sequence
  Description of Artificial Sequence: Synthetic oligonucleotide
  Antisense strand to SEQ ID NO: 1319522
uugcucacagccuaaggaa

SEQ ID NO: 1319524 - RNA, 19 nt, Artificial Sequence
  Description of Artificial Sequence: Synthetic oligonucleotide
  Sense strand starting at position 3645 of SEQ ID NO: 1242045
ggcugugagcaagagaacu

SEQ ID NO: 1319525 - RNA, 19 nt, Artificial Sequence
  Description of Artificial Sequence: Synthetic oligonucleotide
  Antisense strand to SEQ ID NO: 1319524
aguucucuugcucacagcc

SEQ ID NO: 1319526 - RNA, 19 nt, Artificial Sequence
  Description of Artificial Sequence: Synthetic oligonucleotide
  Sense strand starting at position 3708 of SEQ ID NO: 1242045
uguccucaggccuagaaga

SEQ ID NO: 1319527 - RNA, 19 nt, Artificial Sequence
  Description of Artificial Sequence: Synthetic oligonucleotide
  Antisense strand to SEQ ID NO: 1319526
ucuucuaggccugaggaca

SEQ ID NO: 1319528 - RNA, 19 nt, Artificial Sequence
  Description of Artificial Sequence: Synthetic oligonucleotide
  Sense strand starting at position 3935 of SEQ ID NO: 1242045
ucuuuaaaguggguucuca

SEQ ID NO: 1319529 - RNA, 19 nt, Artificial Sequence
  Description of Artificial Sequence: Synthetic oligonucleotide
  Antisense strand to SEQ ID NO: 1319528
ugagaacccacuuuaaaga

SEQ ID NO: 1319530 - RNA, 19 nt, Artificial Sequence
  Description of Artificial Sequence: Synthetic oligonucleotide
  Sense strand starting at position 67 of SEQ ID NO: 1242046
aacggugguucucucaaga

SEQ ID NO: 1319531 - RNA, 19 nt, Artificial Sequence
  Description of Artificial Sequence: Synthetic oligonucleotide
  Antisense strand to SEQ ID NO: 1319530
ucuugagagaaccaccguu

SEQ ID NO: 1319532 - RNA, 19 nt, Artificial Sequence
  Description of Artificial Sequence: Synthetic oligonucleotide
  Sense strand starting at position 77 of SEQ ID NO: 1242046
cucucaagauggugagaau

SEQ ID NO: 1319533 - RNA, 19 nt, Artificial Sequence
  Description of Artificial Sequence: Synthetic oligonucleotide
  Antisense strand to SEQ ID NO: 1319532
auucucaccaucuugagag

SEQ ID NO: 1319534 - RNA, 19 nt, Artificial Sequence
  Description of Artificial Sequence: Synthetic oligonucleotide
  Sense strand starting at position 80 of SEQ ID NO: 1242046
ucaagauggugagaauuac

SEQ ID NO: 1319535 - RNA, 19 nt, Artificial Sequence
  Description of Artificial Sequence: Synthetic oligonucleotide
  Antisense strand to SEQ ID NO: 1319534
guaauucucaccaucuuga

SEQ ID NO: 1319536 - RNA, 19 nt, Artificial Sequence
  Description of Artificial Sequence: Synthetic oligonucleotide
  Sense strand starting at position 86 of SEQ ID NO: 1242046
uggugagaauuacaaguaa

SEQ ID NO: 1319537 - RNA, 19 nt, Artificial Sequence
  Description of Artificial Sequence: Synthetic oligonucleotide
  Antisense strand to SEQ ID NO: 1319536
uuacuuguaauucucacca

SEQ ID NO: 1319538 - RNA, 19 nt, Artificial Sequence
  Description of Artificial Sequence: Synthetic oligonucleotide
  Sense strand starting at position 114 of SEQ ID NO: 1242046
ucuucuuugugucacugua

SEQ ID NO: 1319539 - RNA, 19 nt, Artificial Sequence
  Description of Artificial Sequence: Synthetic oligonucleotide
  Antisense strand to SEQ ID NO: 1319538
uacagugacacaaagaaga

SEQ ID NO: 1319540 - RNA, 19 nt, Artificial Sequence
  Description of Artificial Sequence: Synthetic oligonucleotide
  Sense strand starting at position 116 of SEQ ID NO: 1242046
uucuuugugucacuguauu

SEQ ID NO: 1319541 - RNA, 19 nt, Artificial Sequence
  Description of Artificial Sequence: Synthetic oligonucleotide
  Antisense strand to SEQ ID NO: 1319540
aauacagugacacaaagaa

SEQ ID NO: 1319542 - RNA, 19 nt, Artificial Sequence
  Description of Artificial Sequence: Synthetic oligonucleotide
  Sense strand starting at position 122 of SEQ ID NO: 1242046
gugucacuguauucuccaa

SEQ ID NO: 1319543 - RNA, 19 nt, Artificial Sequence
  Description of Artificial Sequence: Synthetic oligonucleotide
  Antisense strand to SEQ ID NO: 1319542
uuggagaauacagugacac

SEQ ID NO: 1319544 - RNA, 19 nt, Artificial Sequence
  Description of Artificial Sequence: Synthetic oligonucleotide
  Sense strand starting at position 137 of SEQ ID NO: 1242046
ccaaaucaccuagguaugu

SEQ ID NO: 1319545 - RNA, 19 nt, Artificial Sequence
  Description of Artificial Sequence: Synthetic oligonucleotide
  Antisense strand to SEQ ID NO: 1319544
acauaccuaggugauuugg

SEQ ID NO: 1319546 - RNA, 19 nt, Artificial Sequence
  Description of Artificial Sequence: Synthetic oligonucleotide
  Sense strand starting at position 164 of SEQ ID NO: 1242046
ggaauaagauguuggcuuu

SEQ ID NO: 1319547 - RNA, 19 nt, Artificial Sequence
  Description of Artificial Sequence: Synthetic oligonucleotide
  Antisense strand to SEQ ID NO: 1319546
aaagccaacaucuuauucc

SEQ ID NO: 1319548 - RNA, 19 nt, Artificial Sequence
  Description of Artificial Sequence: Synthetic oligonucleotide
  Sense strand starting at position 255 of SEQ ID NO: 1242046
uagggaguuauucgcaaag

SEQ ID NO: 1319549 - RNA, 19 nt, Artificial Sequence
  Description of Artificial Sequence: Synthetic oligonucleotide
  Antisense strand to SEQ ID NO: 1319548
cuuugcgaauaacucccua

SEQ ID NO: 1319550 - RNA, 19 nt, Artificial Sequence
  Description of Artificial Sequence: Synthetic oligonucleotide
  Sense strand starting at position 257 of SEQ ID NO: 1242046
gggaguuauucgcaaagcc

SEQ ID NO: 1319551 - RNA, 19 nt, Artificial Sequence
  Description of Artificial Sequence: Synthetic oligonucleotide
  Antisense strand to SEQ ID NO: 1319550
ggcuuugcgaauaacuccc

SEQ ID NO: 1319552 - RNA, 19 nt, Artificial Sequence
  Description of Artificial Sequence: Synthetic oligonucleotide
  Sense strand starting at position 598 of SEQ ID NO: 1242046
gaaucaauaguccgagugu

SEQ ID NO: 1319553 - RNA, 19 nt, Artificial Sequence
  Description of Artificial Sequence: Synthetic oligonucleotide
  Antisense strand to SEQ ID NO: 1319552
acacucggacuauugauuc

SEQ ID NO: 1319554 - RNA, 19 nt, Artificial Sequence
  Description of Artificial Sequence: Synthetic oligonucleotide
  Sense strand starting at position 599 of SEQ ID NO: 1242046
aaucaauaguccgaguguu

SEQ ID NO: 1319555 - RNA, 19 nt, Artificial Sequence
  Description of Artificial Sequence: Synthetic oligonucleotide
  Antisense strand to SEQ ID NO: 1319554
aacacucggacuauugauu

SEQ ID NO: 1319556 - RNA, 19 nt, Artificial Sequence
  Description of Artificial Sequence: Synthetic oligonucleotide
  Sense strand starting at position 1006 of SEQ ID NO: 1242046
acacacaauuccuggagua

SEQ ID NO: 1319557 - RNA, 19 nt, Artificial Sequence
  Description of Artificial Sequence: Synthetic oligonucleotide
  Antisense strand to SEQ ID NO: 1319556
uacuccaggaauugugugu

SEQ ID NO: 1319558 - RNA, 19 nt, Artificial Sequence
  Description of Artificial Sequence: Synthetic oligonucleotide
  Sense strand starting at position 1159 of SEQ ID NO: 1242046
ggugguugguuccagaaag

SEQ ID NO: 1319559 - RNA, 19 nt, Artificial Sequence
  Description of Artificial Sequence: Synthetic oligonucleotide
  Antisense strand to SEQ ID NO: 1319558
cuuucuggaaccaaccacc

SEQ ID NO: 1319560 - RNA, 19 nt, Artificial Sequence
  Description of Artificial Sequence: Synthetic oligonucleotide
  Sense strand starting at position 1170 of SEQ ID NO: 1242046
ccagaaagcuggccugauc

SEQ ID NO: 1319561 - RNA, 19 nt, Artificial Sequence
  Description of Artificial Sequence: Synthetic oligonucleotide
  Antisense strand to SEQ ID NO: 1319560
gaucaggccagcuuucugg

SEQ ID NO: 1319562 - RNA, 19 nt, Artificial Sequence
  Description of Artificial Sequence: Synthetic oligonucleotide
  Sense strand starting at position 1173 of SEQ ID NO: 1242046
gaaagcuggccugaucaau

SEQ ID NO: 1319563 - RNA, 19 nt, Artificial Sequence
  Description of Artificial Sequence: Synthetic oligonucleotide
  Antisense strand to SEQ ID NO: 1319562
auugaucaggccagcuuuc

SEQ ID NO: 1319564 - RNA, 19 nt, Artificial Sequence
  Description of Artificial Sequence: Synthetic oligonucleotide
  Sense strand starting at position 1352 of SEQ ID NO: 1242046
ggguccagaugucaugcaa

SEQ ID NO: 1319565 - RNA, 19 nt, Artificial Sequence
  Description of Artificial Sequence: Synthetic oligonucleotide
  Antisense strand to SEQ ID NO: 1319564
uugcaugacaucuggaccc

SEQ ID NO: 1319566 - RNA, 19 nt, Artificial Sequence
  Description of Artificial Sequence: Synthetic oligonucleotide
  Sense strand starting at position 1438 of SEQ ID NO: 1242046
cuggguucaucugggucua

SEQ ID NO: 1319567 - RNA, 19 nt, Artificial Sequence
  Description of Artificial Sequence: Synthetic oligonucleotide
  Antisense strand to SEQ ID NO: 1319566
uagacccagaugaacccag

SEQ ID NO: 1319568 - RNA, 19 nt, Artificial Sequence
  Description of Artificial Sequence: Synthetic oligonucleotide
  Sense strand starting at position 1450 of SEQ ID NO: 1242046
gggucuagcccagauucca

SEQ ID NO: 1319569 - RNA, 19 nt, Artificial Sequence
  Description of Artificial Sequence: Synthetic oligonucleotide
  Antisense strand to SEQ ID NO: 1319568
uggaaucugggcuagaccc

SEQ ID NO: 1319570 - RNA, 19 nt, Artificial Sequence
  Description of Artificial Sequence: Synthetic oligonucleotide
  Sense strand starting at position 1991 of SEQ ID NO: 1242046
gacugcuguuucccagaca

SEQ ID NO: 1319571 - RNA, 19 nt, Artificial Sequence
  Description of Artificial Sequence: Synthetic oligonucleotide
  Antisense strand to SEQ ID NO: 1319570
ugucugggaaacagcaguc

SEQ ID NO: 1319572 - RNA, 19 nt, Artificial Sequence
  Description of Artificial Sequence: Synthetic oligonucleotide
  Sense strand starting at position 2121 of SEQ ID NO: 1242046
cugggaggcucccgugaau

SEQ ID NO: 1319573 - RNA, 19 nt, Artificial Sequence
  Description of Artificial Sequence: Synthetic oligonucleotide
  Antisense strand to SEQ ID NO: 1319572
auucacgggagccucccag

SEQ ID NO: 1319574 - RNA, 19 nt, Artificial Sequence
  Description of Artificial Sequence: Synthetic oligonucleotide
  Sense strand starting at position 2159 of SEQ ID NO: 1242046
cccacuauuugcuggauga

SEQ ID NO: 1319575 - RNA, 19 nt, Artificial Sequence
  Description of Artificial Sequence: Synthetic oligonucleotide
  Antisense strand to SEQ ID NO: 1319574
ucauccagcaaauaguggg

SEQ ID NO: 1319576 - RNA, 19 nt, Artificial Sequence
  Description of Artificial Sequence: Synthetic oligonucleotide
  Sense strand starting at position 2169 of SEQ ID NO: 1242046
gcuggaugaucuuaacaag

SEQ ID NO: 1319577 - RNA, 19 nt, Artificial Sequence
  Description of Artificial Sequence: Synthetic oligonucleotide
  Antisense strand to SEQ ID NO: 1319576
cuuguuaagaucauccagc

SEQ ID NO: 1319578 - RNA, 19 nt, Artificial Sequence
  Description of Artificial Sequence: Synthetic oligonucleotide
  Sense strand starting at position 2172 of SEQ ID NO: 1242046
ggaugaucuuaacaaguca

SEQ ID NO: 1319579 - RNA, 19 nt, Artificial Sequence
  Description of Artificial Sequence: Synthetic oligonucleotide
  Antisense strand to SEQ ID NO: 1319578
ugacuuguuaagaucaucc

SEQ ID NO: 1319580 - RNA, 19 nt, Artificial Sequence
  Description of Artificial Sequence: Synthetic oligonucleotide
  Sense strand starting at position 2285 of SEQ ID NO: 1242046
aucaaaugcuccguagaag

SEQ ID NO: 1319581 - RNA, 19 nt, Artificial Sequence
  Description of Artificial Sequence: Synthetic oligonucleotide
  Antisense strand to SEQ ID NO: 1319580
cuucuacggagcauuugau

SEQ ID NO: 1319582 - RNA, 19 nt, Artificial Sequence
  Description of Artificial Sequence: Synthetic oligonucleotide
  Sense strand starting at position 2294 of SEQ ID NO: 1242046
uccguagaagcccaauaua

SEQ ID NO: 1319583 - RNA, 19 nt, Artificial Sequence
  Description of Artificial Sequence: Synthetic oligonucleotide
  Antisense strand to SEQ ID NO: 1319582
uauauugggcuucuacgga

SEQ ID NO: 1319584 - RNA, 19 nt, Artificial Sequence
  Description of Artificial Sequence: Synthetic oligonucleotide
  Sense strand starting at position 2347 of SEQ ID NO: 1242046
agaggucaggcuuggcuaa

SEQ ID NO: 1319585 - RNA, 19 nt, Artificial Sequence
  Description of Artificial Sequence: Synthetic oligonucleotide
  Antisense strand to SEQ ID NO: 1319584
uuagccaagccugaccucu

SEQ ID NO: 1319586 - RNA, 19 nt, Artificial Sequence
  Description of Artificial Sequence: Synthetic oligonucleotide
  Sense strand starting at position 2348 of SEQ ID NO: 1242046
gaggucaggcuuggcuaau

SEQ ID NO: 1319587 - RNA, 19 nt, Artificial Sequence
  Description of Artificial Sequence: Synthetic oligonucleotide
  Antisense strand to SEQ ID NO: 1319586
auuagccaagccugaccuc

SEQ ID NO: 1319588 - RNA, 19 nt, Artificial Sequence
  Description of Artificial Sequence: Synthetic oligonucleotide
  Sense strand starting at position 2524 of SEQ ID NO: 1242046
gcggguucugaccagacaa

SEQ ID NO: 1319589 - RNA, 19 nt, Artificial Sequence
  Description of Artificial Sequence: Synthetic oligonucleotide
  Antisense strand to SEQ ID NO: 1319588
uugucuggucagaacccgc

SEQ ID NO: 1319590 - RNA, 19 nt, Artificial Sequence
  Description of Artificial Sequence: Synthetic oligonucleotide
  Sense strand starting at position 2526 of SEQ ID NO: 1242046
ggguucugaccagacaagu

SEQ ID NO: 1319591 - RNA, 19 nt, Artificial Sequence
  Description of Artificial Sequence: Synthetic oligonucleotide
  Antisense strand to SEQ ID NO: 1319590
acuugucuggucagaaccc

SEQ ID NO: 1319592 - RNA, 19 nt, Artificial Sequence
  Description of Artificial Sequence: Synthetic oligonucleotide
  Sense strand starting at position 2539 of SEQ ID NO: 1242046
acaagugacugccgucaga

SEQ ID NO: 1319593 - RNA, 19 nt, Artificial Sequence
  Description of Artificial Sequence: Synthetic oligonucleotide
  Antisense strand to SEQ ID NO: 1319592
ucugacggcagucacuugu

SEQ ID NO: 1319594 - RNA, 19 nt, Artificial Sequence
  Description of Artificial Sequence: Synthetic oligonucleotide
  Sense strand starting at position 3817 of SEQ ID NO: 1242046
ggccuacuguuagaggagu

SEQ ID NO: 1319595 - RNA, 19 nt, Artificial Sequence
  Description of Artificial Sequence: Synthetic oligonucleotide
  Antisense strand to SEQ ID NO: 1319594
acuccucuaacaguaggcc

SEQ ID NO: 1319596 - RNA, 19 nt, Artificial Sequence
  Description of Artificial Sequence: Synthetic oligonucleotide
  Sense strand starting at position 3819 of SEQ ID NO: 1242046
ccuacuguuagaggaguca

SEQ ID NO: 1319597 - RNA, 19 nt, Artificial Sequence
  Description of Artificial Sequence: Synthetic oligonucleotide
  Antisense strand to SEQ ID NO: 1319596
ugacuccucuaacaguagg

SEQ ID NO: 1319598 - RNA, 19 nt, Artificial Sequence
  Description of Artificial Sequence: Synthetic oligonucleotide
  Sense strand starting at position 3836 of SEQ ID NO: 1242046
cacgacuucgucugcauuu

SEQ ID NO: 1319599 - RNA, 19 nt, Artificial Sequence
  Description of Artificial Sequence: Synthetic oligonucleotide
  Antisense strand to SEQ ID NO: 1319598
aaaugcagacgaagucgug

SEQ ID NO: 1319600 - RNA, 19 nt, Artificial Sequence
  Description of Artificial Sequence: Synthetic oligonucleotide
  Sense strand starting at position 3843 of SEQ ID NO: 1242046
ucgucugcauuuguauaga

SEQ ID NO: 1319601 - RNA, 19 nt, Artificial Sequence
  Description of Artificial Sequence: Synthetic oligonucleotide
  Antisense strand to SEQ ID NO: 1319600
ucuauacaaaugcagacga

SEQ ID NO: 1319602 - RNA, 19 nt, Artificial Sequence
  Description of Artificial Sequence: Synthetic oligonucleotide
  Sense strand starting at position 3852 of SEQ ID NO: 1242046
uuuguauagacagguggau

SEQ ID NO: 1319603 - RNA, 19 nt, Artificial Sequence
  Description of Artificial Sequence: Synthetic oligonucleotide
  Antisense strand to SEQ ID NO: 1319602
auccaccugucuauacaaa

SEQ ID NO: 1319604 - RNA, 19 nt, Artificial Sequence
  Description of Artificial Sequence: Synthetic oligonucleotide
  Sense strand starting at position 3854 of SEQ ID NO: 1242046
uguauagacagguggauau

SEQ ID NO: 1319605 - RNA, 19 nt, Artificial Sequence
  Description of Artificial Sequence: Synthetic oligonucleotide
  Antisense strand to SEQ ID NO: 1319604
auauccaccugucuauaca

SEQ ID NO: 1319606 - RNA, 19 nt, Artificial Sequence
  Description of Artificial Sequence: Synthetic oligonucleotide
  Sense strand starting at position 3865 of SEQ ID NO: 1242046
guggauauaugagcagaag

SEQ ID NO: 1319607 - RNA, 19 nt, Artificial Sequence
  Description of Artificial Sequence: Synthetic oligonucleotide
  Antisense strand to SEQ ID NO: 1319606
cuucugcucauauauccac

SEQ ID NO: 1319608 - RNA, 19 nt, Artificial Sequence
  Description of Artificial Sequence: Synthetic oligonucleotide
  Sense strand starting at position 3974 of SEQ ID NO: 1242046
ccuucuuauguacaugauu

SEQ ID NO: 1319609 - RNA, 19 nt, Artificial Sequence
  Description of Artificial Sequence: Synthetic oligonucleotide
  Antisense strand to SEQ ID NO: 1319608
aaucauguacauaagaagg

SEQ ID NO: 1319610 - RNA, 19 nt, Artificial Sequence
  Description of Artificial Sequence: Synthetic oligonucleotide
  Sense strand starting at position 49 of SEQ ID NO: 1242047
gagauaaccuggcugcaca

SEQ ID NO: 1319611 - RNA, 19 nt, Artificial Sequence
  Description of Artificial Sequence: Synthetic oligonucleotide
  Antisense strand to SEQ ID NO: 1319610
ugugcagccagguuaucuc

SEQ ID NO: 1319612 - RNA, 19 nt, Artificial Sequence
  Description of Artificial Sequence: Synthetic oligonucleotide
  Sense strand starting at position 389 of SEQ ID NO: 1242047
aaguuaauuucucagggac

SEQ ID NO: 1319613 - RNA, 19 nt, Artificial Sequence
  Description of Artificial Sequence: Synthetic oligonucleotide
  Antisense strand to SEQ ID NO: 1319612
gucccugagaaauuaacuu

SEQ ID NO: 1319614 - RNA, 19 nt, Artificial Sequence
  Description of Artificial Sequence: Synthetic oligonucleotide
  Sense strand starting at position 437 of SEQ ID NO: 1242047
gauaauauuuagugaaugg

SEQ ID NO: 1319615 - RNA, 19 nt, Artificial Sequence
  Description of Artificial Sequence: Synthetic oligonucleotide
  Antisense strand to SEQ ID NO: 1319614
ccauucacuaaauauuauc

SEQ ID NO: 1319616 - RNA, 19 nt, Artificial Sequence
  Description of Artificial Sequence: Synthetic oligonucleotide
  Sense strand starting at position 514 of SEQ ID NO: 1242047
aaugcuggguccucaaagu

SEQ ID NO: 1319617 - RNA, 19 nt, Artificial Sequence
  Description of Artificial Sequence: Synthetic oligonucleotide
  Antisense strand to SEQ ID NO: 1319616
acuuugaggacccagcauu

SEQ ID NO: 1319618 - RNA, 19 nt, Artificial Sequence
  Description of Artificial Sequence: Synthetic oligonucleotide
  Sense strand starting at position 527 of SEQ ID NO: 1242047
caaaguugagcgggaagau

SEQ ID NO: 1319619 - RNA, 19 nt, Artificial Sequence
  Description of Artificial Sequence: Synthetic oligonucleotide
  Antisense strand to SEQ ID NO: 1319618
aucuucccgcucaacuuug

SEQ ID NO: 1319620 - RNA, 19 nt, Artificial Sequence
  Description of Artificial Sequence: Synthetic oligonucleotide
  Sense strand starting at position 698 of SEQ ID NO: 1242047
ggcugugagcaagagaacu

SEQ ID NO: 1319621 - RNA, 19 nt, Artificial Sequence
  Description of Artificial Sequence: Synthetic oligonucleotide
  Antisense strand to SEQ ID NO: 1319620
aguucucuugcucacagcc

SEQ ID NO: 1319622 - RNA, 19 nt, Artificial Sequence
  Description of Artificial Sequence: Synthetic oligonucleotide
  Sense strand starting at position 761 of SEQ ID NO: 1242047
uguccucaggccuagaaga

SEQ ID NO: 1319623 - RNA, 19 nt, Artificial Sequence
  Description of Artificial Sequence: Synthetic oligonucleotide
  Antisense strand to SEQ ID NO: 1319622
ucuucuaggccugaggaca

SEQ ID NO: 1319624 - RNA, 19 nt, Artificial Sequence
  Description of Artificial Sequence: Synthetic oligonucleotide
  Sense strand starting at position 988 of SEQ ID NO: 1242047
ucuuuaaaguggguucuca

SEQ ID NO: 1319625 - RNA, 19 nt, Artificial Sequence
  Description of Artificial Sequence: Synthetic oligonucleotide
  Antisense strand to SEQ ID NO: 1319624
ugagaacccacuuuaaaga

SEQ ID NO: 1319626 - RNA, 19 nt, Artificial Sequence
  Description of Artificial Sequence: Synthetic oligonucleotide
  Sense strand starting at position 1158 of SEQ ID NO: 1242047
cugugagacuucucuggaa

SEQ ID NO: 1319627 - RNA, 19 nt, Artificial Sequence
  Description of Artificial Sequence: Synthetic oligonucleotide
  Antisense strand to SEQ ID NO: 1319626
uuccagagaagucucacag

SEQ ID NO: 1319628 - RNA, 19 nt, Artificial Sequence
  Description of Artificial Sequence: Synthetic oligonucleotide
  Sense strand starting at position 1359 of SEQ ID NO: 1242047
aggacuugggcaugugaca

SEQ ID NO: 1319629 - RNA, 19 nt, Artificial Sequence
  Description of Artificial Sequence: Synthetic oligonucleotide
  Antisense strand to SEQ ID NO: 1319628
ugucacaugcccaaguccu

SEQ ID NO: 1319630 - RNA, 19 nt, Artificial Sequence
  Description of Artificial Sequence: Synthetic oligonucleotide
  Sense strand starting at position 1372 of SEQ ID NO: 1242047
gugacagaagucuggagau

SEQ ID NO: 1319631 - RNA, 19 nt, Artificial Sequence
  Description of Artificial Sequence: Synthetic oligonucleotide
  Antisense strand to SEQ ID NO: 1319630
aucuccagacuucugucac

SEQ ID NO: 1319632 - RNA, 19 nt, Artificial Sequence
  Description of Artificial Sequence: Synthetic oligonucleotide
  Sense strand starting at position 1378 of SEQ ID NO: 1242047
gaagucuggagaugaguga

SEQ ID NO: 1319633 - RNA, 19 nt, Artificial Sequence
  Description of Artificial Sequence: Synthetic oligonucleotide
  Antisense strand to SEQ ID NO: 1319632
ucacucaucuccagacuuc

SEQ ID NO: 1319634 - RNA, 19 nt, Artificial Sequence
  Description of Artificial Sequence: Synthetic oligonucleotide
  Sense strand starting at position 1596 of SEQ ID NO: 1242047
cugggagucuucucugaaa

SEQ ID NO: 1319635 - RNA, 19 nt, Artificial Sequence
  Description of Artificial Sequence: Synthetic oligonucleotide
  Antisense strand to SEQ ID NO: 1319634
uuucagagaagacucccag

SEQ ID NO: 1319636 - RNA, 19 nt, Artificial Sequence
  Description of Artificial Sequence: Synthetic oligonucleotide
  Sense strand starting at position 1598 of SEQ ID NO: 1242047
gggagucuucucugaaauc

SEQ ID NO: 1319637 - RNA, 19 nt, Artificial Sequence
  Description of Artificial Sequence: Synthetic oligonucleotide
  Antisense strand to SEQ ID NO: 1319636
gauuucagagaagacuccc

SEQ ID NO: 1319638 - RNA, 19 nt, Artificial Sequence
  Description of Artificial Sequence: Synthetic oligonucleotide
  Sense strand starting at position 1607 of SEQ ID NO: 1242047
cucugaaaucucuggucca

SEQ ID NO: 1319639 - RNA, 19 nt, Artificial Sequence
  Description of Artificial Sequence: Synthetic oligonucleotide
  Antisense strand to SEQ ID NO: 1319638
uggaccagagauuucagag

SEQ ID NO: 1319640 - RNA, 19 nt, Artificial Sequence
  Description of Artificial Sequence: Synthetic oligonucleotide
  Sense strand starting at position 1668 of SEQ ID NO: 1242047
ccuaguuguaagcagaaug

SEQ ID NO: 1319641 - RNA, 19 nt, Artificial Sequence
  Description of Artificial Sequence: Synthetic oligonucleotide
  Antisense strand to SEQ ID NO: 1319640
cauucugcuuacaacuagg

SEQ ID NO: 1319642 - RNA, 19 nt, Artificial Sequence
  Description of Artificial Sequence: Synthetic oligonucleotide
  Sense strand starting at position 1679 of SEQ ID NO: 1242047
gcagaaugucuacacaaca

SEQ ID NO: 1319643 - RNA, 19 nt, Artificial Sequence
  Description of Artificial Sequence: Synthetic oligonucleotide
  Antisense strand to SEQ ID NO: 1319642
uguuguguagacauucugc

SEQ ID NO: 1319644 - RNA, 19 nt, Artificial Sequence
  Description of Artificial Sequence: Synthetic oligonucleotide
  Sense strand starting at position 1740 of SEQ ID NO: 1242047
guucucuccgaaugaaagg

SEQ ID NO: 1319645 - RNA, 19 nt, Artificial Sequence
  Description of Artificial Sequence: Synthetic oligonucleotide
  Antisense strand to SEQ ID NO: 1319644
ccuuucauucggagagaac

SEQ ID NO: 1319646 - RNA, 19 nt, Artificial Sequence
  Description of Artificial Sequence: Synthetic oligonucleotide
  Sense strand starting at position 1861 of SEQ ID NO: 1242047
ucgaauaaagcauguccau

SEQ ID NO: 1319647 - RNA, 19 nt, Artificial Sequence
  Description of Artificial Sequence: Synthetic oligonucleotide
  Antisense strand to SEQ ID NO: 1319646
auggacaugcuuuauucga

SEQ ID NO: 1319648 - RNA, 19 nt, Artificial Sequence
  Description of Artificial Sequence: Synthetic oligonucleotide
  Sense strand starting at position 1993 of SEQ ID NO: 1242047
uccaguucuggcuaaacca

SEQ ID NO: 1319649 - RNA, 19 nt, Artificial Sequence
  Description of Artificial Sequence: Synthetic oligonucleotide
  Antisense strand to SEQ ID NO: 1319648
ugguuuagccagaacugga

SEQ ID NO: 1319650 - RNA, 19 nt, Artificial Sequence
  Description of Artificial Sequence: Synthetic oligonucleotide
  Sense strand starting at position 2003 of SEQ ID NO: 1242047
gcuaaaccacuuugggaaa

SEQ ID NO: 1319651 - RNA, 19 nt, Artificial Sequence
  Description of Artificial Sequence: Synthetic oligonucleotide
  Antisense strand to SEQ ID NO: 1319650
uuucccaaagugguuuagc

SEQ ID NO: 1319652 - RNA, 19 nt, Artificial Sequence
  Description of Artificial Sequence: Synthetic oligonucleotide
  Sense strand starting at position 2076 of SEQ ID NO: 1242047
aagugaugugguggugaca

SEQ ID NO: 1319653 - RNA, 19 nt, Artificial Sequence
  Description of Artificial Sequence: Synthetic oligonucleotide
  Antisense strand to SEQ ID NO: 1319652
ugucaccaccacaucacuu

SEQ ID NO: 1319654 - RNA, 19 nt, Artificial Sequence
  Description of Artificial Sequence: Synthetic oligonucleotide
  Sense strand starting at position 2737 of SEQ ID NO: 1242047
ggcuuacgccacucguauu

SEQ ID NO: 1319655 - RNA, 19 nt, Artificial Sequence
  Description of Artificial Sequence: Synthetic oligonucleotide
  Antisense strand to SEQ ID NO: 1319654
aauacgaguggcguaagcc

SEQ ID NO: 1319656 - RNA, 19 nt, Artificial Sequence
  Description of Artificial Sequence: Synthetic oligonucleotide
  Sense strand starting at position 2918 of SEQ ID NO: 1242047
aucaguuugucauccugaa

SEQ ID NO: 1319657 - RNA, 19 nt, Artificial Sequence
  Description of Artificial Sequence: Synthetic oligonucleotide
  Antisense strand to SEQ ID NO: 1319656
uucaggaugacaaacugau

SEQ ID NO: 1319658 - RNA, 19 nt, Artificial Sequence
  Description of Artificial Sequence: Synthetic oligonucleotide
  Sense strand starting at position 2963 of SEQ ID NO: 1242047
aacaucuugggucggauaa

SEQ ID NO: 1319659 - RNA, 19 nt, Artificial Sequence
  Description of Artificial Sequence: Synthetic oligonucleotide
  Antisense strand to SEQ ID NO: 1319658
uuauccgacccaagauguu

SEQ ID NO: 1319660 - RNA, 19 nt, Artificial Sequence
  Description of Artificial Sequence: Synthetic oligonucleotide
  Sense strand starting at position 3057 of SEQ ID NO: 1242047
guagcauucccgcucccau

SEQ ID NO: 1319661 - RNA, 19 nt, Artificial Sequence
  Description of Artificial Sequence: Synthetic oligonucleotide
  Antisense strand to SEQ ID NO: 1319660
augggagcgggaaugcuac

SEQ ID NO: 1319662 - RNA, 19 nt, Artificial Sequence
  Description of Artificial Sequence: Synthetic oligonucleotide
  Sense strand starting at position 3231 of SEQ ID NO: 1242047
ggaacuaagcucugagaca

SEQ ID NO: 1319663 - RNA, 19 nt, Artificial Sequence
  Description of Artificial Sequence: Synthetic oligonucleotide
  Antisense strand to SEQ ID NO: 1319662
ugucucagagcuuaguucc

SEQ ID NO: 1319664 - RNA, 19 nt, Artificial Sequence
  Description of Artificial Sequence: Synthetic oligonucleotide
  Sense strand starting at position 3277 of SEQ ID NO: 1242047
acuugaaacugcccaguau

SEQ ID NO: 1319665 - RNA, 19 nt, Artificial Sequence
  Description of Artificial Sequence: Synthetic oligonucleotide
  Antisense strand to SEQ ID NO: 1319664
auacugggcaguuucaagu

SEQ ID NO: 1319666 - RNA, 19 nt, Artificial Sequence
  Description of Artificial Sequence: Synthetic oligonucleotide
  Sense strand starting at position 3313 of SEQ ID NO: 1242047
ccguuuagugaucagggca

SEQ ID NO: 1319667 - RNA, 19 nt, Artificial Sequence
  Description of Artificial Sequence: Synthetic oligonucleotide
  Antisense strand to SEQ ID NO: 1319666
ugcccugaucacuaaacgg

SEQ ID NO: 1319668 - RNA, 19 nt, Artificial Sequence
  Description of Artificial Sequence: Synthetic oligonucleotide
  Sense strand starting at position 3316 of SEQ ID NO: 1242047
uuuagugaucagggcaaac

SEQ ID NO: 1319669 - RNA, 19 nt, Artificial Sequence
  Description of Artificial Sequence: Synthetic oligonucleotide
  Antisense strand to SEQ ID NO: 1319668
guuugcccugaucacuaaa

SEQ ID NO: 1319670 - RNA, 19 nt, Artificial Sequence
  Description of Artificial Sequence: Synthetic oligonucleotide
  Sense strand starting at position 3370 of SEQ ID NO: 1242047
caucguguuggugauaaug

SEQ ID NO: 1319671 - RNA, 19 nt, Artificial Sequence
  Description of Artificial Sequence: Synthetic oligonucleotide
  Antisense strand to SEQ ID NO: 1319670
cauuaucaccaacacgaug

SEQ ID NO: 1319672 - RNA, 19 nt, Artificial Sequence
  Description of Artificial Sequence: Synthetic oligonucleotide
  Sense strand starting at position 3448 of SEQ ID NO: 1242047
gugugagcccuuguagcau

SEQ ID NO: 1319673 - RNA, 19 nt, Artificial Sequence
  Description of Artificial Sequence: Synthetic oligonucleotide
  Antisense strand to SEQ ID NO: 1319672
augcuacaagggcucacac

SEQ ID NO: 1319674 - RNA, 19 nt, Artificial Sequence
  Description of Artificial Sequence: Synthetic oligonucleotide
  Sense strand starting at position 3677 of SEQ ID NO: 1242047
gaagauguguuguuuaaag

SEQ ID NO: 1319675 - RNA, 19 nt, Artificial Sequence
  Description of Artificial Sequence: Synthetic oligonucleotide
  Antisense strand to SEQ ID NO: 1319674
cuuuaaacaacacaucuuc

SEQ ID NO: 1319676 - RNA, 19 nt, Artificial Sequence
  Description of Artificial Sequence: Synthetic oligonucleotide
  Sense strand starting at position 3679 of SEQ ID NO: 1242047
agauguguuguuuaaaguu

SEQ ID NO: 1319677 - RNA, 19 nt, Artificial Sequence
  Description of Artificial Sequence: Synthetic oligonucleotide
  Antisense strand to SEQ ID NO: 1319676
aacuuuaaacaacacaucu

SEQ ID NO: 1319678 - RNA, 19 nt, Artificial Sequence
  Description of Artificial Sequence: Synthetic oligonucleotide
  Sense strand starting at position 3701 of SEQ ID NO: 1242047
gugcuugaagggcauuauu

SEQ ID NO: 1319679 - RNA, 19 nt, Artificial Sequence
  Description of Artificial Sequence: Synthetic oligonucleotide
  Antisense strand to SEQ ID NO: 1319678
aauaaugcccuucaagcac

SEQ ID NO: 1319680 - RNA, 19 nt, Artificial Sequence
  Description of Artificial Sequence: Synthetic oligonucleotide
  Sense strand starting at position 3743 of SEQ ID NO: 1242047
aguccauuucuuugcugaa

SEQ ID NO: 1319681 - RNA, 19 nt, Artificial Sequence
  Description of Artificial Sequence: Synthetic oligonucleotide
  Antisense strand to SEQ ID NO: 1319680
uucagcaaagaaauggacu

SEQ ID NO: 1319682 - RNA, 19 nt, Artificial Sequence
  Description of Artificial Sequence: Synthetic oligonucleotide
  Sense strand starting at position 3744 of SEQ ID NO: 1242047
guccauuucuuugcugaau

SEQ ID NO: 1319683 - RNA, 19 nt, Artificial Sequence
  Description of Artificial Sequence: Synthetic oligonucleotide
  Antisense strand to SEQ ID NO: 1319682
auucagcaaagaaauggac

SEQ ID NO: 1319684 - RNA, 19 nt, Artificial Sequence
  Description of Artificial Sequence: Synthetic oligonucleotide
  Sense strand starting at position 3871 of SEQ ID NO: 1242047
aaaggaauggcgugaagag

SEQ ID NO: 1319685 - RNA, 19 nt, Artificial Sequence
  Description of Artificial Sequence: Synthetic oligonucleotide
  Antisense strand to SEQ ID NO: 1319684
cucuucacgccauuccuuu

SEQ ID NO: 1319686 - RNA, 19 nt, Artificial Sequence
  Description of Artificial Sequence: Synthetic oligonucleotide
  Sense strand starting at position 3872 of SEQ ID NO: 1242047
aaggaauggcgugaagagu

SEQ ID NO: 1319687 - RNA, 19 nt, Artificial Sequence
  Description of Artificial Sequence: Synthetic oligonucleotide
  Antisense strand to SEQ ID NO: 1319686
acucuucacgccauuccuu

SEQ ID NO: 1319688 - RNA, 19 nt, Artificial Sequence
  Description of Artificial Sequence: Synthetic oligonucleotide
  Sense strand starting at position 3955 of SEQ ID NO: 1242047
agucuuuccguugacugau

SEQ ID NO: 1319689 - RNA, 19 nt, Artificial Sequence
  Description of Artificial Sequence: Synthetic oligonucleotide
  Antisense strand to SEQ ID NO: 1319688
aucagucaacggaaagacu

SEQ ID NO: 1319690 - RNA, 19 nt, Artificial Sequence
  Description of Artificial Sequence: Synthetic oligonucleotide
  Sense strand starting at position 11 of SEQ ID NO: 1242048
aguggaguguuccagaggu

SEQ ID NO: 1319691 - RNA, 19 nt, Artificial Sequence
  Description of Artificial Sequence: Synthetic oligonucleotide
  Antisense strand to SEQ ID NO: 1319690
accucuggaacacuccacu

SEQ ID NO: 1319692 - RNA, 19 nt, Artificial Sequence
  Description of Artificial Sequence: Synthetic oligonucleotide
  Sense strand starting at position 13 of SEQ ID NO: 1242048
uggaguguuccagagguua

SEQ ID NO: 1319693 - RNA, 19 nt, Artificial Sequence
  Description of Artificial Sequence: Synthetic oligonucleotide
  Antisense strand to SEQ ID NO: 1319692
uaaccucuggaacacucca

SEQ ID NO: 1319694 - RNA, 19 nt, Artificial Sequence
  Description of Artificial Sequence: Synthetic oligonucleotide
  Sense strand starting at position 15 of SEQ ID NO: 1242048
gaguguuccagagguuaca

SEQ ID NO: 1319695 - RNA, 19 nt, Artificial Sequence
  Description of Artificial Sequence: Synthetic oligonucleotide
  Antisense strand to SEQ ID NO: 1319694
uguaaccucuggaacacuc

SEQ ID NO: 1319696 - RNA, 19 nt, Artificial Sequence
  Description of Artificial Sequence: Synthetic oligonucleotide
  Sense strand starting at position 25 of SEQ ID NO: 1242048
gagguuacauggugugcua

SEQ ID NO: 1319697 - RNA, 19 nt, Artificial Sequence
  Description of Artificial Sequence: Synthetic oligonucleotide
  Antisense strand to SEQ ID NO: 1319696
uagcacaccauguaaccuc

SEQ ID NO: 1319698 - RNA, 19 nt, Artificial Sequence
  Description of Artificial Sequence: Synthetic oligonucleotide
  Sense strand starting at position 36 of SEQ ID NO: 1242048
gugugcuaaccacaacagu

SEQ ID NO: 1319699 - RNA, 19 nt, Artificial Sequence
  Description of Artificial Sequence: Synthetic oligonucleotide
  Antisense strand to SEQ ID NO: 1319698
acuguugugguuagcacac

SEQ ID NO: 1319700 - RNA, 19 nt, Artificial Sequence
  Description of Artificial Sequence: Synthetic oligonucleotide
  Sense strand starting at position 47 of SEQ ID NO: 1242048
acaacagucugacguagau

SEQ ID NO: 1319701 - RNA, 19 nt, Artificial Sequence
  Description of Artificial Sequence: Synthetic oligonucleotide
  Antisense strand to SEQ ID NO: 1319700
aucuacgucagacuguugu

SEQ ID NO: 1319702 - RNA, 19 nt, Artificial Sequence
  Description of Artificial Sequence: Synthetic oligonucleotide
  Sense strand starting at position 56 of SEQ ID NO: 1242048
ugacguagaucugagaauc

SEQ ID NO: 1319703 - RNA, 19 nt, Artificial Sequence
  Description of Artificial Sequence: Synthetic oligonucleotide
  Antisense strand to SEQ ID NO: 1319702
gauucucagaucuacguca

SEQ ID NO: 1319704 - RNA, 19 nt, Artificial Sequence
  Description of Artificial Sequence: Synthetic oligonucleotide
  Sense strand starting at position 249 of SEQ ID NO: 1242048
uaucaaagcugaugguuau

SEQ ID NO: 1319705 - RNA, 19 nt, Artificial Sequence
  Description of Artificial Sequence: Synthetic oligonucleotide
  Antisense strand to SEQ ID NO: 1319704
auaaccaucagcuuugaua

SEQ ID NO: 1319706 - RNA, 19 nt, Artificial Sequence
  Description of Artificial Sequence: Synthetic oligonucleotide
  Sense strand starting at position 250 of SEQ ID NO: 1242048
aucaaagcugaugguuaua

SEQ ID NO: 1319707 - RNA, 19 nt, Artificial Sequence
  Description of Artificial Sequence: Synthetic oligonucleotide
  Antisense strand to SEQ ID NO: 1319706
uauaaccaucagcuuugau

SEQ ID NO: 1319708 - RNA, 19 nt, Artificial Sequence
  Description of Artificial Sequence: Synthetic oligonucleotide
  Sense strand starting at position 255 of SEQ ID NO: 1242048
agcugaugguuauacguca

SEQ ID NO: 1319709 - RNA, 19 nt, Artificial Sequence
  Description of Artificial Sequence: Synthetic oligonucleotide
  Antisense strand to SEQ ID NO: 1319708
ugacguauaaccaucagcu

SEQ ID NO: 1319710 - RNA, 19 nt, Artificial Sequence
  Description of Artificial Sequence: Synthetic oligonucleotide
  Sense strand starting at position 262 of SEQ ID NO: 1242048
gguuauacgucagugagaa

SEQ ID NO: 1319711 - RNA, 19 nt, Artificial Sequence
  Description of Artificial Sequence: Synthetic oligonucleotide
  Antisense strand to SEQ ID NO: 1319710
uucucacugacguauaacc

SEQ ID NO: 1319712 - RNA, 19 nt, Artificial Sequence
  Description of Artificial Sequence: Synthetic oligonucleotide
  Sense strand starting at position 263 of SEQ ID NO: 1242048
guuauacgucagugagaaa

SEQ ID NO: 1319713 - RNA, 19 nt, Artificial Sequence
  Description of Artificial Sequence: Synthetic oligonucleotide
  Antisense strand to SEQ ID NO: 1319712
uuucucacugacguauaac

SEQ ID NO: 1319714 - RNA, 19 nt, Artificial Sequence
  Description of Artificial Sequence: Synthetic oligonucleotide
  Sense strand starting at position 302 of SEQ ID NO: 1242048
ugggucuuuacaugagaua

SEQ ID NO: 1319715 - RNA, 19 nt, Artificial Sequence
  Description of Artificial Sequence: Synthetic oligonucleotide
  Antisense strand to SEQ ID NO: 1319714
uaucucauguaaagaccca

SEQ ID NO: 1319716 - RNA, 19 nt, Artificial Sequence
  Description of Artificial Sequence: Synthetic oligonucleotide
  Sense strand starting at position 305 of SEQ ID NO: 1242048
gucuuuacaugagauaaac

SEQ ID NO: 1319717 - RNA, 19 nt, Artificial Sequence
  Description of Artificial Sequence: Synthetic oligonucleotide
  Antisense strand to SEQ ID NO: 1319716
guuuaucucauguaaagac

SEQ ID NO: 1319718 - RNA, 19 nt, Artificial Sequence
  Description of Artificial Sequence: Synthetic oligonucleotide
  Sense strand starting at position 385 of SEQ ID NO: 1242048
cugagauggcaauguacuu

SEQ ID NO: 1319719 - RNA, 19 nt, Artificial Sequence
  Description of Artificial Sequence: Synthetic oligonucleotide
  Antisense strand to SEQ ID NO: 1319718
aaguacauugccaucucag

SEQ ID NO: 1319720 - RNA, 19 nt, Artificial Sequence
  Description of Artificial Sequence: Synthetic oligonucleotide
  Sense strand starting at position 390 of SEQ ID NO: 1242048
auggcaauguacuuuacaa

SEQ ID NO: 1319721 - RNA, 19 nt, Artificial Sequence
  Description of Artificial Sequence: Synthetic oligonucleotide
  Antisense strand to SEQ ID NO: 1319720
uuguaaaguacauugccau

SEQ ID NO: 1319722 - RNA, 19 nt, Artificial Sequence
  Description of Artificial Sequence: Synthetic oligonucleotide
  Sense strand starting at position 458 of SEQ ID NO: 1242048
ucaguaacuugccugaauu

SEQ ID NO: 1319723 - RNA, 19 nt, Artificial Sequence
  Description of Artificial Sequence: Synthetic oligonucleotide
  Antisense strand to SEQ ID NO: 1319722
aauucaggcaaguuacuga

SEQ ID NO: 1319724 - RNA, 19 nt, Artificial Sequence
  Description of Artificial Sequence: Synthetic oligonucleotide
  Sense strand starting at position 459 of SEQ ID NO: 1242048
caguaacuugccugaauug

SEQ ID NO: 1319725 - RNA, 19 nt, Artificial Sequence
  Description of Artificial Sequence: Synthetic oligonucleotide
  Antisense strand to SEQ ID NO: 1319724
caauucaggcaaguuacug

SEQ ID NO: 1319726 - RNA, 19 nt, Artificial Sequence
  Description of Artificial Sequence: Synthetic oligonucleotide
  Sense strand starting at position 460 of SEQ ID NO: 1242048
aguaacuugccugaauuga

SEQ ID NO: 1319727 - RNA, 19 nt, Artificial Sequence
  Description of Artificial Sequence: Synthetic oligonucleotide
  Antisense strand to SEQ ID NO: 1319726
ucaauucaggcaaguuacu

SEQ ID NO: 1319728 - RNA, 19 nt, Artificial Sequence
  Description of Artificial Sequence: Synthetic oligonucleotide
  Sense strand starting at position 464 of SEQ ID NO: 1242048
acuugccugaauugagaga

SEQ ID NO: 1319729 - RNA, 19 nt, Artificial Sequence
  Description of Artificial Sequence: Synthetic oligonucleotide
  Antisense strand to SEQ ID NO: 1319728
ucucucaauucaggcaagu

SEQ ID NO: 1319730 - RNA, 19 nt, Artificial Sequence
  Description of Artificial Sequence: Synthetic oligonucleotide
  Sense strand starting at position 586 of SEQ ID NO: 1242048
acaguccaaucagguuuaa

SEQ ID NO: 1319731 - RNA, 19 nt, Artificial Sequence
  Description of Artificial Sequence: Synthetic oligonucleotide
  Antisense strand to SEQ ID NO: 1319730
uuaaaccugauuggacugu

SEQ ID NO: 1319732 - RNA, 19 nt, Artificial Sequence
  Description of Artificial Sequence: Synthetic oligonucleotide
  Sense strand starting at position 595 of SEQ ID NO: 1242048
ucagguuuaaagcaagagu

SEQ ID NO: 1319733 - RNA, 19 nt, Artificial Sequence
  Description of Artificial Sequence: Synthetic oligonucleotide
  Antisense strand to SEQ ID NO: 1319732
acucuugcuuuaaaccuga

SEQ ID NO: 1319734 - RNA, 19 nt, Artificial Sequence
  Description of Artificial Sequence: Synthetic oligonucleotide
  Sense strand starting at position 598 of SEQ ID NO: 1242048
gguuuaaagcaagaguauu

SEQ ID NO: 1319735 - RNA, 19 nt, Artificial Sequence
  Description of Artificial Sequence: Synthetic oligonucleotide
  Antisense strand to SEQ ID NO: 1319734
aauacucuugcuuuaaacc

SEQ ID NO: 1319736 - RNA, 19 nt, Artificial Sequence
  Description of Artificial Sequence: Synthetic oligonucleotide
  Sense strand starting at position 654 of SEQ ID NO: 1242048
aaagcaggccuguaucauu

SEQ ID NO: 1319737 - RNA, 19 nt, Artificial Sequence
  Description of Artificial Sequence: Synthetic oligonucleotide
  Antisense strand to SEQ ID NO: 1319736
aaugauacaggccugcuuu

SEQ ID NO: 1319738 - RNA, 19 nt, Artificial Sequence
  Description of Artificial Sequence: Synthetic oligonucleotide
  Sense strand starting at position 663 of SEQ ID NO: 1242048
cuguaucauuccuuugguu

SEQ ID NO: 1319739 - RNA, 19 nt, Artificial Sequence
  Description of Artificial Sequence: Synthetic oligonucleotide
  Antisense strand to SEQ ID NO: 1319738
aaccaaaggaaugauacag

SEQ ID NO: 1319740 - RNA, 19 nt, Artificial Sequence
  Description of Artificial Sequence: Synthetic oligonucleotide
  Sense strand starting at position 665 of SEQ ID NO: 1242048
guaucauuccuuugguuuc

SEQ ID NO: 1319741 - RNA, 19 nt, Artificial Sequence
  Description of Artificial Sequence: Synthetic oligonucleotide
  Antisense strand to SEQ ID NO: 1319740
gaaaccaaaggaaugauac

SEQ ID NO: 1319742 - RNA, 19 nt, Artificial Sequence
  Description of Artificial Sequence: Synthetic oligonucleotide
  Sense strand starting at position 63 of SEQ ID NO: 1242049
ugugacaacugccuauaaa

SEQ ID NO: 1319743 - RNA, 19 nt, Artificial Sequence
  Description of Artificial Sequence: Synthetic oligonucleotide
  Antisense strand to SEQ ID NO: 1319742
uuuauaggcaguugucaca

SEQ ID NO: 1319744 - RNA, 19 nt, Artificial Sequence
  Description of Artificial Sequence: Synthetic oligonucleotide
  Sense strand starting at position 143 of SEQ ID NO: 1242049
guggaagucucuccacuca

SEQ ID NO: 1319745 - RNA, 19 nt, Artificial Sequence
  Description of Artificial Sequence: Synthetic oligonucleotide
  Antisense strand to SEQ ID NO: 1319744
ugaguggagagacuuccac

SEQ ID NO: 1319746 - RNA, 19 nt, Artificial Sequence
  Description of Artificial Sequence: Synthetic oligonucleotide
  Sense strand starting at position 164 of SEQ ID NO: 1242049
gcuggacccuaauuaaugu

SEQ ID NO: 1319747 - RNA, 19 nt, Artificial Sequence
  Description of Artificial Sequence: Synthetic oligonucleotide
  Antisense strand to SEQ ID NO: 1319746
acauuaauuaggguccagc

SEQ ID NO: 1319748 - RNA, 19 nt, Artificial Sequence
  Description of Artificial Sequence: Synthetic oligonucleotide
  Sense strand starting at position 177 of SEQ ID NO: 1242049
uaauguauuugagauccag

SEQ ID NO: 1319749 - RNA, 19 nt, Artificial Sequence
  Description of Artificial Sequence: Synthetic oligonucleotide
  Antisense strand to SEQ ID NO: 1319748
cuggaucucaaauacauua

SEQ ID NO: 1319750 - RNA, 19 nt, Artificial Sequence
  Description of Artificial Sequence: Synthetic oligonucleotide
  Sense strand starting at position 287 of SEQ ID NO: 1242049
cgaacaguaugcuucgaaa

SEQ ID NO: 1319751 - RNA, 19 nt, Artificial Sequence
  Description of Artificial Sequence: Synthetic oligonucleotide
  Antisense strand to SEQ ID NO: 1319750
uuucgaagcauacuguucg

SEQ ID NO: 1319752 - RNA, 19 nt, Artificial Sequence
  Description of Artificial Sequence: Synthetic oligonucleotide
  Sense strand starting at position 2086 of SEQ ID NO: 1242049
uggacucgauuagaaugaa

SEQ ID NO: 1319753 - RNA, 19 nt, Artificial Sequence
  Description of Artificial Sequence: Synthetic oligonucleotide
  Antisense strand to SEQ ID NO: 1319752
uucauucuaaucgagucca

SEQ ID NO: 1319754 - RNA, 19 nt, Artificial Sequence
  Description of Artificial Sequence: Synthetic oligonucleotide
  Sense strand starting at position 2110 of SEQ ID NO: 1242049
uaccuaacgcaguguauau

SEQ ID NO: 1319755 - RNA, 19 nt, Artificial Sequence
  Description of Artificial Sequence: Synthetic oligonucleotide
  Antisense strand to SEQ ID NO: 1319754
auauacacugcguuaggua

SEQ ID NO: 1319756 - RNA, 19 nt, Artificial Sequence
  Description of Artificial Sequence: Synthetic oligonucleotide
  Sense strand starting at position 2282 of SEQ ID NO: 1242049
ccucauuagccacguacau

SEQ ID NO: 1319757 - RNA, 19 nt, Artificial Sequence
  Description of Artificial Sequence: Synthetic oligonucleotide
  Antisense strand to SEQ ID NO: 1319756
auguacguggcuaaugagg

SEQ ID NO: 1319758 - RNA, 19 nt, Artificial Sequence
  Description of Artificial Sequence: Synthetic oligonucleotide
  Sense strand starting at position 2327 of SEQ ID NO: 1242049
gugugucguccguccuagu

SEQ ID NO: 1319759 - RNA, 19 nt, Artificial Sequence
  Description of Artificial Sequence: Synthetic oligonucleotide
  Antisense strand to SEQ ID NO: 1319758
acuaggacggacgacacac

SEQ ID NO: 1319760 - RNA, 19 nt, Artificial Sequence
  Description of Artificial Sequence: Synthetic oligonucleotide
  Sense strand starting at position 2604 of SEQ ID NO: 1242049
acagaauaaugguaaguaa

SEQ ID NO: 1319761 - RNA, 19 nt, Artificial Sequence
  Description of Artificial Sequence: Synthetic oligonucleotide
  Antisense strand to SEQ ID NO: 1319760
uuacuuaccauuauucugu

SEQ ID NO: 1319762 - RNA, 19 nt, Artificial Sequence
  Description of Artificial Sequence: Synthetic oligonucleotide
  Sense strand starting at position 2784 of SEQ ID NO: 1242049
uuguaaaucuauuccagga

SEQ ID NO: 1319763 - RNA, 19 nt, Artificial Sequence
  Description of Artificial Sequence: Synthetic oligonucleotide
  Antisense strand to SEQ ID NO: 1319762
uccuggaauagauuuacaa

SEQ ID NO: 1319764 - RNA, 19 nt, Artificial Sequence
  Description of Artificial Sequence: Synthetic oligonucleotide
  Sense strand starting at position 2828 of SEQ ID NO: 1242049
gcaaauauacaggaagugu

SEQ ID NO: 1319765 - RNA, 19 nt, Artificial Sequence
  Description of Artificial Sequence: Synthetic oligonucleotide
  Antisense strand to SEQ ID NO: 1319764
acacuuccuguauauuugc

SEQ ID NO: 1319766 - RNA, 19 nt, Artificial Sequence
  Description of Artificial Sequence: Synthetic oligonucleotide
  Sense strand starting at position 2837 of SEQ ID NO: 1242049
caggaaguguuucucugaa

SEQ ID NO: 1319767 - RNA, 19 nt, Artificial Sequence
  Description of Artificial Sequence: Synthetic oligonucleotide
  Antisense strand to SEQ ID NO: 1319766
uucagagaaacacuuccug

SEQ ID NO: 1319768 - RNA, 19 nt, Artificial Sequence
  Description of Artificial Sequence: Synthetic oligonucleotide
  Sense strand starting at position 2839 of SEQ ID NO: 1242049
ggaaguguuucucugaaua

SEQ ID NO: 1319769 - RNA, 19 nt, Artificial Sequence
  Description of Artificial Sequence: Synthetic oligonucleotide
  Antisense strand to SEQ ID NO: 1319768
uauucagagaaacacuucc

SEQ ID NO: 1319770 - RNA, 19 nt, Artificial Sequence
  Description of Artificial Sequence: Synthetic oligonucleotide
  Sense strand starting at position 3001 of SEQ ID NO: 1242049
guaccacuagggugaaauu

SEQ ID NO: 1319771 - RNA, 19 nt, Artificial Sequence
  Description of Artificial Sequence: Synthetic oligonucleotide
  Antisense strand to SEQ ID NO: 1319770
aauuucacccuagugguac

SEQ ID NO: 1319772 - RNA, 19 nt, Artificial Sequence
  Description of Artificial Sequence: Synthetic oligonucleotide
  Sense strand starting at position 3010 of SEQ ID NO: 1242049
gggugaaauuccuugggag

SEQ ID NO: 1319773 - RNA, 19 nt, Artificial Sequence
  Description of Artificial Sequence: Synthetic oligonucleotide
  Antisense strand to SEQ ID NO: 1319772
cucccaaggaauuucaccc

SEQ ID NO: 1319774 - RNA, 19 nt, Artificial Sequence
  Description of Artificial Sequence: Synthetic oligonucleotide
  Sense strand starting at position 3011 of SEQ ID NO: 1242049
ggugaaauuccuugggaga

SEQ ID NO: 1319775 - RNA, 19 nt, Artificial Sequence
  Description of Artificial Sequence: Synthetic oligonucleotide
  Antisense strand to SEQ ID NO: 1319774
ucucccaaggaauuucacc

SEQ ID NO: 1319776 - RNA, 19 nt, Artificial Sequence
  Description of Artificial Sequence: Synthetic oligonucleotide
  Sense strand starting at position 3012 of SEQ ID NO: 1242049
gugaaauuccuugggagac

SEQ ID NO: 1319777 - RNA, 19 nt, Artificial Sequence
  Description of Artificial Sequence: Synthetic oligonucleotide
  Antisense strand to SEQ ID NO: 1319776
gucucccaaggaauuucac

SEQ ID NO: 1319778 - RNA, 19 nt, Artificial Sequence
  Description of Artificial Sequence: Synthetic oligonucleotide
  Sense strand starting at position 3014 of SEQ ID NO: 1242049
gaaauuccuugggagacau

SEQ ID NO: 1319779 - RNA, 19 nt, Artificial Sequence
  Description of Artificial Sequence: Synthetic oligonucleotide
  Antisense strand to SEQ ID NO: 1319778
augucucccaaggaauuuc

SEQ ID NO: 1319780 - RNA, 19 nt, Artificial Sequence
  Description of Artificial Sequence: Synthetic oligonucleotide
  Sense strand starting at position 3084 of SEQ ID NO: 1242049
ucaccuauuagguguugga

SEQ ID NO: 1319781 - RNA, 19 nt, Artificial Sequence
  Description of Artificial Sequence: Synthetic oligonucleotide
  Antisense strand to SEQ ID NO: 1319780
uccaacaccuaauagguga

SEQ ID NO: 1319782 - RNA, 19 nt, Artificial Sequence
  Description of Artificial Sequence: Synthetic oligonucleotide
  Sense strand starting at position 3172 of SEQ ID NO: 1242049
guuggaagaauugguaaau

SEQ ID NO: 1319783 - RNA, 19 nt, Artificial Sequence
  Description of Artificial Sequence: Synthetic oligonucleotide
  Antisense strand to SEQ ID NO: 1319782
auuuaccaauucuuccaac

SEQ ID NO: 1319784 - RNA, 19 nt, Artificial Sequence
  Description of Artificial Sequence: Synthetic oligonucleotide
  Sense strand starting at position 3270 of SEQ ID NO: 1242049
uuguauuagcgaggguuau

SEQ ID NO: 1319785 - RNA, 19 nt, Artificial Sequence
  Description of Artificial Sequence: Synthetic oligonucleotide
  Antisense strand to SEQ ID NO: 1319784
auaacccucgcuaauacaa

SEQ ID NO: 1319786 - RNA, 19 nt, Artificial Sequence
  Description of Artificial Sequence: Synthetic oligonucleotide
  Sense strand starting at position 3271 of SEQ ID NO: 1242049
uguauuagcgaggguuaua

SEQ ID NO: 1319787 - RNA, 19 nt, Artificial Sequence
  Description of Artificial Sequence: Synthetic oligonucleotide
  Antisense strand to SEQ ID NO: 1319786
uauaacccucgcuaauaca

SEQ ID NO: 1319788 - RNA, 19 nt, Artificial Sequence
  Description of Artificial Sequence: Synthetic oligonucleotide
  Sense strand starting at position 3310 of SEQ ID NO: 1242049
aaagaaaugucagcuguaa

SEQ ID NO: 1319789 - RNA, 19 nt, Artificial Sequence
  Description of Artificial Sequence: Synthetic oligonucleotide
  Antisense strand to SEQ ID NO: 1319788
uuacagcugacauuucuuu

SEQ ID NO: 1319790 - RNA, 19 nt, Artificial Sequence
  Description of Artificial Sequence: Synthetic oligonucleotide
  Sense strand starting at position 3312 of SEQ ID NO: 1242049
agaaaugucagcuguaagg

SEQ ID NO: 1319791 - RNA, 19 nt, Artificial Sequence
  Description of Artificial Sequence: Synthetic oligonucleotide
  Antisense strand to SEQ ID NO: 1319790
ccuuacagcugacauuucu

SEQ ID NO: 1319792 - RNA, 19 nt, Artificial Sequence
  Description of Artificial Sequence: Synthetic oligonucleotide
  Sense strand starting at position 3314 of SEQ ID NO: 1242049
aaaugucagcuguaaggaa

SEQ ID NO: 1319793 - RNA, 19 nt, Artificial Sequence
  Description of Artificial Sequence: Synthetic oligonucleotide
  Antisense strand to SEQ ID NO: 1319792
uuccuuacagcugacauuu

SEQ ID NO: 1319794 - RNA, 19 nt, Artificial Sequence
  Description of Artificial Sequence: Synthetic oligonucleotide
  Sense strand starting at position 3318 of SEQ ID NO: 1242049
gucagcuguaaggaaauau

SEQ ID NO: 1319795 - RNA, 19 nt, Artificial Sequence
  Description of Artificial Sequence: Synthetic oligonucleotide
  Antisense strand to SEQ ID NO: 1319794
auauuuccuuacagcugac

SEQ ID NO: 1319796 - RNA, 19 nt, Artificial Sequence
  Description of Artificial Sequence: Synthetic oligonucleotide
  Sense strand starting at position 3470 of SEQ ID NO: 1242049
ucagcauguugcuuaaauu

SEQ ID NO: 1319797 - RNA, 19 nt, Artificial Sequence
  Description of Artificial Sequence: Synthetic oligonucleotide
  Antisense strand to SEQ ID NO: 1319796
aauuuaagcaacaugcuga

SEQ ID NO: 1319798 - RNA, 19 nt, Artificial Sequence
  Description of Artificial Sequence: Synthetic oligonucleotide
  Sense strand starting at position 3529 of SEQ ID NO: 1242049
uccuccuaguguuuaugua

SEQ ID NO: 1319799 - RNA, 19 nt, Artificial Sequence
  Description of Artificial Sequence: Synthetic oligonucleotide
  Antisense strand to SEQ ID NO: 1319798
uacauaaacacuaggagga

SEQ ID NO: 1319800 - RNA, 19 nt, Artificial Sequence
  Description of Artificial Sequence: Synthetic oligonucleotide
  Sense strand starting at position 3530 of SEQ ID NO: 1242049
ccuccuaguguuuauguaa

SEQ ID NO: 1319801 - RNA, 19 nt, Artificial Sequence
  Description of Artificial Sequence: Synthetic oligonucleotide
  Antisense strand to SEQ ID NO: 1319800
uuacauaaacacuaggagg

SEQ ID NO: 1319802 - RNA, 19 nt, Artificial Sequence
  Description of Artificial Sequence: Synthetic oligonucleotide
  Sense strand starting at position 3533 of SEQ ID NO: 1242049
ccuaguguuuauguaacau

SEQ ID NO: 1319803 - RNA, 19 nt, Artificial Sequence
  Description of Artificial Sequence: Synthetic oligonucleotide
  Antisense strand to SEQ ID NO: 1319802
auguuacauaaacacuagg

SEQ ID NO: 1319804 - RNA, 19 nt, Artificial Sequence
  Description of Artificial Sequence: Synthetic oligonucleotide
  Sense strand starting at position 3595 of SEQ ID NO: 1242049
aaucguaaggcccaucaga

SEQ ID NO: 1319805 - RNA, 19 nt, Artificial Sequence
  Description of Artificial Sequence: Synthetic oligonucleotide
  Antisense strand to SEQ ID NO: 1319804
ucugaugggccuuacgauu

SEQ ID NO: 1319806 - RNA, 19 nt, Artificial Sequence
  Description of Artificial Sequence: Synthetic oligonucleotide
  Sense strand starting at position 3621 of SEQ ID NO: 1242049
agaaacucacauugcuaga

SEQ ID NO: 1319807 - RNA, 19 nt, Artificial Sequence
  Description of Artificial Sequence: Synthetic oligonucleotide
  Antisense strand to SEQ ID NO: 1319806
ucuagcaaugugaguuucu

SEQ ID NO: 1319808 - RNA, 19 nt, Artificial Sequence
  Description of Artificial Sequence: Synthetic oligonucleotide
  Sense strand starting at position 3626 of SEQ ID NO: 1242049
cucacauugcuagaagagu

SEQ ID NO: 1319809 - RNA, 19 nt, Artificial Sequence
  Description of Artificial Sequence: Synthetic oligonucleotide
  Antisense strand to SEQ ID NO: 1319808
acucuucuagcaaugugag

SEQ ID NO: 1319810 - RNA, 19 nt, Artificial Sequence
  Description of Artificial Sequence: Synthetic oligonucleotide
  Sense strand starting at position 3635 of SEQ ID NO: 1242049
cuagaagagugcuuacuac

SEQ ID NO: 1319811 - RNA, 19 nt, Artificial Sequence
  Description of Artificial Sequence: Synthetic oligonucleotide
  Antisense strand to SEQ ID NO: 1319810
guaguaagcacucuucuag

SEQ ID NO: 1319812 - RNA, 19 nt, Artificial Sequence
  Description of Artificial Sequence: Synthetic oligonucleotide
  Sense strand starting at position 3684 of SEQ ID NO: 1242049
uucuguauuugugcugaga

SEQ ID NO: 1319813 - RNA, 19 nt, Artificial Sequence
  Description of Artificial Sequence: Synthetic oligonucleotide
  Antisense strand to SEQ ID NO: 1319812
ucucagcacaaauacagaa

SEQ ID NO: 1319814 - RNA, 19 nt, Artificial Sequence
  Description of Artificial Sequence: Synthetic oligonucleotide
  Sense strand starting at position 3701 of SEQ ID NO: 1242049
gaaauaauaggcuauccgu

SEQ ID NO: 1319815 - RNA, 19 nt, Artificial Sequence
  Description of Artificial Sequence: Synthetic oligonucleotide
  Antisense strand to SEQ ID NO: 1319814
acggauagccuauuauuuc

SEQ ID NO: 1319816 - RNA, 19 nt, Artificial Sequence
  Description of Artificial Sequence: Synthetic oligonucleotide
  Sense strand starting at position 3708 of SEQ ID NO: 1242049
uaggcuauccguugaauuc

SEQ ID NO: 1319817 - RNA, 19 nt, Artificial Sequence
  Description of Artificial Sequence: Synthetic oligonucleotide
  Antisense strand to SEQ ID NO: 1319816
gaauucaacggauagccua

SEQ ID NO: 1319818 - RNA, 19 nt, Artificial Sequence
  Description of Artificial Sequence: Synthetic oligonucleotide
  Sense strand starting at position 3762 of SEQ ID NO: 1242049
gaaauuaagcaaugucgug

SEQ ID NO: 1319819 - RNA, 19 nt, Artificial Sequence
  Description of Artificial Sequence: Synthetic oligonucleotide
  Antisense strand to SEQ ID NO: 1319818
cacgacauugcuuaauuuc

SEQ ID NO: 1319820 - RNA, 19 nt, Artificial Sequence
  Description of Artificial Sequence: Synthetic oligonucleotide
  Sense strand starting at position 3778 of SEQ ID NO: 1242049
gugaucguuguggaagaca

SEQ ID NO: 1319821 - RNA, 19 nt, Artificial Sequence
  Description of Artificial Sequence: Synthetic oligonucleotide
  Antisense strand to SEQ ID NO: 1319820
ugucuuccacaacgaucac

SEQ ID NO: 1319822 - RNA, 19 nt, Artificial Sequence
  Description of Artificial Sequence: Synthetic oligonucleotide
  Sense strand starting at position 1 of SEQ ID NO: 1242050
gucacaguuccuggaauca

SEQ ID NO: 1319823 - RNA, 19 nt, Artificial Sequence
  Description of Artificial Sequence: Synthetic oligonucleotide
  Antisense strand to SEQ ID NO: 1319822
ugauuccaggaacugugac

SEQ ID NO: 1319824 - RNA, 19 nt, Artificial Sequence
  Description of Artificial Sequence: Synthetic oligonucleotide
  Sense strand starting at position 172 of SEQ ID NO: 1242050
ggugcagaaucacccuaau

SEQ ID NO: 1319825 - RNA, 19 nt, Artificial Sequence
  Description of Artificial Sequence: Synthetic oligonucleotide
  Antisense strand to SEQ ID NO: 1319824
auuagggugauucugcacc

SEQ ID NO: 1319826 - RNA, 19 nt, Artificial Sequence
  Description of Artificial Sequence: Synthetic oligonucleotide
  Sense strand starting at position 264 of SEQ ID NO: 1242050
aaauaaacgcuguaguuau

SEQ ID NO: 1319827 - RNA, 19 nt, Artificial Sequence
  Description of Artificial Sequence: Synthetic oligonucleotide
  Antisense strand to SEQ ID NO: 1319826
auaacuacagcguuuauuu

SEQ ID NO: 1319828 - RNA, 19 nt, Artificial Sequence
  Description of Artificial Sequence: Synthetic oligonucleotide
  Sense strand starting at position 275 of SEQ ID NO: 1242050
guaguuaucugagcgacug

SEQ ID NO: 1319829 - RNA, 19 nt, Artificial Sequence
  Description of Artificial Sequence: Synthetic oligonucleotide
  Antisense strand to SEQ ID NO: 1319828
cagucgcucagauaacuac

SEQ ID NO: 1319830 - RNA, 19 nt, Artificial Sequence
  Description of Artificial Sequence: Synthetic oligonucleotide
  Sense strand starting at position 277 of SEQ ID NO: 1242050
aguuaucugagcgacugua

SEQ ID NO: 1319831 - RNA, 19 nt, Artificial Sequence
  Description of Artificial Sequence: Synthetic oligonucleotide
  Antisense strand to SEQ ID NO: 1319830
uacagucgcucagauaacu

SEQ ID NO: 1319832 - RNA, 19 nt, Artificial Sequence
  Description of Artificial Sequence: Synthetic oligonucleotide
  Sense strand starting at position 304 of SEQ ID NO: 1242050
ccgucaaauccacaagugu

SEQ ID NO: 1319833 - RNA, 19 nt, Artificial Sequence
  Description of Artificial Sequence: Synthetic oligonucleotide
  Antisense strand to SEQ ID NO: 1319832
acacuuguggauuugacgg

SEQ ID NO: 1319834 - RNA, 19 nt, Artificial Sequence
  Description of Artificial Sequence: Synthetic oligonucleotide
  Sense strand starting at position 399 of SEQ ID NO: 1242050
cugagaaaguacguggaaa

SEQ ID NO: 1319835 - RNA, 19 nt, Artificial Sequence
  Description of Artificial Sequence: Synthetic oligonucleotide
  Antisense strand to SEQ ID NO: 1319834
uuuccacguacuuucucag

SEQ ID NO: 1319836 - RNA, 19 nt, Artificial Sequence
  Description of Artificial Sequence: Synthetic oligonucleotide
  Sense strand starting at position 470 of SEQ ID NO: 1242050
ugugacaacugccuauaaa

SEQ ID NO: 1319837 - RNA, 19 nt, Artificial Sequence
  Description of Artificial Sequence: Synthetic oligonucleotide
  Antisense strand to SEQ ID NO: 1319836
uuuauaggcaguugucaca

SEQ ID NO: 1319838 - RNA, 19 nt, Artificial Sequence
  Description of Artificial Sequence: Synthetic oligonucleotide
  Sense strand starting at position 550 of SEQ ID NO: 1242050
guggaagucucuccacuca

SEQ ID NO: 1319839 - RNA, 19 nt, Artificial Sequence
  Description of Artificial Sequence: Synthetic oligonucleotide
  Antisense strand to SEQ ID NO: 1319838
ugaguggagagacuuccac

SEQ ID NO: 1319840 - RNA, 19 nt, Artificial Sequence
  Description of Artificial Sequence: Synthetic oligonucleotide
  Sense strand starting at position 571 of SEQ ID NO: 1242050
gcuggacccuaauuaaugu

SEQ ID NO: 1319841 - RNA, 19 nt, Artificial Sequence
  Description of Artificial Sequence: Synthetic oligonucleotide
  Antisense strand to SEQ ID NO: 1319840
acauuaauuaggguccagc

SEQ ID NO: 1319842 - RNA, 19 nt, Artificial Sequence
  Description of Artificial Sequence: Synthetic oligonucleotide
  Sense strand starting at position 584 of SEQ ID NO: 1242050
uaauguauuugagauccag

SEQ ID NO: 1319843 - RNA, 19 nt, Artificial Sequence
  Description of Artificial Sequence: Synthetic oligonucleotide
  Antisense strand to SEQ ID NO: 1319842
cuggaucucaaauacauua

SEQ ID NO: 1319844 - RNA, 19 nt, Artificial Sequence
  Description of Artificial Sequence: Synthetic oligonucleotide
  Sense strand starting at position 694 of SEQ ID NO: 1242050
cgaacaguaugcuucgaaa

SEQ ID NO: 1319845 - RNA, 19 nt, Artificial Sequence
  Description of Artificial Sequence: Synthetic oligonucleotide
  Antisense strand to SEQ ID NO: 1319844
uuucgaagcauacuguucg

SEQ ID NO: 1319846 - RNA, 19 nt, Artificial Sequence
  Description of Artificial Sequence: Synthetic oligonucleotide
  Sense strand starting at position 2493 of SEQ ID NO: 1242050
uggacucgauuagaaugaa

SEQ ID NO: 1319847 - RNA, 19 nt, Artificial Sequence
  Description of Artificial Sequence: Synthetic oligonucleotide
  Antisense strand to SEQ ID NO: 1319846
uucauucuaaucgagucca

SEQ ID NO: 1319848 - RNA, 19 nt, Artificial Sequence
  Description of Artificial Sequence: Synthetic oligonucleotide
  Sense strand starting at position 2517 of SEQ ID NO: 1242050
uaccuaacgcaguguauau

SEQ ID NO: 1319849 - RNA, 19 nt, Artificial Sequence
  Description of Artificial Sequence: Synthetic oligonucleotide
  Antisense strand to SEQ ID NO: 1319848
auauacacugcguuaggua

SEQ ID NO: 1319850 - RNA, 19 nt, Artificial Sequence
  Description of Artificial Sequence: Synthetic oligonucleotide
  Sense strand starting at position 2678 of SEQ ID NO: 1242050
ucgggucacugccucauua

SEQ ID NO: 1319851 - RNA, 19 nt, Artificial Sequence
  Description of Artificial Sequence: Synthetic oligonucleotide
  Antisense strand to SEQ ID NO: 1319850
uaaugaggcagugacccga

SEQ ID NO: 1319852 - RNA, 19 nt, Artificial Sequence
  Description of Artificial Sequence: Synthetic oligonucleotide
  Sense strand starting at position 2689 of SEQ ID NO: 1242050
ccucauuagccacguacau

SEQ ID NO: 1319853 - RNA, 19 nt, Artificial Sequence
  Description of Artificial Sequence: Synthetic oligonucleotide
  Antisense strand to SEQ ID NO: 1319852
auguacguggcuaaugagg

SEQ ID NO: 1319854 - RNA, 19 nt, Artificial Sequence
  Description of Artificial Sequence: Synthetic oligonucleotide
  Sense strand starting at position 2734 of SEQ ID NO: 1242050
gugugucguccguccuagu

SEQ ID NO: 1319855 - RNA, 19 nt, Artificial Sequence
  Description of Artificial Sequence: Synthetic oligonucleotide
  Antisense strand to SEQ ID NO: 1319854
acuaggacggacgacacac

SEQ ID NO: 1319856 - RNA, 19 nt, Artificial Sequence
  Description of Artificial Sequence: Synthetic oligonucleotide
  Sense strand starting at position 3011 of SEQ ID NO: 1242050
acagaauaaugguaaguaa

SEQ ID NO: 1319857 - RNA, 19 nt, Artificial Sequence
  Description of Artificial Sequence: Synthetic oligonucleotide
  Antisense strand to SEQ ID NO: 1319856
uuacuuaccauuauucugu

SEQ ID NO: 1319858 - RNA, 19 nt, Artificial Sequence
  Description of Artificial Sequence: Synthetic oligonucleotide
  Sense strand starting at position 3191 of SEQ ID NO: 1242050
uuguaaaucuauuccagga

SEQ ID NO: 1319859 - RNA, 19 nt, Artificial Sequence
  Description of Artificial Sequence: Synthetic oligonucleotide
  Antisense strand to SEQ ID NO: 1319858
uccuggaauagauuuacaa

SEQ ID NO: 1319860 - RNA, 19 nt, Artificial Sequence
  Description of Artificial Sequence: Synthetic oligonucleotide
  Sense strand starting at position 3235 of SEQ ID NO: 1242050
gcaaauauacaggaagugu

SEQ ID NO: 1319861 - RNA, 19 nt, Artificial Sequence
  Description of Artificial Sequence: Synthetic oligonucleotide
  Antisense strand to SEQ ID NO: 1319860
acacuuccuguauauuugc

SEQ ID NO: 1319862 - RNA, 19 nt, Artificial Sequence
  Description of Artificial Sequence: Synthetic oligonucleotide
  Sense strand starting at position 3244 of SEQ ID NO: 1242050
caggaaguguuucucugaa

SEQ ID NO: 1319863 - RNA, 19 nt, Artificial Sequence
  Description of Artificial Sequence: Synthetic oligonucleotide
  Antisense strand to SEQ ID NO: 1319862
uucagagaaacacuuccug

SEQ ID NO: 1319864 - RNA, 19 nt, Artificial Sequence
  Description of Artificial Sequence: Synthetic oligonucleotide
  Sense strand starting at position 3246 of SEQ ID NO: 1242050
ggaaguguuucucugaaua

SEQ ID NO: 1319865 - RNA, 19 nt, Artificial Sequence
  Description of Artificial Sequence: Synthetic oligonucleotide
  Antisense strand to SEQ ID NO: 1319864
uauucagagaaacacuucc

SEQ ID NO: 1319866 - RNA, 19 nt, Artificial Sequence
  Description of Artificial Sequence: Synthetic oligonucleotide
  Sense strand starting at position 3408 of SEQ ID NO: 1242050
guaccacuagggugaaauu

SEQ ID NO: 1319867 - RNA, 19 nt, Artificial Sequence
  Description of Artificial Sequence: Synthetic oligonucleotide
  Antisense strand to SEQ ID NO: 1319866
aauuucacccuagugguac

SEQ ID NO: 1319868 - RNA, 19 nt, Artificial Sequence
  Description of Artificial Sequence: Synthetic oligonucleotide
  Sense strand starting at position 3417 of SEQ ID NO: 1242050
gggugaaauuccuugggag

SEQ ID NO: 1319869 - RNA, 19 nt, Artificial Sequence
  Description of Artificial Sequence: Synthetic oligonucleotide
  Antisense strand to SEQ ID NO: 1319868
cucccaaggaauuucaccc

SEQ ID NO: 1319870 - RNA, 19 nt, Artificial Sequence
  Description of Artificial Sequence: Synthetic oligonucleotide
  Sense strand starting at position 3418 of SEQ ID NO: 1242050
ggugaaauuccuugggaga

SEQ ID NO: 1319871 - RNA, 19 nt, Artificial Sequence
  Description of Artificial Sequence: Synthetic oligonucleotide
  Antisense strand to SEQ ID NO: 1319870
ucucccaaggaauuucacc

SEQ ID NO: 1319872 - RNA, 19 nt, Artificial Sequence
  Description of Artificial Sequence: Synthetic oligonucleotide
  Sense strand starting at position 3419 of SEQ ID NO: 1242050
gugaaauuccuugggagac

SEQ ID NO: 1319873 - RNA, 19 nt, Artificial Sequence
  Description of Artificial Sequence: Synthetic oligonucleotide
  Antisense strand to SEQ ID NO: 1319872
gucucccaaggaauuucac

SEQ ID NO: 1319874 - RNA, 19 nt, Artificial Sequence
  Description of Artificial Sequence: Synthetic oligonucleotide
  Sense strand starting at position 3421 of SEQ ID NO: 1242050
gaaauuccuugggagacau

SEQ ID NO: 1319875 - RNA, 19 nt, Artificial Sequence
  Description of Artificial Sequence: Synthetic oligonucleotide
  Antisense strand to SEQ ID NO: 1319874
augucucccaaggaauuuc

SEQ ID NO: 1319876 - RNA, 19 nt, Artificial Sequence
  Description of Artificial Sequence: Synthetic oligonucleotide
  Sense strand starting at position 3491 of SEQ ID NO: 1242050
ucaccuauuagguguugga

SEQ ID NO: 1319877 - RNA, 19 nt, Artificial Sequence
  Description of Artificial Sequence: Synthetic oligonucleotide
  Antisense strand to SEQ ID NO: 1319876
uccaacaccuaauagguga

SEQ ID NO: 1319878 - RNA, 19 nt, Artificial Sequence
  Description of Artificial Sequence: Synthetic oligonucleotide
  Sense strand starting at position 3579 of SEQ ID NO: 1242050
guuggaagaauugguaaau

SEQ ID NO: 1319879 - RNA, 19 nt, Artificial Sequence
  Description of Artificial Sequence: Synthetic oligonucleotide
  Antisense strand to SEQ ID NO: 1319878
auuuaccaauucuuccaac

SEQ ID NO: 1319880 - RNA, 19 nt, Artificial Sequence
  Description of Artificial Sequence: Synthetic oligonucleotide
  Sense strand starting at position 3622 of SEQ ID NO: 1242050
aaagucauucggugugagu

SEQ ID NO: 1319881 - RNA, 19 nt, Artificial Sequence
  Description of Artificial Sequence: Synthetic oligonucleotide
  Antisense strand to SEQ ID NO: 1319880
acucacaccgaaugacuuu

SEQ ID NO: 1319882 - RNA, 19 nt, Artificial Sequence
  Description of Artificial Sequence: Synthetic oligonucleotide
  Sense strand starting at position 3677 of SEQ ID NO: 1242050
uuguauuagcgaggguuau

SEQ ID NO: 1319883 - RNA, 19 nt, Artificial Sequence
  Description of Artificial Sequence: Synthetic oligonucleotide
  Antisense strand to SEQ ID NO: 1319882
auaacccucgcuaauacaa

SEQ ID NO: 1319884 - RNA, 19 nt, Artificial Sequence
  Description of Artificial Sequence: Synthetic oligonucleotide
  Sense strand starting at position 3678 of SEQ ID NO: 1242050
uguauuagcgaggguuaua

SEQ ID NO: 1319885 - RNA, 19 nt, Artificial Sequence
  Description of Artificial Sequence: Synthetic oligonucleotide
  Antisense strand to SEQ ID NO: 1319884
uauaacccucgcuaauaca

SEQ ID NO: 1319886 - RNA, 19 nt, Artificial Sequence
  Description of Artificial Sequence: Synthetic oligonucleotide
  Sense strand starting at position 3717 of SEQ ID NO: 1242050
aaagaaaugucagcuguaa

SEQ ID NO: 1319887 - RNA, 19 nt, Artificial Sequence
  Description of Artificial Sequence: Synthetic oligonucleotide
  Antisense strand to SEQ ID NO: 1319886
uuacagcugacauuucuuu

SEQ ID NO: 1319888 - RNA, 19 nt, Artificial Sequence
  Description of Artificial Sequence: Synthetic oligonucleotide
  Sense strand starting at position 3719 of SEQ ID NO: 1242050
agaaaugucagcuguaagg

SEQ ID NO: 1319889 - RNA, 19 nt, Artificial Sequence
  Description of Artificial Sequence: Synthetic oligonucleotide
  Antisense strand to SEQ ID NO: 1319888
ccuuacagcugacauuucu

SEQ ID NO: 1319890 - RNA, 19 nt, Artificial Sequence
  Description of Artificial Sequence: Synthetic oligonucleotide
  Sense strand starting at position 3721 of SEQ ID NO: 1242050
aaaugucagcuguaaggaa

SEQ ID NO: 1319891 - RNA, 19 nt, Artificial Sequence
  Description of Artificial Sequence: Synthetic oligonucleotide
  Antisense strand to SEQ ID NO: 1319890
uuccuuacagcugacauuu

SEQ ID NO: 1319892 - RNA, 19 nt, Artificial Sequence
  Description of Artificial Sequence: Synthetic oligonucleotide
  Sense strand starting at position 3725 of SEQ ID NO: 1242050
gucagcuguaaggaaauau

SEQ ID NO: 1319893 - RNA, 19 nt, Artificial Sequence
  Description of Artificial Sequence: Synthetic oligonucleotide
  Antisense strand to SEQ ID NO: 1319892
auauuuccuuacagcugac

SEQ ID NO: 1319894 - RNA, 19 nt, Artificial Sequence
  Description of Artificial Sequence: Synthetic oligonucleotide
  Sense strand starting at position 3877 of SEQ ID NO: 1242050
ucagcauguugcuuaaauu

SEQ ID NO: 1319895 - RNA, 19 nt, Artificial Sequence
  Description of Artificial Sequence: Synthetic oligonucleotide
  Antisense strand to SEQ ID NO: 1319894
aauuuaagcaacaugcuga

SEQ ID NO: 1319896 - RNA, 19 nt, Artificial Sequence
  Description of Artificial Sequence: Synthetic oligonucleotide
  Sense strand starting at position 3936 of SEQ ID NO: 1242050
uccuccuaguguuuaugua

SEQ ID NO: 1319897 - RNA, 19 nt, Artificial Sequence
  Description of Artificial Sequence: Synthetic oligonucleotide
  Antisense strand to SEQ ID NO: 1319896
uacauaaacacuaggagga

SEQ ID NO: 1319898 - RNA, 19 nt, Artificial Sequence
  Description of Artificial Sequence: Synthetic oligonucleotide
  Sense strand starting at position 3937 of SEQ ID NO: 1242050
ccuccuaguguuuauguaa

SEQ ID NO: 1319899 - RNA, 19 nt, Artificial Sequence
  Description of Artificial Sequence: Synthetic oligonucleotide
  Antisense strand to SEQ ID NO: 1319898
uuacauaaacacuaggagg

SEQ ID NO: 1319900 - RNA, 19 nt, Artificial Sequence
  Description of Artificial Sequence: Synthetic oligonucleotide
  Sense strand starting at position 3940 of SEQ ID NO: 1242050
ccuaguguuuauguaacau

SEQ ID NO: 1319901 - RNA, 19 nt, Artificial Sequence
  Description of Artificial Sequence: Synthetic oligonucleotide
  Antisense strand to SEQ ID NO: 1319900
auguuacauaaacacuagg

SEQ ID NO: 1319902 - RNA, 19 nt, Artificial Sequence
  Description of Artificial Sequence: Synthetic oligonucleotide
  Sense strand starting at position 10 of SEQ ID NO: 1242051
acagcuuggcguggucaaa

SEQ ID NO: 1319903 - RNA, 19 nt, Artificial Sequence
  Description of Artificial Sequence: Synthetic oligonucleotide
  Antisense strand to SEQ ID NO: 1319902
uuugaccacgccaagcugu

SEQ ID NO: 1319904 - RNA, 19 nt, Artificial Sequence
  Description of Artificial Sequence: Synthetic oligonucleotide
  Sense strand starting at position 38 of SEQ ID NO: 1242051
cuauaagauccuuaguggu

SEQ ID NO: 1319905 - RNA, 19 nt, Artificial Sequence
  Description of Artificial Sequence: Synthetic oligonucleotide
  Antisense strand to SEQ ID NO: 1319904
accacuaaggaucuuauag

SEQ ID NO: 1319906 - RNA, 19 nt, Artificial Sequence
  Description of Artificial Sequence: Synthetic oligonucleotide
  Sense strand starting at position 40 of SEQ ID NO: 1242051
auaagauccuuagugguag

SEQ ID NO: 1319907 - RNA, 19 nt, Artificial Sequence
  Description of Artificial Sequence: Synthetic oligonucleotide
  Antisense strand to SEQ ID NO: 1319906
cuaccacuaaggaucuuau

SEQ ID NO: 1319908 - RNA, 19 nt, Artificial Sequence
  Description of Artificial Sequence: Synthetic oligonucleotide
  Sense strand starting at position 46 of SEQ ID NO: 1242051
uccuuagugguagguauuu

SEQ ID NO: 1319909 - RNA, 19 nt, Artificial Sequence
  Description of Artificial Sequence: Synthetic oligonucleotide
  Antisense strand to SEQ ID NO: 1319908
aaauaccuaccacuaagga

SEQ ID NO: 1319910 - RNA, 19 nt, Artificial Sequence
  Description of Artificial Sequence: Synthetic oligonucleotide
  Sense strand starting at position 128 of SEQ ID NO: 1242051
aucugugacuuacugcaaa

SEQ ID NO: 1319911 - RNA, 19 nt, Artificial Sequence
  Description of Artificial Sequence: Synthetic oligonucleotide
  Antisense strand to SEQ ID NO: 1319910
uuugcaguaagucacagau

SEQ ID NO: 1319912 - RNA, 19 nt, Artificial Sequence
  Description of Artificial Sequence: Synthetic oligonucleotide
  Sense strand starting at position 131 of SEQ ID NO: 1242051
ugugacuuacugcaaaguu

SEQ ID NO: 1319913 - RNA, 19 nt, Artificial Sequence
  Description of Artificial Sequence: Synthetic oligonucleotide
  Antisense strand to SEQ ID NO: 1319912
aacuuugcaguaagucaca

SEQ ID NO: 1319914 - RNA, 19 nt, Artificial Sequence
  Description of Artificial Sequence: Synthetic oligonucleotide
  Sense strand starting at position 226 of SEQ ID NO: 1242051
ccagccuaucuugaucaga

SEQ ID NO: 1319915 - RNA, 19 nt, Artificial Sequence
  Description of Artificial Sequence: Synthetic oligonucleotide
  Antisense strand to SEQ ID NO: 1319914
ucugaucaagauaggcugg

SEQ ID NO: 1319916 - RNA, 19 nt, Artificial Sequence
  Description of Artificial Sequence: Synthetic oligonucleotide
  Sense strand starting at position 228 of SEQ ID NO: 1242051
agccuaucuugaucagaau

SEQ ID NO: 1319917 - RNA, 19 nt, Artificial Sequence
  Description of Artificial Sequence: Synthetic oligonucleotide
  Antisense strand to SEQ ID NO: 1319916
auucugaucaagauaggcu

SEQ ID NO: 1319918 - RNA, 19 nt, Artificial Sequence
  Description of Artificial Sequence: Synthetic oligonucleotide
  Sense strand starting at position 229 of SEQ ID NO: 1242051
gccuaucuugaucagaauc

SEQ ID NO: 1319919 - RNA, 19 nt, Artificial Sequence
  Description of Artificial Sequence: Synthetic oligonucleotide
  Antisense strand to SEQ ID NO: 1319918
gauucugaucaagauaggc

SEQ ID NO: 1319920 - RNA, 19 nt, Artificial Sequence
  Description of Artificial Sequence: Synthetic oligonucleotide
  Sense strand starting at position 239 of SEQ ID NO: 1242051
aucagaaucccuuggagug

SEQ ID NO: 1319921 - RNA, 19 nt, Artificial Sequence
  Description of Artificial Sequence: Synthetic oligonucleotide
  Antisense strand to SEQ ID NO: 1319920
cacuccaagggauucugau

SEQ ID NO: 1319922 - RNA, 19 nt, Artificial Sequence
  Description of Artificial Sequence: Synthetic oligonucleotide
  Sense strand starting at position 240 of SEQ ID NO: 1242051
ucagaaucccuuggaguga

SEQ ID NO: 1319923 - RNA, 19 nt, Artificial Sequence
  Description of Artificial Sequence: Synthetic oligonucleotide
  Antisense strand to SEQ ID NO: 1319922
ucacuccaagggauucuga

SEQ ID NO: 1319924 - RNA, 19 nt, Artificial Sequence
  Description of Artificial Sequence: Synthetic oligonucleotide
  Sense strand starting at position 284 of SEQ ID NO: 1242051
caaguuugcccacgugauu

SEQ ID NO: 1319925 - RNA, 19 nt, Artificial Sequence
  Description of Artificial Sequence: Synthetic oligonucleotide
  Antisense strand to SEQ ID NO: 1319924
aaucacgugggcaaacuug

SEQ ID NO: 1319926 - RNA, 19 nt, Artificial Sequence
  Description of Artificial Sequence: Synthetic oligonucleotide
  Sense strand starting at position 295 of SEQ ID NO: 1242051
acgugauuccgacguacac

SEQ ID NO: 1319927 - RNA, 19 nt, Artificial Sequence
  Description of Artificial Sequence: Synthetic oligonucleotide
  Antisense strand to SEQ ID NO: 1319926
guguacgucggaaucacgu

SEQ ID NO: 1319928 - RNA, 19 nt, Artificial Sequence
  Description of Artificial Sequence: Synthetic oligonucleotide
  Sense strand starting at position 304 of SEQ ID NO: 1242051
cgacguacacgagaguuaa

SEQ ID NO: 1319929 - RNA, 19 nt, Artificial Sequence
  Description of Artificial Sequence: Synthetic oligonucleotide
  Antisense strand to SEQ ID NO: 1319928
uuaacucucguguacgucg

SEQ ID NO: 1319930 - RNA, 19 nt, Artificial Sequence
  Description of Artificial Sequence: Synthetic oligonucleotide
  Sense strand starting at position 351 of SEQ ID NO: 1242051
gucucacuguauucucaau

SEQ ID NO: 1319931 - RNA, 19 nt, Artificial Sequence
  Description of Artificial Sequence: Synthetic oligonucleotide
  Antisense strand to SEQ ID NO: 1319930
auugagaauacagugagac

SEQ ID NO: 1319932 - RNA, 19 nt, Artificial Sequence
  Description of Artificial Sequence: Synthetic oligonucleotide
  Sense strand starting at position 357 of SEQ ID NO: 1242051
cuguauucucaauguugua

SEQ ID NO: 1319933 - RNA, 19 nt, Artificial Sequence
  Description of Artificial Sequence: Synthetic oligonucleotide
  Antisense strand to SEQ ID NO: 1319932
uacaacauugagaauacag

SEQ ID NO: 1319934 - RNA, 19 nt, Artificial Sequence
  Description of Artificial Sequence: Synthetic oligonucleotide
  Sense strand starting at position 367 of SEQ ID NO: 1242051
aauguuguauguccgaaag

SEQ ID NO: 1319935 - RNA, 19 nt, Artificial Sequence
  Description of Artificial Sequence: Synthetic oligonucleotide
  Antisense strand to SEQ ID NO: 1319934
cuuucggacauacaacauu

SEQ ID NO: 1319936 - RNA, 19 nt, Artificial Sequence
  Description of Artificial Sequence: Synthetic oligonucleotide
  Sense strand starting at position 444 of SEQ ID NO: 1242051
gagugucccuccgcagaaa

SEQ ID NO: 1319937 - RNA, 19 nt, Artificial Sequence
  Description of Artificial Sequence: Synthetic oligonucleotide
  Antisense strand to SEQ ID NO: 1319936
uuucugcggagggacacuc

SEQ ID NO: 1319938 - RNA, 19 nt, Artificial Sequence
  Description of Artificial Sequence: Synthetic oligonucleotide
  Sense strand starting at position 515 of SEQ ID NO: 1242051
gggccauccuucuccugau

SEQ ID NO: 1319939 - RNA, 19 nt, Artificial Sequence
  Description of Artificial Sequence: Synthetic oligonucleotide
  Antisense strand to SEQ ID NO: 1319938
aucaggagaaggauggccc

SEQ ID NO: 1319940 - RNA, 19 nt, Artificial Sequence
  Description of Artificial Sequence: Synthetic oligonucleotide
  Sense strand starting at position 875 of SEQ ID NO: 1242051
agaaucucuuuccaaacga

SEQ ID NO: 1319941 - RNA, 19 nt, Artificial Sequence
  Description of Artificial Sequence: Synthetic oligonucleotide
  Antisense strand to SEQ ID NO: 1319940
ucguuuggaaagagauucu

SEQ ID NO: 1319942 - RNA, 19 nt, Artificial Sequence
  Description of Artificial Sequence: Synthetic oligonucleotide
  Sense strand starting at position 1325 of SEQ ID NO: 1242051
ccauguugacuucggaaac

SEQ ID NO: 1319943 - RNA, 19 nt, Artificial Sequence
  Description of Artificial Sequence: Synthetic oligonucleotide
  Antisense strand to SEQ ID NO: 1319942
guuuccgaagucaacaugg

SEQ ID NO: 1319944 - RNA, 19 nt, Artificial Sequence
  Description of Artificial Sequence: Synthetic oligonucleotide
  Sense strand starting at position 1623 of SEQ ID NO: 1242051
ggcgaaugucguagccuuu

SEQ ID NO: 1319945 - RNA, 19 nt, Artificial Sequence
  Description of Artificial Sequence: Synthetic oligonucleotide
  Antisense strand to SEQ ID NO: 1319944
aaaggcuacgacauucgcc

SEQ ID NO: 1319946 - RNA, 19 nt, Artificial Sequence
  Description of Artificial Sequence: Synthetic oligonucleotide
  Sense strand starting at position 1674 of SEQ ID NO: 1242051
acauguucccgggaucguu

SEQ ID NO: 1319947 - RNA, 19 nt, Artificial Sequence
  Description of Artificial Sequence: Synthetic oligonucleotide
  Antisense strand to SEQ ID NO: 1319946
aacgaucccgggaacaugu

SEQ ID NO: 1319948 - RNA, 19 nt, Artificial Sequence
  Description of Artificial Sequence: Synthetic oligonucleotide
  Sense strand starting at position 2877 of SEQ ID NO: 1242051
gaacauuucuugggagcac

SEQ ID NO: 1319949 - RNA, 19 nt, Artificial Sequence
  Description of Artificial Sequence: Synthetic oligonucleotide
  Antisense strand to SEQ ID NO: 1319948
gugcucccaagaaauguuc

SEQ ID NO: 1319950 - RNA, 19 nt, Artificial Sequence
  Description of Artificial Sequence: Synthetic oligonucleotide
  Sense strand starting at position 2922 of SEQ ID NO: 1242051
aaauguaauggaugguuaa

SEQ ID NO: 1319951 - RNA, 19 nt, Artificial Sequence
  Description of Artificial Sequence: Synthetic oligonucleotide
  Antisense strand to SEQ ID NO: 1319950
uuaaccauccauuacauuu

SEQ ID NO: 1319952 - RNA, 19 nt, Artificial Sequence
  Description of Artificial Sequence: Synthetic oligonucleotide
  Sense strand starting at position 2923 of SEQ ID NO: 1242051
aauguaauggaugguuaag

SEQ ID NO: 1319953 - RNA, 19 nt, Artificial Sequence
  Description of Artificial Sequence: Synthetic oligonucleotide
  Antisense strand to SEQ ID NO: 1319952
cuuaaccauccauuacauu

SEQ ID NO: 1319954 - RNA, 19 nt, Artificial Sequence
  Description of Artificial Sequence: Synthetic oligonucleotide
  Sense strand starting at position 2943 of SEQ ID NO: 1242051
gaggacugaauauguguuu

SEQ ID NO: 1319955 - RNA, 19 nt, Artificial Sequence
  Description of Artificial Sequence: Synthetic oligonucleotide
  Antisense strand to SEQ ID NO: 1319954
aaacacauauucaguccuc

SEQ ID NO: 1319956 - RNA, 19 nt, Artificial Sequence
  Description of Artificial Sequence: Synthetic oligonucleotide
  Sense strand starting at position 2994 of SEQ ID NO: 1242051
uggagacuggauugucauu

SEQ ID NO: 1319957 - RNA, 19 nt, Artificial Sequence
  Description of Artificial Sequence: Synthetic oligonucleotide
  Antisense strand to SEQ ID NO: 1319956
aaugacaauccagucucca

SEQ ID NO: 1319958 - RNA, 19 nt, Artificial Sequence
  Description of Artificial Sequence: Synthetic oligonucleotide
  Sense strand starting at position 3047 of SEQ ID NO: 1242051
agagcuauccgugguccuu

SEQ ID NO: 1319959 - RNA, 19 nt, Artificial Sequence
  Description of Artificial Sequence: Synthetic oligonucleotide
  Antisense strand to SEQ ID NO: 1319958
aaggaccacggauagcucu

SEQ ID NO: 1319960 - RNA, 19 nt, Artificial Sequence
  Description of Artificial Sequence: Synthetic oligonucleotide
  Sense strand starting at position 3049 of SEQ ID NO: 1242051
agcuauccgugguccuuaa

SEQ ID NO: 1319961 - RNA, 19 nt, Artificial Sequence
  Description of Artificial Sequence: Synthetic oligonucleotide
  Antisense strand to SEQ ID NO: 1319960
uuaaggaccacggauagcu

SEQ ID NO: 1319962 - RNA, 19 nt, Artificial Sequence
  Description of Artificial Sequence: Synthetic oligonucleotide
  Sense strand starting at position 3053 of SEQ ID NO: 1242051
auccgugguccuuaauaua

SEQ ID NO: 1319963 - RNA, 19 nt, Artificial Sequence
  Description of Artificial Sequence: Synthetic oligonucleotide
  Antisense strand to SEQ ID NO: 1319962
uauauuaaggaccacggau

SEQ ID NO: 1319964 - RNA, 19 nt, Artificial Sequence
  Description of Artificial Sequence: Synthetic oligonucleotide
  Sense strand starting at position 3112 of SEQ ID NO: 1242051
cugucauuagaaggcuacu

SEQ ID NO: 1319965 - RNA, 19 nt, Artificial Sequence
  Description of Artificial Sequence: Synthetic oligonucleotide
  Antisense strand to SEQ ID NO: 1319964
aguagccuucuaaugacag

SEQ ID NO: 1319966 - RNA, 19 nt, Artificial Sequence
  Description of Artificial Sequence: Synthetic oligonucleotide
  Sense strand starting at position 3297 of SEQ ID NO: 1242051
agaagaugguuacacaauc

SEQ ID NO: 1319967 - RNA, 19 nt, Artificial Sequence
  Description of Artificial Sequence: Synthetic oligonucleotide
  Antisense strand to SEQ ID NO: 1319966
gauuguguaaccaucuucu

SEQ ID NO: 1319968 - RNA, 19 nt, Artificial Sequence
  Description of Artificial Sequence: Synthetic oligonucleotide
  Sense strand starting at position 3419 of SEQ ID NO: 1242051
acuacuuuccuguauugac

SEQ ID NO: 1319969 - RNA, 19 nt, Artificial Sequence
  Description of Artificial Sequence: Synthetic oligonucleotide
  Antisense strand to SEQ ID NO: 1319968
gucaauacaggaaaguagu

SEQ ID NO: 1319970 - RNA, 19 nt, Artificial Sequence
  Description of Artificial Sequence: Synthetic oligonucleotide
  Sense strand starting at position 3466 of SEQ ID NO: 1242051
uuuaacaucguugagacuu

SEQ ID NO: 1319971 - RNA, 19 nt, Artificial Sequence
  Description of Artificial Sequence: Synthetic oligonucleotide
  Antisense strand to SEQ ID NO: 1319970
aagucucaacgauguuaaa

SEQ ID NO: 1319972 - RNA, 19 nt, Artificial Sequence
  Description of Artificial Sequence: Synthetic oligonucleotide
  Sense strand starting at position 3528 of SEQ ID NO: 1242051
gcauguuucugugcauuaa

SEQ ID NO: 1319973 - RNA, 19 nt, Artificial Sequence
  Description of Artificial Sequence: Synthetic oligonucleotide
  Antisense strand to SEQ ID NO: 1319972
uuaaugcacagaaacaugc

SEQ ID NO: 1319974 - RNA, 19 nt, Artificial Sequence
  Description of Artificial Sequence: Synthetic oligonucleotide
  Sense strand starting at position 3606 of SEQ ID NO: 1242051
accgcaguaccugaaagau

SEQ ID NO: 1319975 - RNA, 19 nt, Artificial Sequence
  Description of Artificial Sequence: Synthetic oligonucleotide
  Antisense strand to SEQ ID NO: 1319974
aucuuucagguacugcggu

SEQ ID NO: 1319976 - RNA, 19 nt, Artificial Sequence
  Description of Artificial Sequence: Synthetic oligonucleotide
  Sense strand starting at position 3694 of SEQ ID NO: 1242051
ucuguuaaugcacaaugga

SEQ ID NO: 1319977 - RNA, 19 nt, Artificial Sequence
  Description of Artificial Sequence: Synthetic oligonucleotide
  Antisense strand to SEQ ID NO: 1319976
uccauugugcauuaacaga

SEQ ID NO: 1319978 - RNA, 19 nt, Artificial Sequence
  Description of Artificial Sequence: Synthetic oligonucleotide
  Sense strand starting at position 3697 of SEQ ID NO: 1242051
guuaaugcacaauggaauu

SEQ ID NO: 1319979 - RNA, 19 nt, Artificial Sequence
  Description of Artificial Sequence: Synthetic oligonucleotide
  Antisense strand to SEQ ID NO: 1319978
aauuccauugugcauuaac

SEQ ID NO: 1319980 - RNA, 19 nt, Artificial Sequence
  Description of Artificial Sequence: Synthetic oligonucleotide
  Sense strand starting at position 3894 of SEQ ID NO: 1242051
accaguuuauauguucuaa

SEQ ID NO: 1319981 - RNA, 19 nt, Artificial Sequence
  Description of Artificial Sequence: Synthetic oligonucleotide
  Antisense strand to SEQ ID NO: 1319980
uuagaacauauaaacuggu

SEQ ID NO: 1319982 - RNA, 19 nt, Artificial Sequence
  Description of Artificial Sequence: Synthetic oligonucleotide
  Sense strand starting at position 112 of SEQ ID NO: 1242052
aucuguagucuguggagaa

SEQ ID NO: 1319983 - RNA, 19 nt, Artificial Sequence
  Description of Artificial Sequence: Synthetic oligonucleotide
  Antisense strand to SEQ ID NO: 1319982
uucuccacagacuacagau

SEQ ID NO: 1319984 - RNA, 19 nt, Artificial Sequence
  Description of Artificial Sequence: Synthetic oligonucleotide
  Sense strand starting at position 116 of SEQ ID NO: 1242052
guagucuguggagaacacu

SEQ ID NO: 1319985 - RNA, 19 nt, Artificial Sequence
  Description of Artificial Sequence: Synthetic oligonucleotide
  Antisense strand to SEQ ID NO: 1319984
aguguucuccacagacuac

SEQ ID NO: 1319986 - RNA, 19 nt, Artificial Sequence
  Description of Artificial Sequence: Synthetic oligonucleotide
  Sense strand starting at position 463 of SEQ ID NO: 1242052
ggagacuugggcuggugau

SEQ ID NO: 1319987 - RNA, 19 nt, Artificial Sequence
  Description of Artificial Sequence: Synthetic oligonucleotide
  Antisense strand to SEQ ID NO: 1319986
aucaccagcccaagucucc

SEQ ID NO: 1319988 - RNA, 19 nt, Artificial Sequence
  Description of Artificial Sequence: Synthetic oligonucleotide
  Sense strand starting at position 464 of SEQ ID NO: 1242052
gagacuugggcuggugauu

SEQ ID NO: 1319989 - RNA, 19 nt, Artificial Sequence
  Description of Artificial Sequence: Synthetic oligonucleotide
  Antisense strand to SEQ ID NO: 1319988
aaucaccagcccaagucuc

SEQ ID NO: 1319990 - RNA, 19 nt, Artificial Sequence
  Description of Artificial Sequence: Synthetic oligonucleotide
  Sense strand starting at position 469 of SEQ ID NO: 1242052
uugggcuggugauugaaga

SEQ ID NO: 1319991 - RNA, 19 nt, Artificial Sequence
  Description of Artificial Sequence: Synthetic oligonucleotide
  Antisense strand to SEQ ID NO: 1319990
ucuucaaucaccagcccaa

SEQ ID NO: 1319992 - RNA, 19 nt, Artificial Sequence
  Description of Artificial Sequence: Synthetic oligonucleotide
  Sense strand starting at position 476 of SEQ ID NO: 1242052
ggugauugaagaggucaga

SEQ ID NO: 1319993 - RNA, 19 nt, Artificial Sequence
  Description of Artificial Sequence: Synthetic oligonucleotide
  Antisense strand to SEQ ID NO: 1319992
ucugaccucuucaaucacc

SEQ ID NO: 1319994 - RNA, 19 nt, Artificial Sequence
  Description of Artificial Sequence: Synthetic oligonucleotide
  Sense strand starting at position 550 of SEQ ID NO: 1242052
caaaguuaacuuuggguuu

SEQ ID NO: 1319995 - RNA, 19 nt, Artificial Sequence
  Description of Artificial Sequence: Synthetic oligonucleotide
  Antisense strand to SEQ ID NO: 1319994
aaacccaaaguuaacuuug

SEQ ID NO: 1319996 - RNA, 19 nt, Artificial Sequence
  Description of Artificial Sequence: Synthetic oligonucleotide
  Sense strand starting at position 578 of SEQ ID NO: 1242052
ucagaagccucucuaagaa

SEQ ID NO: 1319997 - RNA, 19 nt, Artificial Sequence
  Description of Artificial Sequence: Synthetic oligonucleotide
  Antisense strand to SEQ ID NO: 1319996
uucuuagagaggcuucuga

SEQ ID NO: 1319998 - RNA, 19 nt, Artificial Sequence
  Description of Artificial Sequence: Synthetic oligonucleotide
  Sense strand starting at position 620 of SEQ ID NO: 1242052
auaugauggugacagagaa

SEQ ID NO: 1319999 - RNA, 19 nt, Artificial Sequence
  Description of Artificial Sequence: Synthetic oligonucleotide
  Antisense strand to SEQ ID NO: 1319998
uucucugucaccaucauau

SEQ ID NO: 1320000 - RNA, 19 nt, Artificial Sequence
  Description of Artificial Sequence: Synthetic oligonucleotide
  Sense strand starting at position 739 of SEQ ID NO: 1242052
gacaauaaguccuuaagug

SEQ ID NO: 1320001 - RNA, 19 nt, Artificial Sequence
  Description of Artificial Sequence: Synthetic oligonucleotide
  Antisense strand to SEQ ID NO: 1320000
cacuuaaggacuuauuguc

SEQ ID NO: 1320002 - RNA, 19 nt, Artificial Sequence
  Description of Artificial Sequence: Synthetic oligonucleotide
  Sense strand starting at position 787 of SEQ ID NO: 1242052
agcauuugguaauuauguu

SEQ ID NO: 1320003 - RNA, 19 nt, Artificial Sequence
  Description of Artificial Sequence: Synthetic oligonucleotide
  Antisense strand to SEQ ID NO: 1320002
aacauaauuaccaaaugcu

SEQ ID NO: 1320004 - RNA, 19 nt, Artificial Sequence
  Description of Artificial Sequence: Synthetic oligonucleotide
  Sense strand starting at position 846 of SEQ ID NO: 1242052
cuuacuaguccugagcaca

SEQ ID NO: 1320005 - RNA, 19 nt, Artificial Sequence
  Description of Artificial Sequence: Synthetic oligonucleotide
  Antisense strand to SEQ ID NO: 1320004
ugugcucaggacuaguaag

SEQ ID NO: 1320006 - RNA, 19 nt, Artificial Sequence
  Description of Artificial Sequence: Synthetic oligonucleotide
  Sense strand starting at position 928 of SEQ ID NO: 1242052
gguguugguugcauuguga

SEQ ID NO: 1320007 - RNA, 19 nt, Artificial Sequence
  Description of Artificial Sequence: Synthetic oligonucleotide
  Antisense strand to SEQ ID NO: 1320006
ucacaaugcaaccaacacc

SEQ ID NO: 1320008 - RNA, 19 nt, Artificial Sequence
  Description of Artificial Sequence: Synthetic oligonucleotide
  Sense strand starting at position 964 of SEQ ID NO: 1242052
auaaguagauuacucugau

SEQ ID NO: 1320009 - RNA, 19 nt, Artificial Sequence
  Description of Artificial Sequence: Synthetic oligonucleotide
  Antisense strand to SEQ ID NO: 1320008
aucagaguaaucuacuuau

SEQ ID NO: 1320010 - RNA, 19 nt, Artificial Sequence
  Description of Artificial Sequence: Synthetic oligonucleotide
  Sense strand starting at position 965 of SEQ ID NO: 1242052
uaaguagauuacucugaug

SEQ ID NO: 1320011 - RNA, 19 nt, Artificial Sequence
  Description of Artificial Sequence: Synthetic oligonucleotide
  Antisense strand to SEQ ID NO: 1320010
caucagaguaaucuacuua

SEQ ID NO: 1320012 - RNA, 19 nt, Artificial Sequence
  Description of Artificial Sequence: Synthetic oligonucleotide
  Sense strand starting at position 967 of SEQ ID NO: 1242052
aguagauuacucugaugca

SEQ ID NO: 1320013 - RNA, 19 nt, Artificial Sequence
  Description of Artificial Sequence: Synthetic oligonucleotide
  Antisense strand to SEQ ID NO: 1320012
ugcaucagaguaaucuacu

SEQ ID NO: 1320014 - RNA, 19 nt, Artificial Sequence
  Description of Artificial Sequence: Synthetic oligonucleotide
  Sense strand starting at position 993 of SEQ ID NO: 1242052
ccugaaucaucuguugucu

SEQ ID NO: 1320015 - RNA, 19 nt, Artificial Sequence
  Description of Artificial Sequence: Synthetic oligonucleotide
  Antisense strand to SEQ ID NO: 1320014
agacaacagaugauucagg

SEQ ID NO: 1320016 - RNA, 19 nt, Artificial Sequence
  Description of Artificial Sequence: Synthetic oligonucleotide
  Sense strand starting at position 1052 of SEQ ID NO: 1242052
acauccauggucugucauu

SEQ ID NO: 1320017 - RNA, 19 nt, Artificial Sequence
  Description of Artificial Sequence: Synthetic oligonucleotide
  Antisense strand to SEQ ID NO: 1320016
aaugacagaccauggaugu

SEQ ID NO: 1320018 - RNA, 19 nt, Artificial Sequence
  Description of Artificial Sequence: Synthetic oligonucleotide
  Sense strand starting at position 1126 of SEQ ID NO: 1242052
uccauaguuugcucuaaga

SEQ ID NO: 1320019 - RNA, 19 nt, Artificial Sequence
  Description of Artificial Sequence: Synthetic oligonucleotide
  Antisense strand to SEQ ID NO: 1320018
ucuuagagcaaacuaugga

SEQ ID NO: 1320020 - RNA, 19 nt, Artificial Sequence
  Description of Artificial Sequence: Synthetic oligonucleotide
  Sense strand starting at position 1192 of SEQ ID NO: 1242052
agaacaagccaugguaaga

SEQ ID NO: 1320021 - RNA, 19 nt, Artificial Sequence
  Description of Artificial Sequence: Synthetic oligonucleotide
  Antisense strand to SEQ ID NO: 1320020
ucuuaccauggcuuguucu

SEQ ID NO: 1320022 - RNA, 19 nt, Artificial Sequence
  Description of Artificial Sequence: Synthetic oligonucleotide
  Sense strand starting at position 1554 of SEQ ID NO: 1242052
accugauguagcugaugau

SEQ ID NO: 1320023 - RNA, 19 nt, Artificial Sequence
  Description of Artificial Sequence: Synthetic oligonucleotide
  Antisense strand to SEQ ID NO: 1320022
aucaucagcuacaucaggu

SEQ ID NO: 1320024 - RNA, 19 nt, Artificial Sequence
  Description of Artificial Sequence: Synthetic oligonucleotide
  Sense strand starting at position 1747 of SEQ ID NO: 1242052
gagcaaugugugcaaguuc

SEQ ID NO: 1320025 - RNA, 19 nt, Artificial Sequence
  Description of Artificial Sequence: Synthetic oligonucleotide
  Antisense strand to SEQ ID NO: 1320024
gaacuugcacacauugcuc

SEQ ID NO: 1320026 - RNA, 19 nt, Artificial Sequence
  Description of Artificial Sequence: Synthetic oligonucleotide
  Sense strand starting at position 1974 of SEQ ID NO: 1242052
gcauauauccaguaacagc

SEQ ID NO: 1320027 - RNA, 19 nt, Artificial Sequence
  Description of Artificial Sequence: Synthetic oligonucleotide
  Antisense strand to SEQ ID NO: 1320026
gcuguuacuggauauaugc

SEQ ID NO: 1320028 - RNA, 19 nt, Artificial Sequence
  Description of Artificial Sequence: Synthetic oligonucleotide
  Sense strand starting at position 2502 of SEQ ID NO: 1242052
gggauauccacccgaugac

SEQ ID NO: 1320029 - RNA, 19 nt, Artificial Sequence
  Description of Artificial Sequence: Synthetic oligonucleotide
  Antisense strand to SEQ ID NO: 1320028
gucaucggguggauauccc

SEQ ID NO: 1320030 - RNA, 19 nt, Artificial Sequence
  Description of Artificial Sequence: Synthetic oligonucleotide
  Sense strand starting at position 2663 of SEQ ID NO: 1242052
uaauguggaccauguguaa

SEQ ID NO: 1320031 - RNA, 19 nt, Artificial Sequence
  Description of Artificial Sequence: Synthetic oligonucleotide
  Antisense strand to SEQ ID NO: 1320030
uuacacaugguccacauua

SEQ ID NO: 1320032 - RNA, 19 nt, Artificial Sequence
  Description of Artificial Sequence: Synthetic oligonucleotide
  Sense strand starting at position 2754 of SEQ ID NO: 1242052
ggaagaugcuacccugaau

SEQ ID NO: 1320033 - RNA, 19 nt, Artificial Sequence
  Description of Artificial Sequence: Synthetic oligonucleotide
  Antisense strand to SEQ ID NO: 1320032
auucaggguagcaucuucc

SEQ ID NO: 1320034 - RNA, 19 nt, Artificial Sequence
  Description of Artificial Sequence: Synthetic oligonucleotide
  Sense strand starting at position 2757 of SEQ ID NO: 1242052
agaugcuacccugaauucu

SEQ ID NO: 1320035 - RNA, 19 nt, Artificial Sequence
  Description of Artificial Sequence: Synthetic oligonucleotide
  Antisense strand to SEQ ID NO: 1320034
agaauucaggguagcaucu

SEQ ID NO: 1320036 - RNA, 19 nt, Artificial Sequence
  Description of Artificial Sequence: Synthetic oligonucleotide
  Sense strand starting at position 2854 of SEQ ID NO: 1242052
aucugauaauuggauggaa

SEQ ID NO: 1320037 - RNA, 19 nt, Artificial Sequence
  Description of Artificial Sequence: Synthetic oligonucleotide
  Antisense strand to SEQ ID NO: 1320036
uuccauccaauuaucagau

SEQ ID NO: 1320038 - RNA, 19 nt, Artificial Sequence
  Description of Artificial Sequence: Synthetic oligonucleotide
  Sense strand starting at position 2908 of SEQ ID NO: 1242052
acacguaaugcgucaugcu

SEQ ID NO: 1320039 - RNA, 19 nt, Artificial Sequence
  Description of Artificial Sequence: Synthetic oligonucleotide
  Antisense strand to SEQ ID NO: 1320038
agcaugacgcauuacgugu

SEQ ID NO: 1320040 - RNA, 19 nt, Artificial Sequence
  Description of Artificial Sequence: Synthetic oligonucleotide
  Sense strand starting at position 2915 of SEQ ID NO: 1242052
augcgucaugcuucucuua

SEQ ID NO: 1320041 - RNA, 19 nt, Artificial Sequence
  Description of Artificial Sequence: Synthetic oligonucleotide
  Antisense strand to SEQ ID NO: 1320040
uaagagaagcaugacgcau

SEQ ID NO: 1320042 - RNA, 19 nt, Artificial Sequence
  Description of Artificial Sequence: Synthetic oligonucleotide
  Sense strand starting at position 3019 of SEQ ID NO: 1242052
ucgucuugucagucuggua

SEQ ID NO: 1320043 - RNA, 19 nt, Artificial Sequence
  Description of Artificial Sequence: Synthetic oligonucleotide
  Antisense strand to SEQ ID NO: 1320042
uaccagacugacaagacga

SEQ ID NO: 1320044 - RNA, 19 nt, Artificial Sequence
  Description of Artificial Sequence: Synthetic oligonucleotide
  Sense strand starting at position 3020 of SEQ ID NO: 1242052
cgucuugucagucugguau

SEQ ID NO: 1320045 - RNA, 19 nt, Artificial Sequence
  Description of Artificial Sequence: Synthetic oligonucleotide
  Antisense strand to SEQ ID NO: 1320044
auaccagacugacaagacg

SEQ ID NO: 1320046 - RNA, 19 nt, Artificial Sequence
  Description of Artificial Sequence: Synthetic oligonucleotide
  Sense strand starting at position 3041 of SEQ ID NO: 1242052
ggcguuaaccaagagaacu

SEQ ID NO: 1320047 - RNA, 19 nt, Artificial Sequence
  Description of Artificial Sequence: Synthetic oligonucleotide
  Antisense strand to SEQ ID NO: 1320046
aguucucuugguuaacgcc

SEQ ID NO: 1320048 - RNA, 19 nt, Artificial Sequence
  Description of Artificial Sequence: Synthetic oligonucleotide
  Sense strand starting at position 3138 of SEQ ID NO: 1242052
augauauuauccucuguua

SEQ ID NO: 1320049 - RNA, 19 nt, Artificial Sequence
  Description of Artificial Sequence: Synthetic oligonucleotide
  Antisense strand to SEQ ID NO: 1320048
uaacagaggauaauaucau

SEQ ID NO: 1320050 - RNA, 19 nt, Artificial Sequence
  Description of Artificial Sequence: Synthetic oligonucleotide
  Sense strand starting at position 3169 of SEQ ID NO: 1242052
gaagaagaguucucacuuc

SEQ ID NO: 1320051 - RNA, 19 nt, Artificial Sequence
  Description of Artificial Sequence: Synthetic oligonucleotide
  Antisense strand to SEQ ID NO: 1320050
gaagugagaacucuucuuc

SEQ ID NO: 1320052 - RNA, 19 nt, Artificial Sequence
  Description of Artificial Sequence: Synthetic oligonucleotide
  Sense strand starting at position 3379 of SEQ ID NO: 1242052
cuagucaaaggccagaauu

SEQ ID NO: 1320053 - RNA, 19 nt, Artificial Sequence
  Description of Artificial Sequence: Synthetic oligonucleotide
  Antisense strand to SEQ ID NO: 1320052
aauucuggccuuugacuag

SEQ ID NO: 1320054 - RNA, 19 nt, Artificial Sequence
  Description of Artificial Sequence: Synthetic oligonucleotide
  Sense strand starting at position 3820 of SEQ ID NO: 1242052
uuaauaugaugcucaaugu

SEQ ID NO: 1320055 - RNA, 19 nt, Artificial Sequence
  Description of Artificial Sequence: Synthetic oligonucleotide
  Antisense strand to SEQ ID NO: 1320054
acauugagcaucauauuaa

SEQ ID NO: 1320056 - RNA, 19 nt, Artificial Sequence
  Description of Artificial Sequence: Synthetic oligonucleotide
  Sense strand starting at position 3852 of SEQ ID NO: 1242052
auuauacucucgucuauag

SEQ ID NO: 1320057 - RNA, 19 nt, Artificial Sequence
  Description of Artificial Sequence: Synthetic oligonucleotide
  Antisense strand to SEQ ID NO: 1320056
cuauagacgagaguauaau

SEQ ID NO: 1320058 - RNA, 19 nt, Artificial Sequence
  Description of Artificial Sequence: Synthetic oligonucleotide
  Sense strand starting at position 3878 of SEQ ID NO: 1242052
ccagcugauccagauaauc

SEQ ID NO: 1320059 - RNA, 19 nt, Artificial Sequence
  Description of Artificial Sequence: Synthetic oligonucleotide
  Antisense strand to SEQ ID NO: 1320058
gauuaucuggaucagcugg

SEQ ID NO: 1320060 - RNA, 19 nt, Artificial Sequence
  Description of Artificial Sequence: Synthetic oligonucleotide
  Sense strand starting at position 3921 of SEQ ID NO: 1242052
uuuggauggcuguagcuau

SEQ ID NO: 1320061 - RNA, 19 nt, Artificial Sequence
  Description of Artificial Sequence: Synthetic oligonucleotide
  Antisense strand to SEQ ID NO: 1320060
auagcuacagccauccaaa

SEQ ID NO: 1320062 - RNA, 19 nt, Artificial Sequence
  Description of Artificial Sequence: Synthetic oligonucleotide
  Sense strand starting at position 252 of SEQ ID NO: 1242053
uacggaucugggcaaagua

SEQ ID NO: 1320063 - RNA, 19 nt, Artificial Sequence
  Description of Artificial Sequence: Synthetic oligonucleotide
  Antisense strand to SEQ ID NO: 1320062
uacuuugcccagauccgua

SEQ ID NO: 1320064 - RNA, 19 nt, Artificial Sequence
  Description of Artificial Sequence: Synthetic oligonucleotide
  Sense strand starting at position 297 of SEQ ID NO: 1242053
gaugucauucuagauguca

SEQ ID NO: 1320065 - RNA, 19 nt, Artificial Sequence
  Description of Artificial Sequence: Synthetic oligonucleotide
  Antisense strand to SEQ ID NO: 1320064
ugacaucuagaaugacauc

SEQ ID NO: 1320066 - RNA, 19 nt, Artificial Sequence
  Description of Artificial Sequence: Synthetic oligonucleotide
  Sense strand starting at position 367 of SEQ ID NO: 1242053
gaguuuggaagauguggau

SEQ ID NO: 1320067 - RNA, 19 nt, Artificial Sequence
  Description of Artificial Sequence: Synthetic oligonucleotide
  Antisense strand to SEQ ID NO: 1320066
auccacaucuuccaaacuc

SEQ ID NO: 1320068 - RNA, 19 nt, Artificial Sequence
  Description of Artificial Sequence: Synthetic oligonucleotide
  Sense strand starting at position 411 of SEQ ID NO: 1242053
ggguucaagucauugcaga

SEQ ID NO: 1320069 - RNA, 19 nt, Artificial Sequence
  Description of Artificial Sequence: Synthetic oligonucleotide
  Antisense strand to SEQ ID NO: 1320068
ucugcaaugacuugaaccc

SEQ ID NO: 1320070 - RNA, 19 nt, Artificial Sequence
  Description of Artificial Sequence: Synthetic oligonucleotide
  Sense strand starting at position 578 of SEQ ID NO: 1242053
ggauguugugaacauuguu

SEQ ID NO: 1320071 - RNA, 19 nt, Artificial Sequence
  Description of Artificial Sequence: Synthetic oligonucleotide
  Antisense strand to SEQ ID NO: 1320070
aacaauguucacaacaucc

SEQ ID NO: 1320072 - RNA, 19 nt, Artificial Sequence
  Description of Artificial Sequence: Synthetic oligonucleotide
  Sense strand starting at position 950 of SEQ ID NO: 1242053
gacauaauguuauuggaca

SEQ ID NO: 1320073 - RNA, 19 nt, Artificial Sequence
  Description of Artificial Sequence: Synthetic oligonucleotide
  Antisense strand to SEQ ID NO: 1320072
uguccaauaacauuauguc

SEQ ID NO: 1320074 - RNA, 19 nt, Artificial Sequence
  Description of Artificial Sequence: Synthetic oligonucleotide
  Sense strand starting at position 1002 of SEQ ID NO: 1242053
uuuauauaucuugggaaac

SEQ ID NO: 1320075 - RNA, 19 nt, Artificial Sequence
  Description of Artificial Sequence: Synthetic oligonucleotide
  Antisense strand to SEQ ID NO: 1320074
guuucccaagauauauaaa

SEQ ID NO: 1320076 - RNA, 19 nt, Artificial Sequence
  Description of Artificial Sequence: Synthetic oligonucleotide
  Sense strand starting at position 1057 of SEQ ID NO: 1242053
acagcaauggucuggaaca

SEQ ID NO: 1320077 - RNA, 19 nt, Artificial Sequence
  Description of Artificial Sequence: Synthetic oligonucleotide
  Antisense strand to SEQ ID NO: 1320076
uguuccagaccauugcugu

SEQ ID NO: 1320078 - RNA, 19 nt, Artificial Sequence
  Description of Artificial Sequence: Synthetic oligonucleotide
  Sense strand starting at position 1101 of SEQ ID NO: 1242053
gccuguauuuacucaguua

SEQ ID NO: 1320079 - RNA, 19 nt, Artificial Sequence
  Description of Artificial Sequence: Synthetic oligonucleotide
  Antisense strand to SEQ ID NO: 1320078
uaacugaguaaauacaggc

SEQ ID NO: 1320080 - RNA, 19 nt, Artificial Sequence
  Description of Artificial Sequence: Synthetic oligonucleotide
  Sense strand starting at position 1137 of SEQ ID NO: 1242053
gagugcuuaccgccugcua

SEQ ID NO: 1320081 - RNA, 19 nt, Artificial Sequence
  Description of Artificial Sequence: Synthetic oligonucleotide
  Antisense strand to SEQ ID NO: 1320080
uagcaggcgguaagcacuc

SEQ ID NO: 1320082 - RNA, 19 nt, Artificial Sequence
  Description of Artificial Sequence: Synthetic oligonucleotide
  Sense strand starting at position 1252 of SEQ ID NO: 1242053
aaagcaaucuagguuaagu

SEQ ID NO: 1320083 - RNA, 19 nt, Artificial Sequence
  Description of Artificial Sequence: Synthetic oligonucleotide
  Antisense strand to SEQ ID NO: 1320082
acuuaaccuagauugcuuu

SEQ ID NO: 1320084 - RNA, 19 nt, Artificial Sequence
  Description of Artificial Sequence: Synthetic oligonucleotide
  Sense strand starting at position 1263 of SEQ ID NO: 1242053
gguuaagugcuauacuaaa

SEQ ID NO: 1320085 - RNA, 19 nt, Artificial Sequence
  Description of Artificial Sequence: Synthetic oligonucleotide
  Antisense strand to SEQ ID NO: 1320084
uuuaguauagcacuuaacc

SEQ ID NO: 1320086 - RNA, 19 nt, Artificial Sequence
  Description of Artificial Sequence: Synthetic oligonucleotide
  Sense strand starting at position 1439 of SEQ ID NO: 1242053
uggacaucuggucgaagca

SEQ ID NO: 1320087 - RNA, 19 nt, Artificial Sequence
  Description of Artificial Sequence: Synthetic oligonucleotide
  Antisense strand to SEQ ID NO: 1320086
ugcuucgaccagaugucca

SEQ ID NO: 1320088 - RNA, 19 nt, Artificial Sequence
  Description of Artificial Sequence: Synthetic oligonucleotide
  Sense strand starting at position 1696 of SEQ ID NO: 1242053
gcucucaggccuuggaaau

SEQ ID NO: 1320089 - RNA, 19 nt, Artificial Sequence
  Description of Artificial Sequence: Synthetic oligonucleotide
  Antisense strand to SEQ ID NO: 1320088
auuuccaaggccugagagc

SEQ ID NO: 1320090 - RNA, 19 nt, Artificial Sequence
  Description of Artificial Sequence: Synthetic oligonucleotide
  Sense strand starting at position 1697 of SEQ ID NO: 1242053
cucucaggccuuggaaauc

SEQ ID NO: 1320091 - RNA, 19 nt, Artificial Sequence
  Description of Artificial Sequence: Synthetic oligonucleotide
  Antisense strand to SEQ ID NO: 1320090
gauuuccaaggccugagag

SEQ ID NO: 1320092 - RNA, 19 nt, Artificial Sequence
  Description of Artificial Sequence: Synthetic oligonucleotide
  Sense strand starting at position 2218 of SEQ ID NO: 1242053
gccugauuagauuagcaca

SEQ ID NO: 1320093 - RNA, 19 nt, Artificial Sequence
  Description of Artificial Sequence: Synthetic oligonucleotide
  Antisense strand to SEQ ID NO: 1320092
ugugcuaaucuaaucaggc

SEQ ID NO: 1320094 - RNA, 19 nt, Artificial Sequence
  Description of Artificial Sequence: Synthetic oligonucleotide
  Sense strand starting at position 2339 of SEQ ID NO: 1242053
gguauugguggagagguca

SEQ ID NO: 1320095 - RNA, 19 nt, Artificial Sequence
  Description of Artificial Sequence: Synthetic oligonucleotide
  Antisense strand to SEQ ID NO: 1320094
ugaccucuccaccaauacc

SEQ ID NO: 1320096 - RNA, 19 nt, Artificial Sequence
  Description of Artificial Sequence: Synthetic oligonucleotide
  Sense strand starting at position 2540 of SEQ ID NO: 1242053
ucugguuguaauuagaugu

SEQ ID NO: 1320097 - RNA, 19 nt, Artificial Sequence
  Description of Artificial Sequence: Synthetic oligonucleotide
  Antisense strand to SEQ ID NO: 1320096
acaucuaauuacaaccaga

SEQ ID NO: 1320098 - RNA, 19 nt, Artificial Sequence
  Description of Artificial Sequence: Synthetic oligonucleotide
  Sense strand starting at position 2554 of SEQ ID NO: 1242053
gauguaaccugacuuuaga

SEQ ID NO: 1320099 - RNA, 19 nt, Artificial Sequence
  Description of Artificial Sequence: Synthetic oligonucleotide
  Antisense strand to SEQ ID NO: 1320098
ucuaaagucagguuacauc

SEQ ID NO: 1320100 - RNA, 19 nt, Artificial Sequence
  Description of Artificial Sequence: Synthetic oligonucleotide
  Sense strand starting at position 2577 of SEQ ID NO: 1242053
uacagucuuagugggaguu

SEQ ID NO: 1320101 - RNA, 19 nt, Artificial Sequence
  Description of Artificial Sequence: Synthetic oligonucleotide
  Antisense strand to SEQ ID NO: 1320100
aacucccacuaagacugua

SEQ ID NO: 1320102 - RNA, 19 nt, Artificial Sequence
  Description of Artificial Sequence: Synthetic oligonucleotide
  Sense strand starting at position 2583 of SEQ ID NO: 1242053
cuuagugggaguugagauu

SEQ ID NO: 1320103 - RNA, 19 nt, Artificial Sequence
  Description of Artificial Sequence: Synthetic oligonucleotide
  Antisense strand to SEQ ID NO: 1320102
aaucucaacucccacuaag

SEQ ID NO: 1320104 - RNA, 19 nt, Artificial Sequence
  Description of Artificial Sequence: Synthetic oligonucleotide
  Sense strand starting at position 2592 of SEQ ID NO: 1242053
aguugagauuuauagccau

SEQ ID NO: 1320105 - RNA, 19 nt, Artificial Sequence
  Description of Artificial Sequence: Synthetic oligonucleotide
  Antisense strand to SEQ ID NO: 1320104
auggcuauaaaucucaacu

SEQ ID NO: 1320106 - RNA, 19 nt, Artificial Sequence
  Description of Artificial Sequence: Synthetic oligonucleotide
  Sense strand starting at position 2674 of SEQ ID NO: 1242053
caauacugacucgaacgua

SEQ ID NO: 1320107 - RNA, 19 nt, Artificial Sequence
  Description of Artificial Sequence: Synthetic oligonucleotide
  Antisense strand to SEQ ID NO: 1320106
uacguucgagucaguauug

SEQ ID NO: 1320108 - RNA, 19 nt, Artificial Sequence
  Description of Artificial Sequence: Synthetic oligonucleotide
  Sense strand starting at position 2677 of SEQ ID NO: 1242053
uacugacucgaacguauuu

SEQ ID NO: 1320109 - RNA, 19 nt, Artificial Sequence
  Description of Artificial Sequence: Synthetic oligonucleotide
  Antisense strand to SEQ ID NO: 1320108
aaauacguucgagucagua

SEQ ID NO: 1320110 - RNA, 19 nt, Artificial Sequence
  Description of Artificial Sequence: Synthetic oligonucleotide
  Sense strand starting at position 2801 of SEQ ID NO: 1242053
cuuagaaggcuguagguaa

SEQ ID NO: 1320111 - RNA, 19 nt, Artificial Sequence
  Description of Artificial Sequence: Synthetic oligonucleotide
  Antisense strand to SEQ ID NO: 1320110
uuaccuacagccuucuaag

SEQ ID NO: 1320112 - RNA, 19 nt, Artificial Sequence
  Description of Artificial Sequence: Synthetic oligonucleotide
  Sense strand starting at position 2924 of SEQ ID NO: 1242053
gcccuuguggagcaauuau

SEQ ID NO: 1320113 - RNA, 19 nt, Artificial Sequence
  Description of Artificial Sequence: Synthetic oligonucleotide
  Antisense strand to SEQ ID NO: 1320112
auaauugcuccacaagggc

SEQ ID NO: 1320114 - RNA, 19 nt, Artificial Sequence
  Description of Artificial Sequence: Synthetic oligonucleotide
  Sense strand starting at position 2934 of SEQ ID NO: 1242053
agcaauuauccuuggacuc

SEQ ID NO: 1320115 - RNA, 19 nt, Artificial Sequence
  Description of Artificial Sequence: Synthetic oligonucleotide
  Antisense strand to SEQ ID NO: 1320114
gaguccaaggauaauugcu

SEQ ID NO: 1320116 - RNA, 19 nt, Artificial Sequence
  Description of Artificial Sequence: Synthetic oligonucleotide
  Sense strand starting at position 3106 of SEQ ID NO: 1242053
ugguuauaccgugacaggu

SEQ ID NO: 1320117 - RNA, 19 nt, Artificial Sequence
  Description of Artificial Sequence: Synthetic oligonucleotide
  Antisense strand to SEQ ID NO: 1320116
accugucacgguauaacca

SEQ ID NO: 1320118 - RNA, 19 nt, Artificial Sequence
  Description of Artificial Sequence: Synthetic oligonucleotide
  Sense strand starting at position 3134 of SEQ ID NO: 1242053
cauugcagcccugggauau

SEQ ID NO: 1320119 - RNA, 19 nt, Artificial Sequence
  Description of Artificial Sequence: Synthetic oligonucleotide
  Antisense strand to SEQ ID NO: 1320118
auaucccagggcugcaaug

SEQ ID NO: 1320120 - RNA, 19 nt, Artificial Sequence
  Description of Artificial Sequence: Synthetic oligonucleotide
  Sense strand starting at position 3162 of SEQ ID NO: 1242053
uggagagugcucaggcagu

SEQ ID NO: 1320121 - RNA, 19 nt, Artificial Sequence
  Description of Artificial Sequence: Synthetic oligonucleotide
  Antisense strand to SEQ ID NO: 1320120
acugccugagcacucucca

SEQ ID NO: 1320122 - RNA, 19 nt, Artificial Sequence
  Description of Artificial Sequence: Synthetic oligonucleotide
  Sense strand starting at position 3220 of SEQ ID NO: 1242053
acuggaacucucuggagua

SEQ ID NO: 1320123 - RNA, 19 nt, Artificial Sequence
  Description of Artificial Sequence: Synthetic oligonucleotide
  Antisense strand to SEQ ID NO: 1320122
uacuccagagaguuccagu

SEQ ID NO: 1320124 - RNA, 19 nt, Artificial Sequence
  Description of Artificial Sequence: Synthetic oligonucleotide
  Sense strand starting at position 3267 of SEQ ID NO: 1242053
cugaauuauagugguuuga

SEQ ID NO: 1320125 - RNA, 19 nt, Artificial Sequence
  Description of Artificial Sequence: Synthetic oligonucleotide
  Antisense strand to SEQ ID NO: 1320124
ucaaaccacuauaauucag

SEQ ID NO: 1320126 - RNA, 19 nt, Artificial Sequence
  Description of Artificial Sequence: Synthetic oligonucleotide
  Sense strand starting at position 3269 of SEQ ID NO: 1242053
gaauuauagugguuugaac

SEQ ID NO: 1320127 - RNA, 19 nt, Artificial Sequence
  Description of Artificial Sequence: Synthetic oligonucleotide
  Antisense strand to SEQ ID NO: 1320126
guucaaaccacuauaauuc

SEQ ID NO: 1320128 - RNA, 19 nt, Artificial Sequence
  Description of Artificial Sequence: Synthetic oligonucleotide
  Sense strand starting at position 3271 of SEQ ID NO: 1242053
auuauagugguuugaacua

SEQ ID NO: 1320129 - RNA, 19 nt, Artificial Sequence
  Description of Artificial Sequence: Synthetic oligonucleotide
  Antisense strand to SEQ ID NO: 1320128
uaguucaaaccacuauaau

SEQ ID NO: 1320130 - RNA, 19 nt, Artificial Sequence
  Description of Artificial Sequence: Synthetic oligonucleotide
  Sense strand starting at position 3310 of SEQ ID NO: 1242053
uagauaagaugucuugaau

SEQ ID NO: 1320131 - RNA, 19 nt, Artificial Sequence
  Description of Artificial Sequence: Synthetic oligonucleotide
  Antisense strand to SEQ ID NO: 1320130
auucaagacaucuuaucua

SEQ ID NO: 1320132 - RNA, 19 nt, Artificial Sequence
  Description of Artificial Sequence: Synthetic oligonucleotide
  Sense strand starting at position 3376 of SEQ ID NO: 1242053
ugaagaaauauucgaguaa

SEQ ID NO: 1320133 - RNA, 19 nt, Artificial Sequence
  Description of Artificial Sequence: Synthetic oligonucleotide
  Antisense strand to SEQ ID NO: 1320132
uuacucgaauauuucuuca

SEQ ID NO: 1320134 - RNA, 19 nt, Artificial Sequence
  Description of Artificial Sequence: Synthetic oligonucleotide
  Sense strand starting at position 3535 of SEQ ID NO: 1242053
gcccuuugauaaucuaaug

SEQ ID NO: 1320135 - RNA, 19 nt, Artificial Sequence
  Description of Artificial Sequence: Synthetic oligonucleotide
  Antisense strand to SEQ ID NO: 1320134
cauuagauuaucaaagggc

SEQ ID NO: 1320136 - RNA, 19 nt, Artificial Sequence
  Description of Artificial Sequence: Synthetic oligonucleotide
  Sense strand starting at position 3602 of SEQ ID NO: 1242053
guguguaucaaucaguuag

SEQ ID NO: 1320137 - RNA, 19 nt, Artificial Sequence
  Description of Artificial Sequence: Synthetic oligonucleotide
  Antisense strand to SEQ ID NO: 1320136
cuaacugauugauacacac

SEQ ID NO: 1320138 - RNA, 19 nt, Artificial Sequence
  Description of Artificial Sequence: Synthetic oligonucleotide
  Sense strand starting at position 3890 of SEQ ID NO: 1242053
gaaaguauugcuggaccua

SEQ ID NO: 1320139 - RNA, 19 nt, Artificial Sequence
  Description of Artificial Sequence: Synthetic oligonucleotide
  Antisense strand to SEQ ID NO: 1320138
uagguccagcaauacuuuc

SEQ ID NO: 1320140 - RNA, 19 nt, Artificial Sequence
  Description of Artificial Sequence: Synthetic oligonucleotide
  Sense strand starting at position 3940 of SEQ ID NO: 1242053
gcaggcauucuggaauaug

SEQ ID NO: 1320141 - RNA, 19 nt, Artificial Sequence
  Description of Artificial Sequence: Synthetic oligonucleotide
  Antisense strand to SEQ ID NO: 1320140
cauauuccagaaugccugc

SEQ ID NO: 1320142 - RNA, 19 nt, Artificial Sequence
  Description of Artificial Sequence: Synthetic oligonucleotide
  Sense strand starting at position 163 of SEQ ID NO: 1242054
agaaucucuuuccaaacga

SEQ ID NO: 1320143 - RNA, 19 nt, Artificial Sequence
  Description of Artificial Sequence: Synthetic oligonucleotide
  Antisense strand to SEQ ID NO: 1320142
ucguuuggaaagagauucu

SEQ ID NO: 1320144 - RNA, 19 nt, Artificial Sequence
  Description of Artificial Sequence: Synthetic oligonucleotide
  Sense strand starting at position 613 of SEQ ID NO: 1242054
ccauguugacuucggaaac

SEQ ID NO: 1320145 - RNA, 19 nt, Artificial Sequence
  Description of Artificial Sequence: Synthetic oligonucleotide
  Antisense strand to SEQ ID NO: 1320144
guuuccgaagucaacaugg

SEQ ID NO: 1320146 - RNA, 19 nt, Artificial Sequence
  Description of Artificial Sequence: Synthetic oligonucleotide
  Sense strand starting at position 643 of SEQ ID NO: 1242054
uggcgaugucgauguucau

SEQ ID NO: 1320147 - RNA, 19 nt, Artificial Sequence
  Description of Artificial Sequence: Synthetic oligonucleotide
  Antisense strand to SEQ ID NO: 1320146
augaacaucgacaucgcca

SEQ ID NO: 1320148 - RNA, 19 nt, Artificial Sequence
  Description of Artificial Sequence: Synthetic oligonucleotide
  Sense strand starting at position 911 of SEQ ID NO: 1242054
ggcgaaugucguagccuuu

SEQ ID NO: 1320149 - RNA, 19 nt, Artificial Sequence
  Description of Artificial Sequence: Synthetic oligonucleotide
  Antisense strand to SEQ ID NO: 1320148
aaaggcuacgacauucgcc

SEQ ID NO: 1320150 - RNA, 19 nt, Artificial Sequence
  Description of Artificial Sequence: Synthetic oligonucleotide
  Sense strand starting at position 962 of SEQ ID NO: 1242054
acauguucccgggaucguu

SEQ ID NO: 1320151 - RNA, 19 nt, Artificial Sequence
  Description of Artificial Sequence: Synthetic oligonucleotide
  Antisense strand to SEQ ID NO: 1320150
aacgaucccgggaacaugu

SEQ ID NO: 1320152 - RNA, 19 nt, Artificial Sequence
  Description of Artificial Sequence: Synthetic oligonucleotide
  Sense strand starting at position 2165 of SEQ ID NO: 1242054
gaacauuucuugggagcac

SEQ ID NO: 1320153 - RNA, 19 nt, Artificial Sequence
  Description of Artificial Sequence: Synthetic oligonucleotide
  Antisense strand to SEQ ID NO: 1320152
gugcucccaagaaauguuc

SEQ ID NO: 1320154 - RNA, 19 nt, Artificial Sequence
  Description of Artificial Sequence: Synthetic oligonucleotide
  Sense strand starting at position 2210 of SEQ ID NO: 1242054
aaauguaauggaugguuaa

SEQ ID NO: 1320155 - RNA, 19 nt, Artificial Sequence
  Description of Artificial Sequence: Synthetic oligonucleotide
  Antisense strand to SEQ ID NO: 1320154
uuaaccauccauuacauuu

SEQ ID NO: 1320156 - RNA, 19 nt, Artificial Sequence
  Description of Artificial Sequence: Synthetic oligonucleotide
  Sense strand starting at position 2211 of SEQ ID NO: 1242054
aauguaauggaugguuaag

SEQ ID NO: 1320157 - RNA, 19 nt, Artificial Sequence
  Description of Artificial Sequence: Synthetic oligonucleotide
  Antisense strand to SEQ ID NO: 1320156
cuuaaccauccauuacauu

SEQ ID NO: 1320158 - RNA, 19 nt, Artificial Sequence
  Description of Artificial Sequence: Synthetic oligonucleotide
  Sense strand starting at position 2231 of SEQ ID NO: 1242054
gaggacugaauauguguuu

SEQ ID NO: 1320159 - RNA, 19 nt, Artificial Sequence
  Description of Artificial Sequence: Synthetic oligonucleotide
  Antisense strand to SEQ ID NO: 1320158
aaacacauauucaguccuc

SEQ ID NO: 1320160 - RNA, 19 nt, Artificial Sequence
  Description of Artificial Sequence: Synthetic oligonucleotide
  Sense strand starting at position 2282 of SEQ ID NO: 1242054
uggagacuggauugucauu

SEQ ID NO: 1320161 - RNA, 19 nt, Artificial Sequence
  Description of Artificial Sequence: Synthetic oligonucleotide
  Antisense strand to SEQ ID NO: 1320160
aaugacaauccagucucca

SEQ ID NO: 1320162 - RNA, 19 nt, Artificial Sequence
  Description of Artificial Sequence: Synthetic oligonucleotide
  Sense strand starting at position 2335 of SEQ ID NO: 1242054
agagcuauccgugguccuu

SEQ ID NO: 1320163 - RNA, 19 nt, Artificial Sequence
  Description of Artificial Sequence: Synthetic oligonucleotide
  Antisense strand to SEQ ID NO: 1320162
aaggaccacggauagcucu

SEQ ID NO: 1320164 - RNA, 19 nt, Artificial Sequence
  Description of Artificial Sequence: Synthetic oligonucleotide
  Sense strand starting at position 2337 of SEQ ID NO: 1242054
agcuauccgugguccuuaa

SEQ ID NO: 1320165 - RNA, 19 nt, Artificial Sequence
  Description of Artificial Sequence: Synthetic oligonucleotide
  Antisense strand to SEQ ID NO: 1320164
uuaaggaccacggauagcu

SEQ ID NO: 1320166 - RNA, 19 nt, Artificial Sequence
  Description of Artificial Sequence: Synthetic oligonucleotide
  Sense strand starting at position 2341 of SEQ ID NO: 1242054
auccgugguccuuaauaua

SEQ ID NO: 1320167 - RNA, 19 nt, Artificial Sequence
  Description of Artificial Sequence: Synthetic oligonucleotide
  Antisense strand to SEQ ID NO: 1320166
uauauuaaggaccacggau

SEQ ID NO: 1320168 - RNA, 19 nt, Artificial Sequence
  Description of Artificial Sequence: Synthetic oligonucleotide
  Sense strand starting at position 2400 of SEQ ID NO: 1242054
cugucauuagaaggcuacu

SEQ ID NO: 1320169 - RNA, 19 nt, Artificial Sequence
  Description of Artificial Sequence: Synthetic oligonucleotide
  Antisense strand to SEQ ID NO: 1320168
aguagccuucuaaugacag

SEQ ID NO: 1320170 - RNA, 19 nt, Artificial Sequence
  Description of Artificial Sequence: Synthetic oligonucleotide
  Sense strand starting at position 2567 of SEQ ID NO: 1242054
ucggacuucuaauauugaa

SEQ ID NO: 1320171 - RNA, 19 nt, Artificial Sequence
  Description of Artificial Sequence: Synthetic oligonucleotide
  Antisense strand to SEQ ID NO: 1320170
uucaauauuagaaguccga

SEQ ID NO: 1320172 - RNA, 19 nt, Artificial Sequence
  Description of Artificial Sequence: Synthetic oligonucleotide
  Sense strand starting at position 2585 of SEQ ID NO: 1242054
agaagaugguuacacaauc

SEQ ID NO: 1320173 - RNA, 19 nt, Artificial Sequence
  Description of Artificial Sequence: Synthetic oligonucleotide
  Antisense strand to SEQ ID NO: 1320172
gauuguguaaccaucuucu

SEQ ID NO: 1320174 - RNA, 19 nt, Artificial Sequence
  Description of Artificial Sequence: Synthetic oligonucleotide
  Sense strand starting at position 2707 of SEQ ID NO: 1242054
acuacuuuccuguauugac

SEQ ID NO: 1320175 - RNA, 19 nt, Artificial Sequence
  Description of Artificial Sequence: Synthetic oligonucleotide
  Antisense strand to SEQ ID NO: 1320174
gucaauacaggaaaguagu

SEQ ID NO: 1320176 - RNA, 19 nt, Artificial Sequence
  Description of Artificial Sequence: Synthetic oligonucleotide
  Sense strand starting at position 2754 of SEQ ID NO: 1242054
uuuaacaucguugagacuu

SEQ ID NO: 1320177 - RNA, 19 nt, Artificial Sequence
  Description of Artificial Sequence: Synthetic oligonucleotide
  Antisense strand to SEQ ID NO: 1320176
aagucucaacgauguuaaa

SEQ ID NO: 1320178 - RNA, 19 nt, Artificial Sequence
  Description of Artificial Sequence: Synthetic oligonucleotide
  Sense strand starting at position 2816 of SEQ ID NO: 1242054
gcauguuucugugcauuaa

SEQ ID NO: 1320179 - RNA, 19 nt, Artificial Sequence
  Description of Artificial Sequence: Synthetic oligonucleotide
  Antisense strand to SEQ ID NO: 1320178
uuaaugcacagaaacaugc

SEQ ID NO: 1320180 - RNA, 19 nt, Artificial Sequence
  Description of Artificial Sequence: Synthetic oligonucleotide
  Sense strand starting at position 2894 of SEQ ID NO: 1242054
accgcaguaccugaaagau

SEQ ID NO: 1320181 - RNA, 19 nt, Artificial Sequence
  Description of Artificial Sequence: Synthetic oligonucleotide
  Antisense strand to SEQ ID NO: 1320180
aucuuucagguacugcggu

SEQ ID NO: 1320182 - RNA, 19 nt, Artificial Sequence
  Description of Artificial Sequence: Synthetic oligonucleotide
  Sense strand starting at position 2982 of SEQ ID NO: 1242054
ucuguuaaugcacaaugga

SEQ ID NO: 1320183 - RNA, 19 nt, Artificial Sequence
  Description of Artificial Sequence: Synthetic oligonucleotide
  Antisense strand to SEQ ID NO: 1320182
uccauugugcauuaacaga

SEQ ID NO: 1320184 - RNA, 19 nt, Artificial Sequence
  Description of Artificial Sequence: Synthetic oligonucleotide
  Sense strand starting at position 2985 of SEQ ID NO: 1242054
guuaaugcacaauggaauu

SEQ ID NO: 1320185 - RNA, 19 nt, Artificial Sequence
  Description of Artificial Sequence: Synthetic oligonucleotide
  Antisense strand to SEQ ID NO: 1320184
aauuccauugugcauuaac

SEQ ID NO: 1320186 - RNA, 19 nt, Artificial Sequence
  Description of Artificial Sequence: Synthetic oligonucleotide
  Sense strand starting at position 3182 of SEQ ID NO: 1242054
accaguuuauauguucuaa

SEQ ID NO: 1320187 - RNA, 19 nt, Artificial Sequence
  Description of Artificial Sequence: Synthetic oligonucleotide
  Antisense strand to SEQ ID NO: 1320186
uuagaacauauaaacuggu

SEQ ID NO: 1320188 - RNA, 19 nt, Artificial Sequence
  Description of Artificial Sequence: Synthetic oligonucleotide
  Sense strand starting at position 3337 of SEQ ID NO: 1242054
ucagcuuuacaugggaaca

SEQ ID NO: 1320189 - RNA, 19 nt, Artificial Sequence
  Description of Artificial Sequence: Synthetic oligonucleotide
  Antisense strand to SEQ ID NO: 1320188
uguucccauguaaagcuga

SEQ ID NO: 1320190 - RNA, 19 nt, Artificial Sequence
  Description of Artificial Sequence: Synthetic oligonucleotide
  Sense strand starting at position 3410 of SEQ ID NO: 1242054
uuugcucaguacucacaua

SEQ ID NO: 1320191 - RNA, 19 nt, Artificial Sequence
  Description of Artificial Sequence: Synthetic oligonucleotide
  Antisense strand to SEQ ID NO: 1320190
uaugugaguacugagcaaa

SEQ ID NO: 1320192 - RNA, 19 nt, Artificial Sequence
  Description of Artificial Sequence: Synthetic oligonucleotide
  Sense strand starting at position 3453 of SEQ ID NO: 1242054
guuagaagucuaugaggca

SEQ ID NO: 1320193 - RNA, 19 nt, Artificial Sequence
  Description of Artificial Sequence: Synthetic oligonucleotide
  Antisense strand to SEQ ID NO: 1320192
ugccucauagacuucuaac

SEQ ID NO: 1320194 - RNA, 19 nt, Artificial Sequence
  Description of Artificial Sequence: Synthetic oligonucleotide
  Sense strand starting at position 3529 of SEQ ID NO: 1242054
uaagaaauguccugagaug

SEQ ID NO: 1320195 - RNA, 19 nt, Artificial Sequence
  Description of Artificial Sequence: Synthetic oligonucleotide
  Antisense strand to SEQ ID NO: 1320194
caucucaggacauuucuua

SEQ ID NO: 1320196 - RNA, 19 nt, Artificial Sequence
  Description of Artificial Sequence: Synthetic oligonucleotide
  Sense strand starting at position 3566 of SEQ ID NO: 1242054
caaagaugauccugugaga

SEQ ID NO: 1320197 - RNA, 19 nt, Artificial Sequence
  Description of Artificial Sequence: Synthetic oligonucleotide
  Antisense strand to SEQ ID NO: 1320196
ucucacaggaucaucuuug

SEQ ID NO: 1320198 - RNA, 19 nt, Artificial Sequence
  Description of Artificial Sequence: Synthetic oligonucleotide
  Sense strand starting at position 3571 of SEQ ID NO: 1242054
augauccugugagauggau

SEQ ID NO: 1320199 - RNA, 19 nt, Artificial Sequence
  Description of Artificial Sequence: Synthetic oligonucleotide
  Antisense strand to SEQ ID NO: 1320198
auccaucucacaggaucau

SEQ ID NO: 1320200 - RNA, 19 nt, Artificial Sequence
  Description of Artificial Sequence: Synthetic oligonucleotide
  Sense strand starting at position 3619 of SEQ ID NO: 1242054
gguggucugccugguaaug

SEQ ID NO: 1320201 - RNA, 19 nt, Artificial Sequence
  Description of Artificial Sequence: Synthetic oligonucleotide
  Antisense strand to SEQ ID NO: 1320200
cauuaccaggcagaccacc

SEQ ID NO: 1320202 - RNA, 19 nt, Artificial Sequence
  Description of Artificial Sequence: Synthetic oligonucleotide
  Sense strand starting at position 3767 of SEQ ID NO: 1242054
aaccuaggcugaguuguaa

SEQ ID NO: 1320203 - RNA, 19 nt, Artificial Sequence
  Description of Artificial Sequence: Synthetic oligonucleotide
  Antisense strand to SEQ ID NO: 1320202
uuacaacucagccuagguu

SEQ ID NO: 1320204 - RNA, 19 nt, Artificial Sequence
  Description of Artificial Sequence: Synthetic oligonucleotide
  Sense strand starting at position 3779 of SEQ ID NO: 1242054
guuguaaauuagucggcaa

SEQ ID NO: 1320205 - RNA, 19 nt, Artificial Sequence
  Description of Artificial Sequence: Synthetic oligonucleotide
  Antisense strand to SEQ ID NO: 1320204
uugccgacuaauuuacaac

SEQ ID NO: 1320206 - RNA, 19 nt, Artificial Sequence
  Description of Artificial Sequence: Synthetic oligonucleotide
  Sense strand starting at position 3780 of SEQ ID NO: 1242054
uuguaaauuagucggcaag

SEQ ID NO: 1320207 - RNA, 19 nt, Artificial Sequence
  Description of Artificial Sequence: Synthetic oligonucleotide
  Antisense strand to SEQ ID NO: 1320206
cuugccgacuaauuuacaa

SEQ ID NO: 1320208 - RNA, 19 nt, Artificial Sequence
  Description of Artificial Sequence: Synthetic oligonucleotide
  Sense strand starting at position 3781 of SEQ ID NO: 1242054
uguaaauuagucggcaagu

SEQ ID NO: 1320209 - RNA, 19 nt, Artificial Sequence
  Description of Artificial Sequence: Synthetic oligonucleotide
  Antisense strand to SEQ ID NO: 1320208
acuugccgacuaauuuaca

SEQ ID NO: 1320210 - RNA, 19 nt, Artificial Sequence
  Description of Artificial Sequence: Synthetic oligonucleotide
  Sense strand starting at position 3782 of SEQ ID NO: 1242054
guaaauuagucggcaaguc

SEQ ID NO: 1320211 - RNA, 19 nt, Artificial Sequence
  Description of Artificial Sequence: Synthetic oligonucleotide
  Antisense strand to SEQ ID NO: 1320210
gacuugccgacuaauuuac

SEQ ID NO: 1320212 - RNA, 19 nt, Artificial Sequence
  Description of Artificial Sequence: Synthetic oligonucleotide
  Sense strand starting at position 3783 of SEQ ID NO: 1242054
uaaauuagucggcaaguca

SEQ ID NO: 1320213 - RNA, 19 nt, Artificial Sequence
  Description of Artificial Sequence: Synthetic oligonucleotide
  Antisense strand to SEQ ID NO: 1320212
ugacuugccgacuaauuua

SEQ ID NO: 1320214 - RNA, 19 nt, Artificial Sequence
  Description of Artificial Sequence: Synthetic oligonucleotide
  Sense strand starting at position 3791 of SEQ ID NO: 1242054
ucggcaagucacuagaagu

SEQ ID NO: 1320215 - RNA, 19 nt, Artificial Sequence
  Description of Artificial Sequence: Synthetic oligonucleotide
  Antisense strand to SEQ ID NO: 1320214
acuucuagugacuugccga

SEQ ID NO: 1320216 - RNA, 19 nt, Artificial Sequence
  Description of Artificial Sequence: Synthetic oligonucleotide
  Sense strand starting at position 3865 of SEQ ID NO: 1242054
aggugugaucaggaugcau

SEQ ID NO: 1320217 - RNA, 19 nt, Artificial Sequence
  Description of Artificial Sequence: Synthetic oligonucleotide
  Antisense strand to SEQ ID NO: 1320216
augcauccugaucacaccu

SEQ ID NO: 1320218 - RNA, 19 nt, Artificial Sequence
  Description of Artificial Sequence: Synthetic oligonucleotide
  Sense strand starting at position 3873 of SEQ ID NO: 1242054
ucaggaugcaugggcuaua

SEQ ID NO: 1320219 - RNA, 19 nt, Artificial Sequence
  Description of Artificial Sequence: Synthetic oligonucleotide
  Antisense strand to SEQ ID NO: 1320218
uauagcccaugcauccuga

SEQ ID NO: 1320220 - RNA, 19 nt, Artificial Sequence
  Description of Artificial Sequence: Synthetic oligonucleotide
  Sense strand starting at position 3886 of SEQ ID NO: 1242054
gcuauaagguccuuacaca

SEQ ID NO: 1320221 - RNA, 19 nt, Artificial Sequence
  Description of Artificial Sequence: Synthetic oligonucleotide
  Antisense strand to SEQ ID NO: 1320220
uguguaaggaccuuauagc

SEQ ID NO: 1320222 - RNA, 19 nt, Artificial Sequence
  Description of Artificial Sequence: Synthetic oligonucleotide
  Sense strand starting at position 58 of SEQ ID NO: 1242055
ugagguaucuuccuacuaa

SEQ ID NO: 1320223 - RNA, 19 nt, Artificial Sequence
  Description of Artificial Sequence: Synthetic oligonucleotide
  Antisense strand to SEQ ID NO: 1320222
uuaguaggaagauaccuca

SEQ ID NO: 1320224 - RNA, 19 nt, Artificial Sequence
  Description of Artificial Sequence: Synthetic oligonucleotide
  Sense strand starting at position 82 of SEQ ID NO: 1242055
ugcaguagugaggacaaua

SEQ ID NO: 1320225 - RNA, 19 nt, Artificial Sequence
  Description of Artificial Sequence: Synthetic oligonucleotide
  Antisense strand to SEQ ID NO: 1320224
uauuguccucacuacugca

SEQ ID NO: 1320226 - RNA, 19 nt, Artificial Sequence
  Description of Artificial Sequence: Synthetic oligonucleotide
  Sense strand starting at position 105 of SEQ ID NO: 1242055
guguuucuucuagaauguu

SEQ ID NO: 1320227 - RNA, 19 nt, Artificial Sequence
  Description of Artificial Sequence: Synthetic oligonucleotide
  Antisense strand to SEQ ID NO: 1320226
aacauucuagaagaaacac

SEQ ID NO: 1320228 - RNA, 19 nt, Artificial Sequence
  Description of Artificial Sequence: Synthetic oligonucleotide
  Sense strand starting at position 108 of SEQ ID NO: 1242055
uuucuucuagaauguuaag

SEQ ID NO: 1320229 - RNA, 19 nt, Artificial Sequence
  Description of Artificial Sequence: Synthetic oligonucleotide
  Antisense strand to SEQ ID NO: 1320228
cuuaacauucuagaagaaa

SEQ ID NO: 1320230 - RNA, 19 nt, Artificial Sequence
  Description of Artificial Sequence: Synthetic oligonucleotide
  Sense strand starting at position 387 of SEQ ID NO: 1242055
uugaaagaguugccuguga

SEQ ID NO: 1320231 - RNA, 19 nt, Artificial Sequence
  Description of Artificial Sequence: Synthetic oligonucleotide
  Antisense strand to SEQ ID NO: 1320230
ucacaggcaacucuuucaa

SEQ ID NO: 1320232 - RNA, 19 nt, Artificial Sequence
  Description of Artificial Sequence: Synthetic oligonucleotide
  Sense strand starting at position 936 of SEQ ID NO: 1242055
ucaucucuucuagagugau

SEQ ID NO: 1320233 - RNA, 19 nt, Artificial Sequence
  Description of Artificial Sequence: Synthetic oligonucleotide
  Antisense strand to SEQ ID NO: 1320232
aucacucuagaagagauga

SEQ ID NO: 1320234 - RNA, 19 nt, Artificial Sequence
  Description of Artificial Sequence: Synthetic oligonucleotide
  Sense strand starting at position 939 of SEQ ID NO: 1242055
ucucuucuagagugauucu

SEQ ID NO: 1320235 - RNA, 19 nt, Artificial Sequence
  Description of Artificial Sequence: Synthetic oligonucleotide
  Antisense strand to SEQ ID NO: 1320234
agaaucacucuagaagaga

SEQ ID NO: 1320236 - RNA, 19 nt, Artificial Sequence
  Description of Artificial Sequence: Synthetic oligonucleotide
  Sense strand starting at position 942 of SEQ ID NO: 1242055
cuucuagagugauucuaag

SEQ ID NO: 1320237 - RNA, 19 nt, Artificial Sequence
  Description of Artificial Sequence: Synthetic oligonucleotide
  Antisense strand to SEQ ID NO: 1320236
cuuagaaucacucuagaag

SEQ ID NO: 1320238 - RNA, 19 nt, Artificial Sequence
  Description of Artificial Sequence: Synthetic oligonucleotide
  Sense strand starting at position 948 of SEQ ID NO: 1242055
gagugauucuaagcuccca

SEQ ID NO: 1320239 - RNA, 19 nt, Artificial Sequence
  Description of Artificial Sequence: Synthetic oligonucleotide
  Antisense strand to SEQ ID NO: 1320238
ugggagcuuagaaucacuc

SEQ ID NO: 1320240 - RNA, 19 nt, Artificial Sequence
  Description of Artificial Sequence: Synthetic oligonucleotide
  Sense strand starting at position 974 of SEQ ID NO: 1242055
guugguguacugggaggaa

SEQ ID NO: 1320241 - RNA, 19 nt, Artificial Sequence
  Description of Artificial Sequence: Synthetic oligonucleotide
  Antisense strand to SEQ ID NO: 1320240
uuccucccaguacaccaac

SEQ ID NO: 1320242 - RNA, 19 nt, Artificial Sequence
  Description of Artificial Sequence: Synthetic oligonucleotide
  Sense strand starting at position 1001 of SEQ ID NO: 1242055
aauuuauggugagaugauu

SEQ ID NO: 1320243 - RNA, 19 nt, Artificial Sequence
  Description of Artificial Sequence: Synthetic oligonucleotide
  Antisense strand to SEQ ID NO: 1320242
aaucaucucaccauaaauu

SEQ ID NO: 1320244 - RNA, 19 nt, Artificial Sequence
  Description of Artificial Sequence: Synthetic oligonucleotide
  Sense strand starting at position 1021 of SEQ ID NO: 1242055
cuuacauuaccaggcagaa

SEQ ID NO: 1320245 - RNA, 19 nt, Artificial Sequence
  Description of Artificial Sequence: Synthetic oligonucleotide
  Antisense strand to SEQ ID NO: 1320244
uucugccugguaauguaag

SEQ ID NO: 1320246 - RNA, 19 nt, Artificial Sequence
  Description of Artificial Sequence: Synthetic oligonucleotide
  Sense strand starting at position 1034 of SEQ ID NO: 1242055
gcagaagccuuauuaucca

SEQ ID NO: 1320247 - RNA, 19 nt, Artificial Sequence
  Description of Artificial Sequence: Synthetic oligonucleotide
  Antisense strand to SEQ ID NO: 1320246
uggauaauaaggcuucugc

SEQ ID NO: 1320248 - RNA, 19 nt, Artificial Sequence
  Description of Artificial Sequence: Synthetic oligonucleotide
  Sense strand starting at position 1054 of SEQ ID NO: 1242055
uucgacaugcgugcuuuau

SEQ ID NO: 1320249 - RNA, 19 nt, Artificial Sequence
  Description of Artificial Sequence: Synthetic oligonucleotide
  Antisense strand to SEQ ID NO: 1320248
auaaagcacgcaugucgaa

SEQ ID NO: 1320250 - RNA, 19 nt, Artificial Sequence
  Description of Artificial Sequence: Synthetic oligonucleotide
  Sense strand starting at position 1244 of SEQ ID NO: 1242055
ggucuaaacuaggcaguua

SEQ ID NO: 1320251 - RNA, 19 nt, Artificial Sequence
  Description of Artificial Sequence: Synthetic oligonucleotide
  Antisense strand to SEQ ID NO: 1320250
uaacugccuaguuuagacc

SEQ ID NO: 1320252 - RNA, 19 nt, Artificial Sequence
  Description of Artificial Sequence: Synthetic oligonucleotide
  Sense strand starting at position 1310 of SEQ ID NO: 1242055
cagagaaugucagccaaag

SEQ ID NO: 1320253 - RNA, 19 nt, Artificial Sequence
  Description of Artificial Sequence: Synthetic oligonucleotide
  Antisense strand to SEQ ID NO: 1320252
cuuuggcugacauucucug

SEQ ID NO: 1320254 - RNA, 19 nt, Artificial Sequence
  Description of Artificial Sequence: Synthetic oligonucleotide
  Sense strand starting at position 1376 of SEQ ID NO: 1242055
ucgguaaggagccagaaau

SEQ ID NO: 1320255 - RNA, 19 nt, Artificial Sequence
  Description of Artificial Sequence: Synthetic oligonucleotide
  Antisense strand to SEQ ID NO: 1320254
auuucuggcuccuuaccga

SEQ ID NO: 1320256 - RNA, 19 nt, Artificial Sequence
  Description of Artificial Sequence: Synthetic oligonucleotide
  Sense strand starting at position 1405 of SEQ ID NO: 1242055
cccugaaccugguucucaa

SEQ ID NO: 1320257 - RNA, 19 nt, Artificial Sequence
  Description of Artificial Sequence: Synthetic oligonucleotide
  Antisense strand to SEQ ID NO: 1320256
uugagaaccagguucaggg

SEQ ID NO: 1320258 - RNA, 19 nt, Artificial Sequence
  Description of Artificial Sequence: Synthetic oligonucleotide
  Sense strand starting at position 2218 of SEQ ID NO: 1242055
uuugaauggacucggaguu

SEQ ID NO: 1320259 - RNA, 19 nt, Artificial Sequence
  Description of Artificial Sequence: Synthetic oligonucleotide
  Antisense strand to SEQ ID NO: 1320258
aacuccgaguccauucaaa

SEQ ID NO: 1320260 - RNA, 19 nt, Artificial Sequence
  Description of Artificial Sequence: Synthetic oligonucleotide
  Sense strand starting at position 2219 of SEQ ID NO: 1242055
uugaauggacucggaguuu

SEQ ID NO: 1320261 - RNA, 19 nt, Artificial Sequence
  Description of Artificial Sequence: Synthetic oligonucleotide
  Antisense strand to SEQ ID NO: 1320260
aaacuccgaguccauucaa

SEQ ID NO: 1320262 - RNA, 19 nt, Artificial Sequence
  Description of Artificial Sequence: Synthetic oligonucleotide
  Sense strand starting at position 2458 of SEQ ID NO: 1242055
cgcacucuucgugcuaagu

SEQ ID NO: 1320263 - RNA, 19 nt, Artificial Sequence
  Description of Artificial Sequence: Synthetic oligonucleotide
  Antisense strand to SEQ ID NO: 1320262
acuuagcacgaagagugcg

SEQ ID NO: 1320264 - RNA, 19 nt, Artificial Sequence
  Description of Artificial Sequence: Synthetic oligonucleotide
  Sense strand starting at position 2459 of SEQ ID NO: 1242055
gcacucuucgugcuaaguc

SEQ ID NO: 1320265 - RNA, 19 nt, Artificial Sequence
  Description of Artificial Sequence: Synthetic oligonucleotide
  Antisense strand to SEQ ID NO: 1320264
gacuuagcacgaagagugc

SEQ ID NO: 1320266 - RNA, 19 nt, Artificial Sequence
  Description of Artificial Sequence: Synthetic oligonucleotide
  Sense strand starting at position 2498 of SEQ ID NO: 1242055
auaagauucugugcuugga

SEQ ID NO: 1320267 - RNA, 19 nt, Artificial Sequence
  Description of Artificial Sequence: Synthetic oligonucleotide
  Antisense strand to SEQ ID NO: 1320266
uccaagcacagaaucuuau

SEQ ID NO: 1320268 - RNA, 19 nt, Artificial Sequence
  Description of Artificial Sequence: Synthetic oligonucleotide
  Sense strand starting at position 2500 of SEQ ID NO: 1242055
aagauucugugcuuggaaa

SEQ ID NO: 1320269 - RNA, 19 nt, Artificial Sequence
  Description of Artificial Sequence: Synthetic oligonucleotide
  Antisense strand to SEQ ID NO: 1320268
uuuccaagcacagaaucuu

SEQ ID NO: 1320270 - RNA, 19 nt, Artificial Sequence
  Description of Artificial Sequence: Synthetic oligonucleotide
  Sense strand starting at position 2501 of SEQ ID NO: 1242055
agauucugugcuuggaaag

SEQ ID NO: 1320271 - RNA, 19 nt, Artificial Sequence
  Description of Artificial Sequence: Synthetic oligonucleotide
  Antisense strand to SEQ ID NO: 1320270
cuuuccaagcacagaaucu

SEQ ID NO: 1320272 - RNA, 19 nt, Artificial Sequence
  Description of Artificial Sequence: Synthetic oligonucleotide
  Sense strand starting at position 2689 of SEQ ID NO: 1242055
gcaugaggugcgccucauu

SEQ ID NO: 1320273 - RNA, 19 nt, Artificial Sequence
  Description of Artificial Sequence: Synthetic oligonucleotide
  Antisense strand to SEQ ID NO: 1320272
aaugaggcgcaccucaugc

SEQ ID NO: 1320274 - RNA, 19 nt, Artificial Sequence
  Description of Artificial Sequence: Synthetic oligonucleotide
  Sense strand starting at position 2699 of SEQ ID NO: 1242055
cgccucauuccauguauuu

SEQ ID NO: 1320275 - RNA, 19 nt, Artificial Sequence
  Description of Artificial Sequence: Synthetic oligonucleotide
  Antisense strand to SEQ ID NO: 1320274
aaauacauggaaugaggcg

SEQ ID NO: 1320276 - RNA, 19 nt, Artificial Sequence
  Description of Artificial Sequence: Synthetic oligonucleotide
  Sense strand starting at position 2778 of SEQ ID NO: 1242055
uuagucuugcaccauguaa

SEQ ID NO: 1320277 - RNA, 19 nt, Artificial Sequence
  Description of Artificial Sequence: Synthetic oligonucleotide
  Antisense strand to SEQ ID NO: 1320276
uuacauggugcaagacuaa

SEQ ID NO: 1320278 - RNA, 19 nt, Artificial Sequence
  Description of Artificial Sequence: Synthetic oligonucleotide
  Sense strand starting at position 2805 of SEQ ID NO: 1242055
aucgcaacaguguaguaaa

SEQ ID NO: 1320279 - RNA, 19 nt, Artificial Sequence
  Description of Artificial Sequence: Synthetic oligonucleotide
  Antisense strand to SEQ ID NO: 1320278
uuuacuacacuguugcgau

SEQ ID NO: 1320280 - RNA, 19 nt, Artificial Sequence
  Description of Artificial Sequence: Synthetic oligonucleotide
  Sense strand starting at position 2895 of SEQ ID NO: 1242055
gaauuauguaaggguguga

SEQ ID NO: 1320281 - RNA, 19 nt, Artificial Sequence
  Description of Artificial Sequence: Synthetic oligonucleotide
  Antisense strand to SEQ ID NO: 1320280
ucacacccuuacauaauuc

SEQ ID NO: 1320282 - RNA, 19 nt, Artificial Sequence
  Description of Artificial Sequence: Synthetic oligonucleotide
  Sense strand starting at position 2899 of SEQ ID NO: 1242055
uauguaagggugugauaac

SEQ ID NO: 1320283 - RNA, 19 nt, Artificial Sequence
  Description of Artificial Sequence: Synthetic oligonucleotide
  Antisense strand to SEQ ID NO: 1320282
guuaucacacccuuacaua

SEQ ID NO: 1320284 - RNA, 19 nt, Artificial Sequence
  Description of Artificial Sequence: Synthetic oligonucleotide
  Sense strand starting at position 2940 of SEQ ID NO: 1242055
agcuuuguucggccaggca

SEQ ID NO: 1320285 - RNA, 19 nt, Artificial Sequence
  Description of Artificial Sequence: Synthetic oligonucleotide
  Antisense strand to SEQ ID NO: 1320284
ugccuggccgaacaaagcu

SEQ ID NO: 1320286 - RNA, 19 nt, Artificial Sequence
  Description of Artificial Sequence: Synthetic oligonucleotide
  Sense strand starting at position 3107 of SEQ ID NO: 1242055
gccuguauuccucuggugu

SEQ ID NO: 1320287 - RNA, 19 nt, Artificial Sequence
  Description of Artificial Sequence: Synthetic oligonucleotide
  Antisense strand to SEQ ID NO: 1320286
acaccagaggaauacaggc

SEQ ID NO: 1320288 - RNA, 19 nt, Artificial Sequence
  Description of Artificial Sequence: Synthetic oligonucleotide
  Sense strand starting at position 3133 of SEQ ID NO: 1242055
cuuguuucuggauaggcau

SEQ ID NO: 1320289 - RNA, 19 nt, Artificial Sequence
  Description of Artificial Sequence: Synthetic oligonucleotide
  Antisense strand to SEQ ID NO: 1320288
augccuauccagaaacaag

SEQ ID NO: 1320290 - RNA, 19 nt, Artificial Sequence
  Description of Artificial Sequence: Synthetic oligonucleotide
  Sense strand starting at position 3272 of SEQ ID NO: 1242055
ccaggacucuuucuggcau

SEQ ID NO: 1320291 - RNA, 19 nt, Artificial Sequence
  Description of Artificial Sequence: Synthetic oligonucleotide
  Antisense strand to SEQ ID NO: 1320290
augccagaaagaguccugg

SEQ ID NO: 1320292 - RNA, 19 nt, Artificial Sequence
  Description of Artificial Sequence: Synthetic oligonucleotide
  Sense strand starting at position 3357 of SEQ ID NO: 1242055
ugaugaagacucugacgcu

SEQ ID NO: 1320293 - RNA, 19 nt, Artificial Sequence
  Description of Artificial Sequence: Synthetic oligonucleotide
  Antisense strand to SEQ ID NO: 1320292
agcgucagagucuucauca

SEQ ID NO: 1320294 - RNA, 19 nt, Artificial Sequence
  Description of Artificial Sequence: Synthetic oligonucleotide
  Sense strand starting at position 3530 of SEQ ID NO: 1242055
uuaugucgucuccacauaa

SEQ ID NO: 1320295 - RNA, 19 nt, Artificial Sequence
  Description of Artificial Sequence: Synthetic oligonucleotide
  Antisense strand to SEQ ID NO: 1320294
uuauguggagacgacauaa

SEQ ID NO: 1320296 - RNA, 19 nt, Artificial Sequence
  Description of Artificial Sequence: Synthetic oligonucleotide
  Sense strand starting at position 3534 of SEQ ID NO: 1242055
gucgucuccacauaagaga

SEQ ID NO: 1320297 - RNA, 19 nt, Artificial Sequence
  Description of Artificial Sequence: Synthetic oligonucleotide
  Antisense strand to SEQ ID NO: 1320296
ucucuuauguggagacgac

SEQ ID NO: 1320298 - RNA, 19 nt, Artificial Sequence
  Description of Artificial Sequence: Synthetic oligonucleotide
  Sense strand starting at position 3826 of SEQ ID NO: 1242055
cugagugugcugcaagaau

SEQ ID NO: 1320299 - RNA, 19 nt, Artificial Sequence
  Description of Artificial Sequence: Synthetic oligonucleotide
  Antisense strand to SEQ ID NO: 1320298
auucuugcagcacacucag

SEQ ID NO: 1320300 - RNA, 19 nt, Artificial Sequence
  Description of Artificial Sequence: Synthetic oligonucleotide
  Sense strand starting at position 3837 of SEQ ID NO: 1242055
gcaagaaugcugcaaguag

SEQ ID NO: 1320301 - RNA, 19 nt, Artificial Sequence
  Description of Artificial Sequence: Synthetic oligonucleotide
  Antisense strand to SEQ ID NO: 1320300
cuacuugcagcauucuugc

SEQ ID NO: 1320302 - RNA, 19 nt, Artificial Sequence
  Description of Artificial Sequence: Synthetic oligonucleotide
  Sense strand starting at position 1486 of SEQ ID NO: 1242056
agucguuguuaccuuaauu

SEQ ID NO: 1320303 - RNA, 19 nt, Artificial Sequence
  Description of Artificial Sequence: Synthetic oligonucleotide
  Antisense strand to SEQ ID NO: 1320302
aauuaagguaacaacgacu

SEQ ID NO: 1320304 - RNA, 19 nt, Artificial Sequence
  Description of Artificial Sequence: Synthetic oligonucleotide
  Sense strand starting at position 1515 of SEQ ID NO: 1242056
ggcuguaaaggucaguuua

SEQ ID NO: 1320305 - RNA, 19 nt, Artificial Sequence
  Description of Artificial Sequence: Synthetic oligonucleotide
  Antisense strand to SEQ ID NO: 1320304
uaaacugaccuuuacagcc

SEQ ID NO: 1320306 - RNA, 19 nt, Artificial Sequence
  Description of Artificial Sequence: Synthetic oligonucleotide
  Sense strand starting at position 1517 of SEQ ID NO: 1242056
cuguaaaggucaguuuaca

SEQ ID NO: 1320307 - RNA, 19 nt, Artificial Sequence
  Description of Artificial Sequence: Synthetic oligonucleotide
  Antisense strand to SEQ ID NO: 1320306
uguaaacugaccuuuacag

SEQ ID NO: 1320308 - RNA, 19 nt, Artificial Sequence
  Description of Artificial Sequence: Synthetic oligonucleotide
  Sense strand starting at position 1529 of SEQ ID NO: 1242056
guuuacaacucguugaaca

SEQ ID NO: 1320309 - RNA, 19 nt, Artificial Sequence
  Description of Artificial Sequence: Synthetic oligonucleotide
  Antisense strand to SEQ ID NO: 1320308
uguucaacgaguuguaaac

SEQ ID NO: 1320310 - RNA, 19 nt, Artificial Sequence
  Description of Artificial Sequence: Synthetic oligonucleotide
  Sense strand starting at position 1530 of SEQ ID NO: 1242056
uuuacaacucguugaacaa

SEQ ID NO: 1320311 - RNA, 19 nt, Artificial Sequence
  Description of Artificial Sequence: Synthetic oligonucleotide
  Antisense strand to SEQ ID NO: 1320310
uuguucaacgaguuguaaa

SEQ ID NO: 1320312 - RNA, 19 nt, Artificial Sequence
  Description of Artificial Sequence: Synthetic oligonucleotide
  Sense strand starting at position 1545 of SEQ ID NO: 1242056
acaacugaguaagauuuaa

SEQ ID NO: 1320313 - RNA, 19 nt, Artificial Sequence
  Description of Artificial Sequence: Synthetic oligonucleotide
  Antisense strand to SEQ ID NO: 1320312
uuaaaucuuacucaguugu

SEQ ID NO: 1320314 - RNA, 19 nt, Artificial Sequence
  Description of Artificial Sequence: Synthetic oligonucleotide
  Sense strand starting at position 1574 of SEQ ID NO: 1242056
cugauagcugcauaccuaa

SEQ ID NO: 1320315 - RNA, 19 nt, Artificial Sequence
  Description of Artificial Sequence: Synthetic oligonucleotide
  Antisense strand to SEQ ID NO: 1320314
uuagguaugcagcuaucag

SEQ ID NO: 1320316 - RNA, 19 nt, Artificial Sequence
  Description of Artificial Sequence: Synthetic oligonucleotide
  Sense strand starting at position 1720 of SEQ ID NO: 1242056
guacaaugauagcagaaau

SEQ ID NO: 1320317 - RNA, 19 nt, Artificial Sequence
  Description of Artificial Sequence: Synthetic oligonucleotide
  Antisense strand to SEQ ID NO: 1320316
auuucugcuaucauuguac

SEQ ID NO: 1320318 - RNA, 19 nt, Artificial Sequence
  Description of Artificial Sequence: Synthetic oligonucleotide
  Sense strand starting at position 2020 of SEQ ID NO: 1242056
agucguagcgaaucagcua

SEQ ID NO: 1320319 - RNA, 19 nt, Artificial Sequence
  Description of Artificial Sequence: Synthetic oligonucleotide
  Antisense strand to SEQ ID NO: 1320318
uagcugauucgcuacgacu

SEQ ID NO: 1320320 - RNA, 19 nt, Artificial Sequence
  Description of Artificial Sequence: Synthetic oligonucleotide
  Sense strand starting at position 2032 of SEQ ID NO: 1242056
ucagcuacaagucgagaua

SEQ ID NO: 1320321 - RNA, 19 nt, Artificial Sequence
  Description of Artificial Sequence: Synthetic oligonucleotide
  Antisense strand to SEQ ID NO: 1320320
uaucucgacuuguagcuga

SEQ ID NO: 1320322 - RNA, 19 nt, Artificial Sequence
  Description of Artificial Sequence: Synthetic oligonucleotide
  Sense strand starting at position 2033 of SEQ ID NO: 1242056
cagcuacaagucgagauaa

SEQ ID NO: 1320323 - RNA, 19 nt, Artificial Sequence
  Description of Artificial Sequence: Synthetic oligonucleotide
  Antisense strand to SEQ ID NO: 1320322
uuaucucgacuuguagcug

SEQ ID NO: 1320324 - RNA, 19 nt, Artificial Sequence
  Description of Artificial Sequence: Synthetic oligonucleotide
  Sense strand starting at position 2035 of SEQ ID NO: 1242056
gcuacaagucgagauaauu

SEQ ID NO: 1320325 - RNA, 19 nt, Artificial Sequence
  Description of Artificial Sequence: Synthetic oligonucleotide
  Antisense strand to SEQ ID NO: 1320324
aauuaucucgacuuguagc

SEQ ID NO: 1320326 - RNA, 19 nt, Artificial Sequence
  Description of Artificial Sequence: Synthetic oligonucleotide
  Sense strand starting at position 2064 of SEQ ID NO: 1242056
ggaaacagcuccucuaaga

SEQ ID NO: 1320327 - RNA, 19 nt, Artificial Sequence
  Description of Artificial Sequence: Synthetic oligonucleotide
  Antisense strand to SEQ ID NO: 1320326
ucuuagaggagcuguuucc

SEQ ID NO: 1320328 - RNA, 19 nt, Artificial Sequence
  Description of Artificial Sequence: Synthetic oligonucleotide
  Sense strand starting at position 2140 of SEQ ID NO: 1242056
ggaggagguugucuccaau

SEQ ID NO: 1320329 - RNA, 19 nt, Artificial Sequence
  Description of Artificial Sequence: Synthetic oligonucleotide
  Antisense strand to SEQ ID NO: 1320328
auuggagacaaccuccucc

SEQ ID NO: 1320330 - RNA, 19 nt, Artificial Sequence
  Description of Artificial Sequence: Synthetic oligonucleotide
  Sense strand starting at position 2174 of SEQ ID NO: 1242056
cggccaagaugucugacau

SEQ ID NO: 1320331 - RNA, 19 nt, Artificial Sequence
  Description of Artificial Sequence: Synthetic oligonucleotide
  Antisense strand to SEQ ID NO: 1320330
augucagacaucuuggccg

SEQ ID NO: 1320332 - RNA, 19 nt, Artificial Sequence
  Description of Artificial Sequence: Synthetic oligonucleotide
  Sense strand starting at position 2175 of SEQ ID NO: 1242056
ggccaagaugucugacaug

SEQ ID NO: 1320333 - RNA, 19 nt, Artificial Sequence
  Description of Artificial Sequence: Synthetic oligonucleotide
  Antisense strand to SEQ ID NO: 1320332
caugucagacaucuuggcc

SEQ ID NO: 1320334 - RNA, 19 nt, Artificial Sequence
  Description of Artificial Sequence: Synthetic oligonucleotide
  Sense strand starting at position 2178 of SEQ ID NO: 1242056
caagaugucugacauggag

SEQ ID NO: 1320335 - RNA, 19 nt, Artificial Sequence
  Description of Artificial Sequence: Synthetic oligonucleotide
  Antisense strand to SEQ ID NO: 1320334
cuccaugucagacaucuug

SEQ ID NO: 1320336 - RNA, 19 nt, Artificial Sequence
  Description of Artificial Sequence: Synthetic oligonucleotide
  Sense strand starting at position 2181 of SEQ ID NO: 1242056
gaugucugacauggaggau

SEQ ID NO: 1320337 - RNA, 19 nt, Artificial Sequence
  Description of Artificial Sequence: Synthetic oligonucleotide
  Antisense strand to SEQ ID NO: 1320336
auccuccaugucagacauc

SEQ ID NO: 1320338 - RNA, 19 nt, Artificial Sequence
  Description of Artificial Sequence: Synthetic oligonucleotide
  Sense strand starting at position 2184 of SEQ ID NO: 1242056
gucugacauggaggaugau

SEQ ID NO: 1320339 - RNA, 19 nt, Artificial Sequence
  Description of Artificial Sequence: Synthetic oligonucleotide
  Antisense strand to SEQ ID NO: 1320338
aucauccuccaugucagac

SEQ ID NO: 1320340 - RNA, 19 nt, Artificial Sequence
  Description of Artificial Sequence: Synthetic oligonucleotide
  Sense strand starting at position 2199 of SEQ ID NO: 1242056
ugauuucaugugcgaugau

SEQ ID NO: 1320341 - RNA, 19 nt, Artificial Sequence
  Description of Artificial Sequence: Synthetic oligonucleotide
  Antisense strand to SEQ ID NO: 1320340
aucaucgcacaugaaauca

SEQ ID NO: 1320342 - RNA, 19 nt, Artificial Sequence
  Description of Artificial Sequence: Synthetic oligonucleotide
  Sense strand starting at position 2202 of SEQ ID NO: 1242056
uuucaugugcgaugaugag

SEQ ID NO: 1320343 - RNA, 19 nt, Artificial Sequence
  Description of Artificial Sequence: Synthetic oligonucleotide
  Antisense strand to SEQ ID NO: 1320342
cucaucaucgcacaugaaa

SEQ ID NO: 1320344 - RNA, 19 nt, Artificial Sequence
  Description of Artificial Sequence: Synthetic oligonucleotide
  Sense strand starting at position 2353 of SEQ ID NO: 1242056
cggugacaggacugguuua

SEQ ID NO: 1320345 - RNA, 19 nt, Artificial Sequence
  Description of Artificial Sequence: Synthetic oligonucleotide
  Antisense strand to SEQ ID NO: 1320344
uaaaccaguccugucaccg

SEQ ID NO: 1320346 - RNA, 19 nt, Artificial Sequence
  Description of Artificial Sequence: Synthetic oligonucleotide
  Sense strand starting at position 2651 of SEQ ID NO: 1242056
ugcgaaaugcuaggagaag

SEQ ID NO: 1320347 - RNA, 19 nt, Artificial Sequence
  Description of Artificial Sequence: Synthetic oligonucleotide
  Antisense strand to SEQ ID NO: 1320346
cuucuccuagcauuucgca

SEQ ID NO: 1320348 - RNA, 19 nt, Artificial Sequence
  Description of Artificial Sequence: Synthetic oligonucleotide
  Sense strand starting at position 2724 of SEQ ID NO: 1242056
gugagucuccuggagacau

SEQ ID NO: 1320349 - RNA, 19 nt, Artificial Sequence
  Description of Artificial Sequence: Synthetic oligonucleotide
  Antisense strand to SEQ ID NO: 1320348
augucuccaggagacucac

SEQ ID NO: 1320350 - RNA, 19 nt, Artificial Sequence
  Description of Artificial Sequence: Synthetic oligonucleotide
  Sense strand starting at position 3055 of SEQ ID NO: 1242056
uugaauaacguuugcuauu

SEQ ID NO: 1320351 - RNA, 19 nt, Artificial Sequence
  Description of Artificial Sequence: Synthetic oligonucleotide
  Antisense strand to SEQ ID NO: 1320350
aauagcaaacguuauucaa

SEQ ID NO: 1320352 - RNA, 19 nt, Artificial Sequence
  Description of Artificial Sequence: Synthetic oligonucleotide
  Sense strand starting at position 3237 of SEQ ID NO: 1242056
agugccagagauugucaaa

SEQ ID NO: 1320353 - RNA, 19 nt, Artificial Sequence
  Description of Artificial Sequence: Synthetic oligonucleotide
  Antisense strand to SEQ ID NO: 1320352
uuugacaaucucuggcacu

SEQ ID NO: 1320354 - RNA, 19 nt, Artificial Sequence
  Description of Artificial Sequence: Synthetic oligonucleotide
  Sense strand starting at position 3352 of SEQ ID NO: 1242056
aggaaauucucgcuauuau

SEQ ID NO: 1320355 - RNA, 19 nt, Artificial Sequence
  Description of Artificial Sequence: Synthetic oligonucleotide
  Antisense strand to SEQ ID NO: 1320354
auaauagcgagaauuuccu

SEQ ID NO: 1320356 - RNA, 19 nt, Artificial Sequence
  Description of Artificial Sequence: Synthetic oligonucleotide
  Sense strand starting at position 3353 of SEQ ID NO: 1242056
ggaaauucucgcuauuauu

SEQ ID NO: 1320357 - RNA, 19 nt, Artificial Sequence
  Description of Artificial Sequence: Synthetic oligonucleotide
  Antisense strand to SEQ ID NO: 1320356
aauaauagcgagaauuucc

SEQ ID NO: 1320358 - RNA, 19 nt, Artificial Sequence
  Description of Artificial Sequence: Synthetic oligonucleotide
  Sense strand starting at position 3361 of SEQ ID NO: 1242056
ucgcuauuauuugaaaguc

SEQ ID NO: 1320359 - RNA, 19 nt, Artificial Sequence
  Description of Artificial Sequence: Synthetic oligonucleotide
  Antisense strand to SEQ ID NO: 1320358
gacuuucaaauaauagcga

SEQ ID NO: 1320360 - RNA, 19 nt, Artificial Sequence
  Description of Artificial Sequence: Synthetic oligonucleotide
  Sense strand starting at position 3369 of SEQ ID NO: 1242056
auuugaaagucauaguaga

SEQ ID NO: 1320361 - RNA, 19 nt, Artificial Sequence
  Description of Artificial Sequence: Synthetic oligonucleotide
  Antisense strand to SEQ ID NO: 1320360
ucuacuaugacuuucaaau

SEQ ID NO: 1320362 - RNA, 19 nt, Artificial Sequence
  Description of Artificial Sequence: Synthetic oligonucleotide
  Sense strand starting at position 3410 of SEQ ID NO: 1242056
aaauguaguuucgcuaaua

SEQ ID NO: 1320363 - RNA, 19 nt, Artificial Sequence
  Description of Artificial Sequence: Synthetic oligonucleotide
  Antisense strand to SEQ ID NO: 1320362
uauuagcgaaacuacauuu

SEQ ID NO: 1320364 - RNA, 19 nt, Artificial Sequence
  Description of Artificial Sequence: Synthetic oligonucleotide
  Sense strand starting at position 3411 of SEQ ID NO: 1242056
aauguaguuucgcuaauag

SEQ ID NO: 1320365 - RNA, 19 nt, Artificial Sequence
  Description of Artificial Sequence: Synthetic oligonucleotide
  Antisense strand to SEQ ID NO: 1320364
cuauuagcgaaacuacauu

SEQ ID NO: 1320366 - RNA, 19 nt, Artificial Sequence
  Description of Artificial Sequence: Synthetic oligonucleotide
  Sense strand starting at position 3632 of SEQ ID NO: 1242056
ucguuacaugcacaggaua

SEQ ID NO: 1320367 - RNA, 19 nt, Artificial Sequence
  Description of Artificial Sequence: Synthetic oligonucleotide
  Antisense strand to SEQ ID NO: 1320366
uauccugugcauguaacga

SEQ ID NO: 1320368 - RNA, 19 nt, Artificial Sequence
  Description of Artificial Sequence: Synthetic oligonucleotide
  Sense strand starting at position 3653 of SEQ ID NO: 1242056
uagugaucaagucgguauu

SEQ ID NO: 1320369 - RNA, 19 nt, Artificial Sequence
  Description of Artificial Sequence: Synthetic oligonucleotide
  Antisense strand to SEQ ID NO: 1320368
aauaccgacuugaucacua

SEQ ID NO: 1320370 - RNA, 19 nt, Artificial Sequence
  Description of Artificial Sequence: Synthetic oligonucleotide
  Sense strand starting at position 3695 of SEQ ID NO: 1242056
uuuaucauuucugugucua

SEQ ID NO: 1320371 - RNA, 19 nt, Artificial Sequence
  Description of Artificial Sequence: Synthetic oligonucleotide
  Antisense strand to SEQ ID NO: 1320370
uagacacagaaaugauaaa

SEQ ID NO: 1320372 - RNA, 19 nt, Artificial Sequence
  Description of Artificial Sequence: Synthetic oligonucleotide
  Sense strand starting at position 3696 of SEQ ID NO: 1242056
uuaucauuucugugucuag

SEQ ID NO: 1320373 - RNA, 19 nt, Artificial Sequence
  Description of Artificial Sequence: Synthetic oligonucleotide
  Antisense strand to SEQ ID NO: 1320372
cuagacacagaaaugauaa

SEQ ID NO: 1320374 - RNA, 19 nt, Artificial Sequence
  Description of Artificial Sequence: Synthetic oligonucleotide
  Sense strand starting at position 3816 of SEQ ID NO: 1242056
aucuaacuguugguuugua

SEQ ID NO: 1320375 - RNA, 19 nt, Artificial Sequence
  Description of Artificial Sequence: Synthetic oligonucleotide
  Antisense strand to SEQ ID NO: 1320374
uacaaaccaacaguuagau

SEQ ID NO: 1320376 - RNA, 19 nt, Artificial Sequence
  Description of Artificial Sequence: Synthetic oligonucleotide
  Sense strand starting at position 3820 of SEQ ID NO: 1242056
aacuguugguuuguacaua

SEQ ID NO: 1320377 - RNA, 19 nt, Artificial Sequence
  Description of Artificial Sequence: Synthetic oligonucleotide
  Antisense strand to SEQ ID NO: 1320376
uauguacaaaccaacaguu

SEQ ID NO: 1320378 - RNA, 19 nt, Artificial Sequence
  Description of Artificial Sequence: Synthetic oligonucleotide
  Sense strand starting at position 3903 of SEQ ID NO: 1242056
acucucuaccaccgugaaa

SEQ ID NO: 1320379 - RNA, 19 nt, Artificial Sequence
  Description of Artificial Sequence: Synthetic oligonucleotide
  Antisense strand to SEQ ID NO: 1320378
uuucacggugguagagagu

SEQ ID NO: 1320380 - RNA, 19 nt, Artificial Sequence
  Description of Artificial Sequence: Synthetic oligonucleotide
  Sense strand starting at position 3905 of SEQ ID NO: 1242056
ucucuaccaccgugaaauc

SEQ ID NO: 1320381 - RNA, 19 nt, Artificial Sequence
  Description of Artificial Sequence: Synthetic oligonucleotide
  Antisense strand to SEQ ID NO: 1320380
gauuucacggugguagaga

SEQ ID NO: 1320382 - RNA, 19 nt, Artificial Sequence
  Description of Artificial Sequence: Synthetic oligonucleotide
  Sense strand starting at position 175 of SEQ ID NO: 1242057
cggagacugcgccacuaua

SEQ ID NO: 1320383 - RNA, 19 nt, Artificial Sequence
  Description of Artificial Sequence: Synthetic oligonucleotide
  Antisense strand to SEQ ID NO: 1320382
uauaguggcgcagucuccg

SEQ ID NO: 1320384 - RNA, 19 nt, Artificial Sequence
  Description of Artificial Sequence: Synthetic oligonucleotide
  Sense strand starting at position 302 of SEQ ID NO: 1242057
gaagcaugccuuuaacagu

SEQ ID NO: 1320385 - RNA, 19 nt, Artificial Sequence
  Description of Artificial Sequence: Synthetic oligonucleotide
  Antisense strand to SEQ ID NO: 1320384
acuguuaaaggcaugcuuc

SEQ ID NO: 1320386 - RNA, 19 nt, Artificial Sequence
  Description of Artificial Sequence: Synthetic oligonucleotide
  Sense strand starting at position 311 of SEQ ID NO: 1242057
cuuuaacagugugucuuaa

SEQ ID NO: 1320387 - RNA, 19 nt, Artificial Sequence
  Description of Artificial Sequence: Synthetic oligonucleotide
  Antisense strand to SEQ ID NO: 1320386
uuaagacacacuguuaaag

SEQ ID NO: 1320388 - RNA, 19 nt, Artificial Sequence
  Description of Artificial Sequence: Synthetic oligonucleotide
  Sense strand starting at position 313 of SEQ ID NO: 1242057
uuaacagugugucuuaauu

SEQ ID NO: 1320389 - RNA, 19 nt, Artificial Sequence
  Description of Artificial Sequence: Synthetic oligonucleotide
  Antisense strand to SEQ ID NO: 1320388
aauuaagacacacuguuaa

SEQ ID NO: 1320390 - RNA, 19 nt, Artificial Sequence
  Description of Artificial Sequence: Synthetic oligonucleotide
  Sense strand starting at position 349 of SEQ ID NO: 1242057
gcaacagugcuauacaaga

SEQ ID NO: 1320391 - RNA, 19 nt, Artificial Sequence
  Description of Artificial Sequence: Synthetic oligonucleotide
  Antisense strand to SEQ ID NO: 1320390
ucuuguauagcacuguugc

SEQ ID NO: 1320392 - RNA, 19 nt, Artificial Sequence
  Description of Artificial Sequence: Synthetic oligonucleotide
  Sense strand starting at position 401 of SEQ ID NO: 1242057
ugagaaguaguccaaagcu

SEQ ID NO: 1320393 - RNA, 19 nt, Artificial Sequence
  Description of Artificial Sequence: Synthetic oligonucleotide
  Antisense strand to SEQ ID NO: 1320392
agcuuuggacuacuucuca

SEQ ID NO: 1320394 - RNA, 19 nt, Artificial Sequence
  Description of Artificial Sequence: Synthetic oligonucleotide
  Sense strand starting at position 424 of SEQ ID NO: 1242057
uggacucuauaauaagaaa

SEQ ID NO: 1320395 - RNA, 19 nt, Artificial Sequence
  Description of Artificial Sequence: Synthetic oligonucleotide
  Antisense strand to SEQ ID NO: 1320394
uuucuuauuauagagucca

SEQ ID NO: 1320396 - RNA, 19 nt, Artificial Sequence
  Description of Artificial Sequence: Synthetic oligonucleotide
  Sense strand starting at position 450 of SEQ ID NO: 1242057
ucuuucugguaacuaaaga

SEQ ID NO: 1320397 - RNA, 19 nt, Artificial Sequence
  Description of Artificial Sequence: Synthetic oligonucleotide
  Antisense strand to SEQ ID NO: 1320396
ucuuuaguuaccagaaaga

SEQ ID NO: 1320398 - RNA, 19 nt, Artificial Sequence
  Description of Artificial Sequence: Synthetic oligonucleotide
  Sense strand starting at position 535 of SEQ ID NO: 1242057
cugacacacggugguaaua

SEQ ID NO: 1320399 - RNA, 19 nt, Artificial Sequence
  Description of Artificial Sequence: Synthetic oligonucleotide
  Antisense strand to SEQ ID NO: 1320398
uauuaccaccgugugucag

SEQ ID NO: 1320400 - RNA, 19 nt, Artificial Sequence
  Description of Artificial Sequence: Synthetic oligonucleotide
  Sense strand starting at position 1019 of SEQ ID NO: 1242057
uaauguagcaggugacaga

SEQ ID NO: 1320401 - RNA, 19 nt, Artificial Sequence
  Description of Artificial Sequence: Synthetic oligonucleotide
  Antisense strand to SEQ ID NO: 1320400
ucugucaccugcuacauua

SEQ ID NO: 1320402 - RNA, 19 nt, Artificial Sequence
  Description of Artificial Sequence: Synthetic oligonucleotide
  Sense strand starting at position 1063 of SEQ ID NO: 1242057
auuagucagaacgaaguau

SEQ ID NO: 1320403 - RNA, 19 nt, Artificial Sequence
  Description of Artificial Sequence: Synthetic oligonucleotide
  Antisense strand to SEQ ID NO: 1320402
auacuucguucugacuaau

SEQ ID NO: 1320404 - RNA, 19 nt, Artificial Sequence
  Description of Artificial Sequence: Synthetic oligonucleotide
  Sense strand starting at position 1152 of SEQ ID NO: 1242057
agggacugccagcaaauua

SEQ ID NO: 1320405 - RNA, 19 nt, Artificial Sequence
  Description of Artificial Sequence: Synthetic oligonucleotide
  Antisense strand to SEQ ID NO: 1320404
uaauuugcuggcagucccu

SEQ ID NO: 1320406 - RNA, 19 nt, Artificial Sequence
  Description of Artificial Sequence: Synthetic oligonucleotide
  Sense strand starting at position 1324 of SEQ ID NO: 1242057
agaggaguucaguguggau

SEQ ID NO: 1320407 - RNA, 19 nt, Artificial Sequence
  Description of Artificial Sequence: Synthetic oligonucleotide
  Antisense strand to SEQ ID NO: 1320406
auccacacugaacuccucu

SEQ ID NO: 1320408 - RNA, 19 nt, Artificial Sequence
  Description of Artificial Sequence: Synthetic oligonucleotide
  Sense strand starting at position 1326 of SEQ ID NO: 1242057
aggaguucaguguggauau

SEQ ID NO: 1320409 - RNA, 19 nt, Artificial Sequence
  Description of Artificial Sequence: Synthetic oligonucleotide
  Antisense strand to SEQ ID NO: 1320408
auauccacacugaacuccu

SEQ ID NO: 1320410 - RNA, 19 nt, Artificial Sequence
  Description of Artificial Sequence: Synthetic oligonucleotide
  Sense strand starting at position 1441 of SEQ ID NO: 1242057
cuucguaguagucaaggua

SEQ ID NO: 1320411 - RNA, 19 nt, Artificial Sequence
  Description of Artificial Sequence: Synthetic oligonucleotide
  Antisense strand to SEQ ID NO: 1320410
uaccuugacuacuacgaag

SEQ ID NO: 1320412 - RNA, 19 nt, Artificial Sequence
  Description of Artificial Sequence: Synthetic oligonucleotide
  Sense strand starting at position 1444 of SEQ ID NO: 1242057
cguaguagucaagguagaa

SEQ ID NO: 1320413 - RNA, 19 nt, Artificial Sequence
  Description of Artificial Sequence: Synthetic oligonucleotide
  Antisense strand to SEQ ID NO: 1320412
uucuaccuugacuacuacg

SEQ ID NO: 1320414 - RNA, 19 nt, Artificial Sequence
  Description of Artificial Sequence: Synthetic oligonucleotide
  Sense strand starting at position 2025 of SEQ ID NO: 1242057
guggaugucagagaacagu

SEQ ID NO: 1320415 - RNA, 19 nt, Artificial Sequence
  Description of Artificial Sequence: Synthetic oligonucleotide
  Antisense strand to SEQ ID NO: 1320414
acuguucucugacauccac

SEQ ID NO: 1320416 - RNA, 19 nt, Artificial Sequence
  Description of Artificial Sequence: Synthetic oligonucleotide
  Sense strand starting at position 2031 of SEQ ID NO: 1242057
gucagagaacagugucaua

SEQ ID NO: 1320417 - RNA, 19 nt, Artificial Sequence
  Description of Artificial Sequence: Synthetic oligonucleotide
  Antisense strand to SEQ ID NO: 1320416
uaugacacuguucucugac

SEQ ID NO: 1320418 - RNA, 19 nt, Artificial Sequence
  Description of Artificial Sequence: Synthetic oligonucleotide
  Sense strand starting at position 2227 of SEQ ID NO: 1242057
auugauguaucacuugauu

SEQ ID NO: 1320419 - RNA, 19 nt, Artificial Sequence
  Description of Artificial Sequence: Synthetic oligonucleotide
  Antisense strand to SEQ ID NO: 1320418
aaucaagugauacaucaau

SEQ ID NO: 1320420 - RNA, 19 nt, Artificial Sequence
  Description of Artificial Sequence: Synthetic oligonucleotide
  Sense strand starting at position 2256 of SEQ ID NO: 1242057
ugcauuuauuuacagguua

SEQ ID NO: 1320421 - RNA, 19 nt, Artificial Sequence
  Description of Artificial Sequence: Synthetic oligonucleotide
  Antisense strand to SEQ ID NO: 1320420
uaaccuguaaauaaaugca

SEQ ID NO: 1320422 - RNA, 19 nt, Artificial Sequence
  Description of Artificial Sequence: Synthetic oligonucleotide
  Sense strand starting at position 2414 of SEQ ID NO: 1242057
guacacuaucccuaguaca

SEQ ID NO: 1320423 - RNA, 19 nt, Artificial Sequence
  Description of Artificial Sequence: Synthetic oligonucleotide
  Antisense strand to SEQ ID NO: 1320422
uguacuagggauaguguac

SEQ ID NO: 1320424 - RNA, 19 nt, Artificial Sequence
  Description of Artificial Sequence: Synthetic oligonucleotide
  Sense strand starting at position 2459 of SEQ ID NO: 1242057
ucuccuauuugcuuaugua

SEQ ID NO: 1320425 - RNA, 19 nt, Artificial Sequence
  Description of Artificial Sequence: Synthetic oligonucleotide
  Antisense strand to SEQ ID NO: 1320424
uacauaagcaaauaggaga

SEQ ID NO: 1320426 - RNA, 19 nt, Artificial Sequence
  Description of Artificial Sequence: Synthetic oligonucleotide
  Sense strand starting at position 2586 of SEQ ID NO: 1242057
ggugaaaugaugugccuga

SEQ ID NO: 1320427 - RNA, 19 nt, Artificial Sequence
  Description of Artificial Sequence: Synthetic oligonucleotide
  Antisense strand to SEQ ID NO: 1320426
ucaggcacaucauuucacc

SEQ ID NO: 1320428 - RNA, 19 nt, Artificial Sequence
  Description of Artificial Sequence: Synthetic oligonucleotide
  Sense strand starting at position 2590 of SEQ ID NO: 1242057
aaaugaugugccugagguc

SEQ ID NO: 1320429 - RNA, 19 nt, Artificial Sequence
  Description of Artificial Sequence: Synthetic oligonucleotide
  Antisense strand to SEQ ID NO: 1320428
gaccucaggcacaucauuu

SEQ ID NO: 1320430 - RNA, 19 nt, Artificial Sequence
  Description of Artificial Sequence: Synthetic oligonucleotide
  Sense strand starting at position 2602 of SEQ ID NO: 1242057
ugaggucacagugaucauu

SEQ ID NO: 1320431 - RNA, 19 nt, Artificial Sequence
  Description of Artificial Sequence: Synthetic oligonucleotide
  Antisense strand to SEQ ID NO: 1320430
aaugaucacugugaccuca

SEQ ID NO: 1320432 - RNA, 19 nt, Artificial Sequence
  Description of Artificial Sequence: Synthetic oligonucleotide
  Sense strand starting at position 2608 of SEQ ID NO: 1242057
cacagugaucauugggaac

SEQ ID NO: 1320433 - RNA, 19 nt, Artificial Sequence
  Description of Artificial Sequence: Synthetic oligonucleotide
  Antisense strand to SEQ ID NO: 1320432
guucccaaugaucacugug

SEQ ID NO: 1320434 - RNA, 19 nt, Artificial Sequence
  Description of Artificial Sequence: Synthetic oligonucleotide
  Sense strand starting at position 2736 of SEQ ID NO: 1242057
aaaguuuccugauuaagga

SEQ ID NO: 1320435 - RNA, 19 nt, Artificial Sequence
  Description of Artificial Sequence: Synthetic oligonucleotide
  Antisense strand to SEQ ID NO: 1320434
uccuuaaucaggaaacuuu

SEQ ID NO: 1320436 - RNA, 19 nt, Artificial Sequence
  Description of Artificial Sequence: Synthetic oligonucleotide
  Sense strand starting at position 2804 of SEQ ID NO: 1242057
gagauucgauaaguuguau

SEQ ID NO: 1320437 - RNA, 19 nt, Artificial Sequence
  Description of Artificial Sequence: Synthetic oligonucleotide
  Antisense strand to SEQ ID NO: 1320436
auacaacuuaucgaaucuc

SEQ ID NO: 1320438 - RNA, 19 nt, Artificial Sequence
  Description of Artificial Sequence: Synthetic oligonucleotide
  Sense strand starting at position 2810 of SEQ ID NO: 1242057
cgauaaguuguauacauca

SEQ ID NO: 1320439 - RNA, 19 nt, Artificial Sequence
  Description of Artificial Sequence: Synthetic oligonucleotide
  Antisense strand to SEQ ID NO: 1320438
ugauguauacaacuuaucg

SEQ ID NO: 1320440 - RNA, 19 nt, Artificial Sequence
  Description of Artificial Sequence: Synthetic oligonucleotide
  Sense strand starting at position 2815 of SEQ ID NO: 1242057
aguuguauacaucaguaag

SEQ ID NO: 1320441 - RNA, 19 nt, Artificial Sequence
  Description of Artificial Sequence: Synthetic oligonucleotide
  Antisense strand to SEQ ID NO: 1320440
cuuacugauguauacaacu

SEQ ID NO: 1320442 - RNA, 19 nt, Artificial Sequence
  Description of Artificial Sequence: Synthetic oligonucleotide
  Sense strand starting at position 2818 of SEQ ID NO: 1242057
uguauacaucaguaaguua

SEQ ID NO: 1320443 - RNA, 19 nt, Artificial Sequence
  Description of Artificial Sequence: Synthetic oligonucleotide
  Antisense strand to SEQ ID NO: 1320442
uaacuuacugauguauaca

SEQ ID NO: 1320444 - RNA, 19 nt, Artificial Sequence
  Description of Artificial Sequence: Synthetic oligonucleotide
  Sense strand starting at position 2829 of SEQ ID NO: 1242057
guaaguuacugcuccagaa

SEQ ID NO: 1320445 - RNA, 19 nt, Artificial Sequence
  Description of Artificial Sequence: Synthetic oligonucleotide
  Antisense strand to SEQ ID NO: 1320444
uucuggagcaguaacuuac

SEQ ID NO: 1320446 - RNA, 19 nt, Artificial Sequence
  Description of Artificial Sequence: Synthetic oligonucleotide
  Sense strand starting at position 3048 of SEQ ID NO: 1242057
agggcagcuuucucacuau

SEQ ID NO: 1320447 - RNA, 19 nt, Artificial Sequence
  Description of Artificial Sequence: Synthetic oligonucleotide
  Antisense strand to SEQ ID NO: 1320446
auagugagaaagcugcccu

SEQ ID NO: 1320448 - RNA, 19 nt, Artificial Sequence
  Description of Artificial Sequence: Synthetic oligonucleotide
  Sense strand starting at position 3174 of SEQ ID NO: 1242057
aggagucaucacugucacu

SEQ ID NO: 1320449 - RNA, 19 nt, Artificial Sequence
  Description of Artificial Sequence: Synthetic oligonucleotide
  Antisense strand to SEQ ID NO: 1320448
agugacagugaugacuccu

SEQ ID NO: 1320450 - RNA, 19 nt, Artificial Sequence
  Description of Artificial Sequence: Synthetic oligonucleotide
  Sense strand starting at position 3179 of SEQ ID NO: 1242057
ucaucacugucacuuguaa

SEQ ID NO: 1320451 - RNA, 19 nt, Artificial Sequence
  Description of Artificial Sequence: Synthetic oligonucleotide
  Antisense strand to SEQ ID NO: 1320450
uuacaagugacagugauga

SEQ ID NO: 1320452 - RNA, 19 nt, Artificial Sequence
  Description of Artificial Sequence: Synthetic oligonucleotide
  Sense strand starting at position 3713 of SEQ ID NO: 1242057
uguagaaacuguuucgaaa

SEQ ID NO: 1320453 - RNA, 19 nt, Artificial Sequence
  Description of Artificial Sequence: Synthetic oligonucleotide
  Antisense strand to SEQ ID NO: 1320452
uuucgaaacaguuucuaca

SEQ ID NO: 1320454 - RNA, 19 nt, Artificial Sequence
  Description of Artificial Sequence: Synthetic oligonucleotide
  Sense strand starting at position 3746 of SEQ ID NO: 1242057
cugaauauguacuugauga

SEQ ID NO: 1320455 - RNA, 19 nt, Artificial Sequence
  Description of Artificial Sequence: Synthetic oligonucleotide
  Antisense strand to SEQ ID NO: 1320454
ucaucaaguacauauucag

SEQ ID NO: 1320456 - RNA, 19 nt, Artificial Sequence
  Description of Artificial Sequence: Synthetic oligonucleotide
  Sense strand starting at position 3754 of SEQ ID NO: 1242057
guacuugaugaccgaacau

SEQ ID NO: 1320457 - RNA, 19 nt, Artificial Sequence
  Description of Artificial Sequence: Synthetic oligonucleotide
  Antisense strand to SEQ ID NO: 1320456
auguucggucaucaaguac

SEQ ID NO: 1320458 - RNA, 19 nt, Artificial Sequence
  Description of Artificial Sequence: Synthetic oligonucleotide
  Sense strand starting at position 3797 of SEQ ID NO: 1242057
ggcaaaucauuaguuugga

SEQ ID NO: 1320459 - RNA, 19 nt, Artificial Sequence
  Description of Artificial Sequence: Synthetic oligonucleotide
  Antisense strand to SEQ ID NO: 1320458
uccaaacuaaugauuugcc

SEQ ID NO: 1320460 - RNA, 19 nt, Artificial Sequence
  Description of Artificial Sequence: Synthetic oligonucleotide
  Sense strand starting at position 3978 of SEQ ID NO: 1242057
aggccauacuacuucugaa

SEQ ID NO: 1320461 - RNA, 19 nt, Artificial Sequence
  Description of Artificial Sequence: Synthetic oligonucleotide
  Antisense strand to SEQ ID NO: 1320460
uucagaaguaguauggccu

SEQ ID NO: 1320462 - RNA, 19 nt, Artificial Sequence
  Description of Artificial Sequence: Synthetic oligonucleotide
  Sense strand starting at position 1 of SEQ ID NO: 1242058
auugaaguuugaguauaug

SEQ ID NO: 1320463 - RNA, 19 nt, Artificial Sequence
  Description of Artificial Sequence: Synthetic oligonucleotide
  Antisense strand to SEQ ID NO: 1320462
cauauacucaaacuucaau

SEQ ID NO: 1320464 - RNA, 19 nt, Artificial Sequence
  Description of Artificial Sequence: Synthetic oligonucleotide
  Sense strand starting at position 122 of SEQ ID NO: 1242058
ucagcauguccaugauuau

SEQ ID NO: 1320465 - RNA, 19 nt, Artificial Sequence
  Description of Artificial Sequence: Synthetic oligonucleotide
  Antisense strand to SEQ ID NO: 1320464
auaaucauggacaugcuga

SEQ ID NO: 1320466 - RNA, 19 nt, Artificial Sequence
  Description of Artificial Sequence: Synthetic oligonucleotide
  Sense strand starting at position 123 of SEQ ID NO: 1242058
cagcauguccaugauuaug

SEQ ID NO: 1320467 - RNA, 19 nt, Artificial Sequence
  Description of Artificial Sequence: Synthetic oligonucleotide
  Antisense strand to SEQ ID NO: 1320466
cauaaucauggacaugcug

SEQ ID NO: 1320468 - RNA, 19 nt, Artificial Sequence
  Description of Artificial Sequence: Synthetic oligonucleotide
  Sense strand starting at position 129 of SEQ ID NO: 1242058
guccaugauuauguagaaa

SEQ ID NO: 1320469 - RNA, 19 nt, Artificial Sequence
  Description of Artificial Sequence: Synthetic oligonucleotide
  Antisense strand to SEQ ID NO: 1320468
uuucuacauaaucauggac

SEQ ID NO: 1320470 - RNA, 19 nt, Artificial Sequence
  Description of Artificial Sequence: Synthetic oligonucleotide
  Sense strand starting at position 132 of SEQ ID NO: 1242058
caugauuauguagaaagcu

SEQ ID NO: 1320471 - RNA, 19 nt, Artificial Sequence
  Description of Artificial Sequence: Synthetic oligonucleotide
  Antisense strand to SEQ ID NO: 1320470
agcuuucuacauaaucaug

SEQ ID NO: 1320472 - RNA, 19 nt, Artificial Sequence
  Description of Artificial Sequence: Synthetic oligonucleotide
  Sense strand starting at position 140 of SEQ ID NO: 1242058
uguagaaagcuaugacuga

SEQ ID NO: 1320473 - RNA, 19 nt, Artificial Sequence
  Description of Artificial Sequence: Synthetic oligonucleotide
  Antisense strand to SEQ ID NO: 1320472
ucagucauagcuuucuaca

SEQ ID NO: 1320474 - RNA, 19 nt, Artificial Sequence
  Description of Artificial Sequence: Synthetic oligonucleotide
  Sense strand starting at position 157 of SEQ ID NO: 1242058
gaacacaaacgucgaaaua

SEQ ID NO: 1320475 - RNA, 19 nt, Artificial Sequence
  Description of Artificial Sequence: Synthetic oligonucleotide
  Antisense strand to SEQ ID NO: 1320474
uauuucgacguuuguguuc

SEQ ID NO: 1320476 - RNA, 19 nt, Artificial Sequence
  Description of Artificial Sequence: Synthetic oligonucleotide
  Sense strand starting at position 193 of SEQ ID NO: 1242058
ggcagauauacuuggccau

SEQ ID NO: 1320477 - RNA, 19 nt, Artificial Sequence
  Description of Artificial Sequence: Synthetic oligonucleotide
  Antisense strand to SEQ ID NO: 1320476
auggccaaguauaucugcc

SEQ ID NO: 1320478 - RNA, 19 nt, Artificial Sequence
  Description of Artificial Sequence: Synthetic oligonucleotide
  Sense strand starting at position 194 of SEQ ID NO: 1242058
gcagauauacuuggccaua

SEQ ID NO: 1320479 - RNA, 19 nt, Artificial Sequence
  Description of Artificial Sequence: Synthetic oligonucleotide
  Antisense strand to SEQ ID NO: 1320478
uauggccaaguauaucugc

SEQ ID NO: 1320480 - RNA, 19 nt, Artificial Sequence
  Description of Artificial Sequence: Synthetic oligonucleotide
  Sense strand starting at position 196 of SEQ ID NO: 1242058
agauauacuuggccauacu

SEQ ID NO: 1320481 - RNA, 19 nt, Artificial Sequence
  Description of Artificial Sequence: Synthetic oligonucleotide
  Antisense strand to SEQ ID NO: 1320480
aguauggccaaguauaucu

SEQ ID NO: 1320482 - RNA, 19 nt, Artificial Sequence
  Description of Artificial Sequence: Synthetic oligonucleotide
  Sense strand starting at position 423 of SEQ ID NO: 1242058
acgucuggcuaacuuuaaa

SEQ ID NO: 1320483 - RNA, 19 nt, Artificial Sequence
  Description of Artificial Sequence: Synthetic oligonucleotide
  Antisense strand to SEQ ID NO: 1320482
uuuaaaguuagccagacgu

SEQ ID NO: 1320484 - RNA, 19 nt, Artificial Sequence
  Description of Artificial Sequence: Synthetic oligonucleotide
  Sense strand starting at position 611 of SEQ ID NO: 1242058
ucuuuacagcuucgaagaa

SEQ ID NO: 1320485 - RNA, 19 nt, Artificial Sequence
  Description of Artificial Sequence: Synthetic oligonucleotide
  Antisense strand to SEQ ID NO: 1320484
uucuucgaagcuguaaaga

SEQ ID NO: 1320486 - RNA, 19 nt, Artificial Sequence
  Description of Artificial Sequence: Synthetic oligonucleotide
  Sense strand starting at position 704 of SEQ ID NO: 1242058
aagaguucugauugcaacu

SEQ ID NO: 1320487 - RNA, 19 nt, Artificial Sequence
  Description of Artificial Sequence: Synthetic oligonucleotide
  Antisense strand to SEQ ID NO: 1320486
aguugcaaucagaacucuu

SEQ ID NO: 1320488 - RNA, 19 nt, Artificial Sequence
  Description of Artificial Sequence: Synthetic oligonucleotide
  Sense strand starting at position 1014 of SEQ ID NO: 1242058
cuaacuucccgcgaauuga

SEQ ID NO: 1320489 - RNA, 19 nt, Artificial Sequence
  Description of Artificial Sequence: Synthetic oligonucleotide
  Antisense strand to SEQ ID NO: 1320488
ucaauucgcgggaaguuag

SEQ ID NO: 1320490 - RNA, 19 nt, Artificial Sequence
  Description of Artificial Sequence: Synthetic oligonucleotide
  Sense strand starting at position 1485 of SEQ ID NO: 1242058
augaguccuagaggguaaa

SEQ ID NO: 1320491 - RNA, 19 nt, Artificial Sequence
  Description of Artificial Sequence: Synthetic oligonucleotide
  Antisense strand to SEQ ID NO: 1320490
uuuacccucuaggacucau

SEQ ID NO: 1320492 - RNA, 19 nt, Artificial Sequence
  Description of Artificial Sequence: Synthetic oligonucleotide
  Sense strand starting at position 1504 of SEQ ID NO: 1242058
aaucaagagcguuaagaac

SEQ ID NO: 1320493 - RNA, 19 nt, Artificial Sequence
  Description of Artificial Sequence: Synthetic oligonucleotide
  Antisense strand to SEQ ID NO: 1320492
guucuuaacgcucuugauu

SEQ ID NO: 1320494 - RNA, 19 nt, Artificial Sequence
  Description of Artificial Sequence: Synthetic oligonucleotide
  Sense strand starting at position 1512 of SEQ ID NO: 1242058
gcguuaagaaccuggaaau

SEQ ID NO: 1320495 - RNA, 19 nt, Artificial Sequence
  Description of Artificial Sequence: Synthetic oligonucleotide
  Antisense strand to SEQ ID NO: 1320494
auuuccagguucuuaacgc

SEQ ID NO: 1320496 - RNA, 19 nt, Artificial Sequence
  Description of Artificial Sequence: Synthetic oligonucleotide
  Sense strand starting at position 1513 of SEQ ID NO: 1242058
cguuaagaaccuggaaaug

SEQ ID NO: 1320497 - RNA, 19 nt, Artificial Sequence
  Description of Artificial Sequence: Synthetic oligonucleotide
  Antisense strand to SEQ ID NO: 1320496
cauuuccagguucuuaacg

SEQ ID NO: 1320498 - RNA, 19 nt, Artificial Sequence
  Description of Artificial Sequence: Synthetic oligonucleotide
  Sense strand starting at position 1553 of SEQ ID NO: 1242058
ggacgaagcaucugcagau

SEQ ID NO: 1320499 - RNA, 19 nt, Artificial Sequence
  Description of Artificial Sequence: Synthetic oligonucleotide
  Antisense strand to SEQ ID NO: 1320498
aucugcagaugcuucgucc

SEQ ID NO: 1320500 - RNA, 19 nt, Artificial Sequence
  Description of Artificial Sequence: Synthetic oligonucleotide
  Sense strand starting at position 2244 of SEQ ID NO: 1242058
acuccacggcugugaagau

SEQ ID NO: 1320501 - RNA, 19 nt, Artificial Sequence
  Description of Artificial Sequence: Synthetic oligonucleotide
  Antisense strand to SEQ ID NO: 1320500
aucuucacagccguggagu

SEQ ID NO: 1320502 - RNA, 19 nt, Artificial Sequence
  Description of Artificial Sequence: Synthetic oligonucleotide
  Sense strand starting at position 2638 of SEQ ID NO: 1242058
agcggcuucucaucagaaa

SEQ ID NO: 1320503 - RNA, 19 nt, Artificial Sequence
  Description of Artificial Sequence: Synthetic oligonucleotide
  Antisense strand to SEQ ID NO: 1320502
uuucugaugagaagccgcu

SEQ ID NO: 1320504 - RNA, 19 nt, Artificial Sequence
  Description of Artificial Sequence: Synthetic oligonucleotide
  Sense strand starting at position 2702 of SEQ ID NO: 1242058
aacggagaguuguuuaucu

SEQ ID NO: 1320505 - RNA, 19 nt, Artificial Sequence
  Description of Artificial Sequence: Synthetic oligonucleotide
  Antisense strand to SEQ ID NO: 1320504
agauaaacaacucuccguu

SEQ ID NO: 1320506 - RNA, 19 nt, Artificial Sequence
  Description of Artificial Sequence: Synthetic oligonucleotide
  Sense strand starting at position 2704 of SEQ ID NO: 1242058
cggagaguuguuuaucuuu

SEQ ID NO: 1320507 - RNA, 19 nt, Artificial Sequence
  Description of Artificial Sequence: Synthetic oligonucleotide
  Antisense strand to SEQ ID NO: 1320506
aaagauaaacaacucuccg

SEQ ID NO: 1320508 - RNA, 19 nt, Artificial Sequence
  Description of Artificial Sequence: Synthetic oligonucleotide
  Sense strand starting at position 2829 of SEQ ID NO: 1242058
ggguaauucugcuuacgag

SEQ ID NO: 1320509 - RNA, 19 nt, Artificial Sequence
  Description of Artificial Sequence: Synthetic oligonucleotide
  Antisense strand to SEQ ID NO: 1320508
cucguaagcagaauuaccc

SEQ ID NO: 1320510 - RNA, 19 nt, Artificial Sequence
  Description of Artificial Sequence: Synthetic oligonucleotide
  Sense strand starting at position 2830 of SEQ ID NO: 1242058
gguaauucugcuuacgaga

SEQ ID NO: 1320511 - RNA, 19 nt, Artificial Sequence
  Description of Artificial Sequence: Synthetic oligonucleotide
  Antisense strand to SEQ ID NO: 1320510
ucucguaagcagaauuacc

SEQ ID NO: 1320512 - RNA, 19 nt, Artificial Sequence
  Description of Artificial Sequence: Synthetic oligonucleotide
  Sense strand starting at position 2835 of SEQ ID NO: 1242058
uucugcuuacgagaugguu

SEQ ID NO: 1320513 - RNA, 19 nt, Artificial Sequence
  Description of Artificial Sequence: Synthetic oligonucleotide
  Antisense strand to SEQ ID NO: 1320512
aaccaucucguaagcagaa

SEQ ID NO: 1320514 - RNA, 19 nt, Artificial Sequence
  Description of Artificial Sequence: Synthetic oligonucleotide
  Sense strand starting at position 2890 of SEQ ID NO: 1242058
uuuacugugugacuagaaa

SEQ ID NO: 1320515 - RNA, 19 nt, Artificial Sequence
  Description of Artificial Sequence: Synthetic oligonucleotide
  Antisense strand to SEQ ID NO: 1320514
uuucuagucacacaguaaa

SEQ ID NO: 1320516 - RNA, 19 nt, Artificial Sequence
  Description of Artificial Sequence: Synthetic oligonucleotide
  Sense strand starting at position 3169 of SEQ ID NO: 1242058
ucugcucacugacuguaau

SEQ ID NO: 1320517 - RNA, 19 nt, Artificial Sequence
  Description of Artificial Sequence: Synthetic oligonucleotide
  Antisense strand to SEQ ID NO: 1320516
auuacagucagugagcaga

SEQ ID NO: 1320518 - RNA, 19 nt, Artificial Sequence
  Description of Artificial Sequence: Synthetic oligonucleotide
  Sense strand starting at position 3233 of SEQ ID NO: 1242058
uuguucaguggugaagauu

SEQ ID NO: 1320519 - RNA, 19 nt, Artificial Sequence
  Description of Artificial Sequence: Synthetic oligonucleotide
  Antisense strand to SEQ ID NO: 1320518
aaucuucaccacugaacaa

SEQ ID NO: 1320520 - RNA, 19 nt, Artificial Sequence
  Description of Artificial Sequence: Synthetic oligonucleotide
  Sense strand starting at position 3370 of SEQ ID NO: 1242058
ugguuauucugagcaguga

SEQ ID NO: 1320521 - RNA, 19 nt, Artificial Sequence
  Description of Artificial Sequence: Synthetic oligonucleotide
  Antisense strand to SEQ ID NO: 1320520
ucacugcucagaauaacca

SEQ ID NO: 1320522 - RNA, 19 nt, Artificial Sequence
  Description of Artificial Sequence: Synthetic oligonucleotide
  Sense strand starting at position 3371 of SEQ ID NO: 1242058
gguuauucugagcagugau

SEQ ID NO: 1320523 - RNA, 19 nt, Artificial Sequence
  Description of Artificial Sequence: Synthetic oligonucleotide
  Antisense strand to SEQ ID NO: 1320522
aucacugcucagaauaacc

SEQ ID NO: 1320524 - RNA, 19 nt, Artificial Sequence
  Description of Artificial Sequence: Synthetic oligonucleotide
  Sense strand starting at position 3419 of SEQ ID NO: 1242058
ggguacgucccauaaagau

SEQ ID NO: 1320525 - RNA, 19 nt, Artificial Sequence
  Description of Artificial Sequence: Synthetic oligonucleotide
  Antisense strand to SEQ ID NO: 1320524
aucuuuaugggacguaccc

SEQ ID NO: 1320526 - RNA, 19 nt, Artificial Sequence
  Description of Artificial Sequence: Synthetic oligonucleotide
  Sense strand starting at position 3462 of SEQ ID NO: 1242058
agucuuagauaguuauaug

SEQ ID NO: 1320527 - RNA, 19 nt, Artificial Sequence
  Description of Artificial Sequence: Synthetic oligonucleotide
  Antisense strand to SEQ ID NO: 1320526
cauauaacuaucuaagacu

SEQ ID NO: 1320528 - RNA, 19 nt, Artificial Sequence
  Description of Artificial Sequence: Synthetic oligonucleotide
  Sense strand starting at position 3488 of SEQ ID NO: 1242058
gguaauugaagccaucuga

SEQ ID NO: 1320529 - RNA, 19 nt, Artificial Sequence
  Description of Artificial Sequence: Synthetic oligonucleotide
  Antisense strand to SEQ ID NO: 1320528
ucagauggcuucaauuacc

SEQ ID NO: 1320530 - RNA, 19 nt, Artificial Sequence
  Description of Artificial Sequence: Synthetic oligonucleotide
  Sense strand starting at position 3498 of SEQ ID NO: 1242058
gccaucugaggcuaauuau

SEQ ID NO: 1320531 - RNA, 19 nt, Artificial Sequence
  Description of Artificial Sequence: Synthetic oligonucleotide
  Antisense strand to SEQ ID NO: 1320530
auaauuagccucagauggc

SEQ ID NO: 1320532 - RNA, 19 nt, Artificial Sequence
  Description of Artificial Sequence: Synthetic oligonucleotide
  Sense strand starting at position 3681 of SEQ ID NO: 1242058
gaaaucuaauagucuggca

SEQ ID NO: 1320533 - RNA, 19 nt, Artificial Sequence
  Description of Artificial Sequence: Synthetic oligonucleotide
  Antisense strand to SEQ ID NO: 1320532
ugccagacuauuagauuuc

SEQ ID NO: 1320534 - RNA, 19 nt, Artificial Sequence
  Description of Artificial Sequence: Synthetic oligonucleotide
  Sense strand starting at position 3695 of SEQ ID NO: 1242058
uggcauuaucuagguauaa

SEQ ID NO: 1320535 - RNA, 19 nt, Artificial Sequence
  Description of Artificial Sequence: Synthetic oligonucleotide
  Antisense strand to SEQ ID NO: 1320534
uuauaccuagauaaugcca

SEQ ID NO: 1320536 - RNA, 19 nt, Artificial Sequence
  Description of Artificial Sequence: Synthetic oligonucleotide
  Sense strand starting at position 3696 of SEQ ID NO: 1242058
ggcauuaucuagguauaaa

SEQ ID NO: 1320537 - RNA, 19 nt, Artificial Sequence
  Description of Artificial Sequence: Synthetic oligonucleotide
  Antisense strand to SEQ ID NO: 1320536
uuuauaccuagauaaugcc

SEQ ID NO: 1320538 - RNA, 19 nt, Artificial Sequence
  Description of Artificial Sequence: Synthetic oligonucleotide
  Sense strand starting at position 3895 of SEQ ID NO: 1242058
agucacaucucagucgaau

SEQ ID NO: 1320539 - RNA, 19 nt, Artificial Sequence
  Description of Artificial Sequence: Synthetic oligonucleotide
  Antisense strand to SEQ ID NO: 1320538
auucgacugagaugugacu

SEQ ID NO: 1320540 - RNA, 19 nt, Artificial Sequence
  Description of Artificial Sequence: Synthetic oligonucleotide
  Sense strand starting at position 3923 of SEQ ID NO: 1242058
aguugauacuuucugagaa

SEQ ID NO: 1320541 - RNA, 19 nt, Artificial Sequence
  Description of Artificial Sequence: Synthetic oligonucleotide
  Antisense strand to SEQ ID NO: 1320540
uucucagaaaguaucaacu

SEQ ID NO: 1320542 - RNA, 19 nt, Artificial Sequence
  Description of Artificial Sequence: Synthetic oligonucleotide
  Sense strand starting at position 4 of SEQ ID NO: 1242059
uuguaaacccucugaggua

SEQ ID NO: 1320543 - RNA, 19 nt, Artificial Sequence
  Description of Artificial Sequence: Synthetic oligonucleotide
  Antisense strand to SEQ ID NO: 1320542
uaccucagaggguuuacaa

SEQ ID NO: 1320544 - RNA, 19 nt, Artificial Sequence
  Description of Artificial Sequence: Synthetic oligonucleotide
  Sense strand starting at position 70 of SEQ ID NO: 1242059
agaucacugucacuuauga

SEQ ID NO: 1320545 - RNA, 19 nt, Artificial Sequence
  Description of Artificial Sequence: Synthetic oligonucleotide
  Antisense strand to SEQ ID NO: 1320544
ucauaagugacagugaucu

SEQ ID NO: 1320546 - RNA, 19 nt, Artificial Sequence
  Description of Artificial Sequence: Synthetic oligonucleotide
  Sense strand starting at position 249 of SEQ ID NO: 1242059
ucagaauauucuuccugag

SEQ ID NO: 1320547 - RNA, 19 nt, Artificial Sequence
  Description of Artificial Sequence: Synthetic oligonucleotide
  Antisense strand to SEQ ID NO: 1320546
cucaggaagaauauucuga

SEQ ID NO: 1320548 - RNA, 19 nt, Artificial Sequence
  Description of Artificial Sequence: Synthetic oligonucleotide
  Sense strand starting at position 266 of SEQ ID NO: 1242059
agagcugggcucugaggaa

SEQ ID NO: 1320549 - RNA, 19 nt, Artificial Sequence
  Description of Artificial Sequence: Synthetic oligonucleotide
  Antisense strand to SEQ ID NO: 1320548
uuccucagagcccagcucu

SEQ ID NO: 1320550 - RNA, 19 nt, Artificial Sequence
  Description of Artificial Sequence: Synthetic oligonucleotide
  Sense strand starting at position 340 of SEQ ID NO: 1242059
gcugacaaaugcuuuaaua

SEQ ID NO: 1320551 - RNA, 19 nt, Artificial Sequence
  Description of Artificial Sequence: Synthetic oligonucleotide
  Antisense strand to SEQ ID NO: 1320550
uauuaaagcauuugucagc

SEQ ID NO: 1320552 - RNA, 19 nt, Artificial Sequence
  Description of Artificial Sequence: Synthetic oligonucleotide
  Sense strand starting at position 349 of SEQ ID NO: 1242059
ugcuuuaauagaggugcaa

SEQ ID NO: 1320553 - RNA, 19 nt, Artificial Sequence
  Description of Artificial Sequence: Synthetic oligonucleotide
  Antisense strand to SEQ ID NO: 1320552
uugcaccucuauuaaagca

SEQ ID NO: 1320554 - RNA, 19 nt, Artificial Sequence
  Description of Artificial Sequence: Synthetic oligonucleotide
  Sense strand starting at position 511 of SEQ ID NO: 1242059
auugaaguuugaguauaug

SEQ ID NO: 1320555 - RNA, 19 nt, Artificial Sequence
  Description of Artificial Sequence: Synthetic oligonucleotide
  Antisense strand to SEQ ID NO: 1320554
cauauacucaaacuucaau

SEQ ID NO: 1320556 - RNA, 19 nt, Artificial Sequence
  Description of Artificial Sequence: Synthetic oligonucleotide
  Sense strand starting at position 632 of SEQ ID NO: 1242059
ucagcauguccaugauuau

SEQ ID NO: 1320557 - RNA, 19 nt, Artificial Sequence
  Description of Artificial Sequence: Synthetic oligonucleotide
  Antisense strand to SEQ ID NO: 1320556
auaaucauggacaugcuga

SEQ ID NO: 1320558 - RNA, 19 nt, Artificial Sequence
  Description of Artificial Sequence: Synthetic oligonucleotide
  Sense strand starting at position 633 of SEQ ID NO: 1242059
cagcauguccaugauuaug

SEQ ID NO: 1320559 - RNA, 19 nt, Artificial Sequence
  Description of Artificial Sequence: Synthetic oligonucleotide
  Antisense strand to SEQ ID NO: 1320558
cauaaucauggacaugcug

SEQ ID NO: 1320560 - RNA, 19 nt, Artificial Sequence
  Description of Artificial Sequence: Synthetic oligonucleotide
  Sense strand starting at position 635 of SEQ ID NO: 1242059
gcauguccaugauuaugua

SEQ ID NO: 1320561 - RNA, 19 nt, Artificial Sequence
  Description of Artificial Sequence: Synthetic oligonucleotide
  Antisense strand to SEQ ID NO: 1320560
uacauaaucauggacaugc

SEQ ID NO: 1320562 - RNA, 19 nt, Artificial Sequence
  Description of Artificial Sequence: Synthetic oligonucleotide
  Sense strand starting at position 639 of SEQ ID NO: 1242059
guccaugauuauguagaaa

SEQ ID NO: 1320563 - RNA, 19 nt, Artificial Sequence
  Description of Artificial Sequence: Synthetic oligonucleotide
  Antisense strand to SEQ ID NO: 1320562
uuucuacauaaucauggac

SEQ ID NO: 1320564 - RNA, 19 nt, Artificial Sequence
  Description of Artificial Sequence: Synthetic oligonucleotide
  Sense strand starting at position 642 of SEQ ID NO: 1242059
caugauuauguagaaagcu

SEQ ID NO: 1320565 - RNA, 19 nt, Artificial Sequence
  Description of Artificial Sequence: Synthetic oligonucleotide
  Antisense strand to SEQ ID NO: 1320564
agcuuucuacauaaucaug

SEQ ID NO: 1320566 - RNA, 19 nt, Artificial Sequence
  Description of Artificial Sequence: Synthetic oligonucleotide
  Sense strand starting at position 650 of SEQ ID NO: 1242059
uguagaaagcuaugacuga

SEQ ID NO: 1320567 - RNA, 19 nt, Artificial Sequence
  Description of Artificial Sequence: Synthetic oligonucleotide
  Antisense strand to SEQ ID NO: 1320566
ucagucauagcuuucuaca

SEQ ID NO: 1320568 - RNA, 19 nt, Artificial Sequence
  Description of Artificial Sequence: Synthetic oligonucleotide
  Sense strand starting at position 667 of SEQ ID NO: 1242059
gaacacaaacgucgaaaua

SEQ ID NO: 1320569 - RNA, 19 nt, Artificial Sequence
  Description of Artificial Sequence: Synthetic oligonucleotide
  Antisense strand to SEQ ID NO: 1320568
uauuucgacguuuguguuc

SEQ ID NO: 1320570 - RNA, 19 nt, Artificial Sequence
  Description of Artificial Sequence: Synthetic oligonucleotide
  Sense strand starting at position 703 of SEQ ID NO: 1242059
ggcagauauacuuggccau

SEQ ID NO: 1320571 - RNA, 19 nt, Artificial Sequence
  Description of Artificial Sequence: Synthetic oligonucleotide
  Antisense strand to SEQ ID NO: 1320570
auggccaaguauaucugcc

SEQ ID NO: 1320572 - RNA, 19 nt, Artificial Sequence
  Description of Artificial Sequence: Synthetic oligonucleotide
  Sense strand starting at position 704 of SEQ ID NO: 1242059
gcagauauacuuggccaua

SEQ ID NO: 1320573 - RNA, 19 nt, Artificial Sequence
  Description of Artificial Sequence: Synthetic oligonucleotide
  Antisense strand to SEQ ID NO: 1320572
uauggccaaguauaucugc

SEQ ID NO: 1320574 - RNA, 19 nt, Artificial Sequence
  Description of Artificial Sequence: Synthetic oligonucleotide
  Sense strand starting at position 706 of SEQ ID NO: 1242059
agauauacuuggccauacu

SEQ ID NO: 1320575 - RNA, 19 nt, Artificial Sequence
  Description of Artificial Sequence: Synthetic oligonucleotide
  Antisense strand to SEQ ID NO: 1320574
aguauggccaaguauaucu

SEQ ID NO: 1320576 - RNA, 19 nt, Artificial Sequence
  Description of Artificial Sequence: Synthetic oligonucleotide
  Sense strand starting at position 933 of SEQ ID NO: 1242059
acgucuggcuaacuuuaaa

SEQ ID NO: 1320577 - RNA, 19 nt, Artificial Sequence
  Description of Artificial Sequence: Synthetic oligonucleotide
  Antisense strand to SEQ ID NO: 1320576
uuuaaaguuagccagacgu

SEQ ID NO: 1320578 - RNA, 19 nt, Artificial Sequence
  Description of Artificial Sequence: Synthetic oligonucleotide
  Sense strand starting at position 1121 of SEQ ID NO: 1242059
ucuuuacagcuucgaagaa

SEQ ID NO: 1320579 - RNA, 19 nt, Artificial Sequence
  Description of Artificial Sequence: Synthetic oligonucleotide
  Antisense strand to SEQ ID NO: 1320578
uucuucgaagcuguaaaga

SEQ ID NO: 1320580 - RNA, 19 nt, Artificial Sequence
  Description of Artificial Sequence: Synthetic oligonucleotide
  Sense strand starting at position 1214 of SEQ ID NO: 1242059
aagaguucugauugcaacu

SEQ ID NO: 1320581 - RNA, 19 nt, Artificial Sequence
  Description of Artificial Sequence: Synthetic oligonucleotide
  Antisense strand to SEQ ID NO: 1320580
aguugcaaucagaacucuu

SEQ ID NO: 1320582 - RNA, 19 nt, Artificial Sequence
  Description of Artificial Sequence: Synthetic oligonucleotide
  Sense strand starting at position 1524 of SEQ ID NO: 1242059
cuaacuucccgcgaauuga

SEQ ID NO: 1320583 - RNA, 19 nt, Artificial Sequence
  Description of Artificial Sequence: Synthetic oligonucleotide
  Antisense strand to SEQ ID NO: 1320582
ucaauucgcgggaaguuag

SEQ ID NO: 1320584 - RNA, 19 nt, Artificial Sequence
  Description of Artificial Sequence: Synthetic oligonucleotide
  Sense strand starting at position 1995 of SEQ ID NO: 1242059
augaguccuagaggguaaa

SEQ ID NO: 1320585 - RNA, 19 nt, Artificial Sequence
  Description of Artificial Sequence: Synthetic oligonucleotide
  Antisense strand to SEQ ID NO: 1320584
uuuacccucuaggacucau

SEQ ID NO: 1320586 - RNA, 19 nt, Artificial Sequence
  Description of Artificial Sequence: Synthetic oligonucleotide
  Sense strand starting at position 2014 of SEQ ID NO: 1242059
aaucaagagcguuaagaac

SEQ ID NO: 1320587 - RNA, 19 nt, Artificial Sequence
  Description of Artificial Sequence: Synthetic oligonucleotide
  Antisense strand to SEQ ID NO: 1320586
guucuuaacgcucuugauu

SEQ ID NO: 1320588 - RNA, 19 nt, Artificial Sequence
  Description of Artificial Sequence: Synthetic oligonucleotide
  Sense strand starting at position 2022 of SEQ ID NO: 1242059
gcguuaagaaccuggaaau

SEQ ID NO: 1320589 - RNA, 19 nt, Artificial Sequence
  Description of Artificial Sequence: Synthetic oligonucleotide
  Antisense strand to SEQ ID NO: 1320588
auuuccagguucuuaacgc

SEQ ID NO: 1320590 - RNA, 19 nt, Artificial Sequence
  Description of Artificial Sequence: Synthetic oligonucleotide
  Sense strand starting at position 2023 of SEQ ID NO: 1242059
cguuaagaaccuggaaaug

SEQ ID NO: 1320591 - RNA, 19 nt, Artificial Sequence
  Description of Artificial Sequence: Synthetic oligonucleotide
  Antisense strand to SEQ ID NO: 1320590
cauuuccagguucuuaacg

SEQ ID NO: 1320592 - RNA, 19 nt, Artificial Sequence
  Description of Artificial Sequence: Synthetic oligonucleotide
  Sense strand starting at position 2063 of SEQ ID NO: 1242059
ggacgaagcaucugcagau

SEQ ID NO: 1320593 - RNA, 19 nt, Artificial Sequence
  Description of Artificial Sequence: Synthetic oligonucleotide
  Antisense strand to SEQ ID NO: 1320592
aucugcagaugcuucgucc

SEQ ID NO: 1320594 - RNA, 19 nt, Artificial Sequence
  Description of Artificial Sequence: Synthetic oligonucleotide
  Sense strand starting at position 2754 of SEQ ID NO: 1242059
acuccacggcugugaagau

SEQ ID NO: 1320595 - RNA, 19 nt, Artificial Sequence
  Description of Artificial Sequence: Synthetic oligonucleotide
  Antisense strand to SEQ ID NO: 1320594
aucuucacagccguggagu

SEQ ID NO: 1320596 - RNA, 19 nt, Artificial Sequence
  Description of Artificial Sequence: Synthetic oligonucleotide
  Sense strand starting at position 3148 of SEQ ID NO: 1242059
agcggcuucucaucagaaa

SEQ ID NO: 1320597 - RNA, 19 nt, Artificial Sequence
  Description of Artificial Sequence: Synthetic oligonucleotide
  Antisense strand to SEQ ID NO: 1320596
uuucugaugagaagccgcu

SEQ ID NO: 1320598 - RNA, 19 nt, Artificial Sequence
  Description of Artificial Sequence: Synthetic oligonucleotide
  Sense strand starting at position 3212 of SEQ ID NO: 1242059
aacggagaguuguuuaucu

SEQ ID NO: 1320599 - RNA, 19 nt, Artificial Sequence
  Description of Artificial Sequence: Synthetic oligonucleotide
  Antisense strand to SEQ ID NO: 1320598
agauaaacaacucuccguu

SEQ ID NO: 1320600 - RNA, 19 nt, Artificial Sequence
  Description of Artificial Sequence: Synthetic oligonucleotide
  Sense strand starting at position 3214 of SEQ ID NO: 1242059
cggagaguuguuuaucuuu

SEQ ID NO: 1320601 - RNA, 19 nt, Artificial Sequence
  Description of Artificial Sequence: Synthetic oligonucleotide
  Antisense strand to SEQ ID NO: 1320600
aaagauaaacaacucuccg

SEQ ID NO: 1320602 - RNA, 19 nt, Artificial Sequence
  Description of Artificial Sequence: Synthetic oligonucleotide
  Sense strand starting at position 3339 of SEQ ID NO: 1242059
ggguaauucugcuuacgag

SEQ ID NO: 1320603 - RNA, 19 nt, Artificial Sequence
  Description of Artificial Sequence: Synthetic oligonucleotide
  Antisense strand to SEQ ID NO: 1320602
cucguaagcagaauuaccc

SEQ ID NO: 1320604 - RNA, 19 nt, Artificial Sequence
  Description of Artificial Sequence: Synthetic oligonucleotide
  Sense strand starting at position 3340 of SEQ ID NO: 1242059
gguaauucugcuuacgaga

SEQ ID NO: 1320605 - RNA, 19 nt, Artificial Sequence
  Description of Artificial Sequence: Synthetic oligonucleotide
  Antisense strand to SEQ ID NO: 1320604
ucucguaagcagaauuacc

SEQ ID NO: 1320606 - RNA, 19 nt, Artificial Sequence
  Description of Artificial Sequence: Synthetic oligonucleotide
  Sense strand starting at position 3345 of SEQ ID NO: 1242059
uucugcuuacgagaugguu

SEQ ID NO: 1320607 - RNA, 19 nt, Artificial Sequence
  Description of Artificial Sequence: Synthetic oligonucleotide
  Antisense strand to SEQ ID NO: 1320606
aaccaucucguaagcagaa

SEQ ID NO: 1320608 - RNA, 19 nt, Artificial Sequence
  Description of Artificial Sequence: Synthetic oligonucleotide
  Sense strand starting at position 3400 of SEQ ID NO: 1242059
uuuacugugugacuagaaa

SEQ ID NO: 1320609 - RNA, 19 nt, Artificial Sequence
  Description of Artificial Sequence: Synthetic oligonucleotide
  Antisense strand to SEQ ID NO: 1320608
uuucuagucacacaguaaa

SEQ ID NO: 1320610 - RNA, 19 nt, Artificial Sequence
  Description of Artificial Sequence: Synthetic oligonucleotide
  Sense strand starting at position 3679 of SEQ ID NO: 1242059
ucugcucacugacuguaau

SEQ ID NO: 1320611 - RNA, 19 nt, Artificial Sequence
  Description of Artificial Sequence: Synthetic oligonucleotide
  Antisense strand to SEQ ID NO: 1320610
auuacagucagugagcaga

SEQ ID NO: 1320612 - RNA, 19 nt, Artificial Sequence
  Description of Artificial Sequence: Synthetic oligonucleotide
  Sense strand starting at position 3743 of SEQ ID NO: 1242059
uuguucaguggugaagauu

SEQ ID NO: 1320613 - RNA, 19 nt, Artificial Sequence
  Description of Artificial Sequence: Synthetic oligonucleotide
  Antisense strand to SEQ ID NO: 1320612
aaucuucaccacugaacaa

SEQ ID NO: 1320614 - RNA, 19 nt, Artificial Sequence
  Description of Artificial Sequence: Synthetic oligonucleotide
  Sense strand starting at position 3880 of SEQ ID NO: 1242059
ugguuauucugagcaguga

SEQ ID NO: 1320615 - RNA, 19 nt, Artificial Sequence
  Description of Artificial Sequence: Synthetic oligonucleotide
  Antisense strand to SEQ ID NO: 1320614
ucacugcucagaauaacca

SEQ ID NO: 1320616 - RNA, 19 nt, Artificial Sequence
  Description of Artificial Sequence: Synthetic oligonucleotide
  Sense strand starting at position 3881 of SEQ ID NO: 1242059
gguuauucugagcagugau

SEQ ID NO: 1320617 - RNA, 19 nt, Artificial Sequence
  Description of Artificial Sequence: Synthetic oligonucleotide
  Antisense strand to SEQ ID NO: 1320616
aucacugcucagaauaacc

SEQ ID NO: 1320618 - RNA, 19 nt, Artificial Sequence
  Description of Artificial Sequence: Synthetic oligonucleotide
  Sense strand starting at position 3929 of SEQ ID NO: 1242059
ggguacgucccauaaagau

SEQ ID NO: 1320619 - RNA, 19 nt, Artificial Sequence
  Description of Artificial Sequence: Synthetic oligonucleotide
  Antisense strand to SEQ ID NO: 1320618
aucuuuaugggacguaccc

SEQ ID NO: 1320620 - RNA, 19 nt, Artificial Sequence
  Description of Artificial Sequence: Synthetic oligonucleotide
  Sense strand starting at position 3972 of SEQ ID NO: 1242059
agucuuagauaguuauaug

SEQ ID NO: 1320621 - RNA, 19 nt, Artificial Sequence
  Description of Artificial Sequence: Synthetic oligonucleotide
  Antisense strand to SEQ ID NO: 1320620
cauauaacuaucuaagacu

SEQ ID NO: 1320622 - RNA, 19 nt, Artificial Sequence
  Description of Artificial Sequence: Synthetic oligonucleotide
  Sense strand starting at position 71 of SEQ ID NO: 1242060
auugcucuaucaguacuua

SEQ ID NO: 1320623 - RNA, 19 nt, Artificial Sequence
  Description of Artificial Sequence: Synthetic oligonucleotide
  Antisense strand to SEQ ID NO: 1320622
uaaguacugauagagcaau

SEQ ID NO: 1320624 - RNA, 19 nt, Artificial Sequence
  Description of Artificial Sequence: Synthetic oligonucleotide
  Sense strand starting at position 75 of SEQ ID NO: 1242060
cucuaucaguacuuacaga

SEQ ID NO: 1320625 - RNA, 19 nt, Artificial Sequence
  Description of Artificial Sequence: Synthetic oligonucleotide
  Antisense strand to SEQ ID NO: 1320624
ucuguaaguacugauagag

SEQ ID NO: 1320626 - RNA, 19 nt, Artificial Sequence
  Description of Artificial Sequence: Synthetic oligonucleotide
  Sense strand starting at position 157 of SEQ ID NO: 1242060
agcauaaaccaagacguua

SEQ ID NO: 1320627 - RNA, 19 nt, Artificial Sequence
  Description of Artificial Sequence: Synthetic oligonucleotide
  Antisense strand to SEQ ID NO: 1320626
uaacgucuugguuuaugcu

SEQ ID NO: 1320628 - RNA, 19 nt, Artificial Sequence
  Description of Artificial Sequence: Synthetic oligonucleotide
  Sense strand starting at position 162 of SEQ ID NO: 1242060
aaaccaagacguuaacagu

SEQ ID NO: 1320629 - RNA, 19 nt, Artificial Sequence
  Description of Artificial Sequence: Synthetic oligonucleotide
  Antisense strand to SEQ ID NO: 1320628
acuguuaacgucuugguuu

SEQ ID NO: 1320630 - RNA, 19 nt, Artificial Sequence
  Description of Artificial Sequence: Synthetic oligonucleotide
  Sense strand starting at position 341 of SEQ ID NO: 1242060
gcacucaagcuuuaagcaa

SEQ ID NO: 1320631 - RNA, 19 nt, Artificial Sequence
  Description of Artificial Sequence: Synthetic oligonucleotide
  Antisense strand to SEQ ID NO: 1320630
uugcuuaaagcuugagugc

SEQ ID NO: 1320632 - RNA, 19 nt, Artificial Sequence
  Description of Artificial Sequence: Synthetic oligonucleotide
  Sense strand starting at position 519 of SEQ ID NO: 1242060
ugggaacauuuguaaagga

SEQ ID NO: 1320633 - RNA, 19 nt, Artificial Sequence
  Description of Artificial Sequence: Synthetic oligonucleotide
  Antisense strand to SEQ ID NO: 1320632
uccuuuacaaauguuccca

SEQ ID NO: 1320634 - RNA, 19 nt, Artificial Sequence
  Description of Artificial Sequence: Synthetic oligonucleotide
  Sense strand starting at position 529 of SEQ ID NO: 1242060
uguaaaggaccuuaucuuu

SEQ ID NO: 1320635 - RNA, 19 nt, Artificial Sequence
  Description of Artificial Sequence: Synthetic oligonucleotide
  Antisense strand to SEQ ID NO: 1320634
aaagauaagguccuuuaca

SEQ ID NO: 1320636 - RNA, 19 nt, Artificial Sequence
  Description of Artificial Sequence: Synthetic oligonucleotide
  Sense strand starting at position 614 of SEQ ID NO: 1242060
caauucugagagugagcaa

SEQ ID NO: 1320637 - RNA, 19 nt, Artificial Sequence
  Description of Artificial Sequence: Synthetic oligonucleotide
  Antisense strand to SEQ ID NO: 1320636
uugcucacucucagaauug

SEQ ID NO: 1320638 - RNA, 19 nt, Artificial Sequence
  Description of Artificial Sequence: Synthetic oligonucleotide
  Sense strand starting at position 943 of SEQ ID NO: 1242060
gagcgauuccaguacuaga

SEQ ID NO: 1320639 - RNA, 19 nt, Artificial Sequence
  Description of Artificial Sequence: Synthetic oligonucleotide
  Antisense strand to SEQ ID NO: 1320638
ucuaguacuggaaucgcuc

SEQ ID NO: 1320640 - RNA, 19 nt, Artificial Sequence
  Description of Artificial Sequence: Synthetic oligonucleotide
  Sense strand starting at position 948 of SEQ ID NO: 1242060
auuccaguacuagaagcau

SEQ ID NO: 1320641 - RNA, 19 nt, Artificial Sequence
  Description of Artificial Sequence: Synthetic oligonucleotide
  Antisense strand to SEQ ID NO: 1320640
augcuucuaguacuggaau

SEQ ID NO: 1320642 - RNA, 19 nt, Artificial Sequence
  Description of Artificial Sequence: Synthetic oligonucleotide
  Sense strand starting at position 1061 of SEQ ID NO: 1242060
ccauguuauacuuggagug

SEQ ID NO: 1320643 - RNA, 19 nt, Artificial Sequence
  Description of Artificial Sequence: Synthetic oligonucleotide
  Antisense strand to SEQ ID NO: 1320642
cacuccaaguauaacaugg

SEQ ID NO: 1320644 - RNA, 19 nt, Artificial Sequence
  Description of Artificial Sequence: Synthetic oligonucleotide
  Sense strand starting at position 1062 of SEQ ID NO: 1242060
cauguuauacuuggaguga

SEQ ID NO: 1320645 - RNA, 19 nt, Artificial Sequence
  Description of Artificial Sequence: Synthetic oligonucleotide
  Antisense strand to SEQ ID NO: 1320644
ucacuccaaguauaacaug

SEQ ID NO: 1320646 - RNA, 19 nt, Artificial Sequence
  Description of Artificial Sequence: Synthetic oligonucleotide
  Sense strand starting at position 1066 of SEQ ID NO: 1242060
uuauacuuggagugaaucu

SEQ ID NO: 1320647 - RNA, 19 nt, Artificial Sequence
  Description of Artificial Sequence: Synthetic oligonucleotide
  Antisense strand to SEQ ID NO: 1320646
agauucacuccaaguauaa

SEQ ID NO: 1320648 - RNA, 19 nt, Artificial Sequence
  Description of Artificial Sequence: Synthetic oligonucleotide
  Sense strand starting at position 1477 of SEQ ID NO: 1242060
ugcaauuccggcuagggaa

SEQ ID NO: 1320649 - RNA, 19 nt, Artificial Sequence
  Description of Artificial Sequence: Synthetic oligonucleotide
  Antisense strand to SEQ ID NO: 1320648
uucccuagccggaauugca

SEQ ID NO: 1320650 - RNA, 19 nt, Artificial Sequence
  Description of Artificial Sequence: Synthetic oligonucleotide
  Sense strand starting at position 2037 of SEQ ID NO: 1242060
gcgacuucugacgaaguga

SEQ ID NO: 1320651 - RNA, 19 nt, Artificial Sequence
  Description of Artificial Sequence: Synthetic oligonucleotide
  Antisense strand to SEQ ID NO: 1320650
ucacuucgucagaagucgc

SEQ ID NO: 1320652 - RNA, 19 nt, Artificial Sequence
  Description of Artificial Sequence: Synthetic oligonucleotide
  Sense strand starting at position 2048 of SEQ ID NO: 1242060
cgaagugacaauggucuau

SEQ ID NO: 1320653 - RNA, 19 nt, Artificial Sequence
  Description of Artificial Sequence: Synthetic oligonucleotide
  Antisense strand to SEQ ID NO: 1320652
auagaccauugucacuucg

SEQ ID NO: 1320654 - RNA, 19 nt, Artificial Sequence
  Description of Artificial Sequence: Synthetic oligonucleotide
  Sense strand starting at position 2052 of SEQ ID NO: 1242060
gugacaauggucuaugcau

SEQ ID NO: 1320655 - RNA, 19 nt, Artificial Sequence
  Description of Artificial Sequence: Synthetic oligonucleotide
  Antisense strand to SEQ ID NO: 1320654
augcauagaccauugucac

SEQ ID NO: 1320656 - RNA, 19 nt, Artificial Sequence
  Description of Artificial Sequence: Synthetic oligonucleotide
  Sense strand starting at position 2054 of SEQ ID NO: 1242060
gacaauggucuaugcauau

SEQ ID NO: 1320657 - RNA, 19 nt, Artificial Sequence
  Description of Artificial Sequence: Synthetic oligonucleotide
  Antisense strand to SEQ ID NO: 1320656
auaugcauagaccauuguc

SEQ ID NO: 1320658 - RNA, 19 nt, Artificial Sequence
  Description of Artificial Sequence: Synthetic oligonucleotide
  Sense strand starting at position 2058 of SEQ ID NO: 1242060
auggucuaugcauauauua

SEQ ID NO: 1320659 - RNA, 19 nt, Artificial Sequence
  Description of Artificial Sequence: Synthetic oligonucleotide
  Antisense strand to SEQ ID NO: 1320658
uaauauaugcauagaccau

SEQ ID NO: 1320660 - RNA, 19 nt, Artificial Sequence
  Description of Artificial Sequence: Synthetic oligonucleotide
  Sense strand starting at position 2112 of SEQ ID NO: 1242060
aguacaguguuacccuuaa

SEQ ID NO: 1320661 - RNA, 19 nt, Artificial Sequence
  Description of Artificial Sequence: Synthetic oligonucleotide
  Antisense strand to SEQ ID NO: 1320660
uuaaggguaacacuguacu

SEQ ID NO: 1320662 - RNA, 19 nt, Artificial Sequence
  Description of Artificial Sequence: Synthetic oligonucleotide
  Sense strand starting at position 2185 of SEQ ID NO: 1242060
uaaagauuaggugguuucu

SEQ ID NO: 1320663 - RNA, 19 nt, Artificial Sequence
  Description of Artificial Sequence: Synthetic oligonucleotide
  Antisense strand to SEQ ID NO: 1320662
agaaaccaccuaaucuuua

SEQ ID NO: 1320664 - RNA, 19 nt, Artificial Sequence
  Description of Artificial Sequence: Synthetic oligonucleotide
  Sense strand starting at position 2215 of SEQ ID NO: 1242060
cggguuugagacugcagaa

SEQ ID NO: 1320665 - RNA, 19 nt, Artificial Sequence
  Description of Artificial Sequence: Synthetic oligonucleotide
  Antisense strand to SEQ ID NO: 1320664
uucugcagucucaaacccg

SEQ ID NO: 1320666 - RNA, 19 nt, Artificial Sequence
  Description of Artificial Sequence: Synthetic oligonucleotide
  Sense strand starting at position 2298 of SEQ ID NO: 1242060
ucgguuguuauuuggaaca

SEQ ID NO: 1320667 - RNA, 19 nt, Artificial Sequence
  Description of Artificial Sequence: Synthetic oligonucleotide
  Antisense strand to SEQ ID NO: 1320666
uguuccaaauaacaaccga

SEQ ID NO: 1320668 - RNA, 19 nt, Artificial Sequence
  Description of Artificial Sequence: Synthetic oligonucleotide
  Sense strand starting at position 2356 of SEQ ID NO: 1242060
uugagaaacuccgucauga

SEQ ID NO: 1320669 - RNA, 19 nt, Artificial Sequence
  Description of Artificial Sequence: Synthetic oligonucleotide
  Antisense strand to SEQ ID NO: 1320668
ucaugacggaguuucucaa

SEQ ID NO: 1320670 - RNA, 19 nt, Artificial Sequence
  Description of Artificial Sequence: Synthetic oligonucleotide
  Sense strand starting at position 2378 of SEQ ID NO: 1242060
ucgacaagugugggucaga

SEQ ID NO: 1320671 - RNA, 19 nt, Artificial Sequence
  Description of Artificial Sequence: Synthetic oligonucleotide
  Antisense strand to SEQ ID NO: 1320670
ucugacccacacuugucga

SEQ ID NO: 1320672 - RNA, 19 nt, Artificial Sequence
  Description of Artificial Sequence: Synthetic oligonucleotide
  Sense strand starting at position 2379 of SEQ ID NO: 1242060
cgacaagugugggucagaa

SEQ ID NO: 1320673 - RNA, 19 nt, Artificial Sequence
  Description of Artificial Sequence: Synthetic oligonucleotide
  Antisense strand to SEQ ID NO: 1320672
uucugacccacacuugucg

SEQ ID NO: 1320674 - RNA, 19 nt, Artificial Sequence
  Description of Artificial Sequence: Synthetic oligonucleotide
  Sense strand starting at position 2381 of SEQ ID NO: 1242060
acaagugugggucagaaau

SEQ ID NO: 1320675 - RNA, 19 nt, Artificial Sequence
  Description of Artificial Sequence: Synthetic oligonucleotide
  Antisense strand to SEQ ID NO: 1320674
auuucugacccacacuugu

SEQ ID NO: 1320676 - RNA, 19 nt, Artificial Sequence
  Description of Artificial Sequence: Synthetic oligonucleotide
  Sense strand starting at position 2503 of SEQ ID NO: 1242060
ucuuaauugcuguggauuu

SEQ ID NO: 1320677 - RNA, 19 nt, Artificial Sequence
  Description of Artificial Sequence: Synthetic oligonucleotide
  Antisense strand to SEQ ID NO: 1320676
aaauccacagcaauuaaga

SEQ ID NO: 1320678 - RNA, 19 nt, Artificial Sequence
  Description of Artificial Sequence: Synthetic oligonucleotide
  Sense strand starting at position 2670 of SEQ ID NO: 1242060
uccagaguucauggaugga

SEQ ID NO: 1320679 - RNA, 19 nt, Artificial Sequence
  Description of Artificial Sequence: Synthetic oligonucleotide
  Antisense strand to SEQ ID NO: 1320678
uccauccaugaacucugga

SEQ ID NO: 1320680 - RNA, 19 nt, Artificial Sequence
  Description of Artificial Sequence: Synthetic oligonucleotide
  Sense strand starting at position 2877 of SEQ ID NO: 1242060
agagauuguacaugcagaa

SEQ ID NO: 1320681 - RNA, 19 nt, Artificial Sequence
  Description of Artificial Sequence: Synthetic oligonucleotide
  Antisense strand to SEQ ID NO: 1320680
uucugcauguacaaucucu

SEQ ID NO: 1320682 - RNA, 19 nt, Artificial Sequence
  Description of Artificial Sequence: Synthetic oligonucleotide
  Sense strand starting at position 2907 of SEQ ID NO: 1242060
gcauuagagcuguaugagg

SEQ ID NO: 1320683 - RNA, 19 nt, Artificial Sequence
  Description of Artificial Sequence: Synthetic oligonucleotide
  Antisense strand to SEQ ID NO: 1320682
ccucauacagcucuaaugc

SEQ ID NO: 1320684 - RNA, 19 nt, Artificial Sequence
  Description of Artificial Sequence: Synthetic oligonucleotide
  Sense strand starting at position 3500 of SEQ ID NO: 1242060
guguuacuacucuagcaau

SEQ ID NO: 1320685 - RNA, 19 nt, Artificial Sequence
  Description of Artificial Sequence: Synthetic oligonucleotide
  Antisense strand to SEQ ID NO: 1320684
auugcuagaguaguaacac

SEQ ID NO: 1320686 - RNA, 19 nt, Artificial Sequence
  Description of Artificial Sequence: Synthetic oligonucleotide
  Sense strand starting at position 3552 of SEQ ID NO: 1242060
ggaguaagucuagguucau

SEQ ID NO: 1320687 - RNA, 19 nt, Artificial Sequence
  Description of Artificial Sequence: Synthetic oligonucleotide
  Antisense strand to SEQ ID NO: 1320686
augaaccuagacuuacucc

SEQ ID NO: 1320688 - RNA, 19 nt, Artificial Sequence
  Description of Artificial Sequence: Synthetic oligonucleotide
  Sense strand starting at position 3595 of SEQ ID NO: 1242060
cugugugaccuggaaccaa

SEQ ID NO: 1320689 - RNA, 19 nt, Artificial Sequence
  Description of Artificial Sequence: Synthetic oligonucleotide
  Antisense strand to SEQ ID NO: 1320688
uugguuccaggucacacag

SEQ ID NO: 1320690 - RNA, 19 nt, Artificial Sequence
  Description of Artificial Sequence: Synthetic oligonucleotide
  Sense strand starting at position 3729 of SEQ ID NO: 1242060
gaggucugauucucuuagu

SEQ ID NO: 1320691 - RNA, 19 nt, Artificial Sequence
  Description of Artificial Sequence: Synthetic oligonucleotide
  Antisense strand to SEQ ID NO: 1320690
acuaagagaaucagaccuc

SEQ ID NO: 1320692 - RNA, 19 nt, Artificial Sequence
  Description of Artificial Sequence: Synthetic oligonucleotide
  Sense strand starting at position 3765 of SEQ ID NO: 1242060
agaugugcuucuccugaaa

SEQ ID NO: 1320693 - RNA, 19 nt, Artificial Sequence
  Description of Artificial Sequence: Synthetic oligonucleotide
  Antisense strand to SEQ ID NO: 1320692
uuucaggagaagcacaucu

SEQ ID NO: 1320694 - RNA, 19 nt, Artificial Sequence
  Description of Artificial Sequence: Synthetic oligonucleotide
  Sense strand starting at position 3810 of SEQ ID NO: 1242060
auaacaagcccuugagauu

SEQ ID NO: 1320695 - RNA, 19 nt, Artificial Sequence
  Description of Artificial Sequence: Synthetic oligonucleotide
  Antisense strand to SEQ ID NO: 1320694
aaucucaagggcuuguuau

SEQ ID NO: 1320696 - RNA, 19 nt, Artificial Sequence
  Description of Artificial Sequence: Synthetic oligonucleotide
  Sense strand starting at position 3816 of SEQ ID NO: 1242060
agcccuugagauuacuaua

SEQ ID NO: 1320697 - RNA, 19 nt, Artificial Sequence
  Description of Artificial Sequence: Synthetic oligonucleotide
  Antisense strand to SEQ ID NO: 1320696
uauaguaaucucaagggcu

SEQ ID NO: 1320698 - RNA, 19 nt, Artificial Sequence
  Description of Artificial Sequence: Synthetic oligonucleotide
  Sense strand starting at position 3837 of SEQ ID NO: 1242060
auuucugcuugagauugga

SEQ ID NO: 1320699 - RNA, 19 nt, Artificial Sequence
  Description of Artificial Sequence: Synthetic oligonucleotide
  Antisense strand to SEQ ID NO: 1320698
uccaaucucaagcagaaau

SEQ ID NO: 1320700 - RNA, 19 nt, Artificial Sequence
  Description of Artificial Sequence: Synthetic oligonucleotide
  Sense strand starting at position 3900 of SEQ ID NO: 1242060
agauguaagaauugggagu

SEQ ID NO: 1320701 - RNA, 19 nt, Artificial Sequence
  Description of Artificial Sequence: Synthetic oligonucleotide
  Antisense strand to SEQ ID NO: 1320700
acucccaauucuuacaucu

SEQ ID NO: 1320702 - RNA, 19 nt, Artificial Sequence
  Description of Artificial Sequence: Synthetic oligonucleotide
  Sense strand starting at position 18 of SEQ ID NO: 1242061
gaccaacuccuccggagaa

SEQ ID NO: 1320703 - RNA, 19 nt, Artificial Sequence
  Description of Artificial Sequence: Synthetic oligonucleotide
  Antisense strand to SEQ ID NO: 1320702
uucuccggaggaguugguc

SEQ ID NO: 1320704 - RNA, 19 nt, Artificial Sequence
  Description of Artificial Sequence: Synthetic oligonucleotide
  Sense strand starting at position 86 of SEQ ID NO: 1242061
gggcuuggagguuguauaa

SEQ ID NO: 1320705 - RNA, 19 nt, Artificial Sequence
  Description of Artificial Sequence: Synthetic oligonucleotide
  Antisense strand to SEQ ID NO: 1320704
uuauacaaccuccaagccc

SEQ ID NO: 1320706 - RNA, 19 nt, Artificial Sequence
  Description of Artificial Sequence: Synthetic oligonucleotide
  Sense strand starting at position 162 of SEQ ID NO: 1242061
cuuacaaguuguuucccaa

SEQ ID NO: 1320707 - RNA, 19 nt, Artificial Sequence
  Description of Artificial Sequence: Synthetic oligonucleotide
  Antisense strand to SEQ ID NO: 1320706
uugggaaacaacuuguaag

SEQ ID NO: 1320708 - RNA, 19 nt, Artificial Sequence
  Description of Artificial Sequence: Synthetic oligonucleotide
  Sense strand starting at position 338 of SEQ ID NO: 1242061
gccugcuagcccugaguaa

SEQ ID NO: 1320709 - RNA, 19 nt, Artificial Sequence
  Description of Artificial Sequence: Synthetic oligonucleotide
  Antisense strand to SEQ ID NO: 1320708
uuacucagggcuagcaggc

SEQ ID NO: 1320710 - RNA, 19 nt, Artificial Sequence
  Description of Artificial Sequence: Synthetic oligonucleotide
  Sense strand starting at position 342 of SEQ ID NO: 1242061
gcuagcccugaguaagguu

SEQ ID NO: 1320711 - RNA, 19 nt, Artificial Sequence
  Description of Artificial Sequence: Synthetic oligonucleotide
  Antisense strand to SEQ ID NO: 1320710
aaccuuacucagggcuagc

SEQ ID NO: 1320712 - RNA, 19 nt, Artificial Sequence
  Description of Artificial Sequence: Synthetic oligonucleotide
  Sense strand starting at position 349 of SEQ ID NO: 1242061
cugaguaagguucagguaa

SEQ ID NO: 1320713 - RNA, 19 nt, Artificial Sequence
  Description of Artificial Sequence: Synthetic oligonucleotide
  Antisense strand to SEQ ID NO: 1320712
uuaccugaaccuuacucag

SEQ ID NO: 1320714 - RNA, 19 nt, Artificial Sequence
  Description of Artificial Sequence: Synthetic oligonucleotide
  Sense strand starting at position 351 of SEQ ID NO: 1242061
gaguaagguucagguaaag

SEQ ID NO: 1320715 - RNA, 19 nt, Artificial Sequence
  Description of Artificial Sequence: Synthetic oligonucleotide
  Antisense strand to SEQ ID NO: 1320714
cuuuaccugaaccuuacuc

SEQ ID NO: 1320716 - RNA, 19 nt, Artificial Sequence
  Description of Artificial Sequence: Synthetic oligonucleotide
  Sense strand starting at position 420 of SEQ ID NO: 1242061
gguggagcccaucaaugau

SEQ ID NO: 1320717 - RNA, 19 nt, Artificial Sequence
  Description of Artificial Sequence: Synthetic oligonucleotide
  Antisense strand to SEQ ID NO: 1320716
aucauugaugggcuccacc

SEQ ID NO: 1320718 - RNA, 19 nt, Artificial Sequence
  Description of Artificial Sequence: Synthetic oligonucleotide
  Sense strand starting at position 483 of SEQ ID NO: 1242061
gcuuuagccaggcaaagua

SEQ ID NO: 1320719 - RNA, 19 nt, Artificial Sequence
  Description of Artificial Sequence: Synthetic oligonucleotide
  Antisense strand to SEQ ID NO: 1320718
uacuuugccuggcuaaagc

SEQ ID NO: 1320720 - RNA, 19 nt, Artificial Sequence
  Description of Artificial Sequence: Synthetic oligonucleotide
  Sense strand starting at position 499 of SEQ ID NO: 1242061
guaucacgagccuauaguu

SEQ ID NO: 1320721 - RNA, 19 nt, Artificial Sequence
  Description of Artificial Sequence: Synthetic oligonucleotide
  Antisense strand to SEQ ID NO: 1320720
aacuauaggcucgugauac

SEQ ID NO: 1320722 - RNA, 19 nt, Artificial Sequence
  Description of Artificial Sequence: Synthetic oligonucleotide
  Sense strand starting at position 697 of SEQ ID NO: 1242061
aaagguaauuagugguuau

SEQ ID NO: 1320723 - RNA, 19 nt, Artificial Sequence
  Description of Artificial Sequence: Synthetic oligonucleotide
  Antisense strand to SEQ ID NO: 1320722
auaaccacuaauuaccuuu

SEQ ID NO: 1320724 - RNA, 19 nt, Artificial Sequence
  Description of Artificial Sequence: Synthetic oligonucleotide
  Sense strand starting at position 700 of SEQ ID NO: 1242061
gguaauuagugguuaucua

SEQ ID NO: 1320725 - RNA, 19 nt, Artificial Sequence
  Description of Artificial Sequence: Synthetic oligonucleotide
  Antisense strand to SEQ ID NO: 1320724
uagauaaccacuaauuacc

SEQ ID NO: 1320726 - RNA, 19 nt, Artificial Sequence
  Description of Artificial Sequence: Synthetic oligonucleotide
  Sense strand starting at position 701 of SEQ ID NO: 1242061
guaauuagugguuaucuag

SEQ ID NO: 1320727 - RNA, 19 nt, Artificial Sequence
  Description of Artificial Sequence: Synthetic oligonucleotide
  Antisense strand to SEQ ID NO: 1320726
cuagauaaccacuaauuac

SEQ ID NO: 1320728 - RNA, 19 nt, Artificial Sequence
  Description of Artificial Sequence: Synthetic oligonucleotide
  Sense strand starting at position 707 of SEQ ID NO: 1242061
agugguuaucuagggcuga

SEQ ID NO: 1320729 - RNA, 19 nt, Artificial Sequence
  Description of Artificial Sequence: Synthetic oligonucleotide
  Antisense strand to SEQ ID NO: 1320728
ucagcccuagauaaccacu

SEQ ID NO: 1320730 - RNA, 19 nt, Artificial Sequence
  Description of Artificial Sequence: Synthetic oligonucleotide
  Sense strand starting at position 779 of SEQ ID NO: 1242061
ggguauuagaaauguucua

SEQ ID NO: 1320731 - RNA, 19 nt, Artificial Sequence
  Description of Artificial Sequence: Synthetic oligonucleotide
  Antisense strand to SEQ ID NO: 1320730
uagaacauuucuaauaccc

SEQ ID NO: 1320732 - RNA, 19 nt, Artificial Sequence
  Description of Artificial Sequence: Synthetic oligonucleotide
  Sense strand starting at position 819 of SEQ ID NO: 1242061
gcacaacucugaguacacu

SEQ ID NO: 1320733 - RNA, 19 nt, Artificial Sequence
  Description of Artificial Sequence: Synthetic oligonucleotide
  Antisense strand to SEQ ID NO: 1320732
aguguacucagaguugugc

SEQ ID NO: 1320734 - RNA, 19 nt, Artificial Sequence
  Description of Artificial Sequence: Synthetic oligonucleotide
  Sense strand starting at position 884 of SEQ ID NO: 1242061
ugguaugcacauuacauau

SEQ ID NO: 1320735 - RNA, 19 nt, Artificial Sequence
  Description of Artificial Sequence: Synthetic oligonucleotide
  Antisense strand to SEQ ID NO: 1320734
auauguaaugugcauacca

SEQ ID NO: 1320736 - RNA, 19 nt, Artificial Sequence
  Description of Artificial Sequence: Synthetic oligonucleotide
  Sense strand starting at position 1077 of SEQ ID NO: 1242061
cucucuguugcguggugaa

SEQ ID NO: 1320737 - RNA, 19 nt, Artificial Sequence
  Description of Artificial Sequence: Synthetic oligonucleotide
  Antisense strand to SEQ ID NO: 1320736
uucaccacgcaacagagag

SEQ ID NO: 1320738 - RNA, 19 nt, Artificial Sequence
  Description of Artificial Sequence: Synthetic oligonucleotide
  Sense strand starting at position 1173 of SEQ ID NO: 1242061
gcccgucaugucuuucuga

SEQ ID NO: 1320739 - RNA, 19 nt, Artificial Sequence
  Description of Artificial Sequence: Synthetic oligonucleotide
  Antisense strand to SEQ ID NO: 1320738
ucagaaagacaugacgggc

SEQ ID NO: 1320740 - RNA, 19 nt, Artificial Sequence
  Description of Artificial Sequence: Synthetic oligonucleotide
  Sense strand starting at position 1174 of SEQ ID NO: 1242061
cccgucaugucuuucugaa

SEQ ID NO: 1320741 - RNA, 19 nt, Artificial Sequence
  Description of Artificial Sequence: Synthetic oligonucleotide
  Antisense strand to SEQ ID NO: 1320740
uucagaaagacaugacggg

SEQ ID NO: 1320742 - RNA, 19 nt, Artificial Sequence
  Description of Artificial Sequence: Synthetic oligonucleotide
  Sense strand starting at position 1257 of SEQ ID NO: 1242061
aaaggaacgugacuucuaa

SEQ ID NO: 1320743 - RNA, 19 nt, Artificial Sequence
  Description of Artificial Sequence: Synthetic oligonucleotide
  Antisense strand to SEQ ID NO: 1320742
uuagaagucacguuccuuu

SEQ ID NO: 1320744 - RNA, 19 nt, Artificial Sequence
  Description of Artificial Sequence: Synthetic oligonucleotide
  Sense strand starting at position 1261 of SEQ ID NO: 1242061
gaacgugacuucuaacuca

SEQ ID NO: 1320745 - RNA, 19 nt, Artificial Sequence
  Description of Artificial Sequence: Synthetic oligonucleotide
  Antisense strand to SEQ ID NO: 1320744
ugaguuagaagucacguuc

SEQ ID NO: 1320746 - RNA, 19 nt, Artificial Sequence
  Description of Artificial Sequence: Synthetic oligonucleotide
  Sense strand starting at position 1268 of SEQ ID NO: 1242061
acuucuaacucaugguguu

SEQ ID NO: 1320747 - RNA, 19 nt, Artificial Sequence
  Description of Artificial Sequence: Synthetic oligonucleotide
  Antisense strand to SEQ ID NO: 1320746
aacaccaugaguuagaagu

SEQ ID NO: 1320748 - RNA, 19 nt, Artificial Sequence
  Description of Artificial Sequence: Synthetic oligonucleotide
  Sense strand starting at position 1454 of SEQ ID NO: 1242061
uuggcagguccuuaucuuu

SEQ ID NO: 1320749 - RNA, 19 nt, Artificial Sequence
  Description of Artificial Sequence: Synthetic oligonucleotide
  Antisense strand to SEQ ID NO: 1320748
aaagauaaggaccugccaa

SEQ ID NO: 1320750 - RNA, 19 nt, Artificial Sequence
  Description of Artificial Sequence: Synthetic oligonucleotide
  Sense strand starting at position 1480 of SEQ ID NO: 1242061
cucuuucucucagguuauu

SEQ ID NO: 1320751 - RNA, 19 nt, Artificial Sequence
  Description of Artificial Sequence: Synthetic oligonucleotide
  Antisense strand to SEQ ID NO: 1320750
aauaaccugagagaaagag

SEQ ID NO: 1320752 - RNA, 19 nt, Artificial Sequence
  Description of Artificial Sequence: Synthetic oligonucleotide
  Sense strand starting at position 2168 of SEQ ID NO: 1242061
ugaggcuuccgccgaguga

SEQ ID NO: 1320753 - RNA, 19 nt, Artificial Sequence
  Description of Artificial Sequence: Synthetic oligonucleotide
  Antisense strand to SEQ ID NO: 1320752
ucacucggcggaagccuca

SEQ ID NO: 1320754 - RNA, 19 nt, Artificial Sequence
  Description of Artificial Sequence: Synthetic oligonucleotide
  Sense strand starting at position 2169 of SEQ ID NO: 1242061
gaggcuuccgccgagugau

SEQ ID NO: 1320755 - RNA, 19 nt, Artificial Sequence
  Description of Artificial Sequence: Synthetic oligonucleotide
  Antisense strand to SEQ ID NO: 1320754
aucacucggcggaagccuc

SEQ ID NO: 1320756 - RNA, 19 nt, Artificial Sequence
  Description of Artificial Sequence: Synthetic oligonucleotide
  Sense strand starting at position 2170 of SEQ ID NO: 1242061
aggcuuccgccgagugauc

SEQ ID NO: 1320757 - RNA, 19 nt, Artificial Sequence
  Description of Artificial Sequence: Synthetic oligonucleotide
  Antisense strand to SEQ ID NO: 1320756
gaucacucggcggaagccu

SEQ ID NO: 1320758 - RNA, 19 nt, Artificial Sequence
  Description of Artificial Sequence: Synthetic oligonucleotide
  Sense strand starting at position 2181 of SEQ ID NO: 1242061
gagugauccaguugcggga

SEQ ID NO: 1320759 - RNA, 19 nt, Artificial Sequence
  Description of Artificial Sequence: Synthetic oligonucleotide
  Antisense strand to SEQ ID NO: 1320758
ucccgcaacuggaucacuc

SEQ ID NO: 1320760 - RNA, 19 nt, Artificial Sequence
  Description of Artificial Sequence: Synthetic oligonucleotide
  Sense strand starting at position 2292 of SEQ ID NO: 1242061
cuuugcagccugugaucuu

SEQ ID NO: 1320761 - RNA, 19 nt, Artificial Sequence
  Description of Artificial Sequence: Synthetic oligonucleotide
  Antisense strand to SEQ ID NO: 1320760
aagaucacaggcugcaaag

SEQ ID NO: 1320762 - RNA, 19 nt, Artificial Sequence
  Description of Artificial Sequence: Synthetic oligonucleotide
  Sense strand starting at position 2293 of SEQ ID NO: 1242061
uuugcagccugugaucuua

SEQ ID NO: 1320763 - RNA, 19 nt, Artificial Sequence
  Description of Artificial Sequence: Synthetic oligonucleotide
  Antisense strand to SEQ ID NO: 1320762
uaagaucacaggcugcaaa

SEQ ID NO: 1320764 - RNA, 19 nt, Artificial Sequence
  Description of Artificial Sequence: Synthetic oligonucleotide
  Sense strand starting at position 2495 of SEQ ID NO: 1242061
agacaugcgcuccagagau

SEQ ID NO: 1320765 - RNA, 19 nt, Artificial Sequence
  Description of Artificial Sequence: Synthetic oligonucleotide
  Antisense strand to SEQ ID NO: 1320764
aucucuggagcgcaugucu

SEQ ID NO: 1320766 - RNA, 19 nt, Artificial Sequence
  Description of Artificial Sequence: Synthetic oligonucleotide
  Sense strand starting at position 2921 of SEQ ID NO: 1242061
uuaucugccuuguugugau

SEQ ID NO: 1320767 - RNA, 19 nt, Artificial Sequence
  Description of Artificial Sequence: Synthetic oligonucleotide
  Antisense strand to SEQ ID NO: 1320766
aucacaacaaggcagauaa

SEQ ID NO: 1320768 - RNA, 19 nt, Artificial Sequence
  Description of Artificial Sequence: Synthetic oligonucleotide
  Sense strand starting at position 3249 of SEQ ID NO: 1242061
ccgcauccggccugugauu

SEQ ID NO: 1320769 - RNA, 19 nt, Artificial Sequence
  Description of Artificial Sequence: Synthetic oligonucleotide
  Antisense strand to SEQ ID NO: 1320768
aaucacaggccggaugcgg

SEQ ID NO: 1320770 - RNA, 19 nt, Artificial Sequence
  Description of Artificial Sequence: Synthetic oligonucleotide
  Sense strand starting at position 3318 of SEQ ID NO: 1242061
cucccaugggaggguaaua

SEQ ID NO: 1320771 - RNA, 19 nt, Artificial Sequence
  Description of Artificial Sequence: Synthetic oligonucleotide
  Antisense strand to SEQ ID NO: 1320770
uauuacccucccaugggag

SEQ ID NO: 1320772 - RNA, 19 nt, Artificial Sequence
  Description of Artificial Sequence: Synthetic oligonucleotide
  Sense strand starting at position 3323 of SEQ ID NO: 1242061
augggaggguaauaaucuu

SEQ ID NO: 1320773 - RNA, 19 nt, Artificial Sequence
  Description of Artificial Sequence: Synthetic oligonucleotide
  Antisense strand to SEQ ID NO: 1320772
aagauuauuacccucccau

SEQ ID NO: 1320774 - RNA, 19 nt, Artificial Sequence
  Description of Artificial Sequence: Synthetic oligonucleotide
  Sense strand starting at position 3378 of SEQ ID NO: 1242061
guuccaacacuuugacaga

SEQ ID NO: 1320775 - RNA, 19 nt, Artificial Sequence
  Description of Artificial Sequence: Synthetic oligonucleotide
  Antisense strand to SEQ ID NO: 1320774
ucugucaaaguguuggaac

SEQ ID NO: 1320776 - RNA, 19 nt, Artificial Sequence
  Description of Artificial Sequence: Synthetic oligonucleotide
  Sense strand starting at position 3503 of SEQ ID NO: 1242061
cuaacaaguuagccagaga

SEQ ID NO: 1320777 - RNA, 19 nt, Artificial Sequence
  Description of Artificial Sequence: Synthetic oligonucleotide
  Antisense strand to SEQ ID NO: 1320776
ucucuggcuaacuuguuag

SEQ ID NO: 1320778 - RNA, 19 nt, Artificial Sequence
  Description of Artificial Sequence: Synthetic oligonucleotide
  Sense strand starting at position 3539 of SEQ ID NO: 1242061
cuuaacaaaggauguguua

SEQ ID NO: 1320779 - RNA, 19 nt, Artificial Sequence
  Description of Artificial Sequence: Synthetic oligonucleotide
  Antisense strand to SEQ ID NO: 1320778
uaacacauccuuuguuaag

SEQ ID NO: 1320780 - RNA, 19 nt, Artificial Sequence
  Description of Artificial Sequence: Synthetic oligonucleotide
  Sense strand starting at position 3904 of SEQ ID NO: 1242061
uccuacaacucagugagaa

SEQ ID NO: 1320781 - RNA, 19 nt, Artificial Sequence
  Description of Artificial Sequence: Synthetic oligonucleotide
  Antisense strand to SEQ ID NO: 1320780
uucucacugaguuguagga

SEQ ID NO: 1320782 - RNA, 19 nt, Artificial Sequence
  Description of Artificial Sequence: Synthetic oligonucleotide
  Sense strand starting at position 175 of SEQ ID NO: 1242062
agauuacacucagcugauu

SEQ ID NO: 1320783 - RNA, 19 nt, Artificial Sequence
  Description of Artificial Sequence: Synthetic oligonucleotide
  Antisense strand to SEQ ID NO: 1320782
aaucagcugaguguaaucu

SEQ ID NO: 1320784 - RNA, 19 nt, Artificial Sequence
  Description of Artificial Sequence: Synthetic oligonucleotide
  Sense strand starting at position 389 of SEQ ID NO: 1242062
caaaguaaguugguuaugu

SEQ ID NO: 1320785 - RNA, 19 nt, Artificial Sequence
  Description of Artificial Sequence: Synthetic oligonucleotide
  Antisense strand to SEQ ID NO: 1320784
acauaaccaacuuacuuug

SEQ ID NO: 1320786 - RNA, 19 nt, Artificial Sequence
  Description of Artificial Sequence: Synthetic oligonucleotide
  Sense strand starting at position 391 of SEQ ID NO: 1242062
aaguaaguugguuaugugu

SEQ ID NO: 1320787 - RNA, 19 nt, Artificial Sequence
  Description of Artificial Sequence: Synthetic oligonucleotide
  Antisense strand to SEQ ID NO: 1320786
acacauaaccaacuuacuu

SEQ ID NO: 1320788 - RNA, 19 nt, Artificial Sequence
  Description of Artificial Sequence: Synthetic oligonucleotide
  Sense strand starting at position 394 of SEQ ID NO: 1242062
uaaguugguuauguguuaa

SEQ ID NO: 1320789 - RNA, 19 nt, Artificial Sequence
  Description of Artificial Sequence: Synthetic oligonucleotide
  Antisense strand to SEQ ID NO: 1320788
uuaacacauaaccaacuua

SEQ ID NO: 1320790 - RNA, 19 nt, Artificial Sequence
  Description of Artificial Sequence: Synthetic oligonucleotide
  Sense strand starting at position 431 of SEQ ID NO: 1242062
uuaagaaaucguggcucua

SEQ ID NO: 1320791 - RNA, 19 nt, Artificial Sequence
  Description of Artificial Sequence: Synthetic oligonucleotide
  Antisense strand to SEQ ID NO: 1320790
uagagccacgauuucuuaa

SEQ ID NO: 1320792 - RNA, 19 nt, Artificial Sequence
  Description of Artificial Sequence: Synthetic oligonucleotide
  Sense strand starting at position 433 of SEQ ID NO: 1242062
aagaaaucguggcucuauu

SEQ ID NO: 1320793 - RNA, 19 nt, Artificial Sequence
  Description of Artificial Sequence: Synthetic oligonucleotide
  Antisense strand to SEQ ID NO: 1320792
aauagagccacgauuucuu

SEQ ID NO: 1320794 - RNA, 19 nt, Artificial Sequence
  Description of Artificial Sequence: Synthetic oligonucleotide
  Sense strand starting at position 459 of SEQ ID NO: 1242062
gauggucuacauuauagua

SEQ ID NO: 1320795 - RNA, 19 nt, Artificial Sequence
  Description of Artificial Sequence: Synthetic oligonucleotide
  Antisense strand to SEQ ID NO: 1320794
uacuauaauguagaccauc

SEQ ID NO: 1320796 - RNA, 19 nt, Artificial Sequence
  Description of Artificial Sequence: Synthetic oligonucleotide
  Sense strand starting at position 560 of SEQ ID NO: 1242062
gcugaaugaucugcaacaa

SEQ ID NO: 1320797 - RNA, 19 nt, Artificial Sequence
  Description of Artificial Sequence: Synthetic oligonucleotide
  Antisense strand to SEQ ID NO: 1320796
uuguugcagaucauucagc

SEQ ID NO: 1320798 - RNA, 19 nt, Artificial Sequence
  Description of Artificial Sequence: Synthetic oligonucleotide
  Sense strand starting at position 690 of SEQ ID NO: 1242062
aggcaaauauagccuggua

SEQ ID NO: 1320799 - RNA, 19 nt, Artificial Sequence
  Description of Artificial Sequence: Synthetic oligonucleotide
  Antisense strand to SEQ ID NO: 1320798
uaccaggcuauauuugccu

SEQ ID NO: 1320800 - RNA, 19 nt, Artificial Sequence
  Description of Artificial Sequence: Synthetic oligonucleotide
  Sense strand starting at position 692 of SEQ ID NO: 1242062
gcaaauauagccugguacu

SEQ ID NO: 1320801 - RNA, 19 nt, Artificial Sequence
  Description of Artificial Sequence: Synthetic oligonucleotide
  Antisense strand to SEQ ID NO: 1320800
aguaccaggcuauauuugc

SEQ ID NO: 1320802 - RNA, 19 nt, Artificial Sequence
  Description of Artificial Sequence: Synthetic oligonucleotide
  Sense strand starting at position 721 of SEQ ID NO: 1242062
cagugaagguuaucaugaa

SEQ ID NO: 1320803 - RNA, 19 nt, Artificial Sequence
  Description of Artificial Sequence: Synthetic oligonucleotide
  Antisense strand to SEQ ID NO: 1320802
uucaugauaaccuucacug

SEQ ID NO: 1320804 - RNA, 19 nt, Artificial Sequence
  Description of Artificial Sequence: Synthetic oligonucleotide
  Sense strand starting at position 792 of SEQ ID NO: 1242062
ggugguuacaaguagcauu

SEQ ID NO: 1320805 - RNA, 19 nt, Artificial Sequence
  Description of Artificial Sequence: Synthetic oligonucleotide
  Antisense strand to SEQ ID NO: 1320804
aaugcuacuuguaaccacc

SEQ ID NO: 1320806 - RNA, 19 nt, Artificial Sequence
  Description of Artificial Sequence: Synthetic oligonucleotide
  Sense strand starting at position 802 of SEQ ID NO: 1242062
aguagcauuccugaacucu

SEQ ID NO: 1320807 - RNA, 19 nt, Artificial Sequence
  Description of Artificial Sequence: Synthetic oligonucleotide
  Antisense strand to SEQ ID NO: 1320806
agaguucaggaaugcuacu

SEQ ID NO: 1320808 - RNA, 19 nt, Artificial Sequence
  Description of Artificial Sequence: Synthetic oligonucleotide
  Sense strand starting at position 833 of SEQ ID NO: 1242062
aguguuaauguuuaugaug

SEQ ID NO: 1320809 - RNA, 19 nt, Artificial Sequence
  Description of Artificial Sequence: Synthetic oligonucleotide
  Antisense strand to SEQ ID NO: 1320808
caucauaaacauuaacacu

SEQ ID NO: 1320810 - RNA, 19 nt, Artificial Sequence
  Description of Artificial Sequence: Synthetic oligonucleotide
  Sense strand starting at position 885 of SEQ ID NO: 1242062
cucuguguucuguggagag

SEQ ID NO: 1320811 - RNA, 19 nt, Artificial Sequence
  Description of Artificial Sequence: Synthetic oligonucleotide
  Antisense strand to SEQ ID NO: 1320810
cucuccacagaacacagag

SEQ ID NO: 1320812 - RNA, 19 nt, Artificial Sequence
  Description of Artificial Sequence: Synthetic oligonucleotide
  Sense strand starting at position 904 of SEQ ID NO: 1242062
acucuauuguaaguuguca

SEQ ID NO: 1320813 - RNA, 19 nt, Artificial Sequence
  Description of Artificial Sequence: Synthetic oligonucleotide
  Antisense strand to SEQ ID NO: 1320812
ugacaacuuacaauagagu

SEQ ID NO: 1320814 - RNA, 19 nt, Artificial Sequence
  Description of Artificial Sequence: Synthetic oligonucleotide
  Sense strand starting at position 1096 of SEQ ID NO: 1242062
ccaugcuagcccugaagaa

SEQ ID NO: 1320815 - RNA, 19 nt, Artificial Sequence
  Description of Artificial Sequence: Synthetic oligonucleotide
  Antisense strand to SEQ ID NO: 1320814
uucuucagggcuagcaugg

SEQ ID NO: 1320816 - RNA, 19 nt, Artificial Sequence
  Description of Artificial Sequence: Synthetic oligonucleotide
  Sense strand starting at position 1558 of SEQ ID NO: 1242062
ccuuguauguuuguggaaa

SEQ ID NO: 1320817 - RNA, 19 nt, Artificial Sequence
  Description of Artificial Sequence: Synthetic oligonucleotide
  Antisense strand to SEQ ID NO: 1320816
uuuccacaaacauacaagg

SEQ ID NO: 1320818 - RNA, 19 nt, Artificial Sequence
  Description of Artificial Sequence: Synthetic oligonucleotide
  Sense strand starting at position 1562 of SEQ ID NO: 1242062
guauguuuguggaaagguc

SEQ ID NO: 1320819 - RNA, 19 nt, Artificial Sequence
  Description of Artificial Sequence: Synthetic oligonucleotide
  Antisense strand to SEQ ID NO: 1320818
gaccuuuccacaaacauac

SEQ ID NO: 1320820 - RNA, 19 nt, Artificial Sequence
  Description of Artificial Sequence: Synthetic oligonucleotide
  Sense strand starting at position 1569 of SEQ ID NO: 1242062
uguggaaaggucuaagagu

SEQ ID NO: 1320821 - RNA, 19 nt, Artificial Sequence
  Description of Artificial Sequence: Synthetic oligonucleotide
  Antisense strand to SEQ ID NO: 1320820
acucuuagaccuuuccaca

SEQ ID NO: 1320822 - RNA, 19 nt, Artificial Sequence
  Description of Artificial Sequence: Synthetic oligonucleotide
  Sense strand starting at position 1586 of SEQ ID NO: 1242062
guuccagucaugggaaaca

SEQ ID NO: 1320823 - RNA, 19 nt, Artificial Sequence
  Description of Artificial Sequence: Synthetic oligonucleotide
  Antisense strand to SEQ ID NO: 1320822
uguuucccaugacuggaac

SEQ ID NO: 1320824 - RNA, 19 nt, Artificial Sequence
  Description of Artificial Sequence: Synthetic oligonucleotide
  Sense strand starting at position 1638 of SEQ ID NO: 1242062
gagagaagccagugggauu

SEQ ID NO: 1320825 - RNA, 19 nt, Artificial Sequence
  Description of Artificial Sequence: Synthetic oligonucleotide
  Antisense strand to SEQ ID NO: 1320824
aaucccacuggcuucucuc

SEQ ID NO: 1320826 - RNA, 19 nt, Artificial Sequence
  Description of Artificial Sequence: Synthetic oligonucleotide
  Sense strand starting at position 1645 of SEQ ID NO: 1242062
gccagugggauuugauguu

SEQ ID NO: 1320827 - RNA, 19 nt, Artificial Sequence
  Description of Artificial Sequence: Synthetic oligonucleotide
  Antisense strand to SEQ ID NO: 1320826
aacaucaaaucccacuggc

SEQ ID NO: 1320828 - RNA, 19 nt, Artificial Sequence
  Description of Artificial Sequence: Synthetic oligonucleotide
  Sense strand starting at position 1651 of SEQ ID NO: 1242062
gggauuugauguuaaccuu

SEQ ID NO: 1320829 - RNA, 19 nt, Artificial Sequence
  Description of Artificial Sequence: Synthetic oligonucleotide
  Antisense strand to SEQ ID NO: 1320828
aagguuaacaucaaauccc

SEQ ID NO: 1320830 - RNA, 19 nt, Artificial Sequence
  Description of Artificial Sequence: Synthetic oligonucleotide
  Sense strand starting at position 1657 of SEQ ID NO: 1242062
ugauguuaaccuugacgga

SEQ ID NO: 1320831 - RNA, 19 nt, Artificial Sequence
  Description of Artificial Sequence: Synthetic oligonucleotide
  Antisense strand to SEQ ID NO: 1320830
uccgucaagguuaacauca

SEQ ID NO: 1320832 - RNA, 19 nt, Artificial Sequence
  Description of Artificial Sequence: Synthetic oligonucleotide
  Sense strand starting at position 2007 of SEQ ID NO: 1242062
aguaaugcgagaggauaga

SEQ ID NO: 1320833 - RNA, 19 nt, Artificial Sequence
  Description of Artificial Sequence: Synthetic oligonucleotide
  Antisense strand to SEQ ID NO: 1320832
ucuauccucucgcauuacu

SEQ ID NO: 1320834 - RNA, 19 nt, Artificial Sequence
  Description of Artificial Sequence: Synthetic oligonucleotide
  Sense strand starting at position 2038 of SEQ ID NO: 1242062
cccaguuaauguguuacuu

SEQ ID NO: 1320835 - RNA, 19 nt, Artificial Sequence
  Description of Artificial Sequence: Synthetic oligonucleotide
  Antisense strand to SEQ ID NO: 1320834
aaguaacacauuaacuggg

SEQ ID NO: 1320836 - RNA, 19 nt, Artificial Sequence
  Description of Artificial Sequence: Synthetic oligonucleotide
  Sense strand starting at position 2046 of SEQ ID NO: 1242062
auguguuacuuauuaggcu

SEQ ID NO: 1320837 - RNA, 19 nt, Artificial Sequence
  Description of Artificial Sequence: Synthetic oligonucleotide
  Antisense strand to SEQ ID NO: 1320836
agccuaauaaguaacacau

SEQ ID NO: 1320838 - RNA, 19 nt, Artificial Sequence
  Description of Artificial Sequence: Synthetic oligonucleotide
  Sense strand starting at position 2053 of SEQ ID NO: 1242062
acuuauuaggcuggagcua

SEQ ID NO: 1320839 - RNA, 19 nt, Artificial Sequence
  Description of Artificial Sequence: Synthetic oligonucleotide
  Antisense strand to SEQ ID NO: 1320838
uagcuccagccuaauaagu

SEQ ID NO: 1320840 - RNA, 19 nt, Artificial Sequence
  Description of Artificial Sequence: Synthetic oligonucleotide
  Sense strand starting at position 2146 of SEQ ID NO: 1242062
auaaauguucuagguagug

SEQ ID NO: 1320841 - RNA, 19 nt, Artificial Sequence
  Description of Artificial Sequence: Synthetic oligonucleotide
  Antisense strand to SEQ ID NO: 1320840
cacuaccuagaacauuuau

SEQ ID NO: 1320842 - RNA, 19 nt, Artificial Sequence
  Description of Artificial Sequence: Synthetic oligonucleotide
  Sense strand starting at position 2218 of SEQ ID NO: 1242062
gacccagugugaucaaacu

SEQ ID NO: 1320843 - RNA, 19 nt, Artificial Sequence
  Description of Artificial Sequence: Synthetic oligonucleotide
  Antisense strand to SEQ ID NO: 1320842
aguuugaucacacuggguc

SEQ ID NO: 1320844 - RNA, 19 nt, Artificial Sequence
  Description of Artificial Sequence: Synthetic oligonucleotide
  Sense strand starting at position 2224 of SEQ ID NO: 1242062
gugugaucaaacugguuuc

SEQ ID NO: 1320845 - RNA, 19 nt, Artificial Sequence
  Description of Artificial Sequence: Synthetic oligonucleotide
  Antisense strand to SEQ ID NO: 1320844
gaaaccaguuugaucacac

SEQ ID NO: 1320846 - RNA, 19 nt, Artificial Sequence
  Description of Artificial Sequence: Synthetic oligonucleotide
  Sense strand starting at position 2227 of SEQ ID NO: 1242062
ugaucaaacugguuucuaa

SEQ ID NO: 1320847 - RNA, 19 nt, Artificial Sequence
  Description of Artificial Sequence: Synthetic oligonucleotide
  Antisense strand to SEQ ID NO: 1320846
uuagaaaccaguuugauca

SEQ ID NO: 1320848 - RNA, 19 nt, Artificial Sequence
  Description of Artificial Sequence: Synthetic oligonucleotide
  Sense strand starting at position 2234 of SEQ ID NO: 1242062
acugguuucuaaucagggu

SEQ ID NO: 1320849 - RNA, 19 nt, Artificial Sequence
  Description of Artificial Sequence: Synthetic oligonucleotide
  Antisense strand to SEQ ID NO: 1320848
acccugauuagaaaccagu

SEQ ID NO: 1320850 - RNA, 19 nt, Artificial Sequence
  Description of Artificial Sequence: Synthetic oligonucleotide
  Sense strand starting at position 2238 of SEQ ID NO: 1242062
guuucuaaucaggguugca

SEQ ID NO: 1320851 - RNA, 19 nt, Artificial Sequence
  Description of Artificial Sequence: Synthetic oligonucleotide
  Antisense strand to SEQ ID NO: 1320850
ugcaacccugauuagaaac

SEQ ID NO: 1320852 - RNA, 19 nt, Artificial Sequence
  Description of Artificial Sequence: Synthetic oligonucleotide
  Sense strand starting at position 2274 of SEQ ID NO: 1242062
gaugcaauuugcugaaaga

SEQ ID NO: 1320853 - RNA, 19 nt, Artificial Sequence
  Description of Artificial Sequence: Synthetic oligonucleotide
  Antisense strand to SEQ ID NO: 1320852
ucuuucagcaaauugcauc

SEQ ID NO: 1320854 - RNA, 19 nt, Artificial Sequence
  Description of Artificial Sequence: Synthetic oligonucleotide
  Sense strand starting at position 3689 of SEQ ID NO: 1242062
gugagauaaucuuaauuug

SEQ ID NO: 1320855 - RNA, 19 nt, Artificial Sequence
  Description of Artificial Sequence: Synthetic oligonucleotide
  Antisense strand to SEQ ID NO: 1320854
caaauuaagauuaucucac

SEQ ID NO: 1320856 - RNA, 19 nt, Artificial Sequence
  Description of Artificial Sequence: Synthetic oligonucleotide
  Sense strand starting at position 3736 of SEQ ID NO: 1242062
gccagucauuugccaaauu

SEQ ID NO: 1320857 - RNA, 19 nt, Artificial Sequence
  Description of Artificial Sequence: Synthetic oligonucleotide
  Antisense strand to SEQ ID NO: 1320856
aauuuggcaaaugacuggc

SEQ ID NO: 1320858 - RNA, 19 nt, Artificial Sequence
  Description of Artificial Sequence: Synthetic oligonucleotide
  Sense strand starting at position 3737 of SEQ ID NO: 1242062
ccagucauuugccaaauug

SEQ ID NO: 1320859 - RNA, 19 nt, Artificial Sequence
  Description of Artificial Sequence: Synthetic oligonucleotide
  Antisense strand to SEQ ID NO: 1320858
caauuuggcaaaugacugg

SEQ ID NO: 1320860 - RNA, 19 nt, Artificial Sequence
  Description of Artificial Sequence: Synthetic oligonucleotide
  Sense strand starting at position 3962 of SEQ ID NO: 1242062
agggaucaugucugacuca

SEQ ID NO: 1320861 - RNA, 19 nt, Artificial Sequence
  Description of Artificial Sequence: Synthetic oligonucleotide
  Antisense strand to SEQ ID NO: 1320860
ugagucagacaugaucccu

SEQ ID NO: 1320862 - RNA, 19 nt, Artificial Sequence
  Description of Artificial Sequence: Synthetic oligonucleotide
  Sense strand starting at position 59 of SEQ ID NO: 1242063
ucugcaaaucaugagcaga

SEQ ID NO: 1320863 - RNA, 19 nt, Artificial Sequence
  Description of Artificial Sequence: Synthetic oligonucleotide
  Antisense strand to SEQ ID NO: 1320862
ucugcucaugauuugcaga

SEQ ID NO: 1320864 - RNA, 19 nt, Artificial Sequence
  Description of Artificial Sequence: Synthetic oligonucleotide
  Sense strand starting at position 183 of SEQ ID NO: 1242063
cccugaguucuccagucca

SEQ ID NO: 1320865 - RNA, 19 nt, Artificial Sequence
  Description of Artificial Sequence: Synthetic oligonucleotide
  Antisense strand to SEQ ID NO: 1320864
uggacuggagaacucaggg

SEQ ID NO: 1320866 - RNA, 19 nt, Artificial Sequence
  Description of Artificial Sequence: Synthetic oligonucleotide
  Sense strand starting at position 252 of SEQ ID NO: 1242063
caauguguccgacagcaaa

SEQ ID NO: 1320867 - RNA, 19 nt, Artificial Sequence
  Description of Artificial Sequence: Synthetic oligonucleotide
  Antisense strand to SEQ ID NO: 1320866
uuugcugucggacacauug

SEQ ID NO: 1320868 - RNA, 19 nt, Artificial Sequence
  Description of Artificial Sequence: Synthetic oligonucleotide
  Sense strand starting at position 296 of SEQ ID NO: 1242063
aaaggaaacguuugaccca

SEQ ID NO: 1320869 - RNA, 19 nt, Artificial Sequence
  Description of Artificial Sequence: Synthetic oligonucleotide
  Antisense strand to SEQ ID NO: 1320868
ugggucaaacguuuccuuu

SEQ ID NO: 1320870 - RNA, 19 nt, Artificial Sequence
  Description of Artificial Sequence: Synthetic oligonucleotide
  Sense strand starting at position 333 of SEQ ID NO: 1242063
uuuguauacuagucacauu

SEQ ID NO: 1320871 - RNA, 19 nt, Artificial Sequence
  Description of Artificial Sequence: Synthetic oligonucleotide
  Antisense strand to SEQ ID NO: 1320870
aaugugacuaguauacaaa

SEQ ID NO: 1320872 - RNA, 19 nt, Artificial Sequence
  Description of Artificial Sequence: Synthetic oligonucleotide
  Sense strand starting at position 336 of SEQ ID NO: 1242063
guauacuagucacauuugu

SEQ ID NO: 1320873 - RNA, 19 nt, Artificial Sequence
  Description of Artificial Sequence: Synthetic oligonucleotide
  Antisense strand to SEQ ID NO: 1320872
acaaaugugacuaguauac

SEQ ID NO: 1320874 - RNA, 19 nt, Artificial Sequence
  Description of Artificial Sequence: Synthetic oligonucleotide
  Sense strand starting at position 353 of SEQ ID NO: 1242063
guaucaacccaccguauua

SEQ ID NO: 1320875 - RNA, 19 nt, Artificial Sequence
  Description of Artificial Sequence: Synthetic oligonucleotide
  Antisense strand to SEQ ID NO: 1320874
uaauacgguggguugauac

SEQ ID NO: 1320876 - RNA, 19 nt, Artificial Sequence
  Description of Artificial Sequence: Synthetic oligonucleotide
  Sense strand starting at position 434 of SEQ ID NO: 1242063
caugcagucuggucacaca

SEQ ID NO: 1320877 - RNA, 19 nt, Artificial Sequence
  Description of Artificial Sequence: Synthetic oligonucleotide
  Antisense strand to SEQ ID NO: 1320876
ugugugaccagacugcaug

SEQ ID NO: 1320878 - RNA, 19 nt, Artificial Sequence
  Description of Artificial Sequence: Synthetic oligonucleotide
  Sense strand starting at position 573 of SEQ ID NO: 1242063
ccaggacugugguuggaaa

SEQ ID NO: 1320879 - RNA, 19 nt, Artificial Sequence
  Description of Artificial Sequence: Synthetic oligonucleotide
  Antisense strand to SEQ ID NO: 1320878
uuuccaaccacaguccugg

SEQ ID NO: 1320880 - RNA, 19 nt, Artificial Sequence
  Description of Artificial Sequence: Synthetic oligonucleotide
  Sense strand starting at position 607 of SEQ ID NO: 1242063
uguagaucuuacucuauga

SEQ ID NO: 1320881 - RNA, 19 nt, Artificial Sequence
  Description of Artificial Sequence: Synthetic oligonucleotide
  Antisense strand to SEQ ID NO: 1320880
ucauagaguaagaucuaca

SEQ ID NO: 1320882 - RNA, 19 nt, Artificial Sequence
  Description of Artificial Sequence: Synthetic oligonucleotide
  Sense strand starting at position 623 of SEQ ID NO: 1242063
ugaugcuaaugauuggaca

SEQ ID NO: 1320883 - RNA, 19 nt, Artificial Sequence
  Description of Artificial Sequence: Synthetic oligonucleotide
  Antisense strand to SEQ ID NO: 1320882
uguccaaucauuagcauca

SEQ ID NO: 1320884 - RNA, 19 nt, Artificial Sequence
  Description of Artificial Sequence: Synthetic oligonucleotide
  Sense strand starting at position 624 of SEQ ID NO: 1242063
gaugcuaaugauuggacaa

SEQ ID NO: 1320885 - RNA, 19 nt, Artificial Sequence
  Description of Artificial Sequence: Synthetic oligonucleotide
  Antisense strand to SEQ ID NO: 1320884
uuguccaaucauuagcauc

SEQ ID NO: 1320886 - RNA, 19 nt, Artificial Sequence
  Description of Artificial Sequence: Synthetic oligonucleotide
  Sense strand starting at position 1253 of SEQ ID NO: 1242063
agaagaaagugguuuacau

SEQ ID NO: 1320887 - RNA, 19 nt, Artificial Sequence
  Description of Artificial Sequence: Synthetic oligonucleotide
  Antisense strand to SEQ ID NO: 1320886
auguaaaccacuuucuucu

SEQ ID NO: 1320888 - RNA, 19 nt, Artificial Sequence
  Description of Artificial Sequence: Synthetic oligonucleotide
  Sense strand starting at position 1520 of SEQ ID NO: 1242063
gccaauaaacucggcuuga

SEQ ID NO: 1320889 - RNA, 19 nt, Artificial Sequence
  Description of Artificial Sequence: Synthetic oligonucleotide
  Antisense strand to SEQ ID NO: 1320888
ucaagccgaguuuauuggc

SEQ ID NO: 1320890 - RNA, 19 nt, Artificial Sequence
  Description of Artificial Sequence: Synthetic oligonucleotide
  Sense strand starting at position 1524 of SEQ ID NO: 1242063
auaaacucggcuugacaga

SEQ ID NO: 1320891 - RNA, 19 nt, Artificial Sequence
  Description of Artificial Sequence: Synthetic oligonucleotide
  Antisense strand to SEQ ID NO: 1320890
ucugucaagccgaguuuau

SEQ ID NO: 1320892 - RNA, 19 nt, Artificial Sequence
  Description of Artificial Sequence: Synthetic oligonucleotide
  Sense strand starting at position 2493 of SEQ ID NO: 1242063
ggugaugacuaagcuaaga

SEQ ID NO: 1320893 - RNA, 19 nt, Artificial Sequence
  Description of Artificial Sequence: Synthetic oligonucleotide
  Antisense strand to SEQ ID NO: 1320892
ucuuagcuuagucaucacc

SEQ ID NO: 1320894 - RNA, 19 nt, Artificial Sequence
  Description of Artificial Sequence: Synthetic oligonucleotide
  Sense strand starting at position 2513 of SEQ ID NO: 1242063
cugaaaugcaaguaggagu

SEQ ID NO: 1320895 - RNA, 19 nt, Artificial Sequence
  Description of Artificial Sequence: Synthetic oligonucleotide
  Antisense strand to SEQ ID NO: 1320894
acuccuacuugcauuucag

SEQ ID NO: 1320896 - RNA, 19 nt, Artificial Sequence
  Description of Artificial Sequence: Synthetic oligonucleotide
  Sense strand starting at position 2632 of SEQ ID NO: 1242063
gagucacuguuguuaccuu

SEQ ID NO: 1320897 - RNA, 19 nt, Artificial Sequence
  Description of Artificial Sequence: Synthetic oligonucleotide
  Antisense strand to SEQ ID NO: 1320896
aagguaacaacagugacuc

SEQ ID NO: 1320898 - RNA, 19 nt, Artificial Sequence
  Description of Artificial Sequence: Synthetic oligonucleotide
  Sense strand starting at position 2675 of SEQ ID NO: 1242063
cgcugacucaccuagggau

SEQ ID NO: 1320899 - RNA, 19 nt, Artificial Sequence
  Description of Artificial Sequence: Synthetic oligonucleotide
  Antisense strand to SEQ ID NO: 1320898
aucccuaggugagucagcg

SEQ ID NO: 1320900 - RNA, 19 nt, Artificial Sequence
  Description of Artificial Sequence: Synthetic oligonucleotide
  Sense strand starting at position 2682 of SEQ ID NO: 1242063
ucaccuagggauugagcaa

SEQ ID NO: 1320901 - RNA, 19 nt, Artificial Sequence
  Description of Artificial Sequence: Synthetic oligonucleotide
  Antisense strand to SEQ ID NO: 1320900
uugcucaaucccuagguga

SEQ ID NO: 1320902 - RNA, 19 nt, Artificial Sequence
  Description of Artificial Sequence: Synthetic oligonucleotide
  Sense strand starting at position 2808 of SEQ ID NO: 1242063
gagggagucccaggucaaa

SEQ ID NO: 1320903 - RNA, 19 nt, Artificial Sequence
  Description of Artificial Sequence: Synthetic oligonucleotide
  Antisense strand to SEQ ID NO: 1320902
uuugaccugggacucccuc

SEQ ID NO: 1320904 - RNA, 19 nt, Artificial Sequence
  Description of Artificial Sequence: Synthetic oligonucleotide
  Sense strand starting at position 2952 of SEQ ID NO: 1242063
ugaggaaccugugugcuua

SEQ ID NO: 1320905 - RNA, 19 nt, Artificial Sequence
  Description of Artificial Sequence: Synthetic oligonucleotide
  Antisense strand to SEQ ID NO: 1320904
uaagcacacagguuccuca

SEQ ID NO: 1320906 - RNA, 19 nt, Artificial Sequence
  Description of Artificial Sequence: Synthetic oligonucleotide
  Sense strand starting at position 2960 of SEQ ID NO: 1242063
cugugugcuuagcuggaaa

SEQ ID NO: 1320907 - RNA, 19 nt, Artificial Sequence
  Description of Artificial Sequence: Synthetic oligonucleotide
  Antisense strand to SEQ ID NO: 1320906
uuuccagcuaagcacacag

SEQ ID NO: 1320908 - RNA, 19 nt, Artificial Sequence
  Description of Artificial Sequence: Synthetic oligonucleotide
  Sense strand starting at position 2982 of SEQ ID NO: 1242063
ggccuuuaucuugaggaca

SEQ ID NO: 1320909 - RNA, 19 nt, Artificial Sequence
  Description of Artificial Sequence: Synthetic oligonucleotide
  Antisense strand to SEQ ID NO: 1320908
uguccucaagauaaaggcc

SEQ ID NO: 1320910 - RNA, 19 nt, Artificial Sequence
  Description of Artificial Sequence: Synthetic oligonucleotide
  Sense strand starting at position 3098 of SEQ ID NO: 1242063
acgcaugcucaggaacuua

SEQ ID NO: 1320911 - RNA, 19 nt, Artificial Sequence
  Description of Artificial Sequence: Synthetic oligonucleotide
  Antisense strand to SEQ ID NO: 1320910
uaaguuccugagcaugcgu

SEQ ID NO: 1320912 - RNA, 19 nt, Artificial Sequence
  Description of Artificial Sequence: Synthetic oligonucleotide
  Sense strand starting at position 3127 of SEQ ID NO: 1242063
gggacccugucuucuguua

SEQ ID NO: 1320913 - RNA, 19 nt, Artificial Sequence
  Description of Artificial Sequence: Synthetic oligonucleotide
  Antisense strand to SEQ ID NO: 1320912
uaacagaagacaggguccc

SEQ ID NO: 1320914 - RNA, 19 nt, Artificial Sequence
  Description of Artificial Sequence: Synthetic oligonucleotide
  Sense strand starting at position 3140 of SEQ ID NO: 1242063
cuguuagaguuaucuaugu

SEQ ID NO: 1320915 - RNA, 19 nt, Artificial Sequence
  Description of Artificial Sequence: Synthetic oligonucleotide
  Antisense strand to SEQ ID NO: 1320914
acauagauaacucuaacag

SEQ ID NO: 1320916 - RNA, 19 nt, Artificial Sequence
  Description of Artificial Sequence: Synthetic oligonucleotide
  Sense strand starting at position 3142 of SEQ ID NO: 1242063
guuagaguuaucuaugugu

SEQ ID NO: 1320917 - RNA, 19 nt, Artificial Sequence
  Description of Artificial Sequence: Synthetic oligonucleotide
  Antisense strand to SEQ ID NO: 1320916
acacauagauaacucuaac

SEQ ID NO: 1320918 - RNA, 19 nt, Artificial Sequence
  Description of Artificial Sequence: Synthetic oligonucleotide
  Sense strand starting at position 3144 of SEQ ID NO: 1242063
uagaguuaucuaugugugu

SEQ ID NO: 1320919 - RNA, 19 nt, Artificial Sequence
  Description of Artificial Sequence: Synthetic oligonucleotide
  Antisense strand to SEQ ID NO: 1320918
acacacauagauaacucua

SEQ ID NO: 1320920 - RNA, 19 nt, Artificial Sequence
  Description of Artificial Sequence: Synthetic oligonucleotide
  Sense strand starting at position 3323 of SEQ ID NO: 1242063
gguguauacaagugacuuu

SEQ ID NO: 1320921 - RNA, 19 nt, Artificial Sequence
  Description of Artificial Sequence: Synthetic oligonucleotide
  Antisense strand to SEQ ID NO: 1320920
aaagucacuuguauacacc

SEQ ID NO: 1320922 - RNA, 19 nt, Artificial Sequence
  Description of Artificial Sequence: Synthetic oligonucleotide
  Sense strand starting at position 3330 of SEQ ID NO: 1242063
acaagugacuuucccaaag

SEQ ID NO: 1320923 - RNA, 19 nt, Artificial Sequence
  Description of Artificial Sequence: Synthetic oligonucleotide
  Antisense strand to SEQ ID NO: 1320922
cuuugggaaagucacuugu

SEQ ID NO: 1320924 - RNA, 19 nt, Artificial Sequence
  Description of Artificial Sequence: Synthetic oligonucleotide
  Sense strand starting at position 3506 of SEQ ID NO: 1242063
cagagacauuagguuaauu

SEQ ID NO: 1320925 - RNA, 19 nt, Artificial Sequence
  Description of Artificial Sequence: Synthetic oligonucleotide
  Antisense strand to SEQ ID NO: 1320924
aauuaaccuaaugucucug

SEQ ID NO: 1320926 - RNA, 19 nt, Artificial Sequence
  Description of Artificial Sequence: Synthetic oligonucleotide
  Sense strand starting at position 3514 of SEQ ID NO: 1242063
uuagguuaauuggugaaca

SEQ ID NO: 1320927 - RNA, 19 nt, Artificial Sequence
  Description of Artificial Sequence: Synthetic oligonucleotide
  Antisense strand to SEQ ID NO: 1320926
uguucaccaauuaaccuaa

SEQ ID NO: 1320928 - RNA, 19 nt, Artificial Sequence
  Description of Artificial Sequence: Synthetic oligonucleotide
  Sense strand starting at position 3548 of SEQ ID NO: 1242063
cuagucuucuaacccaagu

SEQ ID NO: 1320929 - RNA, 19 nt, Artificial Sequence
  Description of Artificial Sequence: Synthetic oligonucleotide
  Antisense strand to SEQ ID NO: 1320928
acuuggguuagaagacuag

SEQ ID NO: 1320930 - RNA, 19 nt, Artificial Sequence
  Description of Artificial Sequence: Synthetic oligonucleotide
  Sense strand starting at position 3784 of SEQ ID NO: 1242063
gcuggaucuuguuuacauc

SEQ ID NO: 1320931 - RNA, 19 nt, Artificial Sequence
  Description of Artificial Sequence: Synthetic oligonucleotide
  Antisense strand to SEQ ID NO: 1320930
gauguaaacaagauccagc

SEQ ID NO: 1320932 - RNA, 19 nt, Artificial Sequence
  Description of Artificial Sequence: Synthetic oligonucleotide
  Sense strand starting at position 3815 of SEQ ID NO: 1242063
auaucuagagcagguaauu

SEQ ID NO: 1320933 - RNA, 19 nt, Artificial Sequence
  Description of Artificial Sequence: Synthetic oligonucleotide
  Antisense strand to SEQ ID NO: 1320932
aauuaccugcucuagauau

SEQ ID NO: 1320934 - RNA, 19 nt, Artificial Sequence
  Description of Artificial Sequence: Synthetic oligonucleotide
  Sense strand starting at position 3826 of SEQ ID NO: 1242063
agguaauugacguguggua

SEQ ID NO: 1320935 - RNA, 19 nt, Artificial Sequence
  Description of Artificial Sequence: Synthetic oligonucleotide
  Antisense strand to SEQ ID NO: 1320934
uaccacacgucaauuaccu

SEQ ID NO: 1320936 - RNA, 19 nt, Artificial Sequence
  Description of Artificial Sequence: Synthetic oligonucleotide
  Sense strand starting at position 3835 of SEQ ID NO: 1242063
acgugugguagugcaagua

SEQ ID NO: 1320937 - RNA, 19 nt, Artificial Sequence
  Description of Artificial Sequence: Synthetic oligonucleotide
  Antisense strand to SEQ ID NO: 1320936
uacuugcacuaccacacgu

SEQ ID NO: 1320938 - RNA, 19 nt, Artificial Sequence
  Description of Artificial Sequence: Synthetic oligonucleotide
  Sense strand starting at position 3869 of SEQ ID NO: 1242063
aagaaauguuauuacagag

SEQ ID NO: 1320939 - RNA, 19 nt, Artificial Sequence
  Description of Artificial Sequence: Synthetic oligonucleotide
  Antisense strand to SEQ ID NO: 1320938
cucuguaauaacauuucuu

SEQ ID NO: 1320940 - RNA, 19 nt, Artificial Sequence
  Description of Artificial Sequence: Synthetic oligonucleotide
  Sense strand starting at position 3898 of SEQ ID NO: 1242063
acucacucauggucaugaa

SEQ ID NO: 1320941 - RNA, 19 nt, Artificial Sequence
  Description of Artificial Sequence: Synthetic oligonucleotide
  Antisense strand to SEQ ID NO: 1320940
uucaugaccaugagugagu

SEQ ID NO: 1320942 - RNA, 19 nt, Artificial Sequence
  Description of Artificial Sequence: Synthetic oligonucleotide
  Sense strand starting at position 238 of SEQ ID NO: 1242064
cagguauucgccuuggcuu

SEQ ID NO: 1320943 - RNA, 19 nt, Artificial Sequence
  Description of Artificial Sequence: Synthetic oligonucleotide
  Antisense strand to SEQ ID NO: 1320942
aagccaaggcgaauaccug

SEQ ID NO: 1320944 - RNA, 19 nt, Artificial Sequence
  Description of Artificial Sequence: Synthetic oligonucleotide
  Sense strand starting at position 253 of SEQ ID NO: 1242064
gcuuguaagaggcaaacaa

SEQ ID NO: 1320945 - RNA, 19 nt, Artificial Sequence
  Description of Artificial Sequence: Synthetic oligonucleotide
  Antisense strand to SEQ ID NO: 1320944
uuguuugccucuuacaagc

SEQ ID NO: 1320946 - RNA, 19 nt, Artificial Sequence
  Description of Artificial Sequence: Synthetic oligonucleotide
  Sense strand starting at position 271 of SEQ ID NO: 1242064
aggucuauuuaguacagga

SEQ ID NO: 1320947 - RNA, 19 nt, Artificial Sequence
  Description of Artificial Sequence: Synthetic oligonucleotide
  Antisense strand to SEQ ID NO: 1320946
uccuguacuaaauagaccu

SEQ ID NO: 1320948 - RNA, 19 nt, Artificial Sequence
  Description of Artificial Sequence: Synthetic oligonucleotide
  Sense strand starting at position 355 of SEQ ID NO: 1242064
acagaaagagccugcuauu

SEQ ID NO: 1320949 - RNA, 19 nt, Artificial Sequence
  Description of Artificial Sequence: Synthetic oligonucleotide
  Antisense strand to SEQ ID NO: 1320948
aauagcaggcucuuucugu

SEQ ID NO: 1320950 - RNA, 19 nt, Artificial Sequence
  Description of Artificial Sequence: Synthetic oligonucleotide
  Sense strand starting at position 703 of SEQ ID NO: 1242064
gggccuauacccuaguuau

SEQ ID NO: 1320951 - RNA, 19 nt, Artificial Sequence
  Description of Artificial Sequence: Synthetic oligonucleotide
  Antisense strand to SEQ ID NO: 1320950
auaacuaggguauaggccc

SEQ ID NO: 1320952 - RNA, 19 nt, Artificial Sequence
  Description of Artificial Sequence: Synthetic oligonucleotide
  Sense strand starting at position 990 of SEQ ID NO: 1242064
gauggaauguaccuguuaa

SEQ ID NO: 1320953 - RNA, 19 nt, Artificial Sequence
  Description of Artificial Sequence: Synthetic oligonucleotide
  Antisense strand to SEQ ID NO: 1320952
uuaacagguacauuccauc

SEQ ID NO: 1320954 - RNA, 19 nt, Artificial Sequence
  Description of Artificial Sequence: Synthetic oligonucleotide
  Sense strand starting at position 1004 of SEQ ID NO: 1242064
guuaauacagugugucuua

SEQ ID NO: 1320955 - RNA, 19 nt, Artificial Sequence
  Description of Artificial Sequence: Synthetic oligonucleotide
  Antisense strand to SEQ ID NO: 1320954
uaagacacacuguauuaac

SEQ ID NO: 1320956 - RNA, 19 nt, Artificial Sequence
  Description of Artificial Sequence: Synthetic oligonucleotide
  Sense strand starting at position 1005 of SEQ ID NO: 1242064
uuaauacagugugucuuau

SEQ ID NO: 1320957 - RNA, 19 nt, Artificial Sequence
  Description of Artificial Sequence: Synthetic oligonucleotide
  Antisense strand to SEQ ID NO: 1320956
auaagacacacuguauuaa

SEQ ID NO: 1320958 - RNA, 19 nt, Artificial Sequence
  Description of Artificial Sequence: Synthetic oligonucleotide
  Sense strand starting at position 1053 of SEQ ID NO: 1242064
guauucuuccaguguaaag

SEQ ID NO: 1320959 - RNA, 19 nt, Artificial Sequence
  Description of Artificial Sequence: Synthetic oligonucleotide
  Antisense strand to SEQ ID NO: 1320958
cuuuacacuggaagaauac

SEQ ID NO: 1320960 - RNA, 19 nt, Artificial Sequence
  Description of Artificial Sequence: Synthetic oligonucleotide
  Sense strand starting at position 1055 of SEQ ID NO: 1242064
auucuuccaguguaaagua

SEQ ID NO: 1320961 - RNA, 19 nt, Artificial Sequence
  Description of Artificial Sequence: Synthetic oligonucleotide
  Antisense strand to SEQ ID NO: 1320960
uacuuuacacuggaagaau

SEQ ID NO: 1320962 - RNA, 19 nt, Artificial Sequence
  Description of Artificial Sequence: Synthetic oligonucleotide
  Sense strand starting at position 1067 of SEQ ID NO: 1242064
uaaaguagauuccuaggca

SEQ ID NO: 1320963 - RNA, 19 nt, Artificial Sequence
  Description of Artificial Sequence: Synthetic oligonucleotide
  Antisense strand to SEQ ID NO: 1320962
ugccuaggaaucuacuuua

SEQ ID NO: 1320964 - RNA, 19 nt, Artificial Sequence
  Description of Artificial Sequence: Synthetic oligonucleotide
  Sense strand starting at position 1070 of SEQ ID NO: 1242064
aguagauuccuaggcaguc

SEQ ID NO: 1320965 - RNA, 19 nt, Artificial Sequence
  Description of Artificial Sequence: Synthetic oligonucleotide
  Antisense strand to SEQ ID NO: 1320964
gacugccuaggaaucuacu

SEQ ID NO: 1320966 - RNA, 19 nt, Artificial Sequence
  Description of Artificial Sequence: Synthetic oligonucleotide
  Sense strand starting at position 1071 of SEQ ID NO: 1242064
guagauuccuaggcagucu

SEQ ID NO: 1320967 - RNA, 19 nt, Artificial Sequence
  Description of Artificial Sequence: Synthetic oligonucleotide
  Antisense strand to SEQ ID NO: 1320966
agacugccuaggaaucuac

SEQ ID NO: 1320968 - RNA, 19 nt, Artificial Sequence
  Description of Artificial Sequence: Synthetic oligonucleotide
  Sense strand starting at position 1140 of SEQ ID NO: 1242064
gcccaaaguggcugaaaga

SEQ ID NO: 1320969 - RNA, 19 nt, Artificial Sequence
  Description of Artificial Sequence: Synthetic oligonucleotide
  Antisense strand to SEQ ID NO: 1320968
ucuuucagccacuuugggc

SEQ ID NO: 1320970 - RNA, 19 nt, Artificial Sequence
  Description of Artificial Sequence: Synthetic oligonucleotide
  Sense strand starting at position 1224 of SEQ ID NO: 1242064
guuauaaacugagacuaac

SEQ ID NO: 1320971 - RNA, 19 nt, Artificial Sequence
  Description of Artificial Sequence: Synthetic oligonucleotide
  Antisense strand to SEQ ID NO: 1320970
guuagucucaguuuauaac

SEQ ID NO: 1320972 - RNA, 19 nt, Artificial Sequence
  Description of Artificial Sequence: Synthetic oligonucleotide
  Sense strand starting at position 1260 of SEQ ID NO: 1242064
uuacaaagaucagcaagua

SEQ ID NO: 1320973 - RNA, 19 nt, Artificial Sequence
  Description of Artificial Sequence: Synthetic oligonucleotide
  Antisense strand to SEQ ID NO: 1320972
uacuugcugaucuuuguaa

SEQ ID NO: 1320974 - RNA, 19 nt, Artificial Sequence
  Description of Artificial Sequence: Synthetic oligonucleotide
  Sense strand starting at position 1511 of SEQ ID NO: 1242064
gcaggucagcuggaaugau

SEQ ID NO: 1320975 - RNA, 19 nt, Artificial Sequence
  Description of Artificial Sequence: Synthetic oligonucleotide
  Antisense strand to SEQ ID NO: 1320974
aucauuccagcugaccugc

SEQ ID NO: 1320976 - RNA, 19 nt, Artificial Sequence
  Description of Artificial Sequence: Synthetic oligonucleotide
  Sense strand starting at position 1722 of SEQ ID NO: 1242064
cucaguaaauagccuaaga

SEQ ID NO: 1320977 - RNA, 19 nt, Artificial Sequence
  Description of Artificial Sequence: Synthetic oligonucleotide
  Antisense strand to SEQ ID NO: 1320976
ucuuaggcuauuuacugag

SEQ ID NO: 1320978 - RNA, 19 nt, Artificial Sequence
  Description of Artificial Sequence: Synthetic oligonucleotide
  Sense strand starting at position 1750 of SEQ ID NO: 1242064
gguuaugguuacuucugga

SEQ ID NO: 1320979 - RNA, 19 nt, Artificial Sequence
  Description of Artificial Sequence: Synthetic oligonucleotide
  Antisense strand to SEQ ID NO: 1320978
uccagaaguaaccauaacc

SEQ ID NO: 1320980 - RNA, 19 nt, Artificial Sequence
  Description of Artificial Sequence: Synthetic oligonucleotide
  Sense strand starting at position 1797 of SEQ ID NO: 1242064
cagcgauugccugaugaua

SEQ ID NO: 1320981 - RNA, 19 nt, Artificial Sequence
  Description of Artificial Sequence: Synthetic oligonucleotide
  Antisense strand to SEQ ID NO: 1320980
uaucaucaggcaaucgcug

SEQ ID NO: 1320982 - RNA, 19 nt, Artificial Sequence
  Description of Artificial Sequence: Synthetic oligonucleotide
  Sense strand starting at position 1876 of SEQ ID NO: 1242064
ucuccagguuucccggaaa

SEQ ID NO: 1320983 - RNA, 19 nt, Artificial Sequence
  Description of Artificial Sequence: Synthetic oligonucleotide
  Antisense strand to SEQ ID NO: 1320982
uuuccgggaaaccuggaga

SEQ ID NO: 1320984 - RNA, 19 nt, Artificial Sequence
  Description of Artificial Sequence: Synthetic oligonucleotide
  Sense strand starting at position 1902 of SEQ ID NO: 1242064
uccagugacuucucagaug

SEQ ID NO: 1320985 - RNA, 19 nt, Artificial Sequence
  Description of Artificial Sequence: Synthetic oligonucleotide
  Antisense strand to SEQ ID NO: 1320984
caucugagaagucacugga

SEQ ID NO: 1320986 - RNA, 19 nt, Artificial Sequence
  Description of Artificial Sequence: Synthetic oligonucleotide
  Sense strand starting at position 2953 of SEQ ID NO: 1242064
ugaauaauacaguaaccgu

SEQ ID NO: 1320987 - RNA, 19 nt, Artificial Sequence
  Description of Artificial Sequence: Synthetic oligonucleotide
  Antisense strand to SEQ ID NO: 1320986
acgguuacuguauuauuca

SEQ ID NO: 1320988 - RNA, 19 nt, Artificial Sequence
  Description of Artificial Sequence: Synthetic oligonucleotide
  Sense strand starting at position 3024 of SEQ ID NO: 1242064
ugcguuaccuaauuuaauc

SEQ ID NO: 1320989 - RNA, 19 nt, Artificial Sequence
  Description of Artificial Sequence: Synthetic oligonucleotide
  Antisense strand to SEQ ID NO: 1320988
gauuaaauuagguaacgca

SEQ ID NO: 1320990 - RNA, 19 nt, Artificial Sequence
  Description of Artificial Sequence: Synthetic oligonucleotide
  Sense strand starting at position 3035 of SEQ ID NO: 1242064
auuuaaucuuuaggagaga

SEQ ID NO: 1320991 - RNA, 19 nt, Artificial Sequence
  Description of Artificial Sequence: Synthetic oligonucleotide
  Antisense strand to SEQ ID NO: 1320990
ucucuccuaaagauuaaau

SEQ ID NO: 1320992 - RNA, 19 nt, Artificial Sequence
  Description of Artificial Sequence: Synthetic oligonucleotide
  Sense strand starting at position 3085 of SEQ ID NO: 1242064
uuugguaacugcuuaagac

SEQ ID NO: 1320993 - RNA, 19 nt, Artificial Sequence
  Description of Artificial Sequence: Synthetic oligonucleotide
  Antisense strand to SEQ ID NO: 1320992
gucuuaagcaguuaccaaa

SEQ ID NO: 1320994 - RNA, 19 nt, Artificial Sequence
  Description of Artificial Sequence: Synthetic oligonucleotide
  Sense strand starting at position 3086 of SEQ ID NO: 1242064
uugguaacugcuuaagaca

SEQ ID NO: 1320995 - RNA, 19 nt, Artificial Sequence
  Description of Artificial Sequence: Synthetic oligonucleotide
  Antisense strand to SEQ ID NO: 1320994
ugucuuaagcaguuaccaa

SEQ ID NO: 1320996 - RNA, 19 nt, Artificial Sequence
  Description of Artificial Sequence: Synthetic oligonucleotide
  Sense strand starting at position 3100 of SEQ ID NO: 1242064
agacaacacucugaguaag

SEQ ID NO: 1320997 - RNA, 19 nt, Artificial Sequence
  Description of Artificial Sequence: Synthetic oligonucleotide
  Antisense strand to SEQ ID NO: 1320996
cuuacucagaguguugucu

SEQ ID NO: 1320998 - RNA, 19 nt, Artificial Sequence
  Description of Artificial Sequence: Synthetic oligonucleotide
  Sense strand starting at position 3102 of SEQ ID NO: 1242064
acaacacucugaguaagua

SEQ ID NO: 1320999 - RNA, 19 nt, Artificial Sequence
  Description of Artificial Sequence: Synthetic oligonucleotide
  Antisense strand to SEQ ID NO: 1320998
uacuuacucagaguguugu

SEQ ID NO: 1321000 - RNA, 19 nt, Artificial Sequence
  Description of Artificial Sequence: Synthetic oligonucleotide
  Sense strand starting at position 3106 of SEQ ID NO: 1242064
cacucugaguaaguagauu

SEQ ID NO: 1321001 - RNA, 19 nt, Artificial Sequence
  Description of Artificial Sequence: Synthetic oligonucleotide
  Antisense strand to SEQ ID NO: 1321000
aaucuacuuacucagagug

SEQ ID NO: 1321002 - RNA, 19 nt, Artificial Sequence
  Description of Artificial Sequence: Synthetic oligonucleotide
  Sense strand starting at position 3181 of SEQ ID NO: 1242064
aagauaagcucaugggaag

SEQ ID NO: 1321003 - RNA, 19 nt, Artificial Sequence
  Description of Artificial Sequence: Synthetic oligonucleotide
  Antisense strand to SEQ ID NO: 1321002
cuucccaugagcuuaucuu

SEQ ID NO: 1321004 - RNA, 19 nt, Artificial Sequence
  Description of Artificial Sequence: Synthetic oligonucleotide
  Sense strand starting at position 3216 of SEQ ID NO: 1242064
aggacaguucagugugguu

SEQ ID NO: 1321005 - RNA, 19 nt, Artificial Sequence
  Description of Artificial Sequence: Synthetic oligonucleotide
  Antisense strand to SEQ ID NO: 1321004
aaccacacugaacuguccu

SEQ ID NO: 1321006 - RNA, 19 nt, Artificial Sequence
  Description of Artificial Sequence: Synthetic oligonucleotide
  Sense strand starting at position 3221 of SEQ ID NO: 1242064
aguucagugugguugcuaa

SEQ ID NO: 1321007 - RNA, 19 nt, Artificial Sequence
  Description of Artificial Sequence: Synthetic oligonucleotide
  Antisense strand to SEQ ID NO: 1321006
uuagcaaccacacugaacu

SEQ ID NO: 1321008 - RNA, 19 nt, Artificial Sequence
  Description of Artificial Sequence: Synthetic oligonucleotide
  Sense strand starting at position 3256 of SEQ ID NO: 1242064
guaagagaucccuggagug

SEQ ID NO: 1321009 - RNA, 19 nt, Artificial Sequence
  Description of Artificial Sequence: Synthetic oligonucleotide
  Antisense strand to SEQ ID NO: 1321008
cacuccagggaucucuuac

SEQ ID NO: 1321010 - RNA, 19 nt, Artificial Sequence
  Description of Artificial Sequence: Synthetic oligonucleotide
  Sense strand starting at position 3686 of SEQ ID NO: 1242064
ucucuagaaucagugccaa

SEQ ID NO: 1321011 - RNA, 19 nt, Artificial Sequence
  Description of Artificial Sequence: Synthetic oligonucleotide
  Antisense strand to SEQ ID NO: 1321010
uuggcacugauucuagaga

SEQ ID NO: 1321012 - RNA, 19 nt, Artificial Sequence
  Description of Artificial Sequence: Synthetic oligonucleotide
  Sense strand starting at position 3722 of SEQ ID NO: 1242064
aguaaauacucauugcaag

SEQ ID NO: 1321013 - RNA, 19 nt, Artificial Sequence
  Description of Artificial Sequence: Synthetic oligonucleotide
  Antisense strand to SEQ ID NO: 1321012
cuugcaaugaguauuuacu

SEQ ID NO: 1321014 - RNA, 19 nt, Artificial Sequence
  Description of Artificial Sequence: Synthetic oligonucleotide
  Sense strand starting at position 3723 of SEQ ID NO: 1242064
guaaauacucauugcaaga

SEQ ID NO: 1321015 - RNA, 19 nt, Artificial Sequence
  Description of Artificial Sequence: Synthetic oligonucleotide
  Antisense strand to SEQ ID NO: 1321014
ucuugcaaugaguauuuac

SEQ ID NO: 1321016 - RNA, 19 nt, Artificial Sequence
  Description of Artificial Sequence: Synthetic oligonucleotide
  Sense strand starting at position 3741 of SEQ ID NO: 1242064
aauagacuccuaggcugua

SEQ ID NO: 1321017 - RNA, 19 nt, Artificial Sequence
  Description of Artificial Sequence: Synthetic oligonucleotide
  Antisense strand to SEQ ID NO: 1321016
uacagccuaggagucuauu

SEQ ID NO: 1321018 - RNA, 19 nt, Artificial Sequence
  Description of Artificial Sequence: Synthetic oligonucleotide
  Sense strand starting at position 3792 of SEQ ID NO: 1242064
gccugaugacucggaaguu

SEQ ID NO: 1321019 - RNA, 19 nt, Artificial Sequence
  Description of Artificial Sequence: Synthetic oligonucleotide
  Antisense strand to SEQ ID NO: 1321018
aacuuccgagucaucaggc

SEQ ID NO: 1321020 - RNA, 19 nt, Artificial Sequence
  Description of Artificial Sequence: Synthetic oligonucleotide
  Sense strand starting at position 3830 of SEQ ID NO: 1242064
uccucaccugguugacaau

SEQ ID NO: 1321021 - RNA, 19 nt, Artificial Sequence
  Description of Artificial Sequence: Synthetic oligonucleotide
  Antisense strand to SEQ ID NO: 1321020
auugucaaccaggugagga

SEQ ID NO: 1321022 - RNA, 19 nt, Artificial Sequence
  Description of Artificial Sequence: Synthetic oligonucleotide
  Sense strand starting at position 103 of SEQ ID NO: 1242065
gaaagacagucuucucagu

SEQ ID NO: 1321023 - RNA, 19 nt, Artificial Sequence
  Description of Artificial Sequence: Synthetic oligonucleotide
  Antisense strand to SEQ ID NO: 1321022
acugagaagacugucuuuc

SEQ ID NO: 1321024 - RNA, 19 nt, Artificial Sequence
  Description of Artificial Sequence: Synthetic oligonucleotide
  Sense strand starting at position 105 of SEQ ID NO: 1242065
aagacagucuucucaguug

SEQ ID NO: 1321025 - RNA, 19 nt, Artificial Sequence
  Description of Artificial Sequence: Synthetic oligonucleotide
  Antisense strand to SEQ ID NO: 1321024
caacugagaagacugucuu

SEQ ID NO: 1321026 - RNA, 19 nt, Artificial Sequence
  Description of Artificial Sequence: Synthetic oligonucleotide
  Sense strand starting at position 289 of SEQ ID NO: 1242065
gccuucugagcuuggauuu

SEQ ID NO: 1321027 - RNA, 19 nt, Artificial Sequence
  Description of Artificial Sequence: Synthetic oligonucleotide
  Antisense strand to SEQ ID NO: 1321026
aaauccaagcucagaaggc

SEQ ID NO: 1321028 - RNA, 19 nt, Artificial Sequence
  Description of Artificial Sequence: Synthetic oligonucleotide
  Sense strand starting at position 336 of SEQ ID NO: 1242065
ggagucagcuccuuaaccu

SEQ ID NO: 1321029 - RNA, 19 nt, Artificial Sequence
  Description of Artificial Sequence: Synthetic oligonucleotide
  Antisense strand to SEQ ID NO: 1321028
agguuaaggagcugacucc

SEQ ID NO: 1321030 - RNA, 19 nt, Artificial Sequence
  Description of Artificial Sequence: Synthetic oligonucleotide
  Sense strand starting at position 625 of SEQ ID NO: 1242065
cccaguaacguauguggga

SEQ ID NO: 1321031 - RNA, 19 nt, Artificial Sequence
  Description of Artificial Sequence: Synthetic oligonucleotide
  Antisense strand to SEQ ID NO: 1321030
ucccacauacguuacuggg

SEQ ID NO: 1321032 - RNA, 19 nt, Artificial Sequence
  Description of Artificial Sequence: Synthetic oligonucleotide
  Sense strand starting at position 691 of SEQ ID NO: 1242065
ggguguugcacacaaacau

SEQ ID NO: 1321033 - RNA, 19 nt, Artificial Sequence
  Description of Artificial Sequence: Synthetic oligonucleotide
  Antisense strand to SEQ ID NO: 1321032
auguuugugugcaacaccc

SEQ ID NO: 1321034 - RNA, 19 nt, Artificial Sequence
  Description of Artificial Sequence: Synthetic oligonucleotide
  Sense strand starting at position 973 of SEQ ID NO: 1242065
gcugguaggcugggaauau

SEQ ID NO: 1321035 - RNA, 19 nt, Artificial Sequence
  Description of Artificial Sequence: Synthetic oligonucleotide
  Antisense strand to SEQ ID NO: 1321034
auauucccagccuaccagc

SEQ ID NO: 1321036 - RNA, 19 nt, Artificial Sequence
  Description of Artificial Sequence: Synthetic oligonucleotide
  Sense strand starting at position 1180 of SEQ ID NO: 1242065
guaaauaacuacuccaugu

SEQ ID NO: 1321037 - RNA, 19 nt, Artificial Sequence
  Description of Artificial Sequence: Synthetic oligonucleotide
  Antisense strand to SEQ ID NO: 1321036
acauggaguaguuauuuac

SEQ ID NO: 1321038 - RNA, 19 nt, Artificial Sequence
  Description of Artificial Sequence: Synthetic oligonucleotide
  Sense strand starting at position 1184 of SEQ ID NO: 1242065
auaacuacuccauguguau

SEQ ID NO: 1321039 - RNA, 19 nt, Artificial Sequence
  Description of Artificial Sequence: Synthetic oligonucleotide
  Antisense strand to SEQ ID NO: 1321038
auacacauggaguaguuau

SEQ ID NO: 1321040 - RNA, 19 nt, Artificial Sequence
  Description of Artificial Sequence: Synthetic oligonucleotide
  Sense strand starting at position 1187 of SEQ ID NO: 1242065
acuacuccauguguauauu

SEQ ID NO: 1321041 - RNA, 19 nt, Artificial Sequence
  Description of Artificial Sequence: Synthetic oligonucleotide
  Antisense strand to SEQ ID NO: 1321040
aauauacacauggaguagu

SEQ ID NO: 1321042 - RNA, 19 nt, Artificial Sequence
  Description of Artificial Sequence: Synthetic oligonucleotide
  Sense strand starting at position 1193 of SEQ ID NO: 1242065
ccauguguauauuuaguuu

SEQ ID NO: 1321043 - RNA, 19 nt, Artificial Sequence
  Description of Artificial Sequence: Synthetic oligonucleotide
  Antisense strand to SEQ ID NO: 1321042
aaacuaaauauacacaugg

SEQ ID NO: 1321044 - RNA, 19 nt, Artificial Sequence
  Description of Artificial Sequence: Synthetic oligonucleotide
  Sense strand starting at position 1247 of SEQ ID NO: 1242065
uaagcagauggcuaugaau

SEQ ID NO: 1321045 - RNA, 19 nt, Artificial Sequence
  Description of Artificial Sequence: Synthetic oligonucleotide
  Antisense strand to SEQ ID NO: 1321044
auucauagccaucugcuua

SEQ ID NO: 1321046 - RNA, 19 nt, Artificial Sequence
  Description of Artificial Sequence: Synthetic oligonucleotide
  Sense strand starting at position 1249 of SEQ ID NO: 1242065
agcagauggcuaugaauau

SEQ ID NO: 1321047 - RNA, 19 nt, Artificial Sequence
  Description of Artificial Sequence: Synthetic oligonucleotide
  Antisense strand to SEQ ID NO: 1321046
auauucauagccaucugcu

SEQ ID NO: 1321048 - RNA, 19 nt, Artificial Sequence
  Description of Artificial Sequence: Synthetic oligonucleotide
  Sense strand starting at position 1294 of SEQ ID NO: 1242065
uauauaaagcuagguagau

SEQ ID NO: 1321049 - RNA, 19 nt, Artificial Sequence
  Description of Artificial Sequence: Synthetic oligonucleotide
  Antisense strand to SEQ ID NO: 1321048
aucuaccuagcuuuauaua

SEQ ID NO: 1321050 - RNA, 19 nt, Artificial Sequence
  Description of Artificial Sequence: Synthetic oligonucleotide
  Sense strand starting at position 1295 of SEQ ID NO: 1242065
auauaaagcuagguagaua

SEQ ID NO: 1321051 - RNA, 19 nt, Artificial Sequence
  Description of Artificial Sequence: Synthetic oligonucleotide
  Antisense strand to SEQ ID NO: 1321050
uaucuaccuagcuuuauau

SEQ ID NO: 1321052 - RNA, 19 nt, Artificial Sequence
  Description of Artificial Sequence: Synthetic oligonucleotide
  Sense strand starting at position 1370 of SEQ ID NO: 1242065
aguuuacaccgccaaauaa

SEQ ID NO: 1321053 - RNA, 19 nt, Artificial Sequence
  Description of Artificial Sequence: Synthetic oligonucleotide
  Antisense strand to SEQ ID NO: 1321052
uuauuuggcgguguaaacu

SEQ ID NO: 1321054 - RNA, 19 nt, Artificial Sequence
  Description of Artificial Sequence: Synthetic oligonucleotide
  Sense strand starting at position 1380 of SEQ ID NO: 1242065
gccaaauaaguuugguuua

SEQ ID NO: 1321055 - RNA, 19 nt, Artificial Sequence
  Description of Artificial Sequence: Synthetic oligonucleotide
  Antisense strand to SEQ ID NO: 1321054
uaaaccaaacuuauuuggc

SEQ ID NO: 1321056 - RNA, 19 nt, Artificial Sequence
  Description of Artificial Sequence: Synthetic oligonucleotide
  Sense strand starting at position 1382 of SEQ ID NO: 1242065
caaauaaguuugguuuagu

SEQ ID NO: 1321057 - RNA, 19 nt, Artificial Sequence
  Description of Artificial Sequence: Synthetic oligonucleotide
  Antisense strand to SEQ ID NO: 1321056
acuaaaccaaacuuauuug

SEQ ID NO: 1321058 - RNA, 19 nt, Artificial Sequence
  Description of Artificial Sequence: Synthetic oligonucleotide
  Sense strand starting at position 1484 of SEQ ID NO: 1242065
gccuucuuuguagauucua

SEQ ID NO: 1321059 - RNA, 19 nt, Artificial Sequence
  Description of Artificial Sequence: Synthetic oligonucleotide
  Antisense strand to SEQ ID NO: 1321058
uagaaucuacaaagaaggc

SEQ ID NO: 1321060 - RNA, 19 nt, Artificial Sequence
  Description of Artificial Sequence: Synthetic oligonucleotide
  Sense strand starting at position 1518 of SEQ ID NO: 1242065
ggagauuggcucugacucu

SEQ ID NO: 1321061 - RNA, 19 nt, Artificial Sequence
  Description of Artificial Sequence: Synthetic oligonucleotide
  Antisense strand to SEQ ID NO: 1321060
agagucagagccaaucucc

SEQ ID NO: 1321062 - RNA, 19 nt, Artificial Sequence
  Description of Artificial Sequence: Synthetic oligonucleotide
  Sense strand starting at position 1759 of SEQ ID NO: 1242065
agacucaguccagguguga

SEQ ID NO: 1321063 - RNA, 19 nt, Artificial Sequence
  Description of Artificial Sequence: Synthetic oligonucleotide
  Antisense strand to SEQ ID NO: 1321062
ucacaccuggacugagucu

SEQ ID NO: 1321064 - RNA, 19 nt, Artificial Sequence
  Description of Artificial Sequence: Synthetic oligonucleotide
  Sense strand starting at position 1874 of SEQ ID NO: 1242065
cuagcagccucuccaagau

SEQ ID NO: 1321065 - RNA, 19 nt, Artificial Sequence
  Description of Artificial Sequence: Synthetic oligonucleotide
  Antisense strand to SEQ ID NO: 1321064
aucuuggagaggcugcuag

SEQ ID NO: 1321066 - RNA, 19 nt, Artificial Sequence
  Description of Artificial Sequence: Synthetic oligonucleotide
  Sense strand starting at position 2714 of SEQ ID NO: 1242065
gggagugaguagguaucuu

SEQ ID NO: 1321067 - RNA, 19 nt, Artificial Sequence
  Description of Artificial Sequence: Synthetic oligonucleotide
  Antisense strand to SEQ ID NO: 1321066
aagauaccuacucacuccc

SEQ ID NO: 1321068 - RNA, 19 nt, Artificial Sequence
  Description of Artificial Sequence: Synthetic oligonucleotide
  Sense strand starting at position 2920 of SEQ ID NO: 1242065
ccgacagugaagugagaaa

SEQ ID NO: 1321069 - RNA, 19 nt, Artificial Sequence
  Description of Artificial Sequence: Synthetic oligonucleotide
  Antisense strand to SEQ ID NO: 1321068
uuucucacuucacugucgg

SEQ ID NO: 1321070 - RNA, 19 nt, Artificial Sequence
  Description of Artificial Sequence: Synthetic oligonucleotide
  Sense strand starting at position 3155 of SEQ ID NO: 1242065
guacucgucagguaaacug

SEQ ID NO: 1321071 - RNA, 19 nt, Artificial Sequence
  Description of Artificial Sequence: Synthetic oligonucleotide
  Antisense strand to SEQ ID NO: 1321070
caguuuaccugacgaguac

SEQ ID NO: 1321072 - RNA, 19 nt, Artificial Sequence
  Description of Artificial Sequence: Synthetic oligonucleotide
  Sense strand starting at position 3163 of SEQ ID NO: 1242065
cagguaaacugugauuuaa

SEQ ID NO: 1321073 - RNA, 19 nt, Artificial Sequence
  Description of Artificial Sequence: Synthetic oligonucleotide
  Antisense strand to SEQ ID NO: 1321072
uuaaaucacaguuuaccug

SEQ ID NO: 1321074 - RNA, 19 nt, Artificial Sequence
  Description of Artificial Sequence: Synthetic oligonucleotide
  Sense strand starting at position 3317 of SEQ ID NO: 1242065
gucaguucugucuagagca

SEQ ID NO: 1321075 - RNA, 19 nt, Artificial Sequence
  Description of Artificial Sequence: Synthetic oligonucleotide
  Antisense strand to SEQ ID NO: 1321074
ugcucuagacagaacugac

SEQ ID NO: 1321076 - RNA, 19 nt, Artificial Sequence
  Description of Artificial Sequence: Synthetic oligonucleotide
  Sense strand starting at position 3337 of SEQ ID NO: 1242065
cuacuuaauugguugcuga

SEQ ID NO: 1321077 - RNA, 19 nt, Artificial Sequence
  Description of Artificial Sequence: Synthetic oligonucleotide
  Antisense strand to SEQ ID NO: 1321076
ucagcaaccaauuaaguag

SEQ ID NO: 1321078 - RNA, 19 nt, Artificial Sequence
  Description of Artificial Sequence: Synthetic oligonucleotide
  Sense strand starting at position 3338 of SEQ ID NO: 1242065
uacuuaauugguugcugaa

SEQ ID NO: 1321079 - RNA, 19 nt, Artificial Sequence
  Description of Artificial Sequence: Synthetic oligonucleotide
  Antisense strand to SEQ ID NO: 1321078
uucagcaaccaauuaagua

SEQ ID NO: 1321080 - RNA, 19 nt, Artificial Sequence
  Description of Artificial Sequence: Synthetic oligonucleotide
  Sense strand starting at position 3428 of SEQ ID NO: 1242065
guuugauguaaauguacca

SEQ ID NO: 1321081 - RNA, 19 nt, Artificial Sequence
  Description of Artificial Sequence: Synthetic oligonucleotide
  Antisense strand to SEQ ID NO: 1321080
ugguacauuuacaucaaac

SEQ ID NO: 1321082 - RNA, 19 nt, Artificial Sequence
  Description of Artificial Sequence: Synthetic oligonucleotide
  Sense strand starting at position 3455 of SEQ ID NO: 1242065
augggaaaguaauugucau

SEQ ID NO: 1321083 - RNA, 19 nt, Artificial Sequence
  Description of Artificial Sequence: Synthetic oligonucleotide
  Antisense strand to SEQ ID NO: 1321082
augacaauuacuuucccau

SEQ ID NO: 1321084 - RNA, 19 nt, Artificial Sequence
  Description of Artificial Sequence: Synthetic oligonucleotide
  Sense strand starting at position 3456 of SEQ ID NO: 1242065
ugggaaaguaauugucauc

SEQ ID NO: 1321085 - RNA, 19 nt, Artificial Sequence
  Description of Artificial Sequence: Synthetic oligonucleotide
  Antisense strand to SEQ ID NO: 1321084
gaugacaauuacuuuccca

SEQ ID NO: 1321086 - RNA, 19 nt, Artificial Sequence
  Description of Artificial Sequence: Synthetic oligonucleotide
  Sense strand starting at position 3492 of SEQ ID NO: 1242065
uugaaaggguugcuaacuu

SEQ ID NO: 1321087 - RNA, 19 nt, Artificial Sequence
  Description of Artificial Sequence: Synthetic oligonucleotide
  Antisense strand to SEQ ID NO: 1321086
aaguuagcaacccuuucaa

SEQ ID NO: 1321088 - RNA, 19 nt, Artificial Sequence
  Description of Artificial Sequence: Synthetic oligonucleotide
  Sense strand starting at position 3527 of SEQ ID NO: 1242065
gggaccuagccuuaauuau

SEQ ID NO: 1321089 - RNA, 19 nt, Artificial Sequence
  Description of Artificial Sequence: Synthetic oligonucleotide
  Antisense strand to SEQ ID NO: 1321088
auaauuaaggcuagguccc

SEQ ID NO: 1321090 - RNA, 19 nt, Artificial Sequence
  Description of Artificial Sequence: Synthetic oligonucleotide
  Sense strand starting at position 3551 of SEQ ID NO: 1242065
gggaucauagcacauaugu

SEQ ID NO: 1321091 - RNA, 19 nt, Artificial Sequence
  Description of Artificial Sequence: Synthetic oligonucleotide
  Antisense strand to SEQ ID NO: 1321090
acauaugugcuaugauccc

SEQ ID NO: 1321092 - RNA, 19 nt, Artificial Sequence
  Description of Artificial Sequence: Synthetic oligonucleotide
  Sense strand starting at position 3559 of SEQ ID NO: 1242065
agcacauauguauauuaca

SEQ ID NO: 1321093 - RNA, 19 nt, Artificial Sequence
  Description of Artificial Sequence: Synthetic oligonucleotide
  Antisense strand to SEQ ID NO: 1321092
uguaauauacauaugugcu

SEQ ID NO: 1321094 - RNA, 19 nt, Artificial Sequence
  Description of Artificial Sequence: Synthetic oligonucleotide
  Sense strand starting at position 3849 of SEQ ID NO: 1242065
gugauuuauuaguuuccuu

SEQ ID NO: 1321095 - RNA, 19 nt, Artificial Sequence
  Description of Artificial Sequence: Synthetic oligonucleotide
  Antisense strand to SEQ ID NO: 1321094
aaggaaacuaauaaaucac

SEQ ID NO: 1321096 - RNA, 19 nt, Artificial Sequence
  Description of Artificial Sequence: Synthetic oligonucleotide
  Sense strand starting at position 3853 of SEQ ID NO: 1242065
uuuauuaguuuccuucuga

SEQ ID NO: 1321097 - RNA, 19 nt, Artificial Sequence
  Description of Artificial Sequence: Synthetic oligonucleotide
  Antisense strand to SEQ ID NO: 1321096
ucagaaggaaacuaauaaa

SEQ ID NO: 1321098 - RNA, 19 nt, Artificial Sequence
  Description of Artificial Sequence: Synthetic oligonucleotide
  Sense strand starting at position 3897 of SEQ ID NO: 1242065
acgaauggauacccuauua

SEQ ID NO: 1321099 - RNA, 19 nt, Artificial Sequence
  Description of Artificial Sequence: Synthetic oligonucleotide
  Antisense strand to SEQ ID NO: 1321098
uaauaggguauccauucgu

SEQ ID NO: 1321100 - RNA, 19 nt, Artificial Sequence
  Description of Artificial Sequence: Synthetic oligonucleotide
  Sense strand starting at position 3921 of SEQ ID NO: 1242065
uuagcuuccagauggaaug

SEQ ID NO: 1321101 - RNA, 19 nt, Artificial Sequence
  Description of Artificial Sequence: Synthetic oligonucleotide
  Antisense strand to SEQ ID NO: 1321100
cauuccaucuggaagcuaa

SEQ ID NO: 1321102 - RNA, 19 nt, Artificial Sequence
  Description of Artificial Sequence: Synthetic oligonucleotide
  Sense strand starting at position 133 of SEQ ID NO: 1242066
uuugcuuugguauacucaa

SEQ ID NO: 1321103 - RNA, 19 nt, Artificial Sequence
  Description of Artificial Sequence: Synthetic oligonucleotide
  Antisense strand to SEQ ID NO: 1321102
uugaguauaccaaagcaaa

SEQ ID NO: 1321104 - RNA, 19 nt, Artificial Sequence
  Description of Artificial Sequence: Synthetic oligonucleotide
  Sense strand starting at position 231 of SEQ ID NO: 1242066
uauacaggccucugugaua

SEQ ID NO: 1321105 - RNA, 19 nt, Artificial Sequence
  Description of Artificial Sequence: Synthetic oligonucleotide
  Antisense strand to SEQ ID NO: 1321104
uaucacagaggccuguaua

SEQ ID NO: 1321106 - RNA, 19 nt, Artificial Sequence
  Description of Artificial Sequence: Synthetic oligonucleotide
  Sense strand starting at position 238 of SEQ ID NO: 1242066
gccucugugauagaguaac

SEQ ID NO: 1321107 - RNA, 19 nt, Artificial Sequence
  Description of Artificial Sequence: Synthetic oligonucleotide
  Antisense strand to SEQ ID NO: 1321106
guuacucuaucacagaggc

SEQ ID NO: 1321108 - RNA, 19 nt, Artificial Sequence
  Description of Artificial Sequence: Synthetic oligonucleotide
  Sense strand starting at position 389 of SEQ ID NO: 1242066
uguaauauccaaggcuaaa

SEQ ID NO: 1321109 - RNA, 19 nt, Artificial Sequence
  Description of Artificial Sequence: Synthetic oligonucleotide
  Antisense strand to SEQ ID NO: 1321108
uuuagccuuggauauuaca

SEQ ID NO: 1321110 - RNA, 19 nt, Artificial Sequence
  Description of Artificial Sequence: Synthetic oligonucleotide
  Sense strand starting at position 426 of SEQ ID NO: 1242066
ugaaacuguuaagcagaau

SEQ ID NO: 1321111 - RNA, 19 nt, Artificial Sequence
  Description of Artificial Sequence: Synthetic oligonucleotide
  Antisense strand to SEQ ID NO: 1321110
auucugcuuaacaguuuca

SEQ ID NO: 1321112 - RNA, 19 nt, Artificial Sequence
  Description of Artificial Sequence: Synthetic oligonucleotide
  Sense strand starting at position 538 of SEQ ID NO: 1242066
gaggcugaauuugacguua

SEQ ID NO: 1321113 - RNA, 19 nt, Artificial Sequence
  Description of Artificial Sequence: Synthetic oligonucleotide
  Antisense strand to SEQ ID NO: 1321112
uaacgucaaauucagccuc

SEQ ID NO: 1321114 - RNA, 19 nt, Artificial Sequence
  Description of Artificial Sequence: Synthetic oligonucleotide
  Sense strand starting at position 621 of SEQ ID NO: 1242066
auccgacucugccuaacau

SEQ ID NO: 1321115 - RNA, 19 nt, Artificial Sequence
  Description of Artificial Sequence: Synthetic oligonucleotide
  Antisense strand to SEQ ID NO: 1321114
auguuaggcagagucggau

SEQ ID NO: 1321116 - RNA, 19 nt, Artificial Sequence
  Description of Artificial Sequence: Synthetic oligonucleotide
  Sense strand starting at position 622 of SEQ ID NO: 1242066
uccgacucugccuaacauu

SEQ ID NO: 1321117 - RNA, 19 nt, Artificial Sequence
  Description of Artificial Sequence: Synthetic oligonucleotide
  Antisense strand to SEQ ID NO: 1321116
aauguuaggcagagucgga

SEQ ID NO: 1321118 - RNA, 19 nt, Artificial Sequence
  Description of Artificial Sequence: Synthetic oligonucleotide
  Sense strand starting at position 958 of SEQ ID NO: 1242066
ccaacuaagcauugaguaa

SEQ ID NO: 1321119 - RNA, 19 nt, Artificial Sequence
  Description of Artificial Sequence: Synthetic oligonucleotide
  Antisense strand to SEQ ID NO: 1321118
uuacucaaugcuuaguugg

SEQ ID NO: 1321120 - RNA, 19 nt, Artificial Sequence
  Description of Artificial Sequence: Synthetic oligonucleotide
  Sense strand starting at position 962 of SEQ ID NO: 1242066
cuaagcauugaguaaaucu

SEQ ID NO: 1321121 - RNA, 19 nt, Artificial Sequence
  Description of Artificial Sequence: Synthetic oligonucleotide
  Antisense strand to SEQ ID NO: 1321120
agauuuacucaaugcuuag

SEQ ID NO: 1321122 - RNA, 19 nt, Artificial Sequence
  Description of Artificial Sequence: Synthetic oligonucleotide
  Sense strand starting at position 971 of SEQ ID NO: 1242066
gaguaaaucucauccagag

SEQ ID NO: 1321123 - RNA, 19 nt, Artificial Sequence
  Description of Artificial Sequence: Synthetic oligonucleotide
  Antisense strand to SEQ ID NO: 1321122
cucuggaugagauuuacuc

SEQ ID NO: 1321124 - RNA, 19 nt, Artificial Sequence
  Description of Artificial Sequence: Synthetic oligonucleotide
  Sense strand starting at position 1423 of SEQ ID NO: 1242066
aagguuuacaccgguguaa

SEQ ID NO: 1321125 - RNA, 19 nt, Artificial Sequence
  Description of Artificial Sequence: Synthetic oligonucleotide
  Antisense strand to SEQ ID NO: 1321124
uuacaccgguguaaaccuu

SEQ ID NO: 1321126 - RNA, 19 nt, Artificial Sequence
  Description of Artificial Sequence: Synthetic oligonucleotide
  Sense strand starting at position 1425 of SEQ ID NO: 1242066
gguuuacaccgguguaaac

SEQ ID NO: 1321127 - RNA, 19 nt, Artificial Sequence
  Description of Artificial Sequence: Synthetic oligonucleotide
  Antisense strand to SEQ ID NO: 1321126
guuuacaccgguguaaacc

SEQ ID NO: 1321128 - RNA, 19 nt, Artificial Sequence
  Description of Artificial Sequence: Synthetic oligonucleotide
  Sense strand starting at position 1434 of SEQ ID NO: 1242066
cgguguaaaccuugcuaaa

SEQ ID NO: 1321129 - RNA, 19 nt, Artificial Sequence
  Description of Artificial Sequence: Synthetic oligonucleotide
  Antisense strand to SEQ ID NO: 1321128
uuuagcaagguuuacaccg

SEQ ID NO: 1321130 - RNA, 19 nt, Artificial Sequence
  Description of Artificial Sequence: Synthetic oligonucleotide
  Sense strand starting at position 1436 of SEQ ID NO: 1242066
guguaaaccuugcuaaacu

SEQ ID NO: 1321131 - RNA, 19 nt, Artificial Sequence
  Description of Artificial Sequence: Synthetic oligonucleotide
  Antisense strand to SEQ ID NO: 1321130
aguuuagcaagguuuacac

SEQ ID NO: 1321132 - RNA, 19 nt, Artificial Sequence
  Description of Artificial Sequence: Synthetic oligonucleotide
  Sense strand starting at position 1533 of SEQ ID NO: 1242066
agcucaagacccugauaaa

SEQ ID NO: 1321133 - RNA, 19 nt, Artificial Sequence
  Description of Artificial Sequence: Synthetic oligonucleotide
  Antisense strand to SEQ ID NO: 1321132
uuuaucagggucuugagcu

SEQ ID NO: 1321134 - RNA, 19 nt, Artificial Sequence
  Description of Artificial Sequence: Synthetic oligonucleotide
  Sense strand starting at position 1543 of SEQ ID NO: 1242066
ccugauaaaucucccucga

SEQ ID NO: 1321135 - RNA, 19 nt, Artificial Sequence
  Description of Artificial Sequence: Synthetic oligonucleotide
  Antisense strand to SEQ ID NO: 1321134
ucgagggagauuuaucagg

SEQ ID NO: 1321136 - RNA, 19 nt, Artificial Sequence
  Description of Artificial Sequence: Synthetic oligonucleotide
  Sense strand starting at position 2056 of SEQ ID NO: 1242066
gcagcucuucccgcgagau

SEQ ID NO: 1321137 - RNA, 19 nt, Artificial Sequence
  Description of Artificial Sequence: Synthetic oligonucleotide
  Antisense strand to SEQ ID NO: 1321136
aucucgcgggaagagcugc

SEQ ID NO: 1321138 - RNA, 19 nt, Artificial Sequence
  Description of Artificial Sequence: Synthetic oligonucleotide
  Sense strand starting at position 2258 of SEQ ID NO: 1242066
cuuaauaaacugugagcaa

SEQ ID NO: 1321139 - RNA, 19 nt, Artificial Sequence
  Description of Artificial Sequence: Synthetic oligonucleotide
  Antisense strand to SEQ ID NO: 1321138
uugcucacaguuuauuaag

SEQ ID NO: 1321140 - RNA, 19 nt, Artificial Sequence
  Description of Artificial Sequence: Synthetic oligonucleotide
  Sense strand starting at position 2278 of SEQ ID NO: 1242066
gguaguagugaccagaagu

SEQ ID NO: 1321141 - RNA, 19 nt, Artificial Sequence
  Description of Artificial Sequence: Synthetic oligonucleotide
  Antisense strand to SEQ ID NO: 1321140
acuucuggucacuacuacc

SEQ ID NO: 1321142 - RNA, 19 nt, Artificial Sequence
  Description of Artificial Sequence: Synthetic oligonucleotide
  Sense strand starting at position 2310 of SEQ ID NO: 1242066
ggacuuucgcgguaaggua

SEQ ID NO: 1321143 - RNA, 19 nt, Artificial Sequence
  Description of Artificial Sequence: Synthetic oligonucleotide
  Antisense strand to SEQ ID NO: 1321142
uaccuuaccgcgaaagucc

SEQ ID NO: 1321144 - RNA, 19 nt, Artificial Sequence
  Description of Artificial Sequence: Synthetic oligonucleotide
  Sense strand starting at position 2510 of SEQ ID NO: 1242066
ccgguuacccgcgucuaaa

SEQ ID NO: 1321145 - RNA, 19 nt, Artificial Sequence
  Description of Artificial Sequence: Synthetic oligonucleotide
  Antisense strand to SEQ ID NO: 1321144
uuuagacgcggguaaccgg

SEQ ID NO: 1321146 - RNA, 19 nt, Artificial Sequence
  Description of Artificial Sequence: Synthetic oligonucleotide
  Sense strand starting at position 2511 of SEQ ID NO: 1242066
cgguuacccgcgucuaaac

SEQ ID NO: 1321147 - RNA, 19 nt, Artificial Sequence
  Description of Artificial Sequence: Synthetic oligonucleotide
  Antisense strand to SEQ ID NO: 1321146
guuuagacgcggguaaccg

SEQ ID NO: 1321148 - RNA, 19 nt, Artificial Sequence
  Description of Artificial Sequence: Synthetic oligonucleotide
  Sense strand starting at position 2584 of SEQ ID NO: 1242066
agggcaccauuguuaagau

SEQ ID NO: 1321149 - RNA, 19 nt, Artificial Sequence
  Description of Artificial Sequence: Synthetic oligonucleotide
  Antisense strand to SEQ ID NO: 1321148
aucuuaacaauggugcccu

SEQ ID NO: 1321150 - RNA, 19 nt, Artificial Sequence
  Description of Artificial Sequence: Synthetic oligonucleotide
  Sense strand starting at position 2594 of SEQ ID NO: 1242066
uguuaagaugcccauguuu

SEQ ID NO: 1321151 - RNA, 19 nt, Artificial Sequence
  Description of Artificial Sequence: Synthetic oligonucleotide
  Antisense strand to SEQ ID NO: 1321150
aaacaugggcaucuuaaca

SEQ ID NO: 1321152 - RNA, 19 nt, Artificial Sequence
  Description of Artificial Sequence: Synthetic oligonucleotide
  Sense strand starting at position 2627 of SEQ ID NO: 1242066
caggacaucuggucugaca

SEQ ID NO: 1321153 - RNA, 19 nt, Artificial Sequence
  Description of Artificial Sequence: Synthetic oligonucleotide
  Antisense strand to SEQ ID NO: 1321152
ugucagaccagauguccug

SEQ ID NO: 1321154 - RNA, 19 nt, Artificial Sequence
  Description of Artificial Sequence: Synthetic oligonucleotide
  Sense strand starting at position 2629 of SEQ ID NO: 1242066
ggacaucuggucugacaaa

SEQ ID NO: 1321155 - RNA, 19 nt, Artificial Sequence
  Description of Artificial Sequence: Synthetic oligonucleotide
  Antisense strand to SEQ ID NO: 1321154
uuugucagaccagaugucc

SEQ ID NO: 1321156 - RNA, 19 nt, Artificial Sequence
  Description of Artificial Sequence: Synthetic oligonucleotide
  Sense strand starting at position 2641 of SEQ ID NO: 1242066
ugacaaagaacucgucuga

SEQ ID NO: 1321157 - RNA, 19 nt, Artificial Sequence
  Description of Artificial Sequence: Synthetic oligonucleotide
  Antisense strand to SEQ ID NO: 1321156
ucagacgaguucuuuguca

SEQ ID NO: 1321158 - RNA, 19 nt, Artificial Sequence
  Description of Artificial Sequence: Synthetic oligonucleotide
  Sense strand starting at position 2645 of SEQ ID NO: 1242066
aaagaacucgucugaugac

SEQ ID NO: 1321159 - RNA, 19 nt, Artificial Sequence
  Description of Artificial Sequence: Synthetic oligonucleotide
  Antisense strand to SEQ ID NO: 1321158
gucaucagacgaguucuuu

SEQ ID NO: 1321160 - RNA, 19 nt, Artificial Sequence
  Description of Artificial Sequence: Synthetic oligonucleotide
  Sense strand starting at position 2651 of SEQ ID NO: 1242066
cucgucugaugacuguauu

SEQ ID NO: 1321161 - RNA, 19 nt, Artificial Sequence
  Description of Artificial Sequence: Synthetic oligonucleotide
  Antisense strand to SEQ ID NO: 1321160
aauacagucaucagacgag

SEQ ID NO: 1321162 - RNA, 19 nt, Artificial Sequence
  Description of Artificial Sequence: Synthetic oligonucleotide
  Sense strand starting at position 2652 of SEQ ID NO: 1242066
ucgucugaugacuguauuu

SEQ ID NO: 1321163 - RNA, 19 nt, Artificial Sequence
  Description of Artificial Sequence: Synthetic oligonucleotide
  Antisense strand to SEQ ID NO: 1321162
aaauacagucaucagacga

SEQ ID NO: 1321164 - RNA, 19 nt, Artificial Sequence
  Description of Artificial Sequence: Synthetic oligonucleotide
  Sense strand starting at position 2701 of SEQ ID NO: 1242066
aaagcaaaucucgaguuac

SEQ ID NO: 1321165 - RNA, 19 nt, Artificial Sequence
  Description of Artificial Sequence: Synthetic oligonucleotide
  Antisense strand to SEQ ID NO: 1321164
guaacucgagauuugcuuu

SEQ ID NO: 1321166 - RNA, 19 nt, Artificial Sequence
  Description of Artificial Sequence: Synthetic oligonucleotide
  Sense strand starting at position 2767 of SEQ ID NO: 1242066
cccagugcccaguaguauu

SEQ ID NO: 1321167 - RNA, 19 nt, Artificial Sequence
  Description of Artificial Sequence: Synthetic oligonucleotide
  Antisense strand to SEQ ID NO: 1321166
aauacuacugggcacuggg

SEQ ID NO: 1321168 - RNA, 19 nt, Artificial Sequence
  Description of Artificial Sequence: Synthetic oligonucleotide
  Sense strand starting at position 2841 of SEQ ID NO: 1242066
uaugcaaaucucgaguuac

SEQ ID NO: 1321169 - RNA, 19 nt, Artificial Sequence
  Description of Artificial Sequence: Synthetic oligonucleotide
  Antisense strand to SEQ ID NO: 1321168
guaacucgagauuugcaua

SEQ ID NO: 1321170 - RNA, 19 nt, Artificial Sequence
  Description of Artificial Sequence: Synthetic oligonucleotide
  Sense strand starting at position 3029 of SEQ ID NO: 1242066
gccuuuccucuauaaugug

SEQ ID NO: 1321171 - RNA, 19 nt, Artificial Sequence
  Description of Artificial Sequence: Synthetic oligonucleotide
  Antisense strand to SEQ ID NO: 1321170
cacauuauagaggaaaggc

SEQ ID NO: 1321172 - RNA, 19 nt, Artificial Sequence
  Description of Artificial Sequence: Synthetic oligonucleotide
  Sense strand starting at position 3149 of SEQ ID NO: 1242066
gcccuuucuccucaagguu

SEQ ID NO: 1321173 - RNA, 19 nt, Artificial Sequence
  Description of Artificial Sequence: Synthetic oligonucleotide
  Antisense strand to SEQ ID NO: 1321172
aaccuugaggagaaagggc

SEQ ID NO: 1321174 - RNA, 19 nt, Artificial Sequence
  Description of Artificial Sequence: Synthetic oligonucleotide
  Sense strand starting at position 3467 of SEQ ID NO: 1242066
aaaccagucugggaacaua

SEQ ID NO: 1321175 - RNA, 19 nt, Artificial Sequence
  Description of Artificial Sequence: Synthetic oligonucleotide
  Antisense strand to SEQ ID NO: 1321174
uauguucccagacugguuu

SEQ ID NO: 1321176 - RNA, 19 nt, Artificial Sequence
  Description of Artificial Sequence: Synthetic oligonucleotide
  Sense strand starting at position 3587 of SEQ ID NO: 1242066
gggaugaucgcuugagugu

SEQ ID NO: 1321177 - RNA, 19 nt, Artificial Sequence
  Description of Artificial Sequence: Synthetic oligonucleotide
  Antisense strand to SEQ ID NO: 1321176
acacucaagcgaucauccc

SEQ ID NO: 1321178 - RNA, 19 nt, Artificial Sequence
  Description of Artificial Sequence: Synthetic oligonucleotide
  Sense strand starting at position 3588 of SEQ ID NO: 1242066
ggaugaucgcuugagugug

SEQ ID NO: 1321179 - RNA, 19 nt, Artificial Sequence
  Description of Artificial Sequence: Synthetic oligonucleotide
  Antisense strand to SEQ ID NO: 1321178
cacacucaagcgaucaucc

SEQ ID NO: 1321180 - RNA, 19 nt, Artificial Sequence
  Description of Artificial Sequence: Synthetic oligonucleotide
  Sense strand starting at position 3903 of SEQ ID NO: 1242066
ucuccugauucuuuggcaa

SEQ ID NO: 1321181 - RNA, 19 nt, Artificial Sequence
  Description of Artificial Sequence: Synthetic oligonucleotide
  Antisense strand to SEQ ID NO: 1321180
uugccaaagaaucaggaga

SEQ ID NO: 1321182 - RNA, 19 nt, Artificial Sequence
  Description of Artificial Sequence: Synthetic oligonucleotide
  Sense strand starting at position 2 of SEQ ID NO: 1242067
uugcaauucggauacgaaa

SEQ ID NO: 1321183 - RNA, 19 nt, Artificial Sequence
  Description of Artificial Sequence: Synthetic oligonucleotide
  Antisense strand to SEQ ID NO: 1321182
uuucguauccgaauugcaa

SEQ ID NO: 1321184 - RNA, 19 nt, Artificial Sequence
  Description of Artificial Sequence: Synthetic oligonucleotide
  Sense strand starting at position 54 of SEQ ID NO: 1242067
aacaaugaugcucagaugu

SEQ ID NO: 1321185 - RNA, 19 nt, Artificial Sequence
  Description of Artificial Sequence: Synthetic oligonucleotide
  Antisense strand to SEQ ID NO: 1321184
acaucugagcaucauuguu

SEQ ID NO: 1321186 - RNA, 19 nt, Artificial Sequence
  Description of Artificial Sequence: Synthetic oligonucleotide
  Sense strand starting at position 346 of SEQ ID NO: 1242067
uucugugauaacggaaguu

SEQ ID NO: 1321187 - RNA, 19 nt, Artificial Sequence
  Description of Artificial Sequence: Synthetic oligonucleotide
  Antisense strand to SEQ ID NO: 1321186
aacuuccguuaucacagaa

SEQ ID NO: 1321188 - RNA, 19 nt, Artificial Sequence
  Description of Artificial Sequence: Synthetic oligonucleotide
  Sense strand starting at position 356 of SEQ ID NO: 1242067
acggaaguuuaagucaauu

SEQ ID NO: 1321189 - RNA, 19 nt, Artificial Sequence
  Description of Artificial Sequence: Synthetic oligonucleotide
  Antisense strand to SEQ ID NO: 1321188
aauugacuuaaacuuccgu

SEQ ID NO: 1321190 - RNA, 19 nt, Artificial Sequence
  Description of Artificial Sequence: Synthetic oligonucleotide
  Sense strand starting at position 397 of SEQ ID NO: 1242067
ugaaguauggcucacacuu

SEQ ID NO: 1321191 - RNA, 19 nt, Artificial Sequence
  Description of Artificial Sequence: Synthetic oligonucleotide
  Antisense strand to SEQ ID NO: 1321190
aagugugagccauacuuca

SEQ ID NO: 1321192 - RNA, 19 nt, Artificial Sequence
  Description of Artificial Sequence: Synthetic oligonucleotide
  Sense strand starting at position 420 of SEQ ID NO: 1242067
ggagguaauagccgaaauc

SEQ ID NO: 1321193 - RNA, 19 nt, Artificial Sequence
  Description of Artificial Sequence: Synthetic oligonucleotide
  Antisense strand to SEQ ID NO: 1321192
gauuucggcuauuaccucc

SEQ ID NO: 1321194 - RNA, 19 nt, Artificial Sequence
  Description of Artificial Sequence: Synthetic oligonucleotide
  Sense strand starting at position 421 of SEQ ID NO: 1242067
gagguaauagccgaaaucu

SEQ ID NO: 1321195 - RNA, 19 nt, Artificial Sequence
  Description of Artificial Sequence: Synthetic oligonucleotide
  Antisense strand to SEQ ID NO: 1321194
agauuucggcuauuaccuc

SEQ ID NO: 1321196 - RNA, 19 nt, Artificial Sequence
  Description of Artificial Sequence: Synthetic oligonucleotide
  Sense strand starting at position 430 of SEQ ID NO: 1242067
gccgaaaucuuucuaauua

SEQ ID NO: 1321197 - RNA, 19 nt, Artificial Sequence
  Description of Artificial Sequence: Synthetic oligonucleotide
  Antisense strand to SEQ ID NO: 1321196
uaauuagaaagauuucggc

SEQ ID NO: 1321198 - RNA, 19 nt, Artificial Sequence
  Description of Artificial Sequence: Synthetic oligonucleotide
  Sense strand starting at position 499 of SEQ ID NO: 1242067
ggaacugcaaugugaucua

SEQ ID NO: 1321199 - RNA, 19 nt, Artificial Sequence
  Description of Artificial Sequence: Synthetic oligonucleotide
  Antisense strand to SEQ ID NO: 1321198
uagaucacauugcaguucc

SEQ ID NO: 1321200 - RNA, 19 nt, Artificial Sequence
  Description of Artificial Sequence: Synthetic oligonucleotide
  Sense strand starting at position 502 of SEQ ID NO: 1242067
acugcaaugugaucuaaua

SEQ ID NO: 1321201 - RNA, 19 nt, Artificial Sequence
  Description of Artificial Sequence: Synthetic oligonucleotide
  Antisense strand to SEQ ID NO: 1321200
uauuagaucacauugcagu

SEQ ID NO: 1321202 - RNA, 19 nt, Artificial Sequence
  Description of Artificial Sequence: Synthetic oligonucleotide
  Sense strand starting at position 793 of SEQ ID NO: 1242067
uguuaagaaccucagcuuu

SEQ ID NO: 1321203 - RNA, 19 nt, Artificial Sequence
  Description of Artificial Sequence: Synthetic oligonucleotide
  Antisense strand to SEQ ID NO: 1321202
aaagcugagguucuuaaca

SEQ ID NO: 1321204 - RNA, 19 nt, Artificial Sequence
  Description of Artificial Sequence: Synthetic oligonucleotide
  Sense strand starting at position 795 of SEQ ID NO: 1242067
uuaagaaccucagcuuuga

SEQ ID NO: 1321205 - RNA, 19 nt, Artificial Sequence
  Description of Artificial Sequence: Synthetic oligonucleotide
  Antisense strand to SEQ ID NO: 1321204
ucaaagcugagguucuuaa

SEQ ID NO: 1321206 - RNA, 19 nt, Artificial Sequence
  Description of Artificial Sequence: Synthetic oligonucleotide
  Sense strand starting at position 858 of SEQ ID NO: 1242067
uuuggaauugcuugagauc

SEQ ID NO: 1321207 - RNA, 19 nt, Artificial Sequence
  Description of Artificial Sequence: Synthetic oligonucleotide
  Antisense strand to SEQ ID NO: 1321206
gaucucaagcaauuccaaa

SEQ ID NO: 1321208 - RNA, 19 nt, Artificial Sequence
  Description of Artificial Sequence: Synthetic oligonucleotide
  Sense strand starting at position 959 of SEQ ID NO: 1242067
ggccaucucgcaggaauga

SEQ ID NO: 1321209 - RNA, 19 nt, Artificial Sequence
  Description of Artificial Sequence: Synthetic oligonucleotide
  Antisense strand to SEQ ID NO: 1321208
ucauuccugcgagauggcc

SEQ ID NO: 1321210 - RNA, 19 nt, Artificial Sequence
  Description of Artificial Sequence: Synthetic oligonucleotide
  Sense strand starting at position 1155 of SEQ ID NO: 1242067
aaacuugucuaagcugaga

SEQ ID NO: 1321211 - RNA, 19 nt, Artificial Sequence
  Description of Artificial Sequence: Synthetic oligonucleotide
  Antisense strand to SEQ ID NO: 1321210
ucucagcuuagacaaguuu

SEQ ID NO: 1321212 - RNA, 19 nt, Artificial Sequence
  Description of Artificial Sequence: Synthetic oligonucleotide
  Sense strand starting at position 1157 of SEQ ID NO: 1242067
acuugucuaagcugagaag

SEQ ID NO: 1321213 - RNA, 19 nt, Artificial Sequence
  Description of Artificial Sequence: Synthetic oligonucleotide
  Antisense strand to SEQ ID NO: 1321212
cuucucagcuuagacaagu

SEQ ID NO: 1321214 - RNA, 19 nt, Artificial Sequence
  Description of Artificial Sequence: Synthetic oligonucleotide
  Sense strand starting at position 2199 of SEQ ID NO: 1242067
gagagaagucuccggauuc

SEQ ID NO: 1321215 - RNA, 19 nt, Artificial Sequence
  Description of Artificial Sequence: Synthetic oligonucleotide
  Antisense strand to SEQ ID NO: 1321214
gaauccggagacuucucuc

SEQ ID NO: 1321216 - RNA, 19 nt, Artificial Sequence
  Description of Artificial Sequence: Synthetic oligonucleotide
  Sense strand starting at position 2385 of SEQ ID NO: 1242067
gaugaucuuucccaggaag

SEQ ID NO: 1321217 - RNA, 19 nt, Artificial Sequence
  Description of Artificial Sequence: Synthetic oligonucleotide
  Antisense strand to SEQ ID NO: 1321216
cuuccugggaaagaucauc

SEQ ID NO: 1321218 - RNA, 19 nt, Artificial Sequence
  Description of Artificial Sequence: Synthetic oligonucleotide
  Sense strand starting at position 2493 of SEQ ID NO: 1242067
caggacucguccuugaaag

SEQ ID NO: 1321219 - RNA, 19 nt, Artificial Sequence
  Description of Artificial Sequence: Synthetic oligonucleotide
  Antisense strand to SEQ ID NO: 1321218
cuuucaaggacgaguccug

SEQ ID NO: 1321220 - RNA, 19 nt, Artificial Sequence
  Description of Artificial Sequence: Synthetic oligonucleotide
  Sense strand starting at position 2495 of SEQ ID NO: 1242067
ggacucguccuugaaagga

SEQ ID NO: 1321221 - RNA, 19 nt, Artificial Sequence
  Description of Artificial Sequence: Synthetic oligonucleotide
  Antisense strand to SEQ ID NO: 1321220
uccuuucaaggacgagucc

SEQ ID NO: 1321222 - RNA, 19 nt, Artificial Sequence
  Description of Artificial Sequence: Synthetic oligonucleotide
  Sense strand starting at position 2508 of SEQ ID NO: 1242067
aaaggagaguuccaggauu

SEQ ID NO: 1321223 - RNA, 19 nt, Artificial Sequence
  Description of Artificial Sequence: Synthetic oligonucleotide
  Antisense strand to SEQ ID NO: 1321222
aauccuggaacucuccuuu

SEQ ID NO: 1321224 - RNA, 19 nt, Artificial Sequence
  Description of Artificial Sequence: Synthetic oligonucleotide
  Sense strand starting at position 2516 of SEQ ID NO: 1242067
guuccaggauuugacaagu

SEQ ID NO: 1321225 - RNA, 19 nt, Artificial Sequence
  Description of Artificial Sequence: Synthetic oligonucleotide
  Antisense strand to SEQ ID NO: 1321224
acuugucaaauccuggaac

SEQ ID NO: 1321226 - RNA, 19 nt, Artificial Sequence
  Description of Artificial Sequence: Synthetic oligonucleotide
  Sense strand starting at position 2537 of SEQ ID NO: 1242067
ggaacucuccgaugagauc

SEQ ID NO: 1321227 - RNA, 19 nt, Artificial Sequence
  Description of Artificial Sequence: Synthetic oligonucleotide
  Antisense strand to SEQ ID NO: 1321226
gaucucaucggagaguucc

SEQ ID NO: 1321228 - RNA, 19 nt, Artificial Sequence
  Description of Artificial Sequence: Synthetic oligonucleotide
  Sense strand starting at position 2708 of SEQ ID NO: 1242067
ggccaugguuggguucuua

SEQ ID NO: 1321229 - RNA, 19 nt, Artificial Sequence
  Description of Artificial Sequence: Synthetic oligonucleotide
  Antisense strand to SEQ ID NO: 1321228
uaagaacccaaccauggcc

SEQ ID NO: 1321230 - RNA, 19 nt, Artificial Sequence
  Description of Artificial Sequence: Synthetic oligonucleotide
  Sense strand starting at position 2712 of SEQ ID NO: 1242067
augguuggguucuuaccua

SEQ ID NO: 1321231 - RNA, 19 nt, Artificial Sequence
  Description of Artificial Sequence: Synthetic oligonucleotide
  Antisense strand to SEQ ID NO: 1321230
uagguaagaacccaaccau

SEQ ID NO: 1321232 - RNA, 19 nt, Artificial Sequence
  Description of Artificial Sequence: Synthetic oligonucleotide
  Sense strand starting at position 2723 of SEQ ID NO: 1242067
cuuaccuagcccuaggaaa

SEQ ID NO: 1321233 - RNA, 19 nt, Artificial Sequence
  Description of Artificial Sequence: Synthetic oligonucleotide
  Antisense strand to SEQ ID NO: 1321232
uuuccuagggcuagguaag

SEQ ID NO: 1321234 - RNA, 19 nt, Artificial Sequence
  Description of Artificial Sequence: Synthetic oligonucleotide
  Sense strand starting at position 2964 of SEQ ID NO: 1242067
uguuaagaaccucggguuu

SEQ ID NO: 1321235 - RNA, 19 nt, Artificial Sequence
  Description of Artificial Sequence: Synthetic oligonucleotide
  Antisense strand to SEQ ID NO: 1321234
aaacccgagguucuuaaca

SEQ ID NO: 1321236 - RNA, 19 nt, Artificial Sequence
  Description of Artificial Sequence: Synthetic oligonucleotide
  Sense strand starting at position 2970 of SEQ ID NO: 1242067
gaaccucggguuugacauu

SEQ ID NO: 1321237 - RNA, 19 nt, Artificial Sequence
  Description of Artificial Sequence: Synthetic oligonucleotide
  Antisense strand to SEQ ID NO: 1321236
aaugucaaacccgagguuc

SEQ ID NO: 1321238 - RNA, 19 nt, Artificial Sequence
  Description of Artificial Sequence: Synthetic oligonucleotide
  Sense strand starting at position 2976 of SEQ ID NO: 1242067
cggguuugacauuguuuaa

SEQ ID NO: 1321239 - RNA, 19 nt, Artificial Sequence
  Description of Artificial Sequence: Synthetic oligonucleotide
  Antisense strand to SEQ ID NO: 1321238
uuaaacaaugucaaacccg

SEQ ID NO: 1321240 - RNA, 19 nt, Artificial Sequence
  Description of Artificial Sequence: Synthetic oligonucleotide
  Sense strand starting at position 2979 of SEQ ID NO: 1242067
guuugacauuguuuaagaa

SEQ ID NO: 1321241 - RNA, 19 nt, Artificial Sequence
  Description of Artificial Sequence: Synthetic oligonucleotide
  Antisense strand to SEQ ID NO: 1321240
uucuuaaacaaugucaaac

SEQ ID NO: 1321242 - RNA, 19 nt, Artificial Sequence
  Description of Artificial Sequence: Synthetic oligonucleotide
  Sense strand starting at position 3053 of SEQ ID NO: 1242067
caggauugcuguuuccaua

SEQ ID NO: 1321243 - RNA, 19 nt, Artificial Sequence
  Description of Artificial Sequence: Synthetic oligonucleotide
  Antisense strand to SEQ ID NO: 1321242
uauggaaacagcaauccug

SEQ ID NO: 1321244 - RNA, 19 nt, Artificial Sequence
  Description of Artificial Sequence: Synthetic oligonucleotide
  Sense strand starting at position 3223 of SEQ ID NO: 1242067
guaggagcucuguaaccau

SEQ ID NO: 1321245 - RNA, 19 nt, Artificial Sequence
  Description of Artificial Sequence: Synthetic oligonucleotide
  Antisense strand to SEQ ID NO: 1321244
augguuacagagcuccuac

SEQ ID NO: 1321246 - RNA, 19 nt, Artificial Sequence
  Description of Artificial Sequence: Synthetic oligonucleotide
  Sense strand starting at position 3226 of SEQ ID NO: 1242067
ggagcucuguaaccaucua

SEQ ID NO: 1321247 - RNA, 19 nt, Artificial Sequence
  Description of Artificial Sequence: Synthetic oligonucleotide
  Antisense strand to SEQ ID NO: 1321246
uagaugguuacagagcucc

SEQ ID NO: 1321248 - RNA, 19 nt, Artificial Sequence
  Description of Artificial Sequence: Synthetic oligonucleotide
  Sense strand starting at position 3310 of SEQ ID NO: 1242067
ugcgauucccaguauuggu

SEQ ID NO: 1321249 - RNA, 19 nt, Artificial Sequence
  Description of Artificial Sequence: Synthetic oligonucleotide
  Antisense strand to SEQ ID NO: 1321248
accaauacugggaaucgca

SEQ ID NO: 1321250 - RNA, 19 nt, Artificial Sequence
  Description of Artificial Sequence: Synthetic oligonucleotide
  Sense strand starting at position 3682 of SEQ ID NO: 1242067
ccaauucuugcagguagga

SEQ ID NO: 1321251 - RNA, 19 nt, Artificial Sequence
  Description of Artificial Sequence: Synthetic oligonucleotide
  Antisense strand to SEQ ID NO: 1321250
uccuaccugcaagaauugg

SEQ ID NO: 1321252 - RNA, 19 nt, Artificial Sequence
  Description of Artificial Sequence: Synthetic oligonucleotide
  Sense strand starting at position 3715 of SEQ ID NO: 1242067
agagaaagcugaguaguau

SEQ ID NO: 1321253 - RNA, 19 nt, Artificial Sequence
  Description of Artificial Sequence: Synthetic oligonucleotide
  Antisense strand to SEQ ID NO: 1321252
auacuacucagcuuucucu

SEQ ID NO: 1321254 - RNA, 19 nt, Artificial Sequence
  Description of Artificial Sequence: Synthetic oligonucleotide
  Sense strand starting at position 3716 of SEQ ID NO: 1242067
gagaaagcugaguaguauc

SEQ ID NO: 1321255 - RNA, 19 nt, Artificial Sequence
  Description of Artificial Sequence: Synthetic oligonucleotide
  Antisense strand to SEQ ID NO: 1321254
gauacuacucagcuuucuc

SEQ ID NO: 1321256 - RNA, 19 nt, Artificial Sequence
  Description of Artificial Sequence: Synthetic oligonucleotide
  Sense strand starting at position 3833 of SEQ ID NO: 1242067
aaguuuagauuccugaguu

SEQ ID NO: 1321257 - RNA, 19 nt, Artificial Sequence
  Description of Artificial Sequence: Synthetic oligonucleotide
  Antisense strand to SEQ ID NO: 1321256
aacucaggaaucuaaacuu

SEQ ID NO: 1321258 - RNA, 19 nt, Artificial Sequence
  Description of Artificial Sequence: Synthetic oligonucleotide
  Sense strand starting at position 3877 of SEQ ID NO: 1242067
guauucuuagaagagcaua

SEQ ID NO: 1321259 - RNA, 19 nt, Artificial Sequence
  Description of Artificial Sequence: Synthetic oligonucleotide
  Antisense strand to SEQ ID NO: 1321258
uaugcucuucuaagaauac

SEQ ID NO: 1321260 - RNA, 19 nt, Artificial Sequence
  Description of Artificial Sequence: Synthetic oligonucleotide
  Sense strand starting at position 3903 of SEQ ID NO: 1242067
agaagaaauuaggaaagca

SEQ ID NO: 1321261 - RNA, 19 nt, Artificial Sequence
  Description of Artificial Sequence: Synthetic oligonucleotide
  Antisense strand to SEQ ID NO: 1321260
ugcuuuccuaauuucuucu

SEQ ID NO: 1321262 - RNA, 19 nt, Artificial Sequence
  Description of Artificial Sequence: Synthetic oligonucleotide
  Sense strand starting at position 23 of SEQ ID NO: 1242068
cccugagguucccuuugaa

SEQ ID NO: 1321263 - RNA, 19 nt, Artificial Sequence
  Description of Artificial Sequence: Synthetic oligonucleotide
  Antisense strand to SEQ ID NO: 1321262
uucaaagggaaccucaggg

SEQ ID NO: 1321264 - RNA, 19 nt, Artificial Sequence
  Description of Artificial Sequence: Synthetic oligonucleotide
  Sense strand starting at position 118 of SEQ ID NO: 1242068
ugcacuauugaauaaguga

SEQ ID NO: 1321265 - RNA, 19 nt, Artificial Sequence
  Description of Artificial Sequence: Synthetic oligonucleotide
  Antisense strand to SEQ ID NO: 1321264
ucacuuauucaauagugca

SEQ ID NO: 1321266 - RNA, 19 nt, Artificial Sequence
  Description of Artificial Sequence: Synthetic oligonucleotide
  Sense strand starting at position 121 of SEQ ID NO: 1242068
acuauugaauaagugaguu

SEQ ID NO: 1321267 - RNA, 19 nt, Artificial Sequence
  Description of Artificial Sequence: Synthetic oligonucleotide
  Antisense strand to SEQ ID NO: 1321266
aacucacuuauucaauagu

SEQ ID NO: 1321268 - RNA, 19 nt, Artificial Sequence
  Description of Artificial Sequence: Synthetic oligonucleotide
  Sense strand starting at position 129 of SEQ ID NO: 1242068
auaagugaguuucuggaga

SEQ ID NO: 1321269 - RNA, 19 nt, Artificial Sequence
  Description of Artificial Sequence: Synthetic oligonucleotide
  Antisense strand to SEQ ID NO: 1321268
ucuccagaaacucacuuau

SEQ ID NO: 1321270 - RNA, 19 nt, Artificial Sequence
  Description of Artificial Sequence: Synthetic oligonucleotide
  Sense strand starting at position 263 of SEQ ID NO: 1242068
cgguaaguccuuuaauucu

SEQ ID NO: 1321271 - RNA, 19 nt, Artificial Sequence
  Description of Artificial Sequence: Synthetic oligonucleotide
  Antisense strand to SEQ ID NO: 1321270
agaauuaaaggacuuaccg

SEQ ID NO: 1321272 - RNA, 19 nt, Artificial Sequence
  Description of Artificial Sequence: Synthetic oligonucleotide
  Sense strand starting at position 424 of SEQ ID NO: 1242068
agagauugguguccauauu

SEQ ID NO: 1321273 - RNA, 19 nt, Artificial Sequence
  Description of Artificial Sequence: Synthetic oligonucleotide
  Antisense strand to SEQ ID NO: 1321272
aauauggacaccaaucucu

SEQ ID NO: 1321274 - RNA, 19 nt, Artificial Sequence
  Description of Artificial Sequence: Synthetic oligonucleotide
  Sense strand starting at position 425 of SEQ ID NO: 1242068
gagauugguguccauauuc

SEQ ID NO: 1321275 - RNA, 19 nt, Artificial Sequence
  Description of Artificial Sequence: Synthetic oligonucleotide
  Antisense strand to SEQ ID NO: 1321274
gaauauggacaccaaucuc

SEQ ID NO: 1321276 - RNA, 19 nt, Artificial Sequence
  Description of Artificial Sequence: Synthetic oligonucleotide
  Sense strand starting at position 460 of SEQ ID NO: 1242068
uggauacagaagugauguu

SEQ ID NO: 1321277 - RNA, 19 nt, Artificial Sequence
  Description of Artificial Sequence: Synthetic oligonucleotide
  Antisense strand to SEQ ID NO: 1321276
aacaucacuucuguaucca

SEQ ID NO: 1321278 - RNA, 19 nt, Artificial Sequence
  Description of Artificial Sequence: Synthetic oligonucleotide
  Sense strand starting at position 467 of SEQ ID NO: 1242068
agaagugauguuuggagcu

SEQ ID NO: 1321279 - RNA, 19 nt, Artificial Sequence
  Description of Artificial Sequence: Synthetic oligonucleotide
  Antisense strand to SEQ ID NO: 1321278
agcuccaaacaucacuucu

SEQ ID NO: 1321280 - RNA, 19 nt, Artificial Sequence
  Description of Artificial Sequence: Synthetic oligonucleotide
  Sense strand starting at position 522 of SEQ ID NO: 1242068
ugcucuaagguguggagaa

SEQ ID NO: 1321281 - RNA, 19 nt, Artificial Sequence
  Description of Artificial Sequence: Synthetic oligonucleotide
  Antisense strand to SEQ ID NO: 1321280
uucuccacaccuuagagca

SEQ ID NO: 1321282 - RNA, 19 nt, Artificial Sequence
  Description of Artificial Sequence: Synthetic oligonucleotide
  Sense strand starting at position 618 of SEQ ID NO: 1242068
ugcucuuguuauguaagaa

SEQ ID NO: 1321283 - RNA, 19 nt, Artificial Sequence
  Description of Artificial Sequence: Synthetic oligonucleotide
  Antisense strand to SEQ ID NO: 1321282
uucuuacauaacaagagca

SEQ ID NO: 1321284 - RNA, 19 nt, Artificial Sequence
  Description of Artificial Sequence: Synthetic oligonucleotide
  Sense strand starting at position 677 of SEQ ID NO: 1242068
acaguuagugauugcugga

SEQ ID NO: 1321285 - RNA, 19 nt, Artificial Sequence
  Description of Artificial Sequence: Synthetic oligonucleotide
  Antisense strand to SEQ ID NO: 1321284
uccagcaaucacuaacugu

SEQ ID NO: 1321286 - RNA, 19 nt, Artificial Sequence
  Description of Artificial Sequence: Synthetic oligonucleotide
  Sense strand starting at position 682 of SEQ ID NO: 1242068
uagugauugcuggacagga

SEQ ID NO: 1321287 - RNA, 19 nt, Artificial Sequence
  Description of Artificial Sequence: Synthetic oligonucleotide
  Antisense strand to SEQ ID NO: 1321286
uccuguccagcaaucacua

SEQ ID NO: 1321288 - RNA, 19 nt, Artificial Sequence
  Description of Artificial Sequence: Synthetic oligonucleotide
  Sense strand starting at position 684 of SEQ ID NO: 1242068
gugauugcuggacaggauu

SEQ ID NO: 1321289 - RNA, 19 nt, Artificial Sequence
  Description of Artificial Sequence: Synthetic oligonucleotide
  Antisense strand to SEQ ID NO: 1321288
aauccuguccagcaaucac

SEQ ID NO: 1321290 - RNA, 19 nt, Artificial Sequence
  Description of Artificial Sequence: Synthetic oligonucleotide
  Sense strand starting at position 859 of SEQ ID NO: 1242068
gguggcaucgauuaggaau

SEQ ID NO: 1321291 - RNA, 19 nt, Artificial Sequence
  Description of Artificial Sequence: Synthetic oligonucleotide
  Antisense strand to SEQ ID NO: 1321290
auuccuaaucgaugccacc

SEQ ID NO: 1321292 - RNA, 19 nt, Artificial Sequence
  Description of Artificial Sequence: Synthetic oligonucleotide
  Sense strand starting at position 915 of SEQ ID NO: 1242068
gugggaggugcucagcaaa

SEQ ID NO: 1321293 - RNA, 19 nt, Artificial Sequence
  Description of Artificial Sequence: Synthetic oligonucleotide
  Antisense strand to SEQ ID NO: 1321292
uuugcugagcaccucccac

SEQ ID NO: 1321294 - RNA, 19 nt, Artificial Sequence
  Description of Artificial Sequence: Synthetic oligonucleotide
  Sense strand starting at position 1016 of SEQ ID NO: 1242068
ggaggagcccucugacaaa

SEQ ID NO: 1321295 - RNA, 19 nt, Artificial Sequence
  Description of Artificial Sequence: Synthetic oligonucleotide
  Antisense strand to SEQ ID NO: 1321294
uuugucagagggcuccucc

SEQ ID NO: 1321296 - RNA, 19 nt, Artificial Sequence
  Description of Artificial Sequence: Synthetic oligonucleotide
  Sense strand starting at position 1063 of SEQ ID NO: 1242068
cgcugaaccuggcuauuua

SEQ ID NO: 1321297 - RNA, 19 nt, Artificial Sequence
  Description of Artificial Sequence: Synthetic oligonucleotide
  Antisense strand to SEQ ID NO: 1321296
uaaauagccagguucagcg

SEQ ID NO: 1321298 - RNA, 19 nt, Artificial Sequence
  Description of Artificial Sequence: Synthetic oligonucleotide
  Sense strand starting at position 1131 of SEQ ID NO: 1242068
uggugaagaaugcaaguuu

SEQ ID NO: 1321299 - RNA, 19 nt, Artificial Sequence
  Description of Artificial Sequence: Synthetic oligonucleotide
  Antisense strand to SEQ ID NO: 1321298
aaacuugcauucuucacca

SEQ ID NO: 1321300 - RNA, 19 nt, Artificial Sequence
  Description of Artificial Sequence: Synthetic oligonucleotide
  Sense strand starting at position 1143 of SEQ ID NO: 1242068
caaguuuaagaucgcuaug

SEQ ID NO: 1321301 - RNA, 19 nt, Artificial Sequence
  Description of Artificial Sequence: Synthetic oligonucleotide
  Antisense strand to SEQ ID NO: 1321300
cauagcgaucuuaaacuug

SEQ ID NO: 1321302 - RNA, 19 nt, Artificial Sequence
  Description of Artificial Sequence: Synthetic oligonucleotide
  Sense strand starting at position 1146 of SEQ ID NO: 1242068
guuuaagaucgcuauggcu

SEQ ID NO: 1321303 - RNA, 19 nt, Artificial Sequence
  Description of Artificial Sequence: Synthetic oligonucleotide
  Antisense strand to SEQ ID NO: 1321302
agccauagcgaucuuaaac

SEQ ID NO: 1321304 - RNA, 19 nt, Artificial Sequence
  Description of Artificial Sequence: Synthetic oligonucleotide
  Sense strand starting at position 2738 of SEQ ID NO: 1242068
acaguucugccaggaugca

SEQ ID NO: 1321305 - RNA, 19 nt, Artificial Sequence
  Description of Artificial Sequence: Synthetic oligonucleotide
  Antisense strand to SEQ ID NO: 1321304
ugcauccuggcagaacugu

SEQ ID NO: 1321306 - RNA, 19 nt, Artificial Sequence
  Description of Artificial Sequence: Synthetic oligonucleotide
  Sense strand starting at position 2757 of SEQ ID NO: 1242068
cguuuagcgacuucuguca

SEQ ID NO: 1321307 - RNA, 19 nt, Artificial Sequence
  Description of Artificial Sequence: Synthetic oligonucleotide
  Antisense strand to SEQ ID NO: 1321306
ugacagaagucgcuaaacg

SEQ ID NO: 1321308 - RNA, 19 nt, Artificial Sequence
  Description of Artificial Sequence: Synthetic oligonucleotide
  Sense strand starting at position 2846 of SEQ ID NO: 1242068
uuguuuaauccucacagga

SEQ ID NO: 1321309 - RNA, 19 nt, Artificial Sequence
  Description of Artificial Sequence: Synthetic oligonucleotide
  Antisense strand to SEQ ID NO: 1321308
uccugugaggauuaaacaa

SEQ ID NO: 1321310 - RNA, 19 nt, Artificial Sequence
  Description of Artificial Sequence: Synthetic oligonucleotide
  Sense strand starting at position 2870 of SEQ ID NO: 1242068
cuugaaugggcacacuuau

SEQ ID NO: 1321311 - RNA, 19 nt, Artificial Sequence
  Description of Artificial Sequence: Synthetic oligonucleotide
  Antisense strand to SEQ ID NO: 1321310
auaagugugcccauucaag

SEQ ID NO: 1321312 - RNA, 19 nt, Artificial Sequence
  Description of Artificial Sequence: Synthetic oligonucleotide
  Sense strand starting at position 3009 of SEQ ID NO: 1242068
uggacuuugguguggauga

SEQ ID NO: 1321313 - RNA, 19 nt, Artificial Sequence
  Description of Artificial Sequence: Synthetic oligonucleotide
  Antisense strand to SEQ ID NO: 1321312
ucauccacaccaaagucca

SEQ ID NO: 1321314 - RNA, 19 nt, Artificial Sequence
  Description of Artificial Sequence: Synthetic oligonucleotide
  Sense strand starting at position 3073 of SEQ ID NO: 1242068
gcguuugugcagagaauga

SEQ ID NO: 1321315 - RNA, 19 nt, Artificial Sequence
  Description of Artificial Sequence: Synthetic oligonucleotide
  Antisense strand to SEQ ID NO: 1321314
ucauucucugcacaaacgc

SEQ ID NO: 1321316 - RNA, 19 nt, Artificial Sequence
  Description of Artificial Sequence: Synthetic oligonucleotide
  Sense strand starting at position 3234 of SEQ ID NO: 1242068
gaagguacucgauguuaau

SEQ ID NO: 1321317 - RNA, 19 nt, Artificial Sequence
  Description of Artificial Sequence: Synthetic oligonucleotide
  Antisense strand to SEQ ID NO: 1321316
auuaacaucgaguaccuuc

SEQ ID NO: 1321318 - RNA, 19 nt, Artificial Sequence
  Description of Artificial Sequence: Synthetic oligonucleotide
  Sense strand starting at position 3243 of SEQ ID NO: 1242068
cgauguuaaucuguacaua

SEQ ID NO: 1321319 - RNA, 19 nt, Artificial Sequence
  Description of Artificial Sequence: Synthetic oligonucleotide
  Antisense strand to SEQ ID NO: 1321318
uauguacagauuaacaucg

SEQ ID NO: 1321320 - RNA, 19 nt, Artificial Sequence
  Description of Artificial Sequence: Synthetic oligonucleotide
  Sense strand starting at position 3244 of SEQ ID NO: 1242068
gauguuaaucuguacauag

SEQ ID NO: 1321321 - RNA, 19 nt, Artificial Sequence
  Description of Artificial Sequence: Synthetic oligonucleotide
  Antisense strand to SEQ ID NO: 1321320
cuauguacagauuaacauc

SEQ ID NO: 1321322 - RNA, 19 nt, Artificial Sequence
  Description of Artificial Sequence: Synthetic oligonucleotide
  Sense strand starting at position 3246 of SEQ ID NO: 1242068
uguuaaucuguacauaguu

SEQ ID NO: 1321323 - RNA, 19 nt, Artificial Sequence
  Description of Artificial Sequence: Synthetic oligonucleotide
  Antisense strand to SEQ ID NO: 1321322
aacuauguacagauuaaca

SEQ ID NO: 1321324 - RNA, 19 nt, Artificial Sequence
  Description of Artificial Sequence: Synthetic oligonucleotide
  Sense strand starting at position 3684 of SEQ ID NO: 1242068
gguaagauaguguggguga

SEQ ID NO: 1321325 - RNA, 19 nt, Artificial Sequence
  Description of Artificial Sequence: Synthetic oligonucleotide
  Antisense strand to SEQ ID NO: 1321324
ucacccacacuaucuuacc

SEQ ID NO: 1321326 - RNA, 19 nt, Artificial Sequence
  Description of Artificial Sequence: Synthetic oligonucleotide
  Sense strand starting at position 3687 of SEQ ID NO: 1242068
aagauagugugggugaaga

SEQ ID NO: 1321327 - RNA, 19 nt, Artificial Sequence
  Description of Artificial Sequence: Synthetic oligonucleotide
  Antisense strand to SEQ ID NO: 1321326
ucuucacccacacuaucuu

SEQ ID NO: 1321328 - RNA, 19 nt, Artificial Sequence
  Description of Artificial Sequence: Synthetic oligonucleotide
  Sense strand starting at position 3711 of SEQ ID NO: 1242068
gcagacuucuccguacaua

SEQ ID NO: 1321329 - RNA, 19 nt, Artificial Sequence
  Description of Artificial Sequence: Synthetic oligonucleotide
  Antisense strand to SEQ ID NO: 1321328
uauguacggagaagucugc

SEQ ID NO: 1321330 - RNA, 19 nt, Artificial Sequence
  Description of Artificial Sequence: Synthetic oligonucleotide
  Sense strand starting at position 3712 of SEQ ID NO: 1242068
cagacuucuccguacauag

SEQ ID NO: 1321331 - RNA, 19 nt, Artificial Sequence
  Description of Artificial Sequence: Synthetic oligonucleotide
  Antisense strand to SEQ ID NO: 1321330
cuauguacggagaagucug

SEQ ID NO: 1321332 - RNA, 19 nt, Artificial Sequence
  Description of Artificial Sequence: Synthetic oligonucleotide
  Sense strand starting at position 3762 of SEQ ID NO: 1242068
cguucccauccguauaaua

SEQ ID NO: 1321333 - RNA, 19 nt, Artificial Sequence
  Description of Artificial Sequence: Synthetic oligonucleotide
  Antisense strand to SEQ ID NO: 1321332
uauuauacggaugggaacg

SEQ ID NO: 1321334 - RNA, 19 nt, Artificial Sequence
  Description of Artificial Sequence: Synthetic oligonucleotide
  Sense strand starting at position 3795 of SEQ ID NO: 1242068
cgcuguuccuuaguauuua

SEQ ID NO: 1321335 - RNA, 19 nt, Artificial Sequence
  Description of Artificial Sequence: Synthetic oligonucleotide
  Antisense strand to SEQ ID NO: 1321334
uaaauacuaaggaacagcg

SEQ ID NO: 1321336 - RNA, 19 nt, Artificial Sequence
  Description of Artificial Sequence: Synthetic oligonucleotide
  Sense strand starting at position 3819 of SEQ ID NO: 1242068
uuagcauaguacuugcaua

SEQ ID NO: 1321337 - RNA, 19 nt, Artificial Sequence
  Description of Artificial Sequence: Synthetic oligonucleotide
  Antisense strand to SEQ ID NO: 1321336
uaugcaaguacuaugcuaa

SEQ ID NO: 1321338 - RNA, 19 nt, Artificial Sequence
  Description of Artificial Sequence: Synthetic oligonucleotide
  Sense strand starting at position 3824 of SEQ ID NO: 1242068
auaguacuugcauauggua

SEQ ID NO: 1321339 - RNA, 19 nt, Artificial Sequence
  Description of Artificial Sequence: Synthetic oligonucleotide
  Antisense strand to SEQ ID NO: 1321338
uaccauaugcaaguacuau

SEQ ID NO: 1321340 - RNA, 19 nt, Artificial Sequence
  Description of Artificial Sequence: Synthetic oligonucleotide
  Sense strand starting at position 3837 of SEQ ID NO: 1242068
augguaggugcucaguuaa

SEQ ID NO: 1321341 - RNA, 19 nt, Artificial Sequence
  Description of Artificial Sequence: Synthetic oligonucleotide
  Antisense strand to SEQ ID NO: 1321340
uuaacugagcaccuaccau

SEQ ID NO: 1321342 - RNA, 19 nt, Artificial Sequence
  Description of Artificial Sequence: Synthetic oligonucleotide
  Sense strand starting at position 334 of SEQ ID NO: 1242069
ugucuaucccuccaguaga

SEQ ID NO: 1321343 - RNA, 19 nt, Artificial Sequence
  Description of Artificial Sequence: Synthetic oligonucleotide
  Antisense strand to SEQ ID NO: 1321342
ucuacuggagggauagaca

SEQ ID NO: 1321344 - RNA, 19 nt, Artificial Sequence
  Description of Artificial Sequence: Synthetic oligonucleotide
  Sense strand starting at position 342 of SEQ ID NO: 1242069
ccuccaguagacugcuauu

SEQ ID NO: 1321345 - RNA, 19 nt, Artificial Sequence
  Description of Artificial Sequence: Synthetic oligonucleotide
  Antisense strand to SEQ ID NO: 1321344
aauagcagucuacuggagg

SEQ ID NO: 1321346 - RNA, 19 nt, Artificial Sequence
  Description of Artificial Sequence: Synthetic oligonucleotide
  Sense strand starting at position 520 of SEQ ID NO: 1242069
ugaguaguugcgaggugga

SEQ ID NO: 1321347 - RNA, 19 nt, Artificial Sequence
  Description of Artificial Sequence: Synthetic oligonucleotide
  Antisense strand to SEQ ID NO: 1321346
uccaccucgcaacuacuca

SEQ ID NO: 1321348 - RNA, 19 nt, Artificial Sequence
  Description of Artificial Sequence: Synthetic oligonucleotide
  Sense strand starting at position 646 of SEQ ID NO: 1242069
gguugcaaauccuuguaaa

SEQ ID NO: 1321349 - RNA, 19 nt, Artificial Sequence
  Description of Artificial Sequence: Synthetic oligonucleotide
  Antisense strand to SEQ ID NO: 1321348
uuuacaaggauuugcaacc

SEQ ID NO: 1321350 - RNA, 19 nt, Artificial Sequence
  Description of Artificial Sequence: Synthetic oligonucleotide
  Sense strand starting at position 647 of SEQ ID NO: 1242069
guugcaaauccuuguaaau

SEQ ID NO: 1321351 - RNA, 19 nt, Artificial Sequence
  Description of Artificial Sequence: Synthetic oligonucleotide
  Antisense strand to SEQ ID NO: 1321350
auuuacaaggauuugcaac

SEQ ID NO: 1321352 - RNA, 19 nt, Artificial Sequence
  Description of Artificial Sequence: Synthetic oligonucleotide
  Sense strand starting at position 1279 of SEQ ID NO: 1242069
gggaguauaagucgguaua

SEQ ID NO: 1321353 - RNA, 19 nt, Artificial Sequence
  Description of Artificial Sequence: Synthetic oligonucleotide
  Antisense strand to SEQ ID NO: 1321352
uauaccgacuuauacuccc

SEQ ID NO: 1321354 - RNA, 19 nt, Artificial Sequence
  Description of Artificial Sequence: Synthetic oligonucleotide
  Sense strand starting at position 1280 of SEQ ID NO: 1242069
ggaguauaagucgguauaa

SEQ ID NO: 1321355 - RNA, 19 nt, Artificial Sequence
  Description of Artificial Sequence: Synthetic oligonucleotide
  Antisense strand to SEQ ID NO: 1321354
uuauaccgacuuauacucc

SEQ ID NO: 1321356 - RNA, 19 nt, Artificial Sequence
  Description of Artificial Sequence: Synthetic oligonucleotide
  Sense strand starting at position 1281 of SEQ ID NO: 1242069
gaguauaagucgguauaac

SEQ ID NO: 1321357 - RNA, 19 nt, Artificial Sequence
  Description of Artificial Sequence: Synthetic oligonucleotide
  Antisense strand to SEQ ID NO: 1321356
guuauaccgacuuauacuc

SEQ ID NO: 1321358 - RNA, 19 nt, Artificial Sequence
  Description of Artificial Sequence: Synthetic oligonucleotide
  Sense strand starting at position 1282 of SEQ ID NO: 1242069
aguauaagucgguauaacc

SEQ ID NO: 1321359 - RNA, 19 nt, Artificial Sequence
  Description of Artificial Sequence: Synthetic oligonucleotide
  Antisense strand to SEQ ID NO: 1321358
gguuauaccgacuuauacu

SEQ ID NO: 1321360 - RNA, 19 nt, Artificial Sequence
  Description of Artificial Sequence: Synthetic oligonucleotide
  Sense strand starting at position 1291 of SEQ ID NO: 1242069
cgguauaaccacuguagaa

SEQ ID NO: 1321361 - RNA, 19 nt, Artificial Sequence
  Description of Artificial Sequence: Synthetic oligonucleotide
  Antisense strand to SEQ ID NO: 1321360
uucuacagugguuauaccg

SEQ ID NO: 1321362 - RNA, 19 nt, Artificial Sequence
  Description of Artificial Sequence: Synthetic oligonucleotide
  Sense strand starting at position 1315 of SEQ ID NO: 1242069
guugguaggagcuacuaaa

SEQ ID NO: 1321363 - RNA, 19 nt, Artificial Sequence
  Description of Artificial Sequence: Synthetic oligonucleotide
  Antisense strand to SEQ ID NO: 1321362
uuuaguagcuccuaccaac

SEQ ID NO: 1321364 - RNA, 19 nt, Artificial Sequence
  Description of Artificial Sequence: Synthetic oligonucleotide
  Sense strand starting at position 1328 of SEQ ID NO: 1242069
acuaaagugaaacggauau

SEQ ID NO: 1321365 - RNA, 19 nt, Artificial Sequence
  Description of Artificial Sequence: Synthetic oligonucleotide
  Antisense strand to SEQ ID NO: 1321364
auauccguuucacuuuagu

SEQ ID NO: 1321366 - RNA, 19 nt, Artificial Sequence
  Description of Artificial Sequence: Synthetic oligonucleotide
  Sense strand starting at position 1334 of SEQ ID NO: 1242069
gugaaacggauauagucua

SEQ ID NO: 1321367 - RNA, 19 nt, Artificial Sequence
  Description of Artificial Sequence: Synthetic oligonucleotide
  Antisense strand to SEQ ID NO: 1321366
uagacuauauccguuucac

SEQ ID NO: 1321368 - RNA, 19 nt, Artificial Sequence
  Description of Artificial Sequence: Synthetic oligonucleotide
  Sense strand starting at position 1341 of SEQ ID NO: 1242069
ggauauagucuaugaccag

SEQ ID NO: 1321369 - RNA, 19 nt, Artificial Sequence
  Description of Artificial Sequence: Synthetic oligonucleotide
  Antisense strand to SEQ ID NO: 1321368
cuggucauagacuauaucc

SEQ ID NO: 1321370 - RNA, 19 nt, Artificial Sequence
  Description of Artificial Sequence: Synthetic oligonucleotide
  Sense strand starting at position 1347 of SEQ ID NO: 1242069
agucuaugaccaggcaauu

SEQ ID NO: 1321371 - RNA, 19 nt, Artificial Sequence
  Description of Artificial Sequence: Synthetic oligonucleotide
  Antisense strand to SEQ ID NO: 1321370
aauugccuggucauagacu

SEQ ID NO: 1321372 - RNA, 19 nt, Artificial Sequence
  Description of Artificial Sequence: Synthetic oligonucleotide
  Sense strand starting at position 1363 of SEQ ID NO: 1242069
auucuacucgugcauacau

SEQ ID NO: 1321373 - RNA, 19 nt, Artificial Sequence
  Description of Artificial Sequence: Synthetic oligonucleotide
  Antisense strand to SEQ ID NO: 1321372
auguaugcacgaguagaau

SEQ ID NO: 1321374 - RNA, 19 nt, Artificial Sequence
  Description of Artificial Sequence: Synthetic oligonucleotide
  Sense strand starting at position 1642 of SEQ ID NO: 1242069
augugucaccuggaucaaa

SEQ ID NO: 1321375 - RNA, 19 nt, Artificial Sequence
  Description of Artificial Sequence: Synthetic oligonucleotide
  Antisense strand to SEQ ID NO: 1321374
uuugauccaggugacacau

SEQ ID NO: 1321376 - RNA, 19 nt, Artificial Sequence
  Description of Artificial Sequence: Synthetic oligonucleotide
  Sense strand starting at position 2050 of SEQ ID NO: 1242069
uccuuaucuucucuggagu

SEQ ID NO: 1321377 - RNA, 19 nt, Artificial Sequence
  Description of Artificial Sequence: Synthetic oligonucleotide
  Antisense strand to SEQ ID NO: 1321376
acuccagagaagauaagga

SEQ ID NO: 1321378 - RNA, 19 nt, Artificial Sequence
  Description of Artificial Sequence: Synthetic oligonucleotide
  Sense strand starting at position 2246 of SEQ ID NO: 1242069
ggccacauguucuuaacau

SEQ ID NO: 1321379 - RNA, 19 nt, Artificial Sequence
  Description of Artificial Sequence: Synthetic oligonucleotide
  Antisense strand to SEQ ID NO: 1321378
auguuaagaacauguggcc

SEQ ID NO: 1321380 - RNA, 19 nt, Artificial Sequence
  Description of Artificial Sequence: Synthetic oligonucleotide
  Sense strand starting at position 2284 of SEQ ID NO: 1242069
ugccacugucagcuuugua

SEQ ID NO: 1321381 - RNA, 19 nt, Artificial Sequence
  Description of Artificial Sequence: Synthetic oligonucleotide
  Antisense strand to SEQ ID NO: 1321380
uacaaagcugacaguggca

SEQ ID NO: 1321382 - RNA, 19 nt, Artificial Sequence
  Description of Artificial Sequence: Synthetic oligonucleotide
  Sense strand starting at position 2291 of SEQ ID NO: 1242069
gucagcuuuguagaacuga

SEQ ID NO: 1321383 - RNA, 19 nt, Artificial Sequence
  Description of Artificial Sequence: Synthetic oligonucleotide
  Antisense strand to SEQ ID NO: 1321382
ucaguucuacaaagcugac

SEQ ID NO: 1321384 - RNA, 19 nt, Artificial Sequence
  Description of Artificial Sequence: Synthetic oligonucleotide
  Sense strand starting at position 2605 of SEQ ID NO: 1242069
ggcauaaauccugaguuau

SEQ ID NO: 1321385 - RNA, 19 nt, Artificial Sequence
  Description of Artificial Sequence: Synthetic oligonucleotide
  Antisense strand to SEQ ID NO: 1321384
auaacucaggauuuaugcc

SEQ ID NO: 1321386 - RNA, 19 nt, Artificial Sequence
  Description of Artificial Sequence: Synthetic oligonucleotide
  Sense strand starting at position 2607 of SEQ ID NO: 1242069
cauaaauccugaguuaugg

SEQ ID NO: 1321387 - RNA, 19 nt, Artificial Sequence
  Description of Artificial Sequence: Synthetic oligonucleotide
  Antisense strand to SEQ ID NO: 1321386
ccauaacucaggauuuaug

SEQ ID NO: 1321388 - RNA, 19 nt, Artificial Sequence
  Description of Artificial Sequence: Synthetic oligonucleotide
  Sense strand starting at position 2737 of SEQ ID NO: 1242069
ucauucugacaguguggaa

SEQ ID NO: 1321389 - RNA, 19 nt, Artificial Sequence
  Description of Artificial Sequence: Synthetic oligonucleotide
  Antisense strand to SEQ ID NO: 1321388
uuccacacugucagaauga

SEQ ID NO: 1321390 - RNA, 19 nt, Artificial Sequence
  Description of Artificial Sequence: Synthetic oligonucleotide
  Sense strand starting at position 2868 of SEQ ID NO: 1242069
ucaguaugaccguaaagaa

SEQ ID NO: 1321391 - RNA, 19 nt, Artificial Sequence
  Description of Artificial Sequence: Synthetic oligonucleotide
  Antisense strand to SEQ ID NO: 1321390
uucuuuacggucauacuga

SEQ ID NO: 1321392 - RNA, 19 nt, Artificial Sequence
  Description of Artificial Sequence: Synthetic oligonucleotide
  Sense strand starting at position 2920 of SEQ ID NO: 1242069
aucuccucgcaaugaaaga

SEQ ID NO: 1321393 - RNA, 19 nt, Artificial Sequence
  Description of Artificial Sequence: Synthetic oligonucleotide
  Antisense strand to SEQ ID NO: 1321392
ucuuucauugcgaggagau

SEQ ID NO: 1321394 - RNA, 19 nt, Artificial Sequence
  Description of Artificial Sequence: Synthetic oligonucleotide
  Sense strand starting at position 2931 of SEQ ID NO: 1242069
augaaagaaucugacccaa

SEQ ID NO: 1321395 - RNA, 19 nt, Artificial Sequence
  Description of Artificial Sequence: Synthetic oligonucleotide
  Antisense strand to SEQ ID NO: 1321394
uugggucagauucuuucau

SEQ ID NO: 1321396 - RNA, 19 nt, Artificial Sequence
  Description of Artificial Sequence: Synthetic oligonucleotide
  Sense strand starting at position 3068 of SEQ ID NO: 1242069
uauguauuagcagggugau

SEQ ID NO: 1321397 - RNA, 19 nt, Artificial Sequence
  Description of Artificial Sequence: Synthetic oligonucleotide
  Antisense strand to SEQ ID NO: 1321396
aucacccugcuaauacaua

SEQ ID NO: 1321398 - RNA, 19 nt, Artificial Sequence
  Description of Artificial Sequence: Synthetic oligonucleotide
  Sense strand starting at position 3069 of SEQ ID NO: 1242069
auguauuagcagggugaug

SEQ ID NO: 1321399 - RNA, 19 nt, Artificial Sequence
  Description of Artificial Sequence: Synthetic oligonucleotide
  Antisense strand to SEQ ID NO: 1321398
caucacccugcuaauacau

SEQ ID NO: 1321400 - RNA, 19 nt, Artificial Sequence
  Description of Artificial Sequence: Synthetic oligonucleotide
  Sense strand starting at position 3118 of SEQ ID NO: 1242069
agacaccagucuguauuau

SEQ ID NO: 1321401 - RNA, 19 nt, Artificial Sequence
  Description of Artificial Sequence: Synthetic oligonucleotide
  Antisense strand to SEQ ID NO: 1321400
auaauacagacuggugucu

SEQ ID NO: 1321402 - RNA, 19 nt, Artificial Sequence
  Description of Artificial Sequence: Synthetic oligonucleotide
  Sense strand starting at position 3149 of SEQ ID NO: 1242069
gucaccugugacugucaga

SEQ ID NO: 1321403 - RNA, 19 nt, Artificial Sequence
  Description of Artificial Sequence: Synthetic oligonucleotide
  Antisense strand to SEQ ID NO: 1321402
ucugacagucacaggugac

SEQ ID NO: 1321404 - RNA, 19 nt, Artificial Sequence
  Description of Artificial Sequence: Synthetic oligonucleotide
  Sense strand starting at position 3186 of SEQ ID NO: 1242069
gauucuuagguuggugaca

SEQ ID NO: 1321405 - RNA, 19 nt, Artificial Sequence
  Description of Artificial Sequence: Synthetic oligonucleotide
  Antisense strand to SEQ ID NO: 1321404
ugucaccaaccuaagaauc

SEQ ID NO: 1321406 - RNA, 19 nt, Artificial Sequence
  Description of Artificial Sequence: Synthetic oligonucleotide
  Sense strand starting at position 3228 of SEQ ID NO: 1242069
agagacuaggagugcuuau

SEQ ID NO: 1321407 - RNA, 19 nt, Artificial Sequence
  Description of Artificial Sequence: Synthetic oligonucleotide
  Antisense strand to SEQ ID NO: 1321406
auaagcacuccuagucucu

SEQ ID NO: 1321408 - RNA, 19 nt, Artificial Sequence
  Description of Artificial Sequence: Synthetic oligonucleotide
  Sense strand starting at position 3239 of SEQ ID NO: 1242069
gugcuuaucaaaugagguu

SEQ ID NO: 1321409 - RNA, 19 nt, Artificial Sequence
  Description of Artificial Sequence: Synthetic oligonucleotide
  Antisense strand to SEQ ID NO: 1321408
aaccucauuugauaagcac

SEQ ID NO: 1321410 - RNA, 19 nt, Artificial Sequence
  Description of Artificial Sequence: Synthetic oligonucleotide
  Sense strand starting at position 3403 of SEQ ID NO: 1242069
uugaaaugcugauuagaga

SEQ ID NO: 1321411 - RNA, 19 nt, Artificial Sequence
  Description of Artificial Sequence: Synthetic oligonucleotide
  Antisense strand to SEQ ID NO: 1321410
ucucuaaucagcauuucaa

SEQ ID NO: 1321412 - RNA, 19 nt, Artificial Sequence
  Description of Artificial Sequence: Synthetic oligonucleotide
  Sense strand starting at position 3411 of SEQ ID NO: 1242069
cugauuagagagcgaaagu

SEQ ID NO: 1321413 - RNA, 19 nt, Artificial Sequence
  Description of Artificial Sequence: Synthetic oligonucleotide
  Antisense strand to SEQ ID NO: 1321412
acuuucgcucucuaaucag

SEQ ID NO: 1321414 - RNA, 19 nt, Artificial Sequence
  Description of Artificial Sequence: Synthetic oligonucleotide
  Sense strand starting at position 3467 of SEQ ID NO: 1242069
aaaguuauuguaugaaagg

SEQ ID NO: 1321415 - RNA, 19 nt, Artificial Sequence
  Description of Artificial Sequence: Synthetic oligonucleotide
  Antisense strand to SEQ ID NO: 1321414
ccuuucauacaauaacuuu

SEQ ID NO: 1321416 - RNA, 19 nt, Artificial Sequence
  Description of Artificial Sequence: Synthetic oligonucleotide
  Sense strand starting at position 3509 of SEQ ID NO: 1242069
gugaauauguuggcaggua

SEQ ID NO: 1321417 - RNA, 19 nt, Artificial Sequence
  Description of Artificial Sequence: Synthetic oligonucleotide
  Antisense strand to SEQ ID NO: 1321416
uaccugccaacauauucac

SEQ ID NO: 1321418 - RNA, 19 nt, Artificial Sequence
  Description of Artificial Sequence: Synthetic oligonucleotide
  Sense strand starting at position 3514 of SEQ ID NO: 1242069
uauguuggcagguaagauu

SEQ ID NO: 1321419 - RNA, 19 nt, Artificial Sequence
  Description of Artificial Sequence: Synthetic oligonucleotide
  Antisense strand to SEQ ID NO: 1321418
aaucuuaccugccaacaua

SEQ ID NO: 1321420 - RNA, 19 nt, Artificial Sequence
  Description of Artificial Sequence: Synthetic oligonucleotide
  Sense strand starting at position 3929 of SEQ ID NO: 1242069
gcgagacuccggagucuca

SEQ ID NO: 1321421 - RNA, 19 nt, Artificial Sequence
  Description of Artificial Sequence: Synthetic oligonucleotide
  Antisense strand to SEQ ID NO: 1321420
ugagacuccggagucucgc

SEQ ID NO: 1321422 - RNA, 19 nt, Artificial Sequence
  Description of Artificial Sequence: Synthetic oligonucleotide
  Sense strand starting at position 87 of SEQ ID NO: 1242070
accggaagugguugucuca

SEQ ID NO: 1321423 - RNA, 19 nt, Artificial Sequence
  Description of Artificial Sequence: Synthetic oligonucleotide
  Antisense strand to SEQ ID NO: 1321422
ugagacaaccacuuccggu

SEQ ID NO: 1321424 - RNA, 19 nt, Artificial Sequence
  Description of Artificial Sequence: Synthetic oligonucleotide
  Sense strand starting at position 135 of SEQ ID NO: 1242070
cuuugcuccugcuggaaua

SEQ ID NO: 1321425 - RNA, 19 nt, Artificial Sequence
  Description of Artificial Sequence: Synthetic oligonucleotide
  Antisense strand to SEQ ID NO: 1321424
uauuccagcaggagcaaag

SEQ ID NO: 1321426 - RNA, 19 nt, Artificial Sequence
  Description of Artificial Sequence: Synthetic oligonucleotide
  Sense strand starting at position 313 of SEQ ID NO: 1242070
uugucacaaucacuuaagu

SEQ ID NO: 1321427 - RNA, 19 nt, Artificial Sequence
  Description of Artificial Sequence: Synthetic oligonucleotide
  Antisense strand to SEQ ID NO: 1321426
acuuaagugauugugacaa

SEQ ID NO: 1321428 - RNA, 19 nt, Artificial Sequence
  Description of Artificial Sequence: Synthetic oligonucleotide
  Sense strand starting at position 326 of SEQ ID NO: 1242070
uuaagugacugagagggau

SEQ ID NO: 1321429 - RNA, 19 nt, Artificial Sequence
  Description of Artificial Sequence: Synthetic oligonucleotide
  Antisense strand to SEQ ID NO: 1321428
aucccucucagucacuuaa

SEQ ID NO: 1321430 - RNA, 19 nt, Artificial Sequence
  Description of Artificial Sequence: Synthetic oligonucleotide
  Sense strand starting at position 485 of SEQ ID NO: 1242070
auuacauaggcaugaacua

SEQ ID NO: 1321431 - RNA, 19 nt, Artificial Sequence
  Description of Artificial Sequence: Synthetic oligonucleotide
  Antisense strand to SEQ ID NO: 1321430
uaguucaugccuauguaau

SEQ ID NO: 1321432 - RNA, 19 nt, Artificial Sequence
  Description of Artificial Sequence: Synthetic oligonucleotide
  Sense strand starting at position 530 of SEQ ID NO: 1242070
uccucaaaugccuguuagu

SEQ ID NO: 1321433 - RNA, 19 nt, Artificial Sequence
  Description of Artificial Sequence: Synthetic oligonucleotide
  Antisense strand to SEQ ID NO: 1321432
acuaacaggcauuugagga

SEQ ID NO: 1321434 - RNA, 19 nt, Artificial Sequence
  Description of Artificial Sequence: Synthetic oligonucleotide
  Sense strand starting at position 539 of SEQ ID NO: 1242070
gccuguuagugugaagaag

SEQ ID NO: 1321435 - RNA, 19 nt, Artificial Sequence
  Description of Artificial Sequence: Synthetic oligonucleotide
  Antisense strand to SEQ ID NO: 1321434
cuucuucacacuaacaggc

SEQ ID NO: 1321436 - RNA, 19 nt, Artificial Sequence
  Description of Artificial Sequence: Synthetic oligonucleotide
  Sense strand starting at position 806 of SEQ ID NO: 1242070
acccuaaguugagaugaua

SEQ ID NO: 1321437 - RNA, 19 nt, Artificial Sequence
  Description of Artificial Sequence: Synthetic oligonucleotide
  Antisense strand to SEQ ID NO: 1321436
uaucaucucaacuuagggu

SEQ ID NO: 1321438 - RNA, 19 nt, Artificial Sequence
  Description of Artificial Sequence: Synthetic oligonucleotide
  Sense strand starting at position 1228 of SEQ ID NO: 1242070
gggacuggguuauaagauc

SEQ ID NO: 1321439 - RNA, 19 nt, Artificial Sequence
  Description of Artificial Sequence: Synthetic oligonucleotide
  Antisense strand to SEQ ID NO: 1321438
gaucuuauaacccaguccc

SEQ ID NO: 1321440 - RNA, 19 nt, Artificial Sequence
  Description of Artificial Sequence: Synthetic oligonucleotide
  Sense strand starting at position 1607 of SEQ ID NO: 1242070
ggacgugagggcugaauau

SEQ ID NO: 1321441 - RNA, 19 nt, Artificial Sequence
  Description of Artificial Sequence: Synthetic oligonucleotide
  Antisense strand to SEQ ID NO: 1321440
auauucagcccucacgucc

SEQ ID NO: 1321442 - RNA, 19 nt, Artificial Sequence
  Description of Artificial Sequence: Synthetic oligonucleotide
  Sense strand starting at position 1895 of SEQ ID NO: 1242070
aauuuauucugucgagauu

SEQ ID NO: 1321443 - RNA, 19 nt, Artificial Sequence
  Description of Artificial Sequence: Synthetic oligonucleotide
  Antisense strand to SEQ ID NO: 1321442
aaucucgacagaauaaauu

SEQ ID NO: 1321444 - RNA, 19 nt, Artificial Sequence
  Description of Artificial Sequence: Synthetic oligonucleotide
  Sense strand starting at position 1898 of SEQ ID NO: 1242070
uuauucugucgagauucuu

SEQ ID NO: 1321445 - RNA, 19 nt, Artificial Sequence
  Description of Artificial Sequence: Synthetic oligonucleotide
  Antisense strand to SEQ ID NO: 1321444
aagaaucucgacagaauaa

SEQ ID NO: 1321446 - RNA, 19 nt, Artificial Sequence
  Description of Artificial Sequence: Synthetic oligonucleotide
  Sense strand starting at position 1904 of SEQ ID NO: 1242070
ugucgagauucuucuaaca

SEQ ID NO: 1321447 - RNA, 19 nt, Artificial Sequence
  Description of Artificial Sequence: Synthetic oligonucleotide
  Antisense strand to SEQ ID NO: 1321446
uguuagaagaaucucgaca

SEQ ID NO: 1321448 - RNA, 19 nt, Artificial Sequence
  Description of Artificial Sequence: Synthetic oligonucleotide
  Sense strand starting at position 1906 of SEQ ID NO: 1242070
ucgagauucuucuaacauc

SEQ ID NO: 1321449 - RNA, 19 nt, Artificial Sequence
  Description of Artificial Sequence: Synthetic oligonucleotide
  Antisense strand to SEQ ID NO: 1321448
gauguuagaagaaucucga

SEQ ID NO: 1321450 - RNA, 19 nt, Artificial Sequence
  Description of Artificial Sequence: Synthetic oligonucleotide
  Sense strand starting at position 2466 of SEQ ID NO: 1242070
cauguuugaugauuaauga

SEQ ID NO: 1321451 - RNA, 19 nt, Artificial Sequence
  Description of Artificial Sequence: Synthetic oligonucleotide
  Antisense strand to SEQ ID NO: 1321450
ucauuaaucaucaaacaug

SEQ ID NO: 1321452 - RNA, 19 nt, Artificial Sequence
  Description of Artificial Sequence: Synthetic oligonucleotide
  Sense strand starting at position 2532 of SEQ ID NO: 1242070
caaugauuucucggcuuug

SEQ ID NO: 1321453 - RNA, 19 nt, Artificial Sequence
  Description of Artificial Sequence: Synthetic oligonucleotide
  Antisense strand to SEQ ID NO: 1321452
caaagccgagaaaucauug

SEQ ID NO: 1321454 - RNA, 19 nt, Artificial Sequence
  Description of Artificial Sequence: Synthetic oligonucleotide
  Sense strand starting at position 3126 of SEQ ID NO: 1242070
uuaugucacuguguauuga

SEQ ID NO: 1321455 - RNA, 19 nt, Artificial Sequence
  Description of Artificial Sequence: Synthetic oligonucleotide
  Antisense strand to SEQ ID NO: 1321454
ucaauacacagugacauaa

SEQ ID NO: 1321456 - RNA, 19 nt, Artificial Sequence
  Description of Artificial Sequence: Synthetic oligonucleotide
  Sense strand starting at position 3127 of SEQ ID NO: 1242070
uaugucacuguguauugau

SEQ ID NO: 1321457 - RNA, 19 nt, Artificial Sequence
  Description of Artificial Sequence: Synthetic oligonucleotide
  Antisense strand to SEQ ID NO: 1321456
aucaauacacagugacaua

SEQ ID NO: 1321458 - RNA, 19 nt, Artificial Sequence
  Description of Artificial Sequence: Synthetic oligonucleotide
  Sense strand starting at position 3130 of SEQ ID NO: 1242070
gucacuguguauugauugu

SEQ ID NO: 1321459 - RNA, 19 nt, Artificial Sequence
  Description of Artificial Sequence: Synthetic oligonucleotide
  Antisense strand to SEQ ID NO: 1321458
acaaucaauacacagugac

SEQ ID NO: 1321460 - RNA, 19 nt, Artificial Sequence
  Description of Artificial Sequence: Synthetic oligonucleotide
  Sense strand starting at position 3137 of SEQ ID NO: 1242070
uguauugauuguuaccuga

SEQ ID NO: 1321461 - RNA, 19 nt, Artificial Sequence
  Description of Artificial Sequence: Synthetic oligonucleotide
  Antisense strand to SEQ ID NO: 1321460
ucagguaacaaucaauaca

SEQ ID NO: 1321462 - RNA, 19 nt, Artificial Sequence
  Description of Artificial Sequence: Synthetic oligonucleotide
  Sense strand starting at position 3140 of SEQ ID NO: 1242070
auugauuguuaccugaauu

SEQ ID NO: 1321463 - RNA, 19 nt, Artificial Sequence
  Description of Artificial Sequence: Synthetic oligonucleotide
  Antisense strand to SEQ ID NO: 1321462
aauucagguaacaaucaau

SEQ ID NO: 1321464 - RNA, 19 nt, Artificial Sequence
  Description of Artificial Sequence: Synthetic oligonucleotide
  Sense strand starting at position 3744 of SEQ ID NO: 1242070
guaagucucgggcacacua

SEQ ID NO: 1321465 - RNA, 19 nt, Artificial Sequence
  Description of Artificial Sequence: Synthetic oligonucleotide
  Antisense strand to SEQ ID NO: 1321464
uagugugcccgagacuuac

SEQ ID NO: 1321466 - RNA, 19 nt, Artificial Sequence
  Description of Artificial Sequence: Synthetic oligonucleotide
  Sense strand starting at position 3965 of SEQ ID NO: 1242071
acuucuugcuuucgauaga

SEQ ID NO: 1321467 - RNA, 19 nt, Artificial Sequence
  Description of Artificial Sequence: Synthetic oligonucleotide
  Antisense strand to SEQ ID NO: 1321466
ucuaucgaaagcaagaagu

SEQ ID NO: 1321468 - RNA, 19 nt, Artificial Sequence
  Description of Artificial Sequence: Synthetic oligonucleotide
  Sense strand starting at position 3966 of SEQ ID NO: 1242071
cuucuugcuuucgauagau

SEQ ID NO: 1321469 - RNA, 19 nt, Artificial Sequence
  Description of Artificial Sequence: Synthetic oligonucleotide
  Antisense strand to SEQ ID NO: 1321468
aucuaucgaaagcaagaag

SEQ ID NO: 1321470 - RNA, 19 nt, Artificial Sequence
  Description of Artificial Sequence: Synthetic oligonucleotide
  Sense strand starting at position 3968 of SEQ ID NO: 1242071
ucuugcuuucgauagauau

SEQ ID NO: 1321471 - RNA, 19 nt, Artificial Sequence
  Description of Artificial Sequence: Synthetic oligonucleotide
  Antisense strand to SEQ ID NO: 1321470
auaucuaucgaaagcaaga

SEQ ID NO: 1321472 - RNA, 19 nt, Artificial Sequence
  Description of Artificial Sequence: Synthetic oligonucleotide
  Sense strand starting at position 3972 of SEQ ID NO: 1242071
gcuuucgauagauauaaag

SEQ ID NO: 1321473 - RNA, 19 nt, Artificial Sequence
  Description of Artificial Sequence: Synthetic oligonucleotide
  Antisense strand to SEQ ID NO: 1321472
cuuuauaucuaucgaaagc

SEQ ID NO: 1321474 - RNA, 19 nt, Artificial Sequence
  Description of Artificial Sequence: Synthetic oligonucleotide
  Sense strand starting at position 537 of SEQ ID NO: 1242073
uccucaaaugccuguuagu

SEQ ID NO: 1321475 - RNA, 19 nt, Artificial Sequence
  Description of Artificial Sequence: Synthetic oligonucleotide
  Antisense strand to SEQ ID NO: 1321474
acuaacaggcauuugagga

SEQ ID NO: 1321476 - RNA, 19 nt, Artificial Sequence
  Description of Artificial Sequence: Synthetic oligonucleotide
  Sense strand starting at position 546 of SEQ ID NO: 1242073
gccuguuagugugaagaag

SEQ ID NO: 1321477 - RNA, 19 nt, Artificial Sequence
  Description of Artificial Sequence: Synthetic oligonucleotide
  Antisense strand to SEQ ID NO: 1321476
cuucuucacacuaacaggc

SEQ ID NO: 1321478 - RNA, 19 nt, Artificial Sequence
  Description of Artificial Sequence: Synthetic oligonucleotide
  Sense strand starting at position 3909 of SEQ ID NO: 1242073
agcguuaaaucagaauacu

SEQ ID NO: 1321479 - RNA, 19 nt, Artificial Sequence
  Description of Artificial Sequence: Synthetic oligonucleotide
  Antisense strand to SEQ ID NO: 1321478
aguauucugauuuaacgcu

SEQ ID NO: 1321480 - RNA, 19 nt, Artificial Sequence
  Description of Artificial Sequence: Synthetic oligonucleotide
  Sense strand starting at position 76 of SEQ ID NO: 1242075
ggcuacugccauugacuuu

SEQ ID NO: 1321481 - RNA, 19 nt, Artificial Sequence
  Description of Artificial Sequence: Synthetic oligonucleotide
  Antisense strand to SEQ ID NO: 1321480
aaagucaauggcaguagcc

SEQ ID NO: 1321482 - RNA, 19 nt, Artificial Sequence
  Description of Artificial Sequence: Synthetic oligonucleotide
  Sense strand starting at position 272 of SEQ ID NO: 1242075
cguacaagguguugucaca

SEQ ID NO: 1321483 - RNA, 19 nt, Artificial Sequence
  Description of Artificial Sequence: Synthetic oligonucleotide
  Antisense strand to SEQ ID NO: 1321482
ugugacaacaccuuguacg

SEQ ID NO: 1321484 - RNA, 19 nt, Artificial Sequence
  Description of Artificial Sequence: Synthetic oligonucleotide
  Sense strand starting at position 284 of SEQ ID NO: 1242075
ugucacaaucagugacuga

SEQ ID NO: 1321485 - RNA, 19 nt, Artificial Sequence
  Description of Artificial Sequence: Synthetic oligonucleotide
  Antisense strand to SEQ ID NO: 1321484
ucagucacugauugugaca

SEQ ID NO: 1321486 - RNA, 19 nt, Artificial Sequence
  Description of Artificial Sequence: Synthetic oligonucleotide
  Sense strand starting at position 641 of SEQ ID NO: 1242075
cagagcaaagucugguaua

SEQ ID NO: 1321487 - RNA, 19 nt, Artificial Sequence
  Description of Artificial Sequence: Synthetic oligonucleotide
  Antisense strand to SEQ ID NO: 1321486
uauaccagacuuugcucug

SEQ ID NO: 1321488 - RNA, 19 nt, Artificial Sequence
  Description of Artificial Sequence: Synthetic oligonucleotide
  Sense strand starting at position 642 of SEQ ID NO: 1242075
agagcaaagucugguauac

SEQ ID NO: 1321489 - RNA, 19 nt, Artificial Sequence
  Description of Artificial Sequence: Synthetic oligonucleotide
  Antisense strand to SEQ ID NO: 1321488
guauaccagacuuugcucu

SEQ ID NO: 1321490 - RNA, 19 nt, Artificial Sequence
  Description of Artificial Sequence: Synthetic oligonucleotide
  Sense strand starting at position 737 of SEQ ID NO: 1242075
ucagaaagaugucccgcau

SEQ ID NO: 1321491 - RNA, 19 nt, Artificial Sequence
  Description of Artificial Sequence: Synthetic oligonucleotide
  Antisense strand to SEQ ID NO: 1321490
augcgggacaucuuucuga

SEQ ID NO: 1321492 - RNA, 19 nt, Artificial Sequence
  Description of Artificial Sequence: Synthetic oligonucleotide
  Sense strand starting at position 750 of SEQ ID NO: 1242075
ccgcauuuauccuguggca

SEQ ID NO: 1321493 - RNA, 19 nt, Artificial Sequence
  Description of Artificial Sequence: Synthetic oligonucleotide
  Antisense strand to SEQ ID NO: 1321492
ugccacaggauaaaugcgg

SEQ ID NO: 1321494 - RNA, 19 nt, Artificial Sequence
  Description of Artificial Sequence: Synthetic oligonucleotide
  Sense strand starting at position 752 of SEQ ID NO: 1242075
gcauuuauccuguggcacu

SEQ ID NO: 1321495 - RNA, 19 nt, Artificial Sequence
  Description of Artificial Sequence: Synthetic oligonucleotide
  Antisense strand to SEQ ID NO: 1321494
agugccacaggauaaaugc

SEQ ID NO: 1321496 - RNA, 19 nt, Artificial Sequence
  Description of Artificial Sequence: Synthetic oligonucleotide
  Sense strand starting at position 1202 of SEQ ID NO: 1242075
gcuggucuugcagcaguaa

SEQ ID NO: 1321497 - RNA, 19 nt, Artificial Sequence
  Description of Artificial Sequence: Synthetic oligonucleotide
  Antisense strand to SEQ ID NO: 1321496
uuacugcugcaagaccagc

SEQ ID NO: 1321498 - RNA, 19 nt, Artificial Sequence
  Description of Artificial Sequence: Synthetic oligonucleotide
  Sense strand starting at position 1203 of SEQ ID NO: 1242075
cuggucuugcagcaguaau

SEQ ID NO: 1321499 - RNA, 19 nt, Artificial Sequence
  Description of Artificial Sequence: Synthetic oligonucleotide
  Antisense strand to SEQ ID NO: 1321498
auuacugcugcaagaccag

SEQ ID NO: 1321500 - RNA, 19 nt, Artificial Sequence
  Description of Artificial Sequence: Synthetic oligonucleotide
  Sense strand starting at position 3048 of SEQ ID NO: 1242075
acuugauacuuggcuauca

SEQ ID NO: 1321501 - RNA, 19 nt, Artificial Sequence
  Description of Artificial Sequence: Synthetic oligonucleotide
  Antisense strand to SEQ ID NO: 1321500
ugauagccaaguaucaagu

SEQ ID NO: 1321502 - RNA, 19 nt, Artificial Sequence
  Description of Artificial Sequence: Synthetic oligonucleotide
  Sense strand starting at position 3050 of SEQ ID NO: 1242075
uugauacuuggcuaucacu

SEQ ID NO: 1321503 - RNA, 19 nt, Artificial Sequence
  Description of Artificial Sequence: Synthetic oligonucleotide
  Antisense strand to SEQ ID NO: 1321502
agugauagccaaguaucaa

SEQ ID NO: 1321504 - RNA, 19 nt, Artificial Sequence
  Description of Artificial Sequence: Synthetic oligonucleotide
  Sense strand starting at position 3059 of SEQ ID NO: 1242075
ggcuaucacuugcagucau

SEQ ID NO: 1321505 - RNA, 19 nt, Artificial Sequence
  Description of Artificial Sequence: Synthetic oligonucleotide
  Antisense strand to SEQ ID NO: 1321504
augacugcaagugauagcc

SEQ ID NO: 1321506 - RNA, 19 nt, Artificial Sequence
  Description of Artificial Sequence: Synthetic oligonucleotide
  Sense strand starting at position 3472 of SEQ ID NO: 1242075
acuauauguucugucucua

SEQ ID NO: 1321507 - RNA, 19 nt, Artificial Sequence
  Description of Artificial Sequence: Synthetic oligonucleotide
  Antisense strand to SEQ ID NO: 1321506
uagagacagaacauauagu

SEQ ID NO: 1321508 - RNA, 19 nt, Artificial Sequence
  Description of Artificial Sequence: Synthetic oligonucleotide
  Sense strand starting at position 3477 of SEQ ID NO: 1242075
auguucugucucuauauga

SEQ ID NO: 1321509 - RNA, 19 nt, Artificial Sequence
  Description of Artificial Sequence: Synthetic oligonucleotide
  Antisense strand to SEQ ID NO: 1321508
ucauauagagacagaacau

SEQ ID NO: 1321510 - RNA, 19 nt, Artificial Sequence
  Description of Artificial Sequence: Synthetic oligonucleotide
  Sense strand starting at position 3542 of SEQ ID NO: 1242075
ccuuccagccaaugaguuu

SEQ ID NO: 1321511 - RNA, 19 nt, Artificial Sequence
  Description of Artificial Sequence: Synthetic oligonucleotide
  Antisense strand to SEQ ID NO: 1321510
aaacucauuggcuggaagg

SEQ ID NO: 1321512 - RNA, 19 nt, Artificial Sequence
  Description of Artificial Sequence: Synthetic oligonucleotide
  Sense strand starting at position 646 of SEQ ID NO: 1242076
cgcuuauaaaucuacguga

SEQ ID NO: 1321513 - RNA, 19 nt, Artificial Sequence
  Description of Artificial Sequence: Synthetic oligonucleotide
  Antisense strand to SEQ ID NO: 1321512
ucacguagauuuauaagcg

SEQ ID NO: 1321514 - RNA, 19 nt, Artificial Sequence
  Description of Artificial Sequence: Synthetic oligonucleotide
  Sense strand starting at position 648 of SEQ ID NO: 1242076
cuuauaaaucuacgugacu

SEQ ID NO: 1321515 - RNA, 19 nt, Artificial Sequence
  Description of Artificial Sequence: Synthetic oligonucleotide
  Antisense strand to SEQ ID NO: 1321514
agucacguagauuuauaag

SEQ ID NO: 1321516 - RNA, 19 nt, Artificial Sequence
  Description of Artificial Sequence: Synthetic oligonucleotide
  Sense strand starting at position 649 of SEQ ID NO: 1242076
uuauaaaucuacgugacuu

SEQ ID NO: 1321517 - RNA, 19 nt, Artificial Sequence
  Description of Artificial Sequence: Synthetic oligonucleotide
  Antisense strand to SEQ ID NO: 1321516
aagucacguagauuuauaa

SEQ ID NO: 1321518 - RNA, 19 nt, Artificial Sequence
  Description of Artificial Sequence: Synthetic oligonucleotide
  Sense strand starting at position 202 of SEQ ID NO: 1242078
agcgguaacacucaugaga

SEQ ID NO: 1321519 - RNA, 19 nt, Artificial Sequence
  Description of Artificial Sequence: Synthetic oligonucleotide
  Antisense strand to SEQ ID NO: 1321518
ucucaugaguguuaccgcu

SEQ ID NO: 1321520 - RNA, 19 nt, Artificial Sequence
  Description of Artificial Sequence: Synthetic oligonucleotide
  Sense strand starting at position 204 of SEQ ID NO: 1242078
cgguaacacucaugagaau

SEQ ID NO: 1321521 - RNA, 19 nt, Artificial Sequence
  Description of Artificial Sequence: Synthetic oligonucleotide
  Antisense strand to SEQ ID NO: 1321520
auucucaugaguguuaccg

SEQ ID NO: 1321522 - RNA, 19 nt, Artificial Sequence
  Description of Artificial Sequence: Synthetic oligonucleotide
  Sense strand starting at position 679 of SEQ ID NO: 1242078
cagagcgaagucugguaua

SEQ ID NO: 1321523 - RNA, 19 nt, Artificial Sequence
  Description of Artificial Sequence: Synthetic oligonucleotide
  Antisense strand to SEQ ID NO: 1321522
uauaccagacuucgcucug

SEQ ID NO: 1321524 - RNA, 19 nt, Artificial Sequence
  Description of Artificial Sequence: Synthetic oligonucleotide
  Sense strand starting at position 2403 of SEQ ID NO: 1242078
gcacaagaauuacaaguau

SEQ ID NO: 1321525 - RNA, 19 nt, Artificial Sequence
  Description of Artificial Sequence: Synthetic oligonucleotide
  Antisense strand to SEQ ID NO: 1321524
auacuuguaauucuugugc

SEQ ID NO: 1321526 - RNA, 19 nt, Artificial Sequence
  Description of Artificial Sequence: Synthetic oligonucleotide
  Sense strand starting at position 2465 of SEQ ID NO: 1242078
agcauucuugaugauuaau

SEQ ID NO: 1321527 - RNA, 19 nt, Artificial Sequence
  Description of Artificial Sequence: Synthetic oligonucleotide
  Antisense strand to SEQ ID NO: 1321526
auuaaucaucaagaaugcu

SEQ ID NO: 1321528 - RNA, 19 nt, Artificial Sequence
  Description of Artificial Sequence: Synthetic oligonucleotide
  Sense strand starting at position 2998 of SEQ ID NO: 1242078
agcucuuuauugguuuaaa

SEQ ID NO: 1321529 - RNA, 19 nt, Artificial Sequence
  Description of Artificial Sequence: Synthetic oligonucleotide
  Antisense strand to SEQ ID NO: 1321528
uuuaaaccaauaaagagcu

SEQ ID NO: 1321530 - RNA, 19 nt, Artificial Sequence
  Description of Artificial Sequence: Synthetic oligonucleotide
  Sense strand starting at position 3053 of SEQ ID NO: 1242078
cucucuaggccuugcaaau

SEQ ID NO: 1321531 - RNA, 19 nt, Artificial Sequence
  Description of Artificial Sequence: Synthetic oligonucleotide
  Antisense strand to SEQ ID NO: 1321530
auuugcaaggccuagagag

SEQ ID NO: 1321532 - RNA, 19 nt, Artificial Sequence
  Description of Artificial Sequence: Synthetic oligonucleotide
  Sense strand starting at position 3098 of SEQ ID NO: 1242078
ggcuaugacuugcagucau

SEQ ID NO: 1321533 - RNA, 19 nt, Artificial Sequence
  Description of Artificial Sequence: Synthetic oligonucleotide
  Antisense strand to SEQ ID NO: 1321532
augacugcaagucauagcc

SEQ ID NO: 1321534 - RNA, 19 nt, Artificial Sequence
  Description of Artificial Sequence: Synthetic oligonucleotide
  Sense strand starting at position 3602 of SEQ ID NO: 1242078
uuguaugaguuccauaaga

SEQ ID NO: 1321535 - RNA, 19 nt, Artificial Sequence
  Description of Artificial Sequence: Synthetic oligonucleotide
  Antisense strand to SEQ ID NO: 1321534
ucuuauggaacucauacaa

SEQ ID NO: 1321536 - RNA, 19 nt, Artificial Sequence
  Description of Artificial Sequence: Synthetic oligonucleotide
  Sense strand starting at position 3923 of SEQ ID NO: 1242078
accagaauacgccauucuu

SEQ ID NO: 1321537 - RNA, 19 nt, Artificial Sequence
  Description of Artificial Sequence: Synthetic oligonucleotide
  Antisense strand to SEQ ID NO: 1321536
aagaauggcguauucuggu

SEQ ID NO: 1321538 - RNA, 19 nt, Artificial Sequence
  Description of Artificial Sequence: Synthetic oligonucleotide
  Sense strand starting at position 2689 of SEQ ID NO: 1242079
gaacgugacucugucucua

SEQ ID NO: 1321539 - RNA, 19 nt, Artificial Sequence
  Description of Artificial Sequence: Synthetic oligonucleotide
  Antisense strand to SEQ ID NO: 1321538
uagagacagagucacguuc

SEQ ID NO: 1321540 - RNA, 19 nt, Artificial Sequence
  Description of Artificial Sequence: Synthetic oligonucleotide
  Sense strand starting at position 2691 of SEQ ID NO: 1242079
acgugacucugucucuaaa

SEQ ID NO: 1321541 - RNA, 19 nt, Artificial Sequence
  Description of Artificial Sequence: Synthetic oligonucleotide
  Antisense strand to SEQ ID NO: 1321540
uuuagagacagagucacgu

SEQ ID NO: 1321542 - RNA, 19 nt, Artificial Sequence
  Description of Artificial Sequence: Synthetic oligonucleotide
  Sense strand starting at position 204 of SEQ ID NO: 1242080
uguugcugacuccaagaga

SEQ ID NO: 1321543 - RNA, 19 nt, Artificial Sequence
  Description of Artificial Sequence: Synthetic oligonucleotide
  Antisense strand to SEQ ID NO: 1321542
ucucuuggagucagcaaca

SEQ ID NO: 1321544 - RNA, 19 nt, Artificial Sequence
  Description of Artificial Sequence: Synthetic oligonucleotide
  Sense strand starting at position 1541 of SEQ ID NO: 1242080
ucagaaagaugucccgcau

SEQ ID NO: 1321545 - RNA, 19 nt, Artificial Sequence
  Description of Artificial Sequence: Synthetic oligonucleotide
  Antisense strand to SEQ ID NO: 1321544
augcgggacaucuuucuga

SEQ ID NO: 1321546 - RNA, 19 nt, Artificial Sequence
  Description of Artificial Sequence: Synthetic oligonucleotide
  Sense strand starting at position 2901 of SEQ ID NO: 1242080
ccuguagcaucauaaggaa

SEQ ID NO: 1321547 - RNA, 19 nt, Artificial Sequence
  Description of Artificial Sequence: Synthetic oligonucleotide
  Antisense strand to SEQ ID NO: 1321546
uuccuuaugaugcuacagg

SEQ ID NO: 1321548 - RNA, 19 nt, Artificial Sequence
  Description of Artificial Sequence: Synthetic oligonucleotide
  Sense strand starting at position 3116 of SEQ ID NO: 1242080
ugcagcuucuaugcaaagu

SEQ ID NO: 1321549 - RNA, 19 nt, Artificial Sequence
  Description of Artificial Sequence: Synthetic oligonucleotide
  Antisense strand to SEQ ID NO: 1321548
acuuugcauagaagcugca

SEQ ID NO: 1321550 - RNA, 19 nt, Artificial Sequence
  Description of Artificial Sequence: Synthetic oligonucleotide
  Sense strand starting at position 3172 of SEQ ID NO: 1242080
gcacaagaauuacaaguau

SEQ ID NO: 1321551 - RNA, 19 nt, Artificial Sequence
  Description of Artificial Sequence: Synthetic oligonucleotide
  Antisense strand to SEQ ID NO: 1321550
auacuuguaauucuugugc

SEQ ID NO: 1321552 - RNA, 19 nt, Artificial Sequence
  Description of Artificial Sequence: Synthetic oligonucleotide
  Sense strand starting at position 3229 of SEQ ID NO: 1242080
uccauagcauucuugauga

SEQ ID NO: 1321553 - RNA, 19 nt, Artificial Sequence
  Description of Artificial Sequence: Synthetic oligonucleotide
  Antisense strand to SEQ ID NO: 1321552
ucaucaagaaugcuaugga

SEQ ID NO: 1321554 - RNA, 19 nt, Artificial Sequence
  Description of Artificial Sequence: Synthetic oligonucleotide
  Sense strand starting at position 3234 of SEQ ID NO: 1242080
agcauucuugaugauuaau

SEQ ID NO: 1321555 - RNA, 19 nt, Artificial Sequence
  Description of Artificial Sequence: Synthetic oligonucleotide
  Antisense strand to SEQ ID NO: 1321554
auuaaucaucaagaaugcu

SEQ ID NO: 1321556 - RNA, 19 nt, Artificial Sequence
  Description of Artificial Sequence: Synthetic oligonucleotide
  Sense strand starting at position 3249 of SEQ ID NO: 1242080
uaaugaagcugacuauagu

SEQ ID NO: 1321557 - RNA, 19 nt, Artificial Sequence
  Description of Artificial Sequence: Synthetic oligonucleotide
  Antisense strand to SEQ ID NO: 1321556
acuauagucagcuucauua

SEQ ID NO: 1321558 - RNA, 19 nt, Artificial Sequence
  Description of Artificial Sequence: Synthetic oligonucleotide
  Sense strand starting at position 3258 of SEQ ID NO: 1242080
ugacuauaguauccgacau

SEQ ID NO: 1321559 - RNA, 19 nt, Artificial Sequence
  Description of Artificial Sequence: Synthetic oligonucleotide
  Antisense strand to SEQ ID NO: 1321558
augucggauacuauaguca

SEQ ID NO: 1321560 - RNA, 19 nt, Artificial Sequence
  Description of Artificial Sequence: Synthetic oligonucleotide
  Sense strand starting at position 738 of SEQ ID NO: 1242081
ucagaaagaugucccgcau

SEQ ID NO: 1321561 - RNA, 19 nt, Artificial Sequence
  Description of Artificial Sequence: Synthetic oligonucleotide
  Antisense strand to SEQ ID NO: 1321560
augcgggacaucuuucuga

SEQ ID NO: 1321562 - RNA, 19 nt, Artificial Sequence
  Description of Artificial Sequence: Synthetic oligonucleotide
  Sense strand starting at position 2098 of SEQ ID NO: 1242081
ccuguagcaucauaaggaa

SEQ ID NO: 1321563 - RNA, 19 nt, Artificial Sequence
  Description of Artificial Sequence: Synthetic oligonucleotide
  Antisense strand to SEQ ID NO: 1321562
uuccuuaugaugcuacagg

SEQ ID NO: 1321564 - RNA, 19 nt, Artificial Sequence
  Description of Artificial Sequence: Synthetic oligonucleotide
  Sense strand starting at position 2313 of SEQ ID NO: 1242081
ugcagcuucuaugcaaagu

SEQ ID NO: 1321565 - RNA, 19 nt, Artificial Sequence
  Description of Artificial Sequence: Synthetic oligonucleotide
  Antisense strand to SEQ ID NO: 1321564
acuuugcauagaagcugca

SEQ ID NO: 1321566 - RNA, 19 nt, Artificial Sequence
  Description of Artificial Sequence: Synthetic oligonucleotide
  Sense strand starting at position 2369 of SEQ ID NO: 1242081
gcacaagaauuacaaguau

SEQ ID NO: 1321567 - RNA, 19 nt, Artificial Sequence
  Description of Artificial Sequence: Synthetic oligonucleotide
  Antisense strand to SEQ ID NO: 1321566
auacuuguaauucuugugc

SEQ ID NO: 1321568 - RNA, 19 nt, Artificial Sequence
  Description of Artificial Sequence: Synthetic oligonucleotide
  Sense strand starting at position 2426 of SEQ ID NO: 1242081
uccauagcauucuugauga

SEQ ID NO: 1321569 - RNA, 19 nt, Artificial Sequence
  Description of Artificial Sequence: Synthetic oligonucleotide
  Antisense strand to SEQ ID NO: 1321568
ucaucaagaaugcuaugga

SEQ ID NO: 1321570 - RNA, 19 nt, Artificial Sequence
  Description of Artificial Sequence: Synthetic oligonucleotide
  Sense strand starting at position 2431 of SEQ ID NO: 1242081
agcauucuugaugauuaau

SEQ ID NO: 1321571 - RNA, 19 nt, Artificial Sequence
  Description of Artificial Sequence: Synthetic oligonucleotide
  Antisense strand to SEQ ID NO: 1321570
auuaaucaucaagaaugcu

SEQ ID NO: 1321572 - RNA, 19 nt, Artificial Sequence
  Description of Artificial Sequence: Synthetic oligonucleotide
  Sense strand starting at position 2446 of SEQ ID NO: 1242081
uaaugaagcugacuauagu

SEQ ID NO: 1321573 - RNA, 19 nt, Artificial Sequence
  Description of Artificial Sequence: Synthetic oligonucleotide
  Antisense strand to SEQ ID NO: 1321572
acuauagucagcuucauua

SEQ ID NO: 1321574 - RNA, 19 nt, Artificial Sequence
  Description of Artificial Sequence: Synthetic oligonucleotide
  Sense strand starting at position 2455 of SEQ ID NO: 1242081
ugacuauaguauccgacau

SEQ ID NO: 1321575 - RNA, 19 nt, Artificial Sequence
  Description of Artificial Sequence: Synthetic oligonucleotide
  Antisense strand to SEQ ID NO: 1321574
augucggauacuauaguca

SEQ ID NO: 1321576 - RNA, 19 nt, Artificial Sequence
  Description of Artificial Sequence: Synthetic oligonucleotide
  Sense strand starting at position 306 of SEQ ID NO: 1242084
cguacaagguguugucaca

SEQ ID NO: 1321577 - RNA, 19 nt, Artificial Sequence
  Description of Artificial Sequence: Synthetic oligonucleotide
  Antisense strand to SEQ ID NO: 1321576
ugugacaacaccuuguacg

SEQ ID NO: 1321578 - RNA, 19 nt, Artificial Sequence
  Description of Artificial Sequence: Synthetic oligonucleotide
  Sense strand starting at position 2558 of SEQ ID NO: 1242084
cucuuauucuccugcguuu

SEQ ID NO: 1321579 - RNA, 19 nt, Artificial Sequence
  Description of Artificial Sequence: Synthetic oligonucleotide
  Antisense strand to SEQ ID NO: 1321578
aaacgcaggagaauaagag

SEQ ID NO: 1321580 - RNA, 19 nt, Artificial Sequence
  Description of Artificial Sequence: Synthetic oligonucleotide
  Sense strand starting at position 3078 of SEQ ID NO: 1242084
uguauacccuuauauguuu

SEQ ID NO: 1321581 - RNA, 19 nt, Artificial Sequence
  Description of Artificial Sequence: Synthetic oligonucleotide
  Antisense strand to SEQ ID NO: 1321580
aaacauauaaggguauaca

SEQ ID NO: 1321582 - RNA, 19 nt, Artificial Sequence
  Description of Artificial Sequence: Synthetic oligonucleotide
  Sense strand starting at position 3083 of SEQ ID NO: 1242084
acccuuauauguuuguuua

SEQ ID NO: 1321583 - RNA, 19 nt, Artificial Sequence
  Description of Artificial Sequence: Synthetic oligonucleotide
  Antisense strand to SEQ ID NO: 1321582
uaaacaaacauauaagggu

SEQ ID NO: 1321584 - RNA, 19 nt, Artificial Sequence
  Description of Artificial Sequence: Synthetic oligonucleotide
  Sense strand starting at position 3084 of SEQ ID NO: 1242084
cccuuauauguuuguuuaa

SEQ ID NO: 1321585 - RNA, 19 nt, Artificial Sequence
  Description of Artificial Sequence: Synthetic oligonucleotide
  Antisense strand to SEQ ID NO: 1321584
uuaaacaaacauauaaggg

SEQ ID NO: 1321586 - RNA, 19 nt, Artificial Sequence
  Description of Artificial Sequence: Synthetic oligonucleotide
  Sense strand starting at position 94 of SEQ ID NO: 1242085
guggcuuucucagggauac

SEQ ID NO: 1321587 - RNA, 19 nt, Artificial Sequence
  Description of Artificial Sequence: Synthetic oligonucleotide
  Antisense strand to SEQ ID NO: 1321586
guaucccugagaaagccac

SEQ ID NO: 1321588 - RNA, 19 nt, Artificial Sequence
  Description of Artificial Sequence: Synthetic oligonucleotide
  Sense strand starting at position 95 of SEQ ID NO: 1242085
uggcuuucucagggauacu

SEQ ID NO: 1321589 - RNA, 19 nt, Artificial Sequence
  Description of Artificial Sequence: Synthetic oligonucleotide
  Antisense strand to SEQ ID NO: 1321588
aguaucccugagaaagcca

SEQ ID NO: 1321590 - RNA, 19 nt, Artificial Sequence
  Description of Artificial Sequence: Synthetic oligonucleotide
  Sense strand starting at position 96 of SEQ ID NO: 1242085
ggcuuucucagggauacug

SEQ ID NO: 1321591 - RNA, 19 nt, Artificial Sequence
  Description of Artificial Sequence: Synthetic oligonucleotide
  Antisense strand to SEQ ID NO: 1321590
caguaucccugagaaagcc

SEQ ID NO: 1321592 - RNA, 19 nt, Artificial Sequence
  Description of Artificial Sequence: Synthetic oligonucleotide
  Sense strand starting at position 1230 of SEQ ID NO: 1242085
gggacugggucguaagauc

SEQ ID NO: 1321593 - RNA, 19 nt, Artificial Sequence
  Description of Artificial Sequence: Synthetic oligonucleotide
  Antisense strand to SEQ ID NO: 1321592
gaucuuacgacccaguccc

SEQ ID NO: 1321594 - RNA, 19 nt, Artificial Sequence
  Description of Artificial Sequence: Synthetic oligonucleotide
  Sense strand starting at position 3979 of SEQ ID NO: 1242085
cuucuuuauuagccaguga

SEQ ID NO: 1321595 - RNA, 19 nt, Artificial Sequence
  Description of Artificial Sequence: Synthetic oligonucleotide
  Antisense strand to SEQ ID NO: 1321594
ucacuggcuaauaaagaag

SEQ ID NO: 1321596 - RNA, 19 nt, Artificial Sequence
  Description of Artificial Sequence: Synthetic oligonucleotide
  Sense strand starting at position 1332 of SEQ ID NO: 1242086
gugucagcaccaugucuaa

SEQ ID NO: 1321597 - RNA, 19 nt, Artificial Sequence
  Description of Artificial Sequence: Synthetic oligonucleotide
  Antisense strand to SEQ ID NO: 1321596
uuagacauggugcugacac

SEQ ID NO: 1321598 - RNA, 19 nt, Artificial Sequence
  Description of Artificial Sequence: Synthetic oligonucleotide
  Sense strand starting at position 3261 of SEQ ID NO: 1242086
agucaaaccucugauaagu

SEQ ID NO: 1321599 - RNA, 19 nt, Artificial Sequence
  Description of Artificial Sequence: Synthetic oligonucleotide
  Antisense strand to SEQ ID NO: 1321598
acuuaucagagguuugacu

SEQ ID NO: 1321600 - RNA, 19 nt, Artificial Sequence
  Description of Artificial Sequence: Synthetic oligonucleotide
  Sense strand starting at position 2352 of SEQ ID NO: 1242087
cuaugcaagguccaugauu

SEQ ID NO: 1321601 - RNA, 19 nt, Artificial Sequence
  Description of Artificial Sequence: Synthetic oligonucleotide
  Antisense strand to SEQ ID NO: 1321600
aaucauggaccuugcauag

SEQ ID NO: 1321602 - RNA, 19 nt, Artificial Sequence
  Description of Artificial Sequence: Synthetic oligonucleotide
  Sense strand starting at position 3861 of SEQ ID NO: 1242087
acugauauauuuggccaga

SEQ ID NO: 1321603 - RNA, 19 nt, Artificial Sequence
  Description of Artificial Sequence: Synthetic oligonucleotide
  Antisense strand to SEQ ID NO: 1321602
ucuggccaaauauaucagu

SEQ ID NO: 1321604 - RNA, 19 nt, Artificial Sequence
  Description of Artificial Sequence: Synthetic oligonucleotide
  Sense strand starting at position 3901 of SEQ ID NO: 1242087
ccugguguguugucggaca

SEQ ID NO: 1321605 - RNA, 19 nt, Artificial Sequence
  Description of Artificial Sequence: Synthetic oligonucleotide
  Antisense strand to SEQ ID NO: 1321604
uguccgacaacacaccagg

SEQ ID NO: 1321606 - RNA, 19 nt, Artificial Sequence
  Description of Artificial Sequence: Synthetic oligonucleotide
  Sense strand starting at position 3903 of SEQ ID NO: 1242087
ugguguguugucggacauu

SEQ ID NO: 1321607 - RNA, 19 nt, Artificial Sequence
  Description of Artificial Sequence: Synthetic oligonucleotide
  Antisense strand to SEQ ID NO: 1321606
aauguccgacaacacacca

SEQ ID NO: 1321608 - RNA, 19 nt, Artificial Sequence
  Description of Artificial Sequence: Synthetic oligonucleotide
  Sense strand starting at position 3913 of SEQ ID NO: 1242087
ucggacauuuaguaacauu

SEQ ID NO: 1321609 - RNA, 19 nt, Artificial Sequence
  Description of Artificial Sequence: Synthetic oligonucleotide
  Antisense strand to SEQ ID NO: 1321608
aauguuacuaaauguccga

SEQ ID NO: 1321610 - RNA, 19 nt, Artificial Sequence
  Description of Artificial Sequence: Synthetic oligonucleotide
  Sense strand starting at position 92 of SEQ ID NO: 1242088
guggcuuucucagggauac

SEQ ID NO: 1321611 - RNA, 19 nt, Artificial Sequence
  Description of Artificial Sequence: Synthetic oligonucleotide
  Antisense strand to SEQ ID NO: 1321610
guaucccugagaaagccac

SEQ ID NO: 1321612 - RNA, 19 nt, Artificial Sequence
  Description of Artificial Sequence: Synthetic oligonucleotide
  Sense strand starting at position 93 of SEQ ID NO: 1242088
uggcuuucucagggauacu

SEQ ID NO: 1321613 - RNA, 19 nt, Artificial Sequence
  Description of Artificial Sequence: Synthetic oligonucleotide
  Antisense strand to SEQ ID NO: 1321612
aguaucccugagaaagcca

SEQ ID NO: 1321614 - RNA, 19 nt, Artificial Sequence
  Description of Artificial Sequence: Synthetic oligonucleotide
  Sense strand starting at position 94 of SEQ ID NO: 1242088
ggcuuucucagggauacug

SEQ ID NO: 1321615 - RNA, 19 nt, Artificial Sequence
  Description of Artificial Sequence: Synthetic oligonucleotide
  Antisense strand to SEQ ID NO: 1321614
caguaucccugagaaagcc

SEQ ID NO: 1321616 - RNA, 19 nt, Artificial Sequence
  Description of Artificial Sequence: Synthetic oligonucleotide
  Sense strand starting at position 1228 of SEQ ID NO: 1242088
gggacugggucguaagauc

SEQ ID NO: 1321617 - RNA, 19 nt, Artificial Sequence
  Description of Artificial Sequence: Synthetic oligonucleotide
  Antisense strand to SEQ ID NO: 1321616
gaucuuacgacccaguccc

SEQ ID NO: 1321618 - RNA, 19 nt, Artificial Sequence
  Description of Artificial Sequence: Synthetic oligonucleotide
  Sense strand starting at position 3977 of SEQ ID NO: 1242088
cuucuuuauuagccaguga

SEQ ID NO: 1321619 - RNA, 19 nt, Artificial Sequence
  Description of Artificial Sequence: Synthetic oligonucleotide
  Antisense strand to SEQ ID NO: 1321618
ucacuggcuaauaaagaag

SEQ ID NO: 1321620 - RNA, 19 nt, Artificial Sequence
  Description of Artificial Sequence: Synthetic oligonucleotide
  Sense strand starting at position 810 of SEQ ID NO: 1242089
acccaaaguugagauaaua

SEQ ID NO: 1321621 - RNA, 19 nt, Artificial Sequence
  Description of Artificial Sequence: Synthetic oligonucleotide
  Antisense strand to SEQ ID NO: 1321620
uauuaucucaacuuugggu

SEQ ID NO: 1321622 - RNA, 19 nt, Artificial Sequence
  Description of Artificial Sequence: Synthetic oligonucleotide
  Sense strand starting at position 1047 of SEQ ID NO: 1242089
cagagauaccgucaauguu

SEQ ID NO: 1321623 - RNA, 19 nt, Artificial Sequence
  Description of Artificial Sequence: Synthetic oligonucleotide
  Antisense strand to SEQ ID NO: 1321622
aacauugacgguaucucug

SEQ ID NO: 1321624 - RNA, 19 nt, Artificial Sequence
  Description of Artificial Sequence: Synthetic oligonucleotide
  Sense strand starting at position 1332 of SEQ ID NO: 1242089
augucagcaccaugucuaa

SEQ ID NO: 1321625 - RNA, 19 nt, Artificial Sequence
  Description of Artificial Sequence: Synthetic oligonucleotide
  Antisense strand to SEQ ID NO: 1321624
uuagacauggugcugacau

SEQ ID NO: 1321626 - RNA, 19 nt, Artificial Sequence
  Description of Artificial Sequence: Synthetic oligonucleotide
  Sense strand starting at position 1529 of SEQ ID NO: 1242089
gggccuggcuccucagaga

SEQ ID NO: 1321627 - RNA, 19 nt, Artificial Sequence
  Description of Artificial Sequence: Synthetic oligonucleotide
  Antisense strand to SEQ ID NO: 1321626
ucucugaggagccaggccc

SEQ ID NO: 1321628 - RNA, 19 nt, Artificial Sequence
  Description of Artificial Sequence: Synthetic oligonucleotide
  Sense strand starting at position 1532 of SEQ ID NO: 1242089
ccuggcuccucagagauga

SEQ ID NO: 1321629 - RNA, 19 nt, Artificial Sequence
  Description of Artificial Sequence: Synthetic oligonucleotide
  Antisense strand to SEQ ID NO: 1321628
ucaucucugaggagccagg

SEQ ID NO: 1321630 - RNA, 19 nt, Artificial Sequence
  Description of Artificial Sequence: Synthetic oligonucleotide
  Sense strand starting at position 2300 of SEQ ID NO: 1242089
gugugugcguaucuauguu

SEQ ID NO: 1321631 - RNA, 19 nt, Artificial Sequence
  Description of Artificial Sequence: Synthetic oligonucleotide
  Antisense strand to SEQ ID NO: 1321630
aacauagauacgcacacac

SEQ ID NO: 1321632 - RNA, 19 nt, Artificial Sequence
  Description of Artificial Sequence: Synthetic oligonucleotide
  Sense strand starting at position 3158 of SEQ ID NO: 1242089
agaaauaauuaagacguca

SEQ ID NO: 1321633 - RNA, 19 nt, Artificial Sequence
  Description of Artificial Sequence: Synthetic oligonucleotide
  Antisense strand to SEQ ID NO: 1321632
ugacgucuuaauuauuucu

SEQ ID NO: 1321634 - RNA, 19 nt, Artificial Sequence
  Description of Artificial Sequence: Synthetic oligonucleotide
  Sense strand starting at position 306 of SEQ ID NO: 1242090
cguacaagguguugucaca

SEQ ID NO: 1321635 - RNA, 19 nt, Artificial Sequence
  Description of Artificial Sequence: Synthetic oligonucleotide
  Antisense strand to SEQ ID NO: 1321634
ugugacaacaccuuguacg

SEQ ID NO: 1321636 - RNA, 19 nt, Artificial Sequence
  Description of Artificial Sequence: Synthetic oligonucleotide
  Sense strand starting at position 2558 of SEQ ID NO: 1242090
cucuuauucuccugcguuu

SEQ ID NO: 1321637 - RNA, 19 nt, Artificial Sequence
  Description of Artificial Sequence: Synthetic oligonucleotide
  Antisense strand to SEQ ID NO: 1321636
aaacgcaggagaauaagag

SEQ ID NO: 1321638 - RNA, 19 nt, Artificial Sequence
  Description of Artificial Sequence: Synthetic oligonucleotide
  Sense strand starting at position 3078 of SEQ ID NO: 1242090
uguauacccuuauauguuu

SEQ ID NO: 1321639 - RNA, 19 nt, Artificial Sequence
  Description of Artificial Sequence: Synthetic oligonucleotide
  Antisense strand to SEQ ID NO: 1321638
aaacauauaaggguauaca

SEQ ID NO: 1321640 - RNA, 19 nt, Artificial Sequence
  Description of Artificial Sequence: Synthetic oligonucleotide
  Sense strand starting at position 3083 of SEQ ID NO: 1242090
acccuuauauguuuguuua

SEQ ID NO: 1321641 - RNA, 19 nt, Artificial Sequence
  Description of Artificial Sequence: Synthetic oligonucleotide
  Antisense strand to SEQ ID NO: 1321640
uaaacaaacauauaagggu

SEQ ID NO: 1321642 - RNA, 19 nt, Artificial Sequence
  Description of Artificial Sequence: Synthetic oligonucleotide
  Sense strand starting at position 3084 of SEQ ID NO: 1242090
cccuuauauguuuguuuaa

SEQ ID NO: 1321643 - RNA, 19 nt, Artificial Sequence
  Description of Artificial Sequence: Synthetic oligonucleotide
  Antisense strand to SEQ ID NO: 1321642
uuaaacaaacauauaaggg

SEQ ID NO: 1321644 - RNA, 19 nt, Artificial Sequence
  Description of Artificial Sequence: Synthetic oligonucleotide
  Sense strand starting at position 1048 of SEQ ID NO: 1242091
cagagauacugucauuguu

SEQ ID NO: 1321645 - RNA, 19 nt, Artificial Sequence
  Description of Artificial Sequence: Synthetic oligonucleotide
  Antisense strand to SEQ ID NO: 1321644
aacaaugacaguaucucug

SEQ ID NO: 1321646 - RNA, 19 nt, Artificial Sequence
  Description of Artificial Sequence: Synthetic oligonucleotide
  Sense strand starting at position 490 of SEQ ID NO: 1242093
uuaaguaggcaggaaaugu

SEQ ID NO: 1321647 - RNA, 19 nt, Artificial Sequence
  Description of Artificial Sequence: Synthetic oligonucleotide
  Antisense strand to SEQ ID NO: 1321646
acauuuccugccuacuuaa

SEQ ID NO: 1321648 - RNA, 19 nt, Artificial Sequence
  Description of Artificial Sequence: Synthetic oligonucleotide
  Sense strand starting at position 498 of SEQ ID NO: 1242093
gcaggaaauguaugccaug

SEQ ID NO: 1321649 - RNA, 19 nt, Artificial Sequence
  Description of Artificial Sequence: Synthetic oligonucleotide
  Antisense strand to SEQ ID NO: 1321648
cauggcauacauuuccugc

SEQ ID NO: 1321650 - RNA, 19 nt, Artificial Sequence
  Description of Artificial Sequence: Synthetic oligonucleotide
  Sense strand starting at position 503 of SEQ ID NO: 1242093
aaauguaugccaugugguu

SEQ ID NO: 1321651 - RNA, 19 nt, Artificial Sequence
  Description of Artificial Sequence: Synthetic oligonucleotide
  Antisense strand to SEQ ID NO: 1321650
aaccacauggcauacauuu

SEQ ID NO: 1321652 - RNA, 19 nt, Artificial Sequence
  Description of Artificial Sequence: Synthetic oligonucleotide
  Sense strand starting at position 505 of SEQ ID NO: 1242093
auguaugccaugugguuua

SEQ ID NO: 1321653 - RNA, 19 nt, Artificial Sequence
  Description of Artificial Sequence: Synthetic oligonucleotide
  Antisense strand to SEQ ID NO: 1321652
uaaaccacauggcauacau

SEQ ID NO: 1321654 - RNA, 19 nt, Artificial Sequence
  Description of Artificial Sequence: Synthetic oligonucleotide
  Sense strand starting at position 141 of SEQ ID NO: 1242094
augaauauugcuuguauca

SEQ ID NO: 1321655 - RNA, 19 nt, Artificial Sequence
  Description of Artificial Sequence: Synthetic oligonucleotide
  Antisense strand to SEQ ID NO: 1321654
ugauacaagcaauauucau

SEQ ID NO: 1321656 - RNA, 19 nt, Artificial Sequence
  Description of Artificial Sequence: Synthetic oligonucleotide
  Sense strand starting at position 167 of SEQ ID NO: 1242094
uuugaagaggagcgauaaa

SEQ ID NO: 1321657 - RNA, 19 nt, Artificial Sequence
  Description of Artificial Sequence: Synthetic oligonucleotide
  Antisense strand to SEQ ID NO: 1321656
uuuaucgcuccucuucaaa

SEQ ID NO: 1321658 - RNA, 19 nt, Artificial Sequence
  Description of Artificial Sequence: Synthetic oligonucleotide
  Sense strand starting at position 177 of SEQ ID NO: 1242094
agcgauaaagacuauuauc

SEQ ID NO: 1321659 - RNA, 19 nt, Artificial Sequence
  Description of Artificial Sequence: Synthetic oligonucleotide
  Antisense strand to SEQ ID NO: 1321658
gauaauagucuuuaucgcu

SEQ ID NO: 1321660 - RNA, 19 nt, Artificial Sequence
  Description of Artificial Sequence: Synthetic oligonucleotide
  Sense strand starting at position 196 of SEQ ID NO: 1242094
auuuaagaguagugagaag

SEQ ID NO: 1321661 - RNA, 19 nt, Artificial Sequence
  Description of Artificial Sequence: Synthetic oligonucleotide
  Antisense strand to SEQ ID NO: 1321660
cuucucacuacucuuaaau

SEQ ID NO: 1321662 - RNA, 19 nt, Artificial Sequence
  Description of Artificial Sequence: Synthetic oligonucleotide
  Sense strand starting at position 207 of SEQ ID NO: 1242094
gugagaaguacagguaauu

SEQ ID NO: 1321663 - RNA, 19 nt, Artificial Sequence
  Description of Artificial Sequence: Synthetic oligonucleotide
  Antisense strand to SEQ ID NO: 1321662
aauuaccuguacuucucac

SEQ ID NO: 1321664 - RNA, 19 nt, Artificial Sequence
  Description of Artificial Sequence: Synthetic oligonucleotide
  Sense strand starting at position 229 of SEQ ID NO: 1242094
acacuaguaggcuaauauu

SEQ ID NO: 1321665 - RNA, 19 nt, Artificial Sequence
  Description of Artificial Sequence: Synthetic oligonucleotide
  Antisense strand to SEQ ID NO: 1321664
aauauuagccuacuagugu

SEQ ID NO: 1321666 - RNA, 19 nt, Artificial Sequence
  Description of Artificial Sequence: Synthetic oligonucleotide
  Sense strand starting at position 401 of SEQ ID NO: 1242094
uuaaauaaucgacaggcga

SEQ ID NO: 1321667 - RNA, 19 nt, Artificial Sequence
  Description of Artificial Sequence: Synthetic oligonucleotide
  Antisense strand to SEQ ID NO: 1321666
ucgccugucgauuauuuaa

SEQ ID NO: 1321668 - RNA, 19 nt, Artificial Sequence
  Description of Artificial Sequence: Synthetic oligonucleotide
  Sense strand starting at position 568 of SEQ ID NO: 1242094
ucuuuaacagaauggguaa

SEQ ID NO: 1321669 - RNA, 19 nt, Artificial Sequence
  Description of Artificial Sequence: Synthetic oligonucleotide
  Antisense strand to SEQ ID NO: 1321668
uuacccauucuguuaaaga

SEQ ID NO: 1321670 - RNA, 19 nt, Artificial Sequence
  Description of Artificial Sequence: Synthetic oligonucleotide
  Sense strand starting at position 629 of SEQ ID NO: 1242094
auuccucgcuauuuguaaa

SEQ ID NO: 1321671 - RNA, 19 nt, Artificial Sequence
  Description of Artificial Sequence: Synthetic oligonucleotide
  Antisense strand to SEQ ID NO: 1321670
uuuacaaauagcgaggaau

SEQ ID NO: 1321672 - RNA, 19 nt, Artificial Sequence
  Description of Artificial Sequence: Synthetic oligonucleotide
  Sense strand starting at position 1470 of SEQ ID NO: 1242094
ggaggcauucgauggucaa

SEQ ID NO: 1321673 - RNA, 19 nt, Artificial Sequence
  Description of Artificial Sequence: Synthetic oligonucleotide
  Antisense strand to SEQ ID NO: 1321672
uugaccaucgaaugccucc

SEQ ID NO: 1321674 - RNA, 19 nt, Artificial Sequence
  Description of Artificial Sequence: Synthetic oligonucleotide
  Sense strand starting at position 1471 of SEQ ID NO: 1242094
gaggcauucgauggucaag

SEQ ID NO: 1321675 - RNA, 19 nt, Artificial Sequence
  Description of Artificial Sequence: Synthetic oligonucleotide
  Antisense strand to SEQ ID NO: 1321674
cuugaccaucgaaugccuc

SEQ ID NO: 1321676 - RNA, 19 nt, Artificial Sequence
  Description of Artificial Sequence: Synthetic oligonucleotide
  Sense strand starting at position 1473 of SEQ ID NO: 1242094
ggcauucgauggucaagga

SEQ ID NO: 1321677 - RNA, 19 nt, Artificial Sequence
  Description of Artificial Sequence: Synthetic oligonucleotide
  Antisense strand to SEQ ID NO: 1321676
uccuugaccaucgaaugcc

SEQ ID NO: 1321678 - RNA, 19 nt, Artificial Sequence
  Description of Artificial Sequence: Synthetic oligonucleotide
  Sense strand starting at position 2293 of SEQ ID NO: 1242094
cugccugcgguguuagaau

SEQ ID NO: 1321679 - RNA, 19 nt, Artificial Sequence
  Description of Artificial Sequence: Synthetic oligonucleotide
  Antisense strand to SEQ ID NO: 1321678
auucuaacaccgcaggcag

SEQ ID NO: 1321680 - RNA, 19 nt, Artificial Sequence
  Description of Artificial Sequence: Synthetic oligonucleotide
  Sense strand starting at position 2370 of SEQ ID NO: 1242094
ggguguagcuggagcauuu

SEQ ID NO: 1321681 - RNA, 19 nt, Artificial Sequence
  Description of Artificial Sequence: Synthetic oligonucleotide
  Antisense strand to SEQ ID NO: 1321680
aaaugcuccagcuacaccc

SEQ ID NO: 1321682 - RNA, 19 nt, Artificial Sequence
  Description of Artificial Sequence: Synthetic oligonucleotide
  Sense strand starting at position 2500 of SEQ ID NO: 1242094
aauguugggagcugggaua

SEQ ID NO: 1321683 - RNA, 19 nt, Artificial Sequence
  Description of Artificial Sequence: Synthetic oligonucleotide
  Antisense strand to SEQ ID NO: 1321682
uaucccagcucccaacauu

SEQ ID NO: 1321684 - RNA, 19 nt, Artificial Sequence
  Description of Artificial Sequence: Synthetic oligonucleotide
  Sense strand starting at position 2613 of SEQ ID NO: 1242094
cguggucgacuuuauggaa

SEQ ID NO: 1321685 - RNA, 19 nt, Artificial Sequence
  Description of Artificial Sequence: Synthetic oligonucleotide
  Antisense strand to SEQ ID NO: 1321684
uuccauaaagucgaccacg

SEQ ID NO: 1321686 - RNA, 19 nt, Artificial Sequence
  Description of Artificial Sequence: Synthetic oligonucleotide
  Sense strand starting at position 2649 of SEQ ID NO: 1242094
aagugagguacaugguaga

SEQ ID NO: 1321687 - RNA, 19 nt, Artificial Sequence
  Description of Artificial Sequence: Synthetic oligonucleotide
  Antisense strand to SEQ ID NO: 1321686
ucuaccauguaccucacuu

SEQ ID NO: 1321688 - RNA, 19 nt, Artificial Sequence
  Description of Artificial Sequence: Synthetic oligonucleotide
  Sense strand starting at position 2671 of SEQ ID NO: 1242094
cuuugacauguugauuaug

SEQ ID NO: 1321689 - RNA, 19 nt, Artificial Sequence
  Description of Artificial Sequence: Synthetic oligonucleotide
  Antisense strand to SEQ ID NO: 1321688
cauaaucaacaugucaaag

SEQ ID NO: 1321690 - RNA, 19 nt, Artificial Sequence
  Description of Artificial Sequence: Synthetic oligonucleotide
  Sense strand starting at position 2674 of SEQ ID NO: 1242094
ugacauguugauuauguga

SEQ ID NO: 1321691 - RNA, 19 nt, Artificial Sequence
  Description of Artificial Sequence: Synthetic oligonucleotide
  Antisense strand to SEQ ID NO: 1321690
ucacauaaucaacauguca

SEQ ID NO: 1321692 - RNA, 19 nt, Artificial Sequence
  Description of Artificial Sequence: Synthetic oligonucleotide
  Sense strand starting at position 2801 of SEQ ID NO: 1242094
cuuauuuacucuugaaagg

SEQ ID NO: 1321693 - RNA, 19 nt, Artificial Sequence
  Description of Artificial Sequence: Synthetic oligonucleotide
  Antisense strand to SEQ ID NO: 1321692
ccuuucaagaguaaauaag

SEQ ID NO: 1321694 - RNA, 19 nt, Artificial Sequence
  Description of Artificial Sequence: Synthetic oligonucleotide
  Sense strand starting at position 2828 of SEQ ID NO: 1242094
ccgugucuuguacauauuu

SEQ ID NO: 1321695 - RNA, 19 nt, Artificial Sequence
  Description of Artificial Sequence: Synthetic oligonucleotide
  Antisense strand to SEQ ID NO: 1321694
aaauauguacaagacacgg

SEQ ID NO: 1321696 - RNA, 19 nt, Artificial Sequence
  Description of Artificial Sequence: Synthetic oligonucleotide
  Sense strand starting at position 2867 of SEQ ID NO: 1242094
cauaguaaucuaugugaga

SEQ ID NO: 1321697 - RNA, 19 nt, Artificial Sequence
  Description of Artificial Sequence: Synthetic oligonucleotide
  Antisense strand to SEQ ID NO: 1321696
ucucacauagauuacuaug

SEQ ID NO: 1321698 - RNA, 19 nt, Artificial Sequence
  Description of Artificial Sequence: Synthetic oligonucleotide
  Sense strand starting at position 2868 of SEQ ID NO: 1242094
auaguaaucuaugugagaa

SEQ ID NO: 1321699 - RNA, 19 nt, Artificial Sequence
  Description of Artificial Sequence: Synthetic oligonucleotide
  Antisense strand to SEQ ID NO: 1321698
uucucacauagauuacuau

SEQ ID NO: 1321700 - RNA, 19 nt, Artificial Sequence
  Description of Artificial Sequence: Synthetic oligonucleotide
  Sense strand starting at position 2974 of SEQ ID NO: 1242094
acgccauuaccagcgguua

SEQ ID NO: 1321701 - RNA, 19 nt, Artificial Sequence
  Description of Artificial Sequence: Synthetic oligonucleotide
  Antisense strand to SEQ ID NO: 1321700
uaaccgcugguaauggcgu

SEQ ID NO: 1321702 - RNA, 19 nt, Artificial Sequence
  Description of Artificial Sequence: Synthetic oligonucleotide
  Sense strand starting at position 2979 of SEQ ID NO: 1242094
auuaccagcgguuaacauu

SEQ ID NO: 1321703 - RNA, 19 nt, Artificial Sequence
  Description of Artificial Sequence: Synthetic oligonucleotide
  Antisense strand to SEQ ID NO: 1321702
aauguuaaccgcugguaau

SEQ ID NO: 1321704 - RNA, 19 nt, Artificial Sequence
  Description of Artificial Sequence: Synthetic oligonucleotide
  Sense strand starting at position 2999 of SEQ ID NO: 1242094
guuccaggaguccaaacau

SEQ ID NO: 1321705 - RNA, 19 nt, Artificial Sequence
  Description of Artificial Sequence: Synthetic oligonucleotide
  Antisense strand to SEQ ID NO: 1321704
auguuuggacuccuggaac

SEQ ID NO: 1321706 - RNA, 19 nt, Artificial Sequence
  Description of Artificial Sequence: Synthetic oligonucleotide
  Sense strand starting at position 3108 of SEQ ID NO: 1242094
guugaagaaucuguguaaa

SEQ ID NO: 1321707 - RNA, 19 nt, Artificial Sequence
  Description of Artificial Sequence: Synthetic oligonucleotide
  Antisense strand to SEQ ID NO: 1321706
uuuacacagauucuucaac

SEQ ID NO: 1321708 - RNA, 19 nt, Artificial Sequence
  Description of Artificial Sequence: Synthetic oligonucleotide
  Sense strand starting at position 3121 of SEQ ID NO: 1242094
uguaaauagaguuguuuga

SEQ ID NO: 1321709 - RNA, 19 nt, Artificial Sequence
  Description of Artificial Sequence: Synthetic oligonucleotide
  Antisense strand to SEQ ID NO: 1321708
ucaaacaacucuauuuaca

SEQ ID NO: 1321710 - RNA, 19 nt, Artificial Sequence
  Description of Artificial Sequence: Synthetic oligonucleotide
  Sense strand starting at position 3125 of SEQ ID NO: 1242094
aauagaguuguuugauaac

SEQ ID NO: 1321711 - RNA, 19 nt, Artificial Sequence
  Description of Artificial Sequence: Synthetic oligonucleotide
  Antisense strand to SEQ ID NO: 1321710
guuaucaaacaacucuauu

SEQ ID NO: 1321712 - RNA, 19 nt, Artificial Sequence
  Description of Artificial Sequence: Synthetic oligonucleotide
  Sense strand starting at position 3195 of SEQ ID NO: 1242094
acuaguaacaguugggaua

SEQ ID NO: 1321713 - RNA, 19 nt, Artificial Sequence
  Description of Artificial Sequence: Synthetic oligonucleotide
  Antisense strand to SEQ ID NO: 1321712
uaucccaacuguuacuagu

SEQ ID NO: 1321714 - RNA, 19 nt, Artificial Sequence
  Description of Artificial Sequence: Synthetic oligonucleotide
  Sense strand starting at position 3196 of SEQ ID NO: 1242094
cuaguaacaguugggauaa

SEQ ID NO: 1321715 - RNA, 19 nt, Artificial Sequence
  Description of Artificial Sequence: Synthetic oligonucleotide
  Antisense strand to SEQ ID NO: 1321714
uuaucccaacuguuacuag

SEQ ID NO: 1321716 - RNA, 19 nt, Artificial Sequence
  Description of Artificial Sequence: Synthetic oligonucleotide
  Sense strand starting at position 3332 of SEQ ID NO: 1242094
aggguauauggucaguaga

SEQ ID NO: 1321717 - RNA, 19 nt, Artificial Sequence
  Description of Artificial Sequence: Synthetic oligonucleotide
  Antisense strand to SEQ ID NO: 1321716
ucuacugaccauauacccu

SEQ ID NO: 1321718 - RNA, 19 nt, Artificial Sequence
  Description of Artificial Sequence: Synthetic oligonucleotide
  Sense strand starting at position 3334 of SEQ ID NO: 1242094
gguauauggucaguagaau

SEQ ID NO: 1321719 - RNA, 19 nt, Artificial Sequence
  Description of Artificial Sequence: Synthetic oligonucleotide
  Antisense strand to SEQ ID NO: 1321718
auucuacugaccauauacc

SEQ ID NO: 1321720 - RNA, 19 nt, Artificial Sequence
  Description of Artificial Sequence: Synthetic oligonucleotide
  Sense strand starting at position 3335 of SEQ ID NO: 1242094
guauauggucaguagaauc

SEQ ID NO: 1321721 - RNA, 19 nt, Artificial Sequence
  Description of Artificial Sequence: Synthetic oligonucleotide
  Antisense strand to SEQ ID NO: 1321720
gauucuacugaccauauac

SEQ ID NO: 1321722 - RNA, 19 nt, Artificial Sequence
  Description of Artificial Sequence: Synthetic oligonucleotide
  Sense strand starting at position 3372 of SEQ ID NO: 1242094
cugagaucaccaugauucu

SEQ ID NO: 1321723 - RNA, 19 nt, Artificial Sequence
  Description of Artificial Sequence: Synthetic oligonucleotide
  Antisense strand to SEQ ID NO: 1321722
agaaucauggugaucucag

SEQ ID NO: 1321724 - RNA, 19 nt, Artificial Sequence
  Description of Artificial Sequence: Synthetic oligonucleotide
  Sense strand starting at position 3549 of SEQ ID NO: 1242094
uauuaaaugucuguaguag

SEQ ID NO: 1321725 - RNA, 19 nt, Artificial Sequence
  Description of Artificial Sequence: Synthetic oligonucleotide
  Antisense strand to SEQ ID NO: 1321724
cuacuacagacauuuaaua

SEQ ID NO: 1321726 - RNA, 19 nt, Artificial Sequence
  Description of Artificial Sequence: Synthetic oligonucleotide
  Sense strand starting at position 3550 of SEQ ID NO: 1242094
auuaaaugucuguaguagu

SEQ ID NO: 1321727 - RNA, 19 nt, Artificial Sequence
  Description of Artificial Sequence: Synthetic oligonucleotide
  Antisense strand to SEQ ID NO: 1321726
acuacuacagacauuuaau

SEQ ID NO: 1321728 - RNA, 19 nt, Artificial Sequence
  Description of Artificial Sequence: Synthetic oligonucleotide
  Sense strand starting at position 3576 of SEQ ID NO: 1242094
auaauugucuggucaucua

SEQ ID NO: 1321729 - RNA, 19 nt, Artificial Sequence
  Description of Artificial Sequence: Synthetic oligonucleotide
  Antisense strand to SEQ ID NO: 1321728
uagaugaccagacaauuau

SEQ ID NO: 1321730 - RNA, 19 nt, Artificial Sequence
  Description of Artificial Sequence: Synthetic oligonucleotide
  Sense strand starting at position 3633 of SEQ ID NO: 1242094
agcauaacuccagaagugu

SEQ ID NO: 1321731 - RNA, 19 nt, Artificial Sequence
  Description of Artificial Sequence: Synthetic oligonucleotide
  Antisense strand to SEQ ID NO: 1321730
acacuucuggaguuaugcu

SEQ ID NO: 1321732 - RNA, 19 nt, Artificial Sequence
  Description of Artificial Sequence: Synthetic oligonucleotide
  Sense strand starting at position 3945 of SEQ ID NO: 1242094
aguaguugugaucaauuag

SEQ ID NO: 1321733 - RNA, 19 nt, Artificial Sequence
  Description of Artificial Sequence: Synthetic oligonucleotide
  Antisense strand to SEQ ID NO: 1321732
cuaauugaucacaacuacu

SEQ ID NO: 1321734 - RNA, 19 nt, Artificial Sequence
  Description of Artificial Sequence: Synthetic oligonucleotide
  Sense strand starting at position 371 of SEQ ID NO: 1242095
acagguagauugcuacaga

SEQ ID NO: 1321735 - RNA, 19 nt, Artificial Sequence
  Description of Artificial Sequence: Synthetic oligonucleotide
  Antisense strand to SEQ ID NO: 1321734
ucuguagcaaucuaccugu

SEQ ID NO: 1321736 - RNA, 19 nt, Artificial Sequence
  Description of Artificial Sequence: Synthetic oligonucleotide
  Sense strand starting at position 374 of SEQ ID NO: 1242095
gguagauugcuacagauau

SEQ ID NO: 1321737 - RNA, 19 nt, Artificial Sequence
  Description of Artificial Sequence: Synthetic oligonucleotide
  Antisense strand to SEQ ID NO: 1321736
auaucuguagcaaucuacc

SEQ ID NO: 1321738 - RNA, 19 nt, Artificial Sequence
  Description of Artificial Sequence: Synthetic oligonucleotide
  Sense strand starting at position 382 of SEQ ID NO: 1242095
gcuacagauaucugaaagg

SEQ ID NO: 1321739 - RNA, 19 nt, Artificial Sequence
  Description of Artificial Sequence: Synthetic oligonucleotide
  Antisense strand to SEQ ID NO: 1321738
ccuuucagauaucuguagc

SEQ ID NO: 1321740 - RNA, 19 nt, Artificial Sequence
  Description of Artificial Sequence: Synthetic oligonucleotide
  Sense strand starting at position 628 of SEQ ID NO: 1242095
gaauguccaucauuaggau

SEQ ID NO: 1321741 - RNA, 19 nt, Artificial Sequence
  Description of Artificial Sequence: Synthetic oligonucleotide
  Antisense strand to SEQ ID NO: 1321740
auccuaaugauggacauuc

SEQ ID NO: 1321742 - RNA, 19 nt, Artificial Sequence
  Description of Artificial Sequence: Synthetic oligonucleotide
  Sense strand starting at position 700 of SEQ ID NO: 1242095
cuaggcugucaacauggau

SEQ ID NO: 1321743 - RNA, 19 nt, Artificial Sequence
  Description of Artificial Sequence: Synthetic oligonucleotide
  Antisense strand to SEQ ID NO: 1321742
auccauguugacagccuag

SEQ ID NO: 1321744 - RNA, 19 nt, Artificial Sequence
  Description of Artificial Sequence: Synthetic oligonucleotide
  Sense strand starting at position 732 of SEQ ID NO: 1242095
gugguauugggagauggua

SEQ ID NO: 1321745 - RNA, 19 nt, Artificial Sequence
  Description of Artificial Sequence: Synthetic oligonucleotide
  Antisense strand to SEQ ID NO: 1321744
uaccaucucccaauaccac

SEQ ID NO: 1321746 - RNA, 19 nt, Artificial Sequence
  Description of Artificial Sequence: Synthetic oligonucleotide
  Sense strand starting at position 734 of SEQ ID NO: 1242095
gguauugggagaugguaua

SEQ ID NO: 1321747 - RNA, 19 nt, Artificial Sequence
  Description of Artificial Sequence: Synthetic oligonucleotide
  Antisense strand to SEQ ID NO: 1321746
uauaccaucucccaauacc

SEQ ID NO: 1321748 - RNA, 19 nt, Artificial Sequence
  Description of Artificial Sequence: Synthetic oligonucleotide
  Sense strand starting at position 1061 of SEQ ID NO: 1242095
acuaacauguugucuagga

SEQ ID NO: 1321749 - RNA, 19 nt, Artificial Sequence
  Description of Artificial Sequence: Synthetic oligonucleotide
  Antisense strand to SEQ ID NO: 1321748
uccuagacaacauguuagu

SEQ ID NO: 1321750 - RNA, 19 nt, Artificial Sequence
  Description of Artificial Sequence: Synthetic oligonucleotide
  Sense strand starting at position 1062 of SEQ ID NO: 1242095
cuaacauguugucuaggaa

SEQ ID NO: 1321751 - RNA, 19 nt, Artificial Sequence
  Description of Artificial Sequence: Synthetic oligonucleotide
  Antisense strand to SEQ ID NO: 1321750
uuccuagacaacauguuag

SEQ ID NO: 1321752 - RNA, 19 nt, Artificial Sequence
  Description of Artificial Sequence: Synthetic oligonucleotide
  Sense strand starting at position 1065 of SEQ ID NO: 1242095
acauguugucuaggaagga

SEQ ID NO: 1321753 - RNA, 19 nt, Artificial Sequence
  Description of Artificial Sequence: Synthetic oligonucleotide
  Antisense strand to SEQ ID NO: 1321752
uccuuccuagacaacaugu

SEQ ID NO: 1321754 - RNA, 19 nt, Artificial Sequence
  Description of Artificial Sequence: Synthetic oligonucleotide
  Sense strand starting at position 1299 of SEQ ID NO: 1242095
cagcuuuaccagcagagau

SEQ ID NO: 1321755 - RNA, 19 nt, Artificial Sequence
  Description of Artificial Sequence: Synthetic oligonucleotide
  Antisense strand to SEQ ID NO: 1321754
aucucugcugguaaagcug

SEQ ID NO: 1321756 - RNA, 19 nt, Artificial Sequence
  Description of Artificial Sequence: Synthetic oligonucleotide
  Sense strand starting at position 1301 of SEQ ID NO: 1242095
gcuuuaccagcagagauca

SEQ ID NO: 1321757 - RNA, 19 nt, Artificial Sequence
  Description of Artificial Sequence: Synthetic oligonucleotide
  Antisense strand to SEQ ID NO: 1321756
ugaucucugcugguaaagc

SEQ ID NO: 1321758 - RNA, 19 nt, Artificial Sequence
  Description of Artificial Sequence: Synthetic oligonucleotide
  Sense strand starting at position 1541 of SEQ ID NO: 1242095
uuuggcuuggaugaguuua

SEQ ID NO: 1321759 - RNA, 19 nt, Artificial Sequence
  Description of Artificial Sequence: Synthetic oligonucleotide
  Antisense strand to SEQ ID NO: 1321758
uaaacucauccaagccaaa

SEQ ID NO: 1321760 - RNA, 19 nt, Artificial Sequence
  Description of Artificial Sequence: Synthetic oligonucleotide
  Sense strand starting at position 1546 of SEQ ID NO: 1242095
cuuggaugaguuuacagua

SEQ ID NO: 1321761 - RNA, 19 nt, Artificial Sequence
  Description of Artificial Sequence: Synthetic oligonucleotide
  Antisense strand to SEQ ID NO: 1321760
uacuguaaacucauccaag

SEQ ID NO: 1321762 - RNA, 19 nt, Artificial Sequence
  Description of Artificial Sequence: Synthetic oligonucleotide
  Sense strand starting at position 1551 of SEQ ID NO: 1242095
augaguuuacaguacagca

SEQ ID NO: 1321763 - RNA, 19 nt, Artificial Sequence
  Description of Artificial Sequence: Synthetic oligonucleotide
  Antisense strand to SEQ ID NO: 1321762
ugcuguacuguaaacucau

SEQ ID NO: 1321764 - RNA, 19 nt, Artificial Sequence
  Description of Artificial Sequence: Synthetic oligonucleotide
  Sense strand starting at position 1635 of SEQ ID NO: 1242095
guagauuuagugugcuaac

SEQ ID NO: 1321765 - RNA, 19 nt, Artificial Sequence
  Description of Artificial Sequence: Synthetic oligonucleotide
  Antisense strand to SEQ ID NO: 1321764
guuagcacacuaaaucuac

SEQ ID NO: 1321766 - RNA, 19 nt, Artificial Sequence
  Description of Artificial Sequence: Synthetic oligonucleotide
  Sense strand starting at position 1644 of SEQ ID NO: 1242095
gugugcuaacauuagaaag

SEQ ID NO: 1321767 - RNA, 19 nt, Artificial Sequence
  Description of Artificial Sequence: Synthetic oligonucleotide
  Antisense strand to SEQ ID NO: 1321766
cuuucuaauguuagcacac

SEQ ID NO: 1321768 - RNA, 19 nt, Artificial Sequence
  Description of Artificial Sequence: Synthetic oligonucleotide
  Sense strand starting at position 1665 of SEQ ID NO: 1242095
ugauacuacuagccagaau

SEQ ID NO: 1321769 - RNA, 19 nt, Artificial Sequence
  Description of Artificial Sequence: Synthetic oligonucleotide
  Antisense strand to SEQ ID NO: 1321768
auucuggcuaguaguauca

SEQ ID NO: 1321770 - RNA, 19 nt, Artificial Sequence
  Description of Artificial Sequence: Synthetic oligonucleotide
  Sense strand starting at position 1728 of SEQ ID NO: 1242095
gcaagaacucaaugaguua

SEQ ID NO: 1321771 - RNA, 19 nt, Artificial Sequence
  Description of Artificial Sequence: Synthetic oligonucleotide
  Antisense strand to SEQ ID NO: 1321770
uaacucauugaguucuugc

SEQ ID NO: 1321772 - RNA, 19 nt, Artificial Sequence
  Description of Artificial Sequence: Synthetic oligonucleotide
  Sense strand starting at position 1873 of SEQ ID NO: 1242095
ggaugugaucacuacguca

SEQ ID NO: 1321773 - RNA, 19 nt, Artificial Sequence
  Description of Artificial Sequence: Synthetic oligonucleotide
  Antisense strand to SEQ ID NO: 1321772
ugacguagugaucacaucc

SEQ ID NO: 1321774 - RNA, 19 nt, Artificial Sequence
  Description of Artificial Sequence: Synthetic oligonucleotide
  Sense strand starting at position 1894 of SEQ ID NO: 1242095
cugccuucucaugaagaga

SEQ ID NO: 1321775 - RNA, 19 nt, Artificial Sequence
  Description of Artificial Sequence: Synthetic oligonucleotide
  Antisense strand to SEQ ID NO: 1321774
ucucuucaugagaaggcag

SEQ ID NO: 1321776 - RNA, 19 nt, Artificial Sequence
  Description of Artificial Sequence: Synthetic oligonucleotide
  Sense strand starting at position 2222 of SEQ ID NO: 1242095
ccauuaguugcuuaacaga

SEQ ID NO: 1321777 - RNA, 19 nt, Artificial Sequence
  Description of Artificial Sequence: Synthetic oligonucleotide
  Antisense strand to SEQ ID NO: 1321776
ucuguuaagcaacuaaugg

SEQ ID NO: 1321778 - RNA, 19 nt, Artificial Sequence
  Description of Artificial Sequence: Synthetic oligonucleotide
  Sense strand starting at position 2230 of SEQ ID NO: 1242095
ugcuuaacagacuaugguu

SEQ ID NO: 1321779 - RNA, 19 nt, Artificial Sequence
  Description of Artificial Sequence: Synthetic oligonucleotide
  Antisense strand to SEQ ID NO: 1321778
aaccauagucuguuaagca

SEQ ID NO: 1321780 - RNA, 19 nt, Artificial Sequence
  Description of Artificial Sequence: Synthetic oligonucleotide
  Sense strand starting at position 2232 of SEQ ID NO: 1242095
cuuaacagacuaugguuua

SEQ ID NO: 1321781 - RNA, 19 nt, Artificial Sequence
  Description of Artificial Sequence: Synthetic oligonucleotide
  Antisense strand to SEQ ID NO: 1321780
uaaaccauagucuguuaag

SEQ ID NO: 1321782 - RNA, 19 nt, Artificial Sequence
  Description of Artificial Sequence: Synthetic oligonucleotide
  Sense strand starting at position 2466 of SEQ ID NO: 1242095
cuuuccaagcugggaaauu

SEQ ID NO: 1321783 - RNA, 19 nt, Artificial Sequence
  Description of Artificial Sequence: Synthetic oligonucleotide
  Antisense strand to SEQ ID NO: 1321782
aauuucccagcuuggaaag

SEQ ID NO: 1321784 - RNA, 19 nt, Artificial Sequence
  Description of Artificial Sequence: Synthetic oligonucleotide
  Sense strand starting at position 2521 of SEQ ID NO: 1242095
cugaguuggcaugaguaca

SEQ ID NO: 1321785 - RNA, 19 nt, Artificial Sequence
  Description of Artificial Sequence: Synthetic oligonucleotide
  Antisense strand to SEQ ID NO: 1321784
uguacucaugccaacucag

SEQ ID NO: 1321786 - RNA, 19 nt, Artificial Sequence
  Description of Artificial Sequence: Synthetic oligonucleotide
  Sense strand starting at position 2602 of SEQ ID NO: 1242095
auauguguuaauuggaaag

SEQ ID NO: 1321787 - RNA, 19 nt, Artificial Sequence
  Description of Artificial Sequence: Synthetic oligonucleotide
  Antisense strand to SEQ ID NO: 1321786
cuuuccaauuaacacauau

SEQ ID NO: 1321788 - RNA, 19 nt, Artificial Sequence
  Description of Artificial Sequence: Synthetic oligonucleotide
  Sense strand starting at position 2668 of SEQ ID NO: 1242095
ucuuaauaccaguacuguu

SEQ ID NO: 1321789 - RNA, 19 nt, Artificial Sequence
  Description of Artificial Sequence: Synthetic oligonucleotide
  Antisense strand to SEQ ID NO: 1321788
aacaguacugguauuaaga

SEQ ID NO: 1321790 - RNA, 19 nt, Artificial Sequence
  Description of Artificial Sequence: Synthetic oligonucleotide
  Sense strand starting at position 2786 of SEQ ID NO: 1242095
uguauucugcaucauaaga

SEQ ID NO: 1321791 - RNA, 19 nt, Artificial Sequence
  Description of Artificial Sequence: Synthetic oligonucleotide
  Antisense strand to SEQ ID NO: 1321790
ucuuaugaugcagaauaca

SEQ ID NO: 1321792 - RNA, 19 nt, Artificial Sequence
  Description of Artificial Sequence: Synthetic oligonucleotide
  Sense strand starting at position 2917 of SEQ ID NO: 1242095
caaugagcuguguauaaga

SEQ ID NO: 1321793 - RNA, 19 nt, Artificial Sequence
  Description of Artificial Sequence: Synthetic oligonucleotide
  Antisense strand to SEQ ID NO: 1321792
ucuuauacacagcucauug

SEQ ID NO: 1321794 - RNA, 19 nt, Artificial Sequence
  Description of Artificial Sequence: Synthetic oligonucleotide
  Sense strand starting at position 2919 of SEQ ID NO: 1242095
augagcuguguauaagaga

SEQ ID NO: 1321795 - RNA, 19 nt, Artificial Sequence
  Description of Artificial Sequence: Synthetic oligonucleotide
  Antisense strand to SEQ ID NO: 1321794
ucucuuauacacagcucau

SEQ ID NO: 1321796 - RNA, 19 nt, Artificial Sequence
  Description of Artificial Sequence: Synthetic oligonucleotide
  Sense strand starting at position 3050 of SEQ ID NO: 1242095
gacaaacgaguuugacaua

SEQ ID NO: 1321797 - RNA, 19 nt, Artificial Sequence
  Description of Artificial Sequence: Synthetic oligonucleotide
  Antisense strand to SEQ ID NO: 1321796
uaugucaaacucguuuguc

SEQ ID NO: 1321798 - RNA, 19 nt, Artificial Sequence
  Description of Artificial Sequence: Synthetic oligonucleotide
  Sense strand starting at position 3166 of SEQ ID NO: 1242095
ggauacacuugaucugagu

SEQ ID NO: 1321799 - RNA, 19 nt, Artificial Sequence
  Description of Artificial Sequence: Synthetic oligonucleotide
  Antisense strand to SEQ ID NO: 1321798
acucagaucaaguguaucc

SEQ ID NO: 1321800 - RNA, 19 nt, Artificial Sequence
  Description of Artificial Sequence: Synthetic oligonucleotide
  Sense strand starting at position 3263 of SEQ ID NO: 1242095
acagcauggauauggcaau

SEQ ID NO: 1321801 - RNA, 19 nt, Artificial Sequence
  Description of Artificial Sequence: Synthetic oligonucleotide
  Antisense strand to SEQ ID NO: 1321800
auugccauauccaugcugu

SEQ ID NO: 1321802 - RNA, 19 nt, Artificial Sequence
  Description of Artificial Sequence: Synthetic oligonucleotide
  Sense strand starting at position 3276 of SEQ ID NO: 1242095
ggcaauagcaaggaguuua

SEQ ID NO: 1321803 - RNA, 19 nt, Artificial Sequence
  Description of Artificial Sequence: Synthetic oligonucleotide
  Antisense strand to SEQ ID NO: 1321802
uaaacuccuugcuauugcc

SEQ ID NO: 1321804 - RNA, 19 nt, Artificial Sequence
  Description of Artificial Sequence: Synthetic oligonucleotide
  Sense strand starting at position 3305 of SEQ ID NO: 1242095
aggcuagaaucacuuugaa

SEQ ID NO: 1321805 - RNA, 19 nt, Artificial Sequence
  Description of Artificial Sequence: Synthetic oligonucleotide
  Antisense strand to SEQ ID NO: 1321804
uucaaagugauucuagccu

SEQ ID NO: 1321806 - RNA, 19 nt, Artificial Sequence
  Description of Artificial Sequence: Synthetic oligonucleotide
  Sense strand starting at position 3346 of SEQ ID NO: 1242095
ugaguugccaauuaaagug

SEQ ID NO: 1321807 - RNA, 19 nt, Artificial Sequence
  Description of Artificial Sequence: Synthetic oligonucleotide
  Antisense strand to SEQ ID NO: 1321806
cacuuuaauuggcaacuca

SEQ ID NO: 1321808 - RNA, 19 nt, Artificial Sequence
  Description of Artificial Sequence: Synthetic oligonucleotide
  Sense strand starting at position 3648 of SEQ ID NO: 1242095
gagucaaugucaguauaag

SEQ ID NO: 1321809 - RNA, 19 nt, Artificial Sequence
  Description of Artificial Sequence: Synthetic oligonucleotide
  Antisense strand to SEQ ID NO: 1321808
cuuauacugacauugacuc

SEQ ID NO: 1321810 - RNA, 19 nt, Artificial Sequence
  Description of Artificial Sequence: Synthetic oligonucleotide
  Sense strand starting at position 3852 of SEQ ID NO: 1242095
uuagguacuugagcaaaca

SEQ ID NO: 1321811 - RNA, 19 nt, Artificial Sequence
  Description of Artificial Sequence: Synthetic oligonucleotide
  Antisense strand to SEQ ID NO: 1321810
uguuugcucaaguaccuaa

SEQ ID NO: 1321812 - RNA, 19 nt, Artificial Sequence
  Description of Artificial Sequence: Synthetic oligonucleotide
  Sense strand starting at position 3905 of SEQ ID NO: 1242095
gccaaaccucagcagauaa

SEQ ID NO: 1321813 - RNA, 19 nt, Artificial Sequence
  Description of Artificial Sequence: Synthetic oligonucleotide
  Antisense strand to SEQ ID NO: 1321812
uuaucugcugagguuuggc

SEQ ID NO: 1321814 - RNA, 19 nt, Artificial Sequence
  Description of Artificial Sequence: Synthetic oligonucleotide
  Sense strand starting at position 256 of SEQ ID NO: 1242096
agccuaaacucuccuggaa

SEQ ID NO: 1321815 - RNA, 19 nt, Artificial Sequence
  Description of Artificial Sequence: Synthetic oligonucleotide
  Antisense strand to SEQ ID NO: 1321814
uuccaggagaguuuaggcu

SEQ ID NO: 1321816 - RNA, 19 nt, Artificial Sequence
  Description of Artificial Sequence: Synthetic oligonucleotide
  Sense strand starting at position 313 of SEQ ID NO: 1242096
gcccauuugucccagaggu

SEQ ID NO: 1321817 - RNA, 19 nt, Artificial Sequence
  Description of Artificial Sequence: Synthetic oligonucleotide
  Antisense strand to SEQ ID NO: 1321816
accucugggacaaaugggc

SEQ ID NO: 1321818 - RNA, 19 nt, Artificial Sequence
  Description of Artificial Sequence: Synthetic oligonucleotide
  Sense strand starting at position 376 of SEQ ID NO: 1242096
cuaagagugucugcagcau

SEQ ID NO: 1321819 - RNA, 19 nt, Artificial Sequence
  Description of Artificial Sequence: Synthetic oligonucleotide
  Antisense strand to SEQ ID NO: 1321818
augcugcagacacucuuag

SEQ ID NO: 1321820 - RNA, 19 nt, Artificial Sequence
  Description of Artificial Sequence: Synthetic oligonucleotide
  Sense strand starting at position 404 of SEQ ID NO: 1242096
ccagccugaucagaagacu

SEQ ID NO: 1321821 - RNA, 19 nt, Artificial Sequence
  Description of Artificial Sequence: Synthetic oligonucleotide
  Antisense strand to SEQ ID NO: 1321820
agucuucugaucaggcugg

SEQ ID NO: 1321822 - RNA, 19 nt, Artificial Sequence
  Description of Artificial Sequence: Synthetic oligonucleotide
  Sense strand starting at position 450 of SEQ ID NO: 1242096
accuguagucccuguaaug

SEQ ID NO: 1321823 - RNA, 19 nt, Artificial Sequence
  Description of Artificial Sequence: Synthetic oligonucleotide
  Antisense strand to SEQ ID NO: 1321822
cauuacagggacuacaggu

SEQ ID NO: 1321824 - RNA, 19 nt, Artificial Sequence
  Description of Artificial Sequence: Synthetic oligonucleotide
  Sense strand starting at position 754 of SEQ ID NO: 1242096
cugacuccucacugaagaa

SEQ ID NO: 1321825 - RNA, 19 nt, Artificial Sequence
  Description of Artificial Sequence: Synthetic oligonucleotide
  Antisense strand to SEQ ID NO: 1321824
uucuucagugaggagucag

SEQ ID NO: 1321826 - RNA, 19 nt, Artificial Sequence
  Description of Artificial Sequence: Synthetic oligonucleotide
  Sense strand starting at position 809 of SEQ ID NO: 1242096
ggccauaagucuuugcucu

SEQ ID NO: 1321827 - RNA, 19 nt, Artificial Sequence
  Description of Artificial Sequence: Synthetic oligonucleotide
  Antisense strand to SEQ ID NO: 1321826
agagcaaagacuuauggcc

SEQ ID NO: 1321828 - RNA, 19 nt, Artificial Sequence
  Description of Artificial Sequence: Synthetic oligonucleotide
  Sense strand starting at position 811 of SEQ ID NO: 1242096
ccauaagucuuugcucuga

SEQ ID NO: 1321829 - RNA, 19 nt, Artificial Sequence
  Description of Artificial Sequence: Synthetic oligonucleotide
  Antisense strand to SEQ ID NO: 1321828
ucagagcaaagacuuaugg

SEQ ID NO: 1321830 - RNA, 19 nt, Artificial Sequence
  Description of Artificial Sequence: Synthetic oligonucleotide
  Sense strand starting at position 813 of SEQ ID NO: 1242096
auaagucuuugcucugaaa

SEQ ID NO: 1321831 - RNA, 19 nt, Artificial Sequence
  Description of Artificial Sequence: Synthetic oligonucleotide
  Antisense strand to SEQ ID NO: 1321830
uuucagagcaaagacuuau

SEQ ID NO: 1321832 - RNA, 19 nt, Artificial Sequence
  Description of Artificial Sequence: Synthetic oligonucleotide
  Sense strand starting at position 815 of SEQ ID NO: 1242096
aagucuuugcucugaaagg

SEQ ID NO: 1321833 - RNA, 19 nt, Artificial Sequence
  Description of Artificial Sequence: Synthetic oligonucleotide
  Antisense strand to SEQ ID NO: 1321832
ccuuucagagcaaagacuu

SEQ ID NO: 1321834 - RNA, 19 nt, Artificial Sequence
  Description of Artificial Sequence: Synthetic oligonucleotide
  Sense strand starting at position 816 of SEQ ID NO: 1242096
agucuuugcucugaaagga

SEQ ID NO: 1321835 - RNA, 19 nt, Artificial Sequence
  Description of Artificial Sequence: Synthetic oligonucleotide
  Antisense strand to SEQ ID NO: 1321834
uccuuucagagcaaagacu

SEQ ID NO: 1321836 - RNA, 19 nt, Artificial Sequence
  Description of Artificial Sequence: Synthetic oligonucleotide
  Sense strand starting at position 1013 of SEQ ID NO: 1242096
accagucccucugaguaua

SEQ ID NO: 1321837 - RNA, 19 nt, Artificial Sequence
  Description of Artificial Sequence: Synthetic oligonucleotide
  Antisense strand to SEQ ID NO: 1321836
uauacucagagggacuggu

SEQ ID NO: 1321838 - RNA, 19 nt, Artificial Sequence
  Description of Artificial Sequence: Synthetic oligonucleotide
  Sense strand starting at position 1064 of SEQ ID NO: 1242096
cugugugucucgggcugau

SEQ ID NO: 1321839 - RNA, 19 nt, Artificial Sequence
  Description of Artificial Sequence: Synthetic oligonucleotide
  Antisense strand to SEQ ID NO: 1321838
aucagcccgagacacacag

SEQ ID NO: 1321840 - RNA, 19 nt, Artificial Sequence
  Description of Artificial Sequence: Synthetic oligonucleotide
  Sense strand starting at position 1531 of SEQ ID NO: 1242096
ggcaauuaggacugggagu

SEQ ID NO: 1321841 - RNA, 19 nt, Artificial Sequence
  Description of Artificial Sequence: Synthetic oligonucleotide
  Antisense strand to SEQ ID NO: 1321840
acucccaguccuaauugcc

SEQ ID NO: 1321842 - RNA, 19 nt, Artificial Sequence
  Description of Artificial Sequence: Synthetic oligonucleotide
  Sense strand starting at position 2287 of SEQ ID NO: 1242096
ggacgcuucugucguccua

SEQ ID NO: 1321843 - RNA, 19 nt, Artificial Sequence
  Description of Artificial Sequence: Synthetic oligonucleotide
  Antisense strand to SEQ ID NO: 1321842
uaggacgacagaagcgucc

SEQ ID NO: 1321844 - RNA, 19 nt, Artificial Sequence
  Description of Artificial Sequence: Synthetic oligonucleotide
  Sense strand starting at position 2369 of SEQ ID NO: 1242096
aacauagagcuccggauaa

SEQ ID NO: 1321845 - RNA, 19 nt, Artificial Sequence
  Description of Artificial Sequence: Synthetic oligonucleotide
  Antisense strand to SEQ ID NO: 1321844
uuauccggagcucuauguu

SEQ ID NO: 1321846 - RNA, 19 nt, Artificial Sequence
  Description of Artificial Sequence: Synthetic oligonucleotide
  Sense strand starting at position 2371 of SEQ ID NO: 1242096
cauagagcuccggauaagu

SEQ ID NO: 1321847 - RNA, 19 nt, Artificial Sequence
  Description of Artificial Sequence: Synthetic oligonucleotide
  Antisense strand to SEQ ID NO: 1321846
acuuauccggagcucuaug

SEQ ID NO: 1321848 - RNA, 19 nt, Artificial Sequence
  Description of Artificial Sequence: Synthetic oligonucleotide
  Sense strand starting at position 2373 of SEQ ID NO: 1242096
uagagcuccggauaaguuu

SEQ ID NO: 1321849 - RNA, 19 nt, Artificial Sequence
  Description of Artificial Sequence: Synthetic oligonucleotide
  Antisense strand to SEQ ID NO: 1321848
aaacuuauccggagcucua

SEQ ID NO: 1321850 - RNA, 19 nt, Artificial Sequence
  Description of Artificial Sequence: Synthetic oligonucleotide
  Sense strand starting at position 2500 of SEQ ID NO: 1242096
cggaguuaacauugcaguu

SEQ ID NO: 1321851 - RNA, 19 nt, Artificial Sequence
  Description of Artificial Sequence: Synthetic oligonucleotide
  Antisense strand to SEQ ID NO: 1321850
aacugcaauguuaacuccg

SEQ ID NO: 1321852 - RNA, 19 nt, Artificial Sequence
  Description of Artificial Sequence: Synthetic oligonucleotide
  Sense strand starting at position 2600 of SEQ ID NO: 1242096
gugcgcucagugugacaau

SEQ ID NO: 1321853 - RNA, 19 nt, Artificial Sequence
  Description of Artificial Sequence: Synthetic oligonucleotide
  Antisense strand to SEQ ID NO: 1321852
auugucacacugagcgcac

SEQ ID NO: 1321854 - RNA, 19 nt, Artificial Sequence
  Description of Artificial Sequence: Synthetic oligonucleotide
  Sense strand starting at position 2667 of SEQ ID NO: 1242096
acacuugguccuugggagu

SEQ ID NO: 1321855 - RNA, 19 nt, Artificial Sequence
  Description of Artificial Sequence: Synthetic oligonucleotide
  Antisense strand to SEQ ID NO: 1321854
acucccaaggaccaagugu

SEQ ID NO: 1321856 - RNA, 19 nt, Artificial Sequence
  Description of Artificial Sequence: Synthetic oligonucleotide
  Sense strand starting at position 2861 of SEQ ID NO: 1242096
agagcugacuccuccuaca

SEQ ID NO: 1321857 - RNA, 19 nt, Artificial Sequence
  Description of Artificial Sequence: Synthetic oligonucleotide
  Antisense strand to SEQ ID NO: 1321856
uguaggaggagucagcucu

SEQ ID NO: 1321858 - RNA, 19 nt, Artificial Sequence
  Description of Artificial Sequence: Synthetic oligonucleotide
  Sense strand starting at position 2952 of SEQ ID NO: 1242096
ggguuuaucuaccagagug

SEQ ID NO: 1321859 - RNA, 19 nt, Artificial Sequence
  Description of Artificial Sequence: Synthetic oligonucleotide
  Antisense strand to SEQ ID NO: 1321858
cacucugguagauaaaccc

SEQ ID NO: 1321860 - RNA, 19 nt, Artificial Sequence
  Description of Artificial Sequence: Synthetic oligonucleotide
  Sense strand starting at position 3010 of SEQ ID NO: 1242096
cacguaagccauuaaaguc

SEQ ID NO: 1321861 - RNA, 19 nt, Artificial Sequence
  Description of Artificial Sequence: Synthetic oligonucleotide
  Antisense strand to SEQ ID NO: 1321860
gacuuuaauggcuuacgug

SEQ ID NO: 1321862 - RNA, 19 nt, Artificial Sequence
  Description of Artificial Sequence: Synthetic oligonucleotide
  Sense strand starting at position 3054 of SEQ ID NO: 1242096
cuguaacccuaagauagua

SEQ ID NO: 1321863 - RNA, 19 nt, Artificial Sequence
  Description of Artificial Sequence: Synthetic oligonucleotide
  Antisense strand to SEQ ID NO: 1321862
uacuaucuuaggguuacag

SEQ ID NO: 1321864 - RNA, 19 nt, Artificial Sequence
  Description of Artificial Sequence: Synthetic oligonucleotide
  Sense strand starting at position 3059 of SEQ ID NO: 1242096
acccuaagauaguaagcua

SEQ ID NO: 1321865 - RNA, 19 nt, Artificial Sequence
  Description of Artificial Sequence: Synthetic oligonucleotide
  Antisense strand to SEQ ID NO: 1321864
uagcuuacuaucuuagggu

SEQ ID NO: 1321866 - RNA, 19 nt, Artificial Sequence
  Description of Artificial Sequence: Synthetic oligonucleotide
  Sense strand starting at position 3242 of SEQ ID NO: 1242096
agcuguuguuuauugacau

SEQ ID NO: 1321867 - RNA, 19 nt, Artificial Sequence
  Description of Artificial Sequence: Synthetic oligonucleotide
  Antisense strand to SEQ ID NO: 1321866
augucaauaaacaacagcu

SEQ ID NO: 1321868 - RNA, 19 nt, Artificial Sequence
  Description of Artificial Sequence: Synthetic oligonucleotide
  Sense strand starting at position 3243 of SEQ ID NO: 1242096
gcuguuguuuauugacaua

SEQ ID NO: 1321869 - RNA, 19 nt, Artificial Sequence
  Description of Artificial Sequence: Synthetic oligonucleotide
  Antisense strand to SEQ ID NO: 1321868
uaugucaauaaacaacagc

SEQ ID NO: 1321870 - RNA, 19 nt, Artificial Sequence
  Description of Artificial Sequence: Synthetic oligonucleotide
  Sense strand starting at position 3246 of SEQ ID NO: 1242096
guuguuuauugacauacag

SEQ ID NO: 1321871 - RNA, 19 nt, Artificial Sequence
  Description of Artificial Sequence: Synthetic oligonucleotide
  Antisense strand to SEQ ID NO: 1321870
cuguaugucaauaaacaac

SEQ ID NO: 1321872 - RNA, 19 nt, Artificial Sequence
  Description of Artificial Sequence: Synthetic oligonucleotide
  Sense strand starting at position 3261 of SEQ ID NO: 1242096
acagguaggcucuauagca

SEQ ID NO: 1321873 - RNA, 19 nt, Artificial Sequence
  Description of Artificial Sequence: Synthetic oligonucleotide
  Antisense strand to SEQ ID NO: 1321872
ugcuauagagccuaccugu

SEQ ID NO: 1321874 - RNA, 19 nt, Artificial Sequence
  Description of Artificial Sequence: Synthetic oligonucleotide
  Sense strand starting at position 3328 of SEQ ID NO: 1242096
uggaguguuugcugcagga

SEQ ID NO: 1321875 - RNA, 19 nt, Artificial Sequence
  Description of Artificial Sequence: Synthetic oligonucleotide
  Antisense strand to SEQ ID NO: 1321874
uccugcagcaaacacucca

SEQ ID NO: 1321876 - RNA, 19 nt, Artificial Sequence
  Description of Artificial Sequence: Synthetic oligonucleotide
  Sense strand starting at position 3330 of SEQ ID NO: 1242096
gaguguuugcugcaggaca

SEQ ID NO: 1321877 - RNA, 19 nt, Artificial Sequence
  Description of Artificial Sequence: Synthetic oligonucleotide
  Antisense strand to SEQ ID NO: 1321876
uguccugcagcaaacacuc

SEQ ID NO: 1321878 - RNA, 19 nt, Artificial Sequence
  Description of Artificial Sequence: Synthetic oligonucleotide
  Sense strand starting at position 3504 of SEQ ID NO: 1242096
uugggaguccucugggcau

SEQ ID NO: 1321879 - RNA, 19 nt, Artificial Sequence
  Description of Artificial Sequence: Synthetic oligonucleotide
  Antisense strand to SEQ ID NO: 1321878
augcccagaggacucccaa

SEQ ID NO: 1321880 - RNA, 19 nt, Artificial Sequence
  Description of Artificial Sequence: Synthetic oligonucleotide
  Sense strand starting at position 3704 of SEQ ID NO: 1242096
guuucagugaggcguugau

SEQ ID NO: 1321881 - RNA, 19 nt, Artificial Sequence
  Description of Artificial Sequence: Synthetic oligonucleotide
  Antisense strand to SEQ ID NO: 1321880
aucaacgccucacugaaac

SEQ ID NO: 1321882 - RNA, 19 nt, Artificial Sequence
  Description of Artificial Sequence: Synthetic oligonucleotide
  Sense strand starting at position 3768 of SEQ ID NO: 1242096
gagugaguucuacaagcgu

SEQ ID NO: 1321883 - RNA, 19 nt, Artificial Sequence
  Description of Artificial Sequence: Synthetic oligonucleotide
  Antisense strand to SEQ ID NO: 1321882
acgcuuguagaacucacuc

SEQ ID NO: 1321884 - RNA, 19 nt, Artificial Sequence
  Description of Artificial Sequence: Synthetic oligonucleotide
  Sense strand starting at position 3872 of SEQ ID NO: 1242096
cacgcaugguguuggugaa

SEQ ID NO: 1321885 - RNA, 19 nt, Artificial Sequence
  Description of Artificial Sequence: Synthetic oligonucleotide
  Antisense strand to SEQ ID NO: 1321884
uucaccaacaccaugcgug

SEQ ID NO: 1321886 - RNA, 19 nt, Artificial Sequence
  Description of Artificial Sequence: Synthetic oligonucleotide
  Sense strand starting at position 3974 of SEQ ID NO: 1242096
aagggagguuggugaguaa

SEQ ID NO: 1321887 - RNA, 19 nt, Artificial Sequence
  Description of Artificial Sequence: Synthetic oligonucleotide
  Antisense strand to SEQ ID NO: 1321886
uuacucaccaaccucccuu

SEQ ID NO: 1321888 - RNA, 19 nt, Artificial Sequence
  Description of Artificial Sequence: Synthetic oligonucleotide
  Sense strand starting at position 181 of SEQ ID NO: 1242097
gaggacuccucacccuaga

SEQ ID NO: 1321889 - RNA, 19 nt, Artificial Sequence
  Description of Artificial Sequence: Synthetic oligonucleotide
  Antisense strand to SEQ ID NO: 1321888
ucuagggugaggaguccuc

SEQ ID NO: 1321890 - RNA, 19 nt, Artificial Sequence
  Description of Artificial Sequence: Synthetic oligonucleotide
  Sense strand starting at position 394 of SEQ ID NO: 1242097
ugcucuuuccagcaggaga

SEQ ID NO: 1321891 - RNA, 19 nt, Artificial Sequence
  Description of Artificial Sequence: Synthetic oligonucleotide
  Antisense strand to SEQ ID NO: 1321890
ucuccugcuggaaagagca

SEQ ID NO: 1321892 - RNA, 19 nt, Artificial Sequence
  Description of Artificial Sequence: Synthetic oligonucleotide
  Sense strand starting at position 484 of SEQ ID NO: 1242097
gaggcuguauuucugucua

SEQ ID NO: 1321893 - RNA, 19 nt, Artificial Sequence
  Description of Artificial Sequence: Synthetic oligonucleotide
  Antisense strand to SEQ ID NO: 1321892
uagacagaaauacagccuc

SEQ ID NO: 1321894 - RNA, 19 nt, Artificial Sequence
  Description of Artificial Sequence: Synthetic oligonucleotide
  Sense strand starting at position 486 of SEQ ID NO: 1242097
ggcuguauuucugucuaua

SEQ ID NO: 1321895 - RNA, 19 nt, Artificial Sequence
  Description of Artificial Sequence: Synthetic oligonucleotide
  Antisense strand to SEQ ID NO: 1321894
uauagacagaaauacagcc

SEQ ID NO: 1321896 - RNA, 19 nt, Artificial Sequence
  Description of Artificial Sequence: Synthetic oligonucleotide
  Sense strand starting at position 498 of SEQ ID NO: 1242097
gucuauaagagccgagauu

SEQ ID NO: 1321897 - RNA, 19 nt, Artificial Sequence
  Description of Artificial Sequence: Synthetic oligonucleotide
  Antisense strand to SEQ ID NO: 1321896
aaucucggcucuuauagac

SEQ ID NO: 1321898 - RNA, 19 nt, Artificial Sequence
  Description of Artificial Sequence: Synthetic oligonucleotide
  Sense strand starting at position 547 of SEQ ID NO: 1242097
acggauucgacccgggaau

SEQ ID NO: 1321899 - RNA, 19 nt, Artificial Sequence
  Description of Artificial Sequence: Synthetic oligonucleotide
  Antisense strand to SEQ ID NO: 1321898
auucccgggucgaauccgu

SEQ ID NO: 1321900 - RNA, 19 nt, Artificial Sequence
  Description of Artificial Sequence: Synthetic oligonucleotide
  Sense strand starting at position 751 of SEQ ID NO: 1242097
gcgucuguucuuccggagu

SEQ ID NO: 1321901 - RNA, 19 nt, Artificial Sequence
  Description of Artificial Sequence: Synthetic oligonucleotide
  Antisense strand to SEQ ID NO: 1321900
acuccggaagaacagacgc

SEQ ID NO: 1321902 - RNA, 19 nt, Artificial Sequence
  Description of Artificial Sequence: Synthetic oligonucleotide
  Sense strand starting at position 764 of SEQ ID NO: 1242097
cggagucuguagucuacaa

SEQ ID NO: 1321903 - RNA, 19 nt, Artificial Sequence
  Description of Artificial Sequence: Synthetic oligonucleotide
  Antisense strand to SEQ ID NO: 1321902
uuguagacuacagacuccg

SEQ ID NO: 1321904 - RNA, 19 nt, Artificial Sequence
  Description of Artificial Sequence: Synthetic oligonucleotide
  Sense strand starting at position 766 of SEQ ID NO: 1242097
gagucuguagucuacaaau

SEQ ID NO: 1321905 - RNA, 19 nt, Artificial Sequence
  Description of Artificial Sequence: Synthetic oligonucleotide
  Antisense strand to SEQ ID NO: 1321904
auuuguagacuacagacuc

SEQ ID NO: 1321906 - RNA, 19 nt, Artificial Sequence
  Description of Artificial Sequence: Synthetic oligonucleotide
  Sense strand starting at position 768 of SEQ ID NO: 1242097
gucuguagucuacaaauaa

SEQ ID NO: 1321907 - RNA, 19 nt, Artificial Sequence
  Description of Artificial Sequence: Synthetic oligonucleotide
  Antisense strand to SEQ ID NO: 1321906
uuauuuguagacuacagac

SEQ ID NO: 1321908 - RNA, 19 nt, Artificial Sequence
  Description of Artificial Sequence: Synthetic oligonucleotide
  Sense strand starting at position 2013 of SEQ ID NO: 1242097
cgccgucucccguuuaaau

SEQ ID NO: 1321909 - RNA, 19 nt, Artificial Sequence
  Description of Artificial Sequence: Synthetic oligonucleotide
  Antisense strand to SEQ ID NO: 1321908
auuuaaacgggagacggcg

SEQ ID NO: 1321910 - RNA, 19 nt, Artificial Sequence
  Description of Artificial Sequence: Synthetic oligonucleotide
  Sense strand starting at position 2014 of SEQ ID NO: 1242097
gccgucucccguuuaaaug

SEQ ID NO: 1321911 - RNA, 19 nt, Artificial Sequence
  Description of Artificial Sequence: Synthetic oligonucleotide
  Antisense strand to SEQ ID NO: 1321910
cauuuaaacgggagacggc

SEQ ID NO: 1321912 - RNA, 19 nt, Artificial Sequence
  Description of Artificial Sequence: Synthetic oligonucleotide
  Sense strand starting at position 2422 of SEQ ID NO: 1242097
gagcgagaucuccguggga

SEQ ID NO: 1321913 - RNA, 19 nt, Artificial Sequence
  Description of Artificial Sequence: Synthetic oligonucleotide
  Antisense strand to SEQ ID NO: 1321912
ucccacggagaucucgcuc

SEQ ID NO: 1321914 - RNA, 19 nt, Artificial Sequence
  Description of Artificial Sequence: Synthetic oligonucleotide
  Sense strand starting at position 2424 of SEQ ID NO: 1242097
gcgagaucuccgugggauc

SEQ ID NO: 1321915 - RNA, 19 nt, Artificial Sequence
  Description of Artificial Sequence: Synthetic oligonucleotide
  Antisense strand to SEQ ID NO: 1321914
gaucccacggagaucucgc

SEQ ID NO: 1321916 - RNA, 19 nt, Artificial Sequence
  Description of Artificial Sequence: Synthetic oligonucleotide
  Sense strand starting at position 2445 of SEQ ID NO: 1242097
gccagauucggccauucuu

SEQ ID NO: 1321917 - RNA, 19 nt, Artificial Sequence
  Description of Artificial Sequence: Synthetic oligonucleotide
  Antisense strand to SEQ ID NO: 1321916
aagaauggccgaaucuggc

SEQ ID NO: 1321918 - RNA, 19 nt, Artificial Sequence
  Description of Artificial Sequence: Synthetic oligonucleotide
  Sense strand starting at position 2744 of SEQ ID NO: 1242097
aggcuucuguuccuaaauu

SEQ ID NO: 1321919 - RNA, 19 nt, Artificial Sequence
  Description of Artificial Sequence: Synthetic oligonucleotide
  Antisense strand to SEQ ID NO: 1321918
aauuuaggaacagaagccu

SEQ ID NO: 1321920 - RNA, 19 nt, Artificial Sequence
  Description of Artificial Sequence: Synthetic oligonucleotide
  Sense strand starting at position 2869 of SEQ ID NO: 1242097
cccagaaauuuaggacaaa

SEQ ID NO: 1321921 - RNA, 19 nt, Artificial Sequence
  Description of Artificial Sequence: Synthetic oligonucleotide
  Antisense strand to SEQ ID NO: 1321920
uuuguccuaaauuucuggg

SEQ ID NO: 1321922 - RNA, 19 nt, Artificial Sequence
  Description of Artificial Sequence: Synthetic oligonucleotide
  Sense strand starting at position 2911 of SEQ ID NO: 1242097
ugucacauuccggauacca

SEQ ID NO: 1321923 - RNA, 19 nt, Artificial Sequence
  Description of Artificial Sequence: Synthetic oligonucleotide
  Antisense strand to SEQ ID NO: 1321922
ugguauccggaaugugaca

SEQ ID NO: 1321924 - RNA, 19 nt, Artificial Sequence
  Description of Artificial Sequence: Synthetic oligonucleotide
  Sense strand starting at position 2970 of SEQ ID NO: 1242097
uuuguucucuuagccugaa

SEQ ID NO: 1321925 - RNA, 19 nt, Artificial Sequence
  Description of Artificial Sequence: Synthetic oligonucleotide
  Antisense strand to SEQ ID NO: 1321924
uucaggcuaagagaacaaa

SEQ ID NO: 1321926 - RNA, 19 nt, Artificial Sequence
  Description of Artificial Sequence: Synthetic oligonucleotide
  Sense strand starting at position 2971 of SEQ ID NO: 1242097
uuguucucuuagccugaaa

SEQ ID NO: 1321927 - RNA, 19 nt, Artificial Sequence
  Description of Artificial Sequence: Synthetic oligonucleotide
  Antisense strand to SEQ ID NO: 1321926
uuucaggcuaagagaacaa

SEQ ID NO: 1321928 - RNA, 19 nt, Artificial Sequence
  Description of Artificial Sequence: Synthetic oligonucleotide
  Sense strand starting at position 3020 of SEQ ID NO: 1242097
guguguugaagcuaaaguc

SEQ ID NO: 1321929 - RNA, 19 nt, Artificial Sequence
  Description of Artificial Sequence: Synthetic oligonucleotide
  Antisense strand to SEQ ID NO: 1321928
gacuuuagcuucaacacac

SEQ ID NO: 1321930 - RNA, 19 nt, Artificial Sequence
  Description of Artificial Sequence: Synthetic oligonucleotide
  Sense strand starting at position 3028 of SEQ ID NO: 1242097
aagcuaaaguccgugcaaa

SEQ ID NO: 1321931 - RNA, 19 nt, Artificial Sequence
  Description of Artificial Sequence: Synthetic oligonucleotide
  Antisense strand to SEQ ID NO: 1321930
uuugcacggacuuuagcuu

SEQ ID NO: 1321932 - RNA, 19 nt, Artificial Sequence
  Description of Artificial Sequence: Synthetic oligonucleotide
  Sense strand starting at position 3048 of SEQ ID NO: 1242097
auuaacacgucugcaagau

SEQ ID NO: 1321933 - RNA, 19 nt, Artificial Sequence
  Description of Artificial Sequence: Synthetic oligonucleotide
  Antisense strand to SEQ ID NO: 1321932
aucuugcagacguguuaau

SEQ ID NO: 1321934 - RNA, 19 nt, Artificial Sequence
  Description of Artificial Sequence: Synthetic oligonucleotide
  Sense strand starting at position 3078 of SEQ ID NO: 1242097
cuccaucagccacgucaaa

SEQ ID NO: 1321935 - RNA, 19 nt, Artificial Sequence
  Description of Artificial Sequence: Synthetic oligonucleotide
  Antisense strand to SEQ ID NO: 1321934
uuugacguggcugauggag

SEQ ID NO: 1321936 - RNA, 19 nt, Artificial Sequence
  Description of Artificial Sequence: Synthetic oligonucleotide
  Sense strand starting at position 3126 of SEQ ID NO: 1242097
aggaaauaugaaggugucu

SEQ ID NO: 1321937 - RNA, 19 nt, Artificial Sequence
  Description of Artificial Sequence: Synthetic oligonucleotide
  Antisense strand to SEQ ID NO: 1321936
agacaccuucauauuuccu

SEQ ID NO: 1321938 - RNA, 19 nt, Artificial Sequence
  Description of Artificial Sequence: Synthetic oligonucleotide
  Sense strand starting at position 3128 of SEQ ID NO: 1242097
gaaauaugaaggugucugu

SEQ ID NO: 1321939 - RNA, 19 nt, Artificial Sequence
  Description of Artificial Sequence: Synthetic oligonucleotide
  Antisense strand to SEQ ID NO: 1321938
acagacaccuucauauuuc

SEQ ID NO: 1321940 - RNA, 19 nt, Artificial Sequence
  Description of Artificial Sequence: Synthetic oligonucleotide
  Sense strand starting at position 3131 of SEQ ID NO: 1242097
auaugaaggugucuguauu

SEQ ID NO: 1321941 - RNA, 19 nt, Artificial Sequence
  Description of Artificial Sequence: Synthetic oligonucleotide
  Antisense strand to SEQ ID NO: 1321940
aauacagacaccuucauau

SEQ ID NO: 1321942 - RNA, 19 nt, Artificial Sequence
  Description of Artificial Sequence: Synthetic oligonucleotide
  Sense strand starting at position 3132 of SEQ ID NO: 1242097
uaugaaggugucuguauug

SEQ ID NO: 1321943 - RNA, 19 nt, Artificial Sequence
  Description of Artificial Sequence: Synthetic oligonucleotide
  Antisense strand to SEQ ID NO: 1321942
caauacagacaccuucaua

SEQ ID NO: 1321944 - RNA, 19 nt, Artificial Sequence
  Description of Artificial Sequence: Synthetic oligonucleotide
  Sense strand starting at position 3147 of SEQ ID NO: 1242097
auugucuaacgcgaaauaa

SEQ ID NO: 1321945 - RNA, 19 nt, Artificial Sequence
  Description of Artificial Sequence: Synthetic oligonucleotide
  Antisense strand to SEQ ID NO: 1321944
uuauuucgcguuagacaau

SEQ ID NO: 1321946 - RNA, 19 nt, Artificial Sequence
  Description of Artificial Sequence: Synthetic oligonucleotide
  Sense strand starting at position 3213 of SEQ ID NO: 1242097
uuaaguacuugacuaggaa

SEQ ID NO: 1321947 - RNA, 19 nt, Artificial Sequence
  Description of Artificial Sequence: Synthetic oligonucleotide
  Antisense strand to SEQ ID NO: 1321946
uuccuagucaaguacuuaa

SEQ ID NO: 1321948 - RNA, 19 nt, Artificial Sequence
  Description of Artificial Sequence: Synthetic oligonucleotide
  Sense strand starting at position 3316 of SEQ ID NO: 1242097
ugcuguuaggaacgugaaa

SEQ ID NO: 1321949 - RNA, 19 nt, Artificial Sequence
  Description of Artificial Sequence: Synthetic oligonucleotide
  Antisense strand to SEQ ID NO: 1321948
uuucacguuccuaacagca

SEQ ID NO: 1321950 - RNA, 19 nt, Artificial Sequence
  Description of Artificial Sequence: Synthetic oligonucleotide
  Sense strand starting at position 3318 of SEQ ID NO: 1242097
cuguuaggaacgugaaaua

SEQ ID NO: 1321951 - RNA, 19 nt, Artificial Sequence
  Description of Artificial Sequence: Synthetic oligonucleotide
  Antisense strand to SEQ ID NO: 1321950
uauuucacguuccuaacag

SEQ ID NO: 1321952 - RNA, 19 nt, Artificial Sequence
  Description of Artificial Sequence: Synthetic oligonucleotide
  Sense strand starting at position 3361 of SEQ ID NO: 1242097
gaaggacgucugcauuagu

SEQ ID NO: 1321953 - RNA, 19 nt, Artificial Sequence
  Description of Artificial Sequence: Synthetic oligonucleotide
  Antisense strand to SEQ ID NO: 1321952
acuaaugcagacguccuuc

SEQ ID NO: 1321954 - RNA, 19 nt, Artificial Sequence
  Description of Artificial Sequence: Synthetic oligonucleotide
  Sense strand starting at position 3364 of SEQ ID NO: 1242097
ggacgucugcauuaguauc

SEQ ID NO: 1321955 - RNA, 19 nt, Artificial Sequence
  Description of Artificial Sequence: Synthetic oligonucleotide
  Antisense strand to SEQ ID NO: 1321954
gauacuaaugcagacgucc

SEQ ID NO: 1321956 - RNA, 19 nt, Artificial Sequence
  Description of Artificial Sequence: Synthetic oligonucleotide
  Sense strand starting at position 3464 of SEQ ID NO: 1242097
cucaaucaguuguuguuaa

SEQ ID NO: 1321957 - RNA, 19 nt, Artificial Sequence
  Description of Artificial Sequence: Synthetic oligonucleotide
  Antisense strand to SEQ ID NO: 1321956
uuaacaacaacugauugag

SEQ ID NO: 1321958 - RNA, 19 nt, Artificial Sequence
  Description of Artificial Sequence: Synthetic oligonucleotide
  Sense strand starting at position 3477 of SEQ ID NO: 1242097
uguuaagucaugcagugag

SEQ ID NO: 1321959 - RNA, 19 nt, Artificial Sequence
  Description of Artificial Sequence: Synthetic oligonucleotide
  Antisense strand to SEQ ID NO: 1321958
cucacugcaugacuuaaca

SEQ ID NO: 1321960 - RNA, 19 nt, Artificial Sequence
  Description of Artificial Sequence: Synthetic oligonucleotide
  Sense strand starting at position 3501 of SEQ ID NO: 1242097
guuuguaguugccuacaga

SEQ ID NO: 1321961 - RNA, 19 nt, Artificial Sequence
  Description of Artificial Sequence: Synthetic oligonucleotide
  Antisense strand to SEQ ID NO: 1321960
ucuguaggcaacuacaaac

SEQ ID NO: 1321962 - RNA, 19 nt, Artificial Sequence
  Description of Artificial Sequence: Synthetic oligonucleotide
  Sense strand starting at position 3502 of SEQ ID NO: 1242097
uuuguaguugccuacagaa

SEQ ID NO: 1321963 - RNA, 19 nt, Artificial Sequence
  Description of Artificial Sequence: Synthetic oligonucleotide
  Antisense strand to SEQ ID NO: 1321962
uucuguaggcaacuacaaa

SEQ ID NO: 1321964 - RNA, 19 nt, Artificial Sequence
  Description of Artificial Sequence: Synthetic oligonucleotide
  Sense strand starting at position 3504 of SEQ ID NO: 1242097
uguaguugccuacagaaug

SEQ ID NO: 1321965 - RNA, 19 nt, Artificial Sequence
  Description of Artificial Sequence: Synthetic oligonucleotide
  Antisense strand to SEQ ID NO: 1321964
cauucuguaggcaacuaca

SEQ ID NO: 1321966 - RNA, 19 nt, Artificial Sequence
  Description of Artificial Sequence: Synthetic oligonucleotide
  Sense strand starting at position 3560 of SEQ ID NO: 1242097
gugggcuccuggagagaua

SEQ ID NO: 1321967 - RNA, 19 nt, Artificial Sequence
  Description of Artificial Sequence: Synthetic oligonucleotide
  Antisense strand to SEQ ID NO: 1321966
uaucucuccaggagcccac

SEQ ID NO: 1321968 - RNA, 19 nt, Artificial Sequence
  Description of Artificial Sequence: Synthetic oligonucleotide
  Sense strand starting at position 93 of SEQ ID NO: 1242098
acacccauuccuuacggau

SEQ ID NO: 1321969 - RNA, 19 nt, Artificial Sequence
  Description of Artificial Sequence: Synthetic oligonucleotide
  Antisense strand to SEQ ID NO: 1321968
auccguaaggaaugggugu

SEQ ID NO: 1321970 - RNA, 19 nt, Artificial Sequence
  Description of Artificial Sequence: Synthetic oligonucleotide
  Sense strand starting at position 117 of SEQ ID NO: 1242098
uuauucucaugguuuaagu

SEQ ID NO: 1321971 - RNA, 19 nt, Artificial Sequence
  Description of Artificial Sequence: Synthetic oligonucleotide
  Antisense strand to SEQ ID NO: 1321970
acuuaaaccaugagaauaa

SEQ ID NO: 1321972 - RNA, 19 nt, Artificial Sequence
  Description of Artificial Sequence: Synthetic oligonucleotide
  Sense strand starting at position 226 of SEQ ID NO: 1242098
ugcaucguggcuuaaagaa

SEQ ID NO: 1321973 - RNA, 19 nt, Artificial Sequence
  Description of Artificial Sequence: Synthetic oligonucleotide
  Antisense strand to SEQ ID NO: 1321972
uucuuuaagccacgaugca

SEQ ID NO: 1321974 - RNA, 19 nt, Artificial Sequence
  Description of Artificial Sequence: Synthetic oligonucleotide
  Sense strand starting at position 414 of SEQ ID NO: 1242098
ucucgucaucuggauuacu

SEQ ID NO: 1321975 - RNA, 19 nt, Artificial Sequence
  Description of Artificial Sequence: Synthetic oligonucleotide
  Antisense strand to SEQ ID NO: 1321974
aguaauccagaugacgaga

SEQ ID NO: 1321976 - RNA, 19 nt, Artificial Sequence
  Description of Artificial Sequence: Synthetic oligonucleotide
  Sense strand starting at position 419 of SEQ ID NO: 1242098
ucaucuggauuacugcaaa

SEQ ID NO: 1321977 - RNA, 19 nt, Artificial Sequence
  Description of Artificial Sequence: Synthetic oligonucleotide
  Antisense strand to SEQ ID NO: 1321976
uuugcaguaauccagauga

SEQ ID NO: 1321978 - RNA, 19 nt, Artificial Sequence
  Description of Artificial Sequence: Synthetic oligonucleotide
  Sense strand starting at position 728 of SEQ ID NO: 1242098
ccugaaugcucuuccugau

SEQ ID NO: 1321979 - RNA, 19 nt, Artificial Sequence
  Description of Artificial Sequence: Synthetic oligonucleotide
  Antisense strand to SEQ ID NO: 1321978
aucaggaagagcauucagg

SEQ ID NO: 1321980 - RNA, 19 nt, Artificial Sequence
  Description of Artificial Sequence: Synthetic oligonucleotide
  Sense strand starting at position 818 of SEQ ID NO: 1242098
ugaccaccgucaucuuuaa

SEQ ID NO: 1321981 - RNA, 19 nt, Artificial Sequence
  Description of Artificial Sequence: Synthetic oligonucleotide
  Antisense strand to SEQ ID NO: 1321980
uuaaagaugacggugguca

SEQ ID NO: 1321982 - RNA, 19 nt, Artificial Sequence
  Description of Artificial Sequence: Synthetic oligonucleotide
  Sense strand starting at position 861 of SEQ ID NO: 1242098
ggaacuuucccguacuccu

SEQ ID NO: 1321983 - RNA, 19 nt, Artificial Sequence
  Description of Artificial Sequence: Synthetic oligonucleotide
  Antisense strand to SEQ ID NO: 1321982
aggaguacgggaaaguucc

SEQ ID NO: 1321984 - RNA, 19 nt, Artificial Sequence
  Description of Artificial Sequence: Synthetic oligonucleotide
  Sense strand starting at position 1074 of SEQ ID NO: 1242098
aggcaaauaucaguaagua

SEQ ID NO: 1321985 - RNA, 19 nt, Artificial Sequence
  Description of Artificial Sequence: Synthetic oligonucleotide
  Antisense strand to SEQ ID NO: 1321984
uacuuacugauauuugccu

SEQ ID NO: 1321986 - RNA, 19 nt, Artificial Sequence
  Description of Artificial Sequence: Synthetic oligonucleotide
  Sense strand starting at position 1075 of SEQ ID NO: 1242098
ggcaaauaucaguaaguau

SEQ ID NO: 1321987 - RNA, 19 nt, Artificial Sequence
  Description of Artificial Sequence: Synthetic oligonucleotide
  Antisense strand to SEQ ID NO: 1321986
auacuuacugauauuugcc

SEQ ID NO: 1321988 - RNA, 19 nt, Artificial Sequence
  Description of Artificial Sequence: Synthetic oligonucleotide
  Sense strand starting at position 1170 of SEQ ID NO: 1242098
ggaauacagaaucgugcau

SEQ ID NO: 1321989 - RNA, 19 nt, Artificial Sequence
  Description of Artificial Sequence: Synthetic oligonucleotide
  Antisense strand to SEQ ID NO: 1321988
augcacgauucuguauucc

SEQ ID NO: 1321990 - RNA, 19 nt, Artificial Sequence
  Description of Artificial Sequence: Synthetic oligonucleotide
  Sense strand starting at position 1233 of SEQ ID NO: 1242098
cugcguuaaacguuuguua

SEQ ID NO: 1321991 - RNA, 19 nt, Artificial Sequence
  Description of Artificial Sequence: Synthetic oligonucleotide
  Antisense strand to SEQ ID NO: 1321990
uaacaaacguuuaacgcag

SEQ ID NO: 1321992 - RNA, 19 nt, Artificial Sequence
  Description of Artificial Sequence: Synthetic oligonucleotide
  Sense strand starting at position 1234 of SEQ ID NO: 1242098
ugcguuaaacguuuguuaa

SEQ ID NO: 1321993 - RNA, 19 nt, Artificial Sequence
  Description of Artificial Sequence: Synthetic oligonucleotide
  Antisense strand to SEQ ID NO: 1321992
uuaacaaacguuuaacgca

SEQ ID NO: 1321994 - RNA, 19 nt, Artificial Sequence
  Description of Artificial Sequence: Synthetic oligonucleotide
  Sense strand starting at position 1318 of SEQ ID NO: 1242098
ugugguaucagccacagaa

SEQ ID NO: 1321995 - RNA, 19 nt, Artificial Sequence
  Description of Artificial Sequence: Synthetic oligonucleotide
  Antisense strand to SEQ ID NO: 1321994
uucuguggcugauaccaca

SEQ ID NO: 1321996 - RNA, 19 nt, Artificial Sequence
  Description of Artificial Sequence: Synthetic oligonucleotide
  Sense strand starting at position 1320 of SEQ ID NO: 1242098
ugguaucagccacagaaau

SEQ ID NO: 1321997 - RNA, 19 nt, Artificial Sequence
  Description of Artificial Sequence: Synthetic oligonucleotide
  Antisense strand to SEQ ID NO: 1321996
auuucuguggcugauacca

SEQ ID NO: 1321998 - RNA, 19 nt, Artificial Sequence
  Description of Artificial Sequence: Synthetic oligonucleotide
  Sense strand starting at position 1450 of SEQ ID NO: 1242098
cggaguucgcacgaagaaa

SEQ ID NO: 1321999 - RNA, 19 nt, Artificial Sequence
  Description of Artificial Sequence: Synthetic oligonucleotide
  Antisense strand to SEQ ID NO: 1321998
uuucuucgugcgaacuccg

SEQ ID NO: 1322000 - RNA, 19 nt, Artificial Sequence
  Description of Artificial Sequence: Synthetic oligonucleotide
  Sense strand starting at position 1558 of SEQ ID NO: 1242098
gcgcuaguggaugcuuuaa

SEQ ID NO: 1322001 - RNA, 19 nt, Artificial Sequence
  Description of Artificial Sequence: Synthetic oligonucleotide
  Antisense strand to SEQ ID NO: 1322000
uuaaagcauccacuagcgc

SEQ ID NO: 1322002 - RNA, 19 nt, Artificial Sequence
  Description of Artificial Sequence: Synthetic oligonucleotide
  Sense strand starting at position 1560 of SEQ ID NO: 1242098
gcuaguggaugcuuuaaga

SEQ ID NO: 1322003 - RNA, 19 nt, Artificial Sequence
  Description of Artificial Sequence: Synthetic oligonucleotide
  Antisense strand to SEQ ID NO: 1322002
ucuuaaagcauccacuagc

SEQ ID NO: 1322004 - RNA, 19 nt, Artificial Sequence
  Description of Artificial Sequence: Synthetic oligonucleotide
  Sense strand starting at position 2150 of SEQ ID NO: 1242098
cgcucugcucgaguaauuc

SEQ ID NO: 1322005 - RNA, 19 nt, Artificial Sequence
  Description of Artificial Sequence: Synthetic oligonucleotide
  Antisense strand to SEQ ID NO: 1322004
gaauuacucgagcagagcg

SEQ ID NO: 1322006 - RNA, 19 nt, Artificial Sequence
  Description of Artificial Sequence: Synthetic oligonucleotide
  Sense strand starting at position 2183 of SEQ ID NO: 1242098
aucguuccuaagggaauua

SEQ ID NO: 1322007 - RNA, 19 nt, Artificial Sequence
  Description of Artificial Sequence: Synthetic oligonucleotide
  Antisense strand to SEQ ID NO: 1322006
uaauucccuuaggaacgau

SEQ ID NO: 1322008 - RNA, 19 nt, Artificial Sequence
  Description of Artificial Sequence: Synthetic oligonucleotide
  Sense strand starting at position 2184 of SEQ ID NO: 1242098
ucguuccuaagggaauuau

SEQ ID NO: 1322009 - RNA, 19 nt, Artificial Sequence
  Description of Artificial Sequence: Synthetic oligonucleotide
  Antisense strand to SEQ ID NO: 1322008
auaauucccuuaggaacga

SEQ ID NO: 1322010 - RNA, 19 nt, Artificial Sequence
  Description of Artificial Sequence: Synthetic oligonucleotide
  Sense strand starting at position 2236 of SEQ ID NO: 1242098
ugcacaauuuaagaaaugu

SEQ ID NO: 1322011 - RNA, 19 nt, Artificial Sequence
  Description of Artificial Sequence: Synthetic oligonucleotide
  Antisense strand to SEQ ID NO: 1322010
acauuucuuaaauugugca

SEQ ID NO: 1322012 - RNA, 19 nt, Artificial Sequence
  Description of Artificial Sequence: Synthetic oligonucleotide
  Sense strand starting at position 2244 of SEQ ID NO: 1242098
uuaagaaauguagggcauu

SEQ ID NO: 1322013 - RNA, 19 nt, Artificial Sequence
  Description of Artificial Sequence: Synthetic oligonucleotide
  Antisense strand to SEQ ID NO: 1322012
aaugcccuacauuucuuaa

SEQ ID NO: 1322014 - RNA, 19 nt, Artificial Sequence
  Description of Artificial Sequence: Synthetic oligonucleotide
  Sense strand starting at position 2280 of SEQ ID NO: 1242098
guguguucaggguaacagu

SEQ ID NO: 1322015 - RNA, 19 nt, Artificial Sequence
  Description of Artificial Sequence: Synthetic oligonucleotide
  Antisense strand to SEQ ID NO: 1322014
acuguuacccugaacacac

SEQ ID NO: 1322016 - RNA, 19 nt, Artificial Sequence
  Description of Artificial Sequence: Synthetic oligonucleotide
  Sense strand starting at position 2725 of SEQ ID NO: 1242098
gaacuuuaauuugggagaa

SEQ ID NO: 1322017 - RNA, 19 nt, Artificial Sequence
  Description of Artificial Sequence: Synthetic oligonucleotide
  Antisense strand to SEQ ID NO: 1322016
uucucccaaauuaaaguuc

SEQ ID NO: 1322018 - RNA, 19 nt, Artificial Sequence
  Description of Artificial Sequence: Synthetic oligonucleotide
  Sense strand starting at position 2726 of SEQ ID NO: 1242098
aacuuuaauuugggagaag

SEQ ID NO: 1322019 - RNA, 19 nt, Artificial Sequence
  Description of Artificial Sequence: Synthetic oligonucleotide
  Antisense strand to SEQ ID NO: 1322018
cuucucccaaauuaaaguu

SEQ ID NO: 1322020 - RNA, 19 nt, Artificial Sequence
  Description of Artificial Sequence: Synthetic oligonucleotide
  Sense strand starting at position 2727 of SEQ ID NO: 1242098
acuuuaauuugggagaagu

SEQ ID NO: 1322021 - RNA, 19 nt, Artificial Sequence
  Description of Artificial Sequence: Synthetic oligonucleotide
  Antisense strand to SEQ ID NO: 1322020
acuucucccaaauuaaagu

SEQ ID NO: 1322022 - RNA, 19 nt, Artificial Sequence
  Description of Artificial Sequence: Synthetic oligonucleotide
  Sense strand starting at position 2854 of SEQ ID NO: 1242098
gcuuaaacccagcagucau

SEQ ID NO: 1322023 - RNA, 19 nt, Artificial Sequence
  Description of Artificial Sequence: Synthetic oligonucleotide
  Antisense strand to SEQ ID NO: 1322022
augacugcuggguuuaagc

SEQ ID NO: 1322024 - RNA, 19 nt, Artificial Sequence
  Description of Artificial Sequence: Synthetic oligonucleotide
  Sense strand starting at position 2864 of SEQ ID NO: 1242098
agcagucauguguagagca

SEQ ID NO: 1322025 - RNA, 19 nt, Artificial Sequence
  Description of Artificial Sequence: Synthetic oligonucleotide
  Antisense strand to SEQ ID NO: 1322024
ugcucuacacaugacugcu

SEQ ID NO: 1322026 - RNA, 19 nt, Artificial Sequence
  Description of Artificial Sequence: Synthetic oligonucleotide
  Sense strand starting at position 2866 of SEQ ID NO: 1242098
cagucauguguagagcagu

SEQ ID NO: 1322027 - RNA, 19 nt, Artificial Sequence
  Description of Artificial Sequence: Synthetic oligonucleotide
  Antisense strand to SEQ ID NO: 1322026
acugcucuacacaugacug

SEQ ID NO: 1322028 - RNA, 19 nt, Artificial Sequence
  Description of Artificial Sequence: Synthetic oligonucleotide
  Sense strand starting at position 2869 of SEQ ID NO: 1242098
ucauguguagagcaguuua

SEQ ID NO: 1322029 - RNA, 19 nt, Artificial Sequence
  Description of Artificial Sequence: Synthetic oligonucleotide
  Antisense strand to SEQ ID NO: 1322028
uaaacugcucuacacauga

SEQ ID NO: 1322030 - RNA, 19 nt, Artificial Sequence
  Description of Artificial Sequence: Synthetic oligonucleotide
  Sense strand starting at position 2874 of SEQ ID NO: 1242098
uguagagcaguuuauccua

SEQ ID NO: 1322031 - RNA, 19 nt, Artificial Sequence
  Description of Artificial Sequence: Synthetic oligonucleotide
  Antisense strand to SEQ ID NO: 1322030
uaggauaaacugcucuaca

SEQ ID NO: 1322032 - RNA, 19 nt, Artificial Sequence
  Description of Artificial Sequence: Synthetic oligonucleotide
  Sense strand starting at position 2877 of SEQ ID NO: 1242098
agagcaguuuauccuacaa

SEQ ID NO: 1322033 - RNA, 19 nt, Artificial Sequence
  Description of Artificial Sequence: Synthetic oligonucleotide
  Antisense strand to SEQ ID NO: 1322032
uuguaggauaaacugcucu

SEQ ID NO: 1322034 - RNA, 19 nt, Artificial Sequence
  Description of Artificial Sequence: Synthetic oligonucleotide
  Sense strand starting at position 2900 of SEQ ID NO: 1242098
gcugaauagugauuaaaga

SEQ ID NO: 1322035 - RNA, 19 nt, Artificial Sequence
  Description of Artificial Sequence: Synthetic oligonucleotide
  Antisense strand to SEQ ID NO: 1322034
ucuuuaaucacuauucagc

SEQ ID NO: 1322036 - RNA, 19 nt, Artificial Sequence
  Description of Artificial Sequence: Synthetic oligonucleotide
  Sense strand starting at position 2910 of SEQ ID NO: 1242098
gauuaaagaguaugugcaa

SEQ ID NO: 1322037 - RNA, 19 nt, Artificial Sequence
  Description of Artificial Sequence: Synthetic oligonucleotide
  Antisense strand to SEQ ID NO: 1322036
uugcacauacucuuuaauc

SEQ ID NO: 1322038 - RNA, 19 nt, Artificial Sequence
  Description of Artificial Sequence: Synthetic oligonucleotide
  Sense strand starting at position 2981 of SEQ ID NO: 1242098
ugagcaggucuaugaacua

SEQ ID NO: 1322039 - RNA, 19 nt, Artificial Sequence
  Description of Artificial Sequence: Synthetic oligonucleotide
  Antisense strand to SEQ ID NO: 1322038
uaguucauagaccugcuca

SEQ ID NO: 1322040 - RNA, 19 nt, Artificial Sequence
  Description of Artificial Sequence: Synthetic oligonucleotide
  Sense strand starting at position 3509 of SEQ ID NO: 1242098
aguguaaaggucugaaauu

SEQ ID NO: 1322041 - RNA, 19 nt, Artificial Sequence
  Description of Artificial Sequence: Synthetic oligonucleotide
  Antisense strand to SEQ ID NO: 1322040
aauuucagaccuuuacacu

SEQ ID NO: 1322042 - RNA, 19 nt, Artificial Sequence
  Description of Artificial Sequence: Synthetic oligonucleotide
  Sense strand starting at position 3791 of SEQ ID NO: 1242098
cugaauuucugacaguacu

SEQ ID NO: 1322043 - RNA, 19 nt, Artificial Sequence
  Description of Artificial Sequence: Synthetic oligonucleotide
  Antisense strand to SEQ ID NO: 1322042
aguacugucagaaauucag

SEQ ID NO: 1322044 - RNA, 19 nt, Artificial Sequence
  Description of Artificial Sequence: Synthetic oligonucleotide
  Sense strand starting at position 3912 of SEQ ID NO: 1242098
gauaucaaaguguguuaau

SEQ ID NO: 1322045 - RNA, 19 nt, Artificial Sequence
  Description of Artificial Sequence: Synthetic oligonucleotide
  Antisense strand to SEQ ID NO: 1322044
auuaacacacuuugauauc

SEQ ID NO: 1322046 - RNA, 19 nt, Artificial Sequence
  Description of Artificial Sequence: Synthetic oligonucleotide
  Sense strand starting at position 3913 of SEQ ID NO: 1242098
auaucaaaguguguuaaug

SEQ ID NO: 1322047 - RNA, 19 nt, Artificial Sequence
  Description of Artificial Sequence: Synthetic oligonucleotide
  Antisense strand to SEQ ID NO: 1322046
cauuaacacacuuugauau

SEQ ID NO: 1322048 - RNA, 19 nt, Artificial Sequence
  Description of Artificial Sequence: Synthetic oligonucleotide
  Sense strand starting at position 35 of SEQ ID NO: 1242099
acccucugucauuggacaa

SEQ ID NO: 1322049 - RNA, 19 nt, Artificial Sequence
  Description of Artificial Sequence: Synthetic oligonucleotide
  Antisense strand to SEQ ID NO: 1322048
uuguccaaugacagagggu

SEQ ID NO: 1322050 - RNA, 19 nt, Artificial Sequence
  Description of Artificial Sequence: Synthetic oligonucleotide
  Sense strand starting at position 444 of SEQ ID NO: 1242099
aaacacucucgugaagauu

SEQ ID NO: 1322051 - RNA, 19 nt, Artificial Sequence
  Description of Artificial Sequence: Synthetic oligonucleotide
  Antisense strand to SEQ ID NO: 1322050
aaucuucacgagaguguuu

SEQ ID NO: 1322052 - RNA, 19 nt, Artificial Sequence
  Description of Artificial Sequence: Synthetic oligonucleotide
  Sense strand starting at position 495 of SEQ ID NO: 1242099
acugcuugaugcuugauaa

SEQ ID NO: 1322053 - RNA, 19 nt, Artificial Sequence
  Description of Artificial Sequence: Synthetic oligonucleotide
  Antisense strand to SEQ ID NO: 1322052
uuaucaagcaucaagcagu

SEQ ID NO: 1322054 - RNA, 19 nt, Artificial Sequence
  Description of Artificial Sequence: Synthetic oligonucleotide
  Sense strand starting at position 496 of SEQ ID NO: 1242099
cugcuugaugcuugauaag

SEQ ID NO: 1322055 - RNA, 19 nt, Artificial Sequence
  Description of Artificial Sequence: Synthetic oligonucleotide
  Antisense strand to SEQ ID NO: 1322054
cuuaucaagcaucaagcag

SEQ ID NO: 1322056 - RNA, 19 nt, Artificial Sequence
  Description of Artificial Sequence: Synthetic oligonucleotide
  Sense strand starting at position 502 of SEQ ID NO: 1242099
gaugcuugauaaggagcaa

SEQ ID NO: 1322057 - RNA, 19 nt, Artificial Sequence
  Description of Artificial Sequence: Synthetic oligonucleotide
  Antisense strand to SEQ ID NO: 1322056
uugcuccuuaucaagcauc

SEQ ID NO: 1322058 - RNA, 19 nt, Artificial Sequence
  Description of Artificial Sequence: Synthetic oligonucleotide
  Sense strand starting at position 568 of SEQ ID NO: 1242099
agugaagucuuacaccauc

SEQ ID NO: 1322059 - RNA, 19 nt, Artificial Sequence
  Description of Artificial Sequence: Synthetic oligonucleotide
  Antisense strand to SEQ ID NO: 1322058
gaugguguaagacuucacu

SEQ ID NO: 1322060 - RNA, 19 nt, Artificial Sequence
  Description of Artificial Sequence: Synthetic oligonucleotide
  Sense strand starting at position 676 of SEQ ID NO: 1242099
aguggaggucagugaacua

SEQ ID NO: 1322061 - RNA, 19 nt, Artificial Sequence
  Description of Artificial Sequence: Synthetic oligonucleotide
  Antisense strand to SEQ ID NO: 1322060
uaguucacugaccuccacu

SEQ ID NO: 1322062 - RNA, 19 nt, Artificial Sequence
  Description of Artificial Sequence: Synthetic oligonucleotide
  Sense strand starting at position 693 of SEQ ID NO: 1242099
uacccaaggcguuaucuuu

SEQ ID NO: 1322063 - RNA, 19 nt, Artificial Sequence
  Description of Artificial Sequence: Synthetic oligonucleotide
  Antisense strand to SEQ ID NO: 1322062
aaagauaacgccuugggua

SEQ ID NO: 1322064 - RNA, 19 nt, Artificial Sequence
  Description of Artificial Sequence: Synthetic oligonucleotide
  Sense strand starting at position 699 of SEQ ID NO: 1242099
aggcguuaucuuugucaaa

SEQ ID NO: 1322065 - RNA, 19 nt, Artificial Sequence
  Description of Artificial Sequence: Synthetic oligonucleotide
  Antisense strand to SEQ ID NO: 1322064
uuugacaaagauaacgccu

SEQ ID NO: 1322066 - RNA, 19 nt, Artificial Sequence
  Description of Artificial Sequence: Synthetic oligonucleotide
  Sense strand starting at position 700 of SEQ ID NO: 1242099
ggcguuaucuuugucaaau

SEQ ID NO: 1322067 - RNA, 19 nt, Artificial Sequence
  Description of Artificial Sequence: Synthetic oligonucleotide
  Antisense strand to SEQ ID NO: 1322066
auuugacaaagauaacgcc

SEQ ID NO: 1322068 - RNA, 19 nt, Artificial Sequence
  Description of Artificial Sequence: Synthetic oligonucleotide
  Sense strand starting at position 701 of SEQ ID NO: 1242099
gcguuaucuuugucaaaua

SEQ ID NO: 1322069 - RNA, 19 nt, Artificial Sequence
  Description of Artificial Sequence: Synthetic oligonucleotide
  Antisense strand to SEQ ID NO: 1322068
uauuugacaaagauaacgc

SEQ ID NO: 1322070 - RNA, 19 nt, Artificial Sequence
  Description of Artificial Sequence: Synthetic oligonucleotide
  Sense strand starting at position 702 of SEQ ID NO: 1242099
cguuaucuuugucaaauau

SEQ ID NO: 1322071 - RNA, 19 nt, Artificial Sequence
  Description of Artificial Sequence: Synthetic oligonucleotide
  Antisense strand to SEQ ID NO: 1322070
auauuugacaaagauaacg

SEQ ID NO: 1322072 - RNA, 19 nt, Artificial Sequence
  Description of Artificial Sequence: Synthetic oligonucleotide
  Sense strand starting at position 711 of SEQ ID NO: 1242099
ugucaaauaucucgaacuu

SEQ ID NO: 1322073 - RNA, 19 nt, Artificial Sequence
  Description of Artificial Sequence: Synthetic oligonucleotide
  Antisense strand to SEQ ID NO: 1322072
aaguucgagauauuugaca

SEQ ID NO: 1322074 - RNA, 19 nt, Artificial Sequence
  Description of Artificial Sequence: Synthetic oligonucleotide
  Sense strand starting at position 712 of SEQ ID NO: 1242099
gucaaauaucucgaacuua

SEQ ID NO: 1322075 - RNA, 19 nt, Artificial Sequence
  Description of Artificial Sequence: Synthetic oligonucleotide
  Antisense strand to SEQ ID NO: 1322074
uaaguucgagauauuugac

SEQ ID NO: 1322076 - RNA, 19 nt, Artificial Sequence
  Description of Artificial Sequence: Synthetic oligonucleotide
  Sense strand starting at position 806 of SEQ ID NO: 1242099
gaacaauaagccugggcuu

SEQ ID NO: 1322077 - RNA, 19 nt, Artificial Sequence
  Description of Artificial Sequence: Synthetic oligonucleotide
  Antisense strand to SEQ ID NO: 1322076
aagcccaggcuuauuguuc

SEQ ID NO: 1322078 - RNA, 19 nt, Artificial Sequence
  Description of Artificial Sequence: Synthetic oligonucleotide
  Sense strand starting at position 940 of SEQ ID NO: 1242099
cgcugcucccagcgagaaa

SEQ ID NO: 1322079 - RNA, 19 nt, Artificial Sequence
  Description of Artificial Sequence: Synthetic oligonucleotide
  Antisense strand to SEQ ID NO: 1322078
uuucucgcugggagcagcg

SEQ ID NO: 1322080 - RNA, 19 nt, Artificial Sequence
  Description of Artificial Sequence: Synthetic oligonucleotide
  Sense strand starting at position 941 of SEQ ID NO: 1242099
gcugcucccagcgagaaau

SEQ ID NO: 1322081 - RNA, 19 nt, Artificial Sequence
  Description of Artificial Sequence: Synthetic oligonucleotide
  Antisense strand to SEQ ID NO: 1322080
auuucucgcugggagcagc

SEQ ID NO: 1322082 - RNA, 19 nt, Artificial Sequence
  Description of Artificial Sequence: Synthetic oligonucleotide
  Sense strand starting at position 952 of SEQ ID NO: 1242099
cgagaaauuugacaucccu

SEQ ID NO: 1322083 - RNA, 19 nt, Artificial Sequence
  Description of Artificial Sequence: Synthetic oligonucleotide
  Antisense strand to SEQ ID NO: 1322082
agggaugucaaauuucucg

SEQ ID NO: 1322084 - RNA, 19 nt, Artificial Sequence
  Description of Artificial Sequence: Synthetic oligonucleotide
  Sense strand starting at position 1264 of SEQ ID NO: 1242099
uacguuucucccugagggu

SEQ ID NO: 1322085 - RNA, 19 nt, Artificial Sequence
  Description of Artificial Sequence: Synthetic oligonucleotide
  Antisense strand to SEQ ID NO: 1322084
acccucagggagaaacgua

SEQ ID NO: 1322086 - RNA, 19 nt, Artificial Sequence
  Description of Artificial Sequence: Synthetic oligonucleotide
  Sense strand starting at position 1962 of SEQ ID NO: 1242099
gcgagcugucccgguccaa

SEQ ID NO: 1322087 - RNA, 19 nt, Artificial Sequence
  Description of Artificial Sequence: Synthetic oligonucleotide
  Antisense strand to SEQ ID NO: 1322086
uuggaccgggacagcucgc

SEQ ID NO: 1322088 - RNA, 19 nt, Artificial Sequence
  Description of Artificial Sequence: Synthetic oligonucleotide
  Sense strand starting at position 2187 of SEQ ID NO: 1242099
gcccucacgucuugggaaa

SEQ ID NO: 1322089 - RNA, 19 nt, Artificial Sequence
  Description of Artificial Sequence: Synthetic oligonucleotide
  Antisense strand to SEQ ID NO: 1322088
uuucccaagacgugagggc

SEQ ID NO: 1322090 - RNA, 19 nt, Artificial Sequence
  Description of Artificial Sequence: Synthetic oligonucleotide
  Sense strand starting at position 2250 of SEQ ID NO: 1242099
cuuagaaagccugguauac

SEQ ID NO: 1322091 - RNA, 19 nt, Artificial Sequence
  Description of Artificial Sequence: Synthetic oligonucleotide
  Antisense strand to SEQ ID NO: 1322090
guauaccaggcuuucuaag

SEQ ID NO: 1322092 - RNA, 19 nt, Artificial Sequence
  Description of Artificial Sequence: Synthetic oligonucleotide
  Sense strand starting at position 2252 of SEQ ID NO: 1242099
uagaaagccugguauacca

SEQ ID NO: 1322093 - RNA, 19 nt, Artificial Sequence
  Description of Artificial Sequence: Synthetic oligonucleotide
  Antisense strand to SEQ ID NO: 1322092
ugguauaccaggcuuucua

SEQ ID NO: 1322094 - RNA, 19 nt, Artificial Sequence
  Description of Artificial Sequence: Synthetic oligonucleotide
  Sense strand starting at position 2334 of SEQ ID NO: 1242099
cccaccuuugauuguggaa

SEQ ID NO: 1322095 - RNA, 19 nt, Artificial Sequence
  Description of Artificial Sequence: Synthetic oligonucleotide
  Antisense strand to SEQ ID NO: 1322094
uuccacaaucaaagguggg

SEQ ID NO: 1322096 - RNA, 19 nt, Artificial Sequence
  Description of Artificial Sequence: Synthetic oligonucleotide
  Sense strand starting at position 2354 of SEQ ID NO: 1242099
gggugagacuucuguauua

SEQ ID NO: 1322097 - RNA, 19 nt, Artificial Sequence
  Description of Artificial Sequence: Synthetic oligonucleotide
  Antisense strand to SEQ ID NO: 1322096
uaauacagaagucucaccc

SEQ ID NO: 1322098 - RNA, 19 nt, Artificial Sequence
  Description of Artificial Sequence: Synthetic oligonucleotide
  Sense strand starting at position 2356 of SEQ ID NO: 1242099
gugagacuucuguauuacu

SEQ ID NO: 1322099 - RNA, 19 nt, Artificial Sequence
  Description of Artificial Sequence: Synthetic oligonucleotide
  Antisense strand to SEQ ID NO: 1322098
aguaauacagaagucucac

SEQ ID NO: 1322100 - RNA, 19 nt, Artificial Sequence
  Description of Artificial Sequence: Synthetic oligonucleotide
  Sense strand starting at position 2738 of SEQ ID NO: 1242099
cccugaguuuggccaucau

SEQ ID NO: 1322101 - RNA, 19 nt, Artificial Sequence
  Description of Artificial Sequence: Synthetic oligonucleotide
  Antisense strand to SEQ ID NO: 1322100
augauggccaaacucaggg

SEQ ID NO: 1322102 - RNA, 19 nt, Artificial Sequence
  Description of Artificial Sequence: Synthetic oligonucleotide
  Sense strand starting at position 2742 of SEQ ID NO: 1242099
gaguuuggccaucaugaaa

SEQ ID NO: 1322103 - RNA, 19 nt, Artificial Sequence
  Description of Artificial Sequence: Synthetic oligonucleotide
  Antisense strand to SEQ ID NO: 1322102
uuucaugauggccaaacuc

SEQ ID NO: 1322104 - RNA, 19 nt, Artificial Sequence
  Description of Artificial Sequence: Synthetic oligonucleotide
  Sense strand starting at position 2755 of SEQ ID NO: 1242099
augaaacacuggccagauu

SEQ ID NO: 1322105 - RNA, 19 nt, Artificial Sequence
  Description of Artificial Sequence: Synthetic oligonucleotide
  Antisense strand to SEQ ID NO: 1322104
aaucuggccaguguuucau

SEQ ID NO: 1322106 - RNA, 19 nt, Artificial Sequence
  Description of Artificial Sequence: Synthetic oligonucleotide
  Sense strand starting at position 2932 of SEQ ID NO: 1242099
ucggaauccugcuaaucag

SEQ ID NO: 1322107 - RNA, 19 nt, Artificial Sequence
  Description of Artificial Sequence: Synthetic oligonucleotide
  Antisense strand to SEQ ID NO: 1322106
cugauuagcaggauuccga

SEQ ID NO: 1322108 - RNA, 19 nt, Artificial Sequence
  Description of Artificial Sequence: Synthetic oligonucleotide
  Sense strand starting at position 2975 of SEQ ID NO: 1242099
ggaugccucuguuuggaca

SEQ ID NO: 1322109 - RNA, 19 nt, Artificial Sequence
  Description of Artificial Sequence: Synthetic oligonucleotide
  Antisense strand to SEQ ID NO: 1322108
uguccaaacagaggcaucc

SEQ ID NO: 1322110 - RNA, 19 nt, Artificial Sequence
  Description of Artificial Sequence: Synthetic oligonucleotide
  Sense strand starting at position 3041 of SEQ ID NO: 1242099
gcccgauguuuccucagca

SEQ ID NO: 1322111 - RNA, 19 nt, Artificial Sequence
  Description of Artificial Sequence: Synthetic oligonucleotide
  Antisense strand to SEQ ID NO: 1322110
ugcugaggaaacaucgggc

SEQ ID NO: 1322112 - RNA, 19 nt, Artificial Sequence
  Description of Artificial Sequence: Synthetic oligonucleotide
  Sense strand starting at position 3045 of SEQ ID NO: 1242099
gauguuuccucagcagaaa

SEQ ID NO: 1322113 - RNA, 19 nt, Artificial Sequence
  Description of Artificial Sequence: Synthetic oligonucleotide
  Antisense strand to SEQ ID NO: 1322112
uuucugcugaggaaacauc

SEQ ID NO: 1322114 - RNA, 19 nt, Artificial Sequence
  Description of Artificial Sequence: Synthetic oligonucleotide
  Sense strand starting at position 3359 of SEQ ID NO: 1242099
uacaguuaagucgaguuga

SEQ ID NO: 1322115 - RNA, 19 nt, Artificial Sequence
  Description of Artificial Sequence: Synthetic oligonucleotide
  Antisense strand to SEQ ID NO: 1322114
ucaacucgacuuaacugua

SEQ ID NO: 1322116 - RNA, 19 nt, Artificial Sequence
  Description of Artificial Sequence: Synthetic oligonucleotide
  Sense strand starting at position 3716 of SEQ ID NO: 1242099
gcagaaaggcuuggcucua

SEQ ID NO: 1322117 - RNA, 19 nt, Artificial Sequence
  Description of Artificial Sequence: Synthetic oligonucleotide
  Antisense strand to SEQ ID NO: 1322116
uagagccaagccuuucugc

SEQ ID NO: 1322118 - RNA, 19 nt, Artificial Sequence
  Description of Artificial Sequence: Synthetic oligonucleotide
  Sense strand starting at position 3717 of SEQ ID NO: 1242099
cagaaaggcuuggcucuaa

SEQ ID NO: 1322119 - RNA, 19 nt, Artificial Sequence
  Description of Artificial Sequence: Synthetic oligonucleotide
  Antisense strand to SEQ ID NO: 1322118
uuagagccaagccuuucug

SEQ ID NO: 1322120 - RNA, 19 nt, Artificial Sequence
  Description of Artificial Sequence: Synthetic oligonucleotide
  Sense strand starting at position 3922 of SEQ ID NO: 1242099
acauuucccugaugugguu

SEQ ID NO: 1322121 - RNA, 19 nt, Artificial Sequence
  Description of Artificial Sequence: Synthetic oligonucleotide
  Antisense strand to SEQ ID NO: 1322120
aaccacaucagggaaaugu

SEQ ID NO: 1322122 - RNA, 19 nt, Artificial Sequence
  Description of Artificial Sequence: Synthetic oligonucleotide
  Sense strand starting at position 183 of SEQ ID NO: 1242100
guggucacuccugguaaag

SEQ ID NO: 1322123 - RNA, 19 nt, Artificial Sequence
  Description of Artificial Sequence: Synthetic oligonucleotide
  Antisense strand to SEQ ID NO: 1322122
cuuuaccaggagugaccac

SEQ ID NO: 1322124 - RNA, 19 nt, Artificial Sequence
  Description of Artificial Sequence: Synthetic oligonucleotide
  Sense strand starting at position 193 of SEQ ID NO: 1242100
cugguaaaguuagucaacu

SEQ ID NO: 1322125 - RNA, 19 nt, Artificial Sequence
  Description of Artificial Sequence: Synthetic oligonucleotide
  Antisense strand to SEQ ID NO: 1322124
aguugacuaacuuuaccag

SEQ ID NO: 1322126 - RNA, 19 nt, Artificial Sequence
  Description of Artificial Sequence: Synthetic oligonucleotide
  Sense strand starting at position 194 of SEQ ID NO: 1242100
ugguaaaguuagucaacua

SEQ ID NO: 1322127 - RNA, 19 nt, Artificial Sequence
  Description of Artificial Sequence: Synthetic oligonucleotide
  Antisense strand to SEQ ID NO: 1322126
uaguugacuaacuuuacca

SEQ ID NO: 1322128 - RNA, 19 nt, Artificial Sequence
  Description of Artificial Sequence: Synthetic oligonucleotide
  Sense strand starting at position 195 of SEQ ID NO: 1242100
gguaaaguuagucaacuag

SEQ ID NO: 1322129 - RNA, 19 nt, Artificial Sequence
  Description of Artificial Sequence: Synthetic oligonucleotide
  Antisense strand to SEQ ID NO: 1322128
cuaguugacuaacuuuacc

SEQ ID NO: 1322130 - RNA, 19 nt, Artificial Sequence
  Description of Artificial Sequence: Synthetic oligonucleotide
  Sense strand starting at position 434 of SEQ ID NO: 1242100
guauuagagucucuaaugg

SEQ ID NO: 1322131 - RNA, 19 nt, Artificial Sequence
  Description of Artificial Sequence: Synthetic oligonucleotide
  Antisense strand to SEQ ID NO: 1322130
ccauuagagacucuaauac

SEQ ID NO: 1322132 - RNA, 19 nt, Artificial Sequence
  Description of Artificial Sequence: Synthetic oligonucleotide
  Sense strand starting at position 445 of SEQ ID NO: 1242100
ucuaauggcucuucugacu

SEQ ID NO: 1322133 - RNA, 19 nt, Artificial Sequence
  Description of Artificial Sequence: Synthetic oligonucleotide
  Antisense strand to SEQ ID NO: 1322132
agucagaagagccauuaga

SEQ ID NO: 1322134 - RNA, 19 nt, Artificial Sequence
  Description of Artificial Sequence: Synthetic oligonucleotide
  Sense strand starting at position 450 of SEQ ID NO: 1242100
uggcucuucugacuauaaa

SEQ ID NO: 1322135 - RNA, 19 nt, Artificial Sequence
  Description of Artificial Sequence: Synthetic oligonucleotide
  Antisense strand to SEQ ID NO: 1322134
uuuauagucagaagagcca

SEQ ID NO: 1322136 - RNA, 19 nt, Artificial Sequence
  Description of Artificial Sequence: Synthetic oligonucleotide
  Sense strand starting at position 932 of SEQ ID NO: 1242100
gugacuccuuggguuaaug

SEQ ID NO: 1322137 - RNA, 19 nt, Artificial Sequence
  Description of Artificial Sequence: Synthetic oligonucleotide
  Antisense strand to SEQ ID NO: 1322136
cauuaacccaaggagucac

SEQ ID NO: 1322138 - RNA, 19 nt, Artificial Sequence
  Description of Artificial Sequence: Synthetic oligonucleotide
  Sense strand starting at position 1145 of SEQ ID NO: 1242100
ggaccauccuggcuuacaa

SEQ ID NO: 1322139 - RNA, 19 nt, Artificial Sequence
  Description of Artificial Sequence: Synthetic oligonucleotide
  Antisense strand to SEQ ID NO: 1322138
uuguaagccaggauggucc

SEQ ID NO: 1322140 - RNA, 19 nt, Artificial Sequence
  Description of Artificial Sequence: Synthetic oligonucleotide
  Sense strand starting at position 1461 of SEQ ID NO: 1242100
aaacgaggguuguuggaaa

SEQ ID NO: 1322141 - RNA, 19 nt, Artificial Sequence
  Description of Artificial Sequence: Synthetic oligonucleotide
  Antisense strand to SEQ ID NO: 1322140
uuuccaacaacccucguuu

SEQ ID NO: 1322142 - RNA, 19 nt, Artificial Sequence
  Description of Artificial Sequence: Synthetic oligonucleotide
  Sense strand starting at position 1546 of SEQ ID NO: 1242100
ggcaguaucacuggaugaa

SEQ ID NO: 1322143 - RNA, 19 nt, Artificial Sequence
  Description of Artificial Sequence: Synthetic oligonucleotide
  Antisense strand to SEQ ID NO: 1322142
uucauccagugauacugcc

SEQ ID NO: 1322144 - RNA, 19 nt, Artificial Sequence
  Description of Artificial Sequence: Synthetic oligonucleotide
  Sense strand starting at position 2607 of SEQ ID NO: 1242100
ggaccaucgacuuguccaa

SEQ ID NO: 1322145 - RNA, 19 nt, Artificial Sequence
  Description of Artificial Sequence: Synthetic oligonucleotide
  Antisense strand to SEQ ID NO: 1322144
uuggacaagucgauggucc

SEQ ID NO: 1322146 - RNA, 19 nt, Artificial Sequence
  Description of Artificial Sequence: Synthetic oligonucleotide
  Sense strand starting at position 2614 of SEQ ID NO: 1242100
cgacuuguccaacaacaag

SEQ ID NO: 1322147 - RNA, 19 nt, Artificial Sequence
  Description of Artificial Sequence: Synthetic oligonucleotide
  Antisense strand to SEQ ID NO: 1322146
cuuguuguuggacaagucg

SEQ ID NO: 1322148 - RNA, 19 nt, Artificial Sequence
  Description of Artificial Sequence: Synthetic oligonucleotide
  Sense strand starting at position 2676 of SEQ ID NO: 1242100
ugaagagccucucccugaa

SEQ ID NO: 1322149 - RNA, 19 nt, Artificial Sequence
  Description of Artificial Sequence: Synthetic oligonucleotide
  Antisense strand to SEQ ID NO: 1322148
uucagggagaggcucuuca

SEQ ID NO: 1322150 - RNA, 19 nt, Artificial Sequence
  Description of Artificial Sequence: Synthetic oligonucleotide
  Sense strand starting at position 2679 of SEQ ID NO: 1242100
agagccucucccugaacaa

SEQ ID NO: 1322151 - RNA, 19 nt, Artificial Sequence
  Description of Artificial Sequence: Synthetic oligonucleotide
  Antisense strand to SEQ ID NO: 1322150
uuguucagggagaggcucu

SEQ ID NO: 1322152 - RNA, 19 nt, Artificial Sequence
  Description of Artificial Sequence: Synthetic oligonucleotide
  Sense strand starting at position 2828 of SEQ ID NO: 1242100
gccggaauccuugaagccu

SEQ ID NO: 1322153 - RNA, 19 nt, Artificial Sequence
  Description of Artificial Sequence: Synthetic oligonucleotide
  Antisense strand to SEQ ID NO: 1322152
aggcuucaaggauuccggc

SEQ ID NO: 1322154 - RNA, 19 nt, Artificial Sequence
  Description of Artificial Sequence: Synthetic oligonucleotide
  Sense strand starting at position 2882 of SEQ ID NO: 1242100
cuuauaaugauuggguguu

SEQ ID NO: 1322155 - RNA, 19 nt, Artificial Sequence
  Description of Artificial Sequence: Synthetic oligonucleotide
  Antisense strand to SEQ ID NO: 1322154
aacacccaaucauuauaag

SEQ ID NO: 1322156 - RNA, 19 nt, Artificial Sequence
  Description of Artificial Sequence: Synthetic oligonucleotide
  Sense strand starting at position 2884 of SEQ ID NO: 1242100
uauaaugauuggguguuau

SEQ ID NO: 1322157 - RNA, 19 nt, Artificial Sequence
  Description of Artificial Sequence: Synthetic oligonucleotide
  Antisense strand to SEQ ID NO: 1322156
auaacacccaaucauuaua

SEQ ID NO: 1322158 - RNA, 19 nt, Artificial Sequence
  Description of Artificial Sequence: Synthetic oligonucleotide
  Sense strand starting at position 2894 of SEQ ID NO: 1242100
ggguguuauaaugauuguu

SEQ ID NO: 1322159 - RNA, 19 nt, Artificial Sequence
  Description of Artificial Sequence: Synthetic oligonucleotide
  Antisense strand to SEQ ID NO: 1322158
aacaaucauuauaacaccc

SEQ ID NO: 1322160 - RNA, 19 nt, Artificial Sequence
  Description of Artificial Sequence: Synthetic oligonucleotide
  Sense strand starting at position 2896 of SEQ ID NO: 1242100
guguuauaaugauuguuac

SEQ ID NO: 1322161 - RNA, 19 nt, Artificial Sequence
  Description of Artificial Sequence: Synthetic oligonucleotide
  Antisense strand to SEQ ID NO: 1322160
guaacaaucauuauaacac

SEQ ID NO: 1322162 - RNA, 19 nt, Artificial Sequence
  Description of Artificial Sequence: Synthetic oligonucleotide
  Sense strand starting at position 2902 of SEQ ID NO: 1242100
uaaugauuguuacuggguu

SEQ ID NO: 1322163 - RNA, 19 nt, Artificial Sequence
  Description of Artificial Sequence: Synthetic oligonucleotide
  Antisense strand to SEQ ID NO: 1322162
aacccaguaacaaucauua

SEQ ID NO: 1322164 - RNA, 19 nt, Artificial Sequence
  Description of Artificial Sequence: Synthetic oligonucleotide
  Sense strand starting at position 2904 of SEQ ID NO: 1242100
augauuguuacuggguuaa

SEQ ID NO: 1322165 - RNA, 19 nt, Artificial Sequence
  Description of Artificial Sequence: Synthetic oligonucleotide
  Antisense strand to SEQ ID NO: 1322164
uuaacccaguaacaaucau

SEQ ID NO: 1322166 - RNA, 19 nt, Artificial Sequence
  Description of Artificial Sequence: Synthetic oligonucleotide
  Sense strand starting at position 2906 of SEQ ID NO: 1242100
gauuguuacuggguuaauu

SEQ ID NO: 1322167 - RNA, 19 nt, Artificial Sequence
  Description of Artificial Sequence: Synthetic oligonucleotide
  Antisense strand to SEQ ID NO: 1322166
aauuaacccaguaacaauc

SEQ ID NO: 1322168 - RNA, 19 nt, Artificial Sequence
  Description of Artificial Sequence: Synthetic oligonucleotide
  Sense strand starting at position 2915 of SEQ ID NO: 1242100
uggguuaauuuggacuuga

SEQ ID NO: 1322169 - RNA, 19 nt, Artificial Sequence
  Description of Artificial Sequence: Synthetic oligonucleotide
  Antisense strand to SEQ ID NO: 1322168
ucaaguccaaauuaaccca

SEQ ID NO: 1322170 - RNA, 19 nt, Artificial Sequence
  Description of Artificial Sequence: Synthetic oligonucleotide
  Sense strand starting at position 3119 of SEQ ID NO: 1242100
ucuaaagacuauguuggua

SEQ ID NO: 1322171 - RNA, 19 nt, Artificial Sequence
  Description of Artificial Sequence: Synthetic oligonucleotide
  Antisense strand to SEQ ID NO: 1322170
uaccaacauagucuuuaga

SEQ ID NO: 1322172 - RNA, 19 nt, Artificial Sequence
  Description of Artificial Sequence: Synthetic oligonucleotide
  Sense strand starting at position 3284 of SEQ ID NO: 1242100
gcuguucugccugaugaga

SEQ ID NO: 1322173 - RNA, 19 nt, Artificial Sequence
  Description of Artificial Sequence: Synthetic oligonucleotide
  Antisense strand to SEQ ID NO: 1322172
ucucaucaggcagaacagc

SEQ ID NO: 1322174 - RNA, 19 nt, Artificial Sequence
  Description of Artificial Sequence: Synthetic oligonucleotide
  Sense strand starting at position 3463 of SEQ ID NO: 1242100
ugugauggaucucucuaag

SEQ ID NO: 1322175 - RNA, 19 nt, Artificial Sequence
  Description of Artificial Sequence: Synthetic oligonucleotide
  Antisense strand to SEQ ID NO: 1322174
cuuagagagauccaucaca

SEQ ID NO: 1322176 - RNA, 19 nt, Artificial Sequence
  Description of Artificial Sequence: Synthetic oligonucleotide
  Sense strand starting at position 3547 of SEQ ID NO: 1242100
gaaucaggucuagagcuuu

SEQ ID NO: 1322177 - RNA, 19 nt, Artificial Sequence
  Description of Artificial Sequence: Synthetic oligonucleotide
  Antisense strand to SEQ ID NO: 1322176
aaagcucuagaccugauuc

SEQ ID NO: 1322178 - RNA, 19 nt, Artificial Sequence
  Description of Artificial Sequence: Synthetic oligonucleotide
  Sense strand starting at position 3553 of SEQ ID NO: 1242100
ggucuagagcuuuaagguu

SEQ ID NO: 1322179 - RNA, 19 nt, Artificial Sequence
  Description of Artificial Sequence: Synthetic oligonucleotide
  Antisense strand to SEQ ID NO: 1322178
aaccuuaaagcucuagacc

SEQ ID NO: 1322180 - RNA, 19 nt, Artificial Sequence
  Description of Artificial Sequence: Synthetic oligonucleotide
  Sense strand starting at position 3595 of SEQ ID NO: 1242100
gcuuuaaggucuccugaua

SEQ ID NO: 1322181 - RNA, 19 nt, Artificial Sequence
  Description of Artificial Sequence: Synthetic oligonucleotide
  Antisense strand to SEQ ID NO: 1322180
uaucaggagaccuuaaagc

SEQ ID NO: 1322182 - RNA, 19 nt, Artificial Sequence
  Description of Artificial Sequence: Synthetic oligonucleotide
  Sense strand starting at position 3603 of SEQ ID NO: 1242100
gucuccugauaccuguuaa

SEQ ID NO: 1322183 - RNA, 19 nt, Artificial Sequence
  Description of Artificial Sequence: Synthetic oligonucleotide
  Antisense strand to SEQ ID NO: 1322182
uuaacagguaucaggagac

SEQ ID NO: 1322184 - RNA, 19 nt, Artificial Sequence
  Description of Artificial Sequence: Synthetic oligonucleotide
  Sense strand starting at position 3664 of SEQ ID NO: 1242100
ggcuaaaugagagguuucu

SEQ ID NO: 1322185 - RNA, 19 nt, Artificial Sequence
  Description of Artificial Sequence: Synthetic oligonucleotide
  Antisense strand to SEQ ID NO: 1322184
agaaaccucucauuuagcc

SEQ ID NO: 1322186 - RNA, 19 nt, Artificial Sequence
  Description of Artificial Sequence: Synthetic oligonucleotide
  Sense strand starting at position 3670 of SEQ ID NO: 1242100
augagagguuucuucuaua

SEQ ID NO: 1322187 - RNA, 19 nt, Artificial Sequence
  Description of Artificial Sequence: Synthetic oligonucleotide
  Antisense strand to SEQ ID NO: 1322186
uauagaagaaaccucucau

SEQ ID NO: 1322188 - RNA, 19 nt, Artificial Sequence
  Description of Artificial Sequence: Synthetic oligonucleotide
  Sense strand starting at position 3680 of SEQ ID NO: 1242100
ucuucuauaggcugaacua

SEQ ID NO: 1322189 - RNA, 19 nt, Artificial Sequence
  Description of Artificial Sequence: Synthetic oligonucleotide
  Antisense strand to SEQ ID NO: 1322188
uaguucagccuauagaaga

SEQ ID NO: 1322190 - RNA, 19 nt, Artificial Sequence
  Description of Artificial Sequence: Synthetic oligonucleotide
  Sense strand starting at position 3681 of SEQ ID NO: 1242100
cuucuauaggcugaacuaa

SEQ ID NO: 1322191 - RNA, 19 nt, Artificial Sequence
  Description of Artificial Sequence: Synthetic oligonucleotide
  Antisense strand to SEQ ID NO: 1322190
uuaguucagccuauagaag

SEQ ID NO: 1322192 - RNA, 19 nt, Artificial Sequence
  Description of Artificial Sequence: Synthetic oligonucleotide
  Sense strand starting at position 3708 of SEQ ID NO: 1242100
cccaaagugccauggaauu

SEQ ID NO: 1322193 - RNA, 19 nt, Artificial Sequence
  Description of Artificial Sequence: Synthetic oligonucleotide
  Antisense strand to SEQ ID NO: 1322192
aauuccauggcacuuuggg

SEQ ID NO: 1322194 - RNA, 19 nt, Artificial Sequence
  Description of Artificial Sequence: Synthetic oligonucleotide
  Sense strand starting at position 3714 of SEQ ID NO: 1242100
gugccauggaauuaguuga

SEQ ID NO: 1322195 - RNA, 19 nt, Artificial Sequence
  Description of Artificial Sequence: Synthetic oligonucleotide
  Antisense strand to SEQ ID NO: 1322194
ucaacuaauuccauggcac

SEQ ID NO: 1322196 - RNA, 19 nt, Artificial Sequence
  Description of Artificial Sequence: Synthetic oligonucleotide
  Sense strand starting at position 3730 of SEQ ID NO: 1242100
ugagacacuggauguguua

SEQ ID NO: 1322197 - RNA, 19 nt, Artificial Sequence
  Description of Artificial Sequence: Synthetic oligonucleotide
  Antisense strand to SEQ ID NO: 1322196
uaacacauccagugucuca

SEQ ID NO: 1322198 - RNA, 19 nt, Artificial Sequence
  Description of Artificial Sequence: Synthetic oligonucleotide
  Sense strand starting at position 3882 of SEQ ID NO: 1242100
gagcuaugucagggauaua

SEQ ID NO: 1322199 - RNA, 19 nt, Artificial Sequence
  Description of Artificial Sequence: Synthetic oligonucleotide
  Antisense strand to SEQ ID NO: 1322198
uauaucccugacauagcuc

SEQ ID NO: 1322200 - RNA, 19 nt, Artificial Sequence
  Description of Artificial Sequence: Synthetic oligonucleotide
  Sense strand starting at position 3936 of SEQ ID NO: 1242100
ucgggagucagagguaauu

SEQ ID NO: 1322201 - RNA, 19 nt, Artificial Sequence
  Description of Artificial Sequence: Synthetic oligonucleotide
  Antisense strand to SEQ ID NO: 1322200
aauuaccucugacucccga

SEQ ID NO: 1322202 - RNA, 19 nt, Artificial Sequence
  Description of Artificial Sequence: Synthetic oligonucleotide
  Sense strand starting at position 11 of SEQ ID NO: 1242101
cgagaagaccagugacuga

SEQ ID NO: 1322203 - RNA, 19 nt, Artificial Sequence
  Description of Artificial Sequence: Synthetic oligonucleotide
  Antisense strand to SEQ ID NO: 1322202
ucagucacuggucuucucg

SEQ ID NO: 1322204 - RNA, 19 nt, Artificial Sequence
  Description of Artificial Sequence: Synthetic oligonucleotide
  Sense strand starting at position 304 of SEQ ID NO: 1242101
cgaacauccuuagggagaa

SEQ ID NO: 1322205 - RNA, 19 nt, Artificial Sequence
  Description of Artificial Sequence: Synthetic oligonucleotide
  Antisense strand to SEQ ID NO: 1322204
uucucccuaaggauguucg

SEQ ID NO: 1322206 - RNA, 19 nt, Artificial Sequence
  Description of Artificial Sequence: Synthetic oligonucleotide
  Sense strand starting at position 305 of SEQ ID NO: 1242101
gaacauccuuagggagaau

SEQ ID NO: 1322207 - RNA, 19 nt, Artificial Sequence
  Description of Artificial Sequence: Synthetic oligonucleotide
  Antisense strand to SEQ ID NO: 1322206
auucucccuaaggauguuc

SEQ ID NO: 1322208 - RNA, 19 nt, Artificial Sequence
  Description of Artificial Sequence: Synthetic oligonucleotide
  Sense strand starting at position 1787 of SEQ ID NO: 1242101
agguuagacccucgcuaga

SEQ ID NO: 1322209 - RNA, 19 nt, Artificial Sequence
  Description of Artificial Sequence: Synthetic oligonucleotide
  Antisense strand to SEQ ID NO: 1322208
ucuagcgagggucuaaccu

SEQ ID NO: 1322210 - RNA, 19 nt, Artificial Sequence
  Description of Artificial Sequence: Synthetic oligonucleotide
  Sense strand starting at position 2258 of SEQ ID NO: 1242101
agcccuucgagguaagacu

SEQ ID NO: 1322211 - RNA, 19 nt, Artificial Sequence
  Description of Artificial Sequence: Synthetic oligonucleotide
  Antisense strand to SEQ ID NO: 1322210
agucuuaccucgaagggcu

SEQ ID NO: 1322212 - RNA, 19 nt, Artificial Sequence
  Description of Artificial Sequence: Synthetic oligonucleotide
  Sense strand starting at position 2266 of SEQ ID NO: 1242101
gagguaagacuucgaggaa

SEQ ID NO: 1322213 - RNA, 19 nt, Artificial Sequence
  Description of Artificial Sequence: Synthetic oligonucleotide
  Antisense strand to SEQ ID NO: 1322212
uuccucgaagucuuaccuc

SEQ ID NO: 1322214 - RNA, 19 nt, Artificial Sequence
  Description of Artificial Sequence: Synthetic oligonucleotide
  Sense strand starting at position 2267 of SEQ ID NO: 1242101
agguaagacuucgaggaaa

SEQ ID NO: 1322215 - RNA, 19 nt, Artificial Sequence
  Description of Artificial Sequence: Synthetic oligonucleotide
  Antisense strand to SEQ ID NO: 1322214
uuuccucgaagucuuaccu

SEQ ID NO: 1322216 - RNA, 19 nt, Artificial Sequence
  Description of Artificial Sequence: Synthetic oligonucleotide
  Sense strand starting at position 2269 of SEQ ID NO: 1242101
guaagacuucgaggaaaug

SEQ ID NO: 1322217 - RNA, 19 nt, Artificial Sequence
  Description of Artificial Sequence: Synthetic oligonucleotide
  Antisense strand to SEQ ID NO: 1322216
cauuuccucgaagucuuac

SEQ ID NO: 1322218 - RNA, 19 nt, Artificial Sequence
  Description of Artificial Sequence: Synthetic oligonucleotide
  Sense strand starting at position 2345 of SEQ ID NO: 1242101
cucgguaguuccgagaaag

SEQ ID NO: 1322219 - RNA, 19 nt, Artificial Sequence
  Description of Artificial Sequence: Synthetic oligonucleotide
  Antisense strand to SEQ ID NO: 1322218
cuuucucggaacuaccgag

SEQ ID NO: 1322220 - RNA, 19 nt, Artificial Sequence
  Description of Artificial Sequence: Synthetic oligonucleotide
  Sense strand starting at position 2732 of SEQ ID NO: 1242101
cagauuagcucagaaaugg

SEQ ID NO: 1322221 - RNA, 19 nt, Artificial Sequence
  Description of Artificial Sequence: Synthetic oligonucleotide
  Antisense strand to SEQ ID NO: 1322220
ccauuucugagcuaaucug

SEQ ID NO: 1322222 - RNA, 19 nt, Artificial Sequence
  Description of Artificial Sequence: Synthetic oligonucleotide
  Sense strand starting at position 2874 of SEQ ID NO: 1242101
cugccaucucucugaggaa

SEQ ID NO: 1322223 - RNA, 19 nt, Artificial Sequence
  Description of Artificial Sequence: Synthetic oligonucleotide
  Antisense strand to SEQ ID NO: 1322222
uuccucagagagauggcag

SEQ ID NO: 1322224 - RNA, 19 nt, Artificial Sequence
  Description of Artificial Sequence: Synthetic oligonucleotide
  Sense strand starting at position 2875 of SEQ ID NO: 1242101
ugccaucucucugaggaau

SEQ ID NO: 1322225 - RNA, 19 nt, Artificial Sequence
  Description of Artificial Sequence: Synthetic oligonucleotide
  Antisense strand to SEQ ID NO: 1322224
auuccucagagagauggca

SEQ ID NO: 1322226 - RNA, 19 nt, Artificial Sequence
  Description of Artificial Sequence: Synthetic oligonucleotide
  Sense strand starting at position 2877 of SEQ ID NO: 1242101
ccaucucucugaggaauaa

SEQ ID NO: 1322227 - RNA, 19 nt, Artificial Sequence
  Description of Artificial Sequence: Synthetic oligonucleotide
  Antisense strand to SEQ ID NO: 1322226
uuauuccucagagagaugg

SEQ ID NO: 1322228 - RNA, 19 nt, Artificial Sequence
  Description of Artificial Sequence: Synthetic oligonucleotide
  Sense strand starting at position 3124 of SEQ ID NO: 1242101
gcugacaguucucugcaca

SEQ ID NO: 1322229 - RNA, 19 nt, Artificial Sequence
  Description of Artificial Sequence: Synthetic oligonucleotide
  Antisense strand to SEQ ID NO: 1322228
ugugcagagaacugucagc

SEQ ID NO: 1322230 - RNA, 19 nt, Artificial Sequence
  Description of Artificial Sequence: Synthetic oligonucleotide
  Sense strand starting at position 3127 of SEQ ID NO: 1242101
gacaguucucugcacagau

SEQ ID NO: 1322231 - RNA, 19 nt, Artificial Sequence
  Description of Artificial Sequence: Synthetic oligonucleotide
  Antisense strand to SEQ ID NO: 1322230
aucugugcagagaacuguc

SEQ ID NO: 1322232 - RNA, 19 nt, Artificial Sequence
  Description of Artificial Sequence: Synthetic oligonucleotide
  Sense strand starting at position 3151 of SEQ ID NO: 1242101
aagccuaaucccugagugu

SEQ ID NO: 1322233 - RNA, 19 nt, Artificial Sequence
  Description of Artificial Sequence: Synthetic oligonucleotide
  Antisense strand to SEQ ID NO: 1322232
acacucagggauuaggcuu

SEQ ID NO: 1322234 - RNA, 19 nt, Artificial Sequence
  Description of Artificial Sequence: Synthetic oligonucleotide
  Sense strand starting at position 3174 of SEQ ID NO: 1242101
gggucuccuugagaagaag

SEQ ID NO: 1322235 - RNA, 19 nt, Artificial Sequence
  Description of Artificial Sequence: Synthetic oligonucleotide
  Antisense strand to SEQ ID NO: 1322234
cuucuucucaaggagaccc

SEQ ID NO: 1322236 - RNA, 19 nt, Artificial Sequence
  Description of Artificial Sequence: Synthetic oligonucleotide
  Sense strand starting at position 3186 of SEQ ID NO: 1242101
gaagaaguguucuuaaaga

SEQ ID NO: 1322237 - RNA, 19 nt, Artificial Sequence
  Description of Artificial Sequence: Synthetic oligonucleotide
  Antisense strand to SEQ ID NO: 1322236
ucuuuaagaacacuucuuc

SEQ ID NO: 1322238 - RNA, 19 nt, Artificial Sequence
  Description of Artificial Sequence: Synthetic oligonucleotide
  Sense strand starting at position 3269 of SEQ ID NO: 1242101
cuuugagcuucuuugucua

SEQ ID NO: 1322239 - RNA, 19 nt, Artificial Sequence
  Description of Artificial Sequence: Synthetic oligonucleotide
  Antisense strand to SEQ ID NO: 1322238
uagacaaagaagcucaaag

SEQ ID NO: 1322240 - RNA, 19 nt, Artificial Sequence
  Description of Artificial Sequence: Synthetic oligonucleotide
  Sense strand starting at position 3280 of SEQ ID NO: 1242101
uuugucuagcugggaguua

SEQ ID NO: 1322241 - RNA, 19 nt, Artificial Sequence
  Description of Artificial Sequence: Synthetic oligonucleotide
  Antisense strand to SEQ ID NO: 1322240
uaacucccagcuagacaaa

SEQ ID NO: 1322242 - RNA, 19 nt, Artificial Sequence
  Description of Artificial Sequence: Synthetic oligonucleotide
  Sense strand starting at position 3291 of SEQ ID NO: 1242101
gggaguuagucugccuuaa

SEQ ID NO: 1322243 - RNA, 19 nt, Artificial Sequence
  Description of Artificial Sequence: Synthetic oligonucleotide
  Antisense strand to SEQ ID NO: 1322242
uuaaggcagacuaacuccc

SEQ ID NO: 1322244 - RNA, 19 nt, Artificial Sequence
  Description of Artificial Sequence: Synthetic oligonucleotide
  Sense strand starting at position 3293 of SEQ ID NO: 1242101
gaguuagucugccuuaacc

SEQ ID NO: 1322245 - RNA, 19 nt, Artificial Sequence
  Description of Artificial Sequence: Synthetic oligonucleotide
  Antisense strand to SEQ ID NO: 1322244
gguuaaggcagacuaacuc

SEQ ID NO: 1322246 - RNA, 19 nt, Artificial Sequence
  Description of Artificial Sequence: Synthetic oligonucleotide
  Sense strand starting at position 3592 of SEQ ID NO: 1242101
gaaguuagcuaauggcauu

SEQ ID NO: 1322247 - RNA, 19 nt, Artificial Sequence
  Description of Artificial Sequence: Synthetic oligonucleotide
  Antisense strand to SEQ ID NO: 1322246
aaugccauuagcuaacuuc

SEQ ID NO: 1322248 - RNA, 19 nt, Artificial Sequence
  Description of Artificial Sequence: Synthetic oligonucleotide
  Sense strand starting at position 3650 of SEQ ID NO: 1242101
uucugcuuccugggauacu

SEQ ID NO: 1322249 - RNA, 19 nt, Artificial Sequence
  Description of Artificial Sequence: Synthetic oligonucleotide
  Antisense strand to SEQ ID NO: 1322248
aguaucccaggaagcagaa

SEQ ID NO: 1322250 - RNA, 19 nt, Artificial Sequence
  Description of Artificial Sequence: Synthetic oligonucleotide
  Sense strand starting at position 3659 of SEQ ID NO: 1242101
cugggauacugcugccaca

SEQ ID NO: 1322251 - RNA, 19 nt, Artificial Sequence
  Description of Artificial Sequence: Synthetic oligonucleotide
  Antisense strand to SEQ ID NO: 1322250
uguggcagcaguaucccag

SEQ ID NO: 1322252 - RNA, 19 nt, Artificial Sequence
  Description of Artificial Sequence: Synthetic oligonucleotide
  Sense strand starting at position 3688 of SEQ ID NO: 1242101
gggucaggaucucuuaauu

SEQ ID NO: 1322253 - RNA, 19 nt, Artificial Sequence
  Description of Artificial Sequence: Synthetic oligonucleotide
  Antisense strand to SEQ ID NO: 1322252
aauuaagagauccugaccc

SEQ ID NO: 1322254 - RNA, 19 nt, Artificial Sequence
  Description of Artificial Sequence: Synthetic oligonucleotide
  Sense strand starting at position 3783 of SEQ ID NO: 1242101
ugcagcaaugacuauuaga

SEQ ID NO: 1322255 - RNA, 19 nt, Artificial Sequence
  Description of Artificial Sequence: Synthetic oligonucleotide
  Antisense strand to SEQ ID NO: 1322254
ucuaauagucauugcugca

SEQ ID NO: 1322256 - RNA, 19 nt, Artificial Sequence
  Description of Artificial Sequence: Synthetic oligonucleotide
  Sense strand starting at position 3786 of SEQ ID NO: 1242101
agcaaugacuauuagauaa

SEQ ID NO: 1322257 - RNA, 19 nt, Artificial Sequence
  Description of Artificial Sequence: Synthetic oligonucleotide
  Antisense strand to SEQ ID NO: 1322256
uuaucuaauagucauugcu

SEQ ID NO: 1322258 - RNA, 19 nt, Artificial Sequence
  Description of Artificial Sequence: Synthetic oligonucleotide
  Sense strand starting at position 3941 of SEQ ID NO: 1242101
ggcuucaaguugugaggaa

SEQ ID NO: 1322259 - RNA, 19 nt, Artificial Sequence
  Description of Artificial Sequence: Synthetic oligonucleotide
  Antisense strand to SEQ ID NO: 1322258
uuccucacaacuugaagcc

SEQ ID NO: 1322260 - RNA, 19 nt, Artificial Sequence
  Description of Artificial Sequence: Synthetic oligonucleotide
  Sense strand starting at position 3942 of SEQ ID NO: 1242101
gcuucaaguugugaggaag

SEQ ID NO: 1322261 - RNA, 19 nt, Artificial Sequence
  Description of Artificial Sequence: Synthetic oligonucleotide
  Antisense strand to SEQ ID NO: 1322260
cuuccucacaacuugaagc

SEQ ID NO: 1322262 - RNA, 19 nt, Artificial Sequence
  Description of Artificial Sequence: Synthetic oligonucleotide
  Sense strand starting at position 3945 of SEQ ID NO: 1242101
ucaaguugugaggaagcua

SEQ ID NO: 1322263 - RNA, 19 nt, Artificial Sequence
  Description of Artificial Sequence: Synthetic oligonucleotide
  Antisense strand to SEQ ID NO: 1322262
uagcuuccucacaacuuga

SEQ ID NO: 1322264 - RNA, 19 nt, Artificial Sequence
  Description of Artificial Sequence: Synthetic oligonucleotide
  Sense strand starting at position 156 of SEQ ID NO: 1242102
uuauaucuguuagcacaga

SEQ ID NO: 1322265 - RNA, 19 nt, Artificial Sequence
  Description of Artificial Sequence: Synthetic oligonucleotide
  Antisense strand to SEQ ID NO: 1322264
ucugugcuaacagauauaa

SEQ ID NO: 1322266 - RNA, 19 nt, Artificial Sequence
  Description of Artificial Sequence: Synthetic oligonucleotide
  Sense strand starting at position 321 of SEQ ID NO: 1242102
acagaacuuuguguauaau

SEQ ID NO: 1322267 - RNA, 19 nt, Artificial Sequence
  Description of Artificial Sequence: Synthetic oligonucleotide
  Antisense strand to SEQ ID NO: 1322266
auuauacacaaaguucugu

SEQ ID NO: 1322268 - RNA, 19 nt, Artificial Sequence
  Description of Artificial Sequence: Synthetic oligonucleotide
  Sense strand starting at position 460 of SEQ ID NO: 1242102
acaccucagugcuuaggau

SEQ ID NO: 1322269 - RNA, 19 nt, Artificial Sequence
  Description of Artificial Sequence: Synthetic oligonucleotide
  Antisense strand to SEQ ID NO: 1322268
auccuaagcacugaggugu

SEQ ID NO: 1322270 - RNA, 19 nt, Artificial Sequence
  Description of Artificial Sequence: Synthetic oligonucleotide
  Sense strand starting at position 461 of SEQ ID NO: 1242102
caccucagugcuuaggaua

SEQ ID NO: 1322271 - RNA, 19 nt, Artificial Sequence
  Description of Artificial Sequence: Synthetic oligonucleotide
  Antisense strand to SEQ ID NO: 1322270
uauccuaagcacugaggug

SEQ ID NO: 1322272 - RNA, 19 nt, Artificial Sequence
  Description of Artificial Sequence: Synthetic oligonucleotide
  Sense strand starting at position 503 of SEQ ID NO: 1242102
guaucaagugaaugaacau

SEQ ID NO: 1322273 - RNA, 19 nt, Artificial Sequence
  Description of Artificial Sequence: Synthetic oligonucleotide
  Antisense strand to SEQ ID NO: 1322272
auguucauucacuugauac

SEQ ID NO: 1322274 - RNA, 19 nt, Artificial Sequence
  Description of Artificial Sequence: Synthetic oligonucleotide
  Sense strand starting at position 548 of SEQ ID NO: 1242102
aguugaacacucugaaacu

SEQ ID NO: 1322275 - RNA, 19 nt, Artificial Sequence
  Description of Artificial Sequence: Synthetic oligonucleotide
  Antisense strand to SEQ ID NO: 1322274
aguuucagaguguucaacu

SEQ ID NO: 1322276 - RNA, 19 nt, Artificial Sequence
  Description of Artificial Sequence: Synthetic oligonucleotide
  Sense strand starting at position 646 of SEQ ID NO: 1242102
cucuuugucugucucaaca

SEQ ID NO: 1322277 - RNA, 19 nt, Artificial Sequence
  Description of Artificial Sequence: Synthetic oligonucleotide
  Antisense strand to SEQ ID NO: 1322276
uguugagacagacaaagag

SEQ ID NO: 1322278 - RNA, 19 nt, Artificial Sequence
  Description of Artificial Sequence: Synthetic oligonucleotide
  Sense strand starting at position 725 of SEQ ID NO: 1242102
ucugcaucagcuuaugcaa

SEQ ID NO: 1322279 - RNA, 19 nt, Artificial Sequence
  Description of Artificial Sequence: Synthetic oligonucleotide
  Antisense strand to SEQ ID NO: 1322278
uugcauaagcugaugcaga

SEQ ID NO: 1322280 - RNA, 19 nt, Artificial Sequence
  Description of Artificial Sequence: Synthetic oligonucleotide
  Sense strand starting at position 877 of SEQ ID NO: 1242102
aucugagagcucuagaccu

SEQ ID NO: 1322281 - RNA, 19 nt, Artificial Sequence
  Description of Artificial Sequence: Synthetic oligonucleotide
  Antisense strand to SEQ ID NO: 1322280
aggucuagagcucucagau

SEQ ID NO: 1322282 - RNA, 19 nt, Artificial Sequence
  Description of Artificial Sequence: Synthetic oligonucleotide
  Sense strand starting at position 978 of SEQ ID NO: 1242102
cugacagugccuuaggaaa

SEQ ID NO: 1322283 - RNA, 19 nt, Artificial Sequence
  Description of Artificial Sequence: Synthetic oligonucleotide
  Antisense strand to SEQ ID NO: 1322282
uuuccuaaggcacugucag

SEQ ID NO: 1322284 - RNA, 19 nt, Artificial Sequence
  Description of Artificial Sequence: Synthetic oligonucleotide
  Sense strand starting at position 1015 of SEQ ID NO: 1242102
gcacacuaauuagugagua

SEQ ID NO: 1322285 - RNA, 19 nt, Artificial Sequence
  Description of Artificial Sequence: Synthetic oligonucleotide
  Antisense strand to SEQ ID NO: 1322284
uacucacuaauuagugugc

SEQ ID NO: 1322286 - RNA, 19 nt, Artificial Sequence
  Description of Artificial Sequence: Synthetic oligonucleotide
  Sense strand starting at position 1025 of SEQ ID NO: 1242102
uagugaguaggaggauaua

SEQ ID NO: 1322287 - RNA, 19 nt, Artificial Sequence
  Description of Artificial Sequence: Synthetic oligonucleotide
  Antisense strand to SEQ ID NO: 1322286
uauauccuccuacucacua

SEQ ID NO: 1322288 - RNA, 19 nt, Artificial Sequence
  Description of Artificial Sequence: Synthetic oligonucleotide
  Sense strand starting at position 1103 of SEQ ID NO: 1242102
aagggagauccaugccuga

SEQ ID NO: 1322289 - RNA, 19 nt, Artificial Sequence
  Description of Artificial Sequence: Synthetic oligonucleotide
  Antisense strand to SEQ ID NO: 1322288
ucaggcauggaucucccuu

SEQ ID NO: 1322290 - RNA, 19 nt, Artificial Sequence
  Description of Artificial Sequence: Synthetic oligonucleotide
  Sense strand starting at position 1106 of SEQ ID NO: 1242102
ggagauccaugccugagaa

SEQ ID NO: 1322291 - RNA, 19 nt, Artificial Sequence
  Description of Artificial Sequence: Synthetic oligonucleotide
  Antisense strand to SEQ ID NO: 1322290
uucucaggcauggaucucc

SEQ ID NO: 1322292 - RNA, 19 nt, Artificial Sequence
  Description of Artificial Sequence: Synthetic oligonucleotide
  Sense strand starting at position 1107 of SEQ ID NO: 1242102
gagauccaugccugagaac

SEQ ID NO: 1322293 - RNA, 19 nt, Artificial Sequence
  Description of Artificial Sequence: Synthetic oligonucleotide
  Antisense strand to SEQ ID NO: 1322292
guucucaggcauggaucuc

SEQ ID NO: 1322294 - RNA, 19 nt, Artificial Sequence
  Description of Artificial Sequence: Synthetic oligonucleotide
  Sense strand starting at position 1195 of SEQ ID NO: 1242102
augaaagaacacugcugau

SEQ ID NO: 1322295 - RNA, 19 nt, Artificial Sequence
  Description of Artificial Sequence: Synthetic oligonucleotide
  Antisense strand to SEQ ID NO: 1322294
aucagcaguguucuuucau

SEQ ID NO: 1322296 - RNA, 19 nt, Artificial Sequence
  Description of Artificial Sequence: Synthetic oligonucleotide
  Sense strand starting at position 1228 of SEQ ID NO: 1242102
aggaaugaauguuaagaaa

SEQ ID NO: 1322297 - RNA, 19 nt, Artificial Sequence
  Description of Artificial Sequence: Synthetic oligonucleotide
  Antisense strand to SEQ ID NO: 1322296
uuucuuaacauucauuccu

SEQ ID NO: 1322298 - RNA, 19 nt, Artificial Sequence
  Description of Artificial Sequence: Synthetic oligonucleotide
  Sense strand starting at position 1321 of SEQ ID NO: 1242102
caucuaguggcucagggau

SEQ ID NO: 1322299 - RNA, 19 nt, Artificial Sequence
  Description of Artificial Sequence: Synthetic oligonucleotide
  Antisense strand to SEQ ID NO: 1322298
aucccugagccacuagaug

SEQ ID NO: 1322300 - RNA, 19 nt, Artificial Sequence
  Description of Artificial Sequence: Synthetic oligonucleotide
  Sense strand starting at position 1383 of SEQ ID NO: 1242102
cacgguaguguggacauau

SEQ ID NO: 1322301 - RNA, 19 nt, Artificial Sequence
  Description of Artificial Sequence: Synthetic oligonucleotide
  Antisense strand to SEQ ID NO: 1322300
auauguccacacuaccgug

SEQ ID NO: 1322302 - RNA, 19 nt, Artificial Sequence
  Description of Artificial Sequence: Synthetic oligonucleotide
  Sense strand starting at position 1391 of SEQ ID NO: 1242102
uguggacauaugugagagu

SEQ ID NO: 1322303 - RNA, 19 nt, Artificial Sequence
  Description of Artificial Sequence: Synthetic oligonucleotide
  Antisense strand to SEQ ID NO: 1322302
acucucacauauguccaca

SEQ ID NO: 1322304 - RNA, 19 nt, Artificial Sequence
  Description of Artificial Sequence: Synthetic oligonucleotide
  Sense strand starting at position 1398 of SEQ ID NO: 1242102
auaugugagaguggguaua

SEQ ID NO: 1322305 - RNA, 19 nt, Artificial Sequence
  Description of Artificial Sequence: Synthetic oligonucleotide
  Antisense strand to SEQ ID NO: 1322304
uauacccacucucacauau

SEQ ID NO: 1322306 - RNA, 19 nt, Artificial Sequence
  Description of Artificial Sequence: Synthetic oligonucleotide
  Sense strand starting at position 1793 of SEQ ID NO: 1242102
ggguucuuucuuugaccuu

SEQ ID NO: 1322307 - RNA, 19 nt, Artificial Sequence
  Description of Artificial Sequence: Synthetic oligonucleotide
  Antisense strand to SEQ ID NO: 1322306
aaggucaaagaaagaaccc

SEQ ID NO: 1322308 - RNA, 19 nt, Artificial Sequence
  Description of Artificial Sequence: Synthetic oligonucleotide
  Sense strand starting at position 1896 of SEQ ID NO: 1242102
aacuuugacuggucaagag

SEQ ID NO: 1322309 - RNA, 19 nt, Artificial Sequence
  Description of Artificial Sequence: Synthetic oligonucleotide
  Antisense strand to SEQ ID NO: 1322308
cucuugaccagucaaaguu

SEQ ID NO: 1322310 - RNA, 19 nt, Artificial Sequence
  Description of Artificial Sequence: Synthetic oligonucleotide
  Sense strand starting at position 2206 of SEQ ID NO: 1242102
agaaguuaucauugaccac

SEQ ID NO: 1322311 - RNA, 19 nt, Artificial Sequence
  Description of Artificial Sequence: Synthetic oligonucleotide
  Antisense strand to SEQ ID NO: 1322310
guggucaaugauaacuucu

SEQ ID NO: 1322312 - RNA, 19 nt, Artificial Sequence
  Description of Artificial Sequence: Synthetic oligonucleotide
  Sense strand starting at position 2454 of SEQ ID NO: 1242102
ugcuaaaugcaauagucuu

SEQ ID NO: 1322313 - RNA, 19 nt, Artificial Sequence
  Description of Artificial Sequence: Synthetic oligonucleotide
  Antisense strand to SEQ ID NO: 1322312
aagacuauugcauuuagca

SEQ ID NO: 1322314 - RNA, 19 nt, Artificial Sequence
  Description of Artificial Sequence: Synthetic oligonucleotide
  Sense strand starting at position 2976 of SEQ ID NO: 1242102
uuucuuaggcuugaaaugu

SEQ ID NO: 1322315 - RNA, 19 nt, Artificial Sequence
  Description of Artificial Sequence: Synthetic oligonucleotide
  Antisense strand to SEQ ID NO: 1322314
acauuucaagccuaagaaa

SEQ ID NO: 1322316 - RNA, 19 nt, Artificial Sequence
  Description of Artificial Sequence: Synthetic oligonucleotide
  Sense strand starting at position 2985 of SEQ ID NO: 1242102
cuugaaauguuaccuaugu

SEQ ID NO: 1322317 - RNA, 19 nt, Artificial Sequence
  Description of Artificial Sequence: Synthetic oligonucleotide
  Antisense strand to SEQ ID NO: 1322316
acauagguaacauuucaag

SEQ ID NO: 1322318 - RNA, 19 nt, Artificial Sequence
  Description of Artificial Sequence: Synthetic oligonucleotide
  Sense strand starting at position 2986 of SEQ ID NO: 1242102
uugaaauguuaccuaugug

SEQ ID NO: 1322319 - RNA, 19 nt, Artificial Sequence
  Description of Artificial Sequence: Synthetic oligonucleotide
  Antisense strand to SEQ ID NO: 1322318
cacauagguaacauuucaa

SEQ ID NO: 1322320 - RNA, 19 nt, Artificial Sequence
  Description of Artificial Sequence: Synthetic oligonucleotide
  Sense strand starting at position 2998 of SEQ ID NO: 1242102
cuaugugauauccguauag

SEQ ID NO: 1322321 - RNA, 19 nt, Artificial Sequence
  Description of Artificial Sequence: Synthetic oligonucleotide
  Antisense strand to SEQ ID NO: 1322320
cuauacggauaucacauag

SEQ ID NO: 1322322 - RNA, 19 nt, Artificial Sequence
  Description of Artificial Sequence: Synthetic oligonucleotide
  Sense strand starting at position 3000 of SEQ ID NO: 1242102
augugauauccguauaggu

SEQ ID NO: 1322323 - RNA, 19 nt, Artificial Sequence
  Description of Artificial Sequence: Synthetic oligonucleotide
  Antisense strand to SEQ ID NO: 1322322
accuauacggauaucacau

SEQ ID NO: 1322324 - RNA, 19 nt, Artificial Sequence
  Description of Artificial Sequence: Synthetic oligonucleotide
  Sense strand starting at position 3002 of SEQ ID NO: 1242102
gugauauccguauagguuu

SEQ ID NO: 1322325 - RNA, 19 nt, Artificial Sequence
  Description of Artificial Sequence: Synthetic oligonucleotide
  Antisense strand to SEQ ID NO: 1322324
aaaccuauacggauaucac

SEQ ID NO: 1322326 - RNA, 19 nt, Artificial Sequence
  Description of Artificial Sequence: Synthetic oligonucleotide
  Sense strand starting at position 3005 of SEQ ID NO: 1242102
auauccguauagguuuaaa

SEQ ID NO: 1322327 - RNA, 19 nt, Artificial Sequence
  Description of Artificial Sequence: Synthetic oligonucleotide
  Antisense strand to SEQ ID NO: 1322326
uuuaaaccuauacggauau

SEQ ID NO: 1322328 - RNA, 19 nt, Artificial Sequence
  Description of Artificial Sequence: Synthetic oligonucleotide
  Sense strand starting at position 3008 of SEQ ID NO: 1242102
uccguauagguuuaaacau

SEQ ID NO: 1322329 - RNA, 19 nt, Artificial Sequence
  Description of Artificial Sequence: Synthetic oligonucleotide
  Antisense strand to SEQ ID NO: 1322328
auguuuaaaccuauacgga

SEQ ID NO: 1322330 - RNA, 19 nt, Artificial Sequence
  Description of Artificial Sequence: Synthetic oligonucleotide
  Sense strand starting at position 3094 of SEQ ID NO: 1242102
cucuuaugacucugaggca

SEQ ID NO: 1322331 - RNA, 19 nt, Artificial Sequence
  Description of Artificial Sequence: Synthetic oligonucleotide
  Antisense strand to SEQ ID NO: 1322330
ugccucagagucauaagag

SEQ ID NO: 1322332 - RNA, 19 nt, Artificial Sequence
  Description of Artificial Sequence: Synthetic oligonucleotide
  Sense strand starting at position 3407 of SEQ ID NO: 1242102
auaaaucuagucugucaaa

SEQ ID NO: 1322333 - RNA, 19 nt, Artificial Sequence
  Description of Artificial Sequence: Synthetic oligonucleotide
  Antisense strand to SEQ ID NO: 1322332
uuugacagacuagauuuau

SEQ ID NO: 1322334 - RNA, 19 nt, Artificial Sequence
  Description of Artificial Sequence: Synthetic oligonucleotide
  Sense strand starting at position 3597 of SEQ ID NO: 1242102
agagcuuaugcccaggcau

SEQ ID NO: 1322335 - RNA, 19 nt, Artificial Sequence
  Description of Artificial Sequence: Synthetic oligonucleotide
  Antisense strand to SEQ ID NO: 1322334
augccugggcauaagcucu

SEQ ID NO: 1322336 - RNA, 19 nt, Artificial Sequence
  Description of Artificial Sequence: Synthetic oligonucleotide
  Sense strand starting at position 3634 of SEQ ID NO: 1242102
gagagaauucucuggcagg

SEQ ID NO: 1322337 - RNA, 19 nt, Artificial Sequence
  Description of Artificial Sequence: Synthetic oligonucleotide
  Antisense strand to SEQ ID NO: 1322336
ccugccagagaauucucuc

SEQ ID NO: 1322338 - RNA, 19 nt, Artificial Sequence
  Description of Artificial Sequence: Synthetic oligonucleotide
  Sense strand starting at position 3645 of SEQ ID NO: 1242102
cuggcaggcuccuugaaga

SEQ ID NO: 1322339 - RNA, 19 nt, Artificial Sequence
  Description of Artificial Sequence: Synthetic oligonucleotide
  Antisense strand to SEQ ID NO: 1322338
ucuucaaggagccugccag

SEQ ID NO: 1322340 - RNA, 19 nt, Artificial Sequence
  Description of Artificial Sequence: Synthetic oligonucleotide
  Sense strand starting at position 3784 of SEQ ID NO: 1242102
caacaaguauuggugaaga

SEQ ID NO: 1322341 - RNA, 19 nt, Artificial Sequence
  Description of Artificial Sequence: Synthetic oligonucleotide
  Antisense strand to SEQ ID NO: 1322340
ucuucaccaauacuuguug

SEQ ID NO: 1322342 - RNA, 19 nt, Artificial Sequence
  Description of Artificial Sequence: Synthetic oligonucleotide
  Sense strand starting at position 3898 of SEQ ID NO: 1242102
ccuagaguucuuuaugacu

SEQ ID NO: 1322343 - RNA, 19 nt, Artificial Sequence
  Description of Artificial Sequence: Synthetic oligonucleotide
  Antisense strand to SEQ ID NO: 1322342
agucauaaagaacucuagg

SEQ ID NO: 1322344 - RNA, 19 nt, Artificial Sequence
  Description of Artificial Sequence: Synthetic oligonucleotide
  Sense strand starting at position 173 of SEQ ID NO: 1242103
gucacagucuaaccugaua

SEQ ID NO: 1322345 - RNA, 19 nt, Artificial Sequence
  Description of Artificial Sequence: Synthetic oligonucleotide
  Antisense strand to SEQ ID NO: 1322344
uaucagguuagacugugac

SEQ ID NO: 1322346 - RNA, 19 nt, Artificial Sequence
  Description of Artificial Sequence: Synthetic oligonucleotide
  Sense strand starting at position 283 of SEQ ID NO: 1242103
uccugcuuugcugaaggaa

SEQ ID NO: 1322347 - RNA, 19 nt, Artificial Sequence
  Description of Artificial Sequence: Synthetic oligonucleotide
  Antisense strand to SEQ ID NO: 1322346
uuccuucagcaaagcagga

SEQ ID NO: 1322348 - RNA, 19 nt, Artificial Sequence
  Description of Artificial Sequence: Synthetic oligonucleotide
  Sense strand starting at position 386 of SEQ ID NO: 1242103
cguguuaggaacuaguacu

SEQ ID NO: 1322349 - RNA, 19 nt, Artificial Sequence
  Description of Artificial Sequence: Synthetic oligonucleotide
  Antisense strand to SEQ ID NO: 1322348
aguacuaguuccuaacacg

SEQ ID NO: 1322350 - RNA, 19 nt, Artificial Sequence
  Description of Artificial Sequence: Synthetic oligonucleotide
  Sense strand starting at position 480 of SEQ ID NO: 1242103
ggcggugagugcaucagaa

SEQ ID NO: 1322351 - RNA, 19 nt, Artificial Sequence
  Description of Artificial Sequence: Synthetic oligonucleotide
  Antisense strand to SEQ ID NO: 1322350
uucugaugcacucaccgcc

SEQ ID NO: 1322352 - RNA, 19 nt, Artificial Sequence
  Description of Artificial Sequence: Synthetic oligonucleotide
  Sense strand starting at position 482 of SEQ ID NO: 1242103
cggugagugcaucagaaau

SEQ ID NO: 1322353 - RNA, 19 nt, Artificial Sequence
  Description of Artificial Sequence: Synthetic oligonucleotide
  Antisense strand to SEQ ID NO: 1322352
auuucugaugcacucaccg

SEQ ID NO: 1322354 - RNA, 19 nt, Artificial Sequence
  Description of Artificial Sequence: Synthetic oligonucleotide
  Sense strand starting at position 588 of SEQ ID NO: 1242103
ggccucuaauaucugggaa

SEQ ID NO: 1322355 - RNA, 19 nt, Artificial Sequence
  Description of Artificial Sequence: Synthetic oligonucleotide
  Antisense strand to SEQ ID NO: 1322354
uucccagauauuagaggcc

SEQ ID NO: 1322356 - RNA, 19 nt, Artificial Sequence
  Description of Artificial Sequence: Synthetic oligonucleotide
  Sense strand starting at position 805 of SEQ ID NO: 1242103
gaaguauuccuggacucga

SEQ ID NO: 1322357 - RNA, 19 nt, Artificial Sequence
  Description of Artificial Sequence: Synthetic oligonucleotide
  Antisense strand to SEQ ID NO: 1322356
ucgaguccaggaauacuuc

SEQ ID NO: 1322358 - RNA, 19 nt, Artificial Sequence
  Description of Artificial Sequence: Synthetic oligonucleotide
  Sense strand starting at position 828 of SEQ ID NO: 1242103
cugaccauccugcauaaga

SEQ ID NO: 1322359 - RNA, 19 nt, Artificial Sequence
  Description of Artificial Sequence: Synthetic oligonucleotide
  Antisense strand to SEQ ID NO: 1322358
ucuuaugcaggauggucag

SEQ ID NO: 1322360 - RNA, 19 nt, Artificial Sequence
  Description of Artificial Sequence: Synthetic oligonucleotide
  Sense strand starting at position 830 of SEQ ID NO: 1242103
gaccauccugcauaagagu

SEQ ID NO: 1322361 - RNA, 19 nt, Artificial Sequence
  Description of Artificial Sequence: Synthetic oligonucleotide
  Antisense strand to SEQ ID NO: 1322360
acucuuaugcaggaugguc

SEQ ID NO: 1322362 - RNA, 19 nt, Artificial Sequence
  Description of Artificial Sequence: Synthetic oligonucleotide
  Sense strand starting at position 837 of SEQ ID NO: 1242103
cugcauaagagucgacaga

SEQ ID NO: 1322363 - RNA, 19 nt, Artificial Sequence
  Description of Artificial Sequence: Synthetic oligonucleotide
  Antisense strand to SEQ ID NO: 1322362
ucugucgacucuuaugcag

SEQ ID NO: 1322364 - RNA, 19 nt, Artificial Sequence
  Description of Artificial Sequence: Synthetic oligonucleotide
  Sense strand starting at position 838 of SEQ ID NO: 1242103
ugcauaagagucgacagaa

SEQ ID NO: 1322365 - RNA, 19 nt, Artificial Sequence
  Description of Artificial Sequence: Synthetic oligonucleotide
  Antisense strand to SEQ ID NO: 1322364
uucugucgacucuuaugca

SEQ ID NO: 1322366 - RNA, 19 nt, Artificial Sequence
  Description of Artificial Sequence: Synthetic oligonucleotide
  Sense strand starting at position 866 of SEQ ID NO: 1242103
cgugaugucaaggaaagca

SEQ ID NO: 1322367 - RNA, 19 nt, Artificial Sequence
  Description of Artificial Sequence: Synthetic oligonucleotide
  Antisense strand to SEQ ID NO: 1322366
ugcuuuccuugacaucacg

SEQ ID NO: 1322368 - RNA, 19 nt, Artificial Sequence
  Description of Artificial Sequence: Synthetic oligonucleotide
  Sense strand starting at position 926 of SEQ ID NO: 1242103
ugaguuccugauggaauga

SEQ ID NO: 1322369 - RNA, 19 nt, Artificial Sequence
  Description of Artificial Sequence: Synthetic oligonucleotide
  Antisense strand to SEQ ID NO: 1322368
ucauuccaucaggaacuca

SEQ ID NO: 1322370 - RNA, 19 nt, Artificial Sequence
  Description of Artificial Sequence: Synthetic oligonucleotide
  Sense strand starting at position 1002 of SEQ ID NO: 1242103
aucaaagagugguccagua

SEQ ID NO: 1322371 - RNA, 19 nt, Artificial Sequence
  Description of Artificial Sequence: Synthetic oligonucleotide
  Antisense strand to SEQ ID NO: 1322370
uacuggaccacucuuugau

SEQ ID NO: 1322372 - RNA, 19 nt, Artificial Sequence
  Description of Artificial Sequence: Synthetic oligonucleotide
  Sense strand starting at position 1009 of SEQ ID NO: 1242103
agugguccaguaggauuaa

SEQ ID NO: 1322373 - RNA, 19 nt, Artificial Sequence
  Description of Artificial Sequence: Synthetic oligonucleotide
  Antisense strand to SEQ ID NO: 1322372
uuaauccuacuggaccacu

SEQ ID NO: 1322374 - RNA, 19 nt, Artificial Sequence
  Description of Artificial Sequence: Synthetic oligonucleotide
  Sense strand starting at position 1019 of SEQ ID NO: 1242103
uaggauuaauuugggaauu

SEQ ID NO: 1322375 - RNA, 19 nt, Artificial Sequence
  Description of Artificial Sequence: Synthetic oligonucleotide
  Antisense strand to SEQ ID NO: 1322374
aauucccaaauuaauccua

SEQ ID NO: 1322376 - RNA, 19 nt, Artificial Sequence
  Description of Artificial Sequence: Synthetic oligonucleotide
  Sense strand starting at position 1020 of SEQ ID NO: 1242103
aggauuaauuugggaauua

SEQ ID NO: 1322377 - RNA, 19 nt, Artificial Sequence
  Description of Artificial Sequence: Synthetic oligonucleotide
  Antisense strand to SEQ ID NO: 1322376
uaauucccaaauuaauccu

SEQ ID NO: 1322378 - RNA, 19 nt, Artificial Sequence
  Description of Artificial Sequence: Synthetic oligonucleotide
  Sense strand starting at position 1401 of SEQ ID NO: 1242103
ugagaugucagccaagggu

SEQ ID NO: 1322379 - RNA, 19 nt, Artificial Sequence
  Description of Artificial Sequence: Synthetic oligonucleotide
  Antisense strand to SEQ ID NO: 1322378
acccuuggcugacaucuca

SEQ ID NO: 1322380 - RNA, 19 nt, Artificial Sequence
  Description of Artificial Sequence: Synthetic oligonucleotide
  Sense strand starting at position 1475 of SEQ ID NO: 1242103
gggaaaguuaccuguaaca

SEQ ID NO: 1322381 - RNA, 19 nt, Artificial Sequence
  Description of Artificial Sequence: Synthetic oligonucleotide
  Antisense strand to SEQ ID NO: 1322380
uguuacagguaacuuuccc

SEQ ID NO: 1322382 - RNA, 19 nt, Artificial Sequence
  Description of Artificial Sequence: Synthetic oligonucleotide
  Sense strand starting at position 1493 of SEQ ID NO: 1242103
accacaaugucagugauuc

SEQ ID NO: 1322383 - RNA, 19 nt, Artificial Sequence
  Description of Artificial Sequence: Synthetic oligonucleotide
  Antisense strand to SEQ ID NO: 1322382
gaaucacugacauuguggu

SEQ ID NO: 1322384 - RNA, 19 nt, Artificial Sequence
  Description of Artificial Sequence: Synthetic oligonucleotide
  Sense strand starting at position 1738 of SEQ ID NO: 1242103
cgguauaucgcacuaagcu

SEQ ID NO: 1322385 - RNA, 19 nt, Artificial Sequence
  Description of Artificial Sequence: Synthetic oligonucleotide
  Antisense strand to SEQ ID NO: 1322384
agcuuagugcgauauaccg

SEQ ID NO: 1322386 - RNA, 19 nt, Artificial Sequence
  Description of Artificial Sequence: Synthetic oligonucleotide
  Sense strand starting at position 2094 of SEQ ID NO: 1242103
ccagaugaauuccucugga

SEQ ID NO: 1322387 - RNA, 19 nt, Artificial Sequence
  Description of Artificial Sequence: Synthetic oligonucleotide
  Antisense strand to SEQ ID NO: 1322386
uccagaggaauucaucugg

SEQ ID NO: 1322388 - RNA, 19 nt, Artificial Sequence
  Description of Artificial Sequence: Synthetic oligonucleotide
  Sense strand starting at position 2097 of SEQ ID NO: 1242103
gaugaauuccucuggagcu

SEQ ID NO: 1322389 - RNA, 19 nt, Artificial Sequence
  Description of Artificial Sequence: Synthetic oligonucleotide
  Antisense strand to SEQ ID NO: 1322388
agcuccagaggaauucauc

SEQ ID NO: 1322390 - RNA, 19 nt, Artificial Sequence
  Description of Artificial Sequence: Synthetic oligonucleotide
  Sense strand starting at position 2099 of SEQ ID NO: 1242103
ugaauuccucuggagcuga

SEQ ID NO: 1322391 - RNA, 19 nt, Artificial Sequence
  Description of Artificial Sequence: Synthetic oligonucleotide
  Antisense strand to SEQ ID NO: 1322390
ucagcuccagaggaauuca

SEQ ID NO: 1322392 - RNA, 19 nt, Artificial Sequence
  Description of Artificial Sequence: Synthetic oligonucleotide
  Sense strand starting at position 2628 of SEQ ID NO: 1242103
cucaguguugcagaugaaa

SEQ ID NO: 1322393 - RNA, 19 nt, Artificial Sequence
  Description of Artificial Sequence: Synthetic oligonucleotide
  Antisense strand to SEQ ID NO: 1322392
uuucaucugcaacacugag

SEQ ID NO: 1322394 - RNA, 19 nt, Artificial Sequence
  Description of Artificial Sequence: Synthetic oligonucleotide
  Sense strand starting at position 2763 of SEQ ID NO: 1242103
cuggguaggcacuggaaua

SEQ ID NO: 1322395 - RNA, 19 nt, Artificial Sequence
  Description of Artificial Sequence: Synthetic oligonucleotide
  Antisense strand to SEQ ID NO: 1322394
uauuccagugccuacccag

SEQ ID NO: 1322396 - RNA, 19 nt, Artificial Sequence
  Description of Artificial Sequence: Synthetic oligonucleotide
  Sense strand starting at position 2764 of SEQ ID NO: 1242103
uggguaggcacuggaauaa

SEQ ID NO: 1322397 - RNA, 19 nt, Artificial Sequence
  Description of Artificial Sequence: Synthetic oligonucleotide
  Antisense strand to SEQ ID NO: 1322396
uuauuccagugccuaccca

SEQ ID NO: 1322398 - RNA, 19 nt, Artificial Sequence
  Description of Artificial Sequence: Synthetic oligonucleotide
  Sense strand starting at position 2801 of SEQ ID NO: 1242103
gguggccuucuggagaaau

SEQ ID NO: 1322399 - RNA, 19 nt, Artificial Sequence
  Description of Artificial Sequence: Synthetic oligonucleotide
  Antisense strand to SEQ ID NO: 1322398
auuucuccagaaggccacc

SEQ ID NO: 1322400 - RNA, 19 nt, Artificial Sequence
  Description of Artificial Sequence: Synthetic oligonucleotide
  Sense strand starting at position 2803 of SEQ ID NO: 1242103
uggccuucuggagaaauuc

SEQ ID NO: 1322401 - RNA, 19 nt, Artificial Sequence
  Description of Artificial Sequence: Synthetic oligonucleotide
  Antisense strand to SEQ ID NO: 1322400
gaauuucuccagaaggcca

SEQ ID NO: 1322402 - RNA, 19 nt, Artificial Sequence
  Description of Artificial Sequence: Synthetic oligonucleotide
  Sense strand starting at position 2845 of SEQ ID NO: 1242103
guaagagagaccuggugau

SEQ ID NO: 1322403 - RNA, 19 nt, Artificial Sequence
  Description of Artificial Sequence: Synthetic oligonucleotide
  Antisense strand to SEQ ID NO: 1322402
aucaccaggucucucuuac

SEQ ID NO: 1322404 - RNA, 19 nt, Artificial Sequence
  Description of Artificial Sequence: Synthetic oligonucleotide
  Sense strand starting at position 2867 of SEQ ID NO: 1242103
cauagaacuucucugugag

SEQ ID NO: 1322405 - RNA, 19 nt, Artificial Sequence
  Description of Artificial Sequence: Synthetic oligonucleotide
  Antisense strand to SEQ ID NO: 1322404
cucacagagaaguucuaug

SEQ ID NO: 1322406 - RNA, 19 nt, Artificial Sequence
  Description of Artificial Sequence: Synthetic oligonucleotide
  Sense strand starting at position 2868 of SEQ ID NO: 1242103
auagaacuucucugugaga

SEQ ID NO: 1322407 - RNA, 19 nt, Artificial Sequence
  Description of Artificial Sequence: Synthetic oligonucleotide
  Antisense strand to SEQ ID NO: 1322406
ucucacagagaaguucuau

SEQ ID NO: 1322408 - RNA, 19 nt, Artificial Sequence
  Description of Artificial Sequence: Synthetic oligonucleotide
  Sense strand starting at position 2869 of SEQ ID NO: 1242103
uagaacuucucugugagag

SEQ ID NO: 1322409 - RNA, 19 nt, Artificial Sequence
  Description of Artificial Sequence: Synthetic oligonucleotide
  Antisense strand to SEQ ID NO: 1322408
cucucacagagaaguucua

SEQ ID NO: 1322410 - RNA, 19 nt, Artificial Sequence
  Description of Artificial Sequence: Synthetic oligonucleotide
  Sense strand starting at position 2870 of SEQ ID NO: 1242103
agaacuucucugugagagg

SEQ ID NO: 1322411 - RNA, 19 nt, Artificial Sequence
  Description of Artificial Sequence: Synthetic oligonucleotide
  Antisense strand to SEQ ID NO: 1322410
ccucucacagagaaguucu

SEQ ID NO: 1322412 - RNA, 19 nt, Artificial Sequence
  Description of Artificial Sequence: Synthetic oligonucleotide
  Sense strand starting at position 3072 of SEQ ID NO: 1242103
gucucugggaccugaaaua

SEQ ID NO: 1322413 - RNA, 19 nt, Artificial Sequence
  Description of Artificial Sequence: Synthetic oligonucleotide
  Antisense strand to SEQ ID NO: 1322412
uauuucaggucccagagac

SEQ ID NO: 1322414 - RNA, 19 nt, Artificial Sequence
  Description of Artificial Sequence: Synthetic oligonucleotide
  Sense strand starting at position 3097 of SEQ ID NO: 1242103
ucagaauucccagagcuuc

SEQ ID NO: 1322415 - RNA, 19 nt, Artificial Sequence
  Description of Artificial Sequence: Synthetic oligonucleotide
  Antisense strand to SEQ ID NO: 1322414
gaagcucugggaauucuga

SEQ ID NO: 1322416 - RNA, 19 nt, Artificial Sequence
  Description of Artificial Sequence: Synthetic oligonucleotide
  Sense strand starting at position 3324 of SEQ ID NO: 1242103
gccugugauagagaagcuu

SEQ ID NO: 1322417 - RNA, 19 nt, Artificial Sequence
  Description of Artificial Sequence: Synthetic oligonucleotide
  Antisense strand to SEQ ID NO: 1322416
aagcuucucuaucacaggc

SEQ ID NO: 1322418 - RNA, 19 nt, Artificial Sequence
  Description of Artificial Sequence: Synthetic oligonucleotide
  Sense strand starting at position 3616 of SEQ ID NO: 1242103
ugggcuauuccugggaacu

SEQ ID NO: 1322419 - RNA, 19 nt, Artificial Sequence
  Description of Artificial Sequence: Synthetic oligonucleotide
  Antisense strand to SEQ ID NO: 1322418
aguucccaggaauagccca

SEQ ID NO: 1322420 - RNA, 19 nt, Artificial Sequence
  Description of Artificial Sequence: Synthetic oligonucleotide
  Sense strand starting at position 3617 of SEQ ID NO: 1242103
gggcuauuccugggaacug

SEQ ID NO: 1322421 - RNA, 19 nt, Artificial Sequence
  Description of Artificial Sequence: Synthetic oligonucleotide
  Antisense strand to SEQ ID NO: 1322420
caguucccaggaauagccc

SEQ ID NO: 1322422 - RNA, 19 nt, Artificial Sequence
  Description of Artificial Sequence: Synthetic oligonucleotide
  Sense strand starting at position 3709 of SEQ ID NO: 1242103
uggagugagcuguggaaag

SEQ ID NO: 1322423 - RNA, 19 nt, Artificial Sequence
  Description of Artificial Sequence: Synthetic oligonucleotide
  Antisense strand to SEQ ID NO: 1322422
cuuuccacagcucacucca

SEQ ID NO: 1322424 - RNA, 19 nt, Artificial Sequence
  Description of Artificial Sequence: Synthetic oligonucleotide
  Sense strand starting at position 15 of SEQ ID NO: 1242104
uugaaaugauuaguccaua

SEQ ID NO: 1322425 - RNA, 19 nt, Artificial Sequence
  Description of Artificial Sequence: Synthetic oligonucleotide
  Antisense strand to SEQ ID NO: 1322424
uauggacuaaucauuucaa

SEQ ID NO: 1322426 - RNA, 19 nt, Artificial Sequence
  Description of Artificial Sequence: Synthetic oligonucleotide
  Sense strand starting at position 121 of SEQ ID NO: 1242104
agugauuauguccauccau

SEQ ID NO: 1322427 - RNA, 19 nt, Artificial Sequence
  Description of Artificial Sequence: Synthetic oligonucleotide
  Antisense strand to SEQ ID NO: 1322426
auggauggacauaaucacu

SEQ ID NO: 1322428 - RNA, 19 nt, Artificial Sequence
  Description of Artificial Sequence: Synthetic oligonucleotide
  Sense strand starting at position 326 of SEQ ID NO: 1242104
ucuagaaugccuugacccu

SEQ ID NO: 1322429 - RNA, 19 nt, Artificial Sequence
  Description of Artificial Sequence: Synthetic oligonucleotide
  Antisense strand to SEQ ID NO: 1322428
agggucaaggcauucuaga

SEQ ID NO: 1322430 - RNA, 19 nt, Artificial Sequence
  Description of Artificial Sequence: Synthetic oligonucleotide
  Sense strand starting at position 447 of SEQ ID NO: 1242104
gugugucuuccucaaagag

SEQ ID NO: 1322431 - RNA, 19 nt, Artificial Sequence
  Description of Artificial Sequence: Synthetic oligonucleotide
  Antisense strand to SEQ ID NO: 1322430
cucuuugaggaagacacac

SEQ ID NO: 1322432 - RNA, 19 nt, Artificial Sequence
  Description of Artificial Sequence: Synthetic oligonucleotide
  Sense strand starting at position 524 of SEQ ID NO: 1242104
caacgacaaccuuguuaug

SEQ ID NO: 1322433 - RNA, 19 nt, Artificial Sequence
  Description of Artificial Sequence: Synthetic oligonucleotide
  Antisense strand to SEQ ID NO: 1322432
cauaacaagguugucguug

SEQ ID NO: 1322434 - RNA, 19 nt, Artificial Sequence
  Description of Artificial Sequence: Synthetic oligonucleotide
  Sense strand starting at position 530 of SEQ ID NO: 1242104
caaccuuguuauguaggaa

SEQ ID NO: 1322435 - RNA, 19 nt, Artificial Sequence
  Description of Artificial Sequence: Synthetic oligonucleotide
  Antisense strand to SEQ ID NO: 1322434
uuccuacauaacaagguug

SEQ ID NO: 1322436 - RNA, 19 nt, Artificial Sequence
  Description of Artificial Sequence: Synthetic oligonucleotide
  Sense strand starting at position 533 of SEQ ID NO: 1242104
ccuuguuauguaggaagag

SEQ ID NO: 1322437 - RNA, 19 nt, Artificial Sequence
  Description of Artificial Sequence: Synthetic oligonucleotide
  Antisense strand to SEQ ID NO: 1322436
cucuuccuacauaacaagg

SEQ ID NO: 1322438 - RNA, 19 nt, Artificial Sequence
  Description of Artificial Sequence: Synthetic oligonucleotide
  Sense strand starting at position 552 of SEQ ID NO: 1242104
agagcuauuguggacugua

SEQ ID NO: 1322439 - RNA, 19 nt, Artificial Sequence
  Description of Artificial Sequence: Synthetic oligonucleotide
  Antisense strand to SEQ ID NO: 1322438
uacaguccacaauagcucu

SEQ ID NO: 1322440 - RNA, 19 nt, Artificial Sequence
  Description of Artificial Sequence: Synthetic oligonucleotide
  Sense strand starting at position 670 of SEQ ID NO: 1242104
caagcucucggcuaucaga

SEQ ID NO: 1322441 - RNA, 19 nt, Artificial Sequence
  Description of Artificial Sequence: Synthetic oligonucleotide
  Antisense strand to SEQ ID NO: 1322440
ucugauagccgagagcuug

SEQ ID NO: 1322442 - RNA, 19 nt, Artificial Sequence
  Description of Artificial Sequence: Synthetic oligonucleotide
  Sense strand starting at position 681 of SEQ ID NO: 1242104
cuaucagaggucgguuuaa

SEQ ID NO: 1322443 - RNA, 19 nt, Artificial Sequence
  Description of Artificial Sequence: Synthetic oligonucleotide
  Antisense strand to SEQ ID NO: 1322442
uuaaaccgaccucugauag

SEQ ID NO: 1322444 - RNA, 19 nt, Artificial Sequence
  Description of Artificial Sequence: Synthetic oligonucleotide
  Sense strand starting at position 1033 of SEQ ID NO: 1242104
accggcuuuccaggaggaa

SEQ ID NO: 1322445 - RNA, 19 nt, Artificial Sequence
  Description of Artificial Sequence: Synthetic oligonucleotide
  Antisense strand to SEQ ID NO: 1322444
uuccuccuggaaagccggu

SEQ ID NO: 1322446 - RNA, 19 nt, Artificial Sequence
  Description of Artificial Sequence: Synthetic oligonucleotide
  Sense strand starting at position 1327 of SEQ ID NO: 1242104
gcggguagcccuucaucuu

SEQ ID NO: 1322447 - RNA, 19 nt, Artificial Sequence
  Description of Artificial Sequence: Synthetic oligonucleotide
  Antisense strand to SEQ ID NO: 1322446
aagaugaagggcuacccgc

SEQ ID NO: 1322448 - RNA, 19 nt, Artificial Sequence
  Description of Artificial Sequence: Synthetic oligonucleotide
  Sense strand starting at position 1916 of SEQ ID NO: 1242104
gguuaauuccuagguacac

SEQ ID NO: 1322449 - RNA, 19 nt, Artificial Sequence
  Description of Artificial Sequence: Synthetic oligonucleotide
  Antisense strand to SEQ ID NO: 1322448
guguaccuaggaauuaacc

SEQ ID NO: 1322450 - RNA, 19 nt, Artificial Sequence
  Description of Artificial Sequence: Synthetic oligonucleotide
  Sense strand starting at position 2426 of SEQ ID NO: 1242104
cgagcuauuuaaucggagu

SEQ ID NO: 1322451 - RNA, 19 nt, Artificial Sequence
  Description of Artificial Sequence: Synthetic oligonucleotide
  Antisense strand to SEQ ID NO: 1322450
acuccgauuaaauagcucg

SEQ ID NO: 1322452 - RNA, 19 nt, Artificial Sequence
  Description of Artificial Sequence: Synthetic oligonucleotide
  Sense strand starting at position 2437 of SEQ ID NO: 1242104
aucggagucaugggagguu

SEQ ID NO: 1322453 - RNA, 19 nt, Artificial Sequence
  Description of Artificial Sequence: Synthetic oligonucleotide
  Antisense strand to SEQ ID NO: 1322452
aaccucccaugacuccgau

SEQ ID NO: 1322454 - RNA, 19 nt, Artificial Sequence
  Description of Artificial Sequence: Synthetic oligonucleotide
  Sense strand starting at position 2506 of SEQ ID NO: 1242104
guccaaaguccauaagcga

SEQ ID NO: 1322455 - RNA, 19 nt, Artificial Sequence
  Description of Artificial Sequence: Synthetic oligonucleotide
  Antisense strand to SEQ ID NO: 1322454
ucgcuuauggacuuuggac

SEQ ID NO: 1322456 - RNA, 19 nt, Artificial Sequence
  Description of Artificial Sequence: Synthetic oligonucleotide
  Sense strand starting at position 2509 of SEQ ID NO: 1242104
caaaguccauaagcgauua

SEQ ID NO: 1322457 - RNA, 19 nt, Artificial Sequence
  Description of Artificial Sequence: Synthetic oligonucleotide
  Antisense strand to SEQ ID NO: 1322456
uaaucgcuuauggacuuug

SEQ ID NO: 1322458 - RNA, 19 nt, Artificial Sequence
  Description of Artificial Sequence: Synthetic oligonucleotide
  Sense strand starting at position 2514 of SEQ ID NO: 1242104
uccauaagcgauuauguuu

SEQ ID NO: 1322459 - RNA, 19 nt, Artificial Sequence
  Description of Artificial Sequence: Synthetic oligonucleotide
  Antisense strand to SEQ ID NO: 1322458
aaacauaaucgcuuaugga

SEQ ID NO: 1322460 - RNA, 19 nt, Artificial Sequence
  Description of Artificial Sequence: Synthetic oligonucleotide
  Sense strand starting at position 2643 of SEQ ID NO: 1242104
ucccuuucuggagauguau

SEQ ID NO: 1322461 - RNA, 19 nt, Artificial Sequence
  Description of Artificial Sequence: Synthetic oligonucleotide
  Antisense strand to SEQ ID NO: 1322460
auacaucuccagaaaggga

SEQ ID NO: 1322462 - RNA, 19 nt, Artificial Sequence
  Description of Artificial Sequence: Synthetic oligonucleotide
  Sense strand starting at position 2649 of SEQ ID NO: 1242104
ucuggagauguauguacau

SEQ ID NO: 1322463 - RNA, 19 nt, Artificial Sequence
  Description of Artificial Sequence: Synthetic oligonucleotide
  Antisense strand to SEQ ID NO: 1322462
auguacauacaucuccaga

SEQ ID NO: 1322464 - RNA, 19 nt, Artificial Sequence
  Description of Artificial Sequence: Synthetic oligonucleotide
  Sense strand starting at position 2675 of SEQ ID NO: 1242104
ucauuagcucuagaacaug

SEQ ID NO: 1322465 - RNA, 19 nt, Artificial Sequence
  Description of Artificial Sequence: Synthetic oligonucleotide
  Antisense strand to SEQ ID NO: 1322464
cauguucuagagcuaauga

SEQ ID NO: 1322466 - RNA, 19 nt, Artificial Sequence
  Description of Artificial Sequence: Synthetic oligonucleotide
  Sense strand starting at position 2755 of SEQ ID NO: 1242104
guaggaaucuuccuaacac

SEQ ID NO: 1322467 - RNA, 19 nt, Artificial Sequence
  Description of Artificial Sequence: Synthetic oligonucleotide
  Antisense strand to SEQ ID NO: 1322466
guguuaggaagauuccuac

SEQ ID NO: 1322468 - RNA, 19 nt, Artificial Sequence
  Description of Artificial Sequence: Synthetic oligonucleotide
  Sense strand starting at position 2804 of SEQ ID NO: 1242104
caaggaaucguuuggaguc

SEQ ID NO: 1322469 - RNA, 19 nt, Artificial Sequence
  Description of Artificial Sequence: Synthetic oligonucleotide
  Antisense strand to SEQ ID NO: 1322468
gacuccaaacgauuccuug

SEQ ID NO: 1322470 - RNA, 19 nt, Artificial Sequence
  Description of Artificial Sequence: Synthetic oligonucleotide
  Sense strand starting at position 2814 of SEQ ID NO: 1242104
uuuggagucuguccaauga

SEQ ID NO: 1322471 - RNA, 19 nt, Artificial Sequence
  Description of Artificial Sequence: Synthetic oligonucleotide
  Antisense strand to SEQ ID NO: 1322470
ucauuggacagacuccaaa

SEQ ID NO: 1322472 - RNA, 19 nt, Artificial Sequence
  Description of Artificial Sequence: Synthetic oligonucleotide
  Sense strand starting at position 2818 of SEQ ID NO: 1242104
gagucuguccaaugaacga

SEQ ID NO: 1322473 - RNA, 19 nt, Artificial Sequence
  Description of Artificial Sequence: Synthetic oligonucleotide
  Antisense strand to SEQ ID NO: 1322472
ucguucauuggacagacuc

SEQ ID NO: 1322474 - RNA, 19 nt, Artificial Sequence
  Description of Artificial Sequence: Synthetic oligonucleotide
  Sense strand starting at position 3083 of SEQ ID NO: 1242104
gcuuuaaagucucuagauu

SEQ ID NO: 1322475 - RNA, 19 nt, Artificial Sequence
  Description of Artificial Sequence: Synthetic oligonucleotide
  Antisense strand to SEQ ID NO: 1322474
aaucuagagacuuuaaagc

SEQ ID NO: 1322476 - RNA, 19 nt, Artificial Sequence
  Description of Artificial Sequence: Synthetic oligonucleotide
  Sense strand starting at position 3205 of SEQ ID NO: 1242104
gguauugaccuguacucac

SEQ ID NO: 1322477 - RNA, 19 nt, Artificial Sequence
  Description of Artificial Sequence: Synthetic oligonucleotide
  Antisense strand to SEQ ID NO: 1322476
gugaguacaggucaauacc

SEQ ID NO: 1322478 - RNA, 19 nt, Artificial Sequence
  Description of Artificial Sequence: Synthetic oligonucleotide
  Sense strand starting at position 3294 of SEQ ID NO: 1242104
uugugaugaucugcuaaca

SEQ ID NO: 1322479 - RNA, 19 nt, Artificial Sequence
  Description of Artificial Sequence: Synthetic oligonucleotide
  Antisense strand to SEQ ID NO: 1322478
uguuagcagaucaucacaa

SEQ ID NO: 1322480 - RNA, 19 nt, Artificial Sequence
  Description of Artificial Sequence: Synthetic oligonucleotide
  Sense strand starting at position 3372 of SEQ ID NO: 1242104
gcuguagaaugauuucugu

SEQ ID NO: 1322481 - RNA, 19 nt, Artificial Sequence
  Description of Artificial Sequence: Synthetic oligonucleotide
  Antisense strand to SEQ ID NO: 1322480
acagaaaucauucuacagc

SEQ ID NO: 1322482 - RNA, 19 nt, Artificial Sequence
  Description of Artificial Sequence: Synthetic oligonucleotide
  Sense strand starting at position 3567 of SEQ ID NO: 1242104
gagggaugcgaucacaguu

SEQ ID NO: 1322483 - RNA, 19 nt, Artificial Sequence
  Description of Artificial Sequence: Synthetic oligonucleotide
  Antisense strand to SEQ ID NO: 1322482
aacugugaucgcaucccuc

SEQ ID NO: 1322484 - RNA, 19 nt, Artificial Sequence
  Description of Artificial Sequence: Synthetic oligonucleotide
  Sense strand starting at position 3648 of SEQ ID NO: 1242104
caggaccugcauugauauu

SEQ ID NO: 1322485 - RNA, 19 nt, Artificial Sequence
  Description of Artificial Sequence: Synthetic oligonucleotide
  Antisense strand to SEQ ID NO: 1322484
aauaucaaugcagguccug

SEQ ID NO: 1322486 - RNA, 19 nt, Artificial Sequence
  Description of Artificial Sequence: Synthetic oligonucleotide
  Sense strand starting at position 3751 of SEQ ID NO: 1242104
gaaacugauucccugguuu

SEQ ID NO: 1322487 - RNA, 19 nt, Artificial Sequence
  Description of Artificial Sequence: Synthetic oligonucleotide
  Antisense strand to SEQ ID NO: 1322486
aaaccagggaaucaguuuc

SEQ ID NO: 1322488 - RNA, 19 nt, Artificial Sequence
  Description of Artificial Sequence: Synthetic oligonucleotide
  Sense strand starting at position 3779 of SEQ ID NO: 1242104
gcaacaggaugauuaguuu

SEQ ID NO: 1322489 - RNA, 19 nt, Artificial Sequence
  Description of Artificial Sequence: Synthetic oligonucleotide
  Antisense strand to SEQ ID NO: 1322488
aaacuaaucauccuguugc

SEQ ID NO: 1322490 - RNA, 19 nt, Artificial Sequence
  Description of Artificial Sequence: Synthetic oligonucleotide
  Sense strand starting at position 3847 of SEQ ID NO: 1242104
augagaucuugagugguuu

SEQ ID NO: 1322491 - RNA, 19 nt, Artificial Sequence
  Description of Artificial Sequence: Synthetic oligonucleotide
  Antisense strand to SEQ ID NO: 1322490
aaaccacucaagaucucau

SEQ ID NO: 1322492 - RNA, 19 nt, Artificial Sequence
  Description of Artificial Sequence: Synthetic oligonucleotide
  Sense strand starting at position 3851 of SEQ ID NO: 1242104
gaucuugagugguuuggga

SEQ ID NO: 1322493 - RNA, 19 nt, Artificial Sequence
  Description of Artificial Sequence: Synthetic oligonucleotide
  Antisense strand to SEQ ID NO: 1322492
ucccaaaccacucaagauc

SEQ ID NO: 1322494 - RNA, 19 nt, Artificial Sequence
  Description of Artificial Sequence: Synthetic oligonucleotide
  Sense strand starting at position 3853 of SEQ ID NO: 1242104
ucuugagugguuugggaug

SEQ ID NO: 1322495 - RNA, 19 nt, Artificial Sequence
  Description of Artificial Sequence: Synthetic oligonucleotide
  Antisense strand to SEQ ID NO: 1322494
caucccaaaccacucaaga

SEQ ID NO: 1322496 - RNA, 19 nt, Artificial Sequence
  Description of Artificial Sequence: Synthetic oligonucleotide
  Sense strand starting at position 3861 of SEQ ID NO: 1242104
gguuugggauguguugaga

SEQ ID NO: 1322497 - RNA, 19 nt, Artificial Sequence
  Description of Artificial Sequence: Synthetic oligonucleotide
  Antisense strand to SEQ ID NO: 1322496
ucucaacacaucccaaacc

SEQ ID NO: 1322498 - RNA, 19 nt, Artificial Sequence
  Description of Artificial Sequence: Synthetic oligonucleotide
  Sense strand starting at position 3939 of SEQ ID NO: 1242104
guggucaagacagaaugua

SEQ ID NO: 1322499 - RNA, 19 nt, Artificial Sequence
  Description of Artificial Sequence: Synthetic oligonucleotide
  Antisense strand to SEQ ID NO: 1322498
uacauucugucuugaccac

SEQ ID NO: 1322500 - RNA, 19 nt, Artificial Sequence
  Description of Artificial Sequence: Synthetic oligonucleotide
  Sense strand starting at position 3967 of SEQ ID NO: 1242104
gugauaucaguauauaagu

SEQ ID NO: 1322501 - RNA, 19 nt, Artificial Sequence
  Description of Artificial Sequence: Synthetic oligonucleotide
  Antisense strand to SEQ ID NO: 1322500
acuuauauacugauaucac

SEQ ID NO: 1322502 - RNA, 19 nt, Artificial Sequence
  Description of Artificial Sequence: Synthetic oligonucleotide
  Sense strand starting at position 3976 of SEQ ID NO: 1242104
guauauaaguggucacuga

SEQ ID NO: 1322503 - RNA, 19 nt, Artificial Sequence
  Description of Artificial Sequence: Synthetic oligonucleotide
  Antisense strand to SEQ ID NO: 1322502
ucagugaccacuuauauac

SEQ ID NO: 1322504 - RNA, 19 nt, Artificial Sequence
  Description of Artificial Sequence: Synthetic oligonucleotide
  Sense strand starting at position 4 of SEQ ID NO: 1242105
cuggaaauuuaagaagcaa

SEQ ID NO: 1322505 - RNA, 19 nt, Artificial Sequence
  Description of Artificial Sequence: Synthetic oligonucleotide
  Antisense strand to SEQ ID NO: 1322504
uugcuucuuaaauuuccag

SEQ ID NO: 1322506 - RNA, 19 nt, Artificial Sequence
  Description of Artificial Sequence: Synthetic oligonucleotide
  Sense strand starting at position 183 of SEQ ID NO: 1242105
gccauacaaccuugucaug

SEQ ID NO: 1322507 - RNA, 19 nt, Artificial Sequence
  Description of Artificial Sequence: Synthetic oligonucleotide
  Antisense strand to SEQ ID NO: 1322506
caugacaagguuguauggc

SEQ ID NO: 1322508 - RNA, 19 nt, Artificial Sequence
  Description of Artificial Sequence: Synthetic oligonucleotide
  Sense strand starting at position 303 of SEQ ID NO: 1242105
uguguauaggugcagaaua

SEQ ID NO: 1322509 - RNA, 19 nt, Artificial Sequence
  Description of Artificial Sequence: Synthetic oligonucleotide
  Antisense strand to SEQ ID NO: 1322508
uauucugcaccuauacaca

SEQ ID NO: 1322510 - RNA, 19 nt, Artificial Sequence
  Description of Artificial Sequence: Synthetic oligonucleotide
  Sense strand starting at position 475 of SEQ ID NO: 1242105
augaaacaaugucacagaa

SEQ ID NO: 1322511 - RNA, 19 nt, Artificial Sequence
  Description of Artificial Sequence: Synthetic oligonucleotide
  Antisense strand to SEQ ID NO: 1322510
uucugugacauuguuucau

SEQ ID NO: 1322512 - RNA, 19 nt, Artificial Sequence
  Description of Artificial Sequence: Synthetic oligonucleotide
  Sense strand starting at position 544 of SEQ ID NO: 1242105
guaaauagguuucuuccca

SEQ ID NO: 1322513 - RNA, 19 nt, Artificial Sequence
  Description of Artificial Sequence: Synthetic oligonucleotide
  Antisense strand to SEQ ID NO: 1322512
ugggaagaaaccuauuuac

SEQ ID NO: 1322514 - RNA, 19 nt, Artificial Sequence
  Description of Artificial Sequence: Synthetic oligonucleotide
  Sense strand starting at position 548 of SEQ ID NO: 1242105
auagguuucuucccacuau

SEQ ID NO: 1322515 - RNA, 19 nt, Artificial Sequence
  Description of Artificial Sequence: Synthetic oligonucleotide
  Antisense strand to SEQ ID NO: 1322514
auagugggaagaaaccuau

SEQ ID NO: 1322516 - RNA, 19 nt, Artificial Sequence
  Description of Artificial Sequence: Synthetic oligonucleotide
  Sense strand starting at position 948 of SEQ ID NO: 1242105
uuacaaagauggguuaguu

SEQ ID NO: 1322517 - RNA, 19 nt, Artificial Sequence
  Description of Artificial Sequence: Synthetic oligonucleotide
  Antisense strand to SEQ ID NO: 1322516
aacuaacccaucuuuguaa

SEQ ID NO: 1322518 - RNA, 19 nt, Artificial Sequence
  Description of Artificial Sequence: Synthetic oligonucleotide
  Sense strand starting at position 958 of SEQ ID NO: 1242105
ggguuaguuuguucagauu

SEQ ID NO: 1322519 - RNA, 19 nt, Artificial Sequence
  Description of Artificial Sequence: Synthetic oligonucleotide
  Antisense strand to SEQ ID NO: 1322518
aaucugaacaaacuaaccc

SEQ ID NO: 1322520 - RNA, 19 nt, Artificial Sequence
  Description of Artificial Sequence: Synthetic oligonucleotide
  Sense strand starting at position 1214 of SEQ ID NO: 1242105
ucaucucacgcuuaagacu

SEQ ID NO: 1322521 - RNA, 19 nt, Artificial Sequence
  Description of Artificial Sequence: Synthetic oligonucleotide
  Antisense strand to SEQ ID NO: 1322520
agucuuaagcgugagauga

SEQ ID NO: 1322522 - RNA, 19 nt, Artificial Sequence
  Description of Artificial Sequence: Synthetic oligonucleotide
  Sense strand starting at position 1261 of SEQ ID NO: 1242105
uugcaaaggcuuuauaauu

SEQ ID NO: 1322523 - RNA, 19 nt, Artificial Sequence
  Description of Artificial Sequence: Synthetic oligonucleotide
  Antisense strand to SEQ ID NO: 1322522
aauuauaaagccuuugcaa

SEQ ID NO: 1322524 - RNA, 19 nt, Artificial Sequence
  Description of Artificial Sequence: Synthetic oligonucleotide
  Sense strand starting at position 1294 of SEQ ID NO: 1242105
ggcgggagauuuggagaaa

SEQ ID NO: 1322525 - RNA, 19 nt, Artificial Sequence
  Description of Artificial Sequence: Synthetic oligonucleotide
  Antisense strand to SEQ ID NO: 1322524
uuucuccaaaucucccgcc

SEQ ID NO: 1322526 - RNA, 19 nt, Artificial Sequence
  Description of Artificial Sequence: Synthetic oligonucleotide
  Sense strand starting at position 1295 of SEQ ID NO: 1242105
gcgggagauuuggagaaag

SEQ ID NO: 1322527 - RNA, 19 nt, Artificial Sequence
  Description of Artificial Sequence: Synthetic oligonucleotide
  Antisense strand to SEQ ID NO: 1322526
cuuucuccaaaucucccgc

SEQ ID NO: 1322528 - RNA, 19 nt, Artificial Sequence
  Description of Artificial Sequence: Synthetic oligonucleotide
  Sense strand starting at position 1307 of SEQ ID NO: 1242105
gagaaagguuuagcagaug

SEQ ID NO: 1322529 - RNA, 19 nt, Artificial Sequence
  Description of Artificial Sequence: Synthetic oligonucleotide
  Antisense strand to SEQ ID NO: 1322528
caucugcuaaaccuuucuc

SEQ ID NO: 1322530 - RNA, 19 nt, Artificial Sequence
  Description of Artificial Sequence: Synthetic oligonucleotide
  Sense strand starting at position 1490 of SEQ ID NO: 1242105
aggagcuggucagcagaua

SEQ ID NO: 1322531 - RNA, 19 nt, Artificial Sequence
  Description of Artificial Sequence: Synthetic oligonucleotide
  Antisense strand to SEQ ID NO: 1322530
uaucugcugaccagcuccu

SEQ ID NO: 1322532 - RNA, 19 nt, Artificial Sequence
  Description of Artificial Sequence: Synthetic oligonucleotide
  Sense strand starting at position 1491 of SEQ ID NO: 1242105
ggagcuggucagcagauaa

SEQ ID NO: 1322533 - RNA, 19 nt, Artificial Sequence
  Description of Artificial Sequence: Synthetic oligonucleotide
  Antisense strand to SEQ ID NO: 1322532
uuaucugcugaccagcucc

SEQ ID NO: 1322534 - RNA, 19 nt, Artificial Sequence
  Description of Artificial Sequence: Synthetic oligonucleotide
  Sense strand starting at position 1858 of SEQ ID NO: 1242105
guagaugaugcguuaccgu

SEQ ID NO: 1322535 - RNA, 19 nt, Artificial Sequence
  Description of Artificial Sequence: Synthetic oligonucleotide
  Antisense strand to SEQ ID NO: 1322534
acgguaacgcaucaucuac

SEQ ID NO: 1322536 - RNA, 19 nt, Artificial Sequence
  Description of Artificial Sequence: Synthetic oligonucleotide
  Sense strand starting at position 1945 of SEQ ID NO: 1242105
ggcggucgcguccuuuauu

SEQ ID NO: 1322537 - RNA, 19 nt, Artificial Sequence
  Description of Artificial Sequence: Synthetic oligonucleotide
  Antisense strand to SEQ ID NO: 1322536
aauaaaggacgcgaccgcc

SEQ ID NO: 1322538 - RNA, 19 nt, Artificial Sequence
  Description of Artificial Sequence: Synthetic oligonucleotide
  Sense strand starting at position 1980 of SEQ ID NO: 1242105
cgacuugucaaagggaaag

SEQ ID NO: 1322539 - RNA, 19 nt, Artificial Sequence
  Description of Artificial Sequence: Synthetic oligonucleotide
  Antisense strand to SEQ ID NO: 1322538
cuuucccuuugacaagucg

SEQ ID NO: 1322540 - RNA, 19 nt, Artificial Sequence
  Description of Artificial Sequence: Synthetic oligonucleotide
  Sense strand starting at position 2583 of SEQ ID NO: 1242105
gccuuaugggacugccaga

SEQ ID NO: 1322541 - RNA, 19 nt, Artificial Sequence
  Description of Artificial Sequence: Synthetic oligonucleotide
  Antisense strand to SEQ ID NO: 1322540
ucuggcagucccauaaggc

SEQ ID NO: 1322542 - RNA, 19 nt, Artificial Sequence
  Description of Artificial Sequence: Synthetic oligonucleotide
  Sense strand starting at position 2663 of SEQ ID NO: 1242105
uccuuugggugacuuacau

SEQ ID NO: 1322543 - RNA, 19 nt, Artificial Sequence
  Description of Artificial Sequence: Synthetic oligonucleotide
  Antisense strand to SEQ ID NO: 1322542
auguaagucacccaaagga

SEQ ID NO: 1322544 - RNA, 19 nt, Artificial Sequence
  Description of Artificial Sequence: Synthetic oligonucleotide
  Sense strand starting at position 2694 of SEQ ID NO: 1242105
ccucgaccuccacgugaaa

SEQ ID NO: 1322545 - RNA, 19 nt, Artificial Sequence
  Description of Artificial Sequence: Synthetic oligonucleotide
  Antisense strand to SEQ ID NO: 1322544
uuucacguggaggucgagg

SEQ ID NO: 1322546 - RNA, 19 nt, Artificial Sequence
  Description of Artificial Sequence: Synthetic oligonucleotide
  Sense strand starting at position 2737 of SEQ ID NO: 1242105
uggcucaguccucaccaua

SEQ ID NO: 1322547 - RNA, 19 nt, Artificial Sequence
  Description of Artificial Sequence: Synthetic oligonucleotide
  Antisense strand to SEQ ID NO: 1322546
uauggugaggacugagcca

SEQ ID NO: 1322548 - RNA, 19 nt, Artificial Sequence
  Description of Artificial Sequence: Synthetic oligonucleotide
  Sense strand starting at position 2789 of SEQ ID NO: 1242105
uaaauuguugagugaauac

SEQ ID NO: 1322549 - RNA, 19 nt, Artificial Sequence
  Description of Artificial Sequence: Synthetic oligonucleotide
  Antisense strand to SEQ ID NO: 1322548
guauucacucaacaauuua

SEQ ID NO: 1322550 - RNA, 19 nt, Artificial Sequence
  Description of Artificial Sequence: Synthetic oligonucleotide
  Sense strand starting at position 2886 of SEQ ID NO: 1242105
ucuaacgagcaucaauuaa

SEQ ID NO: 1322551 - RNA, 19 nt, Artificial Sequence
  Description of Artificial Sequence: Synthetic oligonucleotide
  Antisense strand to SEQ ID NO: 1322550
uuaauugaugcucguuaga

SEQ ID NO: 1322552 - RNA, 19 nt, Artificial Sequence
  Description of Artificial Sequence: Synthetic oligonucleotide
  Sense strand starting at position 3002 of SEQ ID NO: 1242105
agccaugaaugugucacua

SEQ ID NO: 1322553 - RNA, 19 nt, Artificial Sequence
  Description of Artificial Sequence: Synthetic oligonucleotide
  Antisense strand to SEQ ID NO: 1322552
uagugacacauucauggcu

SEQ ID NO: 1322554 - RNA, 19 nt, Artificial Sequence
  Description of Artificial Sequence: Synthetic oligonucleotide
  Sense strand starting at position 3006 of SEQ ID NO: 1242105
augaaugugucacuaaugu

SEQ ID NO: 1322555 - RNA, 19 nt, Artificial Sequence
  Description of Artificial Sequence: Synthetic oligonucleotide
  Antisense strand to SEQ ID NO: 1322554
acauuagugacacauucau

SEQ ID NO: 1322556 - RNA, 19 nt, Artificial Sequence
  Description of Artificial Sequence: Synthetic oligonucleotide
  Sense strand starting at position 3056 of SEQ ID NO: 1242105
gcuuucccaugguuaaauu

SEQ ID NO: 1322557 - RNA, 19 nt, Artificial Sequence
  Description of Artificial Sequence: Synthetic oligonucleotide
  Antisense strand to SEQ ID NO: 1322556
aauuuaaccaugggaaagc

SEQ ID NO: 1322558 - RNA, 19 nt, Artificial Sequence
  Description of Artificial Sequence: Synthetic oligonucleotide
  Sense strand starting at position 3098 of SEQ ID NO: 1242105
gaggcaguuuaguccaaga

SEQ ID NO: 1322559 - RNA, 19 nt, Artificial Sequence
  Description of Artificial Sequence: Synthetic oligonucleotide
  Antisense strand to SEQ ID NO: 1322558
ucuuggacuaaacugccuc

SEQ ID NO: 1322560 - RNA, 19 nt, Artificial Sequence
  Description of Artificial Sequence: Synthetic oligonucleotide
  Sense strand starting at position 3100 of SEQ ID NO: 1242105
ggcaguuuaguccaagagu

SEQ ID NO: 1322561 - RNA, 19 nt, Artificial Sequence
  Description of Artificial Sequence: Synthetic oligonucleotide
  Antisense strand to SEQ ID NO: 1322560
acucuuggacuaaacugcc

SEQ ID NO: 1322562 - RNA, 19 nt, Artificial Sequence
  Description of Artificial Sequence: Synthetic oligonucleotide
  Sense strand starting at position 3103 of SEQ ID NO: 1242105
aguuuaguccaagaguuag

SEQ ID NO: 1322563 - RNA, 19 nt, Artificial Sequence
  Description of Artificial Sequence: Synthetic oligonucleotide
  Antisense strand to SEQ ID NO: 1322562
cuaacucuuggacuaaacu

SEQ ID NO: 1322564 - RNA, 19 nt, Artificial Sequence
  Description of Artificial Sequence: Synthetic oligonucleotide
  Sense strand starting at position 3216 of SEQ ID NO: 1242105
accucaguuccuuaugugu

SEQ ID NO: 1322565 - RNA, 19 nt, Artificial Sequence
  Description of Artificial Sequence: Synthetic oligonucleotide
  Antisense strand to SEQ ID NO: 1322564
acacauaaggaacugaggu

SEQ ID NO: 1322566 - RNA, 19 nt, Artificial Sequence
  Description of Artificial Sequence: Synthetic oligonucleotide
  Sense strand starting at position 3266 of SEQ ID NO: 1242105
gguuccucugaggaguaaa

SEQ ID NO: 1322567 - RNA, 19 nt, Artificial Sequence
  Description of Artificial Sequence: Synthetic oligonucleotide
  Antisense strand to SEQ ID NO: 1322566
uuuacuccucagaggaacc

SEQ ID NO: 1322568 - RNA, 19 nt, Artificial Sequence
  Description of Artificial Sequence: Synthetic oligonucleotide
  Sense strand starting at position 3298 of SEQ ID NO: 1242105
ucacauacggcacauauua

SEQ ID NO: 1322569 - RNA, 19 nt, Artificial Sequence
  Description of Artificial Sequence: Synthetic oligonucleotide
  Antisense strand to SEQ ID NO: 1322568
uaauaugugccguauguga

SEQ ID NO: 1322570 - RNA, 19 nt, Artificial Sequence
  Description of Artificial Sequence: Synthetic oligonucleotide
  Sense strand starting at position 3322 of SEQ ID NO: 1242105
ucauuaaaugaugggucuu

SEQ ID NO: 1322571 - RNA, 19 nt, Artificial Sequence
  Description of Artificial Sequence: Synthetic oligonucleotide
  Antisense strand to SEQ ID NO: 1322570
aagacccaucauuuaauga

SEQ ID NO: 1322572 - RNA, 19 nt, Artificial Sequence
  Description of Artificial Sequence: Synthetic oligonucleotide
  Sense strand starting at position 3437 of SEQ ID NO: 1242105
ugcuuuaugaucuggguau

SEQ ID NO: 1322573 - RNA, 19 nt, Artificial Sequence
  Description of Artificial Sequence: Synthetic oligonucleotide
  Antisense strand to SEQ ID NO: 1322572
auacccagaucauaaagca

SEQ ID NO: 1322574 - RNA, 19 nt, Artificial Sequence
  Description of Artificial Sequence: Synthetic oligonucleotide
  Sense strand starting at position 3439 of SEQ ID NO: 1242105
cuuuaugaucuggguauug

SEQ ID NO: 1322575 - RNA, 19 nt, Artificial Sequence
  Description of Artificial Sequence: Synthetic oligonucleotide
  Antisense strand to SEQ ID NO: 1322574
caauacccagaucauaaag

SEQ ID NO: 1322576 - RNA, 19 nt, Artificial Sequence
  Description of Artificial Sequence: Synthetic oligonucleotide
  Sense strand starting at position 3457 of SEQ ID NO: 1242105
gugugugaagcauacucaa

SEQ ID NO: 1322577 - RNA, 19 nt, Artificial Sequence
  Description of Artificial Sequence: Synthetic oligonucleotide
  Antisense strand to SEQ ID NO: 1322576
uugaguaugcuucacacac

SEQ ID NO: 1322578 - RNA, 19 nt, Artificial Sequence
  Description of Artificial Sequence: Synthetic oligonucleotide
  Sense strand starting at position 3508 of SEQ ID NO: 1242105
guugaugucaucuacguca

SEQ ID NO: 1322579 - RNA, 19 nt, Artificial Sequence
  Description of Artificial Sequence: Synthetic oligonucleotide
  Antisense strand to SEQ ID NO: 1322578
ugacguagaugacaucaac

SEQ ID NO: 1322580 - RNA, 19 nt, Artificial Sequence
  Description of Artificial Sequence: Synthetic oligonucleotide
  Sense strand starting at position 3534 of SEQ ID NO: 1242105
auaugauauucugucuuuc

SEQ ID NO: 1322581 - RNA, 19 nt, Artificial Sequence
  Description of Artificial Sequence: Synthetic oligonucleotide
  Antisense strand to SEQ ID NO: 1322580
gaaagacagaauaucauau

SEQ ID NO: 1322582 - RNA, 19 nt, Artificial Sequence
  Description of Artificial Sequence: Synthetic oligonucleotide
  Sense strand starting at position 3536 of SEQ ID NO: 1242105
augauauucugucuuucuu

SEQ ID NO: 1322583 - RNA, 19 nt, Artificial Sequence
  Description of Artificial Sequence: Synthetic oligonucleotide
  Antisense strand to SEQ ID NO: 1322582
aagaaagacagaauaucau

SEQ ID NO: 1322584 - RNA, 19 nt, Artificial Sequence
  Description of Artificial Sequence: Synthetic oligonucleotide
  Sense strand starting at position 20 of SEQ ID NO: 1242106
uggcaugaucuugacccau

SEQ ID NO: 1322585 - RNA, 19 nt, Artificial Sequence
  Description of Artificial Sequence: Synthetic oligonucleotide
  Antisense strand to SEQ ID NO: 1322584
augggucaagaucaugcca

SEQ ID NO: 1322586 - RNA, 19 nt, Artificial Sequence
  Description of Artificial Sequence: Synthetic oligonucleotide
  Sense strand starting at position 22 of SEQ ID NO: 1242106
gcaugaucuugacccauug

SEQ ID NO: 1322587 - RNA, 19 nt, Artificial Sequence
  Description of Artificial Sequence: Synthetic oligonucleotide
  Antisense strand to SEQ ID NO: 1322586
caaugggucaagaucaugc

SEQ ID NO: 1322588 - RNA, 19 nt, Artificial Sequence
  Description of Artificial Sequence: Synthetic oligonucleotide
  Sense strand starting at position 558 of SEQ ID NO: 1242106
guagauuggguguaaauaa

SEQ ID NO: 1322589 - RNA, 19 nt, Artificial Sequence
  Description of Artificial Sequence: Synthetic oligonucleotide
  Antisense strand to SEQ ID NO: 1322588
uuauuuacacccaaucuac

SEQ ID NO: 1322590 - RNA, 19 nt, Artificial Sequence
  Description of Artificial Sequence: Synthetic oligonucleotide
  Sense strand starting at position 565 of SEQ ID NO: 1242106
ggguguaaauaauugucua

SEQ ID NO: 1322591 - RNA, 19 nt, Artificial Sequence
  Description of Artificial Sequence: Synthetic oligonucleotide
  Antisense strand to SEQ ID NO: 1322590
uagacaauuauuuacaccc

SEQ ID NO: 1322592 - RNA, 19 nt, Artificial Sequence
  Description of Artificial Sequence: Synthetic oligonucleotide
  Sense strand starting at position 569 of SEQ ID NO: 1242106
guaaauaauugucuaucga

SEQ ID NO: 1322593 - RNA, 19 nt, Artificial Sequence
  Description of Artificial Sequence: Synthetic oligonucleotide
  Antisense strand to SEQ ID NO: 1322592
ucgauagacaauuauuuac

SEQ ID NO: 1322594 - RNA, 19 nt, Artificial Sequence
  Description of Artificial Sequence: Synthetic oligonucleotide
  Sense strand starting at position 618 of SEQ ID NO: 1242106
cugacaagcuugcaguuau

SEQ ID NO: 1322595 - RNA, 19 nt, Artificial Sequence
  Description of Artificial Sequence: Synthetic oligonucleotide
  Antisense strand to SEQ ID NO: 1322594
auaacugcaagcuugucag

SEQ ID NO: 1322596 - RNA, 19 nt, Artificial Sequence
  Description of Artificial Sequence: Synthetic oligonucleotide
  Sense strand starting at position 625 of SEQ ID NO: 1242106
gcuugcaguuaucucauua

SEQ ID NO: 1322597 - RNA, 19 nt, Artificial Sequence
  Description of Artificial Sequence: Synthetic oligonucleotide
  Antisense strand to SEQ ID NO: 1322596
uaaugagauaacugcaagc

SEQ ID NO: 1322598 - RNA, 19 nt, Artificial Sequence
  Description of Artificial Sequence: Synthetic oligonucleotide
  Sense strand starting at position 679 of SEQ ID NO: 1242106
ccucacauucuugauguga

SEQ ID NO: 1322599 - RNA, 19 nt, Artificial Sequence
  Description of Artificial Sequence: Synthetic oligonucleotide
  Antisense strand to SEQ ID NO: 1322598
ucacaucaagaaugugagg

SEQ ID NO: 1322600 - RNA, 19 nt, Artificial Sequence
  Description of Artificial Sequence: Synthetic oligonucleotide
  Sense strand starting at position 681 of SEQ ID NO: 1242106
ucacauucuugaugugaaa

SEQ ID NO: 1322601 - RNA, 19 nt, Artificial Sequence
  Description of Artificial Sequence: Synthetic oligonucleotide
  Antisense strand to SEQ ID NO: 1322600
uuucacaucaagaauguga

SEQ ID NO: 1322602 - RNA, 19 nt, Artificial Sequence
  Description of Artificial Sequence: Synthetic oligonucleotide
  Sense strand starting at position 9 of SEQ ID NO: 1242107
cagcacugggauugacaua

SEQ ID NO: 1322603 - RNA, 19 nt, Artificial Sequence
  Description of Artificial Sequence: Synthetic oligonucleotide
  Antisense strand to SEQ ID NO: 1322602
uaugucaaucccagugcug

SEQ ID NO: 1322604 - RNA, 19 nt, Artificial Sequence
  Description of Artificial Sequence: Synthetic oligonucleotide
  Sense strand starting at position 89 of SEQ ID NO: 1242107
acauauucugagugccaau

SEQ ID NO: 1322605 - RNA, 19 nt, Artificial Sequence
  Description of Artificial Sequence: Synthetic oligonucleotide
  Antisense strand to SEQ ID NO: 1322604
auuggcacucagaauaugu

SEQ ID NO: 1322606 - RNA, 19 nt, Artificial Sequence
  Description of Artificial Sequence: Synthetic oligonucleotide
  Sense strand starting at position 102 of SEQ ID NO: 1242107
gccaaucuuggguaaggca

SEQ ID NO: 1322607 - RNA, 19 nt, Artificial Sequence
  Description of Artificial Sequence: Synthetic oligonucleotide
  Antisense strand to SEQ ID NO: 1322606
ugccuuacccaagauuggc

SEQ ID NO: 1322608 - RNA, 19 nt, Artificial Sequence
  Description of Artificial Sequence: Synthetic oligonucleotide
  Sense strand starting at position 122 of SEQ ID NO: 1242107
ucuauuauuugucaugaag

SEQ ID NO: 1322609 - RNA, 19 nt, Artificial Sequence
  Description of Artificial Sequence: Synthetic oligonucleotide
  Antisense strand to SEQ ID NO: 1322608
cuucaugacaaauaauaga

SEQ ID NO: 1322610 - RNA, 19 nt, Artificial Sequence
  Description of Artificial Sequence: Synthetic oligonucleotide
  Sense strand starting at position 124 of SEQ ID NO: 1242107
uauuauuugucaugaagga

SEQ ID NO: 1322611 - RNA, 19 nt, Artificial Sequence
  Description of Artificial Sequence: Synthetic oligonucleotide
  Antisense strand to SEQ ID NO: 1322610
uccuucaugacaaauaaua

SEQ ID NO: 1322612 - RNA, 19 nt, Artificial Sequence
  Description of Artificial Sequence: Synthetic oligonucleotide
  Sense strand starting at position 232 of SEQ ID NO: 1242107
ugcugagauuguguuucuu

SEQ ID NO: 1322613 - RNA, 19 nt, Artificial Sequence
  Description of Artificial Sequence: Synthetic oligonucleotide
  Antisense strand to SEQ ID NO: 1322612
aagaaacacaaucucagca

SEQ ID NO: 1322614 - RNA, 19 nt, Artificial Sequence
  Description of Artificial Sequence: Synthetic oligonucleotide
  Sense strand starting at position 234 of SEQ ID NO: 1242107
cugagauuguguuucuuuc

SEQ ID NO: 1322615 - RNA, 19 nt, Artificial Sequence
  Description of Artificial Sequence: Synthetic oligonucleotide
  Antisense strand to SEQ ID NO: 1322614
gaaagaaacacaaucucag

SEQ ID NO: 1322616 - RNA, 19 nt, Artificial Sequence
  Description of Artificial Sequence: Synthetic oligonucleotide
  Sense strand starting at position 271 of SEQ ID NO: 1242107
cucuaagggucaucuguau

SEQ ID NO: 1322617 - RNA, 19 nt, Artificial Sequence
  Description of Artificial Sequence: Synthetic oligonucleotide
  Antisense strand to SEQ ID NO: 1322616
auacagaugacccuuagag

SEQ ID NO: 1322618 - RNA, 19 nt, Artificial Sequence
  Description of Artificial Sequence: Synthetic oligonucleotide
  Sense strand starting at position 275 of SEQ ID NO: 1242107
aagggucaucuguauaauu

SEQ ID NO: 1322619 - RNA, 19 nt, Artificial Sequence
  Description of Artificial Sequence: Synthetic oligonucleotide
  Antisense strand to SEQ ID NO: 1322618
aauuauacagaugacccuu

SEQ ID NO: 1322620 - RNA, 19 nt, Artificial Sequence
  Description of Artificial Sequence: Synthetic oligonucleotide
  Sense strand starting at position 277 of SEQ ID NO: 1242107
gggucaucuguauaauuaa

SEQ ID NO: 1322621 - RNA, 19 nt, Artificial Sequence
  Description of Artificial Sequence: Synthetic oligonucleotide
  Antisense strand to SEQ ID NO: 1322620
uuaauuauacagaugaccc

SEQ ID NO: 1322622 - RNA, 19 nt, Artificial Sequence
  Description of Artificial Sequence: Synthetic oligonucleotide
  Sense strand starting at position 379 of SEQ ID NO: 1242107
aagacuuaaccguaaaugu

SEQ ID NO: 1322623 - RNA, 19 nt, Artificial Sequence
  Description of Artificial Sequence: Synthetic oligonucleotide
  Antisense strand to SEQ ID NO: 1322622
acauuuacgguuaagucuu

SEQ ID NO: 1322624 - RNA, 19 nt, Artificial Sequence
  Description of Artificial Sequence: Synthetic oligonucleotide
  Sense strand starting at position 435 of SEQ ID NO: 1242107
agagcuagauuccagauua

SEQ ID NO: 1322625 - RNA, 19 nt, Artificial Sequence
  Description of Artificial Sequence: Synthetic oligonucleotide
  Antisense strand to SEQ ID NO: 1322624
uaaucuggaaucuagcucu

SEQ ID NO: 1322626 - RNA, 19 nt, Artificial Sequence
  Description of Artificial Sequence: Synthetic oligonucleotide
  Sense strand starting at position 485 of SEQ ID NO: 1242107
gcagaauuguauuccuuua

SEQ ID NO: 1322627 - RNA, 19 nt, Artificial Sequence
  Description of Artificial Sequence: Synthetic oligonucleotide
  Antisense strand to SEQ ID NO: 1322626
uaaaggaauacaauucugc

SEQ ID NO: 1322628 - RNA, 19 nt, Artificial Sequence
  Description of Artificial Sequence: Synthetic oligonucleotide
  Sense strand starting at position 490 of SEQ ID NO: 1242107
auuguauuccuuuacauug

SEQ ID NO: 1322629 - RNA, 19 nt, Artificial Sequence
  Description of Artificial Sequence: Synthetic oligonucleotide
  Antisense strand to SEQ ID NO: 1322628
caauguaaaggaauacaau

SEQ ID NO: 1322630 - RNA, 19 nt, Artificial Sequence
  Description of Artificial Sequence: Synthetic oligonucleotide
  Sense strand starting at position 508 of SEQ ID NO: 1242107
guuggcucgacuuacaaau

SEQ ID NO: 1322631 - RNA, 19 nt, Artificial Sequence
  Description of Artificial Sequence: Synthetic oligonucleotide
  Antisense strand to SEQ ID NO: 1322630
auuuguaagucgagccaac

SEQ ID NO: 1322632 - RNA, 19 nt, Artificial Sequence
  Description of Artificial Sequence: Synthetic oligonucleotide
  Sense strand starting at position 521 of SEQ ID NO: 1242107
acaaaugugcuguggaaua

SEQ ID NO: 1322633 - RNA, 19 nt, Artificial Sequence
  Description of Artificial Sequence: Synthetic oligonucleotide
  Antisense strand to SEQ ID NO: 1322632
uauuccacagcacauuugu

SEQ ID NO: 1322634 - RNA, 19 nt, Artificial Sequence
  Description of Artificial Sequence: Synthetic oligonucleotide
  Sense strand starting at position 523 of SEQ ID NO: 1242107
aaaugugcuguggaauaau

SEQ ID NO: 1322635 - RNA, 19 nt, Artificial Sequence
  Description of Artificial Sequence: Synthetic oligonucleotide
  Antisense strand to SEQ ID NO: 1322634
auuauuccacagcacauuu

SEQ ID NO: 1322636 - RNA, 19 nt, Artificial Sequence
  Description of Artificial Sequence: Synthetic oligonucleotide
  Sense strand starting at position 526 of SEQ ID NO: 1242107
ugugcuguggaauaauuau

SEQ ID NO: 1322637 - RNA, 19 nt, Artificial Sequence
  Description of Artificial Sequence: Synthetic oligonucleotide
  Antisense strand to SEQ ID NO: 1322636
auaauuauuccacagcaca

SEQ ID NO: 1322638 - RNA, 19 nt, Artificial Sequence
  Description of Artificial Sequence: Synthetic oligonucleotide
  Sense strand starting at position 532 of SEQ ID NO: 1242107
guggaauaauuauccucaa

SEQ ID NO: 1322639 - RNA, 19 nt, Artificial Sequence
  Description of Artificial Sequence: Synthetic oligonucleotide
  Antisense strand to SEQ ID NO: 1322638
uugaggauaauuauuccac

SEQ ID NO: 1322640 - RNA, 19 nt, Artificial Sequence
  Description of Artificial Sequence: Synthetic oligonucleotide
  Sense strand starting at position 613 of SEQ ID NO: 1242107
augugaaaccaaugucuaa

SEQ ID NO: 1322641 - RNA, 19 nt, Artificial Sequence
  Description of Artificial Sequence: Synthetic oligonucleotide
  Antisense strand to SEQ ID NO: 1322640
uuagacauugguuucacau

SEQ ID NO: 1322642 - RNA, 19 nt, Artificial Sequence
  Description of Artificial Sequence: Synthetic oligonucleotide
  Sense strand starting at position 843 of SEQ ID NO: 1242107
acuuccuuauguucuauga

SEQ ID NO: 1322643 - RNA, 19 nt, Artificial Sequence
  Description of Artificial Sequence: Synthetic oligonucleotide
  Antisense strand to SEQ ID NO: 1322642
ucauagaacauaaggaagu

SEQ ID NO: 1322644 - RNA, 19 nt, Artificial Sequence
  Description of Artificial Sequence: Synthetic oligonucleotide
  Sense strand starting at position 1170 of SEQ ID NO: 1242107
gugccagaaacuuguaugu

SEQ ID NO: 1322645 - RNA, 19 nt, Artificial Sequence
  Description of Artificial Sequence: Synthetic oligonucleotide
  Antisense strand to SEQ ID NO: 1322644
acauacaaguuucuggcac

SEQ ID NO: 1322646 - RNA, 19 nt, Artificial Sequence
  Description of Artificial Sequence: Synthetic oligonucleotide
  Sense strand starting at position 1175 of SEQ ID NO: 1242107
agaaacuuguauguaacuu

SEQ ID NO: 1322647 - RNA, 19 nt, Artificial Sequence
  Description of Artificial Sequence: Synthetic oligonucleotide
  Antisense strand to SEQ ID NO: 1322646
aaguuacauacaaguuucu

SEQ ID NO: 1322648 - RNA, 19 nt, Artificial Sequence
  Description of Artificial Sequence: Synthetic oligonucleotide
  Sense strand starting at position 1183 of SEQ ID NO: 1242107
guauguaacuuugcauagu

SEQ ID NO: 1322649 - RNA, 19 nt, Artificial Sequence
  Description of Artificial Sequence: Synthetic oligonucleotide
  Antisense strand to SEQ ID NO: 1322648
acuaugcaaaguuacauac

SEQ ID NO: 1322650 - RNA, 19 nt, Artificial Sequence
  Description of Artificial Sequence: Synthetic oligonucleotide
  Sense strand starting at position 1192 of SEQ ID NO: 1242107
uuugcauaguucuuguauu

SEQ ID NO: 1322651 - RNA, 19 nt, Artificial Sequence
  Description of Artificial Sequence: Synthetic oligonucleotide
  Antisense strand to SEQ ID NO: 1322650
aauacaagaacuaugcaaa

SEQ ID NO: 1322652 - RNA, 19 nt, Artificial Sequence
  Description of Artificial Sequence: Synthetic oligonucleotide
  Sense strand starting at position 1315 of SEQ ID NO: 1242107
gauuucugcuggcacagua

SEQ ID NO: 1322653 - RNA, 19 nt, Artificial Sequence
  Description of Artificial Sequence: Synthetic oligonucleotide
  Antisense strand to SEQ ID NO: 1322652
uacugugccagcagaaauc

SEQ ID NO: 1322654 - RNA, 19 nt, Artificial Sequence
  Description of Artificial Sequence: Synthetic oligonucleotide
  Sense strand starting at position 1356 of SEQ ID NO: 1242107
auugaaccguaguccuaua

SEQ ID NO: 1322655 - RNA, 19 nt, Artificial Sequence
  Description of Artificial Sequence: Synthetic oligonucleotide
  Antisense strand to SEQ ID NO: 1322654
uauaggacuacgguucaau

SEQ ID NO: 1322656 - RNA, 19 nt, Artificial Sequence
  Description of Artificial Sequence: Synthetic oligonucleotide
  Sense strand starting at position 1361 of SEQ ID NO: 1242107
accguaguccuauaguagu

SEQ ID NO: 1322657 - RNA, 19 nt, Artificial Sequence
  Description of Artificial Sequence: Synthetic oligonucleotide
  Antisense strand to SEQ ID NO: 1322656
acuacuauaggacuacggu

SEQ ID NO: 1322658 - RNA, 19 nt, Artificial Sequence
  Description of Artificial Sequence: Synthetic oligonucleotide
  Sense strand starting at position 1367 of SEQ ID NO: 1242107
guccuauaguaguuaucuu

SEQ ID NO: 1322659 - RNA, 19 nt, Artificial Sequence
  Description of Artificial Sequence: Synthetic oligonucleotide
  Antisense strand to SEQ ID NO: 1322658
aagauaacuacuauaggac

SEQ ID NO: 1322660 - RNA, 19 nt, Artificial Sequence
  Description of Artificial Sequence: Synthetic oligonucleotide
  Sense strand starting at position 1371 of SEQ ID NO: 1242107
uauaguaguuaucuuugga

SEQ ID NO: 1322661 - RNA, 19 nt, Artificial Sequence
  Description of Artificial Sequence: Synthetic oligonucleotide
  Antisense strand to SEQ ID NO: 1322660
uccaaagauaacuacuaua

SEQ ID NO: 1322662 - RNA, 19 nt, Artificial Sequence
  Description of Artificial Sequence: Synthetic oligonucleotide
  Sense strand starting at position 1376 of SEQ ID NO: 1242107
uaguuaucuuuggaugaaa

SEQ ID NO: 1322663 - RNA, 19 nt, Artificial Sequence
  Description of Artificial Sequence: Synthetic oligonucleotide
  Antisense strand to SEQ ID NO: 1322662
uuucauccaaagauaacua

SEQ ID NO: 1322664 - RNA, 19 nt, Artificial Sequence
  Description of Artificial Sequence: Synthetic oligonucleotide
  Sense strand starting at position 1532 of SEQ ID NO: 1242107
ccgacucaccugugaggua

SEQ ID NO: 1322665 - RNA, 19 nt, Artificial Sequence
  Description of Artificial Sequence: Synthetic oligonucleotide
  Antisense strand to SEQ ID NO: 1322664
uaccucacaggugagucgg

SEQ ID NO: 1322666 - RNA, 19 nt, Artificial Sequence
  Description of Artificial Sequence: Synthetic oligonucleotide
  Sense strand starting at position 1648 of SEQ ID NO: 1242107
ucguacuggaauugaaagu

SEQ ID NO: 1322667 - RNA, 19 nt, Artificial Sequence
  Description of Artificial Sequence: Synthetic oligonucleotide
  Antisense strand to SEQ ID NO: 1322666
acuuucaauuccaguacga

SEQ ID NO: 1322668 - RNA, 19 nt, Artificial Sequence
  Description of Artificial Sequence: Synthetic oligonucleotide
  Sense strand starting at position 1649 of SEQ ID NO: 1242107
cguacuggaauugaaaguu

SEQ ID NO: 1322669 - RNA, 19 nt, Artificial Sequence
  Description of Artificial Sequence: Synthetic oligonucleotide
  Antisense strand to SEQ ID NO: 1322668
aacuuucaauuccaguacg

SEQ ID NO: 1322670 - RNA, 19 nt, Artificial Sequence
  Description of Artificial Sequence: Synthetic oligonucleotide
  Sense strand starting at position 1657 of SEQ ID NO: 1242107
aauugaaaguuguucgggu

SEQ ID NO: 1322671 - RNA, 19 nt, Artificial Sequence
  Description of Artificial Sequence: Synthetic oligonucleotide
  Antisense strand to SEQ ID NO: 1322670
acccgaacaacuuucaauu

SEQ ID NO: 1322672 - RNA, 19 nt, Artificial Sequence
  Description of Artificial Sequence: Synthetic oligonucleotide
  Sense strand starting at position 1658 of SEQ ID NO: 1242107
auugaaaguuguucgggua

SEQ ID NO: 1322673 - RNA, 19 nt, Artificial Sequence
  Description of Artificial Sequence: Synthetic oligonucleotide
  Antisense strand to SEQ ID NO: 1322672
uacccgaacaacuuucaau

SEQ ID NO: 1322674 - RNA, 19 nt, Artificial Sequence
  Description of Artificial Sequence: Synthetic oligonucleotide
  Sense strand starting at position 1659 of SEQ ID NO: 1242107
uugaaaguuguucggguaa

SEQ ID NO: 1322675 - RNA, 19 nt, Artificial Sequence
  Description of Artificial Sequence: Synthetic oligonucleotide
  Antisense strand to SEQ ID NO: 1322674
uuacccgaacaacuuucaa

SEQ ID NO: 1322676 - RNA, 19 nt, Artificial Sequence
  Description of Artificial Sequence: Synthetic oligonucleotide
  Sense strand starting at position 1862 of SEQ ID NO: 1242107
gugacuuaucggcgaauca

SEQ ID NO: 1322677 - RNA, 19 nt, Artificial Sequence
  Description of Artificial Sequence: Synthetic oligonucleotide
  Antisense strand to SEQ ID NO: 1322676
ugauucgccgauaagucac

SEQ ID NO: 1322678 - RNA, 19 nt, Artificial Sequence
  Description of Artificial Sequence: Synthetic oligonucleotide
  Sense strand starting at position 1863 of SEQ ID NO: 1242107
ugacuuaucggcgaaucac

SEQ ID NO: 1322679 - RNA, 19 nt, Artificial Sequence
  Description of Artificial Sequence: Synthetic oligonucleotide
  Antisense strand to SEQ ID NO: 1322678
gugauucgccgauaaguca

SEQ ID NO: 1322680 - RNA, 19 nt, Artificial Sequence
  Description of Artificial Sequence: Synthetic oligonucleotide
  Sense strand starting at position 1872 of SEQ ID NO: 1242107
ggcgaaucacgugaccaga

SEQ ID NO: 1322681 - RNA, 19 nt, Artificial Sequence
  Description of Artificial Sequence: Synthetic oligonucleotide
  Antisense strand to SEQ ID NO: 1322680
ucuggucacgugauucgcc

SEQ ID NO: 1322682 - RNA, 19 nt, Artificial Sequence
  Description of Artificial Sequence: Synthetic oligonucleotide
  Sense strand starting at position 604 of SEQ ID NO: 1242108
aggcuagauuaaguacaau

SEQ ID NO: 1322683 - RNA, 19 nt, Artificial Sequence
  Description of Artificial Sequence: Synthetic oligonucleotide
  Antisense strand to SEQ ID NO: 1322682
auuguacuuaaucuagccu

SEQ ID NO: 1322684 - RNA, 19 nt, Artificial Sequence
  Description of Artificial Sequence: Synthetic oligonucleotide
  Sense strand starting at position 636 of SEQ ID NO: 1242108
guacacaggccuuauuacu

SEQ ID NO: 1322685 - RNA, 19 nt, Artificial Sequence
  Description of Artificial Sequence: Synthetic oligonucleotide
  Antisense strand to SEQ ID NO: 1322684
aguaauaaggccuguguac

SEQ ID NO: 1322686 - RNA, 19 nt, Artificial Sequence
  Description of Artificial Sequence: Synthetic oligonucleotide
  Sense strand starting at position 785 of SEQ ID NO: 1242108
aguauuguguuaucugaca

SEQ ID NO: 1322687 - RNA, 19 nt, Artificial Sequence
  Description of Artificial Sequence: Synthetic oligonucleotide
  Antisense strand to SEQ ID NO: 1322686
ugucagauaacacaauacu

SEQ ID NO: 1322688 - RNA, 19 nt, Artificial Sequence
  Description of Artificial Sequence: Synthetic oligonucleotide
  Sense strand starting at position 880 of SEQ ID NO: 1242108
accagaaaguucuuauuga

SEQ ID NO: 1322689 - RNA, 19 nt, Artificial Sequence
  Description of Artificial Sequence: Synthetic oligonucleotide
  Antisense strand to SEQ ID NO: 1322688
ucaauaagaacuuucuggu

SEQ ID NO: 1322690 - RNA, 19 nt, Artificial Sequence
  Description of Artificial Sequence: Synthetic oligonucleotide
  Sense strand starting at position 881 of SEQ ID NO: 1242108
ccagaaaguucuuauugac

SEQ ID NO: 1322691 - RNA, 19 nt, Artificial Sequence
  Description of Artificial Sequence: Synthetic oligonucleotide
  Antisense strand to SEQ ID NO: 1322690
gucaauaagaacuuucugg

SEQ ID NO: 1322692 - RNA, 19 nt, Artificial Sequence
  Description of Artificial Sequence: Synthetic oligonucleotide
  Sense strand starting at position 904 of SEQ ID NO: 1242108
uguccuuugugagccaacu

SEQ ID NO: 1322693 - RNA, 19 nt, Artificial Sequence
  Description of Artificial Sequence: Synthetic oligonucleotide
  Antisense strand to SEQ ID NO: 1322692
aguuggcucacaaaggaca

SEQ ID NO: 1322694 - RNA, 19 nt, Artificial Sequence
  Description of Artificial Sequence: Synthetic oligonucleotide
  Sense strand starting at position 931 of SEQ ID NO: 1242108
uuuagaaucugagcugagu

SEQ ID NO: 1322695 - RNA, 19 nt, Artificial Sequence
  Description of Artificial Sequence: Synthetic oligonucleotide
  Antisense strand to SEQ ID NO: 1322694
acucagcucagauucuaaa

SEQ ID NO: 1322696 - RNA, 19 nt, Artificial Sequence
  Description of Artificial Sequence: Synthetic oligonucleotide
  Sense strand starting at position 1059 of SEQ ID NO: 1242108
aaauguuacguguaagcua

SEQ ID NO: 1322697 - RNA, 19 nt, Artificial Sequence
  Description of Artificial Sequence: Synthetic oligonucleotide
  Antisense strand to SEQ ID NO: 1322696
uagcuuacacguaacauuu

SEQ ID NO: 1322698 - RNA, 19 nt, Artificial Sequence
  Description of Artificial Sequence: Synthetic oligonucleotide
  Sense strand starting at position 1066 of SEQ ID NO: 1242108
acguguaagcuacacauaa

SEQ ID NO: 1322699 - RNA, 19 nt, Artificial Sequence
  Description of Artificial Sequence: Synthetic oligonucleotide
  Antisense strand to SEQ ID NO: 1322698
uuauguguagcuuacacgu

SEQ ID NO: 1322700 - RNA, 19 nt, Artificial Sequence
  Description of Artificial Sequence: Synthetic oligonucleotide
  Sense strand starting at position 1221 of SEQ ID NO: 1242108
ucauucugcuaagaugaaa

SEQ ID NO: 1322701 - RNA, 19 nt, Artificial Sequence
  Description of Artificial Sequence: Synthetic oligonucleotide
  Antisense strand to SEQ ID NO: 1322700
uuucaucuuagcagaauga

SEQ ID NO: 1322702 - RNA, 19 nt, Artificial Sequence
  Description of Artificial Sequence: Synthetic oligonucleotide
  Sense strand starting at position 1406 of SEQ ID NO: 1242108
aagcuaugucgucuugcaa

SEQ ID NO: 1322703 - RNA, 19 nt, Artificial Sequence
  Description of Artificial Sequence: Synthetic oligonucleotide
  Antisense strand to SEQ ID NO: 1322702
uugcaagacgacauagcuu

SEQ ID NO: 1322704 - RNA, 19 nt, Artificial Sequence
  Description of Artificial Sequence: Synthetic oligonucleotide
  Sense strand starting at position 1407 of SEQ ID NO: 1242108
agcuaugucgucuugcaaa

SEQ ID NO: 1322705 - RNA, 19 nt, Artificial Sequence
  Description of Artificial Sequence: Synthetic oligonucleotide
  Antisense strand to SEQ ID NO: 1322704
uuugcaagacgacauagcu

SEQ ID NO: 1322706 - RNA, 19 nt, Artificial Sequence
  Description of Artificial Sequence: Synthetic oligonucleotide
  Sense strand starting at position 1420 of SEQ ID NO: 1242108
ugcaaaggugcauagagau

SEQ ID NO: 1322707 - RNA, 19 nt, Artificial Sequence
  Description of Artificial Sequence: Synthetic oligonucleotide
  Antisense strand to SEQ ID NO: 1322706
aucucuaugcaccuuugca

SEQ ID NO: 1322708 - RNA, 19 nt, Artificial Sequence
  Description of Artificial Sequence: Synthetic oligonucleotide
  Sense strand starting at position 1450 of SEQ ID NO: 1242108
gcuuucgaauucuuugaag

SEQ ID NO: 1322709 - RNA, 19 nt, Artificial Sequence
  Description of Artificial Sequence: Synthetic oligonucleotide
  Antisense strand to SEQ ID NO: 1322708
cuucaaagaauucgaaagc

SEQ ID NO: 1322710 - RNA, 19 nt, Artificial Sequence
  Description of Artificial Sequence: Synthetic oligonucleotide
  Sense strand starting at position 1452 of SEQ ID NO: 1242108
uuucgaauucuuugaagaa

SEQ ID NO: 1322711 - RNA, 19 nt, Artificial Sequence
  Description of Artificial Sequence: Synthetic oligonucleotide
  Antisense strand to SEQ ID NO: 1322710
uucuucaaagaauucgaaa

SEQ ID NO: 1322712 - RNA, 19 nt, Artificial Sequence
  Description of Artificial Sequence: Synthetic oligonucleotide
  Sense strand starting at position 1453 of SEQ ID NO: 1242108
uucgaauucuuugaagaaa

SEQ ID NO: 1322713 - RNA, 19 nt, Artificial Sequence
  Description of Artificial Sequence: Synthetic oligonucleotide
  Antisense strand to SEQ ID NO: 1322712
uuucuucaaagaauucgaa

SEQ ID NO: 1322714 - RNA, 19 nt, Artificial Sequence
  Description of Artificial Sequence: Synthetic oligonucleotide
  Sense strand starting at position 1494 of SEQ ID NO: 1242108
ggaaaugcuccauauucca

SEQ ID NO: 1322715 - RNA, 19 nt, Artificial Sequence
  Description of Artificial Sequence: Synthetic oligonucleotide
  Antisense strand to SEQ ID NO: 1322714
uggaauauggagcauuucc

SEQ ID NO: 1322716 - RNA, 19 nt, Artificial Sequence
  Description of Artificial Sequence: Synthetic oligonucleotide
  Sense strand starting at position 1501 of SEQ ID NO: 1242108
cuccauauuccacguggaa

SEQ ID NO: 1322717 - RNA, 19 nt, Artificial Sequence
  Description of Artificial Sequence: Synthetic oligonucleotide
  Antisense strand to SEQ ID NO: 1322716
uuccacguggaauauggag

SEQ ID NO: 1322718 - RNA, 19 nt, Artificial Sequence
  Description of Artificial Sequence: Synthetic oligonucleotide
  Sense strand starting at position 1608 of SEQ ID NO: 1242108
aagauaaugucuccgcgaa

SEQ ID NO: 1322719 - RNA, 19 nt, Artificial Sequence
  Description of Artificial Sequence: Synthetic oligonucleotide
  Antisense strand to SEQ ID NO: 1322718
uucgcggagacauuaucuu

SEQ ID NO: 1322720 - RNA, 19 nt, Artificial Sequence
  Description of Artificial Sequence: Synthetic oligonucleotide
  Sense strand starting at position 1609 of SEQ ID NO: 1242108
agauaaugucuccgcgaau

SEQ ID NO: 1322721 - RNA, 19 nt, Artificial Sequence
  Description of Artificial Sequence: Synthetic oligonucleotide
  Antisense strand to SEQ ID NO: 1322720
auucgcggagacauuaucu

SEQ ID NO: 1322722 - RNA, 19 nt, Artificial Sequence
  Description of Artificial Sequence: Synthetic oligonucleotide
  Sense strand starting at position 1610 of SEQ ID NO: 1242108
gauaaugucuccgcgaaug

SEQ ID NO: 1322723 - RNA, 19 nt, Artificial Sequence
  Description of Artificial Sequence: Synthetic oligonucleotide
  Antisense strand to SEQ ID NO: 1322722
cauucgcggagacauuauc

SEQ ID NO: 1322724 - RNA, 19 nt, Artificial Sequence
  Description of Artificial Sequence: Synthetic oligonucleotide
  Sense strand starting at position 2100 of SEQ ID NO: 1242108
ccucuuaccgcauagcauu

SEQ ID NO: 1322725 - RNA, 19 nt, Artificial Sequence
  Description of Artificial Sequence: Synthetic oligonucleotide
  Antisense strand to SEQ ID NO: 1322724
aaugcuaugcgguaagagg

SEQ ID NO: 1322726 - RNA, 19 nt, Artificial Sequence
  Description of Artificial Sequence: Synthetic oligonucleotide
  Sense strand starting at position 2122 of SEQ ID NO: 1242108
aauugcuccggugagaaga

SEQ ID NO: 1322727 - RNA, 19 nt, Artificial Sequence
  Description of Artificial Sequence: Synthetic oligonucleotide
  Antisense strand to SEQ ID NO: 1322726
ucuucucaccggagcaauu

SEQ ID NO: 1322728 - RNA, 19 nt, Artificial Sequence
  Description of Artificial Sequence: Synthetic oligonucleotide
  Sense strand starting at position 2248 of SEQ ID NO: 1242108
guuucugggagauguaguu

SEQ ID NO: 1322729 - RNA, 19 nt, Artificial Sequence
  Description of Artificial Sequence: Synthetic oligonucleotide
  Antisense strand to SEQ ID NO: 1322728
aacuacaucucccagaaac

SEQ ID NO: 1322730 - RNA, 19 nt, Artificial Sequence
  Description of Artificial Sequence: Synthetic oligonucleotide
  Sense strand starting at position 2305 of SEQ ID NO: 1242108
aacugaaauuggucaugac

SEQ ID NO: 1322731 - RNA, 19 nt, Artificial Sequence
  Description of Artificial Sequence: Synthetic oligonucleotide
  Antisense strand to SEQ ID NO: 1322730
gucaugaccaauuucaguu

SEQ ID NO: 1322732 - RNA, 19 nt, Artificial Sequence
  Description of Artificial Sequence: Synthetic oligonucleotide
  Sense strand starting at position 2346 of SEQ ID NO: 1242108
cauauucuguauucgauga

SEQ ID NO: 1322733 - RNA, 19 nt, Artificial Sequence
  Description of Artificial Sequence: Synthetic oligonucleotide
  Antisense strand to SEQ ID NO: 1322732
ucaucgaauacagaauaug

SEQ ID NO: 1322734 - RNA, 19 nt, Artificial Sequence
  Description of Artificial Sequence: Synthetic oligonucleotide
  Sense strand starting at position 2772 of SEQ ID NO: 1242108
cggcgaguaguuaguuagu

SEQ ID NO: 1322735 - RNA, 19 nt, Artificial Sequence
  Description of Artificial Sequence: Synthetic oligonucleotide
  Antisense strand to SEQ ID NO: 1322734
acuaacuaacuacucgccg

SEQ ID NO: 1322736 - RNA, 19 nt, Artificial Sequence
  Description of Artificial Sequence: Synthetic oligonucleotide
  Sense strand starting at position 2775 of SEQ ID NO: 1242108
cgaguaguuaguuaguugu

SEQ ID NO: 1322737 - RNA, 19 nt, Artificial Sequence
  Description of Artificial Sequence: Synthetic oligonucleotide
  Antisense strand to SEQ ID NO: 1322736
acaacuaacuaacuacucg

SEQ ID NO: 1322738 - RNA, 19 nt, Artificial Sequence
  Description of Artificial Sequence: Synthetic oligonucleotide
  Sense strand starting at position 2779 of SEQ ID NO: 1242108
uaguuaguuaguuguuguu

SEQ ID NO: 1322739 - RNA, 19 nt, Artificial Sequence
  Description of Artificial Sequence: Synthetic oligonucleotide
  Antisense strand to SEQ ID NO: 1322738
aacaacaacuaacuaacua

SEQ ID NO: 1322740 - RNA, 19 nt, Artificial Sequence
  Description of Artificial Sequence: Synthetic oligonucleotide
  Sense strand starting at position 3620 of SEQ ID NO: 1242108
cugggagcuugauuucguu

SEQ ID NO: 1322741 - RNA, 19 nt, Artificial Sequence
  Description of Artificial Sequence: Synthetic oligonucleotide
  Antisense strand to SEQ ID NO: 1322740
aacgaaaucaagcucccag

SEQ ID NO: 1322742 - RNA, 19 nt, Artificial Sequence
  Description of Artificial Sequence: Synthetic oligonucleotide
  Sense strand starting at position 3644 of SEQ ID NO: 1242108
cuccuuuggcuacguuaaa

SEQ ID NO: 1322743 - RNA, 19 nt, Artificial Sequence
  Description of Artificial Sequence: Synthetic oligonucleotide
  Antisense strand to SEQ ID NO: 1322742
uuuaacguagccaaaggag

SEQ ID NO: 1322744 - RNA, 19 nt, Artificial Sequence
  Description of Artificial Sequence: Synthetic oligonucleotide
  Sense strand starting at position 3701 of SEQ ID NO: 1242108
cugccucuggccuguuaaa

SEQ ID NO: 1322745 - RNA, 19 nt, Artificial Sequence
  Description of Artificial Sequence: Synthetic oligonucleotide
  Antisense strand to SEQ ID NO: 1322744
uuuaacaggccagaggcag

SEQ ID NO: 1322746 - RNA, 19 nt, Artificial Sequence
  Description of Artificial Sequence: Synthetic oligonucleotide
  Sense strand starting at position 3760 of SEQ ID NO: 1242108
ucaggaauuugagagcugu

SEQ ID NO: 1322747 - RNA, 19 nt, Artificial Sequence
  Description of Artificial Sequence: Synthetic oligonucleotide
  Antisense strand to SEQ ID NO: 1322746
acagcucucaaauuccuga

SEQ ID NO: 1322748 - RNA, 19 nt, Artificial Sequence
  Description of Artificial Sequence: Synthetic oligonucleotide
  Sense strand starting at position 3815 of SEQ ID NO: 1242108
agugaugaguuagaggaaa

SEQ ID NO: 1322749 - RNA, 19 nt, Artificial Sequence
  Description of Artificial Sequence: Synthetic oligonucleotide
  Antisense strand to SEQ ID NO: 1322748
uuuccucuaacucaucacu

SEQ ID NO: 1322750 - RNA, 19 nt, Artificial Sequence
  Description of Artificial Sequence: Synthetic oligonucleotide
  Sense strand starting at position 3847 of SEQ ID NO: 1242108
cuuuauuggccuugcuaua

SEQ ID NO: 1322751 - RNA, 19 nt, Artificial Sequence
  Description of Artificial Sequence: Synthetic oligonucleotide
  Antisense strand to SEQ ID NO: 1322750
uauagcaaggccaauaaag

SEQ ID NO: 1322752 - RNA, 19 nt, Artificial Sequence
  Description of Artificial Sequence: Synthetic oligonucleotide
  Sense strand starting at position 3890 of SEQ ID NO: 1242108
gccucuguugaauguggua

SEQ ID NO: 1322753 - RNA, 19 nt, Artificial Sequence
  Description of Artificial Sequence: Synthetic oligonucleotide
  Antisense strand to SEQ ID NO: 1322752
uaccacauucaacagaggc

SEQ ID NO: 1322754 - RNA, 19 nt, Artificial Sequence
  Description of Artificial Sequence: Synthetic oligonucleotide
  Sense strand starting at position 3906 of SEQ ID NO: 1242108
guaagaucauacguugaau

SEQ ID NO: 1322755 - RNA, 19 nt, Artificial Sequence
  Description of Artificial Sequence: Synthetic oligonucleotide
  Antisense strand to SEQ ID NO: 1322754
auucaacguaugaucuuac

SEQ ID NO: 1322756 - RNA, 19 nt, Artificial Sequence
  Description of Artificial Sequence: Synthetic oligonucleotide
  Sense strand starting at position 3908 of SEQ ID NO: 1242108
aagaucauacguugaauua

SEQ ID NO: 1322757 - RNA, 19 nt, Artificial Sequence
  Description of Artificial Sequence: Synthetic oligonucleotide
  Antisense strand to SEQ ID NO: 1322756
uaauucaacguaugaucuu

SEQ ID NO: 1322758 - RNA, 19 nt, Artificial Sequence
  Description of Artificial Sequence: Synthetic oligonucleotide
  Sense strand starting at position 3959 of SEQ ID NO: 1242108
uaggucauuggaugaugua

SEQ ID NO: 1322759 - RNA, 19 nt, Artificial Sequence
  Description of Artificial Sequence: Synthetic oligonucleotide
  Antisense strand to SEQ ID NO: 1322758
uacaucauccaaugaccua

SEQ ID NO: 1322760 - RNA, 19 nt, Artificial Sequence
  Description of Artificial Sequence: Synthetic oligonucleotide
  Sense strand starting at position 3968 of SEQ ID NO: 1242108
ggaugauguacgugaacag

SEQ ID NO: 1322761 - RNA, 19 nt, Artificial Sequence
  Description of Artificial Sequence: Synthetic oligonucleotide
  Antisense strand to SEQ ID NO: 1322760
cuguucacguacaucaucc

SEQ ID NO: 1322762 - RNA, 19 nt, Artificial Sequence
  Description of Artificial Sequence: Synthetic oligonucleotide
  Sense strand starting at position 14 of SEQ ID NO: 1242109
agacauauucuguguuuaa

SEQ ID NO: 1322763 - RNA, 19 nt, Artificial Sequence
  Description of Artificial Sequence: Synthetic oligonucleotide
  Antisense strand to SEQ ID NO: 1322762
uuaaacacagaauaugucu

SEQ ID NO: 1322764 - RNA, 19 nt, Artificial Sequence
  Description of Artificial Sequence: Synthetic oligonucleotide
  Sense strand starting at position 345 of SEQ ID NO: 1242109
ggcucucacugcucaaaga

SEQ ID NO: 1322765 - RNA, 19 nt, Artificial Sequence
  Description of Artificial Sequence: Synthetic oligonucleotide
  Antisense strand to SEQ ID NO: 1322764
ucuuugagcagugagagcc

SEQ ID NO: 1322766 - RNA, 19 nt, Artificial Sequence
  Description of Artificial Sequence: Synthetic oligonucleotide
  Sense strand starting at position 346 of SEQ ID NO: 1242109
gcucucacugcucaaagau

SEQ ID NO: 1322767 - RNA, 19 nt, Artificial Sequence
  Description of Artificial Sequence: Synthetic oligonucleotide
  Antisense strand to SEQ ID NO: 1322766
aucuuugagcagugagagc

SEQ ID NO: 1322768 - RNA, 19 nt, Artificial Sequence
  Description of Artificial Sequence: Synthetic oligonucleotide
  Sense strand starting at position 394 of SEQ ID NO: 1242109
cuggaaauguuacagaaau

SEQ ID NO: 1322769 - RNA, 19 nt, Artificial Sequence
  Description of Artificial Sequence: Synthetic oligonucleotide
  Antisense strand to SEQ ID NO: 1322768
auuucuguaacauuuccag

SEQ ID NO: 1322770 - RNA, 19 nt, Artificial Sequence
  Description of Artificial Sequence: Synthetic oligonucleotide
  Sense strand starting at position 675 of SEQ ID NO: 1242109
gaaacuuaaccuggaguac

SEQ ID NO: 1322771 - RNA, 19 nt, Artificial Sequence
  Description of Artificial Sequence: Synthetic oligonucleotide
  Antisense strand to SEQ ID NO: 1322770
guacuccagguuaaguuuc

SEQ ID NO: 1322772 - RNA, 19 nt, Artificial Sequence
  Description of Artificial Sequence: Synthetic oligonucleotide
  Sense strand starting at position 686 of SEQ ID NO: 1242109
uggaguacggugcaagaaa

SEQ ID NO: 1322773 - RNA, 19 nt, Artificial Sequence
  Description of Artificial Sequence: Synthetic oligonucleotide
  Antisense strand to SEQ ID NO: 1322772
uuucuugcaccguacucca

SEQ ID NO: 1322774 - RNA, 19 nt, Artificial Sequence
  Description of Artificial Sequence: Synthetic oligonucleotide
  Sense strand starting at position 803 of SEQ ID NO: 1242109
gcaagaucucuagacccuu

SEQ ID NO: 1322775 - RNA, 19 nt, Artificial Sequence
  Description of Artificial Sequence: Synthetic oligonucleotide
  Antisense strand to SEQ ID NO: 1322774
aagggucuagagaucuugc

SEQ ID NO: 1322776 - RNA, 19 nt, Artificial Sequence
  Description of Artificial Sequence: Synthetic oligonucleotide
  Sense strand starting at position 857 of SEQ ID NO: 1242109
ggaagaaugcuggguucag

SEQ ID NO: 1322777 - RNA, 19 nt, Artificial Sequence
  Description of Artificial Sequence: Synthetic oligonucleotide
  Antisense strand to SEQ ID NO: 1322776
cugaacccagcauucuucc

SEQ ID NO: 1322778 - RNA, 19 nt, Artificial Sequence
  Description of Artificial Sequence: Synthetic oligonucleotide
  Sense strand starting at position 886 of SEQ ID NO: 1242109
cagagagauuuaggaauuc

SEQ ID NO: 1322779 - RNA, 19 nt, Artificial Sequence
  Description of Artificial Sequence: Synthetic oligonucleotide
  Antisense strand to SEQ ID NO: 1322778
gaauuccuaaaucucucug

SEQ ID NO: 1322780 - RNA, 19 nt, Artificial Sequence
  Description of Artificial Sequence: Synthetic oligonucleotide
  Sense strand starting at position 1030 of SEQ ID NO: 1242109
cuguaaaguggacauaagu

SEQ ID NO: 1322781 - RNA, 19 nt, Artificial Sequence
  Description of Artificial Sequence: Synthetic oligonucleotide
  Antisense strand to SEQ ID NO: 1322780
acuuauguccacuuuacag

SEQ ID NO: 1322782 - RNA, 19 nt, Artificial Sequence
  Description of Artificial Sequence: Synthetic oligonucleotide
  Sense strand starting at position 1053 of SEQ ID NO: 1242109
ccugaauacguauggcaaa

SEQ ID NO: 1322783 - RNA, 19 nt, Artificial Sequence
  Description of Artificial Sequence: Synthetic oligonucleotide
  Antisense strand to SEQ ID NO: 1322782
uuugccauacguauucagg

SEQ ID NO: 1322784 - RNA, 19 nt, Artificial Sequence
  Description of Artificial Sequence: Synthetic oligonucleotide
  Sense strand starting at position 1074 of SEQ ID NO: 1242109
gucaacgugugcccaaaua

SEQ ID NO: 1322785 - RNA, 19 nt, Artificial Sequence
  Description of Artificial Sequence: Synthetic oligonucleotide
  Antisense strand to SEQ ID NO: 1322784
uauuugggcacacguugac

SEQ ID NO: 1322786 - RNA, 19 nt, Artificial Sequence
  Description of Artificial Sequence: Synthetic oligonucleotide
  Sense strand starting at position 1098 of SEQ ID NO: 1242109
agcagauguaaggaguuau

SEQ ID NO: 1322787 - RNA, 19 nt, Artificial Sequence
  Description of Artificial Sequence: Synthetic oligonucleotide
  Antisense strand to SEQ ID NO: 1322786
auaacuccuuacaucugcu

SEQ ID NO: 1322788 - RNA, 19 nt, Artificial Sequence
  Description of Artificial Sequence: Synthetic oligonucleotide
  Sense strand starting at position 1102 of SEQ ID NO: 1242109
gauguaaggaguuauugug

SEQ ID NO: 1322789 - RNA, 19 nt, Artificial Sequence
  Description of Artificial Sequence: Synthetic oligonucleotide
  Antisense strand to SEQ ID NO: 1322788
cacaauaacuccuuacauc

SEQ ID NO: 1322790 - RNA, 19 nt, Artificial Sequence
  Description of Artificial Sequence: Synthetic oligonucleotide
  Sense strand starting at position 1108 of SEQ ID NO: 1242109
aggaguuauugugcuauua

SEQ ID NO: 1322791 - RNA, 19 nt, Artificial Sequence
  Description of Artificial Sequence: Synthetic oligonucleotide
  Antisense strand to SEQ ID NO: 1322790
uaauagcacaauaacuccu

SEQ ID NO: 1322792 - RNA, 19 nt, Artificial Sequence
  Description of Artificial Sequence: Synthetic oligonucleotide
  Sense strand starting at position 1213 of SEQ ID NO: 1242109
uagucacuucgacagagua

SEQ ID NO: 1322793 - RNA, 19 nt, Artificial Sequence
  Description of Artificial Sequence: Synthetic oligonucleotide
  Antisense strand to SEQ ID NO: 1322792
uacucugucgaagugacua

SEQ ID NO: 1322794 - RNA, 19 nt, Artificial Sequence
  Description of Artificial Sequence: Synthetic oligonucleotide
  Sense strand starting at position 1215 of SEQ ID NO: 1242109
gucacuucgacagaguauu

SEQ ID NO: 1322795 - RNA, 19 nt, Artificial Sequence
  Description of Artificial Sequence: Synthetic oligonucleotide
  Antisense strand to SEQ ID NO: 1322794
aauacucugucgaagugac

SEQ ID NO: 1322796 - RNA, 19 nt, Artificial Sequence
  Description of Artificial Sequence: Synthetic oligonucleotide
  Sense strand starting at position 1340 of SEQ ID NO: 1242109
ccacuauuccuacgcugga

SEQ ID NO: 1322797 - RNA, 19 nt, Artificial Sequence
  Description of Artificial Sequence: Synthetic oligonucleotide
  Antisense strand to SEQ ID NO: 1322796
uccagcguaggaauagugg

SEQ ID NO: 1322798 - RNA, 19 nt, Artificial Sequence
  Description of Artificial Sequence: Synthetic oligonucleotide
  Sense strand starting at position 1353 of SEQ ID NO: 1242109
gcuggagguuuauuauuau

SEQ ID NO: 1322799 - RNA, 19 nt, Artificial Sequence
  Description of Artificial Sequence: Synthetic oligonucleotide
  Antisense strand to SEQ ID NO: 1322798
auaauaauaaaccuccagc

SEQ ID NO: 1322800 - RNA, 19 nt, Artificial Sequence
  Description of Artificial Sequence: Synthetic oligonucleotide
  Sense strand starting at position 1371 of SEQ ID NO: 1242109
uuugauuauuuccaggaaa

SEQ ID NO: 1322801 - RNA, 19 nt, Artificial Sequence
  Description of Artificial Sequence: Synthetic oligonucleotide
  Antisense strand to SEQ ID NO: 1322800
uuuccuggaaauaaucaaa

SEQ ID NO: 1322802 - RNA, 19 nt, Artificial Sequence
  Description of Artificial Sequence: Synthetic oligonucleotide
  Sense strand starting at position 1433 of SEQ ID NO: 1242109
acgacaaacugcuuagacu

SEQ ID NO: 1322803 - RNA, 19 nt, Artificial Sequence
  Description of Artificial Sequence: Synthetic oligonucleotide
  Antisense strand to SEQ ID NO: 1322802
agucuaagcaguuugucgu

SEQ ID NO: 1322804 - RNA, 19 nt, Artificial Sequence
  Description of Artificial Sequence: Synthetic oligonucleotide
  Sense strand starting at position 2248 of SEQ ID NO: 1242109
ggcgcagugccaucaacau

SEQ ID NO: 1322805 - RNA, 19 nt, Artificial Sequence
  Description of Artificial Sequence: Synthetic oligonucleotide
  Antisense strand to SEQ ID NO: 1322804
auguugauggcacugcgcc

SEQ ID NO: 1322806 - RNA, 19 nt, Artificial Sequence
  Description of Artificial Sequence: Synthetic oligonucleotide
  Sense strand starting at position 2270 of SEQ ID NO: 1242109
gccugauggacuuaaaguc

SEQ ID NO: 1322807 - RNA, 19 nt, Artificial Sequence
  Description of Artificial Sequence: Synthetic oligonucleotide
  Antisense strand to SEQ ID NO: 1322806
gacuuuaaguccaucaggc

SEQ ID NO: 1322808 - RNA, 19 nt, Artificial Sequence
  Description of Artificial Sequence: Synthetic oligonucleotide
  Sense strand starting at position 2396 of SEQ ID NO: 1242109
guucguucgggucuccaga

SEQ ID NO: 1322809 - RNA, 19 nt, Artificial Sequence
  Description of Artificial Sequence: Synthetic oligonucleotide
  Antisense strand to SEQ ID NO: 1322808
ucuggagacccgaacgaac

SEQ ID NO: 1322810 - RNA, 19 nt, Artificial Sequence
  Description of Artificial Sequence: Synthetic oligonucleotide
  Sense strand starting at position 2506 of SEQ ID NO: 1242109
cgugaaauuucggaagcca

SEQ ID NO: 1322811 - RNA, 19 nt, Artificial Sequence
  Description of Artificial Sequence: Synthetic oligonucleotide
  Antisense strand to SEQ ID NO: 1322810
uggcuuccgaaauuucacg

SEQ ID NO: 1322812 - RNA, 19 nt, Artificial Sequence
  Description of Artificial Sequence: Synthetic oligonucleotide
  Sense strand starting at position 2563 of SEQ ID NO: 1242109
cugggcucuuuccuggaua

SEQ ID NO: 1322813 - RNA, 19 nt, Artificial Sequence
  Description of Artificial Sequence: Synthetic oligonucleotide
  Antisense strand to SEQ ID NO: 1322812
uauccaggaaagagcccag

SEQ ID NO: 1322814 - RNA, 19 nt, Artificial Sequence
  Description of Artificial Sequence: Synthetic oligonucleotide
  Sense strand starting at position 2565 of SEQ ID NO: 1242109
gggcucuuuccuggauaaa

SEQ ID NO: 1322815 - RNA, 19 nt, Artificial Sequence
  Description of Artificial Sequence: Synthetic oligonucleotide
  Antisense strand to SEQ ID NO: 1322814
uuuauccaggaaagagccc

SEQ ID NO: 1322816 - RNA, 19 nt, Artificial Sequence
  Description of Artificial Sequence: Synthetic oligonucleotide
  Sense strand starting at position 2728 of SEQ ID NO: 1242109
gguccugaguuucuaccaa

SEQ ID NO: 1322817 - RNA, 19 nt, Artificial Sequence
  Description of Artificial Sequence: Synthetic oligonucleotide
  Antisense strand to SEQ ID NO: 1322816
uugguagaaacucaggacc

SEQ ID NO: 1322818 - RNA, 19 nt, Artificial Sequence
  Description of Artificial Sequence: Synthetic oligonucleotide
  Sense strand starting at position 2783 of SEQ ID NO: 1242109
gggacuuccacgggaucau

SEQ ID NO: 1322819 - RNA, 19 nt, Artificial Sequence
  Description of Artificial Sequence: Synthetic oligonucleotide
  Antisense strand to SEQ ID NO: 1322818
augaucccguggaaguccc

SEQ ID NO: 1322820 - RNA, 19 nt, Artificial Sequence
  Description of Artificial Sequence: Synthetic oligonucleotide
  Sense strand starting at position 2795 of SEQ ID NO: 1242109
ggaucaucuucugcuggga

SEQ ID NO: 1322821 - RNA, 19 nt, Artificial Sequence
  Description of Artificial Sequence: Synthetic oligonucleotide
  Antisense strand to SEQ ID NO: 1322820
ucccagcagaagaugaucc

SEQ ID NO: 1322822 - RNA, 19 nt, Artificial Sequence
  Description of Artificial Sequence: Synthetic oligonucleotide
  Sense strand starting at position 2798 of SEQ ID NO: 1242109
ucaucuucugcugggaaca

SEQ ID NO: 1322823 - RNA, 19 nt, Artificial Sequence
  Description of Artificial Sequence: Synthetic oligonucleotide
  Antisense strand to SEQ ID NO: 1322822
uguucccagcagaagauga

SEQ ID NO: 1322824 - RNA, 19 nt, Artificial Sequence
  Description of Artificial Sequence: Synthetic oligonucleotide
  Sense strand starting at position 2833 of SEQ ID NO: 1242109
cuggcaucucaggacagua

SEQ ID NO: 1322825 - RNA, 19 nt, Artificial Sequence
  Description of Artificial Sequence: Synthetic oligonucleotide
  Antisense strand to SEQ ID NO: 1322824
uacuguccugagaugccag

SEQ ID NO: 1322826 - RNA, 19 nt, Artificial Sequence
  Description of Artificial Sequence: Synthetic oligonucleotide
  Sense strand starting at position 3248 of SEQ ID NO: 1242109
aggcuugaugcaggagaau

SEQ ID NO: 1322827 - RNA, 19 nt, Artificial Sequence
  Description of Artificial Sequence: Synthetic oligonucleotide
  Antisense strand to SEQ ID NO: 1322826
auucuccugcaucaagccu

SEQ ID NO: 1322828 - RNA, 19 nt, Artificial Sequence
  Description of Artificial Sequence: Synthetic oligonucleotide
  Sense strand starting at position 3394 of SEQ ID NO: 1242109
aaauaaucuugggaguuuc

SEQ ID NO: 1322829 - RNA, 19 nt, Artificial Sequence
  Description of Artificial Sequence: Synthetic oligonucleotide
  Antisense strand to SEQ ID NO: 1322828
gaaacucccaagauuauuu

SEQ ID NO: 1322830 - RNA, 19 nt, Artificial Sequence
  Description of Artificial Sequence: Synthetic oligonucleotide
  Sense strand starting at position 3443 of SEQ ID NO: 1242109
ucaggaaagugagcuugua

SEQ ID NO: 1322831 - RNA, 19 nt, Artificial Sequence
  Description of Artificial Sequence: Synthetic oligonucleotide
  Antisense strand to SEQ ID NO: 1322830
uacaagcucacuuuccuga

SEQ ID NO: 1322832 - RNA, 19 nt, Artificial Sequence
  Description of Artificial Sequence: Synthetic oligonucleotide
  Sense strand starting at position 3474 of SEQ ID NO: 1242109
agucauuuaucagguaaua

SEQ ID NO: 1322833 - RNA, 19 nt, Artificial Sequence
  Description of Artificial Sequence: Synthetic oligonucleotide
  Antisense strand to SEQ ID NO: 1322832
uauuaccugauaaaugacu

SEQ ID NO: 1322834 - RNA, 19 nt, Artificial Sequence
  Description of Artificial Sequence: Synthetic oligonucleotide
  Sense strand starting at position 3483 of SEQ ID NO: 1242109
ucagguaauaccugaggau

SEQ ID NO: 1322835 - RNA, 19 nt, Artificial Sequence
  Description of Artificial Sequence: Synthetic oligonucleotide
  Antisense strand to SEQ ID NO: 1322834
auccucagguauuaccuga

SEQ ID NO: 1322836 - RNA, 19 nt, Artificial Sequence
  Description of Artificial Sequence: Synthetic oligonucleotide
  Sense strand starting at position 3497 of SEQ ID NO: 1242109
aggauucugaaguguucga

SEQ ID NO: 1322837 - RNA, 19 nt, Artificial Sequence
  Description of Artificial Sequence: Synthetic oligonucleotide
  Antisense strand to SEQ ID NO: 1322836
ucgaacacuucagaauccu

SEQ ID NO: 1322838 - RNA, 19 nt, Artificial Sequence
  Description of Artificial Sequence: Synthetic oligonucleotide
  Sense strand starting at position 3501 of SEQ ID NO: 1242109
uucugaaguguucgaauaa

SEQ ID NO: 1322839 - RNA, 19 nt, Artificial Sequence
  Description of Artificial Sequence: Synthetic oligonucleotide
  Antisense strand to SEQ ID NO: 1322838
uuauucgaacacuucagaa

SEQ ID NO: 1322840 - RNA, 19 nt, Artificial Sequence
  Description of Artificial Sequence: Synthetic oligonucleotide
  Sense strand starting at position 3953 of SEQ ID NO: 1242109
auacuaugucuauagguau

SEQ ID NO: 1322841 - RNA, 19 nt, Artificial Sequence
  Description of Artificial Sequence: Synthetic oligonucleotide
  Antisense strand to SEQ ID NO: 1322840
auaccuauagacauaguau

SEQ ID NO: 1322842 - RNA, 19 nt, Artificial Sequence
  Description of Artificial Sequence: Synthetic oligonucleotide
  Sense strand starting at position 67 of SEQ ID NO: 1242110
cuuucuauuccagauguuc

SEQ ID NO: 1322843 - RNA, 19 nt, Artificial Sequence
  Description of Artificial Sequence: Synthetic oligonucleotide
  Antisense strand to SEQ ID NO: 1322842
gaacaucuggaauagaaag

SEQ ID NO: 1322844 - RNA, 19 nt, Artificial Sequence
  Description of Artificial Sequence: Synthetic oligonucleotide
  Sense strand starting at position 131 of SEQ ID NO: 1242110
uuuccauagccauguaaag

SEQ ID NO: 1322845 - RNA, 19 nt, Artificial Sequence
  Description of Artificial Sequence: Synthetic oligonucleotide
  Antisense strand to SEQ ID NO: 1322844
cuuuacauggcuauggaaa

SEQ ID NO: 1322846 - RNA, 19 nt, Artificial Sequence
  Description of Artificial Sequence: Synthetic oligonucleotide
  Sense strand starting at position 193 of SEQ ID NO: 1242110
aaggcugugcugggagaaa

SEQ ID NO: 1322847 - RNA, 19 nt, Artificial Sequence
  Description of Artificial Sequence: Synthetic oligonucleotide
  Antisense strand to SEQ ID NO: 1322846
uuucucccagcacagccuu

SEQ ID NO: 1322848 - RNA, 19 nt, Artificial Sequence
  Description of Artificial Sequence: Synthetic oligonucleotide
  Sense strand starting at position 336 of SEQ ID NO: 1242110
ccacuaaaguucuuuaagu

SEQ ID NO: 1322849 - RNA, 19 nt, Artificial Sequence
  Description of Artificial Sequence: Synthetic oligonucleotide
  Antisense strand to SEQ ID NO: 1322848
acuuaaagaacuuuagugg

SEQ ID NO: 1322850 - RNA, 19 nt, Artificial Sequence
  Description of Artificial Sequence: Synthetic oligonucleotide
  Sense strand starting at position 338 of SEQ ID NO: 1242110
acuaaaguucuuuaaguuc

SEQ ID NO: 1322851 - RNA, 19 nt, Artificial Sequence
  Description of Artificial Sequence: Synthetic oligonucleotide
  Antisense strand to SEQ ID NO: 1322850
gaacuuaaagaacuuuagu

SEQ ID NO: 1322852 - RNA, 19 nt, Artificial Sequence
  Description of Artificial Sequence: Synthetic oligonucleotide
  Sense strand starting at position 370 of SEQ ID NO: 1242110
auauaagcgcuccauauca

SEQ ID NO: 1322853 - RNA, 19 nt, Artificial Sequence
  Description of Artificial Sequence: Synthetic oligonucleotide
  Antisense strand to SEQ ID NO: 1322852
ugauauggagcgcuuauau

SEQ ID NO: 1322854 - RNA, 19 nt, Artificial Sequence
  Description of Artificial Sequence: Synthetic oligonucleotide
  Sense strand starting at position 372 of SEQ ID NO: 1242110
auaagcgcuccauaucaua

SEQ ID NO: 1322855 - RNA, 19 nt, Artificial Sequence
  Description of Artificial Sequence: Synthetic oligonucleotide
  Antisense strand to SEQ ID NO: 1322854
uaugauauggagcgcuuau

SEQ ID NO: 1322856 - RNA, 19 nt, Artificial Sequence
  Description of Artificial Sequence: Synthetic oligonucleotide
  Sense strand starting at position 455 of SEQ ID NO: 1242110
aucagacaugucugucuua

SEQ ID NO: 1322857 - RNA, 19 nt, Artificial Sequence
  Description of Artificial Sequence: Synthetic oligonucleotide
  Antisense strand to SEQ ID NO: 1322856
uaagacagacaugucugau

SEQ ID NO: 1322858 - RNA, 19 nt, Artificial Sequence
  Description of Artificial Sequence: Synthetic oligonucleotide
  Sense strand starting at position 456 of SEQ ID NO: 1242110
ucagacaugucugucuuaa

SEQ ID NO: 1322859 - RNA, 19 nt, Artificial Sequence
  Description of Artificial Sequence: Synthetic oligonucleotide
  Antisense strand to SEQ ID NO: 1322858
uuaagacagacaugucuga

SEQ ID NO: 1322860 - RNA, 19 nt, Artificial Sequence
  Description of Artificial Sequence: Synthetic oligonucleotide
  Sense strand starting at position 943 of SEQ ID NO: 1242110
uauauauccggccaacagu

SEQ ID NO: 1322861 - RNA, 19 nt, Artificial Sequence
  Description of Artificial Sequence: Synthetic oligonucleotide
  Antisense strand to SEQ ID NO: 1322860
acuguuggccggauauaua

SEQ ID NO: 1322862 - RNA, 19 nt, Artificial Sequence
  Description of Artificial Sequence: Synthetic oligonucleotide
  Sense strand starting at position 1010 of SEQ ID NO: 1242110
caagaucugcgucagaauc

SEQ ID NO: 1322863 - RNA, 19 nt, Artificial Sequence
  Description of Artificial Sequence: Synthetic oligonucleotide
  Antisense strand to SEQ ID NO: 1322862
gauucugacgcagaucuug

SEQ ID NO: 1322864 - RNA, 19 nt, Artificial Sequence
  Description of Artificial Sequence: Synthetic oligonucleotide
  Sense strand starting at position 1109 of SEQ ID NO: 1242110
ggagucauucuugauucuu

SEQ ID NO: 1322865 - RNA, 19 nt, Artificial Sequence
  Description of Artificial Sequence: Synthetic oligonucleotide
  Antisense strand to SEQ ID NO: 1322864
aagaaucaagaaugacucc

SEQ ID NO: 1322866 - RNA, 19 nt, Artificial Sequence
  Description of Artificial Sequence: Synthetic oligonucleotide
  Sense strand starting at position 1149 of SEQ ID NO: 1242110
uguaacaaagucuaguaaa

SEQ ID NO: 1322867 - RNA, 19 nt, Artificial Sequence
  Description of Artificial Sequence: Synthetic oligonucleotide
  Antisense strand to SEQ ID NO: 1322866
uuuacuagacuuuguuaca

SEQ ID NO: 1322868 - RNA, 19 nt, Artificial Sequence
  Description of Artificial Sequence: Synthetic oligonucleotide
  Sense strand starting at position 1234 of SEQ ID NO: 1242110
aagggauuauacccaguca

SEQ ID NO: 1322869 - RNA, 19 nt, Artificial Sequence
  Description of Artificial Sequence: Synthetic oligonucleotide
  Antisense strand to SEQ ID NO: 1322868
ugacuggguauaaucccuu

SEQ ID NO: 1322870 - RNA, 19 nt, Artificial Sequence
  Description of Artificial Sequence: Synthetic oligonucleotide
  Sense strand starting at position 1272 of SEQ ID NO: 1242110
cuaggcuagucccuuauuu

SEQ ID NO: 1322871 - RNA, 19 nt, Artificial Sequence
  Description of Artificial Sequence: Synthetic oligonucleotide
  Antisense strand to SEQ ID NO: 1322870
aaauaagggacuagccuag

SEQ ID NO: 1322872 - RNA, 19 nt, Artificial Sequence
  Description of Artificial Sequence: Synthetic oligonucleotide
  Sense strand starting at position 1702 of SEQ ID NO: 1242110
aggugagguccgggaagaa

SEQ ID NO: 1322873 - RNA, 19 nt, Artificial Sequence
  Description of Artificial Sequence: Synthetic oligonucleotide
  Antisense strand to SEQ ID NO: 1322872
uucuucccggaccucaccu

SEQ ID NO: 1322874 - RNA, 19 nt, Artificial Sequence
  Description of Artificial Sequence: Synthetic oligonucleotide
  Sense strand starting at position 2106 of SEQ ID NO: 1242110
ggaggcugcgaacagaaau

SEQ ID NO: 1322875 - RNA, 19 nt, Artificial Sequence
  Description of Artificial Sequence: Synthetic oligonucleotide
  Antisense strand to SEQ ID NO: 1322874
auuucuguucgcagccucc

SEQ ID NO: 1322876 - RNA, 19 nt, Artificial Sequence
  Description of Artificial Sequence: Synthetic oligonucleotide
  Sense strand starting at position 2190 of SEQ ID NO: 1242110
ucagaauccggcuaccuuu

SEQ ID NO: 1322877 - RNA, 19 nt, Artificial Sequence
  Description of Artificial Sequence: Synthetic oligonucleotide
  Antisense strand to SEQ ID NO: 1322876
aaagguagccggauucuga

SEQ ID NO: 1322878 - RNA, 19 nt, Artificial Sequence
  Description of Artificial Sequence: Synthetic oligonucleotide
  Sense strand starting at position 2396 of SEQ ID NO: 1242110
gcacguauccuggaaguga

SEQ ID NO: 1322879 - RNA, 19 nt, Artificial Sequence
  Description of Artificial Sequence: Synthetic oligonucleotide
  Antisense strand to SEQ ID NO: 1322878
ucacuuccaggauacgugc

SEQ ID NO: 1322880 - RNA, 19 nt, Artificial Sequence
  Description of Artificial Sequence: Synthetic oligonucleotide
  Sense strand starting at position 2409 of SEQ ID NO: 1242110
aagugauacgcuuagaaag

SEQ ID NO: 1322881 - RNA, 19 nt, Artificial Sequence
  Description of Artificial Sequence: Synthetic oligonucleotide
  Antisense strand to SEQ ID NO: 1322880
cuuucuaagcguaucacuu

SEQ ID NO: 1322882 - RNA, 19 nt, Artificial Sequence
  Description of Artificial Sequence: Synthetic oligonucleotide
  Sense strand starting at position 2517 of SEQ ID NO: 1242110
ggaggaugcuggaauguua

SEQ ID NO: 1322883 - RNA, 19 nt, Artificial Sequence
  Description of Artificial Sequence: Synthetic oligonucleotide
  Antisense strand to SEQ ID NO: 1322882
uaacauuccagcauccucc

SEQ ID NO: 1322884 - RNA, 19 nt, Artificial Sequence
  Description of Artificial Sequence: Synthetic oligonucleotide
  Sense strand starting at position 2530 of SEQ ID NO: 1242110
auguuagaacccgaacagu

SEQ ID NO: 1322885 - RNA, 19 nt, Artificial Sequence
  Description of Artificial Sequence: Synthetic oligonucleotide
  Antisense strand to SEQ ID NO: 1322884
acuguucggguucuaacau

SEQ ID NO: 1322886 - RNA, 19 nt, Artificial Sequence
  Description of Artificial Sequence: Synthetic oligonucleotide
  Sense strand starting at position 2825 of SEQ ID NO: 1242110
acuuacuuagucuguaaga

SEQ ID NO: 1322887 - RNA, 19 nt, Artificial Sequence
  Description of Artificial Sequence: Synthetic oligonucleotide
  Antisense strand to SEQ ID NO: 1322886
ucuuacagacuaaguaagu

SEQ ID NO: 1322888 - RNA, 19 nt, Artificial Sequence
  Description of Artificial Sequence: Synthetic oligonucleotide
  Sense strand starting at position 2958 of SEQ ID NO: 1242110
caccgaguaguugggauua

SEQ ID NO: 1322889 - RNA, 19 nt, Artificial Sequence
  Description of Artificial Sequence: Synthetic oligonucleotide
  Antisense strand to SEQ ID NO: 1322888
uaaucccaacuacucggug

SEQ ID NO: 1322890 - RNA, 19 nt, Artificial Sequence
  Description of Artificial Sequence: Synthetic oligonucleotide
  Sense strand starting at position 2995 of SEQ ID NO: 1242110
ccuuuaucuagguagugga

SEQ ID NO: 1322891 - RNA, 19 nt, Artificial Sequence
  Description of Artificial Sequence: Synthetic oligonucleotide
  Antisense strand to SEQ ID NO: 1322890
uccacuaccuagauaaagg

SEQ ID NO: 1322892 - RNA, 19 nt, Artificial Sequence
  Description of Artificial Sequence: Synthetic oligonucleotide
  Sense strand starting at position 3022 of SEQ ID NO: 1242110
gcucucuuucugcaggaaa

SEQ ID NO: 1322893 - RNA, 19 nt, Artificial Sequence
  Description of Artificial Sequence: Synthetic oligonucleotide
  Antisense strand to SEQ ID NO: 1322892
uuuccugcagaaagagagc

SEQ ID NO: 1322894 - RNA, 19 nt, Artificial Sequence
  Description of Artificial Sequence: Synthetic oligonucleotide
  Sense strand starting at position 3085 of SEQ ID NO: 1242110
uggaguaacagccagguua

SEQ ID NO: 1322895 - RNA, 19 nt, Artificial Sequence
  Description of Artificial Sequence: Synthetic oligonucleotide
  Antisense strand to SEQ ID NO: 1322894
uaaccuggcuguuacucca

SEQ ID NO: 1322896 - RNA, 19 nt, Artificial Sequence
  Description of Artificial Sequence: Synthetic oligonucleotide
  Sense strand starting at position 3101 of SEQ ID NO: 1242110
uuaguuggauggucuuaac

SEQ ID NO: 1322897 - RNA, 19 nt, Artificial Sequence
  Description of Artificial Sequence: Synthetic oligonucleotide
  Antisense strand to SEQ ID NO: 1322896
guuaagaccauccaacuaa

SEQ ID NO: 1322898 - RNA, 19 nt, Artificial Sequence
  Description of Artificial Sequence: Synthetic oligonucleotide
  Sense strand starting at position 3171 of SEQ ID NO: 1242110
gcaggacuucuccgauaag

SEQ ID NO: 1322899 - RNA, 19 nt, Artificial Sequence
  Description of Artificial Sequence: Synthetic oligonucleotide
  Antisense strand to SEQ ID NO: 1322898
cuuaucggagaaguccugc

SEQ ID NO: 1322900 - RNA, 19 nt, Artificial Sequence
  Description of Artificial Sequence: Synthetic oligonucleotide
  Sense strand starting at position 3174 of SEQ ID NO: 1242110
ggacuucuccgauaaguca

SEQ ID NO: 1322901 - RNA, 19 nt, Artificial Sequence
  Description of Artificial Sequence: Synthetic oligonucleotide
  Antisense strand to SEQ ID NO: 1322900
ugacuuaucggagaagucc

SEQ ID NO: 1322902 - RNA, 19 nt, Artificial Sequence
  Description of Artificial Sequence: Synthetic oligonucleotide
  Sense strand starting at position 3189 of SEQ ID NO: 1242110
gucagagcccucuaucuac

SEQ ID NO: 1322903 - RNA, 19 nt, Artificial Sequence
  Description of Artificial Sequence: Synthetic oligonucleotide
  Antisense strand to SEQ ID NO: 1322902
guagauagagggcucugac

SEQ ID NO: 1322904 - RNA, 19 nt, Artificial Sequence
  Description of Artificial Sequence: Synthetic oligonucleotide
  Sense strand starting at position 3221 of SEQ ID NO: 1242110
aagagaguccuggguacug

SEQ ID NO: 1322905 - RNA, 19 nt, Artificial Sequence
  Description of Artificial Sequence: Synthetic oligonucleotide
  Antisense strand to SEQ ID NO: 1322904
caguacccaggacucucuu

SEQ ID NO: 1322906 - RNA, 19 nt, Artificial Sequence
  Description of Artificial Sequence: Synthetic oligonucleotide
  Sense strand starting at position 3254 of SEQ ID NO: 1242110
gcaaauugguuucuuauuu

SEQ ID NO: 1322907 - RNA, 19 nt, Artificial Sequence
  Description of Artificial Sequence: Synthetic oligonucleotide
  Antisense strand to SEQ ID NO: 1322906
aaauaagaaaccaauuugc

SEQ ID NO: 1322908 - RNA, 19 nt, Artificial Sequence
  Description of Artificial Sequence: Synthetic oligonucleotide
  Sense strand starting at position 3325 of SEQ ID NO: 1242110
ucggauuaucuauagucac

SEQ ID NO: 1322909 - RNA, 19 nt, Artificial Sequence
  Description of Artificial Sequence: Synthetic oligonucleotide
  Antisense strand to SEQ ID NO: 1322908
gugacuauagauaauccga

SEQ ID NO: 1322910 - RNA, 19 nt, Artificial Sequence
  Description of Artificial Sequence: Synthetic oligonucleotide
  Sense strand starting at position 3344 of SEQ ID NO: 1242110
ccugauuaacuuggaugau

SEQ ID NO: 1322911 - RNA, 19 nt, Artificial Sequence
  Description of Artificial Sequence: Synthetic oligonucleotide
  Antisense strand to SEQ ID NO: 1322910
aucauccaaguuaaucagg

SEQ ID NO: 1322912 - RNA, 19 nt, Artificial Sequence
  Description of Artificial Sequence: Synthetic oligonucleotide
  Sense strand starting at position 3412 of SEQ ID NO: 1242110
uagauaugguucuuaccug

SEQ ID NO: 1322913 - RNA, 19 nt, Artificial Sequence
  Description of Artificial Sequence: Synthetic oligonucleotide
  Antisense strand to SEQ ID NO: 1322912
cagguaagaaccauaucua

SEQ ID NO: 1322914 - RNA, 19 nt, Artificial Sequence
  Description of Artificial Sequence: Synthetic oligonucleotide
  Sense strand starting at position 3500 of SEQ ID NO: 1242110
uccuuuagauugucaaaga

SEQ ID NO: 1322915 - RNA, 19 nt, Artificial Sequence
  Description of Artificial Sequence: Synthetic oligonucleotide
  Antisense strand to SEQ ID NO: 1322914
ucuuugacaaucuaaagga

SEQ ID NO: 1322916 - RNA, 19 nt, Artificial Sequence
  Description of Artificial Sequence: Synthetic oligonucleotide
  Sense strand starting at position 3601 of SEQ ID NO: 1242110
aguggcuucugaguuauuu

SEQ ID NO: 1322917 - RNA, 19 nt, Artificial Sequence
  Description of Artificial Sequence: Synthetic oligonucleotide
  Antisense strand to SEQ ID NO: 1322916
aaauaacucagaagccacu

SEQ ID NO: 1322918 - RNA, 19 nt, Artificial Sequence
  Description of Artificial Sequence: Synthetic oligonucleotide
  Sense strand starting at position 3654 of SEQ ID NO: 1242110
ucuacuucucuugggauga

SEQ ID NO: 1322919 - RNA, 19 nt, Artificial Sequence
  Description of Artificial Sequence: Synthetic oligonucleotide
  Antisense strand to SEQ ID NO: 1322918
ucaucccaagagaaguaga

SEQ ID NO: 1322920 - RNA, 19 nt, Artificial Sequence
  Description of Artificial Sequence: Synthetic oligonucleotide
  Sense strand starting at position 3874 of SEQ ID NO: 1242110
uugagacccgccuggauaa

SEQ ID NO: 1322921 - RNA, 19 nt, Artificial Sequence
  Description of Artificial Sequence: Synthetic oligonucleotide
  Antisense strand to SEQ ID NO: 1322920
uuauccaggcgggucucaa

SEQ ID NO: 1322922 - RNA, 19 nt, Artificial Sequence
  Description of Artificial Sequence: Synthetic oligonucleotide
  Sense strand starting at position 966 of SEQ ID NO: 1242111
gggucauucccagaagugc

SEQ ID NO: 1322923 - RNA, 19 nt, Artificial Sequence
  Description of Artificial Sequence: Synthetic oligonucleotide
  Antisense strand to SEQ ID NO: 1322922
gcacuucugggaaugaccc

SEQ ID NO: 1322924 - RNA, 19 nt, Artificial Sequence
  Description of Artificial Sequence: Synthetic oligonucleotide
  Sense strand starting at position 975 of SEQ ID NO: 1242111
ccagaagugcccuguaaau

SEQ ID NO: 1322925 - RNA, 19 nt, Artificial Sequence
  Description of Artificial Sequence: Synthetic oligonucleotide
  Antisense strand to SEQ ID NO: 1322924
auuuacagggcacuucugg

SEQ ID NO: 1322926 - RNA, 19 nt, Artificial Sequence
  Description of Artificial Sequence: Synthetic oligonucleotide
  Sense strand starting at position 977 of SEQ ID NO: 1242111
agaagugcccuguaaauaa

SEQ ID NO: 1322927 - RNA, 19 nt, Artificial Sequence
  Description of Artificial Sequence: Synthetic oligonucleotide
  Antisense strand to SEQ ID NO: 1322926
uuauuuacagggcacuucu

SEQ ID NO: 1322928 - RNA, 19 nt, Artificial Sequence
  Description of Artificial Sequence: Synthetic oligonucleotide
  Sense strand starting at position 999 of SEQ ID NO: 1242111
uugauaaacccuugauuga

SEQ ID NO: 1322929 - RNA, 19 nt, Artificial Sequence
  Description of Artificial Sequence: Synthetic oligonucleotide
  Antisense strand to SEQ ID NO: 1322928
ucaaucaaggguuuaucaa

SEQ ID NO: 1322930 - RNA, 19 nt, Artificial Sequence
  Description of Artificial Sequence: Synthetic oligonucleotide
  Sense strand starting at position 1083 of SEQ ID NO: 1242111
uucugcuaacaagaguaaa

SEQ ID NO: 1322931 - RNA, 19 nt, Artificial Sequence
  Description of Artificial Sequence: Synthetic oligonucleotide
  Antisense strand to SEQ ID NO: 1322930
uuuacucuuguuagcagaa

SEQ ID NO: 1322932 - RNA, 19 nt, Artificial Sequence
  Description of Artificial Sequence: Synthetic oligonucleotide
  Sense strand starting at position 1086 of SEQ ID NO: 1242111
ugcuaacaagaguaaaguu

SEQ ID NO: 1322933 - RNA, 19 nt, Artificial Sequence
  Description of Artificial Sequence: Synthetic oligonucleotide
  Antisense strand to SEQ ID NO: 1322932
aacuuuacucuuguuagca

SEQ ID NO: 1322934 - RNA, 19 nt, Artificial Sequence
  Description of Artificial Sequence: Synthetic oligonucleotide
  Sense strand starting at position 1109 of SEQ ID NO: 1242111
cgccuagaucugcaggaau

SEQ ID NO: 1322935 - RNA, 19 nt, Artificial Sequence
  Description of Artificial Sequence: Synthetic oligonucleotide
  Antisense strand to SEQ ID NO: 1322934
auuccugcagaucuaggcg

SEQ ID NO: 1322936 - RNA, 19 nt, Artificial Sequence
  Description of Artificial Sequence: Synthetic oligonucleotide
  Sense strand starting at position 1111 of SEQ ID NO: 1242111
ccuagaucugcaggaauug

SEQ ID NO: 1322937 - RNA, 19 nt, Artificial Sequence
  Description of Artificial Sequence: Synthetic oligonucleotide
  Antisense strand to SEQ ID NO: 1322936
caauuccugcagaucuagg

SEQ ID NO: 1322938 - RNA, 19 nt, Artificial Sequence
  Description of Artificial Sequence: Synthetic oligonucleotide
  Sense strand starting at position 1117 of SEQ ID NO: 1242111
ucugcaggaauuggugaua

SEQ ID NO: 1322939 - RNA, 19 nt, Artificial Sequence
  Description of Artificial Sequence: Synthetic oligonucleotide
  Antisense strand to SEQ ID NO: 1322938
uaucaccaauuccugcaga

SEQ ID NO: 1322940 - RNA, 19 nt, Artificial Sequence
  Description of Artificial Sequence: Synthetic oligonucleotide
  Sense strand starting at position 1122 of SEQ ID NO: 1242111
aggaauuggugauaaauuu

SEQ ID NO: 1322941 - RNA, 19 nt, Artificial Sequence
  Description of Artificial Sequence: Synthetic oligonucleotide
  Antisense strand to SEQ ID NO: 1322940
aaauuuaucaccaauuccu

SEQ ID NO: 1322942 - RNA, 19 nt, Artificial Sequence
  Description of Artificial Sequence: Synthetic oligonucleotide
  Sense strand starting at position 1129 of SEQ ID NO: 1242111
ggugauaaauuugaagaac

SEQ ID NO: 1322943 - RNA, 19 nt, Artificial Sequence
  Description of Artificial Sequence: Synthetic oligonucleotide
  Antisense strand to SEQ ID NO: 1322942
guucuucaaauuuaucacc

SEQ ID NO: 1322944 - RNA, 19 nt, Artificial Sequence
  Description of Artificial Sequence: Synthetic oligonucleotide
  Sense strand starting at position 1387 of SEQ ID NO: 1242111
ugacaaguguuaccaggua

SEQ ID NO: 1322945 - RNA, 19 nt, Artificial Sequence
  Description of Artificial Sequence: Synthetic oligonucleotide
  Antisense strand to SEQ ID NO: 1322944
uaccugguaacacuuguca

SEQ ID NO: 1322946 - RNA, 19 nt, Artificial Sequence
  Description of Artificial Sequence: Synthetic oligonucleotide
  Sense strand starting at position 1404 of SEQ ID NO: 1242111
uagcaaggacuauguuuaa

SEQ ID NO: 1322947 - RNA, 19 nt, Artificial Sequence
  Description of Artificial Sequence: Synthetic oligonucleotide
  Antisense strand to SEQ ID NO: 1322946
uuaaacauaguccuugcua

SEQ ID NO: 1322948 - RNA, 19 nt, Artificial Sequence
  Description of Artificial Sequence: Synthetic oligonucleotide
  Sense strand starting at position 2123 of SEQ ID NO: 1242111
cugaaugacgucuaauccu

SEQ ID NO: 1322949 - RNA, 19 nt, Artificial Sequence
  Description of Artificial Sequence: Synthetic oligonucleotide
  Antisense strand to SEQ ID NO: 1322948
aggauuagacgucauucag

SEQ ID NO: 1322950 - RNA, 19 nt, Artificial Sequence
  Description of Artificial Sequence: Synthetic oligonucleotide
  Sense strand starting at position 2415 of SEQ ID NO: 1242111
agccuaaucccugggacaa

SEQ ID NO: 1322951 - RNA, 19 nt, Artificial Sequence
  Description of Artificial Sequence: Synthetic oligonucleotide
  Antisense strand to SEQ ID NO: 1322950
uugucccagggauuaggcu

SEQ ID NO: 1322952 - RNA, 19 nt, Artificial Sequence
  Description of Artificial Sequence: Synthetic oligonucleotide
  Sense strand starting at position 2416 of SEQ ID NO: 1242111
gccuaaucccugggacaag

SEQ ID NO: 1322953 - RNA, 19 nt, Artificial Sequence
  Description of Artificial Sequence: Synthetic oligonucleotide
  Antisense strand to SEQ ID NO: 1322952
cuugucccagggauuaggc

SEQ ID NO: 1322954 - RNA, 19 nt, Artificial Sequence
  Description of Artificial Sequence: Synthetic oligonucleotide
  Sense strand starting at position 2649 of SEQ ID NO: 1242111
agguauaaucuguaaaucu

SEQ ID NO: 1322955 - RNA, 19 nt, Artificial Sequence
  Description of Artificial Sequence: Synthetic oligonucleotide
  Antisense strand to SEQ ID NO: 1322954
agauuuacagauuauaccu

SEQ ID NO: 1322956 - RNA, 19 nt, Artificial Sequence
  Description of Artificial Sequence: Synthetic oligonucleotide
  Sense strand starting at position 2690 of SEQ ID NO: 1242111
agguguuuaggucgagaga

SEQ ID NO: 1322957 - RNA, 19 nt, Artificial Sequence
  Description of Artificial Sequence: Synthetic oligonucleotide
  Antisense strand to SEQ ID NO: 1322956
ucucucgaccuaaacaccu

SEQ ID NO: 1322958 - RNA, 19 nt, Artificial Sequence
  Description of Artificial Sequence: Synthetic oligonucleotide
  Sense strand starting at position 2691 of SEQ ID NO: 1242111
gguguuuaggucgagagaa

SEQ ID NO: 1322959 - RNA, 19 nt, Artificial Sequence
  Description of Artificial Sequence: Synthetic oligonucleotide
  Antisense strand to SEQ ID NO: 1322958
uucucucgaccuaaacacc

SEQ ID NO: 1322960 - RNA, 19 nt, Artificial Sequence
  Description of Artificial Sequence: Synthetic oligonucleotide
  Sense strand starting at position 2693 of SEQ ID NO: 1242111
uguuuaggucgagagaaag

SEQ ID NO: 1322961 - RNA, 19 nt, Artificial Sequence
  Description of Artificial Sequence: Synthetic oligonucleotide
  Antisense strand to SEQ ID NO: 1322960
cuuucucucgaccuaaaca

SEQ ID NO: 1322962 - RNA, 19 nt, Artificial Sequence
  Description of Artificial Sequence: Synthetic oligonucleotide
  Sense strand starting at position 2781 of SEQ ID NO: 1242111
cuggaaucagcuugaaaca

SEQ ID NO: 1322963 - RNA, 19 nt, Artificial Sequence
  Description of Artificial Sequence: Synthetic oligonucleotide
  Antisense strand to SEQ ID NO: 1322962
uguuucaagcugauuccag

SEQ ID NO: 1322964 - RNA, 19 nt, Artificial Sequence
  Description of Artificial Sequence: Synthetic oligonucleotide
  Sense strand starting at position 2852 of SEQ ID NO: 1242111
cuggguuaaccucacacau

SEQ ID NO: 1322965 - RNA, 19 nt, Artificial Sequence
  Description of Artificial Sequence: Synthetic oligonucleotide
  Antisense strand to SEQ ID NO: 1322964
augugugagguuaacccag

SEQ ID NO: 1322966 - RNA, 19 nt, Artificial Sequence
  Description of Artificial Sequence: Synthetic oligonucleotide
  Sense strand starting at position 3130 of SEQ ID NO: 1242111
ggguugucaggugggaaga

SEQ ID NO: 1322967 - RNA, 19 nt, Artificial Sequence
  Description of Artificial Sequence: Synthetic oligonucleotide
  Antisense strand to SEQ ID NO: 1322966
ucuucccaccugacaaccc

SEQ ID NO: 1322968 - RNA, 19 nt, Artificial Sequence
  Description of Artificial Sequence: Synthetic oligonucleotide
  Sense strand starting at position 3196 of SEQ ID NO: 1242111
gagacaaaugaguggucau

SEQ ID NO: 1322969 - RNA, 19 nt, Artificial Sequence
  Description of Artificial Sequence: Synthetic oligonucleotide
  Antisense strand to SEQ ID NO: 1322968
augaccacucauuugucuc

SEQ ID NO: 1322970 - RNA, 19 nt, Artificial Sequence
  Description of Artificial Sequence: Synthetic oligonucleotide
  Sense strand starting at position 3197 of SEQ ID NO: 1242111
agacaaaugaguggucaua

SEQ ID NO: 1322971 - RNA, 19 nt, Artificial Sequence
  Description of Artificial Sequence: Synthetic oligonucleotide
  Antisense strand to SEQ ID NO: 1322970
uaugaccacucauuugucu

SEQ ID NO: 1322972 - RNA, 19 nt, Artificial Sequence
  Description of Artificial Sequence: Synthetic oligonucleotide
  Sense strand starting at position 3208 of SEQ ID NO: 1242111
uggucauacccgugacaag

SEQ ID NO: 1322973 - RNA, 19 nt, Artificial Sequence
  Description of Artificial Sequence: Synthetic oligonucleotide
  Antisense strand to SEQ ID NO: 1322972
cuugucacggguaugacca

SEQ ID NO: 1322974 - RNA, 19 nt, Artificial Sequence
  Description of Artificial Sequence: Synthetic oligonucleotide
  Sense strand starting at position 3209 of SEQ ID NO: 1242111
ggucauacccgugacaagu

SEQ ID NO: 1322975 - RNA, 19 nt, Artificial Sequence
  Description of Artificial Sequence: Synthetic oligonucleotide
  Antisense strand to SEQ ID NO: 1322974
acuugucacggguaugacc

SEQ ID NO: 1322976 - RNA, 19 nt, Artificial Sequence
  Description of Artificial Sequence: Synthetic oligonucleotide
  Sense strand starting at position 3356 of SEQ ID NO: 1242111
ggcuguguaccgaguaugu

SEQ ID NO: 1322977 - RNA, 19 nt, Artificial Sequence
  Description of Artificial Sequence: Synthetic oligonucleotide
  Antisense strand to SEQ ID NO: 1322976
acauacucgguacacagcc

SEQ ID NO: 1322978 - RNA, 19 nt, Artificial Sequence
  Description of Artificial Sequence: Synthetic oligonucleotide
  Sense strand starting at position 3508 of SEQ ID NO: 1242111
guagacauaggcuggguaa

SEQ ID NO: 1322979 - RNA, 19 nt, Artificial Sequence
  Description of Artificial Sequence: Synthetic oligonucleotide
  Antisense strand to SEQ ID NO: 1322978
uuacccagccuaugucuac

SEQ ID NO: 1322980 - RNA, 19 nt, Artificial Sequence
  Description of Artificial Sequence: Synthetic oligonucleotide
  Sense strand starting at position 3509 of SEQ ID NO: 1242111
uagacauaggcuggguaaa

SEQ ID NO: 1322981 - RNA, 19 nt, Artificial Sequence
  Description of Artificial Sequence: Synthetic oligonucleotide
  Antisense strand to SEQ ID NO: 1322980
uuuacccagccuaugucua

SEQ ID NO: 1322982 - RNA, 19 nt, Artificial Sequence
  Description of Artificial Sequence: Synthetic oligonucleotide
  Sense strand starting at position 3529 of SEQ ID NO: 1242111
gaaauuccgggaugaagua

SEQ ID NO: 1322983 - RNA, 19 nt, Artificial Sequence
  Description of Artificial Sequence: Synthetic oligonucleotide
  Antisense strand to SEQ ID NO: 1322982
uacuucaucccggaauuuc

SEQ ID NO: 1322984 - RNA, 19 nt, Artificial Sequence
  Description of Artificial Sequence: Synthetic oligonucleotide
  Sense strand starting at position 3593 of SEQ ID NO: 1242111
cguguacuugcuguguaac

SEQ ID NO: 1322985 - RNA, 19 nt, Artificial Sequence
  Description of Artificial Sequence: Synthetic oligonucleotide
  Antisense strand to SEQ ID NO: 1322984
guuacacagcaaguacacg

SEQ ID NO: 1322986 - RNA, 19 nt, Artificial Sequence
  Description of Artificial Sequence: Synthetic oligonucleotide
  Sense strand starting at position 3717 of SEQ ID NO: 1242111
aaguaucuuugaguuagaa

SEQ ID NO: 1322987 - RNA, 19 nt, Artificial Sequence
  Description of Artificial Sequence: Synthetic oligonucleotide
  Antisense strand to SEQ ID NO: 1322986
uucuaacucaaagauacuu

SEQ ID NO: 1322988 - RNA, 19 nt, Artificial Sequence
  Description of Artificial Sequence: Synthetic oligonucleotide
  Sense strand starting at position 3727 of SEQ ID NO: 1242111
gaguuagaauuuggaauaa

SEQ ID NO: 1322989 - RNA, 19 nt, Artificial Sequence
  Description of Artificial Sequence: Synthetic oligonucleotide
  Antisense strand to SEQ ID NO: 1322988
uuauuccaaauucuaacuc

SEQ ID NO: 1322990 - RNA, 19 nt, Artificial Sequence
  Description of Artificial Sequence: Synthetic oligonucleotide
  Sense strand starting at position 3779 of SEQ ID NO: 1242111
ugggauugguuccuccuua

SEQ ID NO: 1322991 - RNA, 19 nt, Artificial Sequence
  Description of Artificial Sequence: Synthetic oligonucleotide
  Antisense strand to SEQ ID NO: 1322990
uaaggaggaaccaauccca

SEQ ID NO: 1322992 - RNA, 19 nt, Artificial Sequence
  Description of Artificial Sequence: Synthetic oligonucleotide
  Sense strand starting at position 3780 of SEQ ID NO: 1242111
gggauugguuccuccuuag

SEQ ID NO: 1322993 - RNA, 19 nt, Artificial Sequence
  Description of Artificial Sequence: Synthetic oligonucleotide
  Antisense strand to SEQ ID NO: 1322992
cuaaggaggaaccaauccc

SEQ ID NO: 1322994 - RNA, 19 nt, Artificial Sequence
  Description of Artificial Sequence: Synthetic oligonucleotide
  Sense strand starting at position 3955 of SEQ ID NO: 1242111
ugugcuauugccuucugca

SEQ ID NO: 1322995 - RNA, 19 nt, Artificial Sequence
  Description of Artificial Sequence: Synthetic oligonucleotide
  Antisense strand to SEQ ID NO: 1322994
ugcagaaggcaauagcaca

SEQ ID NO: 1322996 - RNA, 19 nt, Artificial Sequence
  Description of Artificial Sequence: Synthetic oligonucleotide
  Sense strand starting at position 3956 of SEQ ID NO: 1242111
gugcuauugccuucugcau

SEQ ID NO: 1322997 - RNA, 19 nt, Artificial Sequence
  Description of Artificial Sequence: Synthetic oligonucleotide
  Antisense strand to SEQ ID NO: 1322996
augcagaaggcaauagcac

SEQ ID NO: 1322998 - RNA, 19 nt, Artificial Sequence
  Description of Artificial Sequence: Synthetic oligonucleotide
  Sense strand starting at position 3957 of SEQ ID NO: 1242111
ugcuauugccuucugcauu

SEQ ID NO: 1322999 - RNA, 19 nt, Artificial Sequence
  Description of Artificial Sequence: Synthetic oligonucleotide
  Antisense strand to SEQ ID NO: 1322998
aaugcagaaggcaauagca

SEQ ID NO: 1323000 - RNA, 19 nt, Artificial Sequence
  Description of Artificial Sequence: Synthetic oligonucleotide
  Sense strand starting at position 3982 of SEQ ID NO: 1242111
gagcaucucuucccaggua

SEQ ID NO: 1323001 - RNA, 19 nt, Artificial Sequence
  Description of Artificial Sequence: Synthetic oligonucleotide
  Antisense strand to SEQ ID NO: 1323000
uaccugggaagagaugcuc

SEQ ID NO: 1323002 - RNA, 19 nt, Artificial Sequence
  Description of Artificial Sequence: Synthetic oligonucleotide
  Sense strand starting at position 136 of SEQ ID NO: 1242112
uguuguuagcaauaaacaa

SEQ ID NO: 1323003 - RNA, 19 nt, Artificial Sequence
  Description of Artificial Sequence: Synthetic oligonucleotide
  Antisense strand to SEQ ID NO: 1323002
uuguuuauugcuaacaaca

SEQ ID NO: 1323004 - RNA, 19 nt, Artificial Sequence
  Description of Artificial Sequence: Synthetic oligonucleotide
  Sense strand starting at position 171 of SEQ ID NO: 1242112
cugacuuaauagucugagu

SEQ ID NO: 1323005 - RNA, 19 nt, Artificial Sequence
  Description of Artificial Sequence: Synthetic oligonucleotide
  Antisense strand to SEQ ID NO: 1323004
acucagacuauuaagucag

SEQ ID NO: 1323006 - RNA, 19 nt, Artificial Sequence
  Description of Artificial Sequence: Synthetic oligonucleotide
  Sense strand starting at position 173 of SEQ ID NO: 1242112
gacuuaauagucugaguca

SEQ ID NO: 1323007 - RNA, 19 nt, Artificial Sequence
  Description of Artificial Sequence: Synthetic oligonucleotide
  Antisense strand to SEQ ID NO: 1323006
ugacucagacuauuaaguc

SEQ ID NO: 1323008 - RNA, 19 nt, Artificial Sequence
  Description of Artificial Sequence: Synthetic oligonucleotide
  Sense strand starting at position 182 of SEQ ID NO: 1242112
gucugagucagguacuauu

SEQ ID NO: 1323009 - RNA, 19 nt, Artificial Sequence
  Description of Artificial Sequence: Synthetic oligonucleotide
  Antisense strand to SEQ ID NO: 1323008
aauaguaccugacucagac

SEQ ID NO: 1323010 - RNA, 19 nt, Artificial Sequence
  Description of Artificial Sequence: Synthetic oligonucleotide
  Sense strand starting at position 290 of SEQ ID NO: 1242112
uuagcuagauggcuacaaa

SEQ ID NO: 1323011 - RNA, 19 nt, Artificial Sequence
  Description of Artificial Sequence: Synthetic oligonucleotide
  Antisense strand to SEQ ID NO: 1323010
uuuguagccaucuagcuaa

SEQ ID NO: 1323012 - RNA, 19 nt, Artificial Sequence
  Description of Artificial Sequence: Synthetic oligonucleotide
  Sense strand starting at position 329 of SEQ ID NO: 1242112
gguucucuauuugcaaagu

SEQ ID NO: 1323013 - RNA, 19 nt, Artificial Sequence
  Description of Artificial Sequence: Synthetic oligonucleotide
  Antisense strand to SEQ ID NO: 1323012
acuuugcaaauagagaacc

SEQ ID NO: 1323014 - RNA, 19 nt, Artificial Sequence
  Description of Artificial Sequence: Synthetic oligonucleotide
  Sense strand starting at position 572 of SEQ ID NO: 1242112
guuguuccacuauaggagu

SEQ ID NO: 1323015 - RNA, 19 nt, Artificial Sequence
  Description of Artificial Sequence: Synthetic oligonucleotide
  Antisense strand to SEQ ID NO: 1323014
acuccuauaguggaacaac

SEQ ID NO: 1323016 - RNA, 19 nt, Artificial Sequence
  Description of Artificial Sequence: Synthetic oligonucleotide
  Sense strand starting at position 578 of SEQ ID NO: 1242112
ccacuauaggaguggaagu

SEQ ID NO: 1323017 - RNA, 19 nt, Artificial Sequence
  Description of Artificial Sequence: Synthetic oligonucleotide
  Antisense strand to SEQ ID NO: 1323016
acuuccacuccuauagugg

SEQ ID NO: 1323018 - RNA, 19 nt, Artificial Sequence
  Description of Artificial Sequence: Synthetic oligonucleotide
  Sense strand starting at position 579 of SEQ ID NO: 1242112
cacuauaggaguggaagua

SEQ ID NO: 1323019 - RNA, 19 nt, Artificial Sequence
  Description of Artificial Sequence: Synthetic oligonucleotide
  Antisense strand to SEQ ID NO: 1323018
uacuuccacuccuauagug

SEQ ID NO: 1323020 - RNA, 19 nt, Artificial Sequence
  Description of Artificial Sequence: Synthetic oligonucleotide
  Sense strand starting at position 592 of SEQ ID NO: 1242112
gaaguacagucagccauaa

SEQ ID NO: 1323021 - RNA, 19 nt, Artificial Sequence
  Description of Artificial Sequence: Synthetic oligonucleotide
  Antisense strand to SEQ ID NO: 1323020
uuauggcugacuguacuuc

SEQ ID NO: 1323022 - RNA, 19 nt, Artificial Sequence
  Description of Artificial Sequence: Synthetic oligonucleotide
  Sense strand starting at position 808 of SEQ ID NO: 1242112
uggagcucaucuuccuaga

SEQ ID NO: 1323023 - RNA, 19 nt, Artificial Sequence
  Description of Artificial Sequence: Synthetic oligonucleotide
  Antisense strand to SEQ ID NO: 1323022
ucuaggaagaugagcucca

SEQ ID NO: 1323024 - RNA, 19 nt, Artificial Sequence
  Description of Artificial Sequence: Synthetic oligonucleotide
  Sense strand starting at position 884 of SEQ ID NO: 1242112
gcaggaucccuccagaacu

SEQ ID NO: 1323025 - RNA, 19 nt, Artificial Sequence
  Description of Artificial Sequence: Synthetic oligonucleotide
  Antisense strand to SEQ ID NO: 1323024
aguucuggagggauccugc

SEQ ID NO: 1323026 - RNA, 19 nt, Artificial Sequence
  Description of Artificial Sequence: Synthetic oligonucleotide
  Sense strand starting at position 897 of SEQ ID NO: 1242112
agaacuuacucagcugagu

SEQ ID NO: 1323027 - RNA, 19 nt, Artificial Sequence
  Description of Artificial Sequence: Synthetic oligonucleotide
  Antisense strand to SEQ ID NO: 1323026
acucagcugaguaaguucu

SEQ ID NO: 1323028 - RNA, 19 nt, Artificial Sequence
  Description of Artificial Sequence: Synthetic oligonucleotide
  Sense strand starting at position 900 of SEQ ID NO: 1242112
acuuacucagcugaguaaa

SEQ ID NO: 1323029 - RNA, 19 nt, Artificial Sequence
  Description of Artificial Sequence: Synthetic oligonucleotide
  Antisense strand to SEQ ID NO: 1323028
uuuacucagcugaguaagu

SEQ ID NO: 1323030 - RNA, 19 nt, Artificial Sequence
  Description of Artificial Sequence: Synthetic oligonucleotide
  Sense strand starting at position 961 of SEQ ID NO: 1242112
gugcuauuaggugaggaag

SEQ ID NO: 1323031 - RNA, 19 nt, Artificial Sequence
  Description of Artificial Sequence: Synthetic oligonucleotide
  Antisense strand to SEQ ID NO: 1323030
cuuccucaccuaauagcac

SEQ ID NO: 1323032 - RNA, 19 nt, Artificial Sequence
  Description of Artificial Sequence: Synthetic oligonucleotide
  Sense strand starting at position 1315 of SEQ ID NO: 1242112
ccucgauaucaggaaucuu

SEQ ID NO: 1323033 - RNA, 19 nt, Artificial Sequence
  Description of Artificial Sequence: Synthetic oligonucleotide
  Antisense strand to SEQ ID NO: 1323032
aagauuccugauaucgagg

SEQ ID NO: 1323034 - RNA, 19 nt, Artificial Sequence
  Description of Artificial Sequence: Synthetic oligonucleotide
  Sense strand starting at position 1372 of SEQ ID NO: 1242112
aggucaacuuaagugacau

SEQ ID NO: 1323035 - RNA, 19 nt, Artificial Sequence
  Description of Artificial Sequence: Synthetic oligonucleotide
  Antisense strand to SEQ ID NO: 1323034
augucacuuaaguugaccu

SEQ ID NO: 1323036 - RNA, 19 nt, Artificial Sequence
  Description of Artificial Sequence: Synthetic oligonucleotide
  Sense strand starting at position 1480 of SEQ ID NO: 1242112
gauaaagugaccugcgaga

SEQ ID NO: 1323037 - RNA, 19 nt, Artificial Sequence
  Description of Artificial Sequence: Synthetic oligonucleotide
  Antisense strand to SEQ ID NO: 1323036
ucucgcaggucacuuuauc

SEQ ID NO: 1323038 - RNA, 19 nt, Artificial Sequence
  Description of Artificial Sequence: Synthetic oligonucleotide
  Sense strand starting at position 1493 of SEQ ID NO: 1242112
gcgagaaccuaaucaaauu

SEQ ID NO: 1323039 - RNA, 19 nt, Artificial Sequence
  Description of Artificial Sequence: Synthetic oligonucleotide
  Antisense strand to SEQ ID NO: 1323038
aauuugauuagguucucgc

SEQ ID NO: 1323040 - RNA, 19 nt, Artificial Sequence
  Description of Artificial Sequence: Synthetic oligonucleotide
  Sense strand starting at position 1974 of SEQ ID NO: 1242112
cgugaugacgucucagcga

SEQ ID NO: 1323041 - RNA, 19 nt, Artificial Sequence
  Description of Artificial Sequence: Synthetic oligonucleotide
  Antisense strand to SEQ ID NO: 1323040
ucgcugagacgucaucacg

SEQ ID NO: 1323042 - RNA, 19 nt, Artificial Sequence
  Description of Artificial Sequence: Synthetic oligonucleotide
  Sense strand starting at position 2283 of SEQ ID NO: 1242112
uggagaugaaauuguuacu

SEQ ID NO: 1323043 - RNA, 19 nt, Artificial Sequence
  Description of Artificial Sequence: Synthetic oligonucleotide
  Antisense strand to SEQ ID NO: 1323042
aguaacaauuucaucucca

SEQ ID NO: 1323044 - RNA, 19 nt, Artificial Sequence
  Description of Artificial Sequence: Synthetic oligonucleotide
  Sense strand starting at position 2458 of SEQ ID NO: 1242112
guucucauccauuacggaa

SEQ ID NO: 1323045 - RNA, 19 nt, Artificial Sequence
  Description of Artificial Sequence: Synthetic oligonucleotide
  Antisense strand to SEQ ID NO: 1323044
uuccguaauggaugagaac

SEQ ID NO: 1323046 - RNA, 19 nt, Artificial Sequence
  Description of Artificial Sequence: Synthetic oligonucleotide
  Sense strand starting at position 2627 of SEQ ID NO: 1242112
gguguauagauugagguua

SEQ ID NO: 1323047 - RNA, 19 nt, Artificial Sequence
  Description of Artificial Sequence: Synthetic oligonucleotide
  Antisense strand to SEQ ID NO: 1323046
uaaccucaaucuauacacc

SEQ ID NO: 1323048 - RNA, 19 nt, Artificial Sequence
  Description of Artificial Sequence: Synthetic oligonucleotide
  Sense strand starting at position 2692 of SEQ ID NO: 1242112
aguauugaguacuuacaug

SEQ ID NO: 1323049 - RNA, 19 nt, Artificial Sequence
  Description of Artificial Sequence: Synthetic oligonucleotide
  Antisense strand to SEQ ID NO: 1323048
cauguaaguacucaauacu

SEQ ID NO: 1323050 - RNA, 19 nt, Artificial Sequence
  Description of Artificial Sequence: Synthetic oligonucleotide
  Sense strand starting at position 2757 of SEQ ID NO: 1242112
guggguauguggaaugaag

SEQ ID NO: 1323051 - RNA, 19 nt, Artificial Sequence
  Description of Artificial Sequence: Synthetic oligonucleotide
  Antisense strand to SEQ ID NO: 1323050
cuucauuccacauacccac

SEQ ID NO: 1323052 - RNA, 19 nt, Artificial Sequence
  Description of Artificial Sequence: Synthetic oligonucleotide
  Sense strand starting at position 2781 of SEQ ID NO: 1242112
gggcguucuagacagacca

SEQ ID NO: 1323053 - RNA, 19 nt, Artificial Sequence
  Description of Artificial Sequence: Synthetic oligonucleotide
  Antisense strand to SEQ ID NO: 1323052
uggucugucuagaacgccc

SEQ ID NO: 1323054 - RNA, 19 nt, Artificial Sequence
  Description of Artificial Sequence: Synthetic oligonucleotide
  Sense strand starting at position 2894 of SEQ ID NO: 1242112
uggaaugagugucccaaug

SEQ ID NO: 1323055 - RNA, 19 nt, Artificial Sequence
  Description of Artificial Sequence: Synthetic oligonucleotide
  Antisense strand to SEQ ID NO: 1323054
cauugggacacucauucca

SEQ ID NO: 1323056 - RNA, 19 nt, Artificial Sequence
  Description of Artificial Sequence: Synthetic oligonucleotide
  Sense strand starting at position 3083 of SEQ ID NO: 1242112
cuuugcuguagggacuaaa

SEQ ID NO: 1323057 - RNA, 19 nt, Artificial Sequence
  Description of Artificial Sequence: Synthetic oligonucleotide
  Antisense strand to SEQ ID NO: 1323056
uuuagucccuacagcaaag

SEQ ID NO: 1323058 - RNA, 19 nt, Artificial Sequence
  Description of Artificial Sequence: Synthetic oligonucleotide
  Sense strand starting at position 3133 of SEQ ID NO: 1242112
aauugaaacuggccuguua

SEQ ID NO: 1323059 - RNA, 19 nt, Artificial Sequence
  Description of Artificial Sequence: Synthetic oligonucleotide
  Antisense strand to SEQ ID NO: 1323058
uaacaggccaguuucaauu

SEQ ID NO: 1323060 - RNA, 19 nt, Artificial Sequence
  Description of Artificial Sequence: Synthetic oligonucleotide
  Sense strand starting at position 3336 of SEQ ID NO: 1242112
ugugcuauuagggaagcau

SEQ ID NO: 1323061 - RNA, 19 nt, Artificial Sequence
  Description of Artificial Sequence: Synthetic oligonucleotide
  Antisense strand to SEQ ID NO: 1323060
augcuucccuaauagcaca

SEQ ID NO: 1323062 - RNA, 19 nt, Artificial Sequence
  Description of Artificial Sequence: Synthetic oligonucleotide
  Sense strand starting at position 3345 of SEQ ID NO: 1242112
agggaagcauguucuacau

SEQ ID NO: 1323063 - RNA, 19 nt, Artificial Sequence
  Description of Artificial Sequence: Synthetic oligonucleotide
  Antisense strand to SEQ ID NO: 1323062
auguagaacaugcuucccu

SEQ ID NO: 1323064 - RNA, 19 nt, Artificial Sequence
  Description of Artificial Sequence: Synthetic oligonucleotide
  Sense strand starting at position 3547 of SEQ ID NO: 1242112
cagggugaucuuuaacucu

SEQ ID NO: 1323065 - RNA, 19 nt, Artificial Sequence
  Description of Artificial Sequence: Synthetic oligonucleotide
  Antisense strand to SEQ ID NO: 1323064
agaguuaaagaucacccug

SEQ ID NO: 1323066 - RNA, 19 nt, Artificial Sequence
  Description of Artificial Sequence: Synthetic oligonucleotide
  Sense strand starting at position 3550 of SEQ ID NO: 1242112
ggugaucuuuaacucuuga

SEQ ID NO: 1323067 - RNA, 19 nt, Artificial Sequence
  Description of Artificial Sequence: Synthetic oligonucleotide
  Antisense strand to SEQ ID NO: 1323066
ucaagaguuaaagaucacc

SEQ ID NO: 1323068 - RNA, 19 nt, Artificial Sequence
  Description of Artificial Sequence: Synthetic oligonucleotide
  Sense strand starting at position 3729 of SEQ ID NO: 1242112
aaugcaaggucucugaaga

SEQ ID NO: 1323069 - RNA, 19 nt, Artificial Sequence
  Description of Artificial Sequence: Synthetic oligonucleotide
  Antisense strand to SEQ ID NO: 1323068
ucuucagagaccuugcauu

SEQ ID NO: 1323070 - RNA, 19 nt, Artificial Sequence
  Description of Artificial Sequence: Synthetic oligonucleotide
  Sense strand starting at position 3730 of SEQ ID NO: 1242112
augcaaggucucugaagag

SEQ ID NO: 1323071 - RNA, 19 nt, Artificial Sequence
  Description of Artificial Sequence: Synthetic oligonucleotide
  Antisense strand to SEQ ID NO: 1323070
cucuucagagaccuugcau

SEQ ID NO: 1323072 - RNA, 19 nt, Artificial Sequence
  Description of Artificial Sequence: Synthetic oligonucleotide
  Sense strand starting at position 3734 of SEQ ID NO: 1242112
aaggucucugaagaguagu

SEQ ID NO: 1323073 - RNA, 19 nt, Artificial Sequence
  Description of Artificial Sequence: Synthetic oligonucleotide
  Antisense strand to SEQ ID NO: 1323072
acuacucuucagagaccuu

SEQ ID NO: 1323074 - RNA, 19 nt, Artificial Sequence
  Description of Artificial Sequence: Synthetic oligonucleotide
  Sense strand starting at position 3737 of SEQ ID NO: 1242112
gucucugaagaguaguaga

SEQ ID NO: 1323075 - RNA, 19 nt, Artificial Sequence
  Description of Artificial Sequence: Synthetic oligonucleotide
  Antisense strand to SEQ ID NO: 1323074
ucuacuacucuucagagac

SEQ ID NO: 1323076 - RNA, 19 nt, Artificial Sequence
  Description of Artificial Sequence: Synthetic oligonucleotide
  Sense strand starting at position 3816 of SEQ ID NO: 1242112
aaggaaguuugacuuuauu

SEQ ID NO: 1323077 - RNA, 19 nt, Artificial Sequence
  Description of Artificial Sequence: Synthetic oligonucleotide
  Antisense strand to SEQ ID NO: 1323076
aauaaagucaaacuuccuu

SEQ ID NO: 1323078 - RNA, 19 nt, Artificial Sequence
  Description of Artificial Sequence: Synthetic oligonucleotide
  Sense strand starting at position 3819 of SEQ ID NO: 1242112
gaaguuugacuuuauugca

SEQ ID NO: 1323079 - RNA, 19 nt, Artificial Sequence
  Description of Artificial Sequence: Synthetic oligonucleotide
  Antisense strand to SEQ ID NO: 1323078
ugcaauaaagucaaacuuc

SEQ ID NO: 1323080 - RNA, 19 nt, Artificial Sequence
  Description of Artificial Sequence: Synthetic oligonucleotide
  Sense strand starting at position 3968 of SEQ ID NO: 1242112
aggagacaguguuugugaa

SEQ ID NO: 1323081 - RNA, 19 nt, Artificial Sequence
  Description of Artificial Sequence: Synthetic oligonucleotide
  Antisense strand to SEQ ID NO: 1323080
uucacaaacacugucuccu

SEQ ID NO: 1323082 - RNA, 19 nt, Artificial Sequence
  Description of Artificial Sequence: Synthetic oligonucleotide
  Sense strand starting at position 235 of SEQ ID NO: 1242113
cuaguagacuccuuggugu

SEQ ID NO: 1323083 - RNA, 19 nt, Artificial Sequence
  Description of Artificial Sequence: Synthetic oligonucleotide
  Antisense strand to SEQ ID NO: 1323082
acaccaaggagucuacuag

SEQ ID NO: 1323084 - RNA, 19 nt, Artificial Sequence
  Description of Artificial Sequence: Synthetic oligonucleotide
  Sense strand starting at position 237 of SEQ ID NO: 1242113
aguagacuccuugguguca

SEQ ID NO: 1323085 - RNA, 19 nt, Artificial Sequence
  Description of Artificial Sequence: Synthetic oligonucleotide
  Antisense strand to SEQ ID NO: 1323084
ugacaccaaggagucuacu

SEQ ID NO: 1323086 - RNA, 19 nt, Artificial Sequence
  Description of Artificial Sequence: Synthetic oligonucleotide
  Sense strand starting at position 238 of SEQ ID NO: 1242113
guagacuccuuggugucau

SEQ ID NO: 1323087 - RNA, 19 nt, Artificial Sequence
  Description of Artificial Sequence: Synthetic oligonucleotide
  Antisense strand to SEQ ID NO: 1323086
augacaccaaggagucuac

SEQ ID NO: 1323088 - RNA, 19 nt, Artificial Sequence
  Description of Artificial Sequence: Synthetic oligonucleotide
  Sense strand starting at position 320 of SEQ ID NO: 1242113
ccacccuugccauaaguga

SEQ ID NO: 1323089 - RNA, 19 nt, Artificial Sequence
  Description of Artificial Sequence: Synthetic oligonucleotide
  Antisense strand to SEQ ID NO: 1323088
ucacuuauggcaagggugg

SEQ ID NO: 1323090 - RNA, 19 nt, Artificial Sequence
  Description of Artificial Sequence: Synthetic oligonucleotide
  Sense strand starting at position 341 of SEQ ID NO: 1242113
gccugcugcguaucuagau

SEQ ID NO: 1323091 - RNA, 19 nt, Artificial Sequence
  Description of Artificial Sequence: Synthetic oligonucleotide
  Antisense strand to SEQ ID NO: 1323090
aucuagauacgcagcaggc

SEQ ID NO: 1323092 - RNA, 19 nt, Artificial Sequence
  Description of Artificial Sequence: Synthetic oligonucleotide
  Sense strand starting at position 342 of SEQ ID NO: 1242113
ccugcugcguaucuagauu

SEQ ID NO: 1323093 - RNA, 19 nt, Artificial Sequence
  Description of Artificial Sequence: Synthetic oligonucleotide
  Antisense strand to SEQ ID NO: 1323092
aaucuagauacgcagcagg

SEQ ID NO: 1323094 - RNA, 19 nt, Artificial Sequence
  Description of Artificial Sequence: Synthetic oligonucleotide
  Sense strand starting at position 502 of SEQ ID NO: 1242113
aagcuagaaugcucccgau

SEQ ID NO: 1323095 - RNA, 19 nt, Artificial Sequence
  Description of Artificial Sequence: Synthetic oligonucleotide
  Antisense strand to SEQ ID NO: 1323094
aucgggagcauucuagcuu

SEQ ID NO: 1323096 - RNA, 19 nt, Artificial Sequence
  Description of Artificial Sequence: Synthetic oligonucleotide
  Sense strand starting at position 506 of SEQ ID NO: 1242113
uagaaugcucccgauaaga

SEQ ID NO: 1323097 - RNA, 19 nt, Artificial Sequence
  Description of Artificial Sequence: Synthetic oligonucleotide
  Antisense strand to SEQ ID NO: 1323096
ucuuaucgggagcauucua

SEQ ID NO: 1323098 - RNA, 19 nt, Artificial Sequence
  Description of Artificial Sequence: Synthetic oligonucleotide
  Sense strand starting at position 508 of SEQ ID NO: 1242113
gaaugcucccgauaagaug

SEQ ID NO: 1323099 - RNA, 19 nt, Artificial Sequence
  Description of Artificial Sequence: Synthetic oligonucleotide
  Antisense strand to SEQ ID NO: 1323098
caucuuaucgggagcauuc

SEQ ID NO: 1323100 - RNA, 19 nt, Artificial Sequence
  Description of Artificial Sequence: Synthetic oligonucleotide
  Sense strand starting at position 514 of SEQ ID NO: 1242113
ucccgauaagauggaaauc

SEQ ID NO: 1323101 - RNA, 19 nt, Artificial Sequence
  Description of Artificial Sequence: Synthetic oligonucleotide
  Antisense strand to SEQ ID NO: 1323100
gauuuccaucuuaucggga

SEQ ID NO: 1323102 - RNA, 19 nt, Artificial Sequence
  Description of Artificial Sequence: Synthetic oligonucleotide
  Sense strand starting at position 758 of SEQ ID NO: 1242113
gcgauuccuucagugagga

SEQ ID NO: 1323103 - RNA, 19 nt, Artificial Sequence
  Description of Artificial Sequence: Synthetic oligonucleotide
  Antisense strand to SEQ ID NO: 1323102
uccucacugaaggaaucgc

SEQ ID NO: 1323104 - RNA, 19 nt, Artificial Sequence
  Description of Artificial Sequence: Synthetic oligonucleotide
  Sense strand starting at position 759 of SEQ ID NO: 1242113
cgauuccuucagugaggac

SEQ ID NO: 1323105 - RNA, 19 nt, Artificial Sequence
  Description of Artificial Sequence: Synthetic oligonucleotide
  Antisense strand to SEQ ID NO: 1323104
guccucacugaaggaaucg

SEQ ID NO: 1323106 - RNA, 19 nt, Artificial Sequence
  Description of Artificial Sequence: Synthetic oligonucleotide
  Sense strand starting at position 1292 of SEQ ID NO: 1242113
ggcacaaaguaggaguaua

SEQ ID NO: 1323107 - RNA, 19 nt, Artificial Sequence
  Description of Artificial Sequence: Synthetic oligonucleotide
  Antisense strand to SEQ ID NO: 1323106
uauacuccuacuuugugcc

SEQ ID NO: 1323108 - RNA, 19 nt, Artificial Sequence
  Description of Artificial Sequence: Synthetic oligonucleotide
  Sense strand starting at position 1426 of SEQ ID NO: 1242113
ucugguaugcauugccaca

SEQ ID NO: 1323109 - RNA, 19 nt, Artificial Sequence
  Description of Artificial Sequence: Synthetic oligonucleotide
  Antisense strand to SEQ ID NO: 1323108
uguggcaaugcauaccaga

SEQ ID NO: 1323110 - RNA, 19 nt, Artificial Sequence
  Description of Artificial Sequence: Synthetic oligonucleotide
  Sense strand starting at position 1450 of SEQ ID NO: 1242113
gccagugaguucuuaccag

SEQ ID NO: 1323111 - RNA, 19 nt, Artificial Sequence
  Description of Artificial Sequence: Synthetic oligonucleotide
  Antisense strand to SEQ ID NO: 1323110
cugguaagaacucacuggc

SEQ ID NO: 1323112 - RNA, 19 nt, Artificial Sequence
  Description of Artificial Sequence: Synthetic oligonucleotide
  Sense strand starting at position 1526 of SEQ ID NO: 1242113
ugaagaagcuuacaaccua

SEQ ID NO: 1323113 - RNA, 19 nt, Artificial Sequence
  Description of Artificial Sequence: Synthetic oligonucleotide
  Antisense strand to SEQ ID NO: 1323112
uagguuguaagcuucuuca

SEQ ID NO: 1323114 - RNA, 19 nt, Artificial Sequence
  Description of Artificial Sequence: Synthetic oligonucleotide
  Sense strand starting at position 1541 of SEQ ID NO: 1242113
ccuacaguguacuaauauu

SEQ ID NO: 1323115 - RNA, 19 nt, Artificial Sequence
  Description of Artificial Sequence: Synthetic oligonucleotide
  Antisense strand to SEQ ID NO: 1323114
aauauuaguacacuguagg

SEQ ID NO: 1323116 - RNA, 19 nt, Artificial Sequence
  Description of Artificial Sequence: Synthetic oligonucleotide
  Sense strand starting at position 1559 of SEQ ID NO: 1242113
uugcaaucugcugguauuu

SEQ ID NO: 1323117 - RNA, 19 nt, Artificial Sequence
  Description of Artificial Sequence: Synthetic oligonucleotide
  Antisense strand to SEQ ID NO: 1323116
aaauaccagcagauugcaa

SEQ ID NO: 1323118 - RNA, 19 nt, Artificial Sequence
  Description of Artificial Sequence: Synthetic oligonucleotide
  Sense strand starting at position 1626 of SEQ ID NO: 1242113
ggcuuccaguaaucugaga

SEQ ID NO: 1323119 - RNA, 19 nt, Artificial Sequence
  Description of Artificial Sequence: Synthetic oligonucleotide
  Antisense strand to SEQ ID NO: 1323118
ucucagauuacuggaagcc

SEQ ID NO: 1323120 - RNA, 19 nt, Artificial Sequence
  Description of Artificial Sequence: Synthetic oligonucleotide
  Sense strand starting at position 1631 of SEQ ID NO: 1242113
ccaguaaucugagagcagu

SEQ ID NO: 1323121 - RNA, 19 nt, Artificial Sequence
  Description of Artificial Sequence: Synthetic oligonucleotide
  Antisense strand to SEQ ID NO: 1323120
acugcucucagauuacugg

SEQ ID NO: 1323122 - RNA, 19 nt, Artificial Sequence
  Description of Artificial Sequence: Synthetic oligonucleotide
  Sense strand starting at position 1808 of SEQ ID NO: 1242113
ccuuaucugacguggcaga

SEQ ID NO: 1323123 - RNA, 19 nt, Artificial Sequence
  Description of Artificial Sequence: Synthetic oligonucleotide
  Antisense strand to SEQ ID NO: 1323122
ucugccacgucagauaagg

SEQ ID NO: 1323124 - RNA, 19 nt, Artificial Sequence
  Description of Artificial Sequence: Synthetic oligonucleotide
  Sense strand starting at position 1809 of SEQ ID NO: 1242113
cuuaucugacguggcagaa

SEQ ID NO: 1323125 - RNA, 19 nt, Artificial Sequence
  Description of Artificial Sequence: Synthetic oligonucleotide
  Antisense strand to SEQ ID NO: 1323124
uucugccacgucagauaag

SEQ ID NO: 1323126 - RNA, 19 nt, Artificial Sequence
  Description of Artificial Sequence: Synthetic oligonucleotide
  Sense strand starting at position 1813 of SEQ ID NO: 1242113
ucugacguggcagaaagau

SEQ ID NO: 1323127 - RNA, 19 nt, Artificial Sequence
  Description of Artificial Sequence: Synthetic oligonucleotide
  Antisense strand to SEQ ID NO: 1323126
aucuuucugccacgucaga

SEQ ID NO: 1323128 - RNA, 19 nt, Artificial Sequence
  Description of Artificial Sequence: Synthetic oligonucleotide
  Sense strand starting at position 1822 of SEQ ID NO: 1242113
gcagaaagaucugcacacu

SEQ ID NO: 1323129 - RNA, 19 nt, Artificial Sequence
  Description of Artificial Sequence: Synthetic oligonucleotide
  Antisense strand to SEQ ID NO: 1323128
agugugcagaucuuucugc

SEQ ID NO: 1323130 - RNA, 19 nt, Artificial Sequence
  Description of Artificial Sequence: Synthetic oligonucleotide
  Sense strand starting at position 1865 of SEQ ID NO: 1242113
cuggguuaggagugaagga

SEQ ID NO: 1323131 - RNA, 19 nt, Artificial Sequence
  Description of Artificial Sequence: Synthetic oligonucleotide
  Antisense strand to SEQ ID NO: 1323130
uccuucacuccuaacccag

SEQ ID NO: 1323132 - RNA, 19 nt, Artificial Sequence
  Description of Artificial Sequence: Synthetic oligonucleotide
  Sense strand starting at position 1893 of SEQ ID NO: 1242113
aaguaauucugccacugag

SEQ ID NO: 1323133 - RNA, 19 nt, Artificial Sequence
  Description of Artificial Sequence: Synthetic oligonucleotide
  Antisense strand to SEQ ID NO: 1323132
cucaguggcagaauuacuu

SEQ ID NO: 1323134 - RNA, 19 nt, Artificial Sequence
  Description of Artificial Sequence: Synthetic oligonucleotide
  Sense strand starting at position 2272 of SEQ ID NO: 1242113
gcgcuuuguguuccuguuu

SEQ ID NO: 1323135 - RNA, 19 nt, Artificial Sequence
  Description of Artificial Sequence: Synthetic oligonucleotide
  Antisense strand to SEQ ID NO: 1323134
aaacaggaacacaaagcgc

SEQ ID NO: 1323136 - RNA, 19 nt, Artificial Sequence
  Description of Artificial Sequence: Synthetic oligonucleotide
  Sense strand starting at position 2368 of SEQ ID NO: 1242113
guggcuaacuuccaccaua

SEQ ID NO: 1323137 - RNA, 19 nt, Artificial Sequence
  Description of Artificial Sequence: Synthetic oligonucleotide
  Antisense strand to SEQ ID NO: 1323136
uaugguggaaguuagccac

SEQ ID NO: 1323138 - RNA, 19 nt, Artificial Sequence
  Description of Artificial Sequence: Synthetic oligonucleotide
  Sense strand starting at position 2398 of SEQ ID NO: 1242113
gguggugugcuauauggga

SEQ ID NO: 1323139 - RNA, 19 nt, Artificial Sequence
  Description of Artificial Sequence: Synthetic oligonucleotide
  Antisense strand to SEQ ID NO: 1323138
ucccauauagcacaccacc

SEQ ID NO: 1323140 - RNA, 19 nt, Artificial Sequence
  Description of Artificial Sequence: Synthetic oligonucleotide
  Sense strand starting at position 2400 of SEQ ID NO: 1242113
uggugugcuauaugggaau

SEQ ID NO: 1323141 - RNA, 19 nt, Artificial Sequence
  Description of Artificial Sequence: Synthetic oligonucleotide
  Antisense strand to SEQ ID NO: 1323140
auucccauauagcacacca

SEQ ID NO: 1323142 - RNA, 19 nt, Artificial Sequence
  Description of Artificial Sequence: Synthetic oligonucleotide
  Sense strand starting at position 2402 of SEQ ID NO: 1242113
gugugcuauaugggaaucu

SEQ ID NO: 1323143 - RNA, 19 nt, Artificial Sequence
  Description of Artificial Sequence: Synthetic oligonucleotide
  Antisense strand to SEQ ID NO: 1323142
agauucccauauagcacac

SEQ ID NO: 1323144 - RNA, 19 nt, Artificial Sequence
  Description of Artificial Sequence: Synthetic oligonucleotide
  Sense strand starting at position 2444 of SEQ ID NO: 1242113
cugggaguuguugggcaga

SEQ ID NO: 1323145 - RNA, 19 nt, Artificial Sequence
  Description of Artificial Sequence: Synthetic oligonucleotide
  Antisense strand to SEQ ID NO: 1323144
ucugcccaacaacucccag

SEQ ID NO: 1323146 - RNA, 19 nt, Artificial Sequence
  Description of Artificial Sequence: Synthetic oligonucleotide
  Sense strand starting at position 2446 of SEQ ID NO: 1242113
gggaguuguugggcagauc

SEQ ID NO: 1323147 - RNA, 19 nt, Artificial Sequence
  Description of Artificial Sequence: Synthetic oligonucleotide
  Antisense strand to SEQ ID NO: 1323146
gaucugcccaacaacuccc

SEQ ID NO: 1323148 - RNA, 19 nt, Artificial Sequence
  Description of Artificial Sequence: Synthetic oligonucleotide
  Sense strand starting at position 2455 of SEQ ID NO: 1242113
ugggcagaucccugaggua

SEQ ID NO: 1323149 - RNA, 19 nt, Artificial Sequence
  Description of Artificial Sequence: Synthetic oligonucleotide
  Antisense strand to SEQ ID NO: 1323148
uaccucagggaucugccca

SEQ ID NO: 1323150 - RNA, 19 nt, Artificial Sequence
  Description of Artificial Sequence: Synthetic oligonucleotide
  Sense strand starting at position 2468 of SEQ ID NO: 1242113
gagguagauucccagaggu

SEQ ID NO: 1323151 - RNA, 19 nt, Artificial Sequence
  Description of Artificial Sequence: Synthetic oligonucleotide
  Antisense strand to SEQ ID NO: 1323150
accucugggaaucuaccuc

SEQ ID NO: 1323152 - RNA, 19 nt, Artificial Sequence
  Description of Artificial Sequence: Synthetic oligonucleotide
  Sense strand starting at position 2470 of SEQ ID NO: 1242113
gguagauucccagagguac

SEQ ID NO: 1323153 - RNA, 19 nt, Artificial Sequence
  Description of Artificial Sequence: Synthetic oligonucleotide
  Antisense strand to SEQ ID NO: 1323152
guaccucugggaaucuacc

SEQ ID NO: 1323154 - RNA, 19 nt, Artificial Sequence
  Description of Artificial Sequence: Synthetic oligonucleotide
  Sense strand starting at position 2576 of SEQ ID NO: 1242113
ccacaauccgguuaaccau

SEQ ID NO: 1323155 - RNA, 19 nt, Artificial Sequence
  Description of Artificial Sequence: Synthetic oligonucleotide
  Antisense strand to SEQ ID NO: 1323154
augguuaaccggauugugg

SEQ ID NO: 1323156 - RNA, 19 nt, Artificial Sequence
  Description of Artificial Sequence: Synthetic oligonucleotide
  Sense strand starting at position 2835 of SEQ ID NO: 1242113
ggcuaagucuugcuuauua

SEQ ID NO: 1323157 - RNA, 19 nt, Artificial Sequence
  Description of Artificial Sequence: Synthetic oligonucleotide
  Antisense strand to SEQ ID NO: 1323156
uaauaagcaagacuuagcc

SEQ ID NO: 1323158 - RNA, 19 nt, Artificial Sequence
  Description of Artificial Sequence: Synthetic oligonucleotide
  Sense strand starting at position 2910 of SEQ ID NO: 1242113
gggaacgauuccgcaaagu

SEQ ID NO: 1323159 - RNA, 19 nt, Artificial Sequence
  Description of Artificial Sequence: Synthetic oligonucleotide
  Antisense strand to SEQ ID NO: 1323158
acuuugcggaaucguuccc

SEQ ID NO: 1323160 - RNA, 19 nt, Artificial Sequence
  Description of Artificial Sequence: Synthetic oligonucleotide
  Sense strand starting at position 3108 of SEQ ID NO: 1242113
ccuccagcugucguguaaa

SEQ ID NO: 1323161 - RNA, 19 nt, Artificial Sequence
  Description of Artificial Sequence: Synthetic oligonucleotide
  Antisense strand to SEQ ID NO: 1323160
uuuacacgacagcuggagg

SEQ ID NO: 1323162 - RNA, 19 nt, Artificial Sequence
  Description of Artificial Sequence: Synthetic oligonucleotide
  Sense strand starting at position 213 of SEQ ID NO: 1242114
uguagagucugauguccaa

SEQ ID NO: 1323163 - RNA, 19 nt, Artificial Sequence
  Description of Artificial Sequence: Synthetic oligonucleotide
  Antisense strand to SEQ ID NO: 1323162
uuggacaucagacucuaca

SEQ ID NO: 1323164 - RNA, 19 nt, Artificial Sequence
  Description of Artificial Sequence: Synthetic oligonucleotide
  Sense strand starting at position 339 of SEQ ID NO: 1242114
gcgcuuuguguuccuguuu

SEQ ID NO: 1323165 - RNA, 19 nt, Artificial Sequence
  Description of Artificial Sequence: Synthetic oligonucleotide
  Antisense strand to SEQ ID NO: 1323164
aaacaggaacacaaagcgc

SEQ ID NO: 1323166 - RNA, 19 nt, Artificial Sequence
  Description of Artificial Sequence: Synthetic oligonucleotide
  Sense strand starting at position 435 of SEQ ID NO: 1242114
guggcuaacuuccaccaua

SEQ ID NO: 1323167 - RNA, 19 nt, Artificial Sequence
  Description of Artificial Sequence: Synthetic oligonucleotide
  Antisense strand to SEQ ID NO: 1323166
uaugguggaaguuagccac

SEQ ID NO: 1323168 - RNA, 19 nt, Artificial Sequence
  Description of Artificial Sequence: Synthetic oligonucleotide
  Sense strand starting at position 465 of SEQ ID NO: 1242114
gguggugugcuauauggga

SEQ ID NO: 1323169 - RNA, 19 nt, Artificial Sequence
  Description of Artificial Sequence: Synthetic oligonucleotide
  Antisense strand to SEQ ID NO: 1323168
ucccauauagcacaccacc

SEQ ID NO: 1323170 - RNA, 19 nt, Artificial Sequence
  Description of Artificial Sequence: Synthetic oligonucleotide
  Sense strand starting at position 467 of SEQ ID NO: 1242114
uggugugcuauaugggaau

SEQ ID NO: 1323171 - RNA, 19 nt, Artificial Sequence
  Description of Artificial Sequence: Synthetic oligonucleotide
  Antisense strand to SEQ ID NO: 1323170
auucccauauagcacacca

SEQ ID NO: 1323172 - RNA, 19 nt, Artificial Sequence
  Description of Artificial Sequence: Synthetic oligonucleotide
  Sense strand starting at position 469 of SEQ ID NO: 1242114
gugugcuauaugggaaucu

SEQ ID NO: 1323173 - RNA, 19 nt, Artificial Sequence
  Description of Artificial Sequence: Synthetic oligonucleotide
  Antisense strand to SEQ ID NO: 1323172
agauucccauauagcacac

SEQ ID NO: 1323174 - RNA, 19 nt, Artificial Sequence
  Description of Artificial Sequence: Synthetic oligonucleotide
  Sense strand starting at position 511 of SEQ ID NO: 1242114
cugggaguuguugggcaga

SEQ ID NO: 1323175 - RNA, 19 nt, Artificial Sequence
  Description of Artificial Sequence: Synthetic oligonucleotide
  Antisense strand to SEQ ID NO: 1323174
ucugcccaacaacucccag

SEQ ID NO: 1323176 - RNA, 19 nt, Artificial Sequence
  Description of Artificial Sequence: Synthetic oligonucleotide
  Sense strand starting at position 512 of SEQ ID NO: 1242114
ugggaguuguugggcagau

SEQ ID NO: 1323177 - RNA, 19 nt, Artificial Sequence
  Description of Artificial Sequence: Synthetic oligonucleotide
  Antisense strand to SEQ ID NO: 1323176
aucugcccaacaacuccca

SEQ ID NO: 1323178 - RNA, 19 nt, Artificial Sequence
  Description of Artificial Sequence: Synthetic oligonucleotide
  Sense strand starting at position 513 of SEQ ID NO: 1242114
gggaguuguugggcagauc

SEQ ID NO: 1323179 - RNA, 19 nt, Artificial Sequence
  Description of Artificial Sequence: Synthetic oligonucleotide
  Antisense strand to SEQ ID NO: 1323178
gaucugcccaacaacuccc

SEQ ID NO: 1323180 - RNA, 19 nt, Artificial Sequence
  Description of Artificial Sequence: Synthetic oligonucleotide
  Sense strand starting at position 522 of SEQ ID NO: 1242114
ugggcagaucccugaggua

SEQ ID NO: 1323181 - RNA, 19 nt, Artificial Sequence
  Description of Artificial Sequence: Synthetic oligonucleotide
  Antisense strand to SEQ ID NO: 1323180
uaccucagggaucugccca

SEQ ID NO: 1323182 - RNA, 19 nt, Artificial Sequence
  Description of Artificial Sequence: Synthetic oligonucleotide
  Sense strand starting at position 525 of SEQ ID NO: 1242114
gcagaucccugagguagau

SEQ ID NO: 1323183 - RNA, 19 nt, Artificial Sequence
  Description of Artificial Sequence: Synthetic oligonucleotide
  Antisense strand to SEQ ID NO: 1323182
aucuaccucagggaucugc

SEQ ID NO: 1323184 - RNA, 19 nt, Artificial Sequence
  Description of Artificial Sequence: Synthetic oligonucleotide
  Sense strand starting at position 535 of SEQ ID NO: 1242114
gagguagauucccagaggu

SEQ ID NO: 1323185 - RNA, 19 nt, Artificial Sequence
  Description of Artificial Sequence: Synthetic oligonucleotide
  Antisense strand to SEQ ID NO: 1323184
accucugggaaucuaccuc

SEQ ID NO: 1323186 - RNA, 19 nt, Artificial Sequence
  Description of Artificial Sequence: Synthetic oligonucleotide
  Sense strand starting at position 537 of SEQ ID NO: 1242114
gguagauucccagagguac

SEQ ID NO: 1323187 - RNA, 19 nt, Artificial Sequence
  Description of Artificial Sequence: Synthetic oligonucleotide
  Antisense strand to SEQ ID NO: 1323186
guaccucugggaaucuacc

SEQ ID NO: 1323188 - RNA, 19 nt, Artificial Sequence
  Description of Artificial Sequence: Synthetic oligonucleotide
  Sense strand starting at position 643 of SEQ ID NO: 1242114
ccacaauccgguuaaccau

SEQ ID NO: 1323189 - RNA, 19 nt, Artificial Sequence
  Description of Artificial Sequence: Synthetic oligonucleotide
  Antisense strand to SEQ ID NO: 1323188
augguuaaccggauugugg

SEQ ID NO: 1323190 - RNA, 19 nt, Artificial Sequence
  Description of Artificial Sequence: Synthetic oligonucleotide
  Sense strand starting at position 902 of SEQ ID NO: 1242114
ggcuaagucuugcuuauua

SEQ ID NO: 1323191 - RNA, 19 nt, Artificial Sequence
  Description of Artificial Sequence: Synthetic oligonucleotide
  Antisense strand to SEQ ID NO: 1323190
uaauaagcaagacuuagcc

SEQ ID NO: 1323192 - RNA, 19 nt, Artificial Sequence
  Description of Artificial Sequence: Synthetic oligonucleotide
  Sense strand starting at position 977 of SEQ ID NO: 1242114
gggaacgauuccgcaaagu

SEQ ID NO: 1323193 - RNA, 19 nt, Artificial Sequence
  Description of Artificial Sequence: Synthetic oligonucleotide
  Antisense strand to SEQ ID NO: 1323192
acuuugcggaaucguuccc

SEQ ID NO: 1323194 - RNA, 19 nt, Artificial Sequence
  Description of Artificial Sequence: Synthetic oligonucleotide
  Sense strand starting at position 1175 of SEQ ID NO: 1242114
ccuccagcugucguguaaa

SEQ ID NO: 1323195 - RNA, 19 nt, Artificial Sequence
  Description of Artificial Sequence: Synthetic oligonucleotide
  Antisense strand to SEQ ID NO: 1323194
uuuacacgacagcuggagg

SEQ ID NO: 1323196 - RNA, 19 nt, Artificial Sequence
  Description of Artificial Sequence: Synthetic oligonucleotide
  Sense strand starting at position 2207 of SEQ ID NO: 1242114
cauguaaaccuggauguca

SEQ ID NO: 1323197 - RNA, 19 nt, Artificial Sequence
  Description of Artificial Sequence: Synthetic oligonucleotide
  Antisense strand to SEQ ID NO: 1323196
ugacauccagguuuacaug

SEQ ID NO: 1323198 - RNA, 19 nt, Artificial Sequence
  Description of Artificial Sequence: Synthetic oligonucleotide
  Sense strand starting at position 2209 of SEQ ID NO: 1242114
uguaaaccuggaugucagu

SEQ ID NO: 1323199 - RNA, 19 nt, Artificial Sequence
  Description of Artificial Sequence: Synthetic oligonucleotide
  Antisense strand to SEQ ID NO: 1323198
acugacauccagguuuaca

SEQ ID NO: 1323200 - RNA, 19 nt, Artificial Sequence
  Description of Artificial Sequence: Synthetic oligonucleotide
  Sense strand starting at position 2736 of SEQ ID NO: 1242114
gaaauaugauuggaccaga

SEQ ID NO: 1323201 - RNA, 19 nt, Artificial Sequence
  Description of Artificial Sequence: Synthetic oligonucleotide
  Antisense strand to SEQ ID NO: 1323200
ucugguccaaucauauuuc

SEQ ID NO: 1323202 - RNA, 19 nt, Artificial Sequence
  Description of Artificial Sequence: Synthetic oligonucleotide
  Sense strand starting at position 2785 of SEQ ID NO: 1242114
aaguccuguccguguagau

SEQ ID NO: 1323203 - RNA, 19 nt, Artificial Sequence
  Description of Artificial Sequence: Synthetic oligonucleotide
  Antisense strand to SEQ ID NO: 1323202
aucuacacggacaggacuu

SEQ ID NO: 1323204 - RNA, 19 nt, Artificial Sequence
  Description of Artificial Sequence: Synthetic oligonucleotide
  Sense strand starting at position 2794 of SEQ ID NO: 1242114
ccguguagauucuucuuga

SEQ ID NO: 1323205 - RNA, 19 nt, Artificial Sequence
  Description of Artificial Sequence: Synthetic oligonucleotide
  Antisense strand to SEQ ID NO: 1323204
ucaagaagaaucuacacgg

SEQ ID NO: 1323206 - RNA, 19 nt, Artificial Sequence
  Description of Artificial Sequence: Synthetic oligonucleotide
  Sense strand starting at position 2795 of SEQ ID NO: 1242114
cguguagauucuucuugac

SEQ ID NO: 1323207 - RNA, 19 nt, Artificial Sequence
  Description of Artificial Sequence: Synthetic oligonucleotide
  Antisense strand to SEQ ID NO: 1323206
gucaagaagaaucuacacg

SEQ ID NO: 1323208 - RNA, 19 nt, Artificial Sequence
  Description of Artificial Sequence: Synthetic oligonucleotide
  Sense strand starting at position 2797 of SEQ ID NO: 1242114
uguagauucuucuugaccu

SEQ ID NO: 1323209 - RNA, 19 nt, Artificial Sequence
  Description of Artificial Sequence: Synthetic oligonucleotide
  Antisense strand to SEQ ID NO: 1323208
aggucaagaagaaucuaca

SEQ ID NO: 1323210 - RNA, 19 nt, Artificial Sequence
  Description of Artificial Sequence: Synthetic oligonucleotide
  Sense strand starting at position 2798 of SEQ ID NO: 1242114
guagauucuucuugaccuu

SEQ ID NO: 1323211 - RNA, 19 nt, Artificial Sequence
  Description of Artificial Sequence: Synthetic oligonucleotide
  Antisense strand to SEQ ID NO: 1323210
aaggucaagaagaaucuac

SEQ ID NO: 1323212 - RNA, 19 nt, Artificial Sequence
  Description of Artificial Sequence: Synthetic oligonucleotide
  Sense strand starting at position 2810 of SEQ ID NO: 1242114
ugaccuuucucugcagcau

SEQ ID NO: 1323213 - RNA, 19 nt, Artificial Sequence
  Description of Artificial Sequence: Synthetic oligonucleotide
  Antisense strand to SEQ ID NO: 1323212
augcugcagagaaagguca

SEQ ID NO: 1323214 - RNA, 19 nt, Artificial Sequence
  Description of Artificial Sequence: Synthetic oligonucleotide
  Sense strand starting at position 2905 of SEQ ID NO: 1242114
cagauaauuuauggccagu

SEQ ID NO: 1323215 - RNA, 19 nt, Artificial Sequence
  Description of Artificial Sequence: Synthetic oligonucleotide
  Antisense strand to SEQ ID NO: 1323214
acuggccauaaauuaucug

SEQ ID NO: 1323216 - RNA, 19 nt, Artificial Sequence
  Description of Artificial Sequence: Synthetic oligonucleotide
  Sense strand starting at position 2929 of SEQ ID NO: 1242114
cccagaaaugugugggaga

SEQ ID NO: 1323217 - RNA, 19 nt, Artificial Sequence
  Description of Artificial Sequence: Synthetic oligonucleotide
  Antisense strand to SEQ ID NO: 1323216
ucucccacacauuucuggg

SEQ ID NO: 1323218 - RNA, 19 nt, Artificial Sequence
  Description of Artificial Sequence: Synthetic oligonucleotide
  Sense strand starting at position 2930 of SEQ ID NO: 1242114
ccagaaaugugugggagaa

SEQ ID NO: 1323219 - RNA, 19 nt, Artificial Sequence
  Description of Artificial Sequence: Synthetic oligonucleotide
  Antisense strand to SEQ ID NO: 1323218
uucucccacacauuucugg

SEQ ID NO: 1323220 - RNA, 19 nt, Artificial Sequence
  Description of Artificial Sequence: Synthetic oligonucleotide
  Sense strand starting at position 2932 of SEQ ID NO: 1242114
agaaaugugugggagaaag

SEQ ID NO: 1323221 - RNA, 19 nt, Artificial Sequence
  Description of Artificial Sequence: Synthetic oligonucleotide
  Antisense strand to SEQ ID NO: 1323220
cuuucucccacacauuucu

SEQ ID NO: 1323222 - RNA, 19 nt, Artificial Sequence
  Description of Artificial Sequence: Synthetic oligonucleotide
  Sense strand starting at position 3143 of SEQ ID NO: 1242114
acccuagaguagucaaaca

SEQ ID NO: 1323223 - RNA, 19 nt, Artificial Sequence
  Description of Artificial Sequence: Synthetic oligonucleotide
  Antisense strand to SEQ ID NO: 1323222
uguuugacuacucuagggu

SEQ ID NO: 1323224 - RNA, 19 nt, Artificial Sequence
  Description of Artificial Sequence: Synthetic oligonucleotide
  Sense strand starting at position 3279 of SEQ ID NO: 1242114
agcuccuaagcuuaaauga

SEQ ID NO: 1323225 - RNA, 19 nt, Artificial Sequence
  Description of Artificial Sequence: Synthetic oligonucleotide
  Antisense strand to SEQ ID NO: 1323224
ucauuuaagcuuaggagcu

SEQ ID NO: 1323226 - RNA, 19 nt, Artificial Sequence
  Description of Artificial Sequence: Synthetic oligonucleotide
  Sense strand starting at position 3371 of SEQ ID NO: 1242114
guaauugauucugccacaa

SEQ ID NO: 1323227 - RNA, 19 nt, Artificial Sequence
  Description of Artificial Sequence: Synthetic oligonucleotide
  Antisense strand to SEQ ID NO: 1323226
uuguggcagaaucaauuac

SEQ ID NO: 1323228 - RNA, 19 nt, Artificial Sequence
  Description of Artificial Sequence: Synthetic oligonucleotide
  Sense strand starting at position 3719 of SEQ ID NO: 1242114
gucugaggccucugucaaa

SEQ ID NO: 1323229 - RNA, 19 nt, Artificial Sequence
  Description of Artificial Sequence: Synthetic oligonucleotide
  Antisense strand to SEQ ID NO: 1323228
uuugacagaggccucagac

SEQ ID NO: 1323230 - RNA, 19 nt, Artificial Sequence
  Description of Artificial Sequence: Synthetic oligonucleotide
  Sense strand starting at position 3753 of SEQ ID NO: 1242114
cagcuugugccagaaagac

SEQ ID NO: 1323231 - RNA, 19 nt, Artificial Sequence
  Description of Artificial Sequence: Synthetic oligonucleotide
  Antisense strand to SEQ ID NO: 1323230
gucuuucuggcacaagcug

SEQ ID NO: 1323232 - RNA, 19 nt, Artificial Sequence
  Description of Artificial Sequence: Synthetic oligonucleotide
  Sense strand starting at position 3795 of SEQ ID NO: 1242114
agaauucuguugcuccaaa

SEQ ID NO: 1323233 - RNA, 19 nt, Artificial Sequence
  Description of Artificial Sequence: Synthetic oligonucleotide
  Antisense strand to SEQ ID NO: 1323232
uuuggagcaacagaauucu

SEQ ID NO: 1323234 - RNA, 19 nt, Artificial Sequence
  Description of Artificial Sequence: Synthetic oligonucleotide
  Sense strand starting at position 3827 of SEQ ID NO: 1242114
cauggaagccucuggcauu

SEQ ID NO: 1323235 - RNA, 19 nt, Artificial Sequence
  Description of Artificial Sequence: Synthetic oligonucleotide
  Antisense strand to SEQ ID NO: 1323234
aaugccagaggcuuccaug

SEQ ID NO: 1323236 - RNA, 19 nt, Artificial Sequence
  Description of Artificial Sequence: Synthetic oligonucleotide
  Sense strand starting at position 3923 of SEQ ID NO: 1242114
ugaagauccuucuggucca

SEQ ID NO: 1323237 - RNA, 19 nt, Artificial Sequence
  Description of Artificial Sequence: Synthetic oligonucleotide
  Antisense strand to SEQ ID NO: 1323236
uggaccagaaggaucuuca

SEQ ID NO: 1323238 - RNA, 19 nt, Artificial Sequence
  Description of Artificial Sequence: Synthetic oligonucleotide
  Sense strand starting at position 3924 of SEQ ID NO: 1242114
gaagauccuucugguccaa

SEQ ID NO: 1323239 - RNA, 19 nt, Artificial Sequence
  Description of Artificial Sequence: Synthetic oligonucleotide
  Antisense strand to SEQ ID NO: 1323238
uuggaccagaaggaucuuc

SEQ ID NO: 1323240 - RNA, 19 nt, Artificial Sequence
  Description of Artificial Sequence: Synthetic oligonucleotide
  Sense strand starting at position 3982 of SEQ ID NO: 1242114
cucugaaauggcgguaaug

SEQ ID NO: 1323241 - RNA, 19 nt, Artificial Sequence
  Description of Artificial Sequence: Synthetic oligonucleotide
  Antisense strand to SEQ ID NO: 1323240
cauuaccgccauuucagag

SEQ ID NO: 1323242 - RNA, 19 nt, Artificial Sequence
  Description of Artificial Sequence: Synthetic oligonucleotide
  Sense strand starting at position 220 of SEQ ID NO: 1242115
gucaaaugacucugccaaa

SEQ ID NO: 1323243 - RNA, 19 nt, Artificial Sequence
  Description of Artificial Sequence: Synthetic oligonucleotide
  Antisense strand to SEQ ID NO: 1323242
uuuggcagagucauuugac

SEQ ID NO: 1323244 - RNA, 19 nt, Artificial Sequence
  Description of Artificial Sequence: Synthetic oligonucleotide
  Sense strand starting at position 221 of SEQ ID NO: 1242115
ucaaaugacucugccaaag

SEQ ID NO: 1323245 - RNA, 19 nt, Artificial Sequence
  Description of Artificial Sequence: Synthetic oligonucleotide
  Antisense strand to SEQ ID NO: 1323244
cuuuggcagagucauuuga

SEQ ID NO: 1323246 - RNA, 19 nt, Artificial Sequence
  Description of Artificial Sequence: Synthetic oligonucleotide
  Sense strand starting at position 361 of SEQ ID NO: 1242115
gcacaaucauuaucaagug

SEQ ID NO: 1323247 - RNA, 19 nt, Artificial Sequence
  Description of Artificial Sequence: Synthetic oligonucleotide
  Antisense strand to SEQ ID NO: 1323246
cacuugauaaugauugugc

SEQ ID NO: 1323248 - RNA, 19 nt, Artificial Sequence
  Description of Artificial Sequence: Synthetic oligonucleotide
  Sense strand starting at position 430 of SEQ ID NO: 1242115
ggguguuaaauguaaguuc

SEQ ID NO: 1323249 - RNA, 19 nt, Artificial Sequence
  Description of Artificial Sequence: Synthetic oligonucleotide
  Antisense strand to SEQ ID NO: 1323248
gaacuuacauuuaacaccc

SEQ ID NO: 1323250 - RNA, 19 nt, Artificial Sequence
  Description of Artificial Sequence: Synthetic oligonucleotide
  Sense strand starting at position 509 of SEQ ID NO: 1242115
gcaaaugugacauaagagu

SEQ ID NO: 1323251 - RNA, 19 nt, Artificial Sequence
  Description of Artificial Sequence: Synthetic oligonucleotide
  Antisense strand to SEQ ID NO: 1323250
acucuuaugucacauuugc

SEQ ID NO: 1323252 - RNA, 19 nt, Artificial Sequence
  Description of Artificial Sequence: Synthetic oligonucleotide
  Sense strand starting at position 536 of SEQ ID NO: 1242115
caagcaaaucugggucuga

SEQ ID NO: 1323253 - RNA, 19 nt, Artificial Sequence
  Description of Artificial Sequence: Synthetic oligonucleotide
  Antisense strand to SEQ ID NO: 1323252
ucagacccagauuugcuug

SEQ ID NO: 1323254 - RNA, 19 nt, Artificial Sequence
  Description of Artificial Sequence: Synthetic oligonucleotide
  Sense strand starting at position 537 of SEQ ID NO: 1242115
aagcaaaucugggucugaa

SEQ ID NO: 1323255 - RNA, 19 nt, Artificial Sequence
  Description of Artificial Sequence: Synthetic oligonucleotide
  Antisense strand to SEQ ID NO: 1323254
uucagacccagauuugcuu

SEQ ID NO: 1323256 - RNA, 19 nt, Artificial Sequence
  Description of Artificial Sequence: Synthetic oligonucleotide
  Sense strand starting at position 567 of SEQ ID NO: 1242115
aguagaaucuaguuauuga

SEQ ID NO: 1323257 - RNA, 19 nt, Artificial Sequence
  Description of Artificial Sequence: Synthetic oligonucleotide
  Antisense strand to SEQ ID NO: 1323256
ucaauaacuagauucuacu

SEQ ID NO: 1323258 - RNA, 19 nt, Artificial Sequence
  Description of Artificial Sequence: Synthetic oligonucleotide
  Sense strand starting at position 597 of SEQ ID NO: 1242115
aguuaaugaugcccaugaa

SEQ ID NO: 1323259 - RNA, 19 nt, Artificial Sequence
  Description of Artificial Sequence: Synthetic oligonucleotide
  Antisense strand to SEQ ID NO: 1323258
uucaugggcaucauuaacu

SEQ ID NO: 1323260 - RNA, 19 nt, Artificial Sequence
  Description of Artificial Sequence: Synthetic oligonucleotide
  Sense strand starting at position 598 of SEQ ID NO: 1242115
guuaaugaugcccaugaaa

SEQ ID NO: 1323261 - RNA, 19 nt, Artificial Sequence
  Description of Artificial Sequence: Synthetic oligonucleotide
  Antisense strand to SEQ ID NO: 1323260
uuucaugggcaucauuaac

SEQ ID NO: 1323262 - RNA, 19 nt, Artificial Sequence
  Description of Artificial Sequence: Synthetic oligonucleotide
  Sense strand starting at position 621 of SEQ ID NO: 1242115
cugucuguuggagacagau

SEQ ID NO: 1323263 - RNA, 19 nt, Artificial Sequence
  Description of Artificial Sequence: Synthetic oligonucleotide
  Antisense strand to SEQ ID NO: 1323262
aucugucuccaacagacag

SEQ ID NO: 1323264 - RNA, 19 nt, Artificial Sequence
  Description of Artificial Sequence: Synthetic oligonucleotide
  Sense strand starting at position 724 of SEQ ID NO: 1242115
ucaaacaauucugugaugu

SEQ ID NO: 1323265 - RNA, 19 nt, Artificial Sequence
  Description of Artificial Sequence: Synthetic oligonucleotide
  Antisense strand to SEQ ID NO: 1323264
acaucacagaauuguuuga

SEQ ID NO: 1323266 - RNA, 19 nt, Artificial Sequence
  Description of Artificial Sequence: Synthetic oligonucleotide
  Sense strand starting at position 734 of SEQ ID NO: 1242115
cugugauguaaguauagau

SEQ ID NO: 1323267 - RNA, 19 nt, Artificial Sequence
  Description of Artificial Sequence: Synthetic oligonucleotide
  Antisense strand to SEQ ID NO: 1323266
aucuauacuuacaucacag

SEQ ID NO: 1323268 - RNA, 19 nt, Artificial Sequence
  Description of Artificial Sequence: Synthetic oligonucleotide
  Sense strand starting at position 776 of SEQ ID NO: 1242115
cuuagagauguuuaguaau

SEQ ID NO: 1323269 - RNA, 19 nt, Artificial Sequence
  Description of Artificial Sequence: Synthetic oligonucleotide
  Antisense strand to SEQ ID NO: 1323268
auuacuaaacaucucuaag

SEQ ID NO: 1323270 - RNA, 19 nt, Artificial Sequence
  Description of Artificial Sequence: Synthetic oligonucleotide
  Sense strand starting at position 782 of SEQ ID NO: 1242115
gauguuuaguaauuugcuu

SEQ ID NO: 1323271 - RNA, 19 nt, Artificial Sequence
  Description of Artificial Sequence: Synthetic oligonucleotide
  Antisense strand to SEQ ID NO: 1323270
aagcaaauuacuaaacauc

SEQ ID NO: 1323272 - RNA, 19 nt, Artificial Sequence
  Description of Artificial Sequence: Synthetic oligonucleotide
  Sense strand starting at position 787 of SEQ ID NO: 1242115
uuaguaauuugcuuagggu

SEQ ID NO: 1323273 - RNA, 19 nt, Artificial Sequence
  Description of Artificial Sequence: Synthetic oligonucleotide
  Antisense strand to SEQ ID NO: 1323272
acccuaagcaaauuacuaa

SEQ ID NO: 1323274 - RNA, 19 nt, Artificial Sequence
  Description of Artificial Sequence: Synthetic oligonucleotide
  Sense strand starting at position 820 of SEQ ID NO: 1242115
guggcauugcuaggauuua

SEQ ID NO: 1323275 - RNA, 19 nt, Artificial Sequence
  Description of Artificial Sequence: Synthetic oligonucleotide
  Antisense strand to SEQ ID NO: 1323274
uaaauccuagcaaugccac

SEQ ID NO: 1323276 - RNA, 19 nt, Artificial Sequence
  Description of Artificial Sequence: Synthetic oligonucleotide
  Sense strand starting at position 832 of SEQ ID NO: 1242115
ggauuuaaaucugagacuc

SEQ ID NO: 1323277 - RNA, 19 nt, Artificial Sequence
  Description of Artificial Sequence: Synthetic oligonucleotide
  Antisense strand to SEQ ID NO: 1323276
gagucucagauuuaaaucc

SEQ ID NO: 1323278 - RNA, 19 nt, Artificial Sequence
  Description of Artificial Sequence: Synthetic oligonucleotide
  Sense strand starting at position 1023 of SEQ ID NO: 1242115
ccuguaccaucauuugcua

SEQ ID NO: 1323279 - RNA, 19 nt, Artificial Sequence
  Description of Artificial Sequence: Synthetic oligonucleotide
  Antisense strand to SEQ ID NO: 1323278
uagcaaaugaugguacagg

SEQ ID NO: 1323280 - RNA, 19 nt, Artificial Sequence
  Description of Artificial Sequence: Synthetic oligonucleotide
  Sense strand starting at position 1141 of SEQ ID NO: 1242115
guuaguuccacugagaagc

SEQ ID NO: 1323281 - RNA, 19 nt, Artificial Sequence
  Description of Artificial Sequence: Synthetic oligonucleotide
  Antisense strand to SEQ ID NO: 1323280
gcuucucaguggaacuaac

SEQ ID NO: 1323282 - RNA, 19 nt, Artificial Sequence
  Description of Artificial Sequence: Synthetic oligonucleotide
  Sense strand starting at position 1167 of SEQ ID NO: 1242115
cugcauagaugaucugaaa

SEQ ID NO: 1323283 - RNA, 19 nt, Artificial Sequence
  Description of Artificial Sequence: Synthetic oligonucleotide
  Antisense strand to SEQ ID NO: 1323282
uuucagaucaucuaugcag

SEQ ID NO: 1323284 - RNA, 19 nt, Artificial Sequence
  Description of Artificial Sequence: Synthetic oligonucleotide
  Sense strand starting at position 1304 of SEQ ID NO: 1242115
acgguaauuccgaggugua

SEQ ID NO: 1323285 - RNA, 19 nt, Artificial Sequence
  Description of Artificial Sequence: Synthetic oligonucleotide
  Antisense strand to SEQ ID NO: 1323284
uacaccucggaauuaccgu

SEQ ID NO: 1323286 - RNA, 19 nt, Artificial Sequence
  Description of Artificial Sequence: Synthetic oligonucleotide
  Sense strand starting at position 2291 of SEQ ID NO: 1242115
cuacuaggugcugauuaau

SEQ ID NO: 1323287 - RNA, 19 nt, Artificial Sequence
  Description of Artificial Sequence: Synthetic oligonucleotide
  Antisense strand to SEQ ID NO: 1323286
auuaaucagcaccuaguag

SEQ ID NO: 1323288 - RNA, 19 nt, Artificial Sequence
  Description of Artificial Sequence: Synthetic oligonucleotide
  Sense strand starting at position 2300 of SEQ ID NO: 1242115
gcugauuaauguucuagga

SEQ ID NO: 1323289 - RNA, 19 nt, Artificial Sequence
  Description of Artificial Sequence: Synthetic oligonucleotide
  Antisense strand to SEQ ID NO: 1323288
uccuagaacauuaaucagc

SEQ ID NO: 1323290 - RNA, 19 nt, Artificial Sequence
  Description of Artificial Sequence: Synthetic oligonucleotide
  Sense strand starting at position 2304 of SEQ ID NO: 1242115
auuaauguucuaggaucuu

SEQ ID NO: 1323291 - RNA, 19 nt, Artificial Sequence
  Description of Artificial Sequence: Synthetic oligonucleotide
  Antisense strand to SEQ ID NO: 1323290
aagauccuagaacauuaau

SEQ ID NO: 1323292 - RNA, 19 nt, Artificial Sequence
  Description of Artificial Sequence: Synthetic oligonucleotide
  Sense strand starting at position 2347 of SEQ ID NO: 1242115
uuuacaaucccguggagaa

SEQ ID NO: 1323293 - RNA, 19 nt, Artificial Sequence
  Description of Artificial Sequence: Synthetic oligonucleotide
  Antisense strand to SEQ ID NO: 1323292
uucuccacgggauuguaaa

SEQ ID NO: 1323294 - RNA, 19 nt, Artificial Sequence
  Description of Artificial Sequence: Synthetic oligonucleotide
  Sense strand starting at position 2348 of SEQ ID NO: 1242115
uuacaaucccguggagaaa

SEQ ID NO: 1323295 - RNA, 19 nt, Artificial Sequence
  Description of Artificial Sequence: Synthetic oligonucleotide
  Antisense strand to SEQ ID NO: 1323294
uuucuccacgggauuguaa

SEQ ID NO: 1323296 - RNA, 19 nt, Artificial Sequence
  Description of Artificial Sequence: Synthetic oligonucleotide
  Sense strand starting at position 2734 of SEQ ID NO: 1242115
aaguguacaguuugaugau

SEQ ID NO: 1323297 - RNA, 19 nt, Artificial Sequence
  Description of Artificial Sequence: Synthetic oligonucleotide
  Antisense strand to SEQ ID NO: 1323296
aucaucaaacuguacacuu

SEQ ID NO: 1323298 - RNA, 19 nt, Artificial Sequence
  Description of Artificial Sequence: Synthetic oligonucleotide
  Sense strand starting at position 2819 of SEQ ID NO: 1242115
ccuuguguccguuuauagu

SEQ ID NO: 1323299 - RNA, 19 nt, Artificial Sequence
  Description of Artificial Sequence: Synthetic oligonucleotide
  Antisense strand to SEQ ID NO: 1323298
acuauaaacggacacaagg

SEQ ID NO: 1323300 - RNA, 19 nt, Artificial Sequence
  Description of Artificial Sequence: Synthetic oligonucleotide
  Sense strand starting at position 2946 of SEQ ID NO: 1242115
cuuaguguccaguaggaaa

SEQ ID NO: 1323301 - RNA, 19 nt, Artificial Sequence
  Description of Artificial Sequence: Synthetic oligonucleotide
  Antisense strand to SEQ ID NO: 1323300
uuuccuacuggacacuaag

SEQ ID NO: 1323302 - RNA, 19 nt, Artificial Sequence
  Description of Artificial Sequence: Synthetic oligonucleotide
  Sense strand starting at position 3085 of SEQ ID NO: 1242115
agggaaugcuucucugaag

SEQ ID NO: 1323303 - RNA, 19 nt, Artificial Sequence
  Description of Artificial Sequence: Synthetic oligonucleotide
  Antisense strand to SEQ ID NO: 1323302
cuucagagaagcauucccu

SEQ ID NO: 1323304 - RNA, 19 nt, Artificial Sequence
  Description of Artificial Sequence: Synthetic oligonucleotide
  Sense strand starting at position 3086 of SEQ ID NO: 1242115
gggaaugcuucucugaaga

SEQ ID NO: 1323305 - RNA, 19 nt, Artificial Sequence
  Description of Artificial Sequence: Synthetic oligonucleotide
  Antisense strand to SEQ ID NO: 1323304
ucuucagagaagcauuccc

SEQ ID NO: 1323306 - RNA, 19 nt, Artificial Sequence
  Description of Artificial Sequence: Synthetic oligonucleotide
  Sense strand starting at position 3285 of SEQ ID NO: 1242115
aggugaugagugcaguaga

SEQ ID NO: 1323307 - RNA, 19 nt, Artificial Sequence
  Description of Artificial Sequence: Synthetic oligonucleotide
  Antisense strand to SEQ ID NO: 1323306
ucuacugcacucaucaccu

SEQ ID NO: 1323308 - RNA, 19 nt, Artificial Sequence
  Description of Artificial Sequence: Synthetic oligonucleotide
  Sense strand starting at position 3288 of SEQ ID NO: 1242115
ugaugagugcaguagagaa

SEQ ID NO: 1323309 - RNA, 19 nt, Artificial Sequence
  Description of Artificial Sequence: Synthetic oligonucleotide
  Antisense strand to SEQ ID NO: 1323308
uucucuacugcacucauca

SEQ ID NO: 1323310 - RNA, 19 nt, Artificial Sequence
  Description of Artificial Sequence: Synthetic oligonucleotide
  Sense strand starting at position 3305 of SEQ ID NO: 1242115
aagugaucccaagagcuuu

SEQ ID NO: 1323311 - RNA, 19 nt, Artificial Sequence
  Description of Artificial Sequence: Synthetic oligonucleotide
  Antisense strand to SEQ ID NO: 1323310
aaagcucuugggaucacuu

SEQ ID NO: 1323312 - RNA, 19 nt, Artificial Sequence
  Description of Artificial Sequence: Synthetic oligonucleotide
  Sense strand starting at position 3792 of SEQ ID NO: 1242115
acuucuacuggcugaaauu

SEQ ID NO: 1323313 - RNA, 19 nt, Artificial Sequence
  Description of Artificial Sequence: Synthetic oligonucleotide
  Antisense strand to SEQ ID NO: 1323312
aauuucagccaguagaagu

SEQ ID NO: 1323314 - RNA, 19 nt, Artificial Sequence
  Description of Artificial Sequence: Synthetic oligonucleotide
  Sense strand starting at position 3820 of SEQ ID NO: 1242115
ugucaagacucagcuuaca

SEQ ID NO: 1323315 - RNA, 19 nt, Artificial Sequence
  Description of Artificial Sequence: Synthetic oligonucleotide
  Antisense strand to SEQ ID NO: 1323314
uguaagcugagucuugaca

SEQ ID NO: 1323316 - RNA, 19 nt, Artificial Sequence
  Description of Artificial Sequence: Synthetic oligonucleotide
  Sense strand starting at position 3837 of SEQ ID NO: 1242115
cauguugggaaguaguaaa

SEQ ID NO: 1323317 - RNA, 19 nt, Artificial Sequence
  Description of Artificial Sequence: Synthetic oligonucleotide
  Antisense strand to SEQ ID NO: 1323316
uuuacuacuucccaacaug

SEQ ID NO: 1323318 - RNA, 19 nt, Artificial Sequence
  Description of Artificial Sequence: Synthetic oligonucleotide
  Sense strand starting at position 3927 of SEQ ID NO: 1242115
ccaccucuccugggaaaca

SEQ ID NO: 1323319 - RNA, 19 nt, Artificial Sequence
  Description of Artificial Sequence: Synthetic oligonucleotide
  Antisense strand to SEQ ID NO: 1323318
uguuucccaggagaggugg

SEQ ID NO: 1323320 - RNA, 19 nt, Artificial Sequence
  Description of Artificial Sequence: Synthetic oligonucleotide
  Sense strand starting at position 3961 of SEQ ID NO: 1242115
cugugugccauugagaaga

SEQ ID NO: 1323321 - RNA, 19 nt, Artificial Sequence
  Description of Artificial Sequence: Synthetic oligonucleotide
  Antisense strand to SEQ ID NO: 1323320
ucuucucaauggcacacag

SEQ ID NO: 1323322 - RNA, 19 nt, Artificial Sequence
  Description of Artificial Sequence: Synthetic oligonucleotide
  Sense strand starting at position 95 of SEQ ID NO: 1242116
gccuuugucauagggagag

SEQ ID NO: 1323323 - RNA, 19 nt, Artificial Sequence
  Description of Artificial Sequence: Synthetic oligonucleotide
  Antisense strand to SEQ ID NO: 1323322
cucucccuaugacaaaggc

SEQ ID NO: 1323324 - RNA, 19 nt, Artificial Sequence
  Description of Artificial Sequence: Synthetic oligonucleotide
  Sense strand starting at position 199 of SEQ ID NO: 1242116
gcuccugcagaagagaaau

SEQ ID NO: 1323325 - RNA, 19 nt, Artificial Sequence
  Description of Artificial Sequence: Synthetic oligonucleotide
  Antisense strand to SEQ ID NO: 1323324
auuucucuucugcaggagc

SEQ ID NO: 1323326 - RNA, 19 nt, Artificial Sequence
  Description of Artificial Sequence: Synthetic oligonucleotide
  Sense strand starting at position 384 of SEQ ID NO: 1242116
gaacccaccuggucugaaa

SEQ ID NO: 1323327 - RNA, 19 nt, Artificial Sequence
  Description of Artificial Sequence: Synthetic oligonucleotide
  Antisense strand to SEQ ID NO: 1323326
uuucagaccagguggguuc

SEQ ID NO: 1323328 - RNA, 19 nt, Artificial Sequence
  Description of Artificial Sequence: Synthetic oligonucleotide
  Sense strand starting at position 431 of SEQ ID NO: 1242116
ccagauaacuagcgauccu

SEQ ID NO: 1323329 - RNA, 19 nt, Artificial Sequence
  Description of Artificial Sequence: Synthetic oligonucleotide
  Antisense strand to SEQ ID NO: 1323328
aggaucgcuaguuaucugg

SEQ ID NO: 1323330 - RNA, 19 nt, Artificial Sequence
  Description of Artificial Sequence: Synthetic oligonucleotide
  Sense strand starting at position 660 of SEQ ID NO: 1242116
ucgugaguucacccgucuu

SEQ ID NO: 1323331 - RNA, 19 nt, Artificial Sequence
  Description of Artificial Sequence: Synthetic oligonucleotide
  Antisense strand to SEQ ID NO: 1323330
aagacgggugaacucacga

SEQ ID NO: 1323332 - RNA, 19 nt, Artificial Sequence
  Description of Artificial Sequence: Synthetic oligonucleotide
  Sense strand starting at position 684 of SEQ ID NO: 1242116
cgaauccaacccugguaua

SEQ ID NO: 1323333 - RNA, 19 nt, Artificial Sequence
  Description of Artificial Sequence: Synthetic oligonucleotide
  Antisense strand to SEQ ID NO: 1323332
uauaccaggguuggauucg

SEQ ID NO: 1323334 - RNA, 19 nt, Artificial Sequence
  Description of Artificial Sequence: Synthetic oligonucleotide
  Sense strand starting at position 697 of SEQ ID NO: 1242116
gguauagcugucgggaaua

SEQ ID NO: 1323335 - RNA, 19 nt, Artificial Sequence
  Description of Artificial Sequence: Synthetic oligonucleotide
  Antisense strand to SEQ ID NO: 1323334
uauucccgacagcuauacc

SEQ ID NO: 1323336 - RNA, 19 nt, Artificial Sequence
  Description of Artificial Sequence: Synthetic oligonucleotide
  Sense strand starting at position 699 of SEQ ID NO: 1242116
uauagcugucgggaauaaa

SEQ ID NO: 1323337 - RNA, 19 nt, Artificial Sequence
  Description of Artificial Sequence: Synthetic oligonucleotide
  Antisense strand to SEQ ID NO: 1323336
uuuauucccgacagcuaua

SEQ ID NO: 1323338 - RNA, 19 nt, Artificial Sequence
  Description of Artificial Sequence: Synthetic oligonucleotide
  Sense strand starting at position 702 of SEQ ID NO: 1242116
agcugucgggaauaaaguu

SEQ ID NO: 1323339 - RNA, 19 nt, Artificial Sequence
  Description of Artificial Sequence: Synthetic oligonucleotide
  Antisense strand to SEQ ID NO: 1323338
aacuuuauucccgacagcu

SEQ ID NO: 1323340 - RNA, 19 nt, Artificial Sequence
  Description of Artificial Sequence: Synthetic oligonucleotide
  Sense strand starting at position 741 of SEQ ID NO: 1242116
gcuucuacuucuugggaga

SEQ ID NO: 1323341 - RNA, 19 nt, Artificial Sequence
  Description of Artificial Sequence: Synthetic oligonucleotide
  Antisense strand to SEQ ID NO: 1323340
ucucccaagaaguagaagc

SEQ ID NO: 1323342 - RNA, 19 nt, Artificial Sequence
  Description of Artificial Sequence: Synthetic oligonucleotide
  Sense strand starting at position 744 of SEQ ID NO: 1242116
ucuacuucuugggagagga

SEQ ID NO: 1323343 - RNA, 19 nt, Artificial Sequence
  Description of Artificial Sequence: Synthetic oligonucleotide
  Antisense strand to SEQ ID NO: 1323342
uccucucccaagaaguaga

SEQ ID NO: 1323344 - RNA, 19 nt, Artificial Sequence
  Description of Artificial Sequence: Synthetic oligonucleotide
  Sense strand starting at position 1102 of SEQ ID NO: 1242116
ccaggaaucucccucgucu

SEQ ID NO: 1323345 - RNA, 19 nt, Artificial Sequence
  Description of Artificial Sequence: Synthetic oligonucleotide
  Antisense strand to SEQ ID NO: 1323344
agacgagggagauuccugg

SEQ ID NO: 1323346 - RNA, 19 nt, Artificial Sequence
  Description of Artificial Sequence: Synthetic oligonucleotide
  Sense strand starting at position 2391 of SEQ ID NO: 1242116
ugcguaaaguugucaaaga

SEQ ID NO: 1323347 - RNA, 19 nt, Artificial Sequence
  Description of Artificial Sequence: Synthetic oligonucleotide
  Antisense strand to SEQ ID NO: 1323346
ucuuugacaacuuuacgca

SEQ ID NO: 1323348 - RNA, 19 nt, Artificial Sequence
  Description of Artificial Sequence: Synthetic oligonucleotide
  Sense strand starting at position 2392 of SEQ ID NO: 1242116
gcguaaaguugucaaagau

SEQ ID NO: 1323349 - RNA, 19 nt, Artificial Sequence
  Description of Artificial Sequence: Synthetic oligonucleotide
  Antisense strand to SEQ ID NO: 1323348
aucuuugacaacuuuacgc

SEQ ID NO: 1323350 - RNA, 19 nt, Artificial Sequence
  Description of Artificial Sequence: Synthetic oligonucleotide
  Sense strand starting at position 2445 of SEQ ID NO: 1242116
aaggauagauccuguagcu

SEQ ID NO: 1323351 - RNA, 19 nt, Artificial Sequence
  Description of Artificial Sequence: Synthetic oligonucleotide
  Antisense strand to SEQ ID NO: 1323350
agcuacaggaucuauccuu

SEQ ID NO: 1323352 - RNA, 19 nt, Artificial Sequence
  Description of Artificial Sequence: Synthetic oligonucleotide
  Sense strand starting at position 2615 of SEQ ID NO: 1242116
cugagcucaucugaaagau

SEQ ID NO: 1323353 - RNA, 19 nt, Artificial Sequence
  Description of Artificial Sequence: Synthetic oligonucleotide
  Antisense strand to SEQ ID NO: 1323352
aucuuucagaugagcucag

SEQ ID NO: 1323354 - RNA, 19 nt, Artificial Sequence
  Description of Artificial Sequence: Synthetic oligonucleotide
  Sense strand starting at position 2679 of SEQ ID NO: 1242116
cgcagagguccugacaaau

SEQ ID NO: 1323355 - RNA, 19 nt, Artificial Sequence
  Description of Artificial Sequence: Synthetic oligonucleotide
  Antisense strand to SEQ ID NO: 1323354
auuugucaggaccucugcg

SEQ ID NO: 1323356 - RNA, 19 nt, Artificial Sequence
  Description of Artificial Sequence: Synthetic oligonucleotide
  Sense strand starting at position 2691 of SEQ ID NO: 1242116
gacaaaugaccugguaacu

SEQ ID NO: 1323357 - RNA, 19 nt, Artificial Sequence
  Description of Artificial Sequence: Synthetic oligonucleotide
  Antisense strand to SEQ ID NO: 1323356
aguuaccaggucauuuguc

SEQ ID NO: 1323358 - RNA, 19 nt, Artificial Sequence
  Description of Artificial Sequence: Synthetic oligonucleotide
  Sense strand starting at position 2741 of SEQ ID NO: 1242116
uaacguuucugugccacaa

SEQ ID NO: 1323359 - RNA, 19 nt, Artificial Sequence
  Description of Artificial Sequence: Synthetic oligonucleotide
  Antisense strand to SEQ ID NO: 1323358
uuguggcacagaaacguua

SEQ ID NO: 1323360 - RNA, 19 nt, Artificial Sequence
  Description of Artificial Sequence: Synthetic oligonucleotide
  Sense strand starting at position 2745 of SEQ ID NO: 1242116
guuucugugccacaaagaa

SEQ ID NO: 1323361 - RNA, 19 nt, Artificial Sequence
  Description of Artificial Sequence: Synthetic oligonucleotide
  Antisense strand to SEQ ID NO: 1323360
uucuuuguggcacagaaac

SEQ ID NO: 1323362 - RNA, 19 nt, Artificial Sequence
  Description of Artificial Sequence: Synthetic oligonucleotide
  Sense strand starting at position 2806 of SEQ ID NO: 1242116
agaggucccacgugagaau

SEQ ID NO: 1323363 - RNA, 19 nt, Artificial Sequence
  Description of Artificial Sequence: Synthetic oligonucleotide
  Antisense strand to SEQ ID NO: 1323362
auucucacgugggaccucu

SEQ ID NO: 1323364 - RNA, 19 nt, Artificial Sequence
  Description of Artificial Sequence: Synthetic oligonucleotide
  Sense strand starting at position 2815 of SEQ ID NO: 1242116
acgugagaauguuacagaa

SEQ ID NO: 1323365 - RNA, 19 nt, Artificial Sequence
  Description of Artificial Sequence: Synthetic oligonucleotide
  Antisense strand to SEQ ID NO: 1323364
uucuguaacauucucacgu

SEQ ID NO: 1323366 - RNA, 19 nt, Artificial Sequence
  Description of Artificial Sequence: Synthetic oligonucleotide
  Sense strand starting at position 2817 of SEQ ID NO: 1242116
gugagaauguuacagaaga

SEQ ID NO: 1323367 - RNA, 19 nt, Artificial Sequence
  Description of Artificial Sequence: Synthetic oligonucleotide
  Antisense strand to SEQ ID NO: 1323366
ucuucuguaacauucucac

SEQ ID NO: 1323368 - RNA, 19 nt, Artificial Sequence
  Description of Artificial Sequence: Synthetic oligonucleotide
  Sense strand starting at position 2830 of SEQ ID NO: 1242116
agaagauaagcaugucuuu

SEQ ID NO: 1323369 - RNA, 19 nt, Artificial Sequence
  Description of Artificial Sequence: Synthetic oligonucleotide
  Antisense strand to SEQ ID NO: 1323368
aaagacaugcuuaucuucu

SEQ ID NO: 1323370 - RNA, 19 nt, Artificial Sequence
  Description of Artificial Sequence: Synthetic oligonucleotide
  Sense strand starting at position 2918 of SEQ ID NO: 1242116
uguugaguccagcaugaug

SEQ ID NO: 1323371 - RNA, 19 nt, Artificial Sequence
  Description of Artificial Sequence: Synthetic oligonucleotide
  Antisense strand to SEQ ID NO: 1323370
caucaugcuggacucaaca

SEQ ID NO: 1323372 - RNA, 19 nt, Artificial Sequence
  Description of Artificial Sequence: Synthetic oligonucleotide
  Sense strand starting at position 2965 of SEQ ID NO: 1242116
uacuaaguucuaggagcua

SEQ ID NO: 1323373 - RNA, 19 nt, Artificial Sequence
  Description of Artificial Sequence: Synthetic oligonucleotide
  Antisense strand to SEQ ID NO: 1323372
uagcuccuagaacuuagua

SEQ ID NO: 1323374 - RNA, 19 nt, Artificial Sequence
  Description of Artificial Sequence: Synthetic oligonucleotide
  Sense strand starting at position 3240 of SEQ ID NO: 1242116
gcuauuugcuccuuuggca

SEQ ID NO: 1323375 - RNA, 19 nt, Artificial Sequence
  Description of Artificial Sequence: Synthetic oligonucleotide
  Antisense strand to SEQ ID NO: 1323374
ugccaaaggagcaaauagc

SEQ ID NO: 1323376 - RNA, 19 nt, Artificial Sequence
  Description of Artificial Sequence: Synthetic oligonucleotide
  Sense strand starting at position 3420 of SEQ ID NO: 1242116
ugaccaaugugaugaaaca

SEQ ID NO: 1323377 - RNA, 19 nt, Artificial Sequence
  Description of Artificial Sequence: Synthetic oligonucleotide
  Antisense strand to SEQ ID NO: 1323376
uguuucaucacauugguca

SEQ ID NO: 1323378 - RNA, 19 nt, Artificial Sequence
  Description of Artificial Sequence: Synthetic oligonucleotide
  Sense strand starting at position 3638 of SEQ ID NO: 1242116
uaacuuugauacggauaag

SEQ ID NO: 1323379 - RNA, 19 nt, Artificial Sequence
  Description of Artificial Sequence: Synthetic oligonucleotide
  Antisense strand to SEQ ID NO: 1323378
cuuauccguaucaaaguua

SEQ ID NO: 1323380 - RNA, 19 nt, Artificial Sequence
  Description of Artificial Sequence: Synthetic oligonucleotide
  Sense strand starting at position 3648 of SEQ ID NO: 1242116
acggauaaguaaggaagua

SEQ ID NO: 1323381 - RNA, 19 nt, Artificial Sequence
  Description of Artificial Sequence: Synthetic oligonucleotide
  Antisense strand to SEQ ID NO: 1323380
uacuuccuuacuuauccgu

SEQ ID NO: 1323382 - RNA, 19 nt, Artificial Sequence
  Description of Artificial Sequence: Synthetic oligonucleotide
  Sense strand starting at position 3663 of SEQ ID NO: 1242116
aguacaggccuccagaaau

SEQ ID NO: 1323383 - RNA, 19 nt, Artificial Sequence
  Description of Artificial Sequence: Synthetic oligonucleotide
  Antisense strand to SEQ ID NO: 1323382
auuucuggaggccuguacu

SEQ ID NO: 1323384 - RNA, 19 nt, Artificial Sequence
  Description of Artificial Sequence: Synthetic oligonucleotide
  Sense strand starting at position 3697 of SEQ ID NO: 1242116
uggacagguuuacuaauga

SEQ ID NO: 1323385 - RNA, 19 nt, Artificial Sequence
  Description of Artificial Sequence: Synthetic oligonucleotide
  Antisense strand to SEQ ID NO: 1323384
ucauuaguaaaccugucca

SEQ ID NO: 1323386 - RNA, 19 nt, Artificial Sequence
  Description of Artificial Sequence: Synthetic oligonucleotide
  Sense strand starting at position 3701 of SEQ ID NO: 1242116
cagguuuacuaaugaugag

SEQ ID NO: 1323387 - RNA, 19 nt, Artificial Sequence
  Description of Artificial Sequence: Synthetic oligonucleotide
  Antisense strand to SEQ ID NO: 1323386
cucaucauuaguaaaccug

SEQ ID NO: 1323388 - RNA, 19 nt, Artificial Sequence
  Description of Artificial Sequence: Synthetic oligonucleotide
  Sense strand starting at position 3704 of SEQ ID NO: 1242116
guuuacuaaugaugagguu

SEQ ID NO: 1323389 - RNA, 19 nt, Artificial Sequence
  Description of Artificial Sequence: Synthetic oligonucleotide
  Antisense strand to SEQ ID NO: 1323388
aaccucaucauuaguaaac

SEQ ID NO: 1323390 - RNA, 19 nt, Artificial Sequence
  Description of Artificial Sequence: Synthetic oligonucleotide
  Sense strand starting at position 3710 of SEQ ID NO: 1242116
uaaugaugagguuggcaua

SEQ ID NO: 1323391 - RNA, 19 nt, Artificial Sequence
  Description of Artificial Sequence: Synthetic oligonucleotide
  Antisense strand to SEQ ID NO: 1323390
uaugccaaccucaucauua

SEQ ID NO: 1323392 - RNA, 19 nt, Artificial Sequence
  Description of Artificial Sequence: Synthetic oligonucleotide
  Sense strand starting at position 3723 of SEQ ID NO: 1242116
ggcauagcucaggacuguu

SEQ ID NO: 1323393 - RNA, 19 nt, Artificial Sequence
  Description of Artificial Sequence: Synthetic oligonucleotide
  Antisense strand to SEQ ID NO: 1323392
aacaguccugagcuaugcc

SEQ ID NO: 1323394 - RNA, 19 nt, Artificial Sequence
  Description of Artificial Sequence: Synthetic oligonucleotide
  Sense strand starting at position 3781 of SEQ ID NO: 1242116
ggacaugaggcaugugaac

SEQ ID NO: 1323395 - RNA, 19 nt, Artificial Sequence
  Description of Artificial Sequence: Synthetic oligonucleotide
  Antisense strand to SEQ ID NO: 1323394
guucacaugccucaugucc

SEQ ID NO: 1323396 - RNA, 19 nt, Artificial Sequence
  Description of Artificial Sequence: Synthetic oligonucleotide
  Sense strand starting at position 3857 of SEQ ID NO: 1242116
ggauuucauugugagaaag

SEQ ID NO: 1323397 - RNA, 19 nt, Artificial Sequence
  Description of Artificial Sequence: Synthetic oligonucleotide
  Antisense strand to SEQ ID NO: 1323396
cuuucucacaaugaaaucc

SEQ ID NO: 1323398 - RNA, 19 nt, Artificial Sequence
  Description of Artificial Sequence: Synthetic oligonucleotide
  Sense strand starting at position 3889 of SEQ ID NO: 1242116
gucuacuggccuuaggaaa

SEQ ID NO: 1323399 - RNA, 19 nt, Artificial Sequence
  Description of Artificial Sequence: Synthetic oligonucleotide
  Antisense strand to SEQ ID NO: 1323398
uuuccuaaggccaguagac

SEQ ID NO: 1323400 - RNA, 19 nt, Artificial Sequence
  Description of Artificial Sequence: Synthetic oligonucleotide
  Sense strand starting at position 3959 of SEQ ID NO: 1242116
gggcuugaauucucaacaa

SEQ ID NO: 1323401 - RNA, 19 nt, Artificial Sequence
  Description of Artificial Sequence: Synthetic oligonucleotide
  Antisense strand to SEQ ID NO: 1323400
uuguugagaauucaagccc

SEQ ID NO: 1323402 - RNA, 19 nt, Artificial Sequence
  Description of Artificial Sequence: Synthetic oligonucleotide
  Sense strand starting at position 87 of SEQ ID NO: 1242117
cugcuuugugcguucggga

SEQ ID NO: 1323403 - RNA, 19 nt, Artificial Sequence
  Description of Artificial Sequence: Synthetic oligonucleotide
  Antisense strand to SEQ ID NO: 1323402
ucccgaacgcacaaagcag

SEQ ID NO: 1323404 - RNA, 19 nt, Artificial Sequence
  Description of Artificial Sequence: Synthetic oligonucleotide
  Sense strand starting at position 145 of SEQ ID NO: 1242117
uccuaaagguauugaauaa

SEQ ID NO: 1323405 - RNA, 19 nt, Artificial Sequence
  Description of Artificial Sequence: Synthetic oligonucleotide
  Antisense strand to SEQ ID NO: 1323404
uuauucaauaccuuuagga

SEQ ID NO: 1323406 - RNA, 19 nt, Artificial Sequence
  Description of Artificial Sequence: Synthetic oligonucleotide
  Sense strand starting at position 419 of SEQ ID NO: 1242117
gggcgugucuuuguaggga

SEQ ID NO: 1323407 - RNA, 19 nt, Artificial Sequence
  Description of Artificial Sequence: Synthetic oligonucleotide
  Antisense strand to SEQ ID NO: 1323406
ucccuacaaagacacgccc

SEQ ID NO: 1323408 - RNA, 19 nt, Artificial Sequence
  Description of Artificial Sequence: Synthetic oligonucleotide
  Sense strand starting at position 421 of SEQ ID NO: 1242117
gcgugucuuuguagggaca

SEQ ID NO: 1323409 - RNA, 19 nt, Artificial Sequence
  Description of Artificial Sequence: Synthetic oligonucleotide
  Antisense strand to SEQ ID NO: 1323408
ugucccuacaaagacacgc

SEQ ID NO: 1323410 - RNA, 19 nt, Artificial Sequence
  Description of Artificial Sequence: Synthetic oligonucleotide
  Sense strand starting at position 424 of SEQ ID NO: 1242117
ugucuuuguagggacagaa

SEQ ID NO: 1323411 - RNA, 19 nt, Artificial Sequence
  Description of Artificial Sequence: Synthetic oligonucleotide
  Antisense strand to SEQ ID NO: 1323410
uucugucccuacaaagaca

SEQ ID NO: 1323412 - RNA, 19 nt, Artificial Sequence
  Description of Artificial Sequence: Synthetic oligonucleotide
  Sense strand starting at position 449 of SEQ ID NO: 1242117
cgaggaguucccggcacuu

SEQ ID NO: 1323413 - RNA, 19 nt, Artificial Sequence
  Description of Artificial Sequence: Synthetic oligonucleotide
  Antisense strand to SEQ ID NO: 1323412
aagugccgggaacuccucg

SEQ ID NO: 1323414 - RNA, 19 nt, Artificial Sequence
  Description of Artificial Sequence: Synthetic oligonucleotide
  Sense strand starting at position 555 of SEQ ID NO: 1242117
ggcugagucucucuggaaa

SEQ ID NO: 1323415 - RNA, 19 nt, Artificial Sequence
  Description of Artificial Sequence: Synthetic oligonucleotide
  Antisense strand to SEQ ID NO: 1323414
uuuccagagagacucagcc

SEQ ID NO: 1323416 - RNA, 19 nt, Artificial Sequence
  Description of Artificial Sequence: Synthetic oligonucleotide
  Sense strand starting at position 854 of SEQ ID NO: 1242117
cuuggacaacucugacuua

SEQ ID NO: 1323417 - RNA, 19 nt, Artificial Sequence
  Description of Artificial Sequence: Synthetic oligonucleotide
  Antisense strand to SEQ ID NO: 1323416
uaagucagaguuguccaag

SEQ ID NO: 1323418 - RNA, 19 nt, Artificial Sequence
  Description of Artificial Sequence: Synthetic oligonucleotide
  Sense strand starting at position 972 of SEQ ID NO: 1242117
acgcgucccaucgugagaa

SEQ ID NO: 1323419 - RNA, 19 nt, Artificial Sequence
  Description of Artificial Sequence: Synthetic oligonucleotide
  Antisense strand to SEQ ID NO: 1323418
uucucacgaugggacgcgu

SEQ ID NO: 1323420 - RNA, 19 nt, Artificial Sequence
  Description of Artificial Sequence: Synthetic oligonucleotide
  Sense strand starting at position 974 of SEQ ID NO: 1242117
gcgucccaucgugagaaca

SEQ ID NO: 1323421 - RNA, 19 nt, Artificial Sequence
  Description of Artificial Sequence: Synthetic oligonucleotide
  Antisense strand to SEQ ID NO: 1323420
uguucucacgaugggacgc

SEQ ID NO: 1323422 - RNA, 19 nt, Artificial Sequence
  Description of Artificial Sequence: Synthetic oligonucleotide
  Sense strand starting at position 996 of SEQ ID NO: 1242117
gcuggacauguccacgaaa

SEQ ID NO: 1323423 - RNA, 19 nt, Artificial Sequence
  Description of Artificial Sequence: Synthetic oligonucleotide
  Antisense strand to SEQ ID NO: 1323422
uuucguggacauguccagc

SEQ ID NO: 1323424 - RNA, 19 nt, Artificial Sequence
  Description of Artificial Sequence: Synthetic oligonucleotide
  Sense strand starting at position 999 of SEQ ID NO: 1242117
ggacauguccacgaaagca

SEQ ID NO: 1323425 - RNA, 19 nt, Artificial Sequence
  Description of Artificial Sequence: Synthetic oligonucleotide
  Antisense strand to SEQ ID NO: 1323424
ugcuuucguggacaugucc

SEQ ID NO: 1323426 - RNA, 19 nt, Artificial Sequence
  Description of Artificial Sequence: Synthetic oligonucleotide
  Sense strand starting at position 1122 of SEQ ID NO: 1242117
ggcaaaguugaguguuguu

SEQ ID NO: 1323427 - RNA, 19 nt, Artificial Sequence
  Description of Artificial Sequence: Synthetic oligonucleotide
  Antisense strand to SEQ ID NO: 1323426
aacaacacucaacuuugcc

SEQ ID NO: 1323428 - RNA, 19 nt, Artificial Sequence
  Description of Artificial Sequence: Synthetic oligonucleotide
  Sense strand starting at position 2408 of SEQ ID NO: 1242117
ugcggagaucuugauaguc

SEQ ID NO: 1323429 - RNA, 19 nt, Artificial Sequence
  Description of Artificial Sequence: Synthetic oligonucleotide
  Antisense strand to SEQ ID NO: 1323428
gacuaucaagaucuccgca

SEQ ID NO: 1323430 - RNA, 19 nt, Artificial Sequence
  Description of Artificial Sequence: Synthetic oligonucleotide
  Sense strand starting at position 2410 of SEQ ID NO: 1242117
cggagaucuugauaguccu

SEQ ID NO: 1323431 - RNA, 19 nt, Artificial Sequence
  Description of Artificial Sequence: Synthetic oligonucleotide
  Antisense strand to SEQ ID NO: 1323430
aggacuaucaagaucuccg

SEQ ID NO: 1323432 - RNA, 19 nt, Artificial Sequence
  Description of Artificial Sequence: Synthetic oligonucleotide
  Sense strand starting at position 2471 of SEQ ID NO: 1242117
uugcucuggcaguaacuaa

SEQ ID NO: 1323433 - RNA, 19 nt, Artificial Sequence
  Description of Artificial Sequence: Synthetic oligonucleotide
  Antisense strand to SEQ ID NO: 1323432
uuaguuacugccagagcaa

SEQ ID NO: 1323434 - RNA, 19 nt, Artificial Sequence
  Description of Artificial Sequence: Synthetic oligonucleotide
  Sense strand starting at position 2682 of SEQ ID NO: 1242117
uccagcauuuacugaagua

SEQ ID NO: 1323435 - RNA, 19 nt, Artificial Sequence
  Description of Artificial Sequence: Synthetic oligonucleotide
  Antisense strand to SEQ ID NO: 1323434
uacuucaguaaaugcugga

SEQ ID NO: 1323436 - RNA, 19 nt, Artificial Sequence
  Description of Artificial Sequence: Synthetic oligonucleotide
  Sense strand starting at position 2721 of SEQ ID NO: 1242117
cgguacuuucucuaaccua

SEQ ID NO: 1323437 - RNA, 19 nt, Artificial Sequence
  Description of Artificial Sequence: Synthetic oligonucleotide
  Antisense strand to SEQ ID NO: 1323436
uagguuagagaaaguaccg

SEQ ID NO: 1323438 - RNA, 19 nt, Artificial Sequence
  Description of Artificial Sequence: Synthetic oligonucleotide
  Sense strand starting at position 2746 of SEQ ID NO: 1242117
cagacuguuugccucagua

SEQ ID NO: 1323439 - RNA, 19 nt, Artificial Sequence
  Description of Artificial Sequence: Synthetic oligonucleotide
  Antisense strand to SEQ ID NO: 1323438
uacugaggcaaacagucug

SEQ ID NO: 1323440 - RNA, 19 nt, Artificial Sequence
  Description of Artificial Sequence: Synthetic oligonucleotide
  Sense strand starting at position 2748 of SEQ ID NO: 1242117
gacuguuugccucaguauc

SEQ ID NO: 1323441 - RNA, 19 nt, Artificial Sequence
  Description of Artificial Sequence: Synthetic oligonucleotide
  Antisense strand to SEQ ID NO: 1323440
gauacugaggcaaacaguc

SEQ ID NO: 1323442 - RNA, 19 nt, Artificial Sequence
  Description of Artificial Sequence: Synthetic oligonucleotide
  Sense strand starting at position 2758 of SEQ ID NO: 1242117
cucaguaucccgcaaauau

SEQ ID NO: 1323443 - RNA, 19 nt, Artificial Sequence
  Description of Artificial Sequence: Synthetic oligonucleotide
  Antisense strand to SEQ ID NO: 1323442
auauuugcgggauacugag

SEQ ID NO: 1323444 - RNA, 19 nt, Artificial Sequence
  Description of Artificial Sequence: Synthetic oligonucleotide
  Sense strand starting at position 2768 of SEQ ID NO: 1242117
cgcaaauauuucuuguucu

SEQ ID NO: 1323445 - RNA, 19 nt, Artificial Sequence
  Description of Artificial Sequence: Synthetic oligonucleotide
  Antisense strand to SEQ ID NO: 1323444
agaacaagaaauauuugcg

SEQ ID NO: 1323446 - RNA, 19 nt, Artificial Sequence
  Description of Artificial Sequence: Synthetic oligonucleotide
  Sense strand starting at position 2938 of SEQ ID NO: 1242117
accugucuguugucaguua

SEQ ID NO: 1323447 - RNA, 19 nt, Artificial Sequence
  Description of Artificial Sequence: Synthetic oligonucleotide
  Antisense strand to SEQ ID NO: 1323446
uaacugacaacagacaggu

SEQ ID NO: 1323448 - RNA, 19 nt, Artificial Sequence
  Description of Artificial Sequence: Synthetic oligonucleotide
  Sense strand starting at position 2972 of SEQ ID NO: 1242117
uggcgcuuugcauaucuaa

SEQ ID NO: 1323449 - RNA, 19 nt, Artificial Sequence
  Description of Artificial Sequence: Synthetic oligonucleotide
  Antisense strand to SEQ ID NO: 1323448
uuagauaugcaaagcgcca

SEQ ID NO: 1323450 - RNA, 19 nt, Artificial Sequence
  Description of Artificial Sequence: Synthetic oligonucleotide
  Sense strand starting at position 3086 of SEQ ID NO: 1242117
acuugcuucccuuagugau

SEQ ID NO: 1323451 - RNA, 19 nt, Artificial Sequence
  Description of Artificial Sequence: Synthetic oligonucleotide
  Antisense strand to SEQ ID NO: 1323450
aucacuaagggaagcaagu

SEQ ID NO: 1323452 - RNA, 19 nt, Artificial Sequence
  Description of Artificial Sequence: Synthetic oligonucleotide
  Sense strand starting at position 3121 of SEQ ID NO: 1242117
ggcuuuaaagagcaucuuu

SEQ ID NO: 1323453 - RNA, 19 nt, Artificial Sequence
  Description of Artificial Sequence: Synthetic oligonucleotide
  Antisense strand to SEQ ID NO: 1323452
aaagaugcucuuuaaagcc

SEQ ID NO: 1323454 - RNA, 19 nt, Artificial Sequence
  Description of Artificial Sequence: Synthetic oligonucleotide
  Sense strand starting at position 3142 of SEQ ID NO: 1242117
gcuaaugaugcccaaaugu

SEQ ID NO: 1323455 - RNA, 19 nt, Artificial Sequence
  Description of Artificial Sequence: Synthetic oligonucleotide
  Antisense strand to SEQ ID NO: 1323454
acauuugggcaucauuagc

SEQ ID NO: 1323456 - RNA, 19 nt, Artificial Sequence
  Description of Artificial Sequence: Synthetic oligonucleotide
  Sense strand starting at position 3228 of SEQ ID NO: 1242117
ccuuuagcugucuaguaga

SEQ ID NO: 1323457 - RNA, 19 nt, Artificial Sequence
  Description of Artificial Sequence: Synthetic oligonucleotide
  Antisense strand to SEQ ID NO: 1323456
ucuacuagacagcuaaagg

SEQ ID NO: 1323458 - RNA, 19 nt, Artificial Sequence
  Description of Artificial Sequence: Synthetic oligonucleotide
  Sense strand starting at position 3231 of SEQ ID NO: 1242117
uuagcugucuaguagacaa

SEQ ID NO: 1323459 - RNA, 19 nt, Artificial Sequence
  Description of Artificial Sequence: Synthetic oligonucleotide
  Antisense strand to SEQ ID NO: 1323458
uugucuacuagacagcuaa

SEQ ID NO: 1323460 - RNA, 19 nt, Artificial Sequence
  Description of Artificial Sequence: Synthetic oligonucleotide
  Sense strand starting at position 3312 of SEQ ID NO: 1242117
uccuguugcccaggucaaa

SEQ ID NO: 1323461 - RNA, 19 nt, Artificial Sequence
  Description of Artificial Sequence: Synthetic oligonucleotide
  Antisense strand to SEQ ID NO: 1323460
uuugaccugggcaacagga

SEQ ID NO: 1323462 - RNA, 19 nt, Artificial Sequence
  Description of Artificial Sequence: Synthetic oligonucleotide
  Sense strand starting at position 3472 of SEQ ID NO: 1242117
agagucaucuccuacucuu

SEQ ID NO: 1323463 - RNA, 19 nt, Artificial Sequence
  Description of Artificial Sequence: Synthetic oligonucleotide
  Antisense strand to SEQ ID NO: 1323462
aagaguaggagaugacucu

SEQ ID NO: 1323464 - RNA, 19 nt, Artificial Sequence
  Description of Artificial Sequence: Synthetic oligonucleotide
  Sense strand starting at position 3556 of SEQ ID NO: 1242117
ccuggauugucacagcaaa

SEQ ID NO: 1323465 - RNA, 19 nt, Artificial Sequence
  Description of Artificial Sequence: Synthetic oligonucleotide
  Antisense strand to SEQ ID NO: 1323464
uuugcugugacaauccagg

SEQ ID NO: 1323466 - RNA, 19 nt, Artificial Sequence
  Description of Artificial Sequence: Synthetic oligonucleotide
  Sense strand starting at position 3597 of SEQ ID NO: 1242117
ccuuguccuccuugagugu

SEQ ID NO: 1323467 - RNA, 19 nt, Artificial Sequence
  Description of Artificial Sequence: Synthetic oligonucleotide
  Antisense strand to SEQ ID NO: 1323466
acacucaaggaggacaagg

SEQ ID NO: 1323468 - RNA, 19 nt, Artificial Sequence
  Description of Artificial Sequence: Synthetic oligonucleotide
  Sense strand starting at position 3659 of SEQ ID NO: 1242117
augccacuucucugcuaga

SEQ ID NO: 1323469 - RNA, 19 nt, Artificial Sequence
  Description of Artificial Sequence: Synthetic oligonucleotide
  Antisense strand to SEQ ID NO: 1323468
ucuagcagagaaguggcau

SEQ ID NO: 1323470 - RNA, 19 nt, Artificial Sequence
  Description of Artificial Sequence: Synthetic oligonucleotide
  Sense strand starting at position 3660 of SEQ ID NO: 1242117
ugccacuucucugcuagaa

SEQ ID NO: 1323471 - RNA, 19 nt, Artificial Sequence
  Description of Artificial Sequence: Synthetic oligonucleotide
  Antisense strand to SEQ ID NO: 1323470
uucuagcagagaaguggca

SEQ ID NO: 1323472 - RNA, 19 nt, Artificial Sequence
  Description of Artificial Sequence: Synthetic oligonucleotide
  Sense strand starting at position 3739 of SEQ ID NO: 1242117
cuaucugaucuguaggcuu

SEQ ID NO: 1323473 - RNA, 19 nt, Artificial Sequence
  Description of Artificial Sequence: Synthetic oligonucleotide
  Antisense strand to SEQ ID NO: 1323472
aagccuacagaucagauag

SEQ ID NO: 1323474 - RNA, 19 nt, Artificial Sequence
  Description of Artificial Sequence: Synthetic oligonucleotide
  Sense strand starting at position 3889 of SEQ ID NO: 1242117
agugcaagucuagagaucu

SEQ ID NO: 1323475 - RNA, 19 nt, Artificial Sequence
  Description of Artificial Sequence: Synthetic oligonucleotide
  Antisense strand to SEQ ID NO: 1323474
agaucucuagacuugcacu

SEQ ID NO: 1323476 - RNA, 19 nt, Artificial Sequence
  Description of Artificial Sequence: Synthetic oligonucleotide
  Sense strand starting at position 3900 of SEQ ID NO: 1242117
agagaucuguucccucaua

SEQ ID NO: 1323477 - RNA, 19 nt, Artificial Sequence
  Description of Artificial Sequence: Synthetic oligonucleotide
  Antisense strand to SEQ ID NO: 1323476
uaugagggaacagaucucu

SEQ ID NO: 1323478 - RNA, 19 nt, Artificial Sequence
  Description of Artificial Sequence: Synthetic oligonucleotide
  Sense strand starting at position 3981 of SEQ ID NO: 1242117
ugucuauucuugucuuuaa

SEQ ID NO: 1323479 - RNA, 19 nt, Artificial Sequence
  Description of Artificial Sequence: Synthetic oligonucleotide
  Antisense strand to SEQ ID NO: 1323478
uuaaagacaagaauagaca

SEQ ID NO: 1323480 - RNA, 19 nt, Artificial Sequence
  Description of Artificial Sequence: Synthetic oligonucleotide
  Sense strand starting at position 3982 of SEQ ID NO: 1242117
gucuauucuugucuuuaac

SEQ ID NO: 1323481 - RNA, 19 nt, Artificial Sequence
  Description of Artificial Sequence: Synthetic oligonucleotide
  Antisense strand to SEQ ID NO: 1323480
guuaaagacaagaauagac

SEQ ID NO: 1323482 - RNA, 19 nt, Artificial Sequence
  Description of Artificial Sequence: Synthetic oligonucleotide
  Sense strand starting at position 602 of SEQ ID NO: 1242118
ggcugucaggacggagaaa

SEQ ID NO: 1323483 - RNA, 19 nt, Artificial Sequence
  Description of Artificial Sequence: Synthetic oligonucleotide
  Antisense strand to SEQ ID NO: 1323482
uuucuccguccugacagcc

SEQ ID NO: 1323484 - RNA, 19 nt, Artificial Sequence
  Description of Artificial Sequence: Synthetic oligonucleotide
  Sense strand starting at position 3268 of SEQ ID NO: 1242118
ugcuucguuugcuacguaa

SEQ ID NO: 1323485 - RNA, 19 nt, Artificial Sequence
  Description of Artificial Sequence: Synthetic oligonucleotide
  Antisense strand to SEQ ID NO: 1323484
uuacguagcaaacgaagca

SEQ ID NO: 1323486 - RNA, 19 nt, Artificial Sequence
  Description of Artificial Sequence: Synthetic oligonucleotide
  Sense strand starting at position 3270 of SEQ ID NO: 1242118
cuucguuugcuacguaagu

SEQ ID NO: 1323487 - RNA, 19 nt, Artificial Sequence
  Description of Artificial Sequence: Synthetic oligonucleotide
  Antisense strand to SEQ ID NO: 1323486
acuuacguagcaaacgaag

SEQ ID NO: 1323488 - RNA, 19 nt, Artificial Sequence
  Description of Artificial Sequence: Synthetic oligonucleotide
  Sense strand starting at position 3272 of SEQ ID NO: 1242118
ucguuugcuacguaaguga

SEQ ID NO: 1323489 - RNA, 19 nt, Artificial Sequence
  Description of Artificial Sequence: Synthetic oligonucleotide
  Antisense strand to SEQ ID NO: 1323488
ucacuuacguagcaaacga

SEQ ID NO: 1323490 - RNA, 19 nt, Artificial Sequence
  Description of Artificial Sequence: Synthetic oligonucleotide
  Sense strand starting at position 3279 of SEQ ID NO: 1242118
cuacguaagugacuggaaa

SEQ ID NO: 1323491 - RNA, 19 nt, Artificial Sequence
  Description of Artificial Sequence: Synthetic oligonucleotide
  Antisense strand to SEQ ID NO: 1323490
uuuccagucacuuacguag

SEQ ID NO: 1323492 - RNA, 19 nt, Artificial Sequence
  Description of Artificial Sequence: Synthetic oligonucleotide
  Sense strand starting at position 3457 of SEQ ID NO: 1242118
guuugaaauacguggacuu

SEQ ID NO: 1323493 - RNA, 19 nt, Artificial Sequence
  Description of Artificial Sequence: Synthetic oligonucleotide
  Antisense strand to SEQ ID NO: 1323492
aaguccacguauuucaaac

SEQ ID NO: 1323494 - RNA, 19 nt, Artificial Sequence
  Description of Artificial Sequence: Synthetic oligonucleotide
  Sense strand starting at position 3458 of SEQ ID NO: 1242118
uuugaaauacguggacuuu

SEQ ID NO: 1323495 - RNA, 19 nt, Artificial Sequence
  Description of Artificial Sequence: Synthetic oligonucleotide
  Antisense strand to SEQ ID NO: 1323494
aaaguccacguauuucaaa

SEQ ID NO: 1323496 - RNA, 19 nt, Artificial Sequence
  Description of Artificial Sequence: Synthetic oligonucleotide
  Sense strand starting at position 3483 of SEQ ID NO: 1242118
cagugauuggaccaugugu

SEQ ID NO: 1323497 - RNA, 19 nt, Artificial Sequence
  Description of Artificial Sequence: Synthetic oligonucleotide
  Antisense strand to SEQ ID NO: 1323496
acacaugguccaaucacug

SEQ ID NO: 1323498 - RNA, 19 nt, Artificial Sequence
  Description of Artificial Sequence: Synthetic oligonucleotide
  Sense strand starting at position 3492 of SEQ ID NO: 1242118
gaccaugugucgcccuuaa

SEQ ID NO: 1323499 - RNA, 19 nt, Artificial Sequence
  Description of Artificial Sequence: Synthetic oligonucleotide
  Antisense strand to SEQ ID NO: 1323498
uuaagggcgacacaugguc

SEQ ID NO: 1323500 - RNA, 19 nt, Artificial Sequence
  Description of Artificial Sequence: Synthetic oligonucleotide
  Sense strand starting at position 3504 of SEQ ID NO: 1242118
cccuuaaugugguccgguu

SEQ ID NO: 1323501 - RNA, 19 nt, Artificial Sequence
  Description of Artificial Sequence: Synthetic oligonucleotide
  Antisense strand to SEQ ID NO: 1323500
aaccggaccacauuaaggg

SEQ ID NO: 1323502 - RNA, 19 nt, Artificial Sequence
  Description of Artificial Sequence: Synthetic oligonucleotide
  Sense strand starting at position 3534 of SEQ ID NO: 1242118
gcuaauugaugccaguaau

SEQ ID NO: 1323503 - RNA, 19 nt, Artificial Sequence
  Description of Artificial Sequence: Synthetic oligonucleotide
  Antisense strand to SEQ ID NO: 1323502
auuacuggcaucaauuagc

SEQ ID NO: 1323504 - RNA, 19 nt, Artificial Sequence
  Description of Artificial Sequence: Synthetic oligonucleotide
  Sense strand starting at position 3540 of SEQ ID NO: 1242118
ugaugccaguaauaaauuu

SEQ ID NO: 1323505 - RNA, 19 nt, Artificial Sequence
  Description of Artificial Sequence: Synthetic oligonucleotide
  Antisense strand to SEQ ID NO: 1323504
aaauuuauuacuggcauca

SEQ ID NO: 1323506 - RNA, 19 nt, Artificial Sequence
  Description of Artificial Sequence: Synthetic oligonucleotide
  Sense strand starting at position 3578 of SEQ ID NO: 1242118
agaguugugaauugucgag

SEQ ID NO: 1323507 - RNA, 19 nt, Artificial Sequence
  Description of Artificial Sequence: Synthetic oligonucleotide
  Antisense strand to SEQ ID NO: 1323506
cucgacaauucacaacucu

SEQ ID NO: 1323508 - RNA, 19 nt, Artificial Sequence
  Description of Artificial Sequence: Synthetic oligonucleotide
  Sense strand starting at position 3580 of SEQ ID NO: 1242118
aguugugaauugucgagau

SEQ ID NO: 1323509 - RNA, 19 nt, Artificial Sequence
  Description of Artificial Sequence: Synthetic oligonucleotide
  Antisense strand to SEQ ID NO: 1323508
aucucgacaauucacaacu

SEQ ID NO: 1323510 - RNA, 19 nt, Artificial Sequence
  Description of Artificial Sequence: Synthetic oligonucleotide
  Sense strand starting at position 3582 of SEQ ID NO: 1242118
uugugaauugucgagauaa

SEQ ID NO: 1323511 - RNA, 19 nt, Artificial Sequence
  Description of Artificial Sequence: Synthetic oligonucleotide
  Antisense strand to SEQ ID NO: 1323510
uuaucucgacaauucacaa

SEQ ID NO: 1323512 - RNA, 19 nt, Artificial Sequence
  Description of Artificial Sequence: Synthetic oligonucleotide
  Sense strand starting at position 3584 of SEQ ID NO: 1242118
gugaauugucgagauaaga

SEQ ID NO: 1323513 - RNA, 19 nt, Artificial Sequence
  Description of Artificial Sequence: Synthetic oligonucleotide
  Antisense strand to SEQ ID NO: 1323512
ucuuaucucgacaauucac

SEQ ID NO: 1323514 - RNA, 19 nt, Artificial Sequence
  Description of Artificial Sequence: Synthetic oligonucleotide
  Sense strand starting at position 3593 of SEQ ID NO: 1242118
cgagauaagaagugguugu

SEQ ID NO: 1323515 - RNA, 19 nt, Artificial Sequence
  Description of Artificial Sequence: Synthetic oligonucleotide
  Antisense strand to SEQ ID NO: 1323514
acaaccacuucuuaucucg

SEQ ID NO: 1323516 - RNA, 19 nt, Artificial Sequence
  Description of Artificial Sequence: Synthetic oligonucleotide
  Sense strand starting at position 3597 of SEQ ID NO: 1242118
auaagaagugguugucuca

SEQ ID NO: 1323517 - RNA, 19 nt, Artificial Sequence
  Description of Artificial Sequence: Synthetic oligonucleotide
  Antisense strand to SEQ ID NO: 1323516
ugagacaaccacuucuuau

SEQ ID NO: 1323518 - RNA, 19 nt, Artificial Sequence
  Description of Artificial Sequence: Synthetic oligonucleotide
  Sense strand starting at position 3600 of SEQ ID NO: 1242118
agaagugguugucucaaac

SEQ ID NO: 1323519 - RNA, 19 nt, Artificial Sequence
  Description of Artificial Sequence: Synthetic oligonucleotide
  Antisense strand to SEQ ID NO: 1323518
guuugagacaaccacuucu

SEQ ID NO: 1323520 - RNA, 19 nt, Artificial Sequence
  Description of Artificial Sequence: Synthetic oligonucleotide
  Sense strand starting at position 3633 of SEQ ID NO: 1242118
guagaagggaccugaugua

SEQ ID NO: 1323521 - RNA, 19 nt, Artificial Sequence
  Description of Artificial Sequence: Synthetic oligonucleotide
  Antisense strand to SEQ ID NO: 1323520
uacaucaggucccuucuac

SEQ ID NO: 1323522 - RNA, 19 nt, Artificial Sequence
  Description of Artificial Sequence: Synthetic oligonucleotide
  Sense strand starting at position 3696 of SEQ ID NO: 1242118
ucugcauuagaacguguau

SEQ ID NO: 1323523 - RNA, 19 nt, Artificial Sequence
  Description of Artificial Sequence: Synthetic oligonucleotide
  Antisense strand to SEQ ID NO: 1323522
auacacguucuaaugcaga

SEQ ID NO: 1323524 - RNA, 19 nt, Artificial Sequence
  Description of Artificial Sequence: Synthetic oligonucleotide
  Sense strand starting at position 3708 of SEQ ID NO: 1242118
cguguauccaucguucgua

SEQ ID NO: 1323525 - RNA, 19 nt, Artificial Sequence
  Description of Artificial Sequence: Synthetic oligonucleotide
  Antisense strand to SEQ ID NO: 1323524
uacgaacgauggauacacg

SEQ ID NO: 1323526 - RNA, 19 nt, Artificial Sequence
  Description of Artificial Sequence: Synthetic oligonucleotide
  Sense strand starting at position 3709 of SEQ ID NO: 1242118
guguauccaucguucguaa

SEQ ID NO: 1323527 - RNA, 19 nt, Artificial Sequence
  Description of Artificial Sequence: Synthetic oligonucleotide
  Antisense strand to SEQ ID NO: 1323526
uuacgaacgauggauacac

SEQ ID NO: 1323528 - RNA, 19 nt, Artificial Sequence
  Description of Artificial Sequence: Synthetic oligonucleotide
  Sense strand starting at position 3711 of SEQ ID NO: 1242118
guauccaucguucguaaau

SEQ ID NO: 1323529 - RNA, 19 nt, Artificial Sequence
  Description of Artificial Sequence: Synthetic oligonucleotide
  Antisense strand to SEQ ID NO: 1323528
auuuacgaacgauggauac

SEQ ID NO: 1323530 - RNA, 19 nt, Artificial Sequence
  Description of Artificial Sequence: Synthetic oligonucleotide
  Sense strand starting at position 3712 of SEQ ID NO: 1242118
uauccaucguucguaaaua

SEQ ID NO: 1323531 - RNA, 19 nt, Artificial Sequence
  Description of Artificial Sequence: Synthetic oligonucleotide
  Antisense strand to SEQ ID NO: 1323530
uauuuacgaacgauggaua

SEQ ID NO: 1323532 - RNA, 19 nt, Artificial Sequence
  Description of Artificial Sequence: Synthetic oligonucleotide
  Sense strand starting at position 3713 of SEQ ID NO: 1242118
auccaucguucguaaauaa

SEQ ID NO: 1323533 - RNA, 19 nt, Artificial Sequence
  Description of Artificial Sequence: Synthetic oligonucleotide
  Antisense strand to SEQ ID NO: 1323532
uuauuuacgaacgauggau

SEQ ID NO: 1323534 - RNA, 19 nt, Artificial Sequence
  Description of Artificial Sequence: Synthetic oligonucleotide
  Sense strand starting at position 3788 of SEQ ID NO: 1242118
uuucuaaaguuguuuccua

SEQ ID NO: 1323535 - RNA, 19 nt, Artificial Sequence
  Description of Artificial Sequence: Synthetic oligonucleotide
  Antisense strand to SEQ ID NO: 1323534
uaggaaacaacuuuagaaa

SEQ ID NO: 1323536 - RNA, 19 nt, Artificial Sequence
  Description of Artificial Sequence: Synthetic oligonucleotide
  Sense strand starting at position 3795 of SEQ ID NO: 1242118
aguuguuuccuagaucauu

SEQ ID NO: 1323537 - RNA, 19 nt, Artificial Sequence
  Description of Artificial Sequence: Synthetic oligonucleotide
  Antisense strand to SEQ ID NO: 1323536
aaugaucuaggaaacaacu

SEQ ID NO: 1323538 - RNA, 19 nt, Artificial Sequence
  Description of Artificial Sequence: Synthetic oligonucleotide
  Sense strand starting at position 3820 of SEQ ID NO: 1242118
cuuggaaauuucuagcuca

SEQ ID NO: 1323539 - RNA, 19 nt, Artificial Sequence
  Description of Artificial Sequence: Synthetic oligonucleotide
  Antisense strand to SEQ ID NO: 1323538
ugagcuagaaauuuccaag

SEQ ID NO: 1323540 - RNA, 19 nt, Artificial Sequence
  Description of Artificial Sequence: Synthetic oligonucleotide
  Sense strand starting at position 3842 of SEQ ID NO: 1242118
cagagucaguuguauagaa

SEQ ID NO: 1323541 - RNA, 19 nt, Artificial Sequence
  Description of Artificial Sequence: Synthetic oligonucleotide
  Antisense strand to SEQ ID NO: 1323540
uucuauacaacugacucug

SEQ ID NO: 1323542 - RNA, 19 nt, Artificial Sequence
  Description of Artificial Sequence: Synthetic oligonucleotide
  Sense strand starting at position 3844 of SEQ ID NO: 1242118
gagucaguuguauagaaag

SEQ ID NO: 1323543 - RNA, 19 nt, Artificial Sequence
  Description of Artificial Sequence: Synthetic oligonucleotide
  Antisense strand to SEQ ID NO: 1323542
cuuucuauacaacugacuc

SEQ ID NO: 1323544 - RNA, 19 nt, Artificial Sequence
  Description of Artificial Sequence: Synthetic oligonucleotide
  Sense strand starting at position 3959 of SEQ ID NO: 1242118
uuuggauguuccuagauuu

SEQ ID NO: 1323545 - RNA, 19 nt, Artificial Sequence
  Description of Artificial Sequence: Synthetic oligonucleotide
  Antisense strand to SEQ ID NO: 1323544
aaaucuaggaacauccaaa

SEQ ID NO: 1323546 - RNA, 19 nt, Artificial Sequence
  Description of Artificial Sequence: Synthetic oligonucleotide
  Sense strand starting at position 252 of SEQ ID NO: 1242119
cuggucugccucugccaaa

SEQ ID NO: 1323547 - RNA, 19 nt, Artificial Sequence
  Description of Artificial Sequence: Synthetic oligonucleotide
  Antisense strand to SEQ ID NO: 1323546
uuuggcagaggcagaccag

SEQ ID NO: 1323548 - RNA, 19 nt, Artificial Sequence
  Description of Artificial Sequence: Synthetic oligonucleotide
  Sense strand starting at position 420 of SEQ ID NO: 1242119
caucuuuguguugaggaaa

SEQ ID NO: 1323549 - RNA, 19 nt, Artificial Sequence
  Description of Artificial Sequence: Synthetic oligonucleotide
  Antisense strand to SEQ ID NO: 1323548
uuuccucaacacaaagaug

SEQ ID NO: 1323550 - RNA, 19 nt, Artificial Sequence
  Description of Artificial Sequence: Synthetic oligonucleotide
  Sense strand starting at position 440 of SEQ ID NO: 1242119
ucaaguauuuauugaggca

SEQ ID NO: 1323551 - RNA, 19 nt, Artificial Sequence
  Description of Artificial Sequence: Synthetic oligonucleotide
  Antisense strand to SEQ ID NO: 1323550
ugccucaauaaauacuuga

SEQ ID NO: 1323552 - RNA, 19 nt, Artificial Sequence
  Description of Artificial Sequence: Synthetic oligonucleotide
  Sense strand starting at position 447 of SEQ ID NO: 1242119
uuuauugaggcaugccaca

SEQ ID NO: 1323553 - RNA, 19 nt, Artificial Sequence
  Description of Artificial Sequence: Synthetic oligonucleotide
  Antisense strand to SEQ ID NO: 1323552
uguggcaugccucaauaaa

SEQ ID NO: 1323554 - RNA, 19 nt, Artificial Sequence
  Description of Artificial Sequence: Synthetic oligonucleotide
  Sense strand starting at position 564 of SEQ ID NO: 1242119
gggauauacucccuaagcu

SEQ ID NO: 1323555 - RNA, 19 nt, Artificial Sequence
  Description of Artificial Sequence: Synthetic oligonucleotide
  Antisense strand to SEQ ID NO: 1323554
agcuuagggaguauauccc

SEQ ID NO: 1323556 - RNA, 19 nt, Artificial Sequence
  Description of Artificial Sequence: Synthetic oligonucleotide
  Sense strand starting at position 565 of SEQ ID NO: 1242119
ggauauacucccuaagcuc

SEQ ID NO: 1323557 - RNA, 19 nt, Artificial Sequence
  Description of Artificial Sequence: Synthetic oligonucleotide
  Antisense strand to SEQ ID NO: 1323556
gagcuuagggaguauaucc

SEQ ID NO: 1323558 - RNA, 19 nt, Artificial Sequence
  Description of Artificial Sequence: Synthetic oligonucleotide
  Sense strand starting at position 605 of SEQ ID NO: 1242119
uuaaaugagguaugugaau

SEQ ID NO: 1323559 - RNA, 19 nt, Artificial Sequence
  Description of Artificial Sequence: Synthetic oligonucleotide
  Antisense strand to SEQ ID NO: 1323558
auucacauaccucauuuaa

SEQ ID NO: 1323560 - RNA, 19 nt, Artificial Sequence
  Description of Artificial Sequence: Synthetic oligonucleotide
  Sense strand starting at position 752 of SEQ ID NO: 1242119
ggcucaugcccacgucaua

SEQ ID NO: 1323561 - RNA, 19 nt, Artificial Sequence
  Description of Artificial Sequence: Synthetic oligonucleotide
  Antisense strand to SEQ ID NO: 1323560
uaugacgugggcaugagcc

SEQ ID NO: 1323562 - RNA, 19 nt, Artificial Sequence
  Description of Artificial Sequence: Synthetic oligonucleotide
  Sense strand starting at position 790 of SEQ ID NO: 1242119
cuucuacugugcucguaaa

SEQ ID NO: 1323563 - RNA, 19 nt, Artificial Sequence
  Description of Artificial Sequence: Synthetic oligonucleotide
  Antisense strand to SEQ ID NO: 1323562
uuuacgagcacaguagaag

SEQ ID NO: 1323564 - RNA, 19 nt, Artificial Sequence
  Description of Artificial Sequence: Synthetic oligonucleotide
  Sense strand starting at position 791 of SEQ ID NO: 1242119
uucuacugugcucguaaau

SEQ ID NO: 1323565 - RNA, 19 nt, Artificial Sequence
  Description of Artificial Sequence: Synthetic oligonucleotide
  Antisense strand to SEQ ID NO: 1323564
auuuacgagcacaguagaa

SEQ ID NO: 1323566 - RNA, 19 nt, Artificial Sequence
  Description of Artificial Sequence: Synthetic oligonucleotide
  Sense strand starting at position 804 of SEQ ID NO: 1242119
guaaauguugaccaucacu

SEQ ID NO: 1323567 - RNA, 19 nt, Artificial Sequence
  Description of Artificial Sequence: Synthetic oligonucleotide
  Antisense strand to SEQ ID NO: 1323566
agugauggucaacauuuac

SEQ ID NO: 1323568 - RNA, 19 nt, Artificial Sequence
  Description of Artificial Sequence: Synthetic oligonucleotide
  Sense strand starting at position 1044 of SEQ ID NO: 1242119
agaagaugcuucccuguau

SEQ ID NO: 1323569 - RNA, 19 nt, Artificial Sequence
  Description of Artificial Sequence: Synthetic oligonucleotide
  Antisense strand to SEQ ID NO: 1323568
auacagggaagcaucuucu

SEQ ID NO: 1323570 - RNA, 19 nt, Artificial Sequence
  Description of Artificial Sequence: Synthetic oligonucleotide
  Sense strand starting at position 1045 of SEQ ID NO: 1242119
gaagaugcuucccuguauu

SEQ ID NO: 1323571 - RNA, 19 nt, Artificial Sequence
  Description of Artificial Sequence: Synthetic oligonucleotide
  Antisense strand to SEQ ID NO: 1323570
aauacagggaagcaucuuc

SEQ ID NO: 1323572 - RNA, 19 nt, Artificial Sequence
  Description of Artificial Sequence: Synthetic oligonucleotide
  Sense strand starting at position 1075 of SEQ ID NO: 1242119
cucuauucuuaugcuguua

SEQ ID NO: 1323573 - RNA, 19 nt, Artificial Sequence
  Description of Artificial Sequence: Synthetic oligonucleotide
  Antisense strand to SEQ ID NO: 1323572
uaacagcauaagaauagag

SEQ ID NO: 1323574 - RNA, 19 nt, Artificial Sequence
  Description of Artificial Sequence: Synthetic oligonucleotide
  Sense strand starting at position 1087 of SEQ ID NO: 1242119
gcuguuaccucauucucca

SEQ ID NO: 1323575 - RNA, 19 nt, Artificial Sequence
  Description of Artificial Sequence: Synthetic oligonucleotide
  Antisense strand to SEQ ID NO: 1323574
uggagaaugagguaacagc

SEQ ID NO: 1323576 - RNA, 19 nt, Artificial Sequence
  Description of Artificial Sequence: Synthetic oligonucleotide
  Sense strand starting at position 1176 of SEQ ID NO: 1242119
acaccaauccugggaccua

SEQ ID NO: 1323577 - RNA, 19 nt, Artificial Sequence
  Description of Artificial Sequence: Synthetic oligonucleotide
  Antisense strand to SEQ ID NO: 1323576
uaggucccaggauuggugu

SEQ ID NO: 1323578 - RNA, 19 nt, Artificial Sequence
  Description of Artificial Sequence: Synthetic oligonucleotide
  Sense strand starting at position 1200 of SEQ ID NO: 1242119
gcaggaauuagucacggga

SEQ ID NO: 1323579 - RNA, 19 nt, Artificial Sequence
  Description of Artificial Sequence: Synthetic oligonucleotide
  Antisense strand to SEQ ID NO: 1323578
ucccgugacuaauuccugc

SEQ ID NO: 1323580 - RNA, 19 nt, Artificial Sequence
  Description of Artificial Sequence: Synthetic oligonucleotide
  Sense strand starting at position 1255 of SEQ ID NO: 1242119
cauggucaaucugcagaga

SEQ ID NO: 1323581 - RNA, 19 nt, Artificial Sequence
  Description of Artificial Sequence: Synthetic oligonucleotide
  Antisense strand to SEQ ID NO: 1323580
ucucugcagauugaccaug

SEQ ID NO: 1323582 - RNA, 19 nt, Artificial Sequence
  Description of Artificial Sequence: Synthetic oligonucleotide
  Sense strand starting at position 1256 of SEQ ID NO: 1242119
auggucaaucugcagagau

SEQ ID NO: 1323583 - RNA, 19 nt, Artificial Sequence
  Description of Artificial Sequence: Synthetic oligonucleotide
  Antisense strand to SEQ ID NO: 1323582
aucucugcagauugaccau

SEQ ID NO: 1323584 - RNA, 19 nt, Artificial Sequence
  Description of Artificial Sequence: Synthetic oligonucleotide
  Sense strand starting at position 1429 of SEQ ID NO: 1242119
ucagaaaucucaggaccaa

SEQ ID NO: 1323585 - RNA, 19 nt, Artificial Sequence
  Description of Artificial Sequence: Synthetic oligonucleotide
  Antisense strand to SEQ ID NO: 1323584
uugguccugagauuucuga

SEQ ID NO: 1323586 - RNA, 19 nt, Artificial Sequence
  Description of Artificial Sequence: Synthetic oligonucleotide
  Sense strand starting at position 1991 of SEQ ID NO: 1242119
ggacaaaugugucccaccu

SEQ ID NO: 1323587 - RNA, 19 nt, Artificial Sequence
  Description of Artificial Sequence: Synthetic oligonucleotide
  Antisense strand to SEQ ID NO: 1323586
aggugggacacauuugucc

SEQ ID NO: 1323588 - RNA, 19 nt, Artificial Sequence
  Description of Artificial Sequence: Synthetic oligonucleotide
  Sense strand starting at position 2047 of SEQ ID NO: 1242119
cugacugcuccacgugaaa

SEQ ID NO: 1323589 - RNA, 19 nt, Artificial Sequence
  Description of Artificial Sequence: Synthetic oligonucleotide
  Antisense strand to SEQ ID NO: 1323588
uuucacguggagcagucag

SEQ ID NO: 1323590 - RNA, 19 nt, Artificial Sequence
  Description of Artificial Sequence: Synthetic oligonucleotide
  Sense strand starting at position 2222 of SEQ ID NO: 1242119
gccuucuuuggacaacaca

SEQ ID NO: 1323591 - RNA, 19 nt, Artificial Sequence
  Description of Artificial Sequence: Synthetic oligonucleotide
  Antisense strand to SEQ ID NO: 1323590
uguguuguccaaagaaggc

SEQ ID NO: 1323592 - RNA, 19 nt, Artificial Sequence
  Description of Artificial Sequence: Synthetic oligonucleotide
  Sense strand starting at position 2309 of SEQ ID NO: 1242119
aggagcuuucuauaaaccu

SEQ ID NO: 1323593 - RNA, 19 nt, Artificial Sequence
  Description of Artificial Sequence: Synthetic oligonucleotide
  Antisense strand to SEQ ID NO: 1323592
agguuuauagaaagcuccu

SEQ ID NO: 1323594 - RNA, 19 nt, Artificial Sequence
  Description of Artificial Sequence: Synthetic oligonucleotide
  Sense strand starting at position 2720 of SEQ ID NO: 1242119
cucucagaagcuuauguaa

SEQ ID NO: 1323595 - RNA, 19 nt, Artificial Sequence
  Description of Artificial Sequence: Synthetic oligonucleotide
  Antisense strand to SEQ ID NO: 1323594
uuacauaagcuucugagag

SEQ ID NO: 1323596 - RNA, 19 nt, Artificial Sequence
  Description of Artificial Sequence: Synthetic oligonucleotide
  Sense strand starting at position 2735 of SEQ ID NO: 1242119
guaacucagugguccucaa

SEQ ID NO: 1323597 - RNA, 19 nt, Artificial Sequence
  Description of Artificial Sequence: Synthetic oligonucleotide
  Antisense strand to SEQ ID NO: 1323596
uugaggaccacugaguuac

SEQ ID NO: 1323598 - RNA, 19 nt, Artificial Sequence
  Description of Artificial Sequence: Synthetic oligonucleotide
  Sense strand starting at position 2900 of SEQ ID NO: 1242119
guauacagagcauguugaa

SEQ ID NO: 1323599 - RNA, 19 nt, Artificial Sequence
  Description of Artificial Sequence: Synthetic oligonucleotide
  Antisense strand to SEQ ID NO: 1323598
uucaacaugcucuguauac

SEQ ID NO: 1323600 - RNA, 19 nt, Artificial Sequence
  Description of Artificial Sequence: Synthetic oligonucleotide
  Sense strand starting at position 3021 of SEQ ID NO: 1242119
aucauaagguggcauuuaa

SEQ ID NO: 1323601 - RNA, 19 nt, Artificial Sequence
  Description of Artificial Sequence: Synthetic oligonucleotide
  Antisense strand to SEQ ID NO: 1323600
uuaaaugccaccuuaugau

SEQ ID NO: 1323602 - RNA, 19 nt, Artificial Sequence
  Description of Artificial Sequence: Synthetic oligonucleotide
  Sense strand starting at position 3090 of SEQ ID NO: 1242119
cugugagcccuguguacau

SEQ ID NO: 1323603 - RNA, 19 nt, Artificial Sequence
  Description of Artificial Sequence: Synthetic oligonucleotide
  Antisense strand to SEQ ID NO: 1323602
auguacacagggcucacag

SEQ ID NO: 1323604 - RNA, 19 nt, Artificial Sequence
  Description of Artificial Sequence: Synthetic oligonucleotide
  Sense strand starting at position 3130 of SEQ ID NO: 1242119
ggaccucucuucuaaagaa

SEQ ID NO: 1323605 - RNA, 19 nt, Artificial Sequence
  Description of Artificial Sequence: Synthetic oligonucleotide
  Antisense strand to SEQ ID NO: 1323604
uucuuuagaagagaggucc

SEQ ID NO: 1323606 - RNA, 19 nt, Artificial Sequence
  Description of Artificial Sequence: Synthetic oligonucleotide
  Sense strand starting at position 3199 of SEQ ID NO: 1242119
cuuuaaugaggguguaggu

SEQ ID NO: 1323607 - RNA, 19 nt, Artificial Sequence
  Description of Artificial Sequence: Synthetic oligonucleotide
  Antisense strand to SEQ ID NO: 1323606
accuacacccucauuaaag

SEQ ID NO: 1323608 - RNA, 19 nt, Artificial Sequence
  Description of Artificial Sequence: Synthetic oligonucleotide
  Sense strand starting at position 3225 of SEQ ID NO: 1242119
guaggaagcccuugaaauu

SEQ ID NO: 1323609 - RNA, 19 nt, Artificial Sequence
  Description of Artificial Sequence: Synthetic oligonucleotide
  Antisense strand to SEQ ID NO: 1323608
aauuucaagggcuuccuac

SEQ ID NO: 1323610 - RNA, 19 nt, Artificial Sequence
  Description of Artificial Sequence: Synthetic oligonucleotide
  Sense strand starting at position 3375 of SEQ ID NO: 1242119
ggcugagucuggagugagu

SEQ ID NO: 1323611 - RNA, 19 nt, Artificial Sequence
  Description of Artificial Sequence: Synthetic oligonucleotide
  Antisense strand to SEQ ID NO: 1323610
acucacuccagacucagcc

SEQ ID NO: 1323612 - RNA, 19 nt, Artificial Sequence
  Description of Artificial Sequence: Synthetic oligonucleotide
  Sense strand starting at position 3706 of SEQ ID NO: 1242119
uuccgaagaucuguucuuu

SEQ ID NO: 1323613 - RNA, 19 nt, Artificial Sequence
  Description of Artificial Sequence: Synthetic oligonucleotide
  Antisense strand to SEQ ID NO: 1323612
aaagaacagaucuucggaa

SEQ ID NO: 1323614 - RNA, 19 nt, Artificial Sequence
  Description of Artificial Sequence: Synthetic oligonucleotide
  Sense strand starting at position 3726 of SEQ ID NO: 1242119
ucacucucagaagguaaau

SEQ ID NO: 1323615 - RNA, 19 nt, Artificial Sequence
  Description of Artificial Sequence: Synthetic oligonucleotide
  Antisense strand to SEQ ID NO: 1323614
auuuaccuucugagaguga

SEQ ID NO: 1323616 - RNA, 19 nt, Artificial Sequence
  Description of Artificial Sequence: Synthetic oligonucleotide
  Sense strand starting at position 3739 of SEQ ID NO: 1242119
guaaauuuauuccaaagug

SEQ ID NO: 1323617 - RNA, 19 nt, Artificial Sequence
  Description of Artificial Sequence: Synthetic oligonucleotide
  Antisense strand to SEQ ID NO: 1323616
cacuuuggaauaaauuuac

SEQ ID NO: 1323618 - RNA, 19 nt, Artificial Sequence
  Description of Artificial Sequence: Synthetic oligonucleotide
  Sense strand starting at position 3751 of SEQ ID NO: 1242119
caaaguguaguugagacuu

SEQ ID NO: 1323619 - RNA, 19 nt, Artificial Sequence
  Description of Artificial Sequence: Synthetic oligonucleotide
  Antisense strand to SEQ ID NO: 1323618
aagucucaacuacacuuug

SEQ ID NO: 1323620 - RNA, 19 nt, Artificial Sequence
  Description of Artificial Sequence: Synthetic oligonucleotide
  Sense strand starting at position 3794 of SEQ ID NO: 1242119
gugguuugugcuucaaggu

SEQ ID NO: 1323621 - RNA, 19 nt, Artificial Sequence
  Description of Artificial Sequence: Synthetic oligonucleotide
  Antisense strand to SEQ ID NO: 1323620
accuugaagcacaaaccac

SEQ ID NO: 1323622 - RNA, 19 nt, Artificial Sequence
  Description of Artificial Sequence: Synthetic oligonucleotide
  Sense strand starting at position 3801 of SEQ ID NO: 1242119
gugcuucaagguggaaauu

SEQ ID NO: 1323623 - RNA, 19 nt, Artificial Sequence
  Description of Artificial Sequence: Synthetic oligonucleotide
  Antisense strand to SEQ ID NO: 1323622
aauuuccaccuugaagcac

SEQ ID NO: 1323624 - RNA, 19 nt, Artificial Sequence
  Description of Artificial Sequence: Synthetic oligonucleotide
  Sense strand starting at position 3946 of SEQ ID NO: 1242119
ugguuagaacuaggaaguu

SEQ ID NO: 1323625 - RNA, 19 nt, Artificial Sequence
  Description of Artificial Sequence: Synthetic oligonucleotide
  Antisense strand to SEQ ID NO: 1323624
aacuuccuaguucuaacca

SEQ ID NO: 1323626 - RNA, 19 nt, Artificial Sequence
  Description of Artificial Sequence: Synthetic oligonucleotide
  Sense strand starting at position 330 of SEQ ID NO: 1242120
cuagguacugacugaagau

SEQ ID NO: 1323627 - RNA, 19 nt, Artificial Sequence
  Description of Artificial Sequence: Synthetic oligonucleotide
  Antisense strand to SEQ ID NO: 1323626
aucuucagucaguaccuag

SEQ ID NO: 1323628 - RNA, 19 nt, Artificial Sequence
  Description of Artificial Sequence: Synthetic oligonucleotide
  Sense strand starting at position 342 of SEQ ID NO: 1242120
ugaagauaccugggaugca

SEQ ID NO: 1323629 - RNA, 19 nt, Artificial Sequence
  Description of Artificial Sequence: Synthetic oligonucleotide
  Antisense strand to SEQ ID NO: 1323628
ugcaucccagguaucuuca

SEQ ID NO: 1323630 - RNA, 19 nt, Artificial Sequence
  Description of Artificial Sequence: Synthetic oligonucleotide
  Sense strand starting at position 449 of SEQ ID NO: 1242120
auaggagucuuucucagaa

SEQ ID NO: 1323631 - RNA, 19 nt, Artificial Sequence
  Description of Artificial Sequence: Synthetic oligonucleotide
  Antisense strand to SEQ ID NO: 1323630
uucugagaaagacuccuau

SEQ ID NO: 1323632 - RNA, 19 nt, Artificial Sequence
  Description of Artificial Sequence: Synthetic oligonucleotide
  Sense strand starting at position 461 of SEQ ID NO: 1242120
cucagaagccagcauugaa

SEQ ID NO: 1323633 - RNA, 19 nt, Artificial Sequence
  Description of Artificial Sequence: Synthetic oligonucleotide
  Antisense strand to SEQ ID NO: 1323632
uucaaugcuggcuucugag

SEQ ID NO: 1323634 - RNA, 19 nt, Artificial Sequence
  Description of Artificial Sequence: Synthetic oligonucleotide
  Sense strand starting at position 660 of SEQ ID NO: 1242120
agcauuacaccuugaugau

SEQ ID NO: 1323635 - RNA, 19 nt, Artificial Sequence
  Description of Artificial Sequence: Synthetic oligonucleotide
  Antisense strand to SEQ ID NO: 1323634
aucaucaagguguaaugcu

SEQ ID NO: 1323636 - RNA, 19 nt, Artificial Sequence
  Description of Artificial Sequence: Synthetic oligonucleotide
  Sense strand starting at position 661 of SEQ ID NO: 1242120
gcauuacaccuugaugaua

SEQ ID NO: 1323637 - RNA, 19 nt, Artificial Sequence
  Description of Artificial Sequence: Synthetic oligonucleotide
  Antisense strand to SEQ ID NO: 1323636
uaucaucaagguguaaugc

SEQ ID NO: 1323638 - RNA, 19 nt, Artificial Sequence
  Description of Artificial Sequence: Synthetic oligonucleotide
  Sense strand starting at position 824 of SEQ ID NO: 1242120
ugcagauuggagugacaac

SEQ ID NO: 1323639 - RNA, 19 nt, Artificial Sequence
  Description of Artificial Sequence: Synthetic oligonucleotide
  Antisense strand to SEQ ID NO: 1323638
guugucacuccaaucugca

SEQ ID NO: 1323640 - RNA, 19 nt, Artificial Sequence
  Description of Artificial Sequence: Synthetic oligonucleotide
  Sense strand starting at position 888 of SEQ ID NO: 1242120
ccucaauuagggugacuaa

SEQ ID NO: 1323641 - RNA, 19 nt, Artificial Sequence
  Description of Artificial Sequence: Synthetic oligonucleotide
  Antisense strand to SEQ ID NO: 1323640
uuagucacccuaauugagg

SEQ ID NO: 1323642 - RNA, 19 nt, Artificial Sequence
  Description of Artificial Sequence: Synthetic oligonucleotide
  Sense strand starting at position 945 of SEQ ID NO: 1242120
ugagaugugcuagaucuuu

SEQ ID NO: 1323643 - RNA, 19 nt, Artificial Sequence
  Description of Artificial Sequence: Synthetic oligonucleotide
  Antisense strand to SEQ ID NO: 1323642
aaagaucuagcacaucuca

SEQ ID NO: 1323644 - RNA, 19 nt, Artificial Sequence
  Description of Artificial Sequence: Synthetic oligonucleotide
  Sense strand starting at position 1008 of SEQ ID NO: 1242120
uguaguguuacucaaacag

SEQ ID NO: 1323645 - RNA, 19 nt, Artificial Sequence
  Description of Artificial Sequence: Synthetic oligonucleotide
  Antisense strand to SEQ ID NO: 1323644
cuguuugaguaacacuaca

SEQ ID NO: 1323646 - RNA, 19 nt, Artificial Sequence
  Description of Artificial Sequence: Synthetic oligonucleotide
  Sense strand starting at position 1212 of SEQ ID NO: 1242120
ccacacauugcugaugagu

SEQ ID NO: 1323647 - RNA, 19 nt, Artificial Sequence
  Description of Artificial Sequence: Synthetic oligonucleotide
  Antisense strand to SEQ ID NO: 1323646
acucaucagcaaugugugg

SEQ ID NO: 1323648 - RNA, 19 nt, Artificial Sequence
  Description of Artificial Sequence: Synthetic oligonucleotide
  Sense strand starting at position 1215 of SEQ ID NO: 1242120
cacauugcugaugagugaa

SEQ ID NO: 1323649 - RNA, 19 nt, Artificial Sequence
  Description of Artificial Sequence: Synthetic oligonucleotide
  Antisense strand to SEQ ID NO: 1323648
uucacucaucagcaaugug

SEQ ID NO: 1323650 - RNA, 19 nt, Artificial Sequence
  Description of Artificial Sequence: Synthetic oligonucleotide
  Sense strand starting at position 1227 of SEQ ID NO: 1242120
gagugaaucugggcucaga

SEQ ID NO: 1323651 - RNA, 19 nt, Artificial Sequence
  Description of Artificial Sequence: Synthetic oligonucleotide
  Antisense strand to SEQ ID NO: 1323650
ucugagcccagauucacuc

SEQ ID NO: 1323652 - RNA, 19 nt, Artificial Sequence
  Description of Artificial Sequence: Synthetic oligonucleotide
  Sense strand starting at position 1250 of SEQ ID NO: 1242120
caaaguagguugcucagaa

SEQ ID NO: 1323653 - RNA, 19 nt, Artificial Sequence
  Description of Artificial Sequence: Synthetic oligonucleotide
  Antisense strand to SEQ ID NO: 1323652
uucugagcaaccuacuuug

SEQ ID NO: 1323654 - RNA, 19 nt, Artificial Sequence
  Description of Artificial Sequence: Synthetic oligonucleotide
  Sense strand starting at position 1251 of SEQ ID NO: 1242120
aaaguagguugcucagaau

SEQ ID NO: 1323655 - RNA, 19 nt, Artificial Sequence
  Description of Artificial Sequence: Synthetic oligonucleotide
  Antisense strand to SEQ ID NO: 1323654
auucugagcaaccuacuuu

SEQ ID NO: 1323656 - RNA, 19 nt, Artificial Sequence
  Description of Artificial Sequence: Synthetic oligonucleotide
  Sense strand starting at position 1408 of SEQ ID NO: 1242120
ggaggugaccacugguaga

SEQ ID NO: 1323657 - RNA, 19 nt, Artificial Sequence
  Description of Artificial Sequence: Synthetic oligonucleotide
  Antisense strand to SEQ ID NO: 1323656
ucuaccaguggucaccucc

SEQ ID NO: 1323658 - RNA, 19 nt, Artificial Sequence
  Description of Artificial Sequence: Synthetic oligonucleotide
  Sense strand starting at position 1450 of SEQ ID NO: 1242120
ugcauucucugacucagaa

SEQ ID NO: 1323659 - RNA, 19 nt, Artificial Sequence
  Description of Artificial Sequence: Synthetic oligonucleotide
  Antisense strand to SEQ ID NO: 1323658
uucugagucagagaaugca

SEQ ID NO: 1323660 - RNA, 19 nt, Artificial Sequence
  Description of Artificial Sequence: Synthetic oligonucleotide
  Sense strand starting at position 1755 of SEQ ID NO: 1242120
aggccaauuugugcucuua

SEQ ID NO: 1323661 - RNA, 19 nt, Artificial Sequence
  Description of Artificial Sequence: Synthetic oligonucleotide
  Antisense strand to SEQ ID NO: 1323660
uaagagcacaaauuggccu

SEQ ID NO: 1323662 - RNA, 19 nt, Artificial Sequence
  Description of Artificial Sequence: Synthetic oligonucleotide
  Sense strand starting at position 1757 of SEQ ID NO: 1242120
gccaauuugugcucuuauc

SEQ ID NO: 1323663 - RNA, 19 nt, Artificial Sequence
  Description of Artificial Sequence: Synthetic oligonucleotide
  Antisense strand to SEQ ID NO: 1323662
gauaagagcacaaauuggc

SEQ ID NO: 1323664 - RNA, 19 nt, Artificial Sequence
  Description of Artificial Sequence: Synthetic oligonucleotide
  Sense strand starting at position 2242 of SEQ ID NO: 1242120
ugaagacccugacucuuua

SEQ ID NO: 1323665 - RNA, 19 nt, Artificial Sequence
  Description of Artificial Sequence: Synthetic oligonucleotide
  Antisense strand to SEQ ID NO: 1323664
uaaagagucagggucuuca

SEQ ID NO: 1323666 - RNA, 19 nt, Artificial Sequence
  Description of Artificial Sequence: Synthetic oligonucleotide
  Sense strand starting at position 2639 of SEQ ID NO: 1242120
auagcuaugcaauacuuga

SEQ ID NO: 1323667 - RNA, 19 nt, Artificial Sequence
  Description of Artificial Sequence: Synthetic oligonucleotide
  Antisense strand to SEQ ID NO: 1323666
ucaaguauugcauagcuau

SEQ ID NO: 1323668 - RNA, 19 nt, Artificial Sequence
  Description of Artificial Sequence: Synthetic oligonucleotide
  Sense strand starting at position 2644 of SEQ ID NO: 1242120
uaugcaauacuugaagagu

SEQ ID NO: 1323669 - RNA, 19 nt, Artificial Sequence
  Description of Artificial Sequence: Synthetic oligonucleotide
  Antisense strand to SEQ ID NO: 1323668
acucuucaaguauugcaua

SEQ ID NO: 1323670 - RNA, 19 nt, Artificial Sequence
  Description of Artificial Sequence: Synthetic oligonucleotide
  Sense strand starting at position 2652 of SEQ ID NO: 1242120
acuugaagaguuuggauua

SEQ ID NO: 1323671 - RNA, 19 nt, Artificial Sequence
  Description of Artificial Sequence: Synthetic oligonucleotide
  Antisense strand to SEQ ID NO: 1323670
uaauccaaacucuucaagu

SEQ ID NO: 1323672 - RNA, 19 nt, Artificial Sequence
  Description of Artificial Sequence: Synthetic oligonucleotide
  Sense strand starting at position 2659 of SEQ ID NO: 1242120
gaguuuggauuaucacaca

SEQ ID NO: 1323673 - RNA, 19 nt, Artificial Sequence
  Description of Artificial Sequence: Synthetic oligonucleotide
  Antisense strand to SEQ ID NO: 1323672
ugugugauaauccaaacuc

SEQ ID NO: 1323674 - RNA, 19 nt, Artificial Sequence
  Description of Artificial Sequence: Synthetic oligonucleotide
  Sense strand starting at position 2906 of SEQ ID NO: 1242120
uguauuugauugucugcaa

SEQ ID NO: 1323675 - RNA, 19 nt, Artificial Sequence
  Description of Artificial Sequence: Synthetic oligonucleotide
  Antisense strand to SEQ ID NO: 1323674
uugcagacaaucaaauaca

SEQ ID NO: 1323676 - RNA, 19 nt, Artificial Sequence
  Description of Artificial Sequence: Synthetic oligonucleotide
  Sense strand starting at position 2907 of SEQ ID NO: 1242120
guauuugauugucugcaag

SEQ ID NO: 1323677 - RNA, 19 nt, Artificial Sequence
  Description of Artificial Sequence: Synthetic oligonucleotide
  Antisense strand to SEQ ID NO: 1323676
cuugcagacaaucaaauac

SEQ ID NO: 1323678 - RNA, 19 nt, Artificial Sequence
  Description of Artificial Sequence: Synthetic oligonucleotide
  Sense strand starting at position 2910 of SEQ ID NO: 1242120
uuugauugucugcaagaga

SEQ ID NO: 1323679 - RNA, 19 nt, Artificial Sequence
  Description of Artificial Sequence: Synthetic oligonucleotide
  Antisense strand to SEQ ID NO: 1323678
ucucuugcagacaaucaaa

SEQ ID NO: 1323680 - RNA, 19 nt, Artificial Sequence
  Description of Artificial Sequence: Synthetic oligonucleotide
  Sense strand starting at position 3010 of SEQ ID NO: 1242120
ggcuuccuuccagagagga

SEQ ID NO: 1323681 - RNA, 19 nt, Artificial Sequence
  Description of Artificial Sequence: Synthetic oligonucleotide
  Antisense strand to SEQ ID NO: 1323680
uccucucuggaaggaagcc

SEQ ID NO: 1323682 - RNA, 19 nt, Artificial Sequence
  Description of Artificial Sequence: Synthetic oligonucleotide
  Sense strand starting at position 3044 of SEQ ID NO: 1242120
acaaaugcauccuuuggga

SEQ ID NO: 1323683 - RNA, 19 nt, Artificial Sequence
  Description of Artificial Sequence: Synthetic oligonucleotide
  Antisense strand to SEQ ID NO: 1323682
ucccaaaggaugcauuugu

SEQ ID NO: 1323684 - RNA, 19 nt, Artificial Sequence
  Description of Artificial Sequence: Synthetic oligonucleotide
  Sense strand starting at position 3076 of SEQ ID NO: 1242120
ggcaaauauccaugaccug

SEQ ID NO: 1323685 - RNA, 19 nt, Artificial Sequence
  Description of Artificial Sequence: Synthetic oligonucleotide
  Antisense strand to SEQ ID NO: 1323684
caggucauggauauuugcc

SEQ ID NO: 1323686 - RNA, 19 nt, Artificial Sequence
  Description of Artificial Sequence: Synthetic oligonucleotide
  Sense strand starting at position 3205 of SEQ ID NO: 1242120
ugagcuuuaggagagcauu

SEQ ID NO: 1323687 - RNA, 19 nt, Artificial Sequence
  Description of Artificial Sequence: Synthetic oligonucleotide
  Antisense strand to SEQ ID NO: 1323686
aaugcucuccuaaagcuca

SEQ ID NO: 1323688 - RNA, 19 nt, Artificial Sequence
  Description of Artificial Sequence: Synthetic oligonucleotide
  Sense strand starting at position 3208 of SEQ ID NO: 1242120
gcuuuaggagagcauuaug

SEQ ID NO: 1323689 - RNA, 19 nt, Artificial Sequence
  Description of Artificial Sequence: Synthetic oligonucleotide
  Antisense strand to SEQ ID NO: 1323688
cauaaugcucuccuaaagc

SEQ ID NO: 1323690 - RNA, 19 nt, Artificial Sequence
  Description of Artificial Sequence: Synthetic oligonucleotide
  Sense strand starting at position 3300 of SEQ ID NO: 1242120
gagucauggcauuagaagc

SEQ ID NO: 1323691 - RNA, 19 nt, Artificial Sequence
  Description of Artificial Sequence: Synthetic oligonucleotide
  Antisense strand to SEQ ID NO: 1323690
gcuucuaaugccaugacuc

SEQ ID NO: 1323692 - RNA, 19 nt, Artificial Sequence
  Description of Artificial Sequence: Synthetic oligonucleotide
  Sense strand starting at position 3319 of SEQ ID NO: 1242120
uccaaauauuggccugaug

SEQ ID NO: 1323693 - RNA, 19 nt, Artificial Sequence
  Description of Artificial Sequence: Synthetic oligonucleotide
  Antisense strand to SEQ ID NO: 1323692
caucaggccaauauuugga

SEQ ID NO: 1323694 - RNA, 19 nt, Artificial Sequence
  Description of Artificial Sequence: Synthetic oligonucleotide
  Sense strand starting at position 3327 of SEQ ID NO: 1242120
uuggccugaugaucucuaa

SEQ ID NO: 1323695 - RNA, 19 nt, Artificial Sequence
  Description of Artificial Sequence: Synthetic oligonucleotide
  Antisense strand to SEQ ID NO: 1323694
uuagagaucaucaggccaa

SEQ ID NO: 1323696 - RNA, 19 nt, Artificial Sequence
  Description of Artificial Sequence: Synthetic oligonucleotide
  Sense strand starting at position 3331 of SEQ ID NO: 1242120
ccugaugaucucuaagucu

SEQ ID NO: 1323697 - RNA, 19 nt, Artificial Sequence
  Description of Artificial Sequence: Synthetic oligonucleotide
  Antisense strand to SEQ ID NO: 1323696
agacuuagagaucaucagg

SEQ ID NO: 1323698 - RNA, 19 nt, Artificial Sequence
  Description of Artificial Sequence: Synthetic oligonucleotide
  Sense strand starting at position 3346 of SEQ ID NO: 1242120
gucucuuguccacaagaga

SEQ ID NO: 1323699 - RNA, 19 nt, Artificial Sequence
  Description of Artificial Sequence: Synthetic oligonucleotide
  Antisense strand to SEQ ID NO: 1323698
ucucuuguggacaagagac

SEQ ID NO: 1323700 - RNA, 19 nt, Artificial Sequence
  Description of Artificial Sequence: Synthetic oligonucleotide
  Sense strand starting at position 3621 of SEQ ID NO: 1242120
uaguguuuccuggaaccau

SEQ ID NO: 1323701 - RNA, 19 nt, Artificial Sequence
  Description of Artificial Sequence: Synthetic oligonucleotide
  Antisense strand to SEQ ID NO: 1323700
augguuccaggaaacacua

SEQ ID NO: 1323702 - RNA, 19 nt, Artificial Sequence
  Description of Artificial Sequence: Synthetic oligonucleotide
  Sense strand starting at position 3806 of SEQ ID NO: 1242120
gggagaguuuaggcugauu

SEQ ID NO: 1323703 - RNA, 19 nt, Artificial Sequence
  Description of Artificial Sequence: Synthetic oligonucleotide
  Antisense strand to SEQ ID NO: 1323702
aaucagccuaaacucuccc

SEQ ID NO: 1323704 - RNA, 19 nt, Artificial Sequence
  Description of Artificial Sequence: Synthetic oligonucleotide
  Sense strand starting at position 3827 of SEQ ID NO: 1242120
uuauaagagggauguuagu

SEQ ID NO: 1323705 - RNA, 19 nt, Artificial Sequence
  Description of Artificial Sequence: Synthetic oligonucleotide
  Antisense strand to SEQ ID NO: 1323704
acuaacaucccucuuauaa

SEQ ID NO: 1323706 - RNA, 19 nt, Artificial Sequence
  Description of Artificial Sequence: Synthetic oligonucleotide
  Sense strand starting at position 235 of SEQ ID NO: 1242121
acucuaucuuaagugaguu

SEQ ID NO: 1323707 - RNA, 19 nt, Artificial Sequence
  Description of Artificial Sequence: Synthetic oligonucleotide
  Antisense strand to SEQ ID NO: 1323706
aacucacuuaagauagagu

SEQ ID NO: 1323708 - RNA, 19 nt, Artificial Sequence
  Description of Artificial Sequence: Synthetic oligonucleotide
  Sense strand starting at position 292 of SEQ ID NO: 1242121
gauaauaggugcucaggaa

SEQ ID NO: 1323709 - RNA, 19 nt, Artificial Sequence
  Description of Artificial Sequence: Synthetic oligonucleotide
  Antisense strand to SEQ ID NO: 1323708
uuccugagcaccuauuauc

SEQ ID NO: 1323710 - RNA, 19 nt, Artificial Sequence
  Description of Artificial Sequence: Synthetic oligonucleotide
  Sense strand starting at position 333 of SEQ ID NO: 1242121
gcaugugaauaauccauuc

SEQ ID NO: 1323711 - RNA, 19 nt, Artificial Sequence
  Description of Artificial Sequence: Synthetic oligonucleotide
  Antisense strand to SEQ ID NO: 1323710
gaauggauuauucacaugc

SEQ ID NO: 1323712 - RNA, 19 nt, Artificial Sequence
  Description of Artificial Sequence: Synthetic oligonucleotide
  Sense strand starting at position 360 of SEQ ID NO: 1242121
ugcugaggucuugaaauac

SEQ ID NO: 1323713 - RNA, 19 nt, Artificial Sequence
  Description of Artificial Sequence: Synthetic oligonucleotide
  Antisense strand to SEQ ID NO: 1323712
guauuucaagaccucagca

SEQ ID NO: 1323714 - RNA, 19 nt, Artificial Sequence
  Description of Artificial Sequence: Synthetic oligonucleotide
  Sense strand starting at position 389 of SEQ ID NO: 1242121
ucauuuaggugagcgcuaa

SEQ ID NO: 1323715 - RNA, 19 nt, Artificial Sequence
  Description of Artificial Sequence: Synthetic oligonucleotide
  Antisense strand to SEQ ID NO: 1323714
uuagcgcucaccuaaauga

SEQ ID NO: 1323716 - RNA, 19 nt, Artificial Sequence
  Description of Artificial Sequence: Synthetic oligonucleotide
  Sense strand starting at position 390 of SEQ ID NO: 1242121
cauuuaggugagcgcuaau

SEQ ID NO: 1323717 - RNA, 19 nt, Artificial Sequence
  Description of Artificial Sequence: Synthetic oligonucleotide
  Antisense strand to SEQ ID NO: 1323716
auuagcgcucaccuaaaug

SEQ ID NO: 1323718 - RNA, 19 nt, Artificial Sequence
  Description of Artificial Sequence: Synthetic oligonucleotide
  Sense strand starting at position 400 of SEQ ID NO: 1242121
agcgcuaaucuagauacau

SEQ ID NO: 1323719 - RNA, 19 nt, Artificial Sequence
  Description of Artificial Sequence: Synthetic oligonucleotide
  Antisense strand to SEQ ID NO: 1323718
auguaucuagauuagcgcu

SEQ ID NO: 1323720 - RNA, 19 nt, Artificial Sequence
  Description of Artificial Sequence: Synthetic oligonucleotide
  Sense strand starting at position 544 of SEQ ID NO: 1242121
caauuaagugagugcagga

SEQ ID NO: 1323721 - RNA, 19 nt, Artificial Sequence
  Description of Artificial Sequence: Synthetic oligonucleotide
  Antisense strand to SEQ ID NO: 1323720
uccugcacucacuuaauug

SEQ ID NO: 1323722 - RNA, 19 nt, Artificial Sequence
  Description of Artificial Sequence: Synthetic oligonucleotide
  Sense strand starting at position 549 of SEQ ID NO: 1242121
aagugagugcaggacauau

SEQ ID NO: 1323723 - RNA, 19 nt, Artificial Sequence
  Description of Artificial Sequence: Synthetic oligonucleotide
  Antisense strand to SEQ ID NO: 1323722
auauguccugcacucacuu

SEQ ID NO: 1323724 - RNA, 19 nt, Artificial Sequence
  Description of Artificial Sequence: Synthetic oligonucleotide
  Sense strand starting at position 551 of SEQ ID NO: 1242121
gugagugcaggacauauua

SEQ ID NO: 1323725 - RNA, 19 nt, Artificial Sequence
  Description of Artificial Sequence: Synthetic oligonucleotide
  Antisense strand to SEQ ID NO: 1323724
uaauauguccugcacucac

SEQ ID NO: 1323726 - RNA, 19 nt, Artificial Sequence
  Description of Artificial Sequence: Synthetic oligonucleotide
  Sense strand starting at position 574 of SEQ ID NO: 1242121
aagucacaucauggguuau

SEQ ID NO: 1323727 - RNA, 19 nt, Artificial Sequence
  Description of Artificial Sequence: Synthetic oligonucleotide
  Antisense strand to SEQ ID NO: 1323726
auaacccaugaugugacuu

SEQ ID NO: 1323728 - RNA, 19 nt, Artificial Sequence
  Description of Artificial Sequence: Synthetic oligonucleotide
  Sense strand starting at position 576 of SEQ ID NO: 1242121
gucacaucauggguuauag

SEQ ID NO: 1323729 - RNA, 19 nt, Artificial Sequence
  Description of Artificial Sequence: Synthetic oligonucleotide
  Antisense strand to SEQ ID NO: 1323728
cuauaacccaugaugugac

SEQ ID NO: 1323730 - RNA, 19 nt, Artificial Sequence
  Description of Artificial Sequence: Synthetic oligonucleotide
  Sense strand starting at position 741 of SEQ ID NO: 1242121
acuggaaugucuucccuau

SEQ ID NO: 1323731 - RNA, 19 nt, Artificial Sequence
  Description of Artificial Sequence: Synthetic oligonucleotide
  Antisense strand to SEQ ID NO: 1323730
auagggaagacauuccagu

SEQ ID NO: 1323732 - RNA, 19 nt, Artificial Sequence
  Description of Artificial Sequence: Synthetic oligonucleotide
  Sense strand starting at position 788 of SEQ ID NO: 1242121
aggagaaaugucuguaugu

SEQ ID NO: 1323733 - RNA, 19 nt, Artificial Sequence
  Description of Artificial Sequence: Synthetic oligonucleotide
  Antisense strand to SEQ ID NO: 1323732
acauacagacauuucuccu

SEQ ID NO: 1323734 - RNA, 19 nt, Artificial Sequence
  Description of Artificial Sequence: Synthetic oligonucleotide
  Sense strand starting at position 789 of SEQ ID NO: 1242121
ggagaaaugucuguauguu

SEQ ID NO: 1323735 - RNA, 19 nt, Artificial Sequence
  Description of Artificial Sequence: Synthetic oligonucleotide
  Antisense strand to SEQ ID NO: 1323734
aacauacagacauuucucc

SEQ ID NO: 1323736 - RNA, 19 nt, Artificial Sequence
  Description of Artificial Sequence: Synthetic oligonucleotide
  Sense strand starting at position 790 of SEQ ID NO: 1242121
gagaaaugucuguauguug

SEQ ID NO: 1323737 - RNA, 19 nt, Artificial Sequence
  Description of Artificial Sequence: Synthetic oligonucleotide
  Antisense strand to SEQ ID NO: 1323736
caacauacagacauuucuc

SEQ ID NO: 1323738 - RNA, 19 nt, Artificial Sequence
  Description of Artificial Sequence: Synthetic oligonucleotide
  Sense strand starting at position 829 of SEQ ID NO: 1242121
cacugaucccaugguuuag

SEQ ID NO: 1323739 - RNA, 19 nt, Artificial Sequence
  Description of Artificial Sequence: Synthetic oligonucleotide
  Antisense strand to SEQ ID NO: 1323738
cuaaaccaugggaucagug

SEQ ID NO: 1323740 - RNA, 19 nt, Artificial Sequence
  Description of Artificial Sequence: Synthetic oligonucleotide
  Sense strand starting at position 1206 of SEQ ID NO: 1242121
auaagucuguuucuauaag

SEQ ID NO: 1323741 - RNA, 19 nt, Artificial Sequence
  Description of Artificial Sequence: Synthetic oligonucleotide
  Antisense strand to SEQ ID NO: 1323740
cuuauagaaacagacuuau

SEQ ID NO: 1323742 - RNA, 19 nt, Artificial Sequence
  Description of Artificial Sequence: Synthetic oligonucleotide
  Sense strand starting at position 1238 of SEQ ID NO: 1242121
ugugauuuggccugccuau

SEQ ID NO: 1323743 - RNA, 19 nt, Artificial Sequence
  Description of Artificial Sequence: Synthetic oligonucleotide
  Antisense strand to SEQ ID NO: 1323742
auaggcaggccaaaucaca

SEQ ID NO: 1323744 - RNA, 19 nt, Artificial Sequence
  Description of Artificial Sequence: Synthetic oligonucleotide
  Sense strand starting at position 1254 of SEQ ID NO: 1242121
uaugguaugcucuauaaug

SEQ ID NO: 1323745 - RNA, 19 nt, Artificial Sequence
  Description of Artificial Sequence: Synthetic oligonucleotide
  Antisense strand to SEQ ID NO: 1323744
cauuauagagcauaccaua

SEQ ID NO: 1323746 - RNA, 19 nt, Artificial Sequence
  Description of Artificial Sequence: Synthetic oligonucleotide
  Sense strand starting at position 1266 of SEQ ID NO: 1242121
uauaaugccugucuagaga

SEQ ID NO: 1323747 - RNA, 19 nt, Artificial Sequence
  Description of Artificial Sequence: Synthetic oligonucleotide
  Antisense strand to SEQ ID NO: 1323746
ucucuagacaggcauuaua

SEQ ID NO: 1323748 - RNA, 19 nt, Artificial Sequence
  Description of Artificial Sequence: Synthetic oligonucleotide
  Sense strand starting at position 1296 of SEQ ID NO: 1242121
caguguauugacuacugca

SEQ ID NO: 1323749 - RNA, 19 nt, Artificial Sequence
  Description of Artificial Sequence: Synthetic oligonucleotide
  Antisense strand to SEQ ID NO: 1323748
ugcaguagucaauacacug

SEQ ID NO: 1323750 - RNA, 19 nt, Artificial Sequence
  Description of Artificial Sequence: Synthetic oligonucleotide
  Sense strand starting at position 1332 of SEQ ID NO: 1242121
gggaucuaggcucaguuua

SEQ ID NO: 1323751 - RNA, 19 nt, Artificial Sequence
  Description of Artificial Sequence: Synthetic oligonucleotide
  Antisense strand to SEQ ID NO: 1323750
uaaacugagccuagauccc

SEQ ID NO: 1323752 - RNA, 19 nt, Artificial Sequence
  Description of Artificial Sequence: Synthetic oligonucleotide
  Sense strand starting at position 1343 of SEQ ID NO: 1242121
ucaguuuaccuuggaguga

SEQ ID NO: 1323753 - RNA, 19 nt, Artificial Sequence
  Description of Artificial Sequence: Synthetic oligonucleotide
  Antisense strand to SEQ ID NO: 1323752
ucacuccaagguaaacuga

SEQ ID NO: 1323754 - RNA, 19 nt, Artificial Sequence
  Description of Artificial Sequence: Synthetic oligonucleotide
  Sense strand starting at position 1347 of SEQ ID NO: 1242121
uuuaccuuggagugacaua

SEQ ID NO: 1323755 - RNA, 19 nt, Artificial Sequence
  Description of Artificial Sequence: Synthetic oligonucleotide
  Antisense strand to SEQ ID NO: 1323754
uaugucacuccaagguaaa

SEQ ID NO: 1323756 - RNA, 19 nt, Artificial Sequence
  Description of Artificial Sequence: Synthetic oligonucleotide
  Sense strand starting at position 2061 of SEQ ID NO: 1242121
acacgaguccuggaucuga

SEQ ID NO: 1323757 - RNA, 19 nt, Artificial Sequence
  Description of Artificial Sequence: Synthetic oligonucleotide
  Antisense strand to SEQ ID NO: 1323756
ucagauccaggacucgugu

SEQ ID NO: 1323758 - RNA, 19 nt, Artificial Sequence
  Description of Artificial Sequence: Synthetic oligonucleotide
  Sense strand starting at position 2114 of SEQ ID NO: 1242121
augggcagaucauccuuua

SEQ ID NO: 1323759 - RNA, 19 nt, Artificial Sequence
  Description of Artificial Sequence: Synthetic oligonucleotide
  Antisense strand to SEQ ID NO: 1323758
uaaaggaugaucugcccau

SEQ ID NO: 1323760 - RNA, 19 nt, Artificial Sequence
  Description of Artificial Sequence: Synthetic oligonucleotide
  Sense strand starting at position 2117 of SEQ ID NO: 1242121
ggcagaucauccuuuaaga

SEQ ID NO: 1323761 - RNA, 19 nt, Artificial Sequence
  Description of Artificial Sequence: Synthetic oligonucleotide
  Antisense strand to SEQ ID NO: 1323760
ucuuaaaggaugaucugcc

SEQ ID NO: 1323762 - RNA, 19 nt, Artificial Sequence
  Description of Artificial Sequence: Synthetic oligonucleotide
  Sense strand starting at position 2374 of SEQ ID NO: 1242121
ggaagccauucuuuaaaca

SEQ ID NO: 1323763 - RNA, 19 nt, Artificial Sequence
  Description of Artificial Sequence: Synthetic oligonucleotide
  Antisense strand to SEQ ID NO: 1323762
uguuuaaagaauggcuucc

SEQ ID NO: 1323764 - RNA, 19 nt, Artificial Sequence
  Description of Artificial Sequence: Synthetic oligonucleotide
  Sense strand starting at position 2399 of SEQ ID NO: 1242121
ugcagugaacuccagucua

SEQ ID NO: 1323765 - RNA, 19 nt, Artificial Sequence
  Description of Artificial Sequence: Synthetic oligonucleotide
  Antisense strand to SEQ ID NO: 1323764
uagacuggaguucacugca

SEQ ID NO: 1323766 - RNA, 19 nt, Artificial Sequence
  Description of Artificial Sequence: Synthetic oligonucleotide
  Sense strand starting at position 2488 of SEQ ID NO: 1242121
ugauaacucccauggcauc

SEQ ID NO: 1323767 - RNA, 19 nt, Artificial Sequence
  Description of Artificial Sequence: Synthetic oligonucleotide
  Antisense strand to SEQ ID NO: 1323766
gaugccaugggaguuauca

SEQ ID NO: 1323768 - RNA, 19 nt, Artificial Sequence
  Description of Artificial Sequence: Synthetic oligonucleotide
  Sense strand starting at position 2601 of SEQ ID NO: 1242121
uuggaagucuuaccuaaca

SEQ ID NO: 1323769 - RNA, 19 nt, Artificial Sequence
  Description of Artificial Sequence: Synthetic oligonucleotide
  Antisense strand to SEQ ID NO: 1323768
uguuagguaagacuuccaa

SEQ ID NO: 1323770 - RNA, 19 nt, Artificial Sequence
  Description of Artificial Sequence: Synthetic oligonucleotide
  Sense strand starting at position 3183 of SEQ ID NO: 1242121
uguauuagcucuuugauuu

SEQ ID NO: 1323771 - RNA, 19 nt, Artificial Sequence
  Description of Artificial Sequence: Synthetic oligonucleotide
  Antisense strand to SEQ ID NO: 1323770
aaaucaaagagcuaauaca

SEQ ID NO: 1323772 - RNA, 19 nt, Artificial Sequence
  Description of Artificial Sequence: Synthetic oligonucleotide
  Sense strand starting at position 3460 of SEQ ID NO: 1242121
gucucuaagccuugaagga

SEQ ID NO: 1323773 - RNA, 19 nt, Artificial Sequence
  Description of Artificial Sequence: Synthetic oligonucleotide
  Antisense strand to SEQ ID NO: 1323772
uccuucaaggcuuagagac

SEQ ID NO: 1323774 - RNA, 19 nt, Artificial Sequence
  Description of Artificial Sequence: Synthetic oligonucleotide
  Sense strand starting at position 3492 of SEQ ID NO: 1242121
cugaacagauugguaucau

SEQ ID NO: 1323775 - RNA, 19 nt, Artificial Sequence
  Description of Artificial Sequence: Synthetic oligonucleotide
  Antisense strand to SEQ ID NO: 1323774
augauaccaaucuguucag

SEQ ID NO: 1323776 - RNA, 19 nt, Artificial Sequence
  Description of Artificial Sequence: Synthetic oligonucleotide
  Sense strand starting at position 3568 of SEQ ID NO: 1242121
aguaaucagcuugauaaca

SEQ ID NO: 1323777 - RNA, 19 nt, Artificial Sequence
  Description of Artificial Sequence: Synthetic oligonucleotide
  Antisense strand to SEQ ID NO: 1323776
uguuaucaagcugauuacu

SEQ ID NO: 1323778 - RNA, 19 nt, Artificial Sequence
  Description of Artificial Sequence: Synthetic oligonucleotide
  Sense strand starting at position 3592 of SEQ ID NO: 1242121
ccaacaaugucuguuugaa

SEQ ID NO: 1323779 - RNA, 19 nt, Artificial Sequence
  Description of Artificial Sequence: Synthetic oligonucleotide
  Antisense strand to SEQ ID NO: 1323778
uucaaacagacauuguugg

SEQ ID NO: 1323780 - RNA, 19 nt, Artificial Sequence
  Description of Artificial Sequence: Synthetic oligonucleotide
  Sense strand starting at position 3661 of SEQ ID NO: 1242121
ucucauaaacucuguggua

SEQ ID NO: 1323781 - RNA, 19 nt, Artificial Sequence
  Description of Artificial Sequence: Synthetic oligonucleotide
  Antisense strand to SEQ ID NO: 1323780
uaccacagaguuuaugaga

SEQ ID NO: 1323782 - RNA, 19 nt, Artificial Sequence
  Description of Artificial Sequence: Synthetic oligonucleotide
  Sense strand starting at position 3731 of SEQ ID NO: 1242121
uuaggugacuuucucaaga

SEQ ID NO: 1323783 - RNA, 19 nt, Artificial Sequence
  Description of Artificial Sequence: Synthetic oligonucleotide
  Antisense strand to SEQ ID NO: 1323782
ucuugagaaagucaccuaa

SEQ ID NO: 1323784 - RNA, 19 nt, Artificial Sequence
  Description of Artificial Sequence: Synthetic oligonucleotide
  Sense strand starting at position 3887 of SEQ ID NO: 1242121
ggaucuuuauccucagcac

SEQ ID NO: 1323785 - RNA, 19 nt, Artificial Sequence
  Description of Artificial Sequence: Synthetic oligonucleotide
  Antisense strand to SEQ ID NO: 1323784
gugcugaggauaaagaucc

SEQ ID NO: 1323786 - RNA, 19 nt, Artificial Sequence
  Description of Artificial Sequence: Synthetic oligonucleotide
  Sense strand starting at position 76 of SEQ ID NO: 1242122
uugguagucucccuucuua

SEQ ID NO: 1323787 - RNA, 19 nt, Artificial Sequence
  Description of Artificial Sequence: Synthetic oligonucleotide
  Antisense strand to SEQ ID NO: 1323786
uaagaagggagacuaccaa

SEQ ID NO: 1323788 - RNA, 19 nt, Artificial Sequence
  Description of Artificial Sequence: Synthetic oligonucleotide
  Sense strand starting at position 161 of SEQ ID NO: 1242122
caagcuacagagugauuau

SEQ ID NO: 1323789 - RNA, 19 nt, Artificial Sequence
  Description of Artificial Sequence: Synthetic oligonucleotide
  Antisense strand to SEQ ID NO: 1323788
auaaucacucuguagcuug

SEQ ID NO: 1323790 - RNA, 19 nt, Artificial Sequence
  Description of Artificial Sequence: Synthetic oligonucleotide
  Sense strand starting at position 242 of SEQ ID NO: 1242122
caggaaguuaugugaggaa

SEQ ID NO: 1323791 - RNA, 19 nt, Artificial Sequence
  Description of Artificial Sequence: Synthetic oligonucleotide
  Antisense strand to SEQ ID NO: 1323790
uuccucacauaacuuccug

SEQ ID NO: 1323792 - RNA, 19 nt, Artificial Sequence
  Description of Artificial Sequence: Synthetic oligonucleotide
  Sense strand starting at position 255 of SEQ ID NO: 1242122
gaggaagagcucugccaaa

SEQ ID NO: 1323793 - RNA, 19 nt, Artificial Sequence
  Description of Artificial Sequence: Synthetic oligonucleotide
  Antisense strand to SEQ ID NO: 1323792
uuuggcagagcucuuccuc

SEQ ID NO: 1323794 - RNA, 19 nt, Artificial Sequence
  Description of Artificial Sequence: Synthetic oligonucleotide
  Sense strand starting at position 295 of SEQ ID NO: 1242122
cugguaaagugacaaauuu

SEQ ID NO: 1323795 - RNA, 19 nt, Artificial Sequence
  Description of Artificial Sequence: Synthetic oligonucleotide
  Antisense strand to SEQ ID NO: 1323794
aaauuugucacuuuaccag

SEQ ID NO: 1323796 - RNA, 19 nt, Artificial Sequence
  Description of Artificial Sequence: Synthetic oligonucleotide
  Sense strand starting at position 351 of SEQ ID NO: 1242122
ggcccuguugcacaucuaa

SEQ ID NO: 1323797 - RNA, 19 nt, Artificial Sequence
  Description of Artificial Sequence: Synthetic oligonucleotide
  Antisense strand to SEQ ID NO: 1323796
uuagaugugcaacagggcc

SEQ ID NO: 1323798 - RNA, 19 nt, Artificial Sequence
  Description of Artificial Sequence: Synthetic oligonucleotide
  Sense strand starting at position 410 of SEQ ID NO: 1242122
gggcuccugggacguauaa

SEQ ID NO: 1323799 - RNA, 19 nt, Artificial Sequence
  Description of Artificial Sequence: Synthetic oligonucleotide
  Antisense strand to SEQ ID NO: 1323798
uuauacgucccaggagccc

SEQ ID NO: 1323800 - RNA, 19 nt, Artificial Sequence
  Description of Artificial Sequence: Synthetic oligonucleotide
  Sense strand starting at position 412 of SEQ ID NO: 1242122
gcuccugggacguauaaau

SEQ ID NO: 1323801 - RNA, 19 nt, Artificial Sequence
  Description of Artificial Sequence: Synthetic oligonucleotide
  Antisense strand to SEQ ID NO: 1323800
auuuauacgucccaggagc

SEQ ID NO: 1323802 - RNA, 19 nt, Artificial Sequence
  Description of Artificial Sequence: Synthetic oligonucleotide
  Sense strand starting at position 423 of SEQ ID NO: 1242122
guauaaauaugacucuaug

SEQ ID NO: 1323803 - RNA, 19 nt, Artificial Sequence
  Description of Artificial Sequence: Synthetic oligonucleotide
  Antisense strand to SEQ ID NO: 1323802
cauagagucauauuuauac

SEQ ID NO: 1323804 - RNA, 19 nt, Artificial Sequence
  Description of Artificial Sequence: Synthetic oligonucleotide
  Sense strand starting at position 723 of SEQ ID NO: 1242122
aagacuccgucucuagaga

SEQ ID NO: 1323805 - RNA, 19 nt, Artificial Sequence
  Description of Artificial Sequence: Synthetic oligonucleotide
  Antisense strand to SEQ ID NO: 1323804
ucucuagagacggagucuu

SEQ ID NO: 1323806 - RNA, 19 nt, Artificial Sequence
  Description of Artificial Sequence: Synthetic oligonucleotide
  Sense strand starting at position 724 of SEQ ID NO: 1242122
agacuccgucucuagagaa

SEQ ID NO: 1323807 - RNA, 19 nt, Artificial Sequence
  Description of Artificial Sequence: Synthetic oligonucleotide
  Antisense strand to SEQ ID NO: 1323806
uucucuagagacggagucu

SEQ ID NO: 1323808 - RNA, 19 nt, Artificial Sequence
  Description of Artificial Sequence: Synthetic oligonucleotide
  Sense strand starting at position 831 of SEQ ID NO: 1242122
acuagucucgcucaguuua

SEQ ID NO: 1323809 - RNA, 19 nt, Artificial Sequence
  Description of Artificial Sequence: Synthetic oligonucleotide
  Antisense strand to SEQ ID NO: 1323808
uaaacugagcgagacuagu

SEQ ID NO: 1323810 - RNA, 19 nt, Artificial Sequence
  Description of Artificial Sequence: Synthetic oligonucleotide
  Sense strand starting at position 903 of SEQ ID NO: 1242122
ggagcaagaauucgaguua

SEQ ID NO: 1323811 - RNA, 19 nt, Artificial Sequence
  Description of Artificial Sequence: Synthetic oligonucleotide
  Antisense strand to SEQ ID NO: 1323810
uaacucgaauucuugcucc

SEQ ID NO: 1323812 - RNA, 19 nt, Artificial Sequence
  Description of Artificial Sequence: Synthetic oligonucleotide
  Sense strand starting at position 912 of SEQ ID NO: 1242122
auucgaguuaaacgaauug

SEQ ID NO: 1323813 - RNA, 19 nt, Artificial Sequence
  Description of Artificial Sequence: Synthetic oligonucleotide
  Antisense strand to SEQ ID NO: 1323812
caauucguuuaacucgaau

SEQ ID NO: 1323814 - RNA, 19 nt, Artificial Sequence
  Description of Artificial Sequence: Synthetic oligonucleotide
  Sense strand starting at position 1152 of SEQ ID NO: 1242122
uggccugccacugaugaau

SEQ ID NO: 1323815 - RNA, 19 nt, Artificial Sequence
  Description of Artificial Sequence: Synthetic oligonucleotide
  Antisense strand to SEQ ID NO: 1323814
auucaucaguggcaggcca

SEQ ID NO: 1323816 - RNA, 19 nt, Artificial Sequence
  Description of Artificial Sequence: Synthetic oligonucleotide
  Sense strand starting at position 1194 of SEQ ID NO: 1242122
gucugauacccuugaggag

SEQ ID NO: 1323817 - RNA, 19 nt, Artificial Sequence
  Description of Artificial Sequence: Synthetic oligonucleotide
  Antisense strand to SEQ ID NO: 1323816
cuccucaaggguaucagac

SEQ ID NO: 1323818 - RNA, 19 nt, Artificial Sequence
  Description of Artificial Sequence: Synthetic oligonucleotide
  Sense strand starting at position 1306 of SEQ ID NO: 1242122
gaagucaucgcgcuccuca

SEQ ID NO: 1323819 - RNA, 19 nt, Artificial Sequence
  Description of Artificial Sequence: Synthetic oligonucleotide
  Antisense strand to SEQ ID NO: 1323818
ugaggagcgcgaugacuuc

SEQ ID NO: 1323820 - RNA, 19 nt, Artificial Sequence
  Description of Artificial Sequence: Synthetic oligonucleotide
  Sense strand starting at position 1307 of SEQ ID NO: 1242122
aagucaucgcgcuccucau

SEQ ID NO: 1323821 - RNA, 19 nt, Artificial Sequence
  Description of Artificial Sequence: Synthetic oligonucleotide
  Antisense strand to SEQ ID NO: 1323820
augaggagcgcgaugacuu

SEQ ID NO: 1323822 - RNA, 19 nt, Artificial Sequence
  Description of Artificial Sequence: Synthetic oligonucleotide
  Sense strand starting at position 1308 of SEQ ID NO: 1242122
agucaucgcgcuccucauu

SEQ ID NO: 1323823 - RNA, 19 nt, Artificial Sequence
  Description of Artificial Sequence: Synthetic oligonucleotide
  Antisense strand to SEQ ID NO: 1323822
aaugaggagcgcgaugacu

SEQ ID NO: 1323824 - RNA, 19 nt, Artificial Sequence
  Description of Artificial Sequence: Synthetic oligonucleotide
  Sense strand starting at position 2019 of SEQ ID NO: 1242122
cugggaucucgcguuucuu

SEQ ID NO: 1323825 - RNA, 19 nt, Artificial Sequence
  Description of Artificial Sequence: Synthetic oligonucleotide
  Antisense strand to SEQ ID NO: 1323824
aagaaacgcgagaucccag

SEQ ID NO: 1323826 - RNA, 19 nt, Artificial Sequence
  Description of Artificial Sequence: Synthetic oligonucleotide
  Sense strand starting at position 2122 of SEQ ID NO: 1242122
uuuaguagccaagacugua

SEQ ID NO: 1323827 - RNA, 19 nt, Artificial Sequence
  Description of Artificial Sequence: Synthetic oligonucleotide
  Antisense strand to SEQ ID NO: 1323826
uacagucuuggcuacuaaa

SEQ ID NO: 1323828 - RNA, 19 nt, Artificial Sequence
  Description of Artificial Sequence: Synthetic oligonucleotide
  Sense strand starting at position 2142 of SEQ ID NO: 1242122
cccuuucugcggcaaucau

SEQ ID NO: 1323829 - RNA, 19 nt, Artificial Sequence
  Description of Artificial Sequence: Synthetic oligonucleotide
  Antisense strand to SEQ ID NO: 1323828
augauugccgcagaaaggg

SEQ ID NO: 1323830 - RNA, 19 nt, Artificial Sequence
  Description of Artificial Sequence: Synthetic oligonucleotide
  Sense strand starting at position 2151 of SEQ ID NO: 1242122
cggcaaucauuuccuccua

SEQ ID NO: 1323831 - RNA, 19 nt, Artificial Sequence
  Description of Artificial Sequence: Synthetic oligonucleotide
  Antisense strand to SEQ ID NO: 1323830
uaggaggaaaugauugccg

SEQ ID NO: 1323832 - RNA, 19 nt, Artificial Sequence
  Description of Artificial Sequence: Synthetic oligonucleotide
  Sense strand starting at position 2390 of SEQ ID NO: 1242122
agcgaucucucauugucaa

SEQ ID NO: 1323833 - RNA, 19 nt, Artificial Sequence
  Description of Artificial Sequence: Synthetic oligonucleotide
  Antisense strand to SEQ ID NO: 1323832
uugacaaugagagaucgcu

SEQ ID NO: 1323834 - RNA, 19 nt, Artificial Sequence
  Description of Artificial Sequence: Synthetic oligonucleotide
  Sense strand starting at position 2481 of SEQ ID NO: 1242122
aagggagucgccuggaaau

SEQ ID NO: 1323835 - RNA, 19 nt, Artificial Sequence
  Description of Artificial Sequence: Synthetic oligonucleotide
  Antisense strand to SEQ ID NO: 1323834
auuuccaggcgacucccuu

SEQ ID NO: 1323836 - RNA, 19 nt, Artificial Sequence
  Description of Artificial Sequence: Synthetic oligonucleotide
  Sense strand starting at position 2483 of SEQ ID NO: 1242122
gggagucgccuggaaaucu

SEQ ID NO: 1323837 - RNA, 19 nt, Artificial Sequence
  Description of Artificial Sequence: Synthetic oligonucleotide
  Antisense strand to SEQ ID NO: 1323836
agauuuccaggcgacuccc

SEQ ID NO: 1323838 - RNA, 19 nt, Artificial Sequence
  Description of Artificial Sequence: Synthetic oligonucleotide
  Sense strand starting at position 2491 of SEQ ID NO: 1242122
ccuggaaaucuguauuauu

SEQ ID NO: 1323839 - RNA, 19 nt, Artificial Sequence
  Description of Artificial Sequence: Synthetic oligonucleotide
  Antisense strand to SEQ ID NO: 1323838
aauaauacagauuuccagg

SEQ ID NO: 1323840 - RNA, 19 nt, Artificial Sequence
  Description of Artificial Sequence: Synthetic oligonucleotide
  Sense strand starting at position 2545 of SEQ ID NO: 1242122
guuugagaaacuuggacua

SEQ ID NO: 1323841 - RNA, 19 nt, Artificial Sequence
  Description of Artificial Sequence: Synthetic oligonucleotide
  Antisense strand to SEQ ID NO: 1323840
uaguccaaguuucucaaac

SEQ ID NO: 1323842 - RNA, 19 nt, Artificial Sequence
  Description of Artificial Sequence: Synthetic oligonucleotide
  Sense strand starting at position 2547 of SEQ ID NO: 1242122
uugagaaacuuggacuaua

SEQ ID NO: 1323843 - RNA, 19 nt, Artificial Sequence
  Description of Artificial Sequence: Synthetic oligonucleotide
  Antisense strand to SEQ ID NO: 1323842
uauaguccaaguuucucaa

SEQ ID NO: 1323844 - RNA, 19 nt, Artificial Sequence
  Description of Artificial Sequence: Synthetic oligonucleotide
  Sense strand starting at position 2583 of SEQ ID NO: 1242122
uuuagucugugcucaaaug

SEQ ID NO: 1323845 - RNA, 19 nt, Artificial Sequence
  Description of Artificial Sequence: Synthetic oligonucleotide
  Antisense strand to SEQ ID NO: 1323844
cauuugagcacagacuaaa

SEQ ID NO: 1323846 - RNA, 19 nt, Artificial Sequence
  Description of Artificial Sequence: Synthetic oligonucleotide
  Sense strand starting at position 2584 of SEQ ID NO: 1242122
uuagucugugcucaaauga

SEQ ID NO: 1323847 - RNA, 19 nt, Artificial Sequence
  Description of Artificial Sequence: Synthetic oligonucleotide
  Antisense strand to SEQ ID NO: 1323846
ucauuugagcacagacuaa

SEQ ID NO: 1323848 - RNA, 19 nt, Artificial Sequence
  Description of Artificial Sequence: Synthetic oligonucleotide
  Sense strand starting at position 2625 of SEQ ID NO: 1242122
gccaccaagcauugaguua

SEQ ID NO: 1323849 - RNA, 19 nt, Artificial Sequence
  Description of Artificial Sequence: Synthetic oligonucleotide
  Antisense strand to SEQ ID NO: 1323848
uaacucaaugcuugguggc

SEQ ID NO: 1323850 - RNA, 19 nt, Artificial Sequence
  Description of Artificial Sequence: Synthetic oligonucleotide
  Sense strand starting at position 2662 of SEQ ID NO: 1242122
ccgcuaguugcaucuguaa

SEQ ID NO: 1323851 - RNA, 19 nt, Artificial Sequence
  Description of Artificial Sequence: Synthetic oligonucleotide
  Antisense strand to SEQ ID NO: 1323850
uuacagaugcaacuagcgg

SEQ ID NO: 1323852 - RNA, 19 nt, Artificial Sequence
  Description of Artificial Sequence: Synthetic oligonucleotide
  Sense strand starting at position 2669 of SEQ ID NO: 1242122
uugcaucuguaaguuacau

SEQ ID NO: 1323853 - RNA, 19 nt, Artificial Sequence
  Description of Artificial Sequence: Synthetic oligonucleotide
  Antisense strand to SEQ ID NO: 1323852
auguaacuuacagaugcaa

SEQ ID NO: 1323854 - RNA, 19 nt, Artificial Sequence
  Description of Artificial Sequence: Synthetic oligonucleotide
  Sense strand starting at position 2677 of SEQ ID NO: 1242122
guaaguuacaucugaguau

SEQ ID NO: 1323855 - RNA, 19 nt, Artificial Sequence
  Description of Artificial Sequence: Synthetic oligonucleotide
  Antisense strand to SEQ ID NO: 1323854
auacucagauguaacuuac

SEQ ID NO: 1323856 - RNA, 19 nt, Artificial Sequence
  Description of Artificial Sequence: Synthetic oligonucleotide
  Sense strand starting at position 3042 of SEQ ID NO: 1242122
gcugcauugagcuacaaug

SEQ ID NO: 1323857 - RNA, 19 nt, Artificial Sequence
  Description of Artificial Sequence: Synthetic oligonucleotide
  Antisense strand to SEQ ID NO: 1323856
cauuguagcucaaugcagc

SEQ ID NO: 1323858 - RNA, 19 nt, Artificial Sequence
  Description of Artificial Sequence: Synthetic oligonucleotide
  Sense strand starting at position 3525 of SEQ ID NO: 1242122
acagaaagcuaauacagau

SEQ ID NO: 1323859 - RNA, 19 nt, Artificial Sequence
  Description of Artificial Sequence: Synthetic oligonucleotide
  Antisense strand to SEQ ID NO: 1323858
aucuguauuagcuuucugu

SEQ ID NO: 1323860 - RNA, 19 nt, Artificial Sequence
  Description of Artificial Sequence: Synthetic oligonucleotide
  Sense strand starting at position 3880 of SEQ ID NO: 1242122
ucuuauugagaaggugaua

SEQ ID NO: 1323861 - RNA, 19 nt, Artificial Sequence
  Description of Artificial Sequence: Synthetic oligonucleotide
  Antisense strand to SEQ ID NO: 1323860
uaucaccuucucaauaaga

SEQ ID NO: 1323862 - RNA, 19 nt, Artificial Sequence
  Description of Artificial Sequence: Synthetic oligonucleotide
  Sense strand starting at position 3908 of SEQ ID NO: 1242122
gguuaagccauguguggau

SEQ ID NO: 1323863 - RNA, 19 nt, Artificial Sequence
  Description of Artificial Sequence: Synthetic oligonucleotide
  Antisense strand to SEQ ID NO: 1323862
auccacacauggcuuaacc

SEQ ID NO: 1323864 - RNA, 19 nt, Artificial Sequence
  Description of Artificial Sequence: Synthetic oligonucleotide
  Sense strand starting at position 3961 of SEQ ID NO: 1242122
guggaaaugccuuaaggca

SEQ ID NO: 1323865 - RNA, 19 nt, Artificial Sequence
  Description of Artificial Sequence: Synthetic oligonucleotide
  Antisense strand to SEQ ID NO: 1323864
ugccuuaaggcauuuccac

SEQ ID NO: 1323866 - RNA, 19 nt, Artificial Sequence
  Description of Artificial Sequence: Synthetic oligonucleotide
  Sense strand starting at position 2745 of SEQ ID NO: 1242123
cgaagugacagguggaaua

SEQ ID NO: 1323867 - RNA, 19 nt, Artificial Sequence
  Description of Artificial Sequence: Synthetic oligonucleotide
  Antisense strand to SEQ ID NO: 1323866
uauuccaccugucacuucg

SEQ ID NO: 1323868 - RNA, 19 nt, Artificial Sequence
  Description of Artificial Sequence: Synthetic oligonucleotide
  Sense strand starting at position 3018 of SEQ ID NO: 1242123
uacugaagucgucgcaauu

SEQ ID NO: 1323869 - RNA, 19 nt, Artificial Sequence
  Description of Artificial Sequence: Synthetic oligonucleotide
  Antisense strand to SEQ ID NO: 1323868
aauugcgacgacuucagua

SEQ ID NO: 1323870 - RNA, 19 nt, Artificial Sequence
  Description of Artificial Sequence: Synthetic oligonucleotide
  Sense strand starting at position 3094 of SEQ ID NO: 1242123
cugagcuguucuccagacu

SEQ ID NO: 1323871 - RNA, 19 nt, Artificial Sequence
  Description of Artificial Sequence: Synthetic oligonucleotide
  Antisense strand to SEQ ID NO: 1323870
agucuggagaacagcucag

SEQ ID NO: 1323872 - RNA, 19 nt, Artificial Sequence
  Description of Artificial Sequence: Synthetic oligonucleotide
  Sense strand starting at position 3119 of SEQ ID NO: 1242123
ccaccuuagucccaaaguu

SEQ ID NO: 1323873 - RNA, 19 nt, Artificial Sequence
  Description of Artificial Sequence: Synthetic oligonucleotide
  Antisense strand to SEQ ID NO: 1323872
aacuuugggacuaaggugg

SEQ ID NO: 1323874 - RNA, 19 nt, Artificial Sequence
  Description of Artificial Sequence: Synthetic oligonucleotide
  Sense strand starting at position 3213 of SEQ ID NO: 1242123
cacugaaccugaggaguuu

SEQ ID NO: 1323875 - RNA, 19 nt, Artificial Sequence
  Description of Artificial Sequence: Synthetic oligonucleotide
  Antisense strand to SEQ ID NO: 1323874
aaacuccucagguucagug

SEQ ID NO: 1323876 - RNA, 19 nt, Artificial Sequence
  Description of Artificial Sequence: Synthetic oligonucleotide
  Sense strand starting at position 3226 of SEQ ID NO: 1242123
gaguuuaacucucaggacu

SEQ ID NO: 1323877 - RNA, 19 nt, Artificial Sequence
  Description of Artificial Sequence: Synthetic oligonucleotide
  Antisense strand to SEQ ID NO: 1323876
aguccugagaguuaaacuc

SEQ ID NO: 1323878 - RNA, 19 nt, Artificial Sequence
  Description of Artificial Sequence: Synthetic oligonucleotide
  Sense strand starting at position 3237 of SEQ ID NO: 1242123
ucaggacuccuagagcguu

SEQ ID NO: 1323879 - RNA, 19 nt, Artificial Sequence
  Description of Artificial Sequence: Synthetic oligonucleotide
  Antisense strand to SEQ ID NO: 1323878
aacgcucuaggaguccuga

SEQ ID NO: 1323880 - RNA, 19 nt, Artificial Sequence
  Description of Artificial Sequence: Synthetic oligonucleotide
  Sense strand starting at position 3317 of SEQ ID NO: 1242123
augugagguuugucuucuu

SEQ ID NO: 1323881 - RNA, 19 nt, Artificial Sequence
  Description of Artificial Sequence: Synthetic oligonucleotide
  Antisense strand to SEQ ID NO: 1323880
aagaagacaaaccucacau

SEQ ID NO: 1323882 - RNA, 19 nt, Artificial Sequence
  Description of Artificial Sequence: Synthetic oligonucleotide
  Sense strand starting at position 3499 of SEQ ID NO: 1242123
cuauaaggcuuuccagaau

SEQ ID NO: 1323883 - RNA, 19 nt, Artificial Sequence
  Description of Artificial Sequence: Synthetic oligonucleotide
  Antisense strand to SEQ ID NO: 1323882
auucuggaaagccuuauag

SEQ ID NO: 1323884 - RNA, 19 nt, Artificial Sequence
  Description of Artificial Sequence: Synthetic oligonucleotide
  Sense strand starting at position 3511 of SEQ ID NO: 1242123
ccagaauucugguucccuc

SEQ ID NO: 1323885 - RNA, 19 nt, Artificial Sequence
  Description of Artificial Sequence: Synthetic oligonucleotide
  Antisense strand to SEQ ID NO: 1323884
gagggaaccagaauucugg

SEQ ID NO: 1323886 - RNA, 19 nt, Artificial Sequence
  Description of Artificial Sequence: Synthetic oligonucleotide
  Sense strand starting at position 3599 of SEQ ID NO: 1242123
gggagacuugucugggcgu

SEQ ID NO: 1323887 - RNA, 19 nt, Artificial Sequence
  Description of Artificial Sequence: Synthetic oligonucleotide
  Antisense strand to SEQ ID NO: 1323886
acgcccagacaagucuccc

SEQ ID NO: 1323888 - RNA, 19 nt, Artificial Sequence
  Description of Artificial Sequence: Synthetic oligonucleotide
  Sense strand starting at position 3601 of SEQ ID NO: 1242123
gagacuugucugggcgugu

SEQ ID NO: 1323889 - RNA, 19 nt, Artificial Sequence
  Description of Artificial Sequence: Synthetic oligonucleotide
  Antisense strand to SEQ ID NO: 1323888
acacgcccagacaagucuc

SEQ ID NO: 1323890 - RNA, 19 nt, Artificial Sequence
  Description of Artificial Sequence: Synthetic oligonucleotide
  Sense strand starting at position 3890 of SEQ ID NO: 1242123
accagaacugagugugcua

SEQ ID NO: 1323891 - RNA, 19 nt, Artificial Sequence
  Description of Artificial Sequence: Synthetic oligonucleotide
  Antisense strand to SEQ ID NO: 1323890
uagcacacucaguucuggu

SEQ ID NO: 1323892 - RNA, 19 nt, Artificial Sequence
  Description of Artificial Sequence: Synthetic oligonucleotide
  Sense strand starting at position 3941 of SEQ ID NO: 1242123
gccucagucucauuccuga

SEQ ID NO: 1323893 - RNA, 19 nt, Artificial Sequence
  Description of Artificial Sequence: Synthetic oligonucleotide
  Antisense strand to SEQ ID NO: 1323892
ucaggaaugagacugaggc

SEQ ID NO: 1323894 - RNA, 19 nt, Artificial Sequence
  Description of Artificial Sequence: Synthetic oligonucleotide
  Sense strand starting at position 55 of SEQ ID NO: 1242124
ucuagaagguaugcaacuu

SEQ ID NO: 1323895 - RNA, 19 nt, Artificial Sequence
  Description of Artificial Sequence: Synthetic oligonucleotide
  Antisense strand to SEQ ID NO: 1323894
aaguugcauaccuucuaga

SEQ ID NO: 1323896 - RNA, 19 nt, Artificial Sequence
  Description of Artificial Sequence: Synthetic oligonucleotide
  Sense strand starting at position 694 of SEQ ID NO: 1242124
agugguugauggcuacaga

SEQ ID NO: 1323897 - RNA, 19 nt, Artificial Sequence
  Description of Artificial Sequence: Synthetic oligonucleotide
  Antisense strand to SEQ ID NO: 1323896
ucuguagccaucaaccacu

SEQ ID NO: 1323898 - RNA, 19 nt, Artificial Sequence
  Description of Artificial Sequence: Synthetic oligonucleotide
  Sense strand starting at position 695 of SEQ ID NO: 1242124
gugguugauggcuacagaa

SEQ ID NO: 1323899 - RNA, 19 nt, Artificial Sequence
  Description of Artificial Sequence: Synthetic oligonucleotide
  Antisense strand to SEQ ID NO: 1323898
uucuguagccaucaaccac

SEQ ID NO: 1323900 - RNA, 19 nt, Artificial Sequence
  Description of Artificial Sequence: Synthetic oligonucleotide
  Sense strand starting at position 697 of SEQ ID NO: 1242124
gguugauggcuacagaauu

SEQ ID NO: 1323901 - RNA, 19 nt, Artificial Sequence
  Description of Artificial Sequence: Synthetic oligonucleotide
  Antisense strand to SEQ ID NO: 1323900
aauucuguagccaucaacc

SEQ ID NO: 1323902 - RNA, 19 nt, Artificial Sequence
  Description of Artificial Sequence: Synthetic oligonucleotide
  Sense strand starting at position 751 of SEQ ID NO: 1242124
cgcuuuagaaagcggaauu

SEQ ID NO: 1323903 - RNA, 19 nt, Artificial Sequence
  Description of Artificial Sequence: Synthetic oligonucleotide
  Antisense strand to SEQ ID NO: 1323902
aauuccgcuuucuaaagcg

SEQ ID NO: 1323904 - RNA, 19 nt, Artificial Sequence
  Description of Artificial Sequence: Synthetic oligonucleotide
  Sense strand starting at position 978 of SEQ ID NO: 1242124
ggcacaguuggcuguuaac

SEQ ID NO: 1323905 - RNA, 19 nt, Artificial Sequence
  Description of Artificial Sequence: Synthetic oligonucleotide
  Antisense strand to SEQ ID NO: 1323904
guuaacagccaacugugcc

SEQ ID NO: 1323906 - RNA, 19 nt, Artificial Sequence
  Description of Artificial Sequence: Synthetic oligonucleotide
  Sense strand starting at position 984 of SEQ ID NO: 1242124
guuggcuguuaacuagaau

SEQ ID NO: 1323907 - RNA, 19 nt, Artificial Sequence
  Description of Artificial Sequence: Synthetic oligonucleotide
  Antisense strand to SEQ ID NO: 1323906
auucuaguuaacagccaac

SEQ ID NO: 1323908 - RNA, 19 nt, Artificial Sequence
  Description of Artificial Sequence: Synthetic oligonucleotide
  Sense strand starting at position 987 of SEQ ID NO: 1242124
ggcuguuaacuagaauagu

SEQ ID NO: 1323909 - RNA, 19 nt, Artificial Sequence
  Description of Artificial Sequence: Synthetic oligonucleotide
  Antisense strand to SEQ ID NO: 1323908
acuauucuaguuaacagcc

SEQ ID NO: 1323910 - RNA, 19 nt, Artificial Sequence
  Description of Artificial Sequence: Synthetic oligonucleotide
  Sense strand starting at position 1045 of SEQ ID NO: 1242124
ggcuucuagccucggagau

SEQ ID NO: 1323911 - RNA, 19 nt, Artificial Sequence
  Description of Artificial Sequence: Synthetic oligonucleotide
  Antisense strand to SEQ ID NO: 1323910
aucuccgaggcuagaagcc

SEQ ID NO: 1323912 - RNA, 19 nt, Artificial Sequence
  Description of Artificial Sequence: Synthetic oligonucleotide
  Sense strand starting at position 1046 of SEQ ID NO: 1242124
gcuucuagccucggagauu

SEQ ID NO: 1323913 - RNA, 19 nt, Artificial Sequence
  Description of Artificial Sequence: Synthetic oligonucleotide
  Antisense strand to SEQ ID NO: 1323912
aaucuccgaggcuagaagc

SEQ ID NO: 1323914 - RNA, 19 nt, Artificial Sequence
  Description of Artificial Sequence: Synthetic oligonucleotide
  Sense strand starting at position 1114 of SEQ ID NO: 1242124
ggaugacacuuuccuaguc

SEQ ID NO: 1323915 - RNA, 19 nt, Artificial Sequence
  Description of Artificial Sequence: Synthetic oligonucleotide
  Antisense strand to SEQ ID NO: 1323914
gacuaggaaagugucaucc

SEQ ID NO: 1323916 - RNA, 19 nt, Artificial Sequence
  Description of Artificial Sequence: Synthetic oligonucleotide
  Sense strand starting at position 1123 of SEQ ID NO: 1242124
uuuccuagucgcuauguaa

SEQ ID NO: 1323917 - RNA, 19 nt, Artificial Sequence
  Description of Artificial Sequence: Synthetic oligonucleotide
  Antisense strand to SEQ ID NO: 1323916
uuacauagcgacuaggaaa

SEQ ID NO: 1323918 - RNA, 19 nt, Artificial Sequence
  Description of Artificial Sequence: Synthetic oligonucleotide
  Sense strand starting at position 1504 of SEQ ID NO: 1242124
cgggucuccagagauauga

SEQ ID NO: 1323919 - RNA, 19 nt, Artificial Sequence
  Description of Artificial Sequence: Synthetic oligonucleotide
  Antisense strand to SEQ ID NO: 1323918
ucauaucucuggagacccg

SEQ ID NO: 1323920 - RNA, 19 nt, Artificial Sequence
  Description of Artificial Sequence: Synthetic oligonucleotide
  Sense strand starting at position 1644 of SEQ ID NO: 1242124
cccaguugucgcccgcaga

SEQ ID NO: 1323921 - RNA, 19 nt, Artificial Sequence
  Description of Artificial Sequence: Synthetic oligonucleotide
  Antisense strand to SEQ ID NO: 1323920
ucugcgggcgacaacuggg

SEQ ID NO: 1323922 - RNA, 19 nt, Artificial Sequence
  Description of Artificial Sequence: Synthetic oligonucleotide
  Sense strand starting at position 2287 of SEQ ID NO: 1242124
ggaggaugucaucgcuaca

SEQ ID NO: 1323923 - RNA, 19 nt, Artificial Sequence
  Description of Artificial Sequence: Synthetic oligonucleotide
  Antisense strand to SEQ ID NO: 1323922
uguagcgaugacauccucc

SEQ ID NO: 1323924 - RNA, 19 nt, Artificial Sequence
  Description of Artificial Sequence: Synthetic oligonucleotide
  Sense strand starting at position 2290 of SEQ ID NO: 1242124
ggaugucaucgcuacagug

SEQ ID NO: 1323925 - RNA, 19 nt, Artificial Sequence
  Description of Artificial Sequence: Synthetic oligonucleotide
  Antisense strand to SEQ ID NO: 1323924
cacuguagcgaugacaucc

SEQ ID NO: 1323926 - RNA, 19 nt, Artificial Sequence
  Description of Artificial Sequence: Synthetic oligonucleotide
  Sense strand starting at position 2314 of SEQ ID NO: 1242124
gcagaucucgcaggagaaa

SEQ ID NO: 1323927 - RNA, 19 nt, Artificial Sequence
  Description of Artificial Sequence: Synthetic oligonucleotide
  Antisense strand to SEQ ID NO: 1323926
uuucuccugcgagaucugc

SEQ ID NO: 1323928 - RNA, 19 nt, Artificial Sequence
  Description of Artificial Sequence: Synthetic oligonucleotide
  Sense strand starting at position 2410 of SEQ ID NO: 1242124
ccgggauccugggauauuu

SEQ ID NO: 1323929 - RNA, 19 nt, Artificial Sequence
  Description of Artificial Sequence: Synthetic oligonucleotide
  Antisense strand to SEQ ID NO: 1323928
aaauaucccaggaucccgg

SEQ ID NO: 1323930 - RNA, 19 nt, Artificial Sequence
  Description of Artificial Sequence: Synthetic oligonucleotide
  Sense strand starting at position 2419 of SEQ ID NO: 1242124
ugggauauuuguucccgca

SEQ ID NO: 1323931 - RNA, 19 nt, Artificial Sequence
  Description of Artificial Sequence: Synthetic oligonucleotide
  Antisense strand to SEQ ID NO: 1323930
ugcgggaacaaauauccca

SEQ ID NO: 1323932 - RNA, 19 nt, Artificial Sequence
  Description of Artificial Sequence: Synthetic oligonucleotide
  Sense strand starting at position 2465 of SEQ ID NO: 1242124
uugauaagaucucuuuagg

SEQ ID NO: 1323933 - RNA, 19 nt, Artificial Sequence
  Description of Artificial Sequence: Synthetic oligonucleotide
  Antisense strand to SEQ ID NO: 1323932
ccuaaagagaucuuaucaa

SEQ ID NO: 1323934 - RNA, 19 nt, Artificial Sequence
  Description of Artificial Sequence: Synthetic oligonucleotide
  Sense strand starting at position 2574 of SEQ ID NO: 1242124
guucgacuacuauacagua

SEQ ID NO: 1323935 - RNA, 19 nt, Artificial Sequence
  Description of Artificial Sequence: Synthetic oligonucleotide
  Antisense strand to SEQ ID NO: 1323934
uacuguauaguagucgaac

SEQ ID NO: 1323936 - RNA, 19 nt, Artificial Sequence
  Description of Artificial Sequence: Synthetic oligonucleotide
  Sense strand starting at position 2625 of SEQ ID NO: 1242124
gcaagaacgcuauagguug

SEQ ID NO: 1323937 - RNA, 19 nt, Artificial Sequence
  Description of Artificial Sequence: Synthetic oligonucleotide
  Antisense strand to SEQ ID NO: 1323936
caaccuauagcguucuugc

SEQ ID NO: 1323938 - RNA, 19 nt, Artificial Sequence
  Description of Artificial Sequence: Synthetic oligonucleotide
  Sense strand starting at position 2647 of SEQ ID NO: 1242124
aggacagcauaguuagaua

SEQ ID NO: 1323939 - RNA, 19 nt, Artificial Sequence
  Description of Artificial Sequence: Synthetic oligonucleotide
  Antisense strand to SEQ ID NO: 1323938
uaucuaacuaugcuguccu

SEQ ID NO: 1323940 - RNA, 19 nt, Artificial Sequence
  Description of Artificial Sequence: Synthetic oligonucleotide
  Sense strand starting at position 2650 of SEQ ID NO: 1242124
acagcauaguuagauaaga

SEQ ID NO: 1323941 - RNA, 19 nt, Artificial Sequence
  Description of Artificial Sequence: Synthetic oligonucleotide
  Antisense strand to SEQ ID NO: 1323940
ucuuaucuaacuaugcugu

SEQ ID NO: 1323942 - RNA, 19 nt, Artificial Sequence
  Description of Artificial Sequence: Synthetic oligonucleotide
  Sense strand starting at position 2661 of SEQ ID NO: 1242124
agauaagaugucuacguga

SEQ ID NO: 1323943 - RNA, 19 nt, Artificial Sequence
  Description of Artificial Sequence: Synthetic oligonucleotide
  Antisense strand to SEQ ID NO: 1323942
ucacguagacaucuuaucu

SEQ ID NO: 1323944 - RNA, 19 nt, Artificial Sequence
  Description of Artificial Sequence: Synthetic oligonucleotide
  Sense strand starting at position 2663 of SEQ ID NO: 1242124
auaagaugucuacgugaag

SEQ ID NO: 1323945 - RNA, 19 nt, Artificial Sequence
  Description of Artificial Sequence: Synthetic oligonucleotide
  Antisense strand to SEQ ID NO: 1323944
cuucacguagacaucuuau

SEQ ID NO: 1323946 - RNA, 19 nt, Artificial Sequence
  Description of Artificial Sequence: Synthetic oligonucleotide
  Sense strand starting at position 2666 of SEQ ID NO: 1242124
agaugucuacgugaagguu

SEQ ID NO: 1323947 - RNA, 19 nt, Artificial Sequence
  Description of Artificial Sequence: Synthetic oligonucleotide
  Antisense strand to SEQ ID NO: 1323946
aaccuucacguagacaucu

SEQ ID NO: 1323948 - RNA, 19 nt, Artificial Sequence
  Description of Artificial Sequence: Synthetic oligonucleotide
  Sense strand starting at position 2710 of SEQ ID NO: 1242124
gcagaccuguuaucggaaa

SEQ ID NO: 1323949 - RNA, 19 nt, Artificial Sequence
  Description of Artificial Sequence: Synthetic oligonucleotide
  Antisense strand to SEQ ID NO: 1323948
uuuccgauaacaggucugc

SEQ ID NO: 1323950 - RNA, 19 nt, Artificial Sequence
  Description of Artificial Sequence: Synthetic oligonucleotide
  Sense strand starting at position 2712 of SEQ ID NO: 1242124
agaccuguuaucggaaaug

SEQ ID NO: 1323951 - RNA, 19 nt, Artificial Sequence
  Description of Artificial Sequence: Synthetic oligonucleotide
  Antisense strand to SEQ ID NO: 1323950
cauuuccgauaacaggucu

SEQ ID NO: 1323952 - RNA, 19 nt, Artificial Sequence
  Description of Artificial Sequence: Synthetic oligonucleotide
  Sense strand starting at position 2935 of SEQ ID NO: 1242124
cucagagcaguccauuaga

SEQ ID NO: 1323953 - RNA, 19 nt, Artificial Sequence
  Description of Artificial Sequence: Synthetic oligonucleotide
  Antisense strand to SEQ ID NO: 1323952
ucuaauggacugcucugag

SEQ ID NO: 1323954 - RNA, 19 nt, Artificial Sequence
  Description of Artificial Sequence: Synthetic oligonucleotide
  Sense strand starting at position 2943 of SEQ ID NO: 1242124
aguccauuagacuggucaa

SEQ ID NO: 1323955 - RNA, 19 nt, Artificial Sequence
  Description of Artificial Sequence: Synthetic oligonucleotide
  Antisense strand to SEQ ID NO: 1323954
uugaccagucuaauggacu

SEQ ID NO: 1323956 - RNA, 19 nt, Artificial Sequence
  Description of Artificial Sequence: Synthetic oligonucleotide
  Sense strand starting at position 2946 of SEQ ID NO: 1242124
ccauuagacuggucaacau

SEQ ID NO: 1323957 - RNA, 19 nt, Artificial Sequence
  Description of Artificial Sequence: Synthetic oligonucleotide
  Antisense strand to SEQ ID NO: 1323956
auguugaccagucuaaugg

SEQ ID NO: 1323958 - RNA, 19 nt, Artificial Sequence
  Description of Artificial Sequence: Synthetic oligonucleotide
  Sense strand starting at position 3033 of SEQ ID NO: 1242124
gugagaauugccuagggua

SEQ ID NO: 1323959 - RNA, 19 nt, Artificial Sequence
  Description of Artificial Sequence: Synthetic oligonucleotide
  Antisense strand to SEQ ID NO: 1323958
uacccuaggcaauucucac

SEQ ID NO: 1323960 - RNA, 19 nt, Artificial Sequence
  Description of Artificial Sequence: Synthetic oligonucleotide
  Sense strand starting at position 3035 of SEQ ID NO: 1242124
gagaauugccuaggguaag

SEQ ID NO: 1323961 - RNA, 19 nt, Artificial Sequence
  Description of Artificial Sequence: Synthetic oligonucleotide
  Antisense strand to SEQ ID NO: 1323960
cuuacccuaggcaauucuc

SEQ ID NO: 1323962 - RNA, 19 nt, Artificial Sequence
  Description of Artificial Sequence: Synthetic oligonucleotide
  Sense strand starting at position 3053 of SEQ ID NO: 1242124
ggccuagguguagauaaga

SEQ ID NO: 1323963 - RNA, 19 nt, Artificial Sequence
  Description of Artificial Sequence: Synthetic oligonucleotide
  Antisense strand to SEQ ID NO: 1323962
ucuuaucuacaccuaggcc

SEQ ID NO: 1323964 - RNA, 19 nt, Artificial Sequence
  Description of Artificial Sequence: Synthetic oligonucleotide
  Sense strand starting at position 3175 of SEQ ID NO: 1242124
uuauuaaggucaucaagua

SEQ ID NO: 1323965 - RNA, 19 nt, Artificial Sequence
  Description of Artificial Sequence: Synthetic oligonucleotide
  Antisense strand to SEQ ID NO: 1323964
uacuugaugaccuuaauaa

SEQ ID NO: 1323966 - RNA, 19 nt, Artificial Sequence
  Description of Artificial Sequence: Synthetic oligonucleotide
  Sense strand starting at position 3193 of SEQ ID NO: 1242124
agccuucuugugcugaguu

SEQ ID NO: 1323967 - RNA, 19 nt, Artificial Sequence
  Description of Artificial Sequence: Synthetic oligonucleotide
  Antisense strand to SEQ ID NO: 1323966
aacucagcacaagaaggcu

SEQ ID NO: 1323968 - RNA, 19 nt, Artificial Sequence
  Description of Artificial Sequence: Synthetic oligonucleotide
  Sense strand starting at position 3195 of SEQ ID NO: 1242124
ccuucuugugcugaguuaa

SEQ ID NO: 1323969 - RNA, 19 nt, Artificial Sequence
  Description of Artificial Sequence: Synthetic oligonucleotide
  Antisense strand to SEQ ID NO: 1323968
uuaacucagcacaagaagg

SEQ ID NO: 1323970 - RNA, 19 nt, Artificial Sequence
  Description of Artificial Sequence: Synthetic oligonucleotide
  Sense strand starting at position 3206 of SEQ ID NO: 1242124
ugaguuaacugaccuuuaa

SEQ ID NO: 1323971 - RNA, 19 nt, Artificial Sequence
  Description of Artificial Sequence: Synthetic oligonucleotide
  Antisense strand to SEQ ID NO: 1323970
uuaaaggucaguuaacuca

SEQ ID NO: 1323972 - RNA, 19 nt, Artificial Sequence
  Description of Artificial Sequence: Synthetic oligonucleotide
  Sense strand starting at position 3890 of SEQ ID NO: 1242124
guuaaauuugcuugaaugc

SEQ ID NO: 1323973 - RNA, 19 nt, Artificial Sequence
  Description of Artificial Sequence: Synthetic oligonucleotide
  Antisense strand to SEQ ID NO: 1323972
gcauucaagcaaauuuaac

SEQ ID NO: 1323974 - RNA, 19 nt, Artificial Sequence
  Description of Artificial Sequence: Synthetic oligonucleotide
  Sense strand starting at position 103 of SEQ ID NO: 1242125
uuguauccuagguaagagu

SEQ ID NO: 1323975 - RNA, 19 nt, Artificial Sequence
  Description of Artificial Sequence: Synthetic oligonucleotide
  Antisense strand to SEQ ID NO: 1323974
acucuuaccuaggauacaa

SEQ ID NO: 1323976 - RNA, 19 nt, Artificial Sequence
  Description of Artificial Sequence: Synthetic oligonucleotide
  Sense strand starting at position 112 of SEQ ID NO: 1242125
agguaagagucuccauuau

SEQ ID NO: 1323977 - RNA, 19 nt, Artificial Sequence
  Description of Artificial Sequence: Synthetic oligonucleotide
  Antisense strand to SEQ ID NO: 1323976
auaauggagacucuuaccu

SEQ ID NO: 1323978 - RNA, 19 nt, Artificial Sequence
  Description of Artificial Sequence: Synthetic oligonucleotide
  Sense strand starting at position 163 of SEQ ID NO: 1242125
ggguaugugcagcaaagaa

SEQ ID NO: 1323979 - RNA, 19 nt, Artificial Sequence
  Description of Artificial Sequence: Synthetic oligonucleotide
  Antisense strand to SEQ ID NO: 1323978
uucuuugcugcacauaccc

SEQ ID NO: 1323980 - RNA, 19 nt, Artificial Sequence
  Description of Artificial Sequence: Synthetic oligonucleotide
  Sense strand starting at position 250 of SEQ ID NO: 1242125
gauguccugccugauagaa

SEQ ID NO: 1323981 - RNA, 19 nt, Artificial Sequence
  Description of Artificial Sequence: Synthetic oligonucleotide
  Antisense strand to SEQ ID NO: 1323980
uucuaucaggcaggacauc

SEQ ID NO: 1323982 - RNA, 19 nt, Artificial Sequence
  Description of Artificial Sequence: Synthetic oligonucleotide
  Sense strand starting at position 510 of SEQ ID NO: 1242125
auaucauggcugggaggaa

SEQ ID NO: 1323983 - RNA, 19 nt, Artificial Sequence
  Description of Artificial Sequence: Synthetic oligonucleotide
  Antisense strand to SEQ ID NO: 1323982
uuccucccagccaugauau

SEQ ID NO: 1323984 - RNA, 19 nt, Artificial Sequence
  Description of Artificial Sequence: Synthetic oligonucleotide
  Sense strand starting at position 621 of SEQ ID NO: 1242125
cuuuccuuggcugauuaau

SEQ ID NO: 1323985 - RNA, 19 nt, Artificial Sequence
  Description of Artificial Sequence: Synthetic oligonucleotide
  Antisense strand to SEQ ID NO: 1323984
auuaaucagccaaggaaag

SEQ ID NO: 1323986 - RNA, 19 nt, Artificial Sequence
  Description of Artificial Sequence: Synthetic oligonucleotide
  Sense strand starting at position 914 of SEQ ID NO: 1242125
agguaagauuagguaugau

SEQ ID NO: 1323987 - RNA, 19 nt, Artificial Sequence
  Description of Artificial Sequence: Synthetic oligonucleotide
  Antisense strand to SEQ ID NO: 1323986
aucauaccuaaucuuaccu

SEQ ID NO: 1323988 - RNA, 19 nt, Artificial Sequence
  Description of Artificial Sequence: Synthetic oligonucleotide
  Sense strand starting at position 917 of SEQ ID NO: 1242125
uaagauuagguaugauucu

SEQ ID NO: 1323989 - RNA, 19 nt, Artificial Sequence
  Description of Artificial Sequence: Synthetic oligonucleotide
  Antisense strand to SEQ ID NO: 1323988
agaaucauaccuaaucuua

SEQ ID NO: 1323990 - RNA, 19 nt, Artificial Sequence
  Description of Artificial Sequence: Synthetic oligonucleotide
  Sense strand starting at position 997 of SEQ ID NO: 1242125
agggaagucucuccuagau

SEQ ID NO: 1323991 - RNA, 19 nt, Artificial Sequence
  Description of Artificial Sequence: Synthetic oligonucleotide
  Antisense strand to SEQ ID NO: 1323990
aucuaggagagacuucccu

SEQ ID NO: 1323992 - RNA, 19 nt, Artificial Sequence
  Description of Artificial Sequence: Synthetic oligonucleotide
  Sense strand starting at position 1048 of SEQ ID NO: 1242125
auuagaucccuuugacgag

SEQ ID NO: 1323993 - RNA, 19 nt, Artificial Sequence
  Description of Artificial Sequence: Synthetic oligonucleotide
  Antisense strand to SEQ ID NO: 1323992
cucgucaaagggaucuaau

SEQ ID NO: 1323994 - RNA, 19 nt, Artificial Sequence
  Description of Artificial Sequence: Synthetic oligonucleotide
  Sense strand starting at position 1148 of SEQ ID NO: 1242125
gcuauuauauaugugauag

SEQ ID NO: 1323995 - RNA, 19 nt, Artificial Sequence
  Description of Artificial Sequence: Synthetic oligonucleotide
  Antisense strand to SEQ ID NO: 1323994
cuaucacauauauaauagc

SEQ ID NO: 1323996 - RNA, 19 nt, Artificial Sequence
  Description of Artificial Sequence: Synthetic oligonucleotide
  Sense strand starting at position 1172 of SEQ ID NO: 1242125
accgaugauauauguggaa

SEQ ID NO: 1323997 - RNA, 19 nt, Artificial Sequence
  Description of Artificial Sequence: Synthetic oligonucleotide
  Antisense strand to SEQ ID NO: 1323996
uuccacauauaucaucggu

SEQ ID NO: 1323998 - RNA, 19 nt, Artificial Sequence
  Description of Artificial Sequence: Synthetic oligonucleotide
  Sense strand starting at position 1174 of SEQ ID NO: 1242125
cgaugauauauguggaaau

SEQ ID NO: 1323999 - RNA, 19 nt, Artificial Sequence
  Description of Artificial Sequence: Synthetic oligonucleotide
  Antisense strand to SEQ ID NO: 1323998
auuuccacauauaucaucg

SEQ ID NO: 1324000 - RNA, 19 nt, Artificial Sequence
  Description of Artificial Sequence: Synthetic oligonucleotide
  Sense strand starting at position 1245 of SEQ ID NO: 1242125
gaaacaucugagugcaacu

SEQ ID NO: 1324001 - RNA, 19 nt, Artificial Sequence
  Description of Artificial Sequence: Synthetic oligonucleotide
  Antisense strand to SEQ ID NO: 1324000
aguugcacucagauguuuc

SEQ ID NO: 1324002 - RNA, 19 nt, Artificial Sequence
  Description of Artificial Sequence: Synthetic oligonucleotide
  Sense strand starting at position 1264 of SEQ ID NO: 1242125
auuacaaauugagcuguau

SEQ ID NO: 1324003 - RNA, 19 nt, Artificial Sequence
  Description of Artificial Sequence: Synthetic oligonucleotide
  Antisense strand to SEQ ID NO: 1324002
auacagcucaauuuguaau

SEQ ID NO: 1324004 - RNA, 19 nt, Artificial Sequence
  Description of Artificial Sequence: Synthetic oligonucleotide
  Sense strand starting at position 1268 of SEQ ID NO: 1242125
caaauugagcuguauugga

SEQ ID NO: 1324005 - RNA, 19 nt, Artificial Sequence
  Description of Artificial Sequence: Synthetic oligonucleotide
  Antisense strand to SEQ ID NO: 1324004
uccaauacagcucaauuug

SEQ ID NO: 1324006 - RNA, 19 nt, Artificial Sequence
  Description of Artificial Sequence: Synthetic oligonucleotide
  Sense strand starting at position 1275 of SEQ ID NO: 1242125
agcuguauuggacaagacu

SEQ ID NO: 1324007 - RNA, 19 nt, Artificial Sequence
  Description of Artificial Sequence: Synthetic oligonucleotide
  Antisense strand to SEQ ID NO: 1324006
agucuuguccaauacagcu

SEQ ID NO: 1324008 - RNA, 19 nt, Artificial Sequence
  Description of Artificial Sequence: Synthetic oligonucleotide
  Sense strand starting at position 1385 of SEQ ID NO: 1242125
uguguucuccaaugaggaa

SEQ ID NO: 1324009 - RNA, 19 nt, Artificial Sequence
  Description of Artificial Sequence: Synthetic oligonucleotide
  Antisense strand to SEQ ID NO: 1324008
uuccucauuggagaacaca

SEQ ID NO: 1324010 - RNA, 19 nt, Artificial Sequence
  Description of Artificial Sequence: Synthetic oligonucleotide
  Sense strand starting at position 1386 of SEQ ID NO: 1242125
guguucuccaaugaggaac

SEQ ID NO: 1324011 - RNA, 19 nt, Artificial Sequence
  Description of Artificial Sequence: Synthetic oligonucleotide
  Antisense strand to SEQ ID NO: 1324010
guuccucauuggagaacac

SEQ ID NO: 1324012 - RNA, 19 nt, Artificial Sequence
  Description of Artificial Sequence: Synthetic oligonucleotide
  Sense strand starting at position 1480 of SEQ ID NO: 1242125
cuccuagaguguccgauuu

SEQ ID NO: 1324013 - RNA, 19 nt, Artificial Sequence
  Description of Artificial Sequence: Synthetic oligonucleotide
  Antisense strand to SEQ ID NO: 1324012
aaaucggacacucuaggag

SEQ ID NO: 1324014 - RNA, 19 nt, Artificial Sequence
  Description of Artificial Sequence: Synthetic oligonucleotide
  Sense strand starting at position 2182 of SEQ ID NO: 1242125
guacccugugcguuaguca

SEQ ID NO: 1324015 - RNA, 19 nt, Artificial Sequence
  Description of Artificial Sequence: Synthetic oligonucleotide
  Antisense strand to SEQ ID NO: 1324014
ugacuaacgcacaggguac

SEQ ID NO: 1324016 - RNA, 19 nt, Artificial Sequence
  Description of Artificial Sequence: Synthetic oligonucleotide
  Sense strand starting at position 2213 of SEQ ID NO: 1242125
ccgucuucucaggagacca

SEQ ID NO: 1324017 - RNA, 19 nt, Artificial Sequence
  Description of Artificial Sequence: Synthetic oligonucleotide
  Antisense strand to SEQ ID NO: 1324016
uggucuccugagaagacgg

SEQ ID NO: 1324018 - RNA, 19 nt, Artificial Sequence
  Description of Artificial Sequence: Synthetic oligonucleotide
  Sense strand starting at position 2346 of SEQ ID NO: 1242125
ugcguucuuccuccaguca

SEQ ID NO: 1324019 - RNA, 19 nt, Artificial Sequence
  Description of Artificial Sequence: Synthetic oligonucleotide
  Antisense strand to SEQ ID NO: 1324018
ugacuggaggaagaacgca

SEQ ID NO: 1324020 - RNA, 19 nt, Artificial Sequence
  Description of Artificial Sequence: Synthetic oligonucleotide
  Sense strand starting at position 2514 of SEQ ID NO: 1242125
cgaggauccguugagauga

SEQ ID NO: 1324021 - RNA, 19 nt, Artificial Sequence
  Description of Artificial Sequence: Synthetic oligonucleotide
  Antisense strand to SEQ ID NO: 1324020
ucaucucaacggauccucg

SEQ ID NO: 1324022 - RNA, 19 nt, Artificial Sequence
  Description of Artificial Sequence: Synthetic oligonucleotide
  Sense strand starting at position 2537 of SEQ ID NO: 1242125
gaaggcucuccggaaauug

SEQ ID NO: 1324023 - RNA, 19 nt, Artificial Sequence
  Description of Artificial Sequence: Synthetic oligonucleotide
  Antisense strand to SEQ ID NO: 1324022
caauuuccggagagccuuc

SEQ ID NO: 1324024 - RNA, 19 nt, Artificial Sequence
  Description of Artificial Sequence: Synthetic oligonucleotide
  Sense strand starting at position 2623 of SEQ ID NO: 1242125
gggagagaguguuuacucu

SEQ ID NO: 1324025 - RNA, 19 nt, Artificial Sequence
  Description of Artificial Sequence: Synthetic oligonucleotide
  Antisense strand to SEQ ID NO: 1324024
agaguaaacacucucuccc

SEQ ID NO: 1324026 - RNA, 19 nt, Artificial Sequence
  Description of Artificial Sequence: Synthetic oligonucleotide
  Sense strand starting at position 2627 of SEQ ID NO: 1242125
gagaguguuuacucugaau

SEQ ID NO: 1324027 - RNA, 19 nt, Artificial Sequence
  Description of Artificial Sequence: Synthetic oligonucleotide
  Antisense strand to SEQ ID NO: 1324026
auucagaguaaacacucuc

SEQ ID NO: 1324028 - RNA, 19 nt, Artificial Sequence
  Description of Artificial Sequence: Synthetic oligonucleotide
  Sense strand starting at position 2651 of SEQ ID NO: 1242125
aguuuauucugcguauuua

SEQ ID NO: 1324029 - RNA, 19 nt, Artificial Sequence
  Description of Artificial Sequence: Synthetic oligonucleotide
  Antisense strand to SEQ ID NO: 1324028
uaaauacgcagaauaaacu

SEQ ID NO: 1324030 - RNA, 19 nt, Artificial Sequence
  Description of Artificial Sequence: Synthetic oligonucleotide
  Sense strand starting at position 2652 of SEQ ID NO: 1242125
guuuauucugcguauuuac

SEQ ID NO: 1324031 - RNA, 19 nt, Artificial Sequence
  Description of Artificial Sequence: Synthetic oligonucleotide
  Antisense strand to SEQ ID NO: 1324030
guaaauacgcagaauaaac

SEQ ID NO: 1324032 - RNA, 19 nt, Artificial Sequence
  Description of Artificial Sequence: Synthetic oligonucleotide
  Sense strand starting at position 2659 of SEQ ID NO: 1242125
cugcguauuuacucugaag

SEQ ID NO: 1324033 - RNA, 19 nt, Artificial Sequence
  Description of Artificial Sequence: Synthetic oligonucleotide
  Antisense strand to SEQ ID NO: 1324032
cuucagaguaaauacgcag

SEQ ID NO: 1324034 - RNA, 19 nt, Artificial Sequence
  Description of Artificial Sequence: Synthetic oligonucleotide
  Sense strand starting at position 2661 of SEQ ID NO: 1242125
gcguauuuacucugaaguu

SEQ ID NO: 1324035 - RNA, 19 nt, Artificial Sequence
  Description of Artificial Sequence: Synthetic oligonucleotide
  Antisense strand to SEQ ID NO: 1324034
aacuucagaguaaauacgc

SEQ ID NO: 1324036 - RNA, 19 nt, Artificial Sequence
  Description of Artificial Sequence: Synthetic oligonucleotide
  Sense strand starting at position 2687 of SEQ ID NO: 1242125
cuucuuaauguguacauua

SEQ ID NO: 1324037 - RNA, 19 nt, Artificial Sequence
  Description of Artificial Sequence: Synthetic oligonucleotide
  Antisense strand to SEQ ID NO: 1324036
uaauguacacauuaagaag

SEQ ID NO: 1324038 - RNA, 19 nt, Artificial Sequence
  Description of Artificial Sequence: Synthetic oligonucleotide
  Sense strand starting at position 2815 of SEQ ID NO: 1242125
cuuguagacccucauaaug

SEQ ID NO: 1324039 - RNA, 19 nt, Artificial Sequence
  Description of Artificial Sequence: Synthetic oligonucleotide
  Antisense strand to SEQ ID NO: 1324038
cauuaugagggucuacaag

SEQ ID NO: 1324040 - RNA, 19 nt, Artificial Sequence
  Description of Artificial Sequence: Synthetic oligonucleotide
  Sense strand starting at position 2894 of SEQ ID NO: 1242125
acuaaagggcucugugaag

SEQ ID NO: 1324041 - RNA, 19 nt, Artificial Sequence
  Description of Artificial Sequence: Synthetic oligonucleotide
  Antisense strand to SEQ ID NO: 1324040
cuucacagagcccuuuagu

SEQ ID NO: 1324042 - RNA, 19 nt, Artificial Sequence
  Description of Artificial Sequence: Synthetic oligonucleotide
  Sense strand starting at position 2903 of SEQ ID NO: 1242125
cucugugaaguugaauuau

SEQ ID NO: 1324043 - RNA, 19 nt, Artificial Sequence
  Description of Artificial Sequence: Synthetic oligonucleotide
  Antisense strand to SEQ ID NO: 1324042
auaauucaacuucacagag

SEQ ID NO: 1324044 - RNA, 19 nt, Artificial Sequence
  Description of Artificial Sequence: Synthetic oligonucleotide
  Sense strand starting at position 2912 of SEQ ID NO: 1242125
guugaauuauagguaacuc

SEQ ID NO: 1324045 - RNA, 19 nt, Artificial Sequence
  Description of Artificial Sequence: Synthetic oligonucleotide
  Antisense strand to SEQ ID NO: 1324044
gaguuaccuauaauucaac

SEQ ID NO: 1324046 - RNA, 19 nt, Artificial Sequence
  Description of Artificial Sequence: Synthetic oligonucleotide
  Sense strand starting at position 2945 of SEQ ID NO: 1242125
aaguguauggcuuagaauc

SEQ ID NO: 1324047 - RNA, 19 nt, Artificial Sequence
  Description of Artificial Sequence: Synthetic oligonucleotide
  Antisense strand to SEQ ID NO: 1324046
gauucuaagccauacacuu

SEQ ID NO: 1324048 - RNA, 19 nt, Artificial Sequence
  Description of Artificial Sequence: Synthetic oligonucleotide
  Sense strand starting at position 2959 of SEQ ID NO: 1242125
gaaucagagcagugacuua

SEQ ID NO: 1324049 - RNA, 19 nt, Artificial Sequence
  Description of Artificial Sequence: Synthetic oligonucleotide
  Antisense strand to SEQ ID NO: 1324048
uaagucacugcucugauuc

SEQ ID NO: 1324050 - RNA, 19 nt, Artificial Sequence
  Description of Artificial Sequence: Synthetic oligonucleotide
  Sense strand starting at position 2979 of SEQ ID NO: 1242125
cuguaugaucucgagcaag

SEQ ID NO: 1324051 - RNA, 19 nt, Artificial Sequence
  Description of Artificial Sequence: Synthetic oligonucleotide
  Antisense strand to SEQ ID NO: 1324050
cuugcucgagaucauacag

SEQ ID NO: 1324052 - RNA, 19 nt, Artificial Sequence
  Description of Artificial Sequence: Synthetic oligonucleotide
  Sense strand starting at position 2982 of SEQ ID NO: 1242125
uaugaucucgagcaaguca

SEQ ID NO: 1324053 - RNA, 19 nt, Artificial Sequence
  Description of Artificial Sequence: Synthetic oligonucleotide
  Antisense strand to SEQ ID NO: 1324052
ugacuugcucgagaucaua

SEQ ID NO: 1324054 - RNA, 19 nt, Artificial Sequence
  Description of Artificial Sequence: Synthetic oligonucleotide
  Sense strand starting at position 217 of SEQ ID NO: 1242126
uguuuaugcucuucccuca

SEQ ID NO: 1324055 - RNA, 19 nt, Artificial Sequence
  Description of Artificial Sequence: Synthetic oligonucleotide
  Antisense strand to SEQ ID NO: 1324054
ugagggaagagcauaaaca

SEQ ID NO: 1324056 - RNA, 19 nt, Artificial Sequence
  Description of Artificial Sequence: Synthetic oligonucleotide
  Sense strand starting at position 537 of SEQ ID NO: 1242126
ugggauuacacgcaggagu

SEQ ID NO: 1324057 - RNA, 19 nt, Artificial Sequence
  Description of Artificial Sequence: Synthetic oligonucleotide
  Antisense strand to SEQ ID NO: 1324056
acuccugcguguaauccca

SEQ ID NO: 1324058 - RNA, 19 nt, Artificial Sequence
  Description of Artificial Sequence: Synthetic oligonucleotide
  Sense strand starting at position 954 of SEQ ID NO: 1242126
uacucuguauggcuaguaa

SEQ ID NO: 1324059 - RNA, 19 nt, Artificial Sequence
  Description of Artificial Sequence: Synthetic oligonucleotide
  Antisense strand to SEQ ID NO: 1324058
uuacuagccauacagagua

SEQ ID NO: 1324060 - RNA, 19 nt, Artificial Sequence
  Description of Artificial Sequence: Synthetic oligonucleotide
  Sense strand starting at position 1049 of SEQ ID NO: 1242126
ggagacagggccugaucuu

SEQ ID NO: 1324061 - RNA, 19 nt, Artificial Sequence
  Description of Artificial Sequence: Synthetic oligonucleotide
  Antisense strand to SEQ ID NO: 1324060
aagaucaggcccugucucc

SEQ ID NO: 1324062 - RNA, 19 nt, Artificial Sequence
  Description of Artificial Sequence: Synthetic oligonucleotide
  Sense strand starting at position 1092 of SEQ ID NO: 1242126
ggcacaauaccucacguau

SEQ ID NO: 1324063 - RNA, 19 nt, Artificial Sequence
  Description of Artificial Sequence: Synthetic oligonucleotide
  Antisense strand to SEQ ID NO: 1324062
auacgugagguauugugcc

SEQ ID NO: 1324064 - RNA, 19 nt, Artificial Sequence
  Description of Artificial Sequence: Synthetic oligonucleotide
  Sense strand starting at position 1111 of SEQ ID NO: 1242126
aacuguugaugcgugaaau

SEQ ID NO: 1324065 - RNA, 19 nt, Artificial Sequence
  Description of Artificial Sequence: Synthetic oligonucleotide
  Antisense strand to SEQ ID NO: 1324064
auuucacgcaucaacaguu

SEQ ID NO: 1324066 - RNA, 19 nt, Artificial Sequence
  Description of Artificial Sequence: Synthetic oligonucleotide
  Sense strand starting at position 1112 of SEQ ID NO: 1242126
acuguugaugcgugaaaug

SEQ ID NO: 1324067 - RNA, 19 nt, Artificial Sequence
  Description of Artificial Sequence: Synthetic oligonucleotide
  Antisense strand to SEQ ID NO: 1324066
cauuucacgcaucaacagu

SEQ ID NO: 1324068 - RNA, 19 nt, Artificial Sequence
  Description of Artificial Sequence: Synthetic oligonucleotide
  Sense strand starting at position 1117 of SEQ ID NO: 1242126
ugaugcgugaaauguugau

SEQ ID NO: 1324069 - RNA, 19 nt, Artificial Sequence
  Description of Artificial Sequence: Synthetic oligonucleotide
  Antisense strand to SEQ ID NO: 1324068
aucaacauuucacgcauca

SEQ ID NO: 1324070 - RNA, 19 nt, Artificial Sequence
  Description of Artificial Sequence: Synthetic oligonucleotide
  Sense strand starting at position 1121 of SEQ ID NO: 1242126
gcgugaaauguugauccuu

SEQ ID NO: 1324071 - RNA, 19 nt, Artificial Sequence
  Description of Artificial Sequence: Synthetic oligonucleotide
  Antisense strand to SEQ ID NO: 1324070
aaggaucaacauuucacgc

SEQ ID NO: 1324072 - RNA, 19 nt, Artificial Sequence
  Description of Artificial Sequence: Synthetic oligonucleotide
  Sense strand starting at position 1123 of SEQ ID NO: 1242126
gugaaauguugauccuuua

SEQ ID NO: 1324073 - RNA, 19 nt, Artificial Sequence
  Description of Artificial Sequence: Synthetic oligonucleotide
  Antisense strand to SEQ ID NO: 1324072
uaaaggaucaacauuucac

SEQ ID NO: 1324074 - RNA, 19 nt, Artificial Sequence
  Description of Artificial Sequence: Synthetic oligonucleotide
  Sense strand starting at position 1192 of SEQ ID NO: 1242126
cccaaaggguccuccuuua

SEQ ID NO: 1324075 - RNA, 19 nt, Artificial Sequence
  Description of Artificial Sequence: Synthetic oligonucleotide
  Antisense strand to SEQ ID NO: 1324074
uaaaggaggacccuuuggg

SEQ ID NO: 1324076 - RNA, 19 nt, Artificial Sequence
  Description of Artificial Sequence: Synthetic oligonucleotide
  Sense strand starting at position 1315 of SEQ ID NO: 1242126
uugaaaucuugaggaggga

SEQ ID NO: 1324077 - RNA, 19 nt, Artificial Sequence
  Description of Artificial Sequence: Synthetic oligonucleotide
  Antisense strand to SEQ ID NO: 1324076
ucccuccucaagauuucaa

SEQ ID NO: 1324078 - RNA, 19 nt, Artificial Sequence
  Description of Artificial Sequence: Synthetic oligonucleotide
  Sense strand starting at position 1330 of SEQ ID NO: 1242126
gggaacuaagcccgagaaa

SEQ ID NO: 1324079 - RNA, 19 nt, Artificial Sequence
  Description of Artificial Sequence: Synthetic oligonucleotide
  Antisense strand to SEQ ID NO: 1324078
uuucucgggcuuaguuccc

SEQ ID NO: 1324080 - RNA, 19 nt, Artificial Sequence
  Description of Artificial Sequence: Synthetic oligonucleotide
  Sense strand starting at position 1413 of SEQ ID NO: 1242126
ggucuaucccuugggucua

SEQ ID NO: 1324081 - RNA, 19 nt, Artificial Sequence
  Description of Artificial Sequence: Synthetic oligonucleotide
  Antisense strand to SEQ ID NO: 1324080
uagacccaagggauagacc

SEQ ID NO: 1324082 - RNA, 19 nt, Artificial Sequence
  Description of Artificial Sequence: Synthetic oligonucleotide
  Sense strand starting at position 2310 of SEQ ID NO: 1242126
cggugucugcugccugaaa

SEQ ID NO: 1324083 - RNA, 19 nt, Artificial Sequence
  Description of Artificial Sequence: Synthetic oligonucleotide
  Antisense strand to SEQ ID NO: 1324082
uuucaggcagcagacaccg

SEQ ID NO: 1324084 - RNA, 19 nt, Artificial Sequence
  Description of Artificial Sequence: Synthetic oligonucleotide
  Sense strand starting at position 2311 of SEQ ID NO: 1242126
ggugucugcugccugaaau

SEQ ID NO: 1324085 - RNA, 19 nt, Artificial Sequence
  Description of Artificial Sequence: Synthetic oligonucleotide
  Antisense strand to SEQ ID NO: 1324084
auuucaggcagcagacacc

SEQ ID NO: 1324086 - RNA, 19 nt, Artificial Sequence
  Description of Artificial Sequence: Synthetic oligonucleotide
  Sense strand starting at position 2377 of SEQ ID NO: 1242126
gcaccaauauuuggagaag

SEQ ID NO: 1324087 - RNA, 19 nt, Artificial Sequence
  Description of Artificial Sequence: Synthetic oligonucleotide
  Antisense strand to SEQ ID NO: 1324086
cuucuccaaauauuggugc

SEQ ID NO: 1324088 - RNA, 19 nt, Artificial Sequence
  Description of Artificial Sequence: Synthetic oligonucleotide
  Sense strand starting at position 2414 of SEQ ID NO: 1242126
cagguugucuuguuggaca

SEQ ID NO: 1324089 - RNA, 19 nt, Artificial Sequence
  Description of Artificial Sequence: Synthetic oligonucleotide
  Antisense strand to SEQ ID NO: 1324088
uguccaacaagacaaccug

SEQ ID NO: 1324090 - RNA, 19 nt, Artificial Sequence
  Description of Artificial Sequence: Synthetic oligonucleotide
  Sense strand starting at position 2416 of SEQ ID NO: 1242126
gguugucuuguuggacaca

SEQ ID NO: 1324091 - RNA, 19 nt, Artificial Sequence
  Description of Artificial Sequence: Synthetic oligonucleotide
  Antisense strand to SEQ ID NO: 1324090
uguguccaacaagacaacc

SEQ ID NO: 1324092 - RNA, 19 nt, Artificial Sequence
  Description of Artificial Sequence: Synthetic oligonucleotide
  Sense strand starting at position 2493 of SEQ ID NO: 1242126
uggccucaguccucuuaga

SEQ ID NO: 1324093 - RNA, 19 nt, Artificial Sequence
  Description of Artificial Sequence: Synthetic oligonucleotide
  Antisense strand to SEQ ID NO: 1324092
ucuaagaggacugaggcca

SEQ ID NO: 1324094 - RNA, 19 nt, Artificial Sequence
  Description of Artificial Sequence: Synthetic oligonucleotide
  Sense strand starting at position 2515 of SEQ ID NO: 1242126
ggcagcagucaccagauua

SEQ ID NO: 1324095 - RNA, 19 nt, Artificial Sequence
  Description of Artificial Sequence: Synthetic oligonucleotide
  Antisense strand to SEQ ID NO: 1324094
uaaucuggugacugcugcc

SEQ ID NO: 1324096 - RNA, 19 nt, Artificial Sequence
  Description of Artificial Sequence: Synthetic oligonucleotide
  Sense strand starting at position 2551 of SEQ ID NO: 1242126
uugagaugcggaugcuaaa

SEQ ID NO: 1324097 - RNA, 19 nt, Artificial Sequence
  Description of Artificial Sequence: Synthetic oligonucleotide
  Antisense strand to SEQ ID NO: 1324096
uuuagcauccgcaucucaa

SEQ ID NO: 1324098 - RNA, 19 nt, Artificial Sequence
  Description of Artificial Sequence: Synthetic oligonucleotide
  Sense strand starting at position 2570 of SEQ ID NO: 1242126
gccgaacucuguccaaauu

SEQ ID NO: 1324099 - RNA, 19 nt, Artificial Sequence
  Description of Artificial Sequence: Synthetic oligonucleotide
  Antisense strand to SEQ ID NO: 1324098
aauuuggacagaguucggc

SEQ ID NO: 1324100 - RNA, 19 nt, Artificial Sequence
  Description of Artificial Sequence: Synthetic oligonucleotide
  Sense strand starting at position 2593 of SEQ ID NO: 1242126
accuuuggaucccuugaca

SEQ ID NO: 1324101 - RNA, 19 nt, Artificial Sequence
  Description of Artificial Sequence: Synthetic oligonucleotide
  Antisense strand to SEQ ID NO: 1324100
ugucaagggauccaaaggu

SEQ ID NO: 1324102 - RNA, 19 nt, Artificial Sequence
  Description of Artificial Sequence: Synthetic oligonucleotide
  Sense strand starting at position 2606 of SEQ ID NO: 1242126
uugacauuguucuuugcaa

SEQ ID NO: 1324103 - RNA, 19 nt, Artificial Sequence
  Description of Artificial Sequence: Synthetic oligonucleotide
  Antisense strand to SEQ ID NO: 1324102
uugcaaagaacaaugucaa

SEQ ID NO: 1324104 - RNA, 19 nt, Artificial Sequence
  Description of Artificial Sequence: Synthetic oligonucleotide
  Sense strand starting at position 2607 of SEQ ID NO: 1242126
ugacauuguucuuugcaag

SEQ ID NO: 1324105 - RNA, 19 nt, Artificial Sequence
  Description of Artificial Sequence: Synthetic oligonucleotide
  Antisense strand to SEQ ID NO: 1324104
cuugcaaagaacaauguca

SEQ ID NO: 1324106 - RNA, 19 nt, Artificial Sequence
  Description of Artificial Sequence: Synthetic oligonucleotide
  Sense strand starting at position 2608 of SEQ ID NO: 1242126
gacauuguucuuugcaagu

SEQ ID NO: 1324107 - RNA, 19 nt, Artificial Sequence
  Description of Artificial Sequence: Synthetic oligonucleotide
  Antisense strand to SEQ ID NO: 1324106
acuugcaaagaacaauguc

SEQ ID NO: 1324108 - RNA, 19 nt, Artificial Sequence
  Description of Artificial Sequence: Synthetic oligonucleotide
  Sense strand starting at position 3472 of SEQ ID NO: 1242126
cuggaagucccucaguauu

SEQ ID NO: 1324109 - RNA, 19 nt, Artificial Sequence
  Description of Artificial Sequence: Synthetic oligonucleotide
  Antisense strand to SEQ ID NO: 1324108
aauacugagggacuuccag

SEQ ID NO: 1324110 - RNA, 19 nt, Artificial Sequence
  Description of Artificial Sequence: Synthetic oligonucleotide
  Sense strand starting at position 3593 of SEQ ID NO: 1242126
cucaauucccagugggaac

SEQ ID NO: 1324111 - RNA, 19 nt, Artificial Sequence
  Description of Artificial Sequence: Synthetic oligonucleotide
  Antisense strand to SEQ ID NO: 1324110
guucccacugggaauugag

SEQ ID NO: 1324112 - RNA, 19 nt, Artificial Sequence
  Description of Artificial Sequence: Synthetic oligonucleotide
  Sense strand starting at position 3638 of SEQ ID NO: 1242126
acauccaaucuguguuuau

SEQ ID NO: 1324113 - RNA, 19 nt, Artificial Sequence
  Description of Artificial Sequence: Synthetic oligonucleotide
  Antisense strand to SEQ ID NO: 1324112
auaaacacagauuggaugu

SEQ ID NO: 1324114 - RNA, 19 nt, Artificial Sequence
  Description of Artificial Sequence: Synthetic oligonucleotide
  Sense strand starting at position 3648 of SEQ ID NO: 1242126
uguguuuauuucugagaug

SEQ ID NO: 1324115 - RNA, 19 nt, Artificial Sequence
  Description of Artificial Sequence: Synthetic oligonucleotide
  Antisense strand to SEQ ID NO: 1324114
caucucagaaauaaacaca

SEQ ID NO: 1324116 - RNA, 19 nt, Artificial Sequence
  Description of Artificial Sequence: Synthetic oligonucleotide
  Sense strand starting at position 3649 of SEQ ID NO: 1242126
guguuuauuucugagaugu

SEQ ID NO: 1324117 - RNA, 19 nt, Artificial Sequence
  Description of Artificial Sequence: Synthetic oligonucleotide
  Antisense strand to SEQ ID NO: 1324116
acaucucagaaauaaacac

SEQ ID NO: 1324118 - RNA, 19 nt, Artificial Sequence
  Description of Artificial Sequence: Synthetic oligonucleotide
  Sense strand starting at position 3651 of SEQ ID NO: 1242126
guuuauuucugagaugucu

SEQ ID NO: 1324119 - RNA, 19 nt, Artificial Sequence
  Description of Artificial Sequence: Synthetic oligonucleotide
  Antisense strand to SEQ ID NO: 1324118
agacaucucagaaauaaac

SEQ ID NO: 1324120 - RNA, 19 nt, Artificial Sequence
  Description of Artificial Sequence: Synthetic oligonucleotide
  Sense strand starting at position 3689 of SEQ ID NO: 1242126
uugugauuacacuguaguc

SEQ ID NO: 1324121 - RNA, 19 nt, Artificial Sequence
  Description of Artificial Sequence: Synthetic oligonucleotide
  Antisense strand to SEQ ID NO: 1324120
gacuacaguguaaucacaa

SEQ ID NO: 1324122 - RNA, 19 nt, Artificial Sequence
  Description of Artificial Sequence: Synthetic oligonucleotide
  Sense strand starting at position 3732 of SEQ ID NO: 1242126
caguuaucaggguguucuc

SEQ ID NO: 1324123 - RNA, 19 nt, Artificial Sequence
  Description of Artificial Sequence: Synthetic oligonucleotide
  Antisense strand to SEQ ID NO: 1324122
gagaacacccugauaacug

SEQ ID NO: 1324124 - RNA, 19 nt, Artificial Sequence
  Description of Artificial Sequence: Synthetic oligonucleotide
  Sense strand starting at position 3741 of SEQ ID NO: 1242126
ggguguucucucuaaagug

SEQ ID NO: 1324125 - RNA, 19 nt, Artificial Sequence
  Description of Artificial Sequence: Synthetic oligonucleotide
  Antisense strand to SEQ ID NO: 1324124
cacuuuagagagaacaccc

SEQ ID NO: 1324126 - RNA, 19 nt, Artificial Sequence
  Description of Artificial Sequence: Synthetic oligonucleotide
  Sense strand starting at position 3763 of SEQ ID NO: 1242126
augcaauuguguuucucuu

SEQ ID NO: 1324127 - RNA, 19 nt, Artificial Sequence
  Description of Artificial Sequence: Synthetic oligonucleotide
  Antisense strand to SEQ ID NO: 1324126
aagagaaacacaauugcau

SEQ ID NO: 1324128 - RNA, 19 nt, Artificial Sequence
  Description of Artificial Sequence: Synthetic oligonucleotide
  Sense strand starting at position 3819 of SEQ ID NO: 1242126
gggccaaguucagcaugau

SEQ ID NO: 1324129 - RNA, 19 nt, Artificial Sequence
  Description of Artificial Sequence: Synthetic oligonucleotide
  Antisense strand to SEQ ID NO: 1324128
aucaugcugaacuuggccc

SEQ ID NO: 1324130 - RNA, 19 nt, Artificial Sequence
  Description of Artificial Sequence: Synthetic oligonucleotide
  Sense strand starting at position 3845 of SEQ ID NO: 1242126
gccaaaucauagccugacu

SEQ ID NO: 1324131 - RNA, 19 nt, Artificial Sequence
  Description of Artificial Sequence: Synthetic oligonucleotide
  Antisense strand to SEQ ID NO: 1324130
agucaggcuaugauuuggc

SEQ ID NO: 1324132 - RNA, 19 nt, Artificial Sequence
  Description of Artificial Sequence: Synthetic oligonucleotide
  Sense strand starting at position 3965 of SEQ ID NO: 1242126
gggcaaggguuucauuuau

SEQ ID NO: 1324133 - RNA, 19 nt, Artificial Sequence
  Description of Artificial Sequence: Synthetic oligonucleotide
  Antisense strand to SEQ ID NO: 1324132
auaaaugaaacccuugccc

SEQ ID NO: 1324134 - RNA, 19 nt, Artificial Sequence
  Description of Artificial Sequence: Synthetic oligonucleotide
  Sense strand starting at position 71 of SEQ ID NO: 1242127
gugcuuaauuaacuuagau

SEQ ID NO: 1324135 - RNA, 19 nt, Artificial Sequence
  Description of Artificial Sequence: Synthetic oligonucleotide
  Antisense strand to SEQ ID NO: 1324134
aucuaaguuaauuaagcac

SEQ ID NO: 1324136 - RNA, 19 nt, Artificial Sequence
  Description of Artificial Sequence: Synthetic oligonucleotide
  Sense strand starting at position 135 of SEQ ID NO: 1242127
gaaguugucccaggaggag

SEQ ID NO: 1324137 - RNA, 19 nt, Artificial Sequence
  Description of Artificial Sequence: Synthetic oligonucleotide
  Antisense strand to SEQ ID NO: 1324136
cuccuccugggacaacuuc

SEQ ID NO: 1324138 - RNA, 19 nt, Artificial Sequence
  Description of Artificial Sequence: Synthetic oligonucleotide
  Sense strand starting at position 189 of SEQ ID NO: 1242127
guuacaauacgguggaaau

SEQ ID NO: 1324139 - RNA, 19 nt, Artificial Sequence
  Description of Artificial Sequence: Synthetic oligonucleotide
  Antisense strand to SEQ ID NO: 1324138
auuuccaccguauuguaac

SEQ ID NO: 1324140 - RNA, 19 nt, Artificial Sequence
  Description of Artificial Sequence: Synthetic oligonucleotide
  Sense strand starting at position 190 of SEQ ID NO: 1242127
uuacaauacgguggaaaua

SEQ ID NO: 1324141 - RNA, 19 nt, Artificial Sequence
  Description of Artificial Sequence: Synthetic oligonucleotide
  Antisense strand to SEQ ID NO: 1324140
uauuuccaccguauuguaa

SEQ ID NO: 1324142 - RNA, 19 nt, Artificial Sequence
  Description of Artificial Sequence: Synthetic oligonucleotide
  Sense strand starting at position 223 of SEQ ID NO: 1242127
ucagcucagcuugacaaau

SEQ ID NO: 1324143 - RNA, 19 nt, Artificial Sequence
  Description of Artificial Sequence: Synthetic oligonucleotide
  Antisense strand to SEQ ID NO: 1324142
auuugucaagcugagcuga

SEQ ID NO: 1324144 - RNA, 19 nt, Artificial Sequence
  Description of Artificial Sequence: Synthetic oligonucleotide
  Sense strand starting at position 445 of SEQ ID NO: 1242127
ccuggaaacuagcuuuauc

SEQ ID NO: 1324145 - RNA, 19 nt, Artificial Sequence
  Description of Artificial Sequence: Synthetic oligonucleotide
  Antisense strand to SEQ ID NO: 1324144
gauaaagcuaguuuccagg

SEQ ID NO: 1324146 - RNA, 19 nt, Artificial Sequence
  Description of Artificial Sequence: Synthetic oligonucleotide
  Sense strand starting at position 495 of SEQ ID NO: 1242127
cuauguuugagcuguccag

SEQ ID NO: 1324147 - RNA, 19 nt, Artificial Sequence
  Description of Artificial Sequence: Synthetic oligonucleotide
  Antisense strand to SEQ ID NO: 1324146
cuggacagcucaaacauag

SEQ ID NO: 1324148 - RNA, 19 nt, Artificial Sequence
  Description of Artificial Sequence: Synthetic oligonucleotide
  Sense strand starting at position 499 of SEQ ID NO: 1242127
guuugagcuguccaguaaa

SEQ ID NO: 1324149 - RNA, 19 nt, Artificial Sequence
  Description of Artificial Sequence: Synthetic oligonucleotide
  Antisense strand to SEQ ID NO: 1324148
uuuacuggacagcucaaac

SEQ ID NO: 1324150 - RNA, 19 nt, Artificial Sequence
  Description of Artificial Sequence: Synthetic oligonucleotide
  Sense strand starting at position 502 of SEQ ID NO: 1242127
ugagcuguccaguaaagua

SEQ ID NO: 1324151 - RNA, 19 nt, Artificial Sequence
  Description of Artificial Sequence: Synthetic oligonucleotide
  Antisense strand to SEQ ID NO: 1324150
uacuuuacuggacagcuca

SEQ ID NO: 1324152 - RNA, 19 nt, Artificial Sequence
  Description of Artificial Sequence: Synthetic oligonucleotide
  Sense strand starting at position 546 of SEQ ID NO: 1242127
gcaccugaaauguggcuau

SEQ ID NO: 1324153 - RNA, 19 nt, Artificial Sequence
  Description of Artificial Sequence: Synthetic oligonucleotide
  Antisense strand to SEQ ID NO: 1324152
auagccacauuucaggugc

SEQ ID NO: 1324154 - RNA, 19 nt, Artificial Sequence
  Description of Artificial Sequence: Synthetic oligonucleotide
  Sense strand starting at position 642 of SEQ ID NO: 1242127
uggaaagcauaguucuaaa

SEQ ID NO: 1324155 - RNA, 19 nt, Artificial Sequence
  Description of Artificial Sequence: Synthetic oligonucleotide
  Antisense strand to SEQ ID NO: 1324154
uuuagaacuaugcuuucca

SEQ ID NO: 1324156 - RNA, 19 nt, Artificial Sequence
  Description of Artificial Sequence: Synthetic oligonucleotide
  Sense strand starting at position 700 of SEQ ID NO: 1242127
ccugaaaugugauaagaau

SEQ ID NO: 1324157 - RNA, 19 nt, Artificial Sequence
  Description of Artificial Sequence: Synthetic oligonucleotide
  Antisense strand to SEQ ID NO: 1324156
auucuuaucacauuucagg

SEQ ID NO: 1324158 - RNA, 19 nt, Artificial Sequence
  Description of Artificial Sequence: Synthetic oligonucleotide
  Sense strand starting at position 904 of SEQ ID NO: 1242127
ucaguuaaguccuuaccag

SEQ ID NO: 1324159 - RNA, 19 nt, Artificial Sequence
  Description of Artificial Sequence: Synthetic oligonucleotide
  Antisense strand to SEQ ID NO: 1324158
cugguaaggacuuaacuga

SEQ ID NO: 1324160 - RNA, 19 nt, Artificial Sequence
  Description of Artificial Sequence: Synthetic oligonucleotide
  Sense strand starting at position 966 of SEQ ID NO: 1242127
agcauauucuacccgaaag

SEQ ID NO: 1324161 - RNA, 19 nt, Artificial Sequence
  Description of Artificial Sequence: Synthetic oligonucleotide
  Antisense strand to SEQ ID NO: 1324160
cuuucggguagaauaugcu

SEQ ID NO: 1324162 - RNA, 19 nt, Artificial Sequence
  Description of Artificial Sequence: Synthetic oligonucleotide
  Sense strand starting at position 983 of SEQ ID NO: 1242127
agagacaagucuucugguu

SEQ ID NO: 1324163 - RNA, 19 nt, Artificial Sequence
  Description of Artificial Sequence: Synthetic oligonucleotide
  Antisense strand to SEQ ID NO: 1324162
aaccagaagacuugucucu

SEQ ID NO: 1324164 - RNA, 19 nt, Artificial Sequence
  Description of Artificial Sequence: Synthetic oligonucleotide
  Sense strand starting at position 1280 of SEQ ID NO: 1242127
aggagacagcggugcaaua

SEQ ID NO: 1324165 - RNA, 19 nt, Artificial Sequence
  Description of Artificial Sequence: Synthetic oligonucleotide
  Antisense strand to SEQ ID NO: 1324164
uauugcaccgcugucuccu

SEQ ID NO: 1324166 - RNA, 19 nt, Artificial Sequence
  Description of Artificial Sequence: Synthetic oligonucleotide
  Sense strand starting at position 1292 of SEQ ID NO: 1242127
ugcaauaaauggucggaga

SEQ ID NO: 1324167 - RNA, 19 nt, Artificial Sequence
  Description of Artificial Sequence: Synthetic oligonucleotide
  Antisense strand to SEQ ID NO: 1324166
ucuccgaccauuuauugca

SEQ ID NO: 1324168 - RNA, 19 nt, Artificial Sequence
  Description of Artificial Sequence: Synthetic oligonucleotide
  Sense strand starting at position 1293 of SEQ ID NO: 1242127
gcaauaaauggucggagaa

SEQ ID NO: 1324169 - RNA, 19 nt, Artificial Sequence
  Description of Artificial Sequence: Synthetic oligonucleotide
  Antisense strand to SEQ ID NO: 1324168
uucuccgaccauuuauugc

SEQ ID NO: 1324170 - RNA, 19 nt, Artificial Sequence
  Description of Artificial Sequence: Synthetic oligonucleotide
  Sense strand starting at position 1294 of SEQ ID NO: 1242127
caauaaauggucggagaac

SEQ ID NO: 1324171 - RNA, 19 nt, Artificial Sequence
  Description of Artificial Sequence: Synthetic oligonucleotide
  Antisense strand to SEQ ID NO: 1324170
guucuccgaccauuuauug

SEQ ID NO: 1324172 - RNA, 19 nt, Artificial Sequence
  Description of Artificial Sequence: Synthetic oligonucleotide
  Sense strand starting at position 1402 of SEQ ID NO: 1242127
aacaucuagcugcgugaga

SEQ ID NO: 1324173 - RNA, 19 nt, Artificial Sequence
  Description of Artificial Sequence: Synthetic oligonucleotide
  Antisense strand to SEQ ID NO: 1324172
ucucacgcagcuagauguu

SEQ ID NO: 1324174 - RNA, 19 nt, Artificial Sequence
  Description of Artificial Sequence: Synthetic oligonucleotide
  Sense strand starting at position 2009 of SEQ ID NO: 1242127
cgggauuugucgccuaacu

SEQ ID NO: 1324175 - RNA, 19 nt, Artificial Sequence
  Description of Artificial Sequence: Synthetic oligonucleotide
  Antisense strand to SEQ ID NO: 1324174
aguuaggcgacaaaucccg

SEQ ID NO: 1324176 - RNA, 19 nt, Artificial Sequence
  Description of Artificial Sequence: Synthetic oligonucleotide
  Sense strand starting at position 2019 of SEQ ID NO: 1242127
cgccuaacucccgcgagau

SEQ ID NO: 1324177 - RNA, 19 nt, Artificial Sequence
  Description of Artificial Sequence: Synthetic oligonucleotide
  Antisense strand to SEQ ID NO: 1324176
aucucgcgggaguuaggcg

SEQ ID NO: 1324178 - RNA, 19 nt, Artificial Sequence
  Description of Artificial Sequence: Synthetic oligonucleotide
  Sense strand starting at position 2179 of SEQ ID NO: 1242127
cgcagcgauccguuacuua

SEQ ID NO: 1324179 - RNA, 19 nt, Artificial Sequence
  Description of Artificial Sequence: Synthetic oligonucleotide
  Antisense strand to SEQ ID NO: 1324178
uaaguaacggaucgcugcg

SEQ ID NO: 1324180 - RNA, 19 nt, Artificial Sequence
  Description of Artificial Sequence: Synthetic oligonucleotide
  Sense strand starting at position 2195 of SEQ ID NO: 1242127
uuaguugcggccuuaaguu

SEQ ID NO: 1324181 - RNA, 19 nt, Artificial Sequence
  Description of Artificial Sequence: Synthetic oligonucleotide
  Antisense strand to SEQ ID NO: 1324180
aacuuaaggccgcaacuaa

SEQ ID NO: 1324182 - RNA, 19 nt, Artificial Sequence
  Description of Artificial Sequence: Synthetic oligonucleotide
  Sense strand starting at position 2239 of SEQ ID NO: 1242127
gguguuugcguucccgcaa

SEQ ID NO: 1324183 - RNA, 19 nt, Artificial Sequence
  Description of Artificial Sequence: Synthetic oligonucleotide
  Antisense strand to SEQ ID NO: 1324182
uugcgggaacgcaaacacc

SEQ ID NO: 1324184 - RNA, 19 nt, Artificial Sequence
  Description of Artificial Sequence: Synthetic oligonucleotide
  Sense strand starting at position 2284 of SEQ ID NO: 1242127
ucggaacugcuaggagaaa

SEQ ID NO: 1324185 - RNA, 19 nt, Artificial Sequence
  Description of Artificial Sequence: Synthetic oligonucleotide
  Antisense strand to SEQ ID NO: 1324184
uuucuccuagcaguuccga

SEQ ID NO: 1324186 - RNA, 19 nt, Artificial Sequence
  Description of Artificial Sequence: Synthetic oligonucleotide
  Sense strand starting at position 2422 of SEQ ID NO: 1242127
cgcucaacuguugaaugaa

SEQ ID NO: 1324187 - RNA, 19 nt, Artificial Sequence
  Description of Artificial Sequence: Synthetic oligonucleotide
  Antisense strand to SEQ ID NO: 1324186
uucauucaacaguugagcg

SEQ ID NO: 1324188 - RNA, 19 nt, Artificial Sequence
  Description of Artificial Sequence: Synthetic oligonucleotide
  Sense strand starting at position 2594 of SEQ ID NO: 1242127
accagaaagagucgcucau

SEQ ID NO: 1324189 - RNA, 19 nt, Artificial Sequence
  Description of Artificial Sequence: Synthetic oligonucleotide
  Antisense strand to SEQ ID NO: 1324188
augagcgacucuuucuggu

SEQ ID NO: 1324190 - RNA, 19 nt, Artificial Sequence
  Description of Artificial Sequence: Synthetic oligonucleotide
  Sense strand starting at position 2596 of SEQ ID NO: 1242127
cagaaagagucgcucauac

SEQ ID NO: 1324191 - RNA, 19 nt, Artificial Sequence
  Description of Artificial Sequence: Synthetic oligonucleotide
  Antisense strand to SEQ ID NO: 1324190
guaugagcgacucuuucug

SEQ ID NO: 1324192 - RNA, 19 nt, Artificial Sequence
  Description of Artificial Sequence: Synthetic oligonucleotide
  Sense strand starting at position 2598 of SEQ ID NO: 1242127
gaaagagucgcucauacuc

SEQ ID NO: 1324193 - RNA, 19 nt, Artificial Sequence
  Description of Artificial Sequence: Synthetic oligonucleotide
  Antisense strand to SEQ ID NO: 1324192
gaguaugagcgacucuuuc

SEQ ID NO: 1324194 - RNA, 19 nt, Artificial Sequence
  Description of Artificial Sequence: Synthetic oligonucleotide
  Sense strand starting at position 2734 of SEQ ID NO: 1242127
guucucucccauuguugaa

SEQ ID NO: 1324195 - RNA, 19 nt, Artificial Sequence
  Description of Artificial Sequence: Synthetic oligonucleotide
  Antisense strand to SEQ ID NO: 1324194
uucaacaaugggagagaac

SEQ ID NO: 1324196 - RNA, 19 nt, Artificial Sequence
  Description of Artificial Sequence: Synthetic oligonucleotide
  Sense strand starting at position 2763 of SEQ ID NO: 1242127
ccaucagcuucugugacuu

SEQ ID NO: 1324197 - RNA, 19 nt, Artificial Sequence
  Description of Artificial Sequence: Synthetic oligonucleotide
  Antisense strand to SEQ ID NO: 1324196
aagucacagaagcugaugg

SEQ ID NO: 1324198 - RNA, 19 nt, Artificial Sequence
  Description of Artificial Sequence: Synthetic oligonucleotide
  Sense strand starting at position 3270 of SEQ ID NO: 1242127
aguuaauauguugaugcuu

SEQ ID NO: 1324199 - RNA, 19 nt, Artificial Sequence
  Description of Artificial Sequence: Synthetic oligonucleotide
  Antisense strand to SEQ ID NO: 1324198
aagcaucaacauauuaacu

SEQ ID NO: 1324200 - RNA, 19 nt, Artificial Sequence
  Description of Artificial Sequence: Synthetic oligonucleotide
  Sense strand starting at position 3324 of SEQ ID NO: 1242127
cccggagguguauauccua

SEQ ID NO: 1324201 - RNA, 19 nt, Artificial Sequence
  Description of Artificial Sequence: Synthetic oligonucleotide
  Antisense strand to SEQ ID NO: 1324200
uaggauauacaccuccggg

SEQ ID NO: 1324202 - RNA, 19 nt, Artificial Sequence
  Description of Artificial Sequence: Synthetic oligonucleotide
  Sense strand starting at position 3327 of SEQ ID NO: 1242127
ggagguguauauccuagua

SEQ ID NO: 1324203 - RNA, 19 nt, Artificial Sequence
  Description of Artificial Sequence: Synthetic oligonucleotide
  Antisense strand to SEQ ID NO: 1324202
uacuaggauauacaccucc

SEQ ID NO: 1324204 - RNA, 19 nt, Artificial Sequence
  Description of Artificial Sequence: Synthetic oligonucleotide
  Sense strand starting at position 3403 of SEQ ID NO: 1242127
cucgucauuucccuccuua

SEQ ID NO: 1324205 - RNA, 19 nt, Artificial Sequence
  Description of Artificial Sequence: Synthetic oligonucleotide
  Antisense strand to SEQ ID NO: 1324204
uaaggagggaaaugacgag

SEQ ID NO: 1324206 - RNA, 19 nt, Artificial Sequence
  Description of Artificial Sequence: Synthetic oligonucleotide
  Sense strand starting at position 3755 of SEQ ID NO: 1242127
caggcaugucuauauuaga

SEQ ID NO: 1324207 - RNA, 19 nt, Artificial Sequence
  Description of Artificial Sequence: Synthetic oligonucleotide
  Antisense strand to SEQ ID NO: 1324206
ucuaauauagacaugccug

SEQ ID NO: 1324208 - RNA, 19 nt, Artificial Sequence
  Description of Artificial Sequence: Synthetic oligonucleotide
  Sense strand starting at position 3787 of SEQ ID NO: 1242127
uagucagaugcuuguaucu

SEQ ID NO: 1324209 - RNA, 19 nt, Artificial Sequence
  Description of Artificial Sequence: Synthetic oligonucleotide
  Antisense strand to SEQ ID NO: 1324208
agauacaagcaucugacua

SEQ ID NO: 1324210 - RNA, 19 nt, Artificial Sequence
  Description of Artificial Sequence: Synthetic oligonucleotide
  Sense strand starting at position 3840 of SEQ ID NO: 1242127
auaauauucgacugggcca

SEQ ID NO: 1324211 - RNA, 19 nt, Artificial Sequence
  Description of Artificial Sequence: Synthetic oligonucleotide
  Antisense strand to SEQ ID NO: 1324210
uggcccagucgaauauuau

SEQ ID NO: 1324212 - RNA, 19 nt, Artificial Sequence
  Description of Artificial Sequence: Synthetic oligonucleotide
  Sense strand starting at position 3912 of SEQ ID NO: 1242127
gcaggaucgcuugaugcua

SEQ ID NO: 1324213 - RNA, 19 nt, Artificial Sequence
  Description of Artificial Sequence: Synthetic oligonucleotide
  Antisense strand to SEQ ID NO: 1324212
uagcaucaagcgauccugc

SEQ ID NO: 1324214 - RNA, 19 nt, Artificial Sequence
  Description of Artificial Sequence: Synthetic oligonucleotide
  Sense strand starting at position 89 of SEQ ID NO: 1242128
ccgugcugggauuauagau

SEQ ID NO: 1324215 - RNA, 19 nt, Artificial Sequence
  Description of Artificial Sequence: Synthetic oligonucleotide
  Antisense strand to SEQ ID NO: 1324214
aucuauaaucccagcacgg

SEQ ID NO: 1324216 - RNA, 19 nt, Artificial Sequence
  Description of Artificial Sequence: Synthetic oligonucleotide
  Sense strand starting at position 242 of SEQ ID NO: 1242128
guacaaagagguugaguaa

SEQ ID NO: 1324217 - RNA, 19 nt, Artificial Sequence
  Description of Artificial Sequence: Synthetic oligonucleotide
  Antisense strand to SEQ ID NO: 1324216
uuacucaaccucuuuguac

SEQ ID NO: 1324218 - RNA, 19 nt, Artificial Sequence
  Description of Artificial Sequence: Synthetic oligonucleotide
  Sense strand starting at position 280 of SEQ ID NO: 1242128
cuguuaaguaaugggaacu

SEQ ID NO: 1324219 - RNA, 19 nt, Artificial Sequence
  Description of Artificial Sequence: Synthetic oligonucleotide
  Antisense strand to SEQ ID NO: 1324218
aguucccauuacuuaacag

SEQ ID NO: 1324220 - RNA, 19 nt, Artificial Sequence
  Description of Artificial Sequence: Synthetic oligonucleotide
  Sense strand starting at position 318 of SEQ ID NO: 1242128
uuaacucugcguuaacagu

SEQ ID NO: 1324221 - RNA, 19 nt, Artificial Sequence
  Description of Artificial Sequence: Synthetic oligonucleotide
  Antisense strand to SEQ ID NO: 1324220
acuguuaacgcagaguuaa

SEQ ID NO: 1324222 - RNA, 19 nt, Artificial Sequence
  Description of Artificial Sequence: Synthetic oligonucleotide
  Sense strand starting at position 327 of SEQ ID NO: 1242128
cguuaacaguuccugagga

SEQ ID NO: 1324223 - RNA, 19 nt, Artificial Sequence
  Description of Artificial Sequence: Synthetic oligonucleotide
  Antisense strand to SEQ ID NO: 1324222
uccucaggaacuguuaacg

SEQ ID NO: 1324224 - RNA, 19 nt, Artificial Sequence
  Description of Artificial Sequence: Synthetic oligonucleotide
  Sense strand starting at position 359 of SEQ ID NO: 1242128
gcuguuugugaggagugaa

SEQ ID NO: 1324225 - RNA, 19 nt, Artificial Sequence
  Description of Artificial Sequence: Synthetic oligonucleotide
  Antisense strand to SEQ ID NO: 1324224
uucacuccucacaaacagc

SEQ ID NO: 1324226 - RNA, 19 nt, Artificial Sequence
  Description of Artificial Sequence: Synthetic oligonucleotide
  Sense strand starting at position 362 of SEQ ID NO: 1242128
guuugugaggagugaauga

SEQ ID NO: 1324227 - RNA, 19 nt, Artificial Sequence
  Description of Artificial Sequence: Synthetic oligonucleotide
  Antisense strand to SEQ ID NO: 1324226
ucauucacuccucacaaac

SEQ ID NO: 1324228 - RNA, 19 nt, Artificial Sequence
  Description of Artificial Sequence: Synthetic oligonucleotide
  Sense strand starting at position 433 of SEQ ID NO: 1242128
gucaauaguagcuauuguu

SEQ ID NO: 1324229 - RNA, 19 nt, Artificial Sequence
  Description of Artificial Sequence: Synthetic oligonucleotide
  Antisense strand to SEQ ID NO: 1324228
aacaauagcuacuauugac

SEQ ID NO: 1324230 - RNA, 19 nt, Artificial Sequence
  Description of Artificial Sequence: Synthetic oligonucleotide
  Sense strand starting at position 539 of SEQ ID NO: 1242128
cuaccauggugucuagaaa

SEQ ID NO: 1324231 - RNA, 19 nt, Artificial Sequence
  Description of Artificial Sequence: Synthetic oligonucleotide
  Antisense strand to SEQ ID NO: 1324230
uuucuagacaccaugguag

SEQ ID NO: 1324232 - RNA, 19 nt, Artificial Sequence
  Description of Artificial Sequence: Synthetic oligonucleotide
  Sense strand starting at position 540 of SEQ ID NO: 1242128
uaccauggugucuagaaac

SEQ ID NO: 1324233 - RNA, 19 nt, Artificial Sequence
  Description of Artificial Sequence: Synthetic oligonucleotide
  Antisense strand to SEQ ID NO: 1324232
guuucuagacaccauggua

SEQ ID NO: 1324234 - RNA, 19 nt, Artificial Sequence
  Description of Artificial Sequence: Synthetic oligonucleotide
  Sense strand starting at position 606 of SEQ ID NO: 1242128
uguugacaccuuuaaguuu

SEQ ID NO: 1324235 - RNA, 19 nt, Artificial Sequence
  Description of Artificial Sequence: Synthetic oligonucleotide
  Antisense strand to SEQ ID NO: 1324234
aaacuuaaaggugucaaca

SEQ ID NO: 1324236 - RNA, 19 nt, Artificial Sequence
  Description of Artificial Sequence: Synthetic oligonucleotide
  Sense strand starting at position 701 of SEQ ID NO: 1242128
gcaggaaaucccuggacca

SEQ ID NO: 1324237 - RNA, 19 nt, Artificial Sequence
  Description of Artificial Sequence: Synthetic oligonucleotide
  Antisense strand to SEQ ID NO: 1324236
ugguccagggauuuccugc

SEQ ID NO: 1324238 - RNA, 19 nt, Artificial Sequence
  Description of Artificial Sequence: Synthetic oligonucleotide
  Sense strand starting at position 746 of SEQ ID NO: 1242128
cagccuacucugggucaga

SEQ ID NO: 1324239 - RNA, 19 nt, Artificial Sequence
  Description of Artificial Sequence: Synthetic oligonucleotide
  Antisense strand to SEQ ID NO: 1324238
ucugacccagaguaggcug

SEQ ID NO: 1324240 - RNA, 19 nt, Artificial Sequence
  Description of Artificial Sequence: Synthetic oligonucleotide
  Sense strand starting at position 747 of SEQ ID NO: 1242128
agccuacucugggucagaa

SEQ ID NO: 1324241 - RNA, 19 nt, Artificial Sequence
  Description of Artificial Sequence: Synthetic oligonucleotide
  Antisense strand to SEQ ID NO: 1324240
uucugacccagaguaggcu

SEQ ID NO: 1324242 - RNA, 19 nt, Artificial Sequence
  Description of Artificial Sequence: Synthetic oligonucleotide
  Sense strand starting at position 760 of SEQ ID NO: 1242128
ucagaaugcuagccugaga

SEQ ID NO: 1324243 - RNA, 19 nt, Artificial Sequence
  Description of Artificial Sequence: Synthetic oligonucleotide
  Antisense strand to SEQ ID NO: 1324242
ucucaggcuagcauucuga

SEQ ID NO: 1324244 - RNA, 19 nt, Artificial Sequence
  Description of Artificial Sequence: Synthetic oligonucleotide
  Sense strand starting at position 763 of SEQ ID NO: 1242128
gaaugcuagccugagagca

SEQ ID NO: 1324245 - RNA, 19 nt, Artificial Sequence
  Description of Artificial Sequence: Synthetic oligonucleotide
  Antisense strand to SEQ ID NO: 1324244
ugcucucaggcuagcauuc

SEQ ID NO: 1324246 - RNA, 19 nt, Artificial Sequence
  Description of Artificial Sequence: Synthetic oligonucleotide
  Sense strand starting at position 1024 of SEQ ID NO: 1242128
agucuaugguucucugaag

SEQ ID NO: 1324247 - RNA, 19 nt, Artificial Sequence
  Description of Artificial Sequence: Synthetic oligonucleotide
  Antisense strand to SEQ ID NO: 1324246
cuucagagaaccauagacu

SEQ ID NO: 1324248 - RNA, 19 nt, Artificial Sequence
  Description of Artificial Sequence: Synthetic oligonucleotide
  Sense strand starting at position 1025 of SEQ ID NO: 1242128
gucuaugguucucugaaga

SEQ ID NO: 1324249 - RNA, 19 nt, Artificial Sequence
  Description of Artificial Sequence: Synthetic oligonucleotide
  Antisense strand to SEQ ID NO: 1324248
ucuucagagaaccauagac

SEQ ID NO: 1324250 - RNA, 19 nt, Artificial Sequence
  Description of Artificial Sequence: Synthetic oligonucleotide
  Sense strand starting at position 1457 of SEQ ID NO: 1242128
cucagagaugcuggagaga

SEQ ID NO: 1324251 - RNA, 19 nt, Artificial Sequence
  Description of Artificial Sequence: Synthetic oligonucleotide
  Antisense strand to SEQ ID NO: 1324250
ucucuccagcaucucugag

SEQ ID NO: 1324252 - RNA, 19 nt, Artificial Sequence
  Description of Artificial Sequence: Synthetic oligonucleotide
  Sense strand starting at position 2036 of SEQ ID NO: 1242128
agaugacgcauuugacguu

SEQ ID NO: 1324253 - RNA, 19 nt, Artificial Sequence
  Description of Artificial Sequence: Synthetic oligonucleotide
  Antisense strand to SEQ ID NO: 1324252
aacgucaaaugcgucaucu

SEQ ID NO: 1324254 - RNA, 19 nt, Artificial Sequence
  Description of Artificial Sequence: Synthetic oligonucleotide
  Sense strand starting at position 2060 of SEQ ID NO: 1242128
aguggauugcaacaucuuu

SEQ ID NO: 1324255 - RNA, 19 nt, Artificial Sequence
  Description of Artificial Sequence: Synthetic oligonucleotide
  Antisense strand to SEQ ID NO: 1324254
aaagauguugcaauccacu

SEQ ID NO: 1324256 - RNA, 19 nt, Artificial Sequence
  Description of Artificial Sequence: Synthetic oligonucleotide
  Sense strand starting at position 2162 of SEQ ID NO: 1242128
cugcuaccagucugauacu

SEQ ID NO: 1324257 - RNA, 19 nt, Artificial Sequence
  Description of Artificial Sequence: Synthetic oligonucleotide
  Antisense strand to SEQ ID NO: 1324256
aguaucagacugguagcag

SEQ ID NO: 1324258 - RNA, 19 nt, Artificial Sequence
  Description of Artificial Sequence: Synthetic oligonucleotide
  Sense strand starting at position 2175 of SEQ ID NO: 1242128
gauacucaguggucucuua

SEQ ID NO: 1324259 - RNA, 19 nt, Artificial Sequence
  Description of Artificial Sequence: Synthetic oligonucleotide
  Antisense strand to SEQ ID NO: 1324258
uaagagaccacugaguauc

SEQ ID NO: 1324260 - RNA, 19 nt, Artificial Sequence
  Description of Artificial Sequence: Synthetic oligonucleotide
  Sense strand starting at position 2458 of SEQ ID NO: 1242128
cuaggacuuugagcucuua

SEQ ID NO: 1324261 - RNA, 19 nt, Artificial Sequence
  Description of Artificial Sequence: Synthetic oligonucleotide
  Antisense strand to SEQ ID NO: 1324260
uaagagcucaaaguccuag

SEQ ID NO: 1324262 - RNA, 19 nt, Artificial Sequence
  Description of Artificial Sequence: Synthetic oligonucleotide
  Sense strand starting at position 2514 of SEQ ID NO: 1242128
gugaaugucaaaugaguua

SEQ ID NO: 1324263 - RNA, 19 nt, Artificial Sequence
  Description of Artificial Sequence: Synthetic oligonucleotide
  Antisense strand to SEQ ID NO: 1324262
uaacucauuugacauucac

SEQ ID NO: 1324264 - RNA, 19 nt, Artificial Sequence
  Description of Artificial Sequence: Synthetic oligonucleotide
  Sense strand starting at position 2565 of SEQ ID NO: 1242128
gagggaagugcuugucuuu

SEQ ID NO: 1324265 - RNA, 19 nt, Artificial Sequence
  Description of Artificial Sequence: Synthetic oligonucleotide
  Antisense strand to SEQ ID NO: 1324264
aaagacaagcacuucccuc

SEQ ID NO: 1324266 - RNA, 19 nt, Artificial Sequence
  Description of Artificial Sequence: Synthetic oligonucleotide
  Sense strand starting at position 2637 of SEQ ID NO: 1242128
cccagaucugugcagaauc

SEQ ID NO: 1324267 - RNA, 19 nt, Artificial Sequence
  Description of Artificial Sequence: Synthetic oligonucleotide
  Antisense strand to SEQ ID NO: 1324266
gauucugcacagaucuggg

SEQ ID NO: 1324268 - RNA, 19 nt, Artificial Sequence
  Description of Artificial Sequence: Synthetic oligonucleotide
  Sense strand starting at position 2686 of SEQ ID NO: 1242128
cagugucaugaagaucugu

SEQ ID NO: 1324269 - RNA, 19 nt, Artificial Sequence
  Description of Artificial Sequence: Synthetic oligonucleotide
  Antisense strand to SEQ ID NO: 1324268
acagaucuucaugacacug

SEQ ID NO: 1324270 - RNA, 19 nt, Artificial Sequence
  Description of Artificial Sequence: Synthetic oligonucleotide
  Sense strand starting at position 2695 of SEQ ID NO: 1242128
gaagaucugugguuugaaa

SEQ ID NO: 1324271 - RNA, 19 nt, Artificial Sequence
  Description of Artificial Sequence: Synthetic oligonucleotide
  Antisense strand to SEQ ID NO: 1324270
uuucaaaccacagaucuuc

SEQ ID NO: 1324272 - RNA, 19 nt, Artificial Sequence
  Description of Artificial Sequence: Synthetic oligonucleotide
  Sense strand starting at position 2943 of SEQ ID NO: 1242128
gcauaaagguuacccugau

SEQ ID NO: 1324273 - RNA, 19 nt, Artificial Sequence
  Description of Artificial Sequence: Synthetic oligonucleotide
  Antisense strand to SEQ ID NO: 1324272
aucaggguaaccuuuaugc

SEQ ID NO: 1324274 - RNA, 19 nt, Artificial Sequence
  Description of Artificial Sequence: Synthetic oligonucleotide
  Sense strand starting at position 2953 of SEQ ID NO: 1242128
uacccugauuuaggaggaa

SEQ ID NO: 1324275 - RNA, 19 nt, Artificial Sequence
  Description of Artificial Sequence: Synthetic oligonucleotide
  Antisense strand to SEQ ID NO: 1324274
uuccuccuaaaucagggua

SEQ ID NO: 1324276 - RNA, 19 nt, Artificial Sequence
  Description of Artificial Sequence: Synthetic oligonucleotide
  Sense strand starting at position 3031 of SEQ ID NO: 1242128
auccaaucauagguuugau

SEQ ID NO: 1324277 - RNA, 19 nt, Artificial Sequence
  Description of Artificial Sequence: Synthetic oligonucleotide
  Antisense strand to SEQ ID NO: 1324276
aucaaaccuaugauuggau

SEQ ID NO: 1324278 - RNA, 19 nt, Artificial Sequence
  Description of Artificial Sequence: Synthetic oligonucleotide
  Sense strand starting at position 3147 of SEQ ID NO: 1242128
ucgggucucagucagaaca

SEQ ID NO: 1324279 - RNA, 19 nt, Artificial Sequence
  Description of Artificial Sequence: Synthetic oligonucleotide
  Antisense strand to SEQ ID NO: 1324278
uguucugacugagacccga

SEQ ID NO: 1324280 - RNA, 19 nt, Artificial Sequence
  Description of Artificial Sequence: Synthetic oligonucleotide
  Sense strand starting at position 3218 of SEQ ID NO: 1242128
cugagcugccucuaauucu

SEQ ID NO: 1324281 - RNA, 19 nt, Artificial Sequence
  Description of Artificial Sequence: Synthetic oligonucleotide
  Antisense strand to SEQ ID NO: 1324280
agaauuagaggcagcucag

SEQ ID NO: 1324282 - RNA, 19 nt, Artificial Sequence
  Description of Artificial Sequence: Synthetic oligonucleotide
  Sense strand starting at position 3358 of SEQ ID NO: 1242128
ugaguccuaccauguuaca

SEQ ID NO: 1324283 - RNA, 19 nt, Artificial Sequence
  Description of Artificial Sequence: Synthetic oligonucleotide
  Antisense strand to SEQ ID NO: 1324282
uguaacaugguaggacuca

SEQ ID NO: 1324284 - RNA, 19 nt, Artificial Sequence
  Description of Artificial Sequence: Synthetic oligonucleotide
  Sense strand starting at position 3635 of SEQ ID NO: 1242128
ucagcagguuguucugaaa

SEQ ID NO: 1324285 - RNA, 19 nt, Artificial Sequence
  Description of Artificial Sequence: Synthetic oligonucleotide
  Antisense strand to SEQ ID NO: 1324284
uuucagaacaaccugcuga

SEQ ID NO: 1324286 - RNA, 19 nt, Artificial Sequence
  Description of Artificial Sequence: Synthetic oligonucleotide
  Sense strand starting at position 3823 of SEQ ID NO: 1242128
ccaacauucuggucaugcu

SEQ ID NO: 1324287 - RNA, 19 nt, Artificial Sequence
  Description of Artificial Sequence: Synthetic oligonucleotide
  Antisense strand to SEQ ID NO: 1324286
agcaugaccagaauguugg

SEQ ID NO: 1324288 - RNA, 19 nt, Artificial Sequence
  Description of Artificial Sequence: Synthetic oligonucleotide
  Sense strand starting at position 3879 of SEQ ID NO: 1242128
cuugaaaggucuuccaaug

SEQ ID NO: 1324289 - RNA, 19 nt, Artificial Sequence
  Description of Artificial Sequence: Synthetic oligonucleotide
  Antisense strand to SEQ ID NO: 1324288
cauuggaagaccuuucaag

SEQ ID NO: 1324290 - RNA, 19 nt, Artificial Sequence
  Description of Artificial Sequence: Synthetic oligonucleotide
  Sense strand starting at position 3907 of SEQ ID NO: 1242128
gggucacauugcucccauu

SEQ ID NO: 1324291 - RNA, 19 nt, Artificial Sequence
  Description of Artificial Sequence: Synthetic oligonucleotide
  Antisense strand to SEQ ID NO: 1324290
aaugggagcaaugugaccc

SEQ ID NO: 1324292 - RNA, 19 nt, Artificial Sequence
  Description of Artificial Sequence: Synthetic oligonucleotide
  Sense strand starting at position 3927 of SEQ ID NO: 1242128
caugacgucuuuccaugaa

SEQ ID NO: 1324293 - RNA, 19 nt, Artificial Sequence
  Description of Artificial Sequence: Synthetic oligonucleotide
  Antisense strand to SEQ ID NO: 1324292
uucauggaaagacgucaug

SEQ ID NO: 1324294 - RNA, 19 nt, Artificial Sequence
  Description of Artificial Sequence: Synthetic oligonucleotide
  Sense strand starting at position 31 of SEQ ID NO: 1242129
gcauguuccuggucaugga

SEQ ID NO: 1324295 - RNA, 19 nt, Artificial Sequence
  Description of Artificial Sequence: Synthetic oligonucleotide
  Antisense strand to SEQ ID NO: 1324294
uccaugaccaggaacaugc

SEQ ID NO: 1324296 - RNA, 19 nt, Artificial Sequence
  Description of Artificial Sequence: Synthetic oligonucleotide
  Sense strand starting at position 62 of SEQ ID NO: 1242129
gcacaauucuccgugcuca

SEQ ID NO: 1324297 - RNA, 19 nt, Artificial Sequence
  Description of Artificial Sequence: Synthetic oligonucleotide
  Antisense strand to SEQ ID NO: 1324296
ugagcacggagaauugugc

SEQ ID NO: 1324298 - RNA, 19 nt, Artificial Sequence
  Description of Artificial Sequence: Synthetic oligonucleotide
  Sense strand starting at position 96 of SEQ ID NO: 1242129
gcaguuucucccgagcaca

SEQ ID NO: 1324299 - RNA, 19 nt, Artificial Sequence
  Description of Artificial Sequence: Synthetic oligonucleotide
  Antisense strand to SEQ ID NO: 1324298
ugugcucgggagaaacugc

SEQ ID NO: 1324300 - RNA, 19 nt, Artificial Sequence
  Description of Artificial Sequence: Synthetic oligonucleotide
  Sense strand starting at position 142 of SEQ ID NO: 1242129
cacacaguuccgcacugau

SEQ ID NO: 1324301 - RNA, 19 nt, Artificial Sequence
  Description of Artificial Sequence: Synthetic oligonucleotide
  Antisense strand to SEQ ID NO: 1324300
aucagugcggaacugugug

SEQ ID NO: 1324302 - RNA, 19 nt, Artificial Sequence
  Description of Artificial Sequence: Synthetic oligonucleotide
  Sense strand starting at position 145 of SEQ ID NO: 1242129
acaguuccgcacugauaca

SEQ ID NO: 1324303 - RNA, 19 nt, Artificial Sequence
  Description of Artificial Sequence: Synthetic oligonucleotide
  Antisense strand to SEQ ID NO: 1324302
uguaucagugcggaacugu

SEQ ID NO: 1324304 - RNA, 19 nt, Artificial Sequence
  Description of Artificial Sequence: Synthetic oligonucleotide
  Sense strand starting at position 202 of SEQ ID NO: 1242129
gacaacuucucguuaggga

SEQ ID NO: 1324305 - RNA, 19 nt, Artificial Sequence
  Description of Artificial Sequence: Synthetic oligonucleotide
  Antisense strand to SEQ ID NO: 1324304
ucccuaacgagaaguuguc

SEQ ID NO: 1324306 - RNA, 19 nt, Artificial Sequence
  Description of Artificial Sequence: Synthetic oligonucleotide
  Sense strand starting at position 829 of SEQ ID NO: 1242129
gccggccucaccugacaua

SEQ ID NO: 1324307 - RNA, 19 nt, Artificial Sequence
  Description of Artificial Sequence: Synthetic oligonucleotide
  Antisense strand to SEQ ID NO: 1324306
uaugucaggugaggccggc

SEQ ID NO: 1324308 - RNA, 19 nt, Artificial Sequence
  Description of Artificial Sequence: Synthetic oligonucleotide
  Sense strand starting at position 1162 of SEQ ID NO: 1242129
ugaugagcucucuaaaggu

SEQ ID NO: 1324309 - RNA, 19 nt, Artificial Sequence
  Description of Artificial Sequence: Synthetic oligonucleotide
  Antisense strand to SEQ ID NO: 1324308
accuuuagagagcucauca

SEQ ID NO: 1324310 - RNA, 19 nt, Artificial Sequence
  Description of Artificial Sequence: Synthetic oligonucleotide
  Sense strand starting at position 1172 of SEQ ID NO: 1242129
ucuaaagguccagggcauu

SEQ ID NO: 1324311 - RNA, 19 nt, Artificial Sequence
  Description of Artificial Sequence: Synthetic oligonucleotide
  Antisense strand to SEQ ID NO: 1324310
aaugcccuggaccuuuaga

SEQ ID NO: 1324312 - RNA, 19 nt, Artificial Sequence
  Description of Artificial Sequence: Synthetic oligonucleotide
  Sense strand starting at position 1207 of SEQ ID NO: 1242129
uaucuuguggauugcugaa

SEQ ID NO: 1324313 - RNA, 19 nt, Artificial Sequence
  Description of Artificial Sequence: Synthetic oligonucleotide
  Antisense strand to SEQ ID NO: 1324312
uucagcaauccacaagaua

SEQ ID NO: 1324314 - RNA, 19 nt, Artificial Sequence
  Description of Artificial Sequence: Synthetic oligonucleotide
  Sense strand starting at position 1442 of SEQ ID NO: 1242129
gacacaucgucuuucggca

SEQ ID NO: 1324315 - RNA, 19 nt, Artificial Sequence
  Description of Artificial Sequence: Synthetic oligonucleotide
  Antisense strand to SEQ ID NO: 1324314
ugccgaaagacgauguguc

SEQ ID NO: 1324316 - RNA, 19 nt, Artificial Sequence
  Description of Artificial Sequence: Synthetic oligonucleotide
  Sense strand starting at position 1477 of SEQ ID NO: 1242129
ucagacauuucuuaguuua

SEQ ID NO: 1324317 - RNA, 19 nt, Artificial Sequence
  Description of Artificial Sequence: Synthetic oligonucleotide
  Antisense strand to SEQ ID NO: 1324316
uaaacuaagaaaugucuga

SEQ ID NO: 1324318 - RNA, 19 nt, Artificial Sequence
  Description of Artificial Sequence: Synthetic oligonucleotide
  Sense strand starting at position 1491 of SEQ ID NO: 1242129
guuuaaauaucccagagca

SEQ ID NO: 1324319 - RNA, 19 nt, Artificial Sequence
  Description of Artificial Sequence: Synthetic oligonucleotide
  Antisense strand to SEQ ID NO: 1324318
ugcucugggauauuuaaac

SEQ ID NO: 1324320 - RNA, 19 nt, Artificial Sequence
  Description of Artificial Sequence: Synthetic oligonucleotide
  Sense strand starting at position 1596 of SEQ ID NO: 1242129
ccuaauugccuuugcgcaa

SEQ ID NO: 1324321 - RNA, 19 nt, Artificial Sequence
  Description of Artificial Sequence: Synthetic oligonucleotide
  Antisense strand to SEQ ID NO: 1324320
uugcgcaaaggcaauuagg

SEQ ID NO: 1324322 - RNA, 19 nt, Artificial Sequence
  Description of Artificial Sequence: Synthetic oligonucleotide
  Sense strand starting at position 1597 of SEQ ID NO: 1242129
cuaauugccuuugcgcaaa

SEQ ID NO: 1324323 - RNA, 19 nt, Artificial Sequence
  Description of Artificial Sequence: Synthetic oligonucleotide
  Antisense strand to SEQ ID NO: 1324322
uuugcgcaaaggcaauuag

SEQ ID NO: 1324324 - RNA, 19 nt, Artificial Sequence
  Description of Artificial Sequence: Synthetic oligonucleotide
  Sense strand starting at position 1646 of SEQ ID NO: 1242129
ccuagccggcuugagaaau

SEQ ID NO: 1324325 - RNA, 19 nt, Artificial Sequence
  Description of Artificial Sequence: Synthetic oligonucleotide
  Antisense strand to SEQ ID NO: 1324324
auuucucaagccggcuagg

SEQ ID NO: 1324326 - RNA, 19 nt, Artificial Sequence
  Description of Artificial Sequence: Synthetic oligonucleotide
  Sense strand starting at position 1652 of SEQ ID NO: 1242129
cggcuugagaaauaguguu

SEQ ID NO: 1324327 - RNA, 19 nt, Artificial Sequence
  Description of Artificial Sequence: Synthetic oligonucleotide
  Antisense strand to SEQ ID NO: 1324326
aacacuauuucucaagccg

SEQ ID NO: 1324328 - RNA, 19 nt, Artificial Sequence
  Description of Artificial Sequence: Synthetic oligonucleotide
  Sense strand starting at position 1658 of SEQ ID NO: 1242129
gagaaauaguguuuacuua

SEQ ID NO: 1324329 - RNA, 19 nt, Artificial Sequence
  Description of Artificial Sequence: Synthetic oligonucleotide
  Antisense strand to SEQ ID NO: 1324328
uaaguaaacacuauuucuc

SEQ ID NO: 1324330 - RNA, 19 nt, Artificial Sequence
  Description of Artificial Sequence: Synthetic oligonucleotide
  Sense strand starting at position 1858 of SEQ ID NO: 1242129
auacuuacucuuggaauga

SEQ ID NO: 1324331 - RNA, 19 nt, Artificial Sequence
  Description of Artificial Sequence: Synthetic oligonucleotide
  Antisense strand to SEQ ID NO: 1324330
ucauuccaagaguaaguau

SEQ ID NO: 1324332 - RNA, 19 nt, Artificial Sequence
  Description of Artificial Sequence: Synthetic oligonucleotide
  Sense strand starting at position 2244 of SEQ ID NO: 1242129
ccugauuggcccggaguga

SEQ ID NO: 1324333 - RNA, 19 nt, Artificial Sequence
  Description of Artificial Sequence: Synthetic oligonucleotide
  Antisense strand to SEQ ID NO: 1324332
ucacuccgggccaaucagg

SEQ ID NO: 1324334 - RNA, 19 nt, Artificial Sequence
  Description of Artificial Sequence: Synthetic oligonucleotide
  Sense strand starting at position 2245 of SEQ ID NO: 1242129
cugauuggcccggagugaa

SEQ ID NO: 1324335 - RNA, 19 nt, Artificial Sequence
  Description of Artificial Sequence: Synthetic oligonucleotide
  Antisense strand to SEQ ID NO: 1324334
uucacuccgggccaaucag

SEQ ID NO: 1324336 - RNA, 19 nt, Artificial Sequence
  Description of Artificial Sequence: Synthetic oligonucleotide
  Sense strand starting at position 2372 of SEQ ID NO: 1242129
ccguuacaacucugagcuu

SEQ ID NO: 1324337 - RNA, 19 nt, Artificial Sequence
  Description of Artificial Sequence: Synthetic oligonucleotide
  Antisense strand to SEQ ID NO: 1324336
aagcucagaguuguaacgg

SEQ ID NO: 1324338 - RNA, 19 nt, Artificial Sequence
  Description of Artificial Sequence: Synthetic oligonucleotide
  Sense strand starting at position 2381 of SEQ ID NO: 1242129
cucugagcuuccucuugga

SEQ ID NO: 1324339 - RNA, 19 nt, Artificial Sequence
  Description of Artificial Sequence: Synthetic oligonucleotide
  Antisense strand to SEQ ID NO: 1324338
uccaagaggaagcucagag

SEQ ID NO: 1324340 - RNA, 19 nt, Artificial Sequence
  Description of Artificial Sequence: Synthetic oligonucleotide
  Sense strand starting at position 2455 of SEQ ID NO: 1242129
ggagauggcucuccuuuaa

SEQ ID NO: 1324341 - RNA, 19 nt, Artificial Sequence
  Description of Artificial Sequence: Synthetic oligonucleotide
  Antisense strand to SEQ ID NO: 1324340
uuaaaggagagccaucucc

SEQ ID NO: 1324342 - RNA, 19 nt, Artificial Sequence
  Description of Artificial Sequence: Synthetic oligonucleotide
  Sense strand starting at position 2648 of SEQ ID NO: 1242129
ccaccuggguucugauaaa

SEQ ID NO: 1324343 - RNA, 19 nt, Artificial Sequence
  Description of Artificial Sequence: Synthetic oligonucleotide
  Antisense strand to SEQ ID NO: 1324342
uuuaucagaacccaggugg

SEQ ID NO: 1324344 - RNA, 19 nt, Artificial Sequence
  Description of Artificial Sequence: Synthetic oligonucleotide
  Sense strand starting at position 2989 of SEQ ID NO: 1242129
gggucgauugcguguccaa

SEQ ID NO: 1324345 - RNA, 19 nt, Artificial Sequence
  Description of Artificial Sequence: Synthetic oligonucleotide
  Antisense strand to SEQ ID NO: 1324344
uuggacacgcaaucgaccc

SEQ ID NO: 1324346 - RNA, 19 nt, Artificial Sequence
  Description of Artificial Sequence: Synthetic oligonucleotide
  Sense strand starting at position 2990 of SEQ ID NO: 1242129
ggucgauugcguguccaac

SEQ ID NO: 1324347 - RNA, 19 nt, Artificial Sequence
  Description of Artificial Sequence: Synthetic oligonucleotide
  Antisense strand to SEQ ID NO: 1324346
guuggacacgcaaucgacc

SEQ ID NO: 1324348 - RNA, 19 nt, Artificial Sequence
  Description of Artificial Sequence: Synthetic oligonucleotide
  Sense strand starting at position 2991 of SEQ ID NO: 1242129
gucgauugcguguccaacu

SEQ ID NO: 1324349 - RNA, 19 nt, Artificial Sequence
  Description of Artificial Sequence: Synthetic oligonucleotide
  Antisense strand to SEQ ID NO: 1324348
aguuggacacgcaaucgac

SEQ ID NO: 1324350 - RNA, 19 nt, Artificial Sequence
  Description of Artificial Sequence: Synthetic oligonucleotide
  Sense strand starting at position 2992 of SEQ ID NO: 1242129
ucgauugcguguccaacuu

SEQ ID NO: 1324351 - RNA, 19 nt, Artificial Sequence
  Description of Artificial Sequence: Synthetic oligonucleotide
  Antisense strand to SEQ ID NO: 1324350
aaguuggacacgcaaucga

SEQ ID NO: 1324352 - RNA, 19 nt, Artificial Sequence
  Description of Artificial Sequence: Synthetic oligonucleotide
  Sense strand starting at position 3065 of SEQ ID NO: 1242129
ugcaaauaaucagaaacga

SEQ ID NO: 1324353 - RNA, 19 nt, Artificial Sequence
  Description of Artificial Sequence: Synthetic oligonucleotide
  Antisense strand to SEQ ID NO: 1324352
ucguuucugauuauuugca

SEQ ID NO: 1324354 - RNA, 19 nt, Artificial Sequence
  Description of Artificial Sequence: Synthetic oligonucleotide
  Sense strand starting at position 3084 of SEQ ID NO: 1242129
acguaaggcgcuggguaau

SEQ ID NO: 1324355 - RNA, 19 nt, Artificial Sequence
  Description of Artificial Sequence: Synthetic oligonucleotide
  Antisense strand to SEQ ID NO: 1324354
auuacccagcgccuuacgu

SEQ ID NO: 1324356 - RNA, 19 nt, Artificial Sequence
  Description of Artificial Sequence: Synthetic oligonucleotide
  Sense strand starting at position 3182 of SEQ ID NO: 1242129
caaagaaaucgcugugggu

SEQ ID NO: 1324357 - RNA, 19 nt, Artificial Sequence
  Description of Artificial Sequence: Synthetic oligonucleotide
  Antisense strand to SEQ ID NO: 1324356
acccacagcgauuucuuug

SEQ ID NO: 1324358 - RNA, 19 nt, Artificial Sequence
  Description of Artificial Sequence: Synthetic oligonucleotide
  Sense strand starting at position 3184 of SEQ ID NO: 1242129
aagaaaucgcuguggguuu

SEQ ID NO: 1324359 - RNA, 19 nt, Artificial Sequence
  Description of Artificial Sequence: Synthetic oligonucleotide
  Antisense strand to SEQ ID NO: 1324358
aaacccacagcgauuucuu

SEQ ID NO: 1324360 - RNA, 19 nt, Artificial Sequence
  Description of Artificial Sequence: Synthetic oligonucleotide
  Sense strand starting at position 3219 of SEQ ID NO: 1242129
aagaccggcccaugaauua

SEQ ID NO: 1324361 - RNA, 19 nt, Artificial Sequence
  Description of Artificial Sequence: Synthetic oligonucleotide
  Antisense strand to SEQ ID NO: 1324360
uaauucaugggccggucuu

SEQ ID NO: 1324362 - RNA, 19 nt, Artificial Sequence
  Description of Artificial Sequence: Synthetic oligonucleotide
  Sense strand starting at position 3425 of SEQ ID NO: 1242129
cuacuaagagcaugagguu

SEQ ID NO: 1324363 - RNA, 19 nt, Artificial Sequence
  Description of Artificial Sequence: Synthetic oligonucleotide
  Antisense strand to SEQ ID NO: 1324362
aaccucaugcucuuaguag

SEQ ID NO: 1324364 - RNA, 19 nt, Artificial Sequence
  Description of Artificial Sequence: Synthetic oligonucleotide
  Sense strand starting at position 3440 of SEQ ID NO: 1242129
gguugguuggcgucgaaac

SEQ ID NO: 1324365 - RNA, 19 nt, Artificial Sequence
  Description of Artificial Sequence: Synthetic oligonucleotide
  Antisense strand to SEQ ID NO: 1324364
guuucgacgccaaccaacc

SEQ ID NO: 1324366 - RNA, 19 nt, Artificial Sequence
  Description of Artificial Sequence: Synthetic oligonucleotide
  Sense strand starting at position 3511 of SEQ ID NO: 1242129
ccgagugcacgcuaacauu

SEQ ID NO: 1324367 - RNA, 19 nt, Artificial Sequence
  Description of Artificial Sequence: Synthetic oligonucleotide
  Antisense strand to SEQ ID NO: 1324366
aauguuagcgugcacucgg

SEQ ID NO: 1324368 - RNA, 19 nt, Artificial Sequence
  Description of Artificial Sequence: Synthetic oligonucleotide
  Sense strand starting at position 3517 of SEQ ID NO: 1242129
gcacgcuaacauuauucga

SEQ ID NO: 1324369 - RNA, 19 nt, Artificial Sequence
  Description of Artificial Sequence: Synthetic oligonucleotide
  Antisense strand to SEQ ID NO: 1324368
ucgaauaauguuagcgugc

SEQ ID NO: 1324370 - RNA, 19 nt, Artificial Sequence
  Description of Artificial Sequence: Synthetic oligonucleotide
  Sense strand starting at position 3584 of SEQ ID NO: 1242129
gcuuuaagccucguccagu

SEQ ID NO: 1324371 - RNA, 19 nt, Artificial Sequence
  Description of Artificial Sequence: Synthetic oligonucleotide
  Antisense strand to SEQ ID NO: 1324370
acuggacgaggcuuaaagc

SEQ ID NO: 1324372 - RNA, 19 nt, Artificial Sequence
  Description of Artificial Sequence: Synthetic oligonucleotide
  Sense strand starting at position 3585 of SEQ ID NO: 1242129
cuuuaagccucguccagua

SEQ ID NO: 1324373 - RNA, 19 nt, Artificial Sequence
  Description of Artificial Sequence: Synthetic oligonucleotide
  Antisense strand to SEQ ID NO: 1324372
uacuggacgaggcuuaaag

SEQ ID NO: 1324374 - RNA, 19 nt, Artificial Sequence
  Description of Artificial Sequence: Synthetic oligonucleotide
  Sense strand starting at position 944 of SEQ ID NO: 1242130
gggacucauuccucccaca

SEQ ID NO: 1324375 - RNA, 19 nt, Artificial Sequence
  Description of Artificial Sequence: Synthetic oligonucleotide
  Antisense strand to SEQ ID NO: 1324374
ugugggaggaaugaguccc

SEQ ID NO: 1324376 - RNA, 19 nt, Artificial Sequence
  Description of Artificial Sequence: Synthetic oligonucleotide
  Sense strand starting at position 1084 of SEQ ID NO: 1242130
ggagacuugcccgagguca

SEQ ID NO: 1324377 - RNA, 19 nt, Artificial Sequence
  Description of Artificial Sequence: Synthetic oligonucleotide
  Antisense strand to SEQ ID NO: 1324376
ugaccucgggcaagucucc

SEQ ID NO: 1324378 - RNA, 19 nt, Artificial Sequence
  Description of Artificial Sequence: Synthetic oligonucleotide
  Sense strand starting at position 1463 of SEQ ID NO: 1242130
ccaggcagcugccuaaaua

SEQ ID NO: 1324379 - RNA, 19 nt, Artificial Sequence
  Description of Artificial Sequence: Synthetic oligonucleotide
  Antisense strand to SEQ ID NO: 1324378
uauuuaggcagcugccugg

SEQ ID NO: 1324380 - RNA, 19 nt, Artificial Sequence
  Description of Artificial Sequence: Synthetic oligonucleotide
  Sense strand starting at position 1559 of SEQ ID NO: 1242130
ucaguuguggguuguggaa

SEQ ID NO: 1324381 - RNA, 19 nt, Artificial Sequence
  Description of Artificial Sequence: Synthetic oligonucleotide
  Antisense strand to SEQ ID NO: 1324380
uuccacaacccacaacuga

SEQ ID NO: 1324382 - RNA, 19 nt, Artificial Sequence
  Description of Artificial Sequence: Synthetic oligonucleotide
  Sense strand starting at position 2009 of SEQ ID NO: 1242130
gcaacaaggaccuguguuu

SEQ ID NO: 1324383 - RNA, 19 nt, Artificial Sequence
  Description of Artificial Sequence: Synthetic oligonucleotide
  Antisense strand to SEQ ID NO: 1324382
aaacacagguccuuguugc

SEQ ID NO: 1324384 - RNA, 19 nt, Artificial Sequence
  Description of Artificial Sequence: Synthetic oligonucleotide
  Sense strand starting at position 2205 of SEQ ID NO: 1242130
auugaaucucauggaaggu

SEQ ID NO: 1324385 - RNA, 19 nt, Artificial Sequence
  Description of Artificial Sequence: Synthetic oligonucleotide
  Antisense strand to SEQ ID NO: 1324384
accuuccaugagauucaau

SEQ ID NO: 1324386 - RNA, 19 nt, Artificial Sequence
  Description of Artificial Sequence: Synthetic oligonucleotide
  Sense strand starting at position 2282 of SEQ ID NO: 1242130
auguguguugguguguaua

SEQ ID NO: 1324387 - RNA, 19 nt, Artificial Sequence
  Description of Artificial Sequence: Synthetic oligonucleotide
  Antisense strand to SEQ ID NO: 1324386
uauacacaccaacacacau

SEQ ID NO: 1324388 - RNA, 19 nt, Artificial Sequence
  Description of Artificial Sequence: Synthetic oligonucleotide
  Sense strand starting at position 2334 of SEQ ID NO: 1242130
gggugcguauuucuggauu

SEQ ID NO: 1324389 - RNA, 19 nt, Artificial Sequence
  Description of Artificial Sequence: Synthetic oligonucleotide
  Antisense strand to SEQ ID NO: 1324388
aauccagaaauacgcaccc

SEQ ID NO: 1324390 - RNA, 19 nt, Artificial Sequence
  Description of Artificial Sequence: Synthetic oligonucleotide
  Sense strand starting at position 2336 of SEQ ID NO: 1242130
gugcguauuucuggauuug

SEQ ID NO: 1324391 - RNA, 19 nt, Artificial Sequence
  Description of Artificial Sequence: Synthetic oligonucleotide
  Antisense strand to SEQ ID NO: 1324390
caaauccagaaauacgcac

SEQ ID NO: 1324392 - RNA, 19 nt, Artificial Sequence
  Description of Artificial Sequence: Synthetic oligonucleotide
  Sense strand starting at position 2346 of SEQ ID NO: 1242130
cuggauuuguauguguguu

SEQ ID NO: 1324393 - RNA, 19 nt, Artificial Sequence
  Description of Artificial Sequence: Synthetic oligonucleotide
  Antisense strand to SEQ ID NO: 1324392
aacacacauacaaauccag

SEQ ID NO: 1324394 - RNA, 19 nt, Artificial Sequence
  Description of Artificial Sequence: Synthetic oligonucleotide
  Sense strand starting at position 2351 of SEQ ID NO: 1242130
uuuguauguguguuugcau

SEQ ID NO: 1324395 - RNA, 19 nt, Artificial Sequence
  Description of Artificial Sequence: Synthetic oligonucleotide
  Antisense strand to SEQ ID NO: 1324394
augcaaacacacauacaaa

SEQ ID NO: 1324396 - RNA, 19 nt, Artificial Sequence
  Description of Artificial Sequence: Synthetic oligonucleotide
  Sense strand starting at position 2354 of SEQ ID NO: 1242130
guauguguguuugcaugga

SEQ ID NO: 1324397 - RNA, 19 nt, Artificial Sequence
  Description of Artificial Sequence: Synthetic oligonucleotide
  Antisense strand to SEQ ID NO: 1324396
uccaugcaaacacacauac

SEQ ID NO: 1324398 - RNA, 19 nt, Artificial Sequence
  Description of Artificial Sequence: Synthetic oligonucleotide
  Sense strand starting at position 2358 of SEQ ID NO: 1242130
guguguuugcauggaugug

SEQ ID NO: 1324399 - RNA, 19 nt, Artificial Sequence
  Description of Artificial Sequence: Synthetic oligonucleotide
  Antisense strand to SEQ ID NO: 1324398
cacauccaugcaaacacac

SEQ ID NO: 1324400 - RNA, 19 nt, Artificial Sequence
  Description of Artificial Sequence: Synthetic oligonucleotide
  Sense strand starting at position 2530 of SEQ ID NO: 1242130
ggugaaagccaagauguua

SEQ ID NO: 1324401 - RNA, 19 nt, Artificial Sequence
  Description of Artificial Sequence: Synthetic oligonucleotide
  Antisense strand to SEQ ID NO: 1324400
uaacaucuuggcuuucacc

SEQ ID NO: 1324402 - RNA, 19 nt, Artificial Sequence
  Description of Artificial Sequence: Synthetic oligonucleotide
  Sense strand starting at position 2591 of SEQ ID NO: 1242130
gagacugagcugcgcuaaa

SEQ ID NO: 1324403 - RNA, 19 nt, Artificial Sequence
  Description of Artificial Sequence: Synthetic oligonucleotide
  Antisense strand to SEQ ID NO: 1324402
uuuagcgcagcucagucuc

SEQ ID NO: 1324404 - RNA, 19 nt, Artificial Sequence
  Description of Artificial Sequence: Synthetic oligonucleotide
  Sense strand starting at position 2611 of SEQ ID NO: 1242130
gcauguuguuguccaggga

SEQ ID NO: 1324405 - RNA, 19 nt, Artificial Sequence
  Description of Artificial Sequence: Synthetic oligonucleotide
  Antisense strand to SEQ ID NO: 1324404
ucccuggacaacaacaugc

SEQ ID NO: 1324406 - RNA, 19 nt, Artificial Sequence
  Description of Artificial Sequence: Synthetic oligonucleotide
  Sense strand starting at position 2614 of SEQ ID NO: 1242130
uguuguuguccagggagcu

SEQ ID NO: 1324407 - RNA, 19 nt, Artificial Sequence
  Description of Artificial Sequence: Synthetic oligonucleotide
  Antisense strand to SEQ ID NO: 1324406
agcucccuggacaacaaca

SEQ ID NO: 1324408 - RNA, 19 nt, Artificial Sequence
  Description of Artificial Sequence: Synthetic oligonucleotide
  Sense strand starting at position 2806 of SEQ ID NO: 1242130
gccgcacucccggagaguu

SEQ ID NO: 1324409 - RNA, 19 nt, Artificial Sequence
  Description of Artificial Sequence: Synthetic oligonucleotide
  Antisense strand to SEQ ID NO: 1324408
aacucuccgggagugcggc

SEQ ID NO: 1324410 - RNA, 19 nt, Artificial Sequence
  Description of Artificial Sequence: Synthetic oligonucleotide
  Sense strand starting at position 2814 of SEQ ID NO: 1242130
cccggagaguucucucugu

SEQ ID NO: 1324411 - RNA, 19 nt, Artificial Sequence
  Description of Artificial Sequence: Synthetic oligonucleotide
  Antisense strand to SEQ ID NO: 1324410
acagagagaacucuccggg

SEQ ID NO: 1324412 - RNA, 19 nt, Artificial Sequence
  Description of Artificial Sequence: Synthetic oligonucleotide
  Sense strand starting at position 3158 of SEQ ID NO: 1242130
ucugauaacugguugaauu

SEQ ID NO: 1324413 - RNA, 19 nt, Artificial Sequence
  Description of Artificial Sequence: Synthetic oligonucleotide
  Antisense strand to SEQ ID NO: 1324412
aauucaaccaguuaucaga

SEQ ID NO: 1324414 - RNA, 19 nt, Artificial Sequence
  Description of Artificial Sequence: Synthetic oligonucleotide
  Sense strand starting at position 3159 of SEQ ID NO: 1242130
cugauaacugguugaauuc

SEQ ID NO: 1324415 - RNA, 19 nt, Artificial Sequence
  Description of Artificial Sequence: Synthetic oligonucleotide
  Antisense strand to SEQ ID NO: 1324414
gaauucaaccaguuaucag

SEQ ID NO: 1324416 - RNA, 19 nt, Artificial Sequence
  Description of Artificial Sequence: Synthetic oligonucleotide
  Sense strand starting at position 3169 of SEQ ID NO: 1242130
guugaauucugcucaugac

SEQ ID NO: 1324417 - RNA, 19 nt, Artificial Sequence
  Description of Artificial Sequence: Synthetic oligonucleotide
  Antisense strand to SEQ ID NO: 1324416
gucaugagcagaauucaac

SEQ ID NO: 1324418 - RNA, 19 nt, Artificial Sequence
  Description of Artificial Sequence: Synthetic oligonucleotide
  Sense strand starting at position 3170 of SEQ ID NO: 1242130
uugaauucugcucaugacu

SEQ ID NO: 1324419 - RNA, 19 nt, Artificial Sequence
  Description of Artificial Sequence: Synthetic oligonucleotide
  Antisense strand to SEQ ID NO: 1324418
agucaugagcagaauucaa

SEQ ID NO: 1324420 - RNA, 19 nt, Artificial Sequence
  Description of Artificial Sequence: Synthetic oligonucleotide
  Sense strand starting at position 3216 of SEQ ID NO: 1242130
gcagacagggcucaucuuu

SEQ ID NO: 1324421 - RNA, 19 nt, Artificial Sequence
  Description of Artificial Sequence: Synthetic oligonucleotide
  Antisense strand to SEQ ID NO: 1324420
aaagaugagcccugucugc

SEQ ID NO: 1324422 - RNA, 19 nt, Artificial Sequence
  Description of Artificial Sequence: Synthetic oligonucleotide
  Sense strand starting at position 3224 of SEQ ID NO: 1242130
ggcucaucuuuggcugaaa

SEQ ID NO: 1324423 - RNA, 19 nt, Artificial Sequence
  Description of Artificial Sequence: Synthetic oligonucleotide
  Antisense strand to SEQ ID NO: 1324422
uuucagccaaagaugagcc

SEQ ID NO: 1324424 - RNA, 19 nt, Artificial Sequence
  Description of Artificial Sequence: Synthetic oligonucleotide
  Sense strand starting at position 3225 of SEQ ID NO: 1242130
gcucaucuuuggcugaaag

SEQ ID NO: 1324425 - RNA, 19 nt, Artificial Sequence
  Description of Artificial Sequence: Synthetic oligonucleotide
  Antisense strand to SEQ ID NO: 1324424
cuuucagccaaagaugagc

SEQ ID NO: 1324426 - RNA, 19 nt, Artificial Sequence
  Description of Artificial Sequence: Synthetic oligonucleotide
  Sense strand starting at position 3227 of SEQ ID NO: 1242130
ucaucuuuggcugaaagca

SEQ ID NO: 1324427 - RNA, 19 nt, Artificial Sequence
  Description of Artificial Sequence: Synthetic oligonucleotide
  Antisense strand to SEQ ID NO: 1324426
ugcuuucagccaaagauga

SEQ ID NO: 1324428 - RNA, 19 nt, Artificial Sequence
  Description of Artificial Sequence: Synthetic oligonucleotide
  Sense strand starting at position 3338 of SEQ ID NO: 1242130
gagucugaugcugaggaua

SEQ ID NO: 1324429 - RNA, 19 nt, Artificial Sequence
  Description of Artificial Sequence: Synthetic oligonucleotide
  Antisense strand to SEQ ID NO: 1324428
uauccucagcaucagacuc

SEQ ID NO: 1324430 - RNA, 19 nt, Artificial Sequence
  Description of Artificial Sequence: Synthetic oligonucleotide
  Sense strand starting at position 3421 of SEQ ID NO: 1242130
ccugacugugcuggagaau

SEQ ID NO: 1324431 - RNA, 19 nt, Artificial Sequence
  Description of Artificial Sequence: Synthetic oligonucleotide
  Antisense strand to SEQ ID NO: 1324430
auucuccagcacagucagg

SEQ ID NO: 1324432 - RNA, 19 nt, Artificial Sequence
  Description of Artificial Sequence: Synthetic oligonucleotide
  Sense strand starting at position 3422 of SEQ ID NO: 1242130
cugacugugcuggagaauu

SEQ ID NO: 1324433 - RNA, 19 nt, Artificial Sequence
  Description of Artificial Sequence: Synthetic oligonucleotide
  Antisense strand to SEQ ID NO: 1324432
aauucuccagcacagucag

SEQ ID NO: 1324434 - RNA, 19 nt, Artificial Sequence
  Description of Artificial Sequence: Synthetic oligonucleotide
  Sense strand starting at position 3434 of SEQ ID NO: 1242130
gagaauuucuaggaaaguc

SEQ ID NO: 1324435 - RNA, 19 nt, Artificial Sequence
  Description of Artificial Sequence: Synthetic oligonucleotide
  Antisense strand to SEQ ID NO: 1324434
gacuuuccuagaaauucuc

SEQ ID NO: 1324436 - RNA, 19 nt, Artificial Sequence
  Description of Artificial Sequence: Synthetic oligonucleotide
  Sense strand starting at position 3442 of SEQ ID NO: 1242130
cuaggaaaguccugaauuu

SEQ ID NO: 1324437 - RNA, 19 nt, Artificial Sequence
  Description of Artificial Sequence: Synthetic oligonucleotide
  Antisense strand to SEQ ID NO: 1324436
aaauucaggacuuuccuag

SEQ ID NO: 1324438 - RNA, 19 nt, Artificial Sequence
  Description of Artificial Sequence: Synthetic oligonucleotide
  Sense strand starting at position 3522 of SEQ ID NO: 1242130
cagugaccucagugucagu

SEQ ID NO: 1324439 - RNA, 19 nt, Artificial Sequence
  Description of Artificial Sequence: Synthetic oligonucleotide
  Antisense strand to SEQ ID NO: 1324438
acugacacugaggucacug

SEQ ID NO: 1324440 - RNA, 19 nt, Artificial Sequence
  Description of Artificial Sequence: Synthetic oligonucleotide
  Sense strand starting at position 3645 of SEQ ID NO: 1242130
cucugaggagcucauaguu

SEQ ID NO: 1324441 - RNA, 19 nt, Artificial Sequence
  Description of Artificial Sequence: Synthetic oligonucleotide
  Antisense strand to SEQ ID NO: 1324440
aacuaugagcuccucagag

SEQ ID NO: 1324442 - RNA, 19 nt, Artificial Sequence
  Description of Artificial Sequence: Synthetic oligonucleotide
  Sense strand starting at position 3688 of SEQ ID NO: 1242130
gcacaucagggucagagua

SEQ ID NO: 1324443 - RNA, 19 nt, Artificial Sequence
  Description of Artificial Sequence: Synthetic oligonucleotide
  Antisense strand to SEQ ID NO: 1324442
uacucugacccugaugugc

SEQ ID NO: 1324444 - RNA, 19 nt, Artificial Sequence
  Description of Artificial Sequence: Synthetic oligonucleotide
  Sense strand starting at position 3724 of SEQ ID NO: 1242130
cucaguucccagugacugu

SEQ ID NO: 1324445 - RNA, 19 nt, Artificial Sequence
  Description of Artificial Sequence: Synthetic oligonucleotide
  Antisense strand to SEQ ID NO: 1324444
acagucacugggaacugag

SEQ ID NO: 1324446 - RNA, 19 nt, Artificial Sequence
  Description of Artificial Sequence: Synthetic oligonucleotide
  Sense strand starting at position 3731 of SEQ ID NO: 1242130
cccagugacuguucucuca

SEQ ID NO: 1324447 - RNA, 19 nt, Artificial Sequence
  Description of Artificial Sequence: Synthetic oligonucleotide
  Antisense strand to SEQ ID NO: 1324446
ugagagaacagucacuggg

SEQ ID NO: 1324448 - RNA, 19 nt, Artificial Sequence
  Description of Artificial Sequence: Synthetic oligonucleotide
  Sense strand starting at position 3778 of SEQ ID NO: 1242130
uccuauaagcugugauuau

SEQ ID NO: 1324449 - RNA, 19 nt, Artificial Sequence
  Description of Artificial Sequence: Synthetic oligonucleotide
  Antisense strand to SEQ ID NO: 1324448
auaaucacagcuuauagga

SEQ ID NO: 1324450 - RNA, 19 nt, Artificial Sequence
  Description of Artificial Sequence: Synthetic oligonucleotide
  Sense strand starting at position 3874 of SEQ ID NO: 1242130
gcuauugaucuccagcaca

SEQ ID NO: 1324451 - RNA, 19 nt, Artificial Sequence
  Description of Artificial Sequence: Synthetic oligonucleotide
  Antisense strand to SEQ ID NO: 1324450
ugugcuggagaucaauagc

SEQ ID NO: 1324452 - RNA, 19 nt, Artificial Sequence
  Description of Artificial Sequence: Synthetic oligonucleotide
  Sense strand starting at position 3931 of SEQ ID NO: 1242130
ggacaaguuggguggucau

SEQ ID NO: 1324453 - RNA, 19 nt, Artificial Sequence
  Description of Artificial Sequence: Synthetic oligonucleotide
  Antisense strand to SEQ ID NO: 1324452
augaccacccaacuugucc

SEQ ID NO: 1324454 - RNA, 19 nt, Artificial Sequence
  Description of Artificial Sequence: Synthetic oligonucleotide
  Sense strand starting at position 1762 of SEQ ID NO: 1242131
gggacucauuccucccaca

SEQ ID NO: 1324455 - RNA, 19 nt, Artificial Sequence
  Description of Artificial Sequence: Synthetic oligonucleotide
  Antisense strand to SEQ ID NO: 1324454
ugugggaggaaugaguccc

SEQ ID NO: 1324456 - RNA, 19 nt, Artificial Sequence
  Description of Artificial Sequence: Synthetic oligonucleotide
  Sense strand starting at position 1902 of SEQ ID NO: 1242131
ggagacuugcccgagguca

SEQ ID NO: 1324457 - RNA, 19 nt, Artificial Sequence
  Description of Artificial Sequence: Synthetic oligonucleotide
  Antisense strand to SEQ ID NO: 1324456
ugaccucgggcaagucucc

SEQ ID NO: 1324458 - RNA, 19 nt, Artificial Sequence
  Description of Artificial Sequence: Synthetic oligonucleotide
  Sense strand starting at position 2281 of SEQ ID NO: 1242131
ccaggcagcugccuaaaua

SEQ ID NO: 1324459 - RNA, 19 nt, Artificial Sequence
  Description of Artificial Sequence: Synthetic oligonucleotide
  Antisense strand to SEQ ID NO: 1324458
uauuuaggcagcugccugg

SEQ ID NO: 1324460 - RNA, 19 nt, Artificial Sequence
  Description of Artificial Sequence: Synthetic oligonucleotide
  Sense strand starting at position 2377 of SEQ ID NO: 1242131
ucaguuguggguuguggaa

SEQ ID NO: 1324461 - RNA, 19 nt, Artificial Sequence
  Description of Artificial Sequence: Synthetic oligonucleotide
  Antisense strand to SEQ ID NO: 1324460
uuccacaacccacaacuga

SEQ ID NO: 1324462 - RNA, 19 nt, Artificial Sequence
  Description of Artificial Sequence: Synthetic oligonucleotide
  Sense strand starting at position 2379 of SEQ ID NO: 1242131
aguuguggguuguggaaga

SEQ ID NO: 1324463 - RNA, 19 nt, Artificial Sequence
  Description of Artificial Sequence: Synthetic oligonucleotide
  Antisense strand to SEQ ID NO: 1324462
ucuuccacaacccacaacu

SEQ ID NO: 1324464 - RNA, 19 nt, Artificial Sequence
  Description of Artificial Sequence: Synthetic oligonucleotide
  Sense strand starting at position 2380 of SEQ ID NO: 1242131
guuguggguuguggaagaa

SEQ ID NO: 1324465 - RNA, 19 nt, Artificial Sequence
  Description of Artificial Sequence: Synthetic oligonucleotide
  Antisense strand to SEQ ID NO: 1324464
uucuuccacaacccacaac

SEQ ID NO: 1324466 - RNA, 19 nt, Artificial Sequence
  Description of Artificial Sequence: Synthetic oligonucleotide
  Sense strand starting at position 2827 of SEQ ID NO: 1242131
gcaacaaggaccuguguuu

SEQ ID NO: 1324467 - RNA, 19 nt, Artificial Sequence
  Description of Artificial Sequence: Synthetic oligonucleotide
  Antisense strand to SEQ ID NO: 1324466
aaacacagguccuuguugc

SEQ ID NO: 1324468 - RNA, 19 nt, Artificial Sequence
  Description of Artificial Sequence: Synthetic oligonucleotide
  Sense strand starting at position 3023 of SEQ ID NO: 1242131
auugaaucucauggaaggu

SEQ ID NO: 1324469 - RNA, 19 nt, Artificial Sequence
  Description of Artificial Sequence: Synthetic oligonucleotide
  Antisense strand to SEQ ID NO: 1324468
accuuccaugagauucaau

SEQ ID NO: 1324470 - RNA, 19 nt, Artificial Sequence
  Description of Artificial Sequence: Synthetic oligonucleotide
  Sense strand starting at position 3100 of SEQ ID NO: 1242131
auguguguugguguguaua

SEQ ID NO: 1324471 - RNA, 19 nt, Artificial Sequence
  Description of Artificial Sequence: Synthetic oligonucleotide
  Antisense strand to SEQ ID NO: 1324470
uauacacaccaacacacau

SEQ ID NO: 1324472 - RNA, 19 nt, Artificial Sequence
  Description of Artificial Sequence: Synthetic oligonucleotide
  Sense strand starting at position 3152 of SEQ ID NO: 1242131
gggugcguauuucuggauu

SEQ ID NO: 1324473 - RNA, 19 nt, Artificial Sequence
  Description of Artificial Sequence: Synthetic oligonucleotide
  Antisense strand to SEQ ID NO: 1324472
aauccagaaauacgcaccc

SEQ ID NO: 1324474 - RNA, 19 nt, Artificial Sequence
  Description of Artificial Sequence: Synthetic oligonucleotide
  Sense strand starting at position 3154 of SEQ ID NO: 1242131
gugcguauuucuggauuug

SEQ ID NO: 1324475 - RNA, 19 nt, Artificial Sequence
  Description of Artificial Sequence: Synthetic oligonucleotide
  Antisense strand to SEQ ID NO: 1324474
caaauccagaaauacgcac

SEQ ID NO: 1324476 - RNA, 19 nt, Artificial Sequence
  Description of Artificial Sequence: Synthetic oligonucleotide
  Sense strand starting at position 3164 of SEQ ID NO: 1242131
cuggauuuguauguguguu

SEQ ID NO: 1324477 - RNA, 19 nt, Artificial Sequence
  Description of Artificial Sequence: Synthetic oligonucleotide
  Antisense strand to SEQ ID NO: 1324476
aacacacauacaaauccag

SEQ ID NO: 1324478 - RNA, 19 nt, Artificial Sequence
  Description of Artificial Sequence: Synthetic oligonucleotide
  Sense strand starting at position 3169 of SEQ ID NO: 1242131
uuuguauguguguuugcau

SEQ ID NO: 1324479 - RNA, 19 nt, Artificial Sequence
  Description of Artificial Sequence: Synthetic oligonucleotide
  Antisense strand to SEQ ID NO: 1324478
augcaaacacacauacaaa

SEQ ID NO: 1324480 - RNA, 19 nt, Artificial Sequence
  Description of Artificial Sequence: Synthetic oligonucleotide
  Sense strand starting at position 3172 of SEQ ID NO: 1242131
guauguguguuugcaugga

SEQ ID NO: 1324481 - RNA, 19 nt, Artificial Sequence
  Description of Artificial Sequence: Synthetic oligonucleotide
  Antisense strand to SEQ ID NO: 1324480
uccaugcaaacacacauac

SEQ ID NO: 1324482 - RNA, 19 nt, Artificial Sequence
  Description of Artificial Sequence: Synthetic oligonucleotide
  Sense strand starting at position 3176 of SEQ ID NO: 1242131
guguguuugcauggaugug

SEQ ID NO: 1324483 - RNA, 19 nt, Artificial Sequence
  Description of Artificial Sequence: Synthetic oligonucleotide
  Antisense strand to SEQ ID NO: 1324482
cacauccaugcaaacacac

SEQ ID NO: 1324484 - RNA, 19 nt, Artificial Sequence
  Description of Artificial Sequence: Synthetic oligonucleotide
  Sense strand starting at position 3336 of SEQ ID NO: 1242131
uaccaacccuucggugaaa

SEQ ID NO: 1324485 - RNA, 19 nt, Artificial Sequence
  Description of Artificial Sequence: Synthetic oligonucleotide
  Antisense strand to SEQ ID NO: 1324484
uuucaccgaaggguuggua

SEQ ID NO: 1324486 - RNA, 19 nt, Artificial Sequence
  Description of Artificial Sequence: Synthetic oligonucleotide
  Sense strand starting at position 3348 of SEQ ID NO: 1242131
ggugaaagccaagauguua

SEQ ID NO: 1324487 - RNA, 19 nt, Artificial Sequence
  Description of Artificial Sequence: Synthetic oligonucleotide
  Antisense strand to SEQ ID NO: 1324486
uaacaucuuggcuuucacc

SEQ ID NO: 1324488 - RNA, 19 nt, Artificial Sequence
  Description of Artificial Sequence: Synthetic oligonucleotide
  Sense strand starting at position 3409 of SEQ ID NO: 1242131
gagacugagcugcgcuaaa

SEQ ID NO: 1324489 - RNA, 19 nt, Artificial Sequence
  Description of Artificial Sequence: Synthetic oligonucleotide
  Antisense strand to SEQ ID NO: 1324488
uuuagcgcagcucagucuc

SEQ ID NO: 1324490 - RNA, 19 nt, Artificial Sequence
  Description of Artificial Sequence: Synthetic oligonucleotide
  Sense strand starting at position 3420 of SEQ ID NO: 1242131
gcgcuaaaugcauguuguu

SEQ ID NO: 1324491 - RNA, 19 nt, Artificial Sequence
  Description of Artificial Sequence: Synthetic oligonucleotide
  Antisense strand to SEQ ID NO: 1324490
aacaacaugcauuuagcgc

SEQ ID NO: 1324492 - RNA, 19 nt, Artificial Sequence
  Description of Artificial Sequence: Synthetic oligonucleotide
  Sense strand starting at position 3429 of SEQ ID NO: 1242131
gcauguuguuguccaggga

SEQ ID NO: 1324493 - RNA, 19 nt, Artificial Sequence
  Description of Artificial Sequence: Synthetic oligonucleotide
  Antisense strand to SEQ ID NO: 1324492
ucccuggacaacaacaugc

SEQ ID NO: 1324494 - RNA, 19 nt, Artificial Sequence
  Description of Artificial Sequence: Synthetic oligonucleotide
  Sense strand starting at position 3432 of SEQ ID NO: 1242131
uguuguuguccagggagcu

SEQ ID NO: 1324495 - RNA, 19 nt, Artificial Sequence
  Description of Artificial Sequence: Synthetic oligonucleotide
  Antisense strand to SEQ ID NO: 1324494
agcucccuggacaacaaca

SEQ ID NO: 1324496 - RNA, 19 nt, Artificial Sequence
  Description of Artificial Sequence: Synthetic oligonucleotide
  Sense strand starting at position 3624 of SEQ ID NO: 1242131
gccgcacucccggagaguu

SEQ ID NO: 1324497 - RNA, 19 nt, Artificial Sequence
  Description of Artificial Sequence: Synthetic oligonucleotide
  Antisense strand to SEQ ID NO: 1324496
aacucuccgggagugcggc

SEQ ID NO: 1324498 - RNA, 19 nt, Artificial Sequence
  Description of Artificial Sequence: Synthetic oligonucleotide
  Sense strand starting at position 3632 of SEQ ID NO: 1242131
cccggagaguucucucugu

SEQ ID NO: 1324499 - RNA, 19 nt, Artificial Sequence
  Description of Artificial Sequence: Synthetic oligonucleotide
  Antisense strand to SEQ ID NO: 1324498
acagagagaacucuccggg

SEQ ID NO: 1324500 - RNA, 19 nt, Artificial Sequence
  Description of Artificial Sequence: Synthetic oligonucleotide
  Sense strand starting at position 3967 of SEQ ID NO: 1242131
ggccuuccaucugauaacu

SEQ ID NO: 1324501 - RNA, 19 nt, Artificial Sequence
  Description of Artificial Sequence: Synthetic oligonucleotide
  Antisense strand to SEQ ID NO: 1324500
aguuaucagauggaaggcc

SEQ ID NO: 1324502 - RNA, 19 nt, Artificial Sequence
  Description of Artificial Sequence: Synthetic oligonucleotide
  Sense strand starting at position 3976 of SEQ ID NO: 1242131
ucugauaacugguugaauu

SEQ ID NO: 1324503 - RNA, 19 nt, Artificial Sequence
  Description of Artificial Sequence: Synthetic oligonucleotide
  Antisense strand to SEQ ID NO: 1324502
aauucaaccaguuaucaga

SEQ ID NO: 1324504 - RNA, 19 nt, Artificial Sequence
  Description of Artificial Sequence: Synthetic oligonucleotide
  Sense strand starting at position 3977 of SEQ ID NO: 1242131
cugauaacugguugaauuc

SEQ ID NO: 1324505 - RNA, 19 nt, Artificial Sequence
  Description of Artificial Sequence: Synthetic oligonucleotide
  Antisense strand to SEQ ID NO: 1324504
gaauucaaccaguuaucag

SEQ ID NO: 1324506 - RNA, 19 nt, Artificial Sequence
  Description of Artificial Sequence: Synthetic oligonucleotide
  Sense strand starting at position 294 of SEQ ID NO: 1242132
uggagaaaguccuugcgca

SEQ ID NO: 1324507 - RNA, 19 nt, Artificial Sequence
  Description of Artificial Sequence: Synthetic oligonucleotide
  Antisense strand to SEQ ID NO: 1324506
ugcgcaaggacuuucucca

SEQ ID NO: 1324508 - RNA, 19 nt, Artificial Sequence
  Description of Artificial Sequence: Synthetic oligonucleotide
  Sense strand starting at position 295 of SEQ ID NO: 1242132
ggagaaaguccuugcgcac

SEQ ID NO: 1324509 - RNA, 19 nt, Artificial Sequence
  Description of Artificial Sequence: Synthetic oligonucleotide
  Antisense strand to SEQ ID NO: 1324508
gugcgcaaggacuuucucc

SEQ ID NO: 1324510 - RNA, 19 nt, Artificial Sequence
  Description of Artificial Sequence: Synthetic oligonucleotide
  Sense strand starting at position 399 of SEQ ID NO: 1242132
ccaagacacgucggucaua

SEQ ID NO: 1324511 - RNA, 19 nt, Artificial Sequence
  Description of Artificial Sequence: Synthetic oligonucleotide
  Antisense strand to SEQ ID NO: 1324510
uaugaccgacgugucuugg

SEQ ID NO: 1324512 - RNA, 19 nt, Artificial Sequence
  Description of Artificial Sequence: Synthetic oligonucleotide
  Sense strand starting at position 400 of SEQ ID NO: 1242132
caagacacgucggucauaa

SEQ ID NO: 1324513 - RNA, 19 nt, Artificial Sequence
  Description of Artificial Sequence: Synthetic oligonucleotide
  Antisense strand to SEQ ID NO: 1324512
uuaugaccgacgugucuug

SEQ ID NO: 1324514 - RNA, 19 nt, Artificial Sequence
  Description of Artificial Sequence: Synthetic oligonucleotide
  Sense strand starting at position 512 of SEQ ID NO: 1242132
uuguuacugucccugauca

SEQ ID NO: 1324515 - RNA, 19 nt, Artificial Sequence
  Description of Artificial Sequence: Synthetic oligonucleotide
  Antisense strand to SEQ ID NO: 1324514
ugaucagggacaguaacaa

SEQ ID NO: 1324516 - RNA, 19 nt, Artificial Sequence
  Description of Artificial Sequence: Synthetic oligonucleotide
  Sense strand starting at position 514 of SEQ ID NO: 1242132
guuacugucccugaucaca

SEQ ID NO: 1324517 - RNA, 19 nt, Artificial Sequence
  Description of Artificial Sequence: Synthetic oligonucleotide
  Antisense strand to SEQ ID NO: 1324516
ugugaucagggacaguaac

SEQ ID NO: 1324518 - RNA, 19 nt, Artificial Sequence
  Description of Artificial Sequence: Synthetic oligonucleotide
  Sense strand starting at position 617 of SEQ ID NO: 1242132
cauccauggucagguaaua

SEQ ID NO: 1324519 - RNA, 19 nt, Artificial Sequence
  Description of Artificial Sequence: Synthetic oligonucleotide
  Antisense strand to SEQ ID NO: 1324518
uauuaccugaccauggaug

SEQ ID NO: 1324520 - RNA, 19 nt, Artificial Sequence
  Description of Artificial Sequence: Synthetic oligonucleotide
  Sense strand starting at position 628 of SEQ ID NO: 1242132
agguaauaaucgcaucaau

SEQ ID NO: 1324521 - RNA, 19 nt, Artificial Sequence
  Description of Artificial Sequence: Synthetic oligonucleotide
  Antisense strand to SEQ ID NO: 1324520
auugaugcgauuauuaccu

SEQ ID NO: 1324522 - RNA, 19 nt, Artificial Sequence
  Description of Artificial Sequence: Synthetic oligonucleotide
  Sense strand starting at position 1057 of SEQ ID NO: 1242132
augcauaauugauaguguu

SEQ ID NO: 1324523 - RNA, 19 nt, Artificial Sequence
  Description of Artificial Sequence: Synthetic oligonucleotide
  Antisense strand to SEQ ID NO: 1324522
aacacuaucaauuaugcau

SEQ ID NO: 1324524 - RNA, 19 nt, Artificial Sequence
  Description of Artificial Sequence: Synthetic oligonucleotide
  Sense strand starting at position 1063 of SEQ ID NO: 1242132
aauugauaguguuagcaga

SEQ ID NO: 1324525 - RNA, 19 nt, Artificial Sequence
  Description of Artificial Sequence: Synthetic oligonucleotide
  Antisense strand to SEQ ID NO: 1324524
ucugcuaacacuaucaauu

SEQ ID NO: 1324526 - RNA, 19 nt, Artificial Sequence
  Description of Artificial Sequence: Synthetic oligonucleotide
  Sense strand starting at position 1109 of SEQ ID NO: 1242132
cuggaucugggcugauaua

SEQ ID NO: 1324527 - RNA, 19 nt, Artificial Sequence
  Description of Artificial Sequence: Synthetic oligonucleotide
  Antisense strand to SEQ ID NO: 1324526
uauaucagcccagauccag

SEQ ID NO: 1324528 - RNA, 19 nt, Artificial Sequence
  Description of Artificial Sequence: Synthetic oligonucleotide
  Sense strand starting at position 1273 of SEQ ID NO: 1242132
gccggaacucuuuacuucu

SEQ ID NO: 1324529 - RNA, 19 nt, Artificial Sequence
  Description of Artificial Sequence: Synthetic oligonucleotide
  Antisense strand to SEQ ID NO: 1324528
agaaguaaagaguuccggc

SEQ ID NO: 1324530 - RNA, 19 nt, Artificial Sequence
  Description of Artificial Sequence: Synthetic oligonucleotide
  Sense strand starting at position 1993 of SEQ ID NO: 1242132
cgauuugaguguugagcau

SEQ ID NO: 1324531 - RNA, 19 nt, Artificial Sequence
  Description of Artificial Sequence: Synthetic oligonucleotide
  Antisense strand to SEQ ID NO: 1324530
augcucaacacucaaaucg

SEQ ID NO: 1324532 - RNA, 19 nt, Artificial Sequence
  Description of Artificial Sequence: Synthetic oligonucleotide
  Sense strand starting at position 1997 of SEQ ID NO: 1242132
uugaguguugagcaucuua

SEQ ID NO: 1324533 - RNA, 19 nt, Artificial Sequence
  Description of Artificial Sequence: Synthetic oligonucleotide
  Antisense strand to SEQ ID NO: 1324532
uaagaugcucaacacucaa

SEQ ID NO: 1324534 - RNA, 19 nt, Artificial Sequence
  Description of Artificial Sequence: Synthetic oligonucleotide
  Sense strand starting at position 2005 of SEQ ID NO: 1242132
ugagcaucuuaaugagcua

SEQ ID NO: 1324535 - RNA, 19 nt, Artificial Sequence
  Description of Artificial Sequence: Synthetic oligonucleotide
  Antisense strand to SEQ ID NO: 1324534
uagcucauuaagaugcuca

SEQ ID NO: 1324536 - RNA, 19 nt, Artificial Sequence
  Description of Artificial Sequence: Synthetic oligonucleotide
  Sense strand starting at position 2090 of SEQ ID NO: 1242132
uuccgaggcugcuuuguaa

SEQ ID NO: 1324537 - RNA, 19 nt, Artificial Sequence
  Description of Artificial Sequence: Synthetic oligonucleotide
  Antisense strand to SEQ ID NO: 1324536
uuacaaagcagccucggaa

SEQ ID NO: 1324538 - RNA, 19 nt, Artificial Sequence
  Description of Artificial Sequence: Synthetic oligonucleotide
  Sense strand starting at position 2093 of SEQ ID NO: 1242132
cgaggcugcuuuguaaauu

SEQ ID NO: 1324539 - RNA, 19 nt, Artificial Sequence
  Description of Artificial Sequence: Synthetic oligonucleotide
  Antisense strand to SEQ ID NO: 1324538
aauuuacaaagcagccucg

SEQ ID NO: 1324540 - RNA, 19 nt, Artificial Sequence
  Description of Artificial Sequence: Synthetic oligonucleotide
  Sense strand starting at position 2094 of SEQ ID NO: 1242132
gaggcugcuuuguaaauua

SEQ ID NO: 1324541 - RNA, 19 nt, Artificial Sequence
  Description of Artificial Sequence: Synthetic oligonucleotide
  Antisense strand to SEQ ID NO: 1324540
uaauuuacaaagcagccuc

SEQ ID NO: 1324542 - RNA, 19 nt, Artificial Sequence
  Description of Artificial Sequence: Synthetic oligonucleotide
  Sense strand starting at position 2308 of SEQ ID NO: 1242132
cagggaaggugucuucgaa

SEQ ID NO: 1324543 - RNA, 19 nt, Artificial Sequence
  Description of Artificial Sequence: Synthetic oligonucleotide
  Antisense strand to SEQ ID NO: 1324542
uucgaagacaccuucccug

SEQ ID NO: 1324544 - RNA, 19 nt, Artificial Sequence
  Description of Artificial Sequence: Synthetic oligonucleotide
  Sense strand starting at position 2409 of SEQ ID NO: 1242132
gggugagucccugagguuu

SEQ ID NO: 1324545 - RNA, 19 nt, Artificial Sequence
  Description of Artificial Sequence: Synthetic oligonucleotide
  Antisense strand to SEQ ID NO: 1324544
aaaccucagggacucaccc

SEQ ID NO: 1324546 - RNA, 19 nt, Artificial Sequence
  Description of Artificial Sequence: Synthetic oligonucleotide
  Sense strand starting at position 2575 of SEQ ID NO: 1242132
gccugugccugggaaggau

SEQ ID NO: 1324547 - RNA, 19 nt, Artificial Sequence
  Description of Artificial Sequence: Synthetic oligonucleotide
  Antisense strand to SEQ ID NO: 1324546
auccuucccaggcacaggc

SEQ ID NO: 1324548 - RNA, 19 nt, Artificial Sequence
  Description of Artificial Sequence: Synthetic oligonucleotide
  Sense strand starting at position 2752 of SEQ ID NO: 1242132
gaggcagaaucuggguaau

SEQ ID NO: 1324549 - RNA, 19 nt, Artificial Sequence
  Description of Artificial Sequence: Synthetic oligonucleotide
  Antisense strand to SEQ ID NO: 1324548
auuacccagauucugccuc

SEQ ID NO: 1324550 - RNA, 19 nt, Artificial Sequence
  Description of Artificial Sequence: Synthetic oligonucleotide
  Sense strand starting at position 2776 of SEQ ID NO: 1242132
ggagaaugggcucgcuauc

SEQ ID NO: 1324551 - RNA, 19 nt, Artificial Sequence
  Description of Artificial Sequence: Synthetic oligonucleotide
  Antisense strand to SEQ ID NO: 1324550
gauagcgagcccauucucc

SEQ ID NO: 1324552 - RNA, 19 nt, Artificial Sequence
  Description of Artificial Sequence: Synthetic oligonucleotide
  Sense strand starting at position 3240 of SEQ ID NO: 1242132
cgggucuaauguuuauaac

SEQ ID NO: 1324553 - RNA, 19 nt, Artificial Sequence
  Description of Artificial Sequence: Synthetic oligonucleotide
  Antisense strand to SEQ ID NO: 1324552
guuauaaacauuagacccg

SEQ ID NO: 1324554 - RNA, 19 nt, Artificial Sequence
  Description of Artificial Sequence: Synthetic oligonucleotide
  Sense strand starting at position 3243 of SEQ ID NO: 1242132
gucuaauguuuauaacguu

SEQ ID NO: 1324555 - RNA, 19 nt, Artificial Sequence
  Description of Artificial Sequence: Synthetic oligonucleotide
  Antisense strand to SEQ ID NO: 1324554
aacguuauaaacauuagac

SEQ ID NO: 1324556 - RNA, 19 nt, Artificial Sequence
  Description of Artificial Sequence: Synthetic oligonucleotide
  Sense strand starting at position 3255 of SEQ ID NO: 1242132
uaacguuaauaaugacagu

SEQ ID NO: 1324557 - RNA, 19 nt, Artificial Sequence
  Description of Artificial Sequence: Synthetic oligonucleotide
  Antisense strand to SEQ ID NO: 1324556
acugucauuauuaacguua

SEQ ID NO: 1324558 - RNA, 19 nt, Artificial Sequence
  Description of Artificial Sequence: Synthetic oligonucleotide
  Sense strand starting at position 3318 of SEQ ID NO: 1242132
cgcccacgucuuugaucau

SEQ ID NO: 1324559 - RNA, 19 nt, Artificial Sequence
  Description of Artificial Sequence: Synthetic oligonucleotide
  Antisense strand to SEQ ID NO: 1324558
augaucaaagacgugggcg

SEQ ID NO: 1324560 - RNA, 19 nt, Artificial Sequence
  Description of Artificial Sequence: Synthetic oligonucleotide
  Sense strand starting at position 3321 of SEQ ID NO: 1242132
ccacgucuuugaucauuaa

SEQ ID NO: 1324561 - RNA, 19 nt, Artificial Sequence
  Description of Artificial Sequence: Synthetic oligonucleotide
  Antisense strand to SEQ ID NO: 1324560
uuaaugaucaaagacgugg

SEQ ID NO: 1324562 - RNA, 19 nt, Artificial Sequence
  Description of Artificial Sequence: Synthetic oligonucleotide
  Sense strand starting at position 3324 of SEQ ID NO: 1242132
cgucuuugaucauuaaaga

SEQ ID NO: 1324563 - RNA, 19 nt, Artificial Sequence
  Description of Artificial Sequence: Synthetic oligonucleotide
  Antisense strand to SEQ ID NO: 1324562
ucuuuaaugaucaaagacg

SEQ ID NO: 1324564 - RNA, 19 nt, Artificial Sequence
  Description of Artificial Sequence: Synthetic oligonucleotide
  Sense strand starting at position 3351 of SEQ ID NO: 1242132
acuaaucagguguguggaa

SEQ ID NO: 1324565 - RNA, 19 nt, Artificial Sequence
  Description of Artificial Sequence: Synthetic oligonucleotide
  Antisense strand to SEQ ID NO: 1324564
uuccacacaccugauuagu

SEQ ID NO: 1324566 - RNA, 19 nt, Artificial Sequence
  Description of Artificial Sequence: Synthetic oligonucleotide
  Sense strand starting at position 3353 of SEQ ID NO: 1242132
uaaucagguguguggaagu

SEQ ID NO: 1324567 - RNA, 19 nt, Artificial Sequence
  Description of Artificial Sequence: Synthetic oligonucleotide
  Antisense strand to SEQ ID NO: 1324566
acuuccacacaccugauua

SEQ ID NO: 1324568 - RNA, 19 nt, Artificial Sequence
  Description of Artificial Sequence: Synthetic oligonucleotide
  Sense strand starting at position 3431 of SEQ ID NO: 1242132
ucagaaucugccgaaucca

SEQ ID NO: 1324569 - RNA, 19 nt, Artificial Sequence
  Description of Artificial Sequence: Synthetic oligonucleotide
  Antisense strand to SEQ ID NO: 1324568
uggauucggcagauucuga

SEQ ID NO: 1324570 - RNA, 19 nt, Artificial Sequence
  Description of Artificial Sequence: Synthetic oligonucleotide
  Sense strand starting at position 3585 of SEQ ID NO: 1242132
guugaaaccgguuggaucu

SEQ ID NO: 1324571 - RNA, 19 nt, Artificial Sequence
  Description of Artificial Sequence: Synthetic oligonucleotide
  Antisense strand to SEQ ID NO: 1324570
agauccaaccgguuucaac

SEQ ID NO: 1324572 - RNA, 19 nt, Artificial Sequence
  Description of Artificial Sequence: Synthetic oligonucleotide
  Sense strand starting at position 3854 of SEQ ID NO: 1242132
cagucuaugucccagguau

SEQ ID NO: 1324573 - RNA, 19 nt, Artificial Sequence
  Description of Artificial Sequence: Synthetic oligonucleotide
  Antisense strand to SEQ ID NO: 1324572
auaccugggacauagacug

SEQ ID NO: 1324574 - RNA, 19 nt, Artificial Sequence
  Description of Artificial Sequence: Synthetic oligonucleotide
  Sense strand starting at position 3856 of SEQ ID NO: 1242132
gucuaugucccagguauca

SEQ ID NO: 1324575 - RNA, 19 nt, Artificial Sequence
  Description of Artificial Sequence: Synthetic oligonucleotide
  Antisense strand to SEQ ID NO: 1324574
ugauaccugggacauagac

SEQ ID NO: 1324576 - RNA, 19 nt, Artificial Sequence
  Description of Artificial Sequence: Synthetic oligonucleotide
  Sense strand starting at position 3944 of SEQ ID NO: 1242132
ggcgucuccuaauucuuga

SEQ ID NO: 1324577 - RNA, 19 nt, Artificial Sequence
  Description of Artificial Sequence: Synthetic oligonucleotide
  Antisense strand to SEQ ID NO: 1324576
ucaagaauuaggagacgcc

SEQ ID NO: 1324578 - RNA, 19 nt, Artificial Sequence
  Description of Artificial Sequence: Synthetic oligonucleotide
  Sense strand starting at position 3948 of SEQ ID NO: 1242132
ucuccuaauucuugagcga

SEQ ID NO: 1324579 - RNA, 19 nt, Artificial Sequence
  Description of Artificial Sequence: Synthetic oligonucleotide
  Antisense strand to SEQ ID NO: 1324578
ucgcucaagaauuaggaga

SEQ ID NO: 1324580 - RNA, 19 nt, Artificial Sequence
  Description of Artificial Sequence: Synthetic oligonucleotide
  Sense strand starting at position 3951 of SEQ ID NO: 1242132
ccuaauucuugagcgacua

SEQ ID NO: 1324581 - RNA, 19 nt, Artificial Sequence
  Description of Artificial Sequence: Synthetic oligonucleotide
  Antisense strand to SEQ ID NO: 1324580
uagucgcucaagaauuagg

SEQ ID NO: 1324582 - RNA, 19 nt, Artificial Sequence
  Description of Artificial Sequence: Synthetic oligonucleotide
  Sense strand starting at position 3963 of SEQ ID NO: 1242132
gcgacuagucccuggcaca

SEQ ID NO: 1324583 - RNA, 19 nt, Artificial Sequence
  Description of Artificial Sequence: Synthetic oligonucleotide
  Antisense strand to SEQ ID NO: 1324582
ugugccagggacuagucgc

SEQ ID NO: 1324584 - RNA, 19 nt, Artificial Sequence
  Description of Artificial Sequence: Synthetic oligonucleotide
  Sense strand starting at position 3964 of SEQ ID NO: 1242132
cgacuagucccuggcacaa

SEQ ID NO: 1324585 - RNA, 19 nt, Artificial Sequence
  Description of Artificial Sequence: Synthetic oligonucleotide
  Antisense strand to SEQ ID NO: 1324584
uugugccagggacuagucg

SEQ ID NO: 1324586 - RNA, 19 nt, Artificial Sequence
  Description of Artificial Sequence: Synthetic oligonucleotide
  Sense strand starting at position 15 of SEQ ID NO: 1242133
augaaagauucugcgccuu

SEQ ID NO: 1324587 - RNA, 19 nt, Artificial Sequence
  Description of Artificial Sequence: Synthetic oligonucleotide
  Antisense strand to SEQ ID NO: 1324586
aaggcgcagaaucuuucau

SEQ ID NO: 1324588 - RNA, 19 nt, Artificial Sequence
  Description of Artificial Sequence: Synthetic oligonucleotide
  Sense strand starting at position 17 of SEQ ID NO: 1242133
gaaagauucugcgccuuuc

SEQ ID NO: 1324589 - RNA, 19 nt, Artificial Sequence
  Description of Artificial Sequence: Synthetic oligonucleotide
  Antisense strand to SEQ ID NO: 1324588
gaaaggcgcagaaucuuuc

SEQ ID NO: 1324590 - RNA, 19 nt, Artificial Sequence
  Description of Artificial Sequence: Synthetic oligonucleotide
  Sense strand starting at position 133 of SEQ ID NO: 1242133
gccugucagguuuggcaga

SEQ ID NO: 1324591 - RNA, 19 nt, Artificial Sequence
  Description of Artificial Sequence: Synthetic oligonucleotide
  Antisense strand to SEQ ID NO: 1324590
ucugccaaaccugacaggc

SEQ ID NO: 1324592 - RNA, 19 nt, Artificial Sequence
  Description of Artificial Sequence: Synthetic oligonucleotide
  Sense strand starting at position 160 of SEQ ID NO: 1242133
cacaacuugucuuugggaa

SEQ ID NO: 1324593 - RNA, 19 nt, Artificial Sequence
  Description of Artificial Sequence: Synthetic oligonucleotide
  Antisense strand to SEQ ID NO: 1324592
uucccaaagacaaguugug

SEQ ID NO: 1324594 - RNA, 19 nt, Artificial Sequence
  Description of Artificial Sequence: Synthetic oligonucleotide
  Sense strand starting at position 161 of SEQ ID NO: 1242133
acaacuugucuuugggaac

SEQ ID NO: 1324595 - RNA, 19 nt, Artificial Sequence
  Description of Artificial Sequence: Synthetic oligonucleotide
  Antisense strand to SEQ ID NO: 1324594
guucccaaagacaaguugu

SEQ ID NO: 1324596 - RNA, 19 nt, Artificial Sequence
  Description of Artificial Sequence: Synthetic oligonucleotide
  Sense strand starting at position 194 of SEQ ID NO: 1242133
ugccuuugcucuucuggga

SEQ ID NO: 1324597 - RNA, 19 nt, Artificial Sequence
  Description of Artificial Sequence: Synthetic oligonucleotide
  Antisense strand to SEQ ID NO: 1324596
ucccagaagagcaaaggca

SEQ ID NO: 1324598 - RNA, 19 nt, Artificial Sequence
  Description of Artificial Sequence: Synthetic oligonucleotide
  Sense strand starting at position 575 of SEQ ID NO: 1242133
uggagaaaguccuugcgca

SEQ ID NO: 1324599 - RNA, 19 nt, Artificial Sequence
  Description of Artificial Sequence: Synthetic oligonucleotide
  Antisense strand to SEQ ID NO: 1324598
ugcgcaaggacuuucucca

SEQ ID NO: 1324600 - RNA, 19 nt, Artificial Sequence
  Description of Artificial Sequence: Synthetic oligonucleotide
  Sense strand starting at position 576 of SEQ ID NO: 1242133
ggagaaaguccuugcgcac

SEQ ID NO: 1324601 - RNA, 19 nt, Artificial Sequence
  Description of Artificial Sequence: Synthetic oligonucleotide
  Antisense strand to SEQ ID NO: 1324600
gugcgcaaggacuuucucc

SEQ ID NO: 1324602 - RNA, 19 nt, Artificial Sequence
  Description of Artificial Sequence: Synthetic oligonucleotide
  Sense strand starting at position 680 of SEQ ID NO: 1242133
ccaagacacgucggucaua

SEQ ID NO: 1324603 - RNA, 19 nt, Artificial Sequence
  Description of Artificial Sequence: Synthetic oligonucleotide
  Antisense strand to SEQ ID NO: 1324602
uaugaccgacgugucuugg

SEQ ID NO: 1324604 - RNA, 19 nt, Artificial Sequence
  Description of Artificial Sequence: Synthetic oligonucleotide
  Sense strand starting at position 681 of SEQ ID NO: 1242133
caagacacgucggucauaa

SEQ ID NO: 1324605 - RNA, 19 nt, Artificial Sequence
  Description of Artificial Sequence: Synthetic oligonucleotide
  Antisense strand to SEQ ID NO: 1324604
uuaugaccgacgugucuug

SEQ ID NO: 1324606 - RNA, 19 nt, Artificial Sequence
  Description of Artificial Sequence: Synthetic oligonucleotide
  Sense strand starting at position 793 of SEQ ID NO: 1242133
uuguuacugucccugauca

SEQ ID NO: 1324607 - RNA, 19 nt, Artificial Sequence
  Description of Artificial Sequence: Synthetic oligonucleotide
  Antisense strand to SEQ ID NO: 1324606
ugaucagggacaguaacaa

SEQ ID NO: 1324608 - RNA, 19 nt, Artificial Sequence
  Description of Artificial Sequence: Synthetic oligonucleotide
  Sense strand starting at position 795 of SEQ ID NO: 1242133
guuacugucccugaucaca

SEQ ID NO: 1324609 - RNA, 19 nt, Artificial Sequence
  Description of Artificial Sequence: Synthetic oligonucleotide
  Antisense strand to SEQ ID NO: 1324608
ugugaucagggacaguaac

SEQ ID NO: 1324610 - RNA, 19 nt, Artificial Sequence
  Description of Artificial Sequence: Synthetic oligonucleotide
  Sense strand starting at position 898 of SEQ ID NO: 1242133
cauccauggucagguaaua

SEQ ID NO: 1324611 - RNA, 19 nt, Artificial Sequence
  Description of Artificial Sequence: Synthetic oligonucleotide
  Antisense strand to SEQ ID NO: 1324610
uauuaccugaccauggaug

SEQ ID NO: 1324612 - RNA, 19 nt, Artificial Sequence
  Description of Artificial Sequence: Synthetic oligonucleotide
  Sense strand starting at position 909 of SEQ ID NO: 1242133
agguaauaaucgcaucaau

SEQ ID NO: 1324613 - RNA, 19 nt, Artificial Sequence
  Description of Artificial Sequence: Synthetic oligonucleotide
  Antisense strand to SEQ ID NO: 1324612
auugaugcgauuauuaccu

SEQ ID NO: 1324614 - RNA, 19 nt, Artificial Sequence
  Description of Artificial Sequence: Synthetic oligonucleotide
  Sense strand starting at position 1338 of SEQ ID NO: 1242133
augcauaauugauaguguu

SEQ ID NO: 1324615 - RNA, 19 nt, Artificial Sequence
  Description of Artificial Sequence: Synthetic oligonucleotide
  Antisense strand to SEQ ID NO: 1324614
aacacuaucaauuaugcau

SEQ ID NO: 1324616 - RNA, 19 nt, Artificial Sequence
  Description of Artificial Sequence: Synthetic oligonucleotide
  Sense strand starting at position 1344 of SEQ ID NO: 1242133
aauugauaguguuagcaga

SEQ ID NO: 1324617 - RNA, 19 nt, Artificial Sequence
  Description of Artificial Sequence: Synthetic oligonucleotide
  Antisense strand to SEQ ID NO: 1324616
ucugcuaacacuaucaauu

SEQ ID NO: 1324618 - RNA, 19 nt, Artificial Sequence
  Description of Artificial Sequence: Synthetic oligonucleotide
  Sense strand starting at position 1390 of SEQ ID NO: 1242133
cuggaucugggcugauaua

SEQ ID NO: 1324619 - RNA, 19 nt, Artificial Sequence
  Description of Artificial Sequence: Synthetic oligonucleotide
  Antisense strand to SEQ ID NO: 1324618
uauaucagcccagauccag

SEQ ID NO: 1324620 - RNA, 19 nt, Artificial Sequence
  Description of Artificial Sequence: Synthetic oligonucleotide
  Sense strand starting at position 1554 of SEQ ID NO: 1242133
gccggaacucuuuacuucu

SEQ ID NO: 1324621 - RNA, 19 nt, Artificial Sequence
  Description of Artificial Sequence: Synthetic oligonucleotide
  Antisense strand to SEQ ID NO: 1324620
agaaguaaagaguuccggc

SEQ ID NO: 1324622 - RNA, 19 nt, Artificial Sequence
  Description of Artificial Sequence: Synthetic oligonucleotide
  Sense strand starting at position 2274 of SEQ ID NO: 1242133
cgauuugaguguugagcau

SEQ ID NO: 1324623 - RNA, 19 nt, Artificial Sequence
  Description of Artificial Sequence: Synthetic oligonucleotide
  Antisense strand to SEQ ID NO: 1324622
augcucaacacucaaaucg

SEQ ID NO: 1324624 - RNA, 19 nt, Artificial Sequence
  Description of Artificial Sequence: Synthetic oligonucleotide
  Sense strand starting at position 2278 of SEQ ID NO: 1242133
uugaguguugagcaucuua

SEQ ID NO: 1324625 - RNA, 19 nt, Artificial Sequence
  Description of Artificial Sequence: Synthetic oligonucleotide
  Antisense strand to SEQ ID NO: 1324624
uaagaugcucaacacucaa

SEQ ID NO: 1324626 - RNA, 19 nt, Artificial Sequence
  Description of Artificial Sequence: Synthetic oligonucleotide
  Sense strand starting at position 2286 of SEQ ID NO: 1242133
ugagcaucuuaaugagcua

SEQ ID NO: 1324627 - RNA, 19 nt, Artificial Sequence
  Description of Artificial Sequence: Synthetic oligonucleotide
  Antisense strand to SEQ ID NO: 1324626
uagcucauuaagaugcuca

SEQ ID NO: 1324628 - RNA, 19 nt, Artificial Sequence
  Description of Artificial Sequence: Synthetic oligonucleotide
  Sense strand starting at position 2371 of SEQ ID NO: 1242133
uuccgaggcugcuuuguaa

SEQ ID NO: 1324629 - RNA, 19 nt, Artificial Sequence
  Description of Artificial Sequence: Synthetic oligonucleotide
  Antisense strand to SEQ ID NO: 1324628
uuacaaagcagccucggaa

SEQ ID NO: 1324630 - RNA, 19 nt, Artificial Sequence
  Description of Artificial Sequence: Synthetic oligonucleotide
  Sense strand starting at position 2374 of SEQ ID NO: 1242133
cgaggcugcuuuguaaauu

SEQ ID NO: 1324631 - RNA, 19 nt, Artificial Sequence
  Description of Artificial Sequence: Synthetic oligonucleotide
  Antisense strand to SEQ ID NO: 1324630
aauuuacaaagcagccucg

SEQ ID NO: 1324632 - RNA, 19 nt, Artificial Sequence
  Description of Artificial Sequence: Synthetic oligonucleotide
  Sense strand starting at position 2375 of SEQ ID NO: 1242133
gaggcugcuuuguaaauua

SEQ ID NO: 1324633 - RNA, 19 nt, Artificial Sequence
  Description of Artificial Sequence: Synthetic oligonucleotide
  Antisense strand to SEQ ID NO: 1324632
uaauuuacaaagcagccuc

SEQ ID NO: 1324634 - RNA, 19 nt, Artificial Sequence
  Description of Artificial Sequence: Synthetic oligonucleotide
  Sense strand starting at position 2589 of SEQ ID NO: 1242133
cagggaaggugucuucgaa

SEQ ID NO: 1324635 - RNA, 19 nt, Artificial Sequence
  Description of Artificial Sequence: Synthetic oligonucleotide
  Antisense strand to SEQ ID NO: 1324634
uucgaagacaccuucccug

SEQ ID NO: 1324636 - RNA, 19 nt, Artificial Sequence
  Description of Artificial Sequence: Synthetic oligonucleotide
  Sense strand starting at position 2690 of SEQ ID NO: 1242133
gggugagucccugagguuu

SEQ ID NO: 1324637 - RNA, 19 nt, Artificial Sequence
  Description of Artificial Sequence: Synthetic oligonucleotide
  Antisense strand to SEQ ID NO: 1324636
aaaccucagggacucaccc

SEQ ID NO: 1324638 - RNA, 19 nt, Artificial Sequence
  Description of Artificial Sequence: Synthetic oligonucleotide
  Sense strand starting at position 2856 of SEQ ID NO: 1242133
gccugugccugggaaggau

SEQ ID NO: 1324639 - RNA, 19 nt, Artificial Sequence
  Description of Artificial Sequence: Synthetic oligonucleotide
  Antisense strand to SEQ ID NO: 1324638
auccuucccaggcacaggc

SEQ ID NO: 1324640 - RNA, 19 nt, Artificial Sequence
  Description of Artificial Sequence: Synthetic oligonucleotide
  Sense strand starting at position 3033 of SEQ ID NO: 1242133
gaggcagaaucuggguaau

SEQ ID NO: 1324641 - RNA, 19 nt, Artificial Sequence
  Description of Artificial Sequence: Synthetic oligonucleotide
  Antisense strand to SEQ ID NO: 1324640
auuacccagauucugccuc

SEQ ID NO: 1324642 - RNA, 19 nt, Artificial Sequence
  Description of Artificial Sequence: Synthetic oligonucleotide
  Sense strand starting at position 3057 of SEQ ID NO: 1242133
ggagaaugggcucgcuauc

SEQ ID NO: 1324643 - RNA, 19 nt, Artificial Sequence
  Description of Artificial Sequence: Synthetic oligonucleotide
  Antisense strand to SEQ ID NO: 1324642
gauagcgagcccauucucc

SEQ ID NO: 1324644 - RNA, 19 nt, Artificial Sequence
  Description of Artificial Sequence: Synthetic oligonucleotide
  Sense strand starting at position 3521 of SEQ ID NO: 1242133
cgggucuaauguuuauaac

SEQ ID NO: 1324645 - RNA, 19 nt, Artificial Sequence
  Description of Artificial Sequence: Synthetic oligonucleotide
  Antisense strand to SEQ ID NO: 1324644
guuauaaacauuagacccg

SEQ ID NO: 1324646 - RNA, 19 nt, Artificial Sequence
  Description of Artificial Sequence: Synthetic oligonucleotide
  Sense strand starting at position 3524 of SEQ ID NO: 1242133
gucuaauguuuauaacguu

SEQ ID NO: 1324647 - RNA, 19 nt, Artificial Sequence
  Description of Artificial Sequence: Synthetic oligonucleotide
  Antisense strand to SEQ ID NO: 1324646
aacguuauaaacauuagac

SEQ ID NO: 1324648 - RNA, 19 nt, Artificial Sequence
  Description of Artificial Sequence: Synthetic oligonucleotide
  Sense strand starting at position 3536 of SEQ ID NO: 1242133
uaacguuaauaaugacagu

SEQ ID NO: 1324649 - RNA, 19 nt, Artificial Sequence
  Description of Artificial Sequence: Synthetic oligonucleotide
  Antisense strand to SEQ ID NO: 1324648
acugucauuauuaacguua

SEQ ID NO: 1324650 - RNA, 19 nt, Artificial Sequence
  Description of Artificial Sequence: Synthetic oligonucleotide
  Sense strand starting at position 3599 of SEQ ID NO: 1242133
cgcccacgucuuugaucau

SEQ ID NO: 1324651 - RNA, 19 nt, Artificial Sequence
  Description of Artificial Sequence: Synthetic oligonucleotide
  Antisense strand to SEQ ID NO: 1324650
augaucaaagacgugggcg

SEQ ID NO: 1324652 - RNA, 19 nt, Artificial Sequence
  Description of Artificial Sequence: Synthetic oligonucleotide
  Sense strand starting at position 3600 of SEQ ID NO: 1242133
gcccacgucuuugaucauu

SEQ ID NO: 1324653 - RNA, 19 nt, Artificial Sequence
  Description of Artificial Sequence: Synthetic oligonucleotide
  Antisense strand to SEQ ID NO: 1324652
aaugaucaaagacgugggc

SEQ ID NO: 1324654 - RNA, 19 nt, Artificial Sequence
  Description of Artificial Sequence: Synthetic oligonucleotide
  Sense strand starting at position 3602 of SEQ ID NO: 1242133
ccacgucuuugaucauuaa

SEQ ID NO: 1324655 - RNA, 19 nt, Artificial Sequence
  Description of Artificial Sequence: Synthetic oligonucleotide
  Antisense strand to SEQ ID NO: 1324654
uuaaugaucaaagacgugg

SEQ ID NO: 1324656 - RNA, 19 nt, Artificial Sequence
  Description of Artificial Sequence: Synthetic oligonucleotide
  Sense strand starting at position 3605 of SEQ ID NO: 1242133
cgucuuugaucauuaaaga

SEQ ID NO: 1324657 - RNA, 19 nt, Artificial Sequence
  Description of Artificial Sequence: Synthetic oligonucleotide
  Antisense strand to SEQ ID NO: 1324656
ucuuuaaugaucaaagacg

SEQ ID NO: 1324658 - RNA, 19 nt, Artificial Sequence
  Description of Artificial Sequence: Synthetic oligonucleotide
  Sense strand starting at position 3632 of SEQ ID NO: 1242133
acuaaucagguguguggaa

SEQ ID NO: 1324659 - RNA, 19 nt, Artificial Sequence
  Description of Artificial Sequence: Synthetic oligonucleotide
  Antisense strand to SEQ ID NO: 1324658
uuccacacaccugauuagu

SEQ ID NO: 1324660 - RNA, 19 nt, Artificial Sequence
  Description of Artificial Sequence: Synthetic oligonucleotide
  Sense strand starting at position 3634 of SEQ ID NO: 1242133
uaaucagguguguggaagu

SEQ ID NO: 1324661 - RNA, 19 nt, Artificial Sequence
  Description of Artificial Sequence: Synthetic oligonucleotide
  Antisense strand to SEQ ID NO: 1324660
acuuccacacaccugauua

SEQ ID NO: 1324662 - RNA, 19 nt, Artificial Sequence
  Description of Artificial Sequence: Synthetic oligonucleotide
  Sense strand starting at position 3712 of SEQ ID NO: 1242133
ucagaaucugccgaaucca

SEQ ID NO: 1324663 - RNA, 19 nt, Artificial Sequence
  Description of Artificial Sequence: Synthetic oligonucleotide
  Antisense strand to SEQ ID NO: 1324662
uggauucggcagauucuga

SEQ ID NO: 1324664 - RNA, 19 nt, Artificial Sequence
  Description of Artificial Sequence: Synthetic oligonucleotide
  Sense strand starting at position 3866 of SEQ ID NO: 1242133
guugaaaccgguuggaucu

SEQ ID NO: 1324665 - RNA, 19 nt, Artificial Sequence
  Description of Artificial Sequence: Synthetic oligonucleotide
  Antisense strand to SEQ ID NO: 1324664
agauccaaccgguuucaac

SEQ ID NO: 1324666 - RNA, 19 nt, Artificial Sequence
  Description of Artificial Sequence: Synthetic oligonucleotide
  Sense strand starting at position 26 of SEQ ID NO: 1242134
aggaccugaugcucaauua

SEQ ID NO: 1324667 - RNA, 19 nt, Artificial Sequence
  Description of Artificial Sequence: Synthetic oligonucleotide
  Antisense strand to SEQ ID NO: 1324666
uaauugagcaucagguccu

SEQ ID NO: 1324668 - RNA, 19 nt, Artificial Sequence
  Description of Artificial Sequence: Synthetic oligonucleotide
  Sense strand starting at position 115 of SEQ ID NO: 1242134
agaccucauuguucucuua

SEQ ID NO: 1324669 - RNA, 19 nt, Artificial Sequence
  Description of Artificial Sequence: Synthetic oligonucleotide
  Antisense strand to SEQ ID NO: 1324668
uaagagaacaaugaggucu

SEQ ID NO: 1324670 - RNA, 19 nt, Artificial Sequence
  Description of Artificial Sequence: Synthetic oligonucleotide
  Sense strand starting at position 135 of SEQ ID NO: 1242134
ccagcauuuguacguguuu

SEQ ID NO: 1324671 - RNA, 19 nt, Artificial Sequence
  Description of Artificial Sequence: Synthetic oligonucleotide
  Antisense strand to SEQ ID NO: 1324670
aaacacguacaaaugcugg

SEQ ID NO: 1324672 - RNA, 19 nt, Artificial Sequence
  Description of Artificial Sequence: Synthetic oligonucleotide
  Sense strand starting at position 174 of SEQ ID NO: 1242134
uuuccuguccauugugaca

SEQ ID NO: 1324673 - RNA, 19 nt, Artificial Sequence
  Description of Artificial Sequence: Synthetic oligonucleotide
  Antisense strand to SEQ ID NO: 1324672
ugucacaauggacaggaaa

SEQ ID NO: 1324674 - RNA, 19 nt, Artificial Sequence
  Description of Artificial Sequence: Synthetic oligonucleotide
  Sense strand starting at position 176 of SEQ ID NO: 1242134
uccuguccauugugacaau

SEQ ID NO: 1324675 - RNA, 19 nt, Artificial Sequence
  Description of Artificial Sequence: Synthetic oligonucleotide
  Antisense strand to SEQ ID NO: 1324674
auugucacaauggacagga

SEQ ID NO: 1324676 - RNA, 19 nt, Artificial Sequence
  Description of Artificial Sequence: Synthetic oligonucleotide
  Sense strand starting at position 177 of SEQ ID NO: 1242134
ccuguccauugugacaauu

SEQ ID NO: 1324677 - RNA, 19 nt, Artificial Sequence
  Description of Artificial Sequence: Synthetic oligonucleotide
  Antisense strand to SEQ ID NO: 1324676
aauugucacaauggacagg

SEQ ID NO: 1324678 - RNA, 19 nt, Artificial Sequence
  Description of Artificial Sequence: Synthetic oligonucleotide
  Sense strand starting at position 179 of SEQ ID NO: 1242134
uguccauugugacaauuga

SEQ ID NO: 1324679 - RNA, 19 nt, Artificial Sequence
  Description of Artificial Sequence: Synthetic oligonucleotide
  Antisense strand to SEQ ID NO: 1324678
ucaauugucacaauggaca

SEQ ID NO: 1324680 - RNA, 19 nt, Artificial Sequence
  Description of Artificial Sequence: Synthetic oligonucleotide
  Sense strand starting at position 495 of SEQ ID NO: 1242134
ugggaaagcggucacuaga

SEQ ID NO: 1324681 - RNA, 19 nt, Artificial Sequence
  Description of Artificial Sequence: Synthetic oligonucleotide
  Antisense strand to SEQ ID NO: 1324680
ucuagugaccgcuuuccca

SEQ ID NO: 1324682 - RNA, 19 nt, Artificial Sequence
  Description of Artificial Sequence: Synthetic oligonucleotide
  Sense strand starting at position 609 of SEQ ID NO: 1242134
augaaagauucugcgccuu

SEQ ID NO: 1324683 - RNA, 19 nt, Artificial Sequence
  Description of Artificial Sequence: Synthetic oligonucleotide
  Antisense strand to SEQ ID NO: 1324682
aaggcgcagaaucuuucau

SEQ ID NO: 1324684 - RNA, 19 nt, Artificial Sequence
  Description of Artificial Sequence: Synthetic oligonucleotide
  Sense strand starting at position 611 of SEQ ID NO: 1242134
gaaagauucugcgccuuuc

SEQ ID NO: 1324685 - RNA, 19 nt, Artificial Sequence
  Description of Artificial Sequence: Synthetic oligonucleotide
  Antisense strand to SEQ ID NO: 1324684
gaaaggcgcagaaucuuuc

SEQ ID NO: 1324686 - RNA, 19 nt, Artificial Sequence
  Description of Artificial Sequence: Synthetic oligonucleotide
  Sense strand starting at position 727 of SEQ ID NO: 1242134
gccugucagguuuggcaga

SEQ ID NO: 1324687 - RNA, 19 nt, Artificial Sequence
  Description of Artificial Sequence: Synthetic oligonucleotide
  Antisense strand to SEQ ID NO: 1324686
ucugccaaaccugacaggc

SEQ ID NO: 1324688 - RNA, 19 nt, Artificial Sequence
  Description of Artificial Sequence: Synthetic oligonucleotide
  Sense strand starting at position 754 of SEQ ID NO: 1242134
cacaacuugucuuugggaa

SEQ ID NO: 1324689 - RNA, 19 nt, Artificial Sequence
  Description of Artificial Sequence: Synthetic oligonucleotide
  Antisense strand to SEQ ID NO: 1324688
uucccaaagacaaguugug

SEQ ID NO: 1324690 - RNA, 19 nt, Artificial Sequence
  Description of Artificial Sequence: Synthetic oligonucleotide
  Sense strand starting at position 755 of SEQ ID NO: 1242134
acaacuugucuuugggaac

SEQ ID NO: 1324691 - RNA, 19 nt, Artificial Sequence
  Description of Artificial Sequence: Synthetic oligonucleotide
  Antisense strand to SEQ ID NO: 1324690
guucccaaagacaaguugu

SEQ ID NO: 1324692 - RNA, 19 nt, Artificial Sequence
  Description of Artificial Sequence: Synthetic oligonucleotide
  Sense strand starting at position 788 of SEQ ID NO: 1242134
ugccuuugcucuucuggga

SEQ ID NO: 1324693 - RNA, 19 nt, Artificial Sequence
  Description of Artificial Sequence: Synthetic oligonucleotide
  Antisense strand to SEQ ID NO: 1324692
ucccagaagagcaaaggca

SEQ ID NO: 1324694 - RNA, 19 nt, Artificial Sequence
  Description of Artificial Sequence: Synthetic oligonucleotide
  Sense strand starting at position 1169 of SEQ ID NO: 1242134
uggagaaaguccuugcgca

SEQ ID NO: 1324695 - RNA, 19 nt, Artificial Sequence
  Description of Artificial Sequence: Synthetic oligonucleotide
  Antisense strand to SEQ ID NO: 1324694
ugcgcaaggacuuucucca

SEQ ID NO: 1324696 - RNA, 19 nt, Artificial Sequence
  Description of Artificial Sequence: Synthetic oligonucleotide
  Sense strand starting at position 1170 of SEQ ID NO: 1242134
ggagaaaguccuugcgcac

SEQ ID NO: 1324697 - RNA, 19 nt, Artificial Sequence
  Description of Artificial Sequence: Synthetic oligonucleotide
  Antisense strand to SEQ ID NO: 1324696
gugcgcaaggacuuucucc

SEQ ID NO: 1324698 - RNA, 19 nt, Artificial Sequence
  Description of Artificial Sequence: Synthetic oligonucleotide
  Sense strand starting at position 1274 of SEQ ID NO: 1242134
ccaagacacgucggucaua

SEQ ID NO: 1324699 - RNA, 19 nt, Artificial Sequence
  Description of Artificial Sequence: Synthetic oligonucleotide
  Antisense strand to SEQ ID NO: 1324698
uaugaccgacgugucuugg

SEQ ID NO: 1324700 - RNA, 19 nt, Artificial Sequence
  Description of Artificial Sequence: Synthetic oligonucleotide
  Sense strand starting at position 1275 of SEQ ID NO: 1242134
caagacacgucggucauaa

SEQ ID NO: 1324701 - RNA, 19 nt, Artificial Sequence
  Description of Artificial Sequence: Synthetic oligonucleotide
  Antisense strand to SEQ ID NO: 1324700
uuaugaccgacgugucuug

SEQ ID NO: 1324702 - RNA, 19 nt, Artificial Sequence
  Description of Artificial Sequence: Synthetic oligonucleotide
  Sense strand starting at position 1387 of SEQ ID NO: 1242134
uuguuacugucccugauca

SEQ ID NO: 1324703 - RNA, 19 nt, Artificial Sequence
  Description of Artificial Sequence: Synthetic oligonucleotide
  Antisense strand to SEQ ID NO: 1324702
ugaucagggacaguaacaa

SEQ ID NO: 1324704 - RNA, 19 nt, Artificial Sequence
  Description of Artificial Sequence: Synthetic oligonucleotide
  Sense strand starting at position 1389 of SEQ ID NO: 1242134
guuacugucccugaucaca

SEQ ID NO: 1324705 - RNA, 19 nt, Artificial Sequence
  Description of Artificial Sequence: Synthetic oligonucleotide
  Antisense strand to SEQ ID NO: 1324704
ugugaucagggacaguaac

SEQ ID NO: 1324706 - RNA, 19 nt, Artificial Sequence
  Description of Artificial Sequence: Synthetic oligonucleotide
  Sense strand starting at position 1492 of SEQ ID NO: 1242134
cauccauggucagguaaua

SEQ ID NO: 1324707 - RNA, 19 nt, Artificial Sequence
  Description of Artificial Sequence: Synthetic oligonucleotide
  Antisense strand to SEQ ID NO: 1324706
uauuaccugaccauggaug

SEQ ID NO: 1324708 - RNA, 19 nt, Artificial Sequence
  Description of Artificial Sequence: Synthetic oligonucleotide
  Sense strand starting at position 1503 of SEQ ID NO: 1242134
agguaauaaucgcaucaau

SEQ ID NO: 1324709 - RNA, 19 nt, Artificial Sequence
  Description of Artificial Sequence: Synthetic oligonucleotide
  Antisense strand to SEQ ID NO: 1324708
auugaugcgauuauuaccu

SEQ ID NO: 1324710 - RNA, 19 nt, Artificial Sequence
  Description of Artificial Sequence: Synthetic oligonucleotide
  Sense strand starting at position 1932 of SEQ ID NO: 1242134
augcauaauugauaguguu

SEQ ID NO: 1324711 - RNA, 19 nt, Artificial Sequence
  Description of Artificial Sequence: Synthetic oligonucleotide
  Antisense strand to SEQ ID NO: 1324710
aacacuaucaauuaugcau

SEQ ID NO: 1324712 - RNA, 19 nt, Artificial Sequence
  Description of Artificial Sequence: Synthetic oligonucleotide
  Sense strand starting at position 1938 of SEQ ID NO: 1242134
aauugauaguguuagcaga

SEQ ID NO: 1324713 - RNA, 19 nt, Artificial Sequence
  Description of Artificial Sequence: Synthetic oligonucleotide
  Antisense strand to SEQ ID NO: 1324712
ucugcuaacacuaucaauu

SEQ ID NO: 1324714 - RNA, 19 nt, Artificial Sequence
  Description of Artificial Sequence: Synthetic oligonucleotide
  Sense strand starting at position 1984 of SEQ ID NO: 1242134
cuggaucugggcugauaua

SEQ ID NO: 1324715 - RNA, 19 nt, Artificial Sequence
  Description of Artificial Sequence: Synthetic oligonucleotide
  Antisense strand to SEQ ID NO: 1324714
uauaucagcccagauccag

SEQ ID NO: 1324716 - RNA, 19 nt, Artificial Sequence
  Description of Artificial Sequence: Synthetic oligonucleotide
  Sense strand starting at position 2148 of SEQ ID NO: 1242134
gccggaacucuuuacuucu

SEQ ID NO: 1324717 - RNA, 19 nt, Artificial Sequence
  Description of Artificial Sequence: Synthetic oligonucleotide
  Antisense strand to SEQ ID NO: 1324716
agaaguaaagaguuccggc

SEQ ID NO: 1324718 - RNA, 19 nt, Artificial Sequence
  Description of Artificial Sequence: Synthetic oligonucleotide
  Sense strand starting at position 2868 of SEQ ID NO: 1242134
cgauuugaguguugagcau

SEQ ID NO: 1324719 - RNA, 19 nt, Artificial Sequence
  Description of Artificial Sequence: Synthetic oligonucleotide
  Antisense strand to SEQ ID NO: 1324718
augcucaacacucaaaucg

SEQ ID NO: 1324720 - RNA, 19 nt, Artificial Sequence
  Description of Artificial Sequence: Synthetic oligonucleotide
  Sense strand starting at position 2872 of SEQ ID NO: 1242134
uugaguguugagcaucuua

SEQ ID NO: 1324721 - RNA, 19 nt, Artificial Sequence
  Description of Artificial Sequence: Synthetic oligonucleotide
  Antisense strand to SEQ ID NO: 1324720
uaagaugcucaacacucaa

SEQ ID NO: 1324722 - RNA, 19 nt, Artificial Sequence
  Description of Artificial Sequence: Synthetic oligonucleotide
  Sense strand starting at position 2880 of SEQ ID NO: 1242134
ugagcaucuuaaugagcua

SEQ ID NO: 1324723 - RNA, 19 nt, Artificial Sequence
  Description of Artificial Sequence: Synthetic oligonucleotide
  Antisense strand to SEQ ID NO: 1324722
uagcucauuaagaugcuca

SEQ ID NO: 1324724 - RNA, 19 nt, Artificial Sequence
  Description of Artificial Sequence: Synthetic oligonucleotide
  Sense strand starting at position 2965 of SEQ ID NO: 1242134
uuccgaggcugcuuuguaa

SEQ ID NO: 1324725 - RNA, 19 nt, Artificial Sequence
  Description of Artificial Sequence: Synthetic oligonucleotide
  Antisense strand to SEQ ID NO: 1324724
uuacaaagcagccucggaa

SEQ ID NO: 1324726 - RNA, 19 nt, Artificial Sequence
  Description of Artificial Sequence: Synthetic oligonucleotide
  Sense strand starting at position 2968 of SEQ ID NO: 1242134
cgaggcugcuuuguaaauu

SEQ ID NO: 1324727 - RNA, 19 nt, Artificial Sequence
  Description of Artificial Sequence: Synthetic oligonucleotide
  Antisense strand to SEQ ID NO: 1324726
aauuuacaaagcagccucg

SEQ ID NO: 1324728 - RNA, 19 nt, Artificial Sequence
  Description of Artificial Sequence: Synthetic oligonucleotide
  Sense strand starting at position 2969 of SEQ ID NO: 1242134
gaggcugcuuuguaaauua

SEQ ID NO: 1324729 - RNA, 19 nt, Artificial Sequence
  Description of Artificial Sequence: Synthetic oligonucleotide
  Antisense strand to SEQ ID NO: 1324728
uaauuuacaaagcagccuc

SEQ ID NO: 1324730 - RNA, 19 nt, Artificial Sequence
  Description of Artificial Sequence: Synthetic oligonucleotide
  Sense strand starting at position 3183 of SEQ ID NO: 1242134
cagggaaggugucuucgaa

SEQ ID NO: 1324731 - RNA, 19 nt, Artificial Sequence
  Description of Artificial Sequence: Synthetic oligonucleotide
  Antisense strand to SEQ ID NO: 1324730
uucgaagacaccuucccug

SEQ ID NO: 1324732 - RNA, 19 nt, Artificial Sequence
  Description of Artificial Sequence: Synthetic oligonucleotide
  Sense strand starting at position 3284 of SEQ ID NO: 1242134
gggugagucccugagguuu

SEQ ID NO: 1324733 - RNA, 19 nt, Artificial Sequence
  Description of Artificial Sequence: Synthetic oligonucleotide
  Antisense strand to SEQ ID NO: 1324732
aaaccucagggacucaccc

SEQ ID NO: 1324734 - RNA, 19 nt, Artificial Sequence
  Description of Artificial Sequence: Synthetic oligonucleotide
  Sense strand starting at position 3355 of SEQ ID NO: 1242134
uucuuugucugccgaacaa

SEQ ID NO: 1324735 - RNA, 19 nt, Artificial Sequence
  Description of Artificial Sequence: Synthetic oligonucleotide
  Antisense strand to SEQ ID NO: 1324734
uuguucggcagacaaagaa

SEQ ID NO: 1324736 - RNA, 19 nt, Artificial Sequence
  Description of Artificial Sequence: Synthetic oligonucleotide
  Sense strand starting at position 3404 of SEQ ID NO: 1242134
gggcaguuguccggguguu

SEQ ID NO: 1324737 - RNA, 19 nt, Artificial Sequence
  Description of Artificial Sequence: Synthetic oligonucleotide
  Antisense strand to SEQ ID NO: 1324736
aacacccggacaacugccc

SEQ ID NO: 1324738 - RNA, 19 nt, Artificial Sequence
  Description of Artificial Sequence: Synthetic oligonucleotide
  Sense strand starting at position 3450 of SEQ ID NO: 1242134
gccugugccugggaaggau

SEQ ID NO: 1324739 - RNA, 19 nt, Artificial Sequence
  Description of Artificial Sequence: Synthetic oligonucleotide
  Antisense strand to SEQ ID NO: 1324738
auccuucccaggcacaggc

SEQ ID NO: 1324740 - RNA, 19 nt, Artificial Sequence
  Description of Artificial Sequence: Synthetic oligonucleotide
  Sense strand starting at position 3627 of SEQ ID NO: 1242134
gaggcagaaucuggguaau

SEQ ID NO: 1324741 - RNA, 19 nt, Artificial Sequence
  Description of Artificial Sequence: Synthetic oligonucleotide
  Antisense strand to SEQ ID NO: 1324740
auuacccagauucugccuc

SEQ ID NO: 1324742 - RNA, 19 nt, Artificial Sequence
  Description of Artificial Sequence: Synthetic oligonucleotide
  Sense strand starting at position 3651 of SEQ ID NO: 1242134
ggagaaugggcucgcuauc

SEQ ID NO: 1324743 - RNA, 19 nt, Artificial Sequence
  Description of Artificial Sequence: Synthetic oligonucleotide
  Antisense strand to SEQ ID NO: 1324742
gauagcgagcccauucucc

SEQ ID NO: 1324744 - RNA, 19 nt, Artificial Sequence
  Description of Artificial Sequence: Synthetic oligonucleotide
  Sense strand starting at position 2 of SEQ ID NO: 1242135
cguuuaaccuggugaaaug

SEQ ID NO: 1324745 - RNA, 19 nt, Artificial Sequence
  Description of Artificial Sequence: Synthetic oligonucleotide
  Antisense strand to SEQ ID NO: 1324744
cauuucaccagguuaaacg

SEQ ID NO: 1324746 - RNA, 19 nt, Artificial Sequence
  Description of Artificial Sequence: Synthetic oligonucleotide
  Sense strand starting at position 14 of SEQ ID NO: 1242135
ugaaauggauccuacccaa

SEQ ID NO: 1324747 - RNA, 19 nt, Artificial Sequence
  Description of Artificial Sequence: Synthetic oligonucleotide
  Antisense strand to SEQ ID NO: 1324746
uuggguaggauccauuuca

SEQ ID NO: 1324748 - RNA, 19 nt, Artificial Sequence
  Description of Artificial Sequence: Synthetic oligonucleotide
  Sense strand starting at position 179 of SEQ ID NO: 1242135
aggaccugaugcucaauua

SEQ ID NO: 1324749 - RNA, 19 nt, Artificial Sequence
  Description of Artificial Sequence: Synthetic oligonucleotide
  Antisense strand to SEQ ID NO: 1324748
uaauugagcaucagguccu

SEQ ID NO: 1324750 - RNA, 19 nt, Artificial Sequence
  Description of Artificial Sequence: Synthetic oligonucleotide
  Sense strand starting at position 268 of SEQ ID NO: 1242135
agaccucauuguucucuua

SEQ ID NO: 1324751 - RNA, 19 nt, Artificial Sequence
  Description of Artificial Sequence: Synthetic oligonucleotide
  Antisense strand to SEQ ID NO: 1324750
uaagagaacaaugaggucu

SEQ ID NO: 1324752 - RNA, 19 nt, Artificial Sequence
  Description of Artificial Sequence: Synthetic oligonucleotide
  Sense strand starting at position 288 of SEQ ID NO: 1242135
ccagcauuuguacguguuu

SEQ ID NO: 1324753 - RNA, 19 nt, Artificial Sequence
  Description of Artificial Sequence: Synthetic oligonucleotide
  Antisense strand to SEQ ID NO: 1324752
aaacacguacaaaugcugg

SEQ ID NO: 1324754 - RNA, 19 nt, Artificial Sequence
  Description of Artificial Sequence: Synthetic oligonucleotide
  Sense strand starting at position 327 of SEQ ID NO: 1242135
uuuccuguccauugugaca

SEQ ID NO: 1324755 - RNA, 19 nt, Artificial Sequence
  Description of Artificial Sequence: Synthetic oligonucleotide
  Antisense strand to SEQ ID NO: 1324754
ugucacaauggacaggaaa

SEQ ID NO: 1324756 - RNA, 19 nt, Artificial Sequence
  Description of Artificial Sequence: Synthetic oligonucleotide
  Sense strand starting at position 329 of SEQ ID NO: 1242135
uccuguccauugugacaau

SEQ ID NO: 1324757 - RNA, 19 nt, Artificial Sequence
  Description of Artificial Sequence: Synthetic oligonucleotide
  Antisense strand to SEQ ID NO: 1324756
auugucacaauggacagga

SEQ ID NO: 1324758 - RNA, 19 nt, Artificial Sequence
  Description of Artificial Sequence: Synthetic oligonucleotide
  Sense strand starting at position 330 of SEQ ID NO: 1242135
ccuguccauugugacaauu

SEQ ID NO: 1324759 - RNA, 19 nt, Artificial Sequence
  Description of Artificial Sequence: Synthetic oligonucleotide
  Antisense strand to SEQ ID NO: 1324758
aauugucacaauggacagg

SEQ ID NO: 1324760 - RNA, 19 nt, Artificial Sequence
  Description of Artificial Sequence: Synthetic oligonucleotide
  Sense strand starting at position 332 of SEQ ID NO: 1242135
uguccauugugacaauuga

SEQ ID NO: 1324761 - RNA, 19 nt, Artificial Sequence
  Description of Artificial Sequence: Synthetic oligonucleotide
  Antisense strand to SEQ ID NO: 1324760
ucaauugucacaauggaca

SEQ ID NO: 1324762 - RNA, 19 nt, Artificial Sequence
  Description of Artificial Sequence: Synthetic oligonucleotide
  Sense strand starting at position 648 of SEQ ID NO: 1242135
ugggaaagcggucacuaga

SEQ ID NO: 1324763 - RNA, 19 nt, Artificial Sequence
  Description of Artificial Sequence: Synthetic oligonucleotide
  Antisense strand to SEQ ID NO: 1324762
ucuagugaccgcuuuccca

SEQ ID NO: 1324764 - RNA, 19 nt, Artificial Sequence
  Description of Artificial Sequence: Synthetic oligonucleotide
  Sense strand starting at position 762 of SEQ ID NO: 1242135
augaaagauucugcgccuu

SEQ ID NO: 1324765 - RNA, 19 nt, Artificial Sequence
  Description of Artificial Sequence: Synthetic oligonucleotide
  Antisense strand to SEQ ID NO: 1324764
aaggcgcagaaucuuucau

SEQ ID NO: 1324766 - RNA, 19 nt, Artificial Sequence
  Description of Artificial Sequence: Synthetic oligonucleotide
  Sense strand starting at position 764 of SEQ ID NO: 1242135
gaaagauucugcgccuuuc

SEQ ID NO: 1324767 - RNA, 19 nt, Artificial Sequence
  Description of Artificial Sequence: Synthetic oligonucleotide
  Antisense strand to SEQ ID NO: 1324766
gaaaggcgcagaaucuuuc

SEQ ID NO: 1324768 - RNA, 19 nt, Artificial Sequence
  Description of Artificial Sequence: Synthetic oligonucleotide
  Sense strand starting at position 880 of SEQ ID NO: 1242135
gccugucagguuuggcaga

SEQ ID NO: 1324769 - RNA, 19 nt, Artificial Sequence
  Description of Artificial Sequence: Synthetic oligonucleotide
  Antisense strand to SEQ ID NO: 1324768
ucugccaaaccugacaggc

SEQ ID NO: 1324770 - RNA, 19 nt, Artificial Sequence
  Description of Artificial Sequence: Synthetic oligonucleotide
  Sense strand starting at position 907 of SEQ ID NO: 1242135
cacaacuugucuuugggaa

SEQ ID NO: 1324771 - RNA, 19 nt, Artificial Sequence
  Description of Artificial Sequence: Synthetic oligonucleotide
  Antisense strand to SEQ ID NO: 1324770
uucccaaagacaaguugug

SEQ ID NO: 1324772 - RNA, 19 nt, Artificial Sequence
  Description of Artificial Sequence: Synthetic oligonucleotide
  Sense strand starting at position 908 of SEQ ID NO: 1242135
acaacuugucuuugggaac

SEQ ID NO: 1324773 - RNA, 19 nt, Artificial Sequence
  Description of Artificial Sequence: Synthetic oligonucleotide
  Antisense strand to SEQ ID NO: 1324772
guucccaaagacaaguugu

SEQ ID NO: 1324774 - RNA, 19 nt, Artificial Sequence
  Description of Artificial Sequence: Synthetic oligonucleotide
  Sense strand starting at position 941 of SEQ ID NO: 1242135
ugccuuugcucuucuggga

SEQ ID NO: 1324775 - RNA, 19 nt, Artificial Sequence
  Description of Artificial Sequence: Synthetic oligonucleotide
  Antisense strand to SEQ ID NO: 1324774
ucccagaagagcaaaggca

SEQ ID NO: 1324776 - RNA, 19 nt, Artificial Sequence
  Description of Artificial Sequence: Synthetic oligonucleotide
  Sense strand starting at position 1322 of SEQ ID NO: 1242135
uggagaaaguccuugcgca

SEQ ID NO: 1324777 - RNA, 19 nt, Artificial Sequence
  Description of Artificial Sequence: Synthetic oligonucleotide
  Antisense strand to SEQ ID NO: 1324776
ugcgcaaggacuuucucca

SEQ ID NO: 1324778 - RNA, 19 nt, Artificial Sequence
  Description of Artificial Sequence: Synthetic oligonucleotide
  Sense strand starting at position 1323 of SEQ ID NO: 1242135
ggagaaaguccuugcgcac

SEQ ID NO: 1324779 - RNA, 19 nt, Artificial Sequence
  Description of Artificial Sequence: Synthetic oligonucleotide
  Antisense strand to SEQ ID NO: 1324778
gugcgcaaggacuuucucc

SEQ ID NO: 1324780 - RNA, 19 nt, Artificial Sequence
  Description of Artificial Sequence: Synthetic oligonucleotide
  Sense strand starting at position 1427 of SEQ ID NO: 1242135
ccaagacacgucggucaua

SEQ ID NO: 1324781 - RNA, 19 nt, Artificial Sequence
  Description of Artificial Sequence: Synthetic oligonucleotide
  Antisense strand to SEQ ID NO: 1324780
uaugaccgacgugucuugg

SEQ ID NO: 1324782 - RNA, 19 nt, Artificial Sequence
  Description of Artificial Sequence: Synthetic oligonucleotide
  Sense strand starting at position 1428 of SEQ ID NO: 1242135
caagacacgucggucauaa

SEQ ID NO: 1324783 - RNA, 19 nt, Artificial Sequence
  Description of Artificial Sequence: Synthetic oligonucleotide
  Antisense strand to SEQ ID NO: 1324782
uuaugaccgacgugucuug

SEQ ID NO: 1324784 - RNA, 19 nt, Artificial Sequence
  Description of Artificial Sequence: Synthetic oligonucleotide
  Sense strand starting at position 1540 of SEQ ID NO: 1242135
uuguuacugucccugauca

SEQ ID NO: 1324785 - RNA, 19 nt, Artificial Sequence
  Description of Artificial Sequence: Synthetic oligonucleotide
  Antisense strand to SEQ ID NO: 1324784
ugaucagggacaguaacaa

SEQ ID NO: 1324786 - RNA, 19 nt, Artificial Sequence
  Description of Artificial Sequence: Synthetic oligonucleotide
  Sense strand starting at position 1542 of SEQ ID NO: 1242135
guuacugucccugaucaca

SEQ ID NO: 1324787 - RNA, 19 nt, Artificial Sequence
  Description of Artificial Sequence: Synthetic oligonucleotide
  Antisense strand to SEQ ID NO: 1324786
ugugaucagggacaguaac

SEQ ID NO: 1324788 - RNA, 19 nt, Artificial Sequence
  Description of Artificial Sequence: Synthetic oligonucleotide
  Sense strand starting at position 1645 of SEQ ID NO: 1242135
cauccauggucagguaaua

SEQ ID NO: 1324789 - RNA, 19 nt, Artificial Sequence
  Description of Artificial Sequence: Synthetic oligonucleotide
  Antisense strand to SEQ ID NO: 1324788
uauuaccugaccauggaug

SEQ ID NO: 1324790 - RNA, 19 nt, Artificial Sequence
  Description of Artificial Sequence: Synthetic oligonucleotide
  Sense strand starting at position 1656 of SEQ ID NO: 1242135
agguaauaaucgcaucaau

SEQ ID NO: 1324791 - RNA, 19 nt, Artificial Sequence
  Description of Artificial Sequence: Synthetic oligonucleotide
  Antisense strand to SEQ ID NO: 1324790
auugaugcgauuauuaccu

SEQ ID NO: 1324792 - RNA, 19 nt, Artificial Sequence
  Description of Artificial Sequence: Synthetic oligonucleotide
  Sense strand starting at position 2085 of SEQ ID NO: 1242135
augcauaauugauaguguu

SEQ ID NO: 1324793 - RNA, 19 nt, Artificial Sequence
  Description of Artificial Sequence: Synthetic oligonucleotide
  Antisense strand to SEQ ID NO: 1324792
aacacuaucaauuaugcau

SEQ ID NO: 1324794 - RNA, 19 nt, Artificial Sequence
  Description of Artificial Sequence: Synthetic oligonucleotide
  Sense strand starting at position 2091 of SEQ ID NO: 1242135
aauugauaguguuagcaga

SEQ ID NO: 1324795 - RNA, 19 nt, Artificial Sequence
  Description of Artificial Sequence: Synthetic oligonucleotide
  Antisense strand to SEQ ID NO: 1324794
ucugcuaacacuaucaauu

SEQ ID NO: 1324796 - RNA, 19 nt, Artificial Sequence
  Description of Artificial Sequence: Synthetic oligonucleotide
  Sense strand starting at position 2137 of SEQ ID NO: 1242135
cuggaucugggcugauaua

SEQ ID NO: 1324797 - RNA, 19 nt, Artificial Sequence
  Description of Artificial Sequence: Synthetic oligonucleotide
  Antisense strand to SEQ ID NO: 1324796
uauaucagcccagauccag

SEQ ID NO: 1324798 - RNA, 19 nt, Artificial Sequence
  Description of Artificial Sequence: Synthetic oligonucleotide
  Sense strand starting at position 2301 of SEQ ID NO: 1242135
gccggaacucuuuacuucu

SEQ ID NO: 1324799 - RNA, 19 nt, Artificial Sequence
  Description of Artificial Sequence: Synthetic oligonucleotide
  Antisense strand to SEQ ID NO: 1324798
agaaguaaagaguuccggc

SEQ ID NO: 1324800 - RNA, 19 nt, Artificial Sequence
  Description of Artificial Sequence: Synthetic oligonucleotide
  Sense strand starting at position 3021 of SEQ ID NO: 1242135
cgauuugaguguugagcau

SEQ ID NO: 1324801 - RNA, 19 nt, Artificial Sequence
  Description of Artificial Sequence: Synthetic oligonucleotide
  Antisense strand to SEQ ID NO: 1324800
augcucaacacucaaaucg

SEQ ID NO: 1324802 - RNA, 19 nt, Artificial Sequence
  Description of Artificial Sequence: Synthetic oligonucleotide
  Sense strand starting at position 3025 of SEQ ID NO: 1242135
uugaguguugagcaucuua

SEQ ID NO: 1324803 - RNA, 19 nt, Artificial Sequence
  Description of Artificial Sequence: Synthetic oligonucleotide
  Antisense strand to SEQ ID NO: 1324802
uaagaugcucaacacucaa

SEQ ID NO: 1324804 - RNA, 19 nt, Artificial Sequence
  Description of Artificial Sequence: Synthetic oligonucleotide
  Sense strand starting at position 3033 of SEQ ID NO: 1242135
ugagcaucuuaaugagcua

SEQ ID NO: 1324805 - RNA, 19 nt, Artificial Sequence
  Description of Artificial Sequence: Synthetic oligonucleotide
  Antisense strand to SEQ ID NO: 1324804
uagcucauuaagaugcuca

SEQ ID NO: 1324806 - RNA, 19 nt, Artificial Sequence
  Description of Artificial Sequence: Synthetic oligonucleotide
  Sense strand starting at position 3118 of SEQ ID NO: 1242135
uuccgaggcugcuuuguaa

SEQ ID NO: 1324807 - RNA, 19 nt, Artificial Sequence
  Description of Artificial Sequence: Synthetic oligonucleotide
  Antisense strand to SEQ ID NO: 1324806
uuacaaagcagccucggaa

SEQ ID NO: 1324808 - RNA, 19 nt, Artificial Sequence
  Description of Artificial Sequence: Synthetic oligonucleotide
  Sense strand starting at position 3121 of SEQ ID NO: 1242135
cgaggcugcuuuguaaauu

SEQ ID NO: 1324809 - RNA, 19 nt, Artificial Sequence
  Description of Artificial Sequence: Synthetic oligonucleotide
  Antisense strand to SEQ ID NO: 1324808
aauuuacaaagcagccucg

SEQ ID NO: 1324810 - RNA, 19 nt, Artificial Sequence
  Description of Artificial Sequence: Synthetic oligonucleotide
  Sense strand starting at position 3122 of SEQ ID NO: 1242135
gaggcugcuuuguaaauua

SEQ ID NO: 1324811 - RNA, 19 nt, Artificial Sequence
  Description of Artificial Sequence: Synthetic oligonucleotide
  Antisense strand to SEQ ID NO: 1324810
uaauuuacaaagcagccuc

SEQ ID NO: 1324812 - RNA, 19 nt, Artificial Sequence
  Description of Artificial Sequence: Synthetic oligonucleotide
  Sense strand starting at position 3336 of SEQ ID NO: 1242135
cagggaaggugucuucgaa

SEQ ID NO: 1324813 - RNA, 19 nt, Artificial Sequence
  Description of Artificial Sequence: Synthetic oligonucleotide
  Antisense strand to SEQ ID NO: 1324812
uucgaagacaccuucccug

SEQ ID NO: 1324814 - RNA, 19 nt, Artificial Sequence
  Description of Artificial Sequence: Synthetic oligonucleotide
  Sense strand starting at position 3437 of SEQ ID NO: 1242135
gggugagucccugagguuu

SEQ ID NO: 1324815 - RNA, 19 nt, Artificial Sequence
  Description of Artificial Sequence: Synthetic oligonucleotide
  Antisense strand to SEQ ID NO: 1324814
aaaccucagggacucaccc

SEQ ID NO: 1324816 - RNA, 19 nt, Artificial Sequence
  Description of Artificial Sequence: Synthetic oligonucleotide
  Sense strand starting at position 3508 of SEQ ID NO: 1242135
uucuuugucugccgaacaa

SEQ ID NO: 1324817 - RNA, 19 nt, Artificial Sequence
  Description of Artificial Sequence: Synthetic oligonucleotide
  Antisense strand to SEQ ID NO: 1324816
uuguucggcagacaaagaa

SEQ ID NO: 1324818 - RNA, 19 nt, Artificial Sequence
  Description of Artificial Sequence: Synthetic oligonucleotide
  Sense strand starting at position 3603 of SEQ ID NO: 1242135
gccugugccugggaaggau

SEQ ID NO: 1324819 - RNA, 19 nt, Artificial Sequence
  Description of Artificial Sequence: Synthetic oligonucleotide
  Antisense strand to SEQ ID NO: 1324818
auccuucccaggcacaggc

SEQ ID NO: 1324820 - RNA, 19 nt, Artificial Sequence
  Description of Artificial Sequence: Synthetic oligonucleotide
  Sense strand starting at position 3780 of SEQ ID NO: 1242135
gaggcagaaucuggguaau

SEQ ID NO: 1324821 - RNA, 19 nt, Artificial Sequence
  Description of Artificial Sequence: Synthetic oligonucleotide
  Antisense strand to SEQ ID NO: 1324820
auuacccagauucugccuc

SEQ ID NO: 1324822 - RNA, 19 nt, Artificial Sequence
  Description of Artificial Sequence: Synthetic oligonucleotide
  Sense strand starting at position 3804 of SEQ ID NO: 1242135
ggagaaugggcucgcuauc

SEQ ID NO: 1324823 - RNA, 19 nt, Artificial Sequence
  Description of Artificial Sequence: Synthetic oligonucleotide
  Antisense strand to SEQ ID NO: 1324822
gauagcgagcccauucucc

SEQ ID NO: 1324824 - RNA, 19 nt, Artificial Sequence
  Description of Artificial Sequence: Synthetic oligonucleotide
  Sense strand starting at position 25 of SEQ ID NO: 1242136
ggagcucugagucacaaau

SEQ ID NO: 1324825 - RNA, 19 nt, Artificial Sequence
  Description of Artificial Sequence: Synthetic oligonucleotide
  Antisense strand to SEQ ID NO: 1324824
auuugugacucagagcucc

SEQ ID NO: 1324826 - RNA, 19 nt, Artificial Sequence
  Description of Artificial Sequence: Synthetic oligonucleotide
  Sense strand starting at position 36 of SEQ ID NO: 1242136
ucacaaauccugugucuuc

SEQ ID NO: 1324827 - RNA, 19 nt, Artificial Sequence
  Description of Artificial Sequence: Synthetic oligonucleotide
  Antisense strand to SEQ ID NO: 1324826
gaagacacaggauuuguga

SEQ ID NO: 1324828 - RNA, 19 nt, Artificial Sequence
  Description of Artificial Sequence: Synthetic oligonucleotide
  Sense strand starting at position 202 of SEQ ID NO: 1242136
cggaauuugugucuccauu

SEQ ID NO: 1324829 - RNA, 19 nt, Artificial Sequence
  Description of Artificial Sequence: Synthetic oligonucleotide
  Antisense strand to SEQ ID NO: 1324828
aauggagacacaaauuccg

SEQ ID NO: 1324830 - RNA, 19 nt, Artificial Sequence
  Description of Artificial Sequence: Synthetic oligonucleotide
  Sense strand starting at position 229 of SEQ ID NO: 1242136
aaggaaaccuguuggaaag

SEQ ID NO: 1324831 - RNA, 19 nt, Artificial Sequence
  Description of Artificial Sequence: Synthetic oligonucleotide
  Antisense strand to SEQ ID NO: 1324830
cuuuccaacagguuuccuu

SEQ ID NO: 1324832 - RNA, 19 nt, Artificial Sequence
  Description of Artificial Sequence: Synthetic oligonucleotide
  Sense strand starting at position 251 of SEQ ID NO: 1242136
gcauaaccaguccaagauu

SEQ ID NO: 1324833 - RNA, 19 nt, Artificial Sequence
  Description of Artificial Sequence: Synthetic oligonucleotide
  Antisense strand to SEQ ID NO: 1324832
aaucuuggacugguuaugc

SEQ ID NO: 1324834 - RNA, 19 nt, Artificial Sequence
  Description of Artificial Sequence: Synthetic oligonucleotide
  Sense strand starting at position 451 of SEQ ID NO: 1242136
cuccuagugauaugaggac

SEQ ID NO: 1324835 - RNA, 19 nt, Artificial Sequence
  Description of Artificial Sequence: Synthetic oligonucleotide
  Antisense strand to SEQ ID NO: 1324834
guccucauaucacuaggag

SEQ ID NO: 1324836 - RNA, 19 nt, Artificial Sequence
  Description of Artificial Sequence: Synthetic oligonucleotide
  Sense strand starting at position 535 of SEQ ID NO: 1242136
gcuggcuucuaguugcaua

SEQ ID NO: 1324837 - RNA, 19 nt, Artificial Sequence
  Description of Artificial Sequence: Synthetic oligonucleotide
  Antisense strand to SEQ ID NO: 1324836
uaugcaacuagaagccagc

SEQ ID NO: 1324838 - RNA, 19 nt, Artificial Sequence
  Description of Artificial Sequence: Synthetic oligonucleotide
  Sense strand starting at position 679 of SEQ ID NO: 1242136
cugagaagcuccucuguag

SEQ ID NO: 1324839 - RNA, 19 nt, Artificial Sequence
  Description of Artificial Sequence: Synthetic oligonucleotide
  Antisense strand to SEQ ID NO: 1324838
cuacagaggagcuucucag

SEQ ID NO: 1324840 - RNA, 19 nt, Artificial Sequence
  Description of Artificial Sequence: Synthetic oligonucleotide
  Sense strand starting at position 925 of SEQ ID NO: 1242136
ggccgucuuccgcagaaca

SEQ ID NO: 1324841 - RNA, 19 nt, Artificial Sequence
  Description of Artificial Sequence: Synthetic oligonucleotide
  Antisense strand to SEQ ID NO: 1324840
uguucugcggaagacggcc

SEQ ID NO: 1324842 - RNA, 19 nt, Artificial Sequence
  Description of Artificial Sequence: Synthetic oligonucleotide
  Sense strand starting at position 1210 of SEQ ID NO: 1242136
ccgggugucagguaacguu

SEQ ID NO: 1324843 - RNA, 19 nt, Artificial Sequence
  Description of Artificial Sequence: Synthetic oligonucleotide
  Antisense strand to SEQ ID NO: 1324842
aacguuaccugacacccgg

SEQ ID NO: 1324844 - RNA, 19 nt, Artificial Sequence
  Description of Artificial Sequence: Synthetic oligonucleotide
  Sense strand starting at position 1400 of SEQ ID NO: 1242136
uccaaacuuugagaugcuu

SEQ ID NO: 1324845 - RNA, 19 nt, Artificial Sequence
  Description of Artificial Sequence: Synthetic oligonucleotide
  Antisense strand to SEQ ID NO: 1324844
aagcaucucaaaguuugga

SEQ ID NO: 1324846 - RNA, 19 nt, Artificial Sequence
  Description of Artificial Sequence: Synthetic oligonucleotide
  Sense strand starting at position 2378 of SEQ ID NO: 1242136
gcaggucucccuuggccaa

SEQ ID NO: 1324847 - RNA, 19 nt, Artificial Sequence
  Description of Artificial Sequence: Synthetic oligonucleotide
  Antisense strand to SEQ ID NO: 1324846
uuggccaagggagaccugc

SEQ ID NO: 1324848 - RNA, 19 nt, Artificial Sequence
  Description of Artificial Sequence: Synthetic oligonucleotide
  Sense strand starting at position 2458 of SEQ ID NO: 1242136
gcuugaauuguagaggcua

SEQ ID NO: 1324849 - RNA, 19 nt, Artificial Sequence
  Description of Artificial Sequence: Synthetic oligonucleotide
  Antisense strand to SEQ ID NO: 1324848
uagccucuacaauucaagc

SEQ ID NO: 1324850 - RNA, 19 nt, Artificial Sequence
  Description of Artificial Sequence: Synthetic oligonucleotide
  Sense strand starting at position 2460 of SEQ ID NO: 1242136
uugaauuguagaggcuagu

SEQ ID NO: 1324851 - RNA, 19 nt, Artificial Sequence
  Description of Artificial Sequence: Synthetic oligonucleotide
  Antisense strand to SEQ ID NO: 1324850
acuagccucuacaauucaa

SEQ ID NO: 1324852 - RNA, 19 nt, Artificial Sequence
  Description of Artificial Sequence: Synthetic oligonucleotide
  Sense strand starting at position 2471 of SEQ ID NO: 1242136
aggcuaguguuucuucuga

SEQ ID NO: 1324853 - RNA, 19 nt, Artificial Sequence
  Description of Artificial Sequence: Synthetic oligonucleotide
  Antisense strand to SEQ ID NO: 1324852
ucagaagaaacacuagccu

SEQ ID NO: 1324854 - RNA, 19 nt, Artificial Sequence
  Description of Artificial Sequence: Synthetic oligonucleotide
  Sense strand starting at position 2481 of SEQ ID NO: 1242136
uucuucugacccuggaaua

SEQ ID NO: 1324855 - RNA, 19 nt, Artificial Sequence
  Description of Artificial Sequence: Synthetic oligonucleotide
  Antisense strand to SEQ ID NO: 1324854
uauuccagggucagaagaa

SEQ ID NO: 1324856 - RNA, 19 nt, Artificial Sequence
  Description of Artificial Sequence: Synthetic oligonucleotide
  Sense strand starting at position 2592 of SEQ ID NO: 1242136
acgugaagcucuucuuugu

SEQ ID NO: 1324857 - RNA, 19 nt, Artificial Sequence
  Description of Artificial Sequence: Synthetic oligonucleotide
  Antisense strand to SEQ ID NO: 1324856
acaaagaagagcuucacgu

SEQ ID NO: 1324858 - RNA, 19 nt, Artificial Sequence
  Description of Artificial Sequence: Synthetic oligonucleotide
  Sense strand starting at position 2632 of SEQ ID NO: 1242136
ucuucuaaucacugguagu

SEQ ID NO: 1324859 - RNA, 19 nt, Artificial Sequence
  Description of Artificial Sequence: Synthetic oligonucleotide
  Antisense strand to SEQ ID NO: 1324858
acuaccagugauuagaaga

SEQ ID NO: 1324860 - RNA, 19 nt, Artificial Sequence
  Description of Artificial Sequence: Synthetic oligonucleotide
  Sense strand starting at position 2635 of SEQ ID NO: 1242136
ucuaaucacugguaguuaa

SEQ ID NO: 1324861 - RNA, 19 nt, Artificial Sequence
  Description of Artificial Sequence: Synthetic oligonucleotide
  Antisense strand to SEQ ID NO: 1324860
uuaacuaccagugauuaga

SEQ ID NO: 1324862 - RNA, 19 nt, Artificial Sequence
  Description of Artificial Sequence: Synthetic oligonucleotide
  Sense strand starting at position 2661 of SEQ ID NO: 1242136
gcacauuuaucucaagagc

SEQ ID NO: 1324863 - RNA, 19 nt, Artificial Sequence
  Description of Artificial Sequence: Synthetic oligonucleotide
  Antisense strand to SEQ ID NO: 1324862
gcucuugagauaaaugugc

SEQ ID NO: 1324864 - RNA, 19 nt, Artificial Sequence
  Description of Artificial Sequence: Synthetic oligonucleotide
  Sense strand starting at position 2849 of SEQ ID NO: 1242136
gguugagucccagacacau

SEQ ID NO: 1324865 - RNA, 19 nt, Artificial Sequence
  Description of Artificial Sequence: Synthetic oligonucleotide
  Antisense strand to SEQ ID NO: 1324864
augugucugggacucaacc

SEQ ID NO: 1324866 - RNA, 19 nt, Artificial Sequence
  Description of Artificial Sequence: Synthetic oligonucleotide
  Sense strand starting at position 2909 of SEQ ID NO: 1242136
gugcuuaguagagaagcaa

SEQ ID NO: 1324867 - RNA, 19 nt, Artificial Sequence
  Description of Artificial Sequence: Synthetic oligonucleotide
  Antisense strand to SEQ ID NO: 1324866
uugcuucucuacuaagcac

SEQ ID NO: 1324868 - RNA, 19 nt, Artificial Sequence
  Description of Artificial Sequence: Synthetic oligonucleotide
  Sense strand starting at position 2930 of SEQ ID NO: 1242136
caucaauuggugugaucau

SEQ ID NO: 1324869 - RNA, 19 nt, Artificial Sequence
  Description of Artificial Sequence: Synthetic oligonucleotide
  Antisense strand to SEQ ID NO: 1324868
augaucacaccaauugaug

SEQ ID NO: 1324870 - RNA, 19 nt, Artificial Sequence
  Description of Artificial Sequence: Synthetic oligonucleotide
  Sense strand starting at position 3166 of SEQ ID NO: 1242136
ugaagaugagcuggaguuu

SEQ ID NO: 1324871 - RNA, 19 nt, Artificial Sequence
  Description of Artificial Sequence: Synthetic oligonucleotide
  Antisense strand to SEQ ID NO: 1324870
aaacuccagcucaucuuca

SEQ ID NO: 1324872 - RNA, 19 nt, Artificial Sequence
  Description of Artificial Sequence: Synthetic oligonucleotide
  Sense strand starting at position 3216 of SEQ ID NO: 1242136
gcuugugcucgucucccaa

SEQ ID NO: 1324873 - RNA, 19 nt, Artificial Sequence
  Description of Artificial Sequence: Synthetic oligonucleotide
  Antisense strand to SEQ ID NO: 1324872
uugggagacgagcacaagc

SEQ ID NO: 1324874 - RNA, 19 nt, Artificial Sequence
  Description of Artificial Sequence: Synthetic oligonucleotide
  Sense strand starting at position 3240 of SEQ ID NO: 1242136
cuaucuuucgguuggcuau

SEQ ID NO: 1324875 - RNA, 19 nt, Artificial Sequence
  Description of Artificial Sequence: Synthetic oligonucleotide
  Antisense strand to SEQ ID NO: 1324874
auagccaaccgaaagauag

SEQ ID NO: 1324876 - RNA, 19 nt, Artificial Sequence
  Description of Artificial Sequence: Synthetic oligonucleotide
  Sense strand starting at position 3363 of SEQ ID NO: 1242136
ugcgguucaggcugaaaug

SEQ ID NO: 1324877 - RNA, 19 nt, Artificial Sequence
  Description of Artificial Sequence: Synthetic oligonucleotide
  Antisense strand to SEQ ID NO: 1324876
cauuucagccugaaccgca

SEQ ID NO: 1324878 - RNA, 19 nt, Artificial Sequence
  Description of Artificial Sequence: Synthetic oligonucleotide
  Sense strand starting at position 3364 of SEQ ID NO: 1242136
gcgguucaggcugaaauga

SEQ ID NO: 1324879 - RNA, 19 nt, Artificial Sequence
  Description of Artificial Sequence: Synthetic oligonucleotide
  Antisense strand to SEQ ID NO: 1324878
ucauuucagccugaaccgc

SEQ ID NO: 1324880 - RNA, 19 nt, Artificial Sequence
  Description of Artificial Sequence: Synthetic oligonucleotide
  Sense strand starting at position 3375 of SEQ ID NO: 1242136
ugaaaugaaucaguauguu

SEQ ID NO: 1324881 - RNA, 19 nt, Artificial Sequence
  Description of Artificial Sequence: Synthetic oligonucleotide
  Antisense strand to SEQ ID NO: 1324880
aacauacugauucauuuca

SEQ ID NO: 1324882 - RNA, 19 nt, Artificial Sequence
  Description of Artificial Sequence: Synthetic oligonucleotide
  Sense strand starting at position 3563 of SEQ ID NO: 1242136
ggaacuuuguaggcucaga

SEQ ID NO: 1324883 - RNA, 19 nt, Artificial Sequence
  Description of Artificial Sequence: Synthetic oligonucleotide
  Antisense strand to SEQ ID NO: 1324882
ucugagccuacaaaguucc

SEQ ID NO: 1324884 - RNA, 19 nt, Artificial Sequence
  Description of Artificial Sequence: Synthetic oligonucleotide
  Sense strand starting at position 3608 of SEQ ID NO: 1242136
aggaucuggccuugagaug

SEQ ID NO: 1324885 - RNA, 19 nt, Artificial Sequence
  Description of Artificial Sequence: Synthetic oligonucleotide
  Antisense strand to SEQ ID NO: 1324884
caucucaaggccagauccu

SEQ ID NO: 1324886 - RNA, 19 nt, Artificial Sequence
  Description of Artificial Sequence: Synthetic oligonucleotide
  Sense strand starting at position 3647 of SEQ ID NO: 1242136
aauggaggaucuuguugaa

SEQ ID NO: 1324887 - RNA, 19 nt, Artificial Sequence
  Description of Artificial Sequence: Synthetic oligonucleotide
  Antisense strand to SEQ ID NO: 1324886
uucaacaagauccuccauu

SEQ ID NO: 1324888 - RNA, 19 nt, Artificial Sequence
  Description of Artificial Sequence: Synthetic oligonucleotide
  Sense strand starting at position 3702 of SEQ ID NO: 1242136
ugggacuuaucaguuauac

SEQ ID NO: 1324889 - RNA, 19 nt, Artificial Sequence
  Description of Artificial Sequence: Synthetic oligonucleotide
  Antisense strand to SEQ ID NO: 1324888
guauaacugauaaguccca

SEQ ID NO: 1324890 - RNA, 19 nt, Artificial Sequence
  Description of Artificial Sequence: Synthetic oligonucleotide
  Sense strand starting at position 3704 of SEQ ID NO: 1242136
ggacuuaucaguuauacga

SEQ ID NO: 1324891 - RNA, 19 nt, Artificial Sequence
  Description of Artificial Sequence: Synthetic oligonucleotide
  Antisense strand to SEQ ID NO: 1324890
ucguauaacugauaagucc

SEQ ID NO: 1324892 - RNA, 19 nt, Artificial Sequence
  Description of Artificial Sequence: Synthetic oligonucleotide
  Sense strand starting at position 3706 of SEQ ID NO: 1242136
acuuaucaguuauacgaca

SEQ ID NO: 1324893 - RNA, 19 nt, Artificial Sequence
  Description of Artificial Sequence: Synthetic oligonucleotide
  Antisense strand to SEQ ID NO: 1324892
ugucguauaacugauaagu

SEQ ID NO: 1324894 - RNA, 19 nt, Artificial Sequence
  Description of Artificial Sequence: Synthetic oligonucleotide
  Sense strand starting at position 3744 of SEQ ID NO: 1242136
uugaguuuaagccagcuga

SEQ ID NO: 1324895 - RNA, 19 nt, Artificial Sequence
  Description of Artificial Sequence: Synthetic oligonucleotide
  Antisense strand to SEQ ID NO: 1324894
ucagcuggcuuaaacucaa

SEQ ID NO: 1324896 - RNA, 19 nt, Artificial Sequence
  Description of Artificial Sequence: Synthetic oligonucleotide
  Sense strand starting at position 3748 of SEQ ID NO: 1242136
guuuaagccagcugaguug

SEQ ID NO: 1324897 - RNA, 19 nt, Artificial Sequence
  Description of Artificial Sequence: Synthetic oligonucleotide
  Antisense strand to SEQ ID NO: 1324896
caacucagcuggcuuaaac

SEQ ID NO: 1324898 - RNA, 19 nt, Artificial Sequence
  Description of Artificial Sequence: Synthetic oligonucleotide
  Sense strand starting at position 3754 of SEQ ID NO: 1242136
gccagcugaguugaaugua

SEQ ID NO: 1324899 - RNA, 19 nt, Artificial Sequence
  Description of Artificial Sequence: Synthetic oligonucleotide
  Antisense strand to SEQ ID NO: 1324898
uacauucaacucagcuggc

SEQ ID NO: 1324900 - RNA, 19 nt, Artificial Sequence
  Description of Artificial Sequence: Synthetic oligonucleotide
  Sense strand starting at position 3757 of SEQ ID NO: 1242136
agcugaguugaauguagaa

SEQ ID NO: 1324901 - RNA, 19 nt, Artificial Sequence
  Description of Artificial Sequence: Synthetic oligonucleotide
  Antisense strand to SEQ ID NO: 1324900
uucuacauucaacucagcu

SEQ ID NO: 1324902 - RNA, 19 nt, Artificial Sequence
  Description of Artificial Sequence: Synthetic oligonucleotide
  Sense strand starting at position 3935 of SEQ ID NO: 1242136
ugcagcuugugcucagagu

SEQ ID NO: 1324903 - RNA, 19 nt, Artificial Sequence
  Description of Artificial Sequence: Synthetic oligonucleotide
  Antisense strand to SEQ ID NO: 1324902
acucugagcacaagcugca

SEQ ID NO: 1324904 - RNA, 19 nt, Artificial Sequence
  Description of Artificial Sequence: Synthetic oligonucleotide
  Sense strand starting at position 53 of SEQ ID NO: 1242137
ccggcucucaggugucaga

SEQ ID NO: 1324905 - RNA, 19 nt, Artificial Sequence
  Description of Artificial Sequence: Synthetic oligonucleotide
  Antisense strand to SEQ ID NO: 1324904
ucugacaccugagagccgg

SEQ ID NO: 1324906 - RNA, 19 nt, Artificial Sequence
  Description of Artificial Sequence: Synthetic oligonucleotide
  Sense strand starting at position 541 of SEQ ID NO: 1242137
uugcgaaacguggaucuaa

SEQ ID NO: 1324907 - RNA, 19 nt, Artificial Sequence
  Description of Artificial Sequence: Synthetic oligonucleotide
  Antisense strand to SEQ ID NO: 1324906
uuagauccacguuucgcaa

SEQ ID NO: 1324908 - RNA, 19 nt, Artificial Sequence
  Description of Artificial Sequence: Synthetic oligonucleotide
  Sense strand starting at position 597 of SEQ ID NO: 1242137
gguauuuggccuugguuaa

SEQ ID NO: 1324909 - RNA, 19 nt, Artificial Sequence
  Description of Artificial Sequence: Synthetic oligonucleotide
  Antisense strand to SEQ ID NO: 1324908
uuaaccaaggccaaauacc

SEQ ID NO: 1324910 - RNA, 19 nt, Artificial Sequence
  Description of Artificial Sequence: Synthetic oligonucleotide
  Sense strand starting at position 598 of SEQ ID NO: 1242137
guauuuggccuugguuaaa

SEQ ID NO: 1324911 - RNA, 19 nt, Artificial Sequence
  Description of Artificial Sequence: Synthetic oligonucleotide
  Antisense strand to SEQ ID NO: 1324910
uuuaaccaaggccaaauac

SEQ ID NO: 1324912 - RNA, 19 nt, Artificial Sequence
  Description of Artificial Sequence: Synthetic oligonucleotide
  Sense strand starting at position 666 of SEQ ID NO: 1242137
gggcgucaggaaugacuua

SEQ ID NO: 1324913 - RNA, 19 nt, Artificial Sequence
  Description of Artificial Sequence: Synthetic oligonucleotide
  Antisense strand to SEQ ID NO: 1324912
uaagucauuccugacgccc

SEQ ID NO: 1324914 - RNA, 19 nt, Artificial Sequence
  Description of Artificial Sequence: Synthetic oligonucleotide
  Sense strand starting at position 667 of SEQ ID NO: 1242137
ggcgucaggaaugacuuaa

SEQ ID NO: 1324915 - RNA, 19 nt, Artificial Sequence
  Description of Artificial Sequence: Synthetic oligonucleotide
  Antisense strand to SEQ ID NO: 1324914
uuaagucauuccugacgcc

SEQ ID NO: 1324916 - RNA, 19 nt, Artificial Sequence
  Description of Artificial Sequence: Synthetic oligonucleotide
  Sense strand starting at position 1259 of SEQ ID NO: 1242137
gaaaguugcccaggcgaga

SEQ ID NO: 1324917 - RNA, 19 nt, Artificial Sequence
  Description of Artificial Sequence: Synthetic oligonucleotide
  Antisense strand to SEQ ID NO: 1324916
ucucgccugggcaacuuuc

SEQ ID NO: 1324918 - RNA, 19 nt, Artificial Sequence
  Description of Artificial Sequence: Synthetic oligonucleotide
  Sense strand starting at position 2376 of SEQ ID NO: 1242137
gguuccuuugcguguucau

SEQ ID NO: 1324919 - RNA, 19 nt, Artificial Sequence
  Description of Artificial Sequence: Synthetic oligonucleotide
  Antisense strand to SEQ ID NO: 1324918
augaacacgcaaaggaacc

SEQ ID NO: 1324920 - RNA, 19 nt, Artificial Sequence
  Description of Artificial Sequence: Synthetic oligonucleotide
  Sense strand starting at position 2762 of SEQ ID NO: 1242137
ucccguugcugcgagaaua

SEQ ID NO: 1324921 - RNA, 19 nt, Artificial Sequence
  Description of Artificial Sequence: Synthetic oligonucleotide
  Antisense strand to SEQ ID NO: 1324920
uauucucgcagcaacggga

SEQ ID NO: 1324922 - RNA, 19 nt, Artificial Sequence
  Description of Artificial Sequence: Synthetic oligonucleotide
  Sense strand starting at position 2838 of SEQ ID NO: 1242137
cuuuacucccuccguauau

SEQ ID NO: 1324923 - RNA, 19 nt, Artificial Sequence
  Description of Artificial Sequence: Synthetic oligonucleotide
  Antisense strand to SEQ ID NO: 1324922
auauacggagggaguaaag

SEQ ID NO: 1324924 - RNA, 19 nt, Artificial Sequence
  Description of Artificial Sequence: Synthetic oligonucleotide
  Sense strand starting at position 2839 of SEQ ID NO: 1242137
uuuacucccuccguauauu

SEQ ID NO: 1324925 - RNA, 19 nt, Artificial Sequence
  Description of Artificial Sequence: Synthetic oligonucleotide
  Antisense strand to SEQ ID NO: 1324924
aauauacggagggaguaaa

SEQ ID NO: 1324926 - RNA, 19 nt, Artificial Sequence
  Description of Artificial Sequence: Synthetic oligonucleotide
  Sense strand starting at position 2847 of SEQ ID NO: 1242137
cuccguauauuucugcauu

SEQ ID NO: 1324927 - RNA, 19 nt, Artificial Sequence
  Description of Artificial Sequence: Synthetic oligonucleotide
  Antisense strand to SEQ ID NO: 1324926
aaugcagaaauauacggag

SEQ ID NO: 1324928 - RNA, 19 nt, Artificial Sequence
  Description of Artificial Sequence: Synthetic oligonucleotide
  Sense strand starting at position 2848 of SEQ ID NO: 1242137
uccguauauuucugcauuu

SEQ ID NO: 1324929 - RNA, 19 nt, Artificial Sequence
  Description of Artificial Sequence: Synthetic oligonucleotide
  Antisense strand to SEQ ID NO: 1324928
aaaugcagaaauauacgga

SEQ ID NO: 1324930 - RNA, 19 nt, Artificial Sequence
  Description of Artificial Sequence: Synthetic oligonucleotide
  Sense strand starting at position 2918 of SEQ ID NO: 1242137
ggaagacagcacugauguu

SEQ ID NO: 1324931 - RNA, 19 nt, Artificial Sequence
  Description of Artificial Sequence: Synthetic oligonucleotide
  Antisense strand to SEQ ID NO: 1324930
aacaucagugcugucuucc

SEQ ID NO: 1324932 - RNA, 19 nt, Artificial Sequence
  Description of Artificial Sequence: Synthetic oligonucleotide
  Sense strand starting at position 2925 of SEQ ID NO: 1242137
agcacugauguuuaagagu

SEQ ID NO: 1324933 - RNA, 19 nt, Artificial Sequence
  Description of Artificial Sequence: Synthetic oligonucleotide
  Antisense strand to SEQ ID NO: 1324932
acucuuaaacaucagugcu

SEQ ID NO: 1324934 - RNA, 19 nt, Artificial Sequence
  Description of Artificial Sequence: Synthetic oligonucleotide
  Sense strand starting at position 2952 of SEQ ID NO: 1242137
cugcaaagugcuuaucagu

SEQ ID NO: 1324935 - RNA, 19 nt, Artificial Sequence
  Description of Artificial Sequence: Synthetic oligonucleotide
  Antisense strand to SEQ ID NO: 1324934
acugauaagcacuuugcag

SEQ ID NO: 1324936 - RNA, 19 nt, Artificial Sequence
  Description of Artificial Sequence: Synthetic oligonucleotide
  Sense strand starting at position 2957 of SEQ ID NO: 1242137
aagugcuuaucagugucau

SEQ ID NO: 1324937 - RNA, 19 nt, Artificial Sequence
  Description of Artificial Sequence: Synthetic oligonucleotide
  Antisense strand to SEQ ID NO: 1324936
augacacugauaagcacuu

SEQ ID NO: 1324938 - RNA, 19 nt, Artificial Sequence
  Description of Artificial Sequence: Synthetic oligonucleotide
  Sense strand starting at position 2958 of SEQ ID NO: 1242137
agugcuuaucagugucauu

SEQ ID NO: 1324939 - RNA, 19 nt, Artificial Sequence
  Description of Artificial Sequence: Synthetic oligonucleotide
  Antisense strand to SEQ ID NO: 1324938
aaugacacugauaagcacu

SEQ ID NO: 1324940 - RNA, 19 nt, Artificial Sequence
  Description of Artificial Sequence: Synthetic oligonucleotide
  Sense strand starting at position 2961 of SEQ ID NO: 1242137
gcuuaucagugucauucca

SEQ ID NO: 1324941 - RNA, 19 nt, Artificial Sequence
  Description of Artificial Sequence: Synthetic oligonucleotide
  Antisense strand to SEQ ID NO: 1324940
uggaaugacacugauaagc

SEQ ID NO: 1324942 - RNA, 19 nt, Artificial Sequence
  Description of Artificial Sequence: Synthetic oligonucleotide
  Sense strand starting at position 2968 of SEQ ID NO: 1242137
agugucauuccauguggau

SEQ ID NO: 1324943 - RNA, 19 nt, Artificial Sequence
  Description of Artificial Sequence: Synthetic oligonucleotide
  Antisense strand to SEQ ID NO: 1324942
auccacauggaaugacacu

SEQ ID NO: 1324944 - RNA, 19 nt, Artificial Sequence
  Description of Artificial Sequence: Synthetic oligonucleotide
  Sense strand starting at position 3048 of SEQ ID NO: 1242137
gccacuguuuccuaucuua

SEQ ID NO: 1324945 - RNA, 19 nt, Artificial Sequence
  Description of Artificial Sequence: Synthetic oligonucleotide
  Antisense strand to SEQ ID NO: 1324944
uaagauaggaaacaguggc

SEQ ID NO: 1324946 - RNA, 19 nt, Artificial Sequence
  Description of Artificial Sequence: Synthetic oligonucleotide
  Sense strand starting at position 3266 of SEQ ID NO: 1242137
acgggaaucuucggcaaag

SEQ ID NO: 1324947 - RNA, 19 nt, Artificial Sequence
  Description of Artificial Sequence: Synthetic oligonucleotide
  Antisense strand to SEQ ID NO: 1324946
cuuugccgaagauucccgu

SEQ ID NO: 1324948 - RNA, 19 nt, Artificial Sequence
  Description of Artificial Sequence: Synthetic oligonucleotide
  Sense strand starting at position 3268 of SEQ ID NO: 1242137
gggaaucuucggcaaagca

SEQ ID NO: 1324949 - RNA, 19 nt, Artificial Sequence
  Description of Artificial Sequence: Synthetic oligonucleotide
  Antisense strand to SEQ ID NO: 1324948
ugcuuugccgaagauuccc

SEQ ID NO: 1324950 - RNA, 19 nt, Artificial Sequence
  Description of Artificial Sequence: Synthetic oligonucleotide
  Sense strand starting at position 3694 of SEQ ID NO: 1242137
ugcagagagccaugacauu

SEQ ID NO: 1324951 - RNA, 19 nt, Artificial Sequence
  Description of Artificial Sequence: Synthetic oligonucleotide
  Antisense strand to SEQ ID NO: 1324950
aaugucauggcucucugca

SEQ ID NO: 1324952 - RNA, 19 nt, Artificial Sequence
  Description of Artificial Sequence: Synthetic oligonucleotide
  Sense strand starting at position 3731 of SEQ ID NO: 1242137
ggugacaagucauacgcua

SEQ ID NO: 1324953 - RNA, 19 nt, Artificial Sequence
  Description of Artificial Sequence: Synthetic oligonucleotide
  Antisense strand to SEQ ID NO: 1324952
uagcguaugacuugucacc

SEQ ID NO: 1324954 - RNA, 19 nt, Artificial Sequence
  Description of Artificial Sequence: Synthetic oligonucleotide
  Sense strand starting at position 3767 of SEQ ID NO: 1242137
aggugaagauccuggagaa

SEQ ID NO: 1324955 - RNA, 19 nt, Artificial Sequence
  Description of Artificial Sequence: Synthetic oligonucleotide
  Antisense strand to SEQ ID NO: 1324954
uucuccaggaucuucaccu

SEQ ID NO: 1324956 - RNA, 19 nt, Artificial Sequence
  Description of Artificial Sequence: Synthetic oligonucleotide
  Sense strand starting at position 3882 of SEQ ID NO: 1242137
gaguuugaauacuugacua

SEQ ID NO: 1324957 - RNA, 19 nt, Artificial Sequence
  Description of Artificial Sequence: Synthetic oligonucleotide
  Antisense strand to SEQ ID NO: 1324956
uagucaaguauucaaacuc

SEQ ID NO: 1324958 - RNA, 19 nt, Artificial Sequence
  Description of Artificial Sequence: Synthetic oligonucleotide
  Sense strand starting at position 3884 of SEQ ID NO: 1242137
guuugaauacuugacuacu

SEQ ID NO: 1324959 - RNA, 19 nt, Artificial Sequence
  Description of Artificial Sequence: Synthetic oligonucleotide
  Antisense strand to SEQ ID NO: 1324958
aguagucaaguauucaaac

SEQ ID NO: 1324960 - RNA, 19 nt, Artificial Sequence
  Description of Artificial Sequence: Synthetic oligonucleotide
  Sense strand starting at position 3906 of SEQ ID NO: 1242137
cggagaaccugggaaauca

SEQ ID NO: 1324961 - RNA, 19 nt, Artificial Sequence
  Description of Artificial Sequence: Synthetic oligonucleotide
  Antisense strand to SEQ ID NO: 1324960
ugauuucccagguucuccg

SEQ ID NO: 1324962 - RNA, 19 nt, Artificial Sequence
  Description of Artificial Sequence: Synthetic oligonucleotide
  Sense strand starting at position 3955 of SEQ ID NO: 1242137
gaggaaucuugaguaugug

SEQ ID NO: 1324963 - RNA, 19 nt, Artificial Sequence
  Description of Artificial Sequence: Synthetic oligonucleotide
  Antisense strand to SEQ ID NO: 1324962
cacauacucaagauuccuc

SEQ ID NO: 1324964 - RNA, 19 nt, Artificial Sequence
  Description of Artificial Sequence: Synthetic oligonucleotide
  Sense strand starting at position 3956 of SEQ ID NO: 1242137
aggaaucuugaguaugugu

SEQ ID NO: 1324965 - RNA, 19 nt, Artificial Sequence
  Description of Artificial Sequence: Synthetic oligonucleotide
  Antisense strand to SEQ ID NO: 1324964
acacauacucaagauuccu

SEQ ID NO: 1324966 - RNA, 19 nt, Artificial Sequence
  Description of Artificial Sequence: Synthetic oligonucleotide
  Sense strand starting at position 3958 of SEQ ID NO: 1242137
gaaucuugaguaugugugu

SEQ ID NO: 1324967 - RNA, 19 nt, Artificial Sequence
  Description of Artificial Sequence: Synthetic oligonucleotide
  Antisense strand to SEQ ID NO: 1324966
acacacauacucaagauuc

SEQ ID NO: 1324968 - RNA, 19 nt, Artificial Sequence
  Description of Artificial Sequence: Synthetic oligonucleotide
  Sense strand starting at position 27 of SEQ ID NO: 1242138
ccuagacagcuugauggua

SEQ ID NO: 1324969 - RNA, 19 nt, Artificial Sequence
  Description of Artificial Sequence: Synthetic oligonucleotide
  Antisense strand to SEQ ID NO: 1324968
uaccaucaagcugucuagg

SEQ ID NO: 1324970 - RNA, 19 nt, Artificial Sequence
  Description of Artificial Sequence: Synthetic oligonucleotide
  Sense strand starting at position 83 of SEQ ID NO: 1242138
auugguuuccacuguacuu

SEQ ID NO: 1324971 - RNA, 19 nt, Artificial Sequence
  Description of Artificial Sequence: Synthetic oligonucleotide
  Antisense strand to SEQ ID NO: 1324970
aaguacaguggaaaccaau

SEQ ID NO: 1324972 - RNA, 19 nt, Artificial Sequence
  Description of Artificial Sequence: Synthetic oligonucleotide
  Sense strand starting at position 231 of SEQ ID NO: 1242138
gccagaucucaauaguugu

SEQ ID NO: 1324973 - RNA, 19 nt, Artificial Sequence
  Description of Artificial Sequence: Synthetic oligonucleotide
  Antisense strand to SEQ ID NO: 1324972
acaacuauugagaucuggc

SEQ ID NO: 1324974 - RNA, 19 nt, Artificial Sequence
  Description of Artificial Sequence: Synthetic oligonucleotide
  Sense strand starting at position 708 of SEQ ID NO: 1242138
gagcgcucgcuggcuauaa

SEQ ID NO: 1324975 - RNA, 19 nt, Artificial Sequence
  Description of Artificial Sequence: Synthetic oligonucleotide
  Antisense strand to SEQ ID NO: 1324974
uuauagccagcgagcgcuc

SEQ ID NO: 1324976 - RNA, 19 nt, Artificial Sequence
  Description of Artificial Sequence: Synthetic oligonucleotide
  Sense strand starting at position 712 of SEQ ID NO: 1242138
gcucgcuggcuauaaacau

SEQ ID NO: 1324977 - RNA, 19 nt, Artificial Sequence
  Description of Artificial Sequence: Synthetic oligonucleotide
  Antisense strand to SEQ ID NO: 1324976
auguuuauagccagcgagc

SEQ ID NO: 1324978 - RNA, 19 nt, Artificial Sequence
  Description of Artificial Sequence: Synthetic oligonucleotide
  Sense strand starting at position 785 of SEQ ID NO: 1242138
agugaaaccucaggaagga

SEQ ID NO: 1324979 - RNA, 19 nt, Artificial Sequence
  Description of Artificial Sequence: Synthetic oligonucleotide
  Antisense strand to SEQ ID NO: 1324978
uccuuccugagguuucacu

SEQ ID NO: 1324980 - RNA, 19 nt, Artificial Sequence
  Description of Artificial Sequence: Synthetic oligonucleotide
  Sense strand starting at position 1121 of SEQ ID NO: 1242138
gugugagaagcauaccuca

SEQ ID NO: 1324981 - RNA, 19 nt, Artificial Sequence
  Description of Artificial Sequence: Synthetic oligonucleotide
  Antisense strand to SEQ ID NO: 1324980
ugagguaugcuucucacac

SEQ ID NO: 1324982 - RNA, 19 nt, Artificial Sequence
  Description of Artificial Sequence: Synthetic oligonucleotide
  Sense strand starting at position 1141 of SEQ ID NO: 1242138
ccuguucagguguaaguga

SEQ ID NO: 1324983 - RNA, 19 nt, Artificial Sequence
  Description of Artificial Sequence: Synthetic oligonucleotide
  Antisense strand to SEQ ID NO: 1324982
ucacuuacaccugaacagg

SEQ ID NO: 1324984 - RNA, 19 nt, Artificial Sequence
  Description of Artificial Sequence: Synthetic oligonucleotide
  Sense strand starting at position 1996 of SEQ ID NO: 1242138
cggaaaucucucuguggga

SEQ ID NO: 1324985 - RNA, 19 nt, Artificial Sequence
  Description of Artificial Sequence: Synthetic oligonucleotide
  Antisense strand to SEQ ID NO: 1324984
ucccacagagagauuuccg

SEQ ID NO: 1324986 - RNA, 19 nt, Artificial Sequence
  Description of Artificial Sequence: Synthetic oligonucleotide
  Sense strand starting at position 1997 of SEQ ID NO: 1242138
ggaaaucucucugugggaa

SEQ ID NO: 1324987 - RNA, 19 nt, Artificial Sequence
  Description of Artificial Sequence: Synthetic oligonucleotide
  Antisense strand to SEQ ID NO: 1324986
uucccacagagagauuucc

SEQ ID NO: 1324988 - RNA, 19 nt, Artificial Sequence
  Description of Artificial Sequence: Synthetic oligonucleotide
  Sense strand starting at position 2057 of SEQ ID NO: 1242138
ccaguaaauuggucaagca

SEQ ID NO: 1324989 - RNA, 19 nt, Artificial Sequence
  Description of Artificial Sequence: Synthetic oligonucleotide
  Antisense strand to SEQ ID NO: 1324988
ugcuugaccaauuuacugg

SEQ ID NO: 1324990 - RNA, 19 nt, Artificial Sequence
  Description of Artificial Sequence: Synthetic oligonucleotide
  Sense strand starting at position 2058 of SEQ ID NO: 1242138
caguaaauuggucaagcau

SEQ ID NO: 1324991 - RNA, 19 nt, Artificial Sequence
  Description of Artificial Sequence: Synthetic oligonucleotide
  Antisense strand to SEQ ID NO: 1324990
augcuugaccaauuuacug

SEQ ID NO: 1324992 - RNA, 19 nt, Artificial Sequence
  Description of Artificial Sequence: Synthetic oligonucleotide
  Sense strand starting at position 2067 of SEQ ID NO: 1242138
ggucaagcaucucuggaau

SEQ ID NO: 1324993 - RNA, 19 nt, Artificial Sequence
  Description of Artificial Sequence: Synthetic oligonucleotide
  Antisense strand to SEQ ID NO: 1324992
auuccagagaugcuugacc

SEQ ID NO: 1324994 - RNA, 19 nt, Artificial Sequence
  Description of Artificial Sequence: Synthetic oligonucleotide
  Sense strand starting at position 2080 of SEQ ID NO: 1242138
uggaauaauuaagaucgga

SEQ ID NO: 1324995 - RNA, 19 nt, Artificial Sequence
  Description of Artificial Sequence: Synthetic oligonucleotide
  Antisense strand to SEQ ID NO: 1324994
uccgaucuuaauuauucca

SEQ ID NO: 1324996 - RNA, 19 nt, Artificial Sequence
  Description of Artificial Sequence: Synthetic oligonucleotide
  Sense strand starting at position 2119 of SEQ ID NO: 1242138
gugcacacugaucauaaca

SEQ ID NO: 1324997 - RNA, 19 nt, Artificial Sequence
  Description of Artificial Sequence: Synthetic oligonucleotide
  Antisense strand to SEQ ID NO: 1324996
uguuaugaucagugugcac

SEQ ID NO: 1324998 - RNA, 19 nt, Artificial Sequence
  Description of Artificial Sequence: Synthetic oligonucleotide
  Sense strand starting at position 2121 of SEQ ID NO: 1242138
gcacacugaucauaacaga

SEQ ID NO: 1324999 - RNA, 19 nt, Artificial Sequence
  Description of Artificial Sequence: Synthetic oligonucleotide
  Antisense strand to SEQ ID NO: 1324998
ucuguuaugaucagugugc

SEQ ID NO: 1325000 - RNA, 19 nt, Artificial Sequence
  Description of Artificial Sequence: Synthetic oligonucleotide
  Sense strand starting at position 2139 of SEQ ID NO: 1242138
aguacaucuugcuuuauua

SEQ ID NO: 1325001 - RNA, 19 nt, Artificial Sequence
  Description of Artificial Sequence: Synthetic oligonucleotide
  Antisense strand to SEQ ID NO: 1325000
uaauaaagcaagauguacu

SEQ ID NO: 1325002 - RNA, 19 nt, Artificial Sequence
  Description of Artificial Sequence: Synthetic oligonucleotide
  Sense strand starting at position 2158 of SEQ ID NO: 1242138
uauaacaagguuuguagau

SEQ ID NO: 1325003 - RNA, 19 nt, Artificial Sequence
  Description of Artificial Sequence: Synthetic oligonucleotide
  Antisense strand to SEQ ID NO: 1325002
aucuacaaaccuuguuaua

SEQ ID NO: 1325004 - RNA, 19 nt, Artificial Sequence
  Description of Artificial Sequence: Synthetic oligonucleotide
  Sense strand starting at position 2159 of SEQ ID NO: 1242138
auaacaagguuuguagauu

SEQ ID NO: 1325005 - RNA, 19 nt, Artificial Sequence
  Description of Artificial Sequence: Synthetic oligonucleotide
  Antisense strand to SEQ ID NO: 1325004
aaucuacaaaccuuguuau

SEQ ID NO: 1325006 - RNA, 19 nt, Artificial Sequence
  Description of Artificial Sequence: Synthetic oligonucleotide
  Sense strand starting at position 2160 of SEQ ID NO: 1242138
uaacaagguuuguagauuu

SEQ ID NO: 1325007 - RNA, 19 nt, Artificial Sequence
  Description of Artificial Sequence: Synthetic oligonucleotide
  Antisense strand to SEQ ID NO: 1325006
aaaucuacaaaccuuguua

SEQ ID NO: 1325008 - RNA, 19 nt, Artificial Sequence
  Description of Artificial Sequence: Synthetic oligonucleotide
  Sense strand starting at position 2219 of SEQ ID NO: 1242138
ugccuucuagauuggagau

SEQ ID NO: 1325009 - RNA, 19 nt, Artificial Sequence
  Description of Artificial Sequence: Synthetic oligonucleotide
  Antisense strand to SEQ ID NO: 1325008
aucuccaaucuagaaggca

SEQ ID NO: 1325010 - RNA, 19 nt, Artificial Sequence
  Description of Artificial Sequence: Synthetic oligonucleotide
  Sense strand starting at position 2232 of SEQ ID NO: 1242138
ggagaugcgccucgauuua

SEQ ID NO: 1325011 - RNA, 19 nt, Artificial Sequence
  Description of Artificial Sequence: Synthetic oligonucleotide
  Antisense strand to SEQ ID NO: 1325010
uaaaucgaggcgcaucucc

SEQ ID NO: 1325012 - RNA, 19 nt, Artificial Sequence
  Description of Artificial Sequence: Synthetic oligonucleotide
  Sense strand starting at position 2256 of SEQ ID NO: 1242138
ggguuacuucucgauaaac

SEQ ID NO: 1325013 - RNA, 19 nt, Artificial Sequence
  Description of Artificial Sequence: Synthetic oligonucleotide
  Antisense strand to SEQ ID NO: 1325012
guuuaucgagaaguaaccc

SEQ ID NO: 1325014 - RNA, 19 nt, Artificial Sequence
  Description of Artificial Sequence: Synthetic oligonucleotide
  Sense strand starting at position 2699 of SEQ ID NO: 1242138
cuuauaacggcacaaucau

SEQ ID NO: 1325015 - RNA, 19 nt, Artificial Sequence
  Description of Artificial Sequence: Synthetic oligonucleotide
  Antisense strand to SEQ ID NO: 1325014
augauugugccguuauaag

SEQ ID NO: 1325016 - RNA, 19 nt, Artificial Sequence
  Description of Artificial Sequence: Synthetic oligonucleotide
  Sense strand starting at position 2734 of SEQ ID NO: 1242138
uuuauaagacaguguuaga

SEQ ID NO: 1325017 - RNA, 19 nt, Artificial Sequence
  Description of Artificial Sequence: Synthetic oligonucleotide
  Antisense strand to SEQ ID NO: 1325016
ucuaacacugucuuauaaa

SEQ ID NO: 1325018 - RNA, 19 nt, Artificial Sequence
  Description of Artificial Sequence: Synthetic oligonucleotide
  Sense strand starting at position 2737 of SEQ ID NO: 1242138
auaagacaguguuagauau

SEQ ID NO: 1325019 - RNA, 19 nt, Artificial Sequence
  Description of Artificial Sequence: Synthetic oligonucleotide
  Antisense strand to SEQ ID NO: 1325018
auaucuaacacugucuuau

SEQ ID NO: 1325020 - RNA, 19 nt, Artificial Sequence
  Description of Artificial Sequence: Synthetic oligonucleotide
  Sense strand starting at position 2739 of SEQ ID NO: 1242138
aagacaguguuagauauca

SEQ ID NO: 1325021 - RNA, 19 nt, Artificial Sequence
  Description of Artificial Sequence: Synthetic oligonucleotide
  Antisense strand to SEQ ID NO: 1325020
ugauaucuaacacugucuu

SEQ ID NO: 1325022 - RNA, 19 nt, Artificial Sequence
  Description of Artificial Sequence: Synthetic oligonucleotide
  Sense strand starting at position 3104 of SEQ ID NO: 1242138
guauguauuuaauacacca

SEQ ID NO: 1325023 - RNA, 19 nt, Artificial Sequence
  Description of Artificial Sequence: Synthetic oligonucleotide
  Antisense strand to SEQ ID NO: 1325022
ugguguauuaaauacauac

SEQ ID NO: 1325024 - RNA, 19 nt, Artificial Sequence
  Description of Artificial Sequence: Synthetic oligonucleotide
  Sense strand starting at position 3427 of SEQ ID NO: 1242138
ccaagucaaugcucuugaa

SEQ ID NO: 1325025 - RNA, 19 nt, Artificial Sequence
  Description of Artificial Sequence: Synthetic oligonucleotide
  Antisense strand to SEQ ID NO: 1325024
uucaagagcauugacuugg

SEQ ID NO: 1325026 - RNA, 19 nt, Artificial Sequence
  Description of Artificial Sequence: Synthetic oligonucleotide
  Sense strand starting at position 3431 of SEQ ID NO: 1242138
gucaaugcucuugaacaac

SEQ ID NO: 1325027 - RNA, 19 nt, Artificial Sequence
  Description of Artificial Sequence: Synthetic oligonucleotide
  Antisense strand to SEQ ID NO: 1325026
guuguucaagagcauugac

SEQ ID NO: 1325028 - RNA, 19 nt, Artificial Sequence
  Description of Artificial Sequence: Synthetic oligonucleotide
  Sense strand starting at position 3466 of SEQ ID NO: 1242138
cccugaguccaggagucua

SEQ ID NO: 1325029 - RNA, 19 nt, Artificial Sequence
  Description of Artificial Sequence: Synthetic oligonucleotide
  Antisense strand to SEQ ID NO: 1325028
uagacuccuggacucaggg

SEQ ID NO: 1325030 - RNA, 19 nt, Artificial Sequence
  Description of Artificial Sequence: Synthetic oligonucleotide
  Sense strand starting at position 3471 of SEQ ID NO: 1242138
aguccaggagucuaugcaa

SEQ ID NO: 1325031 - RNA, 19 nt, Artificial Sequence
  Description of Artificial Sequence: Synthetic oligonucleotide
  Antisense strand to SEQ ID NO: 1325030
uugcauagacuccuggacu

SEQ ID NO: 1325032 - RNA, 19 nt, Artificial Sequence
  Description of Artificial Sequence: Synthetic oligonucleotide
  Sense strand starting at position 3505 of SEQ ID NO: 1242138
gugggacuuucggcaaguu

SEQ ID NO: 1325033 - RNA, 19 nt, Artificial Sequence
  Description of Artificial Sequence: Synthetic oligonucleotide
  Antisense strand to SEQ ID NO: 1325032
aacuugccgaaagucccac

SEQ ID NO: 1325034 - RNA, 19 nt, Artificial Sequence
  Description of Artificial Sequence: Synthetic oligonucleotide
  Sense strand starting at position 3506 of SEQ ID NO: 1242138
ugggacuuucggcaaguuu

SEQ ID NO: 1325035 - RNA, 19 nt, Artificial Sequence
  Description of Artificial Sequence: Synthetic oligonucleotide
  Antisense strand to SEQ ID NO: 1325034
aaacuugccgaaaguccca

SEQ ID NO: 1325036 - RNA, 19 nt, Artificial Sequence
  Description of Artificial Sequence: Synthetic oligonucleotide
  Sense strand starting at position 3513 of SEQ ID NO: 1242138
uucggcaaguuucuuagau

SEQ ID NO: 1325037 - RNA, 19 nt, Artificial Sequence
  Description of Artificial Sequence: Synthetic oligonucleotide
  Antisense strand to SEQ ID NO: 1325036
aucuaagaaacuugccgaa

SEQ ID NO: 1325038 - RNA, 19 nt, Artificial Sequence
  Description of Artificial Sequence: Synthetic oligonucleotide
  Sense strand starting at position 3514 of SEQ ID NO: 1242138
ucggcaaguuucuuagauc

SEQ ID NO: 1325039 - RNA, 19 nt, Artificial Sequence
  Description of Artificial Sequence: Synthetic oligonucleotide
  Antisense strand to SEQ ID NO: 1325038
gaucuaagaaacuugccga

SEQ ID NO: 1325040 - RNA, 19 nt, Artificial Sequence
  Description of Artificial Sequence: Synthetic oligonucleotide
  Sense strand starting at position 3585 of SEQ ID NO: 1242138
uaaggcuacuaugaggaau

SEQ ID NO: 1325041 - RNA, 19 nt, Artificial Sequence
  Description of Artificial Sequence: Synthetic oligonucleotide
  Antisense strand to SEQ ID NO: 1325040
auuccucauaguagccuua

SEQ ID NO: 1325042 - RNA, 19 nt, Artificial Sequence
  Description of Artificial Sequence: Synthetic oligonucleotide
  Sense strand starting at position 3587 of SEQ ID NO: 1242138
aggcuacuaugaggaauaa

SEQ ID NO: 1325043 - RNA, 19 nt, Artificial Sequence
  Description of Artificial Sequence: Synthetic oligonucleotide
  Antisense strand to SEQ ID NO: 1325042
uuauuccucauaguagccu

SEQ ID NO: 1325044 - RNA, 19 nt, Artificial Sequence
  Description of Artificial Sequence: Synthetic oligonucleotide
  Sense strand starting at position 3640 of SEQ ID NO: 1242138
uuggcacauugcucucauu

SEQ ID NO: 1325045 - RNA, 19 nt, Artificial Sequence
  Description of Artificial Sequence: Synthetic oligonucleotide
  Antisense strand to SEQ ID NO: 1325044
aaugagagcaaugugccaa

SEQ ID NO: 1325046 - RNA, 19 nt, Artificial Sequence
  Description of Artificial Sequence: Synthetic oligonucleotide
  Sense strand starting at position 3735 of SEQ ID NO: 1242138
aaguacuacugagaaguua

SEQ ID NO: 1325047 - RNA, 19 nt, Artificial Sequence
  Description of Artificial Sequence: Synthetic oligonucleotide
  Antisense strand to SEQ ID NO: 1325046
uaacuucucaguaguacuu

SEQ ID NO: 1325048 - RNA, 19 nt, Artificial Sequence
  Description of Artificial Sequence: Synthetic oligonucleotide
  Sense strand starting at position 104 of SEQ ID NO: 1242139
gcccgccacugucaucaaa

SEQ ID NO: 1325049 - RNA, 19 nt, Artificial Sequence
  Description of Artificial Sequence: Synthetic oligonucleotide
  Antisense strand to SEQ ID NO: 1325048
uuugaugacaguggcgggc

SEQ ID NO: 1325050 - RNA, 19 nt, Artificial Sequence
  Description of Artificial Sequence: Synthetic oligonucleotide
  Sense strand starting at position 341 of SEQ ID NO: 1242139
uuuggacuucugcaauuag

SEQ ID NO: 1325051 - RNA, 19 nt, Artificial Sequence
  Description of Artificial Sequence: Synthetic oligonucleotide
  Antisense strand to SEQ ID NO: 1325050
cuaauugcagaaguccaaa

SEQ ID NO: 1325052 - RNA, 19 nt, Artificial Sequence
  Description of Artificial Sequence: Synthetic oligonucleotide
  Sense strand starting at position 509 of SEQ ID NO: 1242139
uuauguguuccauggcguu

SEQ ID NO: 1325053 - RNA, 19 nt, Artificial Sequence
  Description of Artificial Sequence: Synthetic oligonucleotide
  Antisense strand to SEQ ID NO: 1325052
aacgccauggaacacauaa

SEQ ID NO: 1325054 - RNA, 19 nt, Artificial Sequence
  Description of Artificial Sequence: Synthetic oligonucleotide
  Sense strand starting at position 552 of SEQ ID NO: 1242139
gaaggauuguuugaggaau

SEQ ID NO: 1325055 - RNA, 19 nt, Artificial Sequence
  Description of Artificial Sequence: Synthetic oligonucleotide
  Antisense strand to SEQ ID NO: 1325054
auuccucaaacaauccuuc

SEQ ID NO: 1325056 - RNA, 19 nt, Artificial Sequence
  Description of Artificial Sequence: Synthetic oligonucleotide
  Sense strand starting at position 554 of SEQ ID NO: 1242139
aggauuguuugaggaaucu

SEQ ID NO: 1325057 - RNA, 19 nt, Artificial Sequence
  Description of Artificial Sequence: Synthetic oligonucleotide
  Antisense strand to SEQ ID NO: 1325056
agauuccucaaacaauccu

SEQ ID NO: 1325058 - RNA, 19 nt, Artificial Sequence
  Description of Artificial Sequence: Synthetic oligonucleotide
  Sense strand starting at position 937 of SEQ ID NO: 1242139
gugguugauuguccacguu

SEQ ID NO: 1325059 - RNA, 19 nt, Artificial Sequence
  Description of Artificial Sequence: Synthetic oligonucleotide
  Antisense strand to SEQ ID NO: 1325058
aacguggacaaucaaccac

SEQ ID NO: 1325060 - RNA, 19 nt, Artificial Sequence
  Description of Artificial Sequence: Synthetic oligonucleotide
  Sense strand starting at position 952 of SEQ ID NO: 1242139
cguucucacuuagaaugua

SEQ ID NO: 1325061 - RNA, 19 nt, Artificial Sequence
  Description of Artificial Sequence: Synthetic oligonucleotide
  Antisense strand to SEQ ID NO: 1325060
uacauucuaagugagaacg

SEQ ID NO: 1325062 - RNA, 19 nt, Artificial Sequence
  Description of Artificial Sequence: Synthetic oligonucleotide
  Sense strand starting at position 1084 of SEQ ID NO: 1242139
caaaguauucguugcagca

SEQ ID NO: 1325063 - RNA, 19 nt, Artificial Sequence
  Description of Artificial Sequence: Synthetic oligonucleotide
  Antisense strand to SEQ ID NO: 1325062
ugcugcaacgaauacuuug

SEQ ID NO: 1325064 - RNA, 19 nt, Artificial Sequence
  Description of Artificial Sequence: Synthetic oligonucleotide
  Sense strand starting at position 1086 of SEQ ID NO: 1242139
aaguauucguugcagcauu

SEQ ID NO: 1325065 - RNA, 19 nt, Artificial Sequence
  Description of Artificial Sequence: Synthetic oligonucleotide
  Antisense strand to SEQ ID NO: 1325064
aaugcugcaacgaauacuu

SEQ ID NO: 1325066 - RNA, 19 nt, Artificial Sequence
  Description of Artificial Sequence: Synthetic oligonucleotide
  Sense strand starting at position 1088 of SEQ ID NO: 1242139
guauucguugcagcauuau

SEQ ID NO: 1325067 - RNA, 19 nt, Artificial Sequence
  Description of Artificial Sequence: Synthetic oligonucleotide
  Antisense strand to SEQ ID NO: 1325066
auaaugcugcaacgaauac

SEQ ID NO: 1325068 - RNA, 19 nt, Artificial Sequence
  Description of Artificial Sequence: Synthetic oligonucleotide
  Sense strand starting at position 1115 of SEQ ID NO: 1242139
acggauuggacaugaccua

SEQ ID NO: 1325069 - RNA, 19 nt, Artificial Sequence
  Description of Artificial Sequence: Synthetic oligonucleotide
  Antisense strand to SEQ ID NO: 1325068
uaggucauguccaauccgu

SEQ ID NO: 1325070 - RNA, 19 nt, Artificial Sequence
  Description of Artificial Sequence: Synthetic oligonucleotide
  Sense strand starting at position 1193 of SEQ ID NO: 1242139
gugaaaugaucuccaagau

SEQ ID NO: 1325071 - RNA, 19 nt, Artificial Sequence
  Description of Artificial Sequence: Synthetic oligonucleotide
  Antisense strand to SEQ ID NO: 1325070
aucuuggagaucauuucac

SEQ ID NO: 1325072 - RNA, 19 nt, Artificial Sequence
  Description of Artificial Sequence: Synthetic oligonucleotide
  Sense strand starting at position 1216 of SEQ ID NO: 1242139
ggugcagaagaguguguuu

SEQ ID NO: 1325073 - RNA, 19 nt, Artificial Sequence
  Description of Artificial Sequence: Synthetic oligonucleotide
  Antisense strand to SEQ ID NO: 1325072
aaacacacucuucugcacc

SEQ ID NO: 1325074 - RNA, 19 nt, Artificial Sequence
  Description of Artificial Sequence: Synthetic oligonucleotide
  Sense strand starting at position 1218 of SEQ ID NO: 1242139
ugcagaagaguguguuuag

SEQ ID NO: 1325075 - RNA, 19 nt, Artificial Sequence
  Description of Artificial Sequence: Synthetic oligonucleotide
  Antisense strand to SEQ ID NO: 1325074
cuaaacacacucuucugca

SEQ ID NO: 1325076 - RNA, 19 nt, Artificial Sequence
  Description of Artificial Sequence: Synthetic oligonucleotide
  Sense strand starting at position 1221 of SEQ ID NO: 1242139
agaagaguguguuuagcag

SEQ ID NO: 1325077 - RNA, 19 nt, Artificial Sequence
  Description of Artificial Sequence: Synthetic oligonucleotide
  Antisense strand to SEQ ID NO: 1325076
cugcuaaacacacucuucu

SEQ ID NO: 1325078 - RNA, 19 nt, Artificial Sequence
  Description of Artificial Sequence: Synthetic oligonucleotide
  Sense strand starting at position 1225 of SEQ ID NO: 1242139
gaguguguuuagcaggcua

SEQ ID NO: 1325079 - RNA, 19 nt, Artificial Sequence
  Description of Artificial Sequence: Synthetic oligonucleotide
  Antisense strand to SEQ ID NO: 1325078
uagccugcuaaacacacuc

SEQ ID NO: 1325080 - RNA, 19 nt, Artificial Sequence
  Description of Artificial Sequence: Synthetic oligonucleotide
  Sense strand starting at position 1227 of SEQ ID NO: 1242139
guguguuuagcaggcuacu

SEQ ID NO: 1325081 - RNA, 19 nt, Artificial Sequence
  Description of Artificial Sequence: Synthetic oligonucleotide
  Antisense strand to SEQ ID NO: 1325080
aguagccugcuaaacacac

SEQ ID NO: 1325082 - RNA, 19 nt, Artificial Sequence
  Description of Artificial Sequence: Synthetic oligonucleotide
  Sense strand starting at position 1236 of SEQ ID NO: 1242139
gcaggcuacuauuuguaca

SEQ ID NO: 1325083 - RNA, 19 nt, Artificial Sequence
  Description of Artificial Sequence: Synthetic oligonucleotide
  Antisense strand to SEQ ID NO: 1325082
uguacaaauaguagccugc

SEQ ID NO: 1325084 - RNA, 19 nt, Artificial Sequence
  Description of Artificial Sequence: Synthetic oligonucleotide
  Sense strand starting at position 1269 of SEQ ID NO: 1242139
agucgugugugcacggaua

SEQ ID NO: 1325085 - RNA, 19 nt, Artificial Sequence
  Description of Artificial Sequence: Synthetic oligonucleotide
  Antisense strand to SEQ ID NO: 1325084
uauccgugcacacacgacu

SEQ ID NO: 1325086 - RNA, 19 nt, Artificial Sequence
  Description of Artificial Sequence: Synthetic oligonucleotide
  Sense strand starting at position 1270 of SEQ ID NO: 1242139
gucgugugugcacggauau

SEQ ID NO: 1325087 - RNA, 19 nt, Artificial Sequence
  Description of Artificial Sequence: Synthetic oligonucleotide
  Antisense strand to SEQ ID NO: 1325086
auauccgugcacacacgac

SEQ ID NO: 1325088 - RNA, 19 nt, Artificial Sequence
  Description of Artificial Sequence: Synthetic oligonucleotide
  Sense strand starting at position 1271 of SEQ ID NO: 1242139
ucgugugugcacggauaua

SEQ ID NO: 1325089 - RNA, 19 nt, Artificial Sequence
  Description of Artificial Sequence: Synthetic oligonucleotide
  Antisense strand to SEQ ID NO: 1325088
uauauccgugcacacacga

SEQ ID NO: 1325090 - RNA, 19 nt, Artificial Sequence
  Description of Artificial Sequence: Synthetic oligonucleotide
  Sense strand starting at position 1294 of SEQ ID NO: 1242139
aucuuucuguaagaaugca

SEQ ID NO: 1325091 - RNA, 19 nt, Artificial Sequence
  Description of Artificial Sequence: Synthetic oligonucleotide
  Antisense strand to SEQ ID NO: 1325090
ugcauucuuacagaaagau

SEQ ID NO: 1325092 - RNA, 19 nt, Artificial Sequence
  Description of Artificial Sequence: Synthetic oligonucleotide
  Sense strand starting at position 1349 of SEQ ID NO: 1242139
ugcguaccacuguauauua

SEQ ID NO: 1325093 - RNA, 19 nt, Artificial Sequence
  Description of Artificial Sequence: Synthetic oligonucleotide
  Antisense strand to SEQ ID NO: 1325092
uaauauacagugguacgca

SEQ ID NO: 1325094 - RNA, 19 nt, Artificial Sequence
  Description of Artificial Sequence: Synthetic oligonucleotide
  Sense strand starting at position 1390 of SEQ ID NO: 1242139
gccuguguugcuguucagu

SEQ ID NO: 1325095 - RNA, 19 nt, Artificial Sequence
  Description of Artificial Sequence: Synthetic oligonucleotide
  Antisense strand to SEQ ID NO: 1325094
acugaacagcaacacaggc

SEQ ID NO: 1325096 - RNA, 19 nt, Artificial Sequence
  Description of Artificial Sequence: Synthetic oligonucleotide
  Sense strand starting at position 1395 of SEQ ID NO: 1242139
uguugcuguucagugguaa

SEQ ID NO: 1325097 - RNA, 19 nt, Artificial Sequence
  Description of Artificial Sequence: Synthetic oligonucleotide
  Antisense strand to SEQ ID NO: 1325096
uuaccacugaacagcaaca

SEQ ID NO: 1325098 - RNA, 19 nt, Artificial Sequence
  Description of Artificial Sequence: Synthetic oligonucleotide
  Sense strand starting at position 1396 of SEQ ID NO: 1242139
guugcuguucagugguaag

SEQ ID NO: 1325099 - RNA, 19 nt, Artificial Sequence
  Description of Artificial Sequence: Synthetic oligonucleotide
  Antisense strand to SEQ ID NO: 1325098
cuuaccacugaacagcaac

SEQ ID NO: 1325100 - RNA, 19 nt, Artificial Sequence
  Description of Artificial Sequence: Synthetic oligonucleotide
  Sense strand starting at position 1399 of SEQ ID NO: 1242139
gcuguucagugguaagaaa

SEQ ID NO: 1325101 - RNA, 19 nt, Artificial Sequence
  Description of Artificial Sequence: Synthetic oligonucleotide
  Antisense strand to SEQ ID NO: 1325100
uuucuuaccacugaacagc

SEQ ID NO: 1325102 - RNA, 19 nt, Artificial Sequence
  Description of Artificial Sequence: Synthetic oligonucleotide
  Sense strand starting at position 1589 of SEQ ID NO: 1242139
agcugugugccuucgauga

SEQ ID NO: 1325103 - RNA, 19 nt, Artificial Sequence
  Description of Artificial Sequence: Synthetic oligonucleotide
  Antisense strand to SEQ ID NO: 1325102
ucaucgaaggcacacagcu

SEQ ID NO: 1325104 - RNA, 19 nt, Artificial Sequence
  Description of Artificial Sequence: Synthetic oligonucleotide
  Sense strand starting at position 1593 of SEQ ID NO: 1242139
gugugccuucgaugagcuu

SEQ ID NO: 1325105 - RNA, 19 nt, Artificial Sequence
  Description of Artificial Sequence: Synthetic oligonucleotide
  Antisense strand to SEQ ID NO: 1325104
aagcucaucgaaggcacac

SEQ ID NO: 1325106 - RNA, 19 nt, Artificial Sequence
  Description of Artificial Sequence: Synthetic oligonucleotide
  Sense strand starting at position 2216 of SEQ ID NO: 1242139
gccggcaucccaggguuaa

SEQ ID NO: 1325107 - RNA, 19 nt, Artificial Sequence
  Description of Artificial Sequence: Synthetic oligonucleotide
  Antisense strand to SEQ ID NO: 1325106
uuaacccugggaugccggc

SEQ ID NO: 1325108 - RNA, 19 nt, Artificial Sequence
  Description of Artificial Sequence: Synthetic oligonucleotide
  Sense strand starting at position 2220 of SEQ ID NO: 1242139
gcaucccaggguuaacaaa

SEQ ID NO: 1325109 - RNA, 19 nt, Artificial Sequence
  Description of Artificial Sequence: Synthetic oligonucleotide
  Antisense strand to SEQ ID NO: 1325108
uuuguuaacccugggaugc

SEQ ID NO: 1325110 - RNA, 19 nt, Artificial Sequence
  Description of Artificial Sequence: Synthetic oligonucleotide
  Sense strand starting at position 104 of SEQ ID NO: 1242140
gcccgccacugucaucaaa

SEQ ID NO: 1325111 - RNA, 19 nt, Artificial Sequence
  Description of Artificial Sequence: Synthetic oligonucleotide
  Antisense strand to SEQ ID NO: 1325110
uuugaugacaguggcgggc

SEQ ID NO: 1325112 - RNA, 19 nt, Artificial Sequence
  Description of Artificial Sequence: Synthetic oligonucleotide
  Sense strand starting at position 341 of SEQ ID NO: 1242140
uuuggacuucugcaauuag

SEQ ID NO: 1325113 - RNA, 19 nt, Artificial Sequence
  Description of Artificial Sequence: Synthetic oligonucleotide
  Antisense strand to SEQ ID NO: 1325112
cuaauugcagaaguccaaa

SEQ ID NO: 1325114 - RNA, 19 nt, Artificial Sequence
  Description of Artificial Sequence: Synthetic oligonucleotide
  Sense strand starting at position 509 of SEQ ID NO: 1242140
uuauguguuccauggcguu

SEQ ID NO: 1325115 - RNA, 19 nt, Artificial Sequence
  Description of Artificial Sequence: Synthetic oligonucleotide
  Antisense strand to SEQ ID NO: 1325114
aacgccauggaacacauaa

SEQ ID NO: 1325116 - RNA, 19 nt, Artificial Sequence
  Description of Artificial Sequence: Synthetic oligonucleotide
  Sense strand starting at position 552 of SEQ ID NO: 1242140
gaaggauuguuugaggaau

SEQ ID NO: 1325117 - RNA, 19 nt, Artificial Sequence
  Description of Artificial Sequence: Synthetic oligonucleotide
  Antisense strand to SEQ ID NO: 1325116
auuccucaaacaauccuuc

SEQ ID NO: 1325118 - RNA, 19 nt, Artificial Sequence
  Description of Artificial Sequence: Synthetic oligonucleotide
  Sense strand starting at position 554 of SEQ ID NO: 1242140
aggauuguuugaggaaucu

SEQ ID NO: 1325119 - RNA, 19 nt, Artificial Sequence
  Description of Artificial Sequence: Synthetic oligonucleotide
  Antisense strand to SEQ ID NO: 1325118
agauuccucaaacaauccu

SEQ ID NO: 1325120 - RNA, 19 nt, Artificial Sequence
  Description of Artificial Sequence: Synthetic oligonucleotide
  Sense strand starting at position 937 of SEQ ID NO: 1242140
gugguugauuguccacguu

SEQ ID NO: 1325121 - RNA, 19 nt, Artificial Sequence
  Description of Artificial Sequence: Synthetic oligonucleotide
  Antisense strand to SEQ ID NO: 1325120
aacguggacaaucaaccac

SEQ ID NO: 1325122 - RNA, 19 nt, Artificial Sequence
  Description of Artificial Sequence: Synthetic oligonucleotide
  Sense strand starting at position 952 of SEQ ID NO: 1242140
cguucucacuuagaaugua

SEQ ID NO: 1325123 - RNA, 19 nt, Artificial Sequence
  Description of Artificial Sequence: Synthetic oligonucleotide
  Antisense strand to SEQ ID NO: 1325122
uacauucuaagugagaacg

SEQ ID NO: 1325124 - RNA, 19 nt, Artificial Sequence
  Description of Artificial Sequence: Synthetic oligonucleotide
  Sense strand starting at position 1084 of SEQ ID NO: 1242140
caaaguauucguugcagca

SEQ ID NO: 1325125 - RNA, 19 nt, Artificial Sequence
  Description of Artificial Sequence: Synthetic oligonucleotide
  Antisense strand to SEQ ID NO: 1325124
ugcugcaacgaauacuuug

SEQ ID NO: 1325126 - RNA, 19 nt, Artificial Sequence
  Description of Artificial Sequence: Synthetic oligonucleotide
  Sense strand starting at position 1086 of SEQ ID NO: 1242140
aaguauucguugcagcauu

SEQ ID NO: 1325127 - RNA, 19 nt, Artificial Sequence
  Description of Artificial Sequence: Synthetic oligonucleotide
  Antisense strand to SEQ ID NO: 1325126
aaugcugcaacgaauacuu

SEQ ID NO: 1325128 - RNA, 19 nt, Artificial Sequence
  Description of Artificial Sequence: Synthetic oligonucleotide
  Sense strand starting at position 1088 of SEQ ID NO: 1242140
guauucguugcagcauuau

SEQ ID NO: 1325129 - RNA, 19 nt, Artificial Sequence
  Description of Artificial Sequence: Synthetic oligonucleotide
  Antisense strand to SEQ ID NO: 1325128
auaaugcugcaacgaauac

SEQ ID NO: 1325130 - RNA, 19 nt, Artificial Sequence
  Description of Artificial Sequence: Synthetic oligonucleotide
  Sense strand starting at position 1115 of SEQ ID NO: 1242140
acggauuggacaugaccua

SEQ ID NO: 1325131 - RNA, 19 nt, Artificial Sequence
  Description of Artificial Sequence: Synthetic oligonucleotide
  Antisense strand to SEQ ID NO: 1325130
uaggucauguccaauccgu

SEQ ID NO: 1325132 - RNA, 19 nt, Artificial Sequence
  Description of Artificial Sequence: Synthetic oligonucleotide
  Sense strand starting at position 1193 of SEQ ID NO: 1242140
gugaaaugaucuccaagau

SEQ ID NO: 1325133 - RNA, 19 nt, Artificial Sequence
  Description of Artificial Sequence: Synthetic oligonucleotide
  Antisense strand to SEQ ID NO: 1325132
aucuuggagaucauuucac

SEQ ID NO: 1325134 - RNA, 19 nt, Artificial Sequence
  Description of Artificial Sequence: Synthetic oligonucleotide
  Sense strand starting at position 1216 of SEQ ID NO: 1242140
ggugcagaagaguguguuu

SEQ ID NO: 1325135 - RNA, 19 nt, Artificial Sequence
  Description of Artificial Sequence: Synthetic oligonucleotide
  Antisense strand to SEQ ID NO: 1325134
aaacacacucuucugcacc

SEQ ID NO: 1325136 - RNA, 19 nt, Artificial Sequence
  Description of Artificial Sequence: Synthetic oligonucleotide
  Sense strand starting at position 1218 of SEQ ID NO: 1242140
ugcagaagaguguguuuag

SEQ ID NO: 1325137 - RNA, 19 nt, Artificial Sequence
  Description of Artificial Sequence: Synthetic oligonucleotide
  Antisense strand to SEQ ID NO: 1325136
cuaaacacacucuucugca

SEQ ID NO: 1325138 - RNA, 19 nt, Artificial Sequence
  Description of Artificial Sequence: Synthetic oligonucleotide
  Sense strand starting at position 1221 of SEQ ID NO: 1242140
agaagaguguguuuagcag

SEQ ID NO: 1325139 - RNA, 19 nt, Artificial Sequence
  Description of Artificial Sequence: Synthetic oligonucleotide
  Antisense strand to SEQ ID NO: 1325138
cugcuaaacacacucuucu

SEQ ID NO: 1325140 - RNA, 19 nt, Artificial Sequence
  Description of Artificial Sequence: Synthetic oligonucleotide
  Sense strand starting at position 1225 of SEQ ID NO: 1242140
gaguguguuuagcaggcua

SEQ ID NO: 1325141 - RNA, 19 nt, Artificial Sequence
  Description of Artificial Sequence: Synthetic oligonucleotide
  Antisense strand to SEQ ID NO: 1325140
uagccugcuaaacacacuc

SEQ ID NO: 1325142 - RNA, 19 nt, Artificial Sequence
  Description of Artificial Sequence: Synthetic oligonucleotide
  Sense strand starting at position 1227 of SEQ ID NO: 1242140
guguguuuagcaggcuacu

SEQ ID NO: 1325143 - RNA, 19 nt, Artificial Sequence
  Description of Artificial Sequence: Synthetic oligonucleotide
  Antisense strand to SEQ ID NO: 1325142
aguagccugcuaaacacac

SEQ ID NO: 1325144 - RNA, 19 nt, Artificial Sequence
  Description of Artificial Sequence: Synthetic oligonucleotide
  Sense strand starting at position 1236 of SEQ ID NO: 1242140
gcaggcuacuauuuguaca

SEQ ID NO: 1325145 - RNA, 19 nt, Artificial Sequence
  Description of Artificial Sequence: Synthetic oligonucleotide
  Antisense strand to SEQ ID NO: 1325144
uguacaaauaguagccugc

SEQ ID NO: 1325146 - RNA, 19 nt, Artificial Sequence
  Description of Artificial Sequence: Synthetic oligonucleotide
  Sense strand starting at position 1269 of SEQ ID NO: 1242140
agucgugugugcacggaua

SEQ ID NO: 1325147 - RNA, 19 nt, Artificial Sequence
  Description of Artificial Sequence: Synthetic oligonucleotide
  Antisense strand to SEQ ID NO: 1325146
uauccgugcacacacgacu

SEQ ID NO: 1325148 - RNA, 19 nt, Artificial Sequence
  Description of Artificial Sequence: Synthetic oligonucleotide
  Sense strand starting at position 1270 of SEQ ID NO: 1242140
gucgugugugcacggauau

SEQ ID NO: 1325149 - RNA, 19 nt, Artificial Sequence
  Description of Artificial Sequence: Synthetic oligonucleotide
  Antisense strand to SEQ ID NO: 1325148
auauccgugcacacacgac

SEQ ID NO: 1325150 - RNA, 19 nt, Artificial Sequence
  Description of Artificial Sequence: Synthetic oligonucleotide
  Sense strand starting at position 1271 of SEQ ID NO: 1242140
ucgugugugcacggauaua

SEQ ID NO: 1325151 - RNA, 19 nt, Artificial Sequence
  Description of Artificial Sequence: Synthetic oligonucleotide
  Antisense strand to SEQ ID NO: 1325150
uauauccgugcacacacga

SEQ ID NO: 1325152 - RNA, 19 nt, Artificial Sequence
  Description of Artificial Sequence: Synthetic oligonucleotide
  Sense strand starting at position 1294 of SEQ ID NO: 1242140
aucuuucuguaagaaugca

SEQ ID NO: 1325153 - RNA, 19 nt, Artificial Sequence
  Description of Artificial Sequence: Synthetic oligonucleotide
  Antisense strand to SEQ ID NO: 1325152
ugcauucuuacagaaagau

SEQ ID NO: 1325154 - RNA, 19 nt, Artificial Sequence
  Description of Artificial Sequence: Synthetic oligonucleotide
  Sense strand starting at position 1349 of SEQ ID NO: 1242140
ugcguaccacuguauauua

SEQ ID NO: 1325155 - RNA, 19 nt, Artificial Sequence
  Description of Artificial Sequence: Synthetic oligonucleotide
  Antisense strand to SEQ ID NO: 1325154
uaauauacagugguacgca

SEQ ID NO: 1325156 - RNA, 19 nt, Artificial Sequence
  Description of Artificial Sequence: Synthetic oligonucleotide
  Sense strand starting at position 1390 of SEQ ID NO: 1242140
gccuguguugcuguucagu

SEQ ID NO: 1325157 - RNA, 19 nt, Artificial Sequence
  Description of Artificial Sequence: Synthetic oligonucleotide
  Antisense strand to SEQ ID NO: 1325156
acugaacagcaacacaggc

SEQ ID NO: 1325158 - RNA, 19 nt, Artificial Sequence
  Description of Artificial Sequence: Synthetic oligonucleotide
  Sense strand starting at position 1395 of SEQ ID NO: 1242140
uguugcuguucagugguaa

SEQ ID NO: 1325159 - RNA, 19 nt, Artificial Sequence
  Description of Artificial Sequence: Synthetic oligonucleotide
  Antisense strand to SEQ ID NO: 1325158
uuaccacugaacagcaaca

SEQ ID NO: 1325160 - RNA, 19 nt, Artificial Sequence
  Description of Artificial Sequence: Synthetic oligonucleotide
  Sense strand starting at position 1396 of SEQ ID NO: 1242140
guugcuguucagugguaag

SEQ ID NO: 1325161 - RNA, 19 nt, Artificial Sequence
  Description of Artificial Sequence: Synthetic oligonucleotide
  Antisense strand to SEQ ID NO: 1325160
cuuaccacugaacagcaac

SEQ ID NO: 1325162 - RNA, 19 nt, Artificial Sequence
  Description of Artificial Sequence: Synthetic oligonucleotide
  Sense strand starting at position 1399 of SEQ ID NO: 1242140
gcuguucagugguaagaaa

SEQ ID NO: 1325163 - RNA, 19 nt, Artificial Sequence
  Description of Artificial Sequence: Synthetic oligonucleotide
  Antisense strand to SEQ ID NO: 1325162
uuucuuaccacugaacagc

SEQ ID NO: 1325164 - RNA, 19 nt, Artificial Sequence
  Description of Artificial Sequence: Synthetic oligonucleotide
  Sense strand starting at position 1589 of SEQ ID NO: 1242140
agcugugugccuucgauga

SEQ ID NO: 1325165 - RNA, 19 nt, Artificial Sequence
  Description of Artificial Sequence: Synthetic oligonucleotide
  Antisense strand to SEQ ID NO: 1325164
ucaucgaaggcacacagcu

SEQ ID NO: 1325166 - RNA, 19 nt, Artificial Sequence
  Description of Artificial Sequence: Synthetic oligonucleotide
  Sense strand starting at position 1593 of SEQ ID NO: 1242140
gugugccuucgaugagcuu

SEQ ID NO: 1325167 - RNA, 19 nt, Artificial Sequence
  Description of Artificial Sequence: Synthetic oligonucleotide
  Antisense strand to SEQ ID NO: 1325166
aagcucaucgaaggcacac

SEQ ID NO: 1325168 - RNA, 19 nt, Artificial Sequence
  Description of Artificial Sequence: Synthetic oligonucleotide
  Sense strand starting at position 2216 of SEQ ID NO: 1242140
gccggcaucccaggguuaa

SEQ ID NO: 1325169 - RNA, 19 nt, Artificial Sequence
  Description of Artificial Sequence: Synthetic oligonucleotide
  Antisense strand to SEQ ID NO: 1325168
uuaacccugggaugccggc

SEQ ID NO: 1325170 - RNA, 19 nt, Artificial Sequence
  Description of Artificial Sequence: Synthetic oligonucleotide
  Sense strand starting at position 2220 of SEQ ID NO: 1242140
gcaucccaggguuaacaaa

SEQ ID NO: 1325171 - RNA, 19 nt, Artificial Sequence
  Description of Artificial Sequence: Synthetic oligonucleotide
  Antisense strand to SEQ ID NO: 1325170
uuuguuaacccugggaugc

SEQ ID NO: 1325172 - RNA, 19 nt, Artificial Sequence
  Description of Artificial Sequence: Synthetic oligonucleotide
  Sense strand starting at position 94 of SEQ ID NO: 1242141
ccauuaccugagcagugaa

SEQ ID NO: 1325173 - RNA, 19 nt, Artificial Sequence
  Description of Artificial Sequence: Synthetic oligonucleotide
  Antisense strand to SEQ ID NO: 1325172
uucacugcucagguaaugg

SEQ ID NO: 1325174 - RNA, 19 nt, Artificial Sequence
  Description of Artificial Sequence: Synthetic oligonucleotide
  Sense strand starting at position 190 of SEQ ID NO: 1242141
gucauucuugcggcacauu

SEQ ID NO: 1325175 - RNA, 19 nt, Artificial Sequence
  Description of Artificial Sequence: Synthetic oligonucleotide
  Antisense strand to SEQ ID NO: 1325174
aaugugccgcaagaaugac

SEQ ID NO: 1325176 - RNA, 19 nt, Artificial Sequence
  Description of Artificial Sequence: Synthetic oligonucleotide
  Sense strand starting at position 261 of SEQ ID NO: 1242141
aaagcuuuguaacugauga

SEQ ID NO: 1325177 - RNA, 19 nt, Artificial Sequence
  Description of Artificial Sequence: Synthetic oligonucleotide
  Antisense strand to SEQ ID NO: 1325176
ucaucaguuacaaagcuuu

SEQ ID NO: 1325178 - RNA, 19 nt, Artificial Sequence
  Description of Artificial Sequence: Synthetic oligonucleotide
  Sense strand starting at position 269 of SEQ ID NO: 1242141
guaacugaugaaugacauu

SEQ ID NO: 1325179 - RNA, 19 nt, Artificial Sequence
  Description of Artificial Sequence: Synthetic oligonucleotide
  Antisense strand to SEQ ID NO: 1325178
aaugucauucaucaguuac

SEQ ID NO: 1325180 - RNA, 19 nt, Artificial Sequence
  Description of Artificial Sequence: Synthetic oligonucleotide
  Sense strand starting at position 355 of SEQ ID NO: 1242141
auuccuugucaaggaggua

SEQ ID NO: 1325181 - RNA, 19 nt, Artificial Sequence
  Description of Artificial Sequence: Synthetic oligonucleotide
  Antisense strand to SEQ ID NO: 1325180
uaccuccuugacaaggaau

SEQ ID NO: 1325182 - RNA, 19 nt, Artificial Sequence
  Description of Artificial Sequence: Synthetic oligonucleotide
  Sense strand starting at position 356 of SEQ ID NO: 1242141
uuccuugucaaggagguau

SEQ ID NO: 1325183 - RNA, 19 nt, Artificial Sequence
  Description of Artificial Sequence: Synthetic oligonucleotide
  Antisense strand to SEQ ID NO: 1325182
auaccuccuugacaaggaa

SEQ ID NO: 1325184 - RNA, 19 nt, Artificial Sequence
  Description of Artificial Sequence: Synthetic oligonucleotide
  Sense strand starting at position 358 of SEQ ID NO: 1242141
ccuugucaaggagguauua

SEQ ID NO: 1325185 - RNA, 19 nt, Artificial Sequence
  Description of Artificial Sequence: Synthetic oligonucleotide
  Antisense strand to SEQ ID NO: 1325184
uaauaccuccuugacaagg

SEQ ID NO: 1325186 - RNA, 19 nt, Artificial Sequence
  Description of Artificial Sequence: Synthetic oligonucleotide
  Sense strand starting at position 360 of SEQ ID NO: 1242141
uugucaaggagguauuagu

SEQ ID NO: 1325187 - RNA, 19 nt, Artificial Sequence
  Description of Artificial Sequence: Synthetic oligonucleotide
  Antisense strand to SEQ ID NO: 1325186
acuaauaccuccuugacaa

SEQ ID NO: 1325188 - RNA, 19 nt, Artificial Sequence
  Description of Artificial Sequence: Synthetic oligonucleotide
  Sense strand starting at position 368 of SEQ ID NO: 1242141
gagguauuaguuuaaguau

SEQ ID NO: 1325189 - RNA, 19 nt, Artificial Sequence
  Description of Artificial Sequence: Synthetic oligonucleotide
  Antisense strand to SEQ ID NO: 1325188
auacuuaaacuaauaccuc

SEQ ID NO: 1325190 - RNA, 19 nt, Artificial Sequence
  Description of Artificial Sequence: Synthetic oligonucleotide
  Sense strand starting at position 600 of SEQ ID NO: 1242141
aggcacaaaccuuaaguau

SEQ ID NO: 1325191 - RNA, 19 nt, Artificial Sequence
  Description of Artificial Sequence: Synthetic oligonucleotide
  Antisense strand to SEQ ID NO: 1325190
auacuuaagguuugugccu

SEQ ID NO: 1325192 - RNA, 19 nt, Artificial Sequence
  Description of Artificial Sequence: Synthetic oligonucleotide
  Sense strand starting at position 641 of SEQ ID NO: 1242141
gaaugaauggugugugaau

SEQ ID NO: 1325193 - RNA, 19 nt, Artificial Sequence
  Description of Artificial Sequence: Synthetic oligonucleotide
  Antisense strand to SEQ ID NO: 1325192
auucacacaccauucauuc

SEQ ID NO: 1325194 - RNA, 19 nt, Artificial Sequence
  Description of Artificial Sequence: Synthetic oligonucleotide
  Sense strand starting at position 642 of SEQ ID NO: 1242141
aaugaauggugugugaaug

SEQ ID NO: 1325195 - RNA, 19 nt, Artificial Sequence
  Description of Artificial Sequence: Synthetic oligonucleotide
  Antisense strand to SEQ ID NO: 1325194
cauucacacaccauucauu

SEQ ID NO: 1325196 - RNA, 19 nt, Artificial Sequence
  Description of Artificial Sequence: Synthetic oligonucleotide
  Sense strand starting at position 643 of SEQ ID NO: 1242141
augaauggugugugaauga

SEQ ID NO: 1325197 - RNA, 19 nt, Artificial Sequence
  Description of Artificial Sequence: Synthetic oligonucleotide
  Antisense strand to SEQ ID NO: 1325196
ucauucacacaccauucau

SEQ ID NO: 1325198 - RNA, 19 nt, Artificial Sequence
  Description of Artificial Sequence: Synthetic oligonucleotide
  Sense strand starting at position 648 of SEQ ID NO: 1242141
uggugugugaaugaaugua

SEQ ID NO: 1325199 - RNA, 19 nt, Artificial Sequence
  Description of Artificial Sequence: Synthetic oligonucleotide
  Antisense strand to SEQ ID NO: 1325198
uacauucauucacacacca

SEQ ID NO: 1325200 - RNA, 19 nt, Artificial Sequence
  Description of Artificial Sequence: Synthetic oligonucleotide
  Sense strand starting at position 656 of SEQ ID NO: 1242141
gaaugaauguauguguaca

SEQ ID NO: 1325201 - RNA, 19 nt, Artificial Sequence
  Description of Artificial Sequence: Synthetic oligonucleotide
  Antisense strand to SEQ ID NO: 1325200
uguacacauacauucauuc

SEQ ID NO: 1325202 - RNA, 19 nt, Artificial Sequence
  Description of Artificial Sequence: Synthetic oligonucleotide
  Sense strand starting at position 757 of SEQ ID NO: 1242141
guaguagagcaacagaguu

SEQ ID NO: 1325203 - RNA, 19 nt, Artificial Sequence
  Description of Artificial Sequence: Synthetic oligonucleotide
  Antisense strand to SEQ ID NO: 1325202
aacucuguugcucuacuac

SEQ ID NO: 1325204 - RNA, 19 nt, Artificial Sequence
  Description of Artificial Sequence: Synthetic oligonucleotide
  Sense strand starting at position 789 of SEQ ID NO: 1242141
cagccugcucggguguuaa

SEQ ID NO: 1325205 - RNA, 19 nt, Artificial Sequence
  Description of Artificial Sequence: Synthetic oligonucleotide
  Antisense strand to SEQ ID NO: 1325204
uuaacacccgagcaggcug

SEQ ID NO: 1325206 - RNA, 19 nt, Artificial Sequence
  Description of Artificial Sequence: Synthetic oligonucleotide
  Sense strand starting at position 791 of SEQ ID NO: 1242141
gccugcucggguguuaauu

SEQ ID NO: 1325207 - RNA, 19 nt, Artificial Sequence
  Description of Artificial Sequence: Synthetic oligonucleotide
  Antisense strand to SEQ ID NO: 1325206
aauuaacacccgagcaggc

SEQ ID NO: 1325208 - RNA, 19 nt, Artificial Sequence
  Description of Artificial Sequence: Synthetic oligonucleotide
  Sense strand starting at position 797 of SEQ ID NO: 1242141
ucggguguuaauuauauua

SEQ ID NO: 1325209 - RNA, 19 nt, Artificial Sequence
  Description of Artificial Sequence: Synthetic oligonucleotide
  Antisense strand to SEQ ID NO: 1325208
uaauauaauuaacacccga

SEQ ID NO: 1325210 - RNA, 19 nt, Artificial Sequence
  Description of Artificial Sequence: Synthetic oligonucleotide
  Sense strand starting at position 970 of SEQ ID NO: 1242141
uuaugaucacacuggcuaa

SEQ ID NO: 1325211 - RNA, 19 nt, Artificial Sequence
  Description of Artificial Sequence: Synthetic oligonucleotide
  Antisense strand to SEQ ID NO: 1325210
uuagccagugugaucauaa

SEQ ID NO: 1325212 - RNA, 19 nt, Artificial Sequence
  Description of Artificial Sequence: Synthetic oligonucleotide
  Sense strand starting at position 973 of SEQ ID NO: 1242141
ugaucacacuggcuaauau

SEQ ID NO: 1325213 - RNA, 19 nt, Artificial Sequence
  Description of Artificial Sequence: Synthetic oligonucleotide
  Antisense strand to SEQ ID NO: 1325212
auauuagccagugugauca

SEQ ID NO: 1325214 - RNA, 19 nt, Artificial Sequence
  Description of Artificial Sequence: Synthetic oligonucleotide
  Sense strand starting at position 999 of SEQ ID NO: 1242141
ggcuaauauuaguuauuag

SEQ ID NO: 1325215 - RNA, 19 nt, Artificial Sequence
  Description of Artificial Sequence: Synthetic oligonucleotide
  Antisense strand to SEQ ID NO: 1325214
cuaauaacuaauauuagcc

SEQ ID NO: 1325216 - RNA, 19 nt, Artificial Sequence
  Description of Artificial Sequence: Synthetic oligonucleotide
  Sense strand starting at position 1059 of SEQ ID NO: 1242141
gaagcuggcuauccaaaga

SEQ ID NO: 1325217 - RNA, 19 nt, Artificial Sequence
  Description of Artificial Sequence: Synthetic oligonucleotide
  Antisense strand to SEQ ID NO: 1325216
ucuuuggauagccagcuuc

SEQ ID NO: 1325218 - RNA, 19 nt, Artificial Sequence
  Description of Artificial Sequence: Synthetic oligonucleotide
  Sense strand starting at position 1113 of SEQ ID NO: 1242141
uggacuaguuucucauaau

SEQ ID NO: 1325219 - RNA, 19 nt, Artificial Sequence
  Description of Artificial Sequence: Synthetic oligonucleotide
  Antisense strand to SEQ ID NO: 1325218
auuaugagaaacuagucca

SEQ ID NO: 1325220 - RNA, 19 nt, Artificial Sequence
  Description of Artificial Sequence: Synthetic oligonucleotide
  Sense strand starting at position 1141 of SEQ ID NO: 1242141
ugcugaacugaugauuauu

SEQ ID NO: 1325221 - RNA, 19 nt, Artificial Sequence
  Description of Artificial Sequence: Synthetic oligonucleotide
  Antisense strand to SEQ ID NO: 1325220
aauaaucaucaguucagca

SEQ ID NO: 1325222 - RNA, 19 nt, Artificial Sequence
  Description of Artificial Sequence: Synthetic oligonucleotide
  Sense strand starting at position 1230 of SEQ ID NO: 1242141
ggaacuuuauaagccacaa

SEQ ID NO: 1325223 - RNA, 19 nt, Artificial Sequence
  Description of Artificial Sequence: Synthetic oligonucleotide
  Antisense strand to SEQ ID NO: 1325222
uuguggcuuauaaaguucc

SEQ ID NO: 1325224 - RNA, 19 nt, Artificial Sequence
  Description of Artificial Sequence: Synthetic oligonucleotide
  Sense strand starting at position 1287 of SEQ ID NO: 1242141
aauauaagagcguaguaaa

SEQ ID NO: 1325225 - RNA, 19 nt, Artificial Sequence
  Description of Artificial Sequence: Synthetic oligonucleotide
  Antisense strand to SEQ ID NO: 1325224
uuuacuacgcucuuauauu

SEQ ID NO: 1325226 - RNA, 19 nt, Artificial Sequence
  Description of Artificial Sequence: Synthetic oligonucleotide
  Sense strand starting at position 1413 of SEQ ID NO: 1242141
aagcucauccgucaggaau

SEQ ID NO: 1325227 - RNA, 19 nt, Artificial Sequence
  Description of Artificial Sequence: Synthetic oligonucleotide
  Antisense strand to SEQ ID NO: 1325226
auuccugacggaugagcuu

SEQ ID NO: 1325228 - RNA, 19 nt, Artificial Sequence
  Description of Artificial Sequence: Synthetic oligonucleotide
  Sense strand starting at position 1554 of SEQ ID NO: 1242141
ucgacuccacccgaagaua

SEQ ID NO: 1325229 - RNA, 19 nt, Artificial Sequence
  Description of Artificial Sequence: Synthetic oligonucleotide
  Antisense strand to SEQ ID NO: 1325228
uaucuucggguggagucga

SEQ ID NO: 1325230 - RNA, 19 nt, Artificial Sequence
  Description of Artificial Sequence: Synthetic oligonucleotide
  Sense strand starting at position 2146 of SEQ ID NO: 1242141
gugauacugcgauaggaac

SEQ ID NO: 1325231 - RNA, 19 nt, Artificial Sequence
  Description of Artificial Sequence: Synthetic oligonucleotide
  Antisense strand to SEQ ID NO: 1325230
guuccuaucgcaguaucac

SEQ ID NO: 1325232 - RNA, 19 nt, Artificial Sequence
  Description of Artificial Sequence: Synthetic oligonucleotide
  Sense strand starting at position 2170 of SEQ ID NO: 1242141
guggguaaaggucaacgaa

SEQ ID NO: 1325233 - RNA, 19 nt, Artificial Sequence
  Description of Artificial Sequence: Synthetic oligonucleotide
  Antisense strand to SEQ ID NO: 1325232
uucguugaccuuuacccac

SEQ ID NO: 1325234 - RNA, 19 nt, Artificial Sequence
  Description of Artificial Sequence: Synthetic oligonucleotide
  Sense strand starting at position 2173 of SEQ ID NO: 1242141
gguaaaggucaacgaauga

SEQ ID NO: 1325235 - RNA, 19 nt, Artificial Sequence
  Description of Artificial Sequence: Synthetic oligonucleotide
  Antisense strand to SEQ ID NO: 1325234
ucauucguugaccuuuacc

SEQ ID NO: 1325236 - RNA, 19 nt, Artificial Sequence
  Description of Artificial Sequence: Synthetic oligonucleotide
  Sense strand starting at position 2683 of SEQ ID NO: 1242141
augguaagcccuucguguu

SEQ ID NO: 1325237 - RNA, 19 nt, Artificial Sequence
  Description of Artificial Sequence: Synthetic oligonucleotide
  Antisense strand to SEQ ID NO: 1325236
aacacgaagggcuuaccau

SEQ ID NO: 1325238 - RNA, 19 nt, Artificial Sequence
  Description of Artificial Sequence: Synthetic oligonucleotide
  Sense strand starting at position 2688 of SEQ ID NO: 1242141
aagcccuucguguuuguua

SEQ ID NO: 1325239 - RNA, 19 nt, Artificial Sequence
  Description of Artificial Sequence: Synthetic oligonucleotide
  Antisense strand to SEQ ID NO: 1325238
uaacaaacacgaagggcuu

SEQ ID NO: 1325240 - RNA, 19 nt, Artificial Sequence
  Description of Artificial Sequence: Synthetic oligonucleotide
  Sense strand starting at position 2853 of SEQ ID NO: 1242141
ggguugggucuguagauga

SEQ ID NO: 1325241 - RNA, 19 nt, Artificial Sequence
  Description of Artificial Sequence: Synthetic oligonucleotide
  Antisense strand to SEQ ID NO: 1325240
ucaucuacagacccaaccc

SEQ ID NO: 1325242 - RNA, 19 nt, Artificial Sequence
  Description of Artificial Sequence: Synthetic oligonucleotide
  Sense strand starting at position 3302 of SEQ ID NO: 1242141
aggccugucagauaaacug

SEQ ID NO: 1325243 - RNA, 19 nt, Artificial Sequence
  Description of Artificial Sequence: Synthetic oligonucleotide
  Antisense strand to SEQ ID NO: 1325242
caguuuaucugacaggccu

SEQ ID NO: 1325244 - RNA, 19 nt, Artificial Sequence
  Description of Artificial Sequence: Synthetic oligonucleotide
  Sense strand starting at position 3328 of SEQ ID NO: 1242141
cuaagaugucaucagguug

SEQ ID NO: 1325245 - RNA, 19 nt, Artificial Sequence
  Description of Artificial Sequence: Synthetic oligonucleotide
  Antisense strand to SEQ ID NO: 1325244
caaccugaugacaucuuag

SEQ ID NO: 1325246 - RNA, 19 nt, Artificial Sequence
  Description of Artificial Sequence: Synthetic oligonucleotide
  Sense strand starting at position 3375 of SEQ ID NO: 1242141
guaacagaguccuuacuua

SEQ ID NO: 1325247 - RNA, 19 nt, Artificial Sequence
  Description of Artificial Sequence: Synthetic oligonucleotide
  Antisense strand to SEQ ID NO: 1325246
uaaguaaggacucuguuac

SEQ ID NO: 1325248 - RNA, 19 nt, Artificial Sequence
  Description of Artificial Sequence: Synthetic oligonucleotide
  Sense strand starting at position 3791 of SEQ ID NO: 1242141
cuggccucucaucagaaga

SEQ ID NO: 1325249 - RNA, 19 nt, Artificial Sequence
  Description of Artificial Sequence: Synthetic oligonucleotide
  Antisense strand to SEQ ID NO: 1325248
ucuucugaugagaggccag

SEQ ID NO: 1325250 - RNA, 19 nt, Artificial Sequence
  Description of Artificial Sequence: Synthetic oligonucleotide
  Sense strand starting at position 3835 of SEQ ID NO: 1242141
gaucguuauccucaaggga

SEQ ID NO: 1325251 - RNA, 19 nt, Artificial Sequence
  Description of Artificial Sequence: Synthetic oligonucleotide
  Antisense strand to SEQ ID NO: 1325250
ucccuugaggauaacgauc

SEQ ID NO: 1325252 - RNA, 19 nt, Artificial Sequence
  Description of Artificial Sequence: Synthetic oligonucleotide
  Sense strand starting at position 2116 of SEQ ID NO: 1242142
uaaagauaguauggcucau

SEQ ID NO: 1325253 - RNA, 19 nt, Artificial Sequence
  Description of Artificial Sequence: Synthetic oligonucleotide
  Antisense strand to SEQ ID NO: 1325252
augagccauacuaucuuua

SEQ ID NO: 1325254 - RNA, 19 nt, Artificial Sequence
  Description of Artificial Sequence: Synthetic oligonucleotide
  Sense strand starting at position 2120 of SEQ ID NO: 1242142
gauaguauggcucauguga

SEQ ID NO: 1325255 - RNA, 19 nt, Artificial Sequence
  Description of Artificial Sequence: Synthetic oligonucleotide
  Antisense strand to SEQ ID NO: 1325254
ucacaugagccauacuauc

SEQ ID NO: 1325256 - RNA, 19 nt, Artificial Sequence
  Description of Artificial Sequence: Synthetic oligonucleotide
  Sense strand starting at position 2122 of SEQ ID NO: 1242142
uaguauggcucaugugaug

SEQ ID NO: 1325257 - RNA, 19 nt, Artificial Sequence
  Description of Artificial Sequence: Synthetic oligonucleotide
  Antisense strand to SEQ ID NO: 1325256
caucacaugagccauacua

SEQ ID NO: 1325258 - RNA, 19 nt, Artificial Sequence
  Description of Artificial Sequence: Synthetic oligonucleotide
  Sense strand starting at position 2181 of SEQ ID NO: 1242142
ucuggagaccugugugauc

SEQ ID NO: 1325259 - RNA, 19 nt, Artificial Sequence
  Description of Artificial Sequence: Synthetic oligonucleotide
  Antisense strand to SEQ ID NO: 1325258
gaucacacaggucuccaga

SEQ ID NO: 1325260 - RNA, 19 nt, Artificial Sequence
  Description of Artificial Sequence: Synthetic oligonucleotide
  Sense strand starting at position 2186 of SEQ ID NO: 1242142
agaccugugugaucacuca

SEQ ID NO: 1325261 - RNA, 19 nt, Artificial Sequence
  Description of Artificial Sequence: Synthetic oligonucleotide
  Antisense strand to SEQ ID NO: 1325260
ugagugaucacacaggucu

SEQ ID NO: 1325262 - RNA, 19 nt, Artificial Sequence
  Description of Artificial Sequence: Synthetic oligonucleotide
  Sense strand starting at position 2193 of SEQ ID NO: 1242142
ugugaucacucauauccuu

SEQ ID NO: 1325263 - RNA, 19 nt, Artificial Sequence
  Description of Artificial Sequence: Synthetic oligonucleotide
  Antisense strand to SEQ ID NO: 1325262
aaggauaugagugaucaca

SEQ ID NO: 1325264 - RNA, 19 nt, Artificial Sequence
  Description of Artificial Sequence: Synthetic oligonucleotide
  Sense strand starting at position 2220 of SEQ ID NO: 1242142
ugguaauaauggguccaga

SEQ ID NO: 1325265 - RNA, 19 nt, Artificial Sequence
  Description of Artificial Sequence: Synthetic oligonucleotide
  Antisense strand to SEQ ID NO: 1325264
ucuggacccauuauuacca

SEQ ID NO: 1325266 - RNA, 19 nt, Artificial Sequence
  Description of Artificial Sequence: Synthetic oligonucleotide
  Sense strand starting at position 2651 of SEQ ID NO: 1242142
ucggguagccugcguuuau

SEQ ID NO: 1325267 - RNA, 19 nt, Artificial Sequence
  Description of Artificial Sequence: Synthetic oligonucleotide
  Antisense strand to SEQ ID NO: 1325266
auaaacgcaggcuacccga

SEQ ID NO: 1325268 - RNA, 19 nt, Artificial Sequence
  Description of Artificial Sequence: Synthetic oligonucleotide
  Sense strand starting at position 2652 of SEQ ID NO: 1242142
cggguagccugcguuuauu

SEQ ID NO: 1325269 - RNA, 19 nt, Artificial Sequence
  Description of Artificial Sequence: Synthetic oligonucleotide
  Antisense strand to SEQ ID NO: 1325268
aauaaacgcaggcuacccg

SEQ ID NO: 1325270 - RNA, 19 nt, Artificial Sequence
  Description of Artificial Sequence: Synthetic oligonucleotide
  Sense strand starting at position 3965 of SEQ ID NO: 1242142
gucaccucucaauaauagu

SEQ ID NO: 1325271 - RNA, 19 nt, Artificial Sequence
  Description of Artificial Sequence: Synthetic oligonucleotide
  Antisense strand to SEQ ID NO: 1325270
acuauuauugagaggugac

SEQ ID NO: 1325272 - RNA, 19 nt, Artificial Sequence
  Description of Artificial Sequence: Synthetic oligonucleotide
  Sense strand starting at position 10 of SEQ ID NO: 1242143
ucuagugguacaggguaua

SEQ ID NO: 1325273 - RNA, 19 nt, Artificial Sequence
  Description of Artificial Sequence: Synthetic oligonucleotide
  Antisense strand to SEQ ID NO: 1325272
uauacccuguaccacuaga

SEQ ID NO: 1325274 - RNA, 19 nt, Artificial Sequence
  Description of Artificial Sequence: Synthetic oligonucleotide
  Sense strand starting at position 22 of SEQ ID NO: 1242143
ggguauaaguuacucuaaa

SEQ ID NO: 1325275 - RNA, 19 nt, Artificial Sequence
  Description of Artificial Sequence: Synthetic oligonucleotide
  Antisense strand to SEQ ID NO: 1325274
uuuagaguaacuuauaccc

SEQ ID NO: 1325276 - RNA, 19 nt, Artificial Sequence
  Description of Artificial Sequence: Synthetic oligonucleotide
  Sense strand starting at position 291 of SEQ ID NO: 1242143
gcgugaagcuauuuccuuu

SEQ ID NO: 1325277 - RNA, 19 nt, Artificial Sequence
  Description of Artificial Sequence: Synthetic oligonucleotide
  Antisense strand to SEQ ID NO: 1325276
aaaggaaauagcuucacgc

SEQ ID NO: 1325278 - RNA, 19 nt, Artificial Sequence
  Description of Artificial Sequence: Synthetic oligonucleotide
  Sense strand starting at position 464 of SEQ ID NO: 1242143
uuuaguagacauugcaaug

SEQ ID NO: 1325279 - RNA, 19 nt, Artificial Sequence
  Description of Artificial Sequence: Synthetic oligonucleotide
  Antisense strand to SEQ ID NO: 1325278
cauugcaaugucuacuaaa

SEQ ID NO: 1325280 - RNA, 19 nt, Artificial Sequence
  Description of Artificial Sequence: Synthetic oligonucleotide
  Sense strand starting at position 1117 of SEQ ID NO: 1242143
cccauaaguggaggaugua

SEQ ID NO: 1325281 - RNA, 19 nt, Artificial Sequence
  Description of Artificial Sequence: Synthetic oligonucleotide
  Antisense strand to SEQ ID NO: 1325280
uacauccuccacuuauggg

SEQ ID NO: 1325282 - RNA, 19 nt, Artificial Sequence
  Description of Artificial Sequence: Synthetic oligonucleotide
  Sense strand starting at position 1126 of SEQ ID NO: 1242143
ggaggauguagugaccagu

SEQ ID NO: 1325283 - RNA, 19 nt, Artificial Sequence
  Description of Artificial Sequence: Synthetic oligonucleotide
  Antisense strand to SEQ ID NO: 1325282
acuggucacuacauccucc

SEQ ID NO: 1325284 - RNA, 19 nt, Artificial Sequence
  Description of Artificial Sequence: Synthetic oligonucleotide
  Sense strand starting at position 1129 of SEQ ID NO: 1242143
ggauguagugaccagugau

SEQ ID NO: 1325285 - RNA, 19 nt, Artificial Sequence
  Description of Artificial Sequence: Synthetic oligonucleotide
  Antisense strand to SEQ ID NO: 1325284
aucacuggucacuacaucc

SEQ ID NO: 1325286 - RNA, 19 nt, Artificial Sequence
  Description of Artificial Sequence: Synthetic oligonucleotide
  Sense strand starting at position 1311 of SEQ ID NO: 1242143
ggcccagccucucuuauua

SEQ ID NO: 1325287 - RNA, 19 nt, Artificial Sequence
  Description of Artificial Sequence: Synthetic oligonucleotide
  Antisense strand to SEQ ID NO: 1325286
uaauaagagaggcugggcc

SEQ ID NO: 1325288 - RNA, 19 nt, Artificial Sequence
  Description of Artificial Sequence: Synthetic oligonucleotide
  Sense strand starting at position 1345 of SEQ ID NO: 1242143
aagaaauucgggcgugagu

SEQ ID NO: 1325289 - RNA, 19 nt, Artificial Sequence
  Description of Artificial Sequence: Synthetic oligonucleotide
  Antisense strand to SEQ ID NO: 1325288
acucacgcccgaauuucuu

SEQ ID NO: 1325290 - RNA, 19 nt, Artificial Sequence
  Description of Artificial Sequence: Synthetic oligonucleotide
  Sense strand starting at position 1356 of SEQ ID NO: 1242143
gcgugaguaccucaagaaa

SEQ ID NO: 1325291 - RNA, 19 nt, Artificial Sequence
  Description of Artificial Sequence: Synthetic oligonucleotide
  Antisense strand to SEQ ID NO: 1325290
uuucuugagguacucacgc

SEQ ID NO: 1325292 - RNA, 19 nt, Artificial Sequence
  Description of Artificial Sequence: Synthetic oligonucleotide
  Sense strand starting at position 1442 of SEQ ID NO: 1242143
ucuuaccuuuccucgauga

SEQ ID NO: 1325293 - RNA, 19 nt, Artificial Sequence
  Description of Artificial Sequence: Synthetic oligonucleotide
  Antisense strand to SEQ ID NO: 1325292
ucaucgaggaaagguaaga

SEQ ID NO: 1325294 - RNA, 19 nt, Artificial Sequence
  Description of Artificial Sequence: Synthetic oligonucleotide
  Sense strand starting at position 1443 of SEQ ID NO: 1242143
cuuaccuuuccucgaugaa

SEQ ID NO: 1325295 - RNA, 19 nt, Artificial Sequence
  Description of Artificial Sequence: Synthetic oligonucleotide
  Antisense strand to SEQ ID NO: 1325294
uucaucgaggaaagguaag

SEQ ID NO: 1325296 - RNA, 19 nt, Artificial Sequence
  Description of Artificial Sequence: Synthetic oligonucleotide
  Sense strand starting at position 1444 of SEQ ID NO: 1242143
uuaccuuuccucgaugaaa

SEQ ID NO: 1325297 - RNA, 19 nt, Artificial Sequence
  Description of Artificial Sequence: Synthetic oligonucleotide
  Antisense strand to SEQ ID NO: 1325296
uuucaucgaggaaagguaa

SEQ ID NO: 1325298 - RNA, 19 nt, Artificial Sequence
  Description of Artificial Sequence: Synthetic oligonucleotide
  Sense strand starting at position 1446 of SEQ ID NO: 1242143
accuuuccucgaugaaacu

SEQ ID NO: 1325299 - RNA, 19 nt, Artificial Sequence
  Description of Artificial Sequence: Synthetic oligonucleotide
  Antisense strand to SEQ ID NO: 1325298
aguuucaucgaggaaaggu

SEQ ID NO: 1325300 - RNA, 19 nt, Artificial Sequence
  Description of Artificial Sequence: Synthetic oligonucleotide
  Sense strand starting at position 1699 of SEQ ID NO: 1242143
uggcuagcuagaugaguuu

SEQ ID NO: 1325301 - RNA, 19 nt, Artificial Sequence
  Description of Artificial Sequence: Synthetic oligonucleotide
  Antisense strand to SEQ ID NO: 1325300
aaacucaucuagcuagcca

SEQ ID NO: 1325302 - RNA, 19 nt, Artificial Sequence
  Description of Artificial Sequence: Synthetic oligonucleotide
  Sense strand starting at position 1820 of SEQ ID NO: 1242143
ucuguaagugccuggaaca

SEQ ID NO: 1325303 - RNA, 19 nt, Artificial Sequence
  Description of Artificial Sequence: Synthetic oligonucleotide
  Antisense strand to SEQ ID NO: 1325302
uguuccaggcacuuacaga

SEQ ID NO: 1325304 - RNA, 19 nt, Artificial Sequence
  Description of Artificial Sequence: Synthetic oligonucleotide
  Sense strand starting at position 1953 of SEQ ID NO: 1242143
aguuuauauuggucucuuu

SEQ ID NO: 1325305 - RNA, 19 nt, Artificial Sequence
  Description of Artificial Sequence: Synthetic oligonucleotide
  Antisense strand to SEQ ID NO: 1325304
aaagagaccaauauaaacu

SEQ ID NO: 1325306 - RNA, 19 nt, Artificial Sequence
  Description of Artificial Sequence: Synthetic oligonucleotide
  Sense strand starting at position 2080 of SEQ ID NO: 1242143
gcgcgaauccguccaucaa

SEQ ID NO: 1325307 - RNA, 19 nt, Artificial Sequence
  Description of Artificial Sequence: Synthetic oligonucleotide
  Antisense strand to SEQ ID NO: 1325306
uugauggacggauucgcgc

SEQ ID NO: 1325308 - RNA, 19 nt, Artificial Sequence
  Description of Artificial Sequence: Synthetic oligonucleotide
  Sense strand starting at position 2099 of SEQ ID NO: 1242143
cacgcaaaggccuaggauu

SEQ ID NO: 1325309 - RNA, 19 nt, Artificial Sequence
  Description of Artificial Sequence: Synthetic oligonucleotide
  Antisense strand to SEQ ID NO: 1325308
aauccuaggccuuugcgug

SEQ ID NO: 1325310 - RNA, 19 nt, Artificial Sequence
  Description of Artificial Sequence: Synthetic oligonucleotide
  Sense strand starting at position 2172 of SEQ ID NO: 1242143
ggugcuaaguuucugaacu

SEQ ID NO: 1325311 - RNA, 19 nt, Artificial Sequence
  Description of Artificial Sequence: Synthetic oligonucleotide
  Antisense strand to SEQ ID NO: 1325310
aguucagaaacuuagcacc

SEQ ID NO: 1325312 - RNA, 19 nt, Artificial Sequence
  Description of Artificial Sequence: Synthetic oligonucleotide
  Sense strand starting at position 2192 of SEQ ID NO: 1242143
cagaaaugagccugcuuag

SEQ ID NO: 1325313 - RNA, 19 nt, Artificial Sequence
  Description of Artificial Sequence: Synthetic oligonucleotide
  Antisense strand to SEQ ID NO: 1325312
cuaagcaggcucauuucug

SEQ ID NO: 1325314 - RNA, 19 nt, Artificial Sequence
  Description of Artificial Sequence: Synthetic oligonucleotide
  Sense strand starting at position 2266 of SEQ ID NO: 1242143
gcuuuaaguccauaaugau

SEQ ID NO: 1325315 - RNA, 19 nt, Artificial Sequence
  Description of Artificial Sequence: Synthetic oligonucleotide
  Antisense strand to SEQ ID NO: 1325314
aucauuauggacuuaaagc

SEQ ID NO: 1325316 - RNA, 19 nt, Artificial Sequence
  Description of Artificial Sequence: Synthetic oligonucleotide
  Sense strand starting at position 2284 of SEQ ID NO: 1242143
uugacuccuggaggugaaa

SEQ ID NO: 1325317 - RNA, 19 nt, Artificial Sequence
  Description of Artificial Sequence: Synthetic oligonucleotide
  Antisense strand to SEQ ID NO: 1325316
uuucaccuccaggagucaa

SEQ ID NO: 1325318 - RNA, 19 nt, Artificial Sequence
  Description of Artificial Sequence: Synthetic oligonucleotide
  Sense strand starting at position 2349 of SEQ ID NO: 1242143
uugagaacuuuccuuuagu

SEQ ID NO: 1325319 - RNA, 19 nt, Artificial Sequence
  Description of Artificial Sequence: Synthetic oligonucleotide
  Antisense strand to SEQ ID NO: 1325318
acuaaaggaaaguucucaa

SEQ ID NO: 1325320 - RNA, 19 nt, Artificial Sequence
  Description of Artificial Sequence: Synthetic oligonucleotide
  Sense strand starting at position 2350 of SEQ ID NO: 1242143
ugagaacuuuccuuuaguc

SEQ ID NO: 1325321 - RNA, 19 nt, Artificial Sequence
  Description of Artificial Sequence: Synthetic oligonucleotide
  Antisense strand to SEQ ID NO: 1325320
gacuaaaggaaaguucuca

SEQ ID NO: 1325322 - RNA, 19 nt, Artificial Sequence
  Description of Artificial Sequence: Synthetic oligonucleotide
  Sense strand starting at position 2375 of SEQ ID NO: 1242143
gcaugaacucuuuguacag

SEQ ID NO: 1325323 - RNA, 19 nt, Artificial Sequence
  Description of Artificial Sequence: Synthetic oligonucleotide
  Antisense strand to SEQ ID NO: 1325322
cuguacaaagaguucaugc

SEQ ID NO: 1325324 - RNA, 19 nt, Artificial Sequence
  Description of Artificial Sequence: Synthetic oligonucleotide
  Sense strand starting at position 2468 of SEQ ID NO: 1242143
ugucuuuaggaugauguga

SEQ ID NO: 1325325 - RNA, 19 nt, Artificial Sequence
  Description of Artificial Sequence: Synthetic oligonucleotide
  Antisense strand to SEQ ID NO: 1325324
ucacaucauccuaaagaca

SEQ ID NO: 1325326 - RNA, 19 nt, Artificial Sequence
  Description of Artificial Sequence: Synthetic oligonucleotide
  Sense strand starting at position 2610 of SEQ ID NO: 1242143
gggacucauggcuguaauc

SEQ ID NO: 1325327 - RNA, 19 nt, Artificial Sequence
  Description of Artificial Sequence: Synthetic oligonucleotide
  Antisense strand to SEQ ID NO: 1325326
gauuacagccaugaguccc

SEQ ID NO: 1325328 - RNA, 19 nt, Artificial Sequence
  Description of Artificial Sequence: Synthetic oligonucleotide
  Sense strand starting at position 2794 of SEQ ID NO: 1242143
auggcuugaguucaggaga

SEQ ID NO: 1325329 - RNA, 19 nt, Artificial Sequence
  Description of Artificial Sequence: Synthetic oligonucleotide
  Antisense strand to SEQ ID NO: 1325328
ucuccugaacucaagccau

SEQ ID NO: 1325330 - RNA, 19 nt, Artificial Sequence
  Description of Artificial Sequence: Synthetic oligonucleotide
  Sense strand starting at position 3174 of SEQ ID NO: 1242143
aacagaaucggucaggcau

SEQ ID NO: 1325331 - RNA, 19 nt, Artificial Sequence
  Description of Artificial Sequence: Synthetic oligonucleotide
  Antisense strand to SEQ ID NO: 1325330
augccugaccgauucuguu

SEQ ID NO: 1325332 - RNA, 19 nt, Artificial Sequence
  Description of Artificial Sequence: Synthetic oligonucleotide
  Sense strand starting at position 3508 of SEQ ID NO: 1242143
agaugaacuugcuuuggga

SEQ ID NO: 1325333 - RNA, 19 nt, Artificial Sequence
  Description of Artificial Sequence: Synthetic oligonucleotide
  Antisense strand to SEQ ID NO: 1325332
ucccaaagcaaguucaucu

SEQ ID NO: 1325334 - RNA, 19 nt, Artificial Sequence
  Description of Artificial Sequence: Synthetic oligonucleotide
  Sense strand starting at position 3515 of SEQ ID NO: 1242143
cuugcuuugggauguauuc

SEQ ID NO: 1325335 - RNA, 19 nt, Artificial Sequence
  Description of Artificial Sequence: Synthetic oligonucleotide
  Antisense strand to SEQ ID NO: 1325334
gaauacaucccaaagcaag

SEQ ID NO: 1325336 - RNA, 19 nt, Artificial Sequence
  Description of Artificial Sequence: Synthetic oligonucleotide
  Sense strand starting at position 3533 of SEQ ID NO: 1242143
cuguuaaaugcucacuuga

SEQ ID NO: 1325337 - RNA, 19 nt, Artificial Sequence
  Description of Artificial Sequence: Synthetic oligonucleotide
  Antisense strand to SEQ ID NO: 1325336
ucaagugagcauuuaacag

SEQ ID NO: 1325338 - RNA, 19 nt, Artificial Sequence
  Description of Artificial Sequence: Synthetic oligonucleotide
  Sense strand starting at position 3535 of SEQ ID NO: 1242143
guuaaaugcucacuugaaa

SEQ ID NO: 1325339 - RNA, 19 nt, Artificial Sequence
  Description of Artificial Sequence: Synthetic oligonucleotide
  Antisense strand to SEQ ID NO: 1325338
uuucaagugagcauuuaac

SEQ ID NO: 1325340 - RNA, 19 nt, Artificial Sequence
  Description of Artificial Sequence: Synthetic oligonucleotide
  Sense strand starting at position 3548 of SEQ ID NO: 1242143
uugaaaggcuacucuagaa

SEQ ID NO: 1325341 - RNA, 19 nt, Artificial Sequence
  Description of Artificial Sequence: Synthetic oligonucleotide
  Antisense strand to SEQ ID NO: 1325340
uucuagaguagccuuucaa

SEQ ID NO: 1325342 - RNA, 19 nt, Artificial Sequence
  Description of Artificial Sequence: Synthetic oligonucleotide
  Sense strand starting at position 3567 of SEQ ID NO: 1242143
guguaaacacagcauuaau

SEQ ID NO: 1325343 - RNA, 19 nt, Artificial Sequence
  Description of Artificial Sequence: Synthetic oligonucleotide
  Antisense strand to SEQ ID NO: 1325342
auuaaugcuguguuuacac

SEQ ID NO: 1325344 - RNA, 19 nt, Artificial Sequence
  Description of Artificial Sequence: Synthetic oligonucleotide
  Sense strand starting at position 3612 of SEQ ID NO: 1242143
gaauuaggcuacucaguac

SEQ ID NO: 1325345 - RNA, 19 nt, Artificial Sequence
  Description of Artificial Sequence: Synthetic oligonucleotide
  Antisense strand to SEQ ID NO: 1325344
guacugaguagccuaauuc

SEQ ID NO: 1325346 - RNA, 19 nt, Artificial Sequence
  Description of Artificial Sequence: Synthetic oligonucleotide
  Sense strand starting at position 3736 of SEQ ID NO: 1242143
uugucuuaaccuugguauc

SEQ ID NO: 1325347 - RNA, 19 nt, Artificial Sequence
  Description of Artificial Sequence: Synthetic oligonucleotide
  Antisense strand to SEQ ID NO: 1325346
gauaccaagguuaagacaa

SEQ ID NO: 1325348 - RNA, 19 nt, Artificial Sequence
  Description of Artificial Sequence: Synthetic oligonucleotide
  Sense strand starting at position 3737 of SEQ ID NO: 1242143
ugucuuaaccuugguaucu

SEQ ID NO: 1325349 - RNA, 19 nt, Artificial Sequence
  Description of Artificial Sequence: Synthetic oligonucleotide
  Antisense strand to SEQ ID NO: 1325348
agauaccaagguuaagaca

SEQ ID NO: 1325350 - RNA, 19 nt, Artificial Sequence
  Description of Artificial Sequence: Synthetic oligonucleotide
  Sense strand starting at position 3738 of SEQ ID NO: 1242143
gucuuaaccuugguaucua

SEQ ID NO: 1325351 - RNA, 19 nt, Artificial Sequence
  Description of Artificial Sequence: Synthetic oligonucleotide
  Antisense strand to SEQ ID NO: 1325350
uagauaccaagguuaagac

SEQ ID NO: 1325352 - RNA, 19 nt, Artificial Sequence
  Description of Artificial Sequence: Synthetic oligonucleotide
  Sense strand starting at position 16 of SEQ ID NO: 1242144
uugucaagauuugagaaag

SEQ ID NO: 1325353 - RNA, 19 nt, Artificial Sequence
  Description of Artificial Sequence: Synthetic oligonucleotide
  Antisense strand to SEQ ID NO: 1325352
cuuucucaaaucuugacaa

SEQ ID NO: 1325354 - RNA, 19 nt, Artificial Sequence
  Description of Artificial Sequence: Synthetic oligonucleotide
  Sense strand starting at position 295 of SEQ ID NO: 1242144
uccaaauguuaagugcuau

SEQ ID NO: 1325355 - RNA, 19 nt, Artificial Sequence
  Description of Artificial Sequence: Synthetic oligonucleotide
  Antisense strand to SEQ ID NO: 1325354
auagcacuuaacauuugga

SEQ ID NO: 1325356 - RNA, 19 nt, Artificial Sequence
  Description of Artificial Sequence: Synthetic oligonucleotide
  Sense strand starting at position 301 of SEQ ID NO: 1242144
uguuaagugcuauacacuu

SEQ ID NO: 1325357 - RNA, 19 nt, Artificial Sequence
  Description of Artificial Sequence: Synthetic oligonucleotide
  Antisense strand to SEQ ID NO: 1325356
aaguguauagcacuuaaca

SEQ ID NO: 1325358 - RNA, 19 nt, Artificial Sequence
  Description of Artificial Sequence: Synthetic oligonucleotide
  Sense strand starting at position 370 of SEQ ID NO: 1242144
ucuggcaacugacauuuau

SEQ ID NO: 1325359 - RNA, 19 nt, Artificial Sequence
  Description of Artificial Sequence: Synthetic oligonucleotide
  Antisense strand to SEQ ID NO: 1325358
auaaaugucaguugccaga

SEQ ID NO: 1325360 - RNA, 19 nt, Artificial Sequence
  Description of Artificial Sequence: Synthetic oligonucleotide
  Sense strand starting at position 398 of SEQ ID NO: 1242144
cucccugaucuaugcaagu

SEQ ID NO: 1325361 - RNA, 19 nt, Artificial Sequence
  Description of Artificial Sequence: Synthetic oligonucleotide
  Antisense strand to SEQ ID NO: 1325360
acuugcauagaucagggag

SEQ ID NO: 1325362 - RNA, 19 nt, Artificial Sequence
  Description of Artificial Sequence: Synthetic oligonucleotide
  Sense strand starting at position 481 of SEQ ID NO: 1242144
gcuccaguagccugagaaa

SEQ ID NO: 1325363 - RNA, 19 nt, Artificial Sequence
  Description of Artificial Sequence: Synthetic oligonucleotide
  Antisense strand to SEQ ID NO: 1325362
uuucucaggcuacuggagc

SEQ ID NO: 1325364 - RNA, 19 nt, Artificial Sequence
  Description of Artificial Sequence: Synthetic oligonucleotide
  Sense strand starting at position 574 of SEQ ID NO: 1242144
cccauuaaaggguauugua

SEQ ID NO: 1325365 - RNA, 19 nt, Artificial Sequence
  Description of Artificial Sequence: Synthetic oligonucleotide
  Antisense strand to SEQ ID NO: 1325364
uacaauacccuuuaauggg

SEQ ID NO: 1325366 - RNA, 19 nt, Artificial Sequence
  Description of Artificial Sequence: Synthetic oligonucleotide
  Sense strand starting at position 663 of SEQ ID NO: 1242144
gcucucaaugagggucaau

SEQ ID NO: 1325367 - RNA, 19 nt, Artificial Sequence
  Description of Artificial Sequence: Synthetic oligonucleotide
  Antisense strand to SEQ ID NO: 1325366
auugacccucauugagagc

SEQ ID NO: 1325368 - RNA, 19 nt, Artificial Sequence
  Description of Artificial Sequence: Synthetic oligonucleotide
  Sense strand starting at position 741 of SEQ ID NO: 1242144
uaaugcuggugucugagaa

SEQ ID NO: 1325369 - RNA, 19 nt, Artificial Sequence
  Description of Artificial Sequence: Synthetic oligonucleotide
  Antisense strand to SEQ ID NO: 1325368
uucucagacaccagcauua

SEQ ID NO: 1325370 - RNA, 19 nt, Artificial Sequence
  Description of Artificial Sequence: Synthetic oligonucleotide
  Sense strand starting at position 742 of SEQ ID NO: 1242144
aaugcuggugucugagaaa

SEQ ID NO: 1325371 - RNA, 19 nt, Artificial Sequence
  Description of Artificial Sequence: Synthetic oligonucleotide
  Antisense strand to SEQ ID NO: 1325370
uuucucagacaccagcauu

SEQ ID NO: 1325372 - RNA, 19 nt, Artificial Sequence
  Description of Artificial Sequence: Synthetic oligonucleotide
  Sense strand starting at position 749 of SEQ ID NO: 1242144
gugucugagaaaugacaag

SEQ ID NO: 1325373 - RNA, 19 nt, Artificial Sequence
  Description of Artificial Sequence: Synthetic oligonucleotide
  Antisense strand to SEQ ID NO: 1325372
cuugucauuucucagacac

SEQ ID NO: 1325374 - RNA, 19 nt, Artificial Sequence
  Description of Artificial Sequence: Synthetic oligonucleotide
  Sense strand starting at position 816 of SEQ ID NO: 1242144
gcucguuugcuggaauaaa

SEQ ID NO: 1325375 - RNA, 19 nt, Artificial Sequence
  Description of Artificial Sequence: Synthetic oligonucleotide
  Antisense strand to SEQ ID NO: 1325374
uuuauuccagcaaacgagc

SEQ ID NO: 1325376 - RNA, 19 nt, Artificial Sequence
  Description of Artificial Sequence: Synthetic oligonucleotide
  Sense strand starting at position 837 of SEQ ID NO: 1242144
augcauaacuggccacaua

SEQ ID NO: 1325377 - RNA, 19 nt, Artificial Sequence
  Description of Artificial Sequence: Synthetic oligonucleotide
  Antisense strand to SEQ ID NO: 1325376
uauguggccaguuaugcau

SEQ ID NO: 1325378 - RNA, 19 nt, Artificial Sequence
  Description of Artificial Sequence: Synthetic oligonucleotide
  Sense strand starting at position 838 of SEQ ID NO: 1242144
ugcauaacuggccacauaa

SEQ ID NO: 1325379 - RNA, 19 nt, Artificial Sequence
  Description of Artificial Sequence: Synthetic oligonucleotide
  Antisense strand to SEQ ID NO: 1325378
uuauguggccaguuaugca

SEQ ID NO: 1325380 - RNA, 19 nt, Artificial Sequence
  Description of Artificial Sequence: Synthetic oligonucleotide
  Sense strand starting at position 1035 of SEQ ID NO: 1242144
agauguacauuguuuauag

SEQ ID NO: 1325381 - RNA, 19 nt, Artificial Sequence
  Description of Artificial Sequence: Synthetic oligonucleotide
  Antisense strand to SEQ ID NO: 1325380
cuauaaacaauguacaucu

SEQ ID NO: 1325382 - RNA, 19 nt, Artificial Sequence
  Description of Artificial Sequence: Synthetic oligonucleotide
  Sense strand starting at position 1100 of SEQ ID NO: 1242144
cuuaauucccgcugaauua

SEQ ID NO: 1325383 - RNA, 19 nt, Artificial Sequence
  Description of Artificial Sequence: Synthetic oligonucleotide
  Antisense strand to SEQ ID NO: 1325382
uaauucagcgggaauuaag

SEQ ID NO: 1325384 - RNA, 19 nt, Artificial Sequence
  Description of Artificial Sequence: Synthetic oligonucleotide
  Sense strand starting at position 1101 of SEQ ID NO: 1242144
uuaauucccgcugaauuaa

SEQ ID NO: 1325385 - RNA, 19 nt, Artificial Sequence
  Description of Artificial Sequence: Synthetic oligonucleotide
  Antisense strand to SEQ ID NO: 1325384
uuaauucagcgggaauuaa

SEQ ID NO: 1325386 - RNA, 19 nt, Artificial Sequence
  Description of Artificial Sequence: Synthetic oligonucleotide
  Sense strand starting at position 1172 of SEQ ID NO: 1242144
cgcuuaccacaguaacaau

SEQ ID NO: 1325387 - RNA, 19 nt, Artificial Sequence
  Description of Artificial Sequence: Synthetic oligonucleotide
  Antisense strand to SEQ ID NO: 1325386
auuguuacugugguaagcg

SEQ ID NO: 1325388 - RNA, 19 nt, Artificial Sequence
  Description of Artificial Sequence: Synthetic oligonucleotide
  Sense strand starting at position 1218 of SEQ ID NO: 1242144
cgcugugagaguuaggcua

SEQ ID NO: 1325389 - RNA, 19 nt, Artificial Sequence
  Description of Artificial Sequence: Synthetic oligonucleotide
  Antisense strand to SEQ ID NO: 1325388
uagccuaacucucacagcg

SEQ ID NO: 1325390 - RNA, 19 nt, Artificial Sequence
  Description of Artificial Sequence: Synthetic oligonucleotide
  Sense strand starting at position 1226 of SEQ ID NO: 1242144
gaguuaggcuacucaaaug

SEQ ID NO: 1325391 - RNA, 19 nt, Artificial Sequence
  Description of Artificial Sequence: Synthetic oligonucleotide
  Antisense strand to SEQ ID NO: 1325390
cauuugaguagccuaacuc

SEQ ID NO: 1325392 - RNA, 19 nt, Artificial Sequence
  Description of Artificial Sequence: Synthetic oligonucleotide
  Sense strand starting at position 1295 of SEQ ID NO: 1242144
ucgguagcccaaggaaauu

SEQ ID NO: 1325393 - RNA, 19 nt, Artificial Sequence
  Description of Artificial Sequence: Synthetic oligonucleotide
  Antisense strand to SEQ ID NO: 1325392
aauuuccuugggcuaccga

SEQ ID NO: 1325394 - RNA, 19 nt, Artificial Sequence
  Description of Artificial Sequence: Synthetic oligonucleotide
  Sense strand starting at position 1353 of SEQ ID NO: 1242144
gcugcauuugccugaguug

SEQ ID NO: 1325395 - RNA, 19 nt, Artificial Sequence
  Description of Artificial Sequence: Synthetic oligonucleotide
  Antisense strand to SEQ ID NO: 1325394
caacucaggcaaaugcagc

SEQ ID NO: 1325396 - RNA, 19 nt, Artificial Sequence
  Description of Artificial Sequence: Synthetic oligonucleotide
  Sense strand starting at position 1422 of SEQ ID NO: 1242144
ugcuuucugacaggugaag

SEQ ID NO: 1325397 - RNA, 19 nt, Artificial Sequence
  Description of Artificial Sequence: Synthetic oligonucleotide
  Antisense strand to SEQ ID NO: 1325396
cuucaccugucagaaagca

SEQ ID NO: 1325398 - RNA, 19 nt, Artificial Sequence
  Description of Artificial Sequence: Synthetic oligonucleotide
  Sense strand starting at position 1424 of SEQ ID NO: 1242144
cuuucugacaggugaaguu

SEQ ID NO: 1325399 - RNA, 19 nt, Artificial Sequence
  Description of Artificial Sequence: Synthetic oligonucleotide
  Antisense strand to SEQ ID NO: 1325398
aacuucaccugucagaaag

SEQ ID NO: 1325400 - RNA, 19 nt, Artificial Sequence
  Description of Artificial Sequence: Synthetic oligonucleotide
  Sense strand starting at position 1434 of SEQ ID NO: 1242144
ggugaaguugagcauccuu

SEQ ID NO: 1325401 - RNA, 19 nt, Artificial Sequence
  Description of Artificial Sequence: Synthetic oligonucleotide
  Antisense strand to SEQ ID NO: 1325400
aaggaugcucaacuucacc

SEQ ID NO: 1325402 - RNA, 19 nt, Artificial Sequence
  Description of Artificial Sequence: Synthetic oligonucleotide
  Sense strand starting at position 1439 of SEQ ID NO: 1242144
aguugagcauccuuaucaa

SEQ ID NO: 1325403 - RNA, 19 nt, Artificial Sequence
  Description of Artificial Sequence: Synthetic oligonucleotide
  Antisense strand to SEQ ID NO: 1325402
uugauaaggaugcucaacu

SEQ ID NO: 1325404 - RNA, 19 nt, Artificial Sequence
  Description of Artificial Sequence: Synthetic oligonucleotide
  Sense strand starting at position 1452 of SEQ ID NO: 1242144
uaucaaacccucgggaaga

SEQ ID NO: 1325405 - RNA, 19 nt, Artificial Sequence
  Description of Artificial Sequence: Synthetic oligonucleotide
  Antisense strand to SEQ ID NO: 1325404
ucuucccgaggguuugaua

SEQ ID NO: 1325406 - RNA, 19 nt, Artificial Sequence
  Description of Artificial Sequence: Synthetic oligonucleotide
  Sense strand starting at position 1488 of SEQ ID NO: 1242144
caucaacgugacuggaaau

SEQ ID NO: 1325407 - RNA, 19 nt, Artificial Sequence
  Description of Artificial Sequence: Synthetic oligonucleotide
  Antisense strand to SEQ ID NO: 1325406
auuuccagucacguugaug

SEQ ID NO: 1325408 - RNA, 19 nt, Artificial Sequence
  Description of Artificial Sequence: Synthetic oligonucleotide
  Sense strand starting at position 2927 of SEQ ID NO: 1242144
gcuggugucggcuuaauug

SEQ ID NO: 1325409 - RNA, 19 nt, Artificial Sequence
  Description of Artificial Sequence: Synthetic oligonucleotide
  Antisense strand to SEQ ID NO: 1325408
caauuaagccgacaccagc

SEQ ID NO: 1325410 - RNA, 19 nt, Artificial Sequence
  Description of Artificial Sequence: Synthetic oligonucleotide
  Sense strand starting at position 3450 of SEQ ID NO: 1242144
cuaccugugaucggagcaa

SEQ ID NO: 1325411 - RNA, 19 nt, Artificial Sequence
  Description of Artificial Sequence: Synthetic oligonucleotide
  Antisense strand to SEQ ID NO: 1325410
uugcuccgaucacagguag

SEQ ID NO: 1325412 - RNA, 19 nt, Artificial Sequence
  Description of Artificial Sequence: Synthetic oligonucleotide
  Sense strand starting at position 3684 of SEQ ID NO: 1242144
acgcccuaucagggugaua

SEQ ID NO: 1325413 - RNA, 19 nt, Artificial Sequence
  Description of Artificial Sequence: Synthetic oligonucleotide
  Antisense strand to SEQ ID NO: 1325412
uaucacccugauagggcgu

SEQ ID NO: 1325414 - RNA, 19 nt, Artificial Sequence
  Description of Artificial Sequence: Synthetic oligonucleotide
  Sense strand starting at position 3697 of SEQ ID NO: 1242144
gugauacguguugacaacu

SEQ ID NO: 1325415 - RNA, 19 nt, Artificial Sequence
  Description of Artificial Sequence: Synthetic oligonucleotide
  Antisense strand to SEQ ID NO: 1325414
aguugucaacacguaucac

SEQ ID NO: 1325416 - RNA, 19 nt, Artificial Sequence
  Description of Artificial Sequence: Synthetic oligonucleotide
  Sense strand starting at position 3829 of SEQ ID NO: 1242144
uaaaguaggagugaaguuu

SEQ ID NO: 1325417 - RNA, 19 nt, Artificial Sequence
  Description of Artificial Sequence: Synthetic oligonucleotide
  Antisense strand to SEQ ID NO: 1325416
aaacuucacuccuacuuua

SEQ ID NO: 1325418 - RNA, 19 nt, Artificial Sequence
  Description of Artificial Sequence: Synthetic oligonucleotide
  Sense strand starting at position 3835 of SEQ ID NO: 1242144
aggagugaaguuuguuuga

SEQ ID NO: 1325419 - RNA, 19 nt, Artificial Sequence
  Description of Artificial Sequence: Synthetic oligonucleotide
  Antisense strand to SEQ ID NO: 1325418
ucaaacaaacuucacuccu

SEQ ID NO: 1325420 - RNA, 19 nt, Artificial Sequence
  Description of Artificial Sequence: Synthetic oligonucleotide
  Sense strand starting at position 3837 of SEQ ID NO: 1242144
gagugaaguuuguuugauu

SEQ ID NO: 1325421 - RNA, 19 nt, Artificial Sequence
  Description of Artificial Sequence: Synthetic oligonucleotide
  Antisense strand to SEQ ID NO: 1325420
aaucaaacaaacuucacuc

SEQ ID NO: 1325422 - RNA, 19 nt, Artificial Sequence
  Description of Artificial Sequence: Synthetic oligonucleotide
  Sense strand starting at position 3838 of SEQ ID NO: 1242144
agugaaguuuguuugauuc

SEQ ID NO: 1325423 - RNA, 19 nt, Artificial Sequence
  Description of Artificial Sequence: Synthetic oligonucleotide
  Antisense strand to SEQ ID NO: 1325422
gaaucaaacaaacuucacu

SEQ ID NO: 1325424 - RNA, 19 nt, Artificial Sequence
  Description of Artificial Sequence: Synthetic oligonucleotide
  Sense strand starting at position 3858 of SEQ ID NO: 1242144
cuguaccuugccuagugau

SEQ ID NO: 1325425 - RNA, 19 nt, Artificial Sequence
  Description of Artificial Sequence: Synthetic oligonucleotide
  Antisense strand to SEQ ID NO: 1325424
aucacuaggcaagguacag

SEQ ID NO: 1325426 - RNA, 19 nt, Artificial Sequence
  Description of Artificial Sequence: Synthetic oligonucleotide
  Sense strand starting at position 3914 of SEQ ID NO: 1242144
cccaauauuguuuguggca

SEQ ID NO: 1325427 - RNA, 19 nt, Artificial Sequence
  Description of Artificial Sequence: Synthetic oligonucleotide
  Antisense strand to SEQ ID NO: 1325426
ugccacaaacaauauuggg

SEQ ID NO: 1325428 - RNA, 19 nt, Artificial Sequence
  Description of Artificial Sequence: Synthetic oligonucleotide
  Sense strand starting at position 3915 of SEQ ID NO: 1242144
ccaauauuguuuguggcaa

SEQ ID NO: 1325429 - RNA, 19 nt, Artificial Sequence
  Description of Artificial Sequence: Synthetic oligonucleotide
  Antisense strand to SEQ ID NO: 1325428
uugccacaaacaauauugg

SEQ ID NO: 1325430 - RNA, 19 nt, Artificial Sequence
  Description of Artificial Sequence: Synthetic oligonucleotide
  Sense strand starting at position 3974 of SEQ ID NO: 1242144
uaagaagccuguuugguaa

SEQ ID NO: 1325431 - RNA, 19 nt, Artificial Sequence
  Description of Artificial Sequence: Synthetic oligonucleotide
  Antisense strand to SEQ ID NO: 1325430
uuaccaaacaggcuucuua

SEQ ID NO: 1325432 - RNA, 19 nt, Artificial Sequence
  Description of Artificial Sequence: Synthetic oligonucleotide
  Sense strand starting at position 246 of SEQ ID NO: 1242145
uagcucuccuggucauaga

SEQ ID NO: 1325433 - RNA, 19 nt, Artificial Sequence
  Description of Artificial Sequence: Synthetic oligonucleotide
  Antisense strand to SEQ ID NO: 1325432
ucuaugaccaggagagcua

SEQ ID NO: 1325434 - RNA, 19 nt, Artificial Sequence
  Description of Artificial Sequence: Synthetic oligonucleotide
  Sense strand starting at position 247 of SEQ ID NO: 1242145
agcucuccuggucauagau

SEQ ID NO: 1325435 - RNA, 19 nt, Artificial Sequence
  Description of Artificial Sequence: Synthetic oligonucleotide
  Antisense strand to SEQ ID NO: 1325434
aucuaugaccaggagagcu

SEQ ID NO: 1325436 - RNA, 19 nt, Artificial Sequence
  Description of Artificial Sequence: Synthetic oligonucleotide
  Sense strand starting at position 339 of SEQ ID NO: 1242145
cuagguuaucuguaaauua

SEQ ID NO: 1325437 - RNA, 19 nt, Artificial Sequence
  Description of Artificial Sequence: Synthetic oligonucleotide
  Antisense strand to SEQ ID NO: 1325436
uaauuuacagauaaccuag

SEQ ID NO: 1325438 - RNA, 19 nt, Artificial Sequence
  Description of Artificial Sequence: Synthetic oligonucleotide
  Sense strand starting at position 490 of SEQ ID NO: 1242145
cuuauucucugauuaguuc

SEQ ID NO: 1325439 - RNA, 19 nt, Artificial Sequence
  Description of Artificial Sequence: Synthetic oligonucleotide
  Antisense strand to SEQ ID NO: 1325438
gaacuaaucagagaauaag

SEQ ID NO: 1325440 - RNA, 19 nt, Artificial Sequence
  Description of Artificial Sequence: Synthetic oligonucleotide
  Sense strand starting at position 494 of SEQ ID NO: 1242145
uucucugauuaguucuaua

SEQ ID NO: 1325441 - RNA, 19 nt, Artificial Sequence
  Description of Artificial Sequence: Synthetic oligonucleotide
  Antisense strand to SEQ ID NO: 1325440
uauagaacuaaucagagaa

SEQ ID NO: 1325442 - RNA, 19 nt, Artificial Sequence
  Description of Artificial Sequence: Synthetic oligonucleotide
  Sense strand starting at position 640 of SEQ ID NO: 1242145
ccauucuuucgucaagggu

SEQ ID NO: 1325443 - RNA, 19 nt, Artificial Sequence
  Description of Artificial Sequence: Synthetic oligonucleotide
  Antisense strand to SEQ ID NO: 1325442
acccuugacgaaagaaugg

SEQ ID NO: 1325444 - RNA, 19 nt, Artificial Sequence
  Description of Artificial Sequence: Synthetic oligonucleotide
  Sense strand starting at position 683 of SEQ ID NO: 1242145
ccagucauugaaugcucaa

SEQ ID NO: 1325445 - RNA, 19 nt, Artificial Sequence
  Description of Artificial Sequence: Synthetic oligonucleotide
  Antisense strand to SEQ ID NO: 1325444
uugagcauucaaugacugg

SEQ ID NO: 1325446 - RNA, 19 nt, Artificial Sequence
  Description of Artificial Sequence: Synthetic oligonucleotide
  Sense strand starting at position 743 of SEQ ID NO: 1242145
gccaauuucuugguuucuu

SEQ ID NO: 1325447 - RNA, 19 nt, Artificial Sequence
  Description of Artificial Sequence: Synthetic oligonucleotide
  Antisense strand to SEQ ID NO: 1325446
aagaaaccaagaaauuggc

SEQ ID NO: 1325448 - RNA, 19 nt, Artificial Sequence
  Description of Artificial Sequence: Synthetic oligonucleotide
  Sense strand starting at position 747 of SEQ ID NO: 1242145
auuucuugguuucuuaagu

SEQ ID NO: 1325449 - RNA, 19 nt, Artificial Sequence
  Description of Artificial Sequence: Synthetic oligonucleotide
  Antisense strand to SEQ ID NO: 1325448
acuuaagaaaccaagaaau

SEQ ID NO: 1325450 - RNA, 19 nt, Artificial Sequence
  Description of Artificial Sequence: Synthetic oligonucleotide
  Sense strand starting at position 836 of SEQ ID NO: 1242145
uuaucuauaggcuagauau

SEQ ID NO: 1325451 - RNA, 19 nt, Artificial Sequence
  Description of Artificial Sequence: Synthetic oligonucleotide
  Antisense strand to SEQ ID NO: 1325450
auaucuagccuauagauaa

SEQ ID NO: 1325452 - RNA, 19 nt, Artificial Sequence
  Description of Artificial Sequence: Synthetic oligonucleotide
  Sense strand starting at position 874 of SEQ ID NO: 1242145
uaaguaagauuauuggcuu

SEQ ID NO: 1325453 - RNA, 19 nt, Artificial Sequence
  Description of Artificial Sequence: Synthetic oligonucleotide
  Antisense strand to SEQ ID NO: 1325452
aagccaauaaucuuacuua

SEQ ID NO: 1325454 - RNA, 19 nt, Artificial Sequence
  Description of Artificial Sequence: Synthetic oligonucleotide
  Sense strand starting at position 988 of SEQ ID NO: 1242145
aguuaaacucaacguauau

SEQ ID NO: 1325455 - RNA, 19 nt, Artificial Sequence
  Description of Artificial Sequence: Synthetic oligonucleotide
  Antisense strand to SEQ ID NO: 1325454
auauacguugaguuuaacu

SEQ ID NO: 1325456 - RNA, 19 nt, Artificial Sequence
  Description of Artificial Sequence: Synthetic oligonucleotide
  Sense strand starting at position 1109 of SEQ ID NO: 1242145
ucuccuuugcacgacaaau

SEQ ID NO: 1325457 - RNA, 19 nt, Artificial Sequence
  Description of Artificial Sequence: Synthetic oligonucleotide
  Antisense strand to SEQ ID NO: 1325456
auuugucgugcaaaggaga

SEQ ID NO: 1325458 - RNA, 19 nt, Artificial Sequence
  Description of Artificial Sequence: Synthetic oligonucleotide
  Sense strand starting at position 1111 of SEQ ID NO: 1242145
uccuuugcacgacaaauau

SEQ ID NO: 1325459 - RNA, 19 nt, Artificial Sequence
  Description of Artificial Sequence: Synthetic oligonucleotide
  Antisense strand to SEQ ID NO: 1325458
auauuugucgugcaaagga

SEQ ID NO: 1325460 - RNA, 19 nt, Artificial Sequence
  Description of Artificial Sequence: Synthetic oligonucleotide
  Sense strand starting at position 1129 of SEQ ID NO: 1242145
uuucuuuacccaggaauga

SEQ ID NO: 1325461 - RNA, 19 nt, Artificial Sequence
  Description of Artificial Sequence: Synthetic oligonucleotide
  Antisense strand to SEQ ID NO: 1325460
ucauuccuggguaaagaaa

SEQ ID NO: 1325462 - RNA, 19 nt, Artificial Sequence
  Description of Artificial Sequence: Synthetic oligonucleotide
  Sense strand starting at position 2187 of SEQ ID NO: 1242145
gguugauucagaggucgga

SEQ ID NO: 1325463 - RNA, 19 nt, Artificial Sequence
  Description of Artificial Sequence: Synthetic oligonucleotide
  Antisense strand to SEQ ID NO: 1325462
uccgaccucugaaucaacc

SEQ ID NO: 1325464 - RNA, 19 nt, Artificial Sequence
  Description of Artificial Sequence: Synthetic oligonucleotide
  Sense strand starting at position 2191 of SEQ ID NO: 1242145
gauucagaggucggaaugu

SEQ ID NO: 1325465 - RNA, 19 nt, Artificial Sequence
  Description of Artificial Sequence: Synthetic oligonucleotide
  Antisense strand to SEQ ID NO: 1325464
acauuccgaccucugaauc

SEQ ID NO: 1325466 - RNA, 19 nt, Artificial Sequence
  Description of Artificial Sequence: Synthetic oligonucleotide
  Sense strand starting at position 2225 of SEQ ID NO: 1242145
uguuguauuccugugcugu

SEQ ID NO: 1325467 - RNA, 19 nt, Artificial Sequence
  Description of Artificial Sequence: Synthetic oligonucleotide
  Antisense strand to SEQ ID NO: 1325466
acagcacaggaauacaaca

SEQ ID NO: 1325468 - RNA, 19 nt, Artificial Sequence
  Description of Artificial Sequence: Synthetic oligonucleotide
  Sense strand starting at position 2351 of SEQ ID NO: 1242145
guccuauauguacauuauu

SEQ ID NO: 1325469 - RNA, 19 nt, Artificial Sequence
  Description of Artificial Sequence: Synthetic oligonucleotide
  Antisense strand to SEQ ID NO: 1325468
aauaauguacauauaggac

SEQ ID NO: 1325470 - RNA, 19 nt, Artificial Sequence
  Description of Artificial Sequence: Synthetic oligonucleotide
  Sense strand starting at position 2684 of SEQ ID NO: 1242145
aucaaaucuugauuguguu

SEQ ID NO: 1325471 - RNA, 19 nt, Artificial Sequence
  Description of Artificial Sequence: Synthetic oligonucleotide
  Antisense strand to SEQ ID NO: 1325470
aacacaaucaagauuugau

SEQ ID NO: 1325472 - RNA, 19 nt, Artificial Sequence
  Description of Artificial Sequence: Synthetic oligonucleotide
  Sense strand starting at position 2688 of SEQ ID NO: 1242145
aaucuugauuguguuugau

SEQ ID NO: 1325473 - RNA, 19 nt, Artificial Sequence
  Description of Artificial Sequence: Synthetic oligonucleotide
  Antisense strand to SEQ ID NO: 1325472
aucaaacacaaucaagauu

SEQ ID NO: 1325474 - RNA, 19 nt, Artificial Sequence
  Description of Artificial Sequence: Synthetic oligonucleotide
  Sense strand starting at position 2709 of SEQ ID NO: 1242145
uggccuuacggagaugaau

SEQ ID NO: 1325475 - RNA, 19 nt, Artificial Sequence
  Description of Artificial Sequence: Synthetic oligonucleotide
  Antisense strand to SEQ ID NO: 1325474
auucaucuccguaaggcca

SEQ ID NO: 1325476 - RNA, 19 nt, Artificial Sequence
  Description of Artificial Sequence: Synthetic oligonucleotide
  Sense strand starting at position 2711 of SEQ ID NO: 1242145
gccuuacggagaugaauaa

SEQ ID NO: 1325477 - RNA, 19 nt, Artificial Sequence
  Description of Artificial Sequence: Synthetic oligonucleotide
  Antisense strand to SEQ ID NO: 1325476
uuauucaucuccguaaggc

SEQ ID NO: 1325478 - RNA, 19 nt, Artificial Sequence
  Description of Artificial Sequence: Synthetic oligonucleotide
  Sense strand starting at position 2767 of SEQ ID NO: 1242145
cuacucuugccuuagauga

SEQ ID NO: 1325479 - RNA, 19 nt, Artificial Sequence
  Description of Artificial Sequence: Synthetic oligonucleotide
  Antisense strand to SEQ ID NO: 1325478
ucaucuaaggcaagaguag

SEQ ID NO: 1325480 - RNA, 19 nt, Artificial Sequence
  Description of Artificial Sequence: Synthetic oligonucleotide
  Sense strand starting at position 2903 of SEQ ID NO: 1242145
ugguaaggauagucacaau

SEQ ID NO: 1325481 - RNA, 19 nt, Artificial Sequence
  Description of Artificial Sequence: Synthetic oligonucleotide
  Antisense strand to SEQ ID NO: 1325480
auugugacuauccuuacca

SEQ ID NO: 1325482 - RNA, 19 nt, Artificial Sequence
  Description of Artificial Sequence: Synthetic oligonucleotide
  Sense strand starting at position 2935 of SEQ ID NO: 1242145
auuguuggugcucaggaaa

SEQ ID NO: 1325483 - RNA, 19 nt, Artificial Sequence
  Description of Artificial Sequence: Synthetic oligonucleotide
  Antisense strand to SEQ ID NO: 1325482
uuuccugagcaccaacaau

SEQ ID NO: 1325484 - RNA, 19 nt, Artificial Sequence
  Description of Artificial Sequence: Synthetic oligonucleotide
  Sense strand starting at position 2938 of SEQ ID NO: 1242145
guuggugcucaggaaacga

SEQ ID NO: 1325485 - RNA, 19 nt, Artificial Sequence
  Description of Artificial Sequence: Synthetic oligonucleotide
  Antisense strand to SEQ ID NO: 1325484
ucguuuccugagcaccaac

SEQ ID NO: 1325486 - RNA, 19 nt, Artificial Sequence
  Description of Artificial Sequence: Synthetic oligonucleotide
  Sense strand starting at position 2982 of SEQ ID NO: 1242145
cacugagugcuuugaacua

SEQ ID NO: 1325487 - RNA, 19 nt, Artificial Sequence
  Description of Artificial Sequence: Synthetic oligonucleotide
  Antisense strand to SEQ ID NO: 1325486
uaguucaaagcacucagug

SEQ ID NO: 1325488 - RNA, 19 nt, Artificial Sequence
  Description of Artificial Sequence: Synthetic oligonucleotide
  Sense strand starting at position 3260 of SEQ ID NO: 1242145
ugauguaccuugucauaag

SEQ ID NO: 1325489 - RNA, 19 nt, Artificial Sequence
  Description of Artificial Sequence: Synthetic oligonucleotide
  Antisense strand to SEQ ID NO: 1325488
cuuaugacaagguacauca

SEQ ID NO: 1325490 - RNA, 19 nt, Artificial Sequence
  Description of Artificial Sequence: Synthetic oligonucleotide
  Sense strand starting at position 3274 of SEQ ID NO: 1242145
auaagacccucguuccaaa

SEQ ID NO: 1325491 - RNA, 19 nt, Artificial Sequence
  Description of Artificial Sequence: Synthetic oligonucleotide
  Antisense strand to SEQ ID NO: 1325490
uuuggaacgagggucuuau

SEQ ID NO: 1325492 - RNA, 19 nt, Artificial Sequence
  Description of Artificial Sequence: Synthetic oligonucleotide
  Sense strand starting at position 3587 of SEQ ID NO: 1242145
agcugugacccuuaagaug

SEQ ID NO: 1325493 - RNA, 19 nt, Artificial Sequence
  Description of Artificial Sequence: Synthetic oligonucleotide
  Antisense strand to SEQ ID NO: 1325492
caucuuaagggucacagcu

SEQ ID NO: 1325494 - RNA, 19 nt, Artificial Sequence
  Description of Artificial Sequence: Synthetic oligonucleotide
  Sense strand starting at position 3683 of SEQ ID NO: 1242145
agcuauagugaaugaaugu

SEQ ID NO: 1325495 - RNA, 19 nt, Artificial Sequence
  Description of Artificial Sequence: Synthetic oligonucleotide
  Antisense strand to SEQ ID NO: 1325494
acauucauucacuauagcu

SEQ ID NO: 1325496 - RNA, 19 nt, Artificial Sequence
  Description of Artificial Sequence: Synthetic oligonucleotide
  Sense strand starting at position 3699 of SEQ ID NO: 1242145
uguggaaauuuauacaaug

SEQ ID NO: 1325497 - RNA, 19 nt, Artificial Sequence
  Description of Artificial Sequence: Synthetic oligonucleotide
  Antisense strand to SEQ ID NO: 1325496
cauuguauaaauuuccaca

SEQ ID NO: 1325498 - RNA, 19 nt, Artificial Sequence
  Description of Artificial Sequence: Synthetic oligonucleotide
  Sense strand starting at position 3708 of SEQ ID NO: 1242145
uuauacaaugcagguaaau

SEQ ID NO: 1325499 - RNA, 19 nt, Artificial Sequence
  Description of Artificial Sequence: Synthetic oligonucleotide
  Antisense strand to SEQ ID NO: 1325498
auuuaccugcauuguauaa

SEQ ID NO: 1325500 - RNA, 19 nt, Artificial Sequence
  Description of Artificial Sequence: Synthetic oligonucleotide
  Sense strand starting at position 3717 of SEQ ID NO: 1242145
gcagguaaauauguaggaa

SEQ ID NO: 1325501 - RNA, 19 nt, Artificial Sequence
  Description of Artificial Sequence: Synthetic oligonucleotide
  Antisense strand to SEQ ID NO: 1325500
uuccuacauauuuaccugc

SEQ ID NO: 1325502 - RNA, 19 nt, Artificial Sequence
  Description of Artificial Sequence: Synthetic oligonucleotide
  Sense strand starting at position 3766 of SEQ ID NO: 1242145
agaguauacauauguguaa

SEQ ID NO: 1325503 - RNA, 19 nt, Artificial Sequence
  Description of Artificial Sequence: Synthetic oligonucleotide
  Antisense strand to SEQ ID NO: 1325502
uuacacauauguauacucu

SEQ ID NO: 1325504 - RNA, 19 nt, Artificial Sequence
  Description of Artificial Sequence: Synthetic oligonucleotide
  Sense strand starting at position 3769 of SEQ ID NO: 1242145
guauacauauguguaacau

SEQ ID NO: 1325505 - RNA, 19 nt, Artificial Sequence
  Description of Artificial Sequence: Synthetic oligonucleotide
  Antisense strand to SEQ ID NO: 1325504
auguuacacauauguauac

SEQ ID NO: 1325506 - RNA, 19 nt, Artificial Sequence
  Description of Artificial Sequence: Synthetic oligonucleotide
  Sense strand starting at position 3877 of SEQ ID NO: 1242145
cucaaaguguuaucaaacu

SEQ ID NO: 1325507 - RNA, 19 nt, Artificial Sequence
  Description of Artificial Sequence: Synthetic oligonucleotide
  Antisense strand to SEQ ID NO: 1325506
aguuugauaacacuuugag

SEQ ID NO: 1325508 - RNA, 19 nt, Artificial Sequence
  Description of Artificial Sequence: Synthetic oligonucleotide
  Sense strand starting at position 3924 of SEQ ID NO: 1242145
ucauaucaauuggugagaa

SEQ ID NO: 1325509 - RNA, 19 nt, Artificial Sequence
  Description of Artificial Sequence: Synthetic oligonucleotide
  Antisense strand to SEQ ID NO: 1325508
uucucaccaauugauauga

SEQ ID NO: 1325510 - RNA, 19 nt, Artificial Sequence
  Description of Artificial Sequence: Synthetic oligonucleotide
  Sense strand starting at position 3975 of SEQ ID NO: 1242145
agauaaauguugucuauuc

SEQ ID NO: 1325511 - RNA, 19 nt, Artificial Sequence
  Description of Artificial Sequence: Synthetic oligonucleotide
  Antisense strand to SEQ ID NO: 1325510
gaauagacaacauuuaucu

SEQ ID NO: 1325512 - RNA, 19 nt, Artificial Sequence
  Description of Artificial Sequence: Synthetic oligonucleotide
  Sense strand starting at position 268 of SEQ ID NO: 1242146
agacauguaccuggcuaau

SEQ ID NO: 1325513 - RNA, 19 nt, Artificial Sequence
  Description of Artificial Sequence: Synthetic oligonucleotide
  Antisense strand to SEQ ID NO: 1325512
auuagccagguacaugucu

SEQ ID NO: 1325514 - RNA, 19 nt, Artificial Sequence
  Description of Artificial Sequence: Synthetic oligonucleotide
  Sense strand starting at position 391 of SEQ ID NO: 1242146
aagggauccuuccaaagug

SEQ ID NO: 1325515 - RNA, 19 nt, Artificial Sequence
  Description of Artificial Sequence: Synthetic oligonucleotide
  Antisense strand to SEQ ID NO: 1325514
cacuuuggaaggaucccuu

SEQ ID NO: 1325516 - RNA, 19 nt, Artificial Sequence
  Description of Artificial Sequence: Synthetic oligonucleotide
  Sense strand starting at position 825 of SEQ ID NO: 1242146
ugggauuccaggcguaagu

SEQ ID NO: 1325517 - RNA, 19 nt, Artificial Sequence
  Description of Artificial Sequence: Synthetic oligonucleotide
  Antisense strand to SEQ ID NO: 1325516
acuuacgccuggaauccca

SEQ ID NO: 1325518 - RNA, 19 nt, Artificial Sequence
  Description of Artificial Sequence: Synthetic oligonucleotide
  Sense strand starting at position 1250 of SEQ ID NO: 1242146
aacagauagugauggauaa

SEQ ID NO: 1325519 - RNA, 19 nt, Artificial Sequence
  Description of Artificial Sequence: Synthetic oligonucleotide
  Antisense strand to SEQ ID NO: 1325518
uuauccaucacuaucuguu

SEQ ID NO: 1325520 - RNA, 19 nt, Artificial Sequence
  Description of Artificial Sequence: Synthetic oligonucleotide
  Sense strand starting at position 1373 of SEQ ID NO: 1242146
acaguaaccuuucguuaau

SEQ ID NO: 1325521 - RNA, 19 nt, Artificial Sequence
  Description of Artificial Sequence: Synthetic oligonucleotide
  Antisense strand to SEQ ID NO: 1325520
auuaacgaaagguuacugu

SEQ ID NO: 1325522 - RNA, 19 nt, Artificial Sequence
  Description of Artificial Sequence: Synthetic oligonucleotide
  Sense strand starting at position 1632 of SEQ ID NO: 1242146
gacggagcuccaugaaagu

SEQ ID NO: 1325523 - RNA, 19 nt, Artificial Sequence
  Description of Artificial Sequence: Synthetic oligonucleotide
  Antisense strand to SEQ ID NO: 1325522
acuuucauggagcuccguc

SEQ ID NO: 1325524 - RNA, 19 nt, Artificial Sequence
  Description of Artificial Sequence: Synthetic oligonucleotide
  Sense strand starting at position 2176 of SEQ ID NO: 1242146
ugugcagcauccucaugau

SEQ ID NO: 1325525 - RNA, 19 nt, Artificial Sequence
  Description of Artificial Sequence: Synthetic oligonucleotide
  Antisense strand to SEQ ID NO: 1325524
aucaugaggaugcugcaca

SEQ ID NO: 1325526 - RNA, 19 nt, Artificial Sequence
  Description of Artificial Sequence: Synthetic oligonucleotide
  Sense strand starting at position 2188 of SEQ ID NO: 1242146
ucaugauggcaucgccuua

SEQ ID NO: 1325527 - RNA, 19 nt, Artificial Sequence
  Description of Artificial Sequence: Synthetic oligonucleotide
  Antisense strand to SEQ ID NO: 1325526
uaaggcgaugccaucauga

SEQ ID NO: 1325528 - RNA, 19 nt, Artificial Sequence
  Description of Artificial Sequence: Synthetic oligonucleotide
  Sense strand starting at position 2436 of SEQ ID NO: 1242146
acucauugucaagggaaac

SEQ ID NO: 1325529 - RNA, 19 nt, Artificial Sequence
  Description of Artificial Sequence: Synthetic oligonucleotide
  Antisense strand to SEQ ID NO: 1325528
guuucccuugacaaugagu

SEQ ID NO: 1325530 - RNA, 19 nt, Artificial Sequence
  Description of Artificial Sequence: Synthetic oligonucleotide
  Sense strand starting at position 2508 of SEQ ID NO: 1242146
aagagaugguuggugucuu

SEQ ID NO: 1325531 - RNA, 19 nt, Artificial Sequence
  Description of Artificial Sequence: Synthetic oligonucleotide
  Antisense strand to SEQ ID NO: 1325530
aagacaccaaccaucucuu

SEQ ID NO: 1325532 - RNA, 19 nt, Artificial Sequence
  Description of Artificial Sequence: Synthetic oligonucleotide
  Sense strand starting at position 2530 of SEQ ID NO: 1242146
cucugagaccucugaucca

SEQ ID NO: 1325533 - RNA, 19 nt, Artificial Sequence
  Description of Artificial Sequence: Synthetic oligonucleotide
  Antisense strand to SEQ ID NO: 1325532
uggaucagaggucucagag

SEQ ID NO: 1325534 - RNA, 19 nt, Artificial Sequence
  Description of Artificial Sequence: Synthetic oligonucleotide
  Sense strand starting at position 2548 of SEQ ID NO: 1242146
auuguuugcacuggaagca

SEQ ID NO: 1325535 - RNA, 19 nt, Artificial Sequence
  Description of Artificial Sequence: Synthetic oligonucleotide
  Antisense strand to SEQ ID NO: 1325534
ugcuuccagugcaaacaau

SEQ ID NO: 1325536 - RNA, 19 nt, Artificial Sequence
  Description of Artificial Sequence: Synthetic oligonucleotide
  Sense strand starting at position 2564 of SEQ ID NO: 1242146
gcaccaugaaugggugaau

SEQ ID NO: 1325537 - RNA, 19 nt, Artificial Sequence
  Description of Artificial Sequence: Synthetic oligonucleotide
  Antisense strand to SEQ ID NO: 1325536
auucacccauucauggugc

SEQ ID NO: 1325538 - RNA, 19 nt, Artificial Sequence
  Description of Artificial Sequence: Synthetic oligonucleotide
  Sense strand starting at position 2565 of SEQ ID NO: 1242146
caccaugaaugggugaauu

SEQ ID NO: 1325539 - RNA, 19 nt, Artificial Sequence
  Description of Artificial Sequence: Synthetic oligonucleotide
  Antisense strand to SEQ ID NO: 1325538
aauucacccauucauggug

SEQ ID NO: 1325540 - RNA, 19 nt, Artificial Sequence
  Description of Artificial Sequence: Synthetic oligonucleotide
  Sense strand starting at position 2629 of SEQ ID NO: 1242146
aguaaacuccaguguaguu

SEQ ID NO: 1325541 - RNA, 19 nt, Artificial Sequence
  Description of Artificial Sequence: Synthetic oligonucleotide
  Antisense strand to SEQ ID NO: 1325540
aacuacacuggaguuuacu

SEQ ID NO: 1325542 - RNA, 19 nt, Artificial Sequence
  Description of Artificial Sequence: Synthetic oligonucleotide
  Sense strand starting at position 2638 of SEQ ID NO: 1242146
caguguaguuucuagugaa

SEQ ID NO: 1325543 - RNA, 19 nt, Artificial Sequence
  Description of Artificial Sequence: Synthetic oligonucleotide
  Antisense strand to SEQ ID NO: 1325542
uucacuagaaacuacacug

SEQ ID NO: 1325544 - RNA, 19 nt, Artificial Sequence
  Description of Artificial Sequence: Synthetic oligonucleotide
  Sense strand starting at position 2641 of SEQ ID NO: 1242146
uguaguuucuagugaaauu

SEQ ID NO: 1325545 - RNA, 19 nt, Artificial Sequence
  Description of Artificial Sequence: Synthetic oligonucleotide
  Antisense strand to SEQ ID NO: 1325544
aauuucacuagaaacuaca

SEQ ID NO: 1325546 - RNA, 19 nt, Artificial Sequence
  Description of Artificial Sequence: Synthetic oligonucleotide
  Sense strand starting at position 2671 of SEQ ID NO: 1242146
auagaagauuaccugucau

SEQ ID NO: 1325547 - RNA, 19 nt, Artificial Sequence
  Description of Artificial Sequence: Synthetic oligonucleotide
  Antisense strand to SEQ ID NO: 1325546
augacagguaaucuucuau

SEQ ID NO: 1325548 - RNA, 19 nt, Artificial Sequence
  Description of Artificial Sequence: Synthetic oligonucleotide
  Sense strand starting at position 2677 of SEQ ID NO: 1242146
gauuaccugucauagacag

SEQ ID NO: 1325549 - RNA, 19 nt, Artificial Sequence
  Description of Artificial Sequence: Synthetic oligonucleotide
  Antisense strand to SEQ ID NO: 1325548
cugucuaugacagguaauc

SEQ ID NO: 1325550 - RNA, 19 nt, Artificial Sequence
  Description of Artificial Sequence: Synthetic oligonucleotide
  Sense strand starting at position 2721 of SEQ ID NO: 1242146
uugccaggcucgucagaua

SEQ ID NO: 1325551 - RNA, 19 nt, Artificial Sequence
  Description of Artificial Sequence: Synthetic oligonucleotide
  Antisense strand to SEQ ID NO: 1325550
uaucugacgagccuggcaa

SEQ ID NO: 1325552 - RNA, 19 nt, Artificial Sequence
  Description of Artificial Sequence: Synthetic oligonucleotide
  Sense strand starting at position 2724 of SEQ ID NO: 1242146
ccaggcucgucagauagau

SEQ ID NO: 1325553 - RNA, 19 nt, Artificial Sequence
  Description of Artificial Sequence: Synthetic oligonucleotide
  Antisense strand to SEQ ID NO: 1325552
aucuaucugacgagccugg

SEQ ID NO: 1325554 - RNA, 19 nt, Artificial Sequence
  Description of Artificial Sequence: Synthetic oligonucleotide
  Sense strand starting at position 2728 of SEQ ID NO: 1242146
gcucgucagauagaucuau

SEQ ID NO: 1325555 - RNA, 19 nt, Artificial Sequence
  Description of Artificial Sequence: Synthetic oligonucleotide
  Antisense strand to SEQ ID NO: 1325554
auagaucuaucugacgagc

SEQ ID NO: 1325556 - RNA, 19 nt, Artificial Sequence
  Description of Artificial Sequence: Synthetic oligonucleotide
  Sense strand starting at position 2798 of SEQ ID NO: 1242146
gaaccauaaggucaugugu

SEQ ID NO: 1325557 - RNA, 19 nt, Artificial Sequence
  Description of Artificial Sequence: Synthetic oligonucleotide
  Antisense strand to SEQ ID NO: 1325556
acacaugaccuuaugguuc

SEQ ID NO: 1325558 - RNA, 19 nt, Artificial Sequence
  Description of Artificial Sequence: Synthetic oligonucleotide
  Sense strand starting at position 2800 of SEQ ID NO: 1242146
accauaaggucauguguua

SEQ ID NO: 1325559 - RNA, 19 nt, Artificial Sequence
  Description of Artificial Sequence: Synthetic oligonucleotide
  Antisense strand to SEQ ID NO: 1325558
uaacacaugaccuuauggu

SEQ ID NO: 1325560 - RNA, 19 nt, Artificial Sequence
  Description of Artificial Sequence: Synthetic oligonucleotide
  Sense strand starting at position 2863 of SEQ ID NO: 1242146
gguugagucaguggcaaca

SEQ ID NO: 1325561 - RNA, 19 nt, Artificial Sequence
  Description of Artificial Sequence: Synthetic oligonucleotide
  Antisense strand to SEQ ID NO: 1325560
uguugccacugacucaacc

SEQ ID NO: 1325562 - RNA, 19 nt, Artificial Sequence
  Description of Artificial Sequence: Synthetic oligonucleotide
  Sense strand starting at position 3089 of SEQ ID NO: 1242146
ccaugauuggcuugcaaua

SEQ ID NO: 1325563 - RNA, 19 nt, Artificial Sequence
  Description of Artificial Sequence: Synthetic oligonucleotide
  Antisense strand to SEQ ID NO: 1325562
uauugcaagccaaucaugg

SEQ ID NO: 1325564 - RNA, 19 nt, Artificial Sequence
  Description of Artificial Sequence: Synthetic oligonucleotide
  Sense strand starting at position 3100 of SEQ ID NO: 1242146
uugcaauaccagugugaga

SEQ ID NO: 1325565 - RNA, 19 nt, Artificial Sequence
  Description of Artificial Sequence: Synthetic oligonucleotide
  Antisense strand to SEQ ID NO: 1325564
ucucacacugguauugcaa

SEQ ID NO: 1325566 - RNA, 19 nt, Artificial Sequence
  Description of Artificial Sequence: Synthetic oligonucleotide
  Sense strand starting at position 3102 of SEQ ID NO: 1242146
gcaauaccagugugagaca

SEQ ID NO: 1325567 - RNA, 19 nt, Artificial Sequence
  Description of Artificial Sequence: Synthetic oligonucleotide
  Antisense strand to SEQ ID NO: 1325566
ugucucacacugguauugc

SEQ ID NO: 1325568 - RNA, 19 nt, Artificial Sequence
  Description of Artificial Sequence: Synthetic oligonucleotide
  Sense strand starting at position 3113 of SEQ ID NO: 1242146
gugagacagcguggauaua

SEQ ID NO: 1325569 - RNA, 19 nt, Artificial Sequence
  Description of Artificial Sequence: Synthetic oligonucleotide
  Antisense strand to SEQ ID NO: 1325568
uauauccacgcugucucac

SEQ ID NO: 1325570 - RNA, 19 nt, Artificial Sequence
  Description of Artificial Sequence: Synthetic oligonucleotide
  Sense strand starting at position 3189 of SEQ ID NO: 1242146
ggccaacugauucguguau

SEQ ID NO: 1325571 - RNA, 19 nt, Artificial Sequence
  Description of Artificial Sequence: Synthetic oligonucleotide
  Antisense strand to SEQ ID NO: 1325570
auacacgaaucaguuggcc

SEQ ID NO: 1325572 - RNA, 19 nt, Artificial Sequence
  Description of Artificial Sequence: Synthetic oligonucleotide
  Sense strand starting at position 3193 of SEQ ID NO: 1242146
aacugauucguguaucaca

SEQ ID NO: 1325573 - RNA, 19 nt, Artificial Sequence
  Description of Artificial Sequence: Synthetic oligonucleotide
  Antisense strand to SEQ ID NO: 1325572
ugugauacacgaaucaguu

SEQ ID NO: 1325574 - RNA, 19 nt, Artificial Sequence
  Description of Artificial Sequence: Synthetic oligonucleotide
  Sense strand starting at position 3196 of SEQ ID NO: 1242146
ugauucguguaucacaaag

SEQ ID NO: 1325575 - RNA, 19 nt, Artificial Sequence
  Description of Artificial Sequence: Synthetic oligonucleotide
  Antisense strand to SEQ ID NO: 1325574
cuuugugauacacgaauca

SEQ ID NO: 1325576 - RNA, 19 nt, Artificial Sequence
  Description of Artificial Sequence: Synthetic oligonucleotide
  Sense strand starting at position 3198 of SEQ ID NO: 1242146
auucguguaucacaaagga

SEQ ID NO: 1325577 - RNA, 19 nt, Artificial Sequence
  Description of Artificial Sequence: Synthetic oligonucleotide
  Antisense strand to SEQ ID NO: 1325576
uccuuugugauacacgaau

SEQ ID NO: 1325578 - RNA, 19 nt, Artificial Sequence
  Description of Artificial Sequence: Synthetic oligonucleotide
  Sense strand starting at position 3307 of SEQ ID NO: 1242146
ccucgagcaauuggaaaga

SEQ ID NO: 1325579 - RNA, 19 nt, Artificial Sequence
  Description of Artificial Sequence: Synthetic oligonucleotide
  Antisense strand to SEQ ID NO: 1325578
ucuuuccaauugcucgagg

SEQ ID NO: 1325580 - RNA, 19 nt, Artificial Sequence
  Description of Artificial Sequence: Synthetic oligonucleotide
  Sense strand starting at position 3337 of SEQ ID NO: 1242146
cccaguguucuuugacaug

SEQ ID NO: 1325581 - RNA, 19 nt, Artificial Sequence
  Description of Artificial Sequence: Synthetic oligonucleotide
  Antisense strand to SEQ ID NO: 1325580
caugucaaagaacacuggg

SEQ ID NO: 1325582 - RNA, 19 nt, Artificial Sequence
  Description of Artificial Sequence: Synthetic oligonucleotide
  Sense strand starting at position 3358 of SEQ ID NO: 1242146
guagaaugacacuguuguu

SEQ ID NO: 1325583 - RNA, 19 nt, Artificial Sequence
  Description of Artificial Sequence: Synthetic oligonucleotide
  Antisense strand to SEQ ID NO: 1325582
aacaacagugucauucuac

SEQ ID NO: 1325584 - RNA, 19 nt, Artificial Sequence
  Description of Artificial Sequence: Synthetic oligonucleotide
  Sense strand starting at position 3364 of SEQ ID NO: 1242146
ugacacuguuguucccaaa

SEQ ID NO: 1325585 - RNA, 19 nt, Artificial Sequence
  Description of Artificial Sequence: Synthetic oligonucleotide
  Antisense strand to SEQ ID NO: 1325584
uuugggaacaacaguguca

SEQ ID NO: 1325586 - RNA, 19 nt, Artificial Sequence
  Description of Artificial Sequence: Synthetic oligonucleotide
  Sense strand starting at position 3674 of SEQ ID NO: 1242146
gggcaaagcuguuuccaca

SEQ ID NO: 1325587 - RNA, 19 nt, Artificial Sequence
  Description of Artificial Sequence: Synthetic oligonucleotide
  Antisense strand to SEQ ID NO: 1325586
uguggaaacagcuuugccc

SEQ ID NO: 1325588 - RNA, 19 nt, Artificial Sequence
  Description of Artificial Sequence: Synthetic oligonucleotide
  Sense strand starting at position 3762 of SEQ ID NO: 1242146
ggaagauacacuggcuuga

SEQ ID NO: 1325589 - RNA, 19 nt, Artificial Sequence
  Description of Artificial Sequence: Synthetic oligonucleotide
  Antisense strand to SEQ ID NO: 1325588
ucaagccaguguaucuucc

SEQ ID NO: 1325590 - RNA, 19 nt, Artificial Sequence
  Description of Artificial Sequence: Synthetic oligonucleotide
  Sense strand starting at position 3969 of SEQ ID NO: 1242146
agaauuucaugauggugga

SEQ ID NO: 1325591 - RNA, 19 nt, Artificial Sequence
  Description of Artificial Sequence: Synthetic oligonucleotide
  Antisense strand to SEQ ID NO: 1325590
uccaccaucaugaaauucu

SEQ ID NO: 1325592 - RNA, 19 nt, Artificial Sequence
  Description of Artificial Sequence: Synthetic oligonucleotide
  Sense strand starting at position 56 of SEQ ID NO: 1242147
aggauugccguccauuaaa

SEQ ID NO: 1325593 - RNA, 19 nt, Artificial Sequence
  Description of Artificial Sequence: Synthetic oligonucleotide
  Antisense strand to SEQ ID NO: 1325592
uuuaauggacggcaauccu

SEQ ID NO: 1325594 - RNA, 19 nt, Artificial Sequence
  Description of Artificial Sequence: Synthetic oligonucleotide
  Sense strand starting at position 319 of SEQ ID NO: 1242147
gggcauuccuuuccggaga

SEQ ID NO: 1325595 - RNA, 19 nt, Artificial Sequence
  Description of Artificial Sequence: Synthetic oligonucleotide
  Antisense strand to SEQ ID NO: 1325594
ucuccggaaaggaaugccc

SEQ ID NO: 1325596 - RNA, 19 nt, Artificial Sequence
  Description of Artificial Sequence: Synthetic oligonucleotide
  Sense strand starting at position 465 of SEQ ID NO: 1242147
gcugacuuugguuacgaca

SEQ ID NO: 1325597 - RNA, 19 nt, Artificial Sequence
  Description of Artificial Sequence: Synthetic oligonucleotide
  Antisense strand to SEQ ID NO: 1325596
ugucguaaccaaagucagc

SEQ ID NO: 1325598 - RNA, 19 nt, Artificial Sequence
  Description of Artificial Sequence: Synthetic oligonucleotide
  Sense strand starting at position 468 of SEQ ID NO: 1242147
gacuuugguuacgacaaau

SEQ ID NO: 1325599 - RNA, 19 nt, Artificial Sequence
  Description of Artificial Sequence: Synthetic oligonucleotide
  Antisense strand to SEQ ID NO: 1325598
auuugucguaaccaaaguc

SEQ ID NO: 1325600 - RNA, 19 nt, Artificial Sequence
  Description of Artificial Sequence: Synthetic oligonucleotide
  Sense strand starting at position 552 of SEQ ID NO: 1242147
aaaccuugucccugcguga

SEQ ID NO: 1325601 - RNA, 19 nt, Artificial Sequence
  Description of Artificial Sequence: Synthetic oligonucleotide
  Antisense strand to SEQ ID NO: 1325600
ucacgcagggacaagguuu

SEQ ID NO: 1325602 - RNA, 19 nt, Artificial Sequence
  Description of Artificial Sequence: Synthetic oligonucleotide
  Sense strand starting at position 1058 of SEQ ID NO: 1242147
cccacugaccugugugagu

SEQ ID NO: 1325603 - RNA, 19 nt, Artificial Sequence
  Description of Artificial Sequence: Synthetic oligonucleotide
  Antisense strand to SEQ ID NO: 1325602
acucacacaggucaguggg

SEQ ID NO: 1325604 - RNA, 19 nt, Artificial Sequence
  Description of Artificial Sequence: Synthetic oligonucleotide
  Sense strand starting at position 2235 of SEQ ID NO: 1242147
acgccauugguccgugagu

SEQ ID NO: 1325605 - RNA, 19 nt, Artificial Sequence
  Description of Artificial Sequence: Synthetic oligonucleotide
  Antisense strand to SEQ ID NO: 1325604
acucacggaccaauggcgu

SEQ ID NO: 1325606 - RNA, 19 nt, Artificial Sequence
  Description of Artificial Sequence: Synthetic oligonucleotide
  Sense strand starting at position 2264 of SEQ ID NO: 1242147
gccaauccgagccguuaga

SEQ ID NO: 1325607 - RNA, 19 nt, Artificial Sequence
  Description of Artificial Sequence: Synthetic oligonucleotide
  Antisense strand to SEQ ID NO: 1325606
ucuaacggcucggauuggc

SEQ ID NO: 1325608 - RNA, 19 nt, Artificial Sequence
  Description of Artificial Sequence: Synthetic oligonucleotide
  Sense strand starting at position 3200 of SEQ ID NO: 1242147
cggagacgccggugaauaa

SEQ ID NO: 1325609 - RNA, 19 nt, Artificial Sequence
  Description of Artificial Sequence: Synthetic oligonucleotide
  Antisense strand to SEQ ID NO: 1325608
uuauucaccggcgucuccg

SEQ ID NO: 1325610 - RNA, 19 nt, Artificial Sequence
  Description of Artificial Sequence: Synthetic oligonucleotide
  Sense strand starting at position 3271 of SEQ ID NO: 1242147
uugcauugugcuuaaugga

SEQ ID NO: 1325611 - RNA, 19 nt, Artificial Sequence
  Description of Artificial Sequence: Synthetic oligonucleotide
  Antisense strand to SEQ ID NO: 1325610
uccauuaagcacaaugcaa

SEQ ID NO: 1325612 - RNA, 19 nt, Artificial Sequence
  Description of Artificial Sequence: Synthetic oligonucleotide
  Sense strand starting at position 3278 of SEQ ID NO: 1242147
gugcuuaauggacguucga

SEQ ID NO: 1325613 - RNA, 19 nt, Artificial Sequence
  Description of Artificial Sequence: Synthetic oligonucleotide
  Antisense strand to SEQ ID NO: 1325612
ucgaacguccauuaagcac

SEQ ID NO: 1325614 - RNA, 19 nt, Artificial Sequence
  Description of Artificial Sequence: Synthetic oligonucleotide
  Sense strand starting at position 3389 of SEQ ID NO: 1242147
gggugucauucuucucuca

SEQ ID NO: 1325615 - RNA, 19 nt, Artificial Sequence
  Description of Artificial Sequence: Synthetic oligonucleotide
  Antisense strand to SEQ ID NO: 1325614
ugagagaagaaugacaccc

SEQ ID NO: 1325616 - RNA, 19 nt, Artificial Sequence
  Description of Artificial Sequence: Synthetic oligonucleotide
  Sense strand starting at position 3391 of SEQ ID NO: 1242147
gugucauucuucucucaga

SEQ ID NO: 1325617 - RNA, 19 nt, Artificial Sequence
  Description of Artificial Sequence: Synthetic oligonucleotide
  Antisense strand to SEQ ID NO: 1325616
ucugagagaagaaugacac

SEQ ID NO: 1325618 - RNA, 19 nt, Artificial Sequence
  Description of Artificial Sequence: Synthetic oligonucleotide
  Sense strand starting at position 3415 of SEQ ID NO: 1242147
gguuaauagccgaguucga

SEQ ID NO: 1325619 - RNA, 19 nt, Artificial Sequence
  Description of Artificial Sequence: Synthetic oligonucleotide
  Antisense strand to SEQ ID NO: 1325618
ucgaacucggcuauuaacc

SEQ ID NO: 1325620 - RNA, 19 nt, Artificial Sequence
  Description of Artificial Sequence: Synthetic oligonucleotide
  Sense strand starting at position 3426 of SEQ ID NO: 1242147
gaguucgaguucucaccaa

SEQ ID NO: 1325621 - RNA, 19 nt, Artificial Sequence
  Description of Artificial Sequence: Synthetic oligonucleotide
  Antisense strand to SEQ ID NO: 1325620
uuggugagaacucgaacuc

SEQ ID NO: 1325622 - RNA, 19 nt, Artificial Sequence
  Description of Artificial Sequence: Synthetic oligonucleotide
  Sense strand starting at position 3430 of SEQ ID NO: 1242147
ucgaguucucaccaaauua

SEQ ID NO: 1325623 - RNA, 19 nt, Artificial Sequence
  Description of Artificial Sequence: Synthetic oligonucleotide
  Antisense strand to SEQ ID NO: 1325622
uaauuuggugagaacucga

SEQ ID NO: 1325624 - RNA, 19 nt, Artificial Sequence
  Description of Artificial Sequence: Synthetic oligonucleotide
  Sense strand starting at position 3456 of SEQ ID NO: 1242147
guuggagcucaguaagacu

SEQ ID NO: 1325625 - RNA, 19 nt, Artificial Sequence
  Description of Artificial Sequence: Synthetic oligonucleotide
  Antisense strand to SEQ ID NO: 1325624
agucuuacugagcuccaac

SEQ ID NO: 1325626 - RNA, 19 nt, Artificial Sequence
  Description of Artificial Sequence: Synthetic oligonucleotide
  Sense strand starting at position 3518 of SEQ ID NO: 1242147
uugcguguuacggugaaca

SEQ ID NO: 1325627 - RNA, 19 nt, Artificial Sequence
  Description of Artificial Sequence: Synthetic oligonucleotide
  Antisense strand to SEQ ID NO: 1325626
uguucaccguaacacgcaa

SEQ ID NO: 1325628 - RNA, 19 nt, Artificial Sequence
  Description of Artificial Sequence: Synthetic oligonucleotide
  Sense strand starting at position 3561 of SEQ ID NO: 1242147
cccucaguaucuguaacua

SEQ ID NO: 1325629 - RNA, 19 nt, Artificial Sequence
  Description of Artificial Sequence: Synthetic oligonucleotide
  Antisense strand to SEQ ID NO: 1325628
uaguuacagauacugaggg

SEQ ID NO: 1325630 - RNA, 19 nt, Artificial Sequence
  Description of Artificial Sequence: Synthetic oligonucleotide
  Sense strand starting at position 3593 of SEQ ID NO: 1242147
cggucucgcugauugaguu

SEQ ID NO: 1325631 - RNA, 19 nt, Artificial Sequence
  Description of Artificial Sequence: Synthetic oligonucleotide
  Antisense strand to SEQ ID NO: 1325630
aacucaaucagcgagaccg

SEQ ID NO: 1325632 - RNA, 19 nt, Artificial Sequence
  Description of Artificial Sequence: Synthetic oligonucleotide
  Sense strand starting at position 3663 of SEQ ID NO: 1242147
agggucugugcuugguaga

SEQ ID NO: 1325633 - RNA, 19 nt, Artificial Sequence
  Description of Artificial Sequence: Synthetic oligonucleotide
  Antisense strand to SEQ ID NO: 1325632
ucuaccaagcacagacccu

SEQ ID NO: 1325634 - RNA, 19 nt, Artificial Sequence
  Description of Artificial Sequence: Synthetic oligonucleotide
  Sense strand starting at position 3664 of SEQ ID NO: 1242147
gggucugugcuugguagaa

SEQ ID NO: 1325635 - RNA, 19 nt, Artificial Sequence
  Description of Artificial Sequence: Synthetic oligonucleotide
  Antisense strand to SEQ ID NO: 1325634
uucuaccaagcacagaccc

SEQ ID NO: 1325636 - RNA, 19 nt, Artificial Sequence
  Description of Artificial Sequence: Synthetic oligonucleotide
  Sense strand starting at position 3668 of SEQ ID NO: 1242147
cugugcuugguagaaagua

SEQ ID NO: 1325637 - RNA, 19 nt, Artificial Sequence
  Description of Artificial Sequence: Synthetic oligonucleotide
  Antisense strand to SEQ ID NO: 1325636
uacuuucuaccaagcacag

SEQ ID NO: 1325638 - RNA, 19 nt, Artificial Sequence
  Description of Artificial Sequence: Synthetic oligonucleotide
  Sense strand starting at position 3676 of SEQ ID NO: 1242147
gguagaaaguaaucguguu

SEQ ID NO: 1325639 - RNA, 19 nt, Artificial Sequence
  Description of Artificial Sequence: Synthetic oligonucleotide
  Antisense strand to SEQ ID NO: 1325638
aacacgauuacuuucuacc

SEQ ID NO: 1325640 - RNA, 19 nt, Artificial Sequence
  Description of Artificial Sequence: Synthetic oligonucleotide
  Sense strand starting at position 3677 of SEQ ID NO: 1242147
guagaaaguaaucguguuu

SEQ ID NO: 1325641 - RNA, 19 nt, Artificial Sequence
  Description of Artificial Sequence: Synthetic oligonucleotide
  Antisense strand to SEQ ID NO: 1325640
aaacacgauuacuuucuac

SEQ ID NO: 1325642 - RNA, 19 nt, Artificial Sequence
  Description of Artificial Sequence: Synthetic oligonucleotide
  Sense strand starting at position 3690 of SEQ ID NO: 1242147
guguuucuuccaggcagau

SEQ ID NO: 1325643 - RNA, 19 nt, Artificial Sequence
  Description of Artificial Sequence: Synthetic oligonucleotide
  Antisense strand to SEQ ID NO: 1325642
aucugccuggaagaaacac

SEQ ID NO: 1325644 - RNA, 19 nt, Artificial Sequence
  Description of Artificial Sequence: Synthetic oligonucleotide
  Sense strand starting at position 3692 of SEQ ID NO: 1242147
guuucuuccaggcagauug

SEQ ID NO: 1325645 - RNA, 19 nt, Artificial Sequence
  Description of Artificial Sequence: Synthetic oligonucleotide
  Antisense strand to SEQ ID NO: 1325644
caaucugccuggaagaaac

SEQ ID NO: 1325646 - RNA, 19 nt, Artificial Sequence
  Description of Artificial Sequence: Synthetic oligonucleotide
  Sense strand starting at position 3703 of SEQ ID NO: 1242147
gcagauuguguugaugaca

SEQ ID NO: 1325647 - RNA, 19 nt, Artificial Sequence
  Description of Artificial Sequence: Synthetic oligonucleotide
  Antisense strand to SEQ ID NO: 1325646
ugucaucaacacaaucugc

SEQ ID NO: 1325648 - RNA, 19 nt, Artificial Sequence
  Description of Artificial Sequence: Synthetic oligonucleotide
  Sense strand starting at position 3718 of SEQ ID NO: 1242147
gacauuuaauaagagacgu

SEQ ID NO: 1325649 - RNA, 19 nt, Artificial Sequence
  Description of Artificial Sequence: Synthetic oligonucleotide
  Antisense strand to SEQ ID NO: 1325648
acgucucuuauuaaauguc

SEQ ID NO: 1325650 - RNA, 19 nt, Artificial Sequence
  Description of Artificial Sequence: Synthetic oligonucleotide
  Sense strand starting at position 3735 of SEQ ID NO: 1242147
guguguccugaccaaguaa

SEQ ID NO: 1325651 - RNA, 19 nt, Artificial Sequence
  Description of Artificial Sequence: Synthetic oligonucleotide
  Antisense strand to SEQ ID NO: 1325650
uuacuuggucaggacacac

SEQ ID NO: 1325652 - RNA, 19 nt, Artificial Sequence
  Description of Artificial Sequence: Synthetic oligonucleotide
  Sense strand starting at position 3749 of SEQ ID NO: 1242147
aguaaugauucggaauguu

SEQ ID NO: 1325653 - RNA, 19 nt, Artificial Sequence
  Description of Artificial Sequence: Synthetic oligonucleotide
  Antisense strand to SEQ ID NO: 1325652
aacauuccgaaucauuacu

SEQ ID NO: 1325654 - RNA, 19 nt, Artificial Sequence
  Description of Artificial Sequence: Synthetic oligonucleotide
  Sense strand starting at position 3757 of SEQ ID NO: 1242147
uucggaauguuccucuauu

SEQ ID NO: 1325655 - RNA, 19 nt, Artificial Sequence
  Description of Artificial Sequence: Synthetic oligonucleotide
  Antisense strand to SEQ ID NO: 1325654
aauagaggaacauuccgaa

SEQ ID NO: 1325656 - RNA, 19 nt, Artificial Sequence
  Description of Artificial Sequence: Synthetic oligonucleotide
  Sense strand starting at position 3758 of SEQ ID NO: 1242147
ucggaauguuccucuauuc

SEQ ID NO: 1325657 - RNA, 19 nt, Artificial Sequence
  Description of Artificial Sequence: Synthetic oligonucleotide
  Antisense strand to SEQ ID NO: 1325656
gaauagaggaacauuccga

SEQ ID NO: 1325658 - RNA, 19 nt, Artificial Sequence
  Description of Artificial Sequence: Synthetic oligonucleotide
  Sense strand starting at position 3792 of SEQ ID NO: 1242147
auuagucacuucuuaagga

SEQ ID NO: 1325659 - RNA, 19 nt, Artificial Sequence
  Description of Artificial Sequence: Synthetic oligonucleotide
  Antisense strand to SEQ ID NO: 1325658
uccuuaagaagugacuaau

SEQ ID NO: 1325660 - RNA, 19 nt, Artificial Sequence
  Description of Artificial Sequence: Synthetic oligonucleotide
  Sense strand starting at position 3793 of SEQ ID NO: 1242147
uuagucacuucuuaaggaa

SEQ ID NO: 1325661 - RNA, 19 nt, Artificial Sequence
  Description of Artificial Sequence: Synthetic oligonucleotide
  Antisense strand to SEQ ID NO: 1325660
uuccuuaagaagugacuaa

SEQ ID NO: 1325662 - RNA, 19 nt, Artificial Sequence
  Description of Artificial Sequence: Synthetic oligonucleotide
  Sense strand starting at position 3796 of SEQ ID NO: 1242147
gucacuucuuaaggaagga

SEQ ID NO: 1325663 - RNA, 19 nt, Artificial Sequence
  Description of Artificial Sequence: Synthetic oligonucleotide
  Antisense strand to SEQ ID NO: 1325662
uccuuccuuaagaagugac

SEQ ID NO: 1325664 - RNA, 19 nt, Artificial Sequence
  Description of Artificial Sequence: Synthetic oligonucleotide
  Sense strand starting at position 3945 of SEQ ID NO: 1242147
cgucuagagucugcacuau

SEQ ID NO: 1325665 - RNA, 19 nt, Artificial Sequence
  Description of Artificial Sequence: Synthetic oligonucleotide
  Antisense strand to SEQ ID NO: 1325664
auagugcagacucuagacg

SEQ ID NO: 1325666 - RNA, 19 nt, Artificial Sequence
  Description of Artificial Sequence: Synthetic oligonucleotide
  Sense strand starting at position 3957 of SEQ ID NO: 1242147
gcacuauucuaguauuagg

SEQ ID NO: 1325667 - RNA, 19 nt, Artificial Sequence
  Description of Artificial Sequence: Synthetic oligonucleotide
  Antisense strand to SEQ ID NO: 1325666
ccuaauacuagaauagugc

SEQ ID NO: 1325668 - RNA, 19 nt, Artificial Sequence
  Description of Artificial Sequence: Synthetic oligonucleotide
  Sense strand starting at position 3960 of SEQ ID NO: 1242147
cuauucuaguauuaggcua

SEQ ID NO: 1325669 - RNA, 19 nt, Artificial Sequence
  Description of Artificial Sequence: Synthetic oligonucleotide
  Antisense strand to SEQ ID NO: 1325668
uagccuaauacuagaauag

SEQ ID NO: 1325670 - RNA, 19 nt, Artificial Sequence
  Description of Artificial Sequence: Synthetic oligonucleotide
  Sense strand starting at position 3965 of SEQ ID NO: 1242147
cuaguauuaggcuacuaca

SEQ ID NO: 1325671 - RNA, 19 nt, Artificial Sequence
  Description of Artificial Sequence: Synthetic oligonucleotide
  Antisense strand to SEQ ID NO: 1325670
uguaguagccuaauacuag

SEQ ID NO: 1325672 - RNA, 19 nt, Artificial Sequence
  Description of Artificial Sequence: Synthetic oligonucleotide
  Sense strand starting at position 119 of SEQ ID NO: 1242148
aagugauagacgggacgaa

SEQ ID NO: 1325673 - RNA, 19 nt, Artificial Sequence
  Description of Artificial Sequence: Synthetic oligonucleotide
  Antisense strand to SEQ ID NO: 1325672
uucgucccgucuaucacuu

SEQ ID NO: 1325674 - RNA, 19 nt, Artificial Sequence
  Description of Artificial Sequence: Synthetic oligonucleotide
  Sense strand starting at position 265 of SEQ ID NO: 1242148
augcaauuugccuauagcu

SEQ ID NO: 1325675 - RNA, 19 nt, Artificial Sequence
  Description of Artificial Sequence: Synthetic oligonucleotide
  Antisense strand to SEQ ID NO: 1325674
agcuauaggcaaauugcau

SEQ ID NO: 1325676 - RNA, 19 nt, Artificial Sequence
  Description of Artificial Sequence: Synthetic oligonucleotide
  Sense strand starting at position 267 of SEQ ID NO: 1242148
gcaauuugccuauagcucu

SEQ ID NO: 1325677 - RNA, 19 nt, Artificial Sequence
  Description of Artificial Sequence: Synthetic oligonucleotide
  Antisense strand to SEQ ID NO: 1325676
agagcuauaggcaaauugc

SEQ ID NO: 1325678 - RNA, 19 nt, Artificial Sequence
  Description of Artificial Sequence: Synthetic oligonucleotide
  Sense strand starting at position 332 of SEQ ID NO: 1242148
ggaugaaggugucuuccau

SEQ ID NO: 1325679 - RNA, 19 nt, Artificial Sequence
  Description of Artificial Sequence: Synthetic oligonucleotide
  Antisense strand to SEQ ID NO: 1325678
auggaagacaccuucaucc

SEQ ID NO: 1325680 - RNA, 19 nt, Artificial Sequence
  Description of Artificial Sequence: Synthetic oligonucleotide
  Sense strand starting at position 377 of SEQ ID NO: 1242148
uggagucacugccugacaa

SEQ ID NO: 1325681 - RNA, 19 nt, Artificial Sequence
  Description of Artificial Sequence: Synthetic oligonucleotide
  Antisense strand to SEQ ID NO: 1325680
uugucaggcagugacucca

SEQ ID NO: 1325682 - RNA, 19 nt, Artificial Sequence
  Description of Artificial Sequence: Synthetic oligonucleotide
  Sense strand starting at position 378 of SEQ ID NO: 1242148
ggagucacugccugacaaa

SEQ ID NO: 1325683 - RNA, 19 nt, Artificial Sequence
  Description of Artificial Sequence: Synthetic oligonucleotide
  Antisense strand to SEQ ID NO: 1325682
uuugucaggcagugacucc

SEQ ID NO: 1325684 - RNA, 19 nt, Artificial Sequence
  Description of Artificial Sequence: Synthetic oligonucleotide
  Sense strand starting at position 379 of SEQ ID NO: 1242148
gagucacugccugacaaau

SEQ ID NO: 1325685 - RNA, 19 nt, Artificial Sequence
  Description of Artificial Sequence: Synthetic oligonucleotide
  Antisense strand to SEQ ID NO: 1325684
auuugucaggcagugacuc

SEQ ID NO: 1325686 - RNA, 19 nt, Artificial Sequence
  Description of Artificial Sequence: Synthetic oligonucleotide
  Sense strand starting at position 433 of SEQ ID NO: 1242148
gacugacuacgucaaccuu

SEQ ID NO: 1325687 - RNA, 19 nt, Artificial Sequence
  Description of Artificial Sequence: Synthetic oligonucleotide
  Antisense strand to SEQ ID NO: 1325686
aagguugacguagucaguc

SEQ ID NO: 1325688 - RNA, 19 nt, Artificial Sequence
  Description of Artificial Sequence: Synthetic oligonucleotide
  Sense strand starting at position 664 of SEQ ID NO: 1242148
ccauaacggucacuggaau

SEQ ID NO: 1325689 - RNA, 19 nt, Artificial Sequence
  Description of Artificial Sequence: Synthetic oligonucleotide
  Antisense strand to SEQ ID NO: 1325688
auuccagugaccguuaugg

SEQ ID NO: 1325690 - RNA, 19 nt, Artificial Sequence
  Description of Artificial Sequence: Synthetic oligonucleotide
  Sense strand starting at position 679 of SEQ ID NO: 1242148
gaaucugguccaggauaca

SEQ ID NO: 1325691 - RNA, 19 nt, Artificial Sequence
  Description of Artificial Sequence: Synthetic oligonucleotide
  Antisense strand to SEQ ID NO: 1325690
uguauccuggaccagauuc

SEQ ID NO: 1325692 - RNA, 19 nt, Artificial Sequence
  Description of Artificial Sequence: Synthetic oligonucleotide
  Sense strand starting at position 852 of SEQ ID NO: 1242148
aggucaaauucaccgggau

SEQ ID NO: 1325693 - RNA, 19 nt, Artificial Sequence
  Description of Artificial Sequence: Synthetic oligonucleotide
  Antisense strand to SEQ ID NO: 1325692
aucccggugaauuugaccu

SEQ ID NO: 1325694 - RNA, 19 nt, Artificial Sequence
  Description of Artificial Sequence: Synthetic oligonucleotide
  Sense strand starting at position 853 of SEQ ID NO: 1242148
ggucaaauucaccgggauc

SEQ ID NO: 1325695 - RNA, 19 nt, Artificial Sequence
  Description of Artificial Sequence: Synthetic oligonucleotide
  Antisense strand to SEQ ID NO: 1325694
gaucccggugaauuugacc

SEQ ID NO: 1325696 - RNA, 19 nt, Artificial Sequence
  Description of Artificial Sequence: Synthetic oligonucleotide
  Sense strand starting at position 885 of SEQ ID NO: 1242148
gagcguccagauuaaaucu

SEQ ID NO: 1325697 - RNA, 19 nt, Artificial Sequence
  Description of Artificial Sequence: Synthetic oligonucleotide
  Antisense strand to SEQ ID NO: 1325696
agauuuaaucuggacgcuc

SEQ ID NO: 1325698 - RNA, 19 nt, Artificial Sequence
  Description of Artificial Sequence: Synthetic oligonucleotide
  Sense strand starting at position 948 of SEQ ID NO: 1242148
ggccucuagagagauguuu

SEQ ID NO: 1325699 - RNA, 19 nt, Artificial Sequence
  Description of Artificial Sequence: Synthetic oligonucleotide
  Antisense strand to SEQ ID NO: 1325698
aaacaucucucuagaggcc

SEQ ID NO: 1325700 - RNA, 19 nt, Artificial Sequence
  Description of Artificial Sequence: Synthetic oligonucleotide
  Sense strand starting at position 1144 of SEQ ID NO: 1242148
gguaauuagagucaggcua

SEQ ID NO: 1325701 - RNA, 19 nt, Artificial Sequence
  Description of Artificial Sequence: Synthetic oligonucleotide
  Antisense strand to SEQ ID NO: 1325700
uagccugacucuaauuacc

SEQ ID NO: 1325702 - RNA, 19 nt, Artificial Sequence
  Description of Artificial Sequence: Synthetic oligonucleotide
  Sense strand starting at position 1580 of SEQ ID NO: 1242148
cggcgaauucccucgcgga

SEQ ID NO: 1325703 - RNA, 19 nt, Artificial Sequence
  Description of Artificial Sequence: Synthetic oligonucleotide
  Antisense strand to SEQ ID NO: 1325702
uccgcgagggaauucgccg

SEQ ID NO: 1325704 - RNA, 19 nt, Artificial Sequence
  Description of Artificial Sequence: Synthetic oligonucleotide
  Sense strand starting at position 2166 of SEQ ID NO: 1242148
ggacuucgaccagauucuu

SEQ ID NO: 1325705 - RNA, 19 nt, Artificial Sequence
  Description of Artificial Sequence: Synthetic oligonucleotide
  Antisense strand to SEQ ID NO: 1325704
aagaaucuggucgaagucc

SEQ ID NO: 1325706 - RNA, 19 nt, Artificial Sequence
  Description of Artificial Sequence: Synthetic oligonucleotide
  Sense strand starting at position 2171 of SEQ ID NO: 1242148
ucgaccagauucuuaaaga

SEQ ID NO: 1325707 - RNA, 19 nt, Artificial Sequence
  Description of Artificial Sequence: Synthetic oligonucleotide
  Antisense strand to SEQ ID NO: 1325706
ucuuuaagaaucuggucga

SEQ ID NO: 1325708 - RNA, 19 nt, Artificial Sequence
  Description of Artificial Sequence: Synthetic oligonucleotide
  Sense strand starting at position 2249 of SEQ ID NO: 1242148
gagcuuuccagagggagca

SEQ ID NO: 1325709 - RNA, 19 nt, Artificial Sequence
  Description of Artificial Sequence: Synthetic oligonucleotide
  Antisense strand to SEQ ID NO: 1325708
ugcucccucuggaaagcuc

SEQ ID NO: 1325710 - RNA, 19 nt, Artificial Sequence
  Description of Artificial Sequence: Synthetic oligonucleotide
  Sense strand starting at position 2311 of SEQ ID NO: 1242148
uguagaucucuuuagacuc

SEQ ID NO: 1325711 - RNA, 19 nt, Artificial Sequence
  Description of Artificial Sequence: Synthetic oligonucleotide
  Antisense strand to SEQ ID NO: 1325710
gagucuaaagagaucuaca

SEQ ID NO: 1325712 - RNA, 19 nt, Artificial Sequence
  Description of Artificial Sequence: Synthetic oligonucleotide
  Sense strand starting at position 2344 of SEQ ID NO: 1242148
aguaguugcccgaguguua

SEQ ID NO: 1325713 - RNA, 19 nt, Artificial Sequence
  Description of Artificial Sequence: Synthetic oligonucleotide
  Antisense strand to SEQ ID NO: 1325712
uaacacucgggcaacuacu

SEQ ID NO: 1325714 - RNA, 19 nt, Artificial Sequence
  Description of Artificial Sequence: Synthetic oligonucleotide
  Sense strand starting at position 2345 of SEQ ID NO: 1242148
guaguugcccgaguguuaa

SEQ ID NO: 1325715 - RNA, 19 nt, Artificial Sequence
  Description of Artificial Sequence: Synthetic oligonucleotide
  Antisense strand to SEQ ID NO: 1325714
uuaacacucgggcaacuac

SEQ ID NO: 1325716 - RNA, 19 nt, Artificial Sequence
  Description of Artificial Sequence: Synthetic oligonucleotide
  Sense strand starting at position 2472 of SEQ ID NO: 1242148
cucucugugucauuucuca

SEQ ID NO: 1325717 - RNA, 19 nt, Artificial Sequence
  Description of Artificial Sequence: Synthetic oligonucleotide
  Antisense strand to SEQ ID NO: 1325716
ugagaaaugacacagagag

SEQ ID NO: 1325718 - RNA, 19 nt, Artificial Sequence
  Description of Artificial Sequence: Synthetic oligonucleotide
  Sense strand starting at position 2611 of SEQ ID NO: 1242148
gggagaacgguuugugauu

SEQ ID NO: 1325719 - RNA, 19 nt, Artificial Sequence
  Description of Artificial Sequence: Synthetic oligonucleotide
  Antisense strand to SEQ ID NO: 1325718
aaucacaaaccguucuccc

SEQ ID NO: 1325720 - RNA, 19 nt, Artificial Sequence
  Description of Artificial Sequence: Synthetic oligonucleotide
  Sense strand starting at position 2812 of SEQ ID NO: 1242148
caaguagguugcuuaagga

SEQ ID NO: 1325721 - RNA, 19 nt, Artificial Sequence
  Description of Artificial Sequence: Synthetic oligonucleotide
  Antisense strand to SEQ ID NO: 1325720
uccuuaagcaaccuacuug

SEQ ID NO: 1325722 - RNA, 19 nt, Artificial Sequence
  Description of Artificial Sequence: Synthetic oligonucleotide
  Sense strand starting at position 2945 of SEQ ID NO: 1242148
ggucuaagaaaguguacaa

SEQ ID NO: 1325723 - RNA, 19 nt, Artificial Sequence
  Description of Artificial Sequence: Synthetic oligonucleotide
  Antisense strand to SEQ ID NO: 1325722
uuguacacuuucuuagacc

SEQ ID NO: 1325724 - RNA, 19 nt, Artificial Sequence
  Description of Artificial Sequence: Synthetic oligonucleotide
  Sense strand starting at position 3022 of SEQ ID NO: 1242148
guagaaagcugcuuagaca

SEQ ID NO: 1325725 - RNA, 19 nt, Artificial Sequence
  Description of Artificial Sequence: Synthetic oligonucleotide
  Antisense strand to SEQ ID NO: 1325724
ugucuaagcagcuuucuac

SEQ ID NO: 1325726 - RNA, 19 nt, Artificial Sequence
  Description of Artificial Sequence: Synthetic oligonucleotide
  Sense strand starting at position 3043 of SEQ ID NO: 1242148
acagauaugccaggguuaa

SEQ ID NO: 1325727 - RNA, 19 nt, Artificial Sequence
  Description of Artificial Sequence: Synthetic oligonucleotide
  Antisense strand to SEQ ID NO: 1325726
uuaacccuggcauaucugu

SEQ ID NO: 1325728 - RNA, 19 nt, Artificial Sequence
  Description of Artificial Sequence: Synthetic oligonucleotide
  Sense strand starting at position 3044 of SEQ ID NO: 1242148
cagauaugccaggguuaaa

SEQ ID NO: 1325729 - RNA, 19 nt, Artificial Sequence
  Description of Artificial Sequence: Synthetic oligonucleotide
  Antisense strand to SEQ ID NO: 1325728
uuuaacccuggcauaucug

SEQ ID NO: 1325730 - RNA, 19 nt, Artificial Sequence
  Description of Artificial Sequence: Synthetic oligonucleotide
  Sense strand starting at position 3068 of SEQ ID NO: 1242148
gggagaugaugagaagaua

SEQ ID NO: 1325731 - RNA, 19 nt, Artificial Sequence
  Description of Artificial Sequence: Synthetic oligonucleotide
  Antisense strand to SEQ ID NO: 1325730
uaucuucucaucaucuccc

SEQ ID NO: 1325732 - RNA, 19 nt, Artificial Sequence
  Description of Artificial Sequence: Synthetic oligonucleotide
  Sense strand starting at position 3106 of SEQ ID NO: 1242148
ugggaaacagcuugauguu

SEQ ID NO: 1325733 - RNA, 19 nt, Artificial Sequence
  Description of Artificial Sequence: Synthetic oligonucleotide
  Antisense strand to SEQ ID NO: 1325732
aacaucaagcuguuuccca

SEQ ID NO: 1325734 - RNA, 19 nt, Artificial Sequence
  Description of Artificial Sequence: Synthetic oligonucleotide
  Sense strand starting at position 3247 of SEQ ID NO: 1242148
gggaaagauuaagauaaca

SEQ ID NO: 1325735 - RNA, 19 nt, Artificial Sequence
  Description of Artificial Sequence: Synthetic oligonucleotide
  Antisense strand to SEQ ID NO: 1325734
uguuaucuuaaucuuuccc

SEQ ID NO: 1325736 - RNA, 19 nt, Artificial Sequence
  Description of Artificial Sequence: Synthetic oligonucleotide
  Sense strand starting at position 3288 of SEQ ID NO: 1242148
guaagugcucaguacagau

SEQ ID NO: 1325737 - RNA, 19 nt, Artificial Sequence
  Description of Artificial Sequence: Synthetic oligonucleotide
  Antisense strand to SEQ ID NO: 1325736
aucuguacugagcacuuac

SEQ ID NO: 1325738 - RNA, 19 nt, Artificial Sequence
  Description of Artificial Sequence: Synthetic oligonucleotide
  Sense strand starting at position 3301 of SEQ ID NO: 1242148
acagauuugugcuuccauu

SEQ ID NO: 1325739 - RNA, 19 nt, Artificial Sequence
  Description of Artificial Sequence: Synthetic oligonucleotide
  Antisense strand to SEQ ID NO: 1325738
aauggaagcacaaaucugu

SEQ ID NO: 1325740 - RNA, 19 nt, Artificial Sequence
  Description of Artificial Sequence: Synthetic oligonucleotide
  Sense strand starting at position 3321 of SEQ ID NO: 1242148
ggcccagaucugcagacau

SEQ ID NO: 1325741 - RNA, 19 nt, Artificial Sequence
  Description of Artificial Sequence: Synthetic oligonucleotide
  Antisense strand to SEQ ID NO: 1325740
augucugcagaucugggcc

SEQ ID NO: 1325742 - RNA, 19 nt, Artificial Sequence
  Description of Artificial Sequence: Synthetic oligonucleotide
  Sense strand starting at position 3323 of SEQ ID NO: 1242148
cccagaucugcagacaucu

SEQ ID NO: 1325743 - RNA, 19 nt, Artificial Sequence
  Description of Artificial Sequence: Synthetic oligonucleotide
  Antisense strand to SEQ ID NO: 1325742
agaugucugcagaucuggg

SEQ ID NO: 1325744 - RNA, 19 nt, Artificial Sequence
  Description of Artificial Sequence: Synthetic oligonucleotide
  Sense strand starting at position 3532 of SEQ ID NO: 1242148
ucuguaucuagcuagaggu

SEQ ID NO: 1325745 - RNA, 19 nt, Artificial Sequence
  Description of Artificial Sequence: Synthetic oligonucleotide
  Antisense strand to SEQ ID NO: 1325744
accucuagcuagauacaga

SEQ ID NO: 1325746 - RNA, 19 nt, Artificial Sequence
  Description of Artificial Sequence: Synthetic oligonucleotide
  Sense strand starting at position 3534 of SEQ ID NO: 1242148
uguaucuagcuagagguuu

SEQ ID NO: 1325747 - RNA, 19 nt, Artificial Sequence
  Description of Artificial Sequence: Synthetic oligonucleotide
  Antisense strand to SEQ ID NO: 1325746
aaaccucuagcuagauaca

SEQ ID NO: 1325748 - RNA, 19 nt, Artificial Sequence
  Description of Artificial Sequence: Synthetic oligonucleotide
  Sense strand starting at position 3566 of SEQ ID NO: 1242148
auuagugcucuguagaaau

SEQ ID NO: 1325749 - RNA, 19 nt, Artificial Sequence
  Description of Artificial Sequence: Synthetic oligonucleotide
  Antisense strand to SEQ ID NO: 1325748
auuucuacagagcacuaau

SEQ ID NO: 1325750 - RNA, 19 nt, Artificial Sequence
  Description of Artificial Sequence: Synthetic oligonucleotide
  Sense strand starting at position 3767 of SEQ ID NO: 1242148
cgcucuccacgguaaauuu

SEQ ID NO: 1325751 - RNA, 19 nt, Artificial Sequence
  Description of Artificial Sequence: Synthetic oligonucleotide
  Antisense strand to SEQ ID NO: 1325750
aaauuuaccguggagagcg

SEQ ID NO: 1325752 - RNA, 19 nt, Artificial Sequence
  Description of Artificial Sequence: Synthetic oligonucleotide
  Sense strand starting at position 75 of SEQ ID NO: 1242149
ugaucauaaagcugggaca

SEQ ID NO: 1325753 - RNA, 19 nt, Artificial Sequence
  Description of Artificial Sequence: Synthetic oligonucleotide
  Antisense strand to SEQ ID NO: 1325752
ugucccagcuuuaugauca

SEQ ID NO: 1325754 - RNA, 19 nt, Artificial Sequence
  Description of Artificial Sequence: Synthetic oligonucleotide
  Sense strand starting at position 120 of SEQ ID NO: 1242149
uuccaacuuggcugagaga

SEQ ID NO: 1325755 - RNA, 19 nt, Artificial Sequence
  Description of Artificial Sequence: Synthetic oligonucleotide
  Antisense strand to SEQ ID NO: 1325754
ucucucagccaaguuggaa

SEQ ID NO: 1325756 - RNA, 19 nt, Artificial Sequence
  Description of Artificial Sequence: Synthetic oligonucleotide
  Sense strand starting at position 293 of SEQ ID NO: 1242149
ccauuaagccuuuggagaa

SEQ ID NO: 1325757 - RNA, 19 nt, Artificial Sequence
  Description of Artificial Sequence: Synthetic oligonucleotide
  Antisense strand to SEQ ID NO: 1325756
uucuccaaaggcuuaaugg

SEQ ID NO: 1325758 - RNA, 19 nt, Artificial Sequence
  Description of Artificial Sequence: Synthetic oligonucleotide
  Sense strand starting at position 642 of SEQ ID NO: 1242149
ccaucuugccaagguuuau

SEQ ID NO: 1325759 - RNA, 19 nt, Artificial Sequence
  Description of Artificial Sequence: Synthetic oligonucleotide
  Antisense strand to SEQ ID NO: 1325758
auaaaccuuggcaagaugg

SEQ ID NO: 1325760 - RNA, 19 nt, Artificial Sequence
  Description of Artificial Sequence: Synthetic oligonucleotide
  Sense strand starting at position 674 of SEQ ID NO: 1242149
ggaaucaucugggaaggga

SEQ ID NO: 1325761 - RNA, 19 nt, Artificial Sequence
  Description of Artificial Sequence: Synthetic oligonucleotide
  Antisense strand to SEQ ID NO: 1325760
ucccuucccagaugauucc

SEQ ID NO: 1325762 - RNA, 19 nt, Artificial Sequence
  Description of Artificial Sequence: Synthetic oligonucleotide
  Sense strand starting at position 739 of SEQ ID NO: 1242149
ugaagcuuacucuguacua

SEQ ID NO: 1325763 - RNA, 19 nt, Artificial Sequence
  Description of Artificial Sequence: Synthetic oligonucleotide
  Antisense strand to SEQ ID NO: 1325762
uaguacagaguaagcuuca

SEQ ID NO: 1325764 - RNA, 19 nt, Artificial Sequence
  Description of Artificial Sequence: Synthetic oligonucleotide
  Sense strand starting at position 881 of SEQ ID NO: 1242149
cgcccaaguuucucaaaua

SEQ ID NO: 1325765 - RNA, 19 nt, Artificial Sequence
  Description of Artificial Sequence: Synthetic oligonucleotide
  Antisense strand to SEQ ID NO: 1325764
uauuugagaaacuugggcg

SEQ ID NO: 1325766 - RNA, 19 nt, Artificial Sequence
  Description of Artificial Sequence: Synthetic oligonucleotide
  Sense strand starting at position 944 of SEQ ID NO: 1242149
guguauugagaauguggua

SEQ ID NO: 1325767 - RNA, 19 nt, Artificial Sequence
  Description of Artificial Sequence: Synthetic oligonucleotide
  Antisense strand to SEQ ID NO: 1325766
uaccacauucucaauacac

SEQ ID NO: 1325768 - RNA, 19 nt, Artificial Sequence
  Description of Artificial Sequence: Synthetic oligonucleotide
  Sense strand starting at position 1253 of SEQ ID NO: 1242149
ccuacauagccugguuaua

SEQ ID NO: 1325769 - RNA, 19 nt, Artificial Sequence
  Description of Artificial Sequence: Synthetic oligonucleotide
  Antisense strand to SEQ ID NO: 1325768
uauaaccaggcuauguagg

SEQ ID NO: 1325770 - RNA, 19 nt, Artificial Sequence
  Description of Artificial Sequence: Synthetic oligonucleotide
  Sense strand starting at position 1486 of SEQ ID NO: 1242149
ggcugaacccuggaaggua

SEQ ID NO: 1325771 - RNA, 19 nt, Artificial Sequence
  Description of Artificial Sequence: Synthetic oligonucleotide
  Antisense strand to SEQ ID NO: 1325770
uaccuuccaggguucagcc

SEQ ID NO: 1325772 - RNA, 19 nt, Artificial Sequence
  Description of Artificial Sequence: Synthetic oligonucleotide
  Sense strand starting at position 2012 of SEQ ID NO: 1242149
cgucauauuccgggaugga

SEQ ID NO: 1325773 - RNA, 19 nt, Artificial Sequence
  Description of Artificial Sequence: Synthetic oligonucleotide
  Antisense strand to SEQ ID NO: 1325772
uccaucccggaauaugacg

SEQ ID NO: 1325774 - RNA, 19 nt, Artificial Sequence
  Description of Artificial Sequence: Synthetic oligonucleotide
  Sense strand starting at position 2013 of SEQ ID NO: 1242149
gucauauuccgggauggag

SEQ ID NO: 1325775 - RNA, 19 nt, Artificial Sequence
  Description of Artificial Sequence: Synthetic oligonucleotide
  Antisense strand to SEQ ID NO: 1325774
cuccaucccggaauaugac

SEQ ID NO: 1325776 - RNA, 19 nt, Artificial Sequence
  Description of Artificial Sequence: Synthetic oligonucleotide
  Sense strand starting at position 2095 of SEQ ID NO: 1242149
gggauauugccaggagcac

SEQ ID NO: 1325777 - RNA, 19 nt, Artificial Sequence
  Description of Artificial Sequence: Synthetic oligonucleotide
  Antisense strand to SEQ ID NO: 1325776
gugcuccuggcaauauccc

SEQ ID NO: 1325778 - RNA, 19 nt, Artificial Sequence
  Description of Artificial Sequence: Synthetic oligonucleotide
  Sense strand starting at position 2096 of SEQ ID NO: 1242149
ggauauugccaggagcaca

SEQ ID NO: 1325779 - RNA, 19 nt, Artificial Sequence
  Description of Artificial Sequence: Synthetic oligonucleotide
  Antisense strand to SEQ ID NO: 1325778
ugugcuccuggcaauaucc

SEQ ID NO: 1325780 - RNA, 19 nt, Artificial Sequence
  Description of Artificial Sequence: Synthetic oligonucleotide
  Sense strand starting at position 2112 of SEQ ID NO: 1242149
acagguuauuuggaugaaa

SEQ ID NO: 1325781 - RNA, 19 nt, Artificial Sequence
  Description of Artificial Sequence: Synthetic oligonucleotide
  Antisense strand to SEQ ID NO: 1325780
uuucauccaaauaaccugu

SEQ ID NO: 1325782 - RNA, 19 nt, Artificial Sequence
  Description of Artificial Sequence: Synthetic oligonucleotide
  Sense strand starting at position 2155 of SEQ ID NO: 1242149
gcaggugaggcuugaagaa

SEQ ID NO: 1325783 - RNA, 19 nt, Artificial Sequence
  Description of Artificial Sequence: Synthetic oligonucleotide
  Antisense strand to SEQ ID NO: 1325782
uucuucaagccucaccugc

SEQ ID NO: 1325784 - RNA, 19 nt, Artificial Sequence
  Description of Artificial Sequence: Synthetic oligonucleotide
  Sense strand starting at position 2176 of SEQ ID NO: 1242149
ggaccuaugggcugagaua

SEQ ID NO: 1325785 - RNA, 19 nt, Artificial Sequence
  Description of Artificial Sequence: Synthetic oligonucleotide
  Antisense strand to SEQ ID NO: 1325784
uaucucagcccauaggucc

SEQ ID NO: 1325786 - RNA, 19 nt, Artificial Sequence
  Description of Artificial Sequence: Synthetic oligonucleotide
  Sense strand starting at position 2185 of SEQ ID NO: 1242149
ggcugagauaccugaggca

SEQ ID NO: 1325787 - RNA, 19 nt, Artificial Sequence
  Description of Artificial Sequence: Synthetic oligonucleotide
  Antisense strand to SEQ ID NO: 1325786
ugccucagguaucucagcc

SEQ ID NO: 1325788 - RNA, 19 nt, Artificial Sequence
  Description of Artificial Sequence: Synthetic oligonucleotide
  Sense strand starting at position 2279 of SEQ ID NO: 1242149
gguagcuuccauuacuaaa

SEQ ID NO: 1325789 - RNA, 19 nt, Artificial Sequence
  Description of Artificial Sequence: Synthetic oligonucleotide
  Antisense strand to SEQ ID NO: 1325788
uuuaguaauggaagcuacc

SEQ ID NO: 1325790 - RNA, 19 nt, Artificial Sequence
  Description of Artificial Sequence: Synthetic oligonucleotide
  Sense strand starting at position 2341 of SEQ ID NO: 1242149
cugauuacccaacaguguu

SEQ ID NO: 1325791 - RNA, 19 nt, Artificial Sequence
  Description of Artificial Sequence: Synthetic oligonucleotide
  Antisense strand to SEQ ID NO: 1325790
aacacuguuggguaaucag

SEQ ID NO: 1325792 - RNA, 19 nt, Artificial Sequence
  Description of Artificial Sequence: Synthetic oligonucleotide
  Sense strand starting at position 2483 of SEQ ID NO: 1242149
acggauuguggugaaauug

SEQ ID NO: 1325793 - RNA, 19 nt, Artificial Sequence
  Description of Artificial Sequence: Synthetic oligonucleotide
  Antisense strand to SEQ ID NO: 1325792
caauuucaccacaauccgu

SEQ ID NO: 1325794 - RNA, 19 nt, Artificial Sequence
  Description of Artificial Sequence: Synthetic oligonucleotide
  Sense strand starting at position 2522 of SEQ ID NO: 1242149
ggcucacagcuguaauuau

SEQ ID NO: 1325795 - RNA, 19 nt, Artificial Sequence
  Description of Artificial Sequence: Synthetic oligonucleotide
  Antisense strand to SEQ ID NO: 1325794
auaauuacagcugugagcc

SEQ ID NO: 1325796 - RNA, 19 nt, Artificial Sequence
  Description of Artificial Sequence: Synthetic oligonucleotide
  Sense strand starting at position 2772 of SEQ ID NO: 1242149
gacagagcgugaucucaaa

SEQ ID NO: 1325797 - RNA, 19 nt, Artificial Sequence
  Description of Artificial Sequence: Synthetic oligonucleotide
  Antisense strand to SEQ ID NO: 1325796
uuugagaucacgcucuguc

SEQ ID NO: 1325798 - RNA, 19 nt, Artificial Sequence
  Description of Artificial Sequence: Synthetic oligonucleotide
  Sense strand starting at position 2893 of SEQ ID NO: 1242149
cugagaugauguuugauua

SEQ ID NO: 1325799 - RNA, 19 nt, Artificial Sequence
  Description of Artificial Sequence: Synthetic oligonucleotide
  Antisense strand to SEQ ID NO: 1325798
uaaucaaacaucaucucag

SEQ ID NO: 1325800 - RNA, 19 nt, Artificial Sequence
  Description of Artificial Sequence: Synthetic oligonucleotide
  Sense strand starting at position 2894 of SEQ ID NO: 1242149
ugagaugauguuugauuaa

SEQ ID NO: 1325801 - RNA, 19 nt, Artificial Sequence
  Description of Artificial Sequence: Synthetic oligonucleotide
  Antisense strand to SEQ ID NO: 1325800
uuaaucaaacaucaucuca

SEQ ID NO: 1325802 - RNA, 19 nt, Artificial Sequence
  Description of Artificial Sequence: Synthetic oligonucleotide
  Sense strand starting at position 2969 of SEQ ID NO: 1242149
agaaauggguucuucuaua

SEQ ID NO: 1325803 - RNA, 19 nt, Artificial Sequence
  Description of Artificial Sequence: Synthetic oligonucleotide
  Antisense strand to SEQ ID NO: 1325802
uauagaagaacccauuucu

SEQ ID NO: 1325804 - RNA, 19 nt, Artificial Sequence
  Description of Artificial Sequence: Synthetic oligonucleotide
  Sense strand starting at position 3096 of SEQ ID NO: 1242149
auggaaagccacugaagua

SEQ ID NO: 1325805 - RNA, 19 nt, Artificial Sequence
  Description of Artificial Sequence: Synthetic oligonucleotide
  Antisense strand to SEQ ID NO: 1325804
uacuucaguggcuuuccau

SEQ ID NO: 1325806 - RNA, 19 nt, Artificial Sequence
  Description of Artificial Sequence: Synthetic oligonucleotide
  Sense strand starting at position 3111 of SEQ ID NO: 1242149
aguauuauagcaggagagu

SEQ ID NO: 1325807 - RNA, 19 nt, Artificial Sequence
  Description of Artificial Sequence: Synthetic oligonucleotide
  Antisense strand to SEQ ID NO: 1325806
acucuccugcuauaauacu

SEQ ID NO: 1325808 - RNA, 19 nt, Artificial Sequence
  Description of Artificial Sequence: Synthetic oligonucleotide
  Sense strand starting at position 3112 of SEQ ID NO: 1242149
guauuauagcaggagagug

SEQ ID NO: 1325809 - RNA, 19 nt, Artificial Sequence
  Description of Artificial Sequence: Synthetic oligonucleotide
  Antisense strand to SEQ ID NO: 1325808
cacucuccugcuauaauac

SEQ ID NO: 1325810 - RNA, 19 nt, Artificial Sequence
  Description of Artificial Sequence: Synthetic oligonucleotide
  Sense strand starting at position 3122 of SEQ ID NO: 1242149
aggagagugucauccaauu

SEQ ID NO: 1325811 - RNA, 19 nt, Artificial Sequence
  Description of Artificial Sequence: Synthetic oligonucleotide
  Antisense strand to SEQ ID NO: 1325810
aauuggaugacacucuccu

SEQ ID NO: 1325812 - RNA, 19 nt, Artificial Sequence
  Description of Artificial Sequence: Synthetic oligonucleotide
  Sense strand starting at position 3778 of SEQ ID NO: 1242149
ucgaauaauugggcuugaa

SEQ ID NO: 1325813 - RNA, 19 nt, Artificial Sequence
  Description of Artificial Sequence: Synthetic oligonucleotide
  Antisense strand to SEQ ID NO: 1325812
uucaagcccaauuauucga

SEQ ID NO: 1325814 - RNA, 19 nt, Artificial Sequence
  Description of Artificial Sequence: Synthetic oligonucleotide
  Sense strand starting at position 3792 of SEQ ID NO: 1242149
uugaauaauuguguggaua

SEQ ID NO: 1325815 - RNA, 19 nt, Artificial Sequence
  Description of Artificial Sequence: Synthetic oligonucleotide
  Antisense strand to SEQ ID NO: 1325814
uauccacacaauuauucaa

SEQ ID NO: 1325816 - RNA, 19 nt, Artificial Sequence
  Description of Artificial Sequence: Synthetic oligonucleotide
  Sense strand starting at position 3793 of SEQ ID NO: 1242149
ugaauaauuguguggauag

SEQ ID NO: 1325817 - RNA, 19 nt, Artificial Sequence
  Description of Artificial Sequence: Synthetic oligonucleotide
  Antisense strand to SEQ ID NO: 1325816
cuauccacacaauuauuca

SEQ ID NO: 1325818 - RNA, 19 nt, Artificial Sequence
  Description of Artificial Sequence: Synthetic oligonucleotide
  Sense strand starting at position 3803 of SEQ ID NO: 1242149
uguggauagagucacuauu

SEQ ID NO: 1325819 - RNA, 19 nt, Artificial Sequence
  Description of Artificial Sequence: Synthetic oligonucleotide
  Antisense strand to SEQ ID NO: 1325818
aauagugacucuauccaca

SEQ ID NO: 1325820 - RNA, 19 nt, Artificial Sequence
  Description of Artificial Sequence: Synthetic oligonucleotide
  Sense strand starting at position 3833 of SEQ ID NO: 1242149
gagauugagaguuggguuu

SEQ ID NO: 1325821 - RNA, 19 nt, Artificial Sequence
  Description of Artificial Sequence: Synthetic oligonucleotide
  Antisense strand to SEQ ID NO: 1325820
aaacccaacucucaaucuc

SEQ ID NO: 1325822 - RNA, 19 nt, Artificial Sequence
  Description of Artificial Sequence: Synthetic oligonucleotide
  Sense strand starting at position 3867 of SEQ ID NO: 1242149
ucgacauaucuuugaggca

SEQ ID NO: 1325823 - RNA, 19 nt, Artificial Sequence
  Description of Artificial Sequence: Synthetic oligonucleotide
  Antisense strand to SEQ ID NO: 1325822
ugccucaaagauaugucga

SEQ ID NO: 1325824 - RNA, 19 nt, Artificial Sequence
  Description of Artificial Sequence: Synthetic oligonucleotide
  Sense strand starting at position 3953 of SEQ ID NO: 1242149
gagauacacccuugggagu

SEQ ID NO: 1325825 - RNA, 19 nt, Artificial Sequence
  Description of Artificial Sequence: Synthetic oligonucleotide
  Antisense strand to SEQ ID NO: 1325824
acucccaaggguguaucuc

SEQ ID NO: 1325826 - RNA, 19 nt, Artificial Sequence
  Description of Artificial Sequence: Synthetic oligonucleotide
  Sense strand starting at position 3964 of SEQ ID NO: 1242149
uugggaguuguugacauau

SEQ ID NO: 1325827 - RNA, 19 nt, Artificial Sequence
  Description of Artificial Sequence: Synthetic oligonucleotide
  Antisense strand to SEQ ID NO: 1325826
auaugucaacaacucccaa

SEQ ID NO: 1325828 - RNA, 19 nt, Artificial Sequence
  Description of Artificial Sequence: Synthetic oligonucleotide
  Sense strand starting at position 3970 of SEQ ID NO: 1242149
guuguugacauaugaaugu

SEQ ID NO: 1325829 - RNA, 19 nt, Artificial Sequence
  Description of Artificial Sequence: Synthetic oligonucleotide
  Antisense strand to SEQ ID NO: 1325828
acauucauaugucaacaac

SEQ ID NO: 1325830 - RNA, 19 nt, Artificial Sequence
  Description of Artificial Sequence: Synthetic oligonucleotide
  Sense strand starting at position 3974 of SEQ ID NO: 1242149
uugacauaugaauguacuu

SEQ ID NO: 1325831 - RNA, 19 nt, Artificial Sequence
  Description of Artificial Sequence: Synthetic oligonucleotide
  Antisense strand to SEQ ID NO: 1325830
aaguacauucauaugucaa

SEQ ID NO: 1325832 - RNA, 19 nt, Artificial Sequence
  Description of Artificial Sequence: Synthetic oligonucleotide
  Sense strand starting at position 474 of SEQ ID NO: 1242150
uuuaucuacccauaagugu

SEQ ID NO: 1325833 - RNA, 19 nt, Artificial Sequence
  Description of Artificial Sequence: Synthetic oligonucleotide
  Antisense strand to SEQ ID NO: 1325832
acacuuauggguagauaaa

SEQ ID NO: 1325834 - RNA, 19 nt, Artificial Sequence
  Description of Artificial Sequence: Synthetic oligonucleotide
  Sense strand starting at position 483 of SEQ ID NO: 1242150
ccauaaguguuaccugcaa

SEQ ID NO: 1325835 - RNA, 19 nt, Artificial Sequence
  Description of Artificial Sequence: Synthetic oligonucleotide
  Antisense strand to SEQ ID NO: 1325834
uugcagguaacacuuaugg

SEQ ID NO: 1325836 - RNA, 19 nt, Artificial Sequence
  Description of Artificial Sequence: Synthetic oligonucleotide
  Sense strand starting at position 487 of SEQ ID NO: 1242150
aaguguuaccugcaaguac

SEQ ID NO: 1325837 - RNA, 19 nt, Artificial Sequence
  Description of Artificial Sequence: Synthetic oligonucleotide
  Antisense strand to SEQ ID NO: 1325836
guacuugcagguaacacuu

SEQ ID NO: 1325838 - RNA, 19 nt, Artificial Sequence
  Description of Artificial Sequence: Synthetic oligonucleotide
  Sense strand starting at position 494 of SEQ ID NO: 1242150
accugcaaguacucaguua

SEQ ID NO: 1325839 - RNA, 19 nt, Artificial Sequence
  Description of Artificial Sequence: Synthetic oligonucleotide
  Antisense strand to SEQ ID NO: 1325838
uaacugaguacuugcaggu

SEQ ID NO: 1325840 - RNA, 19 nt, Artificial Sequence
  Description of Artificial Sequence: Synthetic oligonucleotide
  Sense strand starting at position 507 of SEQ ID NO: 1242150
caguuaauggauuguucua

SEQ ID NO: 1325841 - RNA, 19 nt, Artificial Sequence
  Description of Artificial Sequence: Synthetic oligonucleotide
  Antisense strand to SEQ ID NO: 1325840
uagaacaauccauuaacug

SEQ ID NO: 1325842 - RNA, 19 nt, Artificial Sequence
  Description of Artificial Sequence: Synthetic oligonucleotide
  Sense strand starting at position 509 of SEQ ID NO: 1242150
guuaauggauuguucuaca

SEQ ID NO: 1325843 - RNA, 19 nt, Artificial Sequence
  Description of Artificial Sequence: Synthetic oligonucleotide
  Antisense strand to SEQ ID NO: 1325842
uguagaacaauccauuaac

SEQ ID NO: 1325844 - RNA, 19 nt, Artificial Sequence
  Description of Artificial Sequence: Synthetic oligonucleotide
  Sense strand starting at position 514 of SEQ ID NO: 1242150
uggauuguucuacacagua

SEQ ID NO: 1325845 - RNA, 19 nt, Artificial Sequence
  Description of Artificial Sequence: Synthetic oligonucleotide
  Antisense strand to SEQ ID NO: 1325844
uacuguguagaacaaucca

SEQ ID NO: 1325846 - RNA, 19 nt, Artificial Sequence
  Description of Artificial Sequence: Synthetic oligonucleotide
  Sense strand starting at position 546 of SEQ ID NO: 1242150
ugugguuucgcuuuccuca

SEQ ID NO: 1325847 - RNA, 19 nt, Artificial Sequence
  Description of Artificial Sequence: Synthetic oligonucleotide
  Antisense strand to SEQ ID NO: 1325846
ugaggaaagcgaaaccaca

SEQ ID NO: 1325848 - RNA, 19 nt, Artificial Sequence
  Description of Artificial Sequence: Synthetic oligonucleotide
  Sense strand starting at position 568 of SEQ ID NO: 1242150
ucaguuauccaugguccga

SEQ ID NO: 1325849 - RNA, 19 nt, Artificial Sequence
  Description of Artificial Sequence: Synthetic oligonucleotide
  Antisense strand to SEQ ID NO: 1325848
ucggaccauggauaacuga

SEQ ID NO: 1325850 - RNA, 19 nt, Artificial Sequence
  Description of Artificial Sequence: Synthetic oligonucleotide
  Sense strand starting at position 570 of SEQ ID NO: 1242150
aguuauccaugguccgaaa

SEQ ID NO: 1325851 - RNA, 19 nt, Artificial Sequence
  Description of Artificial Sequence: Synthetic oligonucleotide
  Antisense strand to SEQ ID NO: 1325850
uuucggaccauggauaacu

SEQ ID NO: 1325852 - RNA, 19 nt, Artificial Sequence
  Description of Artificial Sequence: Synthetic oligonucleotide
  Sense strand starting at position 572 of SEQ ID NO: 1242150
uuauccaugguccgaaagu

SEQ ID NO: 1325853 - RNA, 19 nt, Artificial Sequence
  Description of Artificial Sequence: Synthetic oligonucleotide
  Antisense strand to SEQ ID NO: 1325852
acuuucggaccauggauaa

SEQ ID NO: 1325854 - RNA, 19 nt, Artificial Sequence
  Description of Artificial Sequence: Synthetic oligonucleotide
  Sense strand starting at position 578 of SEQ ID NO: 1242150
augguccgaaaguauuaaa

SEQ ID NO: 1325855 - RNA, 19 nt, Artificial Sequence
  Description of Artificial Sequence: Synthetic oligonucleotide
  Antisense strand to SEQ ID NO: 1325854
uuuaauacuuucggaccau

SEQ ID NO: 1325856 - RNA, 19 nt, Artificial Sequence
  Description of Artificial Sequence: Synthetic oligonucleotide
  Sense strand starting at position 619 of SEQ ID NO: 1242150
auucguaagcuuuaaauug

SEQ ID NO: 1325857 - RNA, 19 nt, Artificial Sequence
  Description of Artificial Sequence: Synthetic oligonucleotide
  Antisense strand to SEQ ID NO: 1325856
caauuuaaagcuuacgaau

SEQ ID NO: 1325858 - RNA, 19 nt, Artificial Sequence
  Description of Artificial Sequence: Synthetic oligonucleotide
  Sense strand starting at position 645 of SEQ ID NO: 1242150
cucagaguauuguugugau

SEQ ID NO: 1325859 - RNA, 19 nt, Artificial Sequence
  Description of Artificial Sequence: Synthetic oligonucleotide
  Antisense strand to SEQ ID NO: 1325858
aucacaacaauacucugag

SEQ ID NO: 1325860 - RNA, 19 nt, Artificial Sequence
  Description of Artificial Sequence: Synthetic oligonucleotide
  Sense strand starting at position 655 of SEQ ID NO: 1242150
uguugugauuguucuauuu

SEQ ID NO: 1325861 - RNA, 19 nt, Artificial Sequence
  Description of Artificial Sequence: Synthetic oligonucleotide
  Antisense strand to SEQ ID NO: 1325860
aaauagaacaaucacaaca

SEQ ID NO: 1325862 - RNA, 19 nt, Artificial Sequence
  Description of Artificial Sequence: Synthetic oligonucleotide
  Sense strand starting at position 999 of SEQ ID NO: 1242150
auguaaaugcaauagcauu

SEQ ID NO: 1325863 - RNA, 19 nt, Artificial Sequence
  Description of Artificial Sequence: Synthetic oligonucleotide
  Antisense strand to SEQ ID NO: 1325862
aaugcuauugcauuuacau

SEQ ID NO: 1325864 - RNA, 19 nt, Artificial Sequence
  Description of Artificial Sequence: Synthetic oligonucleotide
  Sense strand starting at position 1444 of SEQ ID NO: 1242150
ugggaagucuuucucggaa

SEQ ID NO: 1325865 - RNA, 19 nt, Artificial Sequence
  Description of Artificial Sequence: Synthetic oligonucleotide
  Antisense strand to SEQ ID NO: 1325864
uuccgagaaagacuuccca

SEQ ID NO: 1325866 - RNA, 19 nt, Artificial Sequence
  Description of Artificial Sequence: Synthetic oligonucleotide
  Sense strand starting at position 2264 of SEQ ID NO: 1242150
aguuaacacuuuguaucau

SEQ ID NO: 1325867 - RNA, 19 nt, Artificial Sequence
  Description of Artificial Sequence: Synthetic oligonucleotide
  Antisense strand to SEQ ID NO: 1325866
augauacaaaguguuaacu

SEQ ID NO: 1325868 - RNA, 19 nt, Artificial Sequence
  Description of Artificial Sequence: Synthetic oligonucleotide
  Sense strand starting at position 2290 of SEQ ID NO: 1242150
cuugucagauuccuuacca

SEQ ID NO: 1325869 - RNA, 19 nt, Artificial Sequence
  Description of Artificial Sequence: Synthetic oligonucleotide
  Antisense strand to SEQ ID NO: 1325868
ugguaaggaaucugacaag

SEQ ID NO: 1325870 - RNA, 19 nt, Artificial Sequence
  Description of Artificial Sequence: Synthetic oligonucleotide
  Sense strand starting at position 2291 of SEQ ID NO: 1242150
uugucagauuccuuaccag

SEQ ID NO: 1325871 - RNA, 19 nt, Artificial Sequence
  Description of Artificial Sequence: Synthetic oligonucleotide
  Antisense strand to SEQ ID NO: 1325870
cugguaaggaaucugacaa

SEQ ID NO: 1325872 - RNA, 19 nt, Artificial Sequence
  Description of Artificial Sequence: Synthetic oligonucleotide
  Sense strand starting at position 2294 of SEQ ID NO: 1242150
ucagauuccuuaccagagu

SEQ ID NO: 1325873 - RNA, 19 nt, Artificial Sequence
  Description of Artificial Sequence: Synthetic oligonucleotide
  Antisense strand to SEQ ID NO: 1325872
acucugguaaggaaucuga

SEQ ID NO: 1325874 - RNA, 19 nt, Artificial Sequence
  Description of Artificial Sequence: Synthetic oligonucleotide
  Sense strand starting at position 2548 of SEQ ID NO: 1242150
cuggaauucuagcuccaca

SEQ ID NO: 1325875 - RNA, 19 nt, Artificial Sequence
  Description of Artificial Sequence: Synthetic oligonucleotide
  Antisense strand to SEQ ID NO: 1325874
uguggagcuagaauuccag

SEQ ID NO: 1325876 - RNA, 19 nt, Artificial Sequence
  Description of Artificial Sequence: Synthetic oligonucleotide
  Sense strand starting at position 2793 of SEQ ID NO: 1242150
ccuaguuuaacguguaaug

SEQ ID NO: 1325877 - RNA, 19 nt, Artificial Sequence
  Description of Artificial Sequence: Synthetic oligonucleotide
  Antisense strand to SEQ ID NO: 1325876
cauuacacguuaaacuagg

SEQ ID NO: 1325878 - RNA, 19 nt, Artificial Sequence
  Description of Artificial Sequence: Synthetic oligonucleotide
  Sense strand starting at position 2795 of SEQ ID NO: 1242150
uaguuuaacguguaaugaa

SEQ ID NO: 1325879 - RNA, 19 nt, Artificial Sequence
  Description of Artificial Sequence: Synthetic oligonucleotide
  Antisense strand to SEQ ID NO: 1325878
uucauuacacguuaaacua

SEQ ID NO: 1325880 - RNA, 19 nt, Artificial Sequence
  Description of Artificial Sequence: Synthetic oligonucleotide
  Sense strand starting at position 2804 of SEQ ID NO: 1242150
guguaaugaaauugauaug

SEQ ID NO: 1325881 - RNA, 19 nt, Artificial Sequence
  Description of Artificial Sequence: Synthetic oligonucleotide
  Antisense strand to SEQ ID NO: 1325880
cauaucaauuucauuacac

SEQ ID NO: 1325882 - RNA, 19 nt, Artificial Sequence
  Description of Artificial Sequence: Synthetic oligonucleotide
  Sense strand starting at position 2923 of SEQ ID NO: 1242150
gaaagcuuguaggcuuuau

SEQ ID NO: 1325883 - RNA, 19 nt, Artificial Sequence
  Description of Artificial Sequence: Synthetic oligonucleotide
  Antisense strand to SEQ ID NO: 1325882
auaaagccuacaagcuuuc

SEQ ID NO: 1325884 - RNA, 19 nt, Artificial Sequence
  Description of Artificial Sequence: Synthetic oligonucleotide
  Sense strand starting at position 2927 of SEQ ID NO: 1242150
gcuuguaggcuuuauaccu

SEQ ID NO: 1325885 - RNA, 19 nt, Artificial Sequence
  Description of Artificial Sequence: Synthetic oligonucleotide
  Antisense strand to SEQ ID NO: 1325884
agguauaaagccuacaagc

SEQ ID NO: 1325886 - RNA, 19 nt, Artificial Sequence
  Description of Artificial Sequence: Synthetic oligonucleotide
  Sense strand starting at position 2990 of SEQ ID NO: 1242150
uuucuugcagguggaauaa

SEQ ID NO: 1325887 - RNA, 19 nt, Artificial Sequence
  Description of Artificial Sequence: Synthetic oligonucleotide
  Antisense strand to SEQ ID NO: 1325886
uuauuccaccugcaagaaa

SEQ ID NO: 1325888 - RNA, 19 nt, Artificial Sequence
  Description of Artificial Sequence: Synthetic oligonucleotide
  Sense strand starting at position 3062 of SEQ ID NO: 1242150
guaauaaacuuacugagua

SEQ ID NO: 1325889 - RNA, 19 nt, Artificial Sequence
  Description of Artificial Sequence: Synthetic oligonucleotide
  Antisense strand to SEQ ID NO: 1325888
uacucaguaaguuuauuac

SEQ ID NO: 1325890 - RNA, 19 nt, Artificial Sequence
  Description of Artificial Sequence: Synthetic oligonucleotide
  Sense strand starting at position 3177 of SEQ ID NO: 1242150
gggcuaaauaaguaaagcu

SEQ ID NO: 1325891 - RNA, 19 nt, Artificial Sequence
  Description of Artificial Sequence: Synthetic oligonucleotide
  Antisense strand to SEQ ID NO: 1325890
agcuuuacuuauuuagccc

SEQ ID NO: 1325892 - RNA, 19 nt, Artificial Sequence
  Description of Artificial Sequence: Synthetic oligonucleotide
  Sense strand starting at position 3253 of SEQ ID NO: 1242150
agcguuugacacugaaacu

SEQ ID NO: 1325893 - RNA, 19 nt, Artificial Sequence
  Description of Artificial Sequence: Synthetic oligonucleotide
  Antisense strand to SEQ ID NO: 1325892
aguuucagugucaaacgcu

SEQ ID NO: 1325894 - RNA, 19 nt, Artificial Sequence
  Description of Artificial Sequence: Synthetic oligonucleotide
  Sense strand starting at position 3271 of SEQ ID NO: 1242150
ugcaguuauaguggacaga

SEQ ID NO: 1325895 - RNA, 19 nt, Artificial Sequence
  Description of Artificial Sequence: Synthetic oligonucleotide
  Antisense strand to SEQ ID NO: 1325894
ucuguccacuauaacugca

SEQ ID NO: 1325896 - RNA, 19 nt, Artificial Sequence
  Description of Artificial Sequence: Synthetic oligonucleotide
  Sense strand starting at position 3272 of SEQ ID NO: 1242150
gcaguuauaguggacagau

SEQ ID NO: 1325897 - RNA, 19 nt, Artificial Sequence
  Description of Artificial Sequence: Synthetic oligonucleotide
  Antisense strand to SEQ ID NO: 1325896
aucuguccacuauaacugc

SEQ ID NO: 1325898 - RNA, 19 nt, Artificial Sequence
  Description of Artificial Sequence: Synthetic oligonucleotide
  Sense strand starting at position 3274 of SEQ ID NO: 1242150
aguuauaguggacagaugu

SEQ ID NO: 1325899 - RNA, 19 nt, Artificial Sequence
  Description of Artificial Sequence: Synthetic oligonucleotide
  Antisense strand to SEQ ID NO: 1325898
acaucuguccacuauaacu

SEQ ID NO: 1325900 - RNA, 19 nt, Artificial Sequence
  Description of Artificial Sequence: Synthetic oligonucleotide
  Sense strand starting at position 3300 of SEQ ID NO: 1242150
uaagauaguacuggagguu

SEQ ID NO: 1325901 - RNA, 19 nt, Artificial Sequence
  Description of Artificial Sequence: Synthetic oligonucleotide
  Antisense strand to SEQ ID NO: 1325900
aaccuccaguacuaucuua

SEQ ID NO: 1325902 - RNA, 19 nt, Artificial Sequence
  Description of Artificial Sequence: Synthetic oligonucleotide
  Sense strand starting at position 3391 of SEQ ID NO: 1242150
gucaguggugguuaugagu

SEQ ID NO: 1325903 - RNA, 19 nt, Artificial Sequence
  Description of Artificial Sequence: Synthetic oligonucleotide
  Antisense strand to SEQ ID NO: 1325902
acucauaaccaccacugac

SEQ ID NO: 1325904 - RNA, 19 nt, Artificial Sequence
  Description of Artificial Sequence: Synthetic oligonucleotide
  Sense strand starting at position 3400 of SEQ ID NO: 1242150
gguuaugagugcccacuuu

SEQ ID NO: 1325905 - RNA, 19 nt, Artificial Sequence
  Description of Artificial Sequence: Synthetic oligonucleotide
  Antisense strand to SEQ ID NO: 1325904
aaagugggcacucauaacc

SEQ ID NO: 1325906 - RNA, 19 nt, Artificial Sequence
  Description of Artificial Sequence: Synthetic oligonucleotide
  Sense strand starting at position 3451 of SEQ ID NO: 1242150
guacauauguuacugaaac

SEQ ID NO: 1325907 - RNA, 19 nt, Artificial Sequence
  Description of Artificial Sequence: Synthetic oligonucleotide
  Antisense strand to SEQ ID NO: 1325906
guuucaguaacauauguac

SEQ ID NO: 1325908 - RNA, 19 nt, Artificial Sequence
  Description of Artificial Sequence: Synthetic oligonucleotide
  Sense strand starting at position 3475 of SEQ ID NO: 1242150
ggguuuagccuagauccca

SEQ ID NO: 1325909 - RNA, 19 nt, Artificial Sequence
  Description of Artificial Sequence: Synthetic oligonucleotide
  Antisense strand to SEQ ID NO: 1325908
ugggaucuaggcuaaaccc

SEQ ID NO: 1325910 - RNA, 19 nt, Artificial Sequence
  Description of Artificial Sequence: Synthetic oligonucleotide
  Sense strand starting at position 3830 of SEQ ID NO: 1242150
ccugucagaucagucauga

SEQ ID NO: 1325911 - RNA, 19 nt, Artificial Sequence
  Description of Artificial Sequence: Synthetic oligonucleotide
  Antisense strand to SEQ ID NO: 1325910
ucaugacugaucugacagg

SEQ ID NO: 1325912 - RNA, 19 nt, Artificial Sequence
  Description of Artificial Sequence: Synthetic oligonucleotide
  Sense strand starting at position 28 of SEQ ID NO: 1242151
uagguauuaggcuagguau

SEQ ID NO: 1325913 - RNA, 19 nt, Artificial Sequence
  Description of Artificial Sequence: Synthetic oligonucleotide
  Antisense strand to SEQ ID NO: 1325912
auaccuagccuaauaccua

SEQ ID NO: 1325914 - RNA, 19 nt, Artificial Sequence
  Description of Artificial Sequence: Synthetic oligonucleotide
  Sense strand starting at position 31 of SEQ ID NO: 1242151
guauuaggcuagguaugga

SEQ ID NO: 1325915 - RNA, 19 nt, Artificial Sequence
  Description of Artificial Sequence: Synthetic oligonucleotide
  Antisense strand to SEQ ID NO: 1325914
uccauaccuagccuaauac

SEQ ID NO: 1325916 - RNA, 19 nt, Artificial Sequence
  Description of Artificial Sequence: Synthetic oligonucleotide
  Sense strand starting at position 34 of SEQ ID NO: 1242151
uuaggcuagguauggaaau

SEQ ID NO: 1325917 - RNA, 19 nt, Artificial Sequence
  Description of Artificial Sequence: Synthetic oligonucleotide
  Antisense strand to SEQ ID NO: 1325916
auuuccauaccuagccuaa

SEQ ID NO: 1325918 - RNA, 19 nt, Artificial Sequence
  Description of Artificial Sequence: Synthetic oligonucleotide
  Sense strand starting at position 84 of SEQ ID NO: 1242151
caaggaucucacugucuag

SEQ ID NO: 1325919 - RNA, 19 nt, Artificial Sequence
  Description of Artificial Sequence: Synthetic oligonucleotide
  Antisense strand to SEQ ID NO: 1325918
cuagacagugagauccuug

SEQ ID NO: 1325920 - RNA, 19 nt, Artificial Sequence
  Description of Artificial Sequence: Synthetic oligonucleotide
  Sense strand starting at position 129 of SEQ ID NO: 1242151
accauugagugagugugau

SEQ ID NO: 1325921 - RNA, 19 nt, Artificial Sequence
  Description of Artificial Sequence: Synthetic oligonucleotide
  Antisense strand to SEQ ID NO: 1325920
aucacacucacucaauggu

SEQ ID NO: 1325922 - RNA, 19 nt, Artificial Sequence
  Description of Artificial Sequence: Synthetic oligonucleotide
  Sense strand starting at position 228 of SEQ ID NO: 1242151
caagcaugguccuugaauu

SEQ ID NO: 1325923 - RNA, 19 nt, Artificial Sequence
  Description of Artificial Sequence: Synthetic oligonucleotide
  Antisense strand to SEQ ID NO: 1325922
aauucaaggaccaugcuug

SEQ ID NO: 1325924 - RNA, 19 nt, Artificial Sequence
  Description of Artificial Sequence: Synthetic oligonucleotide
  Sense strand starting at position 229 of SEQ ID NO: 1242151
aagcaugguccuugaauuc

SEQ ID NO: 1325925 - RNA, 19 nt, Artificial Sequence
  Description of Artificial Sequence: Synthetic oligonucleotide
  Antisense strand to SEQ ID NO: 1325924
gaauucaaggaccaugcuu

SEQ ID NO: 1325926 - RNA, 19 nt, Artificial Sequence
  Description of Artificial Sequence: Synthetic oligonucleotide
  Sense strand starting at position 254 of SEQ ID NO: 1242151
cuccuauuccugugaggga

SEQ ID NO: 1325927 - RNA, 19 nt, Artificial Sequence
  Description of Artificial Sequence: Synthetic oligonucleotide
  Antisense strand to SEQ ID NO: 1325926
ucccucacaggaauaggag

SEQ ID NO: 1325928 - RNA, 19 nt, Artificial Sequence
  Description of Artificial Sequence: Synthetic oligonucleotide
  Sense strand starting at position 484 of SEQ ID NO: 1242151
cccuaugcucagggaacua

SEQ ID NO: 1325929 - RNA, 19 nt, Artificial Sequence
  Description of Artificial Sequence: Synthetic oligonucleotide
  Antisense strand to SEQ ID NO: 1325928
uaguucccugagcauaggg

SEQ ID NO: 1325930 - RNA, 19 nt, Artificial Sequence
  Description of Artificial Sequence: Synthetic oligonucleotide
  Sense strand starting at position 534 of SEQ ID NO: 1242151
gcgugaacuguugaggcaa

SEQ ID NO: 1325931 - RNA, 19 nt, Artificial Sequence
  Description of Artificial Sequence: Synthetic oligonucleotide
  Antisense strand to SEQ ID NO: 1325930
uugccucaacaguucacgc

SEQ ID NO: 1325932 - RNA, 19 nt, Artificial Sequence
  Description of Artificial Sequence: Synthetic oligonucleotide
  Sense strand starting at position 583 of SEQ ID NO: 1242151
acaucuuaaugagcagauu

SEQ ID NO: 1325933 - RNA, 19 nt, Artificial Sequence
  Description of Artificial Sequence: Synthetic oligonucleotide
  Antisense strand to SEQ ID NO: 1325932
aaucugcucauuaagaugu

SEQ ID NO: 1325934 - RNA, 19 nt, Artificial Sequence
  Description of Artificial Sequence: Synthetic oligonucleotide
  Sense strand starting at position 598 of SEQ ID NO: 1242151
gauugaggaaucuggguuu

SEQ ID NO: 1325935 - RNA, 19 nt, Artificial Sequence
  Description of Artificial Sequence: Synthetic oligonucleotide
  Antisense strand to SEQ ID NO: 1325934
aaacccagauuccucaauc

SEQ ID NO: 1325936 - RNA, 19 nt, Artificial Sequence
  Description of Artificial Sequence: Synthetic oligonucleotide
  Sense strand starting at position 757 of SEQ ID NO: 1242151
cugucagcucaccgaagaa

SEQ ID NO: 1325937 - RNA, 19 nt, Artificial Sequence
  Description of Artificial Sequence: Synthetic oligonucleotide
  Antisense strand to SEQ ID NO: 1325936
uucuucggugagcugacag

SEQ ID NO: 1325938 - RNA, 19 nt, Artificial Sequence
  Description of Artificial Sequence: Synthetic oligonucleotide
  Sense strand starting at position 922 of SEQ ID NO: 1242151
aggcuugguuucuccuaga

SEQ ID NO: 1325939 - RNA, 19 nt, Artificial Sequence
  Description of Artificial Sequence: Synthetic oligonucleotide
  Antisense strand to SEQ ID NO: 1325938
ucuaggagaaaccaagccu

SEQ ID NO: 1325940 - RNA, 19 nt, Artificial Sequence
  Description of Artificial Sequence: Synthetic oligonucleotide
  Sense strand starting at position 950 of SEQ ID NO: 1242151
gggaucuuuccaggccuua

SEQ ID NO: 1325941 - RNA, 19 nt, Artificial Sequence
  Description of Artificial Sequence: Synthetic oligonucleotide
  Antisense strand to SEQ ID NO: 1325940
uaaggccuggaaagauccc

SEQ ID NO: 1325942 - RNA, 19 nt, Artificial Sequence
  Description of Artificial Sequence: Synthetic oligonucleotide
  Sense strand starting at position 980 of SEQ ID NO: 1242151
agcuuuaauccuggcuaau

SEQ ID NO: 1325943 - RNA, 19 nt, Artificial Sequence
  Description of Artificial Sequence: Synthetic oligonucleotide
  Antisense strand to SEQ ID NO: 1325942
auuagccaggauuaaagcu

SEQ ID NO: 1325944 - RNA, 19 nt, Artificial Sequence
  Description of Artificial Sequence: Synthetic oligonucleotide
  Sense strand starting at position 982 of SEQ ID NO: 1242151
cuuuaauccuggcuaauga

SEQ ID NO: 1325945 - RNA, 19 nt, Artificial Sequence
  Description of Artificial Sequence: Synthetic oligonucleotide
  Antisense strand to SEQ ID NO: 1325944
ucauuagccaggauuaaag

SEQ ID NO: 1325946 - RNA, 19 nt, Artificial Sequence
  Description of Artificial Sequence: Synthetic oligonucleotide
  Sense strand starting at position 983 of SEQ ID NO: 1242151
uuuaauccuggcuaaugau

SEQ ID NO: 1325947 - RNA, 19 nt, Artificial Sequence
  Description of Artificial Sequence: Synthetic oligonucleotide
  Antisense strand to SEQ ID NO: 1325946
aucauuagccaggauuaaa

SEQ ID NO: 1325948 - RNA, 19 nt, Artificial Sequence
  Description of Artificial Sequence: Synthetic oligonucleotide
  Sense strand starting at position 1023 of SEQ ID NO: 1242151
ucaggauagggauggcuau

SEQ ID NO: 1325949 - RNA, 19 nt, Artificial Sequence
  Description of Artificial Sequence: Synthetic oligonucleotide
  Antisense strand to SEQ ID NO: 1325948
auagccaucccuauccuga

SEQ ID NO: 1325950 - RNA, 19 nt, Artificial Sequence
  Description of Artificial Sequence: Synthetic oligonucleotide
  Sense strand starting at position 1037 of SEQ ID NO: 1242151
gcuauuugccacugccaca

SEQ ID NO: 1325951 - RNA, 19 nt, Artificial Sequence
  Description of Artificial Sequence: Synthetic oligonucleotide
  Antisense strand to SEQ ID NO: 1325950
uguggcaguggcaaauagc

SEQ ID NO: 1325952 - RNA, 19 nt, Artificial Sequence
  Description of Artificial Sequence: Synthetic oligonucleotide
  Sense strand starting at position 1102 of SEQ ID NO: 1242151
cucugauauugucugacua

SEQ ID NO: 1325953 - RNA, 19 nt, Artificial Sequence
  Description of Artificial Sequence: Synthetic oligonucleotide
  Antisense strand to SEQ ID NO: 1325952
uagucagacaauaucagag

SEQ ID NO: 1325954 - RNA, 19 nt, Artificial Sequence
  Description of Artificial Sequence: Synthetic oligonucleotide
  Sense strand starting at position 1143 of SEQ ID NO: 1242151
ugagcugucagugacuaag

SEQ ID NO: 1325955 - RNA, 19 nt, Artificial Sequence
  Description of Artificial Sequence: Synthetic oligonucleotide
  Antisense strand to SEQ ID NO: 1325954
cuuagucacugacagcuca

SEQ ID NO: 1325956 - RNA, 19 nt, Artificial Sequence
  Description of Artificial Sequence: Synthetic oligonucleotide
  Sense strand starting at position 1185 of SEQ ID NO: 1242151
guacuuggcacagagcuaa

SEQ ID NO: 1325957 - RNA, 19 nt, Artificial Sequence
  Description of Artificial Sequence: Synthetic oligonucleotide
  Antisense strand to SEQ ID NO: 1325956
uuagcucugugccaaguac

SEQ ID NO: 1325958 - RNA, 19 nt, Artificial Sequence
  Description of Artificial Sequence: Synthetic oligonucleotide
  Sense strand starting at position 1232 of SEQ ID NO: 1242151
ugaucuaucuacuuuguca

SEQ ID NO: 1325959 - RNA, 19 nt, Artificial Sequence
  Description of Artificial Sequence: Synthetic oligonucleotide
  Antisense strand to SEQ ID NO: 1325958
ugacaaaguagauagauca

SEQ ID NO: 1325960 - RNA, 19 nt, Artificial Sequence
  Description of Artificial Sequence: Synthetic oligonucleotide
  Sense strand starting at position 1329 of SEQ ID NO: 1242151
ccgaaucucuggguccaga

SEQ ID NO: 1325961 - RNA, 19 nt, Artificial Sequence
  Description of Artificial Sequence: Synthetic oligonucleotide
  Antisense strand to SEQ ID NO: 1325960
ucuggacccagagauucgg

SEQ ID NO: 1325962 - RNA, 19 nt, Artificial Sequence
  Description of Artificial Sequence: Synthetic oligonucleotide
  Sense strand starting at position 1343 of SEQ ID NO: 1242151
ccagaagucugacccuuua

SEQ ID NO: 1325963 - RNA, 19 nt, Artificial Sequence
  Description of Artificial Sequence: Synthetic oligonucleotide
  Antisense strand to SEQ ID NO: 1325962
uaaagggucagacuucugg

SEQ ID NO: 1325964 - RNA, 19 nt, Artificial Sequence
  Description of Artificial Sequence: Synthetic oligonucleotide
  Sense strand starting at position 1416 of SEQ ID NO: 1242151
cacccuugaguugaguauu

SEQ ID NO: 1325965 - RNA, 19 nt, Artificial Sequence
  Description of Artificial Sequence: Synthetic oligonucleotide
  Antisense strand to SEQ ID NO: 1325964
aauacucaacucaagggug

SEQ ID NO: 1325966 - RNA, 19 nt, Artificial Sequence
  Description of Artificial Sequence: Synthetic oligonucleotide
  Sense strand starting at position 1422 of SEQ ID NO: 1242151
ugaguugaguauucuccca

SEQ ID NO: 1325967 - RNA, 19 nt, Artificial Sequence
  Description of Artificial Sequence: Synthetic oligonucleotide
  Antisense strand to SEQ ID NO: 1325966
ugggagaauacucaacuca

SEQ ID NO: 1325968 - RNA, 19 nt, Artificial Sequence
  Description of Artificial Sequence: Synthetic oligonucleotide
  Sense strand starting at position 1424 of SEQ ID NO: 1242151
aguugaguauucucccagu

SEQ ID NO: 1325969 - RNA, 19 nt, Artificial Sequence
  Description of Artificial Sequence: Synthetic oligonucleotide
  Antisense strand to SEQ ID NO: 1325968
acugggagaauacucaacu

SEQ ID NO: 1325970 - RNA, 19 nt, Artificial Sequence
  Description of Artificial Sequence: Synthetic oligonucleotide
  Sense strand starting at position 1430 of SEQ ID NO: 1242151
guauucucccagugaagua

SEQ ID NO: 1325971 - RNA, 19 nt, Artificial Sequence
  Description of Artificial Sequence: Synthetic oligonucleotide
  Antisense strand to SEQ ID NO: 1325970
uacuucacugggagaauac

SEQ ID NO: 1325972 - RNA, 19 nt, Artificial Sequence
  Description of Artificial Sequence: Synthetic oligonucleotide
  Sense strand starting at position 1452 of SEQ ID NO: 1242151
auacgcuugccaggacaau

SEQ ID NO: 1325973 - RNA, 19 nt, Artificial Sequence
  Description of Artificial Sequence: Synthetic oligonucleotide
  Antisense strand to SEQ ID NO: 1325972
auuguccuggcaagcguau

SEQ ID NO: 1325974 - RNA, 19 nt, Artificial Sequence
  Description of Artificial Sequence: Synthetic oligonucleotide
  Sense strand starting at position 1499 of SEQ ID NO: 1242151
gggacaggguccuagaaga

SEQ ID NO: 1325975 - RNA, 19 nt, Artificial Sequence
  Description of Artificial Sequence: Synthetic oligonucleotide
  Antisense strand to SEQ ID NO: 1325974
ucuucuaggacccuguccc

SEQ ID NO: 1325976 - RNA, 19 nt, Artificial Sequence
  Description of Artificial Sequence: Synthetic oligonucleotide
  Sense strand starting at position 1558 of SEQ ID NO: 1242151
ugugcaaguucugucauuu

SEQ ID NO: 1325977 - RNA, 19 nt, Artificial Sequence
  Description of Artificial Sequence: Synthetic oligonucleotide
  Antisense strand to SEQ ID NO: 1325976
aaaugacagaacuugcaca

SEQ ID NO: 1325978 - RNA, 19 nt, Artificial Sequence
  Description of Artificial Sequence: Synthetic oligonucleotide
  Sense strand starting at position 3148 of SEQ ID NO: 1242151
guuagucuccuugacauaa

SEQ ID NO: 1325979 - RNA, 19 nt, Artificial Sequence
  Description of Artificial Sequence: Synthetic oligonucleotide
  Antisense strand to SEQ ID NO: 1325978
uuaugucaaggagacuaac

SEQ ID NO: 1325980 - RNA, 19 nt, Artificial Sequence
  Description of Artificial Sequence: Synthetic oligonucleotide
  Sense strand starting at position 3291 of SEQ ID NO: 1242151
uugaauucucagggcucau

SEQ ID NO: 1325981 - RNA, 19 nt, Artificial Sequence
  Description of Artificial Sequence: Synthetic oligonucleotide
  Antisense strand to SEQ ID NO: 1325980
augagcccugagaauucaa

SEQ ID NO: 1325982 - RNA, 19 nt, Artificial Sequence
  Description of Artificial Sequence: Synthetic oligonucleotide
  Sense strand starting at position 3398 of SEQ ID NO: 1242151
gccgauggccuauagagua

SEQ ID NO: 1325983 - RNA, 19 nt, Artificial Sequence
  Description of Artificial Sequence: Synthetic oligonucleotide
  Antisense strand to SEQ ID NO: 1325982
uacucuauaggccaucggc

SEQ ID NO: 1325984 - RNA, 19 nt, Artificial Sequence
  Description of Artificial Sequence: Synthetic oligonucleotide
  Sense strand starting at position 3434 of SEQ ID NO: 1242151
gcacucagauguuuguuga

SEQ ID NO: 1325985 - RNA, 19 nt, Artificial Sequence
  Description of Artificial Sequence: Synthetic oligonucleotide
  Antisense strand to SEQ ID NO: 1325984
ucaacaaacaucugagugc

SEQ ID NO: 1325986 - RNA, 19 nt, Artificial Sequence
  Description of Artificial Sequence: Synthetic oligonucleotide
  Sense strand starting at position 3435 of SEQ ID NO: 1242151
cacucagauguuuguugaa

SEQ ID NO: 1325987 - RNA, 19 nt, Artificial Sequence
  Description of Artificial Sequence: Synthetic oligonucleotide
  Antisense strand to SEQ ID NO: 1325986
uucaacaaacaucugagug

SEQ ID NO: 1325988 - RNA, 19 nt, Artificial Sequence
  Description of Artificial Sequence: Synthetic oligonucleotide
  Sense strand starting at position 3470 of SEQ ID NO: 1242151
uugaaaugucaggauguuc

SEQ ID NO: 1325989 - RNA, 19 nt, Artificial Sequence
  Description of Artificial Sequence: Synthetic oligonucleotide
  Antisense strand to SEQ ID NO: 1325988
gaacauccugacauuucaa

SEQ ID NO: 1325990 - RNA, 19 nt, Artificial Sequence
  Description of Artificial Sequence: Synthetic oligonucleotide
  Sense strand starting at position 3542 of SEQ ID NO: 1242151
cuccaaaugugacccagaa

SEQ ID NO: 1325991 - RNA, 19 nt, Artificial Sequence
  Description of Artificial Sequence: Synthetic oligonucleotide
  Antisense strand to SEQ ID NO: 1325990
uucugggucacauuuggag

SEQ ID NO: 1325992 - RNA, 19 nt, Artificial Sequence
  Description of Artificial Sequence: Synthetic oligonucleotide
  Sense strand starting at position 115 of SEQ ID NO: 1242152
aggcuugguuucuccuaga

SEQ ID NO: 1325993 - RNA, 19 nt, Artificial Sequence
  Description of Artificial Sequence: Synthetic oligonucleotide
  Antisense strand to SEQ ID NO: 1325992
ucuaggagaaaccaagccu

SEQ ID NO: 1325994 - RNA, 19 nt, Artificial Sequence
  Description of Artificial Sequence: Synthetic oligonucleotide
  Sense strand starting at position 143 of SEQ ID NO: 1242152
gggaucuuuccaggccuua

SEQ ID NO: 1325995 - RNA, 19 nt, Artificial Sequence
  Description of Artificial Sequence: Synthetic oligonucleotide
  Antisense strand to SEQ ID NO: 1325994
uaaggccuggaaagauccc

SEQ ID NO: 1325996 - RNA, 19 nt, Artificial Sequence
  Description of Artificial Sequence: Synthetic oligonucleotide
  Sense strand starting at position 173 of SEQ ID NO: 1242152
agcuuuaauccuggcuaau

SEQ ID NO: 1325997 - RNA, 19 nt, Artificial Sequence
  Description of Artificial Sequence: Synthetic oligonucleotide
  Antisense strand to SEQ ID NO: 1325996
auuagccaggauuaaagcu

SEQ ID NO: 1325998 - RNA, 19 nt, Artificial Sequence
  Description of Artificial Sequence: Synthetic oligonucleotide
  Sense strand starting at position 175 of SEQ ID NO: 1242152
cuuuaauccuggcuaauga

SEQ ID NO: 1325999 - RNA, 19 nt, Artificial Sequence
  Description of Artificial Sequence: Synthetic oligonucleotide
  Antisense strand to SEQ ID NO: 1325998
ucauuagccaggauuaaag

SEQ ID NO: 1326000 - RNA, 19 nt, Artificial Sequence
  Description of Artificial Sequence: Synthetic oligonucleotide
  Sense strand starting at position 176 of SEQ ID NO: 1242152
uuuaauccuggcuaaugau

SEQ ID NO: 1326001 - RNA, 19 nt, Artificial Sequence
  Description of Artificial Sequence: Synthetic oligonucleotide
  Antisense strand to SEQ ID NO: 1326000
aucauuagccaggauuaaa

SEQ ID NO: 1326002 - RNA, 19 nt, Artificial Sequence
  Description of Artificial Sequence: Synthetic oligonucleotide
  Sense strand starting at position 216 of SEQ ID NO: 1242152
ucaggauagggauggcuau

SEQ ID NO: 1326003 - RNA, 19 nt, Artificial Sequence
  Description of Artificial Sequence: Synthetic oligonucleotide
  Antisense strand to SEQ ID NO: 1326002
auagccaucccuauccuga

SEQ ID NO: 1326004 - RNA, 19 nt, Artificial Sequence
  Description of Artificial Sequence: Synthetic oligonucleotide
  Sense strand starting at position 230 of SEQ ID NO: 1242152
gcuauuugccacugccaca

SEQ ID NO: 1326005 - RNA, 19 nt, Artificial Sequence
  Description of Artificial Sequence: Synthetic oligonucleotide
  Antisense strand to SEQ ID NO: 1326004
uguggcaguggcaaauagc

SEQ ID NO: 1326006 - RNA, 19 nt, Artificial Sequence
  Description of Artificial Sequence: Synthetic oligonucleotide
  Sense strand starting at position 295 of SEQ ID NO: 1242152
cucugauauugucugacua

SEQ ID NO: 1326007 - RNA, 19 nt, Artificial Sequence
  Description of Artificial Sequence: Synthetic oligonucleotide
  Antisense strand to SEQ ID NO: 1326006
uagucagacaauaucagag

SEQ ID NO: 1326008 - RNA, 19 nt, Artificial Sequence
  Description of Artificial Sequence: Synthetic oligonucleotide
  Sense strand starting at position 335 of SEQ ID NO: 1242152
gugagcugucagugacuaa

SEQ ID NO: 1326009 - RNA, 19 nt, Artificial Sequence
  Description of Artificial Sequence: Synthetic oligonucleotide
  Antisense strand to SEQ ID NO: 1326008
uuagucacugacagcucac

SEQ ID NO: 1326010 - RNA, 19 nt, Artificial Sequence
  Description of Artificial Sequence: Synthetic oligonucleotide
  Sense strand starting at position 336 of SEQ ID NO: 1242152
ugagcugucagugacuaag

SEQ ID NO: 1326011 - RNA, 19 nt, Artificial Sequence
  Description of Artificial Sequence: Synthetic oligonucleotide
  Antisense strand to SEQ ID NO: 1326010
cuuagucacugacagcuca

SEQ ID NO: 1326012 - RNA, 19 nt, Artificial Sequence
  Description of Artificial Sequence: Synthetic oligonucleotide
  Sense strand starting at position 378 of SEQ ID NO: 1242152
guacuuggcacagagcuaa

SEQ ID NO: 1326013 - RNA, 19 nt, Artificial Sequence
  Description of Artificial Sequence: Synthetic oligonucleotide
  Antisense strand to SEQ ID NO: 1326012
uuagcucugugccaaguac

SEQ ID NO: 1326014 - RNA, 19 nt, Artificial Sequence
  Description of Artificial Sequence: Synthetic oligonucleotide
  Sense strand starting at position 425 of SEQ ID NO: 1242152
ugaucuaucuacuuuguca

SEQ ID NO: 1326015 - RNA, 19 nt, Artificial Sequence
  Description of Artificial Sequence: Synthetic oligonucleotide
  Antisense strand to SEQ ID NO: 1326014
ugacaaaguagauagauca

SEQ ID NO: 1326016 - RNA, 19 nt, Artificial Sequence
  Description of Artificial Sequence: Synthetic oligonucleotide
  Sense strand starting at position 522 of SEQ ID NO: 1242152
ccgaaucucuggguccaga

SEQ ID NO: 1326017 - RNA, 19 nt, Artificial Sequence
  Description of Artificial Sequence: Synthetic oligonucleotide
  Antisense strand to SEQ ID NO: 1326016
ucuggacccagagauucgg

SEQ ID NO: 1326018 - RNA, 19 nt, Artificial Sequence
  Description of Artificial Sequence: Synthetic oligonucleotide
  Sense strand starting at position 536 of SEQ ID NO: 1242152
ccagaagucugacccuuua

SEQ ID NO: 1326019 - RNA, 19 nt, Artificial Sequence
  Description of Artificial Sequence: Synthetic oligonucleotide
  Antisense strand to SEQ ID NO: 1326018
uaaagggucagacuucugg

SEQ ID NO: 1326020 - RNA, 19 nt, Artificial Sequence
  Description of Artificial Sequence: Synthetic oligonucleotide
  Sense strand starting at position 609 of SEQ ID NO: 1242152
cacccuugaguugaguauu

SEQ ID NO: 1326021 - RNA, 19 nt, Artificial Sequence
  Description of Artificial Sequence: Synthetic oligonucleotide
  Antisense strand to SEQ ID NO: 1326020
aauacucaacucaagggug

SEQ ID NO: 1326022 - RNA, 19 nt, Artificial Sequence
  Description of Artificial Sequence: Synthetic oligonucleotide
  Sense strand starting at position 615 of SEQ ID NO: 1242152
ugaguugaguauucuccca

SEQ ID NO: 1326023 - RNA, 19 nt, Artificial Sequence
  Description of Artificial Sequence: Synthetic oligonucleotide
  Antisense strand to SEQ ID NO: 1326022
ugggagaauacucaacuca

SEQ ID NO: 1326024 - RNA, 19 nt, Artificial Sequence
  Description of Artificial Sequence: Synthetic oligonucleotide
  Sense strand starting at position 617 of SEQ ID NO: 1242152
aguugaguauucucccagu

SEQ ID NO: 1326025 - RNA, 19 nt, Artificial Sequence
  Description of Artificial Sequence: Synthetic oligonucleotide
  Antisense strand to SEQ ID NO: 1326024
acugggagaauacucaacu

SEQ ID NO: 1326026 - RNA, 19 nt, Artificial Sequence
  Description of Artificial Sequence: Synthetic oligonucleotide
  Sense strand starting at position 623 of SEQ ID NO: 1242152
guauucucccagugaagua

SEQ ID NO: 1326027 - RNA, 19 nt, Artificial Sequence
  Description of Artificial Sequence: Synthetic oligonucleotide
  Antisense strand to SEQ ID NO: 1326026
uacuucacugggagaauac

SEQ ID NO: 1326028 - RNA, 19 nt, Artificial Sequence
  Description of Artificial Sequence: Synthetic oligonucleotide
  Sense strand starting at position 645 of SEQ ID NO: 1242152
auacgcuugccaggacaau

SEQ ID NO: 1326029 - RNA, 19 nt, Artificial Sequence
  Description of Artificial Sequence: Synthetic oligonucleotide
  Antisense strand to SEQ ID NO: 1326028
auuguccuggcaagcguau

SEQ ID NO: 1326030 - RNA, 19 nt, Artificial Sequence
  Description of Artificial Sequence: Synthetic oligonucleotide
  Sense strand starting at position 692 of SEQ ID NO: 1242152
gggacaggguccuagaaga

SEQ ID NO: 1326031 - RNA, 19 nt, Artificial Sequence
  Description of Artificial Sequence: Synthetic oligonucleotide
  Antisense strand to SEQ ID NO: 1326030
ucuucuaggacccuguccc

SEQ ID NO: 1326032 - RNA, 19 nt, Artificial Sequence
  Description of Artificial Sequence: Synthetic oligonucleotide
  Sense strand starting at position 751 of SEQ ID NO: 1242152
ugugcaaguucugucauuu

SEQ ID NO: 1326033 - RNA, 19 nt, Artificial Sequence
  Description of Artificial Sequence: Synthetic oligonucleotide
  Antisense strand to SEQ ID NO: 1326032
aaaugacagaacuugcaca

SEQ ID NO: 1326034 - RNA, 19 nt, Artificial Sequence
  Description of Artificial Sequence: Synthetic oligonucleotide
  Sense strand starting at position 2341 of SEQ ID NO: 1242152
guuagucuccuugacauaa

SEQ ID NO: 1326035 - RNA, 19 nt, Artificial Sequence
  Description of Artificial Sequence: Synthetic oligonucleotide
  Antisense strand to SEQ ID NO: 1326034
uuaugucaaggagacuaac

SEQ ID NO: 1326036 - RNA, 19 nt, Artificial Sequence
  Description of Artificial Sequence: Synthetic oligonucleotide
  Sense strand starting at position 2484 of SEQ ID NO: 1242152
uugaauucucagggcucau

SEQ ID NO: 1326037 - RNA, 19 nt, Artificial Sequence
  Description of Artificial Sequence: Synthetic oligonucleotide
  Antisense strand to SEQ ID NO: 1326036
augagcccugagaauucaa

SEQ ID NO: 1326038 - RNA, 19 nt, Artificial Sequence
  Description of Artificial Sequence: Synthetic oligonucleotide
  Sense strand starting at position 2591 of SEQ ID NO: 1242152
gccgauggccuauagagua

SEQ ID NO: 1326039 - RNA, 19 nt, Artificial Sequence
  Description of Artificial Sequence: Synthetic oligonucleotide
  Antisense strand to SEQ ID NO: 1326038
uacucuauaggccaucggc

SEQ ID NO: 1326040 - RNA, 19 nt, Artificial Sequence
  Description of Artificial Sequence: Synthetic oligonucleotide
  Sense strand starting at position 2627 of SEQ ID NO: 1242152
gcacucagauguuuguuga

SEQ ID NO: 1326041 - RNA, 19 nt, Artificial Sequence
  Description of Artificial Sequence: Synthetic oligonucleotide
  Antisense strand to SEQ ID NO: 1326040
ucaacaaacaucugagugc

SEQ ID NO: 1326042 - RNA, 19 nt, Artificial Sequence
  Description of Artificial Sequence: Synthetic oligonucleotide
  Sense strand starting at position 2628 of SEQ ID NO: 1242152
cacucagauguuuguugaa

SEQ ID NO: 1326043 - RNA, 19 nt, Artificial Sequence
  Description of Artificial Sequence: Synthetic oligonucleotide
  Antisense strand to SEQ ID NO: 1326042
uucaacaaacaucugagug

SEQ ID NO: 1326044 - RNA, 19 nt, Artificial Sequence
  Description of Artificial Sequence: Synthetic oligonucleotide
  Sense strand starting at position 2663 of SEQ ID NO: 1242152
uugaaaugucaggauguuc

SEQ ID NO: 1326045 - RNA, 19 nt, Artificial Sequence
  Description of Artificial Sequence: Synthetic oligonucleotide
  Antisense strand to SEQ ID NO: 1326044
gaacauccugacauuucaa

SEQ ID NO: 1326046 - RNA, 19 nt, Artificial Sequence
  Description of Artificial Sequence: Synthetic oligonucleotide
  Sense strand starting at position 2735 of SEQ ID NO: 1242152
cuccaaaugugacccagaa

SEQ ID NO: 1326047 - RNA, 19 nt, Artificial Sequence
  Description of Artificial Sequence: Synthetic oligonucleotide
  Antisense strand to SEQ ID NO: 1326046
uucugggucacauuuggag

SEQ ID NO: 1326048 - RNA, 19 nt, Artificial Sequence
  Description of Artificial Sequence: Synthetic oligonucleotide
  Sense strand starting at position 3296 of SEQ ID NO: 1242152
agggcaguguccuuguaaa

SEQ ID NO: 1326049 - RNA, 19 nt, Artificial Sequence
  Description of Artificial Sequence: Synthetic oligonucleotide
  Antisense strand to SEQ ID NO: 1326048
uuuacaaggacacugcccu

SEQ ID NO: 1326050 - RNA, 19 nt, Artificial Sequence
  Description of Artificial Sequence: Synthetic oligonucleotide
  Sense strand starting at position 3403 of SEQ ID NO: 1242152
acuagaaucugugucccuu

SEQ ID NO: 1326051 - RNA, 19 nt, Artificial Sequence
  Description of Artificial Sequence: Synthetic oligonucleotide
  Antisense strand to SEQ ID NO: 1326050
aagggacacagauucuagu

SEQ ID NO: 1326052 - RNA, 19 nt, Artificial Sequence
  Description of Artificial Sequence: Synthetic oligonucleotide
  Sense strand starting at position 3482 of SEQ ID NO: 1242152
gagagaccuuuggugcuau

SEQ ID NO: 1326053 - RNA, 19 nt, Artificial Sequence
  Description of Artificial Sequence: Synthetic oligonucleotide
  Antisense strand to SEQ ID NO: 1326052
auagcaccaaaggucucuc

SEQ ID NO: 1326054 - RNA, 19 nt, Artificial Sequence
  Description of Artificial Sequence: Synthetic oligonucleotide
  Sense strand starting at position 3503 of SEQ ID NO: 1242152
cuguuucugcaccagaaca

SEQ ID NO: 1326055 - RNA, 19 nt, Artificial Sequence
  Description of Artificial Sequence: Synthetic oligonucleotide
  Antisense strand to SEQ ID NO: 1326054
uguucuggugcagaaacag

SEQ ID NO: 1326056 - RNA, 19 nt, Artificial Sequence
  Description of Artificial Sequence: Synthetic oligonucleotide
  Sense strand starting at position 3609 of SEQ ID NO: 1242152
ggcuauagauccucugcaa

SEQ ID NO: 1326057 - RNA, 19 nt, Artificial Sequence
  Description of Artificial Sequence: Synthetic oligonucleotide
  Antisense strand to SEQ ID NO: 1326056
uugcagaggaucuauagcc

SEQ ID NO: 1326058 - RNA, 19 nt, Artificial Sequence
  Description of Artificial Sequence: Synthetic oligonucleotide
  Sense strand starting at position 3673 of SEQ ID NO: 1242152
ugccuuccaguuugauaau

SEQ ID NO: 1326059 - RNA, 19 nt, Artificial Sequence
  Description of Artificial Sequence: Synthetic oligonucleotide
  Antisense strand to SEQ ID NO: 1326058
auuaucaaacuggaaggca

SEQ ID NO: 1326060 - RNA, 19 nt, Artificial Sequence
  Description of Artificial Sequence: Synthetic oligonucleotide
  Sense strand starting at position 3689 of SEQ ID NO: 1242152
aauuucgguuccugaauuu

SEQ ID NO: 1326061 - RNA, 19 nt, Artificial Sequence
  Description of Artificial Sequence: Synthetic oligonucleotide
  Antisense strand to SEQ ID NO: 1326060
aaauucaggaaccgaaauu

SEQ ID NO: 1326062 - RNA, 19 nt, Artificial Sequence
  Description of Artificial Sequence: Synthetic oligonucleotide
  Sense strand starting at position 3768 of SEQ ID NO: 1242152
gguuguuauccuuacccac

SEQ ID NO: 1326063 - RNA, 19 nt, Artificial Sequence
  Description of Artificial Sequence: Synthetic oligonucleotide
  Antisense strand to SEQ ID NO: 1326062
guggguaaggauaacaacc

SEQ ID NO: 1326064 - RNA, 19 nt, Artificial Sequence
  Description of Artificial Sequence: Synthetic oligonucleotide
  Sense strand starting at position 3783 of SEQ ID NO: 1242152
ccacaaugauggcucacau

SEQ ID NO: 1326065 - RNA, 19 nt, Artificial Sequence
  Description of Artificial Sequence: Synthetic oligonucleotide
  Antisense strand to SEQ ID NO: 1326064
augugagccaucauugugg

SEQ ID NO: 1326066 - RNA, 19 nt, Artificial Sequence
  Description of Artificial Sequence: Synthetic oligonucleotide
  Sense strand starting at position 3855 of SEQ ID NO: 1242152
ccaaaugccugaucauaag

SEQ ID NO: 1326067 - RNA, 19 nt, Artificial Sequence
  Description of Artificial Sequence: Synthetic oligonucleotide
  Antisense strand to SEQ ID NO: 1326066
cuuaugaucaggcauuugg

SEQ ID NO: 1326068 - RNA, 19 nt, Artificial Sequence
  Description of Artificial Sequence: Synthetic oligonucleotide
  Sense strand starting at position 3939 of SEQ ID NO: 1242152
gggugaaucugggcuguag

SEQ ID NO: 1326069 - RNA, 19 nt, Artificial Sequence
  Description of Artificial Sequence: Synthetic oligonucleotide
  Antisense strand to SEQ ID NO: 1326068
cuacagcccagauucaccc

SEQ ID NO: 1326070 - RNA, 19 nt, Artificial Sequence
  Description of Artificial Sequence: Synthetic oligonucleotide
  Sense strand starting at position 3941 of SEQ ID NO: 1242152
gugaaucugggcuguagaa

SEQ ID NO: 1326071 - RNA, 19 nt, Artificial Sequence
  Description of Artificial Sequence: Synthetic oligonucleotide
  Antisense strand to SEQ ID NO: 1326070
uucuacagcccagauucac

SEQ ID NO: 1326072 - RNA, 19 nt, Artificial Sequence
  Description of Artificial Sequence: Synthetic oligonucleotide
  Sense strand starting at position 589 of SEQ ID NO: 1242153
cugagagucuugucauggu

SEQ ID NO: 1326073 - RNA, 19 nt, Artificial Sequence
  Description of Artificial Sequence: Synthetic oligonucleotide
  Antisense strand to SEQ ID NO: 1326072
accaugacaagacucucag

SEQ ID NO: 1326074 - RNA, 19 nt, Artificial Sequence
  Description of Artificial Sequence: Synthetic oligonucleotide
  Sense strand starting at position 597 of SEQ ID NO: 1242153
cuugucauggugugauaaa

SEQ ID NO: 1326075 - RNA, 19 nt, Artificial Sequence
  Description of Artificial Sequence: Synthetic oligonucleotide
  Antisense strand to SEQ ID NO: 1326074
uuuaucacaccaugacaag

SEQ ID NO: 1326076 - RNA, 19 nt, Artificial Sequence
  Description of Artificial Sequence: Synthetic oligonucleotide
  Sense strand starting at position 675 of SEQ ID NO: 1242153
gagucacaaucucuugaga

SEQ ID NO: 1326077 - RNA, 19 nt, Artificial Sequence
  Description of Artificial Sequence: Synthetic oligonucleotide
  Antisense strand to SEQ ID NO: 1326076
ucucaagagauugugacuc

SEQ ID NO: 1326078 - RNA, 19 nt, Artificial Sequence
  Description of Artificial Sequence: Synthetic oligonucleotide
  Sense strand starting at position 678 of SEQ ID NO: 1242153
ucacaaucucuugagagca

SEQ ID NO: 1326079 - RNA, 19 nt, Artificial Sequence
  Description of Artificial Sequence: Synthetic oligonucleotide
  Antisense strand to SEQ ID NO: 1326078
ugcucucaagagauuguga

SEQ ID NO: 1326080 - RNA, 19 nt, Artificial Sequence
  Description of Artificial Sequence: Synthetic oligonucleotide
  Sense strand starting at position 742 of SEQ ID NO: 1242153
auccuccugcacugagaau

SEQ ID NO: 1326081 - RNA, 19 nt, Artificial Sequence
  Description of Artificial Sequence: Synthetic oligonucleotide
  Antisense strand to SEQ ID NO: 1326080
auucucagugcaggaggau

SEQ ID NO: 1326082 - RNA, 19 nt, Artificial Sequence
  Description of Artificial Sequence: Synthetic oligonucleotide
  Sense strand starting at position 757 of SEQ ID NO: 1242153
gaauaacgucugggcucaa

SEQ ID NO: 1326083 - RNA, 19 nt, Artificial Sequence
  Description of Artificial Sequence: Synthetic oligonucleotide
  Antisense strand to SEQ ID NO: 1326082
uugagcccagacguuauuc

SEQ ID NO: 1326084 - RNA, 19 nt, Artificial Sequence
  Description of Artificial Sequence: Synthetic oligonucleotide
  Sense strand starting at position 864 of SEQ ID NO: 1242153
gcaggauuuacgcgaggaa

SEQ ID NO: 1326085 - RNA, 19 nt, Artificial Sequence
  Description of Artificial Sequence: Synthetic oligonucleotide
  Antisense strand to SEQ ID NO: 1326084
uuccucgcguaaauccugc

SEQ ID NO: 1326086 - RNA, 19 nt, Artificial Sequence
  Description of Artificial Sequence: Synthetic oligonucleotide
  Sense strand starting at position 878 of SEQ ID NO: 1242153
aggaaaugccucugaggau

SEQ ID NO: 1326087 - RNA, 19 nt, Artificial Sequence
  Description of Artificial Sequence: Synthetic oligonucleotide
  Antisense strand to SEQ ID NO: 1326086
auccucagaggcauuuccu

SEQ ID NO: 1326088 - RNA, 19 nt, Artificial Sequence
  Description of Artificial Sequence: Synthetic oligonucleotide
  Sense strand starting at position 1402 of SEQ ID NO: 1242153
aguagucugcgcucucaaa

SEQ ID NO: 1326089 - RNA, 19 nt, Artificial Sequence
  Description of Artificial Sequence: Synthetic oligonucleotide
  Antisense strand to SEQ ID NO: 1326088
uuugagagcgcagacuacu

SEQ ID NO: 1326090 - RNA, 19 nt, Artificial Sequence
  Description of Artificial Sequence: Synthetic oligonucleotide
  Sense strand starting at position 2336 of SEQ ID NO: 1242153
aggauuaguuagcuuccuu

SEQ ID NO: 1326091 - RNA, 19 nt, Artificial Sequence
  Description of Artificial Sequence: Synthetic oligonucleotide
  Antisense strand to SEQ ID NO: 1326090
aaggaagcuaacuaauccu

SEQ ID NO: 1326092 - RNA, 19 nt, Artificial Sequence
  Description of Artificial Sequence: Synthetic oligonucleotide
  Sense strand starting at position 2358 of SEQ ID NO: 1242153
ugcuaauaguugcugauuu

SEQ ID NO: 1326093 - RNA, 19 nt, Artificial Sequence
  Description of Artificial Sequence: Synthetic oligonucleotide
  Antisense strand to SEQ ID NO: 1326092
aaaucagcaacuauuagca

SEQ ID NO: 1326094 - RNA, 19 nt, Artificial Sequence
  Description of Artificial Sequence: Synthetic oligonucleotide
  Sense strand starting at position 2511 of SEQ ID NO: 1242153
cagauaguagacuguugau

SEQ ID NO: 1326095 - RNA, 19 nt, Artificial Sequence
  Description of Artificial Sequence: Synthetic oligonucleotide
  Antisense strand to SEQ ID NO: 1326094
aucaacagucuacuaucug

SEQ ID NO: 1326096 - RNA, 19 nt, Artificial Sequence
  Description of Artificial Sequence: Synthetic oligonucleotide
  Sense strand starting at position 2520 of SEQ ID NO: 1242153
gacuguugauucccuugua

SEQ ID NO: 1326097 - RNA, 19 nt, Artificial Sequence
  Description of Artificial Sequence: Synthetic oligonucleotide
  Antisense strand to SEQ ID NO: 1326096
uacaagggaaucaacaguc

SEQ ID NO: 1326098 - RNA, 19 nt, Artificial Sequence
  Description of Artificial Sequence: Synthetic oligonucleotide
  Sense strand starting at position 2553 of SEQ ID NO: 1242153
uuagacugacggugaauaa

SEQ ID NO: 1326099 - RNA, 19 nt, Artificial Sequence
  Description of Artificial Sequence: Synthetic oligonucleotide
  Antisense strand to SEQ ID NO: 1326098
uuauucaccgucagucuaa

SEQ ID NO: 1326100 - RNA, 19 nt, Artificial Sequence
  Description of Artificial Sequence: Synthetic oligonucleotide
  Sense strand starting at position 2624 of SEQ ID NO: 1242153
uaaaguaguguugaauaug

SEQ ID NO: 1326101 - RNA, 19 nt, Artificial Sequence
  Description of Artificial Sequence: Synthetic oligonucleotide
  Antisense strand to SEQ ID NO: 1326100
cauauucaacacuacuuua

SEQ ID NO: 1326102 - RNA, 19 nt, Artificial Sequence
  Description of Artificial Sequence: Synthetic oligonucleotide
  Sense strand starting at position 2674 of SEQ ID NO: 1242153
gauuguucccugugauaug

SEQ ID NO: 1326103 - RNA, 19 nt, Artificial Sequence
  Description of Artificial Sequence: Synthetic oligonucleotide
  Antisense strand to SEQ ID NO: 1326102
cauaucacagggaacaauc

SEQ ID NO: 1326104 - RNA, 19 nt, Artificial Sequence
  Description of Artificial Sequence: Synthetic oligonucleotide
  Sense strand starting at position 2715 of SEQ ID NO: 1242153
guaaauccagguuagacuu

SEQ ID NO: 1326105 - RNA, 19 nt, Artificial Sequence
  Description of Artificial Sequence: Synthetic oligonucleotide
  Antisense strand to SEQ ID NO: 1326104
aagucuaaccuggauuuac

SEQ ID NO: 1326106 - RNA, 19 nt, Artificial Sequence
  Description of Artificial Sequence: Synthetic oligonucleotide
  Sense strand starting at position 2762 of SEQ ID NO: 1242153
gugucugggagucauccau

SEQ ID NO: 1326107 - RNA, 19 nt, Artificial Sequence
  Description of Artificial Sequence: Synthetic oligonucleotide
  Antisense strand to SEQ ID NO: 1326106
auggaugacucccagacac

SEQ ID NO: 1326108 - RNA, 19 nt, Artificial Sequence
  Description of Artificial Sequence: Synthetic oligonucleotide
  Sense strand starting at position 2879 of SEQ ID NO: 1242153
ugguuaacuacagguggua

SEQ ID NO: 1326109 - RNA, 19 nt, Artificial Sequence
  Description of Artificial Sequence: Synthetic oligonucleotide
  Antisense strand to SEQ ID NO: 1326108
uaccaccuguaguuaacca

SEQ ID NO: 1326110 - RNA, 19 nt, Artificial Sequence
  Description of Artificial Sequence: Synthetic oligonucleotide
  Sense strand starting at position 2898 of SEQ ID NO: 1242153
cugcauaaugguuaagagu

SEQ ID NO: 1326111 - RNA, 19 nt, Artificial Sequence
  Description of Artificial Sequence: Synthetic oligonucleotide
  Antisense strand to SEQ ID NO: 1326110
acucuuaaccauuaugcag

SEQ ID NO: 1326112 - RNA, 19 nt, Artificial Sequence
  Description of Artificial Sequence: Synthetic oligonucleotide
  Sense strand starting at position 2904 of SEQ ID NO: 1242153
aaugguuaagagugugagu

SEQ ID NO: 1326113 - RNA, 19 nt, Artificial Sequence
  Description of Artificial Sequence: Synthetic oligonucleotide
  Antisense strand to SEQ ID NO: 1326112
acucacacucuuaaccauu

SEQ ID NO: 1326114 - RNA, 19 nt, Artificial Sequence
  Description of Artificial Sequence: Synthetic oligonucleotide
  Sense strand starting at position 3026 of SEQ ID NO: 1242153
aggauaaagauucgguaau

SEQ ID NO: 1326115 - RNA, 19 nt, Artificial Sequence
  Description of Artificial Sequence: Synthetic oligonucleotide
  Antisense strand to SEQ ID NO: 1326114
auuaccgaaucuuuauccu

SEQ ID NO: 1326116 - RNA, 19 nt, Artificial Sequence
  Description of Artificial Sequence: Synthetic oligonucleotide
  Sense strand starting at position 3028 of SEQ ID NO: 1242153
gauaaagauucgguaauug

SEQ ID NO: 1326117 - RNA, 19 nt, Artificial Sequence
  Description of Artificial Sequence: Synthetic oligonucleotide
  Antisense strand to SEQ ID NO: 1326116
caauuaccgaaucuuuauc

SEQ ID NO: 1326118 - RNA, 19 nt, Artificial Sequence
  Description of Artificial Sequence: Synthetic oligonucleotide
  Sense strand starting at position 3054 of SEQ ID NO: 1242153
acauuuagauuugguguuu

SEQ ID NO: 1326119 - RNA, 19 nt, Artificial Sequence
  Description of Artificial Sequence: Synthetic oligonucleotide
  Antisense strand to SEQ ID NO: 1326118
aaacaccaaaucuaaaugu

SEQ ID NO: 1326120 - RNA, 19 nt, Artificial Sequence
  Description of Artificial Sequence: Synthetic oligonucleotide
  Sense strand starting at position 3103 of SEQ ID NO: 1242153
guuucuguggagcaauaag

SEQ ID NO: 1326121 - RNA, 19 nt, Artificial Sequence
  Description of Artificial Sequence: Synthetic oligonucleotide
  Antisense strand to SEQ ID NO: 1326120
cuuauugcuccacagaaac

SEQ ID NO: 1326122 - RNA, 19 nt, Artificial Sequence
  Description of Artificial Sequence: Synthetic oligonucleotide
  Sense strand starting at position 3140 of SEQ ID NO: 1242153
gugaauaggaggugaguua

SEQ ID NO: 1326123 - RNA, 19 nt, Artificial Sequence
  Description of Artificial Sequence: Synthetic oligonucleotide
  Antisense strand to SEQ ID NO: 1326122
uaacucaccuccuauucac

SEQ ID NO: 1326124 - RNA, 19 nt, Artificial Sequence
  Description of Artificial Sequence: Synthetic oligonucleotide
  Sense strand starting at position 3149 of SEQ ID NO: 1242153
aggugaguuaaaggaggua

SEQ ID NO: 1326125 - RNA, 19 nt, Artificial Sequence
  Description of Artificial Sequence: Synthetic oligonucleotide
  Antisense strand to SEQ ID NO: 1326124
uaccuccuuuaacucaccu

SEQ ID NO: 1326126 - RNA, 19 nt, Artificial Sequence
  Description of Artificial Sequence: Synthetic oligonucleotide
  Sense strand starting at position 3163 of SEQ ID NO: 1242153
agguauccagucuaaauua

SEQ ID NO: 1326127 - RNA, 19 nt, Artificial Sequence
  Description of Artificial Sequence: Synthetic oligonucleotide
  Antisense strand to SEQ ID NO: 1326126
uaauuuagacuggauaccu

SEQ ID NO: 1326128 - RNA, 19 nt, Artificial Sequence
  Description of Artificial Sequence: Synthetic oligonucleotide
  Sense strand starting at position 3182 of SEQ ID NO: 1242153
uuauacuuucgaggagcuu

SEQ ID NO: 1326129 - RNA, 19 nt, Artificial Sequence
  Description of Artificial Sequence: Synthetic oligonucleotide
  Antisense strand to SEQ ID NO: 1326128
aagcuccucgaaaguauaa

SEQ ID NO: 1326130 - RNA, 19 nt, Artificial Sequence
  Description of Artificial Sequence: Synthetic oligonucleotide
  Sense strand starting at position 3183 of SEQ ID NO: 1242153
uauacuuucgaggagcuua

SEQ ID NO: 1326131 - RNA, 19 nt, Artificial Sequence
  Description of Artificial Sequence: Synthetic oligonucleotide
  Antisense strand to SEQ ID NO: 1326130
uaagcuccucgaaaguaua

SEQ ID NO: 1326132 - RNA, 19 nt, Artificial Sequence
  Description of Artificial Sequence: Synthetic oligonucleotide
  Sense strand starting at position 3191 of SEQ ID NO: 1242153
cgaggagcuuaacucagaa

SEQ ID NO: 1326133 - RNA, 19 nt, Artificial Sequence
  Description of Artificial Sequence: Synthetic oligonucleotide
  Antisense strand to SEQ ID NO: 1326132
uucugaguuaagcuccucg

SEQ ID NO: 1326134 - RNA, 19 nt, Artificial Sequence
  Description of Artificial Sequence: Synthetic oligonucleotide
  Sense strand starting at position 3378 of SEQ ID NO: 1242153
gguagaguaacuuggaaua

SEQ ID NO: 1326135 - RNA, 19 nt, Artificial Sequence
  Description of Artificial Sequence: Synthetic oligonucleotide
  Antisense strand to SEQ ID NO: 1326134
uauuccaaguuacucuacc

SEQ ID NO: 1326136 - RNA, 19 nt, Artificial Sequence
  Description of Artificial Sequence: Synthetic oligonucleotide
  Sense strand starting at position 3443 of SEQ ID NO: 1242153
augaauccuuuaucuguga

SEQ ID NO: 1326137 - RNA, 19 nt, Artificial Sequence
  Description of Artificial Sequence: Synthetic oligonucleotide
  Antisense strand to SEQ ID NO: 1326136
ucacagauaaaggauucau

SEQ ID NO: 1326138 - RNA, 19 nt, Artificial Sequence
  Description of Artificial Sequence: Synthetic oligonucleotide
  Sense strand starting at position 3563 of SEQ ID NO: 1242153
cucuguaaaguuggugaca

SEQ ID NO: 1326139 - RNA, 19 nt, Artificial Sequence
  Description of Artificial Sequence: Synthetic oligonucleotide
  Antisense strand to SEQ ID NO: 1326138
ugucaccaacuuuacagag

SEQ ID NO: 1326140 - RNA, 19 nt, Artificial Sequence
  Description of Artificial Sequence: Synthetic oligonucleotide
  Sense strand starting at position 3632 of SEQ ID NO: 1242153
guuugagaauugcuucuga

SEQ ID NO: 1326141 - RNA, 19 nt, Artificial Sequence
  Description of Artificial Sequence: Synthetic oligonucleotide
  Antisense strand to SEQ ID NO: 1326140
ucagaagcaauucucaaac

SEQ ID NO: 1326142 - RNA, 19 nt, Artificial Sequence
  Description of Artificial Sequence: Synthetic oligonucleotide
  Sense strand starting at position 3640 of SEQ ID NO: 1242153
auugcuucugaagggauua

SEQ ID NO: 1326143 - RNA, 19 nt, Artificial Sequence
  Description of Artificial Sequence: Synthetic oligonucleotide
  Antisense strand to SEQ ID NO: 1326142
uaaucccuucagaagcaau

SEQ ID NO: 1326144 - RNA, 19 nt, Artificial Sequence
  Description of Artificial Sequence: Synthetic oligonucleotide
  Sense strand starting at position 3689 of SEQ ID NO: 1242153
aguggauccucaccucuaa

SEQ ID NO: 1326145 - RNA, 19 nt, Artificial Sequence
  Description of Artificial Sequence: Synthetic oligonucleotide
  Antisense strand to SEQ ID NO: 1326144
uuagaggugaggauccacu

SEQ ID NO: 1326146 - RNA, 19 nt, Artificial Sequence
  Description of Artificial Sequence: Synthetic oligonucleotide
  Sense strand starting at position 3731 of SEQ ID NO: 1242153
gagguaucucaggguugau

SEQ ID NO: 1326147 - RNA, 19 nt, Artificial Sequence
  Description of Artificial Sequence: Synthetic oligonucleotide
  Antisense strand to SEQ ID NO: 1326146
aucaacccugagauaccuc

SEQ ID NO: 1326148 - RNA, 19 nt, Artificial Sequence
  Description of Artificial Sequence: Synthetic oligonucleotide
  Sense strand starting at position 3734 of SEQ ID NO: 1242153
guaucucaggguugauuga

SEQ ID NO: 1326149 - RNA, 19 nt, Artificial Sequence
  Description of Artificial Sequence: Synthetic oligonucleotide
  Antisense strand to SEQ ID NO: 1326148
ucaaucaacccugagauac

SEQ ID NO: 1326150 - RNA, 19 nt, Artificial Sequence
  Description of Artificial Sequence: Synthetic oligonucleotide
  Sense strand starting at position 3929 of SEQ ID NO: 1242153
uucugauuucgaugccuua

SEQ ID NO: 1326151 - RNA, 19 nt, Artificial Sequence
  Description of Artificial Sequence: Synthetic oligonucleotide
  Antisense strand to SEQ ID NO: 1326150
uaaggcaucgaaaucagaa

SEQ ID NO: 1326152 - RNA, 19 nt, Artificial Sequence
  Description of Artificial Sequence: Synthetic oligonucleotide
  Sense strand starting at position 117 of SEQ ID NO: 1242154
gcuguuagugggcaaggaa

SEQ ID NO: 1326153 - RNA, 19 nt, Artificial Sequence
  Description of Artificial Sequence: Synthetic oligonucleotide
  Antisense strand to SEQ ID NO: 1326152
uuccuugcccacuaacagc

SEQ ID NO: 1326154 - RNA, 19 nt, Artificial Sequence
  Description of Artificial Sequence: Synthetic oligonucleotide
  Sense strand starting at position 132 of SEQ ID NO: 1242154
ggaagaaccugcuuccuca

SEQ ID NO: 1326155 - RNA, 19 nt, Artificial Sequence
  Description of Artificial Sequence: Synthetic oligonucleotide
  Antisense strand to SEQ ID NO: 1326154
ugaggaagcagguucuucc

SEQ ID NO: 1326156 - RNA, 19 nt, Artificial Sequence
  Description of Artificial Sequence: Synthetic oligonucleotide
  Sense strand starting at position 258 of SEQ ID NO: 1242154
ccuaguaaaccugggugau

SEQ ID NO: 1326157 - RNA, 19 nt, Artificial Sequence
  Description of Artificial Sequence: Synthetic oligonucleotide
  Antisense strand to SEQ ID NO: 1326156
aucacccagguuuacuagg

SEQ ID NO: 1326158 - RNA, 19 nt, Artificial Sequence
  Description of Artificial Sequence: Synthetic oligonucleotide
  Sense strand starting at position 259 of SEQ ID NO: 1242154
cuaguaaaccugggugaug

SEQ ID NO: 1326159 - RNA, 19 nt, Artificial Sequence
  Description of Artificial Sequence: Synthetic oligonucleotide
  Antisense strand to SEQ ID NO: 1326158
caucacccagguuuacuag

SEQ ID NO: 1326160 - RNA, 19 nt, Artificial Sequence
  Description of Artificial Sequence: Synthetic oligonucleotide
  Sense strand starting at position 260 of SEQ ID NO: 1242154
uaguaaaccugggugauga

SEQ ID NO: 1326161 - RNA, 19 nt, Artificial Sequence
  Description of Artificial Sequence: Synthetic oligonucleotide
  Antisense strand to SEQ ID NO: 1326160
ucaucacccagguuuacua

SEQ ID NO: 1326162 - RNA, 19 nt, Artificial Sequence
  Description of Artificial Sequence: Synthetic oligonucleotide
  Sense strand starting at position 271 of SEQ ID NO: 1242154
ggugaugaguuccucaaga

SEQ ID NO: 1326163 - RNA, 19 nt, Artificial Sequence
  Description of Artificial Sequence: Synthetic oligonucleotide
  Antisense strand to SEQ ID NO: 1326162
ucuugaggaacucaucacc

SEQ ID NO: 1326164 - RNA, 19 nt, Artificial Sequence
  Description of Artificial Sequence: Synthetic oligonucleotide
  Sense strand starting at position 582 of SEQ ID NO: 1242154
ggaugacauugucaucaga

SEQ ID NO: 1326165 - RNA, 19 nt, Artificial Sequence
  Description of Artificial Sequence: Synthetic oligonucleotide
  Antisense strand to SEQ ID NO: 1326164
ucugaugacaaugucaucc

SEQ ID NO: 1326166 - RNA, 19 nt, Artificial Sequence
  Description of Artificial Sequence: Synthetic oligonucleotide
  Sense strand starting at position 584 of SEQ ID NO: 1242154
augacauugucaucagagc

SEQ ID NO: 1326167 - RNA, 19 nt, Artificial Sequence
  Description of Artificial Sequence: Synthetic oligonucleotide
  Antisense strand to SEQ ID NO: 1326166
gcucugaugacaaugucau

SEQ ID NO: 1326168 - RNA, 19 nt, Artificial Sequence
  Description of Artificial Sequence: Synthetic oligonucleotide
  Sense strand starting at position 585 of SEQ ID NO: 1242154
ugacauugucaucagagcu

SEQ ID NO: 1326169 - RNA, 19 nt, Artificial Sequence
  Description of Artificial Sequence: Synthetic oligonucleotide
  Antisense strand to SEQ ID NO: 1326168
agcucugaugacaauguca

SEQ ID NO: 1326170 - RNA, 19 nt, Artificial Sequence
  Description of Artificial Sequence: Synthetic oligonucleotide
  Sense strand starting at position 702 of SEQ ID NO: 1242154
ccuuguaguagccgucaca

SEQ ID NO: 1326171 - RNA, 19 nt, Artificial Sequence
  Description of Artificial Sequence: Synthetic oligonucleotide
  Antisense strand to SEQ ID NO: 1326170
ugugacggcuacuacaagg

SEQ ID NO: 1326172 - RNA, 19 nt, Artificial Sequence
  Description of Artificial Sequence: Synthetic oligonucleotide
  Sense strand starting at position 722 of SEQ ID NO: 1242154
gcuacaucugccgucucau

SEQ ID NO: 1326173 - RNA, 19 nt, Artificial Sequence
  Description of Artificial Sequence: Synthetic oligonucleotide
  Antisense strand to SEQ ID NO: 1326172
augagacggcagauguagc

SEQ ID NO: 1326174 - RNA, 19 nt, Artificial Sequence
  Description of Artificial Sequence: Synthetic oligonucleotide
  Sense strand starting at position 772 of SEQ ID NO: 1242154
gaagacgucccagaugcua

SEQ ID NO: 1326175 - RNA, 19 nt, Artificial Sequence
  Description of Artificial Sequence: Synthetic oligonucleotide
  Antisense strand to SEQ ID NO: 1326174
uagcaucugggacgucuuc

SEQ ID NO: 1326176 - RNA, 19 nt, Artificial Sequence
  Description of Artificial Sequence: Synthetic oligonucleotide
  Sense strand starting at position 989 of SEQ ID NO: 1242154
cuugucuuccuaggagugu

SEQ ID NO: 1326177 - RNA, 19 nt, Artificial Sequence
  Description of Artificial Sequence: Synthetic oligonucleotide
  Antisense strand to SEQ ID NO: 1326176
acacuccuaggaagacaag

SEQ ID NO: 1326178 - RNA, 19 nt, Artificial Sequence
  Description of Artificial Sequence: Synthetic oligonucleotide
  Sense strand starting at position 1061 of SEQ ID NO: 1242154
uuuagcucugauuagcaua

SEQ ID NO: 1326179 - RNA, 19 nt, Artificial Sequence
  Description of Artificial Sequence: Synthetic oligonucleotide
  Antisense strand to SEQ ID NO: 1326178
uaugcuaaucagagcuaaa

SEQ ID NO: 1326180 - RNA, 19 nt, Artificial Sequence
  Description of Artificial Sequence: Synthetic oligonucleotide
  Sense strand starting at position 1064 of SEQ ID NO: 1242154
agcucugauuagcauacau

SEQ ID NO: 1326181 - RNA, 19 nt, Artificial Sequence
  Description of Artificial Sequence: Synthetic oligonucleotide
  Antisense strand to SEQ ID NO: 1326180
auguaugcuaaucagagcu

SEQ ID NO: 1326182 - RNA, 19 nt, Artificial Sequence
  Description of Artificial Sequence: Synthetic oligonucleotide
  Sense strand starting at position 1074 of SEQ ID NO: 1242154
agcauacauuaucugugua

SEQ ID NO: 1326183 - RNA, 19 nt, Artificial Sequence
  Description of Artificial Sequence: Synthetic oligonucleotide
  Antisense strand to SEQ ID NO: 1326182
uacacagauaauguaugcu

SEQ ID NO: 1326184 - RNA, 19 nt, Artificial Sequence
  Description of Artificial Sequence: Synthetic oligonucleotide
  Sense strand starting at position 1115 of SEQ ID NO: 1242154
aaauaucuguuaggagcuu

SEQ ID NO: 1326185 - RNA, 19 nt, Artificial Sequence
  Description of Artificial Sequence: Synthetic oligonucleotide
  Antisense strand to SEQ ID NO: 1326184
aagcuccuaacagauauuu

SEQ ID NO: 1326186 - RNA, 19 nt, Artificial Sequence
  Description of Artificial Sequence: Synthetic oligonucleotide
  Sense strand starting at position 1272 of SEQ ID NO: 1242154
gagggaagguuccauagua

SEQ ID NO: 1326187 - RNA, 19 nt, Artificial Sequence
  Description of Artificial Sequence: Synthetic oligonucleotide
  Antisense strand to SEQ ID NO: 1326186
uacuauggaaccuucccuc

SEQ ID NO: 1326188 - RNA, 19 nt, Artificial Sequence
  Description of Artificial Sequence: Synthetic oligonucleotide
  Sense strand starting at position 1577 of SEQ ID NO: 1242154
cucugagacugaugggcaa

SEQ ID NO: 1326189 - RNA, 19 nt, Artificial Sequence
  Description of Artificial Sequence: Synthetic oligonucleotide
  Antisense strand to SEQ ID NO: 1326188
uugcccaucagucucagag

SEQ ID NO: 1326190 - RNA, 19 nt, Artificial Sequence
  Description of Artificial Sequence: Synthetic oligonucleotide
  Sense strand starting at position 1661 of SEQ ID NO: 1242154
cugaguggccucuaucuaa

SEQ ID NO: 1326191 - RNA, 19 nt, Artificial Sequence
  Description of Artificial Sequence: Synthetic oligonucleotide
  Antisense strand to SEQ ID NO: 1326190
uuagauagaggccacucag

SEQ ID NO: 1326192 - RNA, 19 nt, Artificial Sequence
  Description of Artificial Sequence: Synthetic oligonucleotide
  Sense strand starting at position 1882 of SEQ ID NO: 1242154
gaucguccuugaucgcaga

SEQ ID NO: 1326193 - RNA, 19 nt, Artificial Sequence
  Description of Artificial Sequence: Synthetic oligonucleotide
  Antisense strand to SEQ ID NO: 1326192
ucugcgaucaaggacgauc

SEQ ID NO: 1326194 - RNA, 19 nt, Artificial Sequence
  Description of Artificial Sequence: Synthetic oligonucleotide
  Sense strand starting at position 2010 of SEQ ID NO: 1242154
uguggucuguggcuacaga

SEQ ID NO: 1326195 - RNA, 19 nt, Artificial Sequence
  Description of Artificial Sequence: Synthetic oligonucleotide
  Antisense strand to SEQ ID NO: 1326194
ucuguagccacagaccaca

SEQ ID NO: 1326196 - RNA, 19 nt, Artificial Sequence
  Description of Artificial Sequence: Synthetic oligonucleotide
  Sense strand starting at position 2296 of SEQ ID NO: 1242154
ugccaugugucucugucua

SEQ ID NO: 1326197 - RNA, 19 nt, Artificial Sequence
  Description of Artificial Sequence: Synthetic oligonucleotide
  Antisense strand to SEQ ID NO: 1326196
uagacagagacacauggca

SEQ ID NO: 1326198 - RNA, 19 nt, Artificial Sequence
  Description of Artificial Sequence: Synthetic oligonucleotide
  Sense strand starting at position 2610 of SEQ ID NO: 1242154
gccuuauggcuuuguuguu

SEQ ID NO: 1326199 - RNA, 19 nt, Artificial Sequence
  Description of Artificial Sequence: Synthetic oligonucleotide
  Antisense strand to SEQ ID NO: 1326198
aacaacaaagccauaaggc

SEQ ID NO: 1326200 - RNA, 19 nt, Artificial Sequence
  Description of Artificial Sequence: Synthetic oligonucleotide
  Sense strand starting at position 2617 of SEQ ID NO: 1242154
ggcuuuguuguugguuaau

SEQ ID NO: 1326201 - RNA, 19 nt, Artificial Sequence
  Description of Artificial Sequence: Synthetic oligonucleotide
  Antisense strand to SEQ ID NO: 1326200
auuaaccaacaacaaagcc

SEQ ID NO: 1326202 - RNA, 19 nt, Artificial Sequence
  Description of Artificial Sequence: Synthetic oligonucleotide
  Sense strand starting at position 2628 of SEQ ID NO: 1242154
ugguuaauuucuuuguacu

SEQ ID NO: 1326203 - RNA, 19 nt, Artificial Sequence
  Description of Artificial Sequence: Synthetic oligonucleotide
  Antisense strand to SEQ ID NO: 1326202
aguacaaagaaauuaacca

SEQ ID NO: 1326204 - RNA, 19 nt, Artificial Sequence
  Description of Artificial Sequence: Synthetic oligonucleotide
  Sense strand starting at position 2629 of SEQ ID NO: 1242154
gguuaauuucuuuguacuc

SEQ ID NO: 1326205 - RNA, 19 nt, Artificial Sequence
  Description of Artificial Sequence: Synthetic oligonucleotide
  Antisense strand to SEQ ID NO: 1326204
gaguacaaagaaauuaacc

SEQ ID NO: 1326206 - RNA, 19 nt, Artificial Sequence
  Description of Artificial Sequence: Synthetic oligonucleotide
  Sense strand starting at position 2630 of SEQ ID NO: 1242154
guuaauuucuuuguacucu

SEQ ID NO: 1326207 - RNA, 19 nt, Artificial Sequence
  Description of Artificial Sequence: Synthetic oligonucleotide
  Antisense strand to SEQ ID NO: 1326206
agaguacaaagaaauuaac

SEQ ID NO: 1326208 - RNA, 19 nt, Artificial Sequence
  Description of Artificial Sequence: Synthetic oligonucleotide
  Sense strand starting at position 2716 of SEQ ID NO: 1242154
agacuagguucucuggauu

SEQ ID NO: 1326209 - RNA, 19 nt, Artificial Sequence
  Description of Artificial Sequence: Synthetic oligonucleotide
  Antisense strand to SEQ ID NO: 1326208
aauccagagaaccuagucu

SEQ ID NO: 1326210 - RNA, 19 nt, Artificial Sequence
  Description of Artificial Sequence: Synthetic oligonucleotide
  Sense strand starting at position 3135 of SEQ ID NO: 1242154
acaucagcuguuuauguau

SEQ ID NO: 1326211 - RNA, 19 nt, Artificial Sequence
  Description of Artificial Sequence: Synthetic oligonucleotide
  Antisense strand to SEQ ID NO: 1326210
auacauaaacagcugaugu

SEQ ID NO: 1326212 - RNA, 19 nt, Artificial Sequence
  Description of Artificial Sequence: Synthetic oligonucleotide
  Sense strand starting at position 3244 of SEQ ID NO: 1242154
gacgcuuaauaaugugagu

SEQ ID NO: 1326213 - RNA, 19 nt, Artificial Sequence
  Description of Artificial Sequence: Synthetic oligonucleotide
  Antisense strand to SEQ ID NO: 1326212
acucacauuauuaagcguc

SEQ ID NO: 1326214 - RNA, 19 nt, Artificial Sequence
  Description of Artificial Sequence: Synthetic oligonucleotide
  Sense strand starting at position 3246 of SEQ ID NO: 1242154
cgcuuaauaaugugaguaa

SEQ ID NO: 1326215 - RNA, 19 nt, Artificial Sequence
  Description of Artificial Sequence: Synthetic oligonucleotide
  Antisense strand to SEQ ID NO: 1326214
uuacucacauuauuaagcg

SEQ ID NO: 1326216 - RNA, 19 nt, Artificial Sequence
  Description of Artificial Sequence: Synthetic oligonucleotide
  Sense strand starting at position 3247 of SEQ ID NO: 1242154
gcuuaauaaugugaguaaa

SEQ ID NO: 1326217 - RNA, 19 nt, Artificial Sequence
  Description of Artificial Sequence: Synthetic oligonucleotide
  Antisense strand to SEQ ID NO: 1326216
uuuacucacauuauuaagc

SEQ ID NO: 1326218 - RNA, 19 nt, Artificial Sequence
  Description of Artificial Sequence: Synthetic oligonucleotide
  Sense strand starting at position 3505 of SEQ ID NO: 1242154
gugcuauuacuggaaccgu

SEQ ID NO: 1326219 - RNA, 19 nt, Artificial Sequence
  Description of Artificial Sequence: Synthetic oligonucleotide
  Antisense strand to SEQ ID NO: 1326218
acgguuccaguaauagcac

SEQ ID NO: 1326220 - RNA, 19 nt, Artificial Sequence
  Description of Artificial Sequence: Synthetic oligonucleotide
  Sense strand starting at position 3519 of SEQ ID NO: 1242154
accguuagagguugaggaa

SEQ ID NO: 1326221 - RNA, 19 nt, Artificial Sequence
  Description of Artificial Sequence: Synthetic oligonucleotide
  Antisense strand to SEQ ID NO: 1326220
uuccucaaccucuaacggu

SEQ ID NO: 1326222 - RNA, 19 nt, Artificial Sequence
  Description of Artificial Sequence: Synthetic oligonucleotide
  Sense strand starting at position 3520 of SEQ ID NO: 1242154
ccguuagagguugaggaaa

SEQ ID NO: 1326223 - RNA, 19 nt, Artificial Sequence
  Description of Artificial Sequence: Synthetic oligonucleotide
  Antisense strand to SEQ ID NO: 1326222
uuuccucaaccucuaacgg

SEQ ID NO: 1326224 - RNA, 19 nt, Artificial Sequence
  Description of Artificial Sequence: Synthetic oligonucleotide
  Sense strand starting at position 3522 of SEQ ID NO: 1242154
guuagagguugaggaaacu

SEQ ID NO: 1326225 - RNA, 19 nt, Artificial Sequence
  Description of Artificial Sequence: Synthetic oligonucleotide
  Antisense strand to SEQ ID NO: 1326224
aguuuccucaaccucuaac

SEQ ID NO: 1326226 - RNA, 19 nt, Artificial Sequence
  Description of Artificial Sequence: Synthetic oligonucleotide
  Sense strand starting at position 3568 of SEQ ID NO: 1242154
agcaauugugcggagguuu

SEQ ID NO: 1326227 - RNA, 19 nt, Artificial Sequence
  Description of Artificial Sequence: Synthetic oligonucleotide
  Antisense strand to SEQ ID NO: 1326226
aaaccuccgcacaauugcu

SEQ ID NO: 1326228 - RNA, 19 nt, Artificial Sequence
  Description of Artificial Sequence: Synthetic oligonucleotide
  Sense strand starting at position 3714 of SEQ ID NO: 1242154
uggugaugccuguggugaa

SEQ ID NO: 1326229 - RNA, 19 nt, Artificial Sequence
  Description of Artificial Sequence: Synthetic oligonucleotide
  Antisense strand to SEQ ID NO: 1326228
uucaccacaggcaucacca

SEQ ID NO: 1326230 - RNA, 19 nt, Artificial Sequence
  Description of Artificial Sequence: Synthetic oligonucleotide
  Sense strand starting at position 3854 of SEQ ID NO: 1242154
gugugucaauaaggauauu

SEQ ID NO: 1326231 - RNA, 19 nt, Artificial Sequence
  Description of Artificial Sequence: Synthetic oligonucleotide
  Antisense strand to SEQ ID NO: 1326230
aauauccuuauugacacac

SEQ ID NO: 1326232 - RNA, 19 nt, Artificial Sequence
  Description of Artificial Sequence: Synthetic oligonucleotide
  Sense strand starting at position 10 of SEQ ID NO: 1242155
gguccucaccuguggcaga

SEQ ID NO: 1326233 - RNA, 19 nt, Artificial Sequence
  Description of Artificial Sequence: Synthetic oligonucleotide
  Antisense strand to SEQ ID NO: 1326232
ucugccacaggugaggacc

SEQ ID NO: 1326234 - RNA, 19 nt, Artificial Sequence
  Description of Artificial Sequence: Synthetic oligonucleotide
  Sense strand starting at position 23 of SEQ ID NO: 1242155
ggcagaucccaguggugca

SEQ ID NO: 1326235 - RNA, 19 nt, Artificial Sequence
  Description of Artificial Sequence: Synthetic oligonucleotide
  Antisense strand to SEQ ID NO: 1326234
ugcaccacugggaucugcc

SEQ ID NO: 1326236 - RNA, 19 nt, Artificial Sequence
  Description of Artificial Sequence: Synthetic oligonucleotide
  Sense strand starting at position 45 of SEQ ID NO: 1242155
ucacgaugggagugauguu

SEQ ID NO: 1326237 - RNA, 19 nt, Artificial Sequence
  Description of Artificial Sequence: Synthetic oligonucleotide
  Antisense strand to SEQ ID NO: 1326236
aacaucacucccaucguga

SEQ ID NO: 1326238 - RNA, 19 nt, Artificial Sequence
  Description of Artificial Sequence: Synthetic oligonucleotide
  Sense strand starting at position 57 of SEQ ID NO: 1242155
ugauguugcugcucagaag

SEQ ID NO: 1326239 - RNA, 19 nt, Artificial Sequence
  Description of Artificial Sequence: Synthetic oligonucleotide
  Antisense strand to SEQ ID NO: 1326238
cuucugagcagcaacauca

SEQ ID NO: 1326240 - RNA, 19 nt, Artificial Sequence
  Description of Artificial Sequence: Synthetic oligonucleotide
  Sense strand starting at position 78 of SEQ ID NO: 1242155
caucgauaagaucacugua

SEQ ID NO: 1326241 - RNA, 19 nt, Artificial Sequence
  Description of Artificial Sequence: Synthetic oligonucleotide
  Antisense strand to SEQ ID NO: 1326240
uacagugaucuuaucgaug

SEQ ID NO: 1326242 - RNA, 19 nt, Artificial Sequence
  Description of Artificial Sequence: Synthetic oligonucleotide
  Sense strand starting at position 80 of SEQ ID NO: 1242155
ucgauaagaucacuguaga

SEQ ID NO: 1326243 - RNA, 19 nt, Artificial Sequence
  Description of Artificial Sequence: Synthetic oligonucleotide
  Antisense strand to SEQ ID NO: 1326242
ucuacagugaucuuaucga

SEQ ID NO: 1326244 - RNA, 19 nt, Artificial Sequence
  Description of Artificial Sequence: Synthetic oligonucleotide
  Sense strand starting at position 81 of SEQ ID NO: 1242155
cgauaagaucacuguagaa

SEQ ID NO: 1326245 - RNA, 19 nt, Artificial Sequence
  Description of Artificial Sequence: Synthetic oligonucleotide
  Antisense strand to SEQ ID NO: 1326244
uucuacagugaucuuaucg

SEQ ID NO: 1326246 - RNA, 19 nt, Artificial Sequence
  Description of Artificial Sequence: Synthetic oligonucleotide
  Sense strand starting at position 124 of SEQ ID NO: 1242155
cucggcugcaggugaaaua

SEQ ID NO: 1326247 - RNA, 19 nt, Artificial Sequence
  Description of Artificial Sequence: Synthetic oligonucleotide
  Antisense strand to SEQ ID NO: 1326246
uauuucaccugcagccgag

SEQ ID NO: 1326248 - RNA, 19 nt, Artificial Sequence
  Description of Artificial Sequence: Synthetic oligonucleotide
  Sense strand starting at position 477 of SEQ ID NO: 1242155
guucccucagcagaaugau

SEQ ID NO: 1326249 - RNA, 19 nt, Artificial Sequence
  Description of Artificial Sequence: Synthetic oligonucleotide
  Antisense strand to SEQ ID NO: 1326248
aucauucugcugagggaac

SEQ ID NO: 1326250 - RNA, 19 nt, Artificial Sequence
  Description of Artificial Sequence: Synthetic oligonucleotide
  Sense strand starting at position 599 of SEQ ID NO: 1242155
gcuguuagugggcaaggaa

SEQ ID NO: 1326251 - RNA, 19 nt, Artificial Sequence
  Description of Artificial Sequence: Synthetic oligonucleotide
  Antisense strand to SEQ ID NO: 1326250
uuccuugcccacuaacagc

SEQ ID NO: 1326252 - RNA, 19 nt, Artificial Sequence
  Description of Artificial Sequence: Synthetic oligonucleotide
  Sense strand starting at position 614 of SEQ ID NO: 1242155
ggaagaaccugcuuccuca

SEQ ID NO: 1326253 - RNA, 19 nt, Artificial Sequence
  Description of Artificial Sequence: Synthetic oligonucleotide
  Antisense strand to SEQ ID NO: 1326252
ugaggaagcagguucuucc

SEQ ID NO: 1326254 - RNA, 19 nt, Artificial Sequence
  Description of Artificial Sequence: Synthetic oligonucleotide
  Sense strand starting at position 740 of SEQ ID NO: 1242155
ccuaguaaaccugggugau

SEQ ID NO: 1326255 - RNA, 19 nt, Artificial Sequence
  Description of Artificial Sequence: Synthetic oligonucleotide
  Antisense strand to SEQ ID NO: 1326254
aucacccagguuuacuagg

SEQ ID NO: 1326256 - RNA, 19 nt, Artificial Sequence
  Description of Artificial Sequence: Synthetic oligonucleotide
  Sense strand starting at position 741 of SEQ ID NO: 1242155
cuaguaaaccugggugaug

SEQ ID NO: 1326257 - RNA, 19 nt, Artificial Sequence
  Description of Artificial Sequence: Synthetic oligonucleotide
  Antisense strand to SEQ ID NO: 1326256
caucacccagguuuacuag

SEQ ID NO: 1326258 - RNA, 19 nt, Artificial Sequence
  Description of Artificial Sequence: Synthetic oligonucleotide
  Sense strand starting at position 742 of SEQ ID NO: 1242155
uaguaaaccugggugauga

SEQ ID NO: 1326259 - RNA, 19 nt, Artificial Sequence
  Description of Artificial Sequence: Synthetic oligonucleotide
  Antisense strand to SEQ ID NO: 1326258
ucaucacccagguuuacua

SEQ ID NO: 1326260 - RNA, 19 nt, Artificial Sequence
  Description of Artificial Sequence: Synthetic oligonucleotide
  Sense strand starting at position 753 of SEQ ID NO: 1242155
ggugaugaguuccucaaga

SEQ ID NO: 1326261 - RNA, 19 nt, Artificial Sequence
  Description of Artificial Sequence: Synthetic oligonucleotide
  Antisense strand to SEQ ID NO: 1326260
ucuugaggaacucaucacc

SEQ ID NO: 1326262 - RNA, 19 nt, Artificial Sequence
  Description of Artificial Sequence: Synthetic oligonucleotide
  Sense strand starting at position 1064 of SEQ ID NO: 1242155
ggaugacauugucaucaga

SEQ ID NO: 1326263 - RNA, 19 nt, Artificial Sequence
  Description of Artificial Sequence: Synthetic oligonucleotide
  Antisense strand to SEQ ID NO: 1326262
ucugaugacaaugucaucc

SEQ ID NO: 1326264 - RNA, 19 nt, Artificial Sequence
  Description of Artificial Sequence: Synthetic oligonucleotide
  Sense strand starting at position 1066 of SEQ ID NO: 1242155
augacauugucaucagagc

SEQ ID NO: 1326265 - RNA, 19 nt, Artificial Sequence
  Description of Artificial Sequence: Synthetic oligonucleotide
  Antisense strand to SEQ ID NO: 1326264
gcucugaugacaaugucau

SEQ ID NO: 1326266 - RNA, 19 nt, Artificial Sequence
  Description of Artificial Sequence: Synthetic oligonucleotide
  Sense strand starting at position 1067 of SEQ ID NO: 1242155
ugacauugucaucagagcu

SEQ ID NO: 1326267 - RNA, 19 nt, Artificial Sequence
  Description of Artificial Sequence: Synthetic oligonucleotide
  Antisense strand to SEQ ID NO: 1326266
agcucugaugacaauguca

SEQ ID NO: 1326268 - RNA, 19 nt, Artificial Sequence
  Description of Artificial Sequence: Synthetic oligonucleotide
  Sense strand starting at position 1184 of SEQ ID NO: 1242155
ccuuguaguagccgucaca

SEQ ID NO: 1326269 - RNA, 19 nt, Artificial Sequence
  Description of Artificial Sequence: Synthetic oligonucleotide
  Antisense strand to SEQ ID NO: 1326268
ugugacggcuacuacaagg

SEQ ID NO: 1326270 - RNA, 19 nt, Artificial Sequence
  Description of Artificial Sequence: Synthetic oligonucleotide
  Sense strand starting at position 1204 of SEQ ID NO: 1242155
gcuacaucugccgucucau

SEQ ID NO: 1326271 - RNA, 19 nt, Artificial Sequence
  Description of Artificial Sequence: Synthetic oligonucleotide
  Antisense strand to SEQ ID NO: 1326270
augagacggcagauguagc

SEQ ID NO: 1326272 - RNA, 19 nt, Artificial Sequence
  Description of Artificial Sequence: Synthetic oligonucleotide
  Sense strand starting at position 1254 of SEQ ID NO: 1242155
gaagacgucccagaugcua

SEQ ID NO: 1326273 - RNA, 19 nt, Artificial Sequence
  Description of Artificial Sequence: Synthetic oligonucleotide
  Antisense strand to SEQ ID NO: 1326272
uagcaucugggacgucuuc

SEQ ID NO: 1326274 - RNA, 19 nt, Artificial Sequence
  Description of Artificial Sequence: Synthetic oligonucleotide
  Sense strand starting at position 1471 of SEQ ID NO: 1242155
cuugucuuccuaggagugu

SEQ ID NO: 1326275 - RNA, 19 nt, Artificial Sequence
  Description of Artificial Sequence: Synthetic oligonucleotide
  Antisense strand to SEQ ID NO: 1326274
acacuccuaggaagacaag

SEQ ID NO: 1326276 - RNA, 19 nt, Artificial Sequence
  Description of Artificial Sequence: Synthetic oligonucleotide
  Sense strand starting at position 1543 of SEQ ID NO: 1242155
uuuagcucugauuagcaua

SEQ ID NO: 1326277 - RNA, 19 nt, Artificial Sequence
  Description of Artificial Sequence: Synthetic oligonucleotide
  Antisense strand to SEQ ID NO: 1326276
uaugcuaaucagagcuaaa

SEQ ID NO: 1326278 - RNA, 19 nt, Artificial Sequence
  Description of Artificial Sequence: Synthetic oligonucleotide
  Sense strand starting at position 1546 of SEQ ID NO: 1242155
agcucugauuagcauacau

SEQ ID NO: 1326279 - RNA, 19 nt, Artificial Sequence
  Description of Artificial Sequence: Synthetic oligonucleotide
  Antisense strand to SEQ ID NO: 1326278
auguaugcuaaucagagcu

SEQ ID NO: 1326280 - RNA, 19 nt, Artificial Sequence
  Description of Artificial Sequence: Synthetic oligonucleotide
  Sense strand starting at position 1556 of SEQ ID NO: 1242155
agcauacauuaucugugua

SEQ ID NO: 1326281 - RNA, 19 nt, Artificial Sequence
  Description of Artificial Sequence: Synthetic oligonucleotide
  Antisense strand to SEQ ID NO: 1326280
uacacagauaauguaugcu

SEQ ID NO: 1326282 - RNA, 19 nt, Artificial Sequence
  Description of Artificial Sequence: Synthetic oligonucleotide
  Sense strand starting at position 1754 of SEQ ID NO: 1242155
gagggaagguuccauagua

SEQ ID NO: 1326283 - RNA, 19 nt, Artificial Sequence
  Description of Artificial Sequence: Synthetic oligonucleotide
  Antisense strand to SEQ ID NO: 1326282
uacuauggaaccuucccuc

SEQ ID NO: 1326284 - RNA, 19 nt, Artificial Sequence
  Description of Artificial Sequence: Synthetic oligonucleotide
  Sense strand starting at position 2059 of SEQ ID NO: 1242155
cucugagacugaugggcaa

SEQ ID NO: 1326285 - RNA, 19 nt, Artificial Sequence
  Description of Artificial Sequence: Synthetic oligonucleotide
  Antisense strand to SEQ ID NO: 1326284
uugcccaucagucucagag

SEQ ID NO: 1326286 - RNA, 19 nt, Artificial Sequence
  Description of Artificial Sequence: Synthetic oligonucleotide
  Sense strand starting at position 2143 of SEQ ID NO: 1242155
cugaguggccucuaucuaa

SEQ ID NO: 1326287 - RNA, 19 nt, Artificial Sequence
  Description of Artificial Sequence: Synthetic oligonucleotide
  Antisense strand to SEQ ID NO: 1326286
uuagauagaggccacucag

SEQ ID NO: 1326288 - RNA, 19 nt, Artificial Sequence
  Description of Artificial Sequence: Synthetic oligonucleotide
  Sense strand starting at position 2364 of SEQ ID NO: 1242155
gaucguccuugaucgcaga

SEQ ID NO: 1326289 - RNA, 19 nt, Artificial Sequence
  Description of Artificial Sequence: Synthetic oligonucleotide
  Antisense strand to SEQ ID NO: 1326288
ucugcgaucaaggacgauc

SEQ ID NO: 1326290 - RNA, 19 nt, Artificial Sequence
  Description of Artificial Sequence: Synthetic oligonucleotide
  Sense strand starting at position 2492 of SEQ ID NO: 1242155
uguggucuguggcuacaga

SEQ ID NO: 1326291 - RNA, 19 nt, Artificial Sequence
  Description of Artificial Sequence: Synthetic oligonucleotide
  Antisense strand to SEQ ID NO: 1326290
ucuguagccacagaccaca

SEQ ID NO: 1326292 - RNA, 19 nt, Artificial Sequence
  Description of Artificial Sequence: Synthetic oligonucleotide
  Sense strand starting at position 2778 of SEQ ID NO: 1242155
ugccaugugucucugucua

SEQ ID NO: 1326293 - RNA, 19 nt, Artificial Sequence
  Description of Artificial Sequence: Synthetic oligonucleotide
  Antisense strand to SEQ ID NO: 1326292
uagacagagacacauggca

SEQ ID NO: 1326294 - RNA, 19 nt, Artificial Sequence
  Description of Artificial Sequence: Synthetic oligonucleotide
  Sense strand starting at position 3092 of SEQ ID NO: 1242155
gccuuauggcuuuguuguu

SEQ ID NO: 1326295 - RNA, 19 nt, Artificial Sequence
  Description of Artificial Sequence: Synthetic oligonucleotide
  Antisense strand to SEQ ID NO: 1326294
aacaacaaagccauaaggc

SEQ ID NO: 1326296 - RNA, 19 nt, Artificial Sequence
  Description of Artificial Sequence: Synthetic oligonucleotide
  Sense strand starting at position 3099 of SEQ ID NO: 1242155
ggcuuuguuguugguuaau

SEQ ID NO: 1326297 - RNA, 19 nt, Artificial Sequence
  Description of Artificial Sequence: Synthetic oligonucleotide
  Antisense strand to SEQ ID NO: 1326296
auuaaccaacaacaaagcc

SEQ ID NO: 1326298 - RNA, 19 nt, Artificial Sequence
  Description of Artificial Sequence: Synthetic oligonucleotide
  Sense strand starting at position 3110 of SEQ ID NO: 1242155
ugguuaauuucuuuguacu

SEQ ID NO: 1326299 - RNA, 19 nt, Artificial Sequence
  Description of Artificial Sequence: Synthetic oligonucleotide
  Antisense strand to SEQ ID NO: 1326298
aguacaaagaaauuaacca

SEQ ID NO: 1326300 - RNA, 19 nt, Artificial Sequence
  Description of Artificial Sequence: Synthetic oligonucleotide
  Sense strand starting at position 3111 of SEQ ID NO: 1242155
gguuaauuucuuuguacuc

SEQ ID NO: 1326301 - RNA, 19 nt, Artificial Sequence
  Description of Artificial Sequence: Synthetic oligonucleotide
  Antisense strand to SEQ ID NO: 1326300
gaguacaaagaaauuaacc

SEQ ID NO: 1326302 - RNA, 19 nt, Artificial Sequence
  Description of Artificial Sequence: Synthetic oligonucleotide
  Sense strand starting at position 3112 of SEQ ID NO: 1242155
guuaauuucuuuguacucu

SEQ ID NO: 1326303 - RNA, 19 nt, Artificial Sequence
  Description of Artificial Sequence: Synthetic oligonucleotide
  Antisense strand to SEQ ID NO: 1326302
agaguacaaagaaauuaac

SEQ ID NO: 1326304 - RNA, 19 nt, Artificial Sequence
  Description of Artificial Sequence: Synthetic oligonucleotide
  Sense strand starting at position 3198 of SEQ ID NO: 1242155
agacuagguucucuggauu

SEQ ID NO: 1326305 - RNA, 19 nt, Artificial Sequence
  Description of Artificial Sequence: Synthetic oligonucleotide
  Antisense strand to SEQ ID NO: 1326304
aauccagagaaccuagucu

SEQ ID NO: 1326306 - RNA, 19 nt, Artificial Sequence
  Description of Artificial Sequence: Synthetic oligonucleotide
  Sense strand starting at position 3617 of SEQ ID NO: 1242155
acaucagcuguuuauguau

SEQ ID NO: 1326307 - RNA, 19 nt, Artificial Sequence
  Description of Artificial Sequence: Synthetic oligonucleotide
  Antisense strand to SEQ ID NO: 1326306
auacauaaacagcugaugu

SEQ ID NO: 1326308 - RNA, 19 nt, Artificial Sequence
  Description of Artificial Sequence: Synthetic oligonucleotide
  Sense strand starting at position 3728 of SEQ ID NO: 1242155
cgcuuaauaaugugaguaa

SEQ ID NO: 1326309 - RNA, 19 nt, Artificial Sequence
  Description of Artificial Sequence: Synthetic oligonucleotide
  Antisense strand to SEQ ID NO: 1326308
uuacucacauuauuaagcg

SEQ ID NO: 1326310 - RNA, 19 nt, Artificial Sequence
  Description of Artificial Sequence: Synthetic oligonucleotide
  Sense strand starting at position 3729 of SEQ ID NO: 1242155
gcuuaauaaugugaguaaa

SEQ ID NO: 1326311 - RNA, 19 nt, Artificial Sequence
  Description of Artificial Sequence: Synthetic oligonucleotide
  Antisense strand to SEQ ID NO: 1326310
uuuacucacauuauuaagc

SEQ ID NO: 1326312 - RNA, 19 nt, Artificial Sequence
  Description of Artificial Sequence: Synthetic oligonucleotide
  Sense strand starting at position 43 of SEQ ID NO: 1242156
gacgcugcuccagaaacuu

SEQ ID NO: 1326313 - RNA, 19 nt, Artificial Sequence
  Description of Artificial Sequence: Synthetic oligonucleotide
  Antisense strand to SEQ ID NO: 1326312
aaguuucuggagcagcguc

SEQ ID NO: 1326314 - RNA, 19 nt, Artificial Sequence
  Description of Artificial Sequence: Synthetic oligonucleotide
  Sense strand starting at position 120 of SEQ ID NO: 1242156
aucauuaugcugggaaggu

SEQ ID NO: 1326315 - RNA, 19 nt, Artificial Sequence
  Description of Artificial Sequence: Synthetic oligonucleotide
  Antisense strand to SEQ ID NO: 1326314
accuucccagcauaaugau

SEQ ID NO: 1326316 - RNA, 19 nt, Artificial Sequence
  Description of Artificial Sequence: Synthetic oligonucleotide
  Sense strand starting at position 135 of SEQ ID NO: 1242156
agguauggccaauauccau

SEQ ID NO: 1326317 - RNA, 19 nt, Artificial Sequence
  Description of Artificial Sequence: Synthetic oligonucleotide
  Antisense strand to SEQ ID NO: 1326316
auggauauuggccauaccu

SEQ ID NO: 1326318 - RNA, 19 nt, Artificial Sequence
  Description of Artificial Sequence: Synthetic oligonucleotide
  Sense strand starting at position 187 of SEQ ID NO: 1242156
gugaucugguuucucauga

SEQ ID NO: 1326319 - RNA, 19 nt, Artificial Sequence
  Description of Artificial Sequence: Synthetic oligonucleotide
  Antisense strand to SEQ ID NO: 1326318
ucaugagaaaccagaucac

SEQ ID NO: 1326320 - RNA, 19 nt, Artificial Sequence
  Description of Artificial Sequence: Synthetic oligonucleotide
  Sense strand starting at position 188 of SEQ ID NO: 1242156
ugaucugguuucucaugaa

SEQ ID NO: 1326321 - RNA, 19 nt, Artificial Sequence
  Description of Artificial Sequence: Synthetic oligonucleotide
  Antisense strand to SEQ ID NO: 1326320
uucaugagaaaccagauca

SEQ ID NO: 1326322 - RNA, 19 nt, Artificial Sequence
  Description of Artificial Sequence: Synthetic oligonucleotide
  Sense strand starting at position 192 of SEQ ID NO: 1242156
cugguuucucaugaagcaa

SEQ ID NO: 1326323 - RNA, 19 nt, Artificial Sequence
  Description of Artificial Sequence: Synthetic oligonucleotide
  Antisense strand to SEQ ID NO: 1326322
uugcuucaugagaaaccag

SEQ ID NO: 1326324 - RNA, 19 nt, Artificial Sequence
  Description of Artificial Sequence: Synthetic oligonucleotide
  Sense strand starting at position 2160 of SEQ ID NO: 1242156
aaccgagaucccuggaauu

SEQ ID NO: 1326325 - RNA, 19 nt, Artificial Sequence
  Description of Artificial Sequence: Synthetic oligonucleotide
  Antisense strand to SEQ ID NO: 1326324
aauuccagggaucucgguu

SEQ ID NO: 1326326 - RNA, 19 nt, Artificial Sequence
  Description of Artificial Sequence: Synthetic oligonucleotide
  Sense strand starting at position 2208 of SEQ ID NO: 1242156
gaggaaacaugcuucuguu

SEQ ID NO: 1326327 - RNA, 19 nt, Artificial Sequence
  Description of Artificial Sequence: Synthetic oligonucleotide
  Antisense strand to SEQ ID NO: 1326326
aacagaagcauguuuccuc

SEQ ID NO: 1326328 - RNA, 19 nt, Artificial Sequence
  Description of Artificial Sequence: Synthetic oligonucleotide
  Sense strand starting at position 2217 of SEQ ID NO: 1242156
ugcuucuguuaacuacaga

SEQ ID NO: 1326329 - RNA, 19 nt, Artificial Sequence
  Description of Artificial Sequence: Synthetic oligonucleotide
  Antisense strand to SEQ ID NO: 1326328
ucuguaguuaacagaagca

SEQ ID NO: 1326330 - RNA, 19 nt, Artificial Sequence
  Description of Artificial Sequence: Synthetic oligonucleotide
  Sense strand starting at position 2284 of SEQ ID NO: 1242156
gggcucuaugcuuugcgua

SEQ ID NO: 1326331 - RNA, 19 nt, Artificial Sequence
  Description of Artificial Sequence: Synthetic oligonucleotide
  Antisense strand to SEQ ID NO: 1326330
uacgcaaagcauagagccc

SEQ ID NO: 1326332 - RNA, 19 nt, Artificial Sequence
  Description of Artificial Sequence: Synthetic oligonucleotide
  Sense strand starting at position 2759 of SEQ ID NO: 1242156
uuccuagugcuauggaaau

SEQ ID NO: 1326333 - RNA, 19 nt, Artificial Sequence
  Description of Artificial Sequence: Synthetic oligonucleotide
  Antisense strand to SEQ ID NO: 1326332
auuuccauagcacuaggaa

SEQ ID NO: 1326334 - RNA, 19 nt, Artificial Sequence
  Description of Artificial Sequence: Synthetic oligonucleotide
  Sense strand starting at position 2802 of SEQ ID NO: 1242156
gcugaucucuuguuaaaca

SEQ ID NO: 1326335 - RNA, 19 nt, Artificial Sequence
  Description of Artificial Sequence: Synthetic oligonucleotide
  Antisense strand to SEQ ID NO: 1326334
uguuuaacaagagaucagc

SEQ ID NO: 1326336 - RNA, 19 nt, Artificial Sequence
  Description of Artificial Sequence: Synthetic oligonucleotide
  Sense strand starting at position 2820 of SEQ ID NO: 1242156
agaguaucugagcaugagu

SEQ ID NO: 1326337 - RNA, 19 nt, Artificial Sequence
  Description of Artificial Sequence: Synthetic oligonucleotide
  Antisense strand to SEQ ID NO: 1326336
acucaugcucagauacucu

SEQ ID NO: 1326338 - RNA, 19 nt, Artificial Sequence
  Description of Artificial Sequence: Synthetic oligonucleotide
  Sense strand starting at position 2822 of SEQ ID NO: 1242156
aguaucugagcaugaguuu

SEQ ID NO: 1326339 - RNA, 19 nt, Artificial Sequence
  Description of Artificial Sequence: Synthetic oligonucleotide
  Antisense strand to SEQ ID NO: 1326338
aaacucaugcucagauacu

SEQ ID NO: 1326340 - RNA, 19 nt, Artificial Sequence
  Description of Artificial Sequence: Synthetic oligonucleotide
  Sense strand starting at position 2833 of SEQ ID NO: 1242156
augaguuucuggccagauu

SEQ ID NO: 1326341 - RNA, 19 nt, Artificial Sequence
  Description of Artificial Sequence: Synthetic oligonucleotide
  Antisense strand to SEQ ID NO: 1326340
aaucuggccagaaacucau

SEQ ID NO: 1326342 - RNA, 19 nt, Artificial Sequence
  Description of Artificial Sequence: Synthetic oligonucleotide
  Sense strand starting at position 2834 of SEQ ID NO: 1242156
ugaguuucuggccagauug

SEQ ID NO: 1326343 - RNA, 19 nt, Artificial Sequence
  Description of Artificial Sequence: Synthetic oligonucleotide
  Antisense strand to SEQ ID NO: 1326342
caaucuggccagaaacuca

SEQ ID NO: 1326344 - RNA, 19 nt, Artificial Sequence
  Description of Artificial Sequence: Synthetic oligonucleotide
  Sense strand starting at position 2844 of SEQ ID NO: 1242156
gccagauuggugcaacuuu

SEQ ID NO: 1326345 - RNA, 19 nt, Artificial Sequence
  Description of Artificial Sequence: Synthetic oligonucleotide
  Antisense strand to SEQ ID NO: 1326344
aaaguugcaccaaucuggc

SEQ ID NO: 1326346 - RNA, 19 nt, Artificial Sequence
  Description of Artificial Sequence: Synthetic oligonucleotide
  Sense strand starting at position 2904 of SEQ ID NO: 1242156
ggcucauugcagugaauua

SEQ ID NO: 1326347 - RNA, 19 nt, Artificial Sequence
  Description of Artificial Sequence: Synthetic oligonucleotide
  Antisense strand to SEQ ID NO: 1326346
uaauucacugcaaugagcc

SEQ ID NO: 1326348 - RNA, 19 nt, Artificial Sequence
  Description of Artificial Sequence: Synthetic oligonucleotide
  Sense strand starting at position 2915 of SEQ ID NO: 1242156
gugaauuacugagcaugag

SEQ ID NO: 1326349 - RNA, 19 nt, Artificial Sequence
  Description of Artificial Sequence: Synthetic oligonucleotide
  Antisense strand to SEQ ID NO: 1326348
cucaugcucaguaauucac

SEQ ID NO: 1326350 - RNA, 19 nt, Artificial Sequence
  Description of Artificial Sequence: Synthetic oligonucleotide
  Sense strand starting at position 2973 of SEQ ID NO: 1242156
aaguauugaguaugucacu

SEQ ID NO: 1326351 - RNA, 19 nt, Artificial Sequence
  Description of Artificial Sequence: Synthetic oligonucleotide
  Antisense strand to SEQ ID NO: 1326350
agugacauacucaauacuu

SEQ ID NO: 1326352 - RNA, 19 nt, Artificial Sequence
  Description of Artificial Sequence: Synthetic oligonucleotide
  Sense strand starting at position 2974 of SEQ ID NO: 1242156
aguauugaguaugucacuu

SEQ ID NO: 1326353 - RNA, 19 nt, Artificial Sequence
  Description of Artificial Sequence: Synthetic oligonucleotide
  Antisense strand to SEQ ID NO: 1326352
aagugacauacucaauacu

SEQ ID NO: 1326354 - RNA, 19 nt, Artificial Sequence
  Description of Artificial Sequence: Synthetic oligonucleotide
  Sense strand starting at position 2978 of SEQ ID NO: 1242156
uugaguaugucacuuagac

SEQ ID NO: 1326355 - RNA, 19 nt, Artificial Sequence
  Description of Artificial Sequence: Synthetic oligonucleotide
  Antisense strand to SEQ ID NO: 1326354
gucuaagugacauacucaa

SEQ ID NO: 1326356 - RNA, 19 nt, Artificial Sequence
  Description of Artificial Sequence: Synthetic oligonucleotide
  Sense strand starting at position 3029 of SEQ ID NO: 1242156
ggacuugagagcuggaguu

SEQ ID NO: 1326357 - RNA, 19 nt, Artificial Sequence
  Description of Artificial Sequence: Synthetic oligonucleotide
  Antisense strand to SEQ ID NO: 1326356
aacuccagcucucaagucc

SEQ ID NO: 1326358 - RNA, 19 nt, Artificial Sequence
  Description of Artificial Sequence: Synthetic oligonucleotide
  Sense strand starting at position 3041 of SEQ ID NO: 1242156
uggaguucugauuacggau

SEQ ID NO: 1326359 - RNA, 19 nt, Artificial Sequence
  Description of Artificial Sequence: Synthetic oligonucleotide
  Antisense strand to SEQ ID NO: 1326358
auccguaaucagaacucca

SEQ ID NO: 1326360 - RNA, 19 nt, Artificial Sequence
  Description of Artificial Sequence: Synthetic oligonucleotide
  Sense strand starting at position 3079 of SEQ ID NO: 1242156
gccagauacucaucagcau

SEQ ID NO: 1326361 - RNA, 19 nt, Artificial Sequence
  Description of Artificial Sequence: Synthetic oligonucleotide
  Antisense strand to SEQ ID NO: 1326360
augcugaugaguaucuggc

SEQ ID NO: 1326362 - RNA, 19 nt, Artificial Sequence
  Description of Artificial Sequence: Synthetic oligonucleotide
  Sense strand starting at position 3154 of SEQ ID NO: 1242156
gacagugcacaaugaaauc

SEQ ID NO: 1326363 - RNA, 19 nt, Artificial Sequence
  Description of Artificial Sequence: Synthetic oligonucleotide
  Antisense strand to SEQ ID NO: 1326362
gauuucauugugcacuguc

SEQ ID NO: 1326364 - RNA, 19 nt, Artificial Sequence
  Description of Artificial Sequence: Synthetic oligonucleotide
  Sense strand starting at position 3187 of SEQ ID NO: 1242156
uggaaauccacauguugug

SEQ ID NO: 1326365 - RNA, 19 nt, Artificial Sequence
  Description of Artificial Sequence: Synthetic oligonucleotide
  Antisense strand to SEQ ID NO: 1326364
cacaacauguggauuucca

SEQ ID NO: 1326366 - RNA, 19 nt, Artificial Sequence
  Description of Artificial Sequence: Synthetic oligonucleotide
  Sense strand starting at position 3196 of SEQ ID NO: 1242156
acauguuguggugagggua

SEQ ID NO: 1326367 - RNA, 19 nt, Artificial Sequence
  Description of Artificial Sequence: Synthetic oligonucleotide
  Antisense strand to SEQ ID NO: 1326366
uacccucaccacaacaugu

SEQ ID NO: 1326368 - RNA, 19 nt, Artificial Sequence
  Description of Artificial Sequence: Synthetic oligonucleotide
  Sense strand starting at position 3316 of SEQ ID NO: 1242156
uuccauucuuggccaggua

SEQ ID NO: 1326369 - RNA, 19 nt, Artificial Sequence
  Description of Artificial Sequence: Synthetic oligonucleotide
  Antisense strand to SEQ ID NO: 1326368
uaccuggccaagaauggaa

SEQ ID NO: 1326370 - RNA, 19 nt, Artificial Sequence
  Description of Artificial Sequence: Synthetic oligonucleotide
  Sense strand starting at position 3317 of SEQ ID NO: 1242156
uccauucuuggccagguau

SEQ ID NO: 1326371 - RNA, 19 nt, Artificial Sequence
  Description of Artificial Sequence: Synthetic oligonucleotide
  Antisense strand to SEQ ID NO: 1326370
auaccuggccaagaaugga

SEQ ID NO: 1326372 - RNA, 19 nt, Artificial Sequence
  Description of Artificial Sequence: Synthetic oligonucleotide
  Sense strand starting at position 3328 of SEQ ID NO: 1242156
ccagguauccuaugacaug

SEQ ID NO: 1326373 - RNA, 19 nt, Artificial Sequence
  Description of Artificial Sequence: Synthetic oligonucleotide
  Antisense strand to SEQ ID NO: 1326372
caugucauaggauaccugg

SEQ ID NO: 1326374 - RNA, 19 nt, Artificial Sequence
  Description of Artificial Sequence: Synthetic oligonucleotide
  Sense strand starting at position 3382 of SEQ ID NO: 1242156
uauggaucucaucgagcuu

SEQ ID NO: 1326375 - RNA, 19 nt, Artificial Sequence
  Description of Artificial Sequence: Synthetic oligonucleotide
  Antisense strand to SEQ ID NO: 1326374
aagcucgaugagauccaua

SEQ ID NO: 1326376 - RNA, 19 nt, Artificial Sequence
  Description of Artificial Sequence: Synthetic oligonucleotide
  Sense strand starting at position 3383 of SEQ ID NO: 1242156
auggaucucaucgagcuua

SEQ ID NO: 1326377 - RNA, 19 nt, Artificial Sequence
  Description of Artificial Sequence: Synthetic oligonucleotide
  Antisense strand to SEQ ID NO: 1326376
uaagcucgaugagauccau

SEQ ID NO: 1326378 - RNA, 19 nt, Artificial Sequence
  Description of Artificial Sequence: Synthetic oligonucleotide
  Sense strand starting at position 3632 of SEQ ID NO: 1242156
ggaacacugugucucuaau

SEQ ID NO: 1326379 - RNA, 19 nt, Artificial Sequence
  Description of Artificial Sequence: Synthetic oligonucleotide
  Antisense strand to SEQ ID NO: 1326378
auuagagacacaguguucc

SEQ ID NO: 1326380 - RNA, 19 nt, Artificial Sequence
  Description of Artificial Sequence: Synthetic oligonucleotide
  Sense strand starting at position 3686 of SEQ ID NO: 1242156
auguuuagugguuagcauu

SEQ ID NO: 1326381 - RNA, 19 nt, Artificial Sequence
  Description of Artificial Sequence: Synthetic oligonucleotide
  Antisense strand to SEQ ID NO: 1326380
aaugcuaaccacuaaacau

SEQ ID NO: 1326382 - RNA, 19 nt, Artificial Sequence
  Description of Artificial Sequence: Synthetic oligonucleotide
  Sense strand starting at position 3716 of SEQ ID NO: 1242156
ugcuauugggucuggauua

SEQ ID NO: 1326383 - RNA, 19 nt, Artificial Sequence
  Description of Artificial Sequence: Synthetic oligonucleotide
  Antisense strand to SEQ ID NO: 1326382
uaauccagacccaauagca

SEQ ID NO: 1326384 - RNA, 19 nt, Artificial Sequence
  Description of Artificial Sequence: Synthetic oligonucleotide
  Sense strand starting at position 3721 of SEQ ID NO: 1242156
uugggucuggauuaucauu

SEQ ID NO: 1326385 - RNA, 19 nt, Artificial Sequence
  Description of Artificial Sequence: Synthetic oligonucleotide
  Antisense strand to SEQ ID NO: 1326384
aaugauaauccagacccaa

SEQ ID NO: 1326386 - RNA, 19 nt, Artificial Sequence
  Description of Artificial Sequence: Synthetic oligonucleotide
  Sense strand starting at position 3919 of SEQ ID NO: 1242156
auggccauuucugacuauu

SEQ ID NO: 1326387 - RNA, 19 nt, Artificial Sequence
  Description of Artificial Sequence: Synthetic oligonucleotide
  Antisense strand to SEQ ID NO: 1326386
aauagucagaaauggccau

SEQ ID NO: 1326388 - RNA, 19 nt, Artificial Sequence
  Description of Artificial Sequence: Synthetic oligonucleotide
  Sense strand starting at position 3929 of SEQ ID NO: 1242156
cugacuauuuaagagugga

SEQ ID NO: 1326389 - RNA, 19 nt, Artificial Sequence
  Description of Artificial Sequence: Synthetic oligonucleotide
  Antisense strand to SEQ ID NO: 1326388
uccacucuuaaauagucag

SEQ ID NO: 1326390 - RNA, 19 nt, Artificial Sequence
  Description of Artificial Sequence: Synthetic oligonucleotide
  Sense strand starting at position 3945 of SEQ ID NO: 1242156
ggaacagucugguucuaug

SEQ ID NO: 1326391 - RNA, 19 nt, Artificial Sequence
  Description of Artificial Sequence: Synthetic oligonucleotide
  Antisense strand to SEQ ID NO: 1326390
cauagaaccagacuguucc

SEQ ID NO: 1326392 - RNA, 19 nt, Artificial Sequence
  Description of Artificial Sequence: Synthetic oligonucleotide
  Sense strand starting at position 72 of SEQ ID NO: 1242157
aucauuagccuuugggaaa

SEQ ID NO: 1326393 - RNA, 19 nt, Artificial Sequence
  Description of Artificial Sequence: Synthetic oligonucleotide
  Antisense strand to SEQ ID NO: 1326392
uuucccaaaggcuaaugau

SEQ ID NO: 1326394 - RNA, 19 nt, Artificial Sequence
  Description of Artificial Sequence: Synthetic oligonucleotide
  Sense strand starting at position 132 of SEQ ID NO: 1242157
aaggauggcuacuuuagaa

SEQ ID NO: 1326395 - RNA, 19 nt, Artificial Sequence
  Description of Artificial Sequence: Synthetic oligonucleotide
  Antisense strand to SEQ ID NO: 1326394
uucuaaaguagccauccuu

SEQ ID NO: 1326396 - RNA, 19 nt, Artificial Sequence
  Description of Artificial Sequence: Synthetic oligonucleotide
  Sense strand starting at position 388 of SEQ ID NO: 1242157
cuuuaucacccagguugaa

SEQ ID NO: 1326397 - RNA, 19 nt, Artificial Sequence
  Description of Artificial Sequence: Synthetic oligonucleotide
  Antisense strand to SEQ ID NO: 1326396
uucaaccugggugauaaag

SEQ ID NO: 1326398 - RNA, 19 nt, Artificial Sequence
  Description of Artificial Sequence: Synthetic oligonucleotide
  Sense strand starting at position 517 of SEQ ID NO: 1242157
uggcuaacaguuuguauuu

SEQ ID NO: 1326399 - RNA, 19 nt, Artificial Sequence
  Description of Artificial Sequence: Synthetic oligonucleotide
  Antisense strand to SEQ ID NO: 1326398
aaauacaaacuguuagcca

SEQ ID NO: 1326400 - RNA, 19 nt, Artificial Sequence
  Description of Artificial Sequence: Synthetic oligonucleotide
  Sense strand starting at position 617 of SEQ ID NO: 1242157
gaauguuuacaguagcacu

SEQ ID NO: 1326401 - RNA, 19 nt, Artificial Sequence
  Description of Artificial Sequence: Synthetic oligonucleotide
  Antisense strand to SEQ ID NO: 1326400
agugcuacuguaaacauuc

SEQ ID NO: 1326402 - RNA, 19 nt, Artificial Sequence
  Description of Artificial Sequence: Synthetic oligonucleotide
  Sense strand starting at position 746 of SEQ ID NO: 1242157
gcuacaaugccuugaagac

SEQ ID NO: 1326403 - RNA, 19 nt, Artificial Sequence
  Description of Artificial Sequence: Synthetic oligonucleotide
  Antisense strand to SEQ ID NO: 1326402
gucuucaaggcauuguagc

SEQ ID NO: 1326404 - RNA, 19 nt, Artificial Sequence
  Description of Artificial Sequence: Synthetic oligonucleotide
  Sense strand starting at position 888 of SEQ ID NO: 1242157
aggaguaagugcuuuauga

SEQ ID NO: 1326405 - RNA, 19 nt, Artificial Sequence
  Description of Artificial Sequence: Synthetic oligonucleotide
  Antisense strand to SEQ ID NO: 1326404
ucauaaagcacuuacuccu

SEQ ID NO: 1326406 - RNA, 19 nt, Artificial Sequence
  Description of Artificial Sequence: Synthetic oligonucleotide
  Sense strand starting at position 890 of SEQ ID NO: 1242157
gaguaagugcuuuaugaac

SEQ ID NO: 1326407 - RNA, 19 nt, Artificial Sequence
  Description of Artificial Sequence: Synthetic oligonucleotide
  Antisense strand to SEQ ID NO: 1326406
guucauaaagcacuuacuc

SEQ ID NO: 1326408 - RNA, 19 nt, Artificial Sequence
  Description of Artificial Sequence: Synthetic oligonucleotide
  Sense strand starting at position 896 of SEQ ID NO: 1242157
gugcuuuaugaacaguguu

SEQ ID NO: 1326409 - RNA, 19 nt, Artificial Sequence
  Description of Artificial Sequence: Synthetic oligonucleotide
  Antisense strand to SEQ ID NO: 1326408
aacacuguucauaaagcac

SEQ ID NO: 1326410 - RNA, 19 nt, Artificial Sequence
  Description of Artificial Sequence: Synthetic oligonucleotide
  Sense strand starting at position 943 of SEQ ID NO: 1242157
agauauauguugucuacaa

SEQ ID NO: 1326411 - RNA, 19 nt, Artificial Sequence
  Description of Artificial Sequence: Synthetic oligonucleotide
  Antisense strand to SEQ ID NO: 1326410
uuguagacaacauauaucu

SEQ ID NO: 1326412 - RNA, 19 nt, Artificial Sequence
  Description of Artificial Sequence: Synthetic oligonucleotide
  Sense strand starting at position 944 of SEQ ID NO: 1242157
gauauauguugucuacaag

SEQ ID NO: 1326413 - RNA, 19 nt, Artificial Sequence
  Description of Artificial Sequence: Synthetic oligonucleotide
  Antisense strand to SEQ ID NO: 1326412
cuuguagacaacauauauc

SEQ ID NO: 1326414 - RNA, 19 nt, Artificial Sequence
  Description of Artificial Sequence: Synthetic oligonucleotide
  Sense strand starting at position 1175 of SEQ ID NO: 1242157
cccacaauccugugccaga

SEQ ID NO: 1326415 - RNA, 19 nt, Artificial Sequence
  Description of Artificial Sequence: Synthetic oligonucleotide
  Antisense strand to SEQ ID NO: 1326414
ucuggcacaggauuguggg

SEQ ID NO: 1326416 - RNA, 19 nt, Artificial Sequence
  Description of Artificial Sequence: Synthetic oligonucleotide
  Sense strand starting at position 1176 of SEQ ID NO: 1242157
ccacaauccugugccagaa

SEQ ID NO: 1326417 - RNA, 19 nt, Artificial Sequence
  Description of Artificial Sequence: Synthetic oligonucleotide
  Antisense strand to SEQ ID NO: 1326416
uucuggcacaggauugugg

SEQ ID NO: 1326418 - RNA, 19 nt, Artificial Sequence
  Description of Artificial Sequence: Synthetic oligonucleotide
  Sense strand starting at position 1308 of SEQ ID NO: 1242157
ccggaaauucuggaguuuc

SEQ ID NO: 1326419 - RNA, 19 nt, Artificial Sequence
  Description of Artificial Sequence: Synthetic oligonucleotide
  Antisense strand to SEQ ID NO: 1326418
gaaacuccagaauuuccgg

SEQ ID NO: 1326420 - RNA, 19 nt, Artificial Sequence
  Description of Artificial Sequence: Synthetic oligonucleotide
  Sense strand starting at position 1316 of SEQ ID NO: 1242157
ucuggaguuucugcacaag

SEQ ID NO: 1326421 - RNA, 19 nt, Artificial Sequence
  Description of Artificial Sequence: Synthetic oligonucleotide
  Antisense strand to SEQ ID NO: 1326420
cuugugcagaaacuccaga

SEQ ID NO: 1326422 - RNA, 19 nt, Artificial Sequence
  Description of Artificial Sequence: Synthetic oligonucleotide
  Sense strand starting at position 2031 of SEQ ID NO: 1242157
caaagauucgccgaagaca

SEQ ID NO: 1326423 - RNA, 19 nt, Artificial Sequence
  Description of Artificial Sequence: Synthetic oligonucleotide
  Antisense strand to SEQ ID NO: 1326422
ugucuucggcgaaucuuug

SEQ ID NO: 1326424 - RNA, 19 nt, Artificial Sequence
  Description of Artificial Sequence: Synthetic oligonucleotide
  Sense strand starting at position 2042 of SEQ ID NO: 1242157
cgaagacacuccuuuccuu

SEQ ID NO: 1326425 - RNA, 19 nt, Artificial Sequence
  Description of Artificial Sequence: Synthetic oligonucleotide
  Antisense strand to SEQ ID NO: 1326424
aaggaaaggagugucuucg

SEQ ID NO: 1326426 - RNA, 19 nt, Artificial Sequence
  Description of Artificial Sequence: Synthetic oligonucleotide
  Sense strand starting at position 2102 of SEQ ID NO: 1242157
cuggguaugcaugguauau

SEQ ID NO: 1326427 - RNA, 19 nt, Artificial Sequence
  Description of Artificial Sequence: Synthetic oligonucleotide
  Antisense strand to SEQ ID NO: 1326426
auauaccaugcauacccag

SEQ ID NO: 1326428 - RNA, 19 nt, Artificial Sequence
  Description of Artificial Sequence: Synthetic oligonucleotide
  Sense strand starting at position 2124 of SEQ ID NO: 1242157
cccggccauuucgucaaua

SEQ ID NO: 1326429 - RNA, 19 nt, Artificial Sequence
  Description of Artificial Sequence: Synthetic oligonucleotide
  Antisense strand to SEQ ID NO: 1326428
uauugacgaaauggccggg

SEQ ID NO: 1326430 - RNA, 19 nt, Artificial Sequence
  Description of Artificial Sequence: Synthetic oligonucleotide
  Sense strand starting at position 2125 of SEQ ID NO: 1242157
ccggccauuucgucaauau

SEQ ID NO: 1326431 - RNA, 19 nt, Artificial Sequence
  Description of Artificial Sequence: Synthetic oligonucleotide
  Antisense strand to SEQ ID NO: 1326430
auauugacgaaauggccgg

SEQ ID NO: 1326432 - RNA, 19 nt, Artificial Sequence
  Description of Artificial Sequence: Synthetic oligonucleotide
  Sense strand starting at position 2126 of SEQ ID NO: 1242157
cggccauuucgucaauauc

SEQ ID NO: 1326433 - RNA, 19 nt, Artificial Sequence
  Description of Artificial Sequence: Synthetic oligonucleotide
  Antisense strand to SEQ ID NO: 1326432
gauauugacgaaauggccg

SEQ ID NO: 1326434 - RNA, 19 nt, Artificial Sequence
  Description of Artificial Sequence: Synthetic oligonucleotide
  Sense strand starting at position 2134 of SEQ ID NO: 1242157
ucgucaauaucuguuauuu

SEQ ID NO: 1326435 - RNA, 19 nt, Artificial Sequence
  Description of Artificial Sequence: Synthetic oligonucleotide
  Antisense strand to SEQ ID NO: 1326434
aaauaacagauauugacga

SEQ ID NO: 1326436 - RNA, 19 nt, Artificial Sequence
  Description of Artificial Sequence: Synthetic oligonucleotide
  Sense strand starting at position 2145 of SEQ ID NO: 1242157
uguuauuugccaggauucu

SEQ ID NO: 1326437 - RNA, 19 nt, Artificial Sequence
  Description of Artificial Sequence: Synthetic oligonucleotide
  Antisense strand to SEQ ID NO: 1326436
agaauccuggcaaauaaca

SEQ ID NO: 1326438 - RNA, 19 nt, Artificial Sequence
  Description of Artificial Sequence: Synthetic oligonucleotide
  Sense strand starting at position 2240 of SEQ ID NO: 1242157
gggccucuggcuggauuaa

SEQ ID NO: 1326439 - RNA, 19 nt, Artificial Sequence
  Description of Artificial Sequence: Synthetic oligonucleotide
  Antisense strand to SEQ ID NO: 1326438
uuaauccagccagaggccc

SEQ ID NO: 1326440 - RNA, 19 nt, Artificial Sequence
  Description of Artificial Sequence: Synthetic oligonucleotide
  Sense strand starting at position 2241 of SEQ ID NO: 1242157
ggccucuggcuggauuaaa

SEQ ID NO: 1326441 - RNA, 19 nt, Artificial Sequence
  Description of Artificial Sequence: Synthetic oligonucleotide
  Antisense strand to SEQ ID NO: 1326440
uuuaauccagccagaggcc

SEQ ID NO: 1326442 - RNA, 19 nt, Artificial Sequence
  Description of Artificial Sequence: Synthetic oligonucleotide
  Sense strand starting at position 3196 of SEQ ID NO: 1242157
aggcucuguuucuuagaag

SEQ ID NO: 1326443 - RNA, 19 nt, Artificial Sequence
  Description of Artificial Sequence: Synthetic oligonucleotide
  Antisense strand to SEQ ID NO: 1326442
cuucuaagaaacagagccu

SEQ ID NO: 1326444 - RNA, 19 nt, Artificial Sequence
  Description of Artificial Sequence: Synthetic oligonucleotide
  Sense strand starting at position 3229 of SEQ ID NO: 1242157
gaguacauccuguguuaca

SEQ ID NO: 1326445 - RNA, 19 nt, Artificial Sequence
  Description of Artificial Sequence: Synthetic oligonucleotide
  Antisense strand to SEQ ID NO: 1326444
uguaacacaggauguacuc

SEQ ID NO: 1326446 - RNA, 19 nt, Artificial Sequence
  Description of Artificial Sequence: Synthetic oligonucleotide
  Sense strand starting at position 3230 of SEQ ID NO: 1242157
aguacauccuguguuacau

SEQ ID NO: 1326447 - RNA, 19 nt, Artificial Sequence
  Description of Artificial Sequence: Synthetic oligonucleotide
  Antisense strand to SEQ ID NO: 1326446
auguaacacaggauguacu

SEQ ID NO: 1326448 - RNA, 19 nt, Artificial Sequence
  Description of Artificial Sequence: Synthetic oligonucleotide
  Sense strand starting at position 3239 of SEQ ID NO: 1242157
uguguuacauuaccuaauu

SEQ ID NO: 1326449 - RNA, 19 nt, Artificial Sequence
  Description of Artificial Sequence: Synthetic oligonucleotide
  Antisense strand to SEQ ID NO: 1326448
aauuagguaauguaacaca

SEQ ID NO: 1326450 - RNA, 19 nt, Artificial Sequence
  Description of Artificial Sequence: Synthetic oligonucleotide
  Sense strand starting at position 3240 of SEQ ID NO: 1242157
guguuacauuaccuaauua

SEQ ID NO: 1326451 - RNA, 19 nt, Artificial Sequence
  Description of Artificial Sequence: Synthetic oligonucleotide
  Antisense strand to SEQ ID NO: 1326450
uaauuagguaauguaacac

SEQ ID NO: 1326452 - RNA, 19 nt, Artificial Sequence
  Description of Artificial Sequence: Synthetic oligonucleotide
  Sense strand starting at position 3274 of SEQ ID NO: 1242157
uuuggucuuggacaagcaa

SEQ ID NO: 1326453 - RNA, 19 nt, Artificial Sequence
  Description of Artificial Sequence: Synthetic oligonucleotide
  Antisense strand to SEQ ID NO: 1326452
uugcuuguccaagaccaaa

SEQ ID NO: 1326454 - RNA, 19 nt, Artificial Sequence
  Description of Artificial Sequence: Synthetic oligonucleotide
  Sense strand starting at position 3368 of SEQ ID NO: 1242157
ggugggacuggguauguaa

SEQ ID NO: 1326455 - RNA, 19 nt, Artificial Sequence
  Description of Artificial Sequence: Synthetic oligonucleotide
  Antisense strand to SEQ ID NO: 1326454
uuacauacccagucccacc

SEQ ID NO: 1326456 - RNA, 19 nt, Artificial Sequence
  Description of Artificial Sequence: Synthetic oligonucleotide
  Sense strand starting at position 3371 of SEQ ID NO: 1242157
gggacuggguauguaauca

SEQ ID NO: 1326457 - RNA, 19 nt, Artificial Sequence
  Description of Artificial Sequence: Synthetic oligonucleotide
  Antisense strand to SEQ ID NO: 1326456
ugauuacauacccaguccc

SEQ ID NO: 1326458 - RNA, 19 nt, Artificial Sequence
  Description of Artificial Sequence: Synthetic oligonucleotide
  Sense strand starting at position 3375 of SEQ ID NO: 1242157
cuggguauguaaucaucaa

SEQ ID NO: 1326459 - RNA, 19 nt, Artificial Sequence
  Description of Artificial Sequence: Synthetic oligonucleotide
  Antisense strand to SEQ ID NO: 1326458
uugaugauuacauacccag

SEQ ID NO: 1326460 - RNA, 19 nt, Artificial Sequence
  Description of Artificial Sequence: Synthetic oligonucleotide
  Sense strand starting at position 3379 of SEQ ID NO: 1242157
guauguaaucaucaauccu

SEQ ID NO: 1326461 - RNA, 19 nt, Artificial Sequence
  Description of Artificial Sequence: Synthetic oligonucleotide
  Antisense strand to SEQ ID NO: 1326460
aggauugaugauuacauac

SEQ ID NO: 1326462 - RNA, 19 nt, Artificial Sequence
  Description of Artificial Sequence: Synthetic oligonucleotide
  Sense strand starting at position 3661 of SEQ ID NO: 1242157
cuccuaacacguugggauu

SEQ ID NO: 1326463 - RNA, 19 nt, Artificial Sequence
  Description of Artificial Sequence: Synthetic oligonucleotide
  Antisense strand to SEQ ID NO: 1326462
aaucccaacguguuaggag

SEQ ID NO: 1326464 - RNA, 19 nt, Artificial Sequence
  Description of Artificial Sequence: Synthetic oligonucleotide
  Sense strand starting at position 3662 of SEQ ID NO: 1242157
uccuaacacguugggauua

SEQ ID NO: 1326465 - RNA, 19 nt, Artificial Sequence
  Description of Artificial Sequence: Synthetic oligonucleotide
  Antisense strand to SEQ ID NO: 1326464
uaaucccaacguguuagga

SEQ ID NO: 1326466 - RNA, 19 nt, Artificial Sequence
  Description of Artificial Sequence: Synthetic oligonucleotide
  Sense strand starting at position 3667 of SEQ ID NO: 1242157
acacguugggauuacaagu

SEQ ID NO: 1326467 - RNA, 19 nt, Artificial Sequence
  Description of Artificial Sequence: Synthetic oligonucleotide
  Antisense strand to SEQ ID NO: 1326466
acuuguaaucccaacgugu

SEQ ID NO: 1326468 - RNA, 19 nt, Artificial Sequence
  Description of Artificial Sequence: Synthetic oligonucleotide
  Sense strand starting at position 3753 of SEQ ID NO: 1242157
ccauauuccuggcuaucag

SEQ ID NO: 1326469 - RNA, 19 nt, Artificial Sequence
  Description of Artificial Sequence: Synthetic oligonucleotide
  Antisense strand to SEQ ID NO: 1326468
cugauagccaggaauaugg

SEQ ID NO: 1326470 - RNA, 19 nt, Artificial Sequence
  Description of Artificial Sequence: Synthetic oligonucleotide
  Sense strand starting at position 3762 of SEQ ID NO: 1242157
uggcuaucagaauaaacgu

SEQ ID NO: 1326471 - RNA, 19 nt, Artificial Sequence
  Description of Artificial Sequence: Synthetic oligonucleotide
  Antisense strand to SEQ ID NO: 1326470
acguuuauucugauagcca

SEQ ID NO: 1326472 - RNA, 19 nt, Artificial Sequence
  Description of Artificial Sequence: Synthetic oligonucleotide
  Sense strand starting at position 8 of SEQ ID NO: 1242158
gcguucucuucucuggaaa

SEQ ID NO: 1326473 - RNA, 19 nt, Artificial Sequence
  Description of Artificial Sequence: Synthetic oligonucleotide
  Antisense strand to SEQ ID NO: 1326472
uuuccagagaagagaacgc

SEQ ID NO: 1326474 - RNA, 19 nt, Artificial Sequence
  Description of Artificial Sequence: Synthetic oligonucleotide
  Sense strand starting at position 9 of SEQ ID NO: 1242158
cguucucuucucuggaaag

SEQ ID NO: 1326475 - RNA, 19 nt, Artificial Sequence
  Description of Artificial Sequence: Synthetic oligonucleotide
  Antisense strand to SEQ ID NO: 1326474
cuuuccagagaagagaacg

SEQ ID NO: 1326476 - RNA, 19 nt, Artificial Sequence
  Description of Artificial Sequence: Synthetic oligonucleotide
  Sense strand starting at position 1491 of SEQ ID NO: 1242158
ggaggugagucaaggagaa

SEQ ID NO: 1326477 - RNA, 19 nt, Artificial Sequence
  Description of Artificial Sequence: Synthetic oligonucleotide
  Antisense strand to SEQ ID NO: 1326476
uucuccuugacucaccucc

SEQ ID NO: 1326478 - RNA, 19 nt, Artificial Sequence
  Description of Artificial Sequence: Synthetic oligonucleotide
  Sense strand starting at position 1643 of SEQ ID NO: 1242158
gucugaacuccaggugaag

SEQ ID NO: 1326479 - RNA, 19 nt, Artificial Sequence
  Description of Artificial Sequence: Synthetic oligonucleotide
  Antisense strand to SEQ ID NO: 1326478
cuucaccuggaguucagac

SEQ ID NO: 1326480 - RNA, 19 nt, Artificial Sequence
  Description of Artificial Sequence: Synthetic oligonucleotide
  Sense strand starting at position 1655 of SEQ ID NO: 1242158
ggugaagacaccugucaug

SEQ ID NO: 1326481 - RNA, 19 nt, Artificial Sequence
  Description of Artificial Sequence: Synthetic oligonucleotide
  Antisense strand to SEQ ID NO: 1326480
caugacaggugucuucacc

SEQ ID NO: 1326482 - RNA, 19 nt, Artificial Sequence
  Description of Artificial Sequence: Synthetic oligonucleotide
  Sense strand starting at position 1997 of SEQ ID NO: 1242158
agguaaaguugagucagua

SEQ ID NO: 1326483 - RNA, 19 nt, Artificial Sequence
  Description of Artificial Sequence: Synthetic oligonucleotide
  Antisense strand to SEQ ID NO: 1326482
uacugacucaacuuuaccu

SEQ ID NO: 1326484 - RNA, 19 nt, Artificial Sequence
  Description of Artificial Sequence: Synthetic oligonucleotide
  Sense strand starting at position 2129 of SEQ ID NO: 1242158
agucuagcacgugagcauu

SEQ ID NO: 1326485 - RNA, 19 nt, Artificial Sequence
  Description of Artificial Sequence: Synthetic oligonucleotide
  Antisense strand to SEQ ID NO: 1326484
aaugcucacgugcuagacu

SEQ ID NO: 1326486 - RNA, 19 nt, Artificial Sequence
  Description of Artificial Sequence: Synthetic oligonucleotide
  Sense strand starting at position 2194 of SEQ ID NO: 1242158
ccuugcucuccagagggau

SEQ ID NO: 1326487 - RNA, 19 nt, Artificial Sequence
  Description of Artificial Sequence: Synthetic oligonucleotide
  Antisense strand to SEQ ID NO: 1326486
aucccucuggagagcaagg

SEQ ID NO: 1326488 - RNA, 19 nt, Artificial Sequence
  Description of Artificial Sequence: Synthetic oligonucleotide
  Sense strand starting at position 2230 of SEQ ID NO: 1242158
caggaaguuucugucauau

SEQ ID NO: 1326489 - RNA, 19 nt, Artificial Sequence
  Description of Artificial Sequence: Synthetic oligonucleotide
  Antisense strand to SEQ ID NO: 1326488
auaugacagaaacuuccug

SEQ ID NO: 1326490 - RNA, 19 nt, Artificial Sequence
  Description of Artificial Sequence: Synthetic oligonucleotide
  Sense strand starting at position 2259 of SEQ ID NO: 1242158
gugcuagguccuggagaca

SEQ ID NO: 1326491 - RNA, 19 nt, Artificial Sequence
  Description of Artificial Sequence: Synthetic oligonucleotide
  Antisense strand to SEQ ID NO: 1326490
ugucuccaggaccuagcac

SEQ ID NO: 1326492 - RNA, 19 nt, Artificial Sequence
  Description of Artificial Sequence: Synthetic oligonucleotide
  Sense strand starting at position 2277 of SEQ ID NO: 1242158
acagaugauuuagacacau

SEQ ID NO: 1326493 - RNA, 19 nt, Artificial Sequence
  Description of Artificial Sequence: Synthetic oligonucleotide
  Antisense strand to SEQ ID NO: 1326492
augugucuaaaucaucugu

SEQ ID NO: 1326494 - RNA, 19 nt, Artificial Sequence
  Description of Artificial Sequence: Synthetic oligonucleotide
  Sense strand starting at position 2322 of SEQ ID NO: 1242158
ggagguaugauagagcugu

SEQ ID NO: 1326495 - RNA, 19 nt, Artificial Sequence
  Description of Artificial Sequence: Synthetic oligonucleotide
  Antisense strand to SEQ ID NO: 1326494
acagcucuaucauaccucc

SEQ ID NO: 1326496 - RNA, 19 nt, Artificial Sequence
  Description of Artificial Sequence: Synthetic oligonucleotide
  Sense strand starting at position 2326 of SEQ ID NO: 1242158
guaugauagagcuguggug

SEQ ID NO: 1326497 - RNA, 19 nt, Artificial Sequence
  Description of Artificial Sequence: Synthetic oligonucleotide
  Antisense strand to SEQ ID NO: 1326496
caccacagcucuaucauac

SEQ ID NO: 1326498 - RNA, 19 nt, Artificial Sequence
  Description of Artificial Sequence: Synthetic oligonucleotide
  Sense strand starting at position 2399 of SEQ ID NO: 1242158
aagaauuggccaggcagaa

SEQ ID NO: 1326499 - RNA, 19 nt, Artificial Sequence
  Description of Artificial Sequence: Synthetic oligonucleotide
  Antisense strand to SEQ ID NO: 1326498
uucugccuggccaauucuu

SEQ ID NO: 1326500 - RNA, 19 nt, Artificial Sequence
  Description of Artificial Sequence: Synthetic oligonucleotide
  Sense strand starting at position 2427 of SEQ ID NO: 1242158
aaggguaucccaugccaaa

SEQ ID NO: 1326501 - RNA, 19 nt, Artificial Sequence
  Description of Artificial Sequence: Synthetic oligonucleotide
  Antisense strand to SEQ ID NO: 1326500
uuuggcaugggauacccuu

SEQ ID NO: 1326502 - RNA, 19 nt, Artificial Sequence
  Description of Artificial Sequence: Synthetic oligonucleotide
  Sense strand starting at position 2455 of SEQ ID NO: 1242158
ugugcaaagaccuggaagu

SEQ ID NO: 1326503 - RNA, 19 nt, Artificial Sequence
  Description of Artificial Sequence: Synthetic oligonucleotide
  Antisense strand to SEQ ID NO: 1326502
acuuccaggucuuugcaca

SEQ ID NO: 1326504 - RNA, 19 nt, Artificial Sequence
  Description of Artificial Sequence: Synthetic oligonucleotide
  Sense strand starting at position 2478 of SEQ ID NO: 1242158
aauggagugauggguguuu

SEQ ID NO: 1326505 - RNA, 19 nt, Artificial Sequence
  Description of Artificial Sequence: Synthetic oligonucleotide
  Antisense strand to SEQ ID NO: 1326504
aaacacccaucacuccauu

SEQ ID NO: 1326506 - RNA, 19 nt, Artificial Sequence
  Description of Artificial Sequence: Synthetic oligonucleotide
  Sense strand starting at position 2517 of SEQ ID NO: 1242158
aauccuugauuugaggagu

SEQ ID NO: 1326507 - RNA, 19 nt, Artificial Sequence
  Description of Artificial Sequence: Synthetic oligonucleotide
  Antisense strand to SEQ ID NO: 1326506
acuccucaaaucaaggauu

SEQ ID NO: 1326508 - RNA, 19 nt, Artificial Sequence
  Description of Artificial Sequence: Synthetic oligonucleotide
  Sense strand starting at position 2614 of SEQ ID NO: 1242158
gucacagagguauggcuaa

SEQ ID NO: 1326509 - RNA, 19 nt, Artificial Sequence
  Description of Artificial Sequence: Synthetic oligonucleotide
  Antisense strand to SEQ ID NO: 1326508
uuagccauaccucugugac

SEQ ID NO: 1326510 - RNA, 19 nt, Artificial Sequence
  Description of Artificial Sequence: Synthetic oligonucleotide
  Sense strand starting at position 2905 of SEQ ID NO: 1242158
caguguccuccuugguaca

SEQ ID NO: 1326511 - RNA, 19 nt, Artificial Sequence
  Description of Artificial Sequence: Synthetic oligonucleotide
  Antisense strand to SEQ ID NO: 1326510
uguaccaaggaggacacug

SEQ ID NO: 1326512 - RNA, 19 nt, Artificial Sequence
  Description of Artificial Sequence: Synthetic oligonucleotide
  Sense strand starting at position 2906 of SEQ ID NO: 1242158
aguguccuccuugguacaa

SEQ ID NO: 1326513 - RNA, 19 nt, Artificial Sequence
  Description of Artificial Sequence: Synthetic oligonucleotide
  Antisense strand to SEQ ID NO: 1326512
uuguaccaaggaggacacu

SEQ ID NO: 1326514 - RNA, 19 nt, Artificial Sequence
  Description of Artificial Sequence: Synthetic oligonucleotide
  Sense strand starting at position 2907 of SEQ ID NO: 1242158
guguccuccuugguacaau

SEQ ID NO: 1326515 - RNA, 19 nt, Artificial Sequence
  Description of Artificial Sequence: Synthetic oligonucleotide
  Antisense strand to SEQ ID NO: 1326514
auuguaccaaggaggacac

SEQ ID NO: 1326516 - RNA, 19 nt, Artificial Sequence
  Description of Artificial Sequence: Synthetic oligonucleotide
  Sense strand starting at position 2916 of SEQ ID NO: 1242158
uugguacaaugggaauaaa

SEQ ID NO: 1326517 - RNA, 19 nt, Artificial Sequence
  Description of Artificial Sequence: Synthetic oligonucleotide
  Antisense strand to SEQ ID NO: 1326516
uuuauucccauuguaccaa

SEQ ID NO: 1326518 - RNA, 19 nt, Artificial Sequence
  Description of Artificial Sequence: Synthetic oligonucleotide
  Sense strand starting at position 2936 of SEQ ID NO: 1242158
auacauugccaguaacaug

SEQ ID NO: 1326519 - RNA, 19 nt, Artificial Sequence
  Description of Artificial Sequence: Synthetic oligonucleotide
  Antisense strand to SEQ ID NO: 1326518
cauguuacuggcaauguau

SEQ ID NO: 1326520 - RNA, 19 nt, Artificial Sequence
  Description of Artificial Sequence: Synthetic oligonucleotide
  Sense strand starting at position 2945 of SEQ ID NO: 1242158
caguaacaugacuggcaaa

SEQ ID NO: 1326521 - RNA, 19 nt, Artificial Sequence
  Description of Artificial Sequence: Synthetic oligonucleotide
  Antisense strand to SEQ ID NO: 1326520
uuugccagucauguuacug

SEQ ID NO: 1326522 - RNA, 19 nt, Artificial Sequence
  Description of Artificial Sequence: Synthetic oligonucleotide
  Sense strand starting at position 3216 of SEQ ID NO: 1242158
ccaggugagcccuagggaa

SEQ ID NO: 1326523 - RNA, 19 nt, Artificial Sequence
  Description of Artificial Sequence: Synthetic oligonucleotide
  Antisense strand to SEQ ID NO: 1326522
uucccuagggcucaccugg

SEQ ID NO: 1326524 - RNA, 19 nt, Artificial Sequence
  Description of Artificial Sequence: Synthetic oligonucleotide
  Sense strand starting at position 3340 of SEQ ID NO: 1242158
uacuucugcugucuuggaa

SEQ ID NO: 1326525 - RNA, 19 nt, Artificial Sequence
  Description of Artificial Sequence: Synthetic oligonucleotide
  Antisense strand to SEQ ID NO: 1326524
uuccaagacagcagaagua

SEQ ID NO: 1326526 - RNA, 19 nt, Artificial Sequence
  Description of Artificial Sequence: Synthetic oligonucleotide
  Sense strand starting at position 3396 of SEQ ID NO: 1242158
cccagcuaugcggugcaaa

SEQ ID NO: 1326527 - RNA, 19 nt, Artificial Sequence
  Description of Artificial Sequence: Synthetic oligonucleotide
  Antisense strand to SEQ ID NO: 1326526
uuugcaccgcauagcuggg

SEQ ID NO: 1326528 - RNA, 19 nt, Artificial Sequence
  Description of Artificial Sequence: Synthetic oligonucleotide
  Sense strand starting at position 3454 of SEQ ID NO: 1242158
ucccuaaguaugggagcaa

SEQ ID NO: 1326529 - RNA, 19 nt, Artificial Sequence
  Description of Artificial Sequence: Synthetic oligonucleotide
  Antisense strand to SEQ ID NO: 1326528
uugcucccauacuuaggga

SEQ ID NO: 1326530 - RNA, 19 nt, Artificial Sequence
  Description of Artificial Sequence: Synthetic oligonucleotide
  Sense strand starting at position 3501 of SEQ ID NO: 1242158
cugagucuaugucauuuau

SEQ ID NO: 1326531 - RNA, 19 nt, Artificial Sequence
  Description of Artificial Sequence: Synthetic oligonucleotide
  Antisense strand to SEQ ID NO: 1326530
auaaaugacauagacucag

SEQ ID NO: 1326532 - RNA, 19 nt, Artificial Sequence
  Description of Artificial Sequence: Synthetic oligonucleotide
  Sense strand starting at position 3545 of SEQ ID NO: 1242158
cccucuauccaggaguucu

SEQ ID NO: 1326533 - RNA, 19 nt, Artificial Sequence
  Description of Artificial Sequence: Synthetic oligonucleotide
  Antisense strand to SEQ ID NO: 1326532
agaacuccuggauagaggg

SEQ ID NO: 1326534 - RNA, 19 nt, Artificial Sequence
  Description of Artificial Sequence: Synthetic oligonucleotide
  Sense strand starting at position 3553 of SEQ ID NO: 1242158
ccaggaguucugcacaaag

SEQ ID NO: 1326535 - RNA, 19 nt, Artificial Sequence
  Description of Artificial Sequence: Synthetic oligonucleotide
  Antisense strand to SEQ ID NO: 1326534
cuuugugcagaacuccugg

SEQ ID NO: 1326536 - RNA, 19 nt, Artificial Sequence
  Description of Artificial Sequence: Synthetic oligonucleotide
  Sense strand starting at position 3661 of SEQ ID NO: 1242158
aggcuuuacagagaggcau

SEQ ID NO: 1326537 - RNA, 19 nt, Artificial Sequence
  Description of Artificial Sequence: Synthetic oligonucleotide
  Antisense strand to SEQ ID NO: 1326536
augccucucuguaaagccu

SEQ ID NO: 1326538 - RNA, 19 nt, Artificial Sequence
  Description of Artificial Sequence: Synthetic oligonucleotide
  Sense strand starting at position 3672 of SEQ ID NO: 1242158
agaggcauggcaugaauaa

SEQ ID NO: 1326539 - RNA, 19 nt, Artificial Sequence
  Description of Artificial Sequence: Synthetic oligonucleotide
  Antisense strand to SEQ ID NO: 1326538
uuauucaugccaugccucu

SEQ ID NO: 1326540 - RNA, 19 nt, Artificial Sequence
  Description of Artificial Sequence: Synthetic oligonucleotide
  Sense strand starting at position 3779 of SEQ ID NO: 1242158
ggagguagcuccucuacca

SEQ ID NO: 1326541 - RNA, 19 nt, Artificial Sequence
  Description of Artificial Sequence: Synthetic oligonucleotide
  Antisense strand to SEQ ID NO: 1326540
ugguagaggagcuaccucc

SEQ ID NO: 1326542 - RNA, 19 nt, Artificial Sequence
  Description of Artificial Sequence: Synthetic oligonucleotide
  Sense strand starting at position 3894 of SEQ ID NO: 1242158
gggccagucauggagaacu

SEQ ID NO: 1326543 - RNA, 19 nt, Artificial Sequence
  Description of Artificial Sequence: Synthetic oligonucleotide
  Antisense strand to SEQ ID NO: 1326542
aguucuccaugacuggccc

SEQ ID NO: 1326544 - RNA, 19 nt, Artificial Sequence
  Description of Artificial Sequence: Synthetic oligonucleotide
  Sense strand starting at position 3902 of SEQ ID NO: 1242158
cauggagaacuuuggcagu

SEQ ID NO: 1326545 - RNA, 19 nt, Artificial Sequence
  Description of Artificial Sequence: Synthetic oligonucleotide
  Antisense strand to SEQ ID NO: 1326544
acugccaaaguucuccaug

SEQ ID NO: 1326546 - RNA, 19 nt, Artificial Sequence
  Description of Artificial Sequence: Synthetic oligonucleotide
  Sense strand starting at position 3904 of SEQ ID NO: 1242158
uggagaacuuuggcagugu

SEQ ID NO: 1326547 - RNA, 19 nt, Artificial Sequence
  Description of Artificial Sequence: Synthetic oligonucleotide
  Antisense strand to SEQ ID NO: 1326546
acacugccaaaguucucca

SEQ ID NO: 1326548 - RNA, 19 nt, Artificial Sequence
  Description of Artificial Sequence: Synthetic oligonucleotide
  Sense strand starting at position 3908 of SEQ ID NO: 1242158
gaacuuuggcaguguucca

SEQ ID NO: 1326549 - RNA, 19 nt, Artificial Sequence
  Description of Artificial Sequence: Synthetic oligonucleotide
  Antisense strand to SEQ ID NO: 1326548
uggaacacugccaaaguuc

SEQ ID NO: 1326550 - RNA, 19 nt, Artificial Sequence
  Description of Artificial Sequence: Synthetic oligonucleotide
  Sense strand starting at position 3915 of SEQ ID NO: 1242158
ggcaguguuccagaucuaa

SEQ ID NO: 1326551 - RNA, 19 nt, Artificial Sequence
  Description of Artificial Sequence: Synthetic oligonucleotide
  Antisense strand to SEQ ID NO: 1326550
uuagaucuggaacacugcc

SEQ ID NO: 1326552 - RNA, 19 nt, Artificial Sequence
  Description of Artificial Sequence: Synthetic oligonucleotide
  Sense strand starting at position 575 of SEQ ID NO: 1242159
cgcguucucuucucuggaa

SEQ ID NO: 1326553 - RNA, 19 nt, Artificial Sequence
  Description of Artificial Sequence: Synthetic oligonucleotide
  Antisense strand to SEQ ID NO: 1326552
uuccagagaagagaacgcg

SEQ ID NO: 1326554 - RNA, 19 nt, Artificial Sequence
  Description of Artificial Sequence: Synthetic oligonucleotide
  Sense strand starting at position 576 of SEQ ID NO: 1242159
gcguucucuucucuggaaa

SEQ ID NO: 1326555 - RNA, 19 nt, Artificial Sequence
  Description of Artificial Sequence: Synthetic oligonucleotide
  Antisense strand to SEQ ID NO: 1326554
uuuccagagaagagaacgc

SEQ ID NO: 1326556 - RNA, 19 nt, Artificial Sequence
  Description of Artificial Sequence: Synthetic oligonucleotide
  Sense strand starting at position 577 of SEQ ID NO: 1242159
cguucucuucucuggaaag

SEQ ID NO: 1326557 - RNA, 19 nt, Artificial Sequence
  Description of Artificial Sequence: Synthetic oligonucleotide
  Antisense strand to SEQ ID NO: 1326556
cuuuccagagaagagaacg

SEQ ID NO: 1326558 - RNA, 19 nt, Artificial Sequence
  Description of Artificial Sequence: Synthetic oligonucleotide
  Sense strand starting at position 1087 of SEQ ID NO: 1242159
cguguguaugcgcgugaga

SEQ ID NO: 1326559 - RNA, 19 nt, Artificial Sequence
  Description of Artificial Sequence: Synthetic oligonucleotide
  Antisense strand to SEQ ID NO: 1326558
ucucacgcgcauacacacg

SEQ ID NO: 1326560 - RNA, 19 nt, Artificial Sequence
  Description of Artificial Sequence: Synthetic oligonucleotide
  Sense strand starting at position 2059 of SEQ ID NO: 1242159
ggaggugagucaaggagaa

SEQ ID NO: 1326561 - RNA, 19 nt, Artificial Sequence
  Description of Artificial Sequence: Synthetic oligonucleotide
  Antisense strand to SEQ ID NO: 1326560
uucuccuugacucaccucc

SEQ ID NO: 1326562 - RNA, 19 nt, Artificial Sequence
  Description of Artificial Sequence: Synthetic oligonucleotide
  Sense strand starting at position 2211 of SEQ ID NO: 1242159
gucugaacuccaggugaag

SEQ ID NO: 1326563 - RNA, 19 nt, Artificial Sequence
  Description of Artificial Sequence: Synthetic oligonucleotide
  Antisense strand to SEQ ID NO: 1326562
cuucaccuggaguucagac

SEQ ID NO: 1326564 - RNA, 19 nt, Artificial Sequence
  Description of Artificial Sequence: Synthetic oligonucleotide
  Sense strand starting at position 2223 of SEQ ID NO: 1242159
ggugaagacaccugucaug

SEQ ID NO: 1326565 - RNA, 19 nt, Artificial Sequence
  Description of Artificial Sequence: Synthetic oligonucleotide
  Antisense strand to SEQ ID NO: 1326564
caugacaggugucuucacc

SEQ ID NO: 1326566 - RNA, 19 nt, Artificial Sequence
  Description of Artificial Sequence: Synthetic oligonucleotide
  Sense strand starting at position 2234 of SEQ ID NO: 1242159
cugucaugcugggaggaca

SEQ ID NO: 1326567 - RNA, 19 nt, Artificial Sequence
  Description of Artificial Sequence: Synthetic oligonucleotide
  Antisense strand to SEQ ID NO: 1326566
uguccucccagcaugacag

SEQ ID NO: 1326568 - RNA, 19 nt, Artificial Sequence
  Description of Artificial Sequence: Synthetic oligonucleotide
  Sense strand starting at position 2341 of SEQ ID NO: 1242159
gggcauggcuuccaucauu

SEQ ID NO: 1326569 - RNA, 19 nt, Artificial Sequence
  Description of Artificial Sequence: Synthetic oligonucleotide
  Antisense strand to SEQ ID NO: 1326568
aaugauggaagccaugccc

SEQ ID NO: 1326570 - RNA, 19 nt, Artificial Sequence
  Description of Artificial Sequence: Synthetic oligonucleotide
  Sense strand starting at position 2374 of SEQ ID NO: 1242159
cagcucugauaugguguua

SEQ ID NO: 1326571 - RNA, 19 nt, Artificial Sequence
  Description of Artificial Sequence: Synthetic oligonucleotide
  Antisense strand to SEQ ID NO: 1326570
uaacaccauaucagagcug

SEQ ID NO: 1326572 - RNA, 19 nt, Artificial Sequence
  Description of Artificial Sequence: Synthetic oligonucleotide
  Sense strand starting at position 2565 of SEQ ID NO: 1242159
agguaaaguugagucagua

SEQ ID NO: 1326573 - RNA, 19 nt, Artificial Sequence
  Description of Artificial Sequence: Synthetic oligonucleotide
  Antisense strand to SEQ ID NO: 1326572
uacugacucaacuuuaccu

SEQ ID NO: 1326574 - RNA, 19 nt, Artificial Sequence
  Description of Artificial Sequence: Synthetic oligonucleotide
  Sense strand starting at position 2679 of SEQ ID NO: 1242159
ucagccugauccuggacaa

SEQ ID NO: 1326575 - RNA, 19 nt, Artificial Sequence
  Description of Artificial Sequence: Synthetic oligonucleotide
  Antisense strand to SEQ ID NO: 1326574
uuguccaggaucaggcuga

SEQ ID NO: 1326576 - RNA, 19 nt, Artificial Sequence
  Description of Artificial Sequence: Synthetic oligonucleotide
  Sense strand starting at position 2696 of SEQ ID NO: 1242159
aagucuagcacgugagcau

SEQ ID NO: 1326577 - RNA, 19 nt, Artificial Sequence
  Description of Artificial Sequence: Synthetic oligonucleotide
  Antisense strand to SEQ ID NO: 1326576
augcucacgugcuagacuu

SEQ ID NO: 1326578 - RNA, 19 nt, Artificial Sequence
  Description of Artificial Sequence: Synthetic oligonucleotide
  Sense strand starting at position 2697 of SEQ ID NO: 1242159
agucuagcacgugagcauu

SEQ ID NO: 1326579 - RNA, 19 nt, Artificial Sequence
  Description of Artificial Sequence: Synthetic oligonucleotide
  Antisense strand to SEQ ID NO: 1326578
aaugcucacgugcuagacu

SEQ ID NO: 1326580 - RNA, 19 nt, Artificial Sequence
  Description of Artificial Sequence: Synthetic oligonucleotide
  Sense strand starting at position 2762 of SEQ ID NO: 1242159
ccuugcucuccagagggau

SEQ ID NO: 1326581 - RNA, 19 nt, Artificial Sequence
  Description of Artificial Sequence: Synthetic oligonucleotide
  Antisense strand to SEQ ID NO: 1326580
aucccucuggagagcaagg

SEQ ID NO: 1326582 - RNA, 19 nt, Artificial Sequence
  Description of Artificial Sequence: Synthetic oligonucleotide
  Sense strand starting at position 2798 of SEQ ID NO: 1242159
caggaaguuucugucauau

SEQ ID NO: 1326583 - RNA, 19 nt, Artificial Sequence
  Description of Artificial Sequence: Synthetic oligonucleotide
  Antisense strand to SEQ ID NO: 1326582
auaugacagaaacuuccug

SEQ ID NO: 1326584 - RNA, 19 nt, Artificial Sequence
  Description of Artificial Sequence: Synthetic oligonucleotide
  Sense strand starting at position 2800 of SEQ ID NO: 1242159
ggaaguuucugucauaugc

SEQ ID NO: 1326585 - RNA, 19 nt, Artificial Sequence
  Description of Artificial Sequence: Synthetic oligonucleotide
  Antisense strand to SEQ ID NO: 1326584
gcauaugacagaaacuucc

SEQ ID NO: 1326586 - RNA, 19 nt, Artificial Sequence
  Description of Artificial Sequence: Synthetic oligonucleotide
  Sense strand starting at position 2827 of SEQ ID NO: 1242159
gugcuagguccuggagaca

SEQ ID NO: 1326587 - RNA, 19 nt, Artificial Sequence
  Description of Artificial Sequence: Synthetic oligonucleotide
  Antisense strand to SEQ ID NO: 1326586
ugucuccaggaccuagcac

SEQ ID NO: 1326588 - RNA, 19 nt, Artificial Sequence
  Description of Artificial Sequence: Synthetic oligonucleotide
  Sense strand starting at position 2845 of SEQ ID NO: 1242159
acagaugauuuagacacau

SEQ ID NO: 1326589 - RNA, 19 nt, Artificial Sequence
  Description of Artificial Sequence: Synthetic oligonucleotide
  Antisense strand to SEQ ID NO: 1326588
augugucuaaaucaucugu

SEQ ID NO: 1326590 - RNA, 19 nt, Artificial Sequence
  Description of Artificial Sequence: Synthetic oligonucleotide
  Sense strand starting at position 2890 of SEQ ID NO: 1242159
ggagguaugauagagcugu

SEQ ID NO: 1326591 - RNA, 19 nt, Artificial Sequence
  Description of Artificial Sequence: Synthetic oligonucleotide
  Antisense strand to SEQ ID NO: 1326590
acagcucuaucauaccucc

SEQ ID NO: 1326592 - RNA, 19 nt, Artificial Sequence
  Description of Artificial Sequence: Synthetic oligonucleotide
  Sense strand starting at position 2894 of SEQ ID NO: 1242159
guaugauagagcuguggug

SEQ ID NO: 1326593 - RNA, 19 nt, Artificial Sequence
  Description of Artificial Sequence: Synthetic oligonucleotide
  Antisense strand to SEQ ID NO: 1326592
caccacagcucuaucauac

SEQ ID NO: 1326594 - RNA, 19 nt, Artificial Sequence
  Description of Artificial Sequence: Synthetic oligonucleotide
  Sense strand starting at position 2967 of SEQ ID NO: 1242159
aagaauuggccaggcagaa

SEQ ID NO: 1326595 - RNA, 19 nt, Artificial Sequence
  Description of Artificial Sequence: Synthetic oligonucleotide
  Antisense strand to SEQ ID NO: 1326594
uucugccuggccaauucuu

SEQ ID NO: 1326596 - RNA, 19 nt, Artificial Sequence
  Description of Artificial Sequence: Synthetic oligonucleotide
  Sense strand starting at position 2995 of SEQ ID NO: 1242159
aaggguaucccaugccaaa

SEQ ID NO: 1326597 - RNA, 19 nt, Artificial Sequence
  Description of Artificial Sequence: Synthetic oligonucleotide
  Antisense strand to SEQ ID NO: 1326596
uuuggcaugggauacccuu

SEQ ID NO: 1326598 - RNA, 19 nt, Artificial Sequence
  Description of Artificial Sequence: Synthetic oligonucleotide
  Sense strand starting at position 3023 of SEQ ID NO: 1242159
ugugcaaagaccuggaagu

SEQ ID NO: 1326599 - RNA, 19 nt, Artificial Sequence
  Description of Artificial Sequence: Synthetic oligonucleotide
  Antisense strand to SEQ ID NO: 1326598
acuuccaggucuuugcaca

SEQ ID NO: 1326600 - RNA, 19 nt, Artificial Sequence
  Description of Artificial Sequence: Synthetic oligonucleotide
  Sense strand starting at position 3046 of SEQ ID NO: 1242159
aauggagugauggguguuu

SEQ ID NO: 1326601 - RNA, 19 nt, Artificial Sequence
  Description of Artificial Sequence: Synthetic oligonucleotide
  Antisense strand to SEQ ID NO: 1326600
aaacacccaucacuccauu

SEQ ID NO: 1326602 - RNA, 19 nt, Artificial Sequence
  Description of Artificial Sequence: Synthetic oligonucleotide
  Sense strand starting at position 3085 of SEQ ID NO: 1242159
aauccuugauuugaggagu

SEQ ID NO: 1326603 - RNA, 19 nt, Artificial Sequence
  Description of Artificial Sequence: Synthetic oligonucleotide
  Antisense strand to SEQ ID NO: 1326602
acuccucaaaucaaggauu

SEQ ID NO: 1326604 - RNA, 19 nt, Artificial Sequence
  Description of Artificial Sequence: Synthetic oligonucleotide
  Sense strand starting at position 3182 of SEQ ID NO: 1242159
gucacagagguauggcuaa

SEQ ID NO: 1326605 - RNA, 19 nt, Artificial Sequence
  Description of Artificial Sequence: Synthetic oligonucleotide
  Antisense strand to SEQ ID NO: 1326604
uuagccauaccucugugac

SEQ ID NO: 1326606 - RNA, 19 nt, Artificial Sequence
  Description of Artificial Sequence: Synthetic oligonucleotide
  Sense strand starting at position 3428 of SEQ ID NO: 1242159
acccuagacuuugguauca

SEQ ID NO: 1326607 - RNA, 19 nt, Artificial Sequence
  Description of Artificial Sequence: Synthetic oligonucleotide
  Antisense strand to SEQ ID NO: 1326606
ugauaccaaagucuagggu

SEQ ID NO: 1326608 - RNA, 19 nt, Artificial Sequence
  Description of Artificial Sequence: Synthetic oligonucleotide
  Sense strand starting at position 3473 of SEQ ID NO: 1242159
caguguccuccuugguaca

SEQ ID NO: 1326609 - RNA, 19 nt, Artificial Sequence
  Description of Artificial Sequence: Synthetic oligonucleotide
  Antisense strand to SEQ ID NO: 1326608
uguaccaaggaggacacug

SEQ ID NO: 1326610 - RNA, 19 nt, Artificial Sequence
  Description of Artificial Sequence: Synthetic oligonucleotide
  Sense strand starting at position 3474 of SEQ ID NO: 1242159
aguguccuccuugguacaa

SEQ ID NO: 1326611 - RNA, 19 nt, Artificial Sequence
  Description of Artificial Sequence: Synthetic oligonucleotide
  Antisense strand to SEQ ID NO: 1326610
uuguaccaaggaggacacu

SEQ ID NO: 1326612 - RNA, 19 nt, Artificial Sequence
  Description of Artificial Sequence: Synthetic oligonucleotide
  Sense strand starting at position 3475 of SEQ ID NO: 1242159
guguccuccuugguacaau

SEQ ID NO: 1326613 - RNA, 19 nt, Artificial Sequence
  Description of Artificial Sequence: Synthetic oligonucleotide
  Antisense strand to SEQ ID NO: 1326612
auuguaccaaggaggacac

SEQ ID NO: 1326614 - RNA, 19 nt, Artificial Sequence
  Description of Artificial Sequence: Synthetic oligonucleotide
  Sense strand starting at position 3484 of SEQ ID NO: 1242159
uugguacaaugggaauaaa

SEQ ID NO: 1326615 - RNA, 19 nt, Artificial Sequence
  Description of Artificial Sequence: Synthetic oligonucleotide
  Antisense strand to SEQ ID NO: 1326614
uuuauucccauuguaccaa

SEQ ID NO: 1326616 - RNA, 19 nt, Artificial Sequence
  Description of Artificial Sequence: Synthetic oligonucleotide
  Sense strand starting at position 3504 of SEQ ID NO: 1242159
auacauugccaguaacaug

SEQ ID NO: 1326617 - RNA, 19 nt, Artificial Sequence
  Description of Artificial Sequence: Synthetic oligonucleotide
  Antisense strand to SEQ ID NO: 1326616
cauguuacuggcaauguau

SEQ ID NO: 1326618 - RNA, 19 nt, Artificial Sequence
  Description of Artificial Sequence: Synthetic oligonucleotide
  Sense strand starting at position 3513 of SEQ ID NO: 1242159
caguaacaugacuggcaaa

SEQ ID NO: 1326619 - RNA, 19 nt, Artificial Sequence
  Description of Artificial Sequence: Synthetic oligonucleotide
  Antisense strand to SEQ ID NO: 1326618
uuugccagucauguuacug

SEQ ID NO: 1326620 - RNA, 19 nt, Artificial Sequence
  Description of Artificial Sequence: Synthetic oligonucleotide
  Sense strand starting at position 3784 of SEQ ID NO: 1242159
ccaggugagcccuagggaa

SEQ ID NO: 1326621 - RNA, 19 nt, Artificial Sequence
  Description of Artificial Sequence: Synthetic oligonucleotide
  Antisense strand to SEQ ID NO: 1326620
uucccuagggcucaccugg

SEQ ID NO: 1326622 - RNA, 19 nt, Artificial Sequence
  Description of Artificial Sequence: Synthetic oligonucleotide
  Sense strand starting at position 3908 of SEQ ID NO: 1242159
uacuucugcugucuuggaa

SEQ ID NO: 1326623 - RNA, 19 nt, Artificial Sequence
  Description of Artificial Sequence: Synthetic oligonucleotide
  Antisense strand to SEQ ID NO: 1326622
uuccaagacagcagaagua

SEQ ID NO: 1326624 - RNA, 19 nt, Artificial Sequence
  Description of Artificial Sequence: Synthetic oligonucleotide
  Sense strand starting at position 3939 of SEQ ID NO: 1242159
uuguguccgugcuugggaa

SEQ ID NO: 1326625 - RNA, 19 nt, Artificial Sequence
  Description of Artificial Sequence: Synthetic oligonucleotide
  Antisense strand to SEQ ID NO: 1326624
uucccaagcacggacacaa

SEQ ID NO: 1326626 - RNA, 19 nt, Artificial Sequence
  Description of Artificial Sequence: Synthetic oligonucleotide
  Sense strand starting at position 3941 of SEQ ID NO: 1242159
guguccgugcuugggaauu

SEQ ID NO: 1326627 - RNA, 19 nt, Artificial Sequence
  Description of Artificial Sequence: Synthetic oligonucleotide
  Antisense strand to SEQ ID NO: 1326626
aauucccaagcacggacac

SEQ ID NO: 1326628 - RNA, 19 nt, Artificial Sequence
  Description of Artificial Sequence: Synthetic oligonucleotide
  Sense strand starting at position 3943 of SEQ ID NO: 1242159
guccgugcuugggaauuua

SEQ ID NO: 1326629 - RNA, 19 nt, Artificial Sequence
  Description of Artificial Sequence: Synthetic oligonucleotide
  Antisense strand to SEQ ID NO: 1326628
uaaauucccaagcacggac

SEQ ID NO: 1326630 - RNA, 19 nt, Artificial Sequence
  Description of Artificial Sequence: Synthetic oligonucleotide
  Sense strand starting at position 3964 of SEQ ID NO: 1242159
cccagcuaugcggugcaaa

SEQ ID NO: 1326631 - RNA, 19 nt, Artificial Sequence
  Description of Artificial Sequence: Synthetic oligonucleotide
  Antisense strand to SEQ ID NO: 1326630
uuugcaccgcauagcuggg

SEQ ID NO: 1326632 - RNA, 19 nt, Artificial Sequence
  Description of Artificial Sequence: Synthetic oligonucleotide
  Sense strand starting at position 805 of SEQ ID NO: 1242160
cgcguucucuucucuggaa

SEQ ID NO: 1326633 - RNA, 19 nt, Artificial Sequence
  Description of Artificial Sequence: Synthetic oligonucleotide
  Antisense strand to SEQ ID NO: 1326632
uuccagagaagagaacgcg

SEQ ID NO: 1326634 - RNA, 19 nt, Artificial Sequence
  Description of Artificial Sequence: Synthetic oligonucleotide
  Sense strand starting at position 806 of SEQ ID NO: 1242160
gcguucucuucucuggaaa

SEQ ID NO: 1326635 - RNA, 19 nt, Artificial Sequence
  Description of Artificial Sequence: Synthetic oligonucleotide
  Antisense strand to SEQ ID NO: 1326634
uuuccagagaagagaacgc

SEQ ID NO: 1326636 - RNA, 19 nt, Artificial Sequence
  Description of Artificial Sequence: Synthetic oligonucleotide
  Sense strand starting at position 807 of SEQ ID NO: 1242160
cguucucuucucuggaaag

SEQ ID NO: 1326637 - RNA, 19 nt, Artificial Sequence
  Description of Artificial Sequence: Synthetic oligonucleotide
  Antisense strand to SEQ ID NO: 1326636
cuuuccagagaagagaacg

SEQ ID NO: 1326638 - RNA, 19 nt, Artificial Sequence
  Description of Artificial Sequence: Synthetic oligonucleotide
  Sense strand starting at position 1317 of SEQ ID NO: 1242160
cguguguaugcgcgugaga

SEQ ID NO: 1326639 - RNA, 19 nt, Artificial Sequence
  Description of Artificial Sequence: Synthetic oligonucleotide
  Antisense strand to SEQ ID NO: 1326638
ucucacgcgcauacacacg

SEQ ID NO: 1326640 - RNA, 19 nt, Artificial Sequence
  Description of Artificial Sequence: Synthetic oligonucleotide
  Sense strand starting at position 2289 of SEQ ID NO: 1242160
ggaggugagucaaggagaa

SEQ ID NO: 1326641 - RNA, 19 nt, Artificial Sequence
  Description of Artificial Sequence: Synthetic oligonucleotide
  Antisense strand to SEQ ID NO: 1326640
uucuccuugacucaccucc

SEQ ID NO: 1326642 - RNA, 19 nt, Artificial Sequence
  Description of Artificial Sequence: Synthetic oligonucleotide
  Sense strand starting at position 2441 of SEQ ID NO: 1242160
gucugaacuccaggugaag

SEQ ID NO: 1326643 - RNA, 19 nt, Artificial Sequence
  Description of Artificial Sequence: Synthetic oligonucleotide
  Antisense strand to SEQ ID NO: 1326642
cuucaccuggaguucagac

SEQ ID NO: 1326644 - RNA, 19 nt, Artificial Sequence
  Description of Artificial Sequence: Synthetic oligonucleotide
  Sense strand starting at position 2453 of SEQ ID NO: 1242160
ggugaagacaccugucaug

SEQ ID NO: 1326645 - RNA, 19 nt, Artificial Sequence
  Description of Artificial Sequence: Synthetic oligonucleotide
  Antisense strand to SEQ ID NO: 1326644
caugacaggugucuucacc

SEQ ID NO: 1326646 - RNA, 19 nt, Artificial Sequence
  Description of Artificial Sequence: Synthetic oligonucleotide
  Sense strand starting at position 2464 of SEQ ID NO: 1242160
cugucaugcugggaggaca

SEQ ID NO: 1326647 - RNA, 19 nt, Artificial Sequence
  Description of Artificial Sequence: Synthetic oligonucleotide
  Antisense strand to SEQ ID NO: 1326646
uguccucccagcaugacag

SEQ ID NO: 1326648 - RNA, 19 nt, Artificial Sequence
  Description of Artificial Sequence: Synthetic oligonucleotide
  Sense strand starting at position 2571 of SEQ ID NO: 1242160
gggcauggcuuccaucauu

SEQ ID NO: 1326649 - RNA, 19 nt, Artificial Sequence
  Description of Artificial Sequence: Synthetic oligonucleotide
  Antisense strand to SEQ ID NO: 1326648
aaugauggaagccaugccc

SEQ ID NO: 1326650 - RNA, 19 nt, Artificial Sequence
  Description of Artificial Sequence: Synthetic oligonucleotide
  Sense strand starting at position 2604 of SEQ ID NO: 1242160
cagcucugauaugguguua

SEQ ID NO: 1326651 - RNA, 19 nt, Artificial Sequence
  Description of Artificial Sequence: Synthetic oligonucleotide
  Antisense strand to SEQ ID NO: 1326650
uaacaccauaucagagcug

SEQ ID NO: 1326652 - RNA, 19 nt, Artificial Sequence
  Description of Artificial Sequence: Synthetic oligonucleotide
  Sense strand starting at position 2795 of SEQ ID NO: 1242160
agguaaaguugagucagua

SEQ ID NO: 1326653 - RNA, 19 nt, Artificial Sequence
  Description of Artificial Sequence: Synthetic oligonucleotide
  Antisense strand to SEQ ID NO: 1326652
uacugacucaacuuuaccu

SEQ ID NO: 1326654 - RNA, 19 nt, Artificial Sequence
  Description of Artificial Sequence: Synthetic oligonucleotide
  Sense strand starting at position 2909 of SEQ ID NO: 1242160
ucagccugauccuggacaa

SEQ ID NO: 1326655 - RNA, 19 nt, Artificial Sequence
  Description of Artificial Sequence: Synthetic oligonucleotide
  Antisense strand to SEQ ID NO: 1326654
uuguccaggaucaggcuga

SEQ ID NO: 1326656 - RNA, 19 nt, Artificial Sequence
  Description of Artificial Sequence: Synthetic oligonucleotide
  Sense strand starting at position 2926 of SEQ ID NO: 1242160
aagucuagcacgugagcau

SEQ ID NO: 1326657 - RNA, 19 nt, Artificial Sequence
  Description of Artificial Sequence: Synthetic oligonucleotide
  Antisense strand to SEQ ID NO: 1326656
augcucacgugcuagacuu

SEQ ID NO: 1326658 - RNA, 19 nt, Artificial Sequence
  Description of Artificial Sequence: Synthetic oligonucleotide
  Sense strand starting at position 2927 of SEQ ID NO: 1242160
agucuagcacgugagcauu

SEQ ID NO: 1326659 - RNA, 19 nt, Artificial Sequence
  Description of Artificial Sequence: Synthetic oligonucleotide
  Antisense strand to SEQ ID NO: 1326658
aaugcucacgugcuagacu

SEQ ID NO: 1326660 - RNA, 19 nt, Artificial Sequence
  Description of Artificial Sequence: Synthetic oligonucleotide
  Sense strand starting at position 2992 of SEQ ID NO: 1242160
ccuugcucuccagagggau

SEQ ID NO: 1326661 - RNA, 19 nt, Artificial Sequence
  Description of Artificial Sequence: Synthetic oligonucleotide
  Antisense strand to SEQ ID NO: 1326660
aucccucuggagagcaagg

SEQ ID NO: 1326662 - RNA, 19 nt, Artificial Sequence
  Description of Artificial Sequence: Synthetic oligonucleotide
  Sense strand starting at position 3028 of SEQ ID NO: 1242160
caggaaguuucugucauau

SEQ ID NO: 1326663 - RNA, 19 nt, Artificial Sequence
  Description of Artificial Sequence: Synthetic oligonucleotide
  Antisense strand to SEQ ID NO: 1326662
auaugacagaaacuuccug

SEQ ID NO: 1326664 - RNA, 19 nt, Artificial Sequence
  Description of Artificial Sequence: Synthetic oligonucleotide
  Sense strand starting at position 3030 of SEQ ID NO: 1242160
ggaaguuucugucauaugc

SEQ ID NO: 1326665 - RNA, 19 nt, Artificial Sequence
  Description of Artificial Sequence: Synthetic oligonucleotide
  Antisense strand to SEQ ID NO: 1326664
gcauaugacagaaacuucc

SEQ ID NO: 1326666 - RNA, 19 nt, Artificial Sequence
  Description of Artificial Sequence: Synthetic oligonucleotide
  Sense strand starting at position 3057 of SEQ ID NO: 1242160
gugcuagguccuggagaca

SEQ ID NO: 1326667 - RNA, 19 nt, Artificial Sequence
  Description of Artificial Sequence: Synthetic oligonucleotide
  Antisense strand to SEQ ID NO: 1326666
ugucuccaggaccuagcac

SEQ ID NO: 1326668 - RNA, 19 nt, Artificial Sequence
  Description of Artificial Sequence: Synthetic oligonucleotide
  Sense strand starting at position 3075 of SEQ ID NO: 1242160
acagaugauuuagacacau

SEQ ID NO: 1326669 - RNA, 19 nt, Artificial Sequence
  Description of Artificial Sequence: Synthetic oligonucleotide
  Antisense strand to SEQ ID NO: 1326668
augugucuaaaucaucugu

SEQ ID NO: 1326670 - RNA, 19 nt, Artificial Sequence
  Description of Artificial Sequence: Synthetic oligonucleotide
  Sense strand starting at position 3120 of SEQ ID NO: 1242160
ggagguaugauagagcugu

SEQ ID NO: 1326671 - RNA, 19 nt, Artificial Sequence
  Description of Artificial Sequence: Synthetic oligonucleotide
  Antisense strand to SEQ ID NO: 1326670
acagcucuaucauaccucc

SEQ ID NO: 1326672 - RNA, 19 nt, Artificial Sequence
  Description of Artificial Sequence: Synthetic oligonucleotide
  Sense strand starting at position 3124 of SEQ ID NO: 1242160
guaugauagagcuguggug

SEQ ID NO: 1326673 - RNA, 19 nt, Artificial Sequence
  Description of Artificial Sequence: Synthetic oligonucleotide
  Antisense strand to SEQ ID NO: 1326672
caccacagcucuaucauac

SEQ ID NO: 1326674 - RNA, 19 nt, Artificial Sequence
  Description of Artificial Sequence: Synthetic oligonucleotide
  Sense strand starting at position 3197 of SEQ ID NO: 1242160
aagaauuggccaggcagaa

SEQ ID NO: 1326675 - RNA, 19 nt, Artificial Sequence
  Description of Artificial Sequence: Synthetic oligonucleotide
  Antisense strand to SEQ ID NO: 1326674
uucugccuggccaauucuu

SEQ ID NO: 1326676 - RNA, 19 nt, Artificial Sequence
  Description of Artificial Sequence: Synthetic oligonucleotide
  Sense strand starting at position 3225 of SEQ ID NO: 1242160
aaggguaucccaugccaaa

SEQ ID NO: 1326677 - RNA, 19 nt, Artificial Sequence
  Description of Artificial Sequence: Synthetic oligonucleotide
  Antisense strand to SEQ ID NO: 1326676
uuuggcaugggauacccuu

SEQ ID NO: 1326678 - RNA, 19 nt, Artificial Sequence
  Description of Artificial Sequence: Synthetic oligonucleotide
  Sense strand starting at position 3253 of SEQ ID NO: 1242160
ugugcaaagaccuggaagu

SEQ ID NO: 1326679 - RNA, 19 nt, Artificial Sequence
  Description of Artificial Sequence: Synthetic oligonucleotide
  Antisense strand to SEQ ID NO: 1326678
acuuccaggucuuugcaca

SEQ ID NO: 1326680 - RNA, 19 nt, Artificial Sequence
  Description of Artificial Sequence: Synthetic oligonucleotide
  Sense strand starting at position 3276 of SEQ ID NO: 1242160
aauggagugauggguguuu

SEQ ID NO: 1326681 - RNA, 19 nt, Artificial Sequence
  Description of Artificial Sequence: Synthetic oligonucleotide
  Antisense strand to SEQ ID NO: 1326680
aaacacccaucacuccauu

SEQ ID NO: 1326682 - RNA, 19 nt, Artificial Sequence
  Description of Artificial Sequence: Synthetic oligonucleotide
  Sense strand starting at position 3315 of SEQ ID NO: 1242160
aauccuugauuugaggagu

SEQ ID NO: 1326683 - RNA, 19 nt, Artificial Sequence
  Description of Artificial Sequence: Synthetic oligonucleotide
  Antisense strand to SEQ ID NO: 1326682
acuccucaaaucaaggauu

SEQ ID NO: 1326684 - RNA, 19 nt, Artificial Sequence
  Description of Artificial Sequence: Synthetic oligonucleotide
  Sense strand starting at position 3412 of SEQ ID NO: 1242160
gucacagagguauggcuaa

SEQ ID NO: 1326685 - RNA, 19 nt, Artificial Sequence
  Description of Artificial Sequence: Synthetic oligonucleotide
  Antisense strand to SEQ ID NO: 1326684
uuagccauaccucugugac

SEQ ID NO: 1326686 - RNA, 19 nt, Artificial Sequence
  Description of Artificial Sequence: Synthetic oligonucleotide
  Sense strand starting at position 3658 of SEQ ID NO: 1242160
acccuagacuuugguauca

SEQ ID NO: 1326687 - RNA, 19 nt, Artificial Sequence
  Description of Artificial Sequence: Synthetic oligonucleotide
  Antisense strand to SEQ ID NO: 1326686
ugauaccaaagucuagggu

SEQ ID NO: 1326688 - RNA, 19 nt, Artificial Sequence
  Description of Artificial Sequence: Synthetic oligonucleotide
  Sense strand starting at position 3703 of SEQ ID NO: 1242160
caguguccuccuugguaca

SEQ ID NO: 1326689 - RNA, 19 nt, Artificial Sequence
  Description of Artificial Sequence: Synthetic oligonucleotide
  Antisense strand to SEQ ID NO: 1326688
uguaccaaggaggacacug

SEQ ID NO: 1326690 - RNA, 19 nt, Artificial Sequence
  Description of Artificial Sequence: Synthetic oligonucleotide
  Sense strand starting at position 3704 of SEQ ID NO: 1242160
aguguccuccuugguacaa

SEQ ID NO: 1326691 - RNA, 19 nt, Artificial Sequence
  Description of Artificial Sequence: Synthetic oligonucleotide
  Antisense strand to SEQ ID NO: 1326690
uuguaccaaggaggacacu

SEQ ID NO: 1326692 - RNA, 19 nt, Artificial Sequence
  Description of Artificial Sequence: Synthetic oligonucleotide
  Sense strand starting at position 3705 of SEQ ID NO: 1242160
guguccuccuugguacaau

SEQ ID NO: 1326693 - RNA, 19 nt, Artificial Sequence
  Description of Artificial Sequence: Synthetic oligonucleotide
  Antisense strand to SEQ ID NO: 1326692
auuguaccaaggaggacac

SEQ ID NO: 1326694 - RNA, 19 nt, Artificial Sequence
  Description of Artificial Sequence: Synthetic oligonucleotide
  Sense strand starting at position 3714 of SEQ ID NO: 1242160
uugguacaaugggaauaaa

SEQ ID NO: 1326695 - RNA, 19 nt, Artificial Sequence
  Description of Artificial Sequence: Synthetic oligonucleotide
  Antisense strand to SEQ ID NO: 1326694
uuuauucccauuguaccaa

SEQ ID NO: 1326696 - RNA, 19 nt, Artificial Sequence
  Description of Artificial Sequence: Synthetic oligonucleotide
  Sense strand starting at position 3734 of SEQ ID NO: 1242160
auacauugccaguaacaug

SEQ ID NO: 1326697 - RNA, 19 nt, Artificial Sequence
  Description of Artificial Sequence: Synthetic oligonucleotide
  Antisense strand to SEQ ID NO: 1326696
cauguuacuggcaauguau

SEQ ID NO: 1326698 - RNA, 19 nt, Artificial Sequence
  Description of Artificial Sequence: Synthetic oligonucleotide
  Sense strand starting at position 3743 of SEQ ID NO: 1242160
caguaacaugacuggcaaa

SEQ ID NO: 1326699 - RNA, 19 nt, Artificial Sequence
  Description of Artificial Sequence: Synthetic oligonucleotide
  Antisense strand to SEQ ID NO: 1326698
uuugccagucauguuacug

SEQ ID NO: 1326700 - RNA, 19 nt, Artificial Sequence
  Description of Artificial Sequence: Synthetic oligonucleotide
  Sense strand starting at position 194 of SEQ ID NO: 1242161
ggguguccuccaugccuca

SEQ ID NO: 1326701 - RNA, 19 nt, Artificial Sequence
  Description of Artificial Sequence: Synthetic oligonucleotide
  Antisense strand to SEQ ID NO: 1326700
ugaggcauggaggacaccc

SEQ ID NO: 1326702 - RNA, 19 nt, Artificial Sequence
  Description of Artificial Sequence: Synthetic oligonucleotide
  Sense strand starting at position 334 of SEQ ID NO: 1242161
gguccugcauucucacaaa

SEQ ID NO: 1326703 - RNA, 19 nt, Artificial Sequence
  Description of Artificial Sequence: Synthetic oligonucleotide
  Antisense strand to SEQ ID NO: 1326702
uuugugagaaugcaggacc

SEQ ID NO: 1326704 - RNA, 19 nt, Artificial Sequence
  Description of Artificial Sequence: Synthetic oligonucleotide
  Sense strand starting at position 337 of SEQ ID NO: 1242161
ccugcauucucacaaagug

SEQ ID NO: 1326705 - RNA, 19 nt, Artificial Sequence
  Description of Artificial Sequence: Synthetic oligonucleotide
  Antisense strand to SEQ ID NO: 1326704
cacuuugugagaaugcagg

SEQ ID NO: 1326706 - RNA, 19 nt, Artificial Sequence
  Description of Artificial Sequence: Synthetic oligonucleotide
  Sense strand starting at position 386 of SEQ ID NO: 1242161
ggaaguaagguuuaagccu

SEQ ID NO: 1326707 - RNA, 19 nt, Artificial Sequence
  Description of Artificial Sequence: Synthetic oligonucleotide
  Antisense strand to SEQ ID NO: 1326706
aggcuuaaaccuuacuucc

SEQ ID NO: 1326708 - RNA, 19 nt, Artificial Sequence
  Description of Artificial Sequence: Synthetic oligonucleotide
  Sense strand starting at position 408 of SEQ ID NO: 1242161
agcugauauuaccauagac

SEQ ID NO: 1326709 - RNA, 19 nt, Artificial Sequence
  Description of Artificial Sequence: Synthetic oligonucleotide
  Antisense strand to SEQ ID NO: 1326708
gucuaugguaauaucagcu

SEQ ID NO: 1326710 - RNA, 19 nt, Artificial Sequence
  Description of Artificial Sequence: Synthetic oligonucleotide
  Sense strand starting at position 1383 of SEQ ID NO: 1242161
cgcguucucuucucuggaa

SEQ ID NO: 1326711 - RNA, 19 nt, Artificial Sequence
  Description of Artificial Sequence: Synthetic oligonucleotide
  Antisense strand to SEQ ID NO: 1326710
uuccagagaagagaacgcg

SEQ ID NO: 1326712 - RNA, 19 nt, Artificial Sequence
  Description of Artificial Sequence: Synthetic oligonucleotide
  Sense strand starting at position 1384 of SEQ ID NO: 1242161
gcguucucuucucuggaaa

SEQ ID NO: 1326713 - RNA, 19 nt, Artificial Sequence
  Description of Artificial Sequence: Synthetic oligonucleotide
  Antisense strand to SEQ ID NO: 1326712
uuuccagagaagagaacgc

SEQ ID NO: 1326714 - RNA, 19 nt, Artificial Sequence
  Description of Artificial Sequence: Synthetic oligonucleotide
  Sense strand starting at position 1385 of SEQ ID NO: 1242161
cguucucuucucuggaaag

SEQ ID NO: 1326715 - RNA, 19 nt, Artificial Sequence
  Description of Artificial Sequence: Synthetic oligonucleotide
  Antisense strand to SEQ ID NO: 1326714
cuuuccagagaagagaacg

SEQ ID NO: 1326716 - RNA, 19 nt, Artificial Sequence
  Description of Artificial Sequence: Synthetic oligonucleotide
  Sense strand starting at position 1895 of SEQ ID NO: 1242161
cguguguaugcgcgugaga

SEQ ID NO: 1326717 - RNA, 19 nt, Artificial Sequence
  Description of Artificial Sequence: Synthetic oligonucleotide
  Antisense strand to SEQ ID NO: 1326716
ucucacgcgcauacacacg

SEQ ID NO: 1326718 - RNA, 19 nt, Artificial Sequence
  Description of Artificial Sequence: Synthetic oligonucleotide
  Sense strand starting at position 2867 of SEQ ID NO: 1242161
ggaggugagucaaggagaa

SEQ ID NO: 1326719 - RNA, 19 nt, Artificial Sequence
  Description of Artificial Sequence: Synthetic oligonucleotide
  Antisense strand to SEQ ID NO: 1326718
uucuccuugacucaccucc

SEQ ID NO: 1326720 - RNA, 19 nt, Artificial Sequence
  Description of Artificial Sequence: Synthetic oligonucleotide
  Sense strand starting at position 3019 of SEQ ID NO: 1242161
gucugaacuccaggugaag

SEQ ID NO: 1326721 - RNA, 19 nt, Artificial Sequence
  Description of Artificial Sequence: Synthetic oligonucleotide
  Antisense strand to SEQ ID NO: 1326720
cuucaccuggaguucagac

SEQ ID NO: 1326722 - RNA, 19 nt, Artificial Sequence
  Description of Artificial Sequence: Synthetic oligonucleotide
  Sense strand starting at position 3031 of SEQ ID NO: 1242161
ggugaagacaccugucaug

SEQ ID NO: 1326723 - RNA, 19 nt, Artificial Sequence
  Description of Artificial Sequence: Synthetic oligonucleotide
  Antisense strand to SEQ ID NO: 1326722
caugacaggugucuucacc

SEQ ID NO: 1326724 - RNA, 19 nt, Artificial Sequence
  Description of Artificial Sequence: Synthetic oligonucleotide
  Sense strand starting at position 3042 of SEQ ID NO: 1242161
cugucaugcugggaggaca

SEQ ID NO: 1326725 - RNA, 19 nt, Artificial Sequence
  Description of Artificial Sequence: Synthetic oligonucleotide
  Antisense strand to SEQ ID NO: 1326724
uguccucccagcaugacag

SEQ ID NO: 1326726 - RNA, 19 nt, Artificial Sequence
  Description of Artificial Sequence: Synthetic oligonucleotide
  Sense strand starting at position 3149 of SEQ ID NO: 1242161
gggcauggcuuccaucauu

SEQ ID NO: 1326727 - RNA, 19 nt, Artificial Sequence
  Description of Artificial Sequence: Synthetic oligonucleotide
  Antisense strand to SEQ ID NO: 1326726
aaugauggaagccaugccc

SEQ ID NO: 1326728 - RNA, 19 nt, Artificial Sequence
  Description of Artificial Sequence: Synthetic oligonucleotide
  Sense strand starting at position 3182 of SEQ ID NO: 1242161
cagcucugauaugguguua

SEQ ID NO: 1326729 - RNA, 19 nt, Artificial Sequence
  Description of Artificial Sequence: Synthetic oligonucleotide
  Antisense strand to SEQ ID NO: 1326728
uaacaccauaucagagcug

SEQ ID NO: 1326730 - RNA, 19 nt, Artificial Sequence
  Description of Artificial Sequence: Synthetic oligonucleotide
  Sense strand starting at position 3373 of SEQ ID NO: 1242161
agguaaaguugagucagua

SEQ ID NO: 1326731 - RNA, 19 nt, Artificial Sequence
  Description of Artificial Sequence: Synthetic oligonucleotide
  Antisense strand to SEQ ID NO: 1326730
uacugacucaacuuuaccu

SEQ ID NO: 1326732 - RNA, 19 nt, Artificial Sequence
  Description of Artificial Sequence: Synthetic oligonucleotide
  Sense strand starting at position 3487 of SEQ ID NO: 1242161
ucagccugauccuggacaa

SEQ ID NO: 1326733 - RNA, 19 nt, Artificial Sequence
  Description of Artificial Sequence: Synthetic oligonucleotide
  Antisense strand to SEQ ID NO: 1326732
uuguccaggaucaggcuga

SEQ ID NO: 1326734 - RNA, 19 nt, Artificial Sequence
  Description of Artificial Sequence: Synthetic oligonucleotide
  Sense strand starting at position 3504 of SEQ ID NO: 1242161
aagucuagcacgugagcau

SEQ ID NO: 1326735 - RNA, 19 nt, Artificial Sequence
  Description of Artificial Sequence: Synthetic oligonucleotide
  Antisense strand to SEQ ID NO: 1326734
augcucacgugcuagacuu

SEQ ID NO: 1326736 - RNA, 19 nt, Artificial Sequence
  Description of Artificial Sequence: Synthetic oligonucleotide
  Sense strand starting at position 3505 of SEQ ID NO: 1242161
agucuagcacgugagcauu

SEQ ID NO: 1326737 - RNA, 19 nt, Artificial Sequence
  Description of Artificial Sequence: Synthetic oligonucleotide
  Antisense strand to SEQ ID NO: 1326736
aaugcucacgugcuagacu

SEQ ID NO: 1326738 - RNA, 19 nt, Artificial Sequence
  Description of Artificial Sequence: Synthetic oligonucleotide
  Sense strand starting at position 3570 of SEQ ID NO: 1242161
ccuugcucuccagagggau

SEQ ID NO: 1326739 - RNA, 19 nt, Artificial Sequence
  Description of Artificial Sequence: Synthetic oligonucleotide
  Antisense strand to SEQ ID NO: 1326738
aucccucuggagagcaagg

SEQ ID NO: 1326740 - RNA, 19 nt, Artificial Sequence
  Description of Artificial Sequence: Synthetic oligonucleotide
  Sense strand starting at position 3606 of SEQ ID NO: 1242161
caggaaguuucugucauau

SEQ ID NO: 1326741 - RNA, 19 nt, Artificial Sequence
  Description of Artificial Sequence: Synthetic oligonucleotide
  Antisense strand to SEQ ID NO: 1326740
auaugacagaaacuuccug

SEQ ID NO: 1326742 - RNA, 19 nt, Artificial Sequence
  Description of Artificial Sequence: Synthetic oligonucleotide
  Sense strand starting at position 3608 of SEQ ID NO: 1242161
ggaaguuucugucauaugc

SEQ ID NO: 1326743 - RNA, 19 nt, Artificial Sequence
  Description of Artificial Sequence: Synthetic oligonucleotide
  Antisense strand to SEQ ID NO: 1326742
gcauaugacagaaacuucc

SEQ ID NO: 1326744 - RNA, 19 nt, Artificial Sequence
  Description of Artificial Sequence: Synthetic oligonucleotide
  Sense strand starting at position 3635 of SEQ ID NO: 1242161
gugcuagguccuggagaca

SEQ ID NO: 1326745 - RNA, 19 nt, Artificial Sequence
  Description of Artificial Sequence: Synthetic oligonucleotide
  Antisense strand to SEQ ID NO: 1326744
ugucuccaggaccuagcac

SEQ ID NO: 1326746 - RNA, 19 nt, Artificial Sequence
  Description of Artificial Sequence: Synthetic oligonucleotide
  Sense strand starting at position 3653 of SEQ ID NO: 1242161
acagaugauuuagacacau

SEQ ID NO: 1326747 - RNA, 19 nt, Artificial Sequence
  Description of Artificial Sequence: Synthetic oligonucleotide
  Antisense strand to SEQ ID NO: 1326746
augugucuaaaucaucugu

SEQ ID NO: 1326748 - RNA, 19 nt, Artificial Sequence
  Description of Artificial Sequence: Synthetic oligonucleotide
  Sense strand starting at position 3698 of SEQ ID NO: 1242161
ggagguaugauagagcugu

SEQ ID NO: 1326749 - RNA, 19 nt, Artificial Sequence
  Description of Artificial Sequence: Synthetic oligonucleotide
  Antisense strand to SEQ ID NO: 1326748
acagcucuaucauaccucc

SEQ ID NO: 1326750 - RNA, 19 nt, Artificial Sequence
  Description of Artificial Sequence: Synthetic oligonucleotide
  Sense strand starting at position 3702 of SEQ ID NO: 1242161
guaugauagagcuguggug

SEQ ID NO: 1326751 - RNA, 19 nt, Artificial Sequence
  Description of Artificial Sequence: Synthetic oligonucleotide
  Antisense strand to SEQ ID NO: 1326750
caccacagcucuaucauac

SEQ ID NO: 1326752 - RNA, 19 nt, Artificial Sequence
  Description of Artificial Sequence: Synthetic oligonucleotide
  Sense strand starting at position 3775 of SEQ ID NO: 1242161
aagaauuggccaggcagaa

SEQ ID NO: 1326753 - RNA, 19 nt, Artificial Sequence
  Description of Artificial Sequence: Synthetic oligonucleotide
  Antisense strand to SEQ ID NO: 1326752
uucugccuggccaauucuu

SEQ ID NO: 1326754 - RNA, 19 nt, Artificial Sequence
  Description of Artificial Sequence: Synthetic oligonucleotide
  Sense strand starting at position 3803 of SEQ ID NO: 1242161
aaggguaucccaugccaaa

SEQ ID NO: 1326755 - RNA, 19 nt, Artificial Sequence
  Description of Artificial Sequence: Synthetic oligonucleotide
  Antisense strand to SEQ ID NO: 1326754
uuuggcaugggauacccuu

SEQ ID NO: 1326756 - RNA, 19 nt, Artificial Sequence
  Description of Artificial Sequence: Synthetic oligonucleotide
  Sense strand starting at position 3831 of SEQ ID NO: 1242161
ugugcaaagaccuggaagu

SEQ ID NO: 1326757 - RNA, 19 nt, Artificial Sequence
  Description of Artificial Sequence: Synthetic oligonucleotide
  Antisense strand to SEQ ID NO: 1326756
acuuccaggucuuugcaca

SEQ ID NO: 1326758 - RNA, 19 nt, Artificial Sequence
  Description of Artificial Sequence: Synthetic oligonucleotide
  Sense strand starting at position 3854 of SEQ ID NO: 1242161
aauggagugauggguguuu

SEQ ID NO: 1326759 - RNA, 19 nt, Artificial Sequence
  Description of Artificial Sequence: Synthetic oligonucleotide
  Antisense strand to SEQ ID NO: 1326758
aaacacccaucacuccauu

SEQ ID NO: 1326760 - RNA, 19 nt, Artificial Sequence
  Description of Artificial Sequence: Synthetic oligonucleotide
  Sense strand starting at position 3893 of SEQ ID NO: 1242161
aauccuugauuugaggagu

SEQ ID NO: 1326761 - RNA, 19 nt, Artificial Sequence
  Description of Artificial Sequence: Synthetic oligonucleotide
  Antisense strand to SEQ ID NO: 1326760
acuccucaaaucaaggauu

SEQ ID NO: 1326762 - RNA, 19 nt, Artificial Sequence
  Description of Artificial Sequence: Synthetic oligonucleotide
  Sense strand starting at position 2 of SEQ ID NO: 1242162
aagcaugauguguggaguu

SEQ ID NO: 1326763 - RNA, 19 nt, Artificial Sequence
  Description of Artificial Sequence: Synthetic oligonucleotide
  Antisense strand to SEQ ID NO: 1326762
aacuccacacaucaugcuu

SEQ ID NO: 1326764 - RNA, 19 nt, Artificial Sequence
  Description of Artificial Sequence: Synthetic oligonucleotide
  Sense strand starting at position 15 of SEQ ID NO: 1242162
ggaguucgauuugaaacac

SEQ ID NO: 1326765 - RNA, 19 nt, Artificial Sequence
  Description of Artificial Sequence: Synthetic oligonucleotide
  Antisense strand to SEQ ID NO: 1326764
guguuucaaaucgaacucc

SEQ ID NO: 1326766 - RNA, 19 nt, Artificial Sequence
  Description of Artificial Sequence: Synthetic oligonucleotide
  Sense strand starting at position 66 of SEQ ID NO: 1242162
guuuccagcuccuuagaau

SEQ ID NO: 1326767 - RNA, 19 nt, Artificial Sequence
  Description of Artificial Sequence: Synthetic oligonucleotide
  Antisense strand to SEQ ID NO: 1326766
auucuaaggagcuggaaac

SEQ ID NO: 1326768 - RNA, 19 nt, Artificial Sequence
  Description of Artificial Sequence: Synthetic oligonucleotide
  Sense strand starting at position 67 of SEQ ID NO: 1242162
uuuccagcuccuuagaaug

SEQ ID NO: 1326769 - RNA, 19 nt, Artificial Sequence
  Description of Artificial Sequence: Synthetic oligonucleotide
  Antisense strand to SEQ ID NO: 1326768
cauucuaaggagcuggaaa

SEQ ID NO: 1326770 - RNA, 19 nt, Artificial Sequence
  Description of Artificial Sequence: Synthetic oligonucleotide
  Sense strand starting at position 510 of SEQ ID NO: 1242162
ugcccuuagucaggagaca

SEQ ID NO: 1326771 - RNA, 19 nt, Artificial Sequence
  Description of Artificial Sequence: Synthetic oligonucleotide
  Antisense strand to SEQ ID NO: 1326770
ugucuccugacuaagggca

SEQ ID NO: 1326772 - RNA, 19 nt, Artificial Sequence
  Description of Artificial Sequence: Synthetic oligonucleotide
  Sense strand starting at position 849 of SEQ ID NO: 1242162
uguugcuauccagaggcaa

SEQ ID NO: 1326773 - RNA, 19 nt, Artificial Sequence
  Description of Artificial Sequence: Synthetic oligonucleotide
  Antisense strand to SEQ ID NO: 1326772
uugccucuggauagcaaca

SEQ ID NO: 1326774 - RNA, 19 nt, Artificial Sequence
  Description of Artificial Sequence: Synthetic oligonucleotide
  Sense strand starting at position 999 of SEQ ID NO: 1242162
ccgugagguagguaucauu

SEQ ID NO: 1326775 - RNA, 19 nt, Artificial Sequence
  Description of Artificial Sequence: Synthetic oligonucleotide
  Antisense strand to SEQ ID NO: 1326774
aaugauaccuaccucacgg

SEQ ID NO: 1326776 - RNA, 19 nt, Artificial Sequence
  Description of Artificial Sequence: Synthetic oligonucleotide
  Sense strand starting at position 1008 of SEQ ID NO: 1242162
agguaucauuauguccauu

SEQ ID NO: 1326777 - RNA, 19 nt, Artificial Sequence
  Description of Artificial Sequence: Synthetic oligonucleotide
  Antisense strand to SEQ ID NO: 1326776
aauggacauaaugauaccu

SEQ ID NO: 1326778 - RNA, 19 nt, Artificial Sequence
  Description of Artificial Sequence: Synthetic oligonucleotide
  Sense strand starting at position 1020 of SEQ ID NO: 1242162
guccauugugcauauggga

SEQ ID NO: 1326779 - RNA, 19 nt, Artificial Sequence
  Description of Artificial Sequence: Synthetic oligonucleotide
  Antisense strand to SEQ ID NO: 1326778
ucccauaugcacaauggac

SEQ ID NO: 1326780 - RNA, 19 nt, Artificial Sequence
  Description of Artificial Sequence: Synthetic oligonucleotide
  Sense strand starting at position 1041 of SEQ ID NO: 1242162
aacugagacuaggagaaau

SEQ ID NO: 1326781 - RNA, 19 nt, Artificial Sequence
  Description of Artificial Sequence: Synthetic oligonucleotide
  Antisense strand to SEQ ID NO: 1326780
auuucuccuagucucaguu

SEQ ID NO: 1326782 - RNA, 19 nt, Artificial Sequence
  Description of Artificial Sequence: Synthetic oligonucleotide
  Sense strand starting at position 1058 of SEQ ID NO: 1242162
augaaucacuugcaagaag

SEQ ID NO: 1326783 - RNA, 19 nt, Artificial Sequence
  Description of Artificial Sequence: Synthetic oligonucleotide
  Antisense strand to SEQ ID NO: 1326782
cuucuugcaagugauucau

SEQ ID NO: 1326784 - RNA, 19 nt, Artificial Sequence
  Description of Artificial Sequence: Synthetic oligonucleotide
  Sense strand starting at position 1223 of SEQ ID NO: 1242162
ggagguuaguaugccacuu

SEQ ID NO: 1326785 - RNA, 19 nt, Artificial Sequence
  Description of Artificial Sequence: Synthetic oligonucleotide
  Antisense strand to SEQ ID NO: 1326784
aaguggcauacuaaccucc

SEQ ID NO: 1326786 - RNA, 19 nt, Artificial Sequence
  Description of Artificial Sequence: Synthetic oligonucleotide
  Sense strand starting at position 1506 of SEQ ID NO: 1242162
cuccuacaguucuggauau

SEQ ID NO: 1326787 - RNA, 19 nt, Artificial Sequence
  Description of Artificial Sequence: Synthetic oligonucleotide
  Antisense strand to SEQ ID NO: 1326786
auauccagaacuguaggag

SEQ ID NO: 1326788 - RNA, 19 nt, Artificial Sequence
  Description of Artificial Sequence: Synthetic oligonucleotide
  Sense strand starting at position 1654 of SEQ ID NO: 1242162
gcaccaucuccucgaauga

SEQ ID NO: 1326789 - RNA, 19 nt, Artificial Sequence
  Description of Artificial Sequence: Synthetic oligonucleotide
  Antisense strand to SEQ ID NO: 1326788
ucauucgaggagauggugc

SEQ ID NO: 1326790 - RNA, 19 nt, Artificial Sequence
  Description of Artificial Sequence: Synthetic oligonucleotide
  Sense strand starting at position 1746 of SEQ ID NO: 1242162
ggccaaugucuccaguucu

SEQ ID NO: 1326791 - RNA, 19 nt, Artificial Sequence
  Description of Artificial Sequence: Synthetic oligonucleotide
  Antisense strand to SEQ ID NO: 1326790
agaacuggagacauuggcc

SEQ ID NO: 1326792 - RNA, 19 nt, Artificial Sequence
  Description of Artificial Sequence: Synthetic oligonucleotide
  Sense strand starting at position 1756 of SEQ ID NO: 1242162
uccaguucuucuuugcuua

SEQ ID NO: 1326793 - RNA, 19 nt, Artificial Sequence
  Description of Artificial Sequence: Synthetic oligonucleotide
  Antisense strand to SEQ ID NO: 1326792
uaagcaaagaagaacugga

SEQ ID NO: 1326794 - RNA, 19 nt, Artificial Sequence
  Description of Artificial Sequence: Synthetic oligonucleotide
  Sense strand starting at position 1760 of SEQ ID NO: 1242162
guucuucuuugcuuaguga

SEQ ID NO: 1326795 - RNA, 19 nt, Artificial Sequence
  Description of Artificial Sequence: Synthetic oligonucleotide
  Antisense strand to SEQ ID NO: 1326794
ucacuaagcaaagaagaac

SEQ ID NO: 1326796 - RNA, 19 nt, Artificial Sequence
  Description of Artificial Sequence: Synthetic oligonucleotide
  Sense strand starting at position 2045 of SEQ ID NO: 1242162
ccaagagucucccaggaaa

SEQ ID NO: 1326797 - RNA, 19 nt, Artificial Sequence
  Description of Artificial Sequence: Synthetic oligonucleotide
  Antisense strand to SEQ ID NO: 1326796
uuuccugggagacucuugg

SEQ ID NO: 1326798 - RNA, 19 nt, Artificial Sequence
  Description of Artificial Sequence: Synthetic oligonucleotide
  Sense strand starting at position 2254 of SEQ ID NO: 1242162
cgcauaccauccuuagcaa

SEQ ID NO: 1326799 - RNA, 19 nt, Artificial Sequence
  Description of Artificial Sequence: Synthetic oligonucleotide
  Antisense strand to SEQ ID NO: 1326798
uugcuaaggaugguaugcg

SEQ ID NO: 1326800 - RNA, 19 nt, Artificial Sequence
  Description of Artificial Sequence: Synthetic oligonucleotide
  Sense strand starting at position 2376 of SEQ ID NO: 1242162
guggucaggcacugauaaa

SEQ ID NO: 1326801 - RNA, 19 nt, Artificial Sequence
  Description of Artificial Sequence: Synthetic oligonucleotide
  Antisense strand to SEQ ID NO: 1326800
uuuaucagugccugaccac

SEQ ID NO: 1326802 - RNA, 19 nt, Artificial Sequence
  Description of Artificial Sequence: Synthetic oligonucleotide
  Sense strand starting at position 2800 of SEQ ID NO: 1242162
auccuuuaauugggaaguu

SEQ ID NO: 1326803 - RNA, 19 nt, Artificial Sequence
  Description of Artificial Sequence: Synthetic oligonucleotide
  Antisense strand to SEQ ID NO: 1326802
aacuucccaauuaaaggau

SEQ ID NO: 1326804 - RNA, 19 nt, Artificial Sequence
  Description of Artificial Sequence: Synthetic oligonucleotide
  Sense strand starting at position 2812 of SEQ ID NO: 1242162
ggaaguuguuaacuucuca

SEQ ID NO: 1326805 - RNA, 19 nt, Artificial Sequence
  Description of Artificial Sequence: Synthetic oligonucleotide
  Antisense strand to SEQ ID NO: 1326804
ugagaaguuaacaacuucc

SEQ ID NO: 1326806 - RNA, 19 nt, Artificial Sequence
  Description of Artificial Sequence: Synthetic oligonucleotide
  Sense strand starting at position 2816 of SEQ ID NO: 1242162
guuguuaacuucucaaaga

SEQ ID NO: 1326807 - RNA, 19 nt, Artificial Sequence
  Description of Artificial Sequence: Synthetic oligonucleotide
  Antisense strand to SEQ ID NO: 1326806
ucuuugagaaguuaacaac

SEQ ID NO: 1326808 - RNA, 19 nt, Artificial Sequence
  Description of Artificial Sequence: Synthetic oligonucleotide
  Sense strand starting at position 2817 of SEQ ID NO: 1242162
uuguuaacuucucaaagag

SEQ ID NO: 1326809 - RNA, 19 nt, Artificial Sequence
  Description of Artificial Sequence: Synthetic oligonucleotide
  Antisense strand to SEQ ID NO: 1326808
cucuuugagaaguuaacaa

SEQ ID NO: 1326810 - RNA, 19 nt, Artificial Sequence
  Description of Artificial Sequence: Synthetic oligonucleotide
  Sense strand starting at position 3138 of SEQ ID NO: 1242162
caaagaugaaggcgaugau

SEQ ID NO: 1326811 - RNA, 19 nt, Artificial Sequence
  Description of Artificial Sequence: Synthetic oligonucleotide
  Antisense strand to SEQ ID NO: 1326810
aucaucgccuucaucuuug

SEQ ID NO: 1326812 - RNA, 19 nt, Artificial Sequence
  Description of Artificial Sequence: Synthetic oligonucleotide
  Sense strand starting at position 3274 of SEQ ID NO: 1242162
augggccacucauauuuau

SEQ ID NO: 1326813 - RNA, 19 nt, Artificial Sequence
  Description of Artificial Sequence: Synthetic oligonucleotide
  Antisense strand to SEQ ID NO: 1326812
auaaauaugaguggcccau

SEQ ID NO: 1326814 - RNA, 19 nt, Artificial Sequence
  Description of Artificial Sequence: Synthetic oligonucleotide
  Sense strand starting at position 3362 of SEQ ID NO: 1242162
gguagacguucucauuauu

SEQ ID NO: 1326815 - RNA, 19 nt, Artificial Sequence
  Description of Artificial Sequence: Synthetic oligonucleotide
  Antisense strand to SEQ ID NO: 1326814
aauaaugagaacgucuacc

SEQ ID NO: 1326816 - RNA, 19 nt, Artificial Sequence
  Description of Artificial Sequence: Synthetic oligonucleotide
  Sense strand starting at position 3419 of SEQ ID NO: 1242162
uagggaaauugucuaaauu

SEQ ID NO: 1326817 - RNA, 19 nt, Artificial Sequence
  Description of Artificial Sequence: Synthetic oligonucleotide
  Antisense strand to SEQ ID NO: 1326816
aauuuagacaauuucccua

SEQ ID NO: 1326818 - RNA, 19 nt, Artificial Sequence
  Description of Artificial Sequence: Synthetic oligonucleotide
  Sense strand starting at position 3441 of SEQ ID NO: 1242162
accacugaugcguggcaga

SEQ ID NO: 1326819 - RNA, 19 nt, Artificial Sequence
  Description of Artificial Sequence: Synthetic oligonucleotide
  Antisense strand to SEQ ID NO: 1326818
ucugccacgcaucaguggu

SEQ ID NO: 1326820 - RNA, 19 nt, Artificial Sequence
  Description of Artificial Sequence: Synthetic oligonucleotide
  Sense strand starting at position 3483 of SEQ ID NO: 1242162
uggcuccagaguggucaua

SEQ ID NO: 1326821 - RNA, 19 nt, Artificial Sequence
  Description of Artificial Sequence: Synthetic oligonucleotide
  Antisense strand to SEQ ID NO: 1326820
uaugaccacucuggagcca

SEQ ID NO: 1326822 - RNA, 19 nt, Artificial Sequence
  Description of Artificial Sequence: Synthetic oligonucleotide
  Sense strand starting at position 3485 of SEQ ID NO: 1242162
gcuccagaguggucauaac

SEQ ID NO: 1326823 - RNA, 19 nt, Artificial Sequence
  Description of Artificial Sequence: Synthetic oligonucleotide
  Antisense strand to SEQ ID NO: 1326822
guuaugaccacucuggagc

SEQ ID NO: 1326824 - RNA, 19 nt, Artificial Sequence
  Description of Artificial Sequence: Synthetic oligonucleotide
  Sense strand starting at position 3575 of SEQ ID NO: 1242162
cucugugucccuggagaca

SEQ ID NO: 1326825 - RNA, 19 nt, Artificial Sequence
  Description of Artificial Sequence: Synthetic oligonucleotide
  Antisense strand to SEQ ID NO: 1326824
ugucuccagggacacagag

SEQ ID NO: 1326826 - RNA, 19 nt, Artificial Sequence
  Description of Artificial Sequence: Synthetic oligonucleotide
  Sense strand starting at position 3606 of SEQ ID NO: 1242162
gcaugcagcugagcuuaau

SEQ ID NO: 1326827 - RNA, 19 nt, Artificial Sequence
  Description of Artificial Sequence: Synthetic oligonucleotide
  Antisense strand to SEQ ID NO: 1326826
auuaagcucagcugcaugc

SEQ ID NO: 1326828 - RNA, 19 nt, Artificial Sequence
  Description of Artificial Sequence: Synthetic oligonucleotide
  Sense strand starting at position 3612 of SEQ ID NO: 1242162
agcugagcuuaauaacuau

SEQ ID NO: 1326829 - RNA, 19 nt, Artificial Sequence
  Description of Artificial Sequence: Synthetic oligonucleotide
  Antisense strand to SEQ ID NO: 1326828
auaguuauuaagcucagcu

SEQ ID NO: 1326830 - RNA, 19 nt, Artificial Sequence
  Description of Artificial Sequence: Synthetic oligonucleotide
  Sense strand starting at position 3699 of SEQ ID NO: 1242162
uaaccauaggccugugaca

SEQ ID NO: 1326831 - RNA, 19 nt, Artificial Sequence
  Description of Artificial Sequence: Synthetic oligonucleotide
  Antisense strand to SEQ ID NO: 1326830
ugucacaggccuaugguua

SEQ ID NO: 1326832 - RNA, 19 nt, Artificial Sequence
  Description of Artificial Sequence: Synthetic oligonucleotide
  Sense strand starting at position 3701 of SEQ ID NO: 1242162
accauaggccugugacaaa

SEQ ID NO: 1326833 - RNA, 19 nt, Artificial Sequence
  Description of Artificial Sequence: Synthetic oligonucleotide
  Antisense strand to SEQ ID NO: 1326832
uuugucacaggccuauggu

SEQ ID NO: 1326834 - RNA, 19 nt, Artificial Sequence
  Description of Artificial Sequence: Synthetic oligonucleotide
  Sense strand starting at position 3740 of SEQ ID NO: 1242162
cccaguucaguccgguaga

SEQ ID NO: 1326835 - RNA, 19 nt, Artificial Sequence
  Description of Artificial Sequence: Synthetic oligonucleotide
  Antisense strand to SEQ ID NO: 1326834
ucuaccggacugaacuggg

SEQ ID NO: 1326836 - RNA, 19 nt, Artificial Sequence
  Description of Artificial Sequence: Synthetic oligonucleotide
  Sense strand starting at position 3875 of SEQ ID NO: 1242162
gggauuggaucacgacaag

SEQ ID NO: 1326837 - RNA, 19 nt, Artificial Sequence
  Description of Artificial Sequence: Synthetic oligonucleotide
  Antisense strand to SEQ ID NO: 1326836
cuugucgugauccaauccc

SEQ ID NO: 1326838 - RNA, 19 nt, Artificial Sequence
  Description of Artificial Sequence: Synthetic oligonucleotide
  Sense strand starting at position 3940 of SEQ ID NO: 1242162
ugaaacuggucucagggaa

SEQ ID NO: 1326839 - RNA, 19 nt, Artificial Sequence
  Description of Artificial Sequence: Synthetic oligonucleotide
  Antisense strand to SEQ ID NO: 1326838
uucccugagaccaguuuca

SEQ ID NO: 1326840 - RNA, 19 nt, Artificial Sequence
  Description of Artificial Sequence: Synthetic oligonucleotide
  Sense strand starting at position 3979 of SEQ ID NO: 1242162
guaggaaccuccucuccau

SEQ ID NO: 1326841 - RNA, 19 nt, Artificial Sequence
  Description of Artificial Sequence: Synthetic oligonucleotide
  Antisense strand to SEQ ID NO: 1326840
auggagaggagguuccuac

SEQ ID NO: 1326842 - RNA, 19 nt, Artificial Sequence
  Description of Artificial Sequence: Synthetic oligonucleotide
  Sense strand starting at position 73 of SEQ ID NO: 1242163
ccauguacucugugggcua

SEQ ID NO: 1326843 - RNA, 19 nt, Artificial Sequence
  Description of Artificial Sequence: Synthetic oligonucleotide
  Antisense strand to SEQ ID NO: 1326842
uagcccacagaguacaugg

SEQ ID NO: 1326844 - RNA, 19 nt, Artificial Sequence
  Description of Artificial Sequence: Synthetic oligonucleotide
  Sense strand starting at position 953 of SEQ ID NO: 1242163
acauauguguacucacauu

SEQ ID NO: 1326845 - RNA, 19 nt, Artificial Sequence
  Description of Artificial Sequence: Synthetic oligonucleotide
  Antisense strand to SEQ ID NO: 1326844
aaugugaguacacauaugu

SEQ ID NO: 1326846 - RNA, 19 nt, Artificial Sequence
  Description of Artificial Sequence: Synthetic oligonucleotide
  Sense strand starting at position 1147 of SEQ ID NO: 1242163
acacaacuaugagacagau

SEQ ID NO: 1326847 - RNA, 19 nt, Artificial Sequence
  Description of Artificial Sequence: Synthetic oligonucleotide
  Antisense strand to SEQ ID NO: 1326846
aucugucucauaguugugu

SEQ ID NO: 1326848 - RNA, 19 nt, Artificial Sequence
  Description of Artificial Sequence: Synthetic oligonucleotide
  Sense strand starting at position 1159 of SEQ ID NO: 1242163
gacagauucugccucugag

SEQ ID NO: 1326849 - RNA, 19 nt, Artificial Sequence
  Description of Artificial Sequence: Synthetic oligonucleotide
  Antisense strand to SEQ ID NO: 1326848
cucagaggcagaaucuguc

SEQ ID NO: 1326850 - RNA, 19 nt, Artificial Sequence
  Description of Artificial Sequence: Synthetic oligonucleotide
  Sense strand starting at position 1191 of SEQ ID NO: 1242163
ccucuaacuuaggcaaaga

SEQ ID NO: 1326851 - RNA, 19 nt, Artificial Sequence
  Description of Artificial Sequence: Synthetic oligonucleotide
  Antisense strand to SEQ ID NO: 1326850
ucuuugccuaaguuagagg

SEQ ID NO: 1326852 - RNA, 19 nt, Artificial Sequence
  Description of Artificial Sequence: Synthetic oligonucleotide
  Sense strand starting at position 1229 of SEQ ID NO: 1242163
cagugaagcuaugcucaaa

SEQ ID NO: 1326853 - RNA, 19 nt, Artificial Sequence
  Description of Artificial Sequence: Synthetic oligonucleotide
  Antisense strand to SEQ ID NO: 1326852
uuugagcauagcuucacug

SEQ ID NO: 1326854 - RNA, 19 nt, Artificial Sequence
  Description of Artificial Sequence: Synthetic oligonucleotide
  Sense strand starting at position 1232 of SEQ ID NO: 1242163
ugaagcuaugcucaaagcu

SEQ ID NO: 1326855 - RNA, 19 nt, Artificial Sequence
  Description of Artificial Sequence: Synthetic oligonucleotide
  Antisense strand to SEQ ID NO: 1326854
agcuuugagcauagcuuca

SEQ ID NO: 1326856 - RNA, 19 nt, Artificial Sequence
  Description of Artificial Sequence: Synthetic oligonucleotide
  Sense strand starting at position 1462 of SEQ ID NO: 1242163
uugggagcucguuaauuau

SEQ ID NO: 1326857 - RNA, 19 nt, Artificial Sequence
  Description of Artificial Sequence: Synthetic oligonucleotide
  Antisense strand to SEQ ID NO: 1326856
auaauuaacgagcucccaa

SEQ ID NO: 1326858 - RNA, 19 nt, Artificial Sequence
  Description of Artificial Sequence: Synthetic oligonucleotide
  Sense strand starting at position 1468 of SEQ ID NO: 1242163
gcucguuaauuaucuccau

SEQ ID NO: 1326859 - RNA, 19 nt, Artificial Sequence
  Description of Artificial Sequence: Synthetic oligonucleotide
  Antisense strand to SEQ ID NO: 1326858
auggagauaauuaacgagc

SEQ ID NO: 1326860 - RNA, 19 nt, Artificial Sequence
  Description of Artificial Sequence: Synthetic oligonucleotide
  Sense strand starting at position 1471 of SEQ ID NO: 1242163
cguuaauuaucuccaugcu

SEQ ID NO: 1326861 - RNA, 19 nt, Artificial Sequence
  Description of Artificial Sequence: Synthetic oligonucleotide
  Antisense strand to SEQ ID NO: 1326860
agcauggagauaauuaacg

SEQ ID NO: 1326862 - RNA, 19 nt, Artificial Sequence
  Description of Artificial Sequence: Synthetic oligonucleotide
  Sense strand starting at position 1483 of SEQ ID NO: 1242163
ccaugcuguccagaggaaa

SEQ ID NO: 1326863 - RNA, 19 nt, Artificial Sequence
  Description of Artificial Sequence: Synthetic oligonucleotide
  Antisense strand to SEQ ID NO: 1326862
uuuccucuggacagcaugg

SEQ ID NO: 1326864 - RNA, 19 nt, Artificial Sequence
  Description of Artificial Sequence: Synthetic oligonucleotide
  Sense strand starting at position 1505 of SEQ ID NO: 1242163
acagcaauuagaggaguaa

SEQ ID NO: 1326865 - RNA, 19 nt, Artificial Sequence
  Description of Artificial Sequence: Synthetic oligonucleotide
  Antisense strand to SEQ ID NO: 1326864
uuacuccucuaauugcugu

SEQ ID NO: 1326866 - RNA, 19 nt, Artificial Sequence
  Description of Artificial Sequence: Synthetic oligonucleotide
  Sense strand starting at position 1695 of SEQ ID NO: 1242163
uuggaaucugcaugaagaa

SEQ ID NO: 1326867 - RNA, 19 nt, Artificial Sequence
  Description of Artificial Sequence: Synthetic oligonucleotide
  Antisense strand to SEQ ID NO: 1326866
uucuucaugcagauuccaa

SEQ ID NO: 1326868 - RNA, 19 nt, Artificial Sequence
  Description of Artificial Sequence: Synthetic oligonucleotide
  Sense strand starting at position 1713 of SEQ ID NO: 1242163
accauaaauuguugagaaa

SEQ ID NO: 1326869 - RNA, 19 nt, Artificial Sequence
  Description of Artificial Sequence: Synthetic oligonucleotide
  Antisense strand to SEQ ID NO: 1326868
uuucucaacaauuuauggu

SEQ ID NO: 1326870 - RNA, 19 nt, Artificial Sequence
  Description of Artificial Sequence: Synthetic oligonucleotide
  Sense strand starting at position 1756 of SEQ ID NO: 1242163
agguuagaguguuuaaaga

SEQ ID NO: 1326871 - RNA, 19 nt, Artificial Sequence
  Description of Artificial Sequence: Synthetic oligonucleotide
  Antisense strand to SEQ ID NO: 1326870
ucuuuaaacacucuaaccu

SEQ ID NO: 1326872 - RNA, 19 nt, Artificial Sequence
  Description of Artificial Sequence: Synthetic oligonucleotide
  Sense strand starting at position 1763 of SEQ ID NO: 1242163
aguguuuaaagagagcagu

SEQ ID NO: 1326873 - RNA, 19 nt, Artificial Sequence
  Description of Artificial Sequence: Synthetic oligonucleotide
  Antisense strand to SEQ ID NO: 1326872
acugcucucuuuaaacacu

SEQ ID NO: 1326874 - RNA, 19 nt, Artificial Sequence
  Description of Artificial Sequence: Synthetic oligonucleotide
  Sense strand starting at position 1898 of SEQ ID NO: 1242163
cugucacaaucagucauaa

SEQ ID NO: 1326875 - RNA, 19 nt, Artificial Sequence
  Description of Artificial Sequence: Synthetic oligonucleotide
  Antisense strand to SEQ ID NO: 1326874
uuaugacugauugugacag

SEQ ID NO: 1326876 - RNA, 19 nt, Artificial Sequence
  Description of Artificial Sequence: Synthetic oligonucleotide
  Sense strand starting at position 1974 of SEQ ID NO: 1242163
gcuccuccuuggguuagau

SEQ ID NO: 1326877 - RNA, 19 nt, Artificial Sequence
  Description of Artificial Sequence: Synthetic oligonucleotide
  Antisense strand to SEQ ID NO: 1326876
aucuaacccaaggaggagc

SEQ ID NO: 1326878 - RNA, 19 nt, Artificial Sequence
  Description of Artificial Sequence: Synthetic oligonucleotide
  Sense strand starting at position 2268 of SEQ ID NO: 1242163
gaccaauaccauggucuga

SEQ ID NO: 1326879 - RNA, 19 nt, Artificial Sequence
  Description of Artificial Sequence: Synthetic oligonucleotide
  Antisense strand to SEQ ID NO: 1326878
ucagaccaugguauugguc

SEQ ID NO: 1326880 - RNA, 19 nt, Artificial Sequence
  Description of Artificial Sequence: Synthetic oligonucleotide
  Sense strand starting at position 2373 of SEQ ID NO: 1242163
cugugacagccagaaaucu

SEQ ID NO: 1326881 - RNA, 19 nt, Artificial Sequence
  Description of Artificial Sequence: Synthetic oligonucleotide
  Antisense strand to SEQ ID NO: 1326880
agauuucuggcugucacag

SEQ ID NO: 1326882 - RNA, 19 nt, Artificial Sequence
  Description of Artificial Sequence: Synthetic oligonucleotide
  Sense strand starting at position 2441 of SEQ ID NO: 1242163
cuucauggcccucgugaga

SEQ ID NO: 1326883 - RNA, 19 nt, Artificial Sequence
  Description of Artificial Sequence: Synthetic oligonucleotide
  Antisense strand to SEQ ID NO: 1326882
ucucacgagggccaugaag

SEQ ID NO: 1326884 - RNA, 19 nt, Artificial Sequence
  Description of Artificial Sequence: Synthetic oligonucleotide
  Sense strand starting at position 2653 of SEQ ID NO: 1242163
ggugucaccuccucccaaa

SEQ ID NO: 1326885 - RNA, 19 nt, Artificial Sequence
  Description of Artificial Sequence: Synthetic oligonucleotide
  Antisense strand to SEQ ID NO: 1326884
uuugggaggaggugacacc

SEQ ID NO: 1326886 - RNA, 19 nt, Artificial Sequence
  Description of Artificial Sequence: Synthetic oligonucleotide
  Sense strand starting at position 2774 of SEQ ID NO: 1242163
guuggcauucuuuauuugu

SEQ ID NO: 1326887 - RNA, 19 nt, Artificial Sequence
  Description of Artificial Sequence: Synthetic oligonucleotide
  Antisense strand to SEQ ID NO: 1326886
acaaauaaagaaugccaac

SEQ ID NO: 1326888 - RNA, 19 nt, Artificial Sequence
  Description of Artificial Sequence: Synthetic oligonucleotide
  Sense strand starting at position 2776 of SEQ ID NO: 1242163
uggcauucuuuauuuguca

SEQ ID NO: 1326889 - RNA, 19 nt, Artificial Sequence
  Description of Artificial Sequence: Synthetic oligonucleotide
  Antisense strand to SEQ ID NO: 1326888
ugacaaauaaagaaugcca

SEQ ID NO: 1326890 - RNA, 19 nt, Artificial Sequence
  Description of Artificial Sequence: Synthetic oligonucleotide
  Sense strand starting at position 2909 of SEQ ID NO: 1242163
cugcccuaagucugagaaa

SEQ ID NO: 1326891 - RNA, 19 nt, Artificial Sequence
  Description of Artificial Sequence: Synthetic oligonucleotide
  Antisense strand to SEQ ID NO: 1326890
uuucucagacuuagggcag

SEQ ID NO: 1326892 - RNA, 19 nt, Artificial Sequence
  Description of Artificial Sequence: Synthetic oligonucleotide
  Sense strand starting at position 3017 of SEQ ID NO: 1242163
ggcagcucucaggauguau

SEQ ID NO: 1326893 - RNA, 19 nt, Artificial Sequence
  Description of Artificial Sequence: Synthetic oligonucleotide
  Antisense strand to SEQ ID NO: 1326892
auacauccugagagcugcc

SEQ ID NO: 1326894 - RNA, 19 nt, Artificial Sequence
  Description of Artificial Sequence: Synthetic oligonucleotide
  Sense strand starting at position 3019 of SEQ ID NO: 1242163
cagcucucaggauguauga

SEQ ID NO: 1326895 - RNA, 19 nt, Artificial Sequence
  Description of Artificial Sequence: Synthetic oligonucleotide
  Antisense strand to SEQ ID NO: 1326894
ucauacauccugagagcug

SEQ ID NO: 1326896 - RNA, 19 nt, Artificial Sequence
  Description of Artificial Sequence: Synthetic oligonucleotide
  Sense strand starting at position 3029 of SEQ ID NO: 1242163
gauguaugaccucgcaacu

SEQ ID NO: 1326897 - RNA, 19 nt, Artificial Sequence
  Description of Artificial Sequence: Synthetic oligonucleotide
  Antisense strand to SEQ ID NO: 1326896
aguugcgaggucauacauc

SEQ ID NO: 1326898 - RNA, 19 nt, Artificial Sequence
  Description of Artificial Sequence: Synthetic oligonucleotide
  Sense strand starting at position 3194 of SEQ ID NO: 1242163
gccagaaaugcugacaaau

SEQ ID NO: 1326899 - RNA, 19 nt, Artificial Sequence
  Description of Artificial Sequence: Synthetic oligonucleotide
  Antisense strand to SEQ ID NO: 1326898
auuugucagcauuucuggc

SEQ ID NO: 1326900 - RNA, 19 nt, Artificial Sequence
  Description of Artificial Sequence: Synthetic oligonucleotide
  Sense strand starting at position 3307 of SEQ ID NO: 1242163
gggugacauguguguaggu

SEQ ID NO: 1326901 - RNA, 19 nt, Artificial Sequence
  Description of Artificial Sequence: Synthetic oligonucleotide
  Antisense strand to SEQ ID NO: 1326900
accuacacacaugucaccc

SEQ ID NO: 1326902 - RNA, 19 nt, Artificial Sequence
  Description of Artificial Sequence: Synthetic oligonucleotide
  Sense strand starting at position 3309 of SEQ ID NO: 1242163
gugacauguguguagguga

SEQ ID NO: 1326903 - RNA, 19 nt, Artificial Sequence
  Description of Artificial Sequence: Synthetic oligonucleotide
  Antisense strand to SEQ ID NO: 1326902
ucaccuacacacaugucac

SEQ ID NO: 1326904 - RNA, 19 nt, Artificial Sequence
  Description of Artificial Sequence: Synthetic oligonucleotide
  Sense strand starting at position 3432 of SEQ ID NO: 1242163
uuuaaauggcccgguaaag

SEQ ID NO: 1326905 - RNA, 19 nt, Artificial Sequence
  Description of Artificial Sequence: Synthetic oligonucleotide
  Antisense strand to SEQ ID NO: 1326904
cuuuaccgggccauuuaaa

SEQ ID NO: 1326906 - RNA, 19 nt, Artificial Sequence
  Description of Artificial Sequence: Synthetic oligonucleotide
  Sense strand starting at position 3488 of SEQ ID NO: 1242163
cccgucucugaguacauaa

SEQ ID NO: 1326907 - RNA, 19 nt, Artificial Sequence
  Description of Artificial Sequence: Synthetic oligonucleotide
  Antisense strand to SEQ ID NO: 1326906
uuauguacucagagacggg

SEQ ID NO: 1326908 - RNA, 19 nt, Artificial Sequence
  Description of Artificial Sequence: Synthetic oligonucleotide
  Sense strand starting at position 3524 of SEQ ID NO: 1242163
gcuggacucuggguuuauc

SEQ ID NO: 1326909 - RNA, 19 nt, Artificial Sequence
  Description of Artificial Sequence: Synthetic oligonucleotide
  Antisense strand to SEQ ID NO: 1326908
gauaaacccagaguccagc

SEQ ID NO: 1326910 - RNA, 19 nt, Artificial Sequence
  Description of Artificial Sequence: Synthetic oligonucleotide
  Sense strand starting at position 3614 of SEQ ID NO: 1242163
guggcaacccucuggagau

SEQ ID NO: 1326911 - RNA, 19 nt, Artificial Sequence
  Description of Artificial Sequence: Synthetic oligonucleotide
  Antisense strand to SEQ ID NO: 1326910
aucuccagaggguugccac

SEQ ID NO: 1326912 - RNA, 19 nt, Artificial Sequence
  Description of Artificial Sequence: Synthetic oligonucleotide
  Sense strand starting at position 3851 of SEQ ID NO: 1242163
gauacugugccagguaaca

SEQ ID NO: 1326913 - RNA, 19 nt, Artificial Sequence
  Description of Artificial Sequence: Synthetic oligonucleotide
  Antisense strand to SEQ ID NO: 1326912
uguuaccuggcacaguauc

SEQ ID NO: 1326914 - RNA, 19 nt, Artificial Sequence
  Description of Artificial Sequence: Synthetic oligonucleotide
  Sense strand starting at position 3911 of SEQ ID NO: 1242163
uuuaaaggguccucaucuu

SEQ ID NO: 1326915 - RNA, 19 nt, Artificial Sequence
  Description of Artificial Sequence: Synthetic oligonucleotide
  Antisense strand to SEQ ID NO: 1326914
aagaugaggacccuuuaaa

SEQ ID NO: 1326916 - RNA, 19 nt, Artificial Sequence
  Description of Artificial Sequence: Synthetic oligonucleotide
  Sense strand starting at position 3929 of SEQ ID NO: 1242163
uuuagagauaugcgcugaa

SEQ ID NO: 1326917 - RNA, 19 nt, Artificial Sequence
  Description of Artificial Sequence: Synthetic oligonucleotide
  Antisense strand to SEQ ID NO: 1326916
uucagcgcauaucucuaaa

SEQ ID NO: 1326918 - RNA, 19 nt, Artificial Sequence
  Description of Artificial Sequence: Synthetic oligonucleotide
  Sense strand starting at position 3932 of SEQ ID NO: 1242163
agagauaugcgcugaaaua

SEQ ID NO: 1326919 - RNA, 19 nt, Artificial Sequence
  Description of Artificial Sequence: Synthetic oligonucleotide
  Antisense strand to SEQ ID NO: 1326918
uauuucagcgcauaucucu

SEQ ID NO: 1326920 - RNA, 19 nt, Artificial Sequence
  Description of Artificial Sequence: Synthetic oligonucleotide
  Sense strand starting at position 3933 of SEQ ID NO: 1242163
gagauaugcgcugaaauau

SEQ ID NO: 1326921 - RNA, 19 nt, Artificial Sequence
  Description of Artificial Sequence: Synthetic oligonucleotide
  Antisense strand to SEQ ID NO: 1326920
auauuucagcgcauaucuc

SEQ ID NO: 1326922 - RNA, 19 nt, Artificial Sequence
  Description of Artificial Sequence: Synthetic oligonucleotide
  Sense strand starting at position 186 of SEQ ID NO: 1242164
ggcugaacaacgggauauu

SEQ ID NO: 1326923 - RNA, 19 nt, Artificial Sequence
  Description of Artificial Sequence: Synthetic oligonucleotide
  Antisense strand to SEQ ID NO: 1326922
aauaucccguuguucagcc

SEQ ID NO: 1326924 - RNA, 19 nt, Artificial Sequence
  Description of Artificial Sequence: Synthetic oligonucleotide
  Sense strand starting at position 529 of SEQ ID NO: 1242164
uuggaucccuugucuguaa

SEQ ID NO: 1326925 - RNA, 19 nt, Artificial Sequence
  Description of Artificial Sequence: Synthetic oligonucleotide
  Antisense strand to SEQ ID NO: 1326924
uuacagacaagggauccaa

SEQ ID NO: 1326926 - RNA, 19 nt, Artificial Sequence
  Description of Artificial Sequence: Synthetic oligonucleotide
  Sense strand starting at position 531 of SEQ ID NO: 1242164
ggaucccuugucuguaaga

SEQ ID NO: 1326927 - RNA, 19 nt, Artificial Sequence
  Description of Artificial Sequence: Synthetic oligonucleotide
  Antisense strand to SEQ ID NO: 1326926
ucuuacagacaagggaucc

SEQ ID NO: 1326928 - RNA, 19 nt, Artificial Sequence
  Description of Artificial Sequence: Synthetic oligonucleotide
  Sense strand starting at position 532 of SEQ ID NO: 1242164
gaucccuugucuguaagau

SEQ ID NO: 1326929 - RNA, 19 nt, Artificial Sequence
  Description of Artificial Sequence: Synthetic oligonucleotide
  Antisense strand to SEQ ID NO: 1326928
aucuuacagacaagggauc

SEQ ID NO: 1326930 - RNA, 19 nt, Artificial Sequence
  Description of Artificial Sequence: Synthetic oligonucleotide
  Sense strand starting at position 533 of SEQ ID NO: 1242164
aucccuugucuguaagaug

SEQ ID NO: 1326931 - RNA, 19 nt, Artificial Sequence
  Description of Artificial Sequence: Synthetic oligonucleotide
  Antisense strand to SEQ ID NO: 1326930
caucuuacagacaagggau

SEQ ID NO: 1326932 - RNA, 19 nt, Artificial Sequence
  Description of Artificial Sequence: Synthetic oligonucleotide
  Sense strand starting at position 569 of SEQ ID NO: 1242164
aucccauuguugucacaac

SEQ ID NO: 1326933 - RNA, 19 nt, Artificial Sequence
  Description of Artificial Sequence: Synthetic oligonucleotide
  Antisense strand to SEQ ID NO: 1326932
guugugacaacaaugggau

SEQ ID NO: 1326934 - RNA, 19 nt, Artificial Sequence
  Description of Artificial Sequence: Synthetic oligonucleotide
  Sense strand starting at position 870 of SEQ ID NO: 1242164
acuguugaacccuaaguua

SEQ ID NO: 1326935 - RNA, 19 nt, Artificial Sequence
  Description of Artificial Sequence: Synthetic oligonucleotide
  Antisense strand to SEQ ID NO: 1326934
uaacuuaggguucaacagu

SEQ ID NO: 1326936 - RNA, 19 nt, Artificial Sequence
  Description of Artificial Sequence: Synthetic oligonucleotide
  Sense strand starting at position 873 of SEQ ID NO: 1242164
guugaacccuaaguuagau

SEQ ID NO: 1326937 - RNA, 19 nt, Artificial Sequence
  Description of Artificial Sequence: Synthetic oligonucleotide
  Antisense strand to SEQ ID NO: 1326936
aucuaacuuaggguucaac

SEQ ID NO: 1326938 - RNA, 19 nt, Artificial Sequence
  Description of Artificial Sequence: Synthetic oligonucleotide
  Sense strand starting at position 1075 of SEQ ID NO: 1242164
caagguucuccaggacaug

SEQ ID NO: 1326939 - RNA, 19 nt, Artificial Sequence
  Description of Artificial Sequence: Synthetic oligonucleotide
  Antisense strand to SEQ ID NO: 1326938
cauguccuggagaaccuug

SEQ ID NO: 1326940 - RNA, 19 nt, Artificial Sequence
  Description of Artificial Sequence: Synthetic oligonucleotide
  Sense strand starting at position 1135 of SEQ ID NO: 1242164
aucugauaaugggauaaga

SEQ ID NO: 1326941 - RNA, 19 nt, Artificial Sequence
  Description of Artificial Sequence: Synthetic oligonucleotide
  Antisense strand to SEQ ID NO: 1326940
ucuuaucccauuaucagau

SEQ ID NO: 1326942 - RNA, 19 nt, Artificial Sequence
  Description of Artificial Sequence: Synthetic oligonucleotide
  Sense strand starting at position 1302 of SEQ ID NO: 1242164
cauagcagguccucaagaa

SEQ ID NO: 1326943 - RNA, 19 nt, Artificial Sequence
  Description of Artificial Sequence: Synthetic oligonucleotide
  Antisense strand to SEQ ID NO: 1326942
uucuugaggaccugcuaug

SEQ ID NO: 1326944 - RNA, 19 nt, Artificial Sequence
  Description of Artificial Sequence: Synthetic oligonucleotide
  Sense strand starting at position 1572 of SEQ ID NO: 1242164
cuggguguucucgaaacaa

SEQ ID NO: 1326945 - RNA, 19 nt, Artificial Sequence
  Description of Artificial Sequence: Synthetic oligonucleotide
  Antisense strand to SEQ ID NO: 1326944
uuguuucgagaacacccag

SEQ ID NO: 1326946 - RNA, 19 nt, Artificial Sequence
  Description of Artificial Sequence: Synthetic oligonucleotide
  Sense strand starting at position 1576 of SEQ ID NO: 1242164
guguucucgaaacaaauug

SEQ ID NO: 1326947 - RNA, 19 nt, Artificial Sequence
  Description of Artificial Sequence: Synthetic oligonucleotide
  Antisense strand to SEQ ID NO: 1326946
caauuuguuucgagaacac

SEQ ID NO: 1326948 - RNA, 19 nt, Artificial Sequence
  Description of Artificial Sequence: Synthetic oligonucleotide
  Sense strand starting at position 1662 of SEQ ID NO: 1242164
ucugaugcuccaggagaga

SEQ ID NO: 1326949 - RNA, 19 nt, Artificial Sequence
  Description of Artificial Sequence: Synthetic oligonucleotide
  Antisense strand to SEQ ID NO: 1326948
ucucuccuggagcaucaga

SEQ ID NO: 1326950 - RNA, 19 nt, Artificial Sequence
  Description of Artificial Sequence: Synthetic oligonucleotide
  Sense strand starting at position 1832 of SEQ ID NO: 1242164
cugcuacaugcccaaugau

SEQ ID NO: 1326951 - RNA, 19 nt, Artificial Sequence
  Description of Artificial Sequence: Synthetic oligonucleotide
  Antisense strand to SEQ ID NO: 1326950
aucauugggcauguagcag

SEQ ID NO: 1326952 - RNA, 19 nt, Artificial Sequence
  Description of Artificial Sequence: Synthetic oligonucleotide
  Sense strand starting at position 1912 of SEQ ID NO: 1242164
ccaaccauucugcagauga

SEQ ID NO: 1326953 - RNA, 19 nt, Artificial Sequence
  Description of Artificial Sequence: Synthetic oligonucleotide
  Antisense strand to SEQ ID NO: 1326952
ucaucugcagaaugguugg

SEQ ID NO: 1326954 - RNA, 19 nt, Artificial Sequence
  Description of Artificial Sequence: Synthetic oligonucleotide
  Sense strand starting at position 2334 of SEQ ID NO: 1242164
gguucuauucucuguggga

SEQ ID NO: 1326955 - RNA, 19 nt, Artificial Sequence
  Description of Artificial Sequence: Synthetic oligonucleotide
  Antisense strand to SEQ ID NO: 1326954
ucccacagagaauagaacc

SEQ ID NO: 1326956 - RNA, 19 nt, Artificial Sequence
  Description of Artificial Sequence: Synthetic oligonucleotide
  Sense strand starting at position 2335 of SEQ ID NO: 1242164
guucuauucucugugggag

SEQ ID NO: 1326957 - RNA, 19 nt, Artificial Sequence
  Description of Artificial Sequence: Synthetic oligonucleotide
  Antisense strand to SEQ ID NO: 1326956
cucccacagagaauagaac

SEQ ID NO: 1326958 - RNA, 19 nt, Artificial Sequence
  Description of Artificial Sequence: Synthetic oligonucleotide
  Sense strand starting at position 2529 of SEQ ID NO: 1242164
uucugucuugcacaaggua

SEQ ID NO: 1326959 - RNA, 19 nt, Artificial Sequence
  Description of Artificial Sequence: Synthetic oligonucleotide
  Antisense strand to SEQ ID NO: 1326958
uaccuugugcaagacagaa

SEQ ID NO: 1326960 - RNA, 19 nt, Artificial Sequence
  Description of Artificial Sequence: Synthetic oligonucleotide
  Sense strand starting at position 2532 of SEQ ID NO: 1242164
ugucuugcacaagguaauu

SEQ ID NO: 1326961 - RNA, 19 nt, Artificial Sequence
  Description of Artificial Sequence: Synthetic oligonucleotide
  Antisense strand to SEQ ID NO: 1326960
aauuaccuugugcaagaca

SEQ ID NO: 1326962 - RNA, 19 nt, Artificial Sequence
  Description of Artificial Sequence: Synthetic oligonucleotide
  Sense strand starting at position 2552 of SEQ ID NO: 1242164
caguucuuccuguguaaug

SEQ ID NO: 1326963 - RNA, 19 nt, Artificial Sequence
  Description of Artificial Sequence: Synthetic oligonucleotide
  Antisense strand to SEQ ID NO: 1326962
cauuacacaggaagaacug

SEQ ID NO: 1326964 - RNA, 19 nt, Artificial Sequence
  Description of Artificial Sequence: Synthetic oligonucleotide
  Sense strand starting at position 2553 of SEQ ID NO: 1242164
aguucuuccuguguaauga

SEQ ID NO: 1326965 - RNA, 19 nt, Artificial Sequence
  Description of Artificial Sequence: Synthetic oligonucleotide
  Antisense strand to SEQ ID NO: 1326964
ucauuacacaggaagaacu

SEQ ID NO: 1326966 - RNA, 19 nt, Artificial Sequence
  Description of Artificial Sequence: Synthetic oligonucleotide
  Sense strand starting at position 2554 of SEQ ID NO: 1242164
guucuuccuguguaaugag

SEQ ID NO: 1326967 - RNA, 19 nt, Artificial Sequence
  Description of Artificial Sequence: Synthetic oligonucleotide
  Antisense strand to SEQ ID NO: 1326966
cucauuacacaggaagaac

SEQ ID NO: 1326968 - RNA, 19 nt, Artificial Sequence
  Description of Artificial Sequence: Synthetic oligonucleotide
  Sense strand starting at position 2608 of SEQ ID NO: 1242164
uaaugaggugaauggguuu

SEQ ID NO: 1326969 - RNA, 19 nt, Artificial Sequence
  Description of Artificial Sequence: Synthetic oligonucleotide
  Antisense strand to SEQ ID NO: 1326968
aaacccauucaccucauua

SEQ ID NO: 1326970 - RNA, 19 nt, Artificial Sequence
  Description of Artificial Sequence: Synthetic oligonucleotide
  Sense strand starting at position 2611 of SEQ ID NO: 1242164
ugaggugaauggguuuaua

SEQ ID NO: 1326971 - RNA, 19 nt, Artificial Sequence
  Description of Artificial Sequence: Synthetic oligonucleotide
  Antisense strand to SEQ ID NO: 1326970
uauaaacccauucaccuca

SEQ ID NO: 1326972 - RNA, 19 nt, Artificial Sequence
  Description of Artificial Sequence: Synthetic oligonucleotide
  Sense strand starting at position 2614 of SEQ ID NO: 1242164
ggugaauggguuuauagug

SEQ ID NO: 1326973 - RNA, 19 nt, Artificial Sequence
  Description of Artificial Sequence: Synthetic oligonucleotide
  Antisense strand to SEQ ID NO: 1326972
cacuauaaacccauucacc

SEQ ID NO: 1326974 - RNA, 19 nt, Artificial Sequence
  Description of Artificial Sequence: Synthetic oligonucleotide
  Sense strand starting at position 2669 of SEQ ID NO: 1242164
ggcugaguccuggagugaa

SEQ ID NO: 1326975 - RNA, 19 nt, Artificial Sequence
  Description of Artificial Sequence: Synthetic oligonucleotide
  Antisense strand to SEQ ID NO: 1326974
uucacuccaggacucagcc

SEQ ID NO: 1326976 - RNA, 19 nt, Artificial Sequence
  Description of Artificial Sequence: Synthetic oligonucleotide
  Sense strand starting at position 2680 of SEQ ID NO: 1242164
ggagugaagcgacgaguuu

SEQ ID NO: 1326977 - RNA, 19 nt, Artificial Sequence
  Description of Artificial Sequence: Synthetic oligonucleotide
  Antisense strand to SEQ ID NO: 1326976
aaacucgucgcuucacucc

SEQ ID NO: 1326978 - RNA, 19 nt, Artificial Sequence
  Description of Artificial Sequence: Synthetic oligonucleotide
  Sense strand starting at position 2687 of SEQ ID NO: 1242164
agcgacgaguuuccacaua

SEQ ID NO: 1326979 - RNA, 19 nt, Artificial Sequence
  Description of Artificial Sequence: Synthetic oligonucleotide
  Antisense strand to SEQ ID NO: 1326978
uauguggaaacucgucgcu

SEQ ID NO: 1326980 - RNA, 19 nt, Artificial Sequence
  Description of Artificial Sequence: Synthetic oligonucleotide
  Sense strand starting at position 3031 of SEQ ID NO: 1242164
agagguaauuaguuacaag

SEQ ID NO: 1326981 - RNA, 19 nt, Artificial Sequence
  Description of Artificial Sequence: Synthetic oligonucleotide
  Antisense strand to SEQ ID NO: 1326980
cuuguaacuaauuaccucu

SEQ ID NO: 1326982 - RNA, 19 nt, Artificial Sequence
  Description of Artificial Sequence: Synthetic oligonucleotide
  Sense strand starting at position 3040 of SEQ ID NO: 1242164
uaguuacaaggaggucaua

SEQ ID NO: 1326983 - RNA, 19 nt, Artificial Sequence
  Description of Artificial Sequence: Synthetic oligonucleotide
  Antisense strand to SEQ ID NO: 1326982
uaugaccuccuuguaacua

SEQ ID NO: 1326984 - RNA, 19 nt, Artificial Sequence
  Description of Artificial Sequence: Synthetic oligonucleotide
  Sense strand starting at position 3083 of SEQ ID NO: 1242164
aacgacugauguucuuaua

SEQ ID NO: 1326985 - RNA, 19 nt, Artificial Sequence
  Description of Artificial Sequence: Synthetic oligonucleotide
  Antisense strand to SEQ ID NO: 1326984
uauaagaacaucagucguu

SEQ ID NO: 1326986 - RNA, 19 nt, Artificial Sequence
  Description of Artificial Sequence: Synthetic oligonucleotide
  Sense strand starting at position 3093 of SEQ ID NO: 1242164
guucuuauacaagaaguca

SEQ ID NO: 1326987 - RNA, 19 nt, Artificial Sequence
  Description of Artificial Sequence: Synthetic oligonucleotide
  Antisense strand to SEQ ID NO: 1326986
ugacuucuuguauaagaac

SEQ ID NO: 1326988 - RNA, 19 nt, Artificial Sequence
  Description of Artificial Sequence: Synthetic oligonucleotide
  Sense strand starting at position 3225 of SEQ ID NO: 1242164
gugaaaccgucuccaauac

SEQ ID NO: 1326989 - RNA, 19 nt, Artificial Sequence
  Description of Artificial Sequence: Synthetic oligonucleotide
  Antisense strand to SEQ ID NO: 1326988
guauuggagacgguuucac

SEQ ID NO: 1326990 - RNA, 19 nt, Artificial Sequence
  Description of Artificial Sequence: Synthetic oligonucleotide
  Sense strand starting at position 3291 of SEQ ID NO: 1242164
gggagauuacuggguucaa

SEQ ID NO: 1326991 - RNA, 19 nt, Artificial Sequence
  Description of Artificial Sequence: Synthetic oligonucleotide
  Antisense strand to SEQ ID NO: 1326990
uugaacccaguaaucuccc

SEQ ID NO: 1326992 - RNA, 19 nt, Artificial Sequence
  Description of Artificial Sequence: Synthetic oligonucleotide
  Sense strand starting at position 3541 of SEQ ID NO: 1242164
ggaauauccucuccuagag

SEQ ID NO: 1326993 - RNA, 19 nt, Artificial Sequence
  Description of Artificial Sequence: Synthetic oligonucleotide
  Antisense strand to SEQ ID NO: 1326992
cucuaggagaggauauucc

SEQ ID NO: 1326994 - RNA, 19 nt, Artificial Sequence
  Description of Artificial Sequence: Synthetic oligonucleotide
  Sense strand starting at position 3610 of SEQ ID NO: 1242164
agagcugugagagaguaau

SEQ ID NO: 1326995 - RNA, 19 nt, Artificial Sequence
  Description of Artificial Sequence: Synthetic oligonucleotide
  Antisense strand to SEQ ID NO: 1326994
auuacucucucacagcucu

SEQ ID NO: 1326996 - RNA, 19 nt, Artificial Sequence
  Description of Artificial Sequence: Synthetic oligonucleotide
  Sense strand starting at position 3620 of SEQ ID NO: 1242164
gagaguaauuucuauuguu

SEQ ID NO: 1326997 - RNA, 19 nt, Artificial Sequence
  Description of Artificial Sequence: Synthetic oligonucleotide
  Antisense strand to SEQ ID NO: 1326996
aacaauagaaauuacucuc

SEQ ID NO: 1326998 - RNA, 19 nt, Artificial Sequence
  Description of Artificial Sequence: Synthetic oligonucleotide
  Sense strand starting at position 3655 of SEQ ID NO: 1242164
auaguaauuuguuacggga

SEQ ID NO: 1326999 - RNA, 19 nt, Artificial Sequence
  Description of Artificial Sequence: Synthetic oligonucleotide
  Antisense strand to SEQ ID NO: 1326998
ucccguaacaaauuacuau

SEQ ID NO: 1327000 - RNA, 19 nt, Artificial Sequence
  Description of Artificial Sequence: Synthetic oligonucleotide
  Sense strand starting at position 3711 of SEQ ID NO: 1242164
gcaacuaucuggccaugga

SEQ ID NO: 1327001 - RNA, 19 nt, Artificial Sequence
  Description of Artificial Sequence: Synthetic oligonucleotide
  Antisense strand to SEQ ID NO: 1327000
uccauggccagauaguugc

SEQ ID NO: 1327002 - RNA, 19 nt, Artificial Sequence
  Description of Artificial Sequence: Synthetic oligonucleotide
  Sense strand starting at position 48 of SEQ ID NO: 1242165
cucccaucccuggagguua

SEQ ID NO: 1327003 - RNA, 19 nt, Artificial Sequence
  Description of Artificial Sequence: Synthetic oligonucleotide
  Antisense strand to SEQ ID NO: 1327002
uaaccuccagggaugggag

SEQ ID NO: 1327004 - RNA, 19 nt, Artificial Sequence
  Description of Artificial Sequence: Synthetic oligonucleotide
  Sense strand starting at position 105 of SEQ ID NO: 1242165
ggucucagccuagaagauu

SEQ ID NO: 1327005 - RNA, 19 nt, Artificial Sequence
  Description of Artificial Sequence: Synthetic oligonucleotide
  Antisense strand to SEQ ID NO: 1327004
aaucuucuaggcugagacc

SEQ ID NO: 1327006 - RNA, 19 nt, Artificial Sequence
  Description of Artificial Sequence: Synthetic oligonucleotide
  Sense strand starting at position 233 of SEQ ID NO: 1242165
cuaggcuuugcccagaaau

SEQ ID NO: 1327007 - RNA, 19 nt, Artificial Sequence
  Description of Artificial Sequence: Synthetic oligonucleotide
  Antisense strand to SEQ ID NO: 1327006
auuucugggcaaagccuag

SEQ ID NO: 1327008 - RNA, 19 nt, Artificial Sequence
  Description of Artificial Sequence: Synthetic oligonucleotide
  Sense strand starting at position 235 of SEQ ID NO: 1242165
aggcuuugcccagaaauga

SEQ ID NO: 1327009 - RNA, 19 nt, Artificial Sequence
  Description of Artificial Sequence: Synthetic oligonucleotide
  Antisense strand to SEQ ID NO: 1327008
ucauuucugggcaaagccu

SEQ ID NO: 1327010 - RNA, 19 nt, Artificial Sequence
  Description of Artificial Sequence: Synthetic oligonucleotide
  Sense strand starting at position 272 of SEQ ID NO: 1242165
ccacgaggcgucguucuua

SEQ ID NO: 1327011 - RNA, 19 nt, Artificial Sequence
  Description of Artificial Sequence: Synthetic oligonucleotide
  Antisense strand to SEQ ID NO: 1327010
uaagaacgacgccucgugg

SEQ ID NO: 1327012 - RNA, 19 nt, Artificial Sequence
  Description of Artificial Sequence: Synthetic oligonucleotide
  Sense strand starting at position 482 of SEQ ID NO: 1242165
cacugaacacucgggauaa

SEQ ID NO: 1327013 - RNA, 19 nt, Artificial Sequence
  Description of Artificial Sequence: Synthetic oligonucleotide
  Antisense strand to SEQ ID NO: 1327012
uuaucccgaguguucagug

SEQ ID NO: 1327014 - RNA, 19 nt, Artificial Sequence
  Description of Artificial Sequence: Synthetic oligonucleotide
  Sense strand starting at position 525 of SEQ ID NO: 1242165
gcaguuugcccugacagac

SEQ ID NO: 1327015 - RNA, 19 nt, Artificial Sequence
  Description of Artificial Sequence: Synthetic oligonucleotide
  Antisense strand to SEQ ID NO: 1327014
gucugucagggcaaacugc

SEQ ID NO: 1327016 - RNA, 19 nt, Artificial Sequence
  Description of Artificial Sequence: Synthetic oligonucleotide
  Sense strand starting at position 595 of SEQ ID NO: 1242165
cagugaaagcugggagaga

SEQ ID NO: 1327017 - RNA, 19 nt, Artificial Sequence
  Description of Artificial Sequence: Synthetic oligonucleotide
  Antisense strand to SEQ ID NO: 1327016
ucucucccagcuuucacug

SEQ ID NO: 1327018 - RNA, 19 nt, Artificial Sequence
  Description of Artificial Sequence: Synthetic oligonucleotide
  Sense strand starting at position 649 of SEQ ID NO: 1242165
aaagaaacagcuuguaagu

SEQ ID NO: 1327019 - RNA, 19 nt, Artificial Sequence
  Description of Artificial Sequence: Synthetic oligonucleotide
  Antisense strand to SEQ ID NO: 1327018
acuuacaagcuguuucuuu

SEQ ID NO: 1327020 - RNA, 19 nt, Artificial Sequence
  Description of Artificial Sequence: Synthetic oligonucleotide
  Sense strand starting at position 986 of SEQ ID NO: 1242165
agaucuagccacuaguguu

SEQ ID NO: 1327021 - RNA, 19 nt, Artificial Sequence
  Description of Artificial Sequence: Synthetic oligonucleotide
  Antisense strand to SEQ ID NO: 1327020
aacacuaguggcuagaucu

SEQ ID NO: 1327022 - RNA, 19 nt, Artificial Sequence
  Description of Artificial Sequence: Synthetic oligonucleotide
  Sense strand starting at position 1329 of SEQ ID NO: 1242165
cagagcaugcaagguuuaa

SEQ ID NO: 1327023 - RNA, 19 nt, Artificial Sequence
  Description of Artificial Sequence: Synthetic oligonucleotide
  Antisense strand to SEQ ID NO: 1327022
uuaaaccuugcaugcucug

SEQ ID NO: 1327024 - RNA, 19 nt, Artificial Sequence
  Description of Artificial Sequence: Synthetic oligonucleotide
  Sense strand starting at position 1333 of SEQ ID NO: 1242165
gcaugcaagguuuaagcaa

SEQ ID NO: 1327025 - RNA, 19 nt, Artificial Sequence
  Description of Artificial Sequence: Synthetic oligonucleotide
  Antisense strand to SEQ ID NO: 1327024
uugcuuaaaccuugcaugc

SEQ ID NO: 1327026 - RNA, 19 nt, Artificial Sequence
  Description of Artificial Sequence: Synthetic oligonucleotide
  Sense strand starting at position 1530 of SEQ ID NO: 1242165
gccuuuaaucugggaguuc

SEQ ID NO: 1327027 - RNA, 19 nt, Artificial Sequence
  Description of Artificial Sequence: Synthetic oligonucleotide
  Antisense strand to SEQ ID NO: 1327026
gaacucccagauuaaaggc

SEQ ID NO: 1327028 - RNA, 19 nt, Artificial Sequence
  Description of Artificial Sequence: Synthetic oligonucleotide
  Sense strand starting at position 1541 of SEQ ID NO: 1242165
gggaguucaggcugaggaa

SEQ ID NO: 1327029 - RNA, 19 nt, Artificial Sequence
  Description of Artificial Sequence: Synthetic oligonucleotide
  Antisense strand to SEQ ID NO: 1327028
uuccucagccugaacuccc

SEQ ID NO: 1327030 - RNA, 19 nt, Artificial Sequence
  Description of Artificial Sequence: Synthetic oligonucleotide
  Sense strand starting at position 1580 of SEQ ID NO: 1242165
guacauuacugcccugaau

SEQ ID NO: 1327031 - RNA, 19 nt, Artificial Sequence
  Description of Artificial Sequence: Synthetic oligonucleotide
  Antisense strand to SEQ ID NO: 1327030
auucagggcaguaauguac

SEQ ID NO: 1327032 - RNA, 19 nt, Artificial Sequence
  Description of Artificial Sequence: Synthetic oligonucleotide
  Sense strand starting at position 1582 of SEQ ID NO: 1242165
acauuacugcccugaauga

SEQ ID NO: 1327033 - RNA, 19 nt, Artificial Sequence
  Description of Artificial Sequence: Synthetic oligonucleotide
  Antisense strand to SEQ ID NO: 1327032
ucauucagggcaguaaugu

SEQ ID NO: 1327034 - RNA, 19 nt, Artificial Sequence
  Description of Artificial Sequence: Synthetic oligonucleotide
  Sense strand starting at position 1596 of SEQ ID NO: 1242165
aaugaucugucggcuucua

SEQ ID NO: 1327035 - RNA, 19 nt, Artificial Sequence
  Description of Artificial Sequence: Synthetic oligonucleotide
  Antisense strand to SEQ ID NO: 1327034
uagaagccgacagaucauu

SEQ ID NO: 1327036 - RNA, 19 nt, Artificial Sequence
  Description of Artificial Sequence: Synthetic oligonucleotide
  Sense strand starting at position 1607 of SEQ ID NO: 1242165
ggcuucuauuaggcuaaau

SEQ ID NO: 1327037 - RNA, 19 nt, Artificial Sequence
  Description of Artificial Sequence: Synthetic oligonucleotide
  Antisense strand to SEQ ID NO: 1327036
auuuagccuaauagaagcc

SEQ ID NO: 1327038 - RNA, 19 nt, Artificial Sequence
  Description of Artificial Sequence: Synthetic oligonucleotide
  Sense strand starting at position 1642 of SEQ ID NO: 1242165
gaauuauccucugaagagg

SEQ ID NO: 1327039 - RNA, 19 nt, Artificial Sequence
  Description of Artificial Sequence: Synthetic oligonucleotide
  Antisense strand to SEQ ID NO: 1327038
ccucuucagaggauaauuc

SEQ ID NO: 1327040 - RNA, 19 nt, Artificial Sequence
  Description of Artificial Sequence: Synthetic oligonucleotide
  Sense strand starting at position 1869 of SEQ ID NO: 1242165
ccauaagagccuggaauga

SEQ ID NO: 1327041 - RNA, 19 nt, Artificial Sequence
  Description of Artificial Sequence: Synthetic oligonucleotide
  Antisense strand to SEQ ID NO: 1327040
ucauuccaggcucuuaugg

SEQ ID NO: 1327042 - RNA, 19 nt, Artificial Sequence
  Description of Artificial Sequence: Synthetic oligonucleotide
  Sense strand starting at position 1970 of SEQ ID NO: 1242165
gucuuccugucucuuagau

SEQ ID NO: 1327043 - RNA, 19 nt, Artificial Sequence
  Description of Artificial Sequence: Synthetic oligonucleotide
  Antisense strand to SEQ ID NO: 1327042
aucuaagagacaggaagac

SEQ ID NO: 1327044 - RNA, 19 nt, Artificial Sequence
  Description of Artificial Sequence: Synthetic oligonucleotide
  Sense strand starting at position 1977 of SEQ ID NO: 1242165
ugucucuuagauggagcua

SEQ ID NO: 1327045 - RNA, 19 nt, Artificial Sequence
  Description of Artificial Sequence: Synthetic oligonucleotide
  Antisense strand to SEQ ID NO: 1327044
uagcuccaucuaagagaca

SEQ ID NO: 1327046 - RNA, 19 nt, Artificial Sequence
  Description of Artificial Sequence: Synthetic oligonucleotide
  Sense strand starting at position 1978 of SEQ ID NO: 1242165
gucucuuagauggagcuaa

SEQ ID NO: 1327047 - RNA, 19 nt, Artificial Sequence
  Description of Artificial Sequence: Synthetic oligonucleotide
  Antisense strand to SEQ ID NO: 1327046
uuagcuccaucuaagagac

SEQ ID NO: 1327048 - RNA, 19 nt, Artificial Sequence
  Description of Artificial Sequence: Synthetic oligonucleotide
  Sense strand starting at position 2481 of SEQ ID NO: 1242165
cugcgagagcaggguaaua

SEQ ID NO: 1327049 - RNA, 19 nt, Artificial Sequence
  Description of Artificial Sequence: Synthetic oligonucleotide
  Antisense strand to SEQ ID NO: 1327048
uauuacccugcucucgcag

SEQ ID NO: 1327050 - RNA, 19 nt, Artificial Sequence
  Description of Artificial Sequence: Synthetic oligonucleotide
  Sense strand starting at position 2491 of SEQ ID NO: 1242165
aggguaauagcuggaccau

SEQ ID NO: 1327051 - RNA, 19 nt, Artificial Sequence
  Description of Artificial Sequence: Synthetic oligonucleotide
  Antisense strand to SEQ ID NO: 1327050
augguccagcuauuacccu

SEQ ID NO: 1327052 - RNA, 19 nt, Artificial Sequence
  Description of Artificial Sequence: Synthetic oligonucleotide
  Sense strand starting at position 2492 of SEQ ID NO: 1242165
ggguaauagcuggaccauc

SEQ ID NO: 1327053 - RNA, 19 nt, Artificial Sequence
  Description of Artificial Sequence: Synthetic oligonucleotide
  Antisense strand to SEQ ID NO: 1327052
gaugguccagcuauuaccc

SEQ ID NO: 1327054 - RNA, 19 nt, Artificial Sequence
  Description of Artificial Sequence: Synthetic oligonucleotide
  Sense strand starting at position 2722 of SEQ ID NO: 1242165
gcagaacugaccuguacgu

SEQ ID NO: 1327055 - RNA, 19 nt, Artificial Sequence
  Description of Artificial Sequence: Synthetic oligonucleotide
  Antisense strand to SEQ ID NO: 1327054
acguacaggucaguucugc

SEQ ID NO: 1327056 - RNA, 19 nt, Artificial Sequence
  Description of Artificial Sequence: Synthetic oligonucleotide
  Sense strand starting at position 2830 of SEQ ID NO: 1242165
acccucaaccuguaguaaa

SEQ ID NO: 1327057 - RNA, 19 nt, Artificial Sequence
  Description of Artificial Sequence: Synthetic oligonucleotide
  Antisense strand to SEQ ID NO: 1327056
uuuacuacagguugagggu

SEQ ID NO: 1327058 - RNA, 19 nt, Artificial Sequence
  Description of Artificial Sequence: Synthetic oligonucleotide
  Sense strand starting at position 2840 of SEQ ID NO: 1242165
uguaguaaaucccuggaau

SEQ ID NO: 1327059 - RNA, 19 nt, Artificial Sequence
  Description of Artificial Sequence: Synthetic oligonucleotide
  Antisense strand to SEQ ID NO: 1327058
auuccagggauuuacuaca

SEQ ID NO: 1327060 - RNA, 19 nt, Artificial Sequence
  Description of Artificial Sequence: Synthetic oligonucleotide
  Sense strand starting at position 2841 of SEQ ID NO: 1242165
guaguaaaucccuggaaug

SEQ ID NO: 1327061 - RNA, 19 nt, Artificial Sequence
  Description of Artificial Sequence: Synthetic oligonucleotide
  Antisense strand to SEQ ID NO: 1327060
cauuccagggauuuacuac

SEQ ID NO: 1327062 - RNA, 19 nt, Artificial Sequence
  Description of Artificial Sequence: Synthetic oligonucleotide
  Sense strand starting at position 3107 of SEQ ID NO: 1242165
gcaaaugcccucuaaugcu

SEQ ID NO: 1327063 - RNA, 19 nt, Artificial Sequence
  Description of Artificial Sequence: Synthetic oligonucleotide
  Antisense strand to SEQ ID NO: 1327062
agcauuagagggcauuugc

SEQ ID NO: 1327064 - RNA, 19 nt, Artificial Sequence
  Description of Artificial Sequence: Synthetic oligonucleotide
  Sense strand starting at position 3116 of SEQ ID NO: 1242165
cucuaaugcuuucugugaa

SEQ ID NO: 1327065 - RNA, 19 nt, Artificial Sequence
  Description of Artificial Sequence: Synthetic oligonucleotide
  Antisense strand to SEQ ID NO: 1327064
uucacagaaagcauuagag

SEQ ID NO: 1327066 - RNA, 19 nt, Artificial Sequence
  Description of Artificial Sequence: Synthetic oligonucleotide
  Sense strand starting at position 3124 of SEQ ID NO: 1242165
cuuucugugaauuaagggu

SEQ ID NO: 1327067 - RNA, 19 nt, Artificial Sequence
  Description of Artificial Sequence: Synthetic oligonucleotide
  Antisense strand to SEQ ID NO: 1327066
acccuuaauucacagaaag

SEQ ID NO: 1327068 - RNA, 19 nt, Artificial Sequence
  Description of Artificial Sequence: Synthetic oligonucleotide
  Sense strand starting at position 3128 of SEQ ID NO: 1242165
cugugaauuaaggguacaa

SEQ ID NO: 1327069 - RNA, 19 nt, Artificial Sequence
  Description of Artificial Sequence: Synthetic oligonucleotide
  Antisense strand to SEQ ID NO: 1327068
uuguacccuuaauucacag

SEQ ID NO: 1327070 - RNA, 19 nt, Artificial Sequence
  Description of Artificial Sequence: Synthetic oligonucleotide
  Sense strand starting at position 3506 of SEQ ID NO: 1242165
cuggauucgugcuucagaa

SEQ ID NO: 1327071 - RNA, 19 nt, Artificial Sequence
  Description of Artificial Sequence: Synthetic oligonucleotide
  Antisense strand to SEQ ID NO: 1327070
uucugaagcacgaauccag

SEQ ID NO: 1327072 - RNA, 19 nt, Artificial Sequence
  Description of Artificial Sequence: Synthetic oligonucleotide
  Sense strand starting at position 3508 of SEQ ID NO: 1242165
ggauucgugcuucagaaag

SEQ ID NO: 1327073 - RNA, 19 nt, Artificial Sequence
  Description of Artificial Sequence: Synthetic oligonucleotide
  Antisense strand to SEQ ID NO: 1327072
cuuucugaagcacgaaucc

SEQ ID NO: 1327074 - RNA, 19 nt, Artificial Sequence
  Description of Artificial Sequence: Synthetic oligonucleotide
  Sense strand starting at position 3587 of SEQ ID NO: 1242165
gugaguuaggaaugaggca

SEQ ID NO: 1327075 - RNA, 19 nt, Artificial Sequence
  Description of Artificial Sequence: Synthetic oligonucleotide
  Antisense strand to SEQ ID NO: 1327074
ugccucauuccuaacucac

SEQ ID NO: 1327076 - RNA, 19 nt, Artificial Sequence
  Description of Artificial Sequence: Synthetic oligonucleotide
  Sense strand starting at position 3775 of SEQ ID NO: 1242165
auccauuaguuacuuugau

SEQ ID NO: 1327077 - RNA, 19 nt, Artificial Sequence
  Description of Artificial Sequence: Synthetic oligonucleotide
  Antisense strand to SEQ ID NO: 1327076
aucaaaguaacuaauggau

SEQ ID NO: 1327078 - RNA, 19 nt, Artificial Sequence
  Description of Artificial Sequence: Synthetic oligonucleotide
  Sense strand starting at position 3942 of SEQ ID NO: 1242165
gcccaaguucuacaggagu

SEQ ID NO: 1327079 - RNA, 19 nt, Artificial Sequence
  Description of Artificial Sequence: Synthetic oligonucleotide
  Antisense strand to SEQ ID NO: 1327078
acuccuguagaacuugggc

SEQ ID NO: 1327080 - RNA, 19 nt, Artificial Sequence
  Description of Artificial Sequence: Synthetic oligonucleotide
  Sense strand starting at position 3944 of SEQ ID NO: 1242165
ccaaguucuacaggaguga

SEQ ID NO: 1327081 - RNA, 19 nt, Artificial Sequence
  Description of Artificial Sequence: Synthetic oligonucleotide
  Antisense strand to SEQ ID NO: 1327080
ucacuccuguagaacuugg

SEQ ID NO: 1327082 - RNA, 19 nt, Artificial Sequence
  Description of Artificial Sequence: Synthetic oligonucleotide
  Sense strand starting at position 3 of SEQ ID NO: 1242166
gcuagauugcacggacuga

SEQ ID NO: 1327083 - RNA, 19 nt, Artificial Sequence
  Description of Artificial Sequence: Synthetic oligonucleotide
  Antisense strand to SEQ ID NO: 1327082
ucaguccgugcaaucuagc

SEQ ID NO: 1327084 - RNA, 19 nt, Artificial Sequence
  Description of Artificial Sequence: Synthetic oligonucleotide
  Sense strand starting at position 4 of SEQ ID NO: 1242166
cuagauugcacggacugaa

SEQ ID NO: 1327085 - RNA, 19 nt, Artificial Sequence
  Description of Artificial Sequence: Synthetic oligonucleotide
  Antisense strand to SEQ ID NO: 1327084
uucaguccgugcaaucuag

SEQ ID NO: 1327086 - RNA, 19 nt, Artificial Sequence
  Description of Artificial Sequence: Synthetic oligonucleotide
  Sense strand starting at position 16 of SEQ ID NO: 1242166
gacugaagcggguguuaca

SEQ ID NO: 1327087 - RNA, 19 nt, Artificial Sequence
  Description of Artificial Sequence: Synthetic oligonucleotide
  Antisense strand to SEQ ID NO: 1327086
uguaacacccgcuucaguc

SEQ ID NO: 1327088 - RNA, 19 nt, Artificial Sequence
  Description of Artificial Sequence: Synthetic oligonucleotide
  Sense strand starting at position 25 of SEQ ID NO: 1242166
ggguguuacagagagucaa

SEQ ID NO: 1327089 - RNA, 19 nt, Artificial Sequence
  Description of Artificial Sequence: Synthetic oligonucleotide
  Antisense strand to SEQ ID NO: 1327088
uugacucucuguaacaccc

SEQ ID NO: 1327090 - RNA, 19 nt, Artificial Sequence
  Description of Artificial Sequence: Synthetic oligonucleotide
  Sense strand starting at position 51 of SEQ ID NO: 1242166
caagguaacguccagcaua

SEQ ID NO: 1327091 - RNA, 19 nt, Artificial Sequence
  Description of Artificial Sequence: Synthetic oligonucleotide
  Antisense strand to SEQ ID NO: 1327090
uaugcuggacguuaccuug

SEQ ID NO: 1327092 - RNA, 19 nt, Artificial Sequence
  Description of Artificial Sequence: Synthetic oligonucleotide
  Sense strand starting at position 54 of SEQ ID NO: 1242166
gguaacguccagcauaaua

SEQ ID NO: 1327093 - RNA, 19 nt, Artificial Sequence
  Description of Artificial Sequence: Synthetic oligonucleotide
  Antisense strand to SEQ ID NO: 1327092
uauuaugcuggacguuacc

SEQ ID NO: 1327094 - RNA, 19 nt, Artificial Sequence
  Description of Artificial Sequence: Synthetic oligonucleotide
  Sense strand starting at position 166 of SEQ ID NO: 1242166
gcaugaucagcccagucua

SEQ ID NO: 1327095 - RNA, 19 nt, Artificial Sequence
  Description of Artificial Sequence: Synthetic oligonucleotide
  Antisense strand to SEQ ID NO: 1327094
uagacugggcugaucaugc

SEQ ID NO: 1327096 - RNA, 19 nt, Artificial Sequence
  Description of Artificial Sequence: Synthetic oligonucleotide
  Sense strand starting at position 395 of SEQ ID NO: 1242166
cucccaucccuggagguua

SEQ ID NO: 1327097 - RNA, 19 nt, Artificial Sequence
  Description of Artificial Sequence: Synthetic oligonucleotide
  Antisense strand to SEQ ID NO: 1327096
uaaccuccagggaugggag

SEQ ID NO: 1327098 - RNA, 19 nt, Artificial Sequence
  Description of Artificial Sequence: Synthetic oligonucleotide
  Sense strand starting at position 452 of SEQ ID NO: 1242166
ggucucagccuagaagauu

SEQ ID NO: 1327099 - RNA, 19 nt, Artificial Sequence
  Description of Artificial Sequence: Synthetic oligonucleotide
  Antisense strand to SEQ ID NO: 1327098
aaucuucuaggcugagacc

SEQ ID NO: 1327100 - RNA, 19 nt, Artificial Sequence
  Description of Artificial Sequence: Synthetic oligonucleotide
  Sense strand starting at position 580 of SEQ ID NO: 1242166
cuaggcuuugcccagaaau

SEQ ID NO: 1327101 - RNA, 19 nt, Artificial Sequence
  Description of Artificial Sequence: Synthetic oligonucleotide
  Antisense strand to SEQ ID NO: 1327100
auuucugggcaaagccuag

SEQ ID NO: 1327102 - RNA, 19 nt, Artificial Sequence
  Description of Artificial Sequence: Synthetic oligonucleotide
  Sense strand starting at position 582 of SEQ ID NO: 1242166
aggcuuugcccagaaauga

SEQ ID NO: 1327103 - RNA, 19 nt, Artificial Sequence
  Description of Artificial Sequence: Synthetic oligonucleotide
  Antisense strand to SEQ ID NO: 1327102
ucauuucugggcaaagccu

SEQ ID NO: 1327104 - RNA, 19 nt, Artificial Sequence
  Description of Artificial Sequence: Synthetic oligonucleotide
  Sense strand starting at position 619 of SEQ ID NO: 1242166
ccacgaggcgucguucuua

SEQ ID NO: 1327105 - RNA, 19 nt, Artificial Sequence
  Description of Artificial Sequence: Synthetic oligonucleotide
  Antisense strand to SEQ ID NO: 1327104
uaagaacgacgccucgugg

SEQ ID NO: 1327106 - RNA, 19 nt, Artificial Sequence
  Description of Artificial Sequence: Synthetic oligonucleotide
  Sense strand starting at position 829 of SEQ ID NO: 1242166
cacugaacacucgggauaa

SEQ ID NO: 1327107 - RNA, 19 nt, Artificial Sequence
  Description of Artificial Sequence: Synthetic oligonucleotide
  Antisense strand to SEQ ID NO: 1327106
uuaucccgaguguucagug

SEQ ID NO: 1327108 - RNA, 19 nt, Artificial Sequence
  Description of Artificial Sequence: Synthetic oligonucleotide
  Sense strand starting at position 872 of SEQ ID NO: 1242166
gcaguuugcccugacagac

SEQ ID NO: 1327109 - RNA, 19 nt, Artificial Sequence
  Description of Artificial Sequence: Synthetic oligonucleotide
  Antisense strand to SEQ ID NO: 1327108
gucugucagggcaaacugc

SEQ ID NO: 1327110 - RNA, 19 nt, Artificial Sequence
  Description of Artificial Sequence: Synthetic oligonucleotide
  Sense strand starting at position 942 of SEQ ID NO: 1242166
cagugaaagcugggagaga

SEQ ID NO: 1327111 - RNA, 19 nt, Artificial Sequence
  Description of Artificial Sequence: Synthetic oligonucleotide
  Antisense strand to SEQ ID NO: 1327110
ucucucccagcuuucacug

SEQ ID NO: 1327112 - RNA, 19 nt, Artificial Sequence
  Description of Artificial Sequence: Synthetic oligonucleotide
  Sense strand starting at position 996 of SEQ ID NO: 1242166
aaagaaacagcuuguaagu

SEQ ID NO: 1327113 - RNA, 19 nt, Artificial Sequence
  Description of Artificial Sequence: Synthetic oligonucleotide
  Antisense strand to SEQ ID NO: 1327112
acuuacaagcuguuucuuu

SEQ ID NO: 1327114 - RNA, 19 nt, Artificial Sequence
  Description of Artificial Sequence: Synthetic oligonucleotide
  Sense strand starting at position 1333 of SEQ ID NO: 1242166
agaucuagccacuaguguu

SEQ ID NO: 1327115 - RNA, 19 nt, Artificial Sequence
  Description of Artificial Sequence: Synthetic oligonucleotide
  Antisense strand to SEQ ID NO: 1327114
aacacuaguggcuagaucu

SEQ ID NO: 1327116 - RNA, 19 nt, Artificial Sequence
  Description of Artificial Sequence: Synthetic oligonucleotide
  Sense strand starting at position 1676 of SEQ ID NO: 1242166
cagagcaugcaagguuuaa

SEQ ID NO: 1327117 - RNA, 19 nt, Artificial Sequence
  Description of Artificial Sequence: Synthetic oligonucleotide
  Antisense strand to SEQ ID NO: 1327116
uuaaaccuugcaugcucug

SEQ ID NO: 1327118 - RNA, 19 nt, Artificial Sequence
  Description of Artificial Sequence: Synthetic oligonucleotide
  Sense strand starting at position 1680 of SEQ ID NO: 1242166
gcaugcaagguuuaagcaa

SEQ ID NO: 1327119 - RNA, 19 nt, Artificial Sequence
  Description of Artificial Sequence: Synthetic oligonucleotide
  Antisense strand to SEQ ID NO: 1327118
uugcuuaaaccuugcaugc

SEQ ID NO: 1327120 - RNA, 19 nt, Artificial Sequence
  Description of Artificial Sequence: Synthetic oligonucleotide
  Sense strand starting at position 1877 of SEQ ID NO: 1242166
gccuuuaaucugggaguuc

SEQ ID NO: 1327121 - RNA, 19 nt, Artificial Sequence
  Description of Artificial Sequence: Synthetic oligonucleotide
  Antisense strand to SEQ ID NO: 1327120
gaacucccagauuaaaggc

SEQ ID NO: 1327122 - RNA, 19 nt, Artificial Sequence
  Description of Artificial Sequence: Synthetic oligonucleotide
  Sense strand starting at position 1888 of SEQ ID NO: 1242166
gggaguucaggcugaggaa

SEQ ID NO: 1327123 - RNA, 19 nt, Artificial Sequence
  Description of Artificial Sequence: Synthetic oligonucleotide
  Antisense strand to SEQ ID NO: 1327122
uuccucagccugaacuccc

SEQ ID NO: 1327124 - RNA, 19 nt, Artificial Sequence
  Description of Artificial Sequence: Synthetic oligonucleotide
  Sense strand starting at position 1927 of SEQ ID NO: 1242166
guacauuacugcccugaau

SEQ ID NO: 1327125 - RNA, 19 nt, Artificial Sequence
  Description of Artificial Sequence: Synthetic oligonucleotide
  Antisense strand to SEQ ID NO: 1327124
auucagggcaguaauguac

SEQ ID NO: 1327126 - RNA, 19 nt, Artificial Sequence
  Description of Artificial Sequence: Synthetic oligonucleotide
  Sense strand starting at position 1929 of SEQ ID NO: 1242166
acauuacugcccugaauga

SEQ ID NO: 1327127 - RNA, 19 nt, Artificial Sequence
  Description of Artificial Sequence: Synthetic oligonucleotide
  Antisense strand to SEQ ID NO: 1327126
ucauucagggcaguaaugu

SEQ ID NO: 1327128 - RNA, 19 nt, Artificial Sequence
  Description of Artificial Sequence: Synthetic oligonucleotide
  Sense strand starting at position 1954 of SEQ ID NO: 1242166
ggcuucuauuaggcuaaau

SEQ ID NO: 1327129 - RNA, 19 nt, Artificial Sequence
  Description of Artificial Sequence: Synthetic oligonucleotide
  Antisense strand to SEQ ID NO: 1327128
auuuagccuaauagaagcc

SEQ ID NO: 1327130 - RNA, 19 nt, Artificial Sequence
  Description of Artificial Sequence: Synthetic oligonucleotide
  Sense strand starting at position 2216 of SEQ ID NO: 1242166
ccauaagagccuggaauga

SEQ ID NO: 1327131 - RNA, 19 nt, Artificial Sequence
  Description of Artificial Sequence: Synthetic oligonucleotide
  Antisense strand to SEQ ID NO: 1327130
ucauuccaggcucuuaugg

SEQ ID NO: 1327132 - RNA, 19 nt, Artificial Sequence
  Description of Artificial Sequence: Synthetic oligonucleotide
  Sense strand starting at position 2324 of SEQ ID NO: 1242166
ugucucuuagauggagcua

SEQ ID NO: 1327133 - RNA, 19 nt, Artificial Sequence
  Description of Artificial Sequence: Synthetic oligonucleotide
  Antisense strand to SEQ ID NO: 1327132
uagcuccaucuaagagaca

SEQ ID NO: 1327134 - RNA, 19 nt, Artificial Sequence
  Description of Artificial Sequence: Synthetic oligonucleotide
  Sense strand starting at position 2325 of SEQ ID NO: 1242166
gucucuuagauggagcuaa

SEQ ID NO: 1327135 - RNA, 19 nt, Artificial Sequence
  Description of Artificial Sequence: Synthetic oligonucleotide
  Antisense strand to SEQ ID NO: 1327134
uuagcuccaucuaagagac

SEQ ID NO: 1327136 - RNA, 19 nt, Artificial Sequence
  Description of Artificial Sequence: Synthetic oligonucleotide
  Sense strand starting at position 2828 of SEQ ID NO: 1242166
cugcgagagcaggguaaua

SEQ ID NO: 1327137 - RNA, 19 nt, Artificial Sequence
  Description of Artificial Sequence: Synthetic oligonucleotide
  Antisense strand to SEQ ID NO: 1327136
uauuacccugcucucgcag

SEQ ID NO: 1327138 - RNA, 19 nt, Artificial Sequence
  Description of Artificial Sequence: Synthetic oligonucleotide
  Sense strand starting at position 2838 of SEQ ID NO: 1242166
aggguaauagcuggaccau

SEQ ID NO: 1327139 - RNA, 19 nt, Artificial Sequence
  Description of Artificial Sequence: Synthetic oligonucleotide
  Antisense strand to SEQ ID NO: 1327138
augguccagcuauuacccu

SEQ ID NO: 1327140 - RNA, 19 nt, Artificial Sequence
  Description of Artificial Sequence: Synthetic oligonucleotide
  Sense strand starting at position 2839 of SEQ ID NO: 1242166
ggguaauagcuggaccauc

SEQ ID NO: 1327141 - RNA, 19 nt, Artificial Sequence
  Description of Artificial Sequence: Synthetic oligonucleotide
  Antisense strand to SEQ ID NO: 1327140
gaugguccagcuauuaccc

SEQ ID NO: 1327142 - RNA, 19 nt, Artificial Sequence
  Description of Artificial Sequence: Synthetic oligonucleotide
  Sense strand starting at position 3177 of SEQ ID NO: 1242166
acccucaaccuguaguaaa

SEQ ID NO: 1327143 - RNA, 19 nt, Artificial Sequence
  Description of Artificial Sequence: Synthetic oligonucleotide
  Antisense strand to SEQ ID NO: 1327142
uuuacuacagguugagggu

SEQ ID NO: 1327144 - RNA, 19 nt, Artificial Sequence
  Description of Artificial Sequence: Synthetic oligonucleotide
  Sense strand starting at position 3187 of SEQ ID NO: 1242166
uguaguaaaucccuggaau

SEQ ID NO: 1327145 - RNA, 19 nt, Artificial Sequence
  Description of Artificial Sequence: Synthetic oligonucleotide
  Antisense strand to SEQ ID NO: 1327144
auuccagggauuuacuaca

SEQ ID NO: 1327146 - RNA, 19 nt, Artificial Sequence
  Description of Artificial Sequence: Synthetic oligonucleotide
  Sense strand starting at position 3188 of SEQ ID NO: 1242166
guaguaaaucccuggaaug

SEQ ID NO: 1327147 - RNA, 19 nt, Artificial Sequence
  Description of Artificial Sequence: Synthetic oligonucleotide
  Antisense strand to SEQ ID NO: 1327146
cauuccagggauuuacuac

SEQ ID NO: 1327148 - RNA, 19 nt, Artificial Sequence
  Description of Artificial Sequence: Synthetic oligonucleotide
  Sense strand starting at position 3454 of SEQ ID NO: 1242166
gcaaaugcccucuaaugcu

SEQ ID NO: 1327149 - RNA, 19 nt, Artificial Sequence
  Description of Artificial Sequence: Synthetic oligonucleotide
  Antisense strand to SEQ ID NO: 1327148
agcauuagagggcauuugc

SEQ ID NO: 1327150 - RNA, 19 nt, Artificial Sequence
  Description of Artificial Sequence: Synthetic oligonucleotide
  Sense strand starting at position 3463 of SEQ ID NO: 1242166
cucuaaugcuuucugugaa

SEQ ID NO: 1327151 - RNA, 19 nt, Artificial Sequence
  Description of Artificial Sequence: Synthetic oligonucleotide
  Antisense strand to SEQ ID NO: 1327150
uucacagaaagcauuagag

SEQ ID NO: 1327152 - RNA, 19 nt, Artificial Sequence
  Description of Artificial Sequence: Synthetic oligonucleotide
  Sense strand starting at position 3471 of SEQ ID NO: 1242166
cuuucugugaauuaagggu

SEQ ID NO: 1327153 - RNA, 19 nt, Artificial Sequence
  Description of Artificial Sequence: Synthetic oligonucleotide
  Antisense strand to SEQ ID NO: 1327152
acccuuaauucacagaaag

SEQ ID NO: 1327154 - RNA, 19 nt, Artificial Sequence
  Description of Artificial Sequence: Synthetic oligonucleotide
  Sense strand starting at position 3475 of SEQ ID NO: 1242166
cugugaauuaaggguacaa

SEQ ID NO: 1327155 - RNA, 19 nt, Artificial Sequence
  Description of Artificial Sequence: Synthetic oligonucleotide
  Antisense strand to SEQ ID NO: 1327154
uuguacccuuaauucacag

SEQ ID NO: 1327156 - RNA, 19 nt, Artificial Sequence
  Description of Artificial Sequence: Synthetic oligonucleotide
  Sense strand starting at position 3853 of SEQ ID NO: 1242166
cuggauucgugcuucagaa

SEQ ID NO: 1327157 - RNA, 19 nt, Artificial Sequence
  Description of Artificial Sequence: Synthetic oligonucleotide
  Antisense strand to SEQ ID NO: 1327156
uucugaagcacgaauccag

SEQ ID NO: 1327158 - RNA, 19 nt, Artificial Sequence
  Description of Artificial Sequence: Synthetic oligonucleotide
  Sense strand starting at position 3855 of SEQ ID NO: 1242166
ggauucgugcuucagaaag

SEQ ID NO: 1327159 - RNA, 19 nt, Artificial Sequence
  Description of Artificial Sequence: Synthetic oligonucleotide
  Antisense strand to SEQ ID NO: 1327158
cuuucugaagcacgaaucc

SEQ ID NO: 1327160 - RNA, 19 nt, Artificial Sequence
  Description of Artificial Sequence: Synthetic oligonucleotide
  Sense strand starting at position 3934 of SEQ ID NO: 1242166
gugaguuaggaaugaggca

SEQ ID NO: 1327161 - RNA, 19 nt, Artificial Sequence
  Description of Artificial Sequence: Synthetic oligonucleotide
  Antisense strand to SEQ ID NO: 1327160
ugccucauuccuaacucac

SEQ ID NO: 1327162 - RNA, 19 nt, Artificial Sequence
  Description of Artificial Sequence: Synthetic oligonucleotide
  Sense strand starting at position 323 of SEQ ID NO: 1242167
cacgguuccaaggaguuau

SEQ ID NO: 1327163 - RNA, 19 nt, Artificial Sequence
  Description of Artificial Sequence: Synthetic oligonucleotide
  Antisense strand to SEQ ID NO: 1327162
auaacuccuuggaaccgug

SEQ ID NO: 1327164 - RNA, 19 nt, Artificial Sequence
  Description of Artificial Sequence: Synthetic oligonucleotide
  Sense strand starting at position 327 of SEQ ID NO: 1242167
guuccaaggaguuauuggu

SEQ ID NO: 1327165 - RNA, 19 nt, Artificial Sequence
  Description of Artificial Sequence: Synthetic oligonucleotide
  Antisense strand to SEQ ID NO: 1327164
accaauaacuccuuggaac

SEQ ID NO: 1327166 - RNA, 19 nt, Artificial Sequence
  Description of Artificial Sequence: Synthetic oligonucleotide
  Sense strand starting at position 479 of SEQ ID NO: 1242167
uggcuuauacaaggacaaa

SEQ ID NO: 1327167 - RNA, 19 nt, Artificial Sequence
  Description of Artificial Sequence: Synthetic oligonucleotide
  Antisense strand to SEQ ID NO: 1327166
uuuguccuuguauaagcca

SEQ ID NO: 1327168 - RNA, 19 nt, Artificial Sequence
  Description of Artificial Sequence: Synthetic oligonucleotide
  Sense strand starting at position 1112 of SEQ ID NO: 1242167
cgcucugccuuagaaugaa

SEQ ID NO: 1327169 - RNA, 19 nt, Artificial Sequence
  Description of Artificial Sequence: Synthetic oligonucleotide
  Antisense strand to SEQ ID NO: 1327168
uucauucuaaggcagagcg

SEQ ID NO: 1327170 - RNA, 19 nt, Artificial Sequence
  Description of Artificial Sequence: Synthetic oligonucleotide
  Sense strand starting at position 2506 of SEQ ID NO: 1242167
ggugguucgucuccuuuca

SEQ ID NO: 1327171 - RNA, 19 nt, Artificial Sequence
  Description of Artificial Sequence: Synthetic oligonucleotide
  Antisense strand to SEQ ID NO: 1327170
ugaaaggagacgaaccacc

SEQ ID NO: 1327172 - RNA, 19 nt, Artificial Sequence
  Description of Artificial Sequence: Synthetic oligonucleotide
  Sense strand starting at position 2793 of SEQ ID NO: 1242167
guguguuuacacguguuaa

SEQ ID NO: 1327173 - RNA, 19 nt, Artificial Sequence
  Description of Artificial Sequence: Synthetic oligonucleotide
  Antisense strand to SEQ ID NO: 1327172
uuaacacguguaaacacac

SEQ ID NO: 1327174 - RNA, 19 nt, Artificial Sequence
  Description of Artificial Sequence: Synthetic oligonucleotide
  Sense strand starting at position 2794 of SEQ ID NO: 1242167
uguguuuacacguguuaac

SEQ ID NO: 1327175 - RNA, 19 nt, Artificial Sequence
  Description of Artificial Sequence: Synthetic oligonucleotide
  Antisense strand to SEQ ID NO: 1327174
guuaacacguguaaacaca

SEQ ID NO: 1327176 - RNA, 19 nt, Artificial Sequence
  Description of Artificial Sequence: Synthetic oligonucleotide
  Sense strand starting at position 3248 of SEQ ID NO: 1242167
gggaccucuccucggagau

SEQ ID NO: 1327177 - RNA, 19 nt, Artificial Sequence
  Description of Artificial Sequence: Synthetic oligonucleotide
  Antisense strand to SEQ ID NO: 1327176
aucuccgaggagagguccc

SEQ ID NO: 1327178 - RNA, 19 nt, Artificial Sequence
  Description of Artificial Sequence: Synthetic oligonucleotide
  Sense strand starting at position 3249 of SEQ ID NO: 1242167
ggaccucuccucggagauc

SEQ ID NO: 1327179 - RNA, 19 nt, Artificial Sequence
  Description of Artificial Sequence: Synthetic oligonucleotide
  Antisense strand to SEQ ID NO: 1327178
gaucuccgaggagaggucc

SEQ ID NO: 1327180 - RNA, 19 nt, Artificial Sequence
  Description of Artificial Sequence: Synthetic oligonucleotide
  Sense strand starting at position 3276 of SEQ ID NO: 1242167
ccuugauccucagauacag

SEQ ID NO: 1327181 - RNA, 19 nt, Artificial Sequence
  Description of Artificial Sequence: Synthetic oligonucleotide
  Antisense strand to SEQ ID NO: 1327180
cuguaucugaggaucaagg

SEQ ID NO: 1327182 - RNA, 19 nt, Artificial Sequence
  Description of Artificial Sequence: Synthetic oligonucleotide
  Sense strand starting at position 3307 of SEQ ID NO: 1242167
cagggaugucuuggcaaag

SEQ ID NO: 1327183 - RNA, 19 nt, Artificial Sequence
  Description of Artificial Sequence: Synthetic oligonucleotide
  Antisense strand to SEQ ID NO: 1327182
cuuugccaagacaucccug

SEQ ID NO: 1327184 - RNA, 19 nt, Artificial Sequence
  Description of Artificial Sequence: Synthetic oligonucleotide
  Sense strand starting at position 3637 of SEQ ID NO: 1242167
gcaacaucauugcagagau

SEQ ID NO: 1327185 - RNA, 19 nt, Artificial Sequence
  Description of Artificial Sequence: Synthetic oligonucleotide
  Antisense strand to SEQ ID NO: 1327184
aucucugcaaugauguugc

SEQ ID NO: 1327186 - RNA, 19 nt, Artificial Sequence
  Description of Artificial Sequence: Synthetic oligonucleotide
  Sense strand starting at position 3763 of SEQ ID NO: 1242167
gcaccauuucuggguacuu

SEQ ID NO: 1327187 - RNA, 19 nt, Artificial Sequence
  Description of Artificial Sequence: Synthetic oligonucleotide
  Antisense strand to SEQ ID NO: 1327186
aaguacccagaaauggugc

SEQ ID NO: 1327188 - RNA, 19 nt, Artificial Sequence
  Description of Artificial Sequence: Synthetic oligonucleotide
  Sense strand starting at position 3835 of SEQ ID NO: 1242167
uccugucuccuaugucuau

SEQ ID NO: 1327189 - RNA, 19 nt, Artificial Sequence
  Description of Artificial Sequence: Synthetic oligonucleotide
  Antisense strand to SEQ ID NO: 1327188
auagacauaggagacagga

SEQ ID NO: 1327190 - RNA, 19 nt, Artificial Sequence
  Description of Artificial Sequence: Synthetic oligonucleotide
  Sense strand starting at position 125 of SEQ ID NO: 1242168
gcccauuucuaaguuguuu

SEQ ID NO: 1327191 - RNA, 19 nt, Artificial Sequence
  Description of Artificial Sequence: Synthetic oligonucleotide
  Antisense strand to SEQ ID NO: 1327190
aaacaacuuagaaaugggc

SEQ ID NO: 1327192 - RNA, 19 nt, Artificial Sequence
  Description of Artificial Sequence: Synthetic oligonucleotide
  Sense strand starting at position 336 of SEQ ID NO: 1242168
gagaaaucaugguagaauc

SEQ ID NO: 1327193 - RNA, 19 nt, Artificial Sequence
  Description of Artificial Sequence: Synthetic oligonucleotide
  Antisense strand to SEQ ID NO: 1327192
gauucuaccaugauuucuc

SEQ ID NO: 1327194 - RNA, 19 nt, Artificial Sequence
  Description of Artificial Sequence: Synthetic oligonucleotide
  Sense strand starting at position 397 of SEQ ID NO: 1242168
cugaauaaguuguuucuaa

SEQ ID NO: 1327195 - RNA, 19 nt, Artificial Sequence
  Description of Artificial Sequence: Synthetic oligonucleotide
  Antisense strand to SEQ ID NO: 1327194
uuagaaacaacuuauucag

SEQ ID NO: 1327196 - RNA, 19 nt, Artificial Sequence
  Description of Artificial Sequence: Synthetic oligonucleotide
  Sense strand starting at position 475 of SEQ ID NO: 1242168
auaugauugcugggaagua

SEQ ID NO: 1327197 - RNA, 19 nt, Artificial Sequence
  Description of Artificial Sequence: Synthetic oligonucleotide
  Antisense strand to SEQ ID NO: 1327196
uacuucccagcaaucauau

SEQ ID NO: 1327198 - RNA, 19 nt, Artificial Sequence
  Description of Artificial Sequence: Synthetic oligonucleotide
  Sense strand starting at position 542 of SEQ ID NO: 1242168
gcacuucuacucuggacaa

SEQ ID NO: 1327199 - RNA, 19 nt, Artificial Sequence
  Description of Artificial Sequence: Synthetic oligonucleotide
  Antisense strand to SEQ ID NO: 1327198
uuguccagaguagaagugc

SEQ ID NO: 1327200 - RNA, 19 nt, Artificial Sequence
  Description of Artificial Sequence: Synthetic oligonucleotide
  Sense strand starting at position 955 of SEQ ID NO: 1242168
guccguuuccuguugcuua

SEQ ID NO: 1327201 - RNA, 19 nt, Artificial Sequence
  Description of Artificial Sequence: Synthetic oligonucleotide
  Antisense strand to SEQ ID NO: 1327200
uaagcaacaggaaacggac

SEQ ID NO: 1327202 - RNA, 19 nt, Artificial Sequence
  Description of Artificial Sequence: Synthetic oligonucleotide
  Sense strand starting at position 957 of SEQ ID NO: 1242168
ccguuuccuguugcuuaua

SEQ ID NO: 1327203 - RNA, 19 nt, Artificial Sequence
  Description of Artificial Sequence: Synthetic oligonucleotide
  Antisense strand to SEQ ID NO: 1327202
uauaagcaacaggaaacgg

SEQ ID NO: 1327204 - RNA, 19 nt, Artificial Sequence
  Description of Artificial Sequence: Synthetic oligonucleotide
  Sense strand starting at position 1117 of SEQ ID NO: 1242168
ugucaagucucuccuuaaa

SEQ ID NO: 1327205 - RNA, 19 nt, Artificial Sequence
  Description of Artificial Sequence: Synthetic oligonucleotide
  Antisense strand to SEQ ID NO: 1327204
uuuaaggagagacuugaca

SEQ ID NO: 1327206 - RNA, 19 nt, Artificial Sequence
  Description of Artificial Sequence: Synthetic oligonucleotide
  Sense strand starting at position 1144 of SEQ ID NO: 1242168
aguucuaccuccgugauaa

SEQ ID NO: 1327207 - RNA, 19 nt, Artificial Sequence
  Description of Artificial Sequence: Synthetic oligonucleotide
  Antisense strand to SEQ ID NO: 1327206
uuaucacggagguagaacu

SEQ ID NO: 1327208 - RNA, 19 nt, Artificial Sequence
  Description of Artificial Sequence: Synthetic oligonucleotide
  Sense strand starting at position 1184 of SEQ ID NO: 1242168
caauccacucgugaagaca

SEQ ID NO: 1327209 - RNA, 19 nt, Artificial Sequence
  Description of Artificial Sequence: Synthetic oligonucleotide
  Antisense strand to SEQ ID NO: 1327208
ugucuucacgaguggauug

SEQ ID NO: 1327210 - RNA, 19 nt, Artificial Sequence
  Description of Artificial Sequence: Synthetic oligonucleotide
  Sense strand starting at position 1331 of SEQ ID NO: 1242168
ccaucacguccuggucaaa

SEQ ID NO: 1327211 - RNA, 19 nt, Artificial Sequence
  Description of Artificial Sequence: Synthetic oligonucleotide
  Antisense strand to SEQ ID NO: 1327210
uuugaccaggacgugaugg

SEQ ID NO: 1327212 - RNA, 19 nt, Artificial Sequence
  Description of Artificial Sequence: Synthetic oligonucleotide
  Sense strand starting at position 1474 of SEQ ID NO: 1242168
aguaaacacuugcuaauga

SEQ ID NO: 1327213 - RNA, 19 nt, Artificial Sequence
  Description of Artificial Sequence: Synthetic oligonucleotide
  Antisense strand to SEQ ID NO: 1327212
ucauuagcaaguguuuacu

SEQ ID NO: 1327214 - RNA, 19 nt, Artificial Sequence
  Description of Artificial Sequence: Synthetic oligonucleotide
  Sense strand starting at position 1490 of SEQ ID NO: 1242168
ugaauaaagugcuuaacaa

SEQ ID NO: 1327215 - RNA, 19 nt, Artificial Sequence
  Description of Artificial Sequence: Synthetic oligonucleotide
  Antisense strand to SEQ ID NO: 1327214
uuguuaagcacuuuauuca

SEQ ID NO: 1327216 - RNA, 19 nt, Artificial Sequence
  Description of Artificial Sequence: Synthetic oligonucleotide
  Sense strand starting at position 1503 of SEQ ID NO: 1242168
uaacaaacgugucuugauc

SEQ ID NO: 1327217 - RNA, 19 nt, Artificial Sequence
  Description of Artificial Sequence: Synthetic oligonucleotide
  Antisense strand to SEQ ID NO: 1327216
gaucaagacacguuuguua

SEQ ID NO: 1327218 - RNA, 19 nt, Artificial Sequence
  Description of Artificial Sequence: Synthetic oligonucleotide
  Sense strand starting at position 1509 of SEQ ID NO: 1242168
acgugucuugaucagucua

SEQ ID NO: 1327219 - RNA, 19 nt, Artificial Sequence
  Description of Artificial Sequence: Synthetic oligonucleotide
  Antisense strand to SEQ ID NO: 1327218
uagacugaucaagacacgu

SEQ ID NO: 1327220 - RNA, 19 nt, Artificial Sequence
  Description of Artificial Sequence: Synthetic oligonucleotide
  Sense strand starting at position 2011 of SEQ ID NO: 1242168
gcgaauagugucucuuagc

SEQ ID NO: 1327221 - RNA, 19 nt, Artificial Sequence
  Description of Artificial Sequence: Synthetic oligonucleotide
  Antisense strand to SEQ ID NO: 1327220
gcuaagagacacuauucgc

SEQ ID NO: 1327222 - RNA, 19 nt, Artificial Sequence
  Description of Artificial Sequence: Synthetic oligonucleotide
  Sense strand starting at position 2971 of SEQ ID NO: 1242168
cuagguuugagcuggcuga

SEQ ID NO: 1327223 - RNA, 19 nt, Artificial Sequence
  Description of Artificial Sequence: Synthetic oligonucleotide
  Antisense strand to SEQ ID NO: 1327222
ucagccagcucaaaccuag

SEQ ID NO: 1327224 - RNA, 19 nt, Artificial Sequence
  Description of Artificial Sequence: Synthetic oligonucleotide
  Sense strand starting at position 3122 of SEQ ID NO: 1242168
cucauuaagcagugguuua

SEQ ID NO: 1327225 - RNA, 19 nt, Artificial Sequence
  Description of Artificial Sequence: Synthetic oligonucleotide
  Antisense strand to SEQ ID NO: 1327224
uaaaccacugcuuaaugag

SEQ ID NO: 1327226 - RNA, 19 nt, Artificial Sequence
  Description of Artificial Sequence: Synthetic oligonucleotide
  Sense strand starting at position 3146 of SEQ ID NO: 1242168
agggugguugccugggaau

SEQ ID NO: 1327227 - RNA, 19 nt, Artificial Sequence
  Description of Artificial Sequence: Synthetic oligonucleotide
  Antisense strand to SEQ ID NO: 1327226
auucccaggcaaccacccu

SEQ ID NO: 1327228 - RNA, 19 nt, Artificial Sequence
  Description of Artificial Sequence: Synthetic oligonucleotide
  Sense strand starting at position 3217 of SEQ ID NO: 1242168
aaacauuacccgugccuga

SEQ ID NO: 1327229 - RNA, 19 nt, Artificial Sequence
  Description of Artificial Sequence: Synthetic oligonucleotide
  Antisense strand to SEQ ID NO: 1327228
ucaggcacggguaauguuu

SEQ ID NO: 1327230 - RNA, 19 nt, Artificial Sequence
  Description of Artificial Sequence: Synthetic oligonucleotide
  Sense strand starting at position 3227 of SEQ ID NO: 1242168
cgugccugauacuuaacau

SEQ ID NO: 1327231 - RNA, 19 nt, Artificial Sequence
  Description of Artificial Sequence: Synthetic oligonucleotide
  Antisense strand to SEQ ID NO: 1327230
auguuaaguaucaggcacg

SEQ ID NO: 1327232 - RNA, 19 nt, Artificial Sequence
  Description of Artificial Sequence: Synthetic oligonucleotide
  Sense strand starting at position 3335 of SEQ ID NO: 1242168
gccauuuacucugcucuga

SEQ ID NO: 1327233 - RNA, 19 nt, Artificial Sequence
  Description of Artificial Sequence: Synthetic oligonucleotide
  Antisense strand to SEQ ID NO: 1327232
ucagagcagaguaaauggc

SEQ ID NO: 1327234 - RNA, 19 nt, Artificial Sequence
  Description of Artificial Sequence: Synthetic oligonucleotide
  Sense strand starting at position 3422 of SEQ ID NO: 1242168
auugcuuguuaauucugaa

SEQ ID NO: 1327235 - RNA, 19 nt, Artificial Sequence
  Description of Artificial Sequence: Synthetic oligonucleotide
  Antisense strand to SEQ ID NO: 1327234
uucagaauuaacaagcaau

SEQ ID NO: 1327236 - RNA, 19 nt, Artificial Sequence
  Description of Artificial Sequence: Synthetic oligonucleotide
  Sense strand starting at position 3429 of SEQ ID NO: 1242168
guuaauucugaaugacuuu

SEQ ID NO: 1327237 - RNA, 19 nt, Artificial Sequence
  Description of Artificial Sequence: Synthetic oligonucleotide
  Antisense strand to SEQ ID NO: 1327236
aaagucauucagaauuaac

SEQ ID NO: 1327238 - RNA, 19 nt, Artificial Sequence
  Description of Artificial Sequence: Synthetic oligonucleotide
  Sense strand starting at position 3531 of SEQ ID NO: 1242168
ugaguuaucuaacugacaa

SEQ ID NO: 1327239 - RNA, 19 nt, Artificial Sequence
  Description of Artificial Sequence: Synthetic oligonucleotide
  Antisense strand to SEQ ID NO: 1327238
uugucaguuagauaacuca

SEQ ID NO: 1327240 - RNA, 19 nt, Artificial Sequence
  Description of Artificial Sequence: Synthetic oligonucleotide
  Sense strand starting at position 3565 of SEQ ID NO: 1242168
agguaaauuauuggccuga

SEQ ID NO: 1327241 - RNA, 19 nt, Artificial Sequence
  Description of Artificial Sequence: Synthetic oligonucleotide
  Antisense strand to SEQ ID NO: 1327240
ucaggccaauaauuuaccu

SEQ ID NO: 1327242 - RNA, 19 nt, Artificial Sequence
  Description of Artificial Sequence: Synthetic oligonucleotide
  Sense strand starting at position 3567 of SEQ ID NO: 1242168
guaaauuauuggccugaga

SEQ ID NO: 1327243 - RNA, 19 nt, Artificial Sequence
  Description of Artificial Sequence: Synthetic oligonucleotide
  Antisense strand to SEQ ID NO: 1327242
ucucaggccaauaauuuac

SEQ ID NO: 1327244 - RNA, 19 nt, Artificial Sequence
  Description of Artificial Sequence: Synthetic oligonucleotide
  Sense strand starting at position 3635 of SEQ ID NO: 1242168
accuguguaccuuaagagu

SEQ ID NO: 1327245 - RNA, 19 nt, Artificial Sequence
  Description of Artificial Sequence: Synthetic oligonucleotide
  Antisense strand to SEQ ID NO: 1327244
acucuuaagguacacaggu

SEQ ID NO: 1327246 - RNA, 19 nt, Artificial Sequence
  Description of Artificial Sequence: Synthetic oligonucleotide
  Sense strand starting at position 3641 of SEQ ID NO: 1242168
guaccuuaagagugugaau

SEQ ID NO: 1327247 - RNA, 19 nt, Artificial Sequence
  Description of Artificial Sequence: Synthetic oligonucleotide
  Antisense strand to SEQ ID NO: 1327246
auucacacucuuaagguac

SEQ ID NO: 1327248 - RNA, 19 nt, Artificial Sequence
  Description of Artificial Sequence: Synthetic oligonucleotide
  Sense strand starting at position 3648 of SEQ ID NO: 1242168
aagagugugaaugguauga

SEQ ID NO: 1327249 - RNA, 19 nt, Artificial Sequence
  Description of Artificial Sequence: Synthetic oligonucleotide
  Antisense strand to SEQ ID NO: 1327248
ucauaccauucacacucuu

SEQ ID NO: 1327250 - RNA, 19 nt, Artificial Sequence
  Description of Artificial Sequence: Synthetic oligonucleotide
  Sense strand starting at position 3652 of SEQ ID NO: 1242168
gugugaaugguaugaagac

SEQ ID NO: 1327251 - RNA, 19 nt, Artificial Sequence
  Description of Artificial Sequence: Synthetic oligonucleotide
  Antisense strand to SEQ ID NO: 1327250
gucuucauaccauucacac

SEQ ID NO: 1327252 - RNA, 19 nt, Artificial Sequence
  Description of Artificial Sequence: Synthetic oligonucleotide
  Sense strand starting at position 3684 of SEQ ID NO: 1242168
ugaagcacuuaggcauaau

SEQ ID NO: 1327253 - RNA, 19 nt, Artificial Sequence
  Description of Artificial Sequence: Synthetic oligonucleotide
  Antisense strand to SEQ ID NO: 1327252
auuaugccuaagugcuuca

SEQ ID NO: 1327254 - RNA, 19 nt, Artificial Sequence
  Description of Artificial Sequence: Synthetic oligonucleotide
  Sense strand starting at position 3687 of SEQ ID NO: 1242168
agcacuuaggcauaauuaa

SEQ ID NO: 1327255 - RNA, 19 nt, Artificial Sequence
  Description of Artificial Sequence: Synthetic oligonucleotide
  Antisense strand to SEQ ID NO: 1327254
uuaauuaugccuaagugcu

SEQ ID NO: 1327256 - RNA, 19 nt, Artificial Sequence
  Description of Artificial Sequence: Synthetic oligonucleotide
  Sense strand starting at position 3729 of SEQ ID NO: 1242168
gugugugacaaauguggau

SEQ ID NO: 1327257 - RNA, 19 nt, Artificial Sequence
  Description of Artificial Sequence: Synthetic oligonucleotide
  Antisense strand to SEQ ID NO: 1327256
auccacauuugucacacac

SEQ ID NO: 1327258 - RNA, 19 nt, Artificial Sequence
  Description of Artificial Sequence: Synthetic oligonucleotide
  Sense strand starting at position 3742 of SEQ ID NO: 1242168
guggaugggcuuugaaacu

SEQ ID NO: 1327259 - RNA, 19 nt, Artificial Sequence
  Description of Artificial Sequence: Synthetic oligonucleotide
  Antisense strand to SEQ ID NO: 1327258
aguuucaaagcccauccac

SEQ ID NO: 1327260 - RNA, 19 nt, Artificial Sequence
  Description of Artificial Sequence: Synthetic oligonucleotide
  Sense strand starting at position 3826 of SEQ ID NO: 1242168
ucuuauuaaucguuugacu

SEQ ID NO: 1327261 - RNA, 19 nt, Artificial Sequence
  Description of Artificial Sequence: Synthetic oligonucleotide
  Antisense strand to SEQ ID NO: 1327260
agucaaacgauuaauaaga

SEQ ID NO: 1327262 - RNA, 19 nt, Artificial Sequence
  Description of Artificial Sequence: Synthetic oligonucleotide
  Sense strand starting at position 3828 of SEQ ID NO: 1242168
uuauuaaucguuugacuca

SEQ ID NO: 1327263 - RNA, 19 nt, Artificial Sequence
  Description of Artificial Sequence: Synthetic oligonucleotide
  Antisense strand to SEQ ID NO: 1327262
ugagucaaacgauuaauaa

SEQ ID NO: 1327264 - RNA, 19 nt, Artificial Sequence
  Description of Artificial Sequence: Synthetic oligonucleotide
  Sense strand starting at position 3879 of SEQ ID NO: 1242168
uuuacauaucugggucuua

SEQ ID NO: 1327265 - RNA, 19 nt, Artificial Sequence
  Description of Artificial Sequence: Synthetic oligonucleotide
  Antisense strand to SEQ ID NO: 1327264
uaagacccagauauguaaa

SEQ ID NO: 1327266 - RNA, 19 nt, Artificial Sequence
  Description of Artificial Sequence: Synthetic oligonucleotide
  Sense strand starting at position 3880 of SEQ ID NO: 1242168
uuacauaucugggucuuaa

SEQ ID NO: 1327267 - RNA, 19 nt, Artificial Sequence
  Description of Artificial Sequence: Synthetic oligonucleotide
  Antisense strand to SEQ ID NO: 1327266
uuaagacccagauauguaa

SEQ ID NO: 1327268 - RNA, 19 nt, Artificial Sequence
  Description of Artificial Sequence: Synthetic oligonucleotide
  Sense strand starting at position 3944 of SEQ ID NO: 1242168
uagaguuugcuggauugaa

SEQ ID NO: 1327269 - RNA, 19 nt, Artificial Sequence
  Description of Artificial Sequence: Synthetic oligonucleotide
  Antisense strand to SEQ ID NO: 1327268
uucaauccagcaaacucua

SEQ ID NO: 1327270 - RNA, 19 nt, Artificial Sequence
  Description of Artificial Sequence: Synthetic oligonucleotide
  Sense strand starting at position 60 of SEQ ID NO: 1242169
acagauugggcucacucau

SEQ ID NO: 1327271 - RNA, 19 nt, Artificial Sequence
  Description of Artificial Sequence: Synthetic oligonucleotide
  Antisense strand to SEQ ID NO: 1327270
augagugagcccaaucugu

SEQ ID NO: 1327272 - RNA, 19 nt, Artificial Sequence
  Description of Artificial Sequence: Synthetic oligonucleotide
  Sense strand starting at position 95 of SEQ ID NO: 1242169
ccaagagauucugcuucca

SEQ ID NO: 1327273 - RNA, 19 nt, Artificial Sequence
  Description of Artificial Sequence: Synthetic oligonucleotide
  Antisense strand to SEQ ID NO: 1327272
uggaagcagaaucucuugg

SEQ ID NO: 1327274 - RNA, 19 nt, Artificial Sequence
  Description of Artificial Sequence: Synthetic oligonucleotide
  Sense strand starting at position 103 of SEQ ID NO: 1242169
uucugcuuccaagagaaca

SEQ ID NO: 1327275 - RNA, 19 nt, Artificial Sequence
  Description of Artificial Sequence: Synthetic oligonucleotide
  Antisense strand to SEQ ID NO: 1327274
uguucucuuggaagcagaa

SEQ ID NO: 1327276 - RNA, 19 nt, Artificial Sequence
  Description of Artificial Sequence: Synthetic oligonucleotide
  Sense strand starting at position 232 of SEQ ID NO: 1242169
ggacaaugagauugcucaa

SEQ ID NO: 1327277 - RNA, 19 nt, Artificial Sequence
  Description of Artificial Sequence: Synthetic oligonucleotide
  Antisense strand to SEQ ID NO: 1327276
uugagcaaucucauugucc

SEQ ID NO: 1327278 - RNA, 19 nt, Artificial Sequence
  Description of Artificial Sequence: Synthetic oligonucleotide
  Sense strand starting at position 235 of SEQ ID NO: 1242169
caaugagauugcucaagga

SEQ ID NO: 1327279 - RNA, 19 nt, Artificial Sequence
  Description of Artificial Sequence: Synthetic oligonucleotide
  Antisense strand to SEQ ID NO: 1327278
uccuugagcaaucucauug

SEQ ID NO: 1327280 - RNA, 19 nt, Artificial Sequence
  Description of Artificial Sequence: Synthetic oligonucleotide
  Sense strand starting at position 478 of SEQ ID NO: 1242169
cauaaugucgaacgaaaga

SEQ ID NO: 1327281 - RNA, 19 nt, Artificial Sequence
  Description of Artificial Sequence: Synthetic oligonucleotide
  Antisense strand to SEQ ID NO: 1327280
ucuuucguucgacauuaug

SEQ ID NO: 1327282 - RNA, 19 nt, Artificial Sequence
  Description of Artificial Sequence: Synthetic oligonucleotide
  Sense strand starting at position 516 of SEQ ID NO: 1242169
acugauguguuucuauuaa

SEQ ID NO: 1327283 - RNA, 19 nt, Artificial Sequence
  Description of Artificial Sequence: Synthetic oligonucleotide
  Antisense strand to SEQ ID NO: 1327282
uuaauagaaacacaucagu

SEQ ID NO: 1327284 - RNA, 19 nt, Artificial Sequence
  Description of Artificial Sequence: Synthetic oligonucleotide
  Sense strand starting at position 622 of SEQ ID NO: 1242169
agaacucauugaggauuua

SEQ ID NO: 1327285 - RNA, 19 nt, Artificial Sequence
  Description of Artificial Sequence: Synthetic oligonucleotide
  Antisense strand to SEQ ID NO: 1327284
uaaauccucaaugaguucu

SEQ ID NO: 1327286 - RNA, 19 nt, Artificial Sequence
  Description of Artificial Sequence: Synthetic oligonucleotide
  Sense strand starting at position 784 of SEQ ID NO: 1242169
ccuguauggcucuaaauua

SEQ ID NO: 1327287 - RNA, 19 nt, Artificial Sequence
  Description of Artificial Sequence: Synthetic oligonucleotide
  Antisense strand to SEQ ID NO: 1327286
uaauuuagagccauacagg

SEQ ID NO: 1327288 - RNA, 19 nt, Artificial Sequence
  Description of Artificial Sequence: Synthetic oligonucleotide
  Sense strand starting at position 791 of SEQ ID NO: 1242169
ggcucuaaauuauuaugua

SEQ ID NO: 1327289 - RNA, 19 nt, Artificial Sequence
  Description of Artificial Sequence: Synthetic oligonucleotide
  Antisense strand to SEQ ID NO: 1327288
uacauaauaauuuagagcc

SEQ ID NO: 1327290 - RNA, 19 nt, Artificial Sequence
  Description of Artificial Sequence: Synthetic oligonucleotide
  Sense strand starting at position 827 of SEQ ID NO: 1242169
uggcuuuauaaaugagaug

SEQ ID NO: 1327291 - RNA, 19 nt, Artificial Sequence
  Description of Artificial Sequence: Synthetic oligonucleotide
  Antisense strand to SEQ ID NO: 1327290
caucucauuuauaaagcca

SEQ ID NO: 1327292 - RNA, 19 nt, Artificial Sequence
  Description of Artificial Sequence: Synthetic oligonucleotide
  Sense strand starting at position 885 of SEQ ID NO: 1242169
auacuuagugaauggcaau

SEQ ID NO: 1327293 - RNA, 19 nt, Artificial Sequence
  Description of Artificial Sequence: Synthetic oligonucleotide
  Antisense strand to SEQ ID NO: 1327292
auugccauucacuaaguau

SEQ ID NO: 1327294 - RNA, 19 nt, Artificial Sequence
  Description of Artificial Sequence: Synthetic oligonucleotide
  Sense strand starting at position 922 of SEQ ID NO: 1242169
guuauuaacuggccuauga

SEQ ID NO: 1327295 - RNA, 19 nt, Artificial Sequence
  Description of Artificial Sequence: Synthetic oligonucleotide
  Antisense strand to SEQ ID NO: 1327294
ucauaggccaguuaauaac

SEQ ID NO: 1327296 - RNA, 19 nt, Artificial Sequence
  Description of Artificial Sequence: Synthetic oligonucleotide
  Sense strand starting at position 926 of SEQ ID NO: 1242169
uuaacuggccuaugaagua

SEQ ID NO: 1327297 - RNA, 19 nt, Artificial Sequence
  Description of Artificial Sequence: Synthetic oligonucleotide
  Antisense strand to SEQ ID NO: 1327296
uacuucauaggccaguuaa

SEQ ID NO: 1327298 - RNA, 19 nt, Artificial Sequence
  Description of Artificial Sequence: Synthetic oligonucleotide
  Sense strand starting at position 1008 of SEQ ID NO: 1242169
gguacaucccguuagggaa

SEQ ID NO: 1327299 - RNA, 19 nt, Artificial Sequence
  Description of Artificial Sequence: Synthetic oligonucleotide
  Antisense strand to SEQ ID NO: 1327298
uucccuaacgggauguacc

SEQ ID NO: 1327300 - RNA, 19 nt, Artificial Sequence
  Description of Artificial Sequence: Synthetic oligonucleotide
  Sense strand starting at position 1056 of SEQ ID NO: 1242169
cuccaaggcuagucuuaga

SEQ ID NO: 1327301 - RNA, 19 nt, Artificial Sequence
  Description of Artificial Sequence: Synthetic oligonucleotide
  Antisense strand to SEQ ID NO: 1327300
ucuaagacuagccuuggag

SEQ ID NO: 1327302 - RNA, 19 nt, Artificial Sequence
  Description of Artificial Sequence: Synthetic oligonucleotide
  Sense strand starting at position 1176 of SEQ ID NO: 1242169
ucaauuaacugauccguca

SEQ ID NO: 1327303 - RNA, 19 nt, Artificial Sequence
  Description of Artificial Sequence: Synthetic oligonucleotide
  Antisense strand to SEQ ID NO: 1327302
ugacggaucaguuaauuga

SEQ ID NO: 1327304 - RNA, 19 nt, Artificial Sequence
  Description of Artificial Sequence: Synthetic oligonucleotide
  Sense strand starting at position 1273 of SEQ ID NO: 1242169
ccaucaaucuaguuuguga

SEQ ID NO: 1327305 - RNA, 19 nt, Artificial Sequence
  Description of Artificial Sequence: Synthetic oligonucleotide
  Antisense strand to SEQ ID NO: 1327304
ucacaaacuagauugaugg

SEQ ID NO: 1327306 - RNA, 19 nt, Artificial Sequence
  Description of Artificial Sequence: Synthetic oligonucleotide
  Sense strand starting at position 1276 of SEQ ID NO: 1242169
ucaaucuaguuugugaauu

SEQ ID NO: 1327307 - RNA, 19 nt, Artificial Sequence
  Description of Artificial Sequence: Synthetic oligonucleotide
  Antisense strand to SEQ ID NO: 1327306
aauucacaaacuagauuga

SEQ ID NO: 1327308 - RNA, 19 nt, Artificial Sequence
  Description of Artificial Sequence: Synthetic oligonucleotide
  Sense strand starting at position 1366 of SEQ ID NO: 1242169
ucuagaaauugugcaauga

SEQ ID NO: 1327309 - RNA, 19 nt, Artificial Sequence
  Description of Artificial Sequence: Synthetic oligonucleotide
  Antisense strand to SEQ ID NO: 1327308
ucauugcacaauuucuaga

SEQ ID NO: 1327310 - RNA, 19 nt, Artificial Sequence
  Description of Artificial Sequence: Synthetic oligonucleotide
  Sense strand starting at position 1367 of SEQ ID NO: 1242169
cuagaaauugugcaaugau

SEQ ID NO: 1327311 - RNA, 19 nt, Artificial Sequence
  Description of Artificial Sequence: Synthetic oligonucleotide
  Antisense strand to SEQ ID NO: 1327310
aucauugcacaauuucuag

SEQ ID NO: 1327312 - RNA, 19 nt, Artificial Sequence
  Description of Artificial Sequence: Synthetic oligonucleotide
  Sense strand starting at position 1558 of SEQ ID NO: 1242169
aucauuugccgcugaauaa

SEQ ID NO: 1327313 - RNA, 19 nt, Artificial Sequence
  Description of Artificial Sequence: Synthetic oligonucleotide
  Antisense strand to SEQ ID NO: 1327312
uuauucagcggcaaaugau

SEQ ID NO: 1327314 - RNA, 19 nt, Artificial Sequence
  Description of Artificial Sequence: Synthetic oligonucleotide
  Sense strand starting at position 1784 of SEQ ID NO: 1242169
ccuggauucuuugugacac

SEQ ID NO: 1327315 - RNA, 19 nt, Artificial Sequence
  Description of Artificial Sequence: Synthetic oligonucleotide
  Antisense strand to SEQ ID NO: 1327314
gugucacaaagaauccagg

SEQ ID NO: 1327316 - RNA, 19 nt, Artificial Sequence
  Description of Artificial Sequence: Synthetic oligonucleotide
  Sense strand starting at position 2008 of SEQ ID NO: 1242169
ccuauuagauacuuuguua

SEQ ID NO: 1327317 - RNA, 19 nt, Artificial Sequence
  Description of Artificial Sequence: Synthetic oligonucleotide
  Antisense strand to SEQ ID NO: 1327316
uaacaaaguaucuaauagg

SEQ ID NO: 1327318 - RNA, 19 nt, Artificial Sequence
  Description of Artificial Sequence: Synthetic oligonucleotide
  Sense strand starting at position 2012 of SEQ ID NO: 1242169
uuagauacuuuguuaggga

SEQ ID NO: 1327319 - RNA, 19 nt, Artificial Sequence
  Description of Artificial Sequence: Synthetic oligonucleotide
  Antisense strand to SEQ ID NO: 1327318
ucccuaacaaaguaucuaa

SEQ ID NO: 1327320 - RNA, 19 nt, Artificial Sequence
  Description of Artificial Sequence: Synthetic oligonucleotide
  Sense strand starting at position 2026 of SEQ ID NO: 1242169
agggaagacugcccauuaa

SEQ ID NO: 1327321 - RNA, 19 nt, Artificial Sequence
  Description of Artificial Sequence: Synthetic oligonucleotide
  Antisense strand to SEQ ID NO: 1327320
uuaaugggcagucuucccu

SEQ ID NO: 1327322 - RNA, 19 nt, Artificial Sequence
  Description of Artificial Sequence: Synthetic oligonucleotide
  Sense strand starting at position 2257 of SEQ ID NO: 1242169
uuuggaaauucugccaaag

SEQ ID NO: 1327323 - RNA, 19 nt, Artificial Sequence
  Description of Artificial Sequence: Synthetic oligonucleotide
  Antisense strand to SEQ ID NO: 1327322
cuuuggcagaauuuccaaa

SEQ ID NO: 1327324 - RNA, 19 nt, Artificial Sequence
  Description of Artificial Sequence: Synthetic oligonucleotide
  Sense strand starting at position 2425 of SEQ ID NO: 1242169
guccaaauuucuguugggu

SEQ ID NO: 1327325 - RNA, 19 nt, Artificial Sequence
  Description of Artificial Sequence: Synthetic oligonucleotide
  Antisense strand to SEQ ID NO: 1327324
acccaacagaaauuuggac

SEQ ID NO: 1327326 - RNA, 19 nt, Artificial Sequence
  Description of Artificial Sequence: Synthetic oligonucleotide
  Sense strand starting at position 2446 of SEQ ID NO: 1242169
agugaaauuggugaugcuu

SEQ ID NO: 1327327 - RNA, 19 nt, Artificial Sequence
  Description of Artificial Sequence: Synthetic oligonucleotide
  Antisense strand to SEQ ID NO: 1327326
aagcaucaccaauuucacu

SEQ ID NO: 1327328 - RNA, 19 nt, Artificial Sequence
  Description of Artificial Sequence: Synthetic oligonucleotide
  Sense strand starting at position 2824 of SEQ ID NO: 1242169
accuucuggaguuggauaa

SEQ ID NO: 1327329 - RNA, 19 nt, Artificial Sequence
  Description of Artificial Sequence: Synthetic oligonucleotide
  Antisense strand to SEQ ID NO: 1327328
uuauccaacuccagaaggu

SEQ ID NO: 1327330 - RNA, 19 nt, Artificial Sequence
  Description of Artificial Sequence: Synthetic oligonucleotide
  Sense strand starting at position 3176 of SEQ ID NO: 1242169
gguagacugguagaaugua

SEQ ID NO: 1327331 - RNA, 19 nt, Artificial Sequence
  Description of Artificial Sequence: Synthetic oligonucleotide
  Antisense strand to SEQ ID NO: 1327330
uacauucuaccagucuacc

SEQ ID NO: 1327332 - RNA, 19 nt, Artificial Sequence
  Description of Artificial Sequence: Synthetic oligonucleotide
  Sense strand starting at position 3261 of SEQ ID NO: 1242169
agugaauugcauugggaag

SEQ ID NO: 1327333 - RNA, 19 nt, Artificial Sequence
  Description of Artificial Sequence: Synthetic oligonucleotide
  Antisense strand to SEQ ID NO: 1327332
cuucccaaugcaauucacu

SEQ ID NO: 1327334 - RNA, 19 nt, Artificial Sequence
  Description of Artificial Sequence: Synthetic oligonucleotide
  Sense strand starting at position 3379 of SEQ ID NO: 1242169
ggaguaugccuggugugcu

SEQ ID NO: 1327335 - RNA, 19 nt, Artificial Sequence
  Description of Artificial Sequence: Synthetic oligonucleotide
  Antisense strand to SEQ ID NO: 1327334
agcacaccaggcauacucc

SEQ ID NO: 1327336 - RNA, 19 nt, Artificial Sequence
  Description of Artificial Sequence: Synthetic oligonucleotide
  Sense strand starting at position 3387 of SEQ ID NO: 1242169
ccuggugugcuccaggaau

SEQ ID NO: 1327337 - RNA, 19 nt, Artificial Sequence
  Description of Artificial Sequence: Synthetic oligonucleotide
  Antisense strand to SEQ ID NO: 1327336
auuccuggagcacaccagg

SEQ ID NO: 1327338 - RNA, 19 nt, Artificial Sequence
  Description of Artificial Sequence: Synthetic oligonucleotide
  Sense strand starting at position 3563 of SEQ ID NO: 1242169
cuguuagaaggcuauuaca

SEQ ID NO: 1327339 - RNA, 19 nt, Artificial Sequence
  Description of Artificial Sequence: Synthetic oligonucleotide
  Antisense strand to SEQ ID NO: 1327338
uguaauagccuucuaacag

SEQ ID NO: 1327340 - RNA, 19 nt, Artificial Sequence
  Description of Artificial Sequence: Synthetic oligonucleotide
  Sense strand starting at position 3643 of SEQ ID NO: 1242169
uggaugggugguggauaua

SEQ ID NO: 1327341 - RNA, 19 nt, Artificial Sequence
  Description of Artificial Sequence: Synthetic oligonucleotide
  Antisense strand to SEQ ID NO: 1327340
uauauccaccacccaucca

SEQ ID NO: 1327342 - RNA, 19 nt, Artificial Sequence
  Description of Artificial Sequence: Synthetic oligonucleotide
  Sense strand starting at position 3694 of SEQ ID NO: 1242169
ugcugaguugugagaugug

SEQ ID NO: 1327343 - RNA, 19 nt, Artificial Sequence
  Description of Artificial Sequence: Synthetic oligonucleotide
  Antisense strand to SEQ ID NO: 1327342
cacaucucacaacucagca

SEQ ID NO: 1327344 - RNA, 19 nt, Artificial Sequence
  Description of Artificial Sequence: Synthetic oligonucleotide
  Sense strand starting at position 3697 of SEQ ID NO: 1242169
ugaguugugagauguggga

SEQ ID NO: 1327345 - RNA, 19 nt, Artificial Sequence
  Description of Artificial Sequence: Synthetic oligonucleotide
  Antisense strand to SEQ ID NO: 1327344
ucccacaucucacaacuca

SEQ ID NO: 1327346 - RNA, 19 nt, Artificial Sequence
  Description of Artificial Sequence: Synthetic oligonucleotide
  Sense strand starting at position 3701 of SEQ ID NO: 1242169
uugugagaugugggagaaa

SEQ ID NO: 1327347 - RNA, 19 nt, Artificial Sequence
  Description of Artificial Sequence: Synthetic oligonucleotide
  Antisense strand to SEQ ID NO: 1327346
uuucucccacaucucacaa

SEQ ID NO: 1327348 - RNA, 19 nt, Artificial Sequence
  Description of Artificial Sequence: Synthetic oligonucleotide
  Sense strand starting at position 3922 of SEQ ID NO: 1242169
uaauuauugccuggacgag

SEQ ID NO: 1327349 - RNA, 19 nt, Artificial Sequence
  Description of Artificial Sequence: Synthetic oligonucleotide
  Antisense strand to SEQ ID NO: 1327348
cucguccaggcaauaauua

SEQ ID NO: 1327350 - RNA, 19 nt, Artificial Sequence
  Description of Artificial Sequence: Synthetic oligonucleotide
  Sense strand starting at position 19 of SEQ ID NO: 1242170
ggccuaucaucuuaaagga

SEQ ID NO: 1327351 - RNA, 19 nt, Artificial Sequence
  Description of Artificial Sequence: Synthetic oligonucleotide
  Antisense strand to SEQ ID NO: 1327350
uccuuuaagaugauaggcc

SEQ ID NO: 1327352 - RNA, 19 nt, Artificial Sequence
  Description of Artificial Sequence: Synthetic oligonucleotide
  Sense strand starting at position 668 of SEQ ID NO: 1242170
ccuggcuuuaguuaggaau

SEQ ID NO: 1327353 - RNA, 19 nt, Artificial Sequence
  Description of Artificial Sequence: Synthetic oligonucleotide
  Antisense strand to SEQ ID NO: 1327352
auuccuaacuaaagccagg

SEQ ID NO: 1327354 - RNA, 19 nt, Artificial Sequence
  Description of Artificial Sequence: Synthetic oligonucleotide
  Sense strand starting at position 671 of SEQ ID NO: 1242170
ggcuuuaguuaggaaucgu

SEQ ID NO: 1327355 - RNA, 19 nt, Artificial Sequence
  Description of Artificial Sequence: Synthetic oligonucleotide
  Antisense strand to SEQ ID NO: 1327354
acgauuccuaacuaaagcc

SEQ ID NO: 1327356 - RNA, 19 nt, Artificial Sequence
  Description of Artificial Sequence: Synthetic oligonucleotide
  Sense strand starting at position 680 of SEQ ID NO: 1242170
uaggaaucgugccauuucu

SEQ ID NO: 1327357 - RNA, 19 nt, Artificial Sequence
  Description of Artificial Sequence: Synthetic oligonucleotide
  Antisense strand to SEQ ID NO: 1327356
agaaauggcacgauuccua

SEQ ID NO: 1327358 - RNA, 19 nt, Artificial Sequence
  Description of Artificial Sequence: Synthetic oligonucleotide
  Sense strand starting at position 687 of SEQ ID NO: 1242170
cgugccauuucucagaacu

SEQ ID NO: 1327359 - RNA, 19 nt, Artificial Sequence
  Description of Artificial Sequence: Synthetic oligonucleotide
  Antisense strand to SEQ ID NO: 1327358
aguucugagaaauggcacg

SEQ ID NO: 1327360 - RNA, 19 nt, Artificial Sequence
  Description of Artificial Sequence: Synthetic oligonucleotide
  Sense strand starting at position 1073 of SEQ ID NO: 1242170
cuaagaggcucagaauuaa

SEQ ID NO: 1327361 - RNA, 19 nt, Artificial Sequence
  Description of Artificial Sequence: Synthetic oligonucleotide
  Antisense strand to SEQ ID NO: 1327360
uuaauucugagccucuuag

SEQ ID NO: 1327362 - RNA, 19 nt, Artificial Sequence
  Description of Artificial Sequence: Synthetic oligonucleotide
  Sense strand starting at position 1197 of SEQ ID NO: 1242170
cucccucuaucguguaguu

SEQ ID NO: 1327363 - RNA, 19 nt, Artificial Sequence
  Description of Artificial Sequence: Synthetic oligonucleotide
  Antisense strand to SEQ ID NO: 1327362
aacuacacgauagagggag

SEQ ID NO: 1327364 - RNA, 19 nt, Artificial Sequence
  Description of Artificial Sequence: Synthetic oligonucleotide
  Sense strand starting at position 1210 of SEQ ID NO: 1242170
guaguuccaucaucacaaa

SEQ ID NO: 1327365 - RNA, 19 nt, Artificial Sequence
  Description of Artificial Sequence: Synthetic oligonucleotide
  Antisense strand to SEQ ID NO: 1327364
uuugugaugauggaacuac

SEQ ID NO: 1327366 - RNA, 19 nt, Artificial Sequence
  Description of Artificial Sequence: Synthetic oligonucleotide
  Sense strand starting at position 1237 of SEQ ID NO: 1242170
ugaacaagaucugguagaa

SEQ ID NO: 1327367 - RNA, 19 nt, Artificial Sequence
  Description of Artificial Sequence: Synthetic oligonucleotide
  Antisense strand to SEQ ID NO: 1327366
uucuaccagaucuuguuca

SEQ ID NO: 1327368 - RNA, 19 nt, Artificial Sequence
  Description of Artificial Sequence: Synthetic oligonucleotide
  Sense strand starting at position 1279 of SEQ ID NO: 1242170
uuuggaagucccugaauac

SEQ ID NO: 1327369 - RNA, 19 nt, Artificial Sequence
  Description of Artificial Sequence: Synthetic oligonucleotide
  Antisense strand to SEQ ID NO: 1327368
guauucagggacuuccaaa

SEQ ID NO: 1327370 - RNA, 19 nt, Artificial Sequence
  Description of Artificial Sequence: Synthetic oligonucleotide
  Sense strand starting at position 1306 of SEQ ID NO: 1242170
gggcuaagaugcucucaug

SEQ ID NO: 1327371 - RNA, 19 nt, Artificial Sequence
  Description of Artificial Sequence: Synthetic oligonucleotide
  Antisense strand to SEQ ID NO: 1327370
caugagagcaucuuagccc

SEQ ID NO: 1327372 - RNA, 19 nt, Artificial Sequence
  Description of Artificial Sequence: Synthetic oligonucleotide
  Sense strand starting at position 1456 of SEQ ID NO: 1242170
ggagguuugugcuggucca

SEQ ID NO: 1327373 - RNA, 19 nt, Artificial Sequence
  Description of Artificial Sequence: Synthetic oligonucleotide
  Antisense strand to SEQ ID NO: 1327372
uggaccagcacaaaccucc

SEQ ID NO: 1327374 - RNA, 19 nt, Artificial Sequence
  Description of Artificial Sequence: Synthetic oligonucleotide
  Sense strand starting at position 1494 of SEQ ID NO: 1242170
gggacuuagugugugagca

SEQ ID NO: 1327375 - RNA, 19 nt, Artificial Sequence
  Description of Artificial Sequence: Synthetic oligonucleotide
  Antisense strand to SEQ ID NO: 1327374
ugcucacacacuaaguccc

SEQ ID NO: 1327376 - RNA, 19 nt, Artificial Sequence
  Description of Artificial Sequence: Synthetic oligonucleotide
  Sense strand starting at position 1495 of SEQ ID NO: 1242170
ggacuuagugugugagcau

SEQ ID NO: 1327377 - RNA, 19 nt, Artificial Sequence
  Description of Artificial Sequence: Synthetic oligonucleotide
  Antisense strand to SEQ ID NO: 1327376
augcucacacacuaagucc

SEQ ID NO: 1327378 - RNA, 19 nt, Artificial Sequence
  Description of Artificial Sequence: Synthetic oligonucleotide
  Sense strand starting at position 1727 of SEQ ID NO: 1242170
agaggauggcugugacaga

SEQ ID NO: 1327379 - RNA, 19 nt, Artificial Sequence
  Description of Artificial Sequence: Synthetic oligonucleotide
  Antisense strand to SEQ ID NO: 1327378
ucugucacagccauccucu

SEQ ID NO: 1327380 - RNA, 19 nt, Artificial Sequence
  Description of Artificial Sequence: Synthetic oligonucleotide
  Sense strand starting at position 2671 of SEQ ID NO: 1242170
auuugacuauauugaggaa

SEQ ID NO: 1327381 - RNA, 19 nt, Artificial Sequence
  Description of Artificial Sequence: Synthetic oligonucleotide
  Antisense strand to SEQ ID NO: 1327380
uuccucaauauagucaaau

SEQ ID NO: 1327382 - RNA, 19 nt, Artificial Sequence
  Description of Artificial Sequence: Synthetic oligonucleotide
  Sense strand starting at position 2674 of SEQ ID NO: 1242170
ugacuauauugaggaauug

SEQ ID NO: 1327383 - RNA, 19 nt, Artificial Sequence
  Description of Artificial Sequence: Synthetic oligonucleotide
  Antisense strand to SEQ ID NO: 1327382
caauuccucaauauaguca

SEQ ID NO: 1327384 - RNA, 19 nt, Artificial Sequence
  Description of Artificial Sequence: Synthetic oligonucleotide
  Sense strand starting at position 3007 of SEQ ID NO: 1242170
cuaauaugguauugugguu

SEQ ID NO: 1327385 - RNA, 19 nt, Artificial Sequence
  Description of Artificial Sequence: Synthetic oligonucleotide
  Antisense strand to SEQ ID NO: 1327384
aaccacaauaccauauuag

SEQ ID NO: 1327386 - RNA, 19 nt, Artificial Sequence
  Description of Artificial Sequence: Synthetic oligonucleotide
  Sense strand starting at position 3372 of SEQ ID NO: 1242170
gugucuuccuauguuacca

SEQ ID NO: 1327387 - RNA, 19 nt, Artificial Sequence
  Description of Artificial Sequence: Synthetic oligonucleotide
  Antisense strand to SEQ ID NO: 1327386
ugguaacauaggaagacac

SEQ ID NO: 1327388 - RNA, 19 nt, Artificial Sequence
  Description of Artificial Sequence: Synthetic oligonucleotide
  Sense strand starting at position 3377 of SEQ ID NO: 1242170
uuccuauguuaccaaggau

SEQ ID NO: 1327389 - RNA, 19 nt, Artificial Sequence
  Description of Artificial Sequence: Synthetic oligonucleotide
  Antisense strand to SEQ ID NO: 1327388
auccuugguaacauaggaa

SEQ ID NO: 1327390 - RNA, 19 nt, Artificial Sequence
  Description of Artificial Sequence: Synthetic oligonucleotide
  Sense strand starting at position 3527 of SEQ ID NO: 1242170
gaugaauugcuguaacauc

SEQ ID NO: 1327391 - RNA, 19 nt, Artificial Sequence
  Description of Artificial Sequence: Synthetic oligonucleotide
  Antisense strand to SEQ ID NO: 1327390
gauguuacagcaauucauc

SEQ ID NO: 1327392 - RNA, 19 nt, Artificial Sequence
  Description of Artificial Sequence: Synthetic oligonucleotide
  Sense strand starting at position 3605 of SEQ ID NO: 1242170
cagaauugaccuugaguug

SEQ ID NO: 1327393 - RNA, 19 nt, Artificial Sequence
  Description of Artificial Sequence: Synthetic oligonucleotide
  Antisense strand to SEQ ID NO: 1327392
caacucaaggucaauucug

SEQ ID NO: 1327394 - RNA, 19 nt, Artificial Sequence
  Description of Artificial Sequence: Synthetic oligonucleotide
  Sense strand starting at position 3608 of SEQ ID NO: 1242170
aauugaccuugaguuggua

SEQ ID NO: 1327395 - RNA, 19 nt, Artificial Sequence
  Description of Artificial Sequence: Synthetic oligonucleotide
  Antisense strand to SEQ ID NO: 1327394
uaccaacucaaggucaauu

SEQ ID NO: 1327396 - RNA, 19 nt, Artificial Sequence
  Description of Artificial Sequence: Synthetic oligonucleotide
  Sense strand starting at position 3611 of SEQ ID NO: 1242170
ugaccuugaguugguaagu

SEQ ID NO: 1327397 - RNA, 19 nt, Artificial Sequence
  Description of Artificial Sequence: Synthetic oligonucleotide
  Antisense strand to SEQ ID NO: 1327396
acuuaccaacucaagguca

SEQ ID NO: 1327398 - RNA, 19 nt, Artificial Sequence
  Description of Artificial Sequence: Synthetic oligonucleotide
  Sense strand starting at position 3617 of SEQ ID NO: 1242170
ugaguugguaagugcugaa

SEQ ID NO: 1327399 - RNA, 19 nt, Artificial Sequence
  Description of Artificial Sequence: Synthetic oligonucleotide
  Antisense strand to SEQ ID NO: 1327398
uucagcacuuaccaacuca

SEQ ID NO: 1327400 - RNA, 19 nt, Artificial Sequence
  Description of Artificial Sequence: Synthetic oligonucleotide
  Sense strand starting at position 3620 of SEQ ID NO: 1242170
guugguaagugcugaagcu

SEQ ID NO: 1327401 - RNA, 19 nt, Artificial Sequence
  Description of Artificial Sequence: Synthetic oligonucleotide
  Antisense strand to SEQ ID NO: 1327400
agcuucagcacuuaccaac

SEQ ID NO: 1327402 - RNA, 19 nt, Artificial Sequence
  Description of Artificial Sequence: Synthetic oligonucleotide
  Sense strand starting at position 3720 of SEQ ID NO: 1242170
gugcaauggcaggauugua

SEQ ID NO: 1327403 - RNA, 19 nt, Artificial Sequence
  Description of Artificial Sequence: Synthetic oligonucleotide
  Antisense strand to SEQ ID NO: 1327402
uacaauccugccauugcac

SEQ ID NO: 1327404 - RNA, 19 nt, Artificial Sequence
  Description of Artificial Sequence: Synthetic oligonucleotide
  Sense strand starting at position 3768 of SEQ ID NO: 1242170
cgugccuugcuagcuaauu

SEQ ID NO: 1327405 - RNA, 19 nt, Artificial Sequence
  Description of Artificial Sequence: Synthetic oligonucleotide
  Antisense strand to SEQ ID NO: 1327404
aauuagcuagcaaggcacg

SEQ ID NO: 1327406 - RNA, 19 nt, Artificial Sequence
  Description of Artificial Sequence: Synthetic oligonucleotide
  Sense strand starting at position 3769 of SEQ ID NO: 1242170
gugccuugcuagcuaauuu

SEQ ID NO: 1327407 - RNA, 19 nt, Artificial Sequence
  Description of Artificial Sequence: Synthetic oligonucleotide
  Antisense strand to SEQ ID NO: 1327406
aaauuagcuagcaaggcac

SEQ ID NO: 1327408 - RNA, 19 nt, Artificial Sequence
  Description of Artificial Sequence: Synthetic oligonucleotide
  Sense strand starting at position 3846 of SEQ ID NO: 1242170
ggcgggaucucgguugacu

SEQ ID NO: 1327409 - RNA, 19 nt, Artificial Sequence
  Description of Artificial Sequence: Synthetic oligonucleotide
  Antisense strand to SEQ ID NO: 1327408
agucaaccgagaucccgcc

SEQ ID NO: 1327410 - RNA, 19 nt, Artificial Sequence
  Description of Artificial Sequence: Synthetic oligonucleotide
  Sense strand starting at position 369 of SEQ ID NO: 1242171
ugcagacauuucugcaguu

SEQ ID NO: 1327411 - RNA, 19 nt, Artificial Sequence
  Description of Artificial Sequence: Synthetic oligonucleotide
  Antisense strand to SEQ ID NO: 1327410
aacugcagaaaugucugca

SEQ ID NO: 1327412 - RNA, 19 nt, Artificial Sequence
  Description of Artificial Sequence: Synthetic oligonucleotide
  Sense strand starting at position 382 of SEQ ID NO: 1242171
gcaguugauuauguucuua

SEQ ID NO: 1327413 - RNA, 19 nt, Artificial Sequence
  Description of Artificial Sequence: Synthetic oligonucleotide
  Antisense strand to SEQ ID NO: 1327412
uaagaacauaaucaacugc

SEQ ID NO: 1327414 - RNA, 19 nt, Artificial Sequence
  Description of Artificial Sequence: Synthetic oligonucleotide
  Sense strand starting at position 384 of SEQ ID NO: 1242171
aguugauuauguucuuacu

SEQ ID NO: 1327415 - RNA, 19 nt, Artificial Sequence
  Description of Artificial Sequence: Synthetic oligonucleotide
  Antisense strand to SEQ ID NO: 1327414
aguaagaacauaaucaacu

SEQ ID NO: 1327416 - RNA, 19 nt, Artificial Sequence
  Description of Artificial Sequence: Synthetic oligonucleotide
  Sense strand starting at position 393 of SEQ ID NO: 1242171
uguucuuacuugucccuaa

SEQ ID NO: 1327417 - RNA, 19 nt, Artificial Sequence
  Description of Artificial Sequence: Synthetic oligonucleotide
  Antisense strand to SEQ ID NO: 1327416
uuagggacaaguaagaaca

SEQ ID NO: 1327418 - RNA, 19 nt, Artificial Sequence
  Description of Artificial Sequence: Synthetic oligonucleotide
  Sense strand starting at position 397 of SEQ ID NO: 1242171
cuuacuugucccuaagaug

SEQ ID NO: 1327419 - RNA, 19 nt, Artificial Sequence
  Description of Artificial Sequence: Synthetic oligonucleotide
  Antisense strand to SEQ ID NO: 1327418
caucuuagggacaaguaag

SEQ ID NO: 1327420 - RNA, 19 nt, Artificial Sequence
  Description of Artificial Sequence: Synthetic oligonucleotide
  Sense strand starting at position 471 of SEQ ID NO: 1242171
ucccaaaucugauggugga

SEQ ID NO: 1327421 - RNA, 19 nt, Artificial Sequence
  Description of Artificial Sequence: Synthetic oligonucleotide
  Antisense strand to SEQ ID NO: 1327420
uccaccaucagauuuggga

SEQ ID NO: 1327422 - RNA, 19 nt, Artificial Sequence
  Description of Artificial Sequence: Synthetic oligonucleotide
  Sense strand starting at position 722 of SEQ ID NO: 1242171
cccuccugagccugauuaa

SEQ ID NO: 1327423 - RNA, 19 nt, Artificial Sequence
  Description of Artificial Sequence: Synthetic oligonucleotide
  Antisense strand to SEQ ID NO: 1327422
uuaaucaggcucaggaggg

SEQ ID NO: 1327424 - RNA, 19 nt, Artificial Sequence
  Description of Artificial Sequence: Synthetic oligonucleotide
  Sense strand starting at position 723 of SEQ ID NO: 1242171
ccuccugagccugauuaag

SEQ ID NO: 1327425 - RNA, 19 nt, Artificial Sequence
  Description of Artificial Sequence: Synthetic oligonucleotide
  Antisense strand to SEQ ID NO: 1327424
cuuaaucaggcucaggagg

SEQ ID NO: 1327426 - RNA, 19 nt, Artificial Sequence
  Description of Artificial Sequence: Synthetic oligonucleotide
  Sense strand starting at position 725 of SEQ ID NO: 1242171
uccugagccugauuaagaa

SEQ ID NO: 1327427 - RNA, 19 nt, Artificial Sequence
  Description of Artificial Sequence: Synthetic oligonucleotide
  Antisense strand to SEQ ID NO: 1327426
uucuuaaucaggcucagga

SEQ ID NO: 1327428 - RNA, 19 nt, Artificial Sequence
  Description of Artificial Sequence: Synthetic oligonucleotide
  Sense strand starting at position 729 of SEQ ID NO: 1242171
gagccugauuaagaagcaa

SEQ ID NO: 1327429 - RNA, 19 nt, Artificial Sequence
  Description of Artificial Sequence: Synthetic oligonucleotide
  Antisense strand to SEQ ID NO: 1327428
uugcuucuuaaucaggcuc

SEQ ID NO: 1327430 - RNA, 19 nt, Artificial Sequence
  Description of Artificial Sequence: Synthetic oligonucleotide
  Sense strand starting at position 786 of SEQ ID NO: 1242171
cggcaauucucacuaauaa

SEQ ID NO: 1327431 - RNA, 19 nt, Artificial Sequence
  Description of Artificial Sequence: Synthetic oligonucleotide
  Antisense strand to SEQ ID NO: 1327430
uuauuagugagaauugccg

SEQ ID NO: 1327432 - RNA, 19 nt, Artificial Sequence
  Description of Artificial Sequence: Synthetic oligonucleotide
  Sense strand starting at position 1449 of SEQ ID NO: 1242171
gcgccuggccguguauauu

SEQ ID NO: 1327433 - RNA, 19 nt, Artificial Sequence
  Description of Artificial Sequence: Synthetic oligonucleotide
  Antisense strand to SEQ ID NO: 1327432
aauauacacggccaggcgc

SEQ ID NO: 1327434 - RNA, 19 nt, Artificial Sequence
  Description of Artificial Sequence: Synthetic oligonucleotide
  Sense strand starting at position 1494 of SEQ ID NO: 1242171
uaggucauccaucgaaauu

SEQ ID NO: 1327435 - RNA, 19 nt, Artificial Sequence
  Description of Artificial Sequence: Synthetic oligonucleotide
  Antisense strand to SEQ ID NO: 1327434
aauuucgauggaugaccua

SEQ ID NO: 1327436 - RNA, 19 nt, Artificial Sequence
  Description of Artificial Sequence: Synthetic oligonucleotide
  Sense strand starting at position 1504 of SEQ ID NO: 1242171
aucgaaauucccuagcacu

SEQ ID NO: 1327437 - RNA, 19 nt, Artificial Sequence
  Description of Artificial Sequence: Synthetic oligonucleotide
  Antisense strand to SEQ ID NO: 1327436
agugcuagggaauuucgau

SEQ ID NO: 1327438 - RNA, 19 nt, Artificial Sequence
  Description of Artificial Sequence: Synthetic oligonucleotide
  Sense strand starting at position 1585 of SEQ ID NO: 1242171
ggcacagccaugggauaaa

SEQ ID NO: 1327439 - RNA, 19 nt, Artificial Sequence
  Description of Artificial Sequence: Synthetic oligonucleotide
  Antisense strand to SEQ ID NO: 1327438
uuuaucccauggcugugcc

SEQ ID NO: 1327440 - RNA, 19 nt, Artificial Sequence
  Description of Artificial Sequence: Synthetic oligonucleotide
  Sense strand starting at position 1872 of SEQ ID NO: 1242171
ggugaacacucccaucuuu

SEQ ID NO: 1327441 - RNA, 19 nt, Artificial Sequence
  Description of Artificial Sequence: Synthetic oligonucleotide
  Antisense strand to SEQ ID NO: 1327440
aaagaugggaguguucacc

SEQ ID NO: 1327442 - RNA, 19 nt, Artificial Sequence
  Description of Artificial Sequence: Synthetic oligonucleotide
  Sense strand starting at position 2147 of SEQ ID NO: 1242171
gcuggugacuggucaugca

SEQ ID NO: 1327443 - RNA, 19 nt, Artificial Sequence
  Description of Artificial Sequence: Synthetic oligonucleotide
  Antisense strand to SEQ ID NO: 1327442
ugcaugaccagucaccagc

SEQ ID NO: 1327444 - RNA, 19 nt, Artificial Sequence
  Description of Artificial Sequence: Synthetic oligonucleotide
  Sense strand starting at position 2328 of SEQ ID NO: 1242171
uuauuuccaucuuggugau

SEQ ID NO: 1327445 - RNA, 19 nt, Artificial Sequence
  Description of Artificial Sequence: Synthetic oligonucleotide
  Antisense strand to SEQ ID NO: 1327444
aucaccaagauggaaauaa

SEQ ID NO: 1327446 - RNA, 19 nt, Artificial Sequence
  Description of Artificial Sequence: Synthetic oligonucleotide
  Sense strand starting at position 2378 of SEQ ID NO: 1242171
acagcaaucccaggagaug

SEQ ID NO: 1327447 - RNA, 19 nt, Artificial Sequence
  Description of Artificial Sequence: Synthetic oligonucleotide
  Antisense strand to SEQ ID NO: 1327446
caucuccugggauugcugu

SEQ ID NO: 1327448 - RNA, 19 nt, Artificial Sequence
  Description of Artificial Sequence: Synthetic oligonucleotide
  Sense strand starting at position 2499 of SEQ ID NO: 1242171
ggacgaugcugcuaauaau

SEQ ID NO: 1327449 - RNA, 19 nt, Artificial Sequence
  Description of Artificial Sequence: Synthetic oligonucleotide
  Antisense strand to SEQ ID NO: 1327448
auuauuagcagcaucgucc

SEQ ID NO: 1327450 - RNA, 19 nt, Artificial Sequence
  Description of Artificial Sequence: Synthetic oligonucleotide
  Sense strand starting at position 2502 of SEQ ID NO: 1242171
cgaugcugcuaauaaucaa

SEQ ID NO: 1327451 - RNA, 19 nt, Artificial Sequence
  Description of Artificial Sequence: Synthetic oligonucleotide
  Antisense strand to SEQ ID NO: 1327450
uugauuauuagcagcaucg

SEQ ID NO: 1327452 - RNA, 19 nt, Artificial Sequence
  Description of Artificial Sequence: Synthetic oligonucleotide
  Sense strand starting at position 2509 of SEQ ID NO: 1242171
gcuaauaaucaaggccauu

SEQ ID NO: 1327453 - RNA, 19 nt, Artificial Sequence
  Description of Artificial Sequence: Synthetic oligonucleotide
  Antisense strand to SEQ ID NO: 1327452
aauggccuugauuauuagc

SEQ ID NO: 1327454 - RNA, 19 nt, Artificial Sequence
  Description of Artificial Sequence: Synthetic oligonucleotide
  Sense strand starting at position 2635 of SEQ ID NO: 1242171
cugggaagccauugagauc

SEQ ID NO: 1327455 - RNA, 19 nt, Artificial Sequence
  Description of Artificial Sequence: Synthetic oligonucleotide
  Antisense strand to SEQ ID NO: 1327454
gaucucaauggcuucccag

SEQ ID NO: 1327456 - RNA, 19 nt, Artificial Sequence
  Description of Artificial Sequence: Synthetic oligonucleotide
  Sense strand starting at position 2678 of SEQ ID NO: 1242171
cagacaagccuggaaguuu

SEQ ID NO: 1327457 - RNA, 19 nt, Artificial Sequence
  Description of Artificial Sequence: Synthetic oligonucleotide
  Antisense strand to SEQ ID NO: 1327456
aaacuuccaggcuugucug

SEQ ID NO: 1327458 - RNA, 19 nt, Artificial Sequence
  Description of Artificial Sequence: Synthetic oligonucleotide
  Sense strand starting at position 2846 of SEQ ID NO: 1242171
acucuacucccaggaaguu

SEQ ID NO: 1327459 - RNA, 19 nt, Artificial Sequence
  Description of Artificial Sequence: Synthetic oligonucleotide
  Antisense strand to SEQ ID NO: 1327458
aacuuccugggaguagagu

SEQ ID NO: 1327460 - RNA, 19 nt, Artificial Sequence
  Description of Artificial Sequence: Synthetic oligonucleotide
  Sense strand starting at position 2890 of SEQ ID NO: 1242171
caggacauauguuccuaga

SEQ ID NO: 1327461 - RNA, 19 nt, Artificial Sequence
  Description of Artificial Sequence: Synthetic oligonucleotide
  Antisense strand to SEQ ID NO: 1327460
ucuaggaacauauguccug

SEQ ID NO: 1327462 - RNA, 19 nt, Artificial Sequence
  Description of Artificial Sequence: Synthetic oligonucleotide
  Sense strand starting at position 2892 of SEQ ID NO: 1242171
ggacauauguuccuagaga

SEQ ID NO: 1327463 - RNA, 19 nt, Artificial Sequence
  Description of Artificial Sequence: Synthetic oligonucleotide
  Antisense strand to SEQ ID NO: 1327462
ucucuaggaacauaugucc

SEQ ID NO: 1327464 - RNA, 19 nt, Artificial Sequence
  Description of Artificial Sequence: Synthetic oligonucleotide
  Sense strand starting at position 2893 of SEQ ID NO: 1242171
gacauauguuccuagagag

SEQ ID NO: 1327465 - RNA, 19 nt, Artificial Sequence
  Description of Artificial Sequence: Synthetic oligonucleotide
  Antisense strand to SEQ ID NO: 1327464
cucucuaggaacauauguc

SEQ ID NO: 1327466 - RNA, 19 nt, Artificial Sequence
  Description of Artificial Sequence: Synthetic oligonucleotide
  Sense strand starting at position 2917 of SEQ ID NO: 1242171
cuaaacauguuugcaggua

SEQ ID NO: 1327467 - RNA, 19 nt, Artificial Sequence
  Description of Artificial Sequence: Synthetic oligonucleotide
  Antisense strand to SEQ ID NO: 1327466
uaccugcaaacauguuuag

SEQ ID NO: 1327468 - RNA, 19 nt, Artificial Sequence
  Description of Artificial Sequence: Synthetic oligonucleotide
  Sense strand starting at position 2918 of SEQ ID NO: 1242171
uaaacauguuugcagguaa

SEQ ID NO: 1327469 - RNA, 19 nt, Artificial Sequence
  Description of Artificial Sequence: Synthetic oligonucleotide
  Antisense strand to SEQ ID NO: 1327468
uuaccugcaaacauguuua

SEQ ID NO: 1327470 - RNA, 19 nt, Artificial Sequence
  Description of Artificial Sequence: Synthetic oligonucleotide
  Sense strand starting at position 2992 of SEQ ID NO: 1242171
gcaagaagucuucagugag

SEQ ID NO: 1327471 - RNA, 19 nt, Artificial Sequence
  Description of Artificial Sequence: Synthetic oligonucleotide
  Antisense strand to SEQ ID NO: 1327470
cucacugaagacuucuugc

SEQ ID NO: 1327472 - RNA, 19 nt, Artificial Sequence
  Description of Artificial Sequence: Synthetic oligonucleotide
  Sense strand starting at position 3174 of SEQ ID NO: 1242171
ucacauucuugggagcuga

SEQ ID NO: 1327473 - RNA, 19 nt, Artificial Sequence
  Description of Artificial Sequence: Synthetic oligonucleotide
  Antisense strand to SEQ ID NO: 1327472
ucagcucccaagaauguga

SEQ ID NO: 1327474 - RNA, 19 nt, Artificial Sequence
  Description of Artificial Sequence: Synthetic oligonucleotide
  Sense strand starting at position 3178 of SEQ ID NO: 1242171
auucuugggagcugauaga

SEQ ID NO: 1327475 - RNA, 19 nt, Artificial Sequence
  Description of Artificial Sequence: Synthetic oligonucleotide
  Antisense strand to SEQ ID NO: 1327474
ucuaucagcucccaagaau

SEQ ID NO: 1327476 - RNA, 19 nt, Artificial Sequence
  Description of Artificial Sequence: Synthetic oligonucleotide
  Sense strand starting at position 3531 of SEQ ID NO: 1242171
auuggcauucuaggagaaa

SEQ ID NO: 1327477 - RNA, 19 nt, Artificial Sequence
  Description of Artificial Sequence: Synthetic oligonucleotide
  Antisense strand to SEQ ID NO: 1327476
uuucuccuagaaugccaau

SEQ ID NO: 1327478 - RNA, 19 nt, Artificial Sequence
  Description of Artificial Sequence: Synthetic oligonucleotide
  Sense strand starting at position 3532 of SEQ ID NO: 1242171
uuggcauucuaggagaaag

SEQ ID NO: 1327479 - RNA, 19 nt, Artificial Sequence
  Description of Artificial Sequence: Synthetic oligonucleotide
  Antisense strand to SEQ ID NO: 1327478
cuuucuccuagaaugccaa

SEQ ID NO: 1327480 - RNA, 19 nt, Artificial Sequence
  Description of Artificial Sequence: Synthetic oligonucleotide
  Sense strand starting at position 3655 of SEQ ID NO: 1242171
agacaacuagcaugucaau

SEQ ID NO: 1327481 - RNA, 19 nt, Artificial Sequence
  Description of Artificial Sequence: Synthetic oligonucleotide
  Antisense strand to SEQ ID NO: 1327480
auugacaugcuaguugucu

SEQ ID NO: 1327482 - RNA, 19 nt, Artificial Sequence
  Description of Artificial Sequence: Synthetic oligonucleotide
  Sense strand starting at position 3664 of SEQ ID NO: 1242171
gcaugucaaucagaugauu

SEQ ID NO: 1327483 - RNA, 19 nt, Artificial Sequence
  Description of Artificial Sequence: Synthetic oligonucleotide
  Antisense strand to SEQ ID NO: 1327482
aaucaucugauugacaugc

SEQ ID NO: 1327484 - RNA, 19 nt, Artificial Sequence
  Description of Artificial Sequence: Synthetic oligonucleotide
  Sense strand starting at position 3685 of SEQ ID NO: 1242171
ggguuccacuaauuagagu

SEQ ID NO: 1327485 - RNA, 19 nt, Artificial Sequence
  Description of Artificial Sequence: Synthetic oligonucleotide
  Antisense strand to SEQ ID NO: 1327484
acucuaauuaguggaaccc

SEQ ID NO: 1327486 - RNA, 19 nt, Artificial Sequence
  Description of Artificial Sequence: Synthetic oligonucleotide
  Sense strand starting at position 3791 of SEQ ID NO: 1242171
acggaaagagccuguuaag

SEQ ID NO: 1327487 - RNA, 19 nt, Artificial Sequence
  Description of Artificial Sequence: Synthetic oligonucleotide
  Antisense strand to SEQ ID NO: 1327486
cuuaacaggcucuuuccgu

SEQ ID NO: 1327488 - RNA, 19 nt, Artificial Sequence
  Description of Artificial Sequence: Synthetic oligonucleotide
  Sense strand starting at position 3935 of SEQ ID NO: 1242171
gaugaaaugucauuagacu

SEQ ID NO: 1327489 - RNA, 19 nt, Artificial Sequence
  Description of Artificial Sequence: Synthetic oligonucleotide
  Antisense strand to SEQ ID NO: 1327488
agucuaaugacauuucauc

SEQ ID NO: 1327490 - RNA, 19 nt, Artificial Sequence
  Description of Artificial Sequence: Synthetic oligonucleotide
  Sense strand starting at position 105 of SEQ ID NO: 1242172
cuuucuggcccugaagacu

SEQ ID NO: 1327491 - RNA, 19 nt, Artificial Sequence
  Description of Artificial Sequence: Synthetic oligonucleotide
  Antisense strand to SEQ ID NO: 1327490
agucuucagggccagaaag

SEQ ID NO: 1327492 - RNA, 19 nt, Artificial Sequence
  Description of Artificial Sequence: Synthetic oligonucleotide
  Sense strand starting at position 114 of SEQ ID NO: 1242172
ccugaagacucagguuucu

SEQ ID NO: 1327493 - RNA, 19 nt, Artificial Sequence
  Description of Artificial Sequence: Synthetic oligonucleotide
  Antisense strand to SEQ ID NO: 1327492
agaaaccugagucuucagg

SEQ ID NO: 1327494 - RNA, 19 nt, Artificial Sequence
  Description of Artificial Sequence: Synthetic oligonucleotide
  Sense strand starting at position 188 of SEQ ID NO: 1242172
agaugcccucauugaaaug

SEQ ID NO: 1327495 - RNA, 19 nt, Artificial Sequence
  Description of Artificial Sequence: Synthetic oligonucleotide
  Antisense strand to SEQ ID NO: 1327494
cauuucaaugagggcaucu

SEQ ID NO: 1327496 - RNA, 19 nt, Artificial Sequence
  Description of Artificial Sequence: Synthetic oligonucleotide
  Sense strand starting at position 2401 of SEQ ID NO: 1242172
cccuaaagccagugcuaau

SEQ ID NO: 1327497 - RNA, 19 nt, Artificial Sequence
  Description of Artificial Sequence: Synthetic oligonucleotide
  Antisense strand to SEQ ID NO: 1327496
auuagcacuggcuuuaggg

SEQ ID NO: 1327498 - RNA, 19 nt, Artificial Sequence
  Description of Artificial Sequence: Synthetic oligonucleotide
  Sense strand starting at position 2437 of SEQ ID NO: 1242172
gcauguuccuuccaccauu

SEQ ID NO: 1327499 - RNA, 19 nt, Artificial Sequence
  Description of Artificial Sequence: Synthetic oligonucleotide
  Antisense strand to SEQ ID NO: 1327498
aaugguggaaggaacaugc

SEQ ID NO: 1327500 - RNA, 19 nt, Artificial Sequence
  Description of Artificial Sequence: Synthetic oligonucleotide
  Sense strand starting at position 2664 of SEQ ID NO: 1242172
ggguguaucccugagcuga

SEQ ID NO: 1327501 - RNA, 19 nt, Artificial Sequence
  Description of Artificial Sequence: Synthetic oligonucleotide
  Antisense strand to SEQ ID NO: 1327500
ucagcucagggauacaccc

SEQ ID NO: 1327502 - RNA, 19 nt, Artificial Sequence
  Description of Artificial Sequence: Synthetic oligonucleotide
  Sense strand starting at position 2666 of SEQ ID NO: 1242172
guguaucccugagcugaaa

SEQ ID NO: 1327503 - RNA, 19 nt, Artificial Sequence
  Description of Artificial Sequence: Synthetic oligonucleotide
  Antisense strand to SEQ ID NO: 1327502
uuucagcucagggauacac

SEQ ID NO: 1327504 - RNA, 19 nt, Artificial Sequence
  Description of Artificial Sequence: Synthetic oligonucleotide
  Sense strand starting at position 2692 of SEQ ID NO: 1242172
gugagauccugggagagau

SEQ ID NO: 1327505 - RNA, 19 nt, Artificial Sequence
  Description of Artificial Sequence: Synthetic oligonucleotide
  Antisense strand to SEQ ID NO: 1327504
aucucucccaggaucucac

SEQ ID NO: 1327506 - RNA, 19 nt, Artificial Sequence
  Description of Artificial Sequence: Synthetic oligonucleotide
  Sense strand starting at position 2718 of SEQ ID NO: 1242172
ccagacaucacguaugguu

SEQ ID NO: 1327507 - RNA, 19 nt, Artificial Sequence
  Description of Artificial Sequence: Synthetic oligonucleotide
  Antisense strand to SEQ ID NO: 1327506
aaccauacgugaugucugg

SEQ ID NO: 1327508 - RNA, 19 nt, Artificial Sequence
  Description of Artificial Sequence: Synthetic oligonucleotide
  Sense strand starting at position 2757 of SEQ ID NO: 1242172
ucugcauagccugggaaua

SEQ ID NO: 1327509 - RNA, 19 nt, Artificial Sequence
  Description of Artificial Sequence: Synthetic oligonucleotide
  Antisense strand to SEQ ID NO: 1327508
uauucccaggcuaugcaga

SEQ ID NO: 1327510 - RNA, 19 nt, Artificial Sequence
  Description of Artificial Sequence: Synthetic oligonucleotide
  Sense strand starting at position 2758 of SEQ ID NO: 1242172
cugcauagccugggaauaa

SEQ ID NO: 1327511 - RNA, 19 nt, Artificial Sequence
  Description of Artificial Sequence: Synthetic oligonucleotide
  Antisense strand to SEQ ID NO: 1327510
uuauucccaggcuaugcag

SEQ ID NO: 1327512 - RNA, 19 nt, Artificial Sequence
  Description of Artificial Sequence: Synthetic oligonucleotide
  Sense strand starting at position 2767 of SEQ ID NO: 1242172
cugggaauaacuugagugu

SEQ ID NO: 1327513 - RNA, 19 nt, Artificial Sequence
  Description of Artificial Sequence: Synthetic oligonucleotide
  Antisense strand to SEQ ID NO: 1327512
acacucaaguuauucccag

SEQ ID NO: 1327514 - RNA, 19 nt, Artificial Sequence
  Description of Artificial Sequence: Synthetic oligonucleotide
  Sense strand starting at position 2771 of SEQ ID NO: 1242172
gaauaacuugaguguacac

SEQ ID NO: 1327515 - RNA, 19 nt, Artificial Sequence
  Description of Artificial Sequence: Synthetic oligonucleotide
  Antisense strand to SEQ ID NO: 1327514
guguacacucaaguuauuc

SEQ ID NO: 1327516 - RNA, 19 nt, Artificial Sequence
  Description of Artificial Sequence: Synthetic oligonucleotide
  Sense strand starting at position 2773 of SEQ ID NO: 1242172
auaacuugaguguacacau

SEQ ID NO: 1327517 - RNA, 19 nt, Artificial Sequence
  Description of Artificial Sequence: Synthetic oligonucleotide
  Antisense strand to SEQ ID NO: 1327516
auguguacacucaaguuau

SEQ ID NO: 1327518 - RNA, 19 nt, Artificial Sequence
  Description of Artificial Sequence: Synthetic oligonucleotide
  Sense strand starting at position 2780 of SEQ ID NO: 1242172
gaguguacacauggauaaa

SEQ ID NO: 1327519 - RNA, 19 nt, Artificial Sequence
  Description of Artificial Sequence: Synthetic oligonucleotide
  Antisense strand to SEQ ID NO: 1327518
uuuauccauguguacacuc

SEQ ID NO: 1327520 - RNA, 19 nt, Artificial Sequence
  Description of Artificial Sequence: Synthetic oligonucleotide
  Sense strand starting at position 2810 of SEQ ID NO: 1242172
ggcugucuuugauauggga

SEQ ID NO: 1327521 - RNA, 19 nt, Artificial Sequence
  Description of Artificial Sequence: Synthetic oligonucleotide
  Antisense strand to SEQ ID NO: 1327520
ucccauaucaaagacagcc

SEQ ID NO: 1327522 - RNA, 19 nt, Artificial Sequence
  Description of Artificial Sequence: Synthetic oligonucleotide
  Sense strand starting at position 2812 of SEQ ID NO: 1242172
cugucuuugauaugggaca

SEQ ID NO: 1327523 - RNA, 19 nt, Artificial Sequence
  Description of Artificial Sequence: Synthetic oligonucleotide
  Antisense strand to SEQ ID NO: 1327522
ugucccauaucaaagacag

SEQ ID NO: 1327524 - RNA, 19 nt, Artificial Sequence
  Description of Artificial Sequence: Synthetic oligonucleotide
  Sense strand starting at position 2846 of SEQ ID NO: 1242172
cagagaagccaguaagcau

SEQ ID NO: 1327525 - RNA, 19 nt, Artificial Sequence
  Description of Artificial Sequence: Synthetic oligonucleotide
  Antisense strand to SEQ ID NO: 1327524
augcuuacuggcuucucug

SEQ ID NO: 1327526 - RNA, 19 nt, Artificial Sequence
  Description of Artificial Sequence: Synthetic oligonucleotide
  Sense strand starting at position 2853 of SEQ ID NO: 1242172
gccaguaagcauugaacaa

SEQ ID NO: 1327527 - RNA, 19 nt, Artificial Sequence
  Description of Artificial Sequence: Synthetic oligonucleotide
  Antisense strand to SEQ ID NO: 1327526
uuguucaaugcuuacuggc

SEQ ID NO: 1327528 - RNA, 19 nt, Artificial Sequence
  Description of Artificial Sequence: Synthetic oligonucleotide
  Sense strand starting at position 2915 of SEQ ID NO: 1242172
ggcuuagucccuuacucua

SEQ ID NO: 1327529 - RNA, 19 nt, Artificial Sequence
  Description of Artificial Sequence: Synthetic oligonucleotide
  Antisense strand to SEQ ID NO: 1327528
uagaguaagggacuaagcc

SEQ ID NO: 1327530 - RNA, 19 nt, Artificial Sequence
  Description of Artificial Sequence: Synthetic oligonucleotide
  Sense strand starting at position 2949 of SEQ ID NO: 1242172
acggcuuaccaauggaaga

SEQ ID NO: 1327531 - RNA, 19 nt, Artificial Sequence
  Description of Artificial Sequence: Synthetic oligonucleotide
  Antisense strand to SEQ ID NO: 1327530
ucuuccauugguaagccgu

SEQ ID NO: 1327532 - RNA, 19 nt, Artificial Sequence
  Description of Artificial Sequence: Synthetic oligonucleotide
  Sense strand starting at position 2950 of SEQ ID NO: 1242172
cggcuuaccaauggaagau

SEQ ID NO: 1327533 - RNA, 19 nt, Artificial Sequence
  Description of Artificial Sequence: Synthetic oligonucleotide
  Antisense strand to SEQ ID NO: 1327532
aucuuccauugguaagccg

SEQ ID NO: 1327534 - RNA, 19 nt, Artificial Sequence
  Description of Artificial Sequence: Synthetic oligonucleotide
  Sense strand starting at position 2973 of SEQ ID NO: 1242172
ccagauggcuccugagagu

SEQ ID NO: 1327535 - RNA, 19 nt, Artificial Sequence
  Description of Artificial Sequence: Synthetic oligonucleotide
  Antisense strand to SEQ ID NO: 1327534
acucucaggagccaucugg

SEQ ID NO: 1327536 - RNA, 19 nt, Artificial Sequence
  Description of Artificial Sequence: Synthetic oligonucleotide
  Sense strand starting at position 2984 of SEQ ID NO: 1242172
cugagagugcuuugggaga

SEQ ID NO: 1327537 - RNA, 19 nt, Artificial Sequence
  Description of Artificial Sequence: Synthetic oligonucleotide
  Antisense strand to SEQ ID NO: 1327536
ucucccaaagcacucucag

SEQ ID NO: 1327538 - RNA, 19 nt, Artificial Sequence
  Description of Artificial Sequence: Synthetic oligonucleotide
  Sense strand starting at position 2986 of SEQ ID NO: 1242172
gagagugcuuugggagauu

SEQ ID NO: 1327539 - RNA, 19 nt, Artificial Sequence
  Description of Artificial Sequence: Synthetic oligonucleotide
  Antisense strand to SEQ ID NO: 1327538
aaucucccaaagcacucuc

SEQ ID NO: 1327540 - RNA, 19 nt, Artificial Sequence
  Description of Artificial Sequence: Synthetic oligonucleotide
  Sense strand starting at position 2997 of SEQ ID NO: 1242172
gggagauucucuguuccuu

SEQ ID NO: 1327541 - RNA, 19 nt, Artificial Sequence
  Description of Artificial Sequence: Synthetic oligonucleotide
  Antisense strand to SEQ ID NO: 1327540
aaggaacagagaaucuccc

SEQ ID NO: 1327542 - RNA, 19 nt, Artificial Sequence
  Description of Artificial Sequence: Synthetic oligonucleotide
  Sense strand starting at position 3005 of SEQ ID NO: 1242172
cucuguuccuucugggaau

SEQ ID NO: 1327543 - RNA, 19 nt, Artificial Sequence
  Description of Artificial Sequence: Synthetic oligonucleotide
  Antisense strand to SEQ ID NO: 1327542
auucccagaaggaacagag

SEQ ID NO: 1327544 - RNA, 19 nt, Artificial Sequence
  Description of Artificial Sequence: Synthetic oligonucleotide
  Sense strand starting at position 3050 of SEQ ID NO: 1242172
guuugaacgcuuuggcauc

SEQ ID NO: 1327545 - RNA, 19 nt, Artificial Sequence
  Description of Artificial Sequence: Synthetic oligonucleotide
  Antisense strand to SEQ ID NO: 1327544
gaugccaaagcguucaaac

SEQ ID NO: 1327546 - RNA, 19 nt, Artificial Sequence
  Description of Artificial Sequence: Synthetic oligonucleotide
  Sense strand starting at position 3126 of SEQ ID NO: 1242172
ccguguuccugggaaccga

SEQ ID NO: 1327547 - RNA, 19 nt, Artificial Sequence
  Description of Artificial Sequence: Synthetic oligonucleotide
  Antisense strand to SEQ ID NO: 1327546
ucgguucccaggaacacgg

SEQ ID NO: 1327548 - RNA, 19 nt, Artificial Sequence
  Description of Artificial Sequence: Synthetic oligonucleotide
  Sense strand starting at position 3158 of SEQ ID NO: 1242172
cccucuugggcuuauaaac

SEQ ID NO: 1327549 - RNA, 19 nt, Artificial Sequence
  Description of Artificial Sequence: Synthetic oligonucleotide
  Antisense strand to SEQ ID NO: 1327548
guuuauaagcccaagaggg

SEQ ID NO: 1327550 - RNA, 19 nt, Artificial Sequence
  Description of Artificial Sequence: Synthetic oligonucleotide
  Sense strand starting at position 3167 of SEQ ID NO: 1242172
gcuuauaaacaagguauga

SEQ ID NO: 1327551 - RNA, 19 nt, Artificial Sequence
  Description of Artificial Sequence: Synthetic oligonucleotide
  Antisense strand to SEQ ID NO: 1327550
ucauaccuuguuuauaagc

SEQ ID NO: 1327552 - RNA, 19 nt, Artificial Sequence
  Description of Artificial Sequence: Synthetic oligonucleotide
  Sense strand starting at position 3180 of SEQ ID NO: 1242172
guaugaaggaccuguccuu

SEQ ID NO: 1327553 - RNA, 19 nt, Artificial Sequence
  Description of Artificial Sequence: Synthetic oligonucleotide
  Antisense strand to SEQ ID NO: 1327552
aaggacagguccuucauac

SEQ ID NO: 1327554 - RNA, 19 nt, Artificial Sequence
  Description of Artificial Sequence: Synthetic oligonucleotide
  Sense strand starting at position 3205 of SEQ ID NO: 1242172
gcuccuguauauucuuuau

SEQ ID NO: 1327555 - RNA, 19 nt, Artificial Sequence
  Description of Artificial Sequence: Synthetic oligonucleotide
  Antisense strand to SEQ ID NO: 1327554
auaaagaauauacaggagc

SEQ ID NO: 1327556 - RNA, 19 nt, Artificial Sequence
  Description of Artificial Sequence: Synthetic oligonucleotide
  Sense strand starting at position 3256 of SEQ ID NO: 1242172
ggcaacuagaguggacauu

SEQ ID NO: 1327557 - RNA, 19 nt, Artificial Sequence
  Description of Artificial Sequence: Synthetic oligonucleotide
  Antisense strand to SEQ ID NO: 1327556
aauguccacucuaguugcc

SEQ ID NO: 1327558 - RNA, 19 nt, Artificial Sequence
  Description of Artificial Sequence: Synthetic oligonucleotide
  Sense strand starting at position 3265 of SEQ ID NO: 1242172
aguggacauucuuugggaa

SEQ ID NO: 1327559 - RNA, 19 nt, Artificial Sequence
  Description of Artificial Sequence: Synthetic oligonucleotide
  Antisense strand to SEQ ID NO: 1327558
uucccaaagaauguccacu

SEQ ID NO: 1327560 - RNA, 19 nt, Artificial Sequence
  Description of Artificial Sequence: Synthetic oligonucleotide
  Sense strand starting at position 3266 of SEQ ID NO: 1242172
guggacauucuuugggaac

SEQ ID NO: 1327561 - RNA, 19 nt, Artificial Sequence
  Description of Artificial Sequence: Synthetic oligonucleotide
  Antisense strand to SEQ ID NO: 1327560
guucccaaagaauguccac

SEQ ID NO: 1327562 - RNA, 19 nt, Artificial Sequence
  Description of Artificial Sequence: Synthetic oligonucleotide
  Sense strand starting at position 3267 of SEQ ID NO: 1242172
uggacauucuuugggaacu

SEQ ID NO: 1327563 - RNA, 19 nt, Artificial Sequence
  Description of Artificial Sequence: Synthetic oligonucleotide
  Antisense strand to SEQ ID NO: 1327562
aguucccaaagaaugucca

SEQ ID NO: 1327564 - RNA, 19 nt, Artificial Sequence
  Description of Artificial Sequence: Synthetic oligonucleotide
  Sense strand starting at position 3268 of SEQ ID NO: 1242172
ggacauucuuugggaacua

SEQ ID NO: 1327565 - RNA, 19 nt, Artificial Sequence
  Description of Artificial Sequence: Synthetic oligonucleotide
  Antisense strand to SEQ ID NO: 1327564
uaguucccaaagaaugucc

SEQ ID NO: 1327566 - RNA, 19 nt, Artificial Sequence
  Description of Artificial Sequence: Synthetic oligonucleotide
  Sense strand starting at position 3921 of SEQ ID NO: 1242172
agcucuuggcgugaaaccu

SEQ ID NO: 1327567 - RNA, 19 nt, Artificial Sequence
  Description of Artificial Sequence: Synthetic oligonucleotide
  Antisense strand to SEQ ID NO: 1327566
agguuucacgccaagagcu

SEQ ID NO: 1327568 - RNA, 19 nt, Artificial Sequence
  Description of Artificial Sequence: Synthetic oligonucleotide
  Sense strand starting at position 3975 of SEQ ID NO: 1242172
ucuuaauaaggucgaauca

SEQ ID NO: 1327569 - RNA, 19 nt, Artificial Sequence
  Description of Artificial Sequence: Synthetic oligonucleotide
  Antisense strand to SEQ ID NO: 1327568
ugauucgaccuuauuaaga

SEQ ID NO: 1327570 - RNA, 19 nt, Artificial Sequence
  Description of Artificial Sequence: Synthetic oligonucleotide
  Sense strand starting at position 188 of SEQ ID NO: 1242173
gggcacauuacuuagaggu

SEQ ID NO: 1327571 - RNA, 19 nt, Artificial Sequence
  Description of Artificial Sequence: Synthetic oligonucleotide
  Antisense strand to SEQ ID NO: 1327570
accucuaaguaaugugccc

SEQ ID NO: 1327572 - RNA, 19 nt, Artificial Sequence
  Description of Artificial Sequence: Synthetic oligonucleotide
  Sense strand starting at position 190 of SEQ ID NO: 1242173
gcacauuacuuagagguga

SEQ ID NO: 1327573 - RNA, 19 nt, Artificial Sequence
  Description of Artificial Sequence: Synthetic oligonucleotide
  Antisense strand to SEQ ID NO: 1327572
ucaccucuaaguaaugugc

SEQ ID NO: 1327574 - RNA, 19 nt, Artificial Sequence
  Description of Artificial Sequence: Synthetic oligonucleotide
  Sense strand starting at position 373 of SEQ ID NO: 1242173
uccuguaauuggcuccuga

SEQ ID NO: 1327575 - RNA, 19 nt, Artificial Sequence
  Description of Artificial Sequence: Synthetic oligonucleotide
  Antisense strand to SEQ ID NO: 1327574
ucaggagccaauuacagga

SEQ ID NO: 1327576 - RNA, 19 nt, Artificial Sequence
  Description of Artificial Sequence: Synthetic oligonucleotide
  Sense strand starting at position 389 of SEQ ID NO: 1242173
ugaagcugcuccucacuaa

SEQ ID NO: 1327577 - RNA, 19 nt, Artificial Sequence
  Description of Artificial Sequence: Synthetic oligonucleotide
  Antisense strand to SEQ ID NO: 1327576
uuagugaggagcagcuuca

SEQ ID NO: 1327578 - RNA, 19 nt, Artificial Sequence
  Description of Artificial Sequence: Synthetic oligonucleotide
  Sense strand starting at position 519 of SEQ ID NO: 1242173
gggagagaaugccacuuua

SEQ ID NO: 1327579 - RNA, 19 nt, Artificial Sequence
  Description of Artificial Sequence: Synthetic oligonucleotide
  Antisense strand to SEQ ID NO: 1327578
uaaaguggcauucucuccc

SEQ ID NO: 1327580 - RNA, 19 nt, Artificial Sequence
  Description of Artificial Sequence: Synthetic oligonucleotide
  Sense strand starting at position 531 of SEQ ID NO: 1242173
cacuuuagagcuuggauau

SEQ ID NO: 1327581 - RNA, 19 nt, Artificial Sequence
  Description of Artificial Sequence: Synthetic oligonucleotide
  Antisense strand to SEQ ID NO: 1327580
auauccaagcucuaaagug

SEQ ID NO: 1327582 - RNA, 19 nt, Artificial Sequence
  Description of Artificial Sequence: Synthetic oligonucleotide
  Sense strand starting at position 532 of SEQ ID NO: 1242173
acuuuagagcuuggauaug

SEQ ID NO: 1327583 - RNA, 19 nt, Artificial Sequence
  Description of Artificial Sequence: Synthetic oligonucleotide
  Antisense strand to SEQ ID NO: 1327582
cauauccaagcucuaaagu

SEQ ID NO: 1327584 - RNA, 19 nt, Artificial Sequence
  Description of Artificial Sequence: Synthetic oligonucleotide
  Sense strand starting at position 543 of SEQ ID NO: 1242173
uggauaugcucccuccaca

SEQ ID NO: 1327585 - RNA, 19 nt, Artificial Sequence
  Description of Artificial Sequence: Synthetic oligonucleotide
  Antisense strand to SEQ ID NO: 1327584
uguggagggagcauaucca

SEQ ID NO: 1327586 - RNA, 19 nt, Artificial Sequence
  Description of Artificial Sequence: Synthetic oligonucleotide
  Sense strand starting at position 777 of SEQ ID NO: 1242173
gcaucuagcacuuagagga

SEQ ID NO: 1327587 - RNA, 19 nt, Artificial Sequence
  Description of Artificial Sequence: Synthetic oligonucleotide
  Antisense strand to SEQ ID NO: 1327586
uccucuaagugcuagaugc

SEQ ID NO: 1327588 - RNA, 19 nt, Artificial Sequence
  Description of Artificial Sequence: Synthetic oligonucleotide
  Sense strand starting at position 823 of SEQ ID NO: 1242173
gggcgcugugcuugaugua

SEQ ID NO: 1327589 - RNA, 19 nt, Artificial Sequence
  Description of Artificial Sequence: Synthetic oligonucleotide
  Antisense strand to SEQ ID NO: 1327588
uacaucaagcacagcgccc

SEQ ID NO: 1327590 - RNA, 19 nt, Artificial Sequence
  Description of Artificial Sequence: Synthetic oligonucleotide
  Sense strand starting at position 828 of SEQ ID NO: 1242173
cugugcuugauguacagua

SEQ ID NO: 1327591 - RNA, 19 nt, Artificial Sequence
  Description of Artificial Sequence: Synthetic oligonucleotide
  Antisense strand to SEQ ID NO: 1327590
uacuguacaucaagcacag

SEQ ID NO: 1327592 - RNA, 19 nt, Artificial Sequence
  Description of Artificial Sequence: Synthetic oligonucleotide
  Sense strand starting at position 1174 of SEQ ID NO: 1242173
agcagaaaccuuggacacu

SEQ ID NO: 1327593 - RNA, 19 nt, Artificial Sequence
  Description of Artificial Sequence: Synthetic oligonucleotide
  Antisense strand to SEQ ID NO: 1327592
aguguccaagguuucugcu

SEQ ID NO: 1327594 - RNA, 19 nt, Artificial Sequence
  Description of Artificial Sequence: Synthetic oligonucleotide
  Sense strand starting at position 1370 of SEQ ID NO: 1242173
ccagaaacgucuucccucu

SEQ ID NO: 1327595 - RNA, 19 nt, Artificial Sequence
  Description of Artificial Sequence: Synthetic oligonucleotide
  Antisense strand to SEQ ID NO: 1327594
agagggaagacguuucugg

SEQ ID NO: 1327596 - RNA, 19 nt, Artificial Sequence
  Description of Artificial Sequence: Synthetic oligonucleotide
  Sense strand starting at position 1372 of SEQ ID NO: 1242173
agaaacgucuucccucuaa

SEQ ID NO: 1327597 - RNA, 19 nt, Artificial Sequence
  Description of Artificial Sequence: Synthetic oligonucleotide
  Antisense strand to SEQ ID NO: 1327596
uuagagggaagacguuucu

SEQ ID NO: 1327598 - RNA, 19 nt, Artificial Sequence
  Description of Artificial Sequence: Synthetic oligonucleotide
  Sense strand starting at position 1376 of SEQ ID NO: 1242173
acgucuucccucuaaguca

SEQ ID NO: 1327599 - RNA, 19 nt, Artificial Sequence
  Description of Artificial Sequence: Synthetic oligonucleotide
  Antisense strand to SEQ ID NO: 1327598
ugacuuagagggaagacgu

SEQ ID NO: 1327600 - RNA, 19 nt, Artificial Sequence
  Description of Artificial Sequence: Synthetic oligonucleotide
  Sense strand starting at position 1388 of SEQ ID NO: 1242173
uaagucaugccucggagga

SEQ ID NO: 1327601 - RNA, 19 nt, Artificial Sequence
  Description of Artificial Sequence: Synthetic oligonucleotide
  Antisense strand to SEQ ID NO: 1327600
uccuccgaggcaugacuua

SEQ ID NO: 1327602 - RNA, 19 nt, Artificial Sequence
  Description of Artificial Sequence: Synthetic oligonucleotide
  Sense strand starting at position 1389 of SEQ ID NO: 1242173
aagucaugccucggaggaa

SEQ ID NO: 1327603 - RNA, 19 nt, Artificial Sequence
  Description of Artificial Sequence: Synthetic oligonucleotide
  Antisense strand to SEQ ID NO: 1327602
uuccuccgaggcaugacuu

SEQ ID NO: 1327604 - RNA, 19 nt, Artificial Sequence
  Description of Artificial Sequence: Synthetic oligonucleotide
  Sense strand starting at position 1390 of SEQ ID NO: 1242173
agucaugccucggaggaau

SEQ ID NO: 1327605 - RNA, 19 nt, Artificial Sequence
  Description of Artificial Sequence: Synthetic oligonucleotide
  Antisense strand to SEQ ID NO: 1327604
auuccuccgaggcaugacu

SEQ ID NO: 1327606 - RNA, 19 nt, Artificial Sequence
  Description of Artificial Sequence: Synthetic oligonucleotide
  Sense strand starting at position 1472 of SEQ ID NO: 1242173
ccaucaggcucugcagaau

SEQ ID NO: 1327607 - RNA, 19 nt, Artificial Sequence
  Description of Artificial Sequence: Synthetic oligonucleotide
  Antisense strand to SEQ ID NO: 1327606
auucugcagagccugaugg

SEQ ID NO: 1327608 - RNA, 19 nt, Artificial Sequence
  Description of Artificial Sequence: Synthetic oligonucleotide
  Sense strand starting at position 1478 of SEQ ID NO: 1242173
ggcucugcagaauguaauc

SEQ ID NO: 1327609 - RNA, 19 nt, Artificial Sequence
  Description of Artificial Sequence: Synthetic oligonucleotide
  Antisense strand to SEQ ID NO: 1327608
gauuacauucugcagagcc

SEQ ID NO: 1327610 - RNA, 19 nt, Artificial Sequence
  Description of Artificial Sequence: Synthetic oligonucleotide
  Sense strand starting at position 1483 of SEQ ID NO: 1242173
ugcagaauguaauccgcau

SEQ ID NO: 1327611 - RNA, 19 nt, Artificial Sequence
  Description of Artificial Sequence: Synthetic oligonucleotide
  Antisense strand to SEQ ID NO: 1327610
augcggauuacauucugca

SEQ ID NO: 1327612 - RNA, 19 nt, Artificial Sequence
  Description of Artificial Sequence: Synthetic oligonucleotide
  Sense strand starting at position 1575 of SEQ ID NO: 1242173
caucuucgagcuugucuau

SEQ ID NO: 1327613 - RNA, 19 nt, Artificial Sequence
  Description of Artificial Sequence: Synthetic oligonucleotide
  Antisense strand to SEQ ID NO: 1327612
auagacaagcucgaagaug

SEQ ID NO: 1327614 - RNA, 19 nt, Artificial Sequence
  Description of Artificial Sequence: Synthetic oligonucleotide
  Sense strand starting at position 1815 of SEQ ID NO: 1242173
agauguaacucaugcacga

SEQ ID NO: 1327615 - RNA, 19 nt, Artificial Sequence
  Description of Artificial Sequence: Synthetic oligonucleotide
  Antisense strand to SEQ ID NO: 1327614
ucgugcaugaguuacaucu

SEQ ID NO: 1327616 - RNA, 19 nt, Artificial Sequence
  Description of Artificial Sequence: Synthetic oligonucleotide
  Sense strand starting at position 2217 of SEQ ID NO: 1242173
cgucguuccucucugaaga

SEQ ID NO: 1327617 - RNA, 19 nt, Artificial Sequence
  Description of Artificial Sequence: Synthetic oligonucleotide
  Antisense strand to SEQ ID NO: 1327616
ucuucagagaggaacgacg

SEQ ID NO: 1327618 - RNA, 19 nt, Artificial Sequence
  Description of Artificial Sequence: Synthetic oligonucleotide
  Sense strand starting at position 2218 of SEQ ID NO: 1242173
gucguuccucucugaagac

SEQ ID NO: 1327619 - RNA, 19 nt, Artificial Sequence
  Description of Artificial Sequence: Synthetic oligonucleotide
  Antisense strand to SEQ ID NO: 1327618
gucuucagagaggaacgac

SEQ ID NO: 1327620 - RNA, 19 nt, Artificial Sequence
  Description of Artificial Sequence: Synthetic oligonucleotide
  Sense strand starting at position 2710 of SEQ ID NO: 1242173
guuccugaucucugucacu

SEQ ID NO: 1327621 - RNA, 19 nt, Artificial Sequence
  Description of Artificial Sequence: Synthetic oligonucleotide
  Antisense strand to SEQ ID NO: 1327620
agugacagagaucaggaac

SEQ ID NO: 1327622 - RNA, 19 nt, Artificial Sequence
  Description of Artificial Sequence: Synthetic oligonucleotide
  Sense strand starting at position 2721 of SEQ ID NO: 1242173
cugucacucucugggugaa

SEQ ID NO: 1327623 - RNA, 19 nt, Artificial Sequence
  Description of Artificial Sequence: Synthetic oligonucleotide
  Antisense strand to SEQ ID NO: 1327622
uucacccagagagugacag

SEQ ID NO: 1327624 - RNA, 19 nt, Artificial Sequence
  Description of Artificial Sequence: Synthetic oligonucleotide
  Sense strand starting at position 2812 of SEQ ID NO: 1242173
caggccaucguuugagauc

SEQ ID NO: 1327625 - RNA, 19 nt, Artificial Sequence
  Description of Artificial Sequence: Synthetic oligonucleotide
  Antisense strand to SEQ ID NO: 1327624
gaucucaaacgauggccug

SEQ ID NO: 1327626 - RNA, 19 nt, Artificial Sequence
  Description of Artificial Sequence: Synthetic oligonucleotide
  Sense strand starting at position 2813 of SEQ ID NO: 1242173
aggccaucguuugagauca

SEQ ID NO: 1327627 - RNA, 19 nt, Artificial Sequence
  Description of Artificial Sequence: Synthetic oligonucleotide
  Antisense strand to SEQ ID NO: 1327626
ugaucucaaacgauggccu

SEQ ID NO: 1327628 - RNA, 19 nt, Artificial Sequence
  Description of Artificial Sequence: Synthetic oligonucleotide
  Sense strand starting at position 2844 of SEQ ID NO: 1242173
uuaaguggacucugagauc

SEQ ID NO: 1327629 - RNA, 19 nt, Artificial Sequence
  Description of Artificial Sequence: Synthetic oligonucleotide
  Antisense strand to SEQ ID NO: 1327628
gaucucagaguccacuuaa

SEQ ID NO: 1327630 - RNA, 19 nt, Artificial Sequence
  Description of Artificial Sequence: Synthetic oligonucleotide
  Sense strand starting at position 2847 of SEQ ID NO: 1242173
aguggacucugagauccau

SEQ ID NO: 1327631 - RNA, 19 nt, Artificial Sequence
  Description of Artificial Sequence: Synthetic oligonucleotide
  Antisense strand to SEQ ID NO: 1327630
auggaucucagaguccacu

SEQ ID NO: 1327632 - RNA, 19 nt, Artificial Sequence
  Description of Artificial Sequence: Synthetic oligonucleotide
  Sense strand starting at position 2857 of SEQ ID NO: 1242173
gagauccauugccaugaca

SEQ ID NO: 1327633 - RNA, 19 nt, Artificial Sequence
  Description of Artificial Sequence: Synthetic oligonucleotide
  Antisense strand to SEQ ID NO: 1327632
ugucauggcaauggaucuc

SEQ ID NO: 1327634 - RNA, 19 nt, Artificial Sequence
  Description of Artificial Sequence: Synthetic oligonucleotide
  Sense strand starting at position 2880 of SEQ ID NO: 1242173
ggguaagagucucauugcu

SEQ ID NO: 1327635 - RNA, 19 nt, Artificial Sequence
  Description of Artificial Sequence: Synthetic oligonucleotide
  Antisense strand to SEQ ID NO: 1327634
agcaaugagacucuuaccc

SEQ ID NO: 1327636 - RNA, 19 nt, Artificial Sequence
  Description of Artificial Sequence: Synthetic oligonucleotide
  Sense strand starting at position 2882 of SEQ ID NO: 1242173
guaagagucucauugcuug

SEQ ID NO: 1327637 - RNA, 19 nt, Artificial Sequence
  Description of Artificial Sequence: Synthetic oligonucleotide
  Antisense strand to SEQ ID NO: 1327636
caagcaaugagacucuuac

SEQ ID NO: 1327638 - RNA, 19 nt, Artificial Sequence
  Description of Artificial Sequence: Synthetic oligonucleotide
  Sense strand starting at position 2886 of SEQ ID NO: 1242173
gagucucauugcuugagga

SEQ ID NO: 1327639 - RNA, 19 nt, Artificial Sequence
  Description of Artificial Sequence: Synthetic oligonucleotide
  Antisense strand to SEQ ID NO: 1327638
uccucaagcaaugagacuc

SEQ ID NO: 1327640 - RNA, 19 nt, Artificial Sequence
  Description of Artificial Sequence: Synthetic oligonucleotide
  Sense strand starting at position 2887 of SEQ ID NO: 1242173
agucucauugcuugaggaa

SEQ ID NO: 1327641 - RNA, 19 nt, Artificial Sequence
  Description of Artificial Sequence: Synthetic oligonucleotide
  Antisense strand to SEQ ID NO: 1327640
uuccucaagcaaugagacu

SEQ ID NO: 1327642 - RNA, 19 nt, Artificial Sequence
  Description of Artificial Sequence: Synthetic oligonucleotide
  Sense strand starting at position 2888 of SEQ ID NO: 1242173
gucucauugcuugaggaaa

SEQ ID NO: 1327643 - RNA, 19 nt, Artificial Sequence
  Description of Artificial Sequence: Synthetic oligonucleotide
  Antisense strand to SEQ ID NO: 1327642
uuuccucaagcaaugagac

SEQ ID NO: 1327644 - RNA, 19 nt, Artificial Sequence
  Description of Artificial Sequence: Synthetic oligonucleotide
  Sense strand starting at position 2994 of SEQ ID NO: 1242173
ucucauaaccaagaguguu

SEQ ID NO: 1327645 - RNA, 19 nt, Artificial Sequence
  Description of Artificial Sequence: Synthetic oligonucleotide
  Antisense strand to SEQ ID NO: 1327644
aacacucuugguuaugaga

SEQ ID NO: 1327646 - RNA, 19 nt, Artificial Sequence
  Description of Artificial Sequence: Synthetic oligonucleotide
  Sense strand starting at position 3293 of SEQ ID NO: 1242173
gguagugagccgccaugua

SEQ ID NO: 1327647 - RNA, 19 nt, Artificial Sequence
  Description of Artificial Sequence: Synthetic oligonucleotide
  Antisense strand to SEQ ID NO: 1327646
uacauggcggcucacuacc

SEQ ID NO: 1327648 - RNA, 19 nt, Artificial Sequence
  Description of Artificial Sequence: Synthetic oligonucleotide
  Sense strand starting at position 3370 of SEQ ID NO: 1242173
aguacaacugcauguauua

SEQ ID NO: 1327649 - RNA, 19 nt, Artificial Sequence
  Description of Artificial Sequence: Synthetic oligonucleotide
  Antisense strand to SEQ ID NO: 1327648
uaauacaugcaguuguacu

SEQ ID NO: 1327650 - RNA, 19 nt, Artificial Sequence
  Description of Artificial Sequence: Synthetic oligonucleotide
  Sense strand starting at position 349 of SEQ ID NO: 1242174
aucugucuauugucaauaa

SEQ ID NO: 1327651 - RNA, 19 nt, Artificial Sequence
  Description of Artificial Sequence: Synthetic oligonucleotide
  Antisense strand to SEQ ID NO: 1327650
uuauugacaauagacagau

SEQ ID NO: 1327652 - RNA, 19 nt, Artificial Sequence
  Description of Artificial Sequence: Synthetic oligonucleotide
  Sense strand starting at position 572 of SEQ ID NO: 1242174
acauguauccagggacuua

SEQ ID NO: 1327653 - RNA, 19 nt, Artificial Sequence
  Description of Artificial Sequence: Synthetic oligonucleotide
  Antisense strand to SEQ ID NO: 1327652
uaagucccuggauacaugu

SEQ ID NO: 1327654 - RNA, 19 nt, Artificial Sequence
  Description of Artificial Sequence: Synthetic oligonucleotide
  Sense strand starting at position 605 of SEQ ID NO: 1242174
gccuucuaauaucugauga

SEQ ID NO: 1327655 - RNA, 19 nt, Artificial Sequence
  Description of Artificial Sequence: Synthetic oligonucleotide
  Antisense strand to SEQ ID NO: 1327654
ucaucagauauuagaaggc

SEQ ID NO: 1327656 - RNA, 19 nt, Artificial Sequence
  Description of Artificial Sequence: Synthetic oligonucleotide
  Sense strand starting at position 632 of SEQ ID NO: 1242174
agaacauugcaagguugau

SEQ ID NO: 1327657 - RNA, 19 nt, Artificial Sequence
  Description of Artificial Sequence: Synthetic oligonucleotide
  Antisense strand to SEQ ID NO: 1327656
aucaaccuugcaauguucu

SEQ ID NO: 1327658 - RNA, 19 nt, Artificial Sequence
  Description of Artificial Sequence: Synthetic oligonucleotide
  Sense strand starting at position 779 of SEQ ID NO: 1242174
gaguuucucagaggguaac

SEQ ID NO: 1327659 - RNA, 19 nt, Artificial Sequence
  Description of Artificial Sequence: Synthetic oligonucleotide
  Antisense strand to SEQ ID NO: 1327658
guuacccucugagaaacuc

SEQ ID NO: 1327660 - RNA, 19 nt, Artificial Sequence
  Description of Artificial Sequence: Synthetic oligonucleotide
  Sense strand starting at position 780 of SEQ ID NO: 1242174
aguuucucagaggguaaca

SEQ ID NO: 1327661 - RNA, 19 nt, Artificial Sequence
  Description of Artificial Sequence: Synthetic oligonucleotide
  Antisense strand to SEQ ID NO: 1327660
uguuacccucugagaaacu

SEQ ID NO: 1327662 - RNA, 19 nt, Artificial Sequence
  Description of Artificial Sequence: Synthetic oligonucleotide
  Sense strand starting at position 924 of SEQ ID NO: 1242174
gaauguucuggcugggauu

SEQ ID NO: 1327663 - RNA, 19 nt, Artificial Sequence
  Description of Artificial Sequence: Synthetic oligonucleotide
  Antisense strand to SEQ ID NO: 1327662
aaucccagccagaacauuc

SEQ ID NO: 1327664 - RNA, 19 nt, Artificial Sequence
  Description of Artificial Sequence: Synthetic oligonucleotide
  Sense strand starting at position 1099 of SEQ ID NO: 1242174
agccuuuaacaagguaauu

SEQ ID NO: 1327665 - RNA, 19 nt, Artificial Sequence
  Description of Artificial Sequence: Synthetic oligonucleotide
  Antisense strand to SEQ ID NO: 1327664
aauuaccuuguuaaaggcu

SEQ ID NO: 1327666 - RNA, 19 nt, Artificial Sequence
  Description of Artificial Sequence: Synthetic oligonucleotide
  Sense strand starting at position 1163 of SEQ ID NO: 1242174
cuaccucuuguauaguuau

SEQ ID NO: 1327667 - RNA, 19 nt, Artificial Sequence
  Description of Artificial Sequence: Synthetic oligonucleotide
  Antisense strand to SEQ ID NO: 1327666
auaacuauacaagagguag

SEQ ID NO: 1327668 - RNA, 19 nt, Artificial Sequence
  Description of Artificial Sequence: Synthetic oligonucleotide
  Sense strand starting at position 1252 of SEQ ID NO: 1242174
agcuuucugacaggugaac

SEQ ID NO: 1327669 - RNA, 19 nt, Artificial Sequence
  Description of Artificial Sequence: Synthetic oligonucleotide
  Antisense strand to SEQ ID NO: 1327668
guucaccugucagaaagcu

SEQ ID NO: 1327670 - RNA, 19 nt, Artificial Sequence
  Description of Artificial Sequence: Synthetic oligonucleotide
  Sense strand starting at position 1416 of SEQ ID NO: 1242174
uuccuaacgcuggagauua

SEQ ID NO: 1327671 - RNA, 19 nt, Artificial Sequence
  Description of Artificial Sequence: Synthetic oligonucleotide
  Antisense strand to SEQ ID NO: 1327670
uaaucuccagcguuaggaa

SEQ ID NO: 1327672 - RNA, 19 nt, Artificial Sequence
  Description of Artificial Sequence: Synthetic oligonucleotide
  Sense strand starting at position 1551 of SEQ ID NO: 1242174
cacugagaucguuacaguu

SEQ ID NO: 1327673 - RNA, 19 nt, Artificial Sequence
  Description of Artificial Sequence: Synthetic oligonucleotide
  Antisense strand to SEQ ID NO: 1327672
aacuguaacgaucucagug

SEQ ID NO: 1327674 - RNA, 19 nt, Artificial Sequence
  Description of Artificial Sequence: Synthetic oligonucleotide
  Sense strand starting at position 1557 of SEQ ID NO: 1242174
gaucguuacaguugggaag

SEQ ID NO: 1327675 - RNA, 19 nt, Artificial Sequence
  Description of Artificial Sequence: Synthetic oligonucleotide
  Antisense strand to SEQ ID NO: 1327674
cuucccaacuguaacgauc

SEQ ID NO: 1327676 - RNA, 19 nt, Artificial Sequence
  Description of Artificial Sequence: Synthetic oligonucleotide
  Sense strand starting at position 2010 of SEQ ID NO: 1242174
acggaaccucgcgauaauc

SEQ ID NO: 1327677 - RNA, 19 nt, Artificial Sequence
  Description of Artificial Sequence: Synthetic oligonucleotide
  Antisense strand to SEQ ID NO: 1327676
gauuaucgcgagguuccgu

SEQ ID NO: 1327678 - RNA, 19 nt, Artificial Sequence
  Description of Artificial Sequence: Synthetic oligonucleotide
  Sense strand starting at position 2074 of SEQ ID NO: 1242174
uugccaagcgaucugugua

SEQ ID NO: 1327679 - RNA, 19 nt, Artificial Sequence
  Description of Artificial Sequence: Synthetic oligonucleotide
  Antisense strand to SEQ ID NO: 1327678
uacacagaucgcuuggcaa

SEQ ID NO: 1327680 - RNA, 19 nt, Artificial Sequence
  Description of Artificial Sequence: Synthetic oligonucleotide
  Sense strand starting at position 2208 of SEQ ID NO: 1242174
gguaauuuagucggcucca

SEQ ID NO: 1327681 - RNA, 19 nt, Artificial Sequence
  Description of Artificial Sequence: Synthetic oligonucleotide
  Antisense strand to SEQ ID NO: 1327680
uggagccgacuaaauuacc

SEQ ID NO: 1327682 - RNA, 19 nt, Artificial Sequence
  Description of Artificial Sequence: Synthetic oligonucleotide
  Sense strand starting at position 2209 of SEQ ID NO: 1242174
guaauuuagucggcuccaa

SEQ ID NO: 1327683 - RNA, 19 nt, Artificial Sequence
  Description of Artificial Sequence: Synthetic oligonucleotide
  Antisense strand to SEQ ID NO: 1327682
uuggagccgacuaaauuac

SEQ ID NO: 1327684 - RNA, 19 nt, Artificial Sequence
  Description of Artificial Sequence: Synthetic oligonucleotide
  Sense strand starting at position 2348 of SEQ ID NO: 1242174
cuaagagcuguuuauagau

SEQ ID NO: 1327685 - RNA, 19 nt, Artificial Sequence
  Description of Artificial Sequence: Synthetic oligonucleotide
  Antisense strand to SEQ ID NO: 1327684
aucuauaaacagcucuuag

SEQ ID NO: 1327686 - RNA, 19 nt, Artificial Sequence
  Description of Artificial Sequence: Synthetic oligonucleotide
  Sense strand starting at position 2362 of SEQ ID NO: 1242174
uagauuaucucguugaacc

SEQ ID NO: 1327687 - RNA, 19 nt, Artificial Sequence
  Description of Artificial Sequence: Synthetic oligonucleotide
  Antisense strand to SEQ ID NO: 1327686
gguucaacgagauaaucua

SEQ ID NO: 1327688 - RNA, 19 nt, Artificial Sequence
  Description of Artificial Sequence: Synthetic oligonucleotide
  Sense strand starting at position 2447 of SEQ ID NO: 1242174
gguuuauguaacgaagcca

SEQ ID NO: 1327689 - RNA, 19 nt, Artificial Sequence
  Description of Artificial Sequence: Synthetic oligonucleotide
  Antisense strand to SEQ ID NO: 1327688
uggcuucguuacauaaacc

SEQ ID NO: 1327690 - RNA, 19 nt, Artificial Sequence
  Description of Artificial Sequence: Synthetic oligonucleotide
  Sense strand starting at position 2461 of SEQ ID NO: 1242174
agccaacguuauuuagcaa

SEQ ID NO: 1327691 - RNA, 19 nt, Artificial Sequence
  Description of Artificial Sequence: Synthetic oligonucleotide
  Antisense strand to SEQ ID NO: 1327690
uugcuaaauaacguuggcu

SEQ ID NO: 1327692 - RNA, 19 nt, Artificial Sequence
  Description of Artificial Sequence: Synthetic oligonucleotide
  Sense strand starting at position 2464 of SEQ ID NO: 1242174
caacguuauuuagcaagua

SEQ ID NO: 1327693 - RNA, 19 nt, Artificial Sequence
  Description of Artificial Sequence: Synthetic oligonucleotide
  Antisense strand to SEQ ID NO: 1327692
uacuugcuaaauaacguug

SEQ ID NO: 1327694 - RNA, 19 nt, Artificial Sequence
  Description of Artificial Sequence: Synthetic oligonucleotide
  Sense strand starting at position 2509 of SEQ ID NO: 1242174
gucacuacgaacugguaga

SEQ ID NO: 1327695 - RNA, 19 nt, Artificial Sequence
  Description of Artificial Sequence: Synthetic oligonucleotide
  Antisense strand to SEQ ID NO: 1327694
ucuaccaguucguagugac

SEQ ID NO: 1327696 - RNA, 19 nt, Artificial Sequence
  Description of Artificial Sequence: Synthetic oligonucleotide
  Sense strand starting at position 2510 of SEQ ID NO: 1242174
ucacuacgaacugguagau

SEQ ID NO: 1327697 - RNA, 19 nt, Artificial Sequence
  Description of Artificial Sequence: Synthetic oligonucleotide
  Antisense strand to SEQ ID NO: 1327696
aucuaccaguucguaguga

SEQ ID NO: 1327698 - RNA, 19 nt, Artificial Sequence
  Description of Artificial Sequence: Synthetic oligonucleotide
  Sense strand starting at position 2586 of SEQ ID NO: 1242174
uugaguaaagauugcuaaa

SEQ ID NO: 1327699 - RNA, 19 nt, Artificial Sequence
  Description of Artificial Sequence: Synthetic oligonucleotide
  Antisense strand to SEQ ID NO: 1327698
uuuagcaaucuuuacucaa

SEQ ID NO: 1327700 - RNA, 19 nt, Artificial Sequence
  Description of Artificial Sequence: Synthetic oligonucleotide
  Sense strand starting at position 2611 of SEQ ID NO: 1242174
aggaacaauuuagagaguu

SEQ ID NO: 1327701 - RNA, 19 nt, Artificial Sequence
  Description of Artificial Sequence: Synthetic oligonucleotide
  Antisense strand to SEQ ID NO: 1327700
aacucucuaaauuguuccu

SEQ ID NO: 1327702 - RNA, 19 nt, Artificial Sequence
  Description of Artificial Sequence: Synthetic oligonucleotide
  Sense strand starting at position 2657 of SEQ ID NO: 1242174
ugaguaggccgucaauaug

SEQ ID NO: 1327703 - RNA, 19 nt, Artificial Sequence
  Description of Artificial Sequence: Synthetic oligonucleotide
  Antisense strand to SEQ ID NO: 1327702
cauauugacggccuacuca

SEQ ID NO: 1327704 - RNA, 19 nt, Artificial Sequence
  Description of Artificial Sequence: Synthetic oligonucleotide
  Sense strand starting at position 2705 of SEQ ID NO: 1242174
agcgaaauagcaugaaaga

SEQ ID NO: 1327705 - RNA, 19 nt, Artificial Sequence
  Description of Artificial Sequence: Synthetic oligonucleotide
  Antisense strand to SEQ ID NO: 1327704
ucuuucaugcuauuucgcu

SEQ ID NO: 1327706 - RNA, 19 nt, Artificial Sequence
  Description of Artificial Sequence: Synthetic oligonucleotide
  Sense strand starting at position 2945 of SEQ ID NO: 1242174
uuuacaguugcugacuuaa

SEQ ID NO: 1327707 - RNA, 19 nt, Artificial Sequence
  Description of Artificial Sequence: Synthetic oligonucleotide
  Antisense strand to SEQ ID NO: 1327706
uuaagucagcaacuguaaa

SEQ ID NO: 1327708 - RNA, 19 nt, Artificial Sequence
  Description of Artificial Sequence: Synthetic oligonucleotide
  Sense strand starting at position 3124 of SEQ ID NO: 1242174
uuucuaagauaguuucgga

SEQ ID NO: 1327709 - RNA, 19 nt, Artificial Sequence
  Description of Artificial Sequence: Synthetic oligonucleotide
  Antisense strand to SEQ ID NO: 1327708
uccgaaacuaucuuagaaa

SEQ ID NO: 1327710 - RNA, 19 nt, Artificial Sequence
  Description of Artificial Sequence: Synthetic oligonucleotide
  Sense strand starting at position 3132 of SEQ ID NO: 1242174
auaguuucggaauaccuaa

SEQ ID NO: 1327711 - RNA, 19 nt, Artificial Sequence
  Description of Artificial Sequence: Synthetic oligonucleotide
  Antisense strand to SEQ ID NO: 1327710
uuagguauuccgaaacuau

SEQ ID NO: 1327712 - RNA, 19 nt, Artificial Sequence
  Description of Artificial Sequence: Synthetic oligonucleotide
  Sense strand starting at position 3153 of SEQ ID NO: 1242174
auucguggcacucagaaau

SEQ ID NO: 1327713 - RNA, 19 nt, Artificial Sequence
  Description of Artificial Sequence: Synthetic oligonucleotide
  Antisense strand to SEQ ID NO: 1327712
auuucugagugccacgaau

SEQ ID NO: 1327714 - RNA, 19 nt, Artificial Sequence
  Description of Artificial Sequence: Synthetic oligonucleotide
  Sense strand starting at position 3466 of SEQ ID NO: 1242174
guuaccaagugauuauauu

SEQ ID NO: 1327715 - RNA, 19 nt, Artificial Sequence
  Description of Artificial Sequence: Synthetic oligonucleotide
  Antisense strand to SEQ ID NO: 1327714
aauauaaucacuugguaac

SEQ ID NO: 1327716 - RNA, 19 nt, Artificial Sequence
  Description of Artificial Sequence: Synthetic oligonucleotide
  Sense strand starting at position 3689 of SEQ ID NO: 1242174
cccaaagauugguuugcaa

SEQ ID NO: 1327717 - RNA, 19 nt, Artificial Sequence
  Description of Artificial Sequence: Synthetic oligonucleotide
  Antisense strand to SEQ ID NO: 1327716
uugcaaaccaaucuuuggg

SEQ ID NO: 1327718 - RNA, 19 nt, Artificial Sequence
  Description of Artificial Sequence: Synthetic oligonucleotide
  Sense strand starting at position 3691 of SEQ ID NO: 1242174
caaagauugguuugcaaac

SEQ ID NO: 1327719 - RNA, 19 nt, Artificial Sequence
  Description of Artificial Sequence: Synthetic oligonucleotide
  Antisense strand to SEQ ID NO: 1327718
guuugcaaaccaaucuuug

SEQ ID NO: 1327720 - RNA, 19 nt, Artificial Sequence
  Description of Artificial Sequence: Synthetic oligonucleotide
  Sense strand starting at position 3692 of SEQ ID NO: 1242174
aaagauugguuugcaaacu

SEQ ID NO: 1327721 - RNA, 19 nt, Artificial Sequence
  Description of Artificial Sequence: Synthetic oligonucleotide
  Antisense strand to SEQ ID NO: 1327720
aguuugcaaaccaaucuuu

SEQ ID NO: 1327722 - RNA, 19 nt, Artificial Sequence
  Description of Artificial Sequence: Synthetic oligonucleotide
  Sense strand starting at position 3816 of SEQ ID NO: 1242174
ccggaacugcccuacuuua

SEQ ID NO: 1327723 - RNA, 19 nt, Artificial Sequence
  Description of Artificial Sequence: Synthetic oligonucleotide
  Antisense strand to SEQ ID NO: 1327722
uaaaguagggcaguuccgg

SEQ ID NO: 1327724 - RNA, 19 nt, Artificial Sequence
  Description of Artificial Sequence: Synthetic oligonucleotide
  Sense strand starting at position 3846 of SEQ ID NO: 1242174
gguuaucaaucuguacaaa

SEQ ID NO: 1327725 - RNA, 19 nt, Artificial Sequence
  Description of Artificial Sequence: Synthetic oligonucleotide
  Antisense strand to SEQ ID NO: 1327724
uuuguacagauugauaacc

SEQ ID NO: 1327726 - RNA, 19 nt, Artificial Sequence
  Description of Artificial Sequence: Synthetic oligonucleotide
  Sense strand starting at position 3847 of SEQ ID NO: 1242174
guuaucaaucuguacaaag

SEQ ID NO: 1327727 - RNA, 19 nt, Artificial Sequence
  Description of Artificial Sequence: Synthetic oligonucleotide
  Antisense strand to SEQ ID NO: 1327726
cuuuguacagauugauaac

SEQ ID NO: 1327728 - RNA, 19 nt, Artificial Sequence
  Description of Artificial Sequence: Synthetic oligonucleotide
  Sense strand starting at position 3911 of SEQ ID NO: 1242174
ccaagacaacuguguaauu

SEQ ID NO: 1327729 - RNA, 19 nt, Artificial Sequence
  Description of Artificial Sequence: Synthetic oligonucleotide
  Antisense strand to SEQ ID NO: 1327728
aauuacacaguugucuugg

SEQ ID NO: 1327730 - RNA, 19 nt, Artificial Sequence
  Description of Artificial Sequence: Synthetic oligonucleotide
  Sense strand starting at position 15 of SEQ ID NO: 1242175
ucuaaauaacguuaagucu

SEQ ID NO: 1327731 - RNA, 19 nt, Artificial Sequence
  Description of Artificial Sequence: Synthetic oligonucleotide
  Antisense strand to SEQ ID NO: 1327730
agacuuaacguuauuuaga

SEQ ID NO: 1327732 - RNA, 19 nt, Artificial Sequence
  Description of Artificial Sequence: Synthetic oligonucleotide
  Sense strand starting at position 21 of SEQ ID NO: 1242175
uaacguuaagucuaacaug

SEQ ID NO: 1327733 - RNA, 19 nt, Artificial Sequence
  Description of Artificial Sequence: Synthetic oligonucleotide
  Antisense strand to SEQ ID NO: 1327732
cauguuagacuuaacguua

SEQ ID NO: 1327734 - RNA, 19 nt, Artificial Sequence
  Description of Artificial Sequence: Synthetic oligonucleotide
  Sense strand starting at position 75 of SEQ ID NO: 1242175
uuaaaugggauguguggau

SEQ ID NO: 1327735 - RNA, 19 nt, Artificial Sequence
  Description of Artificial Sequence: Synthetic oligonucleotide
  Antisense strand to SEQ ID NO: 1327734
auccacacaucccauuuaa

SEQ ID NO: 1327736 - RNA, 19 nt, Artificial Sequence
  Description of Artificial Sequence: Synthetic oligonucleotide
  Sense strand starting at position 641 of SEQ ID NO: 1242175
agcuuuauguaggcagaaa

SEQ ID NO: 1327737 - RNA, 19 nt, Artificial Sequence
  Description of Artificial Sequence: Synthetic oligonucleotide
  Antisense strand to SEQ ID NO: 1327736
uuucugccuacauaaagcu

SEQ ID NO: 1327738 - RNA, 19 nt, Artificial Sequence
  Description of Artificial Sequence: Synthetic oligonucleotide
  Sense strand starting at position 642 of SEQ ID NO: 1242175
gcuuuauguaggcagaaag

SEQ ID NO: 1327739 - RNA, 19 nt, Artificial Sequence
  Description of Artificial Sequence: Synthetic oligonucleotide
  Antisense strand to SEQ ID NO: 1327738
cuuucugccuacauaaagc

SEQ ID NO: 1327740 - RNA, 19 nt, Artificial Sequence
  Description of Artificial Sequence: Synthetic oligonucleotide
  Sense strand starting at position 737 of SEQ ID NO: 1242175
ucaugcugcuauuugugua

SEQ ID NO: 1327741 - RNA, 19 nt, Artificial Sequence
  Description of Artificial Sequence: Synthetic oligonucleotide
  Antisense strand to SEQ ID NO: 1327740
uacacaaauagcagcauga

SEQ ID NO: 1327742 - RNA, 19 nt, Artificial Sequence
  Description of Artificial Sequence: Synthetic oligonucleotide
  Sense strand starting at position 741 of SEQ ID NO: 1242175
gcugcuauuuguguagaau

SEQ ID NO: 1327743 - RNA, 19 nt, Artificial Sequence
  Description of Artificial Sequence: Synthetic oligonucleotide
  Antisense strand to SEQ ID NO: 1327742
auucuacacaaauagcagc

SEQ ID NO: 1327744 - RNA, 19 nt, Artificial Sequence
  Description of Artificial Sequence: Synthetic oligonucleotide
  Sense strand starting at position 971 of SEQ ID NO: 1242175
cuauuucuguuucugguaa

SEQ ID NO: 1327745 - RNA, 19 nt, Artificial Sequence
  Description of Artificial Sequence: Synthetic oligonucleotide
  Antisense strand to SEQ ID NO: 1327744
uuaccagaaacagaaauag

SEQ ID NO: 1327746 - RNA, 19 nt, Artificial Sequence
  Description of Artificial Sequence: Synthetic oligonucleotide
  Sense strand starting at position 982 of SEQ ID NO: 1242175
ucugguaaaugaucuuguu

SEQ ID NO: 1327747 - RNA, 19 nt, Artificial Sequence
  Description of Artificial Sequence: Synthetic oligonucleotide
  Antisense strand to SEQ ID NO: 1327746
aacaagaucauuuaccaga

SEQ ID NO: 1327748 - RNA, 19 nt, Artificial Sequence
  Description of Artificial Sequence: Synthetic oligonucleotide
  Sense strand starting at position 988 of SEQ ID NO: 1242175
aaaugaucuuguucugagg

SEQ ID NO: 1327749 - RNA, 19 nt, Artificial Sequence
  Description of Artificial Sequence: Synthetic oligonucleotide
  Antisense strand to SEQ ID NO: 1327748
ccucagaacaagaucauuu

SEQ ID NO: 1327750 - RNA, 19 nt, Artificial Sequence
  Description of Artificial Sequence: Synthetic oligonucleotide
  Sense strand starting at position 1303 of SEQ ID NO: 1242175
uggacaagacuuugaguac

SEQ ID NO: 1327751 - RNA, 19 nt, Artificial Sequence
  Description of Artificial Sequence: Synthetic oligonucleotide
  Antisense strand to SEQ ID NO: 1327750
guacucaaagucuugucca

SEQ ID NO: 1327752 - RNA, 19 nt, Artificial Sequence
  Description of Artificial Sequence: Synthetic oligonucleotide
  Sense strand starting at position 1363 of SEQ ID NO: 1242175
accucaaacccuggucaga

SEQ ID NO: 1327753 - RNA, 19 nt, Artificial Sequence
  Description of Artificial Sequence: Synthetic oligonucleotide
  Antisense strand to SEQ ID NO: 1327752
ucugaccaggguuugaggu

SEQ ID NO: 1327754 - RNA, 19 nt, Artificial Sequence
  Description of Artificial Sequence: Synthetic oligonucleotide
  Sense strand starting at position 1378 of SEQ ID NO: 1242175
cagacaauagcuugaguag

SEQ ID NO: 1327755 - RNA, 19 nt, Artificial Sequence
  Description of Artificial Sequence: Synthetic oligonucleotide
  Antisense strand to SEQ ID NO: 1327754
cuacucaagcuauugucug

SEQ ID NO: 1327756 - RNA, 19 nt, Artificial Sequence
  Description of Artificial Sequence: Synthetic oligonucleotide
  Sense strand starting at position 1401 of SEQ ID NO: 1242175
agcggugccgguccuaaua

SEQ ID NO: 1327757 - RNA, 19 nt, Artificial Sequence
  Description of Artificial Sequence: Synthetic oligonucleotide
  Antisense strand to SEQ ID NO: 1327756
uauuaggaccggcaccgcu

SEQ ID NO: 1327758 - RNA, 19 nt, Artificial Sequence
  Description of Artificial Sequence: Synthetic oligonucleotide
  Sense strand starting at position 1425 of SEQ ID NO: 1242175
gcccaucuccuaggacaaa

SEQ ID NO: 1327759 - RNA, 19 nt, Artificial Sequence
  Description of Artificial Sequence: Synthetic oligonucleotide
  Antisense strand to SEQ ID NO: 1327758
uuuguccuaggagaugggc

SEQ ID NO: 1327760 - RNA, 19 nt, Artificial Sequence
  Description of Artificial Sequence: Synthetic oligonucleotide
  Sense strand starting at position 2369 of SEQ ID NO: 1242175
uucgguuauccagaagaac

SEQ ID NO: 1327761 - RNA, 19 nt, Artificial Sequence
  Description of Artificial Sequence: Synthetic oligonucleotide
  Antisense strand to SEQ ID NO: 1327760
guucuucuggauaaccgaa

SEQ ID NO: 1327762 - RNA, 19 nt, Artificial Sequence
  Description of Artificial Sequence: Synthetic oligonucleotide
  Sense strand starting at position 2662 of SEQ ID NO: 1242175
uagugucaccuugggaaag

SEQ ID NO: 1327763 - RNA, 19 nt, Artificial Sequence
  Description of Artificial Sequence: Synthetic oligonucleotide
  Antisense strand to SEQ ID NO: 1327762
cuuucccaaggugacacua

SEQ ID NO: 1327764 - RNA, 19 nt, Artificial Sequence
  Description of Artificial Sequence: Synthetic oligonucleotide
  Sense strand starting at position 2681 of SEQ ID NO: 1242175
gcaccucaucucgaaaguu

SEQ ID NO: 1327765 - RNA, 19 nt, Artificial Sequence
  Description of Artificial Sequence: Synthetic oligonucleotide
  Antisense strand to SEQ ID NO: 1327764
aacuuucgagaugaggugc

SEQ ID NO: 1327766 - RNA, 19 nt, Artificial Sequence
  Description of Artificial Sequence: Synthetic oligonucleotide
  Sense strand starting at position 2775 of SEQ ID NO: 1242175
ggaauuaagugacccaguu

SEQ ID NO: 1327767 - RNA, 19 nt, Artificial Sequence
  Description of Artificial Sequence: Synthetic oligonucleotide
  Antisense strand to SEQ ID NO: 1327766
aacugggucacuuaauucc

SEQ ID NO: 1327768 - RNA, 19 nt, Artificial Sequence
  Description of Artificial Sequence: Synthetic oligonucleotide
  Sense strand starting at position 2939 of SEQ ID NO: 1242175
aggguuuaauuugagcaaa

SEQ ID NO: 1327769 - RNA, 19 nt, Artificial Sequence
  Description of Artificial Sequence: Synthetic oligonucleotide
  Antisense strand to SEQ ID NO: 1327768
uuugcucaaauuaaacccu

SEQ ID NO: 1327770 - RNA, 19 nt, Artificial Sequence
  Description of Artificial Sequence: Synthetic oligonucleotide
  Sense strand starting at position 2949 of SEQ ID NO: 1242175
uugagcaaaucuccaggau

SEQ ID NO: 1327771 - RNA, 19 nt, Artificial Sequence
  Description of Artificial Sequence: Synthetic oligonucleotide
  Antisense strand to SEQ ID NO: 1327770
auccuggagauuugcucaa

SEQ ID NO: 1327772 - RNA, 19 nt, Artificial Sequence
  Description of Artificial Sequence: Synthetic oligonucleotide
  Sense strand starting at position 2961 of SEQ ID NO: 1242175
ccaggauuggagugcuuga

SEQ ID NO: 1327773 - RNA, 19 nt, Artificial Sequence
  Description of Artificial Sequence: Synthetic oligonucleotide
  Antisense strand to SEQ ID NO: 1327772
ucaagcacuccaauccugg

SEQ ID NO: 1327774 - RNA, 19 nt, Artificial Sequence
  Description of Artificial Sequence: Synthetic oligonucleotide
  Sense strand starting at position 2996 of SEQ ID NO: 1242175
auuacauaagcuugaggaa

SEQ ID NO: 1327775 - RNA, 19 nt, Artificial Sequence
  Description of Artificial Sequence: Synthetic oligonucleotide
  Antisense strand to SEQ ID NO: 1327774
uuccucaagcuuauguaau

SEQ ID NO: 1327776 - RNA, 19 nt, Artificial Sequence
  Description of Artificial Sequence: Synthetic oligonucleotide
  Sense strand starting at position 3012 of SEQ ID NO: 1242175
gaaagucccuuauuugugu

SEQ ID NO: 1327777 - RNA, 19 nt, Artificial Sequence
  Description of Artificial Sequence: Synthetic oligonucleotide
  Antisense strand to SEQ ID NO: 1327776
acacaaauaagggacuuuc

SEQ ID NO: 1327778 - RNA, 19 nt, Artificial Sequence
  Description of Artificial Sequence: Synthetic oligonucleotide
  Sense strand starting at position 3072 of SEQ ID NO: 1242175
gaugauggagcuugcuaau

SEQ ID NO: 1327779 - RNA, 19 nt, Artificial Sequence
  Description of Artificial Sequence: Synthetic oligonucleotide
  Antisense strand to SEQ ID NO: 1327778
auuagcaagcuccaucauc

SEQ ID NO: 1327780 - RNA, 19 nt, Artificial Sequence
  Description of Artificial Sequence: Synthetic oligonucleotide
  Sense strand starting at position 3133 of SEQ ID NO: 1242175
gcuccagcugccuuuaagu

SEQ ID NO: 1327781 - RNA, 19 nt, Artificial Sequence
  Description of Artificial Sequence: Synthetic oligonucleotide
  Antisense strand to SEQ ID NO: 1327780
acuuaaaggcagcuggagc

SEQ ID NO: 1327782 - RNA, 19 nt, Artificial Sequence
  Description of Artificial Sequence: Synthetic oligonucleotide
  Sense strand starting at position 3344 of SEQ ID NO: 1242175
auagcaagagguuaguaau

SEQ ID NO: 1327783 - RNA, 19 nt, Artificial Sequence
  Description of Artificial Sequence: Synthetic oligonucleotide
  Antisense strand to SEQ ID NO: 1327782
auuacuaaccucuugcuau

SEQ ID NO: 1327784 - RNA, 19 nt, Artificial Sequence
  Description of Artificial Sequence: Synthetic oligonucleotide
  Sense strand starting at position 3373 of SEQ ID NO: 1242175
gucuguaauccuuacuuag

SEQ ID NO: 1327785 - RNA, 19 nt, Artificial Sequence
  Description of Artificial Sequence: Synthetic oligonucleotide
  Antisense strand to SEQ ID NO: 1327784
cuaaguaaggauuacagac

SEQ ID NO: 1327786 - RNA, 19 nt, Artificial Sequence
  Description of Artificial Sequence: Synthetic oligonucleotide
  Sense strand starting at position 3375 of SEQ ID NO: 1242175
cuguaauccuuacuuaggu

SEQ ID NO: 1327787 - RNA, 19 nt, Artificial Sequence
  Description of Artificial Sequence: Synthetic oligonucleotide
  Antisense strand to SEQ ID NO: 1327786
accuaaguaaggauuacag

SEQ ID NO: 1327788 - RNA, 19 nt, Artificial Sequence
  Description of Artificial Sequence: Synthetic oligonucleotide
  Sense strand starting at position 3614 of SEQ ID NO: 1242175
ucaguucuuggacauacua

SEQ ID NO: 1327789 - RNA, 19 nt, Artificial Sequence
  Description of Artificial Sequence: Synthetic oligonucleotide
  Antisense strand to SEQ ID NO: 1327788
uaguauguccaagaacuga

SEQ ID NO: 1327790 - RNA, 19 nt, Artificial Sequence
  Description of Artificial Sequence: Synthetic oligonucleotide
  Sense strand starting at position 3653 of SEQ ID NO: 1242175
acaagacuuugcucaguug

SEQ ID NO: 1327791 - RNA, 19 nt, Artificial Sequence
  Description of Artificial Sequence: Synthetic oligonucleotide
  Antisense strand to SEQ ID NO: 1327790
caacugagcaaagucuugu

SEQ ID NO: 1327792 - RNA, 19 nt, Artificial Sequence
  Description of Artificial Sequence: Synthetic oligonucleotide
  Sense strand starting at position 3654 of SEQ ID NO: 1242175
caagacuuugcucaguugu

SEQ ID NO: 1327793 - RNA, 19 nt, Artificial Sequence
  Description of Artificial Sequence: Synthetic oligonucleotide
  Antisense strand to SEQ ID NO: 1327792
acaacugagcaaagucuug

SEQ ID NO: 1327794 - RNA, 19 nt, Artificial Sequence
  Description of Artificial Sequence: Synthetic oligonucleotide
  Sense strand starting at position 3662 of SEQ ID NO: 1242175
ugcucaguuguugcaugua

SEQ ID NO: 1327795 - RNA, 19 nt, Artificial Sequence
  Description of Artificial Sequence: Synthetic oligonucleotide
  Antisense strand to SEQ ID NO: 1327794
uacaugcaacaacugagca

SEQ ID NO: 1327796 - RNA, 19 nt, Artificial Sequence
  Description of Artificial Sequence: Synthetic oligonucleotide
  Sense strand starting at position 3678 of SEQ ID NO: 1242175
guauuauaauauccuggaa

SEQ ID NO: 1327797 - RNA, 19 nt, Artificial Sequence
  Description of Artificial Sequence: Synthetic oligonucleotide
  Antisense strand to SEQ ID NO: 1327796
uuccaggauauuauaauac

SEQ ID NO: 1327798 - RNA, 19 nt, Artificial Sequence
  Description of Artificial Sequence: Synthetic oligonucleotide
  Sense strand starting at position 3859 of SEQ ID NO: 1242175
gaaauaauuguguaguuug

SEQ ID NO: 1327799 - RNA, 19 nt, Artificial Sequence
  Description of Artificial Sequence: Synthetic oligonucleotide
  Antisense strand to SEQ ID NO: 1327798
caaacuacacaauuauuuc

SEQ ID NO: 1327800 - RNA, 19 nt, Artificial Sequence
  Description of Artificial Sequence: Synthetic oligonucleotide
  Sense strand starting at position 3912 of SEQ ID NO: 1242175
ccaugagagcuaggaucau

SEQ ID NO: 1327801 - RNA, 19 nt, Artificial Sequence
  Description of Artificial Sequence: Synthetic oligonucleotide
  Antisense strand to SEQ ID NO: 1327800
augauccuagcucucaugg

SEQ ID NO: 1327802 - RNA, 19 nt, Artificial Sequence
  Description of Artificial Sequence: Synthetic oligonucleotide
  Sense strand starting at position 3923 of SEQ ID NO: 1242175
aggaucaugucugauuucu

SEQ ID NO: 1327803 - RNA, 19 nt, Artificial Sequence
  Description of Artificial Sequence: Synthetic oligonucleotide
  Antisense strand to SEQ ID NO: 1327802
agaaaucagacaugauccu

SEQ ID NO: 1327804 - RNA, 19 nt, Artificial Sequence
  Description of Artificial Sequence: Synthetic oligonucleotide
  Sense strand starting at position 3929 of SEQ ID NO: 1242175
augucugauuucuuugcca

SEQ ID NO: 1327805 - RNA, 19 nt, Artificial Sequence
  Description of Artificial Sequence: Synthetic oligonucleotide
  Antisense strand to SEQ ID NO: 1327804
uggcaaagaaaucagacau

SEQ ID NO: 1327806 - RNA, 19 nt, Artificial Sequence
  Description of Artificial Sequence: Synthetic oligonucleotide
  Sense strand starting at position 3931 of SEQ ID NO: 1242175
gucugauuucuuugccauu

SEQ ID NO: 1327807 - RNA, 19 nt, Artificial Sequence
  Description of Artificial Sequence: Synthetic oligonucleotide
  Antisense strand to SEQ ID NO: 1327806
aauggcaaagaaaucagac

SEQ ID NO: 1327808 - RNA, 19 nt, Artificial Sequence
  Description of Artificial Sequence: Synthetic oligonucleotide
  Sense strand starting at position 3933 of SEQ ID NO: 1242175
cugauuucuuugccauugu

SEQ ID NO: 1327809 - RNA, 19 nt, Artificial Sequence
  Description of Artificial Sequence: Synthetic oligonucleotide
  Antisense strand to SEQ ID NO: 1327808
acaauggcaaagaaaucag

SEQ ID NO: 1327810 - RNA, 19 nt, Artificial Sequence
  Description of Artificial Sequence: Synthetic oligonucleotide
  Sense strand starting at position 216 of SEQ ID NO: 1242176
ccuaguuucugggucacau

SEQ ID NO: 1327811 - RNA, 19 nt, Artificial Sequence
  Description of Artificial Sequence: Synthetic oligonucleotide
  Antisense strand to SEQ ID NO: 1327810
augugacccagaaacuagg

SEQ ID NO: 1327812 - RNA, 19 nt, Artificial Sequence
  Description of Artificial Sequence: Synthetic oligonucleotide
  Sense strand starting at position 250 of SEQ ID NO: 1242176
ggaacucaauuugaaguua

SEQ ID NO: 1327813 - RNA, 19 nt, Artificial Sequence
  Description of Artificial Sequence: Synthetic oligonucleotide
  Antisense strand to SEQ ID NO: 1327812
uaacuucaaauugaguucc

SEQ ID NO: 1327814 - RNA, 19 nt, Artificial Sequence
  Description of Artificial Sequence: Synthetic oligonucleotide
  Sense strand starting at position 259 of SEQ ID NO: 1242176
uuugaaguuacacgugaaa

SEQ ID NO: 1327815 - RNA, 19 nt, Artificial Sequence
  Description of Artificial Sequence: Synthetic oligonucleotide
  Antisense strand to SEQ ID NO: 1327814
uuucacguguaacuucaaa

SEQ ID NO: 1327816 - RNA, 19 nt, Artificial Sequence
  Description of Artificial Sequence: Synthetic oligonucleotide
  Sense strand starting at position 333 of SEQ ID NO: 1242176
acaaacaucugagugcaua

SEQ ID NO: 1327817 - RNA, 19 nt, Artificial Sequence
  Description of Artificial Sequence: Synthetic oligonucleotide
  Antisense strand to SEQ ID NO: 1327816
uaugcacucagauguuugu

SEQ ID NO: 1327818 - RNA, 19 nt, Artificial Sequence
  Description of Artificial Sequence: Synthetic oligonucleotide
  Sense strand starting at position 349 of SEQ ID NO: 1242176
auacuaugugcagggcaua

SEQ ID NO: 1327819 - RNA, 19 nt, Artificial Sequence
  Description of Artificial Sequence: Synthetic oligonucleotide
  Antisense strand to SEQ ID NO: 1327818
uaugcccugcacauaguau

SEQ ID NO: 1327820 - RNA, 19 nt, Artificial Sequence
  Description of Artificial Sequence: Synthetic oligonucleotide
  Sense strand starting at position 601 of SEQ ID NO: 1242176
ggucuagggugguuauuau

SEQ ID NO: 1327821 - RNA, 19 nt, Artificial Sequence
  Description of Artificial Sequence: Synthetic oligonucleotide
  Antisense strand to SEQ ID NO: 1327820
auaauaaccacccuagacc

SEQ ID NO: 1327822 - RNA, 19 nt, Artificial Sequence
  Description of Artificial Sequence: Synthetic oligonucleotide
  Sense strand starting at position 613 of SEQ ID NO: 1242176
uuauuaugucaaggagacu

SEQ ID NO: 1327823 - RNA, 19 nt, Artificial Sequence
  Description of Artificial Sequence: Synthetic oligonucleotide
  Antisense strand to SEQ ID NO: 1327822
agucuccuugacauaauaa

SEQ ID NO: 1327824 - RNA, 19 nt, Artificial Sequence
  Description of Artificial Sequence: Synthetic oligonucleotide
  Sense strand starting at position 1431 of SEQ ID NO: 1242176
cgacaacuccucgggcaga

SEQ ID NO: 1327825 - RNA, 19 nt, Artificial Sequence
  Description of Artificial Sequence: Synthetic oligonucleotide
  Antisense strand to SEQ ID NO: 1327824
ucugcccgaggaguugucg

SEQ ID NO: 1327826 - RNA, 19 nt, Artificial Sequence
  Description of Artificial Sequence: Synthetic oligonucleotide
  Sense strand starting at position 1751 of SEQ ID NO: 1242176
uugcgaguggucccgcuua

SEQ ID NO: 1327827 - RNA, 19 nt, Artificial Sequence
  Description of Artificial Sequence: Synthetic oligonucleotide
  Antisense strand to SEQ ID NO: 1327826
uaagcgggaccacucgcaa

SEQ ID NO: 1327828 - RNA, 19 nt, Artificial Sequence
  Description of Artificial Sequence: Synthetic oligonucleotide
  Sense strand starting at position 2135 of SEQ ID NO: 1242176
cccuuaaggacugguguuu

SEQ ID NO: 1327829 - RNA, 19 nt, Artificial Sequence
  Description of Artificial Sequence: Synthetic oligonucleotide
  Antisense strand to SEQ ID NO: 1327828
aaacaccaguccuuaaggg

SEQ ID NO: 1327830 - RNA, 19 nt, Artificial Sequence
  Description of Artificial Sequence: Synthetic oligonucleotide
  Sense strand starting at position 2285 of SEQ ID NO: 1242176
ggcguuuagcuguuaaggu

SEQ ID NO: 1327831 - RNA, 19 nt, Artificial Sequence
  Description of Artificial Sequence: Synthetic oligonucleotide
  Antisense strand to SEQ ID NO: 1327830
accuuaacagcuaaacgcc

SEQ ID NO: 1327832 - RNA, 19 nt, Artificial Sequence
  Description of Artificial Sequence: Synthetic oligonucleotide
  Sense strand starting at position 2295 of SEQ ID NO: 1242176
uguuaagguucugcaggau

SEQ ID NO: 1327833 - RNA, 19 nt, Artificial Sequence
  Description of Artificial Sequence: Synthetic oligonucleotide
  Antisense strand to SEQ ID NO: 1327832
auccugcagaaccuuaaca

SEQ ID NO: 1327834 - RNA, 19 nt, Artificial Sequence
  Description of Artificial Sequence: Synthetic oligonucleotide
  Sense strand starting at position 2539 of SEQ ID NO: 1242176
guagauagaucagugcuuu

SEQ ID NO: 1327835 - RNA, 19 nt, Artificial Sequence
  Description of Artificial Sequence: Synthetic oligonucleotide
  Antisense strand to SEQ ID NO: 1327834
aaagcacugaucuaucuac

SEQ ID NO: 1327836 - RNA, 19 nt, Artificial Sequence
  Description of Artificial Sequence: Synthetic oligonucleotide
  Sense strand starting at position 2540 of SEQ ID NO: 1242176
uagauagaucagugcuuua

SEQ ID NO: 1327837 - RNA, 19 nt, Artificial Sequence
  Description of Artificial Sequence: Synthetic oligonucleotide
  Antisense strand to SEQ ID NO: 1327836
uaaagcacugaucuaucua

SEQ ID NO: 1327838 - RNA, 19 nt, Artificial Sequence
  Description of Artificial Sequence: Synthetic oligonucleotide
  Sense strand starting at position 2543 of SEQ ID NO: 1242176
auagaucagugcuuuauaa

SEQ ID NO: 1327839 - RNA, 19 nt, Artificial Sequence
  Description of Artificial Sequence: Synthetic oligonucleotide
  Antisense strand to SEQ ID NO: 1327838
uuauaaagcacugaucuau

SEQ ID NO: 1327840 - RNA, 19 nt, Artificial Sequence
  Description of Artificial Sequence: Synthetic oligonucleotide
  Sense strand starting at position 2545 of SEQ ID NO: 1242176
agaucagugcuuuauaaug

SEQ ID NO: 1327841 - RNA, 19 nt, Artificial Sequence
  Description of Artificial Sequence: Synthetic oligonucleotide
  Antisense strand to SEQ ID NO: 1327840
cauuauaaagcacugaucu

SEQ ID NO: 1327842 - RNA, 19 nt, Artificial Sequence
  Description of Artificial Sequence: Synthetic oligonucleotide
  Sense strand starting at position 2695 of SEQ ID NO: 1242176
ccaagugguuuauccuuau

SEQ ID NO: 1327843 - RNA, 19 nt, Artificial Sequence
  Description of Artificial Sequence: Synthetic oligonucleotide
  Antisense strand to SEQ ID NO: 1327842
auaaggauaaaccacuugg

SEQ ID NO: 1327844 - RNA, 19 nt, Artificial Sequence
  Description of Artificial Sequence: Synthetic oligonucleotide
  Sense strand starting at position 2698 of SEQ ID NO: 1242176
agugguuuauccuuauaac

SEQ ID NO: 1327845 - RNA, 19 nt, Artificial Sequence
  Description of Artificial Sequence: Synthetic oligonucleotide
  Antisense strand to SEQ ID NO: 1327844
guuauaaggauaaaccacu

SEQ ID NO: 1327846 - RNA, 19 nt, Artificial Sequence
  Description of Artificial Sequence: Synthetic oligonucleotide
  Sense strand starting at position 2699 of SEQ ID NO: 1242176
gugguuuauccuuauaacu

SEQ ID NO: 1327847 - RNA, 19 nt, Artificial Sequence
  Description of Artificial Sequence: Synthetic oligonucleotide
  Antisense strand to SEQ ID NO: 1327846
aguuauaaggauaaaccac

SEQ ID NO: 1327848 - RNA, 19 nt, Artificial Sequence
  Description of Artificial Sequence: Synthetic oligonucleotide
  Sense strand starting at position 2749 of SEQ ID NO: 1242176
cccuauccugagggcuaaa

SEQ ID NO: 1327849 - RNA, 19 nt, Artificial Sequence
  Description of Artificial Sequence: Synthetic oligonucleotide
  Antisense strand to SEQ ID NO: 1327848
uuuagcccucaggauaggg

SEQ ID NO: 1327850 - RNA, 19 nt, Artificial Sequence
  Description of Artificial Sequence: Synthetic oligonucleotide
  Sense strand starting at position 2761 of SEQ ID NO: 1242176
ggcuaaauuugugagauug

SEQ ID NO: 1327851 - RNA, 19 nt, Artificial Sequence
  Description of Artificial Sequence: Synthetic oligonucleotide
  Antisense strand to SEQ ID NO: 1327850
caaucucacaaauuuagcc

SEQ ID NO: 1327852 - RNA, 19 nt, Artificial Sequence
  Description of Artificial Sequence: Synthetic oligonucleotide
  Sense strand starting at position 2763 of SEQ ID NO: 1242176
cuaaauuugugagauugua

SEQ ID NO: 1327853 - RNA, 19 nt, Artificial Sequence
  Description of Artificial Sequence: Synthetic oligonucleotide
  Antisense strand to SEQ ID NO: 1327852
uacaaucucacaaauuuag

SEQ ID NO: 1327854 - RNA, 19 nt, Artificial Sequence
  Description of Artificial Sequence: Synthetic oligonucleotide
  Sense strand starting at position 2773 of SEQ ID NO: 1242176
gagauuguaucauuagcca

SEQ ID NO: 1327855 - RNA, 19 nt, Artificial Sequence
  Description of Artificial Sequence: Synthetic oligonucleotide
  Antisense strand to SEQ ID NO: 1327854
uggcuaaugauacaaucuc

SEQ ID NO: 1327856 - RNA, 19 nt, Artificial Sequence
  Description of Artificial Sequence: Synthetic oligonucleotide
  Sense strand starting at position 2777 of SEQ ID NO: 1242176
uuguaucauuagccaggau

SEQ ID NO: 1327857 - RNA, 19 nt, Artificial Sequence
  Description of Artificial Sequence: Synthetic oligonucleotide
  Antisense strand to SEQ ID NO: 1327856
auccuggcuaaugauacaa

SEQ ID NO: 1327858 - RNA, 19 nt, Artificial Sequence
  Description of Artificial Sequence: Synthetic oligonucleotide
  Sense strand starting at position 2792 of SEQ ID NO: 1242176
ggauuaaagcucuacuuau

SEQ ID NO: 1327859 - RNA, 19 nt, Artificial Sequence
  Description of Artificial Sequence: Synthetic oligonucleotide
  Antisense strand to SEQ ID NO: 1327858
auaaguagagcuuuaaucc

SEQ ID NO: 1327860 - RNA, 19 nt, Artificial Sequence
  Description of Artificial Sequence: Synthetic oligonucleotide
  Sense strand starting at position 2809 of SEQ ID NO: 1242176
auguuuaaggccuggaaag

SEQ ID NO: 1327861 - RNA, 19 nt, Artificial Sequence
  Description of Artificial Sequence: Synthetic oligonucleotide
  Antisense strand to SEQ ID NO: 1327860
cuuuccaggccuuaaacau

SEQ ID NO: 1327862 - RNA, 19 nt, Artificial Sequence
  Description of Artificial Sequence: Synthetic oligonucleotide
  Sense strand starting at position 2810 of SEQ ID NO: 1242176
uguuuaaggccuggaaaga

SEQ ID NO: 1327863 - RNA, 19 nt, Artificial Sequence
  Description of Artificial Sequence: Synthetic oligonucleotide
  Antisense strand to SEQ ID NO: 1327862
ucuuuccaggccuuaaaca

SEQ ID NO: 1327864 - RNA, 19 nt, Artificial Sequence
  Description of Artificial Sequence: Synthetic oligonucleotide
  Sense strand starting at position 3004 of SEQ ID NO: 1242176
ggguucuucggugagcuga

SEQ ID NO: 1327865 - RNA, 19 nt, Artificial Sequence
  Description of Artificial Sequence: Synthetic oligonucleotide
  Antisense strand to SEQ ID NO: 1327864
ucagcucaccgaagaaccc

SEQ ID NO: 1327866 - RNA, 19 nt, Artificial Sequence
  Description of Artificial Sequence: Synthetic oligonucleotide
  Sense strand starting at position 3117 of SEQ ID NO: 1242176
cagccaucacccgauguga

SEQ ID NO: 1327867 - RNA, 19 nt, Artificial Sequence
  Description of Artificial Sequence: Synthetic oligonucleotide
  Antisense strand to SEQ ID NO: 1327866
ucacaucgggugauggcug

SEQ ID NO: 1327868 - RNA, 19 nt, Artificial Sequence
  Description of Artificial Sequence: Synthetic oligonucleotide
  Sense strand starting at position 3224 of SEQ ID NO: 1242176
agcccauugccucaacagu

SEQ ID NO: 1327869 - RNA, 19 nt, Artificial Sequence
  Description of Artificial Sequence: Synthetic oligonucleotide
  Antisense strand to SEQ ID NO: 1327868
acuguugaggcaaugggcu

SEQ ID NO: 1327870 - RNA, 19 nt, Artificial Sequence
  Description of Artificial Sequence: Synthetic oligonucleotide
  Sense strand starting at position 3332 of SEQ ID NO: 1242176
accucuagguccucugauu

SEQ ID NO: 1327871 - RNA, 19 nt, Artificial Sequence
  Description of Artificial Sequence: Synthetic oligonucleotide
  Antisense strand to SEQ ID NO: 1327870
aaucagaggaccuagaggu

SEQ ID NO: 1327872 - RNA, 19 nt, Artificial Sequence
  Description of Artificial Sequence: Synthetic oligonucleotide
  Sense strand starting at position 3338 of SEQ ID NO: 1242176
agguccucugauugacuga

SEQ ID NO: 1327873 - RNA, 19 nt, Artificial Sequence
  Description of Artificial Sequence: Synthetic oligonucleotide
  Antisense strand to SEQ ID NO: 1327872
ucagucaaucagaggaccu

SEQ ID NO: 1327874 - RNA, 19 nt, Artificial Sequence
  Description of Artificial Sequence: Synthetic oligonucleotide
  Sense strand starting at position 3339 of SEQ ID NO: 1242176
gguccucugauugacugau

SEQ ID NO: 1327875 - RNA, 19 nt, Artificial Sequence
  Description of Artificial Sequence: Synthetic oligonucleotide
  Antisense strand to SEQ ID NO: 1327874
aucagucaaucagaggacc

SEQ ID NO: 1327876 - RNA, 19 nt, Artificial Sequence
  Description of Artificial Sequence: Synthetic oligonucleotide
  Sense strand starting at position 3352 of SEQ ID NO: 1242176
acugauuucuagucagccu

SEQ ID NO: 1327877 - RNA, 19 nt, Artificial Sequence
  Description of Artificial Sequence: Synthetic oligonucleotide
  Antisense strand to SEQ ID NO: 1327876
aggcugacuagaaaucagu

SEQ ID NO: 1327878 - RNA, 19 nt, Artificial Sequence
  Description of Artificial Sequence: Synthetic oligonucleotide
  Sense strand starting at position 3519 of SEQ ID NO: 1242176
ggaauaggagcucggugaa

SEQ ID NO: 1327879 - RNA, 19 nt, Artificial Sequence
  Description of Artificial Sequence: Synthetic oligonucleotide
  Antisense strand to SEQ ID NO: 1327878
uucaccgagcuccuauucc

SEQ ID NO: 1327880 - RNA, 19 nt, Artificial Sequence
  Description of Artificial Sequence: Synthetic oligonucleotide
  Sense strand starting at position 3522 of SEQ ID NO: 1242176
auaggagcucggugaauuc

SEQ ID NO: 1327881 - RNA, 19 nt, Artificial Sequence
  Description of Artificial Sequence: Synthetic oligonucleotide
  Antisense strand to SEQ ID NO: 1327880
gaauucaccgagcuccuau

SEQ ID NO: 1327882 - RNA, 19 nt, Artificial Sequence
  Description of Artificial Sequence: Synthetic oligonucleotide
  Sense strand starting at position 3594 of SEQ ID NO: 1242176
gcacauaggacauguuugu

SEQ ID NO: 1327883 - RNA, 19 nt, Artificial Sequence
  Description of Artificial Sequence: Synthetic oligonucleotide
  Antisense strand to SEQ ID NO: 1327882
acaaacauguccuaugugc

SEQ ID NO: 1327884 - RNA, 19 nt, Artificial Sequence
  Description of Artificial Sequence: Synthetic oligonucleotide
  Sense strand starting at position 3645 of SEQ ID NO: 1242176
cucaaugguguugagauau

SEQ ID NO: 1327885 - RNA, 19 nt, Artificial Sequence
  Description of Artificial Sequence: Synthetic oligonucleotide
  Antisense strand to SEQ ID NO: 1327884
auaucucaacaccauugag

SEQ ID NO: 1327886 - RNA, 19 nt, Artificial Sequence
  Description of Artificial Sequence: Synthetic oligonucleotide
  Sense strand starting at position 3653 of SEQ ID NO: 1242176
uguugagauauuuguguuu

SEQ ID NO: 1327887 - RNA, 19 nt, Artificial Sequence
  Description of Artificial Sequence: Synthetic oligonucleotide
  Antisense strand to SEQ ID NO: 1327886
aaacacaaauaucucaaca

SEQ ID NO: 1327888 - RNA, 19 nt, Artificial Sequence
  Description of Artificial Sequence: Synthetic oligonucleotide
  Sense strand starting at position 3685 of SEQ ID NO: 1242176
cagugagauccuugaaggc

SEQ ID NO: 1327889 - RNA, 19 nt, Artificial Sequence
  Description of Artificial Sequence: Synthetic oligonucleotide
  Antisense strand to SEQ ID NO: 1327888
gccuucaaggaucucacug

SEQ ID NO: 1327890 - RNA, 19 nt, Artificial Sequence
  Description of Artificial Sequence: Synthetic oligonucleotide
  Sense strand starting at position 75 of SEQ ID NO: 1242177
cucugagaaccucaguuua

SEQ ID NO: 1327891 - RNA, 19 nt, Artificial Sequence
  Description of Artificial Sequence: Synthetic oligonucleotide
  Antisense strand to SEQ ID NO: 1327890
uaaacugagguucucagag

SEQ ID NO: 1327892 - RNA, 19 nt, Artificial Sequence
  Description of Artificial Sequence: Synthetic oligonucleotide
  Sense strand starting at position 179 of SEQ ID NO: 1242177
caagauuugugagacagua

SEQ ID NO: 1327893 - RNA, 19 nt, Artificial Sequence
  Description of Artificial Sequence: Synthetic oligonucleotide
  Antisense strand to SEQ ID NO: 1327892
uacugucucacaaaucuug

SEQ ID NO: 1327894 - RNA, 19 nt, Artificial Sequence
  Description of Artificial Sequence: Synthetic oligonucleotide
  Sense strand starting at position 187 of SEQ ID NO: 1242177
gugagacaguaguuuaacu

SEQ ID NO: 1327895 - RNA, 19 nt, Artificial Sequence
  Description of Artificial Sequence: Synthetic oligonucleotide
  Antisense strand to SEQ ID NO: 1327894
aguuaaacuacugucucac

SEQ ID NO: 1327896 - RNA, 19 nt, Artificial Sequence
  Description of Artificial Sequence: Synthetic oligonucleotide
  Sense strand starting at position 189 of SEQ ID NO: 1242177
gagacaguaguuuaacuuu

SEQ ID NO: 1327897 - RNA, 19 nt, Artificial Sequence
  Description of Artificial Sequence: Synthetic oligonucleotide
  Antisense strand to SEQ ID NO: 1327896
aaaguuaaacuacugucuc

SEQ ID NO: 1327898 - RNA, 19 nt, Artificial Sequence
  Description of Artificial Sequence: Synthetic oligonucleotide
  Sense strand starting at position 350 of SEQ ID NO: 1242177
gauacuuagcucuaugaug

SEQ ID NO: 1327899 - RNA, 19 nt, Artificial Sequence
  Description of Artificial Sequence: Synthetic oligonucleotide
  Antisense strand to SEQ ID NO: 1327898
caucauagagcuaaguauc

SEQ ID NO: 1327900 - RNA, 19 nt, Artificial Sequence
  Description of Artificial Sequence: Synthetic oligonucleotide
  Sense strand starting at position 455 of SEQ ID NO: 1242177
accugauucugguugaggu

SEQ ID NO: 1327901 - RNA, 19 nt, Artificial Sequence
  Description of Artificial Sequence: Synthetic oligonucleotide
  Antisense strand to SEQ ID NO: 1327900
accucaaccagaaucaggu

SEQ ID NO: 1327902 - RNA, 19 nt, Artificial Sequence
  Description of Artificial Sequence: Synthetic oligonucleotide
  Sense strand starting at position 506 of SEQ ID NO: 1242177
ucagguauacuucgaaucu

SEQ ID NO: 1327903 - RNA, 19 nt, Artificial Sequence
  Description of Artificial Sequence: Synthetic oligonucleotide
  Antisense strand to SEQ ID NO: 1327902
agauucgaaguauaccuga

SEQ ID NO: 1327904 - RNA, 19 nt, Artificial Sequence
  Description of Artificial Sequence: Synthetic oligonucleotide
  Sense strand starting at position 518 of SEQ ID NO: 1242177
cgaaucugguucuuagaga

SEQ ID NO: 1327905 - RNA, 19 nt, Artificial Sequence
  Description of Artificial Sequence: Synthetic oligonucleotide
  Antisense strand to SEQ ID NO: 1327904
ucucuaagaaccagauucg

SEQ ID NO: 1327906 - RNA, 19 nt, Artificial Sequence
  Description of Artificial Sequence: Synthetic oligonucleotide
  Sense strand starting at position 587 of SEQ ID NO: 1242177
cccaguugguucccagaga

SEQ ID NO: 1327907 - RNA, 19 nt, Artificial Sequence
  Description of Artificial Sequence: Synthetic oligonucleotide
  Antisense strand to SEQ ID NO: 1327906
ucucugggaaccaacuggg

SEQ ID NO: 1327908 - RNA, 19 nt, Artificial Sequence
  Description of Artificial Sequence: Synthetic oligonucleotide
  Sense strand starting at position 624 of SEQ ID NO: 1242177
cagagaguugcccaaaggu

SEQ ID NO: 1327909 - RNA, 19 nt, Artificial Sequence
  Description of Artificial Sequence: Synthetic oligonucleotide
  Antisense strand to SEQ ID NO: 1327908
accuuugggcaacucucug

SEQ ID NO: 1327910 - RNA, 19 nt, Artificial Sequence
  Description of Artificial Sequence: Synthetic oligonucleotide
  Sense strand starting at position 674 of SEQ ID NO: 1242177
aggcuuagcgucucuaguu

SEQ ID NO: 1327911 - RNA, 19 nt, Artificial Sequence
  Description of Artificial Sequence: Synthetic oligonucleotide
  Antisense strand to SEQ ID NO: 1327910
aacuagagacgcuaagccu

SEQ ID NO: 1327912 - RNA, 19 nt, Artificial Sequence
  Description of Artificial Sequence: Synthetic oligonucleotide
  Sense strand starting at position 810 of SEQ ID NO: 1242177
cugcuucgccucuuguuaa

SEQ ID NO: 1327913 - RNA, 19 nt, Artificial Sequence
  Description of Artificial Sequence: Synthetic oligonucleotide
  Antisense strand to SEQ ID NO: 1327912
uuaacaagaggcgaagcag

SEQ ID NO: 1327914 - RNA, 19 nt, Artificial Sequence
  Description of Artificial Sequence: Synthetic oligonucleotide
  Sense strand starting at position 875 of SEQ ID NO: 1242177
ccaacauagucuuuagaag

SEQ ID NO: 1327915 - RNA, 19 nt, Artificial Sequence
  Description of Artificial Sequence: Synthetic oligonucleotide
  Antisense strand to SEQ ID NO: 1327914
cuucuaaagacuauguugg

SEQ ID NO: 1327916 - RNA, 19 nt, Artificial Sequence
  Description of Artificial Sequence: Synthetic oligonucleotide
  Sense strand starting at position 915 of SEQ ID NO: 1242177
cggagagcauuugugugua

SEQ ID NO: 1327917 - RNA, 19 nt, Artificial Sequence
  Description of Artificial Sequence: Synthetic oligonucleotide
  Antisense strand to SEQ ID NO: 1327916
uacacacaaaugcucuccg

SEQ ID NO: 1327918 - RNA, 19 nt, Artificial Sequence
  Description of Artificial Sequence: Synthetic oligonucleotide
  Sense strand starting at position 917 of SEQ ID NO: 1242177
gagagcauuuguguguaua

SEQ ID NO: 1327919 - RNA, 19 nt, Artificial Sequence
  Description of Artificial Sequence: Synthetic oligonucleotide
  Antisense strand to SEQ ID NO: 1327918
uauacacacaaaugcucuc

SEQ ID NO: 1327920 - RNA, 19 nt, Artificial Sequence
  Description of Artificial Sequence: Synthetic oligonucleotide
  Sense strand starting at position 918 of SEQ ID NO: 1242177
agagcauuuguguguauaa

SEQ ID NO: 1327921 - RNA, 19 nt, Artificial Sequence
  Description of Artificial Sequence: Synthetic oligonucleotide
  Antisense strand to SEQ ID NO: 1327920
uuauacacacaaaugcucu

SEQ ID NO: 1327922 - RNA, 19 nt, Artificial Sequence
  Description of Artificial Sequence: Synthetic oligonucleotide
  Sense strand starting at position 919 of SEQ ID NO: 1242177
gagcauuuguguguauaau

SEQ ID NO: 1327923 - RNA, 19 nt, Artificial Sequence
  Description of Artificial Sequence: Synthetic oligonucleotide
  Antisense strand to SEQ ID NO: 1327922
auuauacacacaaaugcuc

SEQ ID NO: 1327924 - RNA, 19 nt, Artificial Sequence
  Description of Artificial Sequence: Synthetic oligonucleotide
  Sense strand starting at position 963 of SEQ ID NO: 1242177
ggcacaauccgacagcaau

SEQ ID NO: 1327925 - RNA, 19 nt, Artificial Sequence
  Description of Artificial Sequence: Synthetic oligonucleotide
  Antisense strand to SEQ ID NO: 1327924
auugcugucggauugugcc

SEQ ID NO: 1327926 - RNA, 19 nt, Artificial Sequence
  Description of Artificial Sequence: Synthetic oligonucleotide
  Sense strand starting at position 983 of SEQ ID NO: 1242177
uugugauauuuggaagauc

SEQ ID NO: 1327927 - RNA, 19 nt, Artificial Sequence
  Description of Artificial Sequence: Synthetic oligonucleotide
  Antisense strand to SEQ ID NO: 1327926
gaucuuccaaauaucacaa

SEQ ID NO: 1327928 - RNA, 19 nt, Artificial Sequence
  Description of Artificial Sequence: Synthetic oligonucleotide
  Sense strand starting at position 1035 of SEQ ID NO: 1242177
gguagcuuuguuuacauua

SEQ ID NO: 1327929 - RNA, 19 nt, Artificial Sequence
  Description of Artificial Sequence: Synthetic oligonucleotide
  Antisense strand to SEQ ID NO: 1327928
uaauguaaacaaagcuacc

SEQ ID NO: 1327930 - RNA, 19 nt, Artificial Sequence
  Description of Artificial Sequence: Synthetic oligonucleotide
  Sense strand starting at position 1260 of SEQ ID NO: 1242177
acagcugaucacuagcaaa

SEQ ID NO: 1327931 - RNA, 19 nt, Artificial Sequence
  Description of Artificial Sequence: Synthetic oligonucleotide
  Antisense strand to SEQ ID NO: 1327930
uuugcuagugaucagcugu

SEQ ID NO: 1327932 - RNA, 19 nt, Artificial Sequence
  Description of Artificial Sequence: Synthetic oligonucleotide
  Sense strand starting at position 1326 of SEQ ID NO: 1242177
ggcucuucagcagagugaa

SEQ ID NO: 1327933 - RNA, 19 nt, Artificial Sequence
  Description of Artificial Sequence: Synthetic oligonucleotide
  Antisense strand to SEQ ID NO: 1327932
uucacucugcugaagagcc

SEQ ID NO: 1327934 - RNA, 19 nt, Artificial Sequence
  Description of Artificial Sequence: Synthetic oligonucleotide
  Sense strand starting at position 1338 of SEQ ID NO: 1242177
gagugaacuuuccuaucag

SEQ ID NO: 1327935 - RNA, 19 nt, Artificial Sequence
  Description of Artificial Sequence: Synthetic oligonucleotide
  Antisense strand to SEQ ID NO: 1327934
cugauaggaaaguucacuc

SEQ ID NO: 1327936 - RNA, 19 nt, Artificial Sequence
  Description of Artificial Sequence: Synthetic oligonucleotide
  Sense strand starting at position 1393 of SEQ ID NO: 1242177
gucgaugguccugagauug

SEQ ID NO: 1327937 - RNA, 19 nt, Artificial Sequence
  Description of Artificial Sequence: Synthetic oligonucleotide
  Antisense strand to SEQ ID NO: 1327936
caaucucaggaccaucgac

SEQ ID NO: 1327938 - RNA, 19 nt, Artificial Sequence
  Description of Artificial Sequence: Synthetic oligonucleotide
  Sense strand starting at position 2266 of SEQ ID NO: 1242177
gggucuguacuagaguaau

SEQ ID NO: 1327939 - RNA, 19 nt, Artificial Sequence
  Description of Artificial Sequence: Synthetic oligonucleotide
  Antisense strand to SEQ ID NO: 1327938
auuacucuaguacagaccc

SEQ ID NO: 1327940 - RNA, 19 nt, Artificial Sequence
  Description of Artificial Sequence: Synthetic oligonucleotide
  Sense strand starting at position 2350 of SEQ ID NO: 1242177
guagaugguguuuagggua

SEQ ID NO: 1327941 - RNA, 19 nt, Artificial Sequence
  Description of Artificial Sequence: Synthetic oligonucleotide
  Antisense strand to SEQ ID NO: 1327940
uacccuaaacaccaucuac

SEQ ID NO: 1327942 - RNA, 19 nt, Artificial Sequence
  Description of Artificial Sequence: Synthetic oligonucleotide
  Sense strand starting at position 2418 of SEQ ID NO: 1242177
gggagauuagacuguuacc

SEQ ID NO: 1327943 - RNA, 19 nt, Artificial Sequence
  Description of Artificial Sequence: Synthetic oligonucleotide
  Antisense strand to SEQ ID NO: 1327942
gguaacagucuaaucuccc

SEQ ID NO: 1327944 - RNA, 19 nt, Artificial Sequence
  Description of Artificial Sequence: Synthetic oligonucleotide
  Sense strand starting at position 2452 of SEQ ID NO: 1242177
cagugauacugccucuaga

SEQ ID NO: 1327945 - RNA, 19 nt, Artificial Sequence
  Description of Artificial Sequence: Synthetic oligonucleotide
  Antisense strand to SEQ ID NO: 1327944
ucuagaggcaguaucacug

SEQ ID NO: 1327946 - RNA, 19 nt, Artificial Sequence
  Description of Artificial Sequence: Synthetic oligonucleotide
  Sense strand starting at position 2543 of SEQ ID NO: 1242177
cucguuugugggaaguguu

SEQ ID NO: 1327947 - RNA, 19 nt, Artificial Sequence
  Description of Artificial Sequence: Synthetic oligonucleotide
  Antisense strand to SEQ ID NO: 1327946
aacacuucccacaaacgag

SEQ ID NO: 1327948 - RNA, 19 nt, Artificial Sequence
  Description of Artificial Sequence: Synthetic oligonucleotide
  Sense strand starting at position 2999 of SEQ ID NO: 1242177
agauaagaccuuggaacgu

SEQ ID NO: 1327949 - RNA, 19 nt, Artificial Sequence
  Description of Artificial Sequence: Synthetic oligonucleotide
  Antisense strand to SEQ ID NO: 1327948
acguuccaaggucuuaucu

SEQ ID NO: 1327950 - RNA, 19 nt, Artificial Sequence
  Description of Artificial Sequence: Synthetic oligonucleotide
  Sense strand starting at position 3242 of SEQ ID NO: 1242177
agaggaaguugagaaauuu

SEQ ID NO: 1327951 - RNA, 19 nt, Artificial Sequence
  Description of Artificial Sequence: Synthetic oligonucleotide
  Antisense strand to SEQ ID NO: 1327950
aaauuucucaacuuccucu

SEQ ID NO: 1327952 - RNA, 19 nt, Artificial Sequence
  Description of Artificial Sequence: Synthetic oligonucleotide
  Sense strand starting at position 3390 of SEQ ID NO: 1242177
auggcuugagcuuaagaga

SEQ ID NO: 1327953 - RNA, 19 nt, Artificial Sequence
  Description of Artificial Sequence: Synthetic oligonucleotide
  Antisense strand to SEQ ID NO: 1327952
ucucuuaagcucaagccau

SEQ ID NO: 1327954 - RNA, 19 nt, Artificial Sequence
  Description of Artificial Sequence: Synthetic oligonucleotide
  Sense strand starting at position 3397 of SEQ ID NO: 1242177
gagcuuaagagauggaggu

SEQ ID NO: 1327955 - RNA, 19 nt, Artificial Sequence
  Description of Artificial Sequence: Synthetic oligonucleotide
  Antisense strand to SEQ ID NO: 1327954
accuccaucucuuaagcuc

SEQ ID NO: 1327956 - RNA, 19 nt, Artificial Sequence
  Description of Artificial Sequence: Synthetic oligonucleotide
  Sense strand starting at position 3631 of SEQ ID NO: 1242177
uggucacuagacuguuaaa

SEQ ID NO: 1327957 - RNA, 19 nt, Artificial Sequence
  Description of Artificial Sequence: Synthetic oligonucleotide
  Antisense strand to SEQ ID NO: 1327956
uuuaacagucuagugacca

SEQ ID NO: 1327958 - RNA, 19 nt, Artificial Sequence
  Description of Artificial Sequence: Synthetic oligonucleotide
  Sense strand starting at position 3710 of SEQ ID NO: 1242177
guuauaagaggcugugaua

SEQ ID NO: 1327959 - RNA, 19 nt, Artificial Sequence
  Description of Artificial Sequence: Synthetic oligonucleotide
  Antisense strand to SEQ ID NO: 1327958
uaucacagccucuuauaac

SEQ ID NO: 1327960 - RNA, 19 nt, Artificial Sequence
  Description of Artificial Sequence: Synthetic oligonucleotide
  Sense strand starting at position 3761 of SEQ ID NO: 1242177
acccauugucugggugaug

SEQ ID NO: 1327961 - RNA, 19 nt, Artificial Sequence
  Description of Artificial Sequence: Synthetic oligonucleotide
  Antisense strand to SEQ ID NO: 1327960
caucacccagacaaugggu

SEQ ID NO: 1327962 - RNA, 19 nt, Artificial Sequence
  Description of Artificial Sequence: Synthetic oligonucleotide
  Sense strand starting at position 3781 of SEQ ID NO: 1242177
ggagauucaggugguccua

SEQ ID NO: 1327963 - RNA, 19 nt, Artificial Sequence
  Description of Artificial Sequence: Synthetic oligonucleotide
  Antisense strand to SEQ ID NO: 1327962
uaggaccaccugaaucucc

SEQ ID NO: 1327964 - RNA, 19 nt, Artificial Sequence
  Description of Artificial Sequence: Synthetic oligonucleotide
  Sense strand starting at position 3793 of SEQ ID NO: 1242177
gguccuaguugacuaacuu

SEQ ID NO: 1327965 - RNA, 19 nt, Artificial Sequence
  Description of Artificial Sequence: Synthetic oligonucleotide
  Antisense strand to SEQ ID NO: 1327964
aaguuagucaacuaggacc

SEQ ID NO: 1327966 - RNA, 19 nt, Artificial Sequence
  Description of Artificial Sequence: Synthetic oligonucleotide
  Sense strand starting at position 3794 of SEQ ID NO: 1242177
guccuaguugacuaacuuu

SEQ ID NO: 1327967 - RNA, 19 nt, Artificial Sequence
  Description of Artificial Sequence: Synthetic oligonucleotide
  Antisense strand to SEQ ID NO: 1327966
aaaguuagucaacuaggac

SEQ ID NO: 1327968 - RNA, 19 nt, Artificial Sequence
  Description of Artificial Sequence: Synthetic oligonucleotide
  Sense strand starting at position 3805 of SEQ ID NO: 1242177
cuaacuuuaccaggaguga

SEQ ID NO: 1327969 - RNA, 19 nt, Artificial Sequence
  Description of Artificial Sequence: Synthetic oligonucleotide
  Antisense strand to SEQ ID NO: 1327968
ucacuccugguaaaguuag

SEQ ID NO: 1327970 - RNA, 19 nt, Artificial Sequence
  Description of Artificial Sequence: Synthetic oligonucleotide
  Sense strand starting at position 51 of SEQ ID NO: 1242178
gguaucucccuguacaguu

SEQ ID NO: 1327971 - RNA, 19 nt, Artificial Sequence
  Description of Artificial Sequence: Synthetic oligonucleotide
  Antisense strand to SEQ ID NO: 1327970
aacuguacagggagauacc

SEQ ID NO: 1327972 - RNA, 19 nt, Artificial Sequence
  Description of Artificial Sequence: Synthetic oligonucleotide
  Sense strand starting at position 61 of SEQ ID NO: 1242178
uguacaguuaugggaauga

SEQ ID NO: 1327973 - RNA, 19 nt, Artificial Sequence
  Description of Artificial Sequence: Synthetic oligonucleotide
  Antisense strand to SEQ ID NO: 1327972
ucauucccauaacuguaca

SEQ ID NO: 1327974 - RNA, 19 nt, Artificial Sequence
  Description of Artificial Sequence: Synthetic oligonucleotide
  Sense strand starting at position 463 of SEQ ID NO: 1242178
cugauauggucugauuuac

SEQ ID NO: 1327975 - RNA, 19 nt, Artificial Sequence
  Description of Artificial Sequence: Synthetic oligonucleotide
  Antisense strand to SEQ ID NO: 1327974
guaaaucagaccauaucag

SEQ ID NO: 1327976 - RNA, 19 nt, Artificial Sequence
  Description of Artificial Sequence: Synthetic oligonucleotide
  Sense strand starting at position 696 of SEQ ID NO: 1242178
aggucacugccagagacau

SEQ ID NO: 1327977 - RNA, 19 nt, Artificial Sequence
  Description of Artificial Sequence: Synthetic oligonucleotide
  Antisense strand to SEQ ID NO: 1327976
augucucuggcagugaccu

SEQ ID NO: 1327978 - RNA, 19 nt, Artificial Sequence
  Description of Artificial Sequence: Synthetic oligonucleotide
  Sense strand starting at position 727 of SEQ ID NO: 1242178
gagggaaagguuuggcuga

SEQ ID NO: 1327979 - RNA, 19 nt, Artificial Sequence
  Description of Artificial Sequence: Synthetic oligonucleotide
  Antisense strand to SEQ ID NO: 1327978
ucagccaaaccuuucccuc

SEQ ID NO: 1327980 - RNA, 19 nt, Artificial Sequence
  Description of Artificial Sequence: Synthetic oligonucleotide
  Sense strand starting at position 766 of SEQ ID NO: 1242178
acaaauuaggugugagguu

SEQ ID NO: 1327981 - RNA, 19 nt, Artificial Sequence
  Description of Artificial Sequence: Synthetic oligonucleotide
  Antisense strand to SEQ ID NO: 1327980
aaccucacaccuaauuugu

SEQ ID NO: 1327982 - RNA, 19 nt, Artificial Sequence
  Description of Artificial Sequence: Synthetic oligonucleotide
  Sense strand starting at position 778 of SEQ ID NO: 1242178
ugagguuaguuuguuauau

SEQ ID NO: 1327983 - RNA, 19 nt, Artificial Sequence
  Description of Artificial Sequence: Synthetic oligonucleotide
  Antisense strand to SEQ ID NO: 1327982
auauaacaaacuaaccuca

SEQ ID NO: 1327984 - RNA, 19 nt, Artificial Sequence
  Description of Artificial Sequence: Synthetic oligonucleotide
  Sense strand starting at position 779 of SEQ ID NO: 1242178
gagguuaguuuguuauauu

SEQ ID NO: 1327985 - RNA, 19 nt, Artificial Sequence
  Description of Artificial Sequence: Synthetic oligonucleotide
  Antisense strand to SEQ ID NO: 1327984
aauauaacaaacuaaccuc

SEQ ID NO: 1327986 - RNA, 19 nt, Artificial Sequence
  Description of Artificial Sequence: Synthetic oligonucleotide
  Sense strand starting at position 894 of SEQ ID NO: 1242178
cccuuuaaugucugggcau

SEQ ID NO: 1327987 - RNA, 19 nt, Artificial Sequence
  Description of Artificial Sequence: Synthetic oligonucleotide
  Antisense strand to SEQ ID NO: 1327986
augcccagacauuaaaggg

SEQ ID NO: 1327988 - RNA, 19 nt, Artificial Sequence
  Description of Artificial Sequence: Synthetic oligonucleotide
  Sense strand starting at position 896 of SEQ ID NO: 1242178
cuuuaaugucugggcauuu

SEQ ID NO: 1327989 - RNA, 19 nt, Artificial Sequence
  Description of Artificial Sequence: Synthetic oligonucleotide
  Antisense strand to SEQ ID NO: 1327988
aaaugcccagacauuaaag

SEQ ID NO: 1327990 - RNA, 19 nt, Artificial Sequence
  Description of Artificial Sequence: Synthetic oligonucleotide
  Sense strand starting at position 931 of SEQ ID NO: 1242178
gcuggcaaacucuaucauu

SEQ ID NO: 1327991 - RNA, 19 nt, Artificial Sequence
  Description of Artificial Sequence: Synthetic oligonucleotide
  Antisense strand to SEQ ID NO: 1327990
aaugauagaguuugccagc

SEQ ID NO: 1327992 - RNA, 19 nt, Artificial Sequence
  Description of Artificial Sequence: Synthetic oligonucleotide
  Sense strand starting at position 939 of SEQ ID NO: 1242178
acucuaucauuaguguaca

SEQ ID NO: 1327993 - RNA, 19 nt, Artificial Sequence
  Description of Artificial Sequence: Synthetic oligonucleotide
  Antisense strand to SEQ ID NO: 1327992
uguacacuaaugauagagu

SEQ ID NO: 1327994 - RNA, 19 nt, Artificial Sequence
  Description of Artificial Sequence: Synthetic oligonucleotide
  Sense strand starting at position 947 of SEQ ID NO: 1242178
auuaguguacacggugaga

SEQ ID NO: 1327995 - RNA, 19 nt, Artificial Sequence
  Description of Artificial Sequence: Synthetic oligonucleotide
  Antisense strand to SEQ ID NO: 1327994
ucucaccguguacacuaau

SEQ ID NO: 1327996 - RNA, 19 nt, Artificial Sequence
  Description of Artificial Sequence: Synthetic oligonucleotide
  Sense strand starting at position 960 of SEQ ID NO: 1242178
gugagagguuugcugaaag

SEQ ID NO: 1327997 - RNA, 19 nt, Artificial Sequence
  Description of Artificial Sequence: Synthetic oligonucleotide
  Antisense strand to SEQ ID NO: 1327996
cuuucagcaaaccucucac

SEQ ID NO: 1327998 - RNA, 19 nt, Artificial Sequence
  Description of Artificial Sequence: Synthetic oligonucleotide
  Sense strand starting at position 1011 of SEQ ID NO: 1242178
ggaaguguucgugggagaa

SEQ ID NO: 1327999 - RNA, 19 nt, Artificial Sequence
  Description of Artificial Sequence: Synthetic oligonucleotide
  Antisense strand to SEQ ID NO: 1327998
uucucccacgaacacuucc

SEQ ID NO: 1328000 - RNA, 19 nt, Artificial Sequence
  Description of Artificial Sequence: Synthetic oligonucleotide
  Sense strand starting at position 2343 of SEQ ID NO: 1242178
gauacagaaaugugucguu

SEQ ID NO: 1328001 - RNA, 19 nt, Artificial Sequence
  Description of Artificial Sequence: Synthetic oligonucleotide
  Antisense strand to SEQ ID NO: 1328000
aacgacacauuucuguauc

SEQ ID NO: 1328002 - RNA, 19 nt, Artificial Sequence
  Description of Artificial Sequence: Synthetic oligonucleotide
  Sense strand starting at position 2348 of SEQ ID NO: 1242178
agaaaugugucguucuaaa

SEQ ID NO: 1328003 - RNA, 19 nt, Artificial Sequence
  Description of Artificial Sequence: Synthetic oligonucleotide
  Antisense strand to SEQ ID NO: 1328002
uuuagaacgacacauuucu

SEQ ID NO: 1328004 - RNA, 19 nt, Artificial Sequence
  Description of Artificial Sequence: Synthetic oligonucleotide
  Sense strand starting at position 2353 of SEQ ID NO: 1242178
ugugucguucuaaagcguu

SEQ ID NO: 1328005 - RNA, 19 nt, Artificial Sequence
  Description of Artificial Sequence: Synthetic oligonucleotide
  Antisense strand to SEQ ID NO: 1328004
aacgcuuuagaacgacaca

SEQ ID NO: 1328006 - RNA, 19 nt, Artificial Sequence
  Description of Artificial Sequence: Synthetic oligonucleotide
  Sense strand starting at position 2355 of SEQ ID NO: 1242178
ugucguucuaaagcguuaa

SEQ ID NO: 1328007 - RNA, 19 nt, Artificial Sequence
  Description of Artificial Sequence: Synthetic oligonucleotide
  Antisense strand to SEQ ID NO: 1328006
uuaacgcuuuagaacgaca

SEQ ID NO: 1328008 - RNA, 19 nt, Artificial Sequence
  Description of Artificial Sequence: Synthetic oligonucleotide
  Sense strand starting at position 2358 of SEQ ID NO: 1242178
cguucuaaagcguuaacga

SEQ ID NO: 1328009 - RNA, 19 nt, Artificial Sequence
  Description of Artificial Sequence: Synthetic oligonucleotide
  Antisense strand to SEQ ID NO: 1328008
ucguuaacgcuuuagaacg

SEQ ID NO: 1328010 - RNA, 19 nt, Artificial Sequence
  Description of Artificial Sequence: Synthetic oligonucleotide
  Sense strand starting at position 2359 of SEQ ID NO: 1242178
guucuaaagcguuaacgac

SEQ ID NO: 1328011 - RNA, 19 nt, Artificial Sequence
  Description of Artificial Sequence: Synthetic oligonucleotide
  Antisense strand to SEQ ID NO: 1328010
gucguuaacgcuuuagaac

SEQ ID NO: 1328012 - RNA, 19 nt, Artificial Sequence
  Description of Artificial Sequence: Synthetic oligonucleotide
  Sense strand starting at position 2420 of SEQ ID NO: 1242178
aauuauggaugugugcaaa

SEQ ID NO: 1328013 - RNA, 19 nt, Artificial Sequence
  Description of Artificial Sequence: Synthetic oligonucleotide
  Antisense strand to SEQ ID NO: 1328012
uuugcacacauccauaauu

SEQ ID NO: 1328014 - RNA, 19 nt, Artificial Sequence
  Description of Artificial Sequence: Synthetic oligonucleotide
  Sense strand starting at position 2423 of SEQ ID NO: 1242178
uauggaugugugcaaagaa

SEQ ID NO: 1328015 - RNA, 19 nt, Artificial Sequence
  Description of Artificial Sequence: Synthetic oligonucleotide
  Antisense strand to SEQ ID NO: 1328014
uucuuugcacacauccaua

SEQ ID NO: 1328016 - RNA, 19 nt, Artificial Sequence
  Description of Artificial Sequence: Synthetic oligonucleotide
  Sense strand starting at position 2497 of SEQ ID NO: 1242178
guggaauauuggcaauuua

SEQ ID NO: 1328017 - RNA, 19 nt, Artificial Sequence
  Description of Artificial Sequence: Synthetic oligonucleotide
  Antisense strand to SEQ ID NO: 1328016
uaaauugccaauauuccac

SEQ ID NO: 1328018 - RNA, 19 nt, Artificial Sequence
  Description of Artificial Sequence: Synthetic oligonucleotide
  Sense strand starting at position 2643 of SEQ ID NO: 1242178
gacaaagccugcucaggaa

SEQ ID NO: 1328019 - RNA, 19 nt, Artificial Sequence
  Description of Artificial Sequence: Synthetic oligonucleotide
  Antisense strand to SEQ ID NO: 1328018
uuccugagcaggcuuuguc

SEQ ID NO: 1328020 - RNA, 19 nt, Artificial Sequence
  Description of Artificial Sequence: Synthetic oligonucleotide
  Sense strand starting at position 2946 of SEQ ID NO: 1242178
gcaguucugcaauccuguu

SEQ ID NO: 1328021 - RNA, 19 nt, Artificial Sequence
  Description of Artificial Sequence: Synthetic oligonucleotide
  Antisense strand to SEQ ID NO: 1328020
aacaggauugcagaacugc

SEQ ID NO: 1328022 - RNA, 19 nt, Artificial Sequence
  Description of Artificial Sequence: Synthetic oligonucleotide
  Sense strand starting at position 3008 of SEQ ID NO: 1242178
gugauugccaccgacaagu

SEQ ID NO: 1328023 - RNA, 19 nt, Artificial Sequence
  Description of Artificial Sequence: Synthetic oligonucleotide
  Antisense strand to SEQ ID NO: 1328022
acuugucgguggcaaucac

SEQ ID NO: 1328024 - RNA, 19 nt, Artificial Sequence
  Description of Artificial Sequence: Synthetic oligonucleotide
  Sense strand starting at position 3206 of SEQ ID NO: 1242178
ucuaaaggagccugggaau

SEQ ID NO: 1328025 - RNA, 19 nt, Artificial Sequence
  Description of Artificial Sequence: Synthetic oligonucleotide
  Antisense strand to SEQ ID NO: 1328024
auucccaggcuccuuuaga

SEQ ID NO: 1328026 - RNA, 19 nt, Artificial Sequence
  Description of Artificial Sequence: Synthetic oligonucleotide
  Sense strand starting at position 3283 of SEQ ID NO: 1242178
ugugcugagcucguuauau

SEQ ID NO: 1328027 - RNA, 19 nt, Artificial Sequence
  Description of Artificial Sequence: Synthetic oligonucleotide
  Antisense strand to SEQ ID NO: 1328026
auauaacgagcucagcaca

SEQ ID NO: 1328028 - RNA, 19 nt, Artificial Sequence
  Description of Artificial Sequence: Synthetic oligonucleotide
  Sense strand starting at position 3346 of SEQ ID NO: 1242178
uucgcauaggaagguuauu

SEQ ID NO: 1328029 - RNA, 19 nt, Artificial Sequence
  Description of Artificial Sequence: Synthetic oligonucleotide
  Antisense strand to SEQ ID NO: 1328028
aauaaccuuccuaugcgaa

SEQ ID NO: 1328030 - RNA, 19 nt, Artificial Sequence
  Description of Artificial Sequence: Synthetic oligonucleotide
  Sense strand starting at position 3356 of SEQ ID NO: 1242178
aagguuauugcagguaagu

SEQ ID NO: 1328031 - RNA, 19 nt, Artificial Sequence
  Description of Artificial Sequence: Synthetic oligonucleotide
  Antisense strand to SEQ ID NO: 1328030
acuuaccugcaauaaccuu

SEQ ID NO: 1328032 - RNA, 19 nt, Artificial Sequence
  Description of Artificial Sequence: Synthetic oligonucleotide
  Sense strand starting at position 3358 of SEQ ID NO: 1242178
gguuauugcagguaaguua

SEQ ID NO: 1328033 - RNA, 19 nt, Artificial Sequence
  Description of Artificial Sequence: Synthetic oligonucleotide
  Antisense strand to SEQ ID NO: 1328032
uaacuuaccugcaauaacc

SEQ ID NO: 1328034 - RNA, 19 nt, Artificial Sequence
  Description of Artificial Sequence: Synthetic oligonucleotide
  Sense strand starting at position 3549 of SEQ ID NO: 1242178
ggcugagcgcuccuucagu

SEQ ID NO: 1328035 - RNA, 19 nt, Artificial Sequence
  Description of Artificial Sequence: Synthetic oligonucleotide
  Antisense strand to SEQ ID NO: 1328034
acugaaggagcgcucagcc

SEQ ID NO: 1328036 - RNA, 19 nt, Artificial Sequence
  Description of Artificial Sequence: Synthetic oligonucleotide
  Sense strand starting at position 3607 of SEQ ID NO: 1242178
cucagacagucuuccuuga

SEQ ID NO: 1328037 - RNA, 19 nt, Artificial Sequence
  Description of Artificial Sequence: Synthetic oligonucleotide
  Antisense strand to SEQ ID NO: 1328036
ucaaggaagacugucugag

SEQ ID NO: 1328038 - RNA, 19 nt, Artificial Sequence
  Description of Artificial Sequence: Synthetic oligonucleotide
  Sense strand starting at position 3611 of SEQ ID NO: 1242178
gacagucuuccuugagcaa

SEQ ID NO: 1328039 - RNA, 19 nt, Artificial Sequence
  Description of Artificial Sequence: Synthetic oligonucleotide
  Antisense strand to SEQ ID NO: 1328038
uugcucaaggaagacuguc

SEQ ID NO: 1328040 - RNA, 19 nt, Artificial Sequence
  Description of Artificial Sequence: Synthetic oligonucleotide
  Sense strand starting at position 3612 of SEQ ID NO: 1242178
acagucuuccuugagcaac

SEQ ID NO: 1328041 - RNA, 19 nt, Artificial Sequence
  Description of Artificial Sequence: Synthetic oligonucleotide
  Antisense strand to SEQ ID NO: 1328040
guugcucaaggaagacugu

SEQ ID NO: 1328042 - RNA, 19 nt, Artificial Sequence
  Description of Artificial Sequence: Synthetic oligonucleotide
  Sense strand starting at position 3614 of SEQ ID NO: 1242178
agucuuccuugagcaacuu

SEQ ID NO: 1328043 - RNA, 19 nt, Artificial Sequence
  Description of Artificial Sequence: Synthetic oligonucleotide
  Antisense strand to SEQ ID NO: 1328042
aaguugcucaaggaagacu

SEQ ID NO: 1328044 - RNA, 19 nt, Artificial Sequence
  Description of Artificial Sequence: Synthetic oligonucleotide
  Sense strand starting at position 3739 of SEQ ID NO: 1242178
gguccacuucuagagaggu

SEQ ID NO: 1328045 - RNA, 19 nt, Artificial Sequence
  Description of Artificial Sequence: Synthetic oligonucleotide
  Antisense strand to SEQ ID NO: 1328044
accucucuagaaguggacc

SEQ ID NO: 1328046 - RNA, 19 nt, Artificial Sequence
  Description of Artificial Sequence: Synthetic oligonucleotide
  Sense strand starting at position 3918 of SEQ ID NO: 1242178
ugagaaaugggaugucucu

SEQ ID NO: 1328047 - RNA, 19 nt, Artificial Sequence
  Description of Artificial Sequence: Synthetic oligonucleotide
  Antisense strand to SEQ ID NO: 1328046
agagacaucccauuucuca

SEQ ID NO: 1328048 - RNA, 19 nt, Artificial Sequence
  Description of Artificial Sequence: Synthetic oligonucleotide
  Sense strand starting at position 3944 of SEQ ID NO: 1242178
gugucuaaauucucuuaac

SEQ ID NO: 1328049 - RNA, 19 nt, Artificial Sequence
  Description of Artificial Sequence: Synthetic oligonucleotide
  Antisense strand to SEQ ID NO: 1328048
guuaagagaauuuagacac

SEQ ID NO: 1328050 - RNA, 19 nt, Artificial Sequence
  Description of Artificial Sequence: Synthetic oligonucleotide
  Sense strand starting at position 561 of SEQ ID NO: 1242179
ucaggaggguucguggaaa

SEQ ID NO: 1328051 - RNA, 19 nt, Artificial Sequence
  Description of Artificial Sequence: Synthetic oligonucleotide
  Antisense strand to SEQ ID NO: 1328050
uuuccacgaacccuccuga

SEQ ID NO: 1328052 - RNA, 19 nt, Artificial Sequence
  Description of Artificial Sequence: Synthetic oligonucleotide
  Sense strand starting at position 563 of SEQ ID NO: 1242179
aggaggguucguggaaaug

SEQ ID NO: 1328053 - RNA, 19 nt, Artificial Sequence
  Description of Artificial Sequence: Synthetic oligonucleotide
  Antisense strand to SEQ ID NO: 1328052
cauuuccacgaacccuccu

SEQ ID NO: 1328054 - RNA, 19 nt, Artificial Sequence
  Description of Artificial Sequence: Synthetic oligonucleotide
  Sense strand starting at position 564 of SEQ ID NO: 1242179
ggaggguucguggaaaugu

SEQ ID NO: 1328055 - RNA, 19 nt, Artificial Sequence
  Description of Artificial Sequence: Synthetic oligonucleotide
  Antisense strand to SEQ ID NO: 1328054
acauuuccacgaacccucc

SEQ ID NO: 1328056 - RNA, 19 nt, Artificial Sequence
  Description of Artificial Sequence: Synthetic oligonucleotide
  Sense strand starting at position 565 of SEQ ID NO: 1242179
gaggguucguggaaaugug

SEQ ID NO: 1328057 - RNA, 19 nt, Artificial Sequence
  Description of Artificial Sequence: Synthetic oligonucleotide
  Antisense strand to SEQ ID NO: 1328056
cacauuuccacgaacccuc

SEQ ID NO: 1328058 - RNA, 19 nt, Artificial Sequence
  Description of Artificial Sequence: Synthetic oligonucleotide
  Sense strand starting at position 714 of SEQ ID NO: 1242179
ggaauaguccaagacgcaa

SEQ ID NO: 1328059 - RNA, 19 nt, Artificial Sequence
  Description of Artificial Sequence: Synthetic oligonucleotide
  Antisense strand to SEQ ID NO: 1328058
uugcgucuuggacuauucc

SEQ ID NO: 1328060 - RNA, 19 nt, Artificial Sequence
  Description of Artificial Sequence: Synthetic oligonucleotide
  Sense strand starting at position 1048 of SEQ ID NO: 1242179
ugguauggugagcgaaaga

SEQ ID NO: 1328061 - RNA, 19 nt, Artificial Sequence
  Description of Artificial Sequence: Synthetic oligonucleotide
  Antisense strand to SEQ ID NO: 1328060
ucuuucgcucaccauacca

SEQ ID NO: 1328062 - RNA, 19 nt, Artificial Sequence
  Description of Artificial Sequence: Synthetic oligonucleotide
  Sense strand starting at position 1068 of SEQ ID NO: 1242179
gaaggaggcgucuaaagcu

SEQ ID NO: 1328063 - RNA, 19 nt, Artificial Sequence
  Description of Artificial Sequence: Synthetic oligonucleotide
  Antisense strand to SEQ ID NO: 1328062
agcuuuagacgccuccuuc

SEQ ID NO: 1328064 - RNA, 19 nt, Artificial Sequence
  Description of Artificial Sequence: Synthetic oligonucleotide
  Sense strand starting at position 1080 of SEQ ID NO: 1242179
uaaagcucacccggagaau

SEQ ID NO: 1328065 - RNA, 19 nt, Artificial Sequence
  Description of Artificial Sequence: Synthetic oligonucleotide
  Antisense strand to SEQ ID NO: 1328064
auucuccgggugagcuuua

SEQ ID NO: 1328066 - RNA, 19 nt, Artificial Sequence
  Description of Artificial Sequence: Synthetic oligonucleotide
  Sense strand starting at position 1081 of SEQ ID NO: 1242179
aaagcucacccggagaauu

SEQ ID NO: 1328067 - RNA, 19 nt, Artificial Sequence
  Description of Artificial Sequence: Synthetic oligonucleotide
  Antisense strand to SEQ ID NO: 1328066
aauucuccgggugagcuuu

SEQ ID NO: 1328068 - RNA, 19 nt, Artificial Sequence
  Description of Artificial Sequence: Synthetic oligonucleotide
  Sense strand starting at position 1106 of SEQ ID NO: 1242179
ggaggcuggcuccaagaua

SEQ ID NO: 1328069 - RNA, 19 nt, Artificial Sequence
  Description of Artificial Sequence: Synthetic oligonucleotide
  Antisense strand to SEQ ID NO: 1328068
uaucuuggagccagccucc

SEQ ID NO: 1328070 - RNA, 19 nt, Artificial Sequence
  Description of Artificial Sequence: Synthetic oligonucleotide
  Sense strand starting at position 1234 of SEQ ID NO: 1242179
cugaaagguguugggagaa

SEQ ID NO: 1328071 - RNA, 19 nt, Artificial Sequence
  Description of Artificial Sequence: Synthetic oligonucleotide
  Antisense strand to SEQ ID NO: 1328070
uucucccaacaccuuucag

SEQ ID NO: 1328072 - RNA, 19 nt, Artificial Sequence
  Description of Artificial Sequence: Synthetic oligonucleotide
  Sense strand starting at position 1262 of SEQ ID NO: 1242179
cguuaaggcggguggaaau

SEQ ID NO: 1328073 - RNA, 19 nt, Artificial Sequence
  Description of Artificial Sequence: Synthetic oligonucleotide
  Antisense strand to SEQ ID NO: 1328072
auuuccacccgccuuaacg

SEQ ID NO: 1328074 - RNA, 19 nt, Artificial Sequence
  Description of Artificial Sequence: Synthetic oligonucleotide
  Sense strand starting at position 1445 of SEQ ID NO: 1242179
cgccuuucccagugaauaa

SEQ ID NO: 1328075 - RNA, 19 nt, Artificial Sequence
  Description of Artificial Sequence: Synthetic oligonucleotide
  Antisense strand to SEQ ID NO: 1328074
uuauucacugggaaaggcg

SEQ ID NO: 1328076 - RNA, 19 nt, Artificial Sequence
  Description of Artificial Sequence: Synthetic oligonucleotide
  Sense strand starting at position 1654 of SEQ ID NO: 1242179
aaauuuggcugugagaguu

SEQ ID NO: 1328077 - RNA, 19 nt, Artificial Sequence
  Description of Artificial Sequence: Synthetic oligonucleotide
  Antisense strand to SEQ ID NO: 1328076
aacucucacagccaaauuu

SEQ ID NO: 1328078 - RNA, 19 nt, Artificial Sequence
  Description of Artificial Sequence: Synthetic oligonucleotide
  Sense strand starting at position 2419 of SEQ ID NO: 1242179
cuguguuugccucauauaa

SEQ ID NO: 1328079 - RNA, 19 nt, Artificial Sequence
  Description of Artificial Sequence: Synthetic oligonucleotide
  Antisense strand to SEQ ID NO: 1328078
uuauaugaggcaaacacag

SEQ ID NO: 1328080 - RNA, 19 nt, Artificial Sequence
  Description of Artificial Sequence: Synthetic oligonucleotide
  Sense strand starting at position 2561 of SEQ ID NO: 1242179
gaccgaucgaucgauugau

SEQ ID NO: 1328081 - RNA, 19 nt, Artificial Sequence
  Description of Artificial Sequence: Synthetic oligonucleotide
  Antisense strand to SEQ ID NO: 1328080
aucaaucgaucgaucgguc

SEQ ID NO: 1328082 - RNA, 19 nt, Artificial Sequence
  Description of Artificial Sequence: Synthetic oligonucleotide
  Sense strand starting at position 2571 of SEQ ID NO: 1242179
ucgauugaucuugagcacu

SEQ ID NO: 1328083 - RNA, 19 nt, Artificial Sequence
  Description of Artificial Sequence: Synthetic oligonucleotide
  Antisense strand to SEQ ID NO: 1328082
agugcucaagaucaaucga

SEQ ID NO: 1328084 - RNA, 19 nt, Artificial Sequence
  Description of Artificial Sequence: Synthetic oligonucleotide
  Sense strand starting at position 2573 of SEQ ID NO: 1242179
gauugaucuugagcacuag

SEQ ID NO: 1328085 - RNA, 19 nt, Artificial Sequence
  Description of Artificial Sequence: Synthetic oligonucleotide
  Antisense strand to SEQ ID NO: 1328084
cuagugcucaagaucaauc

SEQ ID NO: 1328086 - RNA, 19 nt, Artificial Sequence
  Description of Artificial Sequence: Synthetic oligonucleotide
  Sense strand starting at position 2574 of SEQ ID NO: 1242179
auugaucuugagcacuagu

SEQ ID NO: 1328087 - RNA, 19 nt, Artificial Sequence
  Description of Artificial Sequence: Synthetic oligonucleotide
  Antisense strand to SEQ ID NO: 1328086
acuagugcucaagaucaau

SEQ ID NO: 1328088 - RNA, 19 nt, Artificial Sequence
  Description of Artificial Sequence: Synthetic oligonucleotide
  Sense strand starting at position 2577 of SEQ ID NO: 1242179
gaucuugagcacuaguacu

SEQ ID NO: 1328089 - RNA, 19 nt, Artificial Sequence
  Description of Artificial Sequence: Synthetic oligonucleotide
  Antisense strand to SEQ ID NO: 1328088
aguacuagugcucaagauc

SEQ ID NO: 1328090 - RNA, 19 nt, Artificial Sequence
  Description of Artificial Sequence: Synthetic oligonucleotide
  Sense strand starting at position 2603 of SEQ ID NO: 1242179
cuggucaaugggugaugua

SEQ ID NO: 1328091 - RNA, 19 nt, Artificial Sequence
  Description of Artificial Sequence: Synthetic oligonucleotide
  Antisense strand to SEQ ID NO: 1328090
uacaucacccauugaccag

SEQ ID NO: 1328092 - RNA, 19 nt, Artificial Sequence
  Description of Artificial Sequence: Synthetic oligonucleotide
  Sense strand starting at position 2629 of SEQ ID NO: 1242179
ccacaacugcccugagagu

SEQ ID NO: 1328093 - RNA, 19 nt, Artificial Sequence
  Description of Artificial Sequence: Synthetic oligonucleotide
  Antisense strand to SEQ ID NO: 1328092
acucucagggcaguugugg

SEQ ID NO: 1328094 - RNA, 19 nt, Artificial Sequence
  Description of Artificial Sequence: Synthetic oligonucleotide
  Sense strand starting at position 2630 of SEQ ID NO: 1242179
cacaacugcccugagaguu

SEQ ID NO: 1328095 - RNA, 19 nt, Artificial Sequence
  Description of Artificial Sequence: Synthetic oligonucleotide
  Antisense strand to SEQ ID NO: 1328094
aacucucagggcaguugug

SEQ ID NO: 1328096 - RNA, 19 nt, Artificial Sequence
  Description of Artificial Sequence: Synthetic oligonucleotide
  Sense strand starting at position 2674 of SEQ ID NO: 1242179
aagggaaauugcucuguaa

SEQ ID NO: 1328097 - RNA, 19 nt, Artificial Sequence
  Description of Artificial Sequence: Synthetic oligonucleotide
  Antisense strand to SEQ ID NO: 1328096
uuacagagcaauuucccuu

SEQ ID NO: 1328098 - RNA, 19 nt, Artificial Sequence
  Description of Artificial Sequence: Synthetic oligonucleotide
  Sense strand starting at position 2676 of SEQ ID NO: 1242179
gggaaauugcucuguaagg

SEQ ID NO: 1328099 - RNA, 19 nt, Artificial Sequence
  Description of Artificial Sequence: Synthetic oligonucleotide
  Antisense strand to SEQ ID NO: 1328098
ccuuacagagcaauuuccc

SEQ ID NO: 1328100 - RNA, 19 nt, Artificial Sequence
  Description of Artificial Sequence: Synthetic oligonucleotide
  Sense strand starting at position 2677 of SEQ ID NO: 1242179
ggaaauugcucuguaaggu

SEQ ID NO: 1328101 - RNA, 19 nt, Artificial Sequence
  Description of Artificial Sequence: Synthetic oligonucleotide
  Antisense strand to SEQ ID NO: 1328100
accuuacagagcaauuucc

SEQ ID NO: 1328102 - RNA, 19 nt, Artificial Sequence
  Description of Artificial Sequence: Synthetic oligonucleotide
  Sense strand starting at position 2678 of SEQ ID NO: 1242179
gaaauugcucuguaaggua

SEQ ID NO: 1328103 - RNA, 19 nt, Artificial Sequence
  Description of Artificial Sequence: Synthetic oligonucleotide
  Antisense strand to SEQ ID NO: 1328102
uaccuuacagagcaauuuc

SEQ ID NO: 1328104 - RNA, 19 nt, Artificial Sequence
  Description of Artificial Sequence: Synthetic oligonucleotide
  Sense strand starting at position 2736 of SEQ ID NO: 1242179
ugucuugagucuucgauca

SEQ ID NO: 1328105 - RNA, 19 nt, Artificial Sequence
  Description of Artificial Sequence: Synthetic oligonucleotide
  Antisense strand to SEQ ID NO: 1328104
ugaucgaagacucaagaca

SEQ ID NO: 1328106 - RNA, 19 nt, Artificial Sequence
  Description of Artificial Sequence: Synthetic oligonucleotide
  Sense strand starting at position 2743 of SEQ ID NO: 1242179
agucuucgaucauuugcuu

SEQ ID NO: 1328107 - RNA, 19 nt, Artificial Sequence
  Description of Artificial Sequence: Synthetic oligonucleotide
  Antisense strand to SEQ ID NO: 1328106
aagcaaaugaucgaagacu

SEQ ID NO: 1328108 - RNA, 19 nt, Artificial Sequence
  Description of Artificial Sequence: Synthetic oligonucleotide
  Sense strand starting at position 3088 of SEQ ID NO: 1242179
gucugagaccuauguuuaa

SEQ ID NO: 1328109 - RNA, 19 nt, Artificial Sequence
  Description of Artificial Sequence: Synthetic oligonucleotide
  Antisense strand to SEQ ID NO: 1328108
uuaaacauaggucucagac

SEQ ID NO: 1328110 - RNA, 19 nt, Artificial Sequence
  Description of Artificial Sequence: Synthetic oligonucleotide
  Sense strand starting at position 3127 of SEQ ID NO: 1242179
aaguuauaguaguuagcua

SEQ ID NO: 1328111 - RNA, 19 nt, Artificial Sequence
  Description of Artificial Sequence: Synthetic oligonucleotide
  Antisense strand to SEQ ID NO: 1328110
uagcuaacuacuauaacuu

SEQ ID NO: 1328112 - RNA, 19 nt, Artificial Sequence
  Description of Artificial Sequence: Synthetic oligonucleotide
  Sense strand starting at position 3138 of SEQ ID NO: 1242179
guuagcuacuugguaaagu

SEQ ID NO: 1328113 - RNA, 19 nt, Artificial Sequence
  Description of Artificial Sequence: Synthetic oligonucleotide
  Antisense strand to SEQ ID NO: 1328112
acuuuaccaaguagcuaac

SEQ ID NO: 1328114 - RNA, 19 nt, Artificial Sequence
  Description of Artificial Sequence: Synthetic oligonucleotide
  Sense strand starting at position 3146 of SEQ ID NO: 1242179
cuugguaaagucugaguau

SEQ ID NO: 1328115 - RNA, 19 nt, Artificial Sequence
  Description of Artificial Sequence: Synthetic oligonucleotide
  Antisense strand to SEQ ID NO: 1328114
auacucagacuuuaccaag

SEQ ID NO: 1328116 - RNA, 19 nt, Artificial Sequence
  Description of Artificial Sequence: Synthetic oligonucleotide
  Sense strand starting at position 3149 of SEQ ID NO: 1242179
gguaaagucugaguauaau

SEQ ID NO: 1328117 - RNA, 19 nt, Artificial Sequence
  Description of Artificial Sequence: Synthetic oligonucleotide
  Antisense strand to SEQ ID NO: 1328116
auuauacucagacuuuacc

SEQ ID NO: 1328118 - RNA, 19 nt, Artificial Sequence
  Description of Artificial Sequence: Synthetic oligonucleotide
  Sense strand starting at position 3586 of SEQ ID NO: 1242179
cuugcaaagucucuuuaag

SEQ ID NO: 1328119 - RNA, 19 nt, Artificial Sequence
  Description of Artificial Sequence: Synthetic oligonucleotide
  Antisense strand to SEQ ID NO: 1328118
cuuaaagagacuuugcaag

SEQ ID NO: 1328120 - RNA, 19 nt, Artificial Sequence
  Description of Artificial Sequence: Synthetic oligonucleotide
  Sense strand starting at position 3626 of SEQ ID NO: 1242179
uugugugguuuguucugaa

SEQ ID NO: 1328121 - RNA, 19 nt, Artificial Sequence
  Description of Artificial Sequence: Synthetic oligonucleotide
  Antisense strand to SEQ ID NO: 1328120
uucagaacaaaccacacaa

SEQ ID NO: 1328122 - RNA, 19 nt, Artificial Sequence
  Description of Artificial Sequence: Synthetic oligonucleotide
  Sense strand starting at position 3728 of SEQ ID NO: 1242179
ggugguaggacccagugau

SEQ ID NO: 1328123 - RNA, 19 nt, Artificial Sequence
  Description of Artificial Sequence: Synthetic oligonucleotide
  Antisense strand to SEQ ID NO: 1328122
aucacuggguccuaccacc

SEQ ID NO: 1328124 - RNA, 19 nt, Artificial Sequence
  Description of Artificial Sequence: Synthetic oligonucleotide
  Sense strand starting at position 3776 of SEQ ID NO: 1242179
ugucacaaaguuugagaau

SEQ ID NO: 1328125 - RNA, 19 nt, Artificial Sequence
  Description of Artificial Sequence: Synthetic oligonucleotide
  Antisense strand to SEQ ID NO: 1328124
auucucaaacuuugugaca

SEQ ID NO: 1328126 - RNA, 19 nt, Artificial Sequence
  Description of Artificial Sequence: Synthetic oligonucleotide
  Sense strand starting at position 3785 of SEQ ID NO: 1242179
guuugagaaucauugguau

SEQ ID NO: 1328127 - RNA, 19 nt, Artificial Sequence
  Description of Artificial Sequence: Synthetic oligonucleotide
  Antisense strand to SEQ ID NO: 1328126
auaccaaugauucucaaac

SEQ ID NO: 1328128 - RNA, 19 nt, Artificial Sequence
  Description of Artificial Sequence: Synthetic oligonucleotide
  Sense strand starting at position 3799 of SEQ ID NO: 1242179
gguauuugcugauacagua

SEQ ID NO: 1328129 - RNA, 19 nt, Artificial Sequence
  Description of Artificial Sequence: Synthetic oligonucleotide
  Antisense strand to SEQ ID NO: 1328128
uacuguaucagcaaauacc

SEQ ID NO: 1328130 - RNA, 19 nt, Artificial Sequence
  Description of Artificial Sequence: Synthetic oligonucleotide
  Sense strand starting at position 62 of SEQ ID NO: 1242180
cuaguuucugaaggaauac

SEQ ID NO: 1328131 - RNA, 19 nt, Artificial Sequence
  Description of Artificial Sequence: Synthetic oligonucleotide
  Antisense strand to SEQ ID NO: 1328130
guauuccuucagaaacuag

SEQ ID NO: 1328132 - RNA, 19 nt, Artificial Sequence
  Description of Artificial Sequence: Synthetic oligonucleotide
  Sense strand starting at position 71 of SEQ ID NO: 1242180
gaaggaauacucuauucgu

SEQ ID NO: 1328133 - RNA, 19 nt, Artificial Sequence
  Description of Artificial Sequence: Synthetic oligonucleotide
  Antisense strand to SEQ ID NO: 1328132
acgaauagaguauuccuuc

SEQ ID NO: 1328134 - RNA, 19 nt, Artificial Sequence
  Description of Artificial Sequence: Synthetic oligonucleotide
  Sense strand starting at position 265 of SEQ ID NO: 1242180
gcagcccuguucuuauuua

SEQ ID NO: 1328135 - RNA, 19 nt, Artificial Sequence
  Description of Artificial Sequence: Synthetic oligonucleotide
  Antisense strand to SEQ ID NO: 1328134
uaaauaagaacagggcugc

SEQ ID NO: 1328136 - RNA, 19 nt, Artificial Sequence
  Description of Artificial Sequence: Synthetic oligonucleotide
  Sense strand starting at position 287 of SEQ ID NO: 1242180
gaaggcuaugacuguaaca

SEQ ID NO: 1328137 - RNA, 19 nt, Artificial Sequence
  Description of Artificial Sequence: Synthetic oligonucleotide
  Antisense strand to SEQ ID NO: 1328136
uguuacagucauagccuuc

SEQ ID NO: 1328138 - RNA, 19 nt, Artificial Sequence
  Description of Artificial Sequence: Synthetic oligonucleotide
  Sense strand starting at position 338 of SEQ ID NO: 1242180
gucgguuacacaggacauu

SEQ ID NO: 1328139 - RNA, 19 nt, Artificial Sequence
  Description of Artificial Sequence: Synthetic oligonucleotide
  Antisense strand to SEQ ID NO: 1328138
aauguccuguguaaccgac

SEQ ID NO: 1328140 - RNA, 19 nt, Artificial Sequence
  Description of Artificial Sequence: Synthetic oligonucleotide
  Sense strand starting at position 438 of SEQ ID NO: 1242180
ggcucagauuugucauucu

SEQ ID NO: 1328141 - RNA, 19 nt, Artificial Sequence
  Description of Artificial Sequence: Synthetic oligonucleotide
  Antisense strand to SEQ ID NO: 1328140
agaaugacaaaucugagcc

SEQ ID NO: 1328142 - RNA, 19 nt, Artificial Sequence
  Description of Artificial Sequence: Synthetic oligonucleotide
  Sense strand starting at position 445 of SEQ ID NO: 1242180
auuugucauucugacagga

SEQ ID NO: 1328143 - RNA, 19 nt, Artificial Sequence
  Description of Artificial Sequence: Synthetic oligonucleotide
  Antisense strand to SEQ ID NO: 1328142
uccugucagaaugacaaau

SEQ ID NO: 1328144 - RNA, 19 nt, Artificial Sequence
  Description of Artificial Sequence: Synthetic oligonucleotide
  Sense strand starting at position 785 of SEQ ID NO: 1242180
ucacaaggguucuuguaaa

SEQ ID NO: 1328145 - RNA, 19 nt, Artificial Sequence
  Description of Artificial Sequence: Synthetic oligonucleotide
  Antisense strand to SEQ ID NO: 1328144
uuuacaagaacccuuguga

SEQ ID NO: 1328146 - RNA, 19 nt, Artificial Sequence
  Description of Artificial Sequence: Synthetic oligonucleotide
  Sense strand starting at position 1107 of SEQ ID NO: 1242180
uuagacugccaagauaagu

SEQ ID NO: 1328147 - RNA, 19 nt, Artificial Sequence
  Description of Artificial Sequence: Synthetic oligonucleotide
  Antisense strand to SEQ ID NO: 1328146
acuuaucuuggcagucuaa

SEQ ID NO: 1328148 - RNA, 19 nt, Artificial Sequence
  Description of Artificial Sequence: Synthetic oligonucleotide
  Sense strand starting at position 1132 of SEQ ID NO: 1242180
agcaaagguuaugcucaaa

SEQ ID NO: 1328149 - RNA, 19 nt, Artificial Sequence
  Description of Artificial Sequence: Synthetic oligonucleotide
  Antisense strand to SEQ ID NO: 1328148
uuugagcauaaccuuugcu

SEQ ID NO: 1328150 - RNA, 19 nt, Artificial Sequence
  Description of Artificial Sequence: Synthetic oligonucleotide
  Sense strand starting at position 1340 of SEQ ID NO: 1242180
agaacaucucaggguauau

SEQ ID NO: 1328151 - RNA, 19 nt, Artificial Sequence
  Description of Artificial Sequence: Synthetic oligonucleotide
  Antisense strand to SEQ ID NO: 1328150
auauacccugagauguucu

SEQ ID NO: 1328152 - RNA, 19 nt, Artificial Sequence
  Description of Artificial Sequence: Synthetic oligonucleotide
  Sense strand starting at position 1442 of SEQ ID NO: 1242180
uuagguuagcacgacauau

SEQ ID NO: 1328153 - RNA, 19 nt, Artificial Sequence
  Description of Artificial Sequence: Synthetic oligonucleotide
  Antisense strand to SEQ ID NO: 1328152
auaugucgugcuaaccuaa

SEQ ID NO: 1328154 - RNA, 19 nt, Artificial Sequence
  Description of Artificial Sequence: Synthetic oligonucleotide
  Sense strand starting at position 1444 of SEQ ID NO: 1242180
agguuagcacgacauauag

SEQ ID NO: 1328155 - RNA, 19 nt, Artificial Sequence
  Description of Artificial Sequence: Synthetic oligonucleotide
  Antisense strand to SEQ ID NO: 1328154
cuauaugucgugcuaaccu

SEQ ID NO: 1328156 - RNA, 19 nt, Artificial Sequence
  Description of Artificial Sequence: Synthetic oligonucleotide
  Sense strand starting at position 1446 of SEQ ID NO: 1242180
guuagcacgacauauagga

SEQ ID NO: 1328157 - RNA, 19 nt, Artificial Sequence
  Description of Artificial Sequence: Synthetic oligonucleotide
  Antisense strand to SEQ ID NO: 1328156
uccuauaugucgugcuaac

SEQ ID NO: 1328158 - RNA, 19 nt, Artificial Sequence
  Description of Artificial Sequence: Synthetic oligonucleotide
  Sense strand starting at position 1450 of SEQ ID NO: 1242180
gcacgacauauaggacuuu

SEQ ID NO: 1328159 - RNA, 19 nt, Artificial Sequence
  Description of Artificial Sequence: Synthetic oligonucleotide
  Antisense strand to SEQ ID NO: 1328158
aaaguccuauaugucgugc

SEQ ID NO: 1328160 - RNA, 19 nt, Artificial Sequence
  Description of Artificial Sequence: Synthetic oligonucleotide
  Sense strand starting at position 1543 of SEQ ID NO: 1242180
gugcuaugggucgcuuaau

SEQ ID NO: 1328161 - RNA, 19 nt, Artificial Sequence
  Description of Artificial Sequence: Synthetic oligonucleotide
  Antisense strand to SEQ ID NO: 1328160
auuaagcgacccauagcac

SEQ ID NO: 1328162 - RNA, 19 nt, Artificial Sequence
  Description of Artificial Sequence: Synthetic oligonucleotide
  Sense strand starting at position 1635 of SEQ ID NO: 1242180
ccggucucaccucagugaa

SEQ ID NO: 1328163 - RNA, 19 nt, Artificial Sequence
  Description of Artificial Sequence: Synthetic oligonucleotide
  Antisense strand to SEQ ID NO: 1328162
uucacugaggugagaccgg

SEQ ID NO: 1328164 - RNA, 19 nt, Artificial Sequence
  Description of Artificial Sequence: Synthetic oligonucleotide
  Sense strand starting at position 1835 of SEQ ID NO: 1242180
gcggcuuccgugucaggau

SEQ ID NO: 1328165 - RNA, 19 nt, Artificial Sequence
  Description of Artificial Sequence: Synthetic oligonucleotide
  Antisense strand to SEQ ID NO: 1328164
auccugacacggaagccgc

SEQ ID NO: 1328166 - RNA, 19 nt, Artificial Sequence
  Description of Artificial Sequence: Synthetic oligonucleotide
  Sense strand starting at position 2787 of SEQ ID NO: 1242180
gcggauccucgagaaccuu

SEQ ID NO: 1328167 - RNA, 19 nt, Artificial Sequence
  Description of Artificial Sequence: Synthetic oligonucleotide
  Antisense strand to SEQ ID NO: 1328166
aagguucucgaggauccgc

SEQ ID NO: 1328168 - RNA, 19 nt, Artificial Sequence
  Description of Artificial Sequence: Synthetic oligonucleotide
  Sense strand starting at position 2793 of SEQ ID NO: 1242180
ccucgagaaccuuauuauu

SEQ ID NO: 1328169 - RNA, 19 nt, Artificial Sequence
  Description of Artificial Sequence: Synthetic oligonucleotide
  Antisense strand to SEQ ID NO: 1328168
aauaauaagguucucgagg

SEQ ID NO: 1328170 - RNA, 19 nt, Artificial Sequence
  Description of Artificial Sequence: Synthetic oligonucleotide
  Sense strand starting at position 2795 of SEQ ID NO: 1242180
ucgagaaccuuauuauuau

SEQ ID NO: 1328171 - RNA, 19 nt, Artificial Sequence
  Description of Artificial Sequence: Synthetic oligonucleotide
  Antisense strand to SEQ ID NO: 1328170
auaauaauaagguucucga

SEQ ID NO: 1328172 - RNA, 19 nt, Artificial Sequence
  Description of Artificial Sequence: Synthetic oligonucleotide
  Sense strand starting at position 2829 of SEQ ID NO: 1242180
gguuaaaguaauuguagua

SEQ ID NO: 1328173 - RNA, 19 nt, Artificial Sequence
  Description of Artificial Sequence: Synthetic oligonucleotide
  Antisense strand to SEQ ID NO: 1328172
uacuacaauuacuuuaacc

SEQ ID NO: 1328174 - RNA, 19 nt, Artificial Sequence
  Description of Artificial Sequence: Synthetic oligonucleotide
  Sense strand starting at position 2855 of SEQ ID NO: 1242180
ccuugaggcuuccuaaaug

SEQ ID NO: 1328175 - RNA, 19 nt, Artificial Sequence
  Description of Artificial Sequence: Synthetic oligonucleotide
  Antisense strand to SEQ ID NO: 1328174
cauuuaggaagccucaagg

SEQ ID NO: 1328176 - RNA, 19 nt, Artificial Sequence
  Description of Artificial Sequence: Synthetic oligonucleotide
  Sense strand starting at position 2964 of SEQ ID NO: 1242180
aggugaugccgucacaaug

SEQ ID NO: 1328177 - RNA, 19 nt, Artificial Sequence
  Description of Artificial Sequence: Synthetic oligonucleotide
  Antisense strand to SEQ ID NO: 1328176
cauugugacggcaucaccu

SEQ ID NO: 1328178 - RNA, 19 nt, Artificial Sequence
  Description of Artificial Sequence: Synthetic oligonucleotide
  Sense strand starting at position 2982 of SEQ ID NO: 1242180
gcaaauuagcagugaagga

SEQ ID NO: 1328179 - RNA, 19 nt, Artificial Sequence
  Description of Artificial Sequence: Synthetic oligonucleotide
  Antisense strand to SEQ ID NO: 1328178
uccuucacugcuaauuugc

SEQ ID NO: 1328180 - RNA, 19 nt, Artificial Sequence
  Description of Artificial Sequence: Synthetic oligonucleotide
  Sense strand starting at position 3185 of SEQ ID NO: 1242180
gggcguuugggcuaaauga

SEQ ID NO: 1328181 - RNA, 19 nt, Artificial Sequence
  Description of Artificial Sequence: Synthetic oligonucleotide
  Antisense strand to SEQ ID NO: 1328180
ucauuuagcccaaacgccc

SEQ ID NO: 1328182 - RNA, 19 nt, Artificial Sequence
  Description of Artificial Sequence: Synthetic oligonucleotide
  Sense strand starting at position 3455 of SEQ ID NO: 1242180
guacauuggugggcaacaa

SEQ ID NO: 1328183 - RNA, 19 nt, Artificial Sequence
  Description of Artificial Sequence: Synthetic oligonucleotide
  Antisense strand to SEQ ID NO: 1328182
uuguugcccaccaauguac

SEQ ID NO: 1328184 - RNA, 19 nt, Artificial Sequence
  Description of Artificial Sequence: Synthetic oligonucleotide
  Sense strand starting at position 3509 of SEQ ID NO: 1242180
aggugaagugaugggauca

SEQ ID NO: 1328185 - RNA, 19 nt, Artificial Sequence
  Description of Artificial Sequence: Synthetic oligonucleotide
  Antisense strand to SEQ ID NO: 1328184
ugaucccaucacuucaccu

SEQ ID NO: 1328186 - RNA, 19 nt, Artificial Sequence
  Description of Artificial Sequence: Synthetic oligonucleotide
  Sense strand starting at position 3535 of SEQ ID NO: 1242180
aaggauuaguggcucccua

SEQ ID NO: 1328187 - RNA, 19 nt, Artificial Sequence
  Description of Artificial Sequence: Synthetic oligonucleotide
  Antisense strand to SEQ ID NO: 1328186
uagggagccacuaauccuu

SEQ ID NO: 1328188 - RNA, 19 nt, Artificial Sequence
  Description of Artificial Sequence: Synthetic oligonucleotide
  Sense strand starting at position 3570 of SEQ ID NO: 1242180
gucaaauguggucagcaug

SEQ ID NO: 1328189 - RNA, 19 nt, Artificial Sequence
  Description of Artificial Sequence: Synthetic oligonucleotide
  Antisense strand to SEQ ID NO: 1328188
caugcugaccacauuugac

SEQ ID NO: 1328190 - RNA, 19 nt, Artificial Sequence
  Description of Artificial Sequence: Synthetic oligonucleotide
  Sense strand starting at position 3615 of SEQ ID NO: 1242180
aaguaaccagaauguguau

SEQ ID NO: 1328191 - RNA, 19 nt, Artificial Sequence
  Description of Artificial Sequence: Synthetic oligonucleotide
  Antisense strand to SEQ ID NO: 1328190
auacacauucugguuacuu

SEQ ID NO: 1328192 - RNA, 19 nt, Artificial Sequence
  Description of Artificial Sequence: Synthetic oligonucleotide
  Sense strand starting at position 3642 of SEQ ID NO: 1242180
aagagaaguugcguacuga

SEQ ID NO: 1328193 - RNA, 19 nt, Artificial Sequence
  Description of Artificial Sequence: Synthetic oligonucleotide
  Antisense strand to SEQ ID NO: 1328192
ucaguacgcaacuucucuu

SEQ ID NO: 1328194 - RNA, 19 nt, Artificial Sequence
  Description of Artificial Sequence: Synthetic oligonucleotide
  Sense strand starting at position 3643 of SEQ ID NO: 1242180
agagaaguugcguacugau

SEQ ID NO: 1328195 - RNA, 19 nt, Artificial Sequence
  Description of Artificial Sequence: Synthetic oligonucleotide
  Antisense strand to SEQ ID NO: 1328194
aucaguacgcaacuucucu

SEQ ID NO: 1328196 - RNA, 19 nt, Artificial Sequence
  Description of Artificial Sequence: Synthetic oligonucleotide
  Sense strand starting at position 3651 of SEQ ID NO: 1242180
ugcguacugauggaucauu

SEQ ID NO: 1328197 - RNA, 19 nt, Artificial Sequence
  Description of Artificial Sequence: Synthetic oligonucleotide
  Antisense strand to SEQ ID NO: 1328196
aaugauccaucaguacgca

SEQ ID NO: 1328198 - RNA, 19 nt, Artificial Sequence
  Description of Artificial Sequence: Synthetic oligonucleotide
  Sense strand starting at position 3659 of SEQ ID NO: 1242180
gauggaucauuguuugaaa

SEQ ID NO: 1328199 - RNA, 19 nt, Artificial Sequence
  Description of Artificial Sequence: Synthetic oligonucleotide
  Antisense strand to SEQ ID NO: 1328198
uuucaaacaaugauccauc

SEQ ID NO: 1328200 - RNA, 19 nt, Artificial Sequence
  Description of Artificial Sequence: Synthetic oligonucleotide
  Sense strand starting at position 3780 of SEQ ID NO: 1242180
cuuugagugaaaggugguu

SEQ ID NO: 1328201 - RNA, 19 nt, Artificial Sequence
  Description of Artificial Sequence: Synthetic oligonucleotide
  Antisense strand to SEQ ID NO: 1328200
aaccaccuuucacucaaag

SEQ ID NO: 1328202 - RNA, 19 nt, Artificial Sequence
  Description of Artificial Sequence: Synthetic oligonucleotide
  Sense strand starting at position 3827 of SEQ ID NO: 1242180
aguaucucaccacaguuua

SEQ ID NO: 1328203 - RNA, 19 nt, Artificial Sequence
  Description of Artificial Sequence: Synthetic oligonucleotide
  Antisense strand to SEQ ID NO: 1328202
uaaacuguggugagauacu

SEQ ID NO: 1328204 - RNA, 19 nt, Artificial Sequence
  Description of Artificial Sequence: Synthetic oligonucleotide
  Sense strand starting at position 3837 of SEQ ID NO: 1242180
cacaguuuacucugggaaa

SEQ ID NO: 1328205 - RNA, 19 nt, Artificial Sequence
  Description of Artificial Sequence: Synthetic oligonucleotide
  Antisense strand to SEQ ID NO: 1328204
uuucccagaguaaacugug

SEQ ID NO: 1328206 - RNA, 19 nt, Artificial Sequence
  Description of Artificial Sequence: Synthetic oligonucleotide
  Sense strand starting at position 3858 of SEQ ID NO: 1242180
uuguccuuacaauggagaa

SEQ ID NO: 1328207 - RNA, 19 nt, Artificial Sequence
  Description of Artificial Sequence: Synthetic oligonucleotide
  Antisense strand to SEQ ID NO: 1328206
uucuccauuguaaggacaa

SEQ ID NO: 1328208 - RNA, 19 nt, Artificial Sequence
  Description of Artificial Sequence: Synthetic oligonucleotide
  Sense strand starting at position 3927 of SEQ ID NO: 1242180
gcgagucucccguugugaa

SEQ ID NO: 1328209 - RNA, 19 nt, Artificial Sequence
  Description of Artificial Sequence: Synthetic oligonucleotide
  Antisense strand to SEQ ID NO: 1328208
uucacaacgggagacucgc

SEQ ID NO: 1328210 - RNA, 19 nt, Artificial Sequence
  Description of Artificial Sequence: Synthetic oligonucleotide
  Sense strand starting at position 86 of SEQ ID NO: 1242181
aggguagcuacugguauuu

SEQ ID NO: 1328211 - RNA, 19 nt, Artificial Sequence
  Description of Artificial Sequence: Synthetic oligonucleotide
  Antisense strand to SEQ ID NO: 1328210
aaauaccaguagcuacccu

SEQ ID NO: 1328212 - RNA, 19 nt, Artificial Sequence
  Description of Artificial Sequence: Synthetic oligonucleotide
  Sense strand starting at position 159 of SEQ ID NO: 1242181
agagaauuguagcucuaug

SEQ ID NO: 1328213 - RNA, 19 nt, Artificial Sequence
  Description of Artificial Sequence: Synthetic oligonucleotide
  Antisense strand to SEQ ID NO: 1328212
cauagagcuacaauucucu

SEQ ID NO: 1328214 - RNA, 19 nt, Artificial Sequence
  Description of Artificial Sequence: Synthetic oligonucleotide
  Sense strand starting at position 215 of SEQ ID NO: 1242181
cucuccauggcaugauaga

SEQ ID NO: 1328215 - RNA, 19 nt, Artificial Sequence
  Description of Artificial Sequence: Synthetic oligonucleotide
  Antisense strand to SEQ ID NO: 1328214
ucuaucaugccauggagag

SEQ ID NO: 1328216 - RNA, 19 nt, Artificial Sequence
  Description of Artificial Sequence: Synthetic oligonucleotide
  Sense strand starting at position 554 of SEQ ID NO: 1242181
auguucuucccagaggugu

SEQ ID NO: 1328217 - RNA, 19 nt, Artificial Sequence
  Description of Artificial Sequence: Synthetic oligonucleotide
  Antisense strand to SEQ ID NO: 1328216
acaccucugggaagaacau

SEQ ID NO: 1328218 - RNA, 19 nt, Artificial Sequence
  Description of Artificial Sequence: Synthetic oligonucleotide
  Sense strand starting at position 556 of SEQ ID NO: 1242181
guucuucccagagguguaa

SEQ ID NO: 1328219 - RNA, 19 nt, Artificial Sequence
  Description of Artificial Sequence: Synthetic oligonucleotide
  Antisense strand to SEQ ID NO: 1328218
uuacaccucugggaagaac

SEQ ID NO: 1328220 - RNA, 19 nt, Artificial Sequence
  Description of Artificial Sequence: Synthetic oligonucleotide
  Sense strand starting at position 688 of SEQ ID NO: 1242181
gagcccagaggguguaauu

SEQ ID NO: 1328221 - RNA, 19 nt, Artificial Sequence
  Description of Artificial Sequence: Synthetic oligonucleotide
  Antisense strand to SEQ ID NO: 1328220
aauuacacccucugggcuc

SEQ ID NO: 1328222 - RNA, 19 nt, Artificial Sequence
  Description of Artificial Sequence: Synthetic oligonucleotide
  Sense strand starting at position 822 of SEQ ID NO: 1242181
uugggcuuugcguaaauau

SEQ ID NO: 1328223 - RNA, 19 nt, Artificial Sequence
  Description of Artificial Sequence: Synthetic oligonucleotide
  Antisense strand to SEQ ID NO: 1328222
auauuuacgcaaagcccaa

SEQ ID NO: 1328224 - RNA, 19 nt, Artificial Sequence
  Description of Artificial Sequence: Synthetic oligonucleotide
  Sense strand starting at position 830 of SEQ ID NO: 1242181
ugcguaaauauagaguagu

SEQ ID NO: 1328225 - RNA, 19 nt, Artificial Sequence
  Description of Artificial Sequence: Synthetic oligonucleotide
  Antisense strand to SEQ ID NO: 1328224
acuacucuauauuuacgca

SEQ ID NO: 1328226 - RNA, 19 nt, Artificial Sequence
  Description of Artificial Sequence: Synthetic oligonucleotide
  Sense strand starting at position 1485 of SEQ ID NO: 1242181
cgaggaauccgccaugggu

SEQ ID NO: 1328227 - RNA, 19 nt, Artificial Sequence
  Description of Artificial Sequence: Synthetic oligonucleotide
  Antisense strand to SEQ ID NO: 1328226
acccauggcggauuccucg

SEQ ID NO: 1328228 - RNA, 19 nt, Artificial Sequence
  Description of Artificial Sequence: Synthetic oligonucleotide
  Sense strand starting at position 2142 of SEQ ID NO: 1242181
gagggauagugcuucuaag

SEQ ID NO: 1328229 - RNA, 19 nt, Artificial Sequence
  Description of Artificial Sequence: Synthetic oligonucleotide
  Antisense strand to SEQ ID NO: 1328228
cuuagaagcacuaucccuc

SEQ ID NO: 1328230 - RNA, 19 nt, Artificial Sequence
  Description of Artificial Sequence: Synthetic oligonucleotide
  Sense strand starting at position 2162 of SEQ ID NO: 1242181
ccuaauggguggccucaaa

SEQ ID NO: 1328231 - RNA, 19 nt, Artificial Sequence
  Description of Artificial Sequence: Synthetic oligonucleotide
  Antisense strand to SEQ ID NO: 1328230
uuugaggccacccauuagg

SEQ ID NO: 1328232 - RNA, 19 nt, Artificial Sequence
  Description of Artificial Sequence: Synthetic oligonucleotide
  Sense strand starting at position 2246 of SEQ ID NO: 1242181
ucgaaaggcuggccacaua

SEQ ID NO: 1328233 - RNA, 19 nt, Artificial Sequence
  Description of Artificial Sequence: Synthetic oligonucleotide
  Antisense strand to SEQ ID NO: 1328232
uauguggccagccuuucga

SEQ ID NO: 1328234 - RNA, 19 nt, Artificial Sequence
  Description of Artificial Sequence: Synthetic oligonucleotide
  Sense strand starting at position 2277 of SEQ ID NO: 1242181
caggcucaguaguuggaau

SEQ ID NO: 1328235 - RNA, 19 nt, Artificial Sequence
  Description of Artificial Sequence: Synthetic oligonucleotide
  Antisense strand to SEQ ID NO: 1328234
auuccaacuacugagccug

SEQ ID NO: 1328236 - RNA, 19 nt, Artificial Sequence
  Description of Artificial Sequence: Synthetic oligonucleotide
  Sense strand starting at position 2278 of SEQ ID NO: 1242181
aggcucaguaguuggaauu

SEQ ID NO: 1328237 - RNA, 19 nt, Artificial Sequence
  Description of Artificial Sequence: Synthetic oligonucleotide
  Antisense strand to SEQ ID NO: 1328236
aauuccaacuacugagccu

SEQ ID NO: 1328238 - RNA, 19 nt, Artificial Sequence
  Description of Artificial Sequence: Synthetic oligonucleotide
  Sense strand starting at position 2279 of SEQ ID NO: 1242181
ggcucaguaguuggaauuu

SEQ ID NO: 1328239 - RNA, 19 nt, Artificial Sequence
  Description of Artificial Sequence: Synthetic oligonucleotide
  Antisense strand to SEQ ID NO: 1328238
aaauuccaacuacugagcc

SEQ ID NO: 1328240 - RNA, 19 nt, Artificial Sequence
  Description of Artificial Sequence: Synthetic oligonucleotide
  Sense strand starting at position 2322 of SEQ ID NO: 1242181
gucaguuuauucuuugaca

SEQ ID NO: 1328241 - RNA, 19 nt, Artificial Sequence
  Description of Artificial Sequence: Synthetic oligonucleotide
  Antisense strand to SEQ ID NO: 1328240
ugucaaagaauaaacugac

SEQ ID NO: 1328242 - RNA, 19 nt, Artificial Sequence
  Description of Artificial Sequence: Synthetic oligonucleotide
  Sense strand starting at position 2323 of SEQ ID NO: 1242181
ucaguuuauucuuugacac

SEQ ID NO: 1328243 - RNA, 19 nt, Artificial Sequence
  Description of Artificial Sequence: Synthetic oligonucleotide
  Antisense strand to SEQ ID NO: 1328242
gugucaaagaauaaacuga

SEQ ID NO: 1328244 - RNA, 19 nt, Artificial Sequence
  Description of Artificial Sequence: Synthetic oligonucleotide
  Sense strand starting at position 2499 of SEQ ID NO: 1242181
ccugguuucuguguuauuu

SEQ ID NO: 1328245 - RNA, 19 nt, Artificial Sequence
  Description of Artificial Sequence: Synthetic oligonucleotide
  Antisense strand to SEQ ID NO: 1328244
aaauaacacagaaaccagg

SEQ ID NO: 1328246 - RNA, 19 nt, Artificial Sequence
  Description of Artificial Sequence: Synthetic oligonucleotide
  Sense strand starting at position 2517 of SEQ ID NO: 1242181
uuggacagcuuuccaagaa

SEQ ID NO: 1328247 - RNA, 19 nt, Artificial Sequence
  Description of Artificial Sequence: Synthetic oligonucleotide
  Antisense strand to SEQ ID NO: 1328246
uucuuggaaagcuguccaa

SEQ ID NO: 1328248 - RNA, 19 nt, Artificial Sequence
  Description of Artificial Sequence: Synthetic oligonucleotide
  Sense strand starting at position 2622 of SEQ ID NO: 1242181
gcuaauauugcucaggaga

SEQ ID NO: 1328249 - RNA, 19 nt, Artificial Sequence
  Description of Artificial Sequence: Synthetic oligonucleotide
  Antisense strand to SEQ ID NO: 1328248
ucuccugagcaauauuagc

SEQ ID NO: 1328250 - RNA, 19 nt, Artificial Sequence
  Description of Artificial Sequence: Synthetic oligonucleotide
  Sense strand starting at position 2878 of SEQ ID NO: 1242181
uguuauucccuccaauggu

SEQ ID NO: 1328251 - RNA, 19 nt, Artificial Sequence
  Description of Artificial Sequence: Synthetic oligonucleotide
  Antisense strand to SEQ ID NO: 1328250
accauuggagggaauaaca

SEQ ID NO: 1328252 - RNA, 19 nt, Artificial Sequence
  Description of Artificial Sequence: Synthetic oligonucleotide
  Sense strand starting at position 2893 of SEQ ID NO: 1242181
ugguaacacucuuccagua

SEQ ID NO: 1328253 - RNA, 19 nt, Artificial Sequence
  Description of Artificial Sequence: Synthetic oligonucleotide
  Antisense strand to SEQ ID NO: 1328252
uacuggaagaguguuacca

SEQ ID NO: 1328254 - RNA, 19 nt, Artificial Sequence
  Description of Artificial Sequence: Synthetic oligonucleotide
  Sense strand starting at position 2925 of SEQ ID NO: 1242181
uguuuaaaucuuuaagguc

SEQ ID NO: 1328255 - RNA, 19 nt, Artificial Sequence
  Description of Artificial Sequence: Synthetic oligonucleotide
  Antisense strand to SEQ ID NO: 1328254
gaccuuaaagauuuaaaca

SEQ ID NO: 1328256 - RNA, 19 nt, Artificial Sequence
  Description of Artificial Sequence: Synthetic oligonucleotide
  Sense strand starting at position 2932 of SEQ ID NO: 1242181
aucuuuaaggucugucuca

SEQ ID NO: 1328257 - RNA, 19 nt, Artificial Sequence
  Description of Artificial Sequence: Synthetic oligonucleotide
  Antisense strand to SEQ ID NO: 1328256
ugagacagaccuuaaagau

SEQ ID NO: 1328258 - RNA, 19 nt, Artificial Sequence
  Description of Artificial Sequence: Synthetic oligonucleotide
  Sense strand starting at position 2933 of SEQ ID NO: 1242181
ucuuuaaggucugucucaa

SEQ ID NO: 1328259 - RNA, 19 nt, Artificial Sequence
  Description of Artificial Sequence: Synthetic oligonucleotide
  Antisense strand to SEQ ID NO: 1328258
uugagacagaccuuaaaga

SEQ ID NO: 1328260 - RNA, 19 nt, Artificial Sequence
  Description of Artificial Sequence: Synthetic oligonucleotide
  Sense strand starting at position 3039 of SEQ ID NO: 1242181
cuccaagagguuuguauua

SEQ ID NO: 1328261 - RNA, 19 nt, Artificial Sequence
  Description of Artificial Sequence: Synthetic oligonucleotide
  Antisense strand to SEQ ID NO: 1328260
uaauacaaaccucuuggag

SEQ ID NO: 1328262 - RNA, 19 nt, Artificial Sequence
  Description of Artificial Sequence: Synthetic oligonucleotide
  Sense strand starting at position 3058 of SEQ ID NO: 1242181
auaccucugguuuaguauu

SEQ ID NO: 1328263 - RNA, 19 nt, Artificial Sequence
  Description of Artificial Sequence: Synthetic oligonucleotide
  Antisense strand to SEQ ID NO: 1328262
aauacuaaaccagagguau

SEQ ID NO: 1328264 - RNA, 19 nt, Artificial Sequence
  Description of Artificial Sequence: Synthetic oligonucleotide
  Sense strand starting at position 3093 of SEQ ID NO: 1242181
guguuuguacuugcaugua

SEQ ID NO: 1328265 - RNA, 19 nt, Artificial Sequence
  Description of Artificial Sequence: Synthetic oligonucleotide
  Antisense strand to SEQ ID NO: 1328264
uacaugcaaguacaaacac

SEQ ID NO: 1328266 - RNA, 19 nt, Artificial Sequence
  Description of Artificial Sequence: Synthetic oligonucleotide
  Sense strand starting at position 3147 of SEQ ID NO: 1242181
cgugcuccugggaggcaua

SEQ ID NO: 1328267 - RNA, 19 nt, Artificial Sequence
  Description of Artificial Sequence: Synthetic oligonucleotide
  Antisense strand to SEQ ID NO: 1328266
uaugccucccaggagcacg

SEQ ID NO: 1328268 - RNA, 19 nt, Artificial Sequence
  Description of Artificial Sequence: Synthetic oligonucleotide
  Sense strand starting at position 3158 of SEQ ID NO: 1242181
gaggcauaacugggucuua

SEQ ID NO: 1328269 - RNA, 19 nt, Artificial Sequence
  Description of Artificial Sequence: Synthetic oligonucleotide
  Antisense strand to SEQ ID NO: 1328268
uaagacccaguuaugccuc

SEQ ID NO: 1328270 - RNA, 19 nt, Artificial Sequence
  Description of Artificial Sequence: Synthetic oligonucleotide
  Sense strand starting at position 3199 of SEQ ID NO: 1242181
ugccuagcucaguggaaua

SEQ ID NO: 1328271 - RNA, 19 nt, Artificial Sequence
  Description of Artificial Sequence: Synthetic oligonucleotide
  Antisense strand to SEQ ID NO: 1328270
uauuccacugagcuaggca

SEQ ID NO: 1328272 - RNA, 19 nt, Artificial Sequence
  Description of Artificial Sequence: Synthetic oligonucleotide
  Sense strand starting at position 3201 of SEQ ID NO: 1242181
ccuagcucaguggaauaaa

SEQ ID NO: 1328273 - RNA, 19 nt, Artificial Sequence
  Description of Artificial Sequence: Synthetic oligonucleotide
  Antisense strand to SEQ ID NO: 1328272
uuuauuccacugagcuagg

SEQ ID NO: 1328274 - RNA, 19 nt, Artificial Sequence
  Description of Artificial Sequence: Synthetic oligonucleotide
  Sense strand starting at position 3237 of SEQ ID NO: 1242181
aauuacaagugguugaauu

SEQ ID NO: 1328275 - RNA, 19 nt, Artificial Sequence
  Description of Artificial Sequence: Synthetic oligonucleotide
  Antisense strand to SEQ ID NO: 1328274
aauucaaccacuuguaauu

SEQ ID NO: 1328276 - RNA, 19 nt, Artificial Sequence
  Description of Artificial Sequence: Synthetic oligonucleotide
  Sense strand starting at position 3248 of SEQ ID NO: 1242181
guugaauugagguguagua

SEQ ID NO: 1328277 - RNA, 19 nt, Artificial Sequence
  Description of Artificial Sequence: Synthetic oligonucleotide
  Antisense strand to SEQ ID NO: 1328276
uacuacaccucaauucaac

SEQ ID NO: 1328278 - RNA, 19 nt, Artificial Sequence
  Description of Artificial Sequence: Synthetic oligonucleotide
  Sense strand starting at position 3250 of SEQ ID NO: 1242181
ugaauugagguguaguaaa

SEQ ID NO: 1328279 - RNA, 19 nt, Artificial Sequence
  Description of Artificial Sequence: Synthetic oligonucleotide
  Antisense strand to SEQ ID NO: 1328278
uuuacuacaccucaauuca

SEQ ID NO: 1328280 - RNA, 19 nt, Artificial Sequence
  Description of Artificial Sequence: Synthetic oligonucleotide
  Sense strand starting at position 3287 of SEQ ID NO: 1242181
uuagauuguuuagcauaag

SEQ ID NO: 1328281 - RNA, 19 nt, Artificial Sequence
  Description of Artificial Sequence: Synthetic oligonucleotide
  Antisense strand to SEQ ID NO: 1328280
cuuaugcuaaacaaucuaa

SEQ ID NO: 1328282 - RNA, 19 nt, Artificial Sequence
  Description of Artificial Sequence: Synthetic oligonucleotide
  Sense strand starting at position 3290 of SEQ ID NO: 1242181
gauuguuuagcauaagucu

SEQ ID NO: 1328283 - RNA, 19 nt, Artificial Sequence
  Description of Artificial Sequence: Synthetic oligonucleotide
  Antisense strand to SEQ ID NO: 1328282
agacuuaugcuaaacaauc

SEQ ID NO: 1328284 - RNA, 19 nt, Artificial Sequence
  Description of Artificial Sequence: Synthetic oligonucleotide
  Sense strand starting at position 3301 of SEQ ID NO: 1242181
auaagucugccaugcauaa

SEQ ID NO: 1328285 - RNA, 19 nt, Artificial Sequence
  Description of Artificial Sequence: Synthetic oligonucleotide
  Antisense strand to SEQ ID NO: 1328284
uuaugcauggcagacuuau

SEQ ID NO: 1328286 - RNA, 19 nt, Artificial Sequence
  Description of Artificial Sequence: Synthetic oligonucleotide
  Sense strand starting at position 3370 of SEQ ID NO: 1242181
gaauuugagucucaguaua

SEQ ID NO: 1328287 - RNA, 19 nt, Artificial Sequence
  Description of Artificial Sequence: Synthetic oligonucleotide
  Antisense strand to SEQ ID NO: 1328286
uauacugagacucaaauuc

SEQ ID NO: 1328288 - RNA, 19 nt, Artificial Sequence
  Description of Artificial Sequence: Synthetic oligonucleotide
  Sense strand starting at position 3732 of SEQ ID NO: 1242181
aggugaucucugcaguaag

SEQ ID NO: 1328289 - RNA, 19 nt, Artificial Sequence
  Description of Artificial Sequence: Synthetic oligonucleotide
  Antisense strand to SEQ ID NO: 1328288
cuuacugcagagaucaccu

SEQ ID NO: 1328290 - RNA, 19 nt, Artificial Sequence
  Description of Artificial Sequence: Synthetic oligonucleotide
  Sense strand starting at position 30 of SEQ ID NO: 1242182
aggagaaguucccugcaga

SEQ ID NO: 1328291 - RNA, 19 nt, Artificial Sequence
  Description of Artificial Sequence: Synthetic oligonucleotide
  Antisense strand to SEQ ID NO: 1328290
ucugcagggaacuucuccu

SEQ ID NO: 1328292 - RNA, 19 nt, Artificial Sequence
  Description of Artificial Sequence: Synthetic oligonucleotide
  Sense strand starting at position 31 of SEQ ID NO: 1242182
ggagaaguucccugcagag

SEQ ID NO: 1328293 - RNA, 19 nt, Artificial Sequence
  Description of Artificial Sequence: Synthetic oligonucleotide
  Antisense strand to SEQ ID NO: 1328292
cucugcagggaacuucucc

SEQ ID NO: 1328294 - RNA, 19 nt, Artificial Sequence
  Description of Artificial Sequence: Synthetic oligonucleotide
  Sense strand starting at position 117 of SEQ ID NO: 1242182
uccaauucuggcuaaauag

SEQ ID NO: 1328295 - RNA, 19 nt, Artificial Sequence
  Description of Artificial Sequence: Synthetic oligonucleotide
  Antisense strand to SEQ ID NO: 1328294
cuauuuagccagaauugga

SEQ ID NO: 1328296 - RNA, 19 nt, Artificial Sequence
  Description of Artificial Sequence: Synthetic oligonucleotide
  Sense strand starting at position 422 of SEQ ID NO: 1242182
cggugagacucuucuucag

SEQ ID NO: 1328297 - RNA, 19 nt, Artificial Sequence
  Description of Artificial Sequence: Synthetic oligonucleotide
  Antisense strand to SEQ ID NO: 1328296
cugaagaagagucucaccg

SEQ ID NO: 1328298 - RNA, 19 nt, Artificial Sequence
  Description of Artificial Sequence: Synthetic oligonucleotide
  Sense strand starting at position 520 of SEQ ID NO: 1242182
uuggaaggucuugguuaac

SEQ ID NO: 1328299 - RNA, 19 nt, Artificial Sequence
  Description of Artificial Sequence: Synthetic oligonucleotide
  Antisense strand to SEQ ID NO: 1328298
guuaaccaagaccuuccaa

SEQ ID NO: 1328300 - RNA, 19 nt, Artificial Sequence
  Description of Artificial Sequence: Synthetic oligonucleotide
  Sense strand starting at position 579 of SEQ ID NO: 1242182
gaggguuaauuccacagaa

SEQ ID NO: 1328301 - RNA, 19 nt, Artificial Sequence
  Description of Artificial Sequence: Synthetic oligonucleotide
  Antisense strand to SEQ ID NO: 1328300
uucuguggaauuaacccuc

SEQ ID NO: 1328302 - RNA, 19 nt, Artificial Sequence
  Description of Artificial Sequence: Synthetic oligonucleotide
  Sense strand starting at position 631 of SEQ ID NO: 1242182
agaagugucuuguuagaga

SEQ ID NO: 1328303 - RNA, 19 nt, Artificial Sequence
  Description of Artificial Sequence: Synthetic oligonucleotide
  Antisense strand to SEQ ID NO: 1328302
ucucuaacaagacacuucu

SEQ ID NO: 1328304 - RNA, 19 nt, Artificial Sequence
  Description of Artificial Sequence: Synthetic oligonucleotide
  Sense strand starting at position 636 of SEQ ID NO: 1242182
ugucuuguuagagaguauu

SEQ ID NO: 1328305 - RNA, 19 nt, Artificial Sequence
  Description of Artificial Sequence: Synthetic oligonucleotide
  Antisense strand to SEQ ID NO: 1328304
aauacucucuaacaagaca

SEQ ID NO: 1328306 - RNA, 19 nt, Artificial Sequence
  Description of Artificial Sequence: Synthetic oligonucleotide
  Sense strand starting at position 639 of SEQ ID NO: 1242182
cuuguuagagaguauuccu

SEQ ID NO: 1328307 - RNA, 19 nt, Artificial Sequence
  Description of Artificial Sequence: Synthetic oligonucleotide
  Antisense strand to SEQ ID NO: 1328306
aggaauacucucuaacaag

SEQ ID NO: 1328308 - RNA, 19 nt, Artificial Sequence
  Description of Artificial Sequence: Synthetic oligonucleotide
  Sense strand starting at position 704 of SEQ ID NO: 1242182
aaagaaugugcuuaugcug

SEQ ID NO: 1328309 - RNA, 19 nt, Artificial Sequence
  Description of Artificial Sequence: Synthetic oligonucleotide
  Antisense strand to SEQ ID NO: 1328308
cagcauaagcacauucuuu

SEQ ID NO: 1328310 - RNA, 19 nt, Artificial Sequence
  Description of Artificial Sequence: Synthetic oligonucleotide
  Sense strand starting at position 873 of SEQ ID NO: 1242182
agaguaguaaguugagauc

SEQ ID NO: 1328311 - RNA, 19 nt, Artificial Sequence
  Description of Artificial Sequence: Synthetic oligonucleotide
  Antisense strand to SEQ ID NO: 1328310
gaucucaacuuacuacucu

SEQ ID NO: 1328312 - RNA, 19 nt, Artificial Sequence
  Description of Artificial Sequence: Synthetic oligonucleotide
  Sense strand starting at position 882 of SEQ ID NO: 1242182
aguugagauccuugcaaug

SEQ ID NO: 1328313 - RNA, 19 nt, Artificial Sequence
  Description of Artificial Sequence: Synthetic oligonucleotide
  Antisense strand to SEQ ID NO: 1328312
cauugcaaggaucucaacu

SEQ ID NO: 1328314 - RNA, 19 nt, Artificial Sequence
  Description of Artificial Sequence: Synthetic oligonucleotide
  Sense strand starting at position 946 of SEQ ID NO: 1242182
cucagaagcuuugcacaau

SEQ ID NO: 1328315 - RNA, 19 nt, Artificial Sequence
  Description of Artificial Sequence: Synthetic oligonucleotide
  Antisense strand to SEQ ID NO: 1328314
auugugcaaagcuucugag

SEQ ID NO: 1328316 - RNA, 19 nt, Artificial Sequence
  Description of Artificial Sequence: Synthetic oligonucleotide
  Sense strand starting at position 949 of SEQ ID NO: 1242182
agaagcuuugcacaauaau

SEQ ID NO: 1328317 - RNA, 19 nt, Artificial Sequence
  Description of Artificial Sequence: Synthetic oligonucleotide
  Antisense strand to SEQ ID NO: 1328316
auuauugugcaaagcuucu

SEQ ID NO: 1328318 - RNA, 19 nt, Artificial Sequence
  Description of Artificial Sequence: Synthetic oligonucleotide
  Sense strand starting at position 1024 of SEQ ID NO: 1242182
aggacucuugcucagaacu

SEQ ID NO: 1328319 - RNA, 19 nt, Artificial Sequence
  Description of Artificial Sequence: Synthetic oligonucleotide
  Antisense strand to SEQ ID NO: 1328318
aguucugagcaagaguccu

SEQ ID NO: 1328320 - RNA, 19 nt, Artificial Sequence
  Description of Artificial Sequence: Synthetic oligonucleotide
  Sense strand starting at position 1046 of SEQ ID NO: 1242182
gggcuaaacugcucuuacu

SEQ ID NO: 1328321 - RNA, 19 nt, Artificial Sequence
  Description of Artificial Sequence: Synthetic oligonucleotide
  Antisense strand to SEQ ID NO: 1328320
aguaagagcaguuuagccc

SEQ ID NO: 1328322 - RNA, 19 nt, Artificial Sequence
  Description of Artificial Sequence: Synthetic oligonucleotide
  Sense strand starting at position 1114 of SEQ ID NO: 1242182
augccugucagccggagaa

SEQ ID NO: 1328323 - RNA, 19 nt, Artificial Sequence
  Description of Artificial Sequence: Synthetic oligonucleotide
  Antisense strand to SEQ ID NO: 1328322
uucuccggcugacaggcau

SEQ ID NO: 1328324 - RNA, 19 nt, Artificial Sequence
  Description of Artificial Sequence: Synthetic oligonucleotide
  Sense strand starting at position 1229 of SEQ ID NO: 1242182
cccuguuccucucuccaga

SEQ ID NO: 1328325 - RNA, 19 nt, Artificial Sequence
  Description of Artificial Sequence: Synthetic oligonucleotide
  Antisense strand to SEQ ID NO: 1328324
ucuggagagaggaacaggg

SEQ ID NO: 1328326 - RNA, 19 nt, Artificial Sequence
  Description of Artificial Sequence: Synthetic oligonucleotide
  Sense strand starting at position 1231 of SEQ ID NO: 1242182
cuguuccucucuccagauu

SEQ ID NO: 1328327 - RNA, 19 nt, Artificial Sequence
  Description of Artificial Sequence: Synthetic oligonucleotide
  Antisense strand to SEQ ID NO: 1328326
aaucuggagagaggaacag

SEQ ID NO: 1328328 - RNA, 19 nt, Artificial Sequence
  Description of Artificial Sequence: Synthetic oligonucleotide
  Sense strand starting at position 1234 of SEQ ID NO: 1242182
uuccucucuccagauuguu

SEQ ID NO: 1328329 - RNA, 19 nt, Artificial Sequence
  Description of Artificial Sequence: Synthetic oligonucleotide
  Antisense strand to SEQ ID NO: 1328328
aacaaucuggagagaggaa

SEQ ID NO: 1328330 - RNA, 19 nt, Artificial Sequence
  Description of Artificial Sequence: Synthetic oligonucleotide
  Sense strand starting at position 2232 of SEQ ID NO: 1242182
gcgucuguucggaguaaua

SEQ ID NO: 1328331 - RNA, 19 nt, Artificial Sequence
  Description of Artificial Sequence: Synthetic oligonucleotide
  Antisense strand to SEQ ID NO: 1328330
uauuacuccgaacagacgc

SEQ ID NO: 1328332 - RNA, 19 nt, Artificial Sequence
  Description of Artificial Sequence: Synthetic oligonucleotide
  Sense strand starting at position 2234 of SEQ ID NO: 1242182
gucuguucggaguaauaag

SEQ ID NO: 1328333 - RNA, 19 nt, Artificial Sequence
  Description of Artificial Sequence: Synthetic oligonucleotide
  Antisense strand to SEQ ID NO: 1328332
cuuauuacuccgaacagac

SEQ ID NO: 1328334 - RNA, 19 nt, Artificial Sequence
  Description of Artificial Sequence: Synthetic oligonucleotide
  Sense strand starting at position 2300 of SEQ ID NO: 1242182
cagcuuucucgcccguaaa

SEQ ID NO: 1328335 - RNA, 19 nt, Artificial Sequence
  Description of Artificial Sequence: Synthetic oligonucleotide
  Antisense strand to SEQ ID NO: 1328334
uuuacgggcgagaaagcug

SEQ ID NO: 1328336 - RNA, 19 nt, Artificial Sequence
  Description of Artificial Sequence: Synthetic oligonucleotide
  Sense strand starting at position 2302 of SEQ ID NO: 1242182
gcuuucucgcccguaaaga

SEQ ID NO: 1328337 - RNA, 19 nt, Artificial Sequence
  Description of Artificial Sequence: Synthetic oligonucleotide
  Antisense strand to SEQ ID NO: 1328336
ucuuuacgggcgagaaagc

SEQ ID NO: 1328338 - RNA, 19 nt, Artificial Sequence
  Description of Artificial Sequence: Synthetic oligonucleotide
  Sense strand starting at position 2331 of SEQ ID NO: 1242182
cccacuuguggguaaugau

SEQ ID NO: 1328339 - RNA, 19 nt, Artificial Sequence
  Description of Artificial Sequence: Synthetic oligonucleotide
  Antisense strand to SEQ ID NO: 1328338
aucauuacccacaaguggg

SEQ ID NO: 1328340 - RNA, 19 nt, Artificial Sequence
  Description of Artificial Sequence: Synthetic oligonucleotide
  Sense strand starting at position 2339 of SEQ ID NO: 1242182
uggguaaugaucuguagcu

SEQ ID NO: 1328341 - RNA, 19 nt, Artificial Sequence
  Description of Artificial Sequence: Synthetic oligonucleotide
  Antisense strand to SEQ ID NO: 1328340
agcuacagaucauuaccca

SEQ ID NO: 1328342 - RNA, 19 nt, Artificial Sequence
  Description of Artificial Sequence: Synthetic oligonucleotide
  Sense strand starting at position 2340 of SEQ ID NO: 1242182
ggguaaugaucuguagcug

SEQ ID NO: 1328343 - RNA, 19 nt, Artificial Sequence
  Description of Artificial Sequence: Synthetic oligonucleotide
  Antisense strand to SEQ ID NO: 1328342
cagcuacagaucauuaccc

SEQ ID NO: 1328344 - RNA, 19 nt, Artificial Sequence
  Description of Artificial Sequence: Synthetic oligonucleotide
  Sense strand starting at position 2515 of SEQ ID NO: 1242182
aacagaaauccacgagugu

SEQ ID NO: 1328345 - RNA, 19 nt, Artificial Sequence
  Description of Artificial Sequence: Synthetic oligonucleotide
  Antisense strand to SEQ ID NO: 1328344
acacucguggauuucuguu

SEQ ID NO: 1328346 - RNA, 19 nt, Artificial Sequence
  Description of Artificial Sequence: Synthetic oligonucleotide
  Sense strand starting at position 2516 of SEQ ID NO: 1242182
acagaaauccacgagugua

SEQ ID NO: 1328347 - RNA, 19 nt, Artificial Sequence
  Description of Artificial Sequence: Synthetic oligonucleotide
  Antisense strand to SEQ ID NO: 1328346
uacacucguggauuucugu

SEQ ID NO: 1328348 - RNA, 19 nt, Artificial Sequence
  Description of Artificial Sequence: Synthetic oligonucleotide
  Sense strand starting at position 2569 of SEQ ID NO: 1242182
uuaagucguguuuaucaaa

SEQ ID NO: 1328349 - RNA, 19 nt, Artificial Sequence
  Description of Artificial Sequence: Synthetic oligonucleotide
  Antisense strand to SEQ ID NO: 1328348
uuugauaaacacgacuuaa

SEQ ID NO: 1328350 - RNA, 19 nt, Artificial Sequence
  Description of Artificial Sequence: Synthetic oligonucleotide
  Sense strand starting at position 2576 of SEQ ID NO: 1242182
guguuuaucaaaugucagg

SEQ ID NO: 1328351 - RNA, 19 nt, Artificial Sequence
  Description of Artificial Sequence: Synthetic oligonucleotide
  Antisense strand to SEQ ID NO: 1328350
ccugacauuugauaaacac

SEQ ID NO: 1328352 - RNA, 19 nt, Artificial Sequence
  Description of Artificial Sequence: Synthetic oligonucleotide
  Sense strand starting at position 2624 of SEQ ID NO: 1242182
guggaagaauucucacaca

SEQ ID NO: 1328353 - RNA, 19 nt, Artificial Sequence
  Description of Artificial Sequence: Synthetic oligonucleotide
  Antisense strand to SEQ ID NO: 1328352
ugugugagaauucuuccac

SEQ ID NO: 1328354 - RNA, 19 nt, Artificial Sequence
  Description of Artificial Sequence: Synthetic oligonucleotide
  Sense strand starting at position 3412 of SEQ ID NO: 1242182
gaaugagucucacuagauu

SEQ ID NO: 1328355 - RNA, 19 nt, Artificial Sequence
  Description of Artificial Sequence: Synthetic oligonucleotide
  Antisense strand to SEQ ID NO: 1328354
aaucuagugagacucauuc

SEQ ID NO: 1328356 - RNA, 19 nt, Artificial Sequence
  Description of Artificial Sequence: Synthetic oligonucleotide
  Sense strand starting at position 3645 of SEQ ID NO: 1242182
aauuguuaaucuucgugga

SEQ ID NO: 1328357 - RNA, 19 nt, Artificial Sequence
  Description of Artificial Sequence: Synthetic oligonucleotide
  Antisense strand to SEQ ID NO: 1328356
uccacgaagauuaacaauu

SEQ ID NO: 1328358 - RNA, 19 nt, Artificial Sequence
  Description of Artificial Sequence: Synthetic oligonucleotide
  Sense strand starting at position 3647 of SEQ ID NO: 1242182
uuguuaaucuucguggaca

SEQ ID NO: 1328359 - RNA, 19 nt, Artificial Sequence
  Description of Artificial Sequence: Synthetic oligonucleotide
  Antisense strand to SEQ ID NO: 1328358
uguccacgaagauuaacaa

SEQ ID NO: 1328360 - RNA, 19 nt, Artificial Sequence
  Description of Artificial Sequence: Synthetic oligonucleotide
  Sense strand starting at position 3649 of SEQ ID NO: 1242182
guuaaucuucguggacaaa

SEQ ID NO: 1328361 - RNA, 19 nt, Artificial Sequence
  Description of Artificial Sequence: Synthetic oligonucleotide
  Antisense strand to SEQ ID NO: 1328360
uuuguccacgaagauuaac

SEQ ID NO: 1328362 - RNA, 19 nt, Artificial Sequence
  Description of Artificial Sequence: Synthetic oligonucleotide
  Sense strand starting at position 3650 of SEQ ID NO: 1242182
uuaaucuucguggacaaag

SEQ ID NO: 1328363 - RNA, 19 nt, Artificial Sequence
  Description of Artificial Sequence: Synthetic oligonucleotide
  Antisense strand to SEQ ID NO: 1328362
cuuuguccacgaagauuaa

SEQ ID NO: 1328364 - RNA, 19 nt, Artificial Sequence
  Description of Artificial Sequence: Synthetic oligonucleotide
  Sense strand starting at position 3724 of SEQ ID NO: 1242182
gacucuggccuuggaauga

SEQ ID NO: 1328365 - RNA, 19 nt, Artificial Sequence
  Description of Artificial Sequence: Synthetic oligonucleotide
  Antisense strand to SEQ ID NO: 1328364
ucauuccaaggccagaguc

SEQ ID NO: 1328366 - RNA, 19 nt, Artificial Sequence
  Description of Artificial Sequence: Synthetic oligonucleotide
  Sense strand starting at position 3737 of SEQ ID NO: 1242182
gaaugagagugacaucauc

SEQ ID NO: 1328367 - RNA, 19 nt, Artificial Sequence
  Description of Artificial Sequence: Synthetic oligonucleotide
  Antisense strand to SEQ ID NO: 1328366
gaugaugucacucucauuc

SEQ ID NO: 1328368 - RNA, 19 nt, Artificial Sequence
  Description of Artificial Sequence: Synthetic oligonucleotide
  Sense strand starting at position 3859 of SEQ ID NO: 1242182
uuaauugugugagccaagu

SEQ ID NO: 1328369 - RNA, 19 nt, Artificial Sequence
  Description of Artificial Sequence: Synthetic oligonucleotide
  Antisense strand to SEQ ID NO: 1328368
acuuggcucacacaauuaa

SEQ ID NO: 1328370 - RNA, 19 nt, Artificial Sequence
  Description of Artificial Sequence: Synthetic oligonucleotide
  Sense strand starting at position 89 of SEQ ID NO: 1242183
aggagaaguucccugcaga

SEQ ID NO: 1328371 - RNA, 19 nt, Artificial Sequence
  Description of Artificial Sequence: Synthetic oligonucleotide
  Antisense strand to SEQ ID NO: 1328370
ucugcagggaacuucuccu

SEQ ID NO: 1328372 - RNA, 19 nt, Artificial Sequence
  Description of Artificial Sequence: Synthetic oligonucleotide
  Sense strand starting at position 90 of SEQ ID NO: 1242183
ggagaaguucccugcagag

SEQ ID NO: 1328373 - RNA, 19 nt, Artificial Sequence
  Description of Artificial Sequence: Synthetic oligonucleotide
  Antisense strand to SEQ ID NO: 1328372
cucugcagggaacuucucc

SEQ ID NO: 1328374 - RNA, 19 nt, Artificial Sequence
  Description of Artificial Sequence: Synthetic oligonucleotide
  Sense strand starting at position 176 of SEQ ID NO: 1242183
uccaauucuggcuaaauag

SEQ ID NO: 1328375 - RNA, 19 nt, Artificial Sequence
  Description of Artificial Sequence: Synthetic oligonucleotide
  Antisense strand to SEQ ID NO: 1328374
cuauuuagccagaauugga

SEQ ID NO: 1328376 - RNA, 19 nt, Artificial Sequence
  Description of Artificial Sequence: Synthetic oligonucleotide
  Sense strand starting at position 481 of SEQ ID NO: 1242183
cggugagacucuucuucag

SEQ ID NO: 1328377 - RNA, 19 nt, Artificial Sequence
  Description of Artificial Sequence: Synthetic oligonucleotide
  Antisense strand to SEQ ID NO: 1328376
cugaagaagagucucaccg

SEQ ID NO: 1328378 - RNA, 19 nt, Artificial Sequence
  Description of Artificial Sequence: Synthetic oligonucleotide
  Sense strand starting at position 579 of SEQ ID NO: 1242183
uuggaaggucuugguuaac

SEQ ID NO: 1328379 - RNA, 19 nt, Artificial Sequence
  Description of Artificial Sequence: Synthetic oligonucleotide
  Antisense strand to SEQ ID NO: 1328378
guuaaccaagaccuuccaa

SEQ ID NO: 1328380 - RNA, 19 nt, Artificial Sequence
  Description of Artificial Sequence: Synthetic oligonucleotide
  Sense strand starting at position 638 of SEQ ID NO: 1242183
gaggguuaauuccacagaa

SEQ ID NO: 1328381 - RNA, 19 nt, Artificial Sequence
  Description of Artificial Sequence: Synthetic oligonucleotide
  Antisense strand to SEQ ID NO: 1328380
uucuguggaauuaacccuc

SEQ ID NO: 1328382 - RNA, 19 nt, Artificial Sequence
  Description of Artificial Sequence: Synthetic oligonucleotide
  Sense strand starting at position 690 of SEQ ID NO: 1242183
agaagugucuuguuagaga

SEQ ID NO: 1328383 - RNA, 19 nt, Artificial Sequence
  Description of Artificial Sequence: Synthetic oligonucleotide
  Antisense strand to SEQ ID NO: 1328382
ucucuaacaagacacuucu

SEQ ID NO: 1328384 - RNA, 19 nt, Artificial Sequence
  Description of Artificial Sequence: Synthetic oligonucleotide
  Sense strand starting at position 695 of SEQ ID NO: 1242183
ugucuuguuagagaguauu

SEQ ID NO: 1328385 - RNA, 19 nt, Artificial Sequence
  Description of Artificial Sequence: Synthetic oligonucleotide
  Antisense strand to SEQ ID NO: 1328384
aauacucucuaacaagaca

SEQ ID NO: 1328386 - RNA, 19 nt, Artificial Sequence
  Description of Artificial Sequence: Synthetic oligonucleotide
  Sense strand starting at position 698 of SEQ ID NO: 1242183
cuuguuagagaguauuccu

SEQ ID NO: 1328387 - RNA, 19 nt, Artificial Sequence
  Description of Artificial Sequence: Synthetic oligonucleotide
  Antisense strand to SEQ ID NO: 1328386
aggaauacucucuaacaag

SEQ ID NO: 1328388 - RNA, 19 nt, Artificial Sequence
  Description of Artificial Sequence: Synthetic oligonucleotide
  Sense strand starting at position 763 of SEQ ID NO: 1242183
aaagaaugugcuuaugcug

SEQ ID NO: 1328389 - RNA, 19 nt, Artificial Sequence
  Description of Artificial Sequence: Synthetic oligonucleotide
  Antisense strand to SEQ ID NO: 1328388
cagcauaagcacauucuuu

SEQ ID NO: 1328390 - RNA, 19 nt, Artificial Sequence
  Description of Artificial Sequence: Synthetic oligonucleotide
  Sense strand starting at position 932 of SEQ ID NO: 1242183
agaguaguaaguugagauc

SEQ ID NO: 1328391 - RNA, 19 nt, Artificial Sequence
  Description of Artificial Sequence: Synthetic oligonucleotide
  Antisense strand to SEQ ID NO: 1328390
gaucucaacuuacuacucu

SEQ ID NO: 1328392 - RNA, 19 nt, Artificial Sequence
  Description of Artificial Sequence: Synthetic oligonucleotide
  Sense strand starting at position 941 of SEQ ID NO: 1242183
aguugagauccuugcaaug

SEQ ID NO: 1328393 - RNA, 19 nt, Artificial Sequence
  Description of Artificial Sequence: Synthetic oligonucleotide
  Antisense strand to SEQ ID NO: 1328392
cauugcaaggaucucaacu

SEQ ID NO: 1328394 - RNA, 19 nt, Artificial Sequence
  Description of Artificial Sequence: Synthetic oligonucleotide
  Sense strand starting at position 1005 of SEQ ID NO: 1242183
cucagaagcuuugcacaau

SEQ ID NO: 1328395 - RNA, 19 nt, Artificial Sequence
  Description of Artificial Sequence: Synthetic oligonucleotide
  Antisense strand to SEQ ID NO: 1328394
auugugcaaagcuucugag

SEQ ID NO: 1328396 - RNA, 19 nt, Artificial Sequence
  Description of Artificial Sequence: Synthetic oligonucleotide
  Sense strand starting at position 1008 of SEQ ID NO: 1242183
agaagcuuugcacaauaau

SEQ ID NO: 1328397 - RNA, 19 nt, Artificial Sequence
  Description of Artificial Sequence: Synthetic oligonucleotide
  Antisense strand to SEQ ID NO: 1328396
auuauugugcaaagcuucu

SEQ ID NO: 1328398 - RNA, 19 nt, Artificial Sequence
  Description of Artificial Sequence: Synthetic oligonucleotide
  Sense strand starting at position 1083 of SEQ ID NO: 1242183
aggacucuugcucagaacu

SEQ ID NO: 1328399 - RNA, 19 nt, Artificial Sequence
  Description of Artificial Sequence: Synthetic oligonucleotide
  Antisense strand to SEQ ID NO: 1328398
aguucugagcaagaguccu

SEQ ID NO: 1328400 - RNA, 19 nt, Artificial Sequence
  Description of Artificial Sequence: Synthetic oligonucleotide
  Sense strand starting at position 1105 of SEQ ID NO: 1242183
gggcuaaacugcucuuacu

SEQ ID NO: 1328401 - RNA, 19 nt, Artificial Sequence
  Description of Artificial Sequence: Synthetic oligonucleotide
  Antisense strand to SEQ ID NO: 1328400
aguaagagcaguuuagccc

SEQ ID NO: 1328402 - RNA, 19 nt, Artificial Sequence
  Description of Artificial Sequence: Synthetic oligonucleotide
  Sense strand starting at position 1173 of SEQ ID NO: 1242183
augccugucagccggagaa

SEQ ID NO: 1328403 - RNA, 19 nt, Artificial Sequence
  Description of Artificial Sequence: Synthetic oligonucleotide
  Antisense strand to SEQ ID NO: 1328402
uucuccggcugacaggcau

SEQ ID NO: 1328404 - RNA, 19 nt, Artificial Sequence
  Description of Artificial Sequence: Synthetic oligonucleotide
  Sense strand starting at position 1288 of SEQ ID NO: 1242183
cccuguuccucucuccaga

SEQ ID NO: 1328405 - RNA, 19 nt, Artificial Sequence
  Description of Artificial Sequence: Synthetic oligonucleotide
  Antisense strand to SEQ ID NO: 1328404
ucuggagagaggaacaggg

SEQ ID NO: 1328406 - RNA, 19 nt, Artificial Sequence
  Description of Artificial Sequence: Synthetic oligonucleotide
  Sense strand starting at position 1290 of SEQ ID NO: 1242183
cuguuccucucuccagauu

SEQ ID NO: 1328407 - RNA, 19 nt, Artificial Sequence
  Description of Artificial Sequence: Synthetic oligonucleotide
  Antisense strand to SEQ ID NO: 1328406
aaucuggagagaggaacag

SEQ ID NO: 1328408 - RNA, 19 nt, Artificial Sequence
  Description of Artificial Sequence: Synthetic oligonucleotide
  Sense strand starting at position 1293 of SEQ ID NO: 1242183
uuccucucuccagauuguu

SEQ ID NO: 1328409 - RNA, 19 nt, Artificial Sequence
  Description of Artificial Sequence: Synthetic oligonucleotide
  Antisense strand to SEQ ID NO: 1328408
aacaaucuggagagaggaa

SEQ ID NO: 1328410 - RNA, 19 nt, Artificial Sequence
  Description of Artificial Sequence: Synthetic oligonucleotide
  Sense strand starting at position 2291 of SEQ ID NO: 1242183
gcgucuguucggaguaaua

SEQ ID NO: 1328411 - RNA, 19 nt, Artificial Sequence
  Description of Artificial Sequence: Synthetic oligonucleotide
  Antisense strand to SEQ ID NO: 1328410
uauuacuccgaacagacgc

SEQ ID NO: 1328412 - RNA, 19 nt, Artificial Sequence
  Description of Artificial Sequence: Synthetic oligonucleotide
  Sense strand starting at position 2293 of SEQ ID NO: 1242183
gucuguucggaguaauaag

SEQ ID NO: 1328413 - RNA, 19 nt, Artificial Sequence
  Description of Artificial Sequence: Synthetic oligonucleotide
  Antisense strand to SEQ ID NO: 1328412
cuuauuacuccgaacagac

SEQ ID NO: 1328414 - RNA, 19 nt, Artificial Sequence
  Description of Artificial Sequence: Synthetic oligonucleotide
  Sense strand starting at position 2359 of SEQ ID NO: 1242183
cagcuuucucgcccguaaa

SEQ ID NO: 1328415 - RNA, 19 nt, Artificial Sequence
  Description of Artificial Sequence: Synthetic oligonucleotide
  Antisense strand to SEQ ID NO: 1328414
uuuacgggcgagaaagcug

SEQ ID NO: 1328416 - RNA, 19 nt, Artificial Sequence
  Description of Artificial Sequence: Synthetic oligonucleotide
  Sense strand starting at position 2361 of SEQ ID NO: 1242183
gcuuucucgcccguaaaga

SEQ ID NO: 1328417 - RNA, 19 nt, Artificial Sequence
  Description of Artificial Sequence: Synthetic oligonucleotide
  Antisense strand to SEQ ID NO: 1328416
ucuuuacgggcgagaaagc

SEQ ID NO: 1328418 - RNA, 19 nt, Artificial Sequence
  Description of Artificial Sequence: Synthetic oligonucleotide
  Sense strand starting at position 2390 of SEQ ID NO: 1242183
cccacuuguggguaaugau

SEQ ID NO: 1328419 - RNA, 19 nt, Artificial Sequence
  Description of Artificial Sequence: Synthetic oligonucleotide
  Antisense strand to SEQ ID NO: 1328418
aucauuacccacaaguggg

SEQ ID NO: 1328420 - RNA, 19 nt, Artificial Sequence
  Description of Artificial Sequence: Synthetic oligonucleotide
  Sense strand starting at position 2398 of SEQ ID NO: 1242183
uggguaaugaucuguagcu

SEQ ID NO: 1328421 - RNA, 19 nt, Artificial Sequence
  Description of Artificial Sequence: Synthetic oligonucleotide
  Antisense strand to SEQ ID NO: 1328420
agcuacagaucauuaccca

SEQ ID NO: 1328422 - RNA, 19 nt, Artificial Sequence
  Description of Artificial Sequence: Synthetic oligonucleotide
  Sense strand starting at position 2399 of SEQ ID NO: 1242183
ggguaaugaucuguagcug

SEQ ID NO: 1328423 - RNA, 19 nt, Artificial Sequence
  Description of Artificial Sequence: Synthetic oligonucleotide
  Antisense strand to SEQ ID NO: 1328422
cagcuacagaucauuaccc

SEQ ID NO: 1328424 - RNA, 19 nt, Artificial Sequence
  Description of Artificial Sequence: Synthetic oligonucleotide
  Sense strand starting at position 2574 of SEQ ID NO: 1242183
aacagaaauccacgagugu

SEQ ID NO: 1328425 - RNA, 19 nt, Artificial Sequence
  Description of Artificial Sequence: Synthetic oligonucleotide
  Antisense strand to SEQ ID NO: 1328424
acacucguggauuucuguu

SEQ ID NO: 1328426 - RNA, 19 nt, Artificial Sequence
  Description of Artificial Sequence: Synthetic oligonucleotide
  Sense strand starting at position 2575 of SEQ ID NO: 1242183
acagaaauccacgagugua

SEQ ID NO: 1328427 - RNA, 19 nt, Artificial Sequence
  Description of Artificial Sequence: Synthetic oligonucleotide
  Antisense strand to SEQ ID NO: 1328426
uacacucguggauuucugu

SEQ ID NO: 1328428 - RNA, 19 nt, Artificial Sequence
  Description of Artificial Sequence: Synthetic oligonucleotide
  Sense strand starting at position 2628 of SEQ ID NO: 1242183
uuaagucguguuuaucaaa

SEQ ID NO: 1328429 - RNA, 19 nt, Artificial Sequence
  Description of Artificial Sequence: Synthetic oligonucleotide
  Antisense strand to SEQ ID NO: 1328428
uuugauaaacacgacuuaa

SEQ ID NO: 1328430 - RNA, 19 nt, Artificial Sequence
  Description of Artificial Sequence: Synthetic oligonucleotide
  Sense strand starting at position 2635 of SEQ ID NO: 1242183
guguuuaucaaaugucagg

SEQ ID NO: 1328431 - RNA, 19 nt, Artificial Sequence
  Description of Artificial Sequence: Synthetic oligonucleotide
  Antisense strand to SEQ ID NO: 1328430
ccugacauuugauaaacac

SEQ ID NO: 1328432 - RNA, 19 nt, Artificial Sequence
  Description of Artificial Sequence: Synthetic oligonucleotide
  Sense strand starting at position 2683 of SEQ ID NO: 1242183
guggaagaauucucacaca

SEQ ID NO: 1328433 - RNA, 19 nt, Artificial Sequence
  Description of Artificial Sequence: Synthetic oligonucleotide
  Antisense strand to SEQ ID NO: 1328432
ugugugagaauucuuccac

SEQ ID NO: 1328434 - RNA, 19 nt, Artificial Sequence
  Description of Artificial Sequence: Synthetic oligonucleotide
  Sense strand starting at position 3471 of SEQ ID NO: 1242183
gaaugagucucacuagauu

SEQ ID NO: 1328435 - RNA, 19 nt, Artificial Sequence
  Description of Artificial Sequence: Synthetic oligonucleotide
  Antisense strand to SEQ ID NO: 1328434
aaucuagugagacucauuc

SEQ ID NO: 1328436 - RNA, 19 nt, Artificial Sequence
  Description of Artificial Sequence: Synthetic oligonucleotide
  Sense strand starting at position 3704 of SEQ ID NO: 1242183
aauuguuaaucuucgugga

SEQ ID NO: 1328437 - RNA, 19 nt, Artificial Sequence
  Description of Artificial Sequence: Synthetic oligonucleotide
  Antisense strand to SEQ ID NO: 1328436
uccacgaagauuaacaauu

SEQ ID NO: 1328438 - RNA, 19 nt, Artificial Sequence
  Description of Artificial Sequence: Synthetic oligonucleotide
  Sense strand starting at position 3706 of SEQ ID NO: 1242183
uuguuaaucuucguggaca

SEQ ID NO: 1328439 - RNA, 19 nt, Artificial Sequence
  Description of Artificial Sequence: Synthetic oligonucleotide
  Antisense strand to SEQ ID NO: 1328438
uguccacgaagauuaacaa

SEQ ID NO: 1328440 - RNA, 19 nt, Artificial Sequence
  Description of Artificial Sequence: Synthetic oligonucleotide
  Sense strand starting at position 3708 of SEQ ID NO: 1242183
guuaaucuucguggacaaa

SEQ ID NO: 1328441 - RNA, 19 nt, Artificial Sequence
  Description of Artificial Sequence: Synthetic oligonucleotide
  Antisense strand to SEQ ID NO: 1328440
uuuguccacgaagauuaac

SEQ ID NO: 1328442 - RNA, 19 nt, Artificial Sequence
  Description of Artificial Sequence: Synthetic oligonucleotide
  Sense strand starting at position 3709 of SEQ ID NO: 1242183
uuaaucuucguggacaaag

SEQ ID NO: 1328443 - RNA, 19 nt, Artificial Sequence
  Description of Artificial Sequence: Synthetic oligonucleotide
  Antisense strand to SEQ ID NO: 1328442
cuuuguccacgaagauuaa

SEQ ID NO: 1328444 - RNA, 19 nt, Artificial Sequence
  Description of Artificial Sequence: Synthetic oligonucleotide
  Sense strand starting at position 3783 of SEQ ID NO: 1242183
gacucuggccuuggaauga

SEQ ID NO: 1328445 - RNA, 19 nt, Artificial Sequence
  Description of Artificial Sequence: Synthetic oligonucleotide
  Antisense strand to SEQ ID NO: 1328444
ucauuccaaggccagaguc

SEQ ID NO: 1328446 - RNA, 19 nt, Artificial Sequence
  Description of Artificial Sequence: Synthetic oligonucleotide
  Sense strand starting at position 3796 of SEQ ID NO: 1242183
gaaugagagugacaucauc

SEQ ID NO: 1328447 - RNA, 19 nt, Artificial Sequence
  Description of Artificial Sequence: Synthetic oligonucleotide
  Antisense strand to SEQ ID NO: 1328446
gaugaugucacucucauuc

SEQ ID NO: 1328448 - RNA, 19 nt, Artificial Sequence
  Description of Artificial Sequence: Synthetic oligonucleotide
  Sense strand starting at position 3918 of SEQ ID NO: 1242183
uuaauugugugagccaagu

SEQ ID NO: 1328449 - RNA, 19 nt, Artificial Sequence
  Description of Artificial Sequence: Synthetic oligonucleotide
  Antisense strand to SEQ ID NO: 1328448
acuuggcucacacaauuaa

SEQ ID NO: 1328450 - RNA, 19 nt, Artificial Sequence
  Description of Artificial Sequence: Synthetic oligonucleotide
  Sense strand starting at position 76 of SEQ ID NO: 1242184
cuggaauuccauugacguu

SEQ ID NO: 1328451 - RNA, 19 nt, Artificial Sequence
  Description of Artificial Sequence: Synthetic oligonucleotide
  Antisense strand to SEQ ID NO: 1328450
aacgucaauggaauuccag

SEQ ID NO: 1328452 - RNA, 19 nt, Artificial Sequence
  Description of Artificial Sequence: Synthetic oligonucleotide
  Sense strand starting at position 1745 of SEQ ID NO: 1242184
aagucaauuggagguggau

SEQ ID NO: 1328453 - RNA, 19 nt, Artificial Sequence
  Description of Artificial Sequence: Synthetic oligonucleotide
  Antisense strand to SEQ ID NO: 1328452
auccaccuccaauugacuu

SEQ ID NO: 1328454 - RNA, 19 nt, Artificial Sequence
  Description of Artificial Sequence: Synthetic oligonucleotide
  Sense strand starting at position 1863 of SEQ ID NO: 1242184
ucgagucacccagauucuu

SEQ ID NO: 1328455 - RNA, 19 nt, Artificial Sequence
  Description of Artificial Sequence: Synthetic oligonucleotide
  Antisense strand to SEQ ID NO: 1328454
aagaaucugggugacucga

SEQ ID NO: 1328456 - RNA, 19 nt, Artificial Sequence
  Description of Artificial Sequence: Synthetic oligonucleotide
  Sense strand starting at position 1890 of SEQ ID NO: 1242184
gcgacaugucccuuugcug

SEQ ID NO: 1328457 - RNA, 19 nt, Artificial Sequence
  Description of Artificial Sequence: Synthetic oligonucleotide
  Antisense strand to SEQ ID NO: 1328456
cagcaaagggacaugucgc

SEQ ID NO: 1328458 - RNA, 19 nt, Artificial Sequence
  Description of Artificial Sequence: Synthetic oligonucleotide
  Sense strand starting at position 2136 of SEQ ID NO: 1242184
cggaguccuggcugacaca

SEQ ID NO: 1328459 - RNA, 19 nt, Artificial Sequence
  Description of Artificial Sequence: Synthetic oligonucleotide
  Antisense strand to SEQ ID NO: 1328458
ugugucagccaggacuccg

SEQ ID NO: 1328460 - RNA, 19 nt, Artificial Sequence
  Description of Artificial Sequence: Synthetic oligonucleotide
  Sense strand starting at position 2333 of SEQ ID NO: 1242184
gguguggucugggcuaaga

SEQ ID NO: 1328461 - RNA, 19 nt, Artificial Sequence
  Description of Artificial Sequence: Synthetic oligonucleotide
  Antisense strand to SEQ ID NO: 1328460
ucuuagcccagaccacacc

SEQ ID NO: 1328462 - RNA, 19 nt, Artificial Sequence
  Description of Artificial Sequence: Synthetic oligonucleotide
  Sense strand starting at position 2386 of SEQ ID NO: 1242184
aagagaguuccaggaguua

SEQ ID NO: 1328463 - RNA, 19 nt, Artificial Sequence
  Description of Artificial Sequence: Synthetic oligonucleotide
  Antisense strand to SEQ ID NO: 1328462
uaacuccuggaacucucuu

SEQ ID NO: 1328464 - RNA, 19 nt, Artificial Sequence
  Description of Artificial Sequence: Synthetic oligonucleotide
  Sense strand starting at position 2407 of SEQ ID NO: 1242184
gcagacagauaccuguauu

SEQ ID NO: 1328465 - RNA, 19 nt, Artificial Sequence
  Description of Artificial Sequence: Synthetic oligonucleotide
  Antisense strand to SEQ ID NO: 1328464
aauacagguaucugucugc

SEQ ID NO: 1328466 - RNA, 19 nt, Artificial Sequence
  Description of Artificial Sequence: Synthetic oligonucleotide
  Sense strand starting at position 2497 of SEQ ID NO: 1242184
agggacuguuacucucuua

SEQ ID NO: 1328467 - RNA, 19 nt, Artificial Sequence
  Description of Artificial Sequence: Synthetic oligonucleotide
  Antisense strand to SEQ ID NO: 1328466
uaagagaguaacagucccu

SEQ ID NO: 1328468 - RNA, 19 nt, Artificial Sequence
  Description of Artificial Sequence: Synthetic oligonucleotide
  Sense strand starting at position 2548 of SEQ ID NO: 1242184
ugaugaguauuggcagaca

SEQ ID NO: 1328469 - RNA, 19 nt, Artificial Sequence
  Description of Artificial Sequence: Synthetic oligonucleotide
  Antisense strand to SEQ ID NO: 1328468
ugucugccaauacucauca

SEQ ID NO: 1328470 - RNA, 19 nt, Artificial Sequence
  Description of Artificial Sequence: Synthetic oligonucleotide
  Sense strand starting at position 2612 of SEQ ID NO: 1242184
uaggcacuccuguaugaug

SEQ ID NO: 1328471 - RNA, 19 nt, Artificial Sequence
  Description of Artificial Sequence: Synthetic oligonucleotide
  Antisense strand to SEQ ID NO: 1328470
caucauacaggagugccua

SEQ ID NO: 1328472 - RNA, 19 nt, Artificial Sequence
  Description of Artificial Sequence: Synthetic oligonucleotide
  Sense strand starting at position 2620 of SEQ ID NO: 1242184
ccuguaugaugucuuggga

SEQ ID NO: 1328473 - RNA, 19 nt, Artificial Sequence
  Description of Artificial Sequence: Synthetic oligonucleotide
  Antisense strand to SEQ ID NO: 1328472
ucccaagacaucauacagg

SEQ ID NO: 1328474 - RNA, 19 nt, Artificial Sequence
  Description of Artificial Sequence: Synthetic oligonucleotide
  Sense strand starting at position 2623 of SEQ ID NO: 1242184
guaugaugucuugggaguc

SEQ ID NO: 1328475 - RNA, 19 nt, Artificial Sequence
  Description of Artificial Sequence: Synthetic oligonucleotide
  Antisense strand to SEQ ID NO: 1328474
gacucccaagacaucauac

SEQ ID NO: 1328476 - RNA, 19 nt, Artificial Sequence
  Description of Artificial Sequence: Synthetic oligonucleotide
  Sense strand starting at position 2645 of SEQ ID NO: 1242184
cuuggcuauuccucaugaa

SEQ ID NO: 1328477 - RNA, 19 nt, Artificial Sequence
  Description of Artificial Sequence: Synthetic oligonucleotide
  Antisense strand to SEQ ID NO: 1328476
uucaugaggaauagccaag

SEQ ID NO: 1328478 - RNA, 19 nt, Artificial Sequence
  Description of Artificial Sequence: Synthetic oligonucleotide
  Sense strand starting at position 2646 of SEQ ID NO: 1242184
uuggcuauuccucaugaaa

SEQ ID NO: 1328479 - RNA, 19 nt, Artificial Sequence
  Description of Artificial Sequence: Synthetic oligonucleotide
  Antisense strand to SEQ ID NO: 1328478
uuucaugaggaauagccaa

SEQ ID NO: 1328480 - RNA, 19 nt, Artificial Sequence
  Description of Artificial Sequence: Synthetic oligonucleotide
  Sense strand starting at position 2677 of SEQ ID NO: 1242184
gagggaaugugguugcacu

SEQ ID NO: 1328481 - RNA, 19 nt, Artificial Sequence
  Description of Artificial Sequence: Synthetic oligonucleotide
  Antisense strand to SEQ ID NO: 1328480
agugcaaccacauucccuc

SEQ ID NO: 1328482 - RNA, 19 nt, Artificial Sequence
  Description of Artificial Sequence: Synthetic oligonucleotide
  Sense strand starting at position 2705 of SEQ ID NO: 1242184
agaacacaggcauguuaga

SEQ ID NO: 1328483 - RNA, 19 nt, Artificial Sequence
  Description of Artificial Sequence: Synthetic oligonucleotide
  Antisense strand to SEQ ID NO: 1328482
ucuaacaugccuguguucu

SEQ ID NO: 1328484 - RNA, 19 nt, Artificial Sequence
  Description of Artificial Sequence: Synthetic oligonucleotide
  Sense strand starting at position 2777 of SEQ ID NO: 1242184
ggaacugagacaugccaca

SEQ ID NO: 1328485 - RNA, 19 nt, Artificial Sequence
  Description of Artificial Sequence: Synthetic oligonucleotide
  Antisense strand to SEQ ID NO: 1328484
uguggcaugucucaguucc

SEQ ID NO: 1328486 - RNA, 19 nt, Artificial Sequence
  Description of Artificial Sequence: Synthetic oligonucleotide
  Sense strand starting at position 2790 of SEQ ID NO: 1242184
gccacacaucaguggaaga

SEQ ID NO: 1328487 - RNA, 19 nt, Artificial Sequence
  Description of Artificial Sequence: Synthetic oligonucleotide
  Antisense strand to SEQ ID NO: 1328486
ucuuccacugauguguggc

SEQ ID NO: 1328488 - RNA, 19 nt, Artificial Sequence
  Description of Artificial Sequence: Synthetic oligonucleotide
  Sense strand starting at position 2860 of SEQ ID NO: 1242184
cagaguagguuucucagua

SEQ ID NO: 1328489 - RNA, 19 nt, Artificial Sequence
  Description of Artificial Sequence: Synthetic oligonucleotide
  Antisense strand to SEQ ID NO: 1328488
uacugagaaaccuacucug

SEQ ID NO: 1328490 - RNA, 19 nt, Artificial Sequence
  Description of Artificial Sequence: Synthetic oligonucleotide
  Sense strand starting at position 2861 of SEQ ID NO: 1242184
agaguagguuucucaguau

SEQ ID NO: 1328491 - RNA, 19 nt, Artificial Sequence
  Description of Artificial Sequence: Synthetic oligonucleotide
  Antisense strand to SEQ ID NO: 1328490
auacugagaaaccuacucu

SEQ ID NO: 1328492 - RNA, 19 nt, Artificial Sequence
  Description of Artificial Sequence: Synthetic oligonucleotide
  Sense strand starting at position 3098 of SEQ ID NO: 1242184
aguauuauugggcaaugcu

SEQ ID NO: 1328493 - RNA, 19 nt, Artificial Sequence
  Description of Artificial Sequence: Synthetic oligonucleotide
  Antisense strand to SEQ ID NO: 1328492
agcauugcccaauaauacu

SEQ ID NO: 1328494 - RNA, 19 nt, Artificial Sequence
  Description of Artificial Sequence: Synthetic oligonucleotide
  Sense strand starting at position 3101 of SEQ ID NO: 1242184
auuauugggcaaugcuaua

SEQ ID NO: 1328495 - RNA, 19 nt, Artificial Sequence
  Description of Artificial Sequence: Synthetic oligonucleotide
  Antisense strand to SEQ ID NO: 1328494
uauagcauugcccaauaau

SEQ ID NO: 1328496 - RNA, 19 nt, Artificial Sequence
  Description of Artificial Sequence: Synthetic oligonucleotide
  Sense strand starting at position 3106 of SEQ ID NO: 1242184
ugggcaaugcuauacaacu

SEQ ID NO: 1328497 - RNA, 19 nt, Artificial Sequence
  Description of Artificial Sequence: Synthetic oligonucleotide
  Antisense strand to SEQ ID NO: 1328496
aguuguauagcauugccca

SEQ ID NO: 1328498 - RNA, 19 nt, Artificial Sequence
  Description of Artificial Sequence: Synthetic oligonucleotide
  Sense strand starting at position 3122 of SEQ ID NO: 1242184
acuuuauggugagaggaag

SEQ ID NO: 1328499 - RNA, 19 nt, Artificial Sequence
  Description of Artificial Sequence: Synthetic oligonucleotide
  Antisense strand to SEQ ID NO: 1328498
cuuccucucaccauaaagu

SEQ ID NO: 1328500 - RNA, 19 nt, Artificial Sequence
  Description of Artificial Sequence: Synthetic oligonucleotide
  Sense strand starting at position 3140 of SEQ ID NO: 1242184
gugauaaucucaguaauug

SEQ ID NO: 1328501 - RNA, 19 nt, Artificial Sequence
  Description of Artificial Sequence: Synthetic oligonucleotide
  Antisense strand to SEQ ID NO: 1328500
caauuacugagauuaucac

SEQ ID NO: 1328502 - RNA, 19 nt, Artificial Sequence
  Description of Artificial Sequence: Synthetic oligonucleotide
  Sense strand starting at position 3194 of SEQ ID NO: 1242184
caaggauguuucguuuaaa

SEQ ID NO: 1328503 - RNA, 19 nt, Artificial Sequence
  Description of Artificial Sequence: Synthetic oligonucleotide
  Antisense strand to SEQ ID NO: 1328502
uuuaaacgaaacauccuug

SEQ ID NO: 1328504 - RNA, 19 nt, Artificial Sequence
  Description of Artificial Sequence: Synthetic oligonucleotide
  Sense strand starting at position 3195 of SEQ ID NO: 1242184
aaggauguuucguuuaaau

SEQ ID NO: 1328505 - RNA, 19 nt, Artificial Sequence
  Description of Artificial Sequence: Synthetic oligonucleotide
  Antisense strand to SEQ ID NO: 1328504
auuuaaacgaaacauccuu

SEQ ID NO: 1328506 - RNA, 19 nt, Artificial Sequence
  Description of Artificial Sequence: Synthetic oligonucleotide
  Sense strand starting at position 3197 of SEQ ID NO: 1242184
ggauguuucguuuaaauag

SEQ ID NO: 1328507 - RNA, 19 nt, Artificial Sequence
  Description of Artificial Sequence: Synthetic oligonucleotide
  Antisense strand to SEQ ID NO: 1328506
cuauuuaaacgaaacaucc

SEQ ID NO: 1328508 - RNA, 19 nt, Artificial Sequence
  Description of Artificial Sequence: Synthetic oligonucleotide
  Sense strand starting at position 3442 of SEQ ID NO: 1242184
acacuuaagggauguuguu

SEQ ID NO: 1328509 - RNA, 19 nt, Artificial Sequence
  Description of Artificial Sequence: Synthetic oligonucleotide
  Antisense strand to SEQ ID NO: 1328508
aacaacaucccuuaagugu

SEQ ID NO: 1328510 - RNA, 19 nt, Artificial Sequence
  Description of Artificial Sequence: Synthetic oligonucleotide
  Sense strand starting at position 3456 of SEQ ID NO: 1242184
uuguuauucccaggaaacu

SEQ ID NO: 1328511 - RNA, 19 nt, Artificial Sequence
  Description of Artificial Sequence: Synthetic oligonucleotide
  Antisense strand to SEQ ID NO: 1328510
aguuuccugggaauaacaa

SEQ ID NO: 1328512 - RNA, 19 nt, Artificial Sequence
  Description of Artificial Sequence: Synthetic oligonucleotide
  Sense strand starting at position 3457 of SEQ ID NO: 1242184
uguuauucccaggaaacuc

SEQ ID NO: 1328513 - RNA, 19 nt, Artificial Sequence
  Description of Artificial Sequence: Synthetic oligonucleotide
  Antisense strand to SEQ ID NO: 1328512
gaguuuccugggaauaaca

SEQ ID NO: 1328514 - RNA, 19 nt, Artificial Sequence
  Description of Artificial Sequence: Synthetic oligonucleotide
  Sense strand starting at position 3667 of SEQ ID NO: 1242184
uagcaaucucagcaugcga

SEQ ID NO: 1328515 - RNA, 19 nt, Artificial Sequence
  Description of Artificial Sequence: Synthetic oligonucleotide
  Antisense strand to SEQ ID NO: 1328514
ucgcaugcugagauugcua

SEQ ID NO: 1328516 - RNA, 19 nt, Artificial Sequence
  Description of Artificial Sequence: Synthetic oligonucleotide
  Sense strand starting at position 3749 of SEQ ID NO: 1242184
uuccguuuggcauaccuaa

SEQ ID NO: 1328517 - RNA, 19 nt, Artificial Sequence
  Description of Artificial Sequence: Synthetic oligonucleotide
  Antisense strand to SEQ ID NO: 1328516
uuagguaugccaaacggaa

SEQ ID NO: 1328518 - RNA, 19 nt, Artificial Sequence
  Description of Artificial Sequence: Synthetic oligonucleotide
  Sense strand starting at position 3764 of SEQ ID NO: 1242184
cuaaauugccaggaucacu

SEQ ID NO: 1328519 - RNA, 19 nt, Artificial Sequence
  Description of Artificial Sequence: Synthetic oligonucleotide
  Antisense strand to SEQ ID NO: 1328518
agugauccuggcaauuuag

SEQ ID NO: 1328520 - RNA, 19 nt, Artificial Sequence
  Description of Artificial Sequence: Synthetic oligonucleotide
  Sense strand starting at position 3839 of SEQ ID NO: 1242184
cugggaaaccgaugguaga

SEQ ID NO: 1328521 - RNA, 19 nt, Artificial Sequence
  Description of Artificial Sequence: Synthetic oligonucleotide
  Antisense strand to SEQ ID NO: 1328520
ucuaccaucgguuucccag

SEQ ID NO: 1328522 - RNA, 19 nt, Artificial Sequence
  Description of Artificial Sequence: Synthetic oligonucleotide
  Sense strand starting at position 3840 of SEQ ID NO: 1242184
ugggaaaccgaugguagau

SEQ ID NO: 1328523 - RNA, 19 nt, Artificial Sequence
  Description of Artificial Sequence: Synthetic oligonucleotide
  Antisense strand to SEQ ID NO: 1328522
aucuaccaucgguuuccca

SEQ ID NO: 1328524 - RNA, 19 nt, Artificial Sequence
  Description of Artificial Sequence: Synthetic oligonucleotide
  Sense strand starting at position 3874 of SEQ ID NO: 1242184
gcuacuaagugguuaauga

SEQ ID NO: 1328525 - RNA, 19 nt, Artificial Sequence
  Description of Artificial Sequence: Synthetic oligonucleotide
  Antisense strand to SEQ ID NO: 1328524
ucauuaaccacuuaguagc

SEQ ID NO: 1328526 - RNA, 19 nt, Artificial Sequence
  Description of Artificial Sequence: Synthetic oligonucleotide
  Sense strand starting at position 3881 of SEQ ID NO: 1242184
agugguuaaugagcaggua

SEQ ID NO: 1328527 - RNA, 19 nt, Artificial Sequence
  Description of Artificial Sequence: Synthetic oligonucleotide
  Antisense strand to SEQ ID NO: 1328526
uaccugcucauuaaccacu

SEQ ID NO: 1328528 - RNA, 19 nt, Artificial Sequence
  Description of Artificial Sequence: Synthetic oligonucleotide
  Sense strand starting at position 3893 of SEQ ID NO: 1242184
gcagguagcgaauacagua

SEQ ID NO: 1328529 - RNA, 19 nt, Artificial Sequence
  Description of Artificial Sequence: Synthetic oligonucleotide
  Antisense strand to SEQ ID NO: 1328528
uacuguauucgcuaccugc

SEQ ID NO: 1328530 - RNA, 19 nt, Artificial Sequence
  Description of Artificial Sequence: Synthetic oligonucleotide
  Sense strand starting at position 92 of SEQ ID NO: 1242185
gcacccauagcuuaaggua

SEQ ID NO: 1328531 - RNA, 19 nt, Artificial Sequence
  Description of Artificial Sequence: Synthetic oligonucleotide
  Antisense strand to SEQ ID NO: 1328530
uaccuuaagcuaugggugc

SEQ ID NO: 1328532 - RNA, 19 nt, Artificial Sequence
  Description of Artificial Sequence: Synthetic oligonucleotide
  Sense strand starting at position 95 of SEQ ID NO: 1242185
cccauagcuuaagguaaga

SEQ ID NO: 1328533 - RNA, 19 nt, Artificial Sequence
  Description of Artificial Sequence: Synthetic oligonucleotide
  Antisense strand to SEQ ID NO: 1328532
ucuuaccuuaagcuauggg

SEQ ID NO: 1328534 - RNA, 19 nt, Artificial Sequence
  Description of Artificial Sequence: Synthetic oligonucleotide
  Sense strand starting at position 403 of SEQ ID NO: 1242185
ccuuguauuggccaucaga

SEQ ID NO: 1328535 - RNA, 19 nt, Artificial Sequence
  Description of Artificial Sequence: Synthetic oligonucleotide
  Antisense strand to SEQ ID NO: 1328534
ucugauggccaauacaagg

SEQ ID NO: 1328536 - RNA, 19 nt, Artificial Sequence
  Description of Artificial Sequence: Synthetic oligonucleotide
  Sense strand starting at position 406 of SEQ ID NO: 1242185
uguauuggccaucagaaau

SEQ ID NO: 1328537 - RNA, 19 nt, Artificial Sequence
  Description of Artificial Sequence: Synthetic oligonucleotide
  Antisense strand to SEQ ID NO: 1328536
auuucugauggccaauaca

SEQ ID NO: 1328538 - RNA, 19 nt, Artificial Sequence
  Description of Artificial Sequence: Synthetic oligonucleotide
  Sense strand starting at position 1213 of SEQ ID NO: 1242185
guugccugugcugaggauu

SEQ ID NO: 1328539 - RNA, 19 nt, Artificial Sequence
  Description of Artificial Sequence: Synthetic oligonucleotide
  Antisense strand to SEQ ID NO: 1328538
aauccucagcacaggcaac

SEQ ID NO: 1328540 - RNA, 19 nt, Artificial Sequence
  Description of Artificial Sequence: Synthetic oligonucleotide
  Sense strand starting at position 1247 of SEQ ID NO: 1242185
ggcaaagaaugcugcaauc

SEQ ID NO: 1328541 - RNA, 19 nt, Artificial Sequence
  Description of Artificial Sequence: Synthetic oligonucleotide
  Antisense strand to SEQ ID NO: 1328540
gauugcagcauucuuugcc

SEQ ID NO: 1328542 - RNA, 19 nt, Artificial Sequence
  Description of Artificial Sequence: Synthetic oligonucleotide
  Sense strand starting at position 1268 of SEQ ID NO: 1242185
uuagcaaugucugccaaga

SEQ ID NO: 1328543 - RNA, 19 nt, Artificial Sequence
  Description of Artificial Sequence: Synthetic oligonucleotide
  Antisense strand to SEQ ID NO: 1328542
ucuuggcagacauugcuaa

SEQ ID NO: 1328544 - RNA, 19 nt, Artificial Sequence
  Description of Artificial Sequence: Synthetic oligonucleotide
  Sense strand starting at position 1270 of SEQ ID NO: 1242185
agcaaugucugccaagaau

SEQ ID NO: 1328545 - RNA, 19 nt, Artificial Sequence
  Description of Artificial Sequence: Synthetic oligonucleotide
  Antisense strand to SEQ ID NO: 1328544
auucuuggcagacauugcu

SEQ ID NO: 1328546 - RNA, 19 nt, Artificial Sequence
  Description of Artificial Sequence: Synthetic oligonucleotide
  Sense strand starting at position 1687 of SEQ ID NO: 1242185
agcugaggguuucuacaaa

SEQ ID NO: 1328547 - RNA, 19 nt, Artificial Sequence
  Description of Artificial Sequence: Synthetic oligonucleotide
  Antisense strand to SEQ ID NO: 1328546
uuuguagaaacccucagcu

SEQ ID NO: 1328548 - RNA, 19 nt, Artificial Sequence
  Description of Artificial Sequence: Synthetic oligonucleotide
  Sense strand starting at position 1707 of SEQ ID NO: 1242185
ccugacuauugggaaggaa

SEQ ID NO: 1328549 - RNA, 19 nt, Artificial Sequence
  Description of Artificial Sequence: Synthetic oligonucleotide
  Antisense strand to SEQ ID NO: 1328548
uuccuucccaauagucagg

SEQ ID NO: 1328550 - RNA, 19 nt, Artificial Sequence
  Description of Artificial Sequence: Synthetic oligonucleotide
  Sense strand starting at position 1730 of SEQ ID NO: 1242185
ccuguccuguacugacauu

SEQ ID NO: 1328551 - RNA, 19 nt, Artificial Sequence
  Description of Artificial Sequence: Synthetic oligonucleotide
  Antisense strand to SEQ ID NO: 1328550
aaugucaguacaggacagg

SEQ ID NO: 1328552 - RNA, 19 nt, Artificial Sequence
  Description of Artificial Sequence: Synthetic oligonucleotide
  Sense strand starting at position 1806 of SEQ ID NO: 1242185
ccaggugacuuguauacaa

SEQ ID NO: 1328553 - RNA, 19 nt, Artificial Sequence
  Description of Artificial Sequence: Synthetic oligonucleotide
  Antisense strand to SEQ ID NO: 1328552
uuguauacaagucaccugg

SEQ ID NO: 1328554 - RNA, 19 nt, Artificial Sequence
  Description of Artificial Sequence: Synthetic oligonucleotide
  Sense strand starting at position 2047 of SEQ ID NO: 1242185
guggcagucuuuccaccaa

SEQ ID NO: 1328555 - RNA, 19 nt, Artificial Sequence
  Description of Artificial Sequence: Synthetic oligonucleotide
  Antisense strand to SEQ ID NO: 1328554
uugguggaaagacugccac

SEQ ID NO: 1328556 - RNA, 19 nt, Artificial Sequence
  Description of Artificial Sequence: Synthetic oligonucleotide
  Sense strand starting at position 2072 of SEQ ID NO: 1242185
cagugaguuccugagggcu

SEQ ID NO: 1328557 - RNA, 19 nt, Artificial Sequence
  Description of Artificial Sequence: Synthetic oligonucleotide
  Antisense strand to SEQ ID NO: 1328556
agcccucaggaacucacug

SEQ ID NO: 1328558 - RNA, 19 nt, Artificial Sequence
  Description of Artificial Sequence: Synthetic oligonucleotide
  Sense strand starting at position 2074 of SEQ ID NO: 1242185
gugaguuccugagggcugu

SEQ ID NO: 1328559 - RNA, 19 nt, Artificial Sequence
  Description of Artificial Sequence: Synthetic oligonucleotide
  Antisense strand to SEQ ID NO: 1328558
acagcccucaggaacucac

SEQ ID NO: 1328560 - RNA, 19 nt, Artificial Sequence
  Description of Artificial Sequence: Synthetic oligonucleotide
  Sense strand starting at position 2204 of SEQ ID NO: 1242185
uuuggcuggugcuaugaaa

SEQ ID NO: 1328561 - RNA, 19 nt, Artificial Sequence
  Description of Artificial Sequence: Synthetic oligonucleotide
  Antisense strand to SEQ ID NO: 1328560
uuucauagcaccagccaaa

SEQ ID NO: 1328562 - RNA, 19 nt, Artificial Sequence
  Description of Artificial Sequence: Synthetic oligonucleotide
  Sense strand starting at position 2326 of SEQ ID NO: 1242185
cggccaugugcuucuaguu

SEQ ID NO: 1328563 - RNA, 19 nt, Artificial Sequence
  Description of Artificial Sequence: Synthetic oligonucleotide
  Antisense strand to SEQ ID NO: 1328562
aacuagaagcacauggccg

SEQ ID NO: 1328564 - RNA, 19 nt, Artificial Sequence
  Description of Artificial Sequence: Synthetic oligonucleotide
  Sense strand starting at position 2327 of SEQ ID NO: 1242185
ggccaugugcuucuaguuu

SEQ ID NO: 1328565 - RNA, 19 nt, Artificial Sequence
  Description of Artificial Sequence: Synthetic oligonucleotide
  Antisense strand to SEQ ID NO: 1328564
aaacuagaagcacauggcc

SEQ ID NO: 1328566 - RNA, 19 nt, Artificial Sequence
  Description of Artificial Sequence: Synthetic oligonucleotide
  Sense strand starting at position 2350 of SEQ ID NO: 1242185
ugaauaagcuagucucuau

SEQ ID NO: 1328567 - RNA, 19 nt, Artificial Sequence
  Description of Artificial Sequence: Synthetic oligonucleotide
  Antisense strand to SEQ ID NO: 1328566
auagagacuagcuuauuca

SEQ ID NO: 1328568 - RNA, 19 nt, Artificial Sequence
  Description of Artificial Sequence: Synthetic oligonucleotide
  Sense strand starting at position 2399 of SEQ ID NO: 1242185
caaagagacugauaggaaa

SEQ ID NO: 1328569 - RNA, 19 nt, Artificial Sequence
  Description of Artificial Sequence: Synthetic oligonucleotide
  Antisense strand to SEQ ID NO: 1328568
uuuccuaucagucucuuug

SEQ ID NO: 1328570 - RNA, 19 nt, Artificial Sequence
  Description of Artificial Sequence: Synthetic oligonucleotide
  Sense strand starting at position 2427 of SEQ ID NO: 1242185
agugcccuuucgggucaaa

SEQ ID NO: 1328571 - RNA, 19 nt, Artificial Sequence
  Description of Artificial Sequence: Synthetic oligonucleotide
  Antisense strand to SEQ ID NO: 1328570
uuugacccgaaagggcacu

SEQ ID NO: 1328572 - RNA, 19 nt, Artificial Sequence
  Description of Artificial Sequence: Synthetic oligonucleotide
  Sense strand starting at position 2472 of SEQ ID NO: 1242185
gcacgauccuuucucagaa

SEQ ID NO: 1328573 - RNA, 19 nt, Artificial Sequence
  Description of Artificial Sequence: Synthetic oligonucleotide
  Antisense strand to SEQ ID NO: 1328572
uucugagaaaggaucgugc

SEQ ID NO: 1328574 - RNA, 19 nt, Artificial Sequence
  Description of Artificial Sequence: Synthetic oligonucleotide
  Sense strand starting at position 2518 of SEQ ID NO: 1242185
gaagaaagaugcuuguguu

SEQ ID NO: 1328575 - RNA, 19 nt, Artificial Sequence
  Description of Artificial Sequence: Synthetic oligonucleotide
  Antisense strand to SEQ ID NO: 1328574
aacacaagcaucuuucuuc

SEQ ID NO: 1328576 - RNA, 19 nt, Artificial Sequence
  Description of Artificial Sequence: Synthetic oligonucleotide
  Sense strand starting at position 2519 of SEQ ID NO: 1242185
aagaaagaugcuuguguuu

SEQ ID NO: 1328577 - RNA, 19 nt, Artificial Sequence
  Description of Artificial Sequence: Synthetic oligonucleotide
  Antisense strand to SEQ ID NO: 1328576
aaacacaagcaucuuucuu

SEQ ID NO: 1328578 - RNA, 19 nt, Artificial Sequence
  Description of Artificial Sequence: Synthetic oligonucleotide
  Sense strand starting at position 2521 of SEQ ID NO: 1242185
gaaagaugcuuguguuucu

SEQ ID NO: 1328579 - RNA, 19 nt, Artificial Sequence
  Description of Artificial Sequence: Synthetic oligonucleotide
  Antisense strand to SEQ ID NO: 1328578
agaaacacaagcaucuuuc

SEQ ID NO: 1328580 - RNA, 19 nt, Artificial Sequence
  Description of Artificial Sequence: Synthetic oligonucleotide
  Sense strand starting at position 2522 of SEQ ID NO: 1242185
aaagaugcuuguguuucua

SEQ ID NO: 1328581 - RNA, 19 nt, Artificial Sequence
  Description of Artificial Sequence: Synthetic oligonucleotide
  Antisense strand to SEQ ID NO: 1328580
uagaaacacaagcaucuuu

SEQ ID NO: 1328582 - RNA, 19 nt, Artificial Sequence
  Description of Artificial Sequence: Synthetic oligonucleotide
  Sense strand starting at position 2526 of SEQ ID NO: 1242185
augcuuguguuucuagcau

SEQ ID NO: 1328583 - RNA, 19 nt, Artificial Sequence
  Description of Artificial Sequence: Synthetic oligonucleotide
  Antisense strand to SEQ ID NO: 1328582
augcuagaaacacaagcau

SEQ ID NO: 1328584 - RNA, 19 nt, Artificial Sequence
  Description of Artificial Sequence: Synthetic oligonucleotide
  Sense strand starting at position 2532 of SEQ ID NO: 1242185
guguuucuagcauaaagca

SEQ ID NO: 1328585 - RNA, 19 nt, Artificial Sequence
  Description of Artificial Sequence: Synthetic oligonucleotide
  Antisense strand to SEQ ID NO: 1328584
ugcuuuaugcuagaaacac

SEQ ID NO: 1328586 - RNA, 19 nt, Artificial Sequence
  Description of Artificial Sequence: Synthetic oligonucleotide
  Sense strand starting at position 2555 of SEQ ID NO: 1242185
cuguguguucucccuguuu

SEQ ID NO: 1328587 - RNA, 19 nt, Artificial Sequence
  Description of Artificial Sequence: Synthetic oligonucleotide
  Antisense strand to SEQ ID NO: 1328586
aaacagggagaacacacag

SEQ ID NO: 1328588 - RNA, 19 nt, Artificial Sequence
  Description of Artificial Sequence: Synthetic oligonucleotide
  Sense strand starting at position 2557 of SEQ ID NO: 1242185
guguguucucccuguuucu

SEQ ID NO: 1328589 - RNA, 19 nt, Artificial Sequence
  Description of Artificial Sequence: Synthetic oligonucleotide
  Antisense strand to SEQ ID NO: 1328588
agaaacagggagaacacac

SEQ ID NO: 1328590 - RNA, 19 nt, Artificial Sequence
  Description of Artificial Sequence: Synthetic oligonucleotide
  Sense strand starting at position 2580 of SEQ ID NO: 1242185
uguucacugcagugggaaa

SEQ ID NO: 1328591 - RNA, 19 nt, Artificial Sequence
  Description of Artificial Sequence: Synthetic oligonucleotide
  Antisense strand to SEQ ID NO: 1328590
uuucccacugcagugaaca

SEQ ID NO: 1328592 - RNA, 19 nt, Artificial Sequence
  Description of Artificial Sequence: Synthetic oligonucleotide
  Sense strand starting at position 2608 of SEQ ID NO: 1242185
gcgguuugcagagcacuua

SEQ ID NO: 1328593 - RNA, 19 nt, Artificial Sequence
  Description of Artificial Sequence: Synthetic oligonucleotide
  Antisense strand to SEQ ID NO: 1328592
uaagugcucugcaaaccgc

SEQ ID NO: 1328594 - RNA, 19 nt, Artificial Sequence
  Description of Artificial Sequence: Synthetic oligonucleotide
  Sense strand starting at position 2862 of SEQ ID NO: 1242185
cugcguugugcccuacuua

SEQ ID NO: 1328595 - RNA, 19 nt, Artificial Sequence
  Description of Artificial Sequence: Synthetic oligonucleotide
  Antisense strand to SEQ ID NO: 1328594
uaaguagggcacaacgcag

SEQ ID NO: 1328596 - RNA, 19 nt, Artificial Sequence
  Description of Artificial Sequence: Synthetic oligonucleotide
  Sense strand starting at position 2873 of SEQ ID NO: 1242185
ccuacuuagcgcgaucuga

SEQ ID NO: 1328597 - RNA, 19 nt, Artificial Sequence
  Description of Artificial Sequence: Synthetic oligonucleotide
  Antisense strand to SEQ ID NO: 1328596
ucagaucgcgcuaaguagg

SEQ ID NO: 1328598 - RNA, 19 nt, Artificial Sequence
  Description of Artificial Sequence: Synthetic oligonucleotide
  Sense strand starting at position 2889 of SEQ ID NO: 1242185
ugauucugcucgggagcuu

SEQ ID NO: 1328599 - RNA, 19 nt, Artificial Sequence
  Description of Artificial Sequence: Synthetic oligonucleotide
  Antisense strand to SEQ ID NO: 1328598
aagcucccgagcagaauca

SEQ ID NO: 1328600 - RNA, 19 nt, Artificial Sequence
  Description of Artificial Sequence: Synthetic oligonucleotide
  Sense strand starting at position 2901 of SEQ ID NO: 1242185
ggagcuuccgggcaauauu

SEQ ID NO: 1328601 - RNA, 19 nt, Artificial Sequence
  Description of Artificial Sequence: Synthetic oligonucleotide
  Antisense strand to SEQ ID NO: 1328600
aauauugcccggaagcucc

SEQ ID NO: 1328602 - RNA, 19 nt, Artificial Sequence
  Description of Artificial Sequence: Synthetic oligonucleotide
  Sense strand starting at position 2964 of SEQ ID NO: 1242185
gggagagaguuggaucaca

SEQ ID NO: 1328603 - RNA, 19 nt, Artificial Sequence
  Description of Artificial Sequence: Synthetic oligonucleotide
  Antisense strand to SEQ ID NO: 1328602
ugugauccaacucucuccc

SEQ ID NO: 1328604 - RNA, 19 nt, Artificial Sequence
  Description of Artificial Sequence: Synthetic oligonucleotide
  Sense strand starting at position 3653 of SEQ ID NO: 1242185
ucggaauccuacuugagua

SEQ ID NO: 1328605 - RNA, 19 nt, Artificial Sequence
  Description of Artificial Sequence: Synthetic oligonucleotide
  Antisense strand to SEQ ID NO: 1328604
uacucaaguaggauuccga

SEQ ID NO: 1328606 - RNA, 19 nt, Artificial Sequence
  Description of Artificial Sequence: Synthetic oligonucleotide
  Sense strand starting at position 3654 of SEQ ID NO: 1242185
cggaauccuacuugaguaa

SEQ ID NO: 1328607 - RNA, 19 nt, Artificial Sequence
  Description of Artificial Sequence: Synthetic oligonucleotide
  Antisense strand to SEQ ID NO: 1328606
uuacucaaguaggauuccg

SEQ ID NO: 1328608 - RNA, 19 nt, Artificial Sequence
  Description of Artificial Sequence: Synthetic oligonucleotide
  Sense strand starting at position 3770 of SEQ ID NO: 1242185
gccuuaggucucugucguu

SEQ ID NO: 1328609 - RNA, 19 nt, Artificial Sequence
  Description of Artificial Sequence: Synthetic oligonucleotide
  Antisense strand to SEQ ID NO: 1328608
aacgacagagaccuaaggc

SEQ ID NO: 1328610 - RNA, 19 nt, Artificial Sequence
  Description of Artificial Sequence: Synthetic oligonucleotide
  Sense strand starting at position 184 of SEQ ID NO: 1242186
uggcaaacccauggucuua

SEQ ID NO: 1328611 - RNA, 19 nt, Artificial Sequence
  Description of Artificial Sequence: Synthetic oligonucleotide
  Antisense strand to SEQ ID NO: 1328610
uaagaccauggguuugcca

SEQ ID NO: 1328612 - RNA, 19 nt, Artificial Sequence
  Description of Artificial Sequence: Synthetic oligonucleotide
  Sense strand starting at position 280 of SEQ ID NO: 1242186
gaaagaaacuccgugaagu

SEQ ID NO: 1328613 - RNA, 19 nt, Artificial Sequence
  Description of Artificial Sequence: Synthetic oligonucleotide
  Antisense strand to SEQ ID NO: 1328612
acuucacggaguuucuuuc

SEQ ID NO: 1328614 - RNA, 19 nt, Artificial Sequence
  Description of Artificial Sequence: Synthetic oligonucleotide
  Sense strand starting at position 281 of SEQ ID NO: 1242186
aaagaaacuccgugaaguc

SEQ ID NO: 1328615 - RNA, 19 nt, Artificial Sequence
  Description of Artificial Sequence: Synthetic oligonucleotide
  Antisense strand to SEQ ID NO: 1328614
gacuucacggaguuucuuu

SEQ ID NO: 1328616 - RNA, 19 nt, Artificial Sequence
  Description of Artificial Sequence: Synthetic oligonucleotide
  Sense strand starting at position 397 of SEQ ID NO: 1242186
aagggauggucucugccuu

SEQ ID NO: 1328617 - RNA, 19 nt, Artificial Sequence
  Description of Artificial Sequence: Synthetic oligonucleotide
  Antisense strand to SEQ ID NO: 1328616
aaggcagagaccaucccuu

SEQ ID NO: 1328618 - RNA, 19 nt, Artificial Sequence
  Description of Artificial Sequence: Synthetic oligonucleotide
  Sense strand starting at position 447 of SEQ ID NO: 1242186
gauugagagucaguccaau

SEQ ID NO: 1328619 - RNA, 19 nt, Artificial Sequence
  Description of Artificial Sequence: Synthetic oligonucleotide
  Antisense strand to SEQ ID NO: 1328618
auuggacugacucucaauc

SEQ ID NO: 1328620 - RNA, 19 nt, Artificial Sequence
  Description of Artificial Sequence: Synthetic oligonucleotide
  Sense strand starting at position 467 of SEQ ID NO: 1242186
ugaaauagaagcuguguga

SEQ ID NO: 1328621 - RNA, 19 nt, Artificial Sequence
  Description of Artificial Sequence: Synthetic oligonucleotide
  Antisense strand to SEQ ID NO: 1328620
ucacacagcuucuauuuca

SEQ ID NO: 1328622 - RNA, 19 nt, Artificial Sequence
  Description of Artificial Sequence: Synthetic oligonucleotide
  Sense strand starting at position 593 of SEQ ID NO: 1242186
gacacuuaacagugguuau

SEQ ID NO: 1328623 - RNA, 19 nt, Artificial Sequence
  Description of Artificial Sequence: Synthetic oligonucleotide
  Antisense strand to SEQ ID NO: 1328622
auaaccacuguuaaguguc

SEQ ID NO: 1328624 - RNA, 19 nt, Artificial Sequence
  Description of Artificial Sequence: Synthetic oligonucleotide
  Sense strand starting at position 656 of SEQ ID NO: 1242186
ucuagaacuguuugaaaug

SEQ ID NO: 1328625 - RNA, 19 nt, Artificial Sequence
  Description of Artificial Sequence: Synthetic oligonucleotide
  Antisense strand to SEQ ID NO: 1328624
cauuucaaacaguucuaga

SEQ ID NO: 1328626 - RNA, 19 nt, Artificial Sequence
  Description of Artificial Sequence: Synthetic oligonucleotide
  Sense strand starting at position 795 of SEQ ID NO: 1242186
guggcuucuccagagucca

SEQ ID NO: 1328627 - RNA, 19 nt, Artificial Sequence
  Description of Artificial Sequence: Synthetic oligonucleotide
  Antisense strand to SEQ ID NO: 1328626
uggacucuggagaagccac

SEQ ID NO: 1328628 - RNA, 19 nt, Artificial Sequence
  Description of Artificial Sequence: Synthetic oligonucleotide
  Sense strand starting at position 816 of SEQ ID NO: 1242186
gaagaagggcuguagucau

SEQ ID NO: 1328629 - RNA, 19 nt, Artificial Sequence
  Description of Artificial Sequence: Synthetic oligonucleotide
  Antisense strand to SEQ ID NO: 1328628
augacuacagcccuucuuc

SEQ ID NO: 1328630 - RNA, 19 nt, Artificial Sequence
  Description of Artificial Sequence: Synthetic oligonucleotide
  Sense strand starting at position 842 of SEQ ID NO: 1242186
cugaaauguggccauaccu

SEQ ID NO: 1328631 - RNA, 19 nt, Artificial Sequence
  Description of Artificial Sequence: Synthetic oligonucleotide
  Antisense strand to SEQ ID NO: 1328630
agguauggccacauuucag

SEQ ID NO: 1328632 - RNA, 19 nt, Artificial Sequence
  Description of Artificial Sequence: Synthetic oligonucleotide
  Sense strand starting at position 924 of SEQ ID NO: 1242186
ucacuuucccagcaaaggu

SEQ ID NO: 1328633 - RNA, 19 nt, Artificial Sequence
  Description of Artificial Sequence: Synthetic oligonucleotide
  Antisense strand to SEQ ID NO: 1328632
accuuugcugggaaaguga

SEQ ID NO: 1328634 - RNA, 19 nt, Artificial Sequence
  Description of Artificial Sequence: Synthetic oligonucleotide
  Sense strand starting at position 1022 of SEQ ID NO: 1242186
uugugauaggccuagaggu

SEQ ID NO: 1328635 - RNA, 19 nt, Artificial Sequence
  Description of Artificial Sequence: Synthetic oligonucleotide
  Antisense strand to SEQ ID NO: 1328634
accucuaggccuaucacaa

SEQ ID NO: 1328636 - RNA, 19 nt, Artificial Sequence
  Description of Artificial Sequence: Synthetic oligonucleotide
  Sense strand starting at position 1054 of SEQ ID NO: 1242186
ugauauccuuccuuggaua

SEQ ID NO: 1328637 - RNA, 19 nt, Artificial Sequence
  Description of Artificial Sequence: Synthetic oligonucleotide
  Antisense strand to SEQ ID NO: 1328636
uauccaaggaaggauauca

SEQ ID NO: 1328638 - RNA, 19 nt, Artificial Sequence
  Description of Artificial Sequence: Synthetic oligonucleotide
  Sense strand starting at position 1087 of SEQ ID NO: 1242186
gcuugaaacucuccaagca

SEQ ID NO: 1328639 - RNA, 19 nt, Artificial Sequence
  Description of Artificial Sequence: Synthetic oligonucleotide
  Antisense strand to SEQ ID NO: 1328638
ugcuuggagaguuucaagc

SEQ ID NO: 1328640 - RNA, 19 nt, Artificial Sequence
  Description of Artificial Sequence: Synthetic oligonucleotide
  Sense strand starting at position 1188 of SEQ ID NO: 1242186
ggcgucaaagguucgugau

SEQ ID NO: 1328641 - RNA, 19 nt, Artificial Sequence
  Description of Artificial Sequence: Synthetic oligonucleotide
  Antisense strand to SEQ ID NO: 1328640
aucacgaaccuuugacgcc

SEQ ID NO: 1328642 - RNA, 19 nt, Artificial Sequence
  Description of Artificial Sequence: Synthetic oligonucleotide
  Sense strand starting at position 1656 of SEQ ID NO: 1242186
ccuggauccuccgccaaga

SEQ ID NO: 1328643 - RNA, 19 nt, Artificial Sequence
  Description of Artificial Sequence: Synthetic oligonucleotide
  Antisense strand to SEQ ID NO: 1328642
ucuuggcggaggauccagg

SEQ ID NO: 1328644 - RNA, 19 nt, Artificial Sequence
  Description of Artificial Sequence: Synthetic oligonucleotide
  Sense strand starting at position 1863 of SEQ ID NO: 1242186
ggagguuacagucgguaaa

SEQ ID NO: 1328645 - RNA, 19 nt, Artificial Sequence
  Description of Artificial Sequence: Synthetic oligonucleotide
  Antisense strand to SEQ ID NO: 1328644
uuuaccgacuguaaccucc

SEQ ID NO: 1328646 - RNA, 19 nt, Artificial Sequence
  Description of Artificial Sequence: Synthetic oligonucleotide
  Sense strand starting at position 1864 of SEQ ID NO: 1242186
gagguuacagucgguaaag

SEQ ID NO: 1328647 - RNA, 19 nt, Artificial Sequence
  Description of Artificial Sequence: Synthetic oligonucleotide
  Antisense strand to SEQ ID NO: 1328646
cuuuaccgacuguaaccuc

SEQ ID NO: 1328648 - RNA, 19 nt, Artificial Sequence
  Description of Artificial Sequence: Synthetic oligonucleotide
  Sense strand starting at position 1866 of SEQ ID NO: 1242186
gguuacagucgguaaagua

SEQ ID NO: 1328649 - RNA, 19 nt, Artificial Sequence
  Description of Artificial Sequence: Synthetic oligonucleotide
  Antisense strand to SEQ ID NO: 1328648
uacuuuaccgacuguaacc

SEQ ID NO: 1328650 - RNA, 19 nt, Artificial Sequence
  Description of Artificial Sequence: Synthetic oligonucleotide
  Sense strand starting at position 2218 of SEQ ID NO: 1242186
auuagaacucucgaaaguc

SEQ ID NO: 1328651 - RNA, 19 nt, Artificial Sequence
  Description of Artificial Sequence: Synthetic oligonucleotide
  Antisense strand to SEQ ID NO: 1328650
gacuuucgagaguucuaau

SEQ ID NO: 1328652 - RNA, 19 nt, Artificial Sequence
  Description of Artificial Sequence: Synthetic oligonucleotide
  Sense strand starting at position 2356 of SEQ ID NO: 1242186
gguguuugcuuaacgugga

SEQ ID NO: 1328653 - RNA, 19 nt, Artificial Sequence
  Description of Artificial Sequence: Synthetic oligonucleotide
  Antisense strand to SEQ ID NO: 1328652
uccacguuaagcaaacacc

SEQ ID NO: 1328654 - RNA, 19 nt, Artificial Sequence
  Description of Artificial Sequence: Synthetic oligonucleotide
  Sense strand starting at position 2408 of SEQ ID NO: 1242186
gacggagaucaggguguua

SEQ ID NO: 1328655 - RNA, 19 nt, Artificial Sequence
  Description of Artificial Sequence: Synthetic oligonucleotide
  Antisense strand to SEQ ID NO: 1328654
uaacacccugaucuccguc

SEQ ID NO: 1328656 - RNA, 19 nt, Artificial Sequence
  Description of Artificial Sequence: Synthetic oligonucleotide
  Sense strand starting at position 2462 of SEQ ID NO: 1242186
uacgacuuacucgauuaca

SEQ ID NO: 1328657 - RNA, 19 nt, Artificial Sequence
  Description of Artificial Sequence: Synthetic oligonucleotide
  Antisense strand to SEQ ID NO: 1328656
uguaaucgaguaagucgua

SEQ ID NO: 1328658 - RNA, 19 nt, Artificial Sequence
  Description of Artificial Sequence: Synthetic oligonucleotide
  Sense strand starting at position 2529 of SEQ ID NO: 1242186
uggaguuugagguggcaga

SEQ ID NO: 1328659 - RNA, 19 nt, Artificial Sequence
  Description of Artificial Sequence: Synthetic oligonucleotide
  Antisense strand to SEQ ID NO: 1328658
ucugccaccucaaacucca

SEQ ID NO: 1328660 - RNA, 19 nt, Artificial Sequence
  Description of Artificial Sequence: Synthetic oligonucleotide
  Sense strand starting at position 2530 of SEQ ID NO: 1242186
ggaguuugagguggcagaa

SEQ ID NO: 1328661 - RNA, 19 nt, Artificial Sequence
  Description of Artificial Sequence: Synthetic oligonucleotide
  Antisense strand to SEQ ID NO: 1328660
uucugccaccucaaacucc

SEQ ID NO: 1328662 - RNA, 19 nt, Artificial Sequence
  Description of Artificial Sequence: Synthetic oligonucleotide
  Sense strand starting at position 2549 of SEQ ID NO: 1242186
cagucauggcauugacgau

SEQ ID NO: 1328663 - RNA, 19 nt, Artificial Sequence
  Description of Artificial Sequence: Synthetic oligonucleotide
  Antisense strand to SEQ ID NO: 1328662
aucgucaaugccaugacug

SEQ ID NO: 1328664 - RNA, 19 nt, Artificial Sequence
  Description of Artificial Sequence: Synthetic oligonucleotide
  Sense strand starting at position 2701 of SEQ ID NO: 1242186
ccaagagucuuugucuaua

SEQ ID NO: 1328665 - RNA, 19 nt, Artificial Sequence
  Description of Artificial Sequence: Synthetic oligonucleotide
  Antisense strand to SEQ ID NO: 1328664
uauagacaaagacucuugg

SEQ ID NO: 1328666 - RNA, 19 nt, Artificial Sequence
  Description of Artificial Sequence: Synthetic oligonucleotide
  Sense strand starting at position 2744 of SEQ ID NO: 1242186
acacaagauuagcccugau

SEQ ID NO: 1328667 - RNA, 19 nt, Artificial Sequence
  Description of Artificial Sequence: Synthetic oligonucleotide
  Antisense strand to SEQ ID NO: 1328666
aucagggcuaaucuugugu

SEQ ID NO: 1328668 - RNA, 19 nt, Artificial Sequence
  Description of Artificial Sequence: Synthetic oligonucleotide
  Sense strand starting at position 2770 of SEQ ID NO: 1242186
uggaaauacugaccaaguu

SEQ ID NO: 1328669 - RNA, 19 nt, Artificial Sequence
  Description of Artificial Sequence: Synthetic oligonucleotide
  Antisense strand to SEQ ID NO: 1328668
aacuuggucaguauuucca

SEQ ID NO: 1328670 - RNA, 19 nt, Artificial Sequence
  Description of Artificial Sequence: Synthetic oligonucleotide
  Sense strand starting at position 2813 of SEQ ID NO: 1242186
acggaaaggugacuaagua

SEQ ID NO: 1328671 - RNA, 19 nt, Artificial Sequence
  Description of Artificial Sequence: Synthetic oligonucleotide
  Antisense strand to SEQ ID NO: 1328670
uacuuagucaccuuuccgu

SEQ ID NO: 1328672 - RNA, 19 nt, Artificial Sequence
  Description of Artificial Sequence: Synthetic oligonucleotide
  Sense strand starting at position 3000 of SEQ ID NO: 1242186
uugggacuuucuccugaac

SEQ ID NO: 1328673 - RNA, 19 nt, Artificial Sequence
  Description of Artificial Sequence: Synthetic oligonucleotide
  Antisense strand to SEQ ID NO: 1328672
guucaggagaaagucccaa

SEQ ID NO: 1328674 - RNA, 19 nt, Artificial Sequence
  Description of Artificial Sequence: Synthetic oligonucleotide
  Sense strand starting at position 3013 of SEQ ID NO: 1242186
cugaacuggccuugaaauc

SEQ ID NO: 1328675 - RNA, 19 nt, Artificial Sequence
  Description of Artificial Sequence: Synthetic oligonucleotide
  Antisense strand to SEQ ID NO: 1328674
gauuucaaggccaguucag

SEQ ID NO: 1328676 - RNA, 19 nt, Artificial Sequence
  Description of Artificial Sequence: Synthetic oligonucleotide
  Sense strand starting at position 3046 of SEQ ID NO: 1242186
aggcaagugcucuggacaa

SEQ ID NO: 1328677 - RNA, 19 nt, Artificial Sequence
  Description of Artificial Sequence: Synthetic oligonucleotide
  Antisense strand to SEQ ID NO: 1328676
uuguccagagcacuugccu

SEQ ID NO: 1328678 - RNA, 19 nt, Artificial Sequence
  Description of Artificial Sequence: Synthetic oligonucleotide
  Sense strand starting at position 3576 of SEQ ID NO: 1242186
acuccagugugggucauaa

SEQ ID NO: 1328679 - RNA, 19 nt, Artificial Sequence
  Description of Artificial Sequence: Synthetic oligonucleotide
  Antisense strand to SEQ ID NO: 1328678
uuaugacccacacuggagu

SEQ ID NO: 1328680 - RNA, 19 nt, Artificial Sequence
  Description of Artificial Sequence: Synthetic oligonucleotide
  Sense strand starting at position 3734 of SEQ ID NO: 1242186
cacagaacauugcugguua

SEQ ID NO: 1328681 - RNA, 19 nt, Artificial Sequence
  Description of Artificial Sequence: Synthetic oligonucleotide
  Antisense strand to SEQ ID NO: 1328680
uaaccagcaauguucugug

SEQ ID NO: 1328682 - RNA, 19 nt, Artificial Sequence
  Description of Artificial Sequence: Synthetic oligonucleotide
  Sense strand starting at position 3736 of SEQ ID NO: 1242186
cagaacauugcugguuaca

SEQ ID NO: 1328683 - RNA, 19 nt, Artificial Sequence
  Description of Artificial Sequence: Synthetic oligonucleotide
  Antisense strand to SEQ ID NO: 1328682
uguaaccagcaauguucug

SEQ ID NO: 1328684 - RNA, 19 nt, Artificial Sequence
  Description of Artificial Sequence: Synthetic oligonucleotide
  Sense strand starting at position 3738 of SEQ ID NO: 1242186
gaacauugcugguuacaac

SEQ ID NO: 1328685 - RNA, 19 nt, Artificial Sequence
  Description of Artificial Sequence: Synthetic oligonucleotide
  Antisense strand to SEQ ID NO: 1328684
guuguaaccagcaauguuc

SEQ ID NO: 1328686 - RNA, 19 nt, Artificial Sequence
  Description of Artificial Sequence: Synthetic oligonucleotide
  Sense strand starting at position 3756 of SEQ ID NO: 1242186
cuaagacuugcguaauggu

SEQ ID NO: 1328687 - RNA, 19 nt, Artificial Sequence
  Description of Artificial Sequence: Synthetic oligonucleotide
  Antisense strand to SEQ ID NO: 1328686
accauuacgcaagucuuag

SEQ ID NO: 1328688 - RNA, 19 nt, Artificial Sequence
  Description of Artificial Sequence: Synthetic oligonucleotide
  Sense strand starting at position 3826 of SEQ ID NO: 1242186
ucagaaaguccagguuaac

SEQ ID NO: 1328689 - RNA, 19 nt, Artificial Sequence
  Description of Artificial Sequence: Synthetic oligonucleotide
  Antisense strand to SEQ ID NO: 1328688
guuaaccuggacuuucuga

SEQ ID NO: 1328690 - RNA, 19 nt, Artificial Sequence
  Description of Artificial Sequence: Synthetic oligonucleotide
  Sense strand starting at position 84 of SEQ ID NO: 1242187
gugggcugucuggaggaua

SEQ ID NO: 1328691 - RNA, 19 nt, Artificial Sequence
  Description of Artificial Sequence: Synthetic oligonucleotide
  Antisense strand to SEQ ID NO: 1328690
uauccuccagacagcccac

SEQ ID NO: 1328692 - RNA, 19 nt, Artificial Sequence
  Description of Artificial Sequence: Synthetic oligonucleotide
  Sense strand starting at position 162 of SEQ ID NO: 1242187
cuuucuggugcuuggacaa

SEQ ID NO: 1328693 - RNA, 19 nt, Artificial Sequence
  Description of Artificial Sequence: Synthetic oligonucleotide
  Antisense strand to SEQ ID NO: 1328692
uuguccaagcaccagaaag

SEQ ID NO: 1328694 - RNA, 19 nt, Artificial Sequence
  Description of Artificial Sequence: Synthetic oligonucleotide
  Sense strand starting at position 353 of SEQ ID NO: 1242187
cuauuuacuugagaauuga

SEQ ID NO: 1328695 - RNA, 19 nt, Artificial Sequence
  Description of Artificial Sequence: Synthetic oligonucleotide
  Antisense strand to SEQ ID NO: 1328694
ucaauucucaaguaaauag

SEQ ID NO: 1328696 - RNA, 19 nt, Artificial Sequence
  Description of Artificial Sequence: Synthetic oligonucleotide
  Sense strand starting at position 526 of SEQ ID NO: 1242187
ucauaaauuugagguagga

SEQ ID NO: 1328697 - RNA, 19 nt, Artificial Sequence
  Description of Artificial Sequence: Synthetic oligonucleotide
  Antisense strand to SEQ ID NO: 1328696
uccuaccucaaauuuauga

SEQ ID NO: 1328698 - RNA, 19 nt, Artificial Sequence
  Description of Artificial Sequence: Synthetic oligonucleotide
  Sense strand starting at position 643 of SEQ ID NO: 1242187
agacuucuaugaucccagu

SEQ ID NO: 1328699 - RNA, 19 nt, Artificial Sequence
  Description of Artificial Sequence: Synthetic oligonucleotide
  Antisense strand to SEQ ID NO: 1328698
acugggaucauagaagucu

SEQ ID NO: 1328700 - RNA, 19 nt, Artificial Sequence
  Description of Artificial Sequence: Synthetic oligonucleotide
  Sense strand starting at position 678 of SEQ ID NO: 1242187
gguccuguuccucacucua

SEQ ID NO: 1328701 - RNA, 19 nt, Artificial Sequence
  Description of Artificial Sequence: Synthetic oligonucleotide
  Antisense strand to SEQ ID NO: 1328700
uagagugaggaacaggacc

SEQ ID NO: 1328702 - RNA, 19 nt, Artificial Sequence
  Description of Artificial Sequence: Synthetic oligonucleotide
  Sense strand starting at position 689 of SEQ ID NO: 1242187
ucacucuaucccugggagu

SEQ ID NO: 1328703 - RNA, 19 nt, Artificial Sequence
  Description of Artificial Sequence: Synthetic oligonucleotide
  Antisense strand to SEQ ID NO: 1328702
acucccagggauagaguga

SEQ ID NO: 1328704 - RNA, 19 nt, Artificial Sequence
  Description of Artificial Sequence: Synthetic oligonucleotide
  Sense strand starting at position 706 of SEQ ID NO: 1242187
gugguucugacuugaaauu

SEQ ID NO: 1328705 - RNA, 19 nt, Artificial Sequence
  Description of Artificial Sequence: Synthetic oligonucleotide
  Antisense strand to SEQ ID NO: 1328704
aauuucaagucagaaccac

SEQ ID NO: 1328706 - RNA, 19 nt, Artificial Sequence
  Description of Artificial Sequence: Synthetic oligonucleotide
  Sense strand starting at position 1212 of SEQ ID NO: 1242187
gguugacacgacuggaaau

SEQ ID NO: 1328707 - RNA, 19 nt, Artificial Sequence
  Description of Artificial Sequence: Synthetic oligonucleotide
  Antisense strand to SEQ ID NO: 1328706
auuuccagucgugucaacc

SEQ ID NO: 1328708 - RNA, 19 nt, Artificial Sequence
  Description of Artificial Sequence: Synthetic oligonucleotide
  Sense strand starting at position 1355 of SEQ ID NO: 1242187
accgguuggucuguaagga

SEQ ID NO: 1328709 - RNA, 19 nt, Artificial Sequence
  Description of Artificial Sequence: Synthetic oligonucleotide
  Antisense strand to SEQ ID NO: 1328708
uccuuacagaccaaccggu

SEQ ID NO: 1328710 - RNA, 19 nt, Artificial Sequence
  Description of Artificial Sequence: Synthetic oligonucleotide
  Sense strand starting at position 1377 of SEQ ID NO: 1242187
gcgugccacgucuuaguga

SEQ ID NO: 1328711 - RNA, 19 nt, Artificial Sequence
  Description of Artificial Sequence: Synthetic oligonucleotide
  Antisense strand to SEQ ID NO: 1328710
ucacuaagacguggcacgc

SEQ ID NO: 1328712 - RNA, 19 nt, Artificial Sequence
  Description of Artificial Sequence: Synthetic oligonucleotide
  Sense strand starting at position 1563 of SEQ ID NO: 1242187
uucugccucugaccagaaa

SEQ ID NO: 1328713 - RNA, 19 nt, Artificial Sequence
  Description of Artificial Sequence: Synthetic oligonucleotide
  Antisense strand to SEQ ID NO: 1328712
uuucuggucagaggcagaa

SEQ ID NO: 1328714 - RNA, 19 nt, Artificial Sequence
  Description of Artificial Sequence: Synthetic oligonucleotide
  Sense strand starting at position 1566 of SEQ ID NO: 1242187
ugccucugaccagaaacau

SEQ ID NO: 1328715 - RNA, 19 nt, Artificial Sequence
  Description of Artificial Sequence: Synthetic oligonucleotide
  Antisense strand to SEQ ID NO: 1328714
auguuucuggucagaggca

SEQ ID NO: 1328716 - RNA, 19 nt, Artificial Sequence
  Description of Artificial Sequence: Synthetic oligonucleotide
  Sense strand starting at position 1802 of SEQ ID NO: 1242187
aguucuagaugugccagau

SEQ ID NO: 1328717 - RNA, 19 nt, Artificial Sequence
  Description of Artificial Sequence: Synthetic oligonucleotide
  Antisense strand to SEQ ID NO: 1328716
aucuggcacaucuagaacu

SEQ ID NO: 1328718 - RNA, 19 nt, Artificial Sequence
  Description of Artificial Sequence: Synthetic oligonucleotide
  Sense strand starting at position 2121 of SEQ ID NO: 1242187
gucugagcuccagugcuuu

SEQ ID NO: 1328719 - RNA, 19 nt, Artificial Sequence
  Description of Artificial Sequence: Synthetic oligonucleotide
  Antisense strand to SEQ ID NO: 1328718
aaagcacuggagcucagac

SEQ ID NO: 1328720 - RNA, 19 nt, Artificial Sequence
  Description of Artificial Sequence: Synthetic oligonucleotide
  Sense strand starting at position 2194 of SEQ ID NO: 1242187
uguccuauggcccauagga

SEQ ID NO: 1328721 - RNA, 19 nt, Artificial Sequence
  Description of Artificial Sequence: Synthetic oligonucleotide
  Antisense strand to SEQ ID NO: 1328720
uccuaugggccauaggaca

SEQ ID NO: 1328722 - RNA, 19 nt, Artificial Sequence
  Description of Artificial Sequence: Synthetic oligonucleotide
  Sense strand starting at position 2553 of SEQ ID NO: 1242187
guuagaggguaguuugaaa

SEQ ID NO: 1328723 - RNA, 19 nt, Artificial Sequence
  Description of Artificial Sequence: Synthetic oligonucleotide
  Antisense strand to SEQ ID NO: 1328722
uuucaaacuacccucuaac

SEQ ID NO: 1328724 - RNA, 19 nt, Artificial Sequence
  Description of Artificial Sequence: Synthetic oligonucleotide
  Sense strand starting at position 2565 of SEQ ID NO: 1242187
uuugaaauuccggagugga

SEQ ID NO: 1328725 - RNA, 19 nt, Artificial Sequence
  Description of Artificial Sequence: Synthetic oligonucleotide
  Antisense strand to SEQ ID NO: 1328724
uccacuccggaauuucaaa

SEQ ID NO: 1328726 - RNA, 19 nt, Artificial Sequence
  Description of Artificial Sequence: Synthetic oligonucleotide
  Sense strand starting at position 2688 of SEQ ID NO: 1242187
ugggauucuugagucauug

SEQ ID NO: 1328727 - RNA, 19 nt, Artificial Sequence
  Description of Artificial Sequence: Synthetic oligonucleotide
  Antisense strand to SEQ ID NO: 1328726
caaugacucaagaauccca

SEQ ID NO: 1328728 - RNA, 19 nt, Artificial Sequence
  Description of Artificial Sequence: Synthetic oligonucleotide
  Sense strand starting at position 2692 of SEQ ID NO: 1242187
auucuugagucauuggaua

SEQ ID NO: 1328729 - RNA, 19 nt, Artificial Sequence
  Description of Artificial Sequence: Synthetic oligonucleotide
  Antisense strand to SEQ ID NO: 1328728
uauccaaugacucaagaau

SEQ ID NO: 1328730 - RNA, 19 nt, Artificial Sequence
  Description of Artificial Sequence: Synthetic oligonucleotide
  Sense strand starting at position 2694 of SEQ ID NO: 1242187
ucuugagucauuggauaug

SEQ ID NO: 1328731 - RNA, 19 nt, Artificial Sequence
  Description of Artificial Sequence: Synthetic oligonucleotide
  Antisense strand to SEQ ID NO: 1328730
cauauccaaugacucaaga

SEQ ID NO: 1328732 - RNA, 19 nt, Artificial Sequence
  Description of Artificial Sequence: Synthetic oligonucleotide
  Sense strand starting at position 2738 of SEQ ID NO: 1242187
ggagcuuucugccuuacag

SEQ ID NO: 1328733 - RNA, 19 nt, Artificial Sequence
  Description of Artificial Sequence: Synthetic oligonucleotide
  Antisense strand to SEQ ID NO: 1328732
cuguaaggcagaaagcucc

SEQ ID NO: 1328734 - RNA, 19 nt, Artificial Sequence
  Description of Artificial Sequence: Synthetic oligonucleotide
  Sense strand starting at position 2749 of SEQ ID NO: 1242187
ccuuacagugaaggaguua

SEQ ID NO: 1328735 - RNA, 19 nt, Artificial Sequence
  Description of Artificial Sequence: Synthetic oligonucleotide
  Antisense strand to SEQ ID NO: 1328734
uaacuccuucacuguaagg

SEQ ID NO: 1328736 - RNA, 19 nt, Artificial Sequence
  Description of Artificial Sequence: Synthetic oligonucleotide
  Sense strand starting at position 2808 of SEQ ID NO: 1242187
aagguuguaggccaauuau

SEQ ID NO: 1328737 - RNA, 19 nt, Artificial Sequence
  Description of Artificial Sequence: Synthetic oligonucleotide
  Antisense strand to SEQ ID NO: 1328736
auaauuggccuacaaccuu

SEQ ID NO: 1328738 - RNA, 19 nt, Artificial Sequence
  Description of Artificial Sequence: Synthetic oligonucleotide
  Sense strand starting at position 2907 of SEQ ID NO: 1242187
gucucuuugcuguuucuau

SEQ ID NO: 1328739 - RNA, 19 nt, Artificial Sequence
  Description of Artificial Sequence: Synthetic oligonucleotide
  Antisense strand to SEQ ID NO: 1328738
auagaaacagcaaagagac

SEQ ID NO: 1328740 - RNA, 19 nt, Artificial Sequence
  Description of Artificial Sequence: Synthetic oligonucleotide
  Sense strand starting at position 2993 of SEQ ID NO: 1242187
aguaaagcgcucuaggacu

SEQ ID NO: 1328741 - RNA, 19 nt, Artificial Sequence
  Description of Artificial Sequence: Synthetic oligonucleotide
  Antisense strand to SEQ ID NO: 1328740
aguccuagagcgcuuuacu

SEQ ID NO: 1328742 - RNA, 19 nt, Artificial Sequence
  Description of Artificial Sequence: Synthetic oligonucleotide
  Sense strand starting at position 3000 of SEQ ID NO: 1242187
cgcucuaggacucaaagga

SEQ ID NO: 1328743 - RNA, 19 nt, Artificial Sequence
  Description of Artificial Sequence: Synthetic oligonucleotide
  Antisense strand to SEQ ID NO: 1328742
uccuuugaguccuagagcg

SEQ ID NO: 1328744 - RNA, 19 nt, Artificial Sequence
  Description of Artificial Sequence: Synthetic oligonucleotide
  Sense strand starting at position 3056 of SEQ ID NO: 1242187
ggaugcucaugcucuuaca

SEQ ID NO: 1328745 - RNA, 19 nt, Artificial Sequence
  Description of Artificial Sequence: Synthetic oligonucleotide
  Antisense strand to SEQ ID NO: 1328744
uguaagagcaugagcaucc

SEQ ID NO: 1328746 - RNA, 19 nt, Artificial Sequence
  Description of Artificial Sequence: Synthetic oligonucleotide
  Sense strand starting at position 3230 of SEQ ID NO: 1242187
uagucugugcucucagcau

SEQ ID NO: 1328747 - RNA, 19 nt, Artificial Sequence
  Description of Artificial Sequence: Synthetic oligonucleotide
  Antisense strand to SEQ ID NO: 1328746
augcugagagcacagacua

SEQ ID NO: 1328748 - RNA, 19 nt, Artificial Sequence
  Description of Artificial Sequence: Synthetic oligonucleotide
  Sense strand starting at position 3328 of SEQ ID NO: 1242187
gggagcaauccuugcuuag

SEQ ID NO: 1328749 - RNA, 19 nt, Artificial Sequence
  Description of Artificial Sequence: Synthetic oligonucleotide
  Antisense strand to SEQ ID NO: 1328748
cuaagcaaggauugcuccc

SEQ ID NO: 1328750 - RNA, 19 nt, Artificial Sequence
  Description of Artificial Sequence: Synthetic oligonucleotide
  Sense strand starting at position 3331 of SEQ ID NO: 1242187
agcaauccuugcuuagauc

SEQ ID NO: 1328751 - RNA, 19 nt, Artificial Sequence
  Description of Artificial Sequence: Synthetic oligonucleotide
  Antisense strand to SEQ ID NO: 1328750
gaucuaagcaaggauugcu

SEQ ID NO: 1328752 - RNA, 19 nt, Artificial Sequence
  Description of Artificial Sequence: Synthetic oligonucleotide
  Sense strand starting at position 3353 of SEQ ID NO: 1242187
ggaugcaaaucugcgacaa

SEQ ID NO: 1328753 - RNA, 19 nt, Artificial Sequence
  Description of Artificial Sequence: Synthetic oligonucleotide
  Antisense strand to SEQ ID NO: 1328752
uugucgcagauuugcaucc

SEQ ID NO: 1328754 - RNA, 19 nt, Artificial Sequence
  Description of Artificial Sequence: Synthetic oligonucleotide
  Sense strand starting at position 3354 of SEQ ID NO: 1242187
gaugcaaaucugcgacaau

SEQ ID NO: 1328755 - RNA, 19 nt, Artificial Sequence
  Description of Artificial Sequence: Synthetic oligonucleotide
  Antisense strand to SEQ ID NO: 1328754
auugucgcagauuugcauc

SEQ ID NO: 1328756 - RNA, 19 nt, Artificial Sequence
  Description of Artificial Sequence: Synthetic oligonucleotide
  Sense strand starting at position 3432 of SEQ ID NO: 1242187
cugaguucugagcaucaca

SEQ ID NO: 1328757 - RNA, 19 nt, Artificial Sequence
  Description of Artificial Sequence: Synthetic oligonucleotide
  Antisense strand to SEQ ID NO: 1328756
ugugaugcucagaacucag

SEQ ID NO: 1328758 - RNA, 19 nt, Artificial Sequence
  Description of Artificial Sequence: Synthetic oligonucleotide
  Sense strand starting at position 3544 of SEQ ID NO: 1242187
guguguuaggagggaaacu

SEQ ID NO: 1328759 - RNA, 19 nt, Artificial Sequence
  Description of Artificial Sequence: Synthetic oligonucleotide
  Antisense strand to SEQ ID NO: 1328758
aguuucccuccuaacacac

SEQ ID NO: 1328760 - RNA, 19 nt, Artificial Sequence
  Description of Artificial Sequence: Synthetic oligonucleotide
  Sense strand starting at position 3570 of SEQ ID NO: 1242187
acauuuaguuuacgaacaa

SEQ ID NO: 1328761 - RNA, 19 nt, Artificial Sequence
  Description of Artificial Sequence: Synthetic oligonucleotide
  Antisense strand to SEQ ID NO: 1328760
uuguucguaaacuaaaugu

SEQ ID NO: 1328762 - RNA, 19 nt, Artificial Sequence
  Description of Artificial Sequence: Synthetic oligonucleotide
  Sense strand starting at position 3759 of SEQ ID NO: 1242187
cugcaaugaaauggugaga

SEQ ID NO: 1328763 - RNA, 19 nt, Artificial Sequence
  Description of Artificial Sequence: Synthetic oligonucleotide
  Antisense strand to SEQ ID NO: 1328762
ucucaccauuucauugcag

SEQ ID NO: 1328764 - RNA, 19 nt, Artificial Sequence
  Description of Artificial Sequence: Synthetic oligonucleotide
  Sense strand starting at position 3933 of SEQ ID NO: 1242187
uuaguaccauccuccgaua

SEQ ID NO: 1328765 - RNA, 19 nt, Artificial Sequence
  Description of Artificial Sequence: Synthetic oligonucleotide
  Antisense strand to SEQ ID NO: 1328764
uaucggaggaugguacuaa

SEQ ID NO: 1328766 - RNA, 19 nt, Artificial Sequence
  Description of Artificial Sequence: Synthetic oligonucleotide
  Sense strand starting at position 3935 of SEQ ID NO: 1242187
aguaccauccuccgauaau

SEQ ID NO: 1328767 - RNA, 19 nt, Artificial Sequence
  Description of Artificial Sequence: Synthetic oligonucleotide
  Antisense strand to SEQ ID NO: 1328766
auuaucggaggaugguacu

SEQ ID NO: 1328768 - RNA, 19 nt, Artificial Sequence
  Description of Artificial Sequence: Synthetic oligonucleotide
  Sense strand starting at position 3953 of SEQ ID NO: 1242187
ugcugugagguuugaauug

SEQ ID NO: 1328769 - RNA, 19 nt, Artificial Sequence
  Description of Artificial Sequence: Synthetic oligonucleotide
  Antisense strand to SEQ ID NO: 1328768
caauucaaaccucacagca

SEQ ID NO: 1328770 - RNA, 19 nt, Artificial Sequence
  Description of Artificial Sequence: Synthetic oligonucleotide
  Sense strand starting at position 8 of SEQ ID NO: 1242188
cuauacaagucaguauuau

SEQ ID NO: 1328771 - RNA, 19 nt, Artificial Sequence
  Description of Artificial Sequence: Synthetic oligonucleotide
  Antisense strand to SEQ ID NO: 1328770
auaauacugacuuguauag

SEQ ID NO: 1328772 - RNA, 19 nt, Artificial Sequence
  Description of Artificial Sequence: Synthetic oligonucleotide
  Sense strand starting at position 126 of SEQ ID NO: 1242188
cgaccuugugaucauuaca

SEQ ID NO: 1328773 - RNA, 19 nt, Artificial Sequence
  Description of Artificial Sequence: Synthetic oligonucleotide
  Antisense strand to SEQ ID NO: 1328772
uguaaugaucacaaggucg

SEQ ID NO: 1328774 - RNA, 19 nt, Artificial Sequence
  Description of Artificial Sequence: Synthetic oligonucleotide
  Sense strand starting at position 131 of SEQ ID NO: 1242188
uugugaucauuacagggau

SEQ ID NO: 1328775 - RNA, 19 nt, Artificial Sequence
  Description of Artificial Sequence: Synthetic oligonucleotide
  Antisense strand to SEQ ID NO: 1328774
aucccuguaaugaucacaa

SEQ ID NO: 1328776 - RNA, 19 nt, Artificial Sequence
  Description of Artificial Sequence: Synthetic oligonucleotide
  Sense strand starting at position 386 of SEQ ID NO: 1242188
guccaagccuauucugauu

SEQ ID NO: 1328777 - RNA, 19 nt, Artificial Sequence
  Description of Artificial Sequence: Synthetic oligonucleotide
  Antisense strand to SEQ ID NO: 1328776
aaucagaauaggcuuggac

SEQ ID NO: 1328778 - RNA, 19 nt, Artificial Sequence
  Description of Artificial Sequence: Synthetic oligonucleotide
  Sense strand starting at position 527 of SEQ ID NO: 1242188
cuggcuauuucucuagcua

SEQ ID NO: 1328779 - RNA, 19 nt, Artificial Sequence
  Description of Artificial Sequence: Synthetic oligonucleotide
  Antisense strand to SEQ ID NO: 1328778
uagcuagagaaauagccag

SEQ ID NO: 1328780 - RNA, 19 nt, Artificial Sequence
  Description of Artificial Sequence: Synthetic oligonucleotide
  Sense strand starting at position 551 of SEQ ID NO: 1242188
gcagcuuucccucacauag

SEQ ID NO: 1328781 - RNA, 19 nt, Artificial Sequence
  Description of Artificial Sequence: Synthetic oligonucleotide
  Antisense strand to SEQ ID NO: 1328780
cuaugugagggaaagcugc

SEQ ID NO: 1328782 - RNA, 19 nt, Artificial Sequence
  Description of Artificial Sequence: Synthetic oligonucleotide
  Sense strand starting at position 647 of SEQ ID NO: 1242188
gaaauaaagugcucguuug

SEQ ID NO: 1328783 - RNA, 19 nt, Artificial Sequence
  Description of Artificial Sequence: Synthetic oligonucleotide
  Antisense strand to SEQ ID NO: 1328782
caaacgagcacuuuauuuc

SEQ ID NO: 1328784 - RNA, 19 nt, Artificial Sequence
  Description of Artificial Sequence: Synthetic oligonucleotide
  Sense strand starting at position 648 of SEQ ID NO: 1242188
aaauaaagugcucguuugu

SEQ ID NO: 1328785 - RNA, 19 nt, Artificial Sequence
  Description of Artificial Sequence: Synthetic oligonucleotide
  Antisense strand to SEQ ID NO: 1328784
acaaacgagcacuuuauuu

SEQ ID NO: 1328786 - RNA, 19 nt, Artificial Sequence
  Description of Artificial Sequence: Synthetic oligonucleotide
  Sense strand starting at position 778 of SEQ ID NO: 1242188
ggaaaucauuagugagaaa

SEQ ID NO: 1328787 - RNA, 19 nt, Artificial Sequence
  Description of Artificial Sequence: Synthetic oligonucleotide
  Antisense strand to SEQ ID NO: 1328786
uuucucacuaaugauuucc

SEQ ID NO: 1328788 - RNA, 19 nt, Artificial Sequence
  Description of Artificial Sequence: Synthetic oligonucleotide
  Sense strand starting at position 840 of SEQ ID NO: 1242188
agccgcuuucuugagcaau

SEQ ID NO: 1328789 - RNA, 19 nt, Artificial Sequence
  Description of Artificial Sequence: Synthetic oligonucleotide
  Antisense strand to SEQ ID NO: 1328788
auugcucaagaaagcggcu

SEQ ID NO: 1328790 - RNA, 19 nt, Artificial Sequence
  Description of Artificial Sequence: Synthetic oligonucleotide
  Sense strand starting at position 842 of SEQ ID NO: 1242188
ccgcuuucuugagcaauuu

SEQ ID NO: 1328791 - RNA, 19 nt, Artificial Sequence
  Description of Artificial Sequence: Synthetic oligonucleotide
  Antisense strand to SEQ ID NO: 1328790
aaauugcucaagaaagcgg

SEQ ID NO: 1328792 - RNA, 19 nt, Artificial Sequence
  Description of Artificial Sequence: Synthetic oligonucleotide
  Sense strand starting at position 843 of SEQ ID NO: 1242188
cgcuuucuugagcaauuuc

SEQ ID NO: 1328793 - RNA, 19 nt, Artificial Sequence
  Description of Artificial Sequence: Synthetic oligonucleotide
  Antisense strand to SEQ ID NO: 1328792
gaaauugcucaagaaagcg

SEQ ID NO: 1328794 - RNA, 19 nt, Artificial Sequence
  Description of Artificial Sequence: Synthetic oligonucleotide
  Sense strand starting at position 851 of SEQ ID NO: 1242188
ugagcaauuucccaggaag

SEQ ID NO: 1328795 - RNA, 19 nt, Artificial Sequence
  Description of Artificial Sequence: Synthetic oligonucleotide
  Antisense strand to SEQ ID NO: 1328794
cuuccugggaaauugcuca

SEQ ID NO: 1328796 - RNA, 19 nt, Artificial Sequence
  Description of Artificial Sequence: Synthetic oligonucleotide
  Sense strand starting at position 1102 of SEQ ID NO: 1242188
gccagacucccagaugauc

SEQ ID NO: 1328797 - RNA, 19 nt, Artificial Sequence
  Description of Artificial Sequence: Synthetic oligonucleotide
  Antisense strand to SEQ ID NO: 1328796
gaucaucugggagucuggc

SEQ ID NO: 1328798 - RNA, 19 nt, Artificial Sequence
  Description of Artificial Sequence: Synthetic oligonucleotide
  Sense strand starting at position 1110 of SEQ ID NO: 1242188
cccagaugaucacauuuag

SEQ ID NO: 1328799 - RNA, 19 nt, Artificial Sequence
  Description of Artificial Sequence: Synthetic oligonucleotide
  Antisense strand to SEQ ID NO: 1328798
cuaaaugugaucaucuggg

SEQ ID NO: 1328800 - RNA, 19 nt, Artificial Sequence
  Description of Artificial Sequence: Synthetic oligonucleotide
  Sense strand starting at position 1116 of SEQ ID NO: 1242188
ugaucacauuuagaacaga

SEQ ID NO: 1328801 - RNA, 19 nt, Artificial Sequence
  Description of Artificial Sequence: Synthetic oligonucleotide
  Antisense strand to SEQ ID NO: 1328800
ucuguucuaaaugugauca

SEQ ID NO: 1328802 - RNA, 19 nt, Artificial Sequence
  Description of Artificial Sequence: Synthetic oligonucleotide
  Sense strand starting at position 1256 of SEQ ID NO: 1242188
uccgcuaacuggucugagu

SEQ ID NO: 1328803 - RNA, 19 nt, Artificial Sequence
  Description of Artificial Sequence: Synthetic oligonucleotide
  Antisense strand to SEQ ID NO: 1328802
acucagaccaguuagcgga

SEQ ID NO: 1328804 - RNA, 19 nt, Artificial Sequence
  Description of Artificial Sequence: Synthetic oligonucleotide
  Sense strand starting at position 1258 of SEQ ID NO: 1242188
cgcuaacuggucugaguca

SEQ ID NO: 1328805 - RNA, 19 nt, Artificial Sequence
  Description of Artificial Sequence: Synthetic oligonucleotide
  Antisense strand to SEQ ID NO: 1328804
ugacucagaccaguuagcg

SEQ ID NO: 1328806 - RNA, 19 nt, Artificial Sequence
  Description of Artificial Sequence: Synthetic oligonucleotide
  Sense strand starting at position 1277 of SEQ ID NO: 1242188
ggaacacaaucagugcuua

SEQ ID NO: 1328807 - RNA, 19 nt, Artificial Sequence
  Description of Artificial Sequence: Synthetic oligonucleotide
  Antisense strand to SEQ ID NO: 1328806
uaagcacugauuguguucc

SEQ ID NO: 1328808 - RNA, 19 nt, Artificial Sequence
  Description of Artificial Sequence: Synthetic oligonucleotide
  Sense strand starting at position 1288 of SEQ ID NO: 1242188
agugcuuagucaccgauac

SEQ ID NO: 1328809 - RNA, 19 nt, Artificial Sequence
  Description of Artificial Sequence: Synthetic oligonucleotide
  Antisense strand to SEQ ID NO: 1328808
guaucggugacuaagcacu

SEQ ID NO: 1328810 - RNA, 19 nt, Artificial Sequence
  Description of Artificial Sequence: Synthetic oligonucleotide
  Sense strand starting at position 1341 of SEQ ID NO: 1242188
cccagacguacgugacaaa

SEQ ID NO: 1328811 - RNA, 19 nt, Artificial Sequence
  Description of Artificial Sequence: Synthetic oligonucleotide
  Antisense strand to SEQ ID NO: 1328810
uuugucacguacgucuggg

SEQ ID NO: 1328812 - RNA, 19 nt, Artificial Sequence
  Description of Artificial Sequence: Synthetic oligonucleotide
  Sense strand starting at position 2087 of SEQ ID NO: 1242188
ggcagaugacgcggaaaua

SEQ ID NO: 1328813 - RNA, 19 nt, Artificial Sequence
  Description of Artificial Sequence: Synthetic oligonucleotide
  Antisense strand to SEQ ID NO: 1328812
uauuuccgcgucaucugcc

SEQ ID NO: 1328814 - RNA, 19 nt, Artificial Sequence
  Description of Artificial Sequence: Synthetic oligonucleotide
  Sense strand starting at position 2201 of SEQ ID NO: 1242188
agaagaagucugugucgcu

SEQ ID NO: 1328815 - RNA, 19 nt, Artificial Sequence
  Description of Artificial Sequence: Synthetic oligonucleotide
  Antisense strand to SEQ ID NO: 1328814
agcgacacagacuucuucu

SEQ ID NO: 1328816 - RNA, 19 nt, Artificial Sequence
  Description of Artificial Sequence: Synthetic oligonucleotide
  Sense strand starting at position 2386 of SEQ ID NO: 1242188
auaggaaacuugucgagag

SEQ ID NO: 1328817 - RNA, 19 nt, Artificial Sequence
  Description of Artificial Sequence: Synthetic oligonucleotide
  Antisense strand to SEQ ID NO: 1328816
cucucgacaaguuuccuau

SEQ ID NO: 1328818 - RNA, 19 nt, Artificial Sequence
  Description of Artificial Sequence: Synthetic oligonucleotide
  Sense strand starting at position 2389 of SEQ ID NO: 1242188
ggaaacuugucgagaggcu

SEQ ID NO: 1328819 - RNA, 19 nt, Artificial Sequence
  Description of Artificial Sequence: Synthetic oligonucleotide
  Antisense strand to SEQ ID NO: 1328818
agccucucgacaaguuucc

SEQ ID NO: 1328820 - RNA, 19 nt, Artificial Sequence
  Description of Artificial Sequence: Synthetic oligonucleotide
  Sense strand starting at position 2482 of SEQ ID NO: 1242188
aauggauacucagugcuga

SEQ ID NO: 1328821 - RNA, 19 nt, Artificial Sequence
  Description of Artificial Sequence: Synthetic oligonucleotide
  Antisense strand to SEQ ID NO: 1328820
ucagcacugaguauccauu

SEQ ID NO: 1328822 - RNA, 19 nt, Artificial Sequence
  Description of Artificial Sequence: Synthetic oligonucleotide
  Sense strand starting at position 2483 of SEQ ID NO: 1242188
auggauacucagugcugau

SEQ ID NO: 1328823 - RNA, 19 nt, Artificial Sequence
  Description of Artificial Sequence: Synthetic oligonucleotide
  Antisense strand to SEQ ID NO: 1328822
aucagcacugaguauccau

SEQ ID NO: 1328824 - RNA, 19 nt, Artificial Sequence
  Description of Artificial Sequence: Synthetic oligonucleotide
  Sense strand starting at position 2487 of SEQ ID NO: 1242188
auacucagugcugaugaga

SEQ ID NO: 1328825 - RNA, 19 nt, Artificial Sequence
  Description of Artificial Sequence: Synthetic oligonucleotide
  Antisense strand to SEQ ID NO: 1328824
ucucaucagcacugaguau

SEQ ID NO: 1328826 - RNA, 19 nt, Artificial Sequence
  Description of Artificial Sequence: Synthetic oligonucleotide
  Sense strand starting at position 2528 of SEQ ID NO: 1242188
uugagagcagauugaugau

SEQ ID NO: 1328827 - RNA, 19 nt, Artificial Sequence
  Description of Artificial Sequence: Synthetic oligonucleotide
  Antisense strand to SEQ ID NO: 1328826
aucaucaaucugcucucaa

SEQ ID NO: 1328828 - RNA, 19 nt, Artificial Sequence
  Description of Artificial Sequence: Synthetic oligonucleotide
  Sense strand starting at position 2916 of SEQ ID NO: 1242188
gucucuauuagcugggcau

SEQ ID NO: 1328829 - RNA, 19 nt, Artificial Sequence
  Description of Artificial Sequence: Synthetic oligonucleotide
  Antisense strand to SEQ ID NO: 1328828
augcccagcuaauagagac

SEQ ID NO: 1328830 - RNA, 19 nt, Artificial Sequence
  Description of Artificial Sequence: Synthetic oligonucleotide
  Sense strand starting at position 3401 of SEQ ID NO: 1242188
uucugugaauuacuaaaga

SEQ ID NO: 1328831 - RNA, 19 nt, Artificial Sequence
  Description of Artificial Sequence: Synthetic oligonucleotide
  Antisense strand to SEQ ID NO: 1328830
ucuuuaguaauucacagaa

SEQ ID NO: 1328832 - RNA, 19 nt, Artificial Sequence
  Description of Artificial Sequence: Synthetic oligonucleotide
  Sense strand starting at position 3749 of SEQ ID NO: 1242188
augggagguuaguugcauu

SEQ ID NO: 1328833 - RNA, 19 nt, Artificial Sequence
  Description of Artificial Sequence: Synthetic oligonucleotide
  Antisense strand to SEQ ID NO: 1328832
aaugcaacuaaccucccau

SEQ ID NO: 1328834 - RNA, 19 nt, Artificial Sequence
  Description of Artificial Sequence: Synthetic oligonucleotide
  Sense strand starting at position 3759 of SEQ ID NO: 1242188
aguugcauucaggaugguu

SEQ ID NO: 1328835 - RNA, 19 nt, Artificial Sequence
  Description of Artificial Sequence: Synthetic oligonucleotide
  Antisense strand to SEQ ID NO: 1328834
aaccauccugaaugcaacu

SEQ ID NO: 1328836 - RNA, 19 nt, Artificial Sequence
  Description of Artificial Sequence: Synthetic oligonucleotide
  Sense strand starting at position 3761 of SEQ ID NO: 1242188
uugcauucaggaugguuga

SEQ ID NO: 1328837 - RNA, 19 nt, Artificial Sequence
  Description of Artificial Sequence: Synthetic oligonucleotide
  Antisense strand to SEQ ID NO: 1328836
ucaaccauccugaaugcaa

SEQ ID NO: 1328838 - RNA, 19 nt, Artificial Sequence
  Description of Artificial Sequence: Synthetic oligonucleotide
  Sense strand starting at position 3772 of SEQ ID NO: 1242188
augguugauuaagucacua

SEQ ID NO: 1328839 - RNA, 19 nt, Artificial Sequence
  Description of Artificial Sequence: Synthetic oligonucleotide
  Antisense strand to SEQ ID NO: 1328838
uagugacuuaaucaaccau

SEQ ID NO: 1328840 - RNA, 19 nt, Artificial Sequence
  Description of Artificial Sequence: Synthetic oligonucleotide
  Sense strand starting at position 3813 of SEQ ID NO: 1242188
cagcuuucucacuguggua

SEQ ID NO: 1328841 - RNA, 19 nt, Artificial Sequence
  Description of Artificial Sequence: Synthetic oligonucleotide
  Antisense strand to SEQ ID NO: 1328840
uaccacagugagaaagcug

SEQ ID NO: 1328842 - RNA, 19 nt, Artificial Sequence
  Description of Artificial Sequence: Synthetic oligonucleotide
  Sense strand starting at position 3815 of SEQ ID NO: 1242188
gcuuucucacugugguaga

SEQ ID NO: 1328843 - RNA, 19 nt, Artificial Sequence
  Description of Artificial Sequence: Synthetic oligonucleotide
  Antisense strand to SEQ ID NO: 1328842
ucuaccacagugagaaagc

SEQ ID NO: 1328844 - RNA, 19 nt, Artificial Sequence
  Description of Artificial Sequence: Synthetic oligonucleotide
  Sense strand starting at position 3829 of SEQ ID NO: 1242188
guagaaugacguuagaagu

SEQ ID NO: 1328845 - RNA, 19 nt, Artificial Sequence
  Description of Artificial Sequence: Synthetic oligonucleotide
  Antisense strand to SEQ ID NO: 1328844
acuucuaacgucauucuac

SEQ ID NO: 1328846 - RNA, 19 nt, Artificial Sequence
  Description of Artificial Sequence: Synthetic oligonucleotide
  Sense strand starting at position 3835 of SEQ ID NO: 1242188
ugacguuagaaguauggga

SEQ ID NO: 1328847 - RNA, 19 nt, Artificial Sequence
  Description of Artificial Sequence: Synthetic oligonucleotide
  Antisense strand to SEQ ID NO: 1328846
ucccauacuucuaacguca

SEQ ID NO: 1328848 - RNA, 19 nt, Artificial Sequence
  Description of Artificial Sequence: Synthetic oligonucleotide
  Sense strand starting at position 3855 of SEQ ID NO: 1242188
gggagaauaccuuacgcua

SEQ ID NO: 1328849 - RNA, 19 nt, Artificial Sequence
  Description of Artificial Sequence: Synthetic oligonucleotide
  Antisense strand to SEQ ID NO: 1328848
uagcguaagguauucuccc

SEQ ID NO: 1328850 - RNA, 19 nt, Artificial Sequence
  Description of Artificial Sequence: Synthetic oligonucleotide
  Sense strand starting at position 61 of SEQ ID NO: 1242189
caaagauuacuugggcaug

SEQ ID NO: 1328851 - RNA, 19 nt, Artificial Sequence
  Description of Artificial Sequence: Synthetic oligonucleotide
  Antisense strand to SEQ ID NO: 1328850
caugcccaaguaaucuuug

SEQ ID NO: 1328852 - RNA, 19 nt, Artificial Sequence
  Description of Artificial Sequence: Synthetic oligonucleotide
  Sense strand starting at position 345 of SEQ ID NO: 1242189
ugacucauuccaugauguc

SEQ ID NO: 1328853 - RNA, 19 nt, Artificial Sequence
  Description of Artificial Sequence: Synthetic oligonucleotide
  Antisense strand to SEQ ID NO: 1328852
gacaucauggaaugaguca

SEQ ID NO: 1328854 - RNA, 19 nt, Artificial Sequence
  Description of Artificial Sequence: Synthetic oligonucleotide
  Sense strand starting at position 355 of SEQ ID NO: 1242189
caugauguccucugcaaug

SEQ ID NO: 1328855 - RNA, 19 nt, Artificial Sequence
  Description of Artificial Sequence: Synthetic oligonucleotide
  Antisense strand to SEQ ID NO: 1328854
cauugcagaggacaucaug

SEQ ID NO: 1328856 - RNA, 19 nt, Artificial Sequence
  Description of Artificial Sequence: Synthetic oligonucleotide
  Sense strand starting at position 515 of SEQ ID NO: 1242189
agaauuauuccauguaaug

SEQ ID NO: 1328857 - RNA, 19 nt, Artificial Sequence
  Description of Artificial Sequence: Synthetic oligonucleotide
  Antisense strand to SEQ ID NO: 1328856
cauuacauggaauaauucu

SEQ ID NO: 1328858 - RNA, 19 nt, Artificial Sequence
  Description of Artificial Sequence: Synthetic oligonucleotide
  Sense strand starting at position 524 of SEQ ID NO: 1242189
ccauguaaugcucauggua

SEQ ID NO: 1328859 - RNA, 19 nt, Artificial Sequence
  Description of Artificial Sequence: Synthetic oligonucleotide
  Antisense strand to SEQ ID NO: 1328858
uaccaugagcauuacaugg

SEQ ID NO: 1328860 - RNA, 19 nt, Artificial Sequence
  Description of Artificial Sequence: Synthetic oligonucleotide
  Sense strand starting at position 677 of SEQ ID NO: 1242189
aaaggucaugcugguaauu

SEQ ID NO: 1328861 - RNA, 19 nt, Artificial Sequence
  Description of Artificial Sequence: Synthetic oligonucleotide
  Antisense strand to SEQ ID NO: 1328860
aauuaccagcaugaccuuu

SEQ ID NO: 1328862 - RNA, 19 nt, Artificial Sequence
  Description of Artificial Sequence: Synthetic oligonucleotide
  Sense strand starting at position 802 of SEQ ID NO: 1242189
guaccauaugauggucaua

SEQ ID NO: 1328863 - RNA, 19 nt, Artificial Sequence
  Description of Artificial Sequence: Synthetic oligonucleotide
  Antisense strand to SEQ ID NO: 1328862
uaugaccaucauaugguac

SEQ ID NO: 1328864 - RNA, 19 nt, Artificial Sequence
  Description of Artificial Sequence: Synthetic oligonucleotide
  Sense strand starting at position 814 of SEQ ID NO: 1242189
ggucauaaauaaucuguuu

SEQ ID NO: 1328865 - RNA, 19 nt, Artificial Sequence
  Description of Artificial Sequence: Synthetic oligonucleotide
  Antisense strand to SEQ ID NO: 1328864
aaacagauuauuuaugacc

SEQ ID NO: 1328866 - RNA, 19 nt, Artificial Sequence
  Description of Artificial Sequence: Synthetic oligonucleotide
  Sense strand starting at position 1048 of SEQ ID NO: 1242189
augagaaccugggaaagau

SEQ ID NO: 1328867 - RNA, 19 nt, Artificial Sequence
  Description of Artificial Sequence: Synthetic oligonucleotide
  Antisense strand to SEQ ID NO: 1328866
aucuuucccagguucucau

SEQ ID NO: 1328868 - RNA, 19 nt, Artificial Sequence
  Description of Artificial Sequence: Synthetic oligonucleotide
  Sense strand starting at position 1068 of SEQ ID NO: 1242189
uuugaaacguuagcauaaa

SEQ ID NO: 1328869 - RNA, 19 nt, Artificial Sequence
  Description of Artificial Sequence: Synthetic oligonucleotide
  Antisense strand to SEQ ID NO: 1328868
uuuaugcuaacguuucaaa

SEQ ID NO: 1328870 - RNA, 19 nt, Artificial Sequence
  Description of Artificial Sequence: Synthetic oligonucleotide
  Sense strand starting at position 1125 of SEQ ID NO: 1242189
aacguaaacccagaguuua

SEQ ID NO: 1328871 - RNA, 19 nt, Artificial Sequence
  Description of Artificial Sequence: Synthetic oligonucleotide
  Antisense strand to SEQ ID NO: 1328870
uaaacucuggguuuacguu

SEQ ID NO: 1328872 - RNA, 19 nt, Artificial Sequence
  Description of Artificial Sequence: Synthetic oligonucleotide
  Sense strand starting at position 1145 of SEQ ID NO: 1242189
agcucuauuccaggaagaa

SEQ ID NO: 1328873 - RNA, 19 nt, Artificial Sequence
  Description of Artificial Sequence: Synthetic oligonucleotide
  Antisense strand to SEQ ID NO: 1328872
uucuuccuggaauagagcu

SEQ ID NO: 1328874 - RNA, 19 nt, Artificial Sequence
  Description of Artificial Sequence: Synthetic oligonucleotide
  Sense strand starting at position 1337 of SEQ ID NO: 1242189
aggucugaaucucugggaa

SEQ ID NO: 1328875 - RNA, 19 nt, Artificial Sequence
  Description of Artificial Sequence: Synthetic oligonucleotide
  Antisense strand to SEQ ID NO: 1328874
uucccagagauucagaccu

SEQ ID NO: 1328876 - RNA, 19 nt, Artificial Sequence
  Description of Artificial Sequence: Synthetic oligonucleotide
  Sense strand starting at position 1539 of SEQ ID NO: 1242189
guaggaguucgacacccaa

SEQ ID NO: 1328877 - RNA, 19 nt, Artificial Sequence
  Description of Artificial Sequence: Synthetic oligonucleotide
  Antisense strand to SEQ ID NO: 1328876
uugggugucgaacuccuac

SEQ ID NO: 1328878 - RNA, 19 nt, Artificial Sequence
  Description of Artificial Sequence: Synthetic oligonucleotide
  Sense strand starting at position 1554 of SEQ ID NO: 1242189
ccaaguuuccaugacgaua

SEQ ID NO: 1328879 - RNA, 19 nt, Artificial Sequence
  Description of Artificial Sequence: Synthetic oligonucleotide
  Antisense strand to SEQ ID NO: 1328878
uaucgucauggaaacuugg

SEQ ID NO: 1328880 - RNA, 19 nt, Artificial Sequence
  Description of Artificial Sequence: Synthetic oligonucleotide
  Sense strand starting at position 1557 of SEQ ID NO: 1242189
aguuuccaugacgauauaa

SEQ ID NO: 1328881 - RNA, 19 nt, Artificial Sequence
  Description of Artificial Sequence: Synthetic oligonucleotide
  Antisense strand to SEQ ID NO: 1328880
uuauaucgucauggaaacu

SEQ ID NO: 1328882 - RNA, 19 nt, Artificial Sequence
  Description of Artificial Sequence: Synthetic oligonucleotide
  Sense strand starting at position 1768 of SEQ ID NO: 1242189
agcuuaauugaauaagcau

SEQ ID NO: 1328883 - RNA, 19 nt, Artificial Sequence
  Description of Artificial Sequence: Synthetic oligonucleotide
  Antisense strand to SEQ ID NO: 1328882
augcuuauucaauuaagcu

SEQ ID NO: 1328884 - RNA, 19 nt, Artificial Sequence
  Description of Artificial Sequence: Synthetic oligonucleotide
  Sense strand starting at position 2180 of SEQ ID NO: 1242189
ugagucuaguccucacaaa

SEQ ID NO: 1328885 - RNA, 19 nt, Artificial Sequence
  Description of Artificial Sequence: Synthetic oligonucleotide
  Antisense strand to SEQ ID NO: 1328884
uuugugaggacuagacuca

SEQ ID NO: 1328886 - RNA, 19 nt, Artificial Sequence
  Description of Artificial Sequence: Synthetic oligonucleotide
  Sense strand starting at position 2275 of SEQ ID NO: 1242189
gaaaguauuuauugacagg

SEQ ID NO: 1328887 - RNA, 19 nt, Artificial Sequence
  Description of Artificial Sequence: Synthetic oligonucleotide
  Antisense strand to SEQ ID NO: 1328886
ccugucaauaaauacuuuc

SEQ ID NO: 1328888 - RNA, 19 nt, Artificial Sequence
  Description of Artificial Sequence: Synthetic oligonucleotide
  Sense strand starting at position 2278 of SEQ ID NO: 1242189
aguauuuauugacaggaaa

SEQ ID NO: 1328889 - RNA, 19 nt, Artificial Sequence
  Description of Artificial Sequence: Synthetic oligonucleotide
  Antisense strand to SEQ ID NO: 1328888
uuuccugucaauaaauacu

SEQ ID NO: 1328890 - RNA, 19 nt, Artificial Sequence
  Description of Artificial Sequence: Synthetic oligonucleotide
  Sense strand starting at position 2433 of SEQ ID NO: 1242189
uuuccucauguguaauauc

SEQ ID NO: 1328891 - RNA, 19 nt, Artificial Sequence
  Description of Artificial Sequence: Synthetic oligonucleotide
  Antisense strand to SEQ ID NO: 1328890
gauauuacacaugaggaaa

SEQ ID NO: 1328892 - RNA, 19 nt, Artificial Sequence
  Description of Artificial Sequence: Synthetic oligonucleotide
  Sense strand starting at position 2452 of SEQ ID NO: 1242189
agaucuuagcuguaccuaa

SEQ ID NO: 1328893 - RNA, 19 nt, Artificial Sequence
  Description of Artificial Sequence: Synthetic oligonucleotide
  Antisense strand to SEQ ID NO: 1328892
uuagguacagcuaagaucu

SEQ ID NO: 1328894 - RNA, 19 nt, Artificial Sequence
  Description of Artificial Sequence: Synthetic oligonucleotide
  Sense strand starting at position 2466 of SEQ ID NO: 1242189
ccuaacaaaugaguuagua

SEQ ID NO: 1328895 - RNA, 19 nt, Artificial Sequence
  Description of Artificial Sequence: Synthetic oligonucleotide
  Antisense strand to SEQ ID NO: 1328894
uacuaacucauuuguuagg

SEQ ID NO: 1328896 - RNA, 19 nt, Artificial Sequence
  Description of Artificial Sequence: Synthetic oligonucleotide
  Sense strand starting at position 2485 of SEQ ID NO: 1242189
uuuguaaaguacucagaag

SEQ ID NO: 1328897 - RNA, 19 nt, Artificial Sequence
  Description of Artificial Sequence: Synthetic oligonucleotide
  Antisense strand to SEQ ID NO: 1328896
cuucugaguacuuuacaaa

SEQ ID NO: 1328898 - RNA, 19 nt, Artificial Sequence
  Description of Artificial Sequence: Synthetic oligonucleotide
  Sense strand starting at position 2517 of SEQ ID NO: 1242189
uggcaagugccauauuagu

SEQ ID NO: 1328899 - RNA, 19 nt, Artificial Sequence
  Description of Artificial Sequence: Synthetic oligonucleotide
  Antisense strand to SEQ ID NO: 1328898
acuaauauggcacuugcca

SEQ ID NO: 1328900 - RNA, 19 nt, Artificial Sequence
  Description of Artificial Sequence: Synthetic oligonucleotide
  Sense strand starting at position 2614 of SEQ ID NO: 1242189
ccuacaaucaguggaggau

SEQ ID NO: 1328901 - RNA, 19 nt, Artificial Sequence
  Description of Artificial Sequence: Synthetic oligonucleotide
  Antisense strand to SEQ ID NO: 1328900
auccuccacugauuguagg

SEQ ID NO: 1328902 - RNA, 19 nt, Artificial Sequence
  Description of Artificial Sequence: Synthetic oligonucleotide
  Sense strand starting at position 2737 of SEQ ID NO: 1242189
acucucuaagucuagguua

SEQ ID NO: 1328903 - RNA, 19 nt, Artificial Sequence
  Description of Artificial Sequence: Synthetic oligonucleotide
  Antisense strand to SEQ ID NO: 1328902
uaaccuagacuuagagagu

SEQ ID NO: 1328904 - RNA, 19 nt, Artificial Sequence
  Description of Artificial Sequence: Synthetic oligonucleotide
  Sense strand starting at position 2739 of SEQ ID NO: 1242189
ucucuaagucuagguuauc

SEQ ID NO: 1328905 - RNA, 19 nt, Artificial Sequence
  Description of Artificial Sequence: Synthetic oligonucleotide
  Antisense strand to SEQ ID NO: 1328904
gauaaccuagacuuagaga

SEQ ID NO: 1328906 - RNA, 19 nt, Artificial Sequence
  Description of Artificial Sequence: Synthetic oligonucleotide
  Sense strand starting at position 2740 of SEQ ID NO: 1242189
cucuaagucuagguuauca

SEQ ID NO: 1328907 - RNA, 19 nt, Artificial Sequence
  Description of Artificial Sequence: Synthetic oligonucleotide
  Antisense strand to SEQ ID NO: 1328906
ugauaaccuagacuuagag

SEQ ID NO: 1328908 - RNA, 19 nt, Artificial Sequence
  Description of Artificial Sequence: Synthetic oligonucleotide
  Sense strand starting at position 2748 of SEQ ID NO: 1242189
cuagguuaucaccaguuau

SEQ ID NO: 1328909 - RNA, 19 nt, Artificial Sequence
  Description of Artificial Sequence: Synthetic oligonucleotide
  Antisense strand to SEQ ID NO: 1328908
auaacuggugauaaccuag

SEQ ID NO: 1328910 - RNA, 19 nt, Artificial Sequence
  Description of Artificial Sequence: Synthetic oligonucleotide
  Sense strand starting at position 2758 of SEQ ID NO: 1242189
accaguuauuuccaggaaa

SEQ ID NO: 1328911 - RNA, 19 nt, Artificial Sequence
  Description of Artificial Sequence: Synthetic oligonucleotide
  Antisense strand to SEQ ID NO: 1328910
uuuccuggaaauaacuggu

SEQ ID NO: 1328912 - RNA, 19 nt, Artificial Sequence
  Description of Artificial Sequence: Synthetic oligonucleotide
  Sense strand starting at position 2779 of SEQ ID NO: 1242189
ccgaucuugagaugugaac

SEQ ID NO: 1328913 - RNA, 19 nt, Artificial Sequence
  Description of Artificial Sequence: Synthetic oligonucleotide
  Antisense strand to SEQ ID NO: 1328912
guucacaucucaagaucgg

SEQ ID NO: 1328914 - RNA, 19 nt, Artificial Sequence
  Description of Artificial Sequence: Synthetic oligonucleotide
  Sense strand starting at position 2791 of SEQ ID NO: 1242189
ugugaacuguaccucuaua

SEQ ID NO: 1328915 - RNA, 19 nt, Artificial Sequence
  Description of Artificial Sequence: Synthetic oligonucleotide
  Antisense strand to SEQ ID NO: 1328914
uauagagguacaguucaca

SEQ ID NO: 1328916 - RNA, 19 nt, Artificial Sequence
  Description of Artificial Sequence: Synthetic oligonucleotide
  Sense strand starting at position 2796 of SEQ ID NO: 1242189
acuguaccucuauaguguu

SEQ ID NO: 1328917 - RNA, 19 nt, Artificial Sequence
  Description of Artificial Sequence: Synthetic oligonucleotide
  Antisense strand to SEQ ID NO: 1328916
aacacuauagagguacagu

SEQ ID NO: 1328918 - RNA, 19 nt, Artificial Sequence
  Description of Artificial Sequence: Synthetic oligonucleotide
  Sense strand starting at position 2830 of SEQ ID NO: 1242189
gcuccuuccuacuuaggaa

SEQ ID NO: 1328919 - RNA, 19 nt, Artificial Sequence
  Description of Artificial Sequence: Synthetic oligonucleotide
  Antisense strand to SEQ ID NO: 1328918
uuccuaaguaggaaggagc

SEQ ID NO: 1328920 - RNA, 19 nt, Artificial Sequence
  Description of Artificial Sequence: Synthetic oligonucleotide
  Sense strand starting at position 2989 of SEQ ID NO: 1242189
agcaaacuugagugagaga

SEQ ID NO: 1328921 - RNA, 19 nt, Artificial Sequence
  Description of Artificial Sequence: Synthetic oligonucleotide
  Antisense strand to SEQ ID NO: 1328920
ucucucacucaaguuugcu

SEQ ID NO: 1328922 - RNA, 19 nt, Artificial Sequence
  Description of Artificial Sequence: Synthetic oligonucleotide
  Sense strand starting at position 3122 of SEQ ID NO: 1242189
caggguacauuugaugauu

SEQ ID NO: 1328923 - RNA, 19 nt, Artificial Sequence
  Description of Artificial Sequence: Synthetic oligonucleotide
  Antisense strand to SEQ ID NO: 1328922
aaucaucaaauguacccug

SEQ ID NO: 1328924 - RNA, 19 nt, Artificial Sequence
  Description of Artificial Sequence: Synthetic oligonucleotide
  Sense strand starting at position 3387 of SEQ ID NO: 1242189
gcuggauguguggugugua

SEQ ID NO: 1328925 - RNA, 19 nt, Artificial Sequence
  Description of Artificial Sequence: Synthetic oligonucleotide
  Antisense strand to SEQ ID NO: 1328924
uacacaccacacauccagc

SEQ ID NO: 1328926 - RNA, 19 nt, Artificial Sequence
  Description of Artificial Sequence: Synthetic oligonucleotide
  Sense strand starting at position 3626 of SEQ ID NO: 1242189
agacaaauaucugacagau

SEQ ID NO: 1328927 - RNA, 19 nt, Artificial Sequence
  Description of Artificial Sequence: Synthetic oligonucleotide
  Antisense strand to SEQ ID NO: 1328926
aucugucagauauuugucu

SEQ ID NO: 1328928 - RNA, 19 nt, Artificial Sequence
  Description of Artificial Sequence: Synthetic oligonucleotide
  Sense strand starting at position 3870 of SEQ ID NO: 1242189
aucacagacucaguuuaga

SEQ ID NO: 1328929 - RNA, 19 nt, Artificial Sequence
  Description of Artificial Sequence: Synthetic oligonucleotide
  Antisense strand to SEQ ID NO: 1328928
ucuaaacugagucugugau

SEQ ID NO: 1328930 - RNA, 19 nt, Artificial Sequence
  Description of Artificial Sequence: Synthetic oligonucleotide
  Sense strand starting at position 32 of SEQ ID NO: 1242190
ucaguuauucugcauguag

SEQ ID NO: 1328931 - RNA, 19 nt, Artificial Sequence
  Description of Artificial Sequence: Synthetic oligonucleotide
  Antisense strand to SEQ ID NO: 1328930
cuacaugcagaauaacuga

SEQ ID NO: 1328932 - RNA, 19 nt, Artificial Sequence
  Description of Artificial Sequence: Synthetic oligonucleotide
  Sense strand starting at position 424 of SEQ ID NO: 1242190
uacugucaugguuagcauu

SEQ ID NO: 1328933 - RNA, 19 nt, Artificial Sequence
  Description of Artificial Sequence: Synthetic oligonucleotide
  Antisense strand to SEQ ID NO: 1328932
aaugcuaaccaugacagua

SEQ ID NO: 1328934 - RNA, 19 nt, Artificial Sequence
  Description of Artificial Sequence: Synthetic oligonucleotide
  Sense strand starting at position 589 of SEQ ID NO: 1242190
auaccucgucucuacaaga

SEQ ID NO: 1328935 - RNA, 19 nt, Artificial Sequence
  Description of Artificial Sequence: Synthetic oligonucleotide
  Antisense strand to SEQ ID NO: 1328934
ucuuguagagacgagguau

SEQ ID NO: 1328936 - RNA, 19 nt, Artificial Sequence
  Description of Artificial Sequence: Synthetic oligonucleotide
  Sense strand starting at position 594 of SEQ ID NO: 1242190
ucgucucuacaagauacaa

SEQ ID NO: 1328937 - RNA, 19 nt, Artificial Sequence
  Description of Artificial Sequence: Synthetic oligonucleotide
  Antisense strand to SEQ ID NO: 1328936
uuguaucuuguagagacga

SEQ ID NO: 1328938 - RNA, 19 nt, Artificial Sequence
  Description of Artificial Sequence: Synthetic oligonucleotide
  Sense strand starting at position 766 of SEQ ID NO: 1242190
aaugaaacagugugcucaa

SEQ ID NO: 1328939 - RNA, 19 nt, Artificial Sequence
  Description of Artificial Sequence: Synthetic oligonucleotide
  Antisense strand to SEQ ID NO: 1328938
uugagcacacuguuucauu

SEQ ID NO: 1328940 - RNA, 19 nt, Artificial Sequence
  Description of Artificial Sequence: Synthetic oligonucleotide
  Sense strand starting at position 767 of SEQ ID NO: 1242190
augaaacagugugcucaaa

SEQ ID NO: 1328941 - RNA, 19 nt, Artificial Sequence
  Description of Artificial Sequence: Synthetic oligonucleotide
  Antisense strand to SEQ ID NO: 1328940
uuugagcacacuguuucau

SEQ ID NO: 1328942 - RNA, 19 nt, Artificial Sequence
  Description of Artificial Sequence: Synthetic oligonucleotide
  Sense strand starting at position 769 of SEQ ID NO: 1242190
gaaacagugugcucaaaca

SEQ ID NO: 1328943 - RNA, 19 nt, Artificial Sequence
  Description of Artificial Sequence: Synthetic oligonucleotide
  Antisense strand to SEQ ID NO: 1328942
uguuugagcacacuguuuc

SEQ ID NO: 1328944 - RNA, 19 nt, Artificial Sequence
  Description of Artificial Sequence: Synthetic oligonucleotide
  Sense strand starting at position 861 of SEQ ID NO: 1242190
gcuggaaucuguccaagga

SEQ ID NO: 1328945 - RNA, 19 nt, Artificial Sequence
  Description of Artificial Sequence: Synthetic oligonucleotide
  Antisense strand to SEQ ID NO: 1328944
uccuuggacagauuccagc

SEQ ID NO: 1328946 - RNA, 19 nt, Artificial Sequence
  Description of Artificial Sequence: Synthetic oligonucleotide
  Sense strand starting at position 865 of SEQ ID NO: 1242190
gaaucuguccaaggacauu

SEQ ID NO: 1328947 - RNA, 19 nt, Artificial Sequence
  Description of Artificial Sequence: Synthetic oligonucleotide
  Antisense strand to SEQ ID NO: 1328946
aauguccuuggacagauuc

SEQ ID NO: 1328948 - RNA, 19 nt, Artificial Sequence
  Description of Artificial Sequence: Synthetic oligonucleotide
  Sense strand starting at position 941 of SEQ ID NO: 1242190
gugguugugucuauaugug

SEQ ID NO: 1328949 - RNA, 19 nt, Artificial Sequence
  Description of Artificial Sequence: Synthetic oligonucleotide
  Antisense strand to SEQ ID NO: 1328948
cacauauagacacaaccac

SEQ ID NO: 1328950 - RNA, 19 nt, Artificial Sequence
  Description of Artificial Sequence: Synthetic oligonucleotide
  Sense strand starting at position 1056 of SEQ ID NO: 1242190
gcaauuuaucaaugcugug

SEQ ID NO: 1328951 - RNA, 19 nt, Artificial Sequence
  Description of Artificial Sequence: Synthetic oligonucleotide
  Antisense strand to SEQ ID NO: 1328950
cacagcauugauaaauugc

SEQ ID NO: 1328952 - RNA, 19 nt, Artificial Sequence
  Description of Artificial Sequence: Synthetic oligonucleotide
  Sense strand starting at position 1186 of SEQ ID NO: 1242190
gcauccggacacugagauu

SEQ ID NO: 1328953 - RNA, 19 nt, Artificial Sequence
  Description of Artificial Sequence: Synthetic oligonucleotide
  Antisense strand to SEQ ID NO: 1328952
aaucucaguguccggaugc

SEQ ID NO: 1328954 - RNA, 19 nt, Artificial Sequence
  Description of Artificial Sequence: Synthetic oligonucleotide
  Sense strand starting at position 1991 of SEQ ID NO: 1242190
acuguuacuccggaaccaa

SEQ ID NO: 1328955 - RNA, 19 nt, Artificial Sequence
  Description of Artificial Sequence: Synthetic oligonucleotide
  Antisense strand to SEQ ID NO: 1328954
uugguuccggaguaacagu

SEQ ID NO: 1328956 - RNA, 19 nt, Artificial Sequence
  Description of Artificial Sequence: Synthetic oligonucleotide
  Sense strand starting at position 2166 of SEQ ID NO: 1242190
gggagagacuggucuugcu

SEQ ID NO: 1328957 - RNA, 19 nt, Artificial Sequence
  Description of Artificial Sequence: Synthetic oligonucleotide
  Antisense strand to SEQ ID NO: 1328956
agcaagaccagucucuccc

SEQ ID NO: 1328958 - RNA, 19 nt, Artificial Sequence
  Description of Artificial Sequence: Synthetic oligonucleotide
  Sense strand starting at position 2247 of SEQ ID NO: 1242190
uccugacccugcuuaauga

SEQ ID NO: 1328959 - RNA, 19 nt, Artificial Sequence
  Description of Artificial Sequence: Synthetic oligonucleotide
  Antisense strand to SEQ ID NO: 1328958
ucauuaagcagggucagga

SEQ ID NO: 1328960 - RNA, 19 nt, Artificial Sequence
  Description of Artificial Sequence: Synthetic oligonucleotide
  Sense strand starting at position 2260 of SEQ ID NO: 1242190
uaaugacagcgaggugaaa

SEQ ID NO: 1328961 - RNA, 19 nt, Artificial Sequence
  Description of Artificial Sequence: Synthetic oligonucleotide
  Antisense strand to SEQ ID NO: 1328960
uuucaccucgcugucauua

SEQ ID NO: 1328962 - RNA, 19 nt, Artificial Sequence
  Description of Artificial Sequence: Synthetic oligonucleotide
  Sense strand starting at position 2517 of SEQ ID NO: 1242190
agaggaucaucaucuuucu

SEQ ID NO: 1328963 - RNA, 19 nt, Artificial Sequence
  Description of Artificial Sequence: Synthetic oligonucleotide
  Antisense strand to SEQ ID NO: 1328962
agaaagaugaugauccucu

SEQ ID NO: 1328964 - RNA, 19 nt, Artificial Sequence
  Description of Artificial Sequence: Synthetic oligonucleotide
  Sense strand starting at position 2631 of SEQ ID NO: 1242190
uaaagaaauucgccgaaga

SEQ ID NO: 1328965 - RNA, 19 nt, Artificial Sequence
  Description of Artificial Sequence: Synthetic oligonucleotide
  Antisense strand to SEQ ID NO: 1328964
ucuucggcgaauuucuuua

SEQ ID NO: 1328966 - RNA, 19 nt, Artificial Sequence
  Description of Artificial Sequence: Synthetic oligonucleotide
  Sense strand starting at position 2632 of SEQ ID NO: 1242190
aaagaaauucgccgaagag

SEQ ID NO: 1328967 - RNA, 19 nt, Artificial Sequence
  Description of Artificial Sequence: Synthetic oligonucleotide
  Antisense strand to SEQ ID NO: 1328966
cucuucggcgaauuucuuu

SEQ ID NO: 1328968 - RNA, 19 nt, Artificial Sequence
  Description of Artificial Sequence: Synthetic oligonucleotide
  Sense strand starting at position 2633 of SEQ ID NO: 1242190
aagaaauucgccgaagagu

SEQ ID NO: 1328969 - RNA, 19 nt, Artificial Sequence
  Description of Artificial Sequence: Synthetic oligonucleotide
  Antisense strand to SEQ ID NO: 1328968
acucuucggcgaauuucuu

SEQ ID NO: 1328970 - RNA, 19 nt, Artificial Sequence
  Description of Artificial Sequence: Synthetic oligonucleotide
  Sense strand starting at position 2636 of SEQ ID NO: 1242190
aaauucgccgaagaguuua

SEQ ID NO: 1328971 - RNA, 19 nt, Artificial Sequence
  Description of Artificial Sequence: Synthetic oligonucleotide
  Antisense strand to SEQ ID NO: 1328970
uaaacucuucggcgaauuu

SEQ ID NO: 1328972 - RNA, 19 nt, Artificial Sequence
  Description of Artificial Sequence: Synthetic oligonucleotide
  Sense strand starting at position 2672 of SEQ ID NO: 1242190
gcaguagucgcaucaucgu

SEQ ID NO: 1328973 - RNA, 19 nt, Artificial Sequence
  Description of Artificial Sequence: Synthetic oligonucleotide
  Antisense strand to SEQ ID NO: 1328972
acgaugaugcgacuacugc

SEQ ID NO: 1328974 - RNA, 19 nt, Artificial Sequence
  Description of Artificial Sequence: Synthetic oligonucleotide
  Sense strand starting at position 2679 of SEQ ID NO: 1242190
ucgcaucaucgucucuuau

SEQ ID NO: 1328975 - RNA, 19 nt, Artificial Sequence
  Description of Artificial Sequence: Synthetic oligonucleotide
  Antisense strand to SEQ ID NO: 1328974
auaagagacgaugaugcga

SEQ ID NO: 1328976 - RNA, 19 nt, Artificial Sequence
  Description of Artificial Sequence: Synthetic oligonucleotide
  Sense strand starting at position 2680 of SEQ ID NO: 1242190
cgcaucaucgucucuuauu

SEQ ID NO: 1328977 - RNA, 19 nt, Artificial Sequence
  Description of Artificial Sequence: Synthetic oligonucleotide
  Antisense strand to SEQ ID NO: 1328976
aauaagagacgaugaugcg

SEQ ID NO: 1328978 - RNA, 19 nt, Artificial Sequence
  Description of Artificial Sequence: Synthetic oligonucleotide
  Sense strand starting at position 2711 of SEQ ID NO: 1242190
aaauauucggucuagucca

SEQ ID NO: 1328979 - RNA, 19 nt, Artificial Sequence
  Description of Artificial Sequence: Synthetic oligonucleotide
  Antisense strand to SEQ ID NO: 1328978
uggacuagaccgaauauuu

SEQ ID NO: 1328980 - RNA, 19 nt, Artificial Sequence
  Description of Artificial Sequence: Synthetic oligonucleotide
  Sense strand starting at position 2718 of SEQ ID NO: 1242190
cggucuaguccauguauuu

SEQ ID NO: 1328981 - RNA, 19 nt, Artificial Sequence
  Description of Artificial Sequence: Synthetic oligonucleotide
  Antisense strand to SEQ ID NO: 1328980
aaauacauggacuagaccg

SEQ ID NO: 1328982 - RNA, 19 nt, Artificial Sequence
  Description of Artificial Sequence: Synthetic oligonucleotide
  Sense strand starting at position 2764 of SEQ ID NO: 1242190
uggugauauggugauauca

SEQ ID NO: 1328983 - RNA, 19 nt, Artificial Sequence
  Description of Artificial Sequence: Synthetic oligonucleotide
  Antisense strand to SEQ ID NO: 1328982
ugauaucaccauaucacca

SEQ ID NO: 1328984 - RNA, 19 nt, Artificial Sequence
  Description of Artificial Sequence: Synthetic oligonucleotide
  Sense strand starting at position 2772 of SEQ ID NO: 1242190
uggugauaucacggaagua

SEQ ID NO: 1328985 - RNA, 19 nt, Artificial Sequence
  Description of Artificial Sequence: Synthetic oligonucleotide
  Antisense strand to SEQ ID NO: 1328984
uacuuccgugauaucacca

SEQ ID NO: 1328986 - RNA, 19 nt, Artificial Sequence
  Description of Artificial Sequence: Synthetic oligonucleotide
  Sense strand starting at position 2773 of SEQ ID NO: 1242190
ggugauaucacggaaguag

SEQ ID NO: 1328987 - RNA, 19 nt, Artificial Sequence
  Description of Artificial Sequence: Synthetic oligonucleotide
  Antisense strand to SEQ ID NO: 1328986
cuacuuccgugauaucacc

SEQ ID NO: 1328988 - RNA, 19 nt, Artificial Sequence
  Description of Artificial Sequence: Synthetic oligonucleotide
  Sense strand starting at position 2790 of SEQ ID NO: 1242190
agcaauaaaccuugguuau

SEQ ID NO: 1328989 - RNA, 19 nt, Artificial Sequence
  Description of Artificial Sequence: Synthetic oligonucleotide
  Antisense strand to SEQ ID NO: 1328988
auaaccaagguuuauugcu

SEQ ID NO: 1328990 - RNA, 19 nt, Artificial Sequence
  Description of Artificial Sequence: Synthetic oligonucleotide
  Sense strand starting at position 2791 of SEQ ID NO: 1242190
gcaauaaaccuugguuauc

SEQ ID NO: 1328991 - RNA, 19 nt, Artificial Sequence
  Description of Artificial Sequence: Synthetic oligonucleotide
  Antisense strand to SEQ ID NO: 1328990
gauaaccaagguuuauugc

SEQ ID NO: 1328992 - RNA, 19 nt, Artificial Sequence
  Description of Artificial Sequence: Synthetic oligonucleotide
  Sense strand starting at position 3203 of SEQ ID NO: 1242190
ggugccucuacagaaguuu

SEQ ID NO: 1328993 - RNA, 19 nt, Artificial Sequence
  Description of Artificial Sequence: Synthetic oligonucleotide
  Antisense strand to SEQ ID NO: 1328992
aaacuucuguagaggcacc

SEQ ID NO: 1328994 - RNA, 19 nt, Artificial Sequence
  Description of Artificial Sequence: Synthetic oligonucleotide
  Sense strand starting at position 3240 of SEQ ID NO: 1242190
guagguucguccuuuauuu

SEQ ID NO: 1328995 - RNA, 19 nt, Artificial Sequence
  Description of Artificial Sequence: Synthetic oligonucleotide
  Antisense strand to SEQ ID NO: 1328994
aaauaaaggacgaaccuac

SEQ ID NO: 1328996 - RNA, 19 nt, Artificial Sequence
  Description of Artificial Sequence: Synthetic oligonucleotide
  Sense strand starting at position 3349 of SEQ ID NO: 1242190
acaguaaggugcuugauua

SEQ ID NO: 1328997 - RNA, 19 nt, Artificial Sequence
  Description of Artificial Sequence: Synthetic oligonucleotide
  Antisense strand to SEQ ID NO: 1328996
uaaucaagcaccuuacugu

SEQ ID NO: 1328998 - RNA, 19 nt, Artificial Sequence
  Description of Artificial Sequence: Synthetic oligonucleotide
  Sense strand starting at position 3359 of SEQ ID NO: 1242190
gcuugauuaaugugagaga

SEQ ID NO: 1328999 - RNA, 19 nt, Artificial Sequence
  Description of Artificial Sequence: Synthetic oligonucleotide
  Antisense strand to SEQ ID NO: 1328998
ucucucacauuaaucaagc

SEQ ID NO: 1329000 - RNA, 19 nt, Artificial Sequence
  Description of Artificial Sequence: Synthetic oligonucleotide
  Sense strand starting at position 3430 of SEQ ID NO: 1242190
acuuuacucugaguuacuu

SEQ ID NO: 1329001 - RNA, 19 nt, Artificial Sequence
  Description of Artificial Sequence: Synthetic oligonucleotide
  Antisense strand to SEQ ID NO: 1329000
aaguaacucagaguaaagu

SEQ ID NO: 1329002 - RNA, 19 nt, Artificial Sequence
  Description of Artificial Sequence: Synthetic oligonucleotide
  Sense strand starting at position 3464 of SEQ ID NO: 1242190
aaggccauuguaggagaua

SEQ ID NO: 1329003 - RNA, 19 nt, Artificial Sequence
  Description of Artificial Sequence: Synthetic oligonucleotide
  Antisense strand to SEQ ID NO: 1329002
uaucuccuacaauggccuu

SEQ ID NO: 1329004 - RNA, 19 nt, Artificial Sequence
  Description of Artificial Sequence: Synthetic oligonucleotide
  Sense strand starting at position 3510 of SEQ ID NO: 1242190
ucaauagcuuagguagaaa

SEQ ID NO: 1329005 - RNA, 19 nt, Artificial Sequence
  Description of Artificial Sequence: Synthetic oligonucleotide
  Antisense strand to SEQ ID NO: 1329004
uuucuaccuaagcuauuga

SEQ ID NO: 1329006 - RNA, 19 nt, Artificial Sequence
  Description of Artificial Sequence: Synthetic oligonucleotide
  Sense strand starting at position 3887 of SEQ ID NO: 1242190
cuuugaugauuugagcaag

SEQ ID NO: 1329007 - RNA, 19 nt, Artificial Sequence
  Description of Artificial Sequence: Synthetic oligonucleotide
  Antisense strand to SEQ ID NO: 1329006
cuugcucaaaucaucaaag

SEQ ID NO: 1329008 - RNA, 19 nt, Artificial Sequence
  Description of Artificial Sequence: Synthetic oligonucleotide
  Sense strand starting at position 3927 of SEQ ID NO: 1242190
cucucauugcgagaagcau

SEQ ID NO: 1329009 - RNA, 19 nt, Artificial Sequence
  Description of Artificial Sequence: Synthetic oligonucleotide
  Antisense strand to SEQ ID NO: 1329008
augcuucucgcaaugagag

SEQ ID NO: 1329010 - RNA, 19 nt, Artificial Sequence
  Description of Artificial Sequence: Synthetic oligonucleotide
  Sense strand starting at position 46 of SEQ ID NO: 1242191
gugcuaacauuagucuuua

SEQ ID NO: 1329011 - RNA, 19 nt, Artificial Sequence
  Description of Artificial Sequence: Synthetic oligonucleotide
  Antisense strand to SEQ ID NO: 1329010
uaaagacuaauguuagcac

SEQ ID NO: 1329012 - RNA, 19 nt, Artificial Sequence
  Description of Artificial Sequence: Synthetic oligonucleotide
  Sense strand starting at position 58 of SEQ ID NO: 1242191
gucuuuagaaugugugcau

SEQ ID NO: 1329013 - RNA, 19 nt, Artificial Sequence
  Description of Artificial Sequence: Synthetic oligonucleotide
  Antisense strand to SEQ ID NO: 1329012
augcacacauucuaaagac

SEQ ID NO: 1329014 - RNA, 19 nt, Artificial Sequence
  Description of Artificial Sequence: Synthetic oligonucleotide
  Sense strand starting at position 59 of SEQ ID NO: 1242191
ucuuuagaaugugugcauu

SEQ ID NO: 1329015 - RNA, 19 nt, Artificial Sequence
  Description of Artificial Sequence: Synthetic oligonucleotide
  Antisense strand to SEQ ID NO: 1329014
aaugcacacauucuaaaga

SEQ ID NO: 1329016 - RNA, 19 nt, Artificial Sequence
  Description of Artificial Sequence: Synthetic oligonucleotide
  Sense strand starting at position 142 of SEQ ID NO: 1242191
gccaacgacuacuucuaau

SEQ ID NO: 1329017 - RNA, 19 nt, Artificial Sequence
  Description of Artificial Sequence: Synthetic oligonucleotide
  Antisense strand to SEQ ID NO: 1329016
auuagaaguagucguuggc

SEQ ID NO: 1329018 - RNA, 19 nt, Artificial Sequence
  Description of Artificial Sequence: Synthetic oligonucleotide
  Sense strand starting at position 186 of SEQ ID NO: 1242191
agaauauccucauauacga

SEQ ID NO: 1329019 - RNA, 19 nt, Artificial Sequence
  Description of Artificial Sequence: Synthetic oligonucleotide
  Antisense strand to SEQ ID NO: 1329018
ucguauaugaggauauucu

SEQ ID NO: 1329020 - RNA, 19 nt, Artificial Sequence
  Description of Artificial Sequence: Synthetic oligonucleotide
  Sense strand starting at position 250 of SEQ ID NO: 1242191
caguaauaccuaggugauc

SEQ ID NO: 1329021 - RNA, 19 nt, Artificial Sequence
  Description of Artificial Sequence: Synthetic oligonucleotide
  Antisense strand to SEQ ID NO: 1329020
gaucaccuagguauuacug

SEQ ID NO: 1329022 - RNA, 19 nt, Artificial Sequence
  Description of Artificial Sequence: Synthetic oligonucleotide
  Sense strand starting at position 251 of SEQ ID NO: 1242191
aguaauaccuaggugauca

SEQ ID NO: 1329023 - RNA, 19 nt, Artificial Sequence
  Description of Artificial Sequence: Synthetic oligonucleotide
  Antisense strand to SEQ ID NO: 1329022
ugaucaccuagguauuacu

SEQ ID NO: 1329024 - RNA, 19 nt, Artificial Sequence
  Description of Artificial Sequence: Synthetic oligonucleotide
  Sense strand starting at position 280 of SEQ ID NO: 1242191
gcucaaaucuggcauauuu

SEQ ID NO: 1329025 - RNA, 19 nt, Artificial Sequence
  Description of Artificial Sequence: Synthetic oligonucleotide
  Antisense strand to SEQ ID NO: 1329024
aaauaugccagauuugagc

SEQ ID NO: 1329026 - RNA, 19 nt, Artificial Sequence
  Description of Artificial Sequence: Synthetic oligonucleotide
  Sense strand starting at position 374 of SEQ ID NO: 1242191
gauguaacauaugugaaau

SEQ ID NO: 1329027 - RNA, 19 nt, Artificial Sequence
  Description of Artificial Sequence: Synthetic oligonucleotide
  Antisense strand to SEQ ID NO: 1329026
auuucacauauguuacauc

SEQ ID NO: 1329028 - RNA, 19 nt, Artificial Sequence
  Description of Artificial Sequence: Synthetic oligonucleotide
  Sense strand starting at position 504 of SEQ ID NO: 1242191
aucugauauuucuaugaag

SEQ ID NO: 1329029 - RNA, 19 nt, Artificial Sequence
  Description of Artificial Sequence: Synthetic oligonucleotide
  Antisense strand to SEQ ID NO: 1329028
cuucauagaaauaucagau

SEQ ID NO: 1329030 - RNA, 19 nt, Artificial Sequence
  Description of Artificial Sequence: Synthetic oligonucleotide
  Sense strand starting at position 518 of SEQ ID NO: 1242191
ugaagaaauuccugauuuc

SEQ ID NO: 1329031 - RNA, 19 nt, Artificial Sequence
  Description of Artificial Sequence: Synthetic oligonucleotide
  Antisense strand to SEQ ID NO: 1329030
gaaaucaggaauuucuuca

SEQ ID NO: 1329032 - RNA, 19 nt, Artificial Sequence
  Description of Artificial Sequence: Synthetic oligonucleotide
  Sense strand starting at position 561 of SEQ ID NO: 1242191
acauucuucuggucagauc

SEQ ID NO: 1329033 - RNA, 19 nt, Artificial Sequence
  Description of Artificial Sequence: Synthetic oligonucleotide
  Antisense strand to SEQ ID NO: 1329032
gaucugaccagaagaaugu

SEQ ID NO: 1329034 - RNA, 19 nt, Artificial Sequence
  Description of Artificial Sequence: Synthetic oligonucleotide
  Sense strand starting at position 624 of SEQ ID NO: 1242191
ugcaauuggaacuguaaga

SEQ ID NO: 1329035 - RNA, 19 nt, Artificial Sequence
  Description of Artificial Sequence: Synthetic oligonucleotide
  Antisense strand to SEQ ID NO: 1329034
ucuuacaguuccaauugca

SEQ ID NO: 1329036 - RNA, 19 nt, Artificial Sequence
  Description of Artificial Sequence: Synthetic oligonucleotide
  Sense strand starting at position 770 of SEQ ID NO: 1242191
acugcaucuuuagcaauga

SEQ ID NO: 1329037 - RNA, 19 nt, Artificial Sequence
  Description of Artificial Sequence: Synthetic oligonucleotide
  Antisense strand to SEQ ID NO: 1329036
ucauugcuaaagaugcagu

SEQ ID NO: 1329038 - RNA, 19 nt, Artificial Sequence
  Description of Artificial Sequence: Synthetic oligonucleotide
  Sense strand starting at position 793 of SEQ ID NO: 1242191
gaauucugccguuaauaca

SEQ ID NO: 1329039 - RNA, 19 nt, Artificial Sequence
  Description of Artificial Sequence: Synthetic oligonucleotide
  Antisense strand to SEQ ID NO: 1329038
uguauuaacggcagaauuc

SEQ ID NO: 1329040 - RNA, 19 nt, Artificial Sequence
  Description of Artificial Sequence: Synthetic oligonucleotide
  Sense strand starting at position 802 of SEQ ID NO: 1242191
cguuaauacaaguaggcuu

SEQ ID NO: 1329041 - RNA, 19 nt, Artificial Sequence
  Description of Artificial Sequence: Synthetic oligonucleotide
  Antisense strand to SEQ ID NO: 1329040
aagccuacuuguauuaacg

SEQ ID NO: 1329042 - RNA, 19 nt, Artificial Sequence
  Description of Artificial Sequence: Synthetic oligonucleotide
  Sense strand starting at position 949 of SEQ ID NO: 1242191
guccuacacucgccaagaa

SEQ ID NO: 1329043 - RNA, 19 nt, Artificial Sequence
  Description of Artificial Sequence: Synthetic oligonucleotide
  Antisense strand to SEQ ID NO: 1329042
uucuuggcgaguguaggac

SEQ ID NO: 1329044 - RNA, 19 nt, Artificial Sequence
  Description of Artificial Sequence: Synthetic oligonucleotide
  Sense strand starting at position 950 of SEQ ID NO: 1242191
uccuacacucgccaagaaa

SEQ ID NO: 1329045 - RNA, 19 nt, Artificial Sequence
  Description of Artificial Sequence: Synthetic oligonucleotide
  Antisense strand to SEQ ID NO: 1329044
uuucuuggcgaguguagga

SEQ ID NO: 1329046 - RNA, 19 nt, Artificial Sequence
  Description of Artificial Sequence: Synthetic oligonucleotide
  Sense strand starting at position 1153 of SEQ ID NO: 1242191
uuaggaauuucgucuccga

SEQ ID NO: 1329047 - RNA, 19 nt, Artificial Sequence
  Description of Artificial Sequence: Synthetic oligonucleotide
  Antisense strand to SEQ ID NO: 1329046
ucggagacgaaauuccuaa

SEQ ID NO: 1329048 - RNA, 19 nt, Artificial Sequence
  Description of Artificial Sequence: Synthetic oligonucleotide
  Sense strand starting at position 1156 of SEQ ID NO: 1242191
ggaauuucgucuccgaguu

SEQ ID NO: 1329049 - RNA, 19 nt, Artificial Sequence
  Description of Artificial Sequence: Synthetic oligonucleotide
  Antisense strand to SEQ ID NO: 1329048
aacucggagacgaaauucc

SEQ ID NO: 1329050 - RNA, 19 nt, Artificial Sequence
  Description of Artificial Sequence: Synthetic oligonucleotide
  Sense strand starting at position 1157 of SEQ ID NO: 1242191
gaauuucgucuccgaguuu

SEQ ID NO: 1329051 - RNA, 19 nt, Artificial Sequence
  Description of Artificial Sequence: Synthetic oligonucleotide
  Antisense strand to SEQ ID NO: 1329050
aaacucggagacgaaauuc

SEQ ID NO: 1329052 - RNA, 19 nt, Artificial Sequence
  Description of Artificial Sequence: Synthetic oligonucleotide
  Sense strand starting at position 2266 of SEQ ID NO: 1242191
cagugccagcguuuacuaa

SEQ ID NO: 1329053 - RNA, 19 nt, Artificial Sequence
  Description of Artificial Sequence: Synthetic oligonucleotide
  Antisense strand to SEQ ID NO: 1329052
uuaguaaacgcuggcacug

SEQ ID NO: 1329054 - RNA, 19 nt, Artificial Sequence
  Description of Artificial Sequence: Synthetic oligonucleotide
  Sense strand starting at position 2273 of SEQ ID NO: 1242191
agcguuuacuaagcaccua

SEQ ID NO: 1329055 - RNA, 19 nt, Artificial Sequence
  Description of Artificial Sequence: Synthetic oligonucleotide
  Antisense strand to SEQ ID NO: 1329054
uaggugcuuaguaaacgcu

SEQ ID NO: 1329056 - RNA, 19 nt, Artificial Sequence
  Description of Artificial Sequence: Synthetic oligonucleotide
  Sense strand starting at position 2346 of SEQ ID NO: 1242191
gguggaccuuaagauggau

SEQ ID NO: 1329057 - RNA, 19 nt, Artificial Sequence
  Description of Artificial Sequence: Synthetic oligonucleotide
  Antisense strand to SEQ ID NO: 1329056
auccaucuuaagguccacc

SEQ ID NO: 1329058 - RNA, 19 nt, Artificial Sequence
  Description of Artificial Sequence: Synthetic oligonucleotide
  Sense strand starting at position 2522 of SEQ ID NO: 1242191
gaggguguuucugugagca

SEQ ID NO: 1329059 - RNA, 19 nt, Artificial Sequence
  Description of Artificial Sequence: Synthetic oligonucleotide
  Antisense strand to SEQ ID NO: 1329058
ugcucacagaaacacccuc

SEQ ID NO: 1329060 - RNA, 19 nt, Artificial Sequence
  Description of Artificial Sequence: Synthetic oligonucleotide
  Sense strand starting at position 2526 of SEQ ID NO: 1242191
guguuucugugagcaaaga

SEQ ID NO: 1329061 - RNA, 19 nt, Artificial Sequence
  Description of Artificial Sequence: Synthetic oligonucleotide
  Antisense strand to SEQ ID NO: 1329060
ucuuugcucacagaaacac

SEQ ID NO: 1329062 - RNA, 19 nt, Artificial Sequence
  Description of Artificial Sequence: Synthetic oligonucleotide
  Sense strand starting at position 2611 of SEQ ID NO: 1242191
ugcacuaugaaacguagaa

SEQ ID NO: 1329063 - RNA, 19 nt, Artificial Sequence
  Description of Artificial Sequence: Synthetic oligonucleotide
  Antisense strand to SEQ ID NO: 1329062
uucuacguuucauagugca

SEQ ID NO: 1329064 - RNA, 19 nt, Artificial Sequence
  Description of Artificial Sequence: Synthetic oligonucleotide
  Sense strand starting at position 2716 of SEQ ID NO: 1242191
caguguuuaugugaaauuu

SEQ ID NO: 1329065 - RNA, 19 nt, Artificial Sequence
  Description of Artificial Sequence: Synthetic oligonucleotide
  Antisense strand to SEQ ID NO: 1329064
aaauuucacauaaacacug

SEQ ID NO: 1329066 - RNA, 19 nt, Artificial Sequence
  Description of Artificial Sequence: Synthetic oligonucleotide
  Sense strand starting at position 2786 of SEQ ID NO: 1242191
aucaccaucuugcugagaa

SEQ ID NO: 1329067 - RNA, 19 nt, Artificial Sequence
  Description of Artificial Sequence: Synthetic oligonucleotide
  Antisense strand to SEQ ID NO: 1329066
uucucagcaagauggugau

SEQ ID NO: 1329068 - RNA, 19 nt, Artificial Sequence
  Description of Artificial Sequence: Synthetic oligonucleotide
  Sense strand starting at position 2821 of SEQ ID NO: 1242191
ccuucuagucauuauuaug

SEQ ID NO: 1329069 - RNA, 19 nt, Artificial Sequence
  Description of Artificial Sequence: Synthetic oligonucleotide
  Antisense strand to SEQ ID NO: 1329068
cauaauaaugacuagaagg

SEQ ID NO: 1329070 - RNA, 19 nt, Artificial Sequence
  Description of Artificial Sequence: Synthetic oligonucleotide
  Sense strand starting at position 2829 of SEQ ID NO: 1242191
ucauuauuaugggcaucuu

SEQ ID NO: 1329071 - RNA, 19 nt, Artificial Sequence
  Description of Artificial Sequence: Synthetic oligonucleotide
  Antisense strand to SEQ ID NO: 1329070
aagaugcccauaauaauga

SEQ ID NO: 1329072 - RNA, 19 nt, Artificial Sequence
  Description of Artificial Sequence: Synthetic oligonucleotide
  Sense strand starting at position 3253 of SEQ ID NO: 1242191
cugaguaccaggugugaag

SEQ ID NO: 1329073 - RNA, 19 nt, Artificial Sequence
  Description of Artificial Sequence: Synthetic oligonucleotide
  Antisense strand to SEQ ID NO: 1329072
cuucacaccugguacucag

SEQ ID NO: 1329074 - RNA, 19 nt, Artificial Sequence
  Description of Artificial Sequence: Synthetic oligonucleotide
  Sense strand starting at position 3312 of SEQ ID NO: 1242191
uuguuccaaccgcagaauu

SEQ ID NO: 1329075 - RNA, 19 nt, Artificial Sequence
  Description of Artificial Sequence: Synthetic oligonucleotide
  Antisense strand to SEQ ID NO: 1329074
aauucugcgguuggaacaa

SEQ ID NO: 1329076 - RNA, 19 nt, Artificial Sequence
  Description of Artificial Sequence: Synthetic oligonucleotide
  Sense strand starting at position 3424 of SEQ ID NO: 1242191
ugagaacucguuuaccuuc

SEQ ID NO: 1329077 - RNA, 19 nt, Artificial Sequence
  Description of Artificial Sequence: Synthetic oligonucleotide
  Antisense strand to SEQ ID NO: 1329076
gaagguaaacgaguucuca

SEQ ID NO: 1329078 - RNA, 19 nt, Artificial Sequence
  Description of Artificial Sequence: Synthetic oligonucleotide
  Sense strand starting at position 3536 of SEQ ID NO: 1242191
gcugacuuccuguggauaa

SEQ ID NO: 1329079 - RNA, 19 nt, Artificial Sequence
  Description of Artificial Sequence: Synthetic oligonucleotide
  Antisense strand to SEQ ID NO: 1329078
uuauccacaggaagucagc

SEQ ID NO: 1329080 - RNA, 19 nt, Artificial Sequence
  Description of Artificial Sequence: Synthetic oligonucleotide
  Sense strand starting at position 3554 of SEQ ID NO: 1242191
augcaaaguuggcuuacaa

SEQ ID NO: 1329081 - RNA, 19 nt, Artificial Sequence
  Description of Artificial Sequence: Synthetic oligonucleotide
  Antisense strand to SEQ ID NO: 1329080
uuguaagccaacuuugcau

SEQ ID NO: 1329082 - RNA, 19 nt, Artificial Sequence
  Description of Artificial Sequence: Synthetic oligonucleotide
  Sense strand starting at position 3595 of SEQ ID NO: 1242191
gacagaaucuuuguagcau

SEQ ID NO: 1329083 - RNA, 19 nt, Artificial Sequence
  Description of Artificial Sequence: Synthetic oligonucleotide
  Antisense strand to SEQ ID NO: 1329082
augcuacaaagauucuguc

SEQ ID NO: 1329084 - RNA, 19 nt, Artificial Sequence
  Description of Artificial Sequence: Synthetic oligonucleotide
  Sense strand starting at position 3744 of SEQ ID NO: 1242191
auuccaucauugugauuua

SEQ ID NO: 1329085 - RNA, 19 nt, Artificial Sequence
  Description of Artificial Sequence: Synthetic oligonucleotide
  Antisense strand to SEQ ID NO: 1329084
uaaaucacaaugauggaau

SEQ ID NO: 1329086 - RNA, 19 nt, Artificial Sequence
  Description of Artificial Sequence: Synthetic oligonucleotide
  Sense strand starting at position 3745 of SEQ ID NO: 1242191
uuccaucauugugauuuau

SEQ ID NO: 1329087 - RNA, 19 nt, Artificial Sequence
  Description of Artificial Sequence: Synthetic oligonucleotide
  Antisense strand to SEQ ID NO: 1329086
auaaaucacaaugauggaa

SEQ ID NO: 1329088 - RNA, 19 nt, Artificial Sequence
  Description of Artificial Sequence: Synthetic oligonucleotide
  Sense strand starting at position 3843 of SEQ ID NO: 1242191
uuaagaagauuccuuguaa

SEQ ID NO: 1329089 - RNA, 19 nt, Artificial Sequence
  Description of Artificial Sequence: Synthetic oligonucleotide
  Antisense strand to SEQ ID NO: 1329088
uuacaaggaaucuucuuaa

SEQ ID NO: 1329090 - RNA, 19 nt, Artificial Sequence
  Description of Artificial Sequence: Synthetic oligonucleotide
  Sense strand starting at position 44 of SEQ ID NO: 1242192
ugaacuaaguccucccaga

SEQ ID NO: 1329091 - RNA, 19 nt, Artificial Sequence
  Description of Artificial Sequence: Synthetic oligonucleotide
  Antisense strand to SEQ ID NO: 1329090
ucugggaggacuuaguuca

SEQ ID NO: 1329092 - RNA, 19 nt, Artificial Sequence
  Description of Artificial Sequence: Synthetic oligonucleotide
  Sense strand starting at position 69 of SEQ ID NO: 1242192
ccauuuguacaguggcauu

SEQ ID NO: 1329093 - RNA, 19 nt, Artificial Sequence
  Description of Artificial Sequence: Synthetic oligonucleotide
  Antisense strand to SEQ ID NO: 1329092
aaugccacuguacaaaugg

SEQ ID NO: 1329094 - RNA, 19 nt, Artificial Sequence
  Description of Artificial Sequence: Synthetic oligonucleotide
  Sense strand starting at position 202 of SEQ ID NO: 1242192
ggguuuacaggcuacuaau

SEQ ID NO: 1329095 - RNA, 19 nt, Artificial Sequence
  Description of Artificial Sequence: Synthetic oligonucleotide
  Antisense strand to SEQ ID NO: 1329094
auuaguagccuguaaaccc

SEQ ID NO: 1329096 - RNA, 19 nt, Artificial Sequence
  Description of Artificial Sequence: Synthetic oligonucleotide
  Sense strand starting at position 237 of SEQ ID NO: 1242192
ucugauccugugggaguaa

SEQ ID NO: 1329097 - RNA, 19 nt, Artificial Sequence
  Description of Artificial Sequence: Synthetic oligonucleotide
  Antisense strand to SEQ ID NO: 1329096
uuacucccacaggaucaga

SEQ ID NO: 1329098 - RNA, 19 nt, Artificial Sequence
  Description of Artificial Sequence: Synthetic oligonucleotide
  Sense strand starting at position 249 of SEQ ID NO: 1242192
ggaguaaagcccuggauuc

SEQ ID NO: 1329099 - RNA, 19 nt, Artificial Sequence
  Description of Artificial Sequence: Synthetic oligonucleotide
  Antisense strand to SEQ ID NO: 1329098
gaauccagggcuuuacucc

SEQ ID NO: 1329100 - RNA, 19 nt, Artificial Sequence
  Description of Artificial Sequence: Synthetic oligonucleotide
  Sense strand starting at position 275 of SEQ ID NO: 1242192
ggauuaaauaaaugucgac

SEQ ID NO: 1329101 - RNA, 19 nt, Artificial Sequence
  Description of Artificial Sequence: Synthetic oligonucleotide
  Antisense strand to SEQ ID NO: 1329100
gucgacauuuauuuaaucc

SEQ ID NO: 1329102 - RNA, 19 nt, Artificial Sequence
  Description of Artificial Sequence: Synthetic oligonucleotide
  Sense strand starting at position 378 of SEQ ID NO: 1242192
gaacuuugccucugaggau

SEQ ID NO: 1329103 - RNA, 19 nt, Artificial Sequence
  Description of Artificial Sequence: Synthetic oligonucleotide
  Antisense strand to SEQ ID NO: 1329102
auccucagaggcaaaguuc

SEQ ID NO: 1329104 - RNA, 19 nt, Artificial Sequence
  Description of Artificial Sequence: Synthetic oligonucleotide
  Sense strand starting at position 420 of SEQ ID NO: 1242192
gcucuuggcauauagugaa

SEQ ID NO: 1329105 - RNA, 19 nt, Artificial Sequence
  Description of Artificial Sequence: Synthetic oligonucleotide
  Antisense strand to SEQ ID NO: 1329104
uucacuauaugccaagagc

SEQ ID NO: 1329106 - RNA, 19 nt, Artificial Sequence
  Description of Artificial Sequence: Synthetic oligonucleotide
  Sense strand starting at position 427 of SEQ ID NO: 1242192
gcauauagugaaugagaua

SEQ ID NO: 1329107 - RNA, 19 nt, Artificial Sequence
  Description of Artificial Sequence: Synthetic oligonucleotide
  Antisense strand to SEQ ID NO: 1329106
uaucucauucacuauaugc

SEQ ID NO: 1329108 - RNA, 19 nt, Artificial Sequence
  Description of Artificial Sequence: Synthetic oligonucleotide
  Sense strand starting at position 439 of SEQ ID NO: 1242192
ugagauaagcaaugcucaa

SEQ ID NO: 1329109 - RNA, 19 nt, Artificial Sequence
  Description of Artificial Sequence: Synthetic oligonucleotide
  Antisense strand to SEQ ID NO: 1329108
uugagcauugcuuaucuca

SEQ ID NO: 1329110 - RNA, 19 nt, Artificial Sequence
  Description of Artificial Sequence: Synthetic oligonucleotide
  Sense strand starting at position 497 of SEQ ID NO: 1242192
cuugcauguuauuccuaag

SEQ ID NO: 1329111 - RNA, 19 nt, Artificial Sequence
  Description of Artificial Sequence: Synthetic oligonucleotide
  Antisense strand to SEQ ID NO: 1329110
cuuaggaauaacaugcaag

SEQ ID NO: 1329112 - RNA, 19 nt, Artificial Sequence
  Description of Artificial Sequence: Synthetic oligonucleotide
  Sense strand starting at position 747 of SEQ ID NO: 1242192
ugagucauagcauaucaac

SEQ ID NO: 1329113 - RNA, 19 nt, Artificial Sequence
  Description of Artificial Sequence: Synthetic oligonucleotide
  Antisense strand to SEQ ID NO: 1329112
guugauaugcuaugacuca

SEQ ID NO: 1329114 - RNA, 19 nt, Artificial Sequence
  Description of Artificial Sequence: Synthetic oligonucleotide
  Sense strand starting at position 899 of SEQ ID NO: 1242192
ccaaaucauugccugcaga

SEQ ID NO: 1329115 - RNA, 19 nt, Artificial Sequence
  Description of Artificial Sequence: Synthetic oligonucleotide
  Antisense strand to SEQ ID NO: 1329114
ucugcaggcaaugauuugg

SEQ ID NO: 1329116 - RNA, 19 nt, Artificial Sequence
  Description of Artificial Sequence: Synthetic oligonucleotide
  Sense strand starting at position 945 of SEQ ID NO: 1242192
aagggcuucuaguuaucuu

SEQ ID NO: 1329117 - RNA, 19 nt, Artificial Sequence
  Description of Artificial Sequence: Synthetic oligonucleotide
  Antisense strand to SEQ ID NO: 1329116
aagauaacuagaagcccuu

SEQ ID NO: 1329118 - RNA, 19 nt, Artificial Sequence
  Description of Artificial Sequence: Synthetic oligonucleotide
  Sense strand starting at position 1289 of SEQ ID NO: 1242192
uuaguaucacagugucuua

SEQ ID NO: 1329119 - RNA, 19 nt, Artificial Sequence
  Description of Artificial Sequence: Synthetic oligonucleotide
  Antisense strand to SEQ ID NO: 1329118
uaagacacugugauacuaa

SEQ ID NO: 1329120 - RNA, 19 nt, Artificial Sequence
  Description of Artificial Sequence: Synthetic oligonucleotide
  Sense strand starting at position 1305 of SEQ ID NO: 1242192
uuaccuucugccuagcgaa

SEQ ID NO: 1329121 - RNA, 19 nt, Artificial Sequence
  Description of Artificial Sequence: Synthetic oligonucleotide
  Antisense strand to SEQ ID NO: 1329120
uucgcuaggcagaagguaa

SEQ ID NO: 1329122 - RNA, 19 nt, Artificial Sequence
  Description of Artificial Sequence: Synthetic oligonucleotide
  Sense strand starting at position 1472 of SEQ ID NO: 1242192
ccgccagaggcguuuaacu

SEQ ID NO: 1329123 - RNA, 19 nt, Artificial Sequence
  Description of Artificial Sequence: Synthetic oligonucleotide
  Antisense strand to SEQ ID NO: 1329122
aguuaaacgccucuggcgg

SEQ ID NO: 1329124 - RNA, 19 nt, Artificial Sequence
  Description of Artificial Sequence: Synthetic oligonucleotide
  Sense strand starting at position 1568 of SEQ ID NO: 1242192
aacuguaguguccaaggga

SEQ ID NO: 1329125 - RNA, 19 nt, Artificial Sequence
  Description of Artificial Sequence: Synthetic oligonucleotide
  Antisense strand to SEQ ID NO: 1329124
ucccuuggacacuacaguu

SEQ ID NO: 1329126 - RNA, 19 nt, Artificial Sequence
  Description of Artificial Sequence: Synthetic oligonucleotide
  Sense strand starting at position 1571 of SEQ ID NO: 1242192
uguaguguccaagggagga

SEQ ID NO: 1329127 - RNA, 19 nt, Artificial Sequence
  Description of Artificial Sequence: Synthetic oligonucleotide
  Antisense strand to SEQ ID NO: 1329126
uccucccuuggacacuaca

SEQ ID NO: 1329128 - RNA, 19 nt, Artificial Sequence
  Description of Artificial Sequence: Synthetic oligonucleotide
  Sense strand starting at position 2279 of SEQ ID NO: 1242192
aagguugucaucugauagg

SEQ ID NO: 1329129 - RNA, 19 nt, Artificial Sequence
  Description of Artificial Sequence: Synthetic oligonucleotide
  Antisense strand to SEQ ID NO: 1329128
ccuaucagaugacaaccuu

SEQ ID NO: 1329130 - RNA, 19 nt, Artificial Sequence
  Description of Artificial Sequence: Synthetic oligonucleotide
  Sense strand starting at position 2314 of SEQ ID NO: 1242192
ugaaacuccuagcucagaa

SEQ ID NO: 1329131 - RNA, 19 nt, Artificial Sequence
  Description of Artificial Sequence: Synthetic oligonucleotide
  Antisense strand to SEQ ID NO: 1329130
uucugagcuaggaguuuca

SEQ ID NO: 1329132 - RNA, 19 nt, Artificial Sequence
  Description of Artificial Sequence: Synthetic oligonucleotide
  Sense strand starting at position 2452 of SEQ ID NO: 1242192
ggauuauucugaguaaugc

SEQ ID NO: 1329133 - RNA, 19 nt, Artificial Sequence
  Description of Artificial Sequence: Synthetic oligonucleotide
  Antisense strand to SEQ ID NO: 1329132
gcauuacucagaauaaucc

SEQ ID NO: 1329134 - RNA, 19 nt, Artificial Sequence
  Description of Artificial Sequence: Synthetic oligonucleotide
  Sense strand starting at position 2453 of SEQ ID NO: 1242192
gauuauucugaguaaugca

SEQ ID NO: 1329135 - RNA, 19 nt, Artificial Sequence
  Description of Artificial Sequence: Synthetic oligonucleotide
  Antisense strand to SEQ ID NO: 1329134
ugcauuacucagaauaauc

SEQ ID NO: 1329136 - RNA, 19 nt, Artificial Sequence
  Description of Artificial Sequence: Synthetic oligonucleotide
  Sense strand starting at position 2502 of SEQ ID NO: 1242192
ugggcaaccuggucaucau

SEQ ID NO: 1329137 - RNA, 19 nt, Artificial Sequence
  Description of Artificial Sequence: Synthetic oligonucleotide
  Antisense strand to SEQ ID NO: 1329136
augaugaccagguugccca

SEQ ID NO: 1329138 - RNA, 19 nt, Artificial Sequence
  Description of Artificial Sequence: Synthetic oligonucleotide
  Sense strand starting at position 2505 of SEQ ID NO: 1242192
gcaaccuggucaucaugaa

SEQ ID NO: 1329139 - RNA, 19 nt, Artificial Sequence
  Description of Artificial Sequence: Synthetic oligonucleotide
  Antisense strand to SEQ ID NO: 1329138
uucaugaugaccagguugc

SEQ ID NO: 1329140 - RNA, 19 nt, Artificial Sequence
  Description of Artificial Sequence: Synthetic oligonucleotide
  Sense strand starting at position 2575 of SEQ ID NO: 1242192
gugaauaugcuauguuaua

SEQ ID NO: 1329141 - RNA, 19 nt, Artificial Sequence
  Description of Artificial Sequence: Synthetic oligonucleotide
  Antisense strand to SEQ ID NO: 1329140
uauaacauagcauauucac

SEQ ID NO: 1329142 - RNA, 19 nt, Artificial Sequence
  Description of Artificial Sequence: Synthetic oligonucleotide
  Sense strand starting at position 2636 of SEQ ID NO: 1242192
ugugcuuccucaccuaaag

SEQ ID NO: 1329143 - RNA, 19 nt, Artificial Sequence
  Description of Artificial Sequence: Synthetic oligonucleotide
  Antisense strand to SEQ ID NO: 1329142
cuuuaggugaggaagcaca

SEQ ID NO: 1329144 - RNA, 19 nt, Artificial Sequence
  Description of Artificial Sequence: Synthetic oligonucleotide
  Sense strand starting at position 2661 of SEQ ID NO: 1242192
aggacuuuguugcuccaga

SEQ ID NO: 1329145 - RNA, 19 nt, Artificial Sequence
  Description of Artificial Sequence: Synthetic oligonucleotide
  Antisense strand to SEQ ID NO: 1329144
ucuggagcaacaaaguccu

SEQ ID NO: 1329146 - RNA, 19 nt, Artificial Sequence
  Description of Artificial Sequence: Synthetic oligonucleotide
  Sense strand starting at position 2662 of SEQ ID NO: 1242192
ggacuuuguugcuccagau

SEQ ID NO: 1329147 - RNA, 19 nt, Artificial Sequence
  Description of Artificial Sequence: Synthetic oligonucleotide
  Antisense strand to SEQ ID NO: 1329146
aucuggagcaacaaagucc

SEQ ID NO: 1329148 - RNA, 19 nt, Artificial Sequence
  Description of Artificial Sequence: Synthetic oligonucleotide
  Sense strand starting at position 2666 of SEQ ID NO: 1242192
uuuguugcuccagaucuuu

SEQ ID NO: 1329149 - RNA, 19 nt, Artificial Sequence
  Description of Artificial Sequence: Synthetic oligonucleotide
  Antisense strand to SEQ ID NO: 1329148
aaagaucuggagcaacaaa

SEQ ID NO: 1329150 - RNA, 19 nt, Artificial Sequence
  Description of Artificial Sequence: Synthetic oligonucleotide
  Sense strand starting at position 2838 of SEQ ID NO: 1242192
uccugaguauucuccacuu

SEQ ID NO: 1329151 - RNA, 19 nt, Artificial Sequence
  Description of Artificial Sequence: Synthetic oligonucleotide
  Antisense strand to SEQ ID NO: 1329150
aaguggagaauacucagga

SEQ ID NO: 1329152 - RNA, 19 nt, Artificial Sequence
  Description of Artificial Sequence: Synthetic oligonucleotide
  Sense strand starting at position 2840 of SEQ ID NO: 1242192
cugaguauucuccacuuga

SEQ ID NO: 1329153 - RNA, 19 nt, Artificial Sequence
  Description of Artificial Sequence: Synthetic oligonucleotide
  Antisense strand to SEQ ID NO: 1329152
ucaaguggagaauacucag

SEQ ID NO: 1329154 - RNA, 19 nt, Artificial Sequence
  Description of Artificial Sequence: Synthetic oligonucleotide
  Sense strand starting at position 2959 of SEQ ID NO: 1242192
uuugaaucccuguggagau

SEQ ID NO: 1329155 - RNA, 19 nt, Artificial Sequence
  Description of Artificial Sequence: Synthetic oligonucleotide
  Antisense strand to SEQ ID NO: 1329154
aucuccacagggauucaaa

SEQ ID NO: 1329156 - RNA, 19 nt, Artificial Sequence
  Description of Artificial Sequence: Synthetic oligonucleotide
  Sense strand starting at position 2976 of SEQ ID NO: 1242192
augacaugugucugcaaga

SEQ ID NO: 1329157 - RNA, 19 nt, Artificial Sequence
  Description of Artificial Sequence: Synthetic oligonucleotide
  Antisense strand to SEQ ID NO: 1329156
ucuugcagacacaugucau

SEQ ID NO: 1329158 - RNA, 19 nt, Artificial Sequence
  Description of Artificial Sequence: Synthetic oligonucleotide
  Sense strand starting at position 2977 of SEQ ID NO: 1242192
ugacaugugucugcaagag

SEQ ID NO: 1329159 - RNA, 19 nt, Artificial Sequence
  Description of Artificial Sequence: Synthetic oligonucleotide
  Antisense strand to SEQ ID NO: 1329158
cucuugcagacacauguca

SEQ ID NO: 1329160 - RNA, 19 nt, Artificial Sequence
  Description of Artificial Sequence: Synthetic oligonucleotide
  Sense strand starting at position 2981 of SEQ ID NO: 1242192
augugucugcaagagggaa

SEQ ID NO: 1329161 - RNA, 19 nt, Artificial Sequence
  Description of Artificial Sequence: Synthetic oligonucleotide
  Antisense strand to SEQ ID NO: 1329160
uucccucuugcagacacau

SEQ ID NO: 1329162 - RNA, 19 nt, Artificial Sequence
  Description of Artificial Sequence: Synthetic oligonucleotide
  Sense strand starting at position 3103 of SEQ ID NO: 1242192
uuugaaacccuguggagau

SEQ ID NO: 1329163 - RNA, 19 nt, Artificial Sequence
  Description of Artificial Sequence: Synthetic oligonucleotide
  Antisense strand to SEQ ID NO: 1329162
aucuccacaggguuucaaa

SEQ ID NO: 1329164 - RNA, 19 nt, Artificial Sequence
  Description of Artificial Sequence: Synthetic oligonucleotide
  Sense strand starting at position 3473 of SEQ ID NO: 1242192
gggaccucuccaugggauu

SEQ ID NO: 1329165 - RNA, 19 nt, Artificial Sequence
  Description of Artificial Sequence: Synthetic oligonucleotide
  Antisense strand to SEQ ID NO: 1329164
aaucccauggagagguccc

SEQ ID NO: 1329166 - RNA, 19 nt, Artificial Sequence
  Description of Artificial Sequence: Synthetic oligonucleotide
  Sense strand starting at position 3651 of SEQ ID NO: 1242192
gaucacucauggccagaua

SEQ ID NO: 1329167 - RNA, 19 nt, Artificial Sequence
  Description of Artificial Sequence: Synthetic oligonucleotide
  Antisense strand to SEQ ID NO: 1329166
uaucuggccaugagugauc

SEQ ID NO: 1329168 - RNA, 19 nt, Artificial Sequence
  Description of Artificial Sequence: Synthetic oligonucleotide
  Sense strand starting at position 3660 of SEQ ID NO: 1242192
uggccagauaaaugguuua

SEQ ID NO: 1329169 - RNA, 19 nt, Artificial Sequence
  Description of Artificial Sequence: Synthetic oligonucleotide
  Antisense strand to SEQ ID NO: 1329168
uaaaccauuuaucuggcca

SEQ ID NO: 1329170 - RNA, 19 nt, Artificial Sequence
  Description of Artificial Sequence: Synthetic oligonucleotide
  Sense strand starting at position 366 of SEQ ID NO: 1242193
gaucccuucccuggugaaa

SEQ ID NO: 1329171 - RNA, 19 nt, Artificial Sequence
  Description of Artificial Sequence: Synthetic oligonucleotide
  Antisense strand to SEQ ID NO: 1329170
uuucaccagggaagggauc

SEQ ID NO: 1329172 - RNA, 19 nt, Artificial Sequence
  Description of Artificial Sequence: Synthetic oligonucleotide
  Sense strand starting at position 801 of SEQ ID NO: 1242193
gcuucuuaggaguaauaau

SEQ ID NO: 1329173 - RNA, 19 nt, Artificial Sequence
  Description of Artificial Sequence: Synthetic oligonucleotide
  Antisense strand to SEQ ID NO: 1329172
auuauuacuccuaagaagc

SEQ ID NO: 1329174 - RNA, 19 nt, Artificial Sequence
  Description of Artificial Sequence: Synthetic oligonucleotide
  Sense strand starting at position 810 of SEQ ID NO: 1242193
gaguaauaauaugcauggu

SEQ ID NO: 1329175 - RNA, 19 nt, Artificial Sequence
  Description of Artificial Sequence: Synthetic oligonucleotide
  Antisense strand to SEQ ID NO: 1329174
accaugcauauuauuacuc

SEQ ID NO: 1329176 - RNA, 19 nt, Artificial Sequence
  Description of Artificial Sequence: Synthetic oligonucleotide
  Sense strand starting at position 835 of SEQ ID NO: 1242193
acagguaugacugggcaau

SEQ ID NO: 1329177 - RNA, 19 nt, Artificial Sequence
  Description of Artificial Sequence: Synthetic oligonucleotide
  Antisense strand to SEQ ID NO: 1329176
auugcccagucauaccugu

SEQ ID NO: 1329178 - RNA, 19 nt, Artificial Sequence
  Description of Artificial Sequence: Synthetic oligonucleotide
  Sense strand starting at position 968 of SEQ ID NO: 1242193
guccuaaaguauucuggaa

SEQ ID NO: 1329179 - RNA, 19 nt, Artificial Sequence
  Description of Artificial Sequence: Synthetic oligonucleotide
  Antisense strand to SEQ ID NO: 1329178
uuccagaauacuuuaggac

SEQ ID NO: 1329180 - RNA, 19 nt, Artificial Sequence
  Description of Artificial Sequence: Synthetic oligonucleotide
  Sense strand starting at position 1047 of SEQ ID NO: 1242193
gggugcaaucaauacugca

SEQ ID NO: 1329181 - RNA, 19 nt, Artificial Sequence
  Description of Artificial Sequence: Synthetic oligonucleotide
  Antisense strand to SEQ ID NO: 1329180
ugcaguauugauugcaccc

SEQ ID NO: 1329182 - RNA, 19 nt, Artificial Sequence
  Description of Artificial Sequence: Synthetic oligonucleotide
  Sense strand starting at position 2067 of SEQ ID NO: 1242193
ggcaguaaggcacaucaaa

SEQ ID NO: 1329183 - RNA, 19 nt, Artificial Sequence
  Description of Artificial Sequence: Synthetic oligonucleotide
  Antisense strand to SEQ ID NO: 1329182
uuugaugugccuuacugcc

SEQ ID NO: 1329184 - RNA, 19 nt, Artificial Sequence
  Description of Artificial Sequence: Synthetic oligonucleotide
  Sense strand starting at position 2075 of SEQ ID NO: 1242193
ggcacaucaaagugagaaa

SEQ ID NO: 1329185 - RNA, 19 nt, Artificial Sequence
  Description of Artificial Sequence: Synthetic oligonucleotide
  Antisense strand to SEQ ID NO: 1329184
uuucucacuuugaugugcc

SEQ ID NO: 1329186 - RNA, 19 nt, Artificial Sequence
  Description of Artificial Sequence: Synthetic oligonucleotide
  Sense strand starting at position 2380 of SEQ ID NO: 1242193
gggacuuucuacuucucua

SEQ ID NO: 1329187 - RNA, 19 nt, Artificial Sequence
  Description of Artificial Sequence: Synthetic oligonucleotide
  Antisense strand to SEQ ID NO: 1329186
uagagaaguagaaaguccc

SEQ ID NO: 1329188 - RNA, 19 nt, Artificial Sequence
  Description of Artificial Sequence: Synthetic oligonucleotide
  Sense strand starting at position 2427 of SEQ ID NO: 1242193
cagggccaguuauuaaaua

SEQ ID NO: 1329189 - RNA, 19 nt, Artificial Sequence
  Description of Artificial Sequence: Synthetic oligonucleotide
  Antisense strand to SEQ ID NO: 1329188
uauuuaauaacuggcccug

SEQ ID NO: 1329190 - RNA, 19 nt, Artificial Sequence
  Description of Artificial Sequence: Synthetic oligonucleotide
  Sense strand starting at position 2658 of SEQ ID NO: 1242193
ggcccuaucgacuaggauu

SEQ ID NO: 1329191 - RNA, 19 nt, Artificial Sequence
  Description of Artificial Sequence: Synthetic oligonucleotide
  Antisense strand to SEQ ID NO: 1329190
aauccuagucgauagggcc

SEQ ID NO: 1329192 - RNA, 19 nt, Artificial Sequence
  Description of Artificial Sequence: Synthetic oligonucleotide
  Sense strand starting at position 2813 of SEQ ID NO: 1242193
ugagauguagccugagaau

SEQ ID NO: 1329193 - RNA, 19 nt, Artificial Sequence
  Description of Artificial Sequence: Synthetic oligonucleotide
  Antisense strand to SEQ ID NO: 1329192
auucucaggcuacaucuca

SEQ ID NO: 1329194 - RNA, 19 nt, Artificial Sequence
  Description of Artificial Sequence: Synthetic oligonucleotide
  Sense strand starting at position 2858 of SEQ ID NO: 1242193
guugguuaugagggauaag

SEQ ID NO: 1329195 - RNA, 19 nt, Artificial Sequence
  Description of Artificial Sequence: Synthetic oligonucleotide
  Antisense strand to SEQ ID NO: 1329194
cuuaucccucauaaccaac

SEQ ID NO: 1329196 - RNA, 19 nt, Artificial Sequence
  Description of Artificial Sequence: Synthetic oligonucleotide
  Sense strand starting at position 2894 of SEQ ID NO: 1242193
guaaauacguaauuacaga

SEQ ID NO: 1329197 - RNA, 19 nt, Artificial Sequence
  Description of Artificial Sequence: Synthetic oligonucleotide
  Antisense strand to SEQ ID NO: 1329196
ucuguaauuacguauuuac

SEQ ID NO: 1329198 - RNA, 19 nt, Artificial Sequence
  Description of Artificial Sequence: Synthetic oligonucleotide
  Sense strand starting at position 2902 of SEQ ID NO: 1242193
guaauuacagaguagggua

SEQ ID NO: 1329199 - RNA, 19 nt, Artificial Sequence
  Description of Artificial Sequence: Synthetic oligonucleotide
  Antisense strand to SEQ ID NO: 1329198
uacccuacucuguaauuac

SEQ ID NO: 1329200 - RNA, 19 nt, Artificial Sequence
  Description of Artificial Sequence: Synthetic oligonucleotide
  Sense strand starting at position 2916 of SEQ ID NO: 1242193
ggguaaaugcuguggagga

SEQ ID NO: 1329201 - RNA, 19 nt, Artificial Sequence
  Description of Artificial Sequence: Synthetic oligonucleotide
  Antisense strand to SEQ ID NO: 1329200
uccuccacagcauuuaccc

SEQ ID NO: 1329202 - RNA, 19 nt, Artificial Sequence
  Description of Artificial Sequence: Synthetic oligonucleotide
  Sense strand starting at position 2918 of SEQ ID NO: 1242193
guaaaugcuguggaggaaa

SEQ ID NO: 1329203 - RNA, 19 nt, Artificial Sequence
  Description of Artificial Sequence: Synthetic oligonucleotide
  Antisense strand to SEQ ID NO: 1329202
uuuccuccacagcauuuac

SEQ ID NO: 1329204 - RNA, 19 nt, Artificial Sequence
  Description of Artificial Sequence: Synthetic oligonucleotide
  Sense strand starting at position 2958 of SEQ ID NO: 1242193
gguugaacucaucacggau

SEQ ID NO: 1329205 - RNA, 19 nt, Artificial Sequence
  Description of Artificial Sequence: Synthetic oligonucleotide
  Antisense strand to SEQ ID NO: 1329204
auccgugaugaguucaacc

SEQ ID NO: 1329206 - RNA, 19 nt, Artificial Sequence
  Description of Artificial Sequence: Synthetic oligonucleotide
  Sense strand starting at position 2961 of SEQ ID NO: 1242193
ugaacucaucacggaucaa

SEQ ID NO: 1329207 - RNA, 19 nt, Artificial Sequence
  Description of Artificial Sequence: Synthetic oligonucleotide
  Antisense strand to SEQ ID NO: 1329206
uugauccgugaugaguuca

SEQ ID NO: 1329208 - RNA, 19 nt, Artificial Sequence
  Description of Artificial Sequence: Synthetic oligonucleotide
  Sense strand starting at position 3203 of SEQ ID NO: 1242193
gaggacaguuuaucauugu

SEQ ID NO: 1329209 - RNA, 19 nt, Artificial Sequence
  Description of Artificial Sequence: Synthetic oligonucleotide
  Antisense strand to SEQ ID NO: 1329208
acaaugauaaacuguccuc

SEQ ID NO: 1329210 - RNA, 19 nt, Artificial Sequence
  Description of Artificial Sequence: Synthetic oligonucleotide
  Sense strand starting at position 3206 of SEQ ID NO: 1242193
gacaguuuaucauugugaa

SEQ ID NO: 1329211 - RNA, 19 nt, Artificial Sequence
  Description of Artificial Sequence: Synthetic oligonucleotide
  Antisense strand to SEQ ID NO: 1329210
uucacaaugauaaacuguc

SEQ ID NO: 1329212 - RNA, 19 nt, Artificial Sequence
  Description of Artificial Sequence: Synthetic oligonucleotide
  Sense strand starting at position 3207 of SEQ ID NO: 1242193
acaguuuaucauugugaag

SEQ ID NO: 1329213 - RNA, 19 nt, Artificial Sequence
  Description of Artificial Sequence: Synthetic oligonucleotide
  Antisense strand to SEQ ID NO: 1329212
cuucacaaugauaaacugu

SEQ ID NO: 1329214 - RNA, 19 nt, Artificial Sequence
  Description of Artificial Sequence: Synthetic oligonucleotide
  Sense strand starting at position 3280 of SEQ ID NO: 1242193
ucaggacuuugucucuaua

SEQ ID NO: 1329215 - RNA, 19 nt, Artificial Sequence
  Description of Artificial Sequence: Synthetic oligonucleotide
  Antisense strand to SEQ ID NO: 1329214
uauagagacaaaguccuga

SEQ ID NO: 1329216 - RNA, 19 nt, Artificial Sequence
  Description of Artificial Sequence: Synthetic oligonucleotide
  Sense strand starting at position 3328 of SEQ ID NO: 1242193
gagcuucucccaggaugaa

SEQ ID NO: 1329217 - RNA, 19 nt, Artificial Sequence
  Description of Artificial Sequence: Synthetic oligonucleotide
  Antisense strand to SEQ ID NO: 1329216
uucauccugggagaagcuc

SEQ ID NO: 1329218 - RNA, 19 nt, Artificial Sequence
  Description of Artificial Sequence: Synthetic oligonucleotide
  Sense strand starting at position 3337 of SEQ ID NO: 1242193
ccaggaugaacuugguauc

SEQ ID NO: 1329219 - RNA, 19 nt, Artificial Sequence
  Description of Artificial Sequence: Synthetic oligonucleotide
  Antisense strand to SEQ ID NO: 1329218
gauaccaaguucauccugg

SEQ ID NO: 1329220 - RNA, 19 nt, Artificial Sequence
  Description of Artificial Sequence: Synthetic oligonucleotide
  Sense strand starting at position 3349 of SEQ ID NO: 1242193
ugguaucuucugcagacaa

SEQ ID NO: 1329221 - RNA, 19 nt, Artificial Sequence
  Description of Artificial Sequence: Synthetic oligonucleotide
  Antisense strand to SEQ ID NO: 1329220
uugucugcagaagauacca

SEQ ID NO: 1329222 - RNA, 19 nt, Artificial Sequence
  Description of Artificial Sequence: Synthetic oligonucleotide
  Sense strand starting at position 3351 of SEQ ID NO: 1242193
guaucuucugcagacaaug

SEQ ID NO: 1329223 - RNA, 19 nt, Artificial Sequence
  Description of Artificial Sequence: Synthetic oligonucleotide
  Antisense strand to SEQ ID NO: 1329222
cauugucugcagaagauac

SEQ ID NO: 1329224 - RNA, 19 nt, Artificial Sequence
  Description of Artificial Sequence: Synthetic oligonucleotide
  Sense strand starting at position 3431 of SEQ ID NO: 1242193
guucuacuuagagguagga

SEQ ID NO: 1329225 - RNA, 19 nt, Artificial Sequence
  Description of Artificial Sequence: Synthetic oligonucleotide
  Antisense strand to SEQ ID NO: 1329224
uccuaccucuaaguagaac

SEQ ID NO: 1329226 - RNA, 19 nt, Artificial Sequence
  Description of Artificial Sequence: Synthetic oligonucleotide
  Sense strand starting at position 3500 of SEQ ID NO: 1242193
ggacgagauuaccuaguuu

SEQ ID NO: 1329227 - RNA, 19 nt, Artificial Sequence
  Description of Artificial Sequence: Synthetic oligonucleotide
  Antisense strand to SEQ ID NO: 1329226
aaacuagguaaucucgucc

SEQ ID NO: 1329228 - RNA, 19 nt, Artificial Sequence
  Description of Artificial Sequence: Synthetic oligonucleotide
  Sense strand starting at position 3504 of SEQ ID NO: 1242193
gagauuaccuaguuuacag

SEQ ID NO: 1329229 - RNA, 19 nt, Artificial Sequence
  Description of Artificial Sequence: Synthetic oligonucleotide
  Antisense strand to SEQ ID NO: 1329228
cuguaaacuagguaaucuc

SEQ ID NO: 1329230 - RNA, 19 nt, Artificial Sequence
  Description of Artificial Sequence: Synthetic oligonucleotide
  Sense strand starting at position 3512 of SEQ ID NO: 1242193
cuaguuuacagauacgaug

SEQ ID NO: 1329231 - RNA, 19 nt, Artificial Sequence
  Description of Artificial Sequence: Synthetic oligonucleotide
  Antisense strand to SEQ ID NO: 1329230
caucguaucuguaaacuag

SEQ ID NO: 1329232 - RNA, 19 nt, Artificial Sequence
  Description of Artificial Sequence: Synthetic oligonucleotide
  Sense strand starting at position 3577 of SEQ ID NO: 1242193
acagaaaggugucucuauc

SEQ ID NO: 1329233 - RNA, 19 nt, Artificial Sequence
  Description of Artificial Sequence: Synthetic oligonucleotide
  Antisense strand to SEQ ID NO: 1329232
gauagagacaccuuucugu

SEQ ID NO: 1329234 - RNA, 19 nt, Artificial Sequence
  Description of Artificial Sequence: Synthetic oligonucleotide
  Sense strand starting at position 3613 of SEQ ID NO: 1242193
uuguuuggauaucuuaauc

SEQ ID NO: 1329235 - RNA, 19 nt, Artificial Sequence
  Description of Artificial Sequence: Synthetic oligonucleotide
  Antisense strand to SEQ ID NO: 1329234
gauuaagauauccaaacaa

SEQ ID NO: 1329236 - RNA, 19 nt, Artificial Sequence
  Description of Artificial Sequence: Synthetic oligonucleotide
  Sense strand starting at position 3618 of SEQ ID NO: 1242193
uggauaucuuaaucaaguu

SEQ ID NO: 1329237 - RNA, 19 nt, Artificial Sequence
  Description of Artificial Sequence: Synthetic oligonucleotide
  Antisense strand to SEQ ID NO: 1329236
aacuugauuaagauaucca

SEQ ID NO: 1329238 - RNA, 19 nt, Artificial Sequence
  Description of Artificial Sequence: Synthetic oligonucleotide
  Sense strand starting at position 3627 of SEQ ID NO: 1242193
uaaucaaguuauguaagag

SEQ ID NO: 1329239 - RNA, 19 nt, Artificial Sequence
  Description of Artificial Sequence: Synthetic oligonucleotide
  Antisense strand to SEQ ID NO: 1329238
cucuuacauaacuugauua

SEQ ID NO: 1329240 - RNA, 19 nt, Artificial Sequence
  Description of Artificial Sequence: Synthetic oligonucleotide
  Sense strand starting at position 3668 of SEQ ID NO: 1242193
cauguuacagaugaguuua

SEQ ID NO: 1329241 - RNA, 19 nt, Artificial Sequence
  Description of Artificial Sequence: Synthetic oligonucleotide
  Antisense strand to SEQ ID NO: 1329240
uaaacucaucuguaacaug

SEQ ID NO: 1329242 - RNA, 19 nt, Artificial Sequence
  Description of Artificial Sequence: Synthetic oligonucleotide
  Sense strand starting at position 3679 of SEQ ID NO: 1242193
ugaguuuaacaguaaguac

SEQ ID NO: 1329243 - RNA, 19 nt, Artificial Sequence
  Description of Artificial Sequence: Synthetic oligonucleotide
  Antisense strand to SEQ ID NO: 1329242
guacuuacuguuaaacuca

SEQ ID NO: 1329244 - RNA, 19 nt, Artificial Sequence
  Description of Artificial Sequence: Synthetic oligonucleotide
  Sense strand starting at position 3762 of SEQ ID NO: 1242193
gugcuagguauggaguaaa

SEQ ID NO: 1329245 - RNA, 19 nt, Artificial Sequence
  Description of Artificial Sequence: Synthetic oligonucleotide
  Antisense strand to SEQ ID NO: 1329244
uuuacuccauaccuagcac

SEQ ID NO: 1329246 - RNA, 19 nt, Artificial Sequence
  Description of Artificial Sequence: Synthetic oligonucleotide
  Sense strand starting at position 3765 of SEQ ID NO: 1242193
cuagguauggaguaaaugu

SEQ ID NO: 1329247 - RNA, 19 nt, Artificial Sequence
  Description of Artificial Sequence: Synthetic oligonucleotide
  Antisense strand to SEQ ID NO: 1329246
acauuuacuccauaccuag

SEQ ID NO: 1329248 - RNA, 19 nt, Artificial Sequence
  Description of Artificial Sequence: Synthetic oligonucleotide
  Sense strand starting at position 3772 of SEQ ID NO: 1242193
uggaguaaauguuuaauac

SEQ ID NO: 1329249 - RNA, 19 nt, Artificial Sequence
  Description of Artificial Sequence: Synthetic oligonucleotide
  Antisense strand to SEQ ID NO: 1329248
guauuaaacauuuacucca

SEQ ID NO: 1329250 - RNA, 19 nt, Artificial Sequence
  Description of Artificial Sequence: Synthetic oligonucleotide
  Sense strand starting at position 27 of SEQ ID NO: 1242194
uaacgagagugacuugaaa

SEQ ID NO: 1329251 - RNA, 19 nt, Artificial Sequence
  Description of Artificial Sequence: Synthetic oligonucleotide
  Antisense strand to SEQ ID NO: 1329250
uuucaagucacucucguua

SEQ ID NO: 1329252 - RNA, 19 nt, Artificial Sequence
  Description of Artificial Sequence: Synthetic oligonucleotide
  Sense strand starting at position 159 of SEQ ID NO: 1242194
caaagugagcaagaauguu

SEQ ID NO: 1329253 - RNA, 19 nt, Artificial Sequence
  Description of Artificial Sequence: Synthetic oligonucleotide
  Antisense strand to SEQ ID NO: 1329252
aacauucuugcucacuuug

SEQ ID NO: 1329254 - RNA, 19 nt, Artificial Sequence
  Description of Artificial Sequence: Synthetic oligonucleotide
  Sense strand starting at position 168 of SEQ ID NO: 1242194
caagaauguuggucccaga

SEQ ID NO: 1329255 - RNA, 19 nt, Artificial Sequence
  Description of Artificial Sequence: Synthetic oligonucleotide
  Antisense strand to SEQ ID NO: 1329254
ucugggaccaacauucuug

SEQ ID NO: 1329256 - RNA, 19 nt, Artificial Sequence
  Description of Artificial Sequence: Synthetic oligonucleotide
  Sense strand starting at position 201 of SEQ ID NO: 1242194
gggugcagugugagguauu

SEQ ID NO: 1329257 - RNA, 19 nt, Artificial Sequence
  Description of Artificial Sequence: Synthetic oligonucleotide
  Antisense strand to SEQ ID NO: 1329256
aauaccucacacugcaccc

SEQ ID NO: 1329258 - RNA, 19 nt, Artificial Sequence
  Description of Artificial Sequence: Synthetic oligonucleotide
  Sense strand starting at position 495 of SEQ ID NO: 1242194
gugcuuagugaugaauaau

SEQ ID NO: 1329259 - RNA, 19 nt, Artificial Sequence
  Description of Artificial Sequence: Synthetic oligonucleotide
  Antisense strand to SEQ ID NO: 1329258
auuauucaucacuaagcac

SEQ ID NO: 1329260 - RNA, 19 nt, Artificial Sequence
  Description of Artificial Sequence: Synthetic oligonucleotide
  Sense strand starting at position 559 of SEQ ID NO: 1242194
aguagagagauaugguuau

SEQ ID NO: 1329261 - RNA, 19 nt, Artificial Sequence
  Description of Artificial Sequence: Synthetic oligonucleotide
  Antisense strand to SEQ ID NO: 1329260
auaaccauaucucucuacu

SEQ ID NO: 1329262 - RNA, 19 nt, Artificial Sequence
  Description of Artificial Sequence: Synthetic oligonucleotide
  Sense strand starting at position 565 of SEQ ID NO: 1242194
gagauaugguuauccugga

SEQ ID NO: 1329263 - RNA, 19 nt, Artificial Sequence
  Description of Artificial Sequence: Synthetic oligonucleotide
  Antisense strand to SEQ ID NO: 1329262
uccaggauaaccauaucuc

SEQ ID NO: 1329264 - RNA, 19 nt, Artificial Sequence
  Description of Artificial Sequence: Synthetic oligonucleotide
  Sense strand starting at position 566 of SEQ ID NO: 1242194
agauaugguuauccuggau

SEQ ID NO: 1329265 - RNA, 19 nt, Artificial Sequence
  Description of Artificial Sequence: Synthetic oligonucleotide
  Antisense strand to SEQ ID NO: 1329264
auccaggauaaccauaucu

SEQ ID NO: 1329266 - RNA, 19 nt, Artificial Sequence
  Description of Artificial Sequence: Synthetic oligonucleotide
  Sense strand starting at position 606 of SEQ ID NO: 1242194
cugaaauuaccugguuaaa

SEQ ID NO: 1329267 - RNA, 19 nt, Artificial Sequence
  Description of Artificial Sequence: Synthetic oligonucleotide
  Antisense strand to SEQ ID NO: 1329266
uuuaaccagguaauuucag

SEQ ID NO: 1329268 - RNA, 19 nt, Artificial Sequence
  Description of Artificial Sequence: Synthetic oligonucleotide
  Sense strand starting at position 710 of SEQ ID NO: 1242194
uacuuugugcuagaguaga

SEQ ID NO: 1329269 - RNA, 19 nt, Artificial Sequence
  Description of Artificial Sequence: Synthetic oligonucleotide
  Antisense strand to SEQ ID NO: 1329268
ucuacucuagcacaaagua

SEQ ID NO: 1329270 - RNA, 19 nt, Artificial Sequence
  Description of Artificial Sequence: Synthetic oligonucleotide
  Sense strand starting at position 727 of SEQ ID NO: 1242194
gaugacauguaauauuuga

SEQ ID NO: 1329271 - RNA, 19 nt, Artificial Sequence
  Description of Artificial Sequence: Synthetic oligonucleotide
  Antisense strand to SEQ ID NO: 1329270
ucaaauauuacaugucauc

SEQ ID NO: 1329272 - RNA, 19 nt, Artificial Sequence
  Description of Artificial Sequence: Synthetic oligonucleotide
  Sense strand starting at position 833 of SEQ ID NO: 1242194
cuagaaauauccucgguua

SEQ ID NO: 1329273 - RNA, 19 nt, Artificial Sequence
  Description of Artificial Sequence: Synthetic oligonucleotide
  Antisense strand to SEQ ID NO: 1329272
uaaccgaggauauuucuag

SEQ ID NO: 1329274 - RNA, 19 nt, Artificial Sequence
  Description of Artificial Sequence: Synthetic oligonucleotide
  Sense strand starting at position 835 of SEQ ID NO: 1242194
agaaauauccucgguuaua

SEQ ID NO: 1329275 - RNA, 19 nt, Artificial Sequence
  Description of Artificial Sequence: Synthetic oligonucleotide
  Antisense strand to SEQ ID NO: 1329274
uauaaccgaggauauuucu

SEQ ID NO: 1329276 - RNA, 19 nt, Artificial Sequence
  Description of Artificial Sequence: Synthetic oligonucleotide
  Sense strand starting at position 836 of SEQ ID NO: 1242194
gaaauauccucgguuauau

SEQ ID NO: 1329277 - RNA, 19 nt, Artificial Sequence
  Description of Artificial Sequence: Synthetic oligonucleotide
  Antisense strand to SEQ ID NO: 1329276
auauaaccgaggauauuuc

SEQ ID NO: 1329278 - RNA, 19 nt, Artificial Sequence
  Description of Artificial Sequence: Synthetic oligonucleotide
  Sense strand starting at position 962 of SEQ ID NO: 1242194
cugucugacaguuauguaa

SEQ ID NO: 1329279 - RNA, 19 nt, Artificial Sequence
  Description of Artificial Sequence: Synthetic oligonucleotide
  Antisense strand to SEQ ID NO: 1329278
uuacauaacugucagacag

SEQ ID NO: 1329280 - RNA, 19 nt, Artificial Sequence
  Description of Artificial Sequence: Synthetic oligonucleotide
  Sense strand starting at position 994 of SEQ ID NO: 1242194
ucacgcuuuagggacuaua

SEQ ID NO: 1329281 - RNA, 19 nt, Artificial Sequence
  Description of Artificial Sequence: Synthetic oligonucleotide
  Antisense strand to SEQ ID NO: 1329280
uauagucccuaaagcguga

SEQ ID NO: 1329282 - RNA, 19 nt, Artificial Sequence
  Description of Artificial Sequence: Synthetic oligonucleotide
  Sense strand starting at position 1143 of SEQ ID NO: 1242194
ucauacuuuggauaguuua

SEQ ID NO: 1329283 - RNA, 19 nt, Artificial Sequence
  Description of Artificial Sequence: Synthetic oligonucleotide
  Antisense strand to SEQ ID NO: 1329282
uaaacuauccaaaguauga

SEQ ID NO: 1329284 - RNA, 19 nt, Artificial Sequence
  Description of Artificial Sequence: Synthetic oligonucleotide
  Sense strand starting at position 1523 of SEQ ID NO: 1242194
gcgggcugaacauaaauua

SEQ ID NO: 1329285 - RNA, 19 nt, Artificial Sequence
  Description of Artificial Sequence: Synthetic oligonucleotide
  Antisense strand to SEQ ID NO: 1329284
uaauuuauguucagcccgc

SEQ ID NO: 1329286 - RNA, 19 nt, Artificial Sequence
  Description of Artificial Sequence: Synthetic oligonucleotide
  Sense strand starting at position 2001 of SEQ ID NO: 1242194
uauagugaaggaugaguau

SEQ ID NO: 1329287 - RNA, 19 nt, Artificial Sequence
  Description of Artificial Sequence: Synthetic oligonucleotide
  Antisense strand to SEQ ID NO: 1329286
auacucauccuucacuaua

SEQ ID NO: 1329288 - RNA, 19 nt, Artificial Sequence
  Description of Artificial Sequence: Synthetic oligonucleotide
  Sense strand starting at position 2254 of SEQ ID NO: 1242194
cucuuuauuccuugggaua

SEQ ID NO: 1329289 - RNA, 19 nt, Artificial Sequence
  Description of Artificial Sequence: Synthetic oligonucleotide
  Antisense strand to SEQ ID NO: 1329288
uaucccaaggaauaaagag

SEQ ID NO: 1329290 - RNA, 19 nt, Artificial Sequence
  Description of Artificial Sequence: Synthetic oligonucleotide
  Sense strand starting at position 2255 of SEQ ID NO: 1242194
ucuuuauuccuugggauac

SEQ ID NO: 1329291 - RNA, 19 nt, Artificial Sequence
  Description of Artificial Sequence: Synthetic oligonucleotide
  Antisense strand to SEQ ID NO: 1329290
guaucccaaggaauaaaga

SEQ ID NO: 1329292 - RNA, 19 nt, Artificial Sequence
  Description of Artificial Sequence: Synthetic oligonucleotide
  Sense strand starting at position 2281 of SEQ ID NO: 1242194
agcccuauaccauguaaga

SEQ ID NO: 1329293 - RNA, 19 nt, Artificial Sequence
  Description of Artificial Sequence: Synthetic oligonucleotide
  Antisense strand to SEQ ID NO: 1329292
ucuuacaugguauagggcu

SEQ ID NO: 1329294 - RNA, 19 nt, Artificial Sequence
  Description of Artificial Sequence: Synthetic oligonucleotide
  Sense strand starting at position 2665 of SEQ ID NO: 1242194
auuccuuucugguugaaau

SEQ ID NO: 1329295 - RNA, 19 nt, Artificial Sequence
  Description of Artificial Sequence: Synthetic oligonucleotide
  Antisense strand to SEQ ID NO: 1329294
auuucaaccagaaaggaau

SEQ ID NO: 1329296 - RNA, 19 nt, Artificial Sequence
  Description of Artificial Sequence: Synthetic oligonucleotide
  Sense strand starting at position 2667 of SEQ ID NO: 1242194
uccuuucugguugaaauau

SEQ ID NO: 1329297 - RNA, 19 nt, Artificial Sequence
  Description of Artificial Sequence: Synthetic oligonucleotide
  Antisense strand to SEQ ID NO: 1329296
auauuucaaccagaaagga

SEQ ID NO: 1329298 - RNA, 19 nt, Artificial Sequence
  Description of Artificial Sequence: Synthetic oligonucleotide
  Sense strand starting at position 2757 of SEQ ID NO: 1242194
aguugucuagcauauuaaa

SEQ ID NO: 1329299 - RNA, 19 nt, Artificial Sequence
  Description of Artificial Sequence: Synthetic oligonucleotide
  Antisense strand to SEQ ID NO: 1329298
uuuaauaugcuagacaacu

SEQ ID NO: 1329300 - RNA, 19 nt, Artificial Sequence
  Description of Artificial Sequence: Synthetic oligonucleotide
  Sense strand starting at position 2867 of SEQ ID NO: 1242194
gcugcauuuaguuagcaga

SEQ ID NO: 1329301 - RNA, 19 nt, Artificial Sequence
  Description of Artificial Sequence: Synthetic oligonucleotide
  Antisense strand to SEQ ID NO: 1329300
ucugcuaacuaaaugcagc

SEQ ID NO: 1329302 - RNA, 19 nt, Artificial Sequence
  Description of Artificial Sequence: Synthetic oligonucleotide
  Sense strand starting at position 2869 of SEQ ID NO: 1242194
ugcauuuaguuagcagagu

SEQ ID NO: 1329303 - RNA, 19 nt, Artificial Sequence
  Description of Artificial Sequence: Synthetic oligonucleotide
  Antisense strand to SEQ ID NO: 1329302
acucugcuaacuaaaugca

SEQ ID NO: 1329304 - RNA, 19 nt, Artificial Sequence
  Description of Artificial Sequence: Synthetic oligonucleotide
  Sense strand starting at position 2892 of SEQ ID NO: 1242194
uuacguuguccguucagua

SEQ ID NO: 1329305 - RNA, 19 nt, Artificial Sequence
  Description of Artificial Sequence: Synthetic oligonucleotide
  Antisense strand to SEQ ID NO: 1329304
uacugaacggacaacguaa

SEQ ID NO: 1329306 - RNA, 19 nt, Artificial Sequence
  Description of Artificial Sequence: Synthetic oligonucleotide
  Sense strand starting at position 2957 of SEQ ID NO: 1242194
ugggcugaagaauguaaau

SEQ ID NO: 1329307 - RNA, 19 nt, Artificial Sequence
  Description of Artificial Sequence: Synthetic oligonucleotide
  Antisense strand to SEQ ID NO: 1329306
auuuacauucuucagccca

SEQ ID NO: 1329308 - RNA, 19 nt, Artificial Sequence
  Description of Artificial Sequence: Synthetic oligonucleotide
  Sense strand starting at position 2989 of SEQ ID NO: 1242194
aucgucgagcaaugaauuu

SEQ ID NO: 1329309 - RNA, 19 nt, Artificial Sequence
  Description of Artificial Sequence: Synthetic oligonucleotide
  Antisense strand to SEQ ID NO: 1329308
aaauucauugcucgacgau

SEQ ID NO: 1329310 - RNA, 19 nt, Artificial Sequence
  Description of Artificial Sequence: Synthetic oligonucleotide
  Sense strand starting at position 3026 of SEQ ID NO: 1242194
uccugucaucgcucgcuau

SEQ ID NO: 1329311 - RNA, 19 nt, Artificial Sequence
  Description of Artificial Sequence: Synthetic oligonucleotide
  Antisense strand to SEQ ID NO: 1329310
auagcgagcgaugacagga

SEQ ID NO: 1329312 - RNA, 19 nt, Artificial Sequence
  Description of Artificial Sequence: Synthetic oligonucleotide
  Sense strand starting at position 3028 of SEQ ID NO: 1242194
cugucaucgcucgcuauau

SEQ ID NO: 1329313 - RNA, 19 nt, Artificial Sequence
  Description of Artificial Sequence: Synthetic oligonucleotide
  Antisense strand to SEQ ID NO: 1329312
auauagcgagcgaugacag

SEQ ID NO: 1329314 - RNA, 19 nt, Artificial Sequence
  Description of Artificial Sequence: Synthetic oligonucleotide
  Sense strand starting at position 3104 of SEQ ID NO: 1242194
aacaaaugguaugucagua

SEQ ID NO: 1329315 - RNA, 19 nt, Artificial Sequence
  Description of Artificial Sequence: Synthetic oligonucleotide
  Antisense strand to SEQ ID NO: 1329314
uacugacauaccauuuguu

SEQ ID NO: 1329316 - RNA, 19 nt, Artificial Sequence
  Description of Artificial Sequence: Synthetic oligonucleotide
  Sense strand starting at position 3109 of SEQ ID NO: 1242194
augguaugucaguaccaua

SEQ ID NO: 1329317 - RNA, 19 nt, Artificial Sequence
  Description of Artificial Sequence: Synthetic oligonucleotide
  Antisense strand to SEQ ID NO: 1329316
uaugguacugacauaccau

SEQ ID NO: 1329318 - RNA, 19 nt, Artificial Sequence
  Description of Artificial Sequence: Synthetic oligonucleotide
  Sense strand starting at position 3114 of SEQ ID NO: 1242194
augucaguaccauagucau

SEQ ID NO: 1329319 - RNA, 19 nt, Artificial Sequence
  Description of Artificial Sequence: Synthetic oligonucleotide
  Antisense strand to SEQ ID NO: 1329318
augacuaugguacugacau

SEQ ID NO: 1329320 - RNA, 19 nt, Artificial Sequence
  Description of Artificial Sequence: Synthetic oligonucleotide
  Sense strand starting at position 3138 of SEQ ID NO: 1242194
cccagcuuaccucaucgaa

SEQ ID NO: 1329321 - RNA, 19 nt, Artificial Sequence
  Description of Artificial Sequence: Synthetic oligonucleotide
  Antisense strand to SEQ ID NO: 1329320
uucgaugagguaagcuggg

SEQ ID NO: 1329322 - RNA, 19 nt, Artificial Sequence
  Description of Artificial Sequence: Synthetic oligonucleotide
  Sense strand starting at position 3311 of SEQ ID NO: 1242194
cugccuggcggguaauuua

SEQ ID NO: 1329323 - RNA, 19 nt, Artificial Sequence
  Description of Artificial Sequence: Synthetic oligonucleotide
  Antisense strand to SEQ ID NO: 1329322
uaaauuacccgccaggcag

SEQ ID NO: 1329324 - RNA, 19 nt, Artificial Sequence
  Description of Artificial Sequence: Synthetic oligonucleotide
  Sense strand starting at position 3570 of SEQ ID NO: 1242194
ggucuuucccuugacaagu

SEQ ID NO: 1329325 - RNA, 19 nt, Artificial Sequence
  Description of Artificial Sequence: Synthetic oligonucleotide
  Antisense strand to SEQ ID NO: 1329324
acuugucaagggaaagacc

SEQ ID NO: 1329326 - RNA, 19 nt, Artificial Sequence
  Description of Artificial Sequence: Synthetic oligonucleotide
  Sense strand starting at position 3772 of SEQ ID NO: 1242194
cucuucucuggugaacaua

SEQ ID NO: 1329327 - RNA, 19 nt, Artificial Sequence
  Description of Artificial Sequence: Synthetic oligonucleotide
  Antisense strand to SEQ ID NO: 1329326
uauguucaccagagaagag

SEQ ID NO: 1329328 - RNA, 19 nt, Artificial Sequence
  Description of Artificial Sequence: Synthetic oligonucleotide
  Sense strand starting at position 3876 of SEQ ID NO: 1242194
auguuccauccggaauaau

SEQ ID NO: 1329329 - RNA, 19 nt, Artificial Sequence
  Description of Artificial Sequence: Synthetic oligonucleotide
  Antisense strand to SEQ ID NO: 1329328
auuauuccggauggaacau

SEQ ID NO: 1329330 - RNA, 19 nt, Artificial Sequence
  Description of Artificial Sequence: Synthetic oligonucleotide
  Sense strand starting at position 72 of SEQ ID NO: 1242195
gugauucuauugucaaugu

SEQ ID NO: 1329331 - RNA, 19 nt, Artificial Sequence
  Description of Artificial Sequence: Synthetic oligonucleotide
  Antisense strand to SEQ ID NO: 1329330
acauugacaauagaaucac

SEQ ID NO: 1329332 - RNA, 19 nt, Artificial Sequence
  Description of Artificial Sequence: Synthetic oligonucleotide
  Sense strand starting at position 83 of SEQ ID NO: 1242195
gucaaugugucaccauaua

SEQ ID NO: 1329333 - RNA, 19 nt, Artificial Sequence
  Description of Artificial Sequence: Synthetic oligonucleotide
  Antisense strand to SEQ ID NO: 1329332
uauauggugacacauugac

SEQ ID NO: 1329334 - RNA, 19 nt, Artificial Sequence
  Description of Artificial Sequence: Synthetic oligonucleotide
  Sense strand starting at position 125 of SEQ ID NO: 1242195
uuaugauauacaggugugu

SEQ ID NO: 1329335 - RNA, 19 nt, Artificial Sequence
  Description of Artificial Sequence: Synthetic oligonucleotide
  Antisense strand to SEQ ID NO: 1329334
acacaccuguauaucauaa

SEQ ID NO: 1329336 - RNA, 19 nt, Artificial Sequence
  Description of Artificial Sequence: Synthetic oligonucleotide
  Sense strand starting at position 176 of SEQ ID NO: 1242195
cagcaucugcuuuagugaa

SEQ ID NO: 1329337 - RNA, 19 nt, Artificial Sequence
  Description of Artificial Sequence: Synthetic oligonucleotide
  Antisense strand to SEQ ID NO: 1329336
uucacuaaagcagaugcug

SEQ ID NO: 1329338 - RNA, 19 nt, Artificial Sequence
  Description of Artificial Sequence: Synthetic oligonucleotide
  Sense strand starting at position 518 of SEQ ID NO: 1242195
gaaaguacucuuggguaau

SEQ ID NO: 1329339 - RNA, 19 nt, Artificial Sequence
  Description of Artificial Sequence: Synthetic oligonucleotide
  Antisense strand to SEQ ID NO: 1329338
auuacccaagaguacuuuc

SEQ ID NO: 1329340 - RNA, 19 nt, Artificial Sequence
  Description of Artificial Sequence: Synthetic oligonucleotide
  Sense strand starting at position 520 of SEQ ID NO: 1242195
aaguacucuuggguaaugu

SEQ ID NO: 1329341 - RNA, 19 nt, Artificial Sequence
  Description of Artificial Sequence: Synthetic oligonucleotide
  Antisense strand to SEQ ID NO: 1329340
acauuacccaagaguacuu

SEQ ID NO: 1329342 - RNA, 19 nt, Artificial Sequence
  Description of Artificial Sequence: Synthetic oligonucleotide
  Sense strand starting at position 521 of SEQ ID NO: 1242195
aguacucuuggguaaugua

SEQ ID NO: 1329343 - RNA, 19 nt, Artificial Sequence
  Description of Artificial Sequence: Synthetic oligonucleotide
  Antisense strand to SEQ ID NO: 1329342
uacauuacccaagaguacu

SEQ ID NO: 1329344 - RNA, 19 nt, Artificial Sequence
  Description of Artificial Sequence: Synthetic oligonucleotide
  Sense strand starting at position 528 of SEQ ID NO: 1242195
uuggguaauguacaccuaa

SEQ ID NO: 1329345 - RNA, 19 nt, Artificial Sequence
  Description of Artificial Sequence: Synthetic oligonucleotide
  Antisense strand to SEQ ID NO: 1329344
uuagguguacauuacccaa

SEQ ID NO: 1329346 - RNA, 19 nt, Artificial Sequence
  Description of Artificial Sequence: Synthetic oligonucleotide
  Sense strand starting at position 577 of SEQ ID NO: 1242195
aguaauagaugauacaaga

SEQ ID NO: 1329347 - RNA, 19 nt, Artificial Sequence
  Description of Artificial Sequence: Synthetic oligonucleotide
  Antisense strand to SEQ ID NO: 1329346
ucuuguaucaucuauuacu

SEQ ID NO: 1329348 - RNA, 19 nt, Artificial Sequence
  Description of Artificial Sequence: Synthetic oligonucleotide
  Sense strand starting at position 602 of SEQ ID NO: 1242195
ggaaacauacugugcuaaa

SEQ ID NO: 1329349 - RNA, 19 nt, Artificial Sequence
  Description of Artificial Sequence: Synthetic oligonucleotide
  Antisense strand to SEQ ID NO: 1329348
uuuagcacaguauguuucc

SEQ ID NO: 1329350 - RNA, 19 nt, Artificial Sequence
  Description of Artificial Sequence: Synthetic oligonucleotide
  Sense strand starting at position 632 of SEQ ID NO: 1242195
auguuaagacaauguuugu

SEQ ID NO: 1329351 - RNA, 19 nt, Artificial Sequence
  Description of Artificial Sequence: Synthetic oligonucleotide
  Antisense strand to SEQ ID NO: 1329350
acaaacauugucuuaacau

SEQ ID NO: 1329352 - RNA, 19 nt, Artificial Sequence
  Description of Artificial Sequence: Synthetic oligonucleotide
  Sense strand starting at position 741 of SEQ ID NO: 1242195
gcagguuaacacuauguua

SEQ ID NO: 1329353 - RNA, 19 nt, Artificial Sequence
  Description of Artificial Sequence: Synthetic oligonucleotide
  Antisense strand to SEQ ID NO: 1329352
uaacauaguguuaaccugc

SEQ ID NO: 1329354 - RNA, 19 nt, Artificial Sequence
  Description of Artificial Sequence: Synthetic oligonucleotide
  Sense strand starting at position 743 of SEQ ID NO: 1242195
agguuaacacuauguuaua

SEQ ID NO: 1329355 - RNA, 19 nt, Artificial Sequence
  Description of Artificial Sequence: Synthetic oligonucleotide
  Antisense strand to SEQ ID NO: 1329354
uauaacauaguguuaaccu

SEQ ID NO: 1329356 - RNA, 19 nt, Artificial Sequence
  Description of Artificial Sequence: Synthetic oligonucleotide
  Sense strand starting at position 744 of SEQ ID NO: 1242195
gguuaacacuauguuauau

SEQ ID NO: 1329357 - RNA, 19 nt, Artificial Sequence
  Description of Artificial Sequence: Synthetic oligonucleotide
  Antisense strand to SEQ ID NO: 1329356
auauaacauaguguuaacc

SEQ ID NO: 1329358 - RNA, 19 nt, Artificial Sequence
  Description of Artificial Sequence: Synthetic oligonucleotide
  Sense strand starting at position 820 of SEQ ID NO: 1242195
gaaucuauuucggauguga

SEQ ID NO: 1329359 - RNA, 19 nt, Artificial Sequence
  Description of Artificial Sequence: Synthetic oligonucleotide
  Antisense strand to SEQ ID NO: 1329358
ucacauccgaaauagauuc

SEQ ID NO: 1329360 - RNA, 19 nt, Artificial Sequence
  Description of Artificial Sequence: Synthetic oligonucleotide
  Sense strand starting at position 828 of SEQ ID NO: 1242195
uucggaugugagcaacaau

SEQ ID NO: 1329361 - RNA, 19 nt, Artificial Sequence
  Description of Artificial Sequence: Synthetic oligonucleotide
  Antisense strand to SEQ ID NO: 1329360
auuguugcucacauccgaa

SEQ ID NO: 1329362 - RNA, 19 nt, Artificial Sequence
  Description of Artificial Sequence: Synthetic oligonucleotide
  Sense strand starting at position 831 of SEQ ID NO: 1242195
ggaugugagcaacaauucu

SEQ ID NO: 1329363 - RNA, 19 nt, Artificial Sequence
  Description of Artificial Sequence: Synthetic oligonucleotide
  Antisense strand to SEQ ID NO: 1329362
agaauuguugcucacaucc

SEQ ID NO: 1329364 - RNA, 19 nt, Artificial Sequence
  Description of Artificial Sequence: Synthetic oligonucleotide
  Sense strand starting at position 908 of SEQ ID NO: 1242195
acuuguuugcacuaucuca

SEQ ID NO: 1329365 - RNA, 19 nt, Artificial Sequence
  Description of Artificial Sequence: Synthetic oligonucleotide
  Antisense strand to SEQ ID NO: 1329364
ugagauagugcaaacaagu

SEQ ID NO: 1329366 - RNA, 19 nt, Artificial Sequence
  Description of Artificial Sequence: Synthetic oligonucleotide
  Sense strand starting at position 944 of SEQ ID NO: 1242195
agcucaaaggcaugaaauc

SEQ ID NO: 1329367 - RNA, 19 nt, Artificial Sequence
  Description of Artificial Sequence: Synthetic oligonucleotide
  Antisense strand to SEQ ID NO: 1329366
gauuucaugccuuugagcu

SEQ ID NO: 1329368 - RNA, 19 nt, Artificial Sequence
  Description of Artificial Sequence: Synthetic oligonucleotide
  Sense strand starting at position 1151 of SEQ ID NO: 1242195
cucacagaauucguaccua

SEQ ID NO: 1329369 - RNA, 19 nt, Artificial Sequence
  Description of Artificial Sequence: Synthetic oligonucleotide
  Antisense strand to SEQ ID NO: 1329368
uagguacgaauucugugag

SEQ ID NO: 1329370 - RNA, 19 nt, Artificial Sequence
  Description of Artificial Sequence: Synthetic oligonucleotide
  Sense strand starting at position 1156 of SEQ ID NO: 1242195
agaauucguaccuaagcgu

SEQ ID NO: 1329371 - RNA, 19 nt, Artificial Sequence
  Description of Artificial Sequence: Synthetic oligonucleotide
  Antisense strand to SEQ ID NO: 1329370
acgcuuagguacgaauucu

SEQ ID NO: 1329372 - RNA, 19 nt, Artificial Sequence
  Description of Artificial Sequence: Synthetic oligonucleotide
  Sense strand starting at position 2110 of SEQ ID NO: 1242195
acugaauuauccucucggu

SEQ ID NO: 1329373 - RNA, 19 nt, Artificial Sequence
  Description of Artificial Sequence: Synthetic oligonucleotide
  Antisense strand to SEQ ID NO: 1329372
accgagaggauaauucagu

SEQ ID NO: 1329374 - RNA, 19 nt, Artificial Sequence
  Description of Artificial Sequence: Synthetic oligonucleotide
  Sense strand starting at position 2131 of SEQ ID NO: 1242195
guucuagaguaauuggaau

SEQ ID NO: 1329375 - RNA, 19 nt, Artificial Sequence
  Description of Artificial Sequence: Synthetic oligonucleotide
  Antisense strand to SEQ ID NO: 1329374
auuccaauuacucuagaac

SEQ ID NO: 1329376 - RNA, 19 nt, Artificial Sequence
  Description of Artificial Sequence: Synthetic oligonucleotide
  Sense strand starting at position 2312 of SEQ ID NO: 1242195
cucgcuuuccucugaagga

SEQ ID NO: 1329377 - RNA, 19 nt, Artificial Sequence
  Description of Artificial Sequence: Synthetic oligonucleotide
  Antisense strand to SEQ ID NO: 1329376
uccuucagaggaaagcgag

SEQ ID NO: 1329378 - RNA, 19 nt, Artificial Sequence
  Description of Artificial Sequence: Synthetic oligonucleotide
  Sense strand starting at position 2345 of SEQ ID NO: 1242195
aagggauacuggucacuug

SEQ ID NO: 1329379 - RNA, 19 nt, Artificial Sequence
  Description of Artificial Sequence: Synthetic oligonucleotide
  Antisense strand to SEQ ID NO: 1329378
caagugaccaguaucccuu

SEQ ID NO: 1329380 - RNA, 19 nt, Artificial Sequence
  Description of Artificial Sequence: Synthetic oligonucleotide
  Sense strand starting at position 2905 of SEQ ID NO: 1242195
ccuccuuaucgugacuuaa

SEQ ID NO: 1329381 - RNA, 19 nt, Artificial Sequence
  Description of Artificial Sequence: Synthetic oligonucleotide
  Antisense strand to SEQ ID NO: 1329380
uuaagucacgauaaggagg

SEQ ID NO: 1329382 - RNA, 19 nt, Artificial Sequence
  Description of Artificial Sequence: Synthetic oligonucleotide
  Sense strand starting at position 2907 of SEQ ID NO: 1242195
uccuuaucgugacuuaaua

SEQ ID NO: 1329383 - RNA, 19 nt, Artificial Sequence
  Description of Artificial Sequence: Synthetic oligonucleotide
  Antisense strand to SEQ ID NO: 1329382
uauuaagucacgauaagga

SEQ ID NO: 1329384 - RNA, 19 nt, Artificial Sequence
  Description of Artificial Sequence: Synthetic oligonucleotide
  Sense strand starting at position 2918 of SEQ ID NO: 1242195
acuuaauaguuucuaggau

SEQ ID NO: 1329385 - RNA, 19 nt, Artificial Sequence
  Description of Artificial Sequence: Synthetic oligonucleotide
  Antisense strand to SEQ ID NO: 1329384
auccuagaaacuauuaagu

SEQ ID NO: 1329386 - RNA, 19 nt, Artificial Sequence
  Description of Artificial Sequence: Synthetic oligonucleotide
  Sense strand starting at position 2945 of SEQ ID NO: 1242195
cggugaacuaugugaugga

SEQ ID NO: 1329387 - RNA, 19 nt, Artificial Sequence
  Description of Artificial Sequence: Synthetic oligonucleotide
  Antisense strand to SEQ ID NO: 1329386
uccaucacauaguucaccg

SEQ ID NO: 1329388 - RNA, 19 nt, Artificial Sequence
  Description of Artificial Sequence: Synthetic oligonucleotide
  Sense strand starting at position 2949 of SEQ ID NO: 1242195
gaacuaugugauggacauu

SEQ ID NO: 1329389 - RNA, 19 nt, Artificial Sequence
  Description of Artificial Sequence: Synthetic oligonucleotide
  Antisense strand to SEQ ID NO: 1329388
aauguccaucacauaguuc

SEQ ID NO: 1329390 - RNA, 19 nt, Artificial Sequence
  Description of Artificial Sequence: Synthetic oligonucleotide
  Sense strand starting at position 3067 of SEQ ID NO: 1242195
gugaccugucagggucaca

SEQ ID NO: 1329391 - RNA, 19 nt, Artificial Sequence
  Description of Artificial Sequence: Synthetic oligonucleotide
  Antisense strand to SEQ ID NO: 1329390
ugugacccugacaggucac

SEQ ID NO: 1329392 - RNA, 19 nt, Artificial Sequence
  Description of Artificial Sequence: Synthetic oligonucleotide
  Sense strand starting at position 3078 of SEQ ID NO: 1242195
gggucacagcuucagagua

SEQ ID NO: 1329393 - RNA, 19 nt, Artificial Sequence
  Description of Artificial Sequence: Synthetic oligonucleotide
  Antisense strand to SEQ ID NO: 1329392
uacucugaagcugugaccc

SEQ ID NO: 1329394 - RNA, 19 nt, Artificial Sequence
  Description of Artificial Sequence: Synthetic oligonucleotide
  Sense strand starting at position 3197 of SEQ ID NO: 1242195
uacugauuauguuuaucga

SEQ ID NO: 1329395 - RNA, 19 nt, Artificial Sequence
  Description of Artificial Sequence: Synthetic oligonucleotide
  Antisense strand to SEQ ID NO: 1329394
ucgauaaacauaaucagua

SEQ ID NO: 1329396 - RNA, 19 nt, Artificial Sequence
  Description of Artificial Sequence: Synthetic oligonucleotide
  Sense strand starting at position 3200 of SEQ ID NO: 1242195
ugauuauguuuaucgaggu

SEQ ID NO: 1329397 - RNA, 19 nt, Artificial Sequence
  Description of Artificial Sequence: Synthetic oligonucleotide
  Antisense strand to SEQ ID NO: 1329396
accucgauaaacauaauca

SEQ ID NO: 1329398 - RNA, 19 nt, Artificial Sequence
  Description of Artificial Sequence: Synthetic oligonucleotide
  Sense strand starting at position 3210 of SEQ ID NO: 1242195
uaucgaggucuuuaggaga

SEQ ID NO: 1329399 - RNA, 19 nt, Artificial Sequence
  Description of Artificial Sequence: Synthetic oligonucleotide
  Antisense strand to SEQ ID NO: 1329398
ucuccuaaagaccucgaua

SEQ ID NO: 1329400 - RNA, 19 nt, Artificial Sequence
  Description of Artificial Sequence: Synthetic oligonucleotide
  Sense strand starting at position 3338 of SEQ ID NO: 1242195
ccaaaugguuguuugcauu

SEQ ID NO: 1329401 - RNA, 19 nt, Artificial Sequence
  Description of Artificial Sequence: Synthetic oligonucleotide
  Antisense strand to SEQ ID NO: 1329400
aaugcaaacaaccauuugg

SEQ ID NO: 1329402 - RNA, 19 nt, Artificial Sequence
  Description of Artificial Sequence: Synthetic oligonucleotide
  Sense strand starting at position 3345 of SEQ ID NO: 1242195
guuguuugcauuugaagau

SEQ ID NO: 1329403 - RNA, 19 nt, Artificial Sequence
  Description of Artificial Sequence: Synthetic oligonucleotide
  Antisense strand to SEQ ID NO: 1329402
aucuucaaaugcaaacaac

SEQ ID NO: 1329404 - RNA, 19 nt, Artificial Sequence
  Description of Artificial Sequence: Synthetic oligonucleotide
  Sense strand starting at position 3655 of SEQ ID NO: 1242195
gguguaaaucagcaaguca

SEQ ID NO: 1329405 - RNA, 19 nt, Artificial Sequence
  Description of Artificial Sequence: Synthetic oligonucleotide
  Antisense strand to SEQ ID NO: 1329404
ugacuugcugauuuacacc

SEQ ID NO: 1329406 - RNA, 19 nt, Artificial Sequence
  Description of Artificial Sequence: Synthetic oligonucleotide
  Sense strand starting at position 3726 of SEQ ID NO: 1242195
uggcucuucugcuccaaga

SEQ ID NO: 1329407 - RNA, 19 nt, Artificial Sequence
  Description of Artificial Sequence: Synthetic oligonucleotide
  Antisense strand to SEQ ID NO: 1329406
ucuuggagcagaagagcca

SEQ ID NO: 1329408 - RNA, 19 nt, Artificial Sequence
  Description of Artificial Sequence: Synthetic oligonucleotide
  Sense strand starting at position 3829 of SEQ ID NO: 1242195
ugcugucacccuggaagaa

SEQ ID NO: 1329409 - RNA, 19 nt, Artificial Sequence
  Description of Artificial Sequence: Synthetic oligonucleotide
  Antisense strand to SEQ ID NO: 1329408
uucuuccagggugacagca

SEQ ID NO: 1329410 - RNA, 19 nt, Artificial Sequence
  Description of Artificial Sequence: Synthetic oligonucleotide
  Sense strand starting at position 429 of SEQ ID NO: 1242196
aguucuuugcuuguauguu

SEQ ID NO: 1329411 - RNA, 19 nt, Artificial Sequence
  Description of Artificial Sequence: Synthetic oligonucleotide
  Antisense strand to SEQ ID NO: 1329410
aacauacaagcaaagaacu

SEQ ID NO: 1329412 - RNA, 19 nt, Artificial Sequence
  Description of Artificial Sequence: Synthetic oligonucleotide
  Sense strand starting at position 480 of SEQ ID NO: 1242196
ugcauauauccaugaagca

SEQ ID NO: 1329413 - RNA, 19 nt, Artificial Sequence
  Description of Artificial Sequence: Synthetic oligonucleotide
  Antisense strand to SEQ ID NO: 1329412
ugcuucauggauauaugca

SEQ ID NO: 1329414 - RNA, 19 nt, Artificial Sequence
  Description of Artificial Sequence: Synthetic oligonucleotide
  Sense strand starting at position 481 of SEQ ID NO: 1242196
gcauauauccaugaagcag

SEQ ID NO: 1329415 - RNA, 19 nt, Artificial Sequence
  Description of Artificial Sequence: Synthetic oligonucleotide
  Antisense strand to SEQ ID NO: 1329414
cugcuucauggauauaugc

SEQ ID NO: 1329416 - RNA, 19 nt, Artificial Sequence
  Description of Artificial Sequence: Synthetic oligonucleotide
  Sense strand starting at position 566 of SEQ ID NO: 1242196
uuggaaugauuccuuugga

SEQ ID NO: 1329417 - RNA, 19 nt, Artificial Sequence
  Description of Artificial Sequence: Synthetic oligonucleotide
  Antisense strand to SEQ ID NO: 1329416
uccaaaggaaucauuccaa

SEQ ID NO: 1329418 - RNA, 19 nt, Artificial Sequence
  Description of Artificial Sequence: Synthetic oligonucleotide
  Sense strand starting at position 583 of SEQ ID NO: 1242196
gaauaauagcauggauagu

SEQ ID NO: 1329419 - RNA, 19 nt, Artificial Sequence
  Description of Artificial Sequence: Synthetic oligonucleotide
  Antisense strand to SEQ ID NO: 1329418
acuauccaugcuauuauuc

SEQ ID NO: 1329420 - RNA, 19 nt, Artificial Sequence
  Description of Artificial Sequence: Synthetic oligonucleotide
  Sense strand starting at position 593 of SEQ ID NO: 1242196
auggauaguuuaccaaucu

SEQ ID NO: 1329421 - RNA, 19 nt, Artificial Sequence
  Description of Artificial Sequence: Synthetic oligonucleotide
  Antisense strand to SEQ ID NO: 1329420
agauugguaaacuauccau

SEQ ID NO: 1329422 - RNA, 19 nt, Artificial Sequence
  Description of Artificial Sequence: Synthetic oligonucleotide
  Sense strand starting at position 660 of SEQ ID NO: 1242196
gucuuuguugaacaaucuu

SEQ ID NO: 1329423 - RNA, 19 nt, Artificial Sequence
  Description of Artificial Sequence: Synthetic oligonucleotide
  Antisense strand to SEQ ID NO: 1329422
aagauuguucaacaaagac

SEQ ID NO: 1329424 - RNA, 19 nt, Artificial Sequence
  Description of Artificial Sequence: Synthetic oligonucleotide
  Sense strand starting at position 797 of SEQ ID NO: 1242196
gugaauuacuacucagauu

SEQ ID NO: 1329425 - RNA, 19 nt, Artificial Sequence
  Description of Artificial Sequence: Synthetic oligonucleotide
  Antisense strand to SEQ ID NO: 1329424
aaucugaguaguaauucac

SEQ ID NO: 1329426 - RNA, 19 nt, Artificial Sequence
  Description of Artificial Sequence: Synthetic oligonucleotide
  Sense strand starting at position 847 of SEQ ID NO: 1242196
cugguaaacuuucugaaac

SEQ ID NO: 1329427 - RNA, 19 nt, Artificial Sequence
  Description of Artificial Sequence: Synthetic oligonucleotide
  Antisense strand to SEQ ID NO: 1329426
guuucagaaaguuuaccag

SEQ ID NO: 1329428 - RNA, 19 nt, Artificial Sequence
  Description of Artificial Sequence: Synthetic oligonucleotide
  Sense strand starting at position 906 of SEQ ID NO: 1242196
gagauagcaucucuccagu

SEQ ID NO: 1329429 - RNA, 19 nt, Artificial Sequence
  Description of Artificial Sequence: Synthetic oligonucleotide
  Antisense strand to SEQ ID NO: 1329428
acuggagagaugcuaucuc

SEQ ID NO: 1329430 - RNA, 19 nt, Artificial Sequence
  Description of Artificial Sequence: Synthetic oligonucleotide
  Sense strand starting at position 909 of SEQ ID NO: 1242196
auagcaucucuccaguagu

SEQ ID NO: 1329431 - RNA, 19 nt, Artificial Sequence
  Description of Artificial Sequence: Synthetic oligonucleotide
  Antisense strand to SEQ ID NO: 1329430
acuacuggagagaugcuau

SEQ ID NO: 1329432 - RNA, 19 nt, Artificial Sequence
  Description of Artificial Sequence: Synthetic oligonucleotide
  Sense strand starting at position 919 of SEQ ID NO: 1242196
uccaguaguuccuuuauaa

SEQ ID NO: 1329433 - RNA, 19 nt, Artificial Sequence
  Description of Artificial Sequence: Synthetic oligonucleotide
  Antisense strand to SEQ ID NO: 1329432
uuauaaaggaacuacugga

SEQ ID NO: 1329434 - RNA, 19 nt, Artificial Sequence
  Description of Artificial Sequence: Synthetic oligonucleotide
  Sense strand starting at position 1025 of SEQ ID NO: 1242196
gcuuauggaccauauaguu

SEQ ID NO: 1329435 - RNA, 19 nt, Artificial Sequence
  Description of Artificial Sequence: Synthetic oligonucleotide
  Antisense strand to SEQ ID NO: 1329434
aacuauaugguccauaagc

SEQ ID NO: 1329436 - RNA, 19 nt, Artificial Sequence
  Description of Artificial Sequence: Synthetic oligonucleotide
  Sense strand starting at position 1114 of SEQ ID NO: 1242196
augacagugcucuaauaaa

SEQ ID NO: 1329437 - RNA, 19 nt, Artificial Sequence
  Description of Artificial Sequence: Synthetic oligonucleotide
  Antisense strand to SEQ ID NO: 1329436
uuuauuagagcacugucau

SEQ ID NO: 1329438 - RNA, 19 nt, Artificial Sequence
  Description of Artificial Sequence: Synthetic oligonucleotide
  Sense strand starting at position 1175 of SEQ ID NO: 1242196
uuguuaagccaacauuaga

SEQ ID NO: 1329439 - RNA, 19 nt, Artificial Sequence
  Description of Artificial Sequence: Synthetic oligonucleotide
  Antisense strand to SEQ ID NO: 1329438
ucuaauguuggcuuaacaa

SEQ ID NO: 1329440 - RNA, 19 nt, Artificial Sequence
  Description of Artificial Sequence: Synthetic oligonucleotide
  Sense strand starting at position 1238 of SEQ ID NO: 1242196
uaccuugaaucuguaagga

SEQ ID NO: 1329441 - RNA, 19 nt, Artificial Sequence
  Description of Artificial Sequence: Synthetic oligonucleotide
  Antisense strand to SEQ ID NO: 1329440
uccuuacagauucaaggua

SEQ ID NO: 1329442 - RNA, 19 nt, Artificial Sequence
  Description of Artificial Sequence: Synthetic oligonucleotide
  Sense strand starting at position 1538 of SEQ ID NO: 1242196
uauacaauggauugguaau

SEQ ID NO: 1329443 - RNA, 19 nt, Artificial Sequence
  Description of Artificial Sequence: Synthetic oligonucleotide
  Antisense strand to SEQ ID NO: 1329442
auuaccaauccauuguaua

SEQ ID NO: 1329444 - RNA, 19 nt, Artificial Sequence
  Description of Artificial Sequence: Synthetic oligonucleotide
  Sense strand starting at position 1600 of SEQ ID NO: 1242196
ggugacauauaucuauaau

SEQ ID NO: 1329445 - RNA, 19 nt, Artificial Sequence
  Description of Artificial Sequence: Synthetic oligonucleotide
  Antisense strand to SEQ ID NO: 1329444
auuauagauauaugucacc

SEQ ID NO: 1329446 - RNA, 19 nt, Artificial Sequence
  Description of Artificial Sequence: Synthetic oligonucleotide
  Sense strand starting at position 2095 of SEQ ID NO: 1242196
acagcauuauuaguugaaa

SEQ ID NO: 1329447 - RNA, 19 nt, Artificial Sequence
  Description of Artificial Sequence: Synthetic oligonucleotide
  Antisense strand to SEQ ID NO: 1329446
uuucaacuaauaaugcugu

SEQ ID NO: 1329448 - RNA, 19 nt, Artificial Sequence
  Description of Artificial Sequence: Synthetic oligonucleotide
  Sense strand starting at position 2195 of SEQ ID NO: 1242196
ucuaguucugguuaaacua

SEQ ID NO: 1329449 - RNA, 19 nt, Artificial Sequence
  Description of Artificial Sequence: Synthetic oligonucleotide
  Antisense strand to SEQ ID NO: 1329448
uaguuuaaccagaacuaga

SEQ ID NO: 1329450 - RNA, 19 nt, Artificial Sequence
  Description of Artificial Sequence: Synthetic oligonucleotide
  Sense strand starting at position 2218 of SEQ ID NO: 1242196
aacaauaauguuugagguu

SEQ ID NO: 1329451 - RNA, 19 nt, Artificial Sequence
  Description of Artificial Sequence: Synthetic oligonucleotide
  Antisense strand to SEQ ID NO: 1329450
aaccucaaacauuauuguu

SEQ ID NO: 1329452 - RNA, 19 nt, Artificial Sequence
  Description of Artificial Sequence: Synthetic oligonucleotide
  Sense strand starting at position 2266 of SEQ ID NO: 1242196
agccaagccuuacugagau

SEQ ID NO: 1329453 - RNA, 19 nt, Artificial Sequence
  Description of Artificial Sequence: Synthetic oligonucleotide
  Antisense strand to SEQ ID NO: 1329452
aucucaguaaggcuuggcu

SEQ ID NO: 1329454 - RNA, 19 nt, Artificial Sequence
  Description of Artificial Sequence: Synthetic oligonucleotide
  Sense strand starting at position 2846 of SEQ ID NO: 1242196
uccauuuauucuguguagu

SEQ ID NO: 1329455 - RNA, 19 nt, Artificial Sequence
  Description of Artificial Sequence: Synthetic oligonucleotide
  Antisense strand to SEQ ID NO: 1329454
acuacacagaauaaaugga

SEQ ID NO: 1329456 - RNA, 19 nt, Artificial Sequence
  Description of Artificial Sequence: Synthetic oligonucleotide
  Sense strand starting at position 2847 of SEQ ID NO: 1242196
ccauuuauucuguguagua

SEQ ID NO: 1329457 - RNA, 19 nt, Artificial Sequence
  Description of Artificial Sequence: Synthetic oligonucleotide
  Antisense strand to SEQ ID NO: 1329456
uacuacacagaauaaaugg

SEQ ID NO: 1329458 - RNA, 19 nt, Artificial Sequence
  Description of Artificial Sequence: Synthetic oligonucleotide
  Sense strand starting at position 2848 of SEQ ID NO: 1242196
cauuuauucuguguaguag

SEQ ID NO: 1329459 - RNA, 19 nt, Artificial Sequence
  Description of Artificial Sequence: Synthetic oligonucleotide
  Antisense strand to SEQ ID NO: 1329458
cuacuacacagaauaaaug

SEQ ID NO: 1329460 - RNA, 19 nt, Artificial Sequence
  Description of Artificial Sequence: Synthetic oligonucleotide
  Sense strand starting at position 2877 of SEQ ID NO: 1242196
aaugauauaguuugucaug

SEQ ID NO: 1329461 - RNA, 19 nt, Artificial Sequence
  Description of Artificial Sequence: Synthetic oligonucleotide
  Antisense strand to SEQ ID NO: 1329460
caugacaaacuauaucauu

SEQ ID NO: 1329462 - RNA, 19 nt, Artificial Sequence
  Description of Artificial Sequence: Synthetic oligonucleotide
  Sense strand starting at position 2901 of SEQ ID NO: 1242196
aaugauggcugugucauuu

SEQ ID NO: 1329463 - RNA, 19 nt, Artificial Sequence
  Description of Artificial Sequence: Synthetic oligonucleotide
  Antisense strand to SEQ ID NO: 1329462
aaaugacacagccaucauu

SEQ ID NO: 1329464 - RNA, 19 nt, Artificial Sequence
  Description of Artificial Sequence: Synthetic oligonucleotide
  Sense strand starting at position 2971 of SEQ ID NO: 1242196
gcaugaaugcuauaauaca

SEQ ID NO: 1329465 - RNA, 19 nt, Artificial Sequence
  Description of Artificial Sequence: Synthetic oligonucleotide
  Antisense strand to SEQ ID NO: 1329464
uguauuauagcauucaugc

SEQ ID NO: 1329466 - RNA, 19 nt, Artificial Sequence
  Description of Artificial Sequence: Synthetic oligonucleotide
  Sense strand starting at position 3040 of SEQ ID NO: 1242196
acuguacauguguaucaau

SEQ ID NO: 1329467 - RNA, 19 nt, Artificial Sequence
  Description of Artificial Sequence: Synthetic oligonucleotide
  Antisense strand to SEQ ID NO: 1329466
auugauacacauguacagu

SEQ ID NO: 1329468 - RNA, 19 nt, Artificial Sequence
  Description of Artificial Sequence: Synthetic oligonucleotide
  Sense strand starting at position 3079 of SEQ ID NO: 1242196
caaauccagugugugauua

SEQ ID NO: 1329469 - RNA, 19 nt, Artificial Sequence
  Description of Artificial Sequence: Synthetic oligonucleotide
  Antisense strand to SEQ ID NO: 1329468
uaaucacacacuggauuug

SEQ ID NO: 1329470 - RNA, 19 nt, Artificial Sequence
  Description of Artificial Sequence: Synthetic oligonucleotide
  Sense strand starting at position 3080 of SEQ ID NO: 1242196
aaauccagugugugauuaa

SEQ ID NO: 1329471 - RNA, 19 nt, Artificial Sequence
  Description of Artificial Sequence: Synthetic oligonucleotide
  Antisense strand to SEQ ID NO: 1329470
uuaaucacacacuggauuu

SEQ ID NO: 1329472 - RNA, 19 nt, Artificial Sequence
  Description of Artificial Sequence: Synthetic oligonucleotide
  Sense strand starting at position 3215 of SEQ ID NO: 1242196
acaguaguugaucaucuau

SEQ ID NO: 1329473 - RNA, 19 nt, Artificial Sequence
  Description of Artificial Sequence: Synthetic oligonucleotide
  Antisense strand to SEQ ID NO: 1329472
auagaugaucaacuacugu

SEQ ID NO: 1329474 - RNA, 19 nt, Artificial Sequence
  Description of Artificial Sequence: Synthetic oligonucleotide
  Sense strand starting at position 3217 of SEQ ID NO: 1242196
aguaguugaucaucuauua

SEQ ID NO: 1329475 - RNA, 19 nt, Artificial Sequence
  Description of Artificial Sequence: Synthetic oligonucleotide
  Antisense strand to SEQ ID NO: 1329474
uaauagaugaucaacuacu

SEQ ID NO: 1329476 - RNA, 19 nt, Artificial Sequence
  Description of Artificial Sequence: Synthetic oligonucleotide
  Sense strand starting at position 3472 of SEQ ID NO: 1242196
cccugaggaugugucucau

SEQ ID NO: 1329477 - RNA, 19 nt, Artificial Sequence
  Description of Artificial Sequence: Synthetic oligonucleotide
  Antisense strand to SEQ ID NO: 1329476
augagacacauccucaggg

SEQ ID NO: 1329478 - RNA, 19 nt, Artificial Sequence
  Description of Artificial Sequence: Synthetic oligonucleotide
  Sense strand starting at position 3494 of SEQ ID NO: 1242196
caaacucgaguaugagaua

SEQ ID NO: 1329479 - RNA, 19 nt, Artificial Sequence
  Description of Artificial Sequence: Synthetic oligonucleotide
  Antisense strand to SEQ ID NO: 1329478
uaucucauacucgaguuug

SEQ ID NO: 1329480 - RNA, 19 nt, Artificial Sequence
  Description of Artificial Sequence: Synthetic oligonucleotide
  Sense strand starting at position 3688 of SEQ ID NO: 1242196
uacuguaguaggcaagaga

SEQ ID NO: 1329481 - RNA, 19 nt, Artificial Sequence
  Description of Artificial Sequence: Synthetic oligonucleotide
  Antisense strand to SEQ ID NO: 1329480
ucucuugccuacuacagua

SEQ ID NO: 1329482 - RNA, 19 nt, Artificial Sequence
  Description of Artificial Sequence: Synthetic oligonucleotide
  Sense strand starting at position 3739 of SEQ ID NO: 1242196
cgcuaaggcaugcaagaua

SEQ ID NO: 1329483 - RNA, 19 nt, Artificial Sequence
  Description of Artificial Sequence: Synthetic oligonucleotide
  Antisense strand to SEQ ID NO: 1329482
uaucuugcaugccuuagcg

SEQ ID NO: 1329484 - RNA, 19 nt, Artificial Sequence
  Description of Artificial Sequence: Synthetic oligonucleotide
  Sense strand starting at position 3769 of SEQ ID NO: 1242196
guaagauggauacagugua

SEQ ID NO: 1329485 - RNA, 19 nt, Artificial Sequence
  Description of Artificial Sequence: Synthetic oligonucleotide
  Antisense strand to SEQ ID NO: 1329484
uacacuguauccaucuuac

SEQ ID NO: 1329486 - RNA, 19 nt, Artificial Sequence
  Description of Artificial Sequence: Synthetic oligonucleotide
  Sense strand starting at position 3782 of SEQ ID NO: 1242196
aguguacuaccuuauauca

SEQ ID NO: 1329487 - RNA, 19 nt, Artificial Sequence
  Description of Artificial Sequence: Synthetic oligonucleotide
  Antisense strand to SEQ ID NO: 1329486
ugauauaagguaguacacu

SEQ ID NO: 1329488 - RNA, 19 nt, Artificial Sequence
  Description of Artificial Sequence: Synthetic oligonucleotide
  Sense strand starting at position 3821 of SEQ ID NO: 1242196
agaacauauuugggcauuu

SEQ ID NO: 1329489 - RNA, 19 nt, Artificial Sequence
  Description of Artificial Sequence: Synthetic oligonucleotide
  Antisense strand to SEQ ID NO: 1329488
aaaugcccaaauauguucu

SEQ ID NO: 1329490 - RNA, 19 nt, Artificial Sequence
  Description of Artificial Sequence: Synthetic oligonucleotide
  Sense strand starting at position 106 of SEQ ID NO: 1242197
cgaauuucuagcggcuuaa

SEQ ID NO: 1329491 - RNA, 19 nt, Artificial Sequence
  Description of Artificial Sequence: Synthetic oligonucleotide
  Antisense strand to SEQ ID NO: 1329490
uuaagccgcuagaaauucg

SEQ ID NO: 1329492 - RNA, 19 nt, Artificial Sequence
  Description of Artificial Sequence: Synthetic oligonucleotide
  Sense strand starting at position 110 of SEQ ID NO: 1242197
uuucuagcggcuuaaacaa

SEQ ID NO: 1329493 - RNA, 19 nt, Artificial Sequence
  Description of Artificial Sequence: Synthetic oligonucleotide
  Antisense strand to SEQ ID NO: 1329492
uuguuuaagccgcuagaaa

SEQ ID NO: 1329494 - RNA, 19 nt, Artificial Sequence
  Description of Artificial Sequence: Synthetic oligonucleotide
  Sense strand starting at position 266 of SEQ ID NO: 1242197
uccggaaagccucgagcuu

SEQ ID NO: 1329495 - RNA, 19 nt, Artificial Sequence
  Description of Artificial Sequence: Synthetic oligonucleotide
  Antisense strand to SEQ ID NO: 1329494
aagcucgaggcuuuccgga

SEQ ID NO: 1329496 - RNA, 19 nt, Artificial Sequence
  Description of Artificial Sequence: Synthetic oligonucleotide
  Sense strand starting at position 267 of SEQ ID NO: 1242197
ccggaaagccucgagcuuu

SEQ ID NO: 1329497 - RNA, 19 nt, Artificial Sequence
  Description of Artificial Sequence: Synthetic oligonucleotide
  Antisense strand to SEQ ID NO: 1329496
aaagcucgaggcuuuccgg

SEQ ID NO: 1329498 - RNA, 19 nt, Artificial Sequence
  Description of Artificial Sequence: Synthetic oligonucleotide
  Sense strand starting at position 312 of SEQ ID NO: 1242197
ucaagauaaucucccgaca

SEQ ID NO: 1329499 - RNA, 19 nt, Artificial Sequence
  Description of Artificial Sequence: Synthetic oligonucleotide
  Antisense strand to SEQ ID NO: 1329498
ugucgggagauuaucuuga

SEQ ID NO: 1329500 - RNA, 19 nt, Artificial Sequence
  Description of Artificial Sequence: Synthetic oligonucleotide
  Sense strand starting at position 315 of SEQ ID NO: 1242197
agauaaucucccgacagca

SEQ ID NO: 1329501 - RNA, 19 nt, Artificial Sequence
  Description of Artificial Sequence: Synthetic oligonucleotide
  Antisense strand to SEQ ID NO: 1329500
ugcugucgggagauuaucu

SEQ ID NO: 1329502 - RNA, 19 nt, Artificial Sequence
  Description of Artificial Sequence: Synthetic oligonucleotide
  Sense strand starting at position 697 of SEQ ID NO: 1242197
cggagccacuuugaaauau

SEQ ID NO: 1329503 - RNA, 19 nt, Artificial Sequence
  Description of Artificial Sequence: Synthetic oligonucleotide
  Antisense strand to SEQ ID NO: 1329502
auauuucaaaguggcuccg

SEQ ID NO: 1329504 - RNA, 19 nt, Artificial Sequence
  Description of Artificial Sequence: Synthetic oligonucleotide
  Sense strand starting at position 943 of SEQ ID NO: 1242197
aggaacgauucugccuauu

SEQ ID NO: 1329505 - RNA, 19 nt, Artificial Sequence
  Description of Artificial Sequence: Synthetic oligonucleotide
  Antisense strand to SEQ ID NO: 1329504
aauaggcagaaucguuccu

SEQ ID NO: 1329506 - RNA, 19 nt, Artificial Sequence
  Description of Artificial Sequence: Synthetic oligonucleotide
  Sense strand starting at position 1133 of SEQ ID NO: 1242197
cgcagagagucacuugcuu

SEQ ID NO: 1329507 - RNA, 19 nt, Artificial Sequence
  Description of Artificial Sequence: Synthetic oligonucleotide
  Antisense strand to SEQ ID NO: 1329506
aagcaagugacucucugcg

SEQ ID NO: 1329508 - RNA, 19 nt, Artificial Sequence
  Description of Artificial Sequence: Synthetic oligonucleotide
  Sense strand starting at position 1141 of SEQ ID NO: 1242197
gucacuugcuucuccuuua

SEQ ID NO: 1329509 - RNA, 19 nt, Artificial Sequence
  Description of Artificial Sequence: Synthetic oligonucleotide
  Antisense strand to SEQ ID NO: 1329508
uaaaggagaagcaagugac

SEQ ID NO: 1329510 - RNA, 19 nt, Artificial Sequence
  Description of Artificial Sequence: Synthetic oligonucleotide
  Sense strand starting at position 1248 of SEQ ID NO: 1242197
uagaguaacggcuauggga

SEQ ID NO: 1329511 - RNA, 19 nt, Artificial Sequence
  Description of Artificial Sequence: Synthetic oligonucleotide
  Antisense strand to SEQ ID NO: 1329510
ucccauagccguuacucua

SEQ ID NO: 1329512 - RNA, 19 nt, Artificial Sequence
  Description of Artificial Sequence: Synthetic oligonucleotide
  Sense strand starting at position 1737 of SEQ ID NO: 1242197
cggagcugguggaaaguua

SEQ ID NO: 1329513 - RNA, 19 nt, Artificial Sequence
  Description of Artificial Sequence: Synthetic oligonucleotide
  Antisense strand to SEQ ID NO: 1329512
uaacuuuccaccagcuccg

SEQ ID NO: 1329514 - RNA, 19 nt, Artificial Sequence
  Description of Artificial Sequence: Synthetic oligonucleotide
  Sense strand starting at position 2479 of SEQ ID NO: 1242197
cucuaugcucucgauggga

SEQ ID NO: 1329515 - RNA, 19 nt, Artificial Sequence
  Description of Artificial Sequence: Synthetic oligonucleotide
  Antisense strand to SEQ ID NO: 1329514
ucccaucgagagcauagag

SEQ ID NO: 1329516 - RNA, 19 nt, Artificial Sequence
  Description of Artificial Sequence: Synthetic oligonucleotide
  Sense strand starting at position 2481 of SEQ ID NO: 1242197
cuaugcucucgaugggaga

SEQ ID NO: 1329517 - RNA, 19 nt, Artificial Sequence
  Description of Artificial Sequence: Synthetic oligonucleotide
  Antisense strand to SEQ ID NO: 1329516
ucucccaucgagagcauag

SEQ ID NO: 1329518 - RNA, 19 nt, Artificial Sequence
  Description of Artificial Sequence: Synthetic oligonucleotide
  Sense strand starting at position 2482 of SEQ ID NO: 1242197
uaugcucucgaugggagau

SEQ ID NO: 1329519 - RNA, 19 nt, Artificial Sequence
  Description of Artificial Sequence: Synthetic oligonucleotide
  Antisense strand to SEQ ID NO: 1329518
aucucccaucgagagcaua

SEQ ID NO: 1329520 - RNA, 19 nt, Artificial Sequence
  Description of Artificial Sequence: Synthetic oligonucleotide
  Sense strand starting at position 2742 of SEQ ID NO: 1242197
gggcaaugaacuugucuug

SEQ ID NO: 1329521 - RNA, 19 nt, Artificial Sequence
  Description of Artificial Sequence: Synthetic oligonucleotide
  Antisense strand to SEQ ID NO: 1329520
caagacaaguucauugccc

SEQ ID NO: 1329522 - RNA, 19 nt, Artificial Sequence
  Description of Artificial Sequence: Synthetic oligonucleotide
  Sense strand starting at position 2749 of SEQ ID NO: 1242197
gaacuugucuugccgaggu

SEQ ID NO: 1329523 - RNA, 19 nt, Artificial Sequence
  Description of Artificial Sequence: Synthetic oligonucleotide
  Antisense strand to SEQ ID NO: 1329522
accucggcaagacaaguuc

SEQ ID NO: 1329524 - RNA, 19 nt, Artificial Sequence
  Description of Artificial Sequence: Synthetic oligonucleotide
  Sense strand starting at position 2762 of SEQ ID NO: 1242197
cgaggucuacuccaggcaa

SEQ ID NO: 1329525 - RNA, 19 nt, Artificial Sequence
  Description of Artificial Sequence: Synthetic oligonucleotide
  Antisense strand to SEQ ID NO: 1329524
uugccuggaguagaccucg

SEQ ID NO: 1329526 - RNA, 19 nt, Artificial Sequence
  Description of Artificial Sequence: Synthetic oligonucleotide
  Sense strand starting at position 2999 of SEQ ID NO: 1242197
ggguaaagaccuggcucuu

SEQ ID NO: 1329527 - RNA, 19 nt, Artificial Sequence
  Description of Artificial Sequence: Synthetic oligonucleotide
  Antisense strand to SEQ ID NO: 1329526
aagagccaggucuuuaccc

SEQ ID NO: 1329528 - RNA, 19 nt, Artificial Sequence
  Description of Artificial Sequence: Synthetic oligonucleotide
  Sense strand starting at position 3011 of SEQ ID NO: 1242197
ggcucuuaagaguggugca

SEQ ID NO: 1329529 - RNA, 19 nt, Artificial Sequence
  Description of Artificial Sequence: Synthetic oligonucleotide
  Antisense strand to SEQ ID NO: 1329528
ugcaccacucuuaagagcc

SEQ ID NO: 1329530 - RNA, 19 nt, Artificial Sequence
  Description of Artificial Sequence: Synthetic oligonucleotide
  Sense strand starting at position 3064 of SEQ ID NO: 1242197
caggaaaugugggcugacu

SEQ ID NO: 1329531 - RNA, 19 nt, Artificial Sequence
  Description of Artificial Sequence: Synthetic oligonucleotide
  Antisense strand to SEQ ID NO: 1329530
agucagcccacauuuccug

SEQ ID NO: 1329532 - RNA, 19 nt, Artificial Sequence
  Description of Artificial Sequence: Synthetic oligonucleotide
  Sense strand starting at position 3180 of SEQ ID NO: 1242197
uuggaaaggugguuauaca

SEQ ID NO: 1329533 - RNA, 19 nt, Artificial Sequence
  Description of Artificial Sequence: Synthetic oligonucleotide
  Antisense strand to SEQ ID NO: 1329532
uguauaaccaccuuuccaa

SEQ ID NO: 1329534 - RNA, 19 nt, Artificial Sequence
  Description of Artificial Sequence: Synthetic oligonucleotide
  Sense strand starting at position 3221 of SEQ ID NO: 1242197
cgaauaaaguaggccuaau

SEQ ID NO: 1329535 - RNA, 19 nt, Artificial Sequence
  Description of Artificial Sequence: Synthetic oligonucleotide
  Antisense strand to SEQ ID NO: 1329534
auuaggccuacuuuauucg

SEQ ID NO: 1329536 - RNA, 19 nt, Artificial Sequence
  Description of Artificial Sequence: Synthetic oligonucleotide
  Sense strand starting at position 3232 of SEQ ID NO: 1242197
ggccuaaugccugagacug

SEQ ID NO: 1329537 - RNA, 19 nt, Artificial Sequence
  Description of Artificial Sequence: Synthetic oligonucleotide
  Antisense strand to SEQ ID NO: 1329536
cagucucaggcauuaggcc

SEQ ID NO: 1329538 - RNA, 19 nt, Artificial Sequence
  Description of Artificial Sequence: Synthetic oligonucleotide
  Sense strand starting at position 3267 of SEQ ID NO: 1242197
ccgugugucugagcaccua

SEQ ID NO: 1329539 - RNA, 19 nt, Artificial Sequence
  Description of Artificial Sequence: Synthetic oligonucleotide
  Antisense strand to SEQ ID NO: 1329538
uaggugcucagacacacgg

SEQ ID NO: 1329540 - RNA, 19 nt, Artificial Sequence
  Description of Artificial Sequence: Synthetic oligonucleotide
  Sense strand starting at position 3294 of SEQ ID NO: 1242197
gggccauucugggucugau

SEQ ID NO: 1329541 - RNA, 19 nt, Artificial Sequence
  Description of Artificial Sequence: Synthetic oligonucleotide
  Antisense strand to SEQ ID NO: 1329540
aucagacccagaauggccc

SEQ ID NO: 1329542 - RNA, 19 nt, Artificial Sequence
  Description of Artificial Sequence: Synthetic oligonucleotide
  Sense strand starting at position 3297 of SEQ ID NO: 1242197
ccauucugggucugaugga

SEQ ID NO: 1329543 - RNA, 19 nt, Artificial Sequence
  Description of Artificial Sequence: Synthetic oligonucleotide
  Antisense strand to SEQ ID NO: 1329542
uccaucagacccagaaugg

SEQ ID NO: 1329544 - RNA, 19 nt, Artificial Sequence
  Description of Artificial Sequence: Synthetic oligonucleotide
  Sense strand starting at position 3432 of SEQ ID NO: 1242197
ccaccaggauucucauagu

SEQ ID NO: 1329545 - RNA, 19 nt, Artificial Sequence
  Description of Artificial Sequence: Synthetic oligonucleotide
  Antisense strand to SEQ ID NO: 1329544
acuaugagaauccuggugg

SEQ ID NO: 1329546 - RNA, 19 nt, Artificial Sequence
  Description of Artificial Sequence: Synthetic oligonucleotide
  Sense strand starting at position 3470 of SEQ ID NO: 1242197
gccagaaauuucuguggua

SEQ ID NO: 1329547 - RNA, 19 nt, Artificial Sequence
  Description of Artificial Sequence: Synthetic oligonucleotide
  Antisense strand to SEQ ID NO: 1329546
uaccacagaaauuucuggc

SEQ ID NO: 1329548 - RNA, 19 nt, Artificial Sequence
  Description of Artificial Sequence: Synthetic oligonucleotide
  Sense strand starting at position 3473 of SEQ ID NO: 1242197
agaaauuucugugguacac

SEQ ID NO: 1329549 - RNA, 19 nt, Artificial Sequence
  Description of Artificial Sequence: Synthetic oligonucleotide
  Antisense strand to SEQ ID NO: 1329548
guguaccacagaaauuucu

SEQ ID NO: 1329550 - RNA, 19 nt, Artificial Sequence
  Description of Artificial Sequence: Synthetic oligonucleotide
  Sense strand starting at position 3598 of SEQ ID NO: 1242197
cauuccucgcuuugggaua

SEQ ID NO: 1329551 - RNA, 19 nt, Artificial Sequence
  Description of Artificial Sequence: Synthetic oligonucleotide
  Antisense strand to SEQ ID NO: 1329550
uaucccaaagcgaggaaug

SEQ ID NO: 1329552 - RNA, 19 nt, Artificial Sequence
  Description of Artificial Sequence: Synthetic oligonucleotide
  Sense strand starting at position 3603 of SEQ ID NO: 1242197
cucgcuuugggauaucaaa

SEQ ID NO: 1329553 - RNA, 19 nt, Artificial Sequence
  Description of Artificial Sequence: Synthetic oligonucleotide
  Antisense strand to SEQ ID NO: 1329552
uuugauaucccaaagcgag

SEQ ID NO: 1329554 - RNA, 19 nt, Artificial Sequence
  Description of Artificial Sequence: Synthetic oligonucleotide
  Sense strand starting at position 3899 of SEQ ID NO: 1242197
ggcugaauucgauguucuc

SEQ ID NO: 1329555 - RNA, 19 nt, Artificial Sequence
  Description of Artificial Sequence: Synthetic oligonucleotide
  Antisense strand to SEQ ID NO: 1329554
gagaacaucgaauucagcc

SEQ ID NO: 1329556 - RNA, 19 nt, Artificial Sequence
  Description of Artificial Sequence: Synthetic oligonucleotide
  Sense strand starting at position 3902 of SEQ ID NO: 1242197
ugaauucgauguucucuaa

SEQ ID NO: 1329557 - RNA, 19 nt, Artificial Sequence
  Description of Artificial Sequence: Synthetic oligonucleotide
  Antisense strand to SEQ ID NO: 1329556
uuagagaacaucgaauuca

SEQ ID NO: 1329558 - RNA, 19 nt, Artificial Sequence
  Description of Artificial Sequence: Synthetic oligonucleotide
  Sense strand starting at position 3905 of SEQ ID NO: 1242197
auucgauguucucuaagau

SEQ ID NO: 1329559 - RNA, 19 nt, Artificial Sequence
  Description of Artificial Sequence: Synthetic oligonucleotide
  Antisense strand to SEQ ID NO: 1329558
aucuuagagaacaucgaau

SEQ ID NO: 1329560 - RNA, 19 nt, Artificial Sequence
  Description of Artificial Sequence: Synthetic oligonucleotide
  Sense strand starting at position 3906 of SEQ ID NO: 1242197
uucgauguucucuaagauu

SEQ ID NO: 1329561 - RNA, 19 nt, Artificial Sequence
  Description of Artificial Sequence: Synthetic oligonucleotide
  Antisense strand to SEQ ID NO: 1329560
aaucuuagagaacaucgaa

SEQ ID NO: 1329562 - RNA, 19 nt, Artificial Sequence
  Description of Artificial Sequence: Synthetic oligonucleotide
  Sense strand starting at position 3944 of SEQ ID NO: 1242197
cacaguuuguggguaucau

SEQ ID NO: 1329563 - RNA, 19 nt, Artificial Sequence
  Description of Artificial Sequence: Synthetic oligonucleotide
  Antisense strand to SEQ ID NO: 1329562
augauacccacaaacugug

SEQ ID NO: 1329564 - RNA, 19 nt, Artificial Sequence
  Description of Artificial Sequence: Synthetic oligonucleotide
  Sense strand starting at position 3945 of SEQ ID NO: 1242197
acaguuuguggguaucaua

SEQ ID NO: 1329565 - RNA, 19 nt, Artificial Sequence
  Description of Artificial Sequence: Synthetic oligonucleotide
  Antisense strand to SEQ ID NO: 1329564
uaugauacccacaaacugu

SEQ ID NO: 1329566 - RNA, 19 nt, Artificial Sequence
  Description of Artificial Sequence: Synthetic oligonucleotide
  Sense strand starting at position 3952 of SEQ ID NO: 1242197
guggguaucauagaugcca

SEQ ID NO: 1329567 - RNA, 19 nt, Artificial Sequence
  Description of Artificial Sequence: Synthetic oligonucleotide
  Antisense strand to SEQ ID NO: 1329566
uggcaucuaugauacccac

SEQ ID NO: 1329568 - RNA, 19 nt, Artificial Sequence
  Description of Artificial Sequence: Synthetic oligonucleotide
  Sense strand starting at position 3954 of SEQ ID NO: 1242197
ggguaucauagaugccaaa

SEQ ID NO: 1329569 - RNA, 19 nt, Artificial Sequence
  Description of Artificial Sequence: Synthetic oligonucleotide
  Antisense strand to SEQ ID NO: 1329568
uuuggcaucuaugauaccc

SEQ ID NO: 1329570 - RNA, 19 nt, Artificial Sequence
  Description of Artificial Sequence: Synthetic oligonucleotide
  Sense strand starting at position 120 of SEQ ID NO: 1242198
uuuauaucuagguaagugu

SEQ ID NO: 1329571 - RNA, 19 nt, Artificial Sequence
  Description of Artificial Sequence: Synthetic oligonucleotide
  Antisense strand to SEQ ID NO: 1329570
acacuuaccuagauauaaa

SEQ ID NO: 1329572 - RNA, 19 nt, Artificial Sequence
  Description of Artificial Sequence: Synthetic oligonucleotide
  Sense strand starting at position 128 of SEQ ID NO: 1242198
uagguaaguguuggagauu

SEQ ID NO: 1329573 - RNA, 19 nt, Artificial Sequence
  Description of Artificial Sequence: Synthetic oligonucleotide
  Antisense strand to SEQ ID NO: 1329572
aaucuccaacacuuaccua

SEQ ID NO: 1329574 - RNA, 19 nt, Artificial Sequence
  Description of Artificial Sequence: Synthetic oligonucleotide
  Sense strand starting at position 129 of SEQ ID NO: 1242198
agguaaguguuggagauuu

SEQ ID NO: 1329575 - RNA, 19 nt, Artificial Sequence
  Description of Artificial Sequence: Synthetic oligonucleotide
  Antisense strand to SEQ ID NO: 1329574
aaaucuccaacacuuaccu

SEQ ID NO: 1329576 - RNA, 19 nt, Artificial Sequence
  Description of Artificial Sequence: Synthetic oligonucleotide
  Sense strand starting at position 168 of SEQ ID NO: 1242198
cagucugcgcuccaauaaa

SEQ ID NO: 1329577 - RNA, 19 nt, Artificial Sequence
  Description of Artificial Sequence: Synthetic oligonucleotide
  Antisense strand to SEQ ID NO: 1329576
uuuauuggagcgcagacug

SEQ ID NO: 1329578 - RNA, 19 nt, Artificial Sequence
  Description of Artificial Sequence: Synthetic oligonucleotide
  Sense strand starting at position 181 of SEQ ID NO: 1242198
aauaaacuccuggaugugu

SEQ ID NO: 1329579 - RNA, 19 nt, Artificial Sequence
  Description of Artificial Sequence: Synthetic oligonucleotide
  Antisense strand to SEQ ID NO: 1329578
acacauccaggaguuuauu

SEQ ID NO: 1329580 - RNA, 19 nt, Artificial Sequence
  Description of Artificial Sequence: Synthetic oligonucleotide
  Sense strand starting at position 211 of SEQ ID NO: 1242198
uaucccaguccggauaaga

SEQ ID NO: 1329581 - RNA, 19 nt, Artificial Sequence
  Description of Artificial Sequence: Synthetic oligonucleotide
  Antisense strand to SEQ ID NO: 1329580
ucuuauccggacugggaua

SEQ ID NO: 1329582 - RNA, 19 nt, Artificial Sequence
  Description of Artificial Sequence: Synthetic oligonucleotide
  Sense strand starting at position 221 of SEQ ID NO: 1242198
cggauaagaaagugaucua

SEQ ID NO: 1329583 - RNA, 19 nt, Artificial Sequence
  Description of Artificial Sequence: Synthetic oligonucleotide
  Antisense strand to SEQ ID NO: 1329582
uagaucacuuucuuauccg

SEQ ID NO: 1329584 - RNA, 19 nt, Artificial Sequence
  Description of Artificial Sequence: Synthetic oligonucleotide
  Sense strand starting at position 228 of SEQ ID NO: 1242198
gaaagugaucuaggcugaa

SEQ ID NO: 1329585 - RNA, 19 nt, Artificial Sequence
  Description of Artificial Sequence: Synthetic oligonucleotide
  Antisense strand to SEQ ID NO: 1329584
uucagccuagaucacuuuc

SEQ ID NO: 1329586 - RNA, 19 nt, Artificial Sequence
  Description of Artificial Sequence: Synthetic oligonucleotide
  Sense strand starting at position 231 of SEQ ID NO: 1242198
agugaucuaggcugaagau

SEQ ID NO: 1329587 - RNA, 19 nt, Artificial Sequence
  Description of Artificial Sequence: Synthetic oligonucleotide
  Antisense strand to SEQ ID NO: 1329586
aucuucagccuagaucacu

SEQ ID NO: 1329588 - RNA, 19 nt, Artificial Sequence
  Description of Artificial Sequence: Synthetic oligonucleotide
  Sense strand starting at position 232 of SEQ ID NO: 1242198
gugaucuaggcugaagauu

SEQ ID NO: 1329589 - RNA, 19 nt, Artificial Sequence
  Description of Artificial Sequence: Synthetic oligonucleotide
  Antisense strand to SEQ ID NO: 1329588
aaucuucagccuagaucac

SEQ ID NO: 1329590 - RNA, 19 nt, Artificial Sequence
  Description of Artificial Sequence: Synthetic oligonucleotide
  Sense strand starting at position 605 of SEQ ID NO: 1242198
ccgaacugucguguuucau

SEQ ID NO: 1329591 - RNA, 19 nt, Artificial Sequence
  Description of Artificial Sequence: Synthetic oligonucleotide
  Antisense strand to SEQ ID NO: 1329590
augaaacacgacaguucgg

SEQ ID NO: 1329592 - RNA, 19 nt, Artificial Sequence
  Description of Artificial Sequence: Synthetic oligonucleotide
  Sense strand starting at position 1069 of SEQ ID NO: 1242198
ugcugccuggcuuauugaa

SEQ ID NO: 1329593 - RNA, 19 nt, Artificial Sequence
  Description of Artificial Sequence: Synthetic oligonucleotide
  Antisense strand to SEQ ID NO: 1329592
uucaauaagccaggcagca

SEQ ID NO: 1329594 - RNA, 19 nt, Artificial Sequence
  Description of Artificial Sequence: Synthetic oligonucleotide
  Sense strand starting at position 1071 of SEQ ID NO: 1242198
cugccuggcuuauugaaga

SEQ ID NO: 1329595 - RNA, 19 nt, Artificial Sequence
  Description of Artificial Sequence: Synthetic oligonucleotide
  Antisense strand to SEQ ID NO: 1329594
ucuucaauaagccaggcag

SEQ ID NO: 1329596 - RNA, 19 nt, Artificial Sequence
  Description of Artificial Sequence: Synthetic oligonucleotide
  Sense strand starting at position 2237 of SEQ ID NO: 1242198
gcgguaacgccugcuaaug

SEQ ID NO: 1329597 - RNA, 19 nt, Artificial Sequence
  Description of Artificial Sequence: Synthetic oligonucleotide
  Antisense strand to SEQ ID NO: 1329596
cauuagcaggcguuaccgc

SEQ ID NO: 1329598 - RNA, 19 nt, Artificial Sequence
  Description of Artificial Sequence: Synthetic oligonucleotide
  Sense strand starting at position 2359 of SEQ ID NO: 1242198
caccguuuggguggaaacu

SEQ ID NO: 1329599 - RNA, 19 nt, Artificial Sequence
  Description of Artificial Sequence: Synthetic oligonucleotide
  Antisense strand to SEQ ID NO: 1329598
aguuuccacccaaacggug

SEQ ID NO: 1329600 - RNA, 19 nt, Artificial Sequence
  Description of Artificial Sequence: Synthetic oligonucleotide
  Sense strand starting at position 2360 of SEQ ID NO: 1242198
accguuuggguggaaacua

SEQ ID NO: 1329601 - RNA, 19 nt, Artificial Sequence
  Description of Artificial Sequence: Synthetic oligonucleotide
  Antisense strand to SEQ ID NO: 1329600
uaguuuccacccaaacggu

SEQ ID NO: 1329602 - RNA, 19 nt, Artificial Sequence
  Description of Artificial Sequence: Synthetic oligonucleotide
  Sense strand starting at position 2646 of SEQ ID NO: 1242198
gacuguuguucuccaacag

SEQ ID NO: 1329603 - RNA, 19 nt, Artificial Sequence
  Description of Artificial Sequence: Synthetic oligonucleotide
  Antisense strand to SEQ ID NO: 1329602
cuguuggagaacaacaguc

SEQ ID NO: 1329604 - RNA, 19 nt, Artificial Sequence
  Description of Artificial Sequence: Synthetic oligonucleotide
  Sense strand starting at position 2767 of SEQ ID NO: 1242198
ggagguugauuagagagaa

SEQ ID NO: 1329605 - RNA, 19 nt, Artificial Sequence
  Description of Artificial Sequence: Synthetic oligonucleotide
  Antisense strand to SEQ ID NO: 1329604
uucucucuaaucaaccucc

SEQ ID NO: 1329606 - RNA, 19 nt, Artificial Sequence
  Description of Artificial Sequence: Synthetic oligonucleotide
  Sense strand starting at position 2782 of SEQ ID NO: 1242198
agaauaaaguacucugugu

SEQ ID NO: 1329607 - RNA, 19 nt, Artificial Sequence
  Description of Artificial Sequence: Synthetic oligonucleotide
  Antisense strand to SEQ ID NO: 1329606
acacagaguacuuuauucu

SEQ ID NO: 1329608 - RNA, 19 nt, Artificial Sequence
  Description of Artificial Sequence: Synthetic oligonucleotide
  Sense strand starting at position 2784 of SEQ ID NO: 1242198
aauaaaguacucugugugu

SEQ ID NO: 1329609 - RNA, 19 nt, Artificial Sequence
  Description of Artificial Sequence: Synthetic oligonucleotide
  Antisense strand to SEQ ID NO: 1329608
acacacagaguacuuuauu

SEQ ID NO: 1329610 - RNA, 19 nt, Artificial Sequence
  Description of Artificial Sequence: Synthetic oligonucleotide
  Sense strand starting at position 2908 of SEQ ID NO: 1242198
uaagcuuucgagcaacaga

SEQ ID NO: 1329611 - RNA, 19 nt, Artificial Sequence
  Description of Artificial Sequence: Synthetic oligonucleotide
  Antisense strand to SEQ ID NO: 1329610
ucuguugcucgaaagcuua

SEQ ID NO: 1329612 - RNA, 19 nt, Artificial Sequence
  Description of Artificial Sequence: Synthetic oligonucleotide
  Sense strand starting at position 2969 of SEQ ID NO: 1242198
cggagaaauuuggccucgu

SEQ ID NO: 1329613 - RNA, 19 nt, Artificial Sequence
  Description of Artificial Sequence: Synthetic oligonucleotide
  Antisense strand to SEQ ID NO: 1329612
acgaggccaaauuucuccg

SEQ ID NO: 1329614 - RNA, 19 nt, Artificial Sequence
  Description of Artificial Sequence: Synthetic oligonucleotide
  Sense strand starting at position 3005 of SEQ ID NO: 1242198
augaacuccggaggucaau

SEQ ID NO: 1329615 - RNA, 19 nt, Artificial Sequence
  Description of Artificial Sequence: Synthetic oligonucleotide
  Antisense strand to SEQ ID NO: 1329614
auugaccuccggaguucau

SEQ ID NO: 1329616 - RNA, 19 nt, Artificial Sequence
  Description of Artificial Sequence: Synthetic oligonucleotide
  Sense strand starting at position 3052 of SEQ ID NO: 1242198
agcaccugugaugaugaua

SEQ ID NO: 1329617 - RNA, 19 nt, Artificial Sequence
  Description of Artificial Sequence: Synthetic oligonucleotide
  Antisense strand to SEQ ID NO: 1329616
uaucaucaucacaggugcu

SEQ ID NO: 1329618 - RNA, 19 nt, Artificial Sequence
  Description of Artificial Sequence: Synthetic oligonucleotide
  Sense strand starting at position 3063 of SEQ ID NO: 1242198
ugaugauagugauuaccag

SEQ ID NO: 1329619 - RNA, 19 nt, Artificial Sequence
  Description of Artificial Sequence: Synthetic oligonucleotide
  Antisense strand to SEQ ID NO: 1329618
cugguaaucacuaucauca

SEQ ID NO: 1329620 - RNA, 19 nt, Artificial Sequence
  Description of Artificial Sequence: Synthetic oligonucleotide
  Sense strand starting at position 3069 of SEQ ID NO: 1242198
uagugauuaccagagcaau

SEQ ID NO: 1329621 - RNA, 19 nt, Artificial Sequence
  Description of Artificial Sequence: Synthetic oligonucleotide
  Antisense strand to SEQ ID NO: 1329620
auugcucugguaaucacua

SEQ ID NO: 1329622 - RNA, 19 nt, Artificial Sequence
  Description of Artificial Sequence: Synthetic oligonucleotide
  Sense strand starting at position 3096 of SEQ ID NO: 1242198
uugauuaaaugagccauca

SEQ ID NO: 1329623 - RNA, 19 nt, Artificial Sequence
  Description of Artificial Sequence: Synthetic oligonucleotide
  Antisense strand to SEQ ID NO: 1329622
ugauggcucauuuaaucaa

SEQ ID NO: 1329624 - RNA, 19 nt, Artificial Sequence
  Description of Artificial Sequence: Synthetic oligonucleotide
  Sense strand starting at position 3118 of SEQ ID NO: 1242198
caaugaugucugcgggaaa

SEQ ID NO: 1329625 - RNA, 19 nt, Artificial Sequence
  Description of Artificial Sequence: Synthetic oligonucleotide
  Antisense strand to SEQ ID NO: 1329624
uuucccgcagacaucauug

SEQ ID NO: 1329626 - RNA, 19 nt, Artificial Sequence
  Description of Artificial Sequence: Synthetic oligonucleotide
  Sense strand starting at position 3444 of SEQ ID NO: 1242198
guugcucgucgacauuuaa

SEQ ID NO: 1329627 - RNA, 19 nt, Artificial Sequence
  Description of Artificial Sequence: Synthetic oligonucleotide
  Antisense strand to SEQ ID NO: 1329626
uuaaaugucgacgagcaac

SEQ ID NO: 1329628 - RNA, 19 nt, Artificial Sequence
  Description of Artificial Sequence: Synthetic oligonucleotide
  Sense strand starting at position 3506 of SEQ ID NO: 1242198
aaaguuggucuccagaauu

SEQ ID NO: 1329629 - RNA, 19 nt, Artificial Sequence
  Description of Artificial Sequence: Synthetic oligonucleotide
  Antisense strand to SEQ ID NO: 1329628
aauucuggagaccaacuuu

SEQ ID NO: 1329630 - RNA, 19 nt, Artificial Sequence
  Description of Artificial Sequence: Synthetic oligonucleotide
  Sense strand starting at position 3688 of SEQ ID NO: 1242198
cugagaaauuuguacucag

SEQ ID NO: 1329631 - RNA, 19 nt, Artificial Sequence
  Description of Artificial Sequence: Synthetic oligonucleotide
  Antisense strand to SEQ ID NO: 1329630
cugaguacaaauuucucag

SEQ ID NO: 1329632 - RNA, 19 nt, Artificial Sequence
  Description of Artificial Sequence: Synthetic oligonucleotide
  Sense strand starting at position 3754 of SEQ ID NO: 1242198
uaucgucgccaauaggauu

SEQ ID NO: 1329633 - RNA, 19 nt, Artificial Sequence
  Description of Artificial Sequence: Synthetic oligonucleotide
  Antisense strand to SEQ ID NO: 1329632
aauccuauuggcgacgaua

SEQ ID NO: 1329634 - RNA, 19 nt, Artificial Sequence
  Description of Artificial Sequence: Synthetic oligonucleotide
  Sense strand starting at position 3760 of SEQ ID NO: 1242198
cgccaauaggauuauuguu

SEQ ID NO: 1329635 - RNA, 19 nt, Artificial Sequence
  Description of Artificial Sequence: Synthetic oligonucleotide
  Antisense strand to SEQ ID NO: 1329634
aacaauaauccuauuggcg

SEQ ID NO: 1329636 - RNA, 19 nt, Artificial Sequence
  Description of Artificial Sequence: Synthetic oligonucleotide
  Sense strand starting at position 3802 of SEQ ID NO: 1242198
gugccaguuacguuucuuu

SEQ ID NO: 1329637 - RNA, 19 nt, Artificial Sequence
  Description of Artificial Sequence: Synthetic oligonucleotide
  Antisense strand to SEQ ID NO: 1329636
aaagaaacguaacuggcac

SEQ ID NO: 1329638 - RNA, 19 nt, Artificial Sequence
  Description of Artificial Sequence: Synthetic oligonucleotide
  Sense strand starting at position 3826 of SEQ ID NO: 1242198
agaaauuccucaguguccu

SEQ ID NO: 1329639 - RNA, 19 nt, Artificial Sequence
  Description of Artificial Sequence: Synthetic oligonucleotide
  Antisense strand to SEQ ID NO: 1329638
aggacacugaggaauuucu

SEQ ID NO: 1329640 - RNA, 19 nt, Artificial Sequence
  Description of Artificial Sequence: Synthetic oligonucleotide
  Sense strand starting at position 3832 of SEQ ID NO: 1242198
uccucaguguccuugauaa

SEQ ID NO: 1329641 - RNA, 19 nt, Artificial Sequence
  Description of Artificial Sequence: Synthetic oligonucleotide
  Antisense strand to SEQ ID NO: 1329640
uuaucaaggacacugagga

SEQ ID NO: 1329642 - RNA, 19 nt, Artificial Sequence
  Description of Artificial Sequence: Synthetic oligonucleotide
  Sense strand starting at position 3834 of SEQ ID NO: 1242198
cucaguguccuugauaaac

SEQ ID NO: 1329643 - RNA, 19 nt, Artificial Sequence
  Description of Artificial Sequence: Synthetic oligonucleotide
  Antisense strand to SEQ ID NO: 1329642
guuuaucaaggacacugag

SEQ ID NO: 1329644 - RNA, 19 nt, Artificial Sequence
  Description of Artificial Sequence: Synthetic oligonucleotide
  Sense strand starting at position 3890 of SEQ ID NO: 1242198
ccuugcaggguuuaaacau

SEQ ID NO: 1329645 - RNA, 19 nt, Artificial Sequence
  Description of Artificial Sequence: Synthetic oligonucleotide
  Antisense strand to SEQ ID NO: 1329644
auguuuaaacccugcaagg

SEQ ID NO: 1329646 - RNA, 19 nt, Artificial Sequence
  Description of Artificial Sequence: Synthetic oligonucleotide
  Sense strand starting at position 3953 of SEQ ID NO: 1242198
acuguaaagugaguuagca

SEQ ID NO: 1329647 - RNA, 19 nt, Artificial Sequence
  Description of Artificial Sequence: Synthetic oligonucleotide
  Antisense strand to SEQ ID NO: 1329646
ugcuaacucacuuuacagu

SEQ ID NO: 1329648 - RNA, 19 nt, Artificial Sequence
  Description of Artificial Sequence: Synthetic oligonucleotide
  Sense strand starting at position 3955 of SEQ ID NO: 1242198
uguaaagugaguuagcauc

SEQ ID NO: 1329649 - RNA, 19 nt, Artificial Sequence
  Description of Artificial Sequence: Synthetic oligonucleotide
  Antisense strand to SEQ ID NO: 1329648
gaugcuaacucacuuuaca

SEQ ID NO: 1329650 - RNA, 19 nt, Artificial Sequence
  Description of Artificial Sequence: Synthetic oligonucleotide
  Sense strand starting at position 657 of SEQ ID NO: 1242199
gcuaauaaucagcacgaga

SEQ ID NO: 1329651 - RNA, 19 nt, Artificial Sequence
  Description of Artificial Sequence: Synthetic oligonucleotide
  Antisense strand to SEQ ID NO: 1329650
ucucgugcugauuauuagc

SEQ ID NO: 1329652 - RNA, 19 nt, Artificial Sequence
  Description of Artificial Sequence: Synthetic oligonucleotide
  Sense strand starting at position 739 of SEQ ID NO: 1242199
gggcgaauaacgugaaagu

SEQ ID NO: 1329653 - RNA, 19 nt, Artificial Sequence
  Description of Artificial Sequence: Synthetic oligonucleotide
  Antisense strand to SEQ ID NO: 1329652
acuuucacguuauucgccc

SEQ ID NO: 1329654 - RNA, 19 nt, Artificial Sequence
  Description of Artificial Sequence: Synthetic oligonucleotide
  Sense strand starting at position 740 of SEQ ID NO: 1242199
ggcgaauaacgugaaaguu

SEQ ID NO: 1329655 - RNA, 19 nt, Artificial Sequence
  Description of Artificial Sequence: Synthetic oligonucleotide
  Antisense strand to SEQ ID NO: 1329654
aacuuucacguuauucgcc

SEQ ID NO: 1329656 - RNA, 19 nt, Artificial Sequence
  Description of Artificial Sequence: Synthetic oligonucleotide
  Sense strand starting at position 748 of SEQ ID NO: 1242199
acgugaaaguuaccagaaa

SEQ ID NO: 1329657 - RNA, 19 nt, Artificial Sequence
  Description of Artificial Sequence: Synthetic oligonucleotide
  Antisense strand to SEQ ID NO: 1329656
uuucugguaacuuucacgu

SEQ ID NO: 1329658 - RNA, 19 nt, Artificial Sequence
  Description of Artificial Sequence: Synthetic oligonucleotide
  Sense strand starting at position 749 of SEQ ID NO: 1242199
cgugaaaguuaccagaaac

SEQ ID NO: 1329659 - RNA, 19 nt, Artificial Sequence
  Description of Artificial Sequence: Synthetic oligonucleotide
  Antisense strand to SEQ ID NO: 1329658
guuucugguaacuuucacg

SEQ ID NO: 1329660 - RNA, 19 nt, Artificial Sequence
  Description of Artificial Sequence: Synthetic oligonucleotide
  Sense strand starting at position 786 of SEQ ID NO: 1242199
cccugcguccuugucaauu

SEQ ID NO: 1329661 - RNA, 19 nt, Artificial Sequence
  Description of Artificial Sequence: Synthetic oligonucleotide
  Antisense strand to SEQ ID NO: 1329660
aauugacaaggacgcaggg

SEQ ID NO: 1329662 - RNA, 19 nt, Artificial Sequence
  Description of Artificial Sequence: Synthetic oligonucleotide
  Sense strand starting at position 1007 of SEQ ID NO: 1242199
ggcgaaagcguguaacgau

SEQ ID NO: 1329663 - RNA, 19 nt, Artificial Sequence
  Description of Artificial Sequence: Synthetic oligonucleotide
  Antisense strand to SEQ ID NO: 1329662
aucguuacacgcuuucgcc

SEQ ID NO: 1329664 - RNA, 19 nt, Artificial Sequence
  Description of Artificial Sequence: Synthetic oligonucleotide
  Sense strand starting at position 1279 of SEQ ID NO: 1242199
uuuauaucuagguaagugu

SEQ ID NO: 1329665 - RNA, 19 nt, Artificial Sequence
  Description of Artificial Sequence: Synthetic oligonucleotide
  Antisense strand to SEQ ID NO: 1329664
acacuuaccuagauauaaa

SEQ ID NO: 1329666 - RNA, 19 nt, Artificial Sequence
  Description of Artificial Sequence: Synthetic oligonucleotide
  Sense strand starting at position 1287 of SEQ ID NO: 1242199
uagguaaguguuggagauu

SEQ ID NO: 1329667 - RNA, 19 nt, Artificial Sequence
  Description of Artificial Sequence: Synthetic oligonucleotide
  Antisense strand to SEQ ID NO: 1329666
aaucuccaacacuuaccua

SEQ ID NO: 1329668 - RNA, 19 nt, Artificial Sequence
  Description of Artificial Sequence: Synthetic oligonucleotide
  Sense strand starting at position 1288 of SEQ ID NO: 1242199
agguaaguguuggagauuu

SEQ ID NO: 1329669 - RNA, 19 nt, Artificial Sequence
  Description of Artificial Sequence: Synthetic oligonucleotide
  Antisense strand to SEQ ID NO: 1329668
aaaucuccaacacuuaccu

SEQ ID NO: 1329670 - RNA, 19 nt, Artificial Sequence
  Description of Artificial Sequence: Synthetic oligonucleotide
  Sense strand starting at position 1327 of SEQ ID NO: 1242199
cagucugcgcuccaauaaa

SEQ ID NO: 1329671 - RNA, 19 nt, Artificial Sequence
  Description of Artificial Sequence: Synthetic oligonucleotide
  Antisense strand to SEQ ID NO: 1329670
uuuauuggagcgcagacug

SEQ ID NO: 1329672 - RNA, 19 nt, Artificial Sequence
  Description of Artificial Sequence: Synthetic oligonucleotide
  Sense strand starting at position 1340 of SEQ ID NO: 1242199
aauaaacuccuggaugugu

SEQ ID NO: 1329673 - RNA, 19 nt, Artificial Sequence
  Description of Artificial Sequence: Synthetic oligonucleotide
  Antisense strand to SEQ ID NO: 1329672
acacauccaggaguuuauu

SEQ ID NO: 1329674 - RNA, 19 nt, Artificial Sequence
  Description of Artificial Sequence: Synthetic oligonucleotide
  Sense strand starting at position 1349 of SEQ ID NO: 1242199
cuggaugugucguauauuu

SEQ ID NO: 1329675 - RNA, 19 nt, Artificial Sequence
  Description of Artificial Sequence: Synthetic oligonucleotide
  Antisense strand to SEQ ID NO: 1329674
aaauauacgacacauccag

SEQ ID NO: 1329676 - RNA, 19 nt, Artificial Sequence
  Description of Artificial Sequence: Synthetic oligonucleotide
  Sense strand starting at position 1370 of SEQ ID NO: 1242199
uaucccaguccggauaaga

SEQ ID NO: 1329677 - RNA, 19 nt, Artificial Sequence
  Description of Artificial Sequence: Synthetic oligonucleotide
  Antisense strand to SEQ ID NO: 1329676
ucuuauccggacugggaua

SEQ ID NO: 1329678 - RNA, 19 nt, Artificial Sequence
  Description of Artificial Sequence: Synthetic oligonucleotide
  Sense strand starting at position 1380 of SEQ ID NO: 1242199
cggauaagaaagugaucua

SEQ ID NO: 1329679 - RNA, 19 nt, Artificial Sequence
  Description of Artificial Sequence: Synthetic oligonucleotide
  Antisense strand to SEQ ID NO: 1329678
uagaucacuuucuuauccg

SEQ ID NO: 1329680 - RNA, 19 nt, Artificial Sequence
  Description of Artificial Sequence: Synthetic oligonucleotide
  Sense strand starting at position 1387 of SEQ ID NO: 1242199
gaaagugaucuaggcugaa

SEQ ID NO: 1329681 - RNA, 19 nt, Artificial Sequence
  Description of Artificial Sequence: Synthetic oligonucleotide
  Antisense strand to SEQ ID NO: 1329680
uucagccuagaucacuuuc

SEQ ID NO: 1329682 - RNA, 19 nt, Artificial Sequence
  Description of Artificial Sequence: Synthetic oligonucleotide
  Sense strand starting at position 1390 of SEQ ID NO: 1242199
agugaucuaggcugaagau

SEQ ID NO: 1329683 - RNA, 19 nt, Artificial Sequence
  Description of Artificial Sequence: Synthetic oligonucleotide
  Antisense strand to SEQ ID NO: 1329682
aucuucagccuagaucacu

SEQ ID NO: 1329684 - RNA, 19 nt, Artificial Sequence
  Description of Artificial Sequence: Synthetic oligonucleotide
  Sense strand starting at position 1391 of SEQ ID NO: 1242199
gugaucuaggcugaagauu

SEQ ID NO: 1329685 - RNA, 19 nt, Artificial Sequence
  Description of Artificial Sequence: Synthetic oligonucleotide
  Antisense strand to SEQ ID NO: 1329684
aaucuucagccuagaucac

SEQ ID NO: 1329686 - RNA, 19 nt, Artificial Sequence
  Description of Artificial Sequence: Synthetic oligonucleotide
  Sense strand starting at position 1764 of SEQ ID NO: 1242199
ccgaacugucguguuucau

SEQ ID NO: 1329687 - RNA, 19 nt, Artificial Sequence
  Description of Artificial Sequence: Synthetic oligonucleotide
  Antisense strand to SEQ ID NO: 1329686
augaaacacgacaguucgg

SEQ ID NO: 1329688 - RNA, 19 nt, Artificial Sequence
  Description of Artificial Sequence: Synthetic oligonucleotide
  Sense strand starting at position 1831 of SEQ ID NO: 1242199
gugaaugaaugaugguuga

SEQ ID NO: 1329689 - RNA, 19 nt, Artificial Sequence
  Description of Artificial Sequence: Synthetic oligonucleotide
  Antisense strand to SEQ ID NO: 1329688
ucaaccaucauucauucac

SEQ ID NO: 1329690 - RNA, 19 nt, Artificial Sequence
  Description of Artificial Sequence: Synthetic oligonucleotide
  Sense strand starting at position 1911 of SEQ ID NO: 1242199
gguuucugcuucuugaauu

SEQ ID NO: 1329691 - RNA, 19 nt, Artificial Sequence
  Description of Artificial Sequence: Synthetic oligonucleotide
  Antisense strand to SEQ ID NO: 1329690
aauucaagaagcagaaacc

SEQ ID NO: 1329692 - RNA, 19 nt, Artificial Sequence
  Description of Artificial Sequence: Synthetic oligonucleotide
  Sense strand starting at position 2228 of SEQ ID NO: 1242199
ugcugccuggcuuauugaa

SEQ ID NO: 1329693 - RNA, 19 nt, Artificial Sequence
  Description of Artificial Sequence: Synthetic oligonucleotide
  Antisense strand to SEQ ID NO: 1329692
uucaauaagccaggcagca

SEQ ID NO: 1329694 - RNA, 19 nt, Artificial Sequence
  Description of Artificial Sequence: Synthetic oligonucleotide
  Sense strand starting at position 2230 of SEQ ID NO: 1242199
cugccuggcuuauugaaga

SEQ ID NO: 1329695 - RNA, 19 nt, Artificial Sequence
  Description of Artificial Sequence: Synthetic oligonucleotide
  Antisense strand to SEQ ID NO: 1329694
ucuucaauaagccaggcag

SEQ ID NO: 1329696 - RNA, 19 nt, Artificial Sequence
  Description of Artificial Sequence: Synthetic oligonucleotide
  Sense strand starting at position 2301 of SEQ ID NO: 1242199
ggaagucgugguggccaua

SEQ ID NO: 1329697 - RNA, 19 nt, Artificial Sequence
  Description of Artificial Sequence: Synthetic oligonucleotide
  Antisense strand to SEQ ID NO: 1329696
uauggccaccacgacuucc

SEQ ID NO: 1329698 - RNA, 19 nt, Artificial Sequence
  Description of Artificial Sequence: Synthetic oligonucleotide
  Sense strand starting at position 2884 of SEQ ID NO: 1242199
cccgaaggcuuccugcuaa

SEQ ID NO: 1329699 - RNA, 19 nt, Artificial Sequence
  Description of Artificial Sequence: Synthetic oligonucleotide
  Antisense strand to SEQ ID NO: 1329698
uuagcaggaagccuucggg

SEQ ID NO: 1329700 - RNA, 19 nt, Artificial Sequence
  Description of Artificial Sequence: Synthetic oligonucleotide
  Sense strand starting at position 3132 of SEQ ID NO: 1242199
ggcagucaucuggguccga

SEQ ID NO: 1329701 - RNA, 19 nt, Artificial Sequence
  Description of Artificial Sequence: Synthetic oligonucleotide
  Antisense strand to SEQ ID NO: 1329700
ucggacccagaugacugcc

SEQ ID NO: 1329702 - RNA, 19 nt, Artificial Sequence
  Description of Artificial Sequence: Synthetic oligonucleotide
  Sense strand starting at position 3133 of SEQ ID NO: 1242199
gcagucaucuggguccgau

SEQ ID NO: 1329703 - RNA, 19 nt, Artificial Sequence
  Description of Artificial Sequence: Synthetic oligonucleotide
  Antisense strand to SEQ ID NO: 1329702
aucggacccagaugacugc

SEQ ID NO: 1329704 - RNA, 19 nt, Artificial Sequence
  Description of Artificial Sequence: Synthetic oligonucleotide
  Sense strand starting at position 3136 of SEQ ID NO: 1242199
gucaucuggguccgaugua

SEQ ID NO: 1329705 - RNA, 19 nt, Artificial Sequence
  Description of Artificial Sequence: Synthetic oligonucleotide
  Antisense strand to SEQ ID NO: 1329704
uacaucggacccagaugac

SEQ ID NO: 1329706 - RNA, 19 nt, Artificial Sequence
  Description of Artificial Sequence: Synthetic oligonucleotide
  Sense strand starting at position 3241 of SEQ ID NO: 1242199
uagugugcgucuccaaagu

SEQ ID NO: 1329707 - RNA, 19 nt, Artificial Sequence
  Description of Artificial Sequence: Synthetic oligonucleotide
  Antisense strand to SEQ ID NO: 1329706
acuuuggagacgcacacua

SEQ ID NO: 1329708 - RNA, 19 nt, Artificial Sequence
  Description of Artificial Sequence: Synthetic oligonucleotide
  Sense strand starting at position 3396 of SEQ ID NO: 1242199
gcgguaacgccugcuaaug

SEQ ID NO: 1329709 - RNA, 19 nt, Artificial Sequence
  Description of Artificial Sequence: Synthetic oligonucleotide
  Antisense strand to SEQ ID NO: 1329708
cauuagcaggcguuaccgc

SEQ ID NO: 1329710 - RNA, 19 nt, Artificial Sequence
  Description of Artificial Sequence: Synthetic oligonucleotide
  Sense strand starting at position 3405 of SEQ ID NO: 1242199
ccugcuaauggcuguguua

SEQ ID NO: 1329711 - RNA, 19 nt, Artificial Sequence
  Description of Artificial Sequence: Synthetic oligonucleotide
  Antisense strand to SEQ ID NO: 1329710
uaacacagccauuagcagg

SEQ ID NO: 1329712 - RNA, 19 nt, Artificial Sequence
  Description of Artificial Sequence: Synthetic oligonucleotide
  Sense strand starting at position 3518 of SEQ ID NO: 1242199
caccguuuggguggaaacu

SEQ ID NO: 1329713 - RNA, 19 nt, Artificial Sequence
  Description of Artificial Sequence: Synthetic oligonucleotide
  Antisense strand to SEQ ID NO: 1329712
aguuuccacccaaacggug

SEQ ID NO: 1329714 - RNA, 19 nt, Artificial Sequence
  Description of Artificial Sequence: Synthetic oligonucleotide
  Sense strand starting at position 3519 of SEQ ID NO: 1242199
accguuuggguggaaacua

SEQ ID NO: 1329715 - RNA, 19 nt, Artificial Sequence
  Description of Artificial Sequence: Synthetic oligonucleotide
  Antisense strand to SEQ ID NO: 1329714
uaguuuccacccaaacggu

SEQ ID NO: 1329716 - RNA, 19 nt, Artificial Sequence
  Description of Artificial Sequence: Synthetic oligonucleotide
  Sense strand starting at position 3802 of SEQ ID NO: 1242199
gcggacuguuguucuccaa

SEQ ID NO: 1329717 - RNA, 19 nt, Artificial Sequence
  Description of Artificial Sequence: Synthetic oligonucleotide
  Antisense strand to SEQ ID NO: 1329716
uuggagaacaacaguccgc

SEQ ID NO: 1329718 - RNA, 19 nt, Artificial Sequence
  Description of Artificial Sequence: Synthetic oligonucleotide
  Sense strand starting at position 3805 of SEQ ID NO: 1242199
gacuguuguucuccaacag

SEQ ID NO: 1329719 - RNA, 19 nt, Artificial Sequence
  Description of Artificial Sequence: Synthetic oligonucleotide
  Antisense strand to SEQ ID NO: 1329718
cuguuggagaacaacaguc

SEQ ID NO: 1329720 - RNA, 19 nt, Artificial Sequence
  Description of Artificial Sequence: Synthetic oligonucleotide
  Sense strand starting at position 3843 of SEQ ID NO: 1242199
ugaacccauucugagaagu

SEQ ID NO: 1329721 - RNA, 19 nt, Artificial Sequence
  Description of Artificial Sequence: Synthetic oligonucleotide
  Antisense strand to SEQ ID NO: 1329720
acuucucagaauggguuca

SEQ ID NO: 1329722 - RNA, 19 nt, Artificial Sequence
  Description of Artificial Sequence: Synthetic oligonucleotide
  Sense strand starting at position 3864 of SEQ ID NO: 1242199
agaguagugucuuccgcga

SEQ ID NO: 1329723 - RNA, 19 nt, Artificial Sequence
  Description of Artificial Sequence: Synthetic oligonucleotide
  Antisense strand to SEQ ID NO: 1329722
ucgcggaagacacuacucu

SEQ ID NO: 1329724 - RNA, 19 nt, Artificial Sequence
  Description of Artificial Sequence: Synthetic oligonucleotide
  Sense strand starting at position 3926 of SEQ ID NO: 1242199
ggagguugauuagagagaa

SEQ ID NO: 1329725 - RNA, 19 nt, Artificial Sequence
  Description of Artificial Sequence: Synthetic oligonucleotide
  Antisense strand to SEQ ID NO: 1329724
uucucucuaaucaaccucc

SEQ ID NO: 1329726 - RNA, 19 nt, Artificial Sequence
  Description of Artificial Sequence: Synthetic oligonucleotide
  Sense strand starting at position 3941 of SEQ ID NO: 1242199
agaauaaaguacucugugu

SEQ ID NO: 1329727 - RNA, 19 nt, Artificial Sequence
  Description of Artificial Sequence: Synthetic oligonucleotide
  Antisense strand to SEQ ID NO: 1329726
acacagaguacuuuauucu

SEQ ID NO: 1329728 - RNA, 19 nt, Artificial Sequence
  Description of Artificial Sequence: Synthetic oligonucleotide
  Sense strand starting at position 3943 of SEQ ID NO: 1242199
aauaaaguacucugugugu

SEQ ID NO: 1329729 - RNA, 19 nt, Artificial Sequence
  Description of Artificial Sequence: Synthetic oligonucleotide
  Antisense strand to SEQ ID NO: 1329728
acacacagaguacuuuauu

SEQ ID NO: 1329730 - RNA, 19 nt, Artificial Sequence
  Description of Artificial Sequence: Synthetic oligonucleotide
  Sense strand starting at position 160 of SEQ ID NO: 1242200
uggaguccuucuuuaauac

SEQ ID NO: 1329731 - RNA, 19 nt, Artificial Sequence
  Description of Artificial Sequence: Synthetic oligonucleotide
  Antisense strand to SEQ ID NO: 1329730
guauuaaagaaggacucca

SEQ ID NO: 1329732 - RNA, 19 nt, Artificial Sequence
  Description of Artificial Sequence: Synthetic oligonucleotide
  Sense strand starting at position 161 of SEQ ID NO: 1242200
ggaguccuucuuuaauaca

SEQ ID NO: 1329733 - RNA, 19 nt, Artificial Sequence
  Description of Artificial Sequence: Synthetic oligonucleotide
  Antisense strand to SEQ ID NO: 1329732
uguauuaaagaaggacucc

SEQ ID NO: 1329734 - RNA, 19 nt, Artificial Sequence
  Description of Artificial Sequence: Synthetic oligonucleotide
  Sense strand starting at position 338 of SEQ ID NO: 1242200
ucaguuggaacguaaugaa

SEQ ID NO: 1329735 - RNA, 19 nt, Artificial Sequence
  Description of Artificial Sequence: Synthetic oligonucleotide
  Antisense strand to SEQ ID NO: 1329734
uucauuacguuccaacuga

SEQ ID NO: 1329736 - RNA, 19 nt, Artificial Sequence
  Description of Artificial Sequence: Synthetic oligonucleotide
  Sense strand starting at position 465 of SEQ ID NO: 1242200
agggaacacugugugaaau

SEQ ID NO: 1329737 - RNA, 19 nt, Artificial Sequence
  Description of Artificial Sequence: Synthetic oligonucleotide
  Antisense strand to SEQ ID NO: 1329736
auuucacacaguguucccu

SEQ ID NO: 1329738 - RNA, 19 nt, Artificial Sequence
  Description of Artificial Sequence: Synthetic oligonucleotide
  Sense strand starting at position 466 of SEQ ID NO: 1242200
gggaacacugugugaaauu

SEQ ID NO: 1329739 - RNA, 19 nt, Artificial Sequence
  Description of Artificial Sequence: Synthetic oligonucleotide
  Antisense strand to SEQ ID NO: 1329738
aauuucacacaguguuccc

SEQ ID NO: 1329740 - RNA, 19 nt, Artificial Sequence
  Description of Artificial Sequence: Synthetic oligonucleotide
  Sense strand starting at position 467 of SEQ ID NO: 1242200
ggaacacugugugaaauug

SEQ ID NO: 1329741 - RNA, 19 nt, Artificial Sequence
  Description of Artificial Sequence: Synthetic oligonucleotide
  Antisense strand to SEQ ID NO: 1329740
caauuucacacaguguucc

SEQ ID NO: 1329742 - RNA, 19 nt, Artificial Sequence
  Description of Artificial Sequence: Synthetic oligonucleotide
  Sense strand starting at position 628 of SEQ ID NO: 1242200
guuugcuccuguucuacua

SEQ ID NO: 1329743 - RNA, 19 nt, Artificial Sequence
  Description of Artificial Sequence: Synthetic oligonucleotide
  Antisense strand to SEQ ID NO: 1329742
uaguagaacaggagcaaac

SEQ ID NO: 1329744 - RNA, 19 nt, Artificial Sequence
  Description of Artificial Sequence: Synthetic oligonucleotide
  Sense strand starting at position 689 of SEQ ID NO: 1242200
uggagagcuuccuuccaaa

SEQ ID NO: 1329745 - RNA, 19 nt, Artificial Sequence
  Description of Artificial Sequence: Synthetic oligonucleotide
  Antisense strand to SEQ ID NO: 1329744
uuuggaaggaagcucucca

SEQ ID NO: 1329746 - RNA, 19 nt, Artificial Sequence
  Description of Artificial Sequence: Synthetic oligonucleotide
  Sense strand starting at position 710 of SEQ ID NO: 1242200
ccacauuucucccagcguu

SEQ ID NO: 1329747 - RNA, 19 nt, Artificial Sequence
  Description of Artificial Sequence: Synthetic oligonucleotide
  Antisense strand to SEQ ID NO: 1329746
aacgcugggagaaaugugg

SEQ ID NO: 1329748 - RNA, 19 nt, Artificial Sequence
  Description of Artificial Sequence: Synthetic oligonucleotide
  Sense strand starting at position 779 of SEQ ID NO: 1242200
cgcguaugcccuuuguguu

SEQ ID NO: 1329749 - RNA, 19 nt, Artificial Sequence
  Description of Artificial Sequence: Synthetic oligonucleotide
  Antisense strand to SEQ ID NO: 1329748
aacacaaagggcauacgcg

SEQ ID NO: 1329750 - RNA, 19 nt, Artificial Sequence
  Description of Artificial Sequence: Synthetic oligonucleotide
  Sense strand starting at position 1091 of SEQ ID NO: 1242200
gaauuaagaagugggugau

SEQ ID NO: 1329751 - RNA, 19 nt, Artificial Sequence
  Description of Artificial Sequence: Synthetic oligonucleotide
  Antisense strand to SEQ ID NO: 1329750
aucacccacuucuuaauuc

SEQ ID NO: 1329752 - RNA, 19 nt, Artificial Sequence
  Description of Artificial Sequence: Synthetic oligonucleotide
  Sense strand starting at position 1092 of SEQ ID NO: 1242200
aauuaagaagugggugauu

SEQ ID NO: 1329753 - RNA, 19 nt, Artificial Sequence
  Description of Artificial Sequence: Synthetic oligonucleotide
  Antisense strand to SEQ ID NO: 1329752
aaucacccacuucuuaauu

SEQ ID NO: 1329754 - RNA, 19 nt, Artificial Sequence
  Description of Artificial Sequence: Synthetic oligonucleotide
  Sense strand starting at position 1094 of SEQ ID NO: 1242200
uuaagaagugggugauuag

SEQ ID NO: 1329755 - RNA, 19 nt, Artificial Sequence
  Description of Artificial Sequence: Synthetic oligonucleotide
  Antisense strand to SEQ ID NO: 1329754
cuaaucacccacuucuuaa

SEQ ID NO: 1329756 - RNA, 19 nt, Artificial Sequence
  Description of Artificial Sequence: Synthetic oligonucleotide
  Sense strand starting at position 1112 of SEQ ID NO: 1242200
ggacuuccuggccgacaga

SEQ ID NO: 1329757 - RNA, 19 nt, Artificial Sequence
  Description of Artificial Sequence: Synthetic oligonucleotide
  Antisense strand to SEQ ID NO: 1329756
ucugucggccaggaagucc

SEQ ID NO: 1329758 - RNA, 19 nt, Artificial Sequence
  Description of Artificial Sequence: Synthetic oligonucleotide
  Sense strand starting at position 1228 of SEQ ID NO: 1242200
gcuucucaucggcaggaaa

SEQ ID NO: 1329759 - RNA, 19 nt, Artificial Sequence
  Description of Artificial Sequence: Synthetic oligonucleotide
  Antisense strand to SEQ ID NO: 1329758
uuuccugccgaugagaagc

SEQ ID NO: 1329760 - RNA, 19 nt, Artificial Sequence
  Description of Artificial Sequence: Synthetic oligonucleotide
  Sense strand starting at position 1230 of SEQ ID NO: 1242200
uucucaucggcaggaaacu

SEQ ID NO: 1329761 - RNA, 19 nt, Artificial Sequence
  Description of Artificial Sequence: Synthetic oligonucleotide
  Antisense strand to SEQ ID NO: 1329760
aguuuccugccgaugagaa

SEQ ID NO: 1329762 - RNA, 19 nt, Artificial Sequence
  Description of Artificial Sequence: Synthetic oligonucleotide
  Sense strand starting at position 1297 of SEQ ID NO: 1242200
gcguccuuuggccaggaau

SEQ ID NO: 1329763 - RNA, 19 nt, Artificial Sequence
  Description of Artificial Sequence: Synthetic oligonucleotide
  Antisense strand to SEQ ID NO: 1329762
auuccuggccaaaggacgc

SEQ ID NO: 1329764 - RNA, 19 nt, Artificial Sequence
  Description of Artificial Sequence: Synthetic oligonucleotide
  Sense strand starting at position 1382 of SEQ ID NO: 1242200
gaguggucgggcugugaga

SEQ ID NO: 1329765 - RNA, 19 nt, Artificial Sequence
  Description of Artificial Sequence: Synthetic oligonucleotide
  Antisense strand to SEQ ID NO: 1329764
ucucacagcccgaccacuc

SEQ ID NO: 1329766 - RNA, 19 nt, Artificial Sequence
  Description of Artificial Sequence: Synthetic oligonucleotide
  Sense strand starting at position 1594 of SEQ ID NO: 1242200
gggucaguuuacccauaga

SEQ ID NO: 1329767 - RNA, 19 nt, Artificial Sequence
  Description of Artificial Sequence: Synthetic oligonucleotide
  Antisense strand to SEQ ID NO: 1329766
ucuauggguaaacugaccc

SEQ ID NO: 1329768 - RNA, 19 nt, Artificial Sequence
  Description of Artificial Sequence: Synthetic oligonucleotide
  Sense strand starting at position 2436 of SEQ ID NO: 1242200
gcuaauaaucagcacgaga

SEQ ID NO: 1329769 - RNA, 19 nt, Artificial Sequence
  Description of Artificial Sequence: Synthetic oligonucleotide
  Antisense strand to SEQ ID NO: 1329768
ucucgugcugauuauuagc

SEQ ID NO: 1329770 - RNA, 19 nt, Artificial Sequence
  Description of Artificial Sequence: Synthetic oligonucleotide
  Sense strand starting at position 2518 of SEQ ID NO: 1242200
gggcgaauaacgugaaagu

SEQ ID NO: 1329771 - RNA, 19 nt, Artificial Sequence
  Description of Artificial Sequence: Synthetic oligonucleotide
  Antisense strand to SEQ ID NO: 1329770
acuuucacguuauucgccc

SEQ ID NO: 1329772 - RNA, 19 nt, Artificial Sequence
  Description of Artificial Sequence: Synthetic oligonucleotide
  Sense strand starting at position 2519 of SEQ ID NO: 1242200
ggcgaauaacgugaaaguu

SEQ ID NO: 1329773 - RNA, 19 nt, Artificial Sequence
  Description of Artificial Sequence: Synthetic oligonucleotide
  Antisense strand to SEQ ID NO: 1329772
aacuuucacguuauucgcc

SEQ ID NO: 1329774 - RNA, 19 nt, Artificial Sequence
  Description of Artificial Sequence: Synthetic oligonucleotide
  Sense strand starting at position 2527 of SEQ ID NO: 1242200
acgugaaaguuaccagaaa

SEQ ID NO: 1329775 - RNA, 19 nt, Artificial Sequence
  Description of Artificial Sequence: Synthetic oligonucleotide
  Antisense strand to SEQ ID NO: 1329774
uuucugguaacuuucacgu

SEQ ID NO: 1329776 - RNA, 19 nt, Artificial Sequence
  Description of Artificial Sequence: Synthetic oligonucleotide
  Sense strand starting at position 2528 of SEQ ID NO: 1242200
cgugaaaguuaccagaaac

SEQ ID NO: 1329777 - RNA, 19 nt, Artificial Sequence
  Description of Artificial Sequence: Synthetic oligonucleotide
  Antisense strand to SEQ ID NO: 1329776
guuucugguaacuuucacg

SEQ ID NO: 1329778 - RNA, 19 nt, Artificial Sequence
  Description of Artificial Sequence: Synthetic oligonucleotide
  Sense strand starting at position 2565 of SEQ ID NO: 1242200
cccugcguccuugucaauu

SEQ ID NO: 1329779 - RNA, 19 nt, Artificial Sequence
  Description of Artificial Sequence: Synthetic oligonucleotide
  Antisense strand to SEQ ID NO: 1329778
aauugacaaggacgcaggg

SEQ ID NO: 1329780 - RNA, 19 nt, Artificial Sequence
  Description of Artificial Sequence: Synthetic oligonucleotide
  Sense strand starting at position 2786 of SEQ ID NO: 1242200
ggcgaaagcguguaacgau

SEQ ID NO: 1329781 - RNA, 19 nt, Artificial Sequence
  Description of Artificial Sequence: Synthetic oligonucleotide
  Antisense strand to SEQ ID NO: 1329780
aucguuacacgcuuucgcc

SEQ ID NO: 1329782 - RNA, 19 nt, Artificial Sequence
  Description of Artificial Sequence: Synthetic oligonucleotide
  Sense strand starting at position 3058 of SEQ ID NO: 1242200
uuuauaucuagguaagugu

SEQ ID NO: 1329783 - RNA, 19 nt, Artificial Sequence
  Description of Artificial Sequence: Synthetic oligonucleotide
  Antisense strand to SEQ ID NO: 1329782
acacuuaccuagauauaaa

SEQ ID NO: 1329784 - RNA, 19 nt, Artificial Sequence
  Description of Artificial Sequence: Synthetic oligonucleotide
  Sense strand starting at position 3066 of SEQ ID NO: 1242200
uagguaaguguuggagauu

SEQ ID NO: 1329785 - RNA, 19 nt, Artificial Sequence
  Description of Artificial Sequence: Synthetic oligonucleotide
  Antisense strand to SEQ ID NO: 1329784
aaucuccaacacuuaccua

SEQ ID NO: 1329786 - RNA, 19 nt, Artificial Sequence
  Description of Artificial Sequence: Synthetic oligonucleotide
  Sense strand starting at position 3067 of SEQ ID NO: 1242200
agguaaguguuggagauuu

SEQ ID NO: 1329787 - RNA, 19 nt, Artificial Sequence
  Description of Artificial Sequence: Synthetic oligonucleotide
  Antisense strand to SEQ ID NO: 1329786
aaaucuccaacacuuaccu

SEQ ID NO: 1329788 - RNA, 19 nt, Artificial Sequence
  Description of Artificial Sequence: Synthetic oligonucleotide
  Sense strand starting at position 3106 of SEQ ID NO: 1242200
cagucugcgcuccaauaaa

SEQ ID NO: 1329789 - RNA, 19 nt, Artificial Sequence
  Description of Artificial Sequence: Synthetic oligonucleotide
  Antisense strand to SEQ ID NO: 1329788
uuuauuggagcgcagacug

SEQ ID NO: 1329790 - RNA, 19 nt, Artificial Sequence
  Description of Artificial Sequence: Synthetic oligonucleotide
  Sense strand starting at position 3119 of SEQ ID NO: 1242200
aauaaacuccuggaugugu

SEQ ID NO: 1329791 - RNA, 19 nt, Artificial Sequence
  Description of Artificial Sequence: Synthetic oligonucleotide
  Antisense strand to SEQ ID NO: 1329790
acacauccaggaguuuauu

SEQ ID NO: 1329792 - RNA, 19 nt, Artificial Sequence
  Description of Artificial Sequence: Synthetic oligonucleotide
  Sense strand starting at position 3128 of SEQ ID NO: 1242200
cuggaugugucguauauuu

SEQ ID NO: 1329793 - RNA, 19 nt, Artificial Sequence
  Description of Artificial Sequence: Synthetic oligonucleotide
  Antisense strand to SEQ ID NO: 1329792
aaauauacgacacauccag

SEQ ID NO: 1329794 - RNA, 19 nt, Artificial Sequence
  Description of Artificial Sequence: Synthetic oligonucleotide
  Sense strand starting at position 3149 of SEQ ID NO: 1242200
uaucccaguccggauaaga

SEQ ID NO: 1329795 - RNA, 19 nt, Artificial Sequence
  Description of Artificial Sequence: Synthetic oligonucleotide
  Antisense strand to SEQ ID NO: 1329794
ucuuauccggacugggaua

SEQ ID NO: 1329796 - RNA, 19 nt, Artificial Sequence
  Description of Artificial Sequence: Synthetic oligonucleotide
  Sense strand starting at position 3159 of SEQ ID NO: 1242200
cggauaagaaagugaucua

SEQ ID NO: 1329797 - RNA, 19 nt, Artificial Sequence
  Description of Artificial Sequence: Synthetic oligonucleotide
  Antisense strand to SEQ ID NO: 1329796
uagaucacuuucuuauccg

SEQ ID NO: 1329798 - RNA, 19 nt, Artificial Sequence
  Description of Artificial Sequence: Synthetic oligonucleotide
  Sense strand starting at position 3166 of SEQ ID NO: 1242200
gaaagugaucuaggcugaa

SEQ ID NO: 1329799 - RNA, 19 nt, Artificial Sequence
  Description of Artificial Sequence: Synthetic oligonucleotide
  Antisense strand to SEQ ID NO: 1329798
uucagccuagaucacuuuc

SEQ ID NO: 1329800 - RNA, 19 nt, Artificial Sequence
  Description of Artificial Sequence: Synthetic oligonucleotide
  Sense strand starting at position 3169 of SEQ ID NO: 1242200
agugaucuaggcugaagau

SEQ ID NO: 1329801 - RNA, 19 nt, Artificial Sequence
  Description of Artificial Sequence: Synthetic oligonucleotide
  Antisense strand to SEQ ID NO: 1329800
aucuucagccuagaucacu

SEQ ID NO: 1329802 - RNA, 19 nt, Artificial Sequence
  Description of Artificial Sequence: Synthetic oligonucleotide
  Sense strand starting at position 3170 of SEQ ID NO: 1242200
gugaucuaggcugaagauu

SEQ ID NO: 1329803 - RNA, 19 nt, Artificial Sequence
  Description of Artificial Sequence: Synthetic oligonucleotide
  Antisense strand to SEQ ID NO: 1329802
aaucuucagccuagaucac

SEQ ID NO: 1329804 - RNA, 19 nt, Artificial Sequence
  Description of Artificial Sequence: Synthetic oligonucleotide
  Sense strand starting at position 3543 of SEQ ID NO: 1242200
ccgaacugucguguuucau

SEQ ID NO: 1329805 - RNA, 19 nt, Artificial Sequence
  Description of Artificial Sequence: Synthetic oligonucleotide
  Antisense strand to SEQ ID NO: 1329804
augaaacacgacaguucgg

SEQ ID NO: 1329806 - RNA, 19 nt, Artificial Sequence
  Description of Artificial Sequence: Synthetic oligonucleotide
  Sense strand starting at position 3610 of SEQ ID NO: 1242200
gugaaugaaugaugguuga

SEQ ID NO: 1329807 - RNA, 19 nt, Artificial Sequence
  Description of Artificial Sequence: Synthetic oligonucleotide
  Antisense strand to SEQ ID NO: 1329806
ucaaccaucauucauucac

SEQ ID NO: 1329808 - RNA, 19 nt, Artificial Sequence
  Description of Artificial Sequence: Synthetic oligonucleotide
  Sense strand starting at position 3690 of SEQ ID NO: 1242200
gguuucugcuucuugaauu

SEQ ID NO: 1329809 - RNA, 19 nt, Artificial Sequence
  Description of Artificial Sequence: Synthetic oligonucleotide
  Antisense strand to SEQ ID NO: 1329808
aauucaagaagcagaaacc

SEQ ID NO: 1329810 - RNA, 19 nt, Artificial Sequence
  Description of Artificial Sequence: Synthetic oligonucleotide
  Sense strand starting at position 56 of SEQ ID NO: 1242201
gaauuaagaagugggugau

SEQ ID NO: 1329811 - RNA, 19 nt, Artificial Sequence
  Description of Artificial Sequence: Synthetic oligonucleotide
  Antisense strand to SEQ ID NO: 1329810
aucacccacuucuuaauuc

SEQ ID NO: 1329812 - RNA, 19 nt, Artificial Sequence
  Description of Artificial Sequence: Synthetic oligonucleotide
  Sense strand starting at position 57 of SEQ ID NO: 1242201
aauuaagaagugggugauu

SEQ ID NO: 1329813 - RNA, 19 nt, Artificial Sequence
  Description of Artificial Sequence: Synthetic oligonucleotide
  Antisense strand to SEQ ID NO: 1329812
aaucacccacuucuuaauu

SEQ ID NO: 1329814 - RNA, 19 nt, Artificial Sequence
  Description of Artificial Sequence: Synthetic oligonucleotide
  Sense strand starting at position 59 of SEQ ID NO: 1242201
uuaagaagugggugauuag

SEQ ID NO: 1329815 - RNA, 19 nt, Artificial Sequence
  Description of Artificial Sequence: Synthetic oligonucleotide
  Antisense strand to SEQ ID NO: 1329814
cuaaucacccacuucuuaa

SEQ ID NO: 1329816 - RNA, 19 nt, Artificial Sequence
  Description of Artificial Sequence: Synthetic oligonucleotide
  Sense strand starting at position 77 of SEQ ID NO: 1242201
ggacuuccuggccgacaga

SEQ ID NO: 1329817 - RNA, 19 nt, Artificial Sequence
  Description of Artificial Sequence: Synthetic oligonucleotide
  Antisense strand to SEQ ID NO: 1329816
ucugucggccaggaagucc

SEQ ID NO: 1329818 - RNA, 19 nt, Artificial Sequence
  Description of Artificial Sequence: Synthetic oligonucleotide
  Sense strand starting at position 193 of SEQ ID NO: 1242201
gcuucucaucggcaggaaa

SEQ ID NO: 1329819 - RNA, 19 nt, Artificial Sequence
  Description of Artificial Sequence: Synthetic oligonucleotide
  Antisense strand to SEQ ID NO: 1329818
uuuccugccgaugagaagc

SEQ ID NO: 1329820 - RNA, 19 nt, Artificial Sequence
  Description of Artificial Sequence: Synthetic oligonucleotide
  Sense strand starting at position 195 of SEQ ID NO: 1242201
uucucaucggcaggaaacu

SEQ ID NO: 1329821 - RNA, 19 nt, Artificial Sequence
  Description of Artificial Sequence: Synthetic oligonucleotide
  Antisense strand to SEQ ID NO: 1329820
aguuuccugccgaugagaa

SEQ ID NO: 1329822 - RNA, 19 nt, Artificial Sequence
  Description of Artificial Sequence: Synthetic oligonucleotide
  Sense strand starting at position 262 of SEQ ID NO: 1242201
gcguccuuuggccaggaau

SEQ ID NO: 1329823 - RNA, 19 nt, Artificial Sequence
  Description of Artificial Sequence: Synthetic oligonucleotide
  Antisense strand to SEQ ID NO: 1329822
auuccuggccaaaggacgc

SEQ ID NO: 1329824 - RNA, 19 nt, Artificial Sequence
  Description of Artificial Sequence: Synthetic oligonucleotide
  Sense strand starting at position 347 of SEQ ID NO: 1242201
gaguggucgggcugugaga

SEQ ID NO: 1329825 - RNA, 19 nt, Artificial Sequence
  Description of Artificial Sequence: Synthetic oligonucleotide
  Antisense strand to SEQ ID NO: 1329824
ucucacagcccgaccacuc

SEQ ID NO: 1329826 - RNA, 19 nt, Artificial Sequence
  Description of Artificial Sequence: Synthetic oligonucleotide
  Sense strand starting at position 559 of SEQ ID NO: 1242201
gggucaguuuacccauaga

SEQ ID NO: 1329827 - RNA, 19 nt, Artificial Sequence
  Description of Artificial Sequence: Synthetic oligonucleotide
  Antisense strand to SEQ ID NO: 1329826
ucuauggguaaacugaccc

SEQ ID NO: 1329828 - RNA, 19 nt, Artificial Sequence
  Description of Artificial Sequence: Synthetic oligonucleotide
  Sense strand starting at position 1291 of SEQ ID NO: 1242201
gaguuagugugaggaggaa

SEQ ID NO: 1329829 - RNA, 19 nt, Artificial Sequence
  Description of Artificial Sequence: Synthetic oligonucleotide
  Antisense strand to SEQ ID NO: 1329828
uuccuccucacacuaacuc

SEQ ID NO: 1329830 - RNA, 19 nt, Artificial Sequence
  Description of Artificial Sequence: Synthetic oligonucleotide
  Sense strand starting at position 1401 of SEQ ID NO: 1242201
gcuaauaaucagcacgaga

SEQ ID NO: 1329831 - RNA, 19 nt, Artificial Sequence
  Description of Artificial Sequence: Synthetic oligonucleotide
  Antisense strand to SEQ ID NO: 1329830
ucucgugcugauuauuagc

SEQ ID NO: 1329832 - RNA, 19 nt, Artificial Sequence
  Description of Artificial Sequence: Synthetic oligonucleotide
  Sense strand starting at position 1483 of SEQ ID NO: 1242201
gggcgaauaacgugaaagu

SEQ ID NO: 1329833 - RNA, 19 nt, Artificial Sequence
  Description of Artificial Sequence: Synthetic oligonucleotide
  Antisense strand to SEQ ID NO: 1329832
acuuucacguuauucgccc

SEQ ID NO: 1329834 - RNA, 19 nt, Artificial Sequence
  Description of Artificial Sequence: Synthetic oligonucleotide
  Sense strand starting at position 1484 of SEQ ID NO: 1242201
ggcgaauaacgugaaaguu

SEQ ID NO: 1329835 - RNA, 19 nt, Artificial Sequence
  Description of Artificial Sequence: Synthetic oligonucleotide
  Antisense strand to SEQ ID NO: 1329834
aacuuucacguuauucgcc

SEQ ID NO: 1329836 - RNA, 19 nt, Artificial Sequence
  Description of Artificial Sequence: Synthetic oligonucleotide
  Sense strand starting at position 1492 of SEQ ID NO: 1242201
acgugaaaguuaccagaaa

SEQ ID NO: 1329837 - RNA, 19 nt, Artificial Sequence
  Description of Artificial Sequence: Synthetic oligonucleotide
  Antisense strand to SEQ ID NO: 1329836
uuucugguaacuuucacgu

SEQ ID NO: 1329838 - RNA, 19 nt, Artificial Sequence
  Description of Artificial Sequence: Synthetic oligonucleotide
  Sense strand starting at position 1493 of SEQ ID NO: 1242201
cgugaaaguuaccagaaac

SEQ ID NO: 1329839 - RNA, 19 nt, Artificial Sequence
  Description of Artificial Sequence: Synthetic oligonucleotide
  Antisense strand to SEQ ID NO: 1329838
guuucugguaacuuucacg

SEQ ID NO: 1329840 - RNA, 19 nt, Artificial Sequence
  Description of Artificial Sequence: Synthetic oligonucleotide
  Sense strand starting at position 1530 of SEQ ID NO: 1242201
cccugcguccuugucaauu

SEQ ID NO: 1329841 - RNA, 19 nt, Artificial Sequence
  Description of Artificial Sequence: Synthetic oligonucleotide
  Antisense strand to SEQ ID NO: 1329840
aauugacaaggacgcaggg

SEQ ID NO: 1329842 - RNA, 19 nt, Artificial Sequence
  Description of Artificial Sequence: Synthetic oligonucleotide
  Sense strand starting at position 1751 of SEQ ID NO: 1242201
ggcgaaagcguguaacgau

SEQ ID NO: 1329843 - RNA, 19 nt, Artificial Sequence
  Description of Artificial Sequence: Synthetic oligonucleotide
  Antisense strand to SEQ ID NO: 1329842
aucguuacacgcuuucgcc

SEQ ID NO: 1329844 - RNA, 19 nt, Artificial Sequence
  Description of Artificial Sequence: Synthetic oligonucleotide
  Sense strand starting at position 2023 of SEQ ID NO: 1242201
uuuauaucuagguaagugu

SEQ ID NO: 1329845 - RNA, 19 nt, Artificial Sequence
  Description of Artificial Sequence: Synthetic oligonucleotide
  Antisense strand to SEQ ID NO: 1329844
acacuuaccuagauauaaa

SEQ ID NO: 1329846 - RNA, 19 nt, Artificial Sequence
  Description of Artificial Sequence: Synthetic oligonucleotide
  Sense strand starting at position 2031 of SEQ ID NO: 1242201
uagguaaguguuggagauu

SEQ ID NO: 1329847 - RNA, 19 nt, Artificial Sequence
  Description of Artificial Sequence: Synthetic oligonucleotide
  Antisense strand to SEQ ID NO: 1329846
aaucuccaacacuuaccua

SEQ ID NO: 1329848 - RNA, 19 nt, Artificial Sequence
  Description of Artificial Sequence: Synthetic oligonucleotide
  Sense strand starting at position 2032 of SEQ ID NO: 1242201
agguaaguguuggagauuu

SEQ ID NO: 1329849 - RNA, 19 nt, Artificial Sequence
  Description of Artificial Sequence: Synthetic oligonucleotide
  Antisense strand to SEQ ID NO: 1329848
aaaucuccaacacuuaccu

SEQ ID NO: 1329850 - RNA, 19 nt, Artificial Sequence
  Description of Artificial Sequence: Synthetic oligonucleotide
  Sense strand starting at position 2071 of SEQ ID NO: 1242201
cagucugcgcuccaauaaa

SEQ ID NO: 1329851 - RNA, 19 nt, Artificial Sequence
  Description of Artificial Sequence: Synthetic oligonucleotide
  Antisense strand to SEQ ID NO: 1329850
uuuauuggagcgcagacug

SEQ ID NO: 1329852 - RNA, 19 nt, Artificial Sequence
  Description of Artificial Sequence: Synthetic oligonucleotide
  Sense strand starting at position 2082 of SEQ ID NO: 1242201
ccaauaaacuccuggaugu

SEQ ID NO: 1329853 - RNA, 19 nt, Artificial Sequence
  Description of Artificial Sequence: Synthetic oligonucleotide
  Antisense strand to SEQ ID NO: 1329852
acauccaggaguuuauugg

SEQ ID NO: 1329854 - RNA, 19 nt, Artificial Sequence
  Description of Artificial Sequence: Synthetic oligonucleotide
  Sense strand starting at position 2084 of SEQ ID NO: 1242201
aauaaacuccuggaugugu

SEQ ID NO: 1329855 - RNA, 19 nt, Artificial Sequence
  Description of Artificial Sequence: Synthetic oligonucleotide
  Antisense strand to SEQ ID NO: 1329854
acacauccaggaguuuauu

SEQ ID NO: 1329856 - RNA, 19 nt, Artificial Sequence
  Description of Artificial Sequence: Synthetic oligonucleotide
  Sense strand starting at position 2093 of SEQ ID NO: 1242201
cuggaugugucguauauuu

SEQ ID NO: 1329857 - RNA, 19 nt, Artificial Sequence
  Description of Artificial Sequence: Synthetic oligonucleotide
  Antisense strand to SEQ ID NO: 1329856
aaauauacgacacauccag

SEQ ID NO: 1329858 - RNA, 19 nt, Artificial Sequence
  Description of Artificial Sequence: Synthetic oligonucleotide
  Sense strand starting at position 2114 of SEQ ID NO: 1242201
uaucccaguccggauaaga

SEQ ID NO: 1329859 - RNA, 19 nt, Artificial Sequence
  Description of Artificial Sequence: Synthetic oligonucleotide
  Antisense strand to SEQ ID NO: 1329858
ucuuauccggacugggaua

SEQ ID NO: 1329860 - RNA, 19 nt, Artificial Sequence
  Description of Artificial Sequence: Synthetic oligonucleotide
  Sense strand starting at position 2124 of SEQ ID NO: 1242201
cggauaagaaagugaucua

SEQ ID NO: 1329861 - RNA, 19 nt, Artificial Sequence
  Description of Artificial Sequence: Synthetic oligonucleotide
  Antisense strand to SEQ ID NO: 1329860
uagaucacuuucuuauccg

SEQ ID NO: 1329862 - RNA, 19 nt, Artificial Sequence
  Description of Artificial Sequence: Synthetic oligonucleotide
  Sense strand starting at position 2131 of SEQ ID NO: 1242201
gaaagugaucuaggcugaa

SEQ ID NO: 1329863 - RNA, 19 nt, Artificial Sequence
  Description of Artificial Sequence: Synthetic oligonucleotide
  Antisense strand to SEQ ID NO: 1329862
uucagccuagaucacuuuc

SEQ ID NO: 1329864 - RNA, 19 nt, Artificial Sequence
  Description of Artificial Sequence: Synthetic oligonucleotide
  Sense strand starting at position 2134 of SEQ ID NO: 1242201
agugaucuaggcugaagau

SEQ ID NO: 1329865 - RNA, 19 nt, Artificial Sequence
  Description of Artificial Sequence: Synthetic oligonucleotide
  Antisense strand to SEQ ID NO: 1329864
aucuucagccuagaucacu

SEQ ID NO: 1329866 - RNA, 19 nt, Artificial Sequence
  Description of Artificial Sequence: Synthetic oligonucleotide
  Sense strand starting at position 2135 of SEQ ID NO: 1242201
gugaucuaggcugaagauu

SEQ ID NO: 1329867 - RNA, 19 nt, Artificial Sequence
  Description of Artificial Sequence: Synthetic oligonucleotide
  Antisense strand to SEQ ID NO: 1329866
aaucuucagccuagaucac

SEQ ID NO: 1329868 - RNA, 19 nt, Artificial Sequence
  Description of Artificial Sequence: Synthetic oligonucleotide
  Sense strand starting at position 2508 of SEQ ID NO: 1242201
ccgaacugucguguuucau

SEQ ID NO: 1329869 - RNA, 19 nt, Artificial Sequence
  Description of Artificial Sequence: Synthetic oligonucleotide
  Antisense strand to SEQ ID NO: 1329868
augaaacacgacaguucgg

SEQ ID NO: 1329870 - RNA, 19 nt, Artificial Sequence
  Description of Artificial Sequence: Synthetic oligonucleotide
  Sense strand starting at position 2575 of SEQ ID NO: 1242201
gugaaugaaugaugguuga

SEQ ID NO: 1329871 - RNA, 19 nt, Artificial Sequence
  Description of Artificial Sequence: Synthetic oligonucleotide
  Antisense strand to SEQ ID NO: 1329870
ucaaccaucauucauucac

SEQ ID NO: 1329872 - RNA, 19 nt, Artificial Sequence
  Description of Artificial Sequence: Synthetic oligonucleotide
  Sense strand starting at position 2655 of SEQ ID NO: 1242201
gguuucugcuucuugaauu

SEQ ID NO: 1329873 - RNA, 19 nt, Artificial Sequence
  Description of Artificial Sequence: Synthetic oligonucleotide
  Antisense strand to SEQ ID NO: 1329872
aauucaagaagcagaaacc

SEQ ID NO: 1329874 - RNA, 19 nt, Artificial Sequence
  Description of Artificial Sequence: Synthetic oligonucleotide
  Sense strand starting at position 2656 of SEQ ID NO: 1242201
guuucugcuucuugaauuu

SEQ ID NO: 1329875 - RNA, 19 nt, Artificial Sequence
  Description of Artificial Sequence: Synthetic oligonucleotide
  Antisense strand to SEQ ID NO: 1329874
aaauucaagaagcagaaac

SEQ ID NO: 1329876 - RNA, 19 nt, Artificial Sequence
  Description of Artificial Sequence: Synthetic oligonucleotide
  Sense strand starting at position 2972 of SEQ ID NO: 1242201
ugcugccuggcuuauugaa

SEQ ID NO: 1329877 - RNA, 19 nt, Artificial Sequence
  Description of Artificial Sequence: Synthetic oligonucleotide
  Antisense strand to SEQ ID NO: 1329876
uucaauaagccaggcagca

SEQ ID NO: 1329878 - RNA, 19 nt, Artificial Sequence
  Description of Artificial Sequence: Synthetic oligonucleotide
  Sense strand starting at position 2974 of SEQ ID NO: 1242201
cugccuggcuuauugaaga

SEQ ID NO: 1329879 - RNA, 19 nt, Artificial Sequence
  Description of Artificial Sequence: Synthetic oligonucleotide
  Antisense strand to SEQ ID NO: 1329878
ucuucaauaagccaggcag

SEQ ID NO: 1329880 - RNA, 19 nt, Artificial Sequence
  Description of Artificial Sequence: Synthetic oligonucleotide
  Sense strand starting at position 3045 of SEQ ID NO: 1242201
ggaagucgugguggccaua

SEQ ID NO: 1329881 - RNA, 19 nt, Artificial Sequence
  Description of Artificial Sequence: Synthetic oligonucleotide
  Antisense strand to SEQ ID NO: 1329880
uauggccaccacgacuucc

SEQ ID NO: 1329882 - RNA, 19 nt, Artificial Sequence
  Description of Artificial Sequence: Synthetic oligonucleotide
  Sense strand starting at position 3628 of SEQ ID NO: 1242201
cccgaaggcuuccugcuaa

SEQ ID NO: 1329883 - RNA, 19 nt, Artificial Sequence
  Description of Artificial Sequence: Synthetic oligonucleotide
  Antisense strand to SEQ ID NO: 1329882
uuagcaggaagccuucggg

SEQ ID NO: 1329884 - RNA, 19 nt, Artificial Sequence
  Description of Artificial Sequence: Synthetic oligonucleotide
  Sense strand starting at position 3876 of SEQ ID NO: 1242201
ggcagucaucuggguccga

SEQ ID NO: 1329885 - RNA, 19 nt, Artificial Sequence
  Description of Artificial Sequence: Synthetic oligonucleotide
  Antisense strand to SEQ ID NO: 1329884
ucggacccagaugacugcc

SEQ ID NO: 1329886 - RNA, 19 nt, Artificial Sequence
  Description of Artificial Sequence: Synthetic oligonucleotide
  Sense strand starting at position 3877 of SEQ ID NO: 1242201
gcagucaucuggguccgau

SEQ ID NO: 1329887 - RNA, 19 nt, Artificial Sequence
  Description of Artificial Sequence: Synthetic oligonucleotide
  Antisense strand to SEQ ID NO: 1329886
aucggacccagaugacugc

SEQ ID NO: 1329888 - RNA, 19 nt, Artificial Sequence
  Description of Artificial Sequence: Synthetic oligonucleotide
  Sense strand starting at position 3880 of SEQ ID NO: 1242201
gucaucuggguccgaugua

SEQ ID NO: 1329889 - RNA, 19 nt, Artificial Sequence
  Description of Artificial Sequence: Synthetic oligonucleotide
  Antisense strand to SEQ ID NO: 1329888
uacaucggacccagaugac

SEQ ID NO: 1329890 - RNA, 19 nt, Artificial Sequence
  Description of Artificial Sequence: Synthetic oligonucleotide
  Sense strand starting at position 2042 of SEQ ID NO: 1242202
caccgccuuucguuuaaau

SEQ ID NO: 1329891 - RNA, 19 nt, Artificial Sequence
  Description of Artificial Sequence: Synthetic oligonucleotide
  Antisense strand to SEQ ID NO: 1329890
auuuaaacgaaaggcggug

SEQ ID NO: 1329892 - RNA, 19 nt, Artificial Sequence
  Description of Artificial Sequence: Synthetic oligonucleotide
  Sense strand starting at position 2320 of SEQ ID NO: 1242202
ggccuuacguaagcucuua

SEQ ID NO: 1329893 - RNA, 19 nt, Artificial Sequence
  Description of Artificial Sequence: Synthetic oligonucleotide
  Antisense strand to SEQ ID NO: 1329892
uaagagcuuacguaaggcc

SEQ ID NO: 1329894 - RNA, 19 nt, Artificial Sequence
  Description of Artificial Sequence: Synthetic oligonucleotide
  Sense strand starting at position 2509 of SEQ ID NO: 1242202
gcccuuuguuguguuugau

SEQ ID NO: 1329895 - RNA, 19 nt, Artificial Sequence
  Description of Artificial Sequence: Synthetic oligonucleotide
  Antisense strand to SEQ ID NO: 1329894
aucaaacacaacaaagggc

SEQ ID NO: 1329896 - RNA, 19 nt, Artificial Sequence
  Description of Artificial Sequence: Synthetic oligonucleotide
  Sense strand starting at position 2599 of SEQ ID NO: 1242202
uccgaagaguggugcuaga

SEQ ID NO: 1329897 - RNA, 19 nt, Artificial Sequence
  Description of Artificial Sequence: Synthetic oligonucleotide
  Antisense strand to SEQ ID NO: 1329896
ucuagcaccacucuucgga

SEQ ID NO: 1329898 - RNA, 19 nt, Artificial Sequence
  Description of Artificial Sequence: Synthetic oligonucleotide
  Sense strand starting at position 2623 of SEQ ID NO: 1242202
gcccguuccucccuugaaa

SEQ ID NO: 1329899 - RNA, 19 nt, Artificial Sequence
  Description of Artificial Sequence: Synthetic oligonucleotide
  Antisense strand to SEQ ID NO: 1329898
uuucaagggaggaacgggc

SEQ ID NO: 1329900 - RNA, 19 nt, Artificial Sequence
  Description of Artificial Sequence: Synthetic oligonucleotide
  Sense strand starting at position 2625 of SEQ ID NO: 1242202
ccguuccucccuugaaaua

SEQ ID NO: 1329901 - RNA, 19 nt, Artificial Sequence
  Description of Artificial Sequence: Synthetic oligonucleotide
  Antisense strand to SEQ ID NO: 1329900
uauuucaagggaggaacgg

SEQ ID NO: 1329902 - RNA, 19 nt, Artificial Sequence
  Description of Artificial Sequence: Synthetic oligonucleotide
  Sense strand starting at position 2709 of SEQ ID NO: 1242202
uuaugaguuccaugacauu

SEQ ID NO: 1329903 - RNA, 19 nt, Artificial Sequence
  Description of Artificial Sequence: Synthetic oligonucleotide
  Antisense strand to SEQ ID NO: 1329902
aaugucauggaacucauaa

SEQ ID NO: 1329904 - RNA, 19 nt, Artificial Sequence
  Description of Artificial Sequence: Synthetic oligonucleotide
  Sense strand starting at position 2712 of SEQ ID NO: 1242202
ugaguuccaugacauuguu

SEQ ID NO: 1329905 - RNA, 19 nt, Artificial Sequence
  Description of Artificial Sequence: Synthetic oligonucleotide
  Antisense strand to SEQ ID NO: 1329904
aacaaugucauggaacuca

SEQ ID NO: 1329906 - RNA, 19 nt, Artificial Sequence
  Description of Artificial Sequence: Synthetic oligonucleotide
  Sense strand starting at position 2747 of SEQ ID NO: 1242202
guauccgucuucucuucua

SEQ ID NO: 1329907 - RNA, 19 nt, Artificial Sequence
  Description of Artificial Sequence: Synthetic oligonucleotide
  Antisense strand to SEQ ID NO: 1329906
uagaagagaagacggauac

SEQ ID NO: 1329908 - RNA, 19 nt, Artificial Sequence
  Description of Artificial Sequence: Synthetic oligonucleotide
  Sense strand starting at position 2750 of SEQ ID NO: 1242202
uccgucuucucuucuagaa

SEQ ID NO: 1329909 - RNA, 19 nt, Artificial Sequence
  Description of Artificial Sequence: Synthetic oligonucleotide
  Antisense strand to SEQ ID NO: 1329908
uucuagaagagaagacgga

SEQ ID NO: 1329910 - RNA, 19 nt, Artificial Sequence
  Description of Artificial Sequence: Synthetic oligonucleotide
  Sense strand starting at position 2752 of SEQ ID NO: 1242202
cgucuucucuucuagaaau

SEQ ID NO: 1329911 - RNA, 19 nt, Artificial Sequence
  Description of Artificial Sequence: Synthetic oligonucleotide
  Antisense strand to SEQ ID NO: 1329910
auuucuagaagagaagacg

SEQ ID NO: 1329912 - RNA, 19 nt, Artificial Sequence
  Description of Artificial Sequence: Synthetic oligonucleotide
  Sense strand starting at position 2766 of SEQ ID NO: 1242202
gaaauuagagauugugcac

SEQ ID NO: 1329913 - RNA, 19 nt, Artificial Sequence
  Description of Artificial Sequence: Synthetic oligonucleotide
  Antisense strand to SEQ ID NO: 1329912
gugcacaaucucuaauuuc

SEQ ID NO: 1329914 - RNA, 19 nt, Artificial Sequence
  Description of Artificial Sequence: Synthetic oligonucleotide
  Sense strand starting at position 2792 of SEQ ID NO: 1242202
uugaguacuugguuccuaa

SEQ ID NO: 1329915 - RNA, 19 nt, Artificial Sequence
  Description of Artificial Sequence: Synthetic oligonucleotide
  Antisense strand to SEQ ID NO: 1329914
uuaggaaccaaguacucaa

SEQ ID NO: 1329916 - RNA, 19 nt, Artificial Sequence
  Description of Artificial Sequence: Synthetic oligonucleotide
  Sense strand starting at position 2795 of SEQ ID NO: 1242202
aguacuugguuccuaaaca

SEQ ID NO: 1329917 - RNA, 19 nt, Artificial Sequence
  Description of Artificial Sequence: Synthetic oligonucleotide
  Antisense strand to SEQ ID NO: 1329916
uguuuaggaaccaaguacu

SEQ ID NO: 1329918 - RNA, 19 nt, Artificial Sequence
  Description of Artificial Sequence: Synthetic oligonucleotide
  Sense strand starting at position 2796 of SEQ ID NO: 1242202
guacuugguuccuaaacag

SEQ ID NO: 1329919 - RNA, 19 nt, Artificial Sequence
  Description of Artificial Sequence: Synthetic oligonucleotide
  Antisense strand to SEQ ID NO: 1329918
cuguuuaggaaccaaguac

SEQ ID NO: 1329920 - RNA, 19 nt, Artificial Sequence
  Description of Artificial Sequence: Synthetic oligonucleotide
  Sense strand starting at position 2810 of SEQ ID NO: 1242202
aacaguagcuguuagaauu

SEQ ID NO: 1329921 - RNA, 19 nt, Artificial Sequence
  Description of Artificial Sequence: Synthetic oligonucleotide
  Antisense strand to SEQ ID NO: 1329920
aauucuaacagcuacuguu

SEQ ID NO: 1329922 - RNA, 19 nt, Artificial Sequence
  Description of Artificial Sequence: Synthetic oligonucleotide
  Sense strand starting at position 2818 of SEQ ID NO: 1242202
cuguuagaauuauuaugag

SEQ ID NO: 1329923 - RNA, 19 nt, Artificial Sequence
  Description of Artificial Sequence: Synthetic oligonucleotide
  Antisense strand to SEQ ID NO: 1329922
cucauaauaauucuaacag

SEQ ID NO: 1329924 - RNA, 19 nt, Artificial Sequence
  Description of Artificial Sequence: Synthetic oligonucleotide
  Sense strand starting at position 2828 of SEQ ID NO: 1242202
uauuaugagcccugaucag

SEQ ID NO: 1329925 - RNA, 19 nt, Artificial Sequence
  Description of Artificial Sequence: Synthetic oligonucleotide
  Antisense strand to SEQ ID NO: 1329924
cugaucagggcucauaaua

SEQ ID NO: 1329926 - RNA, 19 nt, Artificial Sequence
  Description of Artificial Sequence: Synthetic oligonucleotide
  Sense strand starting at position 2867 of SEQ ID NO: 1242202
cgucuauuuauucgucugu

SEQ ID NO: 1329927 - RNA, 19 nt, Artificial Sequence
  Description of Artificial Sequence: Synthetic oligonucleotide
  Antisense strand to SEQ ID NO: 1329926
acagacgaauaaauagacg

SEQ ID NO: 1329928 - RNA, 19 nt, Artificial Sequence
  Description of Artificial Sequence: Synthetic oligonucleotide
  Sense strand starting at position 2868 of SEQ ID NO: 1242202
gucuauuuauucgucugua

SEQ ID NO: 1329929 - RNA, 19 nt, Artificial Sequence
  Description of Artificial Sequence: Synthetic oligonucleotide
  Antisense strand to SEQ ID NO: 1329928
uacagacgaauaaauagac

SEQ ID NO: 1329930 - RNA, 19 nt, Artificial Sequence
  Description of Artificial Sequence: Synthetic oligonucleotide
  Sense strand starting at position 2869 of SEQ ID NO: 1242202
ucuauuuauucgucuguau

SEQ ID NO: 1329931 - RNA, 19 nt, Artificial Sequence
  Description of Artificial Sequence: Synthetic oligonucleotide
  Antisense strand to SEQ ID NO: 1329930
auacagacgaauaaauaga

SEQ ID NO: 1329932 - RNA, 19 nt, Artificial Sequence
  Description of Artificial Sequence: Synthetic oligonucleotide
  Sense strand starting at position 2873 of SEQ ID NO: 1242202
uuuauucgucuguauaaug

SEQ ID NO: 1329933 - RNA, 19 nt, Artificial Sequence
  Description of Artificial Sequence: Synthetic oligonucleotide
  Antisense strand to SEQ ID NO: 1329932
cauuauacagacgaauaaa

SEQ ID NO: 1329934 - RNA, 19 nt, Artificial Sequence
  Description of Artificial Sequence: Synthetic oligonucleotide
  Sense strand starting at position 2878 of SEQ ID NO: 1242202
ucgucuguauaauggaaua

SEQ ID NO: 1329935 - RNA, 19 nt, Artificial Sequence
  Description of Artificial Sequence: Synthetic oligonucleotide
  Antisense strand to SEQ ID NO: 1329934
uauuccauuauacagacga

SEQ ID NO: 1329936 - RNA, 19 nt, Artificial Sequence
  Description of Artificial Sequence: Synthetic oligonucleotide
  Sense strand starting at position 2899 of SEQ ID NO: 1242202
aguggcugcuguuaaauga

SEQ ID NO: 1329937 - RNA, 19 nt, Artificial Sequence
  Description of Artificial Sequence: Synthetic oligonucleotide
  Antisense strand to SEQ ID NO: 1329936
ucauuuaacagcagccacu

SEQ ID NO: 1329938 - RNA, 19 nt, Artificial Sequence
  Description of Artificial Sequence: Synthetic oligonucleotide
  Sense strand starting at position 2930 of SEQ ID NO: 1242202
ggcguuuggagggaaacau

SEQ ID NO: 1329939 - RNA, 19 nt, Artificial Sequence
  Description of Artificial Sequence: Synthetic oligonucleotide
  Antisense strand to SEQ ID NO: 1329938
auguuucccuccaaacgcc

SEQ ID NO: 1329940 - RNA, 19 nt, Artificial Sequence
  Description of Artificial Sequence: Synthetic oligonucleotide
  Sense strand starting at position 2940 of SEQ ID NO: 1242202
gggaaacauuacuacucca

SEQ ID NO: 1329941 - RNA, 19 nt, Artificial Sequence
  Description of Artificial Sequence: Synthetic oligonucleotide
  Antisense strand to SEQ ID NO: 1329940
uggaguaguaauguuuccc

SEQ ID NO: 1329942 - RNA, 19 nt, Artificial Sequence
  Description of Artificial Sequence: Synthetic oligonucleotide
  Sense strand starting at position 2993 of SEQ ID NO: 1242202
ugaagugacuuccgaagau

SEQ ID NO: 1329943 - RNA, 19 nt, Artificial Sequence
  Description of Artificial Sequence: Synthetic oligonucleotide
  Antisense strand to SEQ ID NO: 1329942
aucuucggaagucacuuca

SEQ ID NO: 1329944 - RNA, 19 nt, Artificial Sequence
  Description of Artificial Sequence: Synthetic oligonucleotide
  Sense strand starting at position 3303 of SEQ ID NO: 1242202
ccaagcauuucugagaaug

SEQ ID NO: 1329945 - RNA, 19 nt, Artificial Sequence
  Description of Artificial Sequence: Synthetic oligonucleotide
  Antisense strand to SEQ ID NO: 1329944
cauucucagaaaugcuugg

SEQ ID NO: 1329946 - RNA, 19 nt, Artificial Sequence
  Description of Artificial Sequence: Synthetic oligonucleotide
  Sense strand starting at position 3320 of SEQ ID NO: 1242202
ugaacugugagacaugcua

SEQ ID NO: 1329947 - RNA, 19 nt, Artificial Sequence
  Description of Artificial Sequence: Synthetic oligonucleotide
  Antisense strand to SEQ ID NO: 1329946
uagcaugucucacaguuca

SEQ ID NO: 1329948 - RNA, 19 nt, Artificial Sequence
  Description of Artificial Sequence: Synthetic oligonucleotide
  Sense strand starting at position 3375 of SEQ ID NO: 1242202
gauggauagucauccuacu

SEQ ID NO: 1329949 - RNA, 19 nt, Artificial Sequence
  Description of Artificial Sequence: Synthetic oligonucleotide
  Antisense strand to SEQ ID NO: 1329948
aguaggaugacuauccauc

SEQ ID NO: 1329950 - RNA, 19 nt, Artificial Sequence
  Description of Artificial Sequence: Synthetic oligonucleotide
  Sense strand starting at position 3417 of SEQ ID NO: 1242202
aucuuuagaauccggauga

SEQ ID NO: 1329951 - RNA, 19 nt, Artificial Sequence
  Description of Artificial Sequence: Synthetic oligonucleotide
  Antisense strand to SEQ ID NO: 1329950
ucauccggauucuaaagau

SEQ ID NO: 1329952 - RNA, 19 nt, Artificial Sequence
  Description of Artificial Sequence: Synthetic oligonucleotide
  Sense strand starting at position 3446 of SEQ ID NO: 1242202
uuugcaaaccgaggucaau

SEQ ID NO: 1329953 - RNA, 19 nt, Artificial Sequence
  Description of Artificial Sequence: Synthetic oligonucleotide
  Antisense strand to SEQ ID NO: 1329952
auugaccucgguuugcaaa

SEQ ID NO: 1329954 - RNA, 19 nt, Artificial Sequence
  Description of Artificial Sequence: Synthetic oligonucleotide
  Sense strand starting at position 3482 of SEQ ID NO: 1242202
ggaaguaauuauguagggu

SEQ ID NO: 1329955 - RNA, 19 nt, Artificial Sequence
  Description of Artificial Sequence: Synthetic oligonucleotide
  Antisense strand to SEQ ID NO: 1329954
acccuacauaauuacuucc

SEQ ID NO: 1329956 - RNA, 19 nt, Artificial Sequence
  Description of Artificial Sequence: Synthetic oligonucleotide
  Sense strand starting at position 3483 of SEQ ID NO: 1242202
gaaguaauuauguaggguu

SEQ ID NO: 1329957 - RNA, 19 nt, Artificial Sequence
  Description of Artificial Sequence: Synthetic oligonucleotide
  Antisense strand to SEQ ID NO: 1329956
aacccuacauaauuacuuc

SEQ ID NO: 1329958 - RNA, 19 nt, Artificial Sequence
  Description of Artificial Sequence: Synthetic oligonucleotide
  Sense strand starting at position 3485 of SEQ ID NO: 1242202
aguaauuauguaggguuaa

SEQ ID NO: 1329959 - RNA, 19 nt, Artificial Sequence
  Description of Artificial Sequence: Synthetic oligonucleotide
  Antisense strand to SEQ ID NO: 1329958
uuaacccuacauaauuacu

SEQ ID NO: 1329960 - RNA, 19 nt, Artificial Sequence
  Description of Artificial Sequence: Synthetic oligonucleotide
  Sense strand starting at position 3486 of SEQ ID NO: 1242202
guaauuauguaggguuaau

SEQ ID NO: 1329961 - RNA, 19 nt, Artificial Sequence
  Description of Artificial Sequence: Synthetic oligonucleotide
  Antisense strand to SEQ ID NO: 1329960
auuaacccuacauaauuac

SEQ ID NO: 1329962 - RNA, 19 nt, Artificial Sequence
  Description of Artificial Sequence: Synthetic oligonucleotide
  Sense strand starting at position 3951 of SEQ ID NO: 1242202
cuguucugugccuaguuua

SEQ ID NO: 1329963 - RNA, 19 nt, Artificial Sequence
  Description of Artificial Sequence: Synthetic oligonucleotide
  Antisense strand to SEQ ID NO: 1329962
uaaacuaggcacagaacag

SEQ ID NO: 1329964 - RNA, 19 nt, Artificial Sequence
  Description of Artificial Sequence: Synthetic oligonucleotide
  Sense strand starting at position 3958 of SEQ ID NO: 1242202
gugccuaguuuauucuuga

SEQ ID NO: 1329965 - RNA, 19 nt, Artificial Sequence
  Description of Artificial Sequence: Synthetic oligonucleotide
  Antisense strand to SEQ ID NO: 1329964
ucaagaauaaacuaggcac

SEQ ID NO: 1329966 - RNA, 19 nt, Artificial Sequence
  Description of Artificial Sequence: Synthetic oligonucleotide
  Sense strand starting at position 3962 of SEQ ID NO: 1242202
cuaguuuauucuugaggcu

SEQ ID NO: 1329967 - RNA, 19 nt, Artificial Sequence
  Description of Artificial Sequence: Synthetic oligonucleotide
  Antisense strand to SEQ ID NO: 1329966
agccucaagaauaaacuag

SEQ ID NO: 1329968 - RNA, 19 nt, Artificial Sequence
  Description of Artificial Sequence: Synthetic oligonucleotide
  Sense strand starting at position 3971 of SEQ ID NO: 1242202
ucuugaggcugcucuaaga

SEQ ID NO: 1329969 - RNA, 19 nt, Artificial Sequence
  Description of Artificial Sequence: Synthetic oligonucleotide
  Antisense strand to SEQ ID NO: 1329968
ucuuagagcagccucaaga

SEQ ID NO: 1329970 - RNA, 19 nt, Artificial Sequence
  Description of Artificial Sequence: Synthetic oligonucleotide
  Sense strand starting at position 309 of SEQ ID NO: 1242203
gugcgauguggagcaaguu

SEQ ID NO: 1329971 - RNA, 19 nt, Artificial Sequence
  Description of Artificial Sequence: Synthetic oligonucleotide
  Antisense strand to SEQ ID NO: 1329970
aacuugcuccacaucgcac

SEQ ID NO: 1329972 - RNA, 19 nt, Artificial Sequence
  Description of Artificial Sequence: Synthetic oligonucleotide
  Sense strand starting at position 343 of SEQ ID NO: 1242203
gucucaaugucaucaucua

SEQ ID NO: 1329973 - RNA, 19 nt, Artificial Sequence
  Description of Artificial Sequence: Synthetic oligonucleotide
  Antisense strand to SEQ ID NO: 1329972
uagaugaugacauugagac

SEQ ID NO: 1329974 - RNA, 19 nt, Artificial Sequence
  Description of Artificial Sequence: Synthetic oligonucleotide
  Sense strand starting at position 550 of SEQ ID NO: 1242203
uuucucaugaggugauguu

SEQ ID NO: 1329975 - RNA, 19 nt, Artificial Sequence
  Description of Artificial Sequence: Synthetic oligonucleotide
  Antisense strand to SEQ ID NO: 1329974
aacaucaccucaugagaaa

SEQ ID NO: 1329976 - RNA, 19 nt, Artificial Sequence
  Description of Artificial Sequence: Synthetic oligonucleotide
  Sense strand starting at position 569 of SEQ ID NO: 1242203
cucacucuggcagaucaaa

SEQ ID NO: 1329977 - RNA, 19 nt, Artificial Sequence
  Description of Artificial Sequence: Synthetic oligonucleotide
  Antisense strand to SEQ ID NO: 1329976
uuugaucugccagagugag

SEQ ID NO: 1329978 - RNA, 19 nt, Artificial Sequence
  Description of Artificial Sequence: Synthetic oligonucleotide
  Sense strand starting at position 588 of SEQ ID NO: 1242203
aggcuuuauuugcuggagu

SEQ ID NO: 1329979 - RNA, 19 nt, Artificial Sequence
  Description of Artificial Sequence: Synthetic oligonucleotide
  Antisense strand to SEQ ID NO: 1329978
acuccagcaaauaaagccu

SEQ ID NO: 1329980 - RNA, 19 nt, Artificial Sequence
  Description of Artificial Sequence: Synthetic oligonucleotide
  Sense strand starting at position 736 of SEQ ID NO: 1242203
agaugcaucaggugguauu

SEQ ID NO: 1329981 - RNA, 19 nt, Artificial Sequence
  Description of Artificial Sequence: Synthetic oligonucleotide
  Antisense strand to SEQ ID NO: 1329980
aauaccaccugaugcaucu

SEQ ID NO: 1329982 - RNA, 19 nt, Artificial Sequence
  Description of Artificial Sequence: Synthetic oligonucleotide
  Sense strand starting at position 737 of SEQ ID NO: 1242203
gaugcaucaggugguauuu

SEQ ID NO: 1329983 - RNA, 19 nt, Artificial Sequence
  Description of Artificial Sequence: Synthetic oligonucleotide
  Antisense strand to SEQ ID NO: 1329982
aaauaccaccugaugcauc

SEQ ID NO: 1329984 - RNA, 19 nt, Artificial Sequence
  Description of Artificial Sequence: Synthetic oligonucleotide
  Sense strand starting at position 755 of SEQ ID NO: 1242203
uuaaacucuugucugaaag

SEQ ID NO: 1329985 - RNA, 19 nt, Artificial Sequence
  Description of Artificial Sequence: Synthetic oligonucleotide
  Antisense strand to SEQ ID NO: 1329984
cuuucagacaagaguuuaa

SEQ ID NO: 1329986 - RNA, 19 nt, Artificial Sequence
  Description of Artificial Sequence: Synthetic oligonucleotide
  Sense strand starting at position 863 of SEQ ID NO: 1242203
ccucauguugcagauaaag

SEQ ID NO: 1329987 - RNA, 19 nt, Artificial Sequence
  Description of Artificial Sequence: Synthetic oligonucleotide
  Antisense strand to SEQ ID NO: 1329986
cuuuaucugcaacaugagg

SEQ ID NO: 1329988 - RNA, 19 nt, Artificial Sequence
  Description of Artificial Sequence: Synthetic oligonucleotide
  Sense strand starting at position 1307 of SEQ ID NO: 1242203
aggaaaugcucuuuaguag

SEQ ID NO: 1329989 - RNA, 19 nt, Artificial Sequence
  Description of Artificial Sequence: Synthetic oligonucleotide
  Antisense strand to SEQ ID NO: 1329988
cuacuaaagagcauuuccu

SEQ ID NO: 1329990 - RNA, 19 nt, Artificial Sequence
  Description of Artificial Sequence: Synthetic oligonucleotide
  Sense strand starting at position 1308 of SEQ ID NO: 1242203
ggaaaugcucuuuaguaga

SEQ ID NO: 1329991 - RNA, 19 nt, Artificial Sequence
  Description of Artificial Sequence: Synthetic oligonucleotide
  Antisense strand to SEQ ID NO: 1329990
ucuacuaaagagcauuucc

SEQ ID NO: 1329992 - RNA, 19 nt, Artificial Sequence
  Description of Artificial Sequence: Synthetic oligonucleotide
  Sense strand starting at position 1316 of SEQ ID NO: 1242203
ucuuuaguagauugggaaa

SEQ ID NO: 1329993 - RNA, 19 nt, Artificial Sequence
  Description of Artificial Sequence: Synthetic oligonucleotide
  Antisense strand to SEQ ID NO: 1329992
uuucccaaucuacuaaaga

SEQ ID NO: 1329994 - RNA, 19 nt, Artificial Sequence
  Description of Artificial Sequence: Synthetic oligonucleotide
  Sense strand starting at position 1447 of SEQ ID NO: 1242203
auugaagugguuugagaaa

SEQ ID NO: 1329995 - RNA, 19 nt, Artificial Sequence
  Description of Artificial Sequence: Synthetic oligonucleotide
  Antisense strand to SEQ ID NO: 1329994
uuucucaaaccacuucaau

SEQ ID NO: 1329996 - RNA, 19 nt, Artificial Sequence
  Description of Artificial Sequence: Synthetic oligonucleotide
  Sense strand starting at position 1585 of SEQ ID NO: 1242203
gcaugaguagaggagguua

SEQ ID NO: 1329997 - RNA, 19 nt, Artificial Sequence
  Description of Artificial Sequence: Synthetic oligonucleotide
  Antisense strand to SEQ ID NO: 1329996
uaaccuccucuacucaugc

SEQ ID NO: 1329998 - RNA, 19 nt, Artificial Sequence
  Description of Artificial Sequence: Synthetic oligonucleotide
  Sense strand starting at position 1701 of SEQ ID NO: 1242203
cucccauugcuccagaaga

SEQ ID NO: 1329999 - RNA, 19 nt, Artificial Sequence
  Description of Artificial Sequence: Synthetic oligonucleotide
  Antisense strand to SEQ ID NO: 1329998
ucuucuggagcaaugggag

SEQ ID NO: 1330000 - RNA, 19 nt, Artificial Sequence
  Description of Artificial Sequence: Synthetic oligonucleotide
  Sense strand starting at position 2386 of SEQ ID NO: 1242203
gcaauuuccuuugagaaca

SEQ ID NO: 1330001 - RNA, 19 nt, Artificial Sequence
  Description of Artificial Sequence: Synthetic oligonucleotide
  Antisense strand to SEQ ID NO: 1330000
uguucucaaaggaaauugc

SEQ ID NO: 1330002 - RNA, 19 nt, Artificial Sequence
  Description of Artificial Sequence: Synthetic oligonucleotide
  Sense strand starting at position 2452 of SEQ ID NO: 1242203
agucauaaauaguucgagu

SEQ ID NO: 1330003 - RNA, 19 nt, Artificial Sequence
  Description of Artificial Sequence: Synthetic oligonucleotide
  Antisense strand to SEQ ID NO: 1330002
acucgaacuauuuaugacu

SEQ ID NO: 1330004 - RNA, 19 nt, Artificial Sequence
  Description of Artificial Sequence: Synthetic oligonucleotide
  Sense strand starting at position 2573 of SEQ ID NO: 1242203
gcuugccuuucuuugauuu

SEQ ID NO: 1330005 - RNA, 19 nt, Artificial Sequence
  Description of Artificial Sequence: Synthetic oligonucleotide
  Antisense strand to SEQ ID NO: 1330004
aaaucaaagaaaggcaagc

SEQ ID NO: 1330006 - RNA, 19 nt, Artificial Sequence
  Description of Artificial Sequence: Synthetic oligonucleotide
  Sense strand starting at position 2668 of SEQ ID NO: 1242203
ggccaaagaugcuuugaga

SEQ ID NO: 1330007 - RNA, 19 nt, Artificial Sequence
  Description of Artificial Sequence: Synthetic oligonucleotide
  Antisense strand to SEQ ID NO: 1330006
ucucaaagcaucuuuggcc

SEQ ID NO: 1330008 - RNA, 19 nt, Artificial Sequence
  Description of Artificial Sequence: Synthetic oligonucleotide
  Sense strand starting at position 2679 of SEQ ID NO: 1242203
cuuugagauucuucuuguu

SEQ ID NO: 1330009 - RNA, 19 nt, Artificial Sequence
  Description of Artificial Sequence: Synthetic oligonucleotide
  Antisense strand to SEQ ID NO: 1330008
aacaagaagaaucucaaag

SEQ ID NO: 1330010 - RNA, 19 nt, Artificial Sequence
  Description of Artificial Sequence: Synthetic oligonucleotide
  Sense strand starting at position 2788 of SEQ ID NO: 1242203
ggcuuaagccuuuauaauc

SEQ ID NO: 1330011 - RNA, 19 nt, Artificial Sequence
  Description of Artificial Sequence: Synthetic oligonucleotide
  Antisense strand to SEQ ID NO: 1330010
gauuauaaaggcuuaagcc

SEQ ID NO: 1330012 - RNA, 19 nt, Artificial Sequence
  Description of Artificial Sequence: Synthetic oligonucleotide
  Sense strand starting at position 2831 of SEQ ID NO: 1242203
ggacgauaauuugaguuua

SEQ ID NO: 1330013 - RNA, 19 nt, Artificial Sequence
  Description of Artificial Sequence: Synthetic oligonucleotide
  Antisense strand to SEQ ID NO: 1330012
uaaacucaaauuaucgucc

SEQ ID NO: 1330014 - RNA, 19 nt, Artificial Sequence
  Description of Artificial Sequence: Synthetic oligonucleotide
  Sense strand starting at position 2981 of SEQ ID NO: 1242203
augggcauuuauuaccaau

SEQ ID NO: 1330015 - RNA, 19 nt, Artificial Sequence
  Description of Artificial Sequence: Synthetic oligonucleotide
  Antisense strand to SEQ ID NO: 1330014
auugguaauaaaugcccau

SEQ ID NO: 1330016 - RNA, 19 nt, Artificial Sequence
  Description of Artificial Sequence: Synthetic oligonucleotide
  Sense strand starting at position 3062 of SEQ ID NO: 1242203
auuaguaggcugcauauaa

SEQ ID NO: 1330017 - RNA, 19 nt, Artificial Sequence
  Description of Artificial Sequence: Synthetic oligonucleotide
  Antisense strand to SEQ ID NO: 1330016
uuauaugcagccuacuaau

SEQ ID NO: 1330018 - RNA, 19 nt, Artificial Sequence
  Description of Artificial Sequence: Synthetic oligonucleotide
  Sense strand starting at position 3155 of SEQ ID NO: 1242203
caguguaaacucgaaacua

SEQ ID NO: 1330019 - RNA, 19 nt, Artificial Sequence
  Description of Artificial Sequence: Synthetic oligonucleotide
  Antisense strand to SEQ ID NO: 1330018
uaguuucgaguuuacacug

SEQ ID NO: 1330020 - RNA, 19 nt, Artificial Sequence
  Description of Artificial Sequence: Synthetic oligonucleotide
  Sense strand starting at position 3166 of SEQ ID NO: 1242203
cgaaacuagggcugguaua

SEQ ID NO: 1330021 - RNA, 19 nt, Artificial Sequence
  Description of Artificial Sequence: Synthetic oligonucleotide
  Antisense strand to SEQ ID NO: 1330020
uauaccagcccuaguuucg

SEQ ID NO: 1330022 - RNA, 19 nt, Artificial Sequence
  Description of Artificial Sequence: Synthetic oligonucleotide
  Sense strand starting at position 3286 of SEQ ID NO: 1242203
gagcuccagucaucaagau

SEQ ID NO: 1330023 - RNA, 19 nt, Artificial Sequence
  Description of Artificial Sequence: Synthetic oligonucleotide
  Antisense strand to SEQ ID NO: 1330022
aucuugaugacuggagcuc

SEQ ID NO: 1330024 - RNA, 19 nt, Artificial Sequence
  Description of Artificial Sequence: Synthetic oligonucleotide
  Sense strand starting at position 3394 of SEQ ID NO: 1242203
uugcauacauuucuguuua

SEQ ID NO: 1330025 - RNA, 19 nt, Artificial Sequence
  Description of Artificial Sequence: Synthetic oligonucleotide
  Antisense strand to SEQ ID NO: 1330024
uaaacagaaauguaugcaa

SEQ ID NO: 1330026 - RNA, 19 nt, Artificial Sequence
  Description of Artificial Sequence: Synthetic oligonucleotide
  Sense strand starting at position 3449 of SEQ ID NO: 1242203
cugagaaauugucuucuag

SEQ ID NO: 1330027 - RNA, 19 nt, Artificial Sequence
  Description of Artificial Sequence: Synthetic oligonucleotide
  Antisense strand to SEQ ID NO: 1330026
cuagaagacaauuucucag

SEQ ID NO: 1330028 - RNA, 19 nt, Artificial Sequence
  Description of Artificial Sequence: Synthetic oligonucleotide
  Sense strand starting at position 3599 of SEQ ID NO: 1242203
guaggaguggcugauauuc

SEQ ID NO: 1330029 - RNA, 19 nt, Artificial Sequence
  Description of Artificial Sequence: Synthetic oligonucleotide
  Antisense strand to SEQ ID NO: 1330028
gaauaucagccacuccuac

SEQ ID NO: 1330030 - RNA, 19 nt, Artificial Sequence
  Description of Artificial Sequence: Synthetic oligonucleotide
  Sense strand starting at position 3604 of SEQ ID NO: 1242203
aguggcugauauucuacau

SEQ ID NO: 1330031 - RNA, 19 nt, Artificial Sequence
  Description of Artificial Sequence: Synthetic oligonucleotide
  Antisense strand to SEQ ID NO: 1330030
auguagaauaucagccacu

SEQ ID NO: 1330032 - RNA, 19 nt, Artificial Sequence
  Description of Artificial Sequence: Synthetic oligonucleotide
  Sense strand starting at position 3631 of SEQ ID NO: 1242203
augcaucuguauguaaaca

SEQ ID NO: 1330033 - RNA, 19 nt, Artificial Sequence
  Description of Artificial Sequence: Synthetic oligonucleotide
  Antisense strand to SEQ ID NO: 1330032
uguuuacauacagaugcau

SEQ ID NO: 1330034 - RNA, 19 nt, Artificial Sequence
  Description of Artificial Sequence: Synthetic oligonucleotide
  Sense strand starting at position 3670 of SEQ ID NO: 1242203
uauugacguugagcagaaa

SEQ ID NO: 1330035 - RNA, 19 nt, Artificial Sequence
  Description of Artificial Sequence: Synthetic oligonucleotide
  Antisense strand to SEQ ID NO: 1330034
uuucugcucaacgucaaua

SEQ ID NO: 1330036 - RNA, 19 nt, Artificial Sequence
  Description of Artificial Sequence: Synthetic oligonucleotide
  Sense strand starting at position 3673 of SEQ ID NO: 1242203
ugacguugagcagaaacaa

SEQ ID NO: 1330037 - RNA, 19 nt, Artificial Sequence
  Description of Artificial Sequence: Synthetic oligonucleotide
  Antisense strand to SEQ ID NO: 1330036
uuguuucugcucaacguca

SEQ ID NO: 1330038 - RNA, 19 nt, Artificial Sequence
  Description of Artificial Sequence: Synthetic oligonucleotide
  Sense strand starting at position 3730 of SEQ ID NO: 1242203
gggaaaugucaugagcuuu

SEQ ID NO: 1330039 - RNA, 19 nt, Artificial Sequence
  Description of Artificial Sequence: Synthetic oligonucleotide
  Antisense strand to SEQ ID NO: 1330038
aaagcucaugacauuuccc

SEQ ID NO: 1330040 - RNA, 19 nt, Artificial Sequence
  Description of Artificial Sequence: Synthetic oligonucleotide
  Sense strand starting at position 3905 of SEQ ID NO: 1242203
uugggauucuuggcccaca

SEQ ID NO: 1330041 - RNA, 19 nt, Artificial Sequence
  Description of Artificial Sequence: Synthetic oligonucleotide
  Antisense strand to SEQ ID NO: 1330040
ugugggccaagaaucccaa

SEQ ID NO: 1330042 - RNA, 19 nt, Artificial Sequence
  Description of Artificial Sequence: Synthetic oligonucleotide
  Sense strand starting at position 3906 of SEQ ID NO: 1242203
ugggauucuuggcccacau

SEQ ID NO: 1330043 - RNA, 19 nt, Artificial Sequence
  Description of Artificial Sequence: Synthetic oligonucleotide
  Antisense strand to SEQ ID NO: 1330042
augugggccaagaauccca

SEQ ID NO: 1330044 - RNA, 19 nt, Artificial Sequence
  Description of Artificial Sequence: Synthetic oligonucleotide
  Sense strand starting at position 3908 of SEQ ID NO: 1242203
ggauucuuggcccacauau

SEQ ID NO: 1330045 - RNA, 19 nt, Artificial Sequence
  Description of Artificial Sequence: Synthetic oligonucleotide
  Antisense strand to SEQ ID NO: 1330044
auaugugggccaagaaucc

SEQ ID NO: 1330046 - RNA, 19 nt, Artificial Sequence
  Description of Artificial Sequence: Synthetic oligonucleotide
  Sense strand starting at position 3919 of SEQ ID NO: 1242203
ccacauaucuaguuauaga

SEQ ID NO: 1330047 - RNA, 19 nt, Artificial Sequence
  Description of Artificial Sequence: Synthetic oligonucleotide
  Antisense strand to SEQ ID NO: 1330046
ucuauaacuagauaugugg

SEQ ID NO: 1330048 - RNA, 19 nt, Artificial Sequence
  Description of Artificial Sequence: Synthetic oligonucleotide
  Sense strand starting at position 3971 of SEQ ID NO: 1242203
ugggaauguguagaaaguu

SEQ ID NO: 1330049 - RNA, 19 nt, Artificial Sequence
  Description of Artificial Sequence: Synthetic oligonucleotide
  Antisense strand to SEQ ID NO: 1330048
aacuuucuacacauuccca

SEQ ID NO: 1330050 - RNA, 19 nt, Artificial Sequence
  Description of Artificial Sequence: Synthetic oligonucleotide
  Sense strand starting at position 39 of SEQ ID NO: 1242204
ccaggaugcucccgugcau

SEQ ID NO: 1330051 - RNA, 19 nt, Artificial Sequence
  Description of Artificial Sequence: Synthetic oligonucleotide
  Antisense strand to SEQ ID NO: 1330050
augcacgggagcauccugg

SEQ ID NO: 1330052 - RNA, 19 nt, Artificial Sequence
  Description of Artificial Sequence: Synthetic oligonucleotide
  Sense strand starting at position 214 of SEQ ID NO: 1242204
augguuacuugaguauaau

SEQ ID NO: 1330053 - RNA, 19 nt, Artificial Sequence
  Description of Artificial Sequence: Synthetic oligonucleotide
  Antisense strand to SEQ ID NO: 1330052
auuauacucaaguaaccau

SEQ ID NO: 1330054 - RNA, 19 nt, Artificial Sequence
  Description of Artificial Sequence: Synthetic oligonucleotide
  Sense strand starting at position 215 of SEQ ID NO: 1242204
ugguuacuugaguauaaua

SEQ ID NO: 1330055 - RNA, 19 nt, Artificial Sequence
  Description of Artificial Sequence: Synthetic oligonucleotide
  Antisense strand to SEQ ID NO: 1330054
uauuauacucaaguaacca

SEQ ID NO: 1330056 - RNA, 19 nt, Artificial Sequence
  Description of Artificial Sequence: Synthetic oligonucleotide
  Sense strand starting at position 231 of SEQ ID NO: 1242204
auagguaccugauguacau

SEQ ID NO: 1330057 - RNA, 19 nt, Artificial Sequence
  Description of Artificial Sequence: Synthetic oligonucleotide
  Antisense strand to SEQ ID NO: 1330056
auguacaucagguaccuau

SEQ ID NO: 1330058 - RNA, 19 nt, Artificial Sequence
  Description of Artificial Sequence: Synthetic oligonucleotide
  Sense strand starting at position 235 of SEQ ID NO: 1242204
guaccugauguacauacaa

SEQ ID NO: 1330059 - RNA, 19 nt, Artificial Sequence
  Description of Artificial Sequence: Synthetic oligonucleotide
  Antisense strand to SEQ ID NO: 1330058
uuguauguacaucagguac

SEQ ID NO: 1330060 - RNA, 19 nt, Artificial Sequence
  Description of Artificial Sequence: Synthetic oligonucleotide
  Sense strand starting at position 390 of SEQ ID NO: 1242204
ggcugacccaucuggacua

SEQ ID NO: 1330061 - RNA, 19 nt, Artificial Sequence
  Description of Artificial Sequence: Synthetic oligonucleotide
  Antisense strand to SEQ ID NO: 1330060
uaguccagaugggucagcc

SEQ ID NO: 1330062 - RNA, 19 nt, Artificial Sequence
  Description of Artificial Sequence: Synthetic oligonucleotide
  Sense strand starting at position 467 of SEQ ID NO: 1242204
ggcuaaagauugcaagaac

SEQ ID NO: 1330063 - RNA, 19 nt, Artificial Sequence
  Description of Artificial Sequence: Synthetic oligonucleotide
  Antisense strand to SEQ ID NO: 1330062
guucuugcaaucuuuagcc

SEQ ID NO: 1330064 - RNA, 19 nt, Artificial Sequence
  Description of Artificial Sequence: Synthetic oligonucleotide
  Sense strand starting at position 550 of SEQ ID NO: 1242204
agaagaaauugccaacuga

SEQ ID NO: 1330065 - RNA, 19 nt, Artificial Sequence
  Description of Artificial Sequence: Synthetic oligonucleotide
  Antisense strand to SEQ ID NO: 1330064
ucaguuggcaauuucuucu

SEQ ID NO: 1330066 - RNA, 19 nt, Artificial Sequence
  Description of Artificial Sequence: Synthetic oligonucleotide
  Sense strand starting at position 697 of SEQ ID NO: 1242204
ggcucucacccgcaggaau

SEQ ID NO: 1330067 - RNA, 19 nt, Artificial Sequence
  Description of Artificial Sequence: Synthetic oligonucleotide
  Antisense strand to SEQ ID NO: 1330066
auuccugcgggugagagcc

SEQ ID NO: 1330068 - RNA, 19 nt, Artificial Sequence
  Description of Artificial Sequence: Synthetic oligonucleotide
  Sense strand starting at position 821 of SEQ ID NO: 1242204
ucaguugucccuugucacu

SEQ ID NO: 1330069 - RNA, 19 nt, Artificial Sequence
  Description of Artificial Sequence: Synthetic oligonucleotide
  Antisense strand to SEQ ID NO: 1330068
agugacaagggacaacuga

SEQ ID NO: 1330070 - RNA, 19 nt, Artificial Sequence
  Description of Artificial Sequence: Synthetic oligonucleotide
  Sense strand starting at position 1511 of SEQ ID NO: 1242204
ccgacagguggccgauaua

SEQ ID NO: 1330071 - RNA, 19 nt, Artificial Sequence
  Description of Artificial Sequence: Synthetic oligonucleotide
  Antisense strand to SEQ ID NO: 1330070
uauaucggccaccugucgg

SEQ ID NO: 1330072 - RNA, 19 nt, Artificial Sequence
  Description of Artificial Sequence: Synthetic oligonucleotide
  Sense strand starting at position 2315 of SEQ ID NO: 1242204
gcuuccaauuuguauaaug

SEQ ID NO: 1330073 - RNA, 19 nt, Artificial Sequence
  Description of Artificial Sequence: Synthetic oligonucleotide
  Antisense strand to SEQ ID NO: 1330072
cauuauacaaauuggaagc

SEQ ID NO: 1330074 - RNA, 19 nt, Artificial Sequence
  Description of Artificial Sequence: Synthetic oligonucleotide
  Sense strand starting at position 2352 of SEQ ID NO: 1242204
ccaauuggacaguggagua

SEQ ID NO: 1330075 - RNA, 19 nt, Artificial Sequence
  Description of Artificial Sequence: Synthetic oligonucleotide
  Antisense strand to SEQ ID NO: 1330074
uacuccacuguccaauugg

SEQ ID NO: 1330076 - RNA, 19 nt, Artificial Sequence
  Description of Artificial Sequence: Synthetic oligonucleotide
  Sense strand starting at position 2428 of SEQ ID NO: 1242204
ccacuucuccuuugaggca

SEQ ID NO: 1330077 - RNA, 19 nt, Artificial Sequence
  Description of Artificial Sequence: Synthetic oligonucleotide
  Antisense strand to SEQ ID NO: 1330076
ugccucaaaggagaagugg

SEQ ID NO: 1330078 - RNA, 19 nt, Artificial Sequence
  Description of Artificial Sequence: Synthetic oligonucleotide
  Sense strand starting at position 2461 of SEQ ID NO: 1242204
agacccuucccugguaaga

SEQ ID NO: 1330079 - RNA, 19 nt, Artificial Sequence
  Description of Artificial Sequence: Synthetic oligonucleotide
  Antisense strand to SEQ ID NO: 1330078
ucuuaccagggaagggucu

SEQ ID NO: 1330080 - RNA, 19 nt, Artificial Sequence
  Description of Artificial Sequence: Synthetic oligonucleotide
  Sense strand starting at position 2528 of SEQ ID NO: 1242204
ugccgagucuggucaggau

SEQ ID NO: 1330081 - RNA, 19 nt, Artificial Sequence
  Description of Artificial Sequence: Synthetic oligonucleotide
  Antisense strand to SEQ ID NO: 1330080
auccugaccagacucggca

SEQ ID NO: 1330082 - RNA, 19 nt, Artificial Sequence
  Description of Artificial Sequence: Synthetic oligonucleotide
  Sense strand starting at position 2672 of SEQ ID NO: 1242204
gccgcuauuggacagguau

SEQ ID NO: 1330083 - RNA, 19 nt, Artificial Sequence
  Description of Artificial Sequence: Synthetic oligonucleotide
  Antisense strand to SEQ ID NO: 1330082
auaccuguccaauagcggc

SEQ ID NO: 1330084 - RNA, 19 nt, Artificial Sequence
  Description of Artificial Sequence: Synthetic oligonucleotide
  Sense strand starting at position 2674 of SEQ ID NO: 1242204
cgcuauuggacagguauaa

SEQ ID NO: 1330085 - RNA, 19 nt, Artificial Sequence
  Description of Artificial Sequence: Synthetic oligonucleotide
  Antisense strand to SEQ ID NO: 1330084
uuauaccuguccaauagcg

SEQ ID NO: 1330086 - RNA, 19 nt, Artificial Sequence
  Description of Artificial Sequence: Synthetic oligonucleotide
  Sense strand starting at position 2716 of SEQ ID NO: 1242204
guggaaaugacgcagcaaa

SEQ ID NO: 1330087 - RNA, 19 nt, Artificial Sequence
  Description of Artificial Sequence: Synthetic oligonucleotide
  Antisense strand to SEQ ID NO: 1330086
uuugcugcgucauuuccac

SEQ ID NO: 1330088 - RNA, 19 nt, Artificial Sequence
  Description of Artificial Sequence: Synthetic oligonucleotide
  Sense strand starting at position 2751 of SEQ ID NO: 1242204
caacacccuucgugaugaa

SEQ ID NO: 1330089 - RNA, 19 nt, Artificial Sequence
  Description of Artificial Sequence: Synthetic oligonucleotide
  Antisense strand to SEQ ID NO: 1330088
uucaucacgaaggguguug

SEQ ID NO: 1330090 - RNA, 19 nt, Artificial Sequence
  Description of Artificial Sequence: Synthetic oligonucleotide
  Sense strand starting at position 2752 of SEQ ID NO: 1242204
aacacccuucgugaugaaa

SEQ ID NO: 1330091 - RNA, 19 nt, Artificial Sequence
  Description of Artificial Sequence: Synthetic oligonucleotide
  Antisense strand to SEQ ID NO: 1330090
uuucaucacgaaggguguu

SEQ ID NO: 1330092 - RNA, 19 nt, Artificial Sequence
  Description of Artificial Sequence: Synthetic oligonucleotide
  Sense strand starting at position 2813 of SEQ ID NO: 1242204
augaaaggcuccuacaaag

SEQ ID NO: 1330093 - RNA, 19 nt, Artificial Sequence
  Description of Artificial Sequence: Synthetic oligonucleotide
  Antisense strand to SEQ ID NO: 1330092
cuuuguaggagccuuucau

SEQ ID NO: 1330094 - RNA, 19 nt, Artificial Sequence
  Description of Artificial Sequence: Synthetic oligonucleotide
  Sense strand starting at position 2844 of SEQ ID NO: 1242204
gccucauacugaguaguga

SEQ ID NO: 1330095 - RNA, 19 nt, Artificial Sequence
  Description of Artificial Sequence: Synthetic oligonucleotide
  Antisense strand to SEQ ID NO: 1330094
ucacuacucaguaugaggc

SEQ ID NO: 1330096 - RNA, 19 nt, Artificial Sequence
  Description of Artificial Sequence: Synthetic oligonucleotide
  Sense strand starting at position 2845 of SEQ ID NO: 1242204
ccucauacugaguagugaa

SEQ ID NO: 1330097 - RNA, 19 nt, Artificial Sequence
  Description of Artificial Sequence: Synthetic oligonucleotide
  Antisense strand to SEQ ID NO: 1330096
uucacuacucaguaugagg

SEQ ID NO: 1330098 - RNA, 19 nt, Artificial Sequence
  Description of Artificial Sequence: Synthetic oligonucleotide
  Sense strand starting at position 2848 of SEQ ID NO: 1242204
cauacugaguagugaaaga

SEQ ID NO: 1330099 - RNA, 19 nt, Artificial Sequence
  Description of Artificial Sequence: Synthetic oligonucleotide
  Antisense strand to SEQ ID NO: 1330098
ucuuucacuacucaguaug

SEQ ID NO: 1330100 - RNA, 19 nt, Artificial Sequence
  Description of Artificial Sequence: Synthetic oligonucleotide
  Sense strand starting at position 2907 of SEQ ID NO: 1242204
gagggugucucucuuacca

SEQ ID NO: 1330101 - RNA, 19 nt, Artificial Sequence
  Description of Artificial Sequence: Synthetic oligonucleotide
  Antisense strand to SEQ ID NO: 1330100
ugguaagagagacacccuc

SEQ ID NO: 1330102 - RNA, 19 nt, Artificial Sequence
  Description of Artificial Sequence: Synthetic oligonucleotide
  Sense strand starting at position 2909 of SEQ ID NO: 1242204
gggugucucucuuaccacu

SEQ ID NO: 1330103 - RNA, 19 nt, Artificial Sequence
  Description of Artificial Sequence: Synthetic oligonucleotide
  Antisense strand to SEQ ID NO: 1330102
agugguaagagagacaccc

SEQ ID NO: 1330104 - RNA, 19 nt, Artificial Sequence
  Description of Artificial Sequence: Synthetic oligonucleotide
  Sense strand starting at position 2951 of SEQ ID NO: 1242204
gaggaucuaggcuaugcaa

SEQ ID NO: 1330105 - RNA, 19 nt, Artificial Sequence
  Description of Artificial Sequence: Synthetic oligonucleotide
  Antisense strand to SEQ ID NO: 1330104
uugcauagccuagauccuc

SEQ ID NO: 1330106 - RNA, 19 nt, Artificial Sequence
  Description of Artificial Sequence: Synthetic oligonucleotide
  Sense strand starting at position 2953 of SEQ ID NO: 1242204
ggaucuaggcuaugcaauu

SEQ ID NO: 1330107 - RNA, 19 nt, Artificial Sequence
  Description of Artificial Sequence: Synthetic oligonucleotide
  Antisense strand to SEQ ID NO: 1330106
aauugcauagccuagaucc

SEQ ID NO: 1330108 - RNA, 19 nt, Artificial Sequence
  Description of Artificial Sequence: Synthetic oligonucleotide
  Sense strand starting at position 3049 of SEQ ID NO: 1242204
gcgcaugagccugaccaau

SEQ ID NO: 1330109 - RNA, 19 nt, Artificial Sequence
  Description of Artificial Sequence: Synthetic oligonucleotide
  Antisense strand to SEQ ID NO: 1330108
auuggucaggcucaugcgc

SEQ ID NO: 1330110 - RNA, 19 nt, Artificial Sequence
  Description of Artificial Sequence: Synthetic oligonucleotide
  Sense strand starting at position 3263 of SEQ ID NO: 1242204
aguaucaaccuuuaaguau

SEQ ID NO: 1330111 - RNA, 19 nt, Artificial Sequence
  Description of Artificial Sequence: Synthetic oligonucleotide
  Antisense strand to SEQ ID NO: 1330110
auacuuaaagguugauacu

SEQ ID NO: 1330112 - RNA, 19 nt, Artificial Sequence
  Description of Artificial Sequence: Synthetic oligonucleotide
  Sense strand starting at position 3278 of SEQ ID NO: 1242204
guaucaauagacuguaaua

SEQ ID NO: 1330113 - RNA, 19 nt, Artificial Sequence
  Description of Artificial Sequence: Synthetic oligonucleotide
  Antisense strand to SEQ ID NO: 1330112
uauuacagucuauugauac

SEQ ID NO: 1330114 - RNA, 19 nt, Artificial Sequence
  Description of Artificial Sequence: Synthetic oligonucleotide
  Sense strand starting at position 3288 of SEQ ID NO: 1242204
acuguaauauguuacugau

SEQ ID NO: 1330115 - RNA, 19 nt, Artificial Sequence
  Description of Artificial Sequence: Synthetic oligonucleotide
  Antisense strand to SEQ ID NO: 1330114
aucaguaacauauuacagu

SEQ ID NO: 1330116 - RNA, 19 nt, Artificial Sequence
  Description of Artificial Sequence: Synthetic oligonucleotide
  Sense strand starting at position 3291 of SEQ ID NO: 1242204
guaauauguuacugauuug

SEQ ID NO: 1330117 - RNA, 19 nt, Artificial Sequence
  Description of Artificial Sequence: Synthetic oligonucleotide
  Antisense strand to SEQ ID NO: 1330116
caaaucaguaacauauuac

SEQ ID NO: 1330118 - RNA, 19 nt, Artificial Sequence
  Description of Artificial Sequence: Synthetic oligonucleotide
  Sense strand starting at position 3384 of SEQ ID NO: 1242204
uaaagaggauuaugguguu

SEQ ID NO: 1330119 - RNA, 19 nt, Artificial Sequence
  Description of Artificial Sequence: Synthetic oligonucleotide
  Antisense strand to SEQ ID NO: 1330118
aacaccauaauccucuuua

SEQ ID NO: 1330120 - RNA, 19 nt, Artificial Sequence
  Description of Artificial Sequence: Synthetic oligonucleotide
  Sense strand starting at position 3387 of SEQ ID NO: 1242204
agaggauuaugguguucag

SEQ ID NO: 1330121 - RNA, 19 nt, Artificial Sequence
  Description of Artificial Sequence: Synthetic oligonucleotide
  Antisense strand to SEQ ID NO: 1330120
cugaacaccauaauccucu

SEQ ID NO: 1330122 - RNA, 19 nt, Artificial Sequence
  Description of Artificial Sequence: Synthetic oligonucleotide
  Sense strand starting at position 3396 of SEQ ID NO: 1242204
ugguguucagcuggucgaa

SEQ ID NO: 1330123 - RNA, 19 nt, Artificial Sequence
  Description of Artificial Sequence: Synthetic oligonucleotide
  Antisense strand to SEQ ID NO: 1330122
uucgaccagcugaacacca

SEQ ID NO: 1330124 - RNA, 19 nt, Artificial Sequence
  Description of Artificial Sequence: Synthetic oligonucleotide
  Sense strand starting at position 3947 of SEQ ID NO: 1242204
ugcaaagaaucgugggaac

SEQ ID NO: 1330125 - RNA, 19 nt, Artificial Sequence
  Description of Artificial Sequence: Synthetic oligonucleotide
  Antisense strand to SEQ ID NO: 1330124
guucccacgauucuuugca

SEQ ID NO: 1330126 - RNA, 19 nt, Artificial Sequence
  Description of Artificial Sequence: Synthetic oligonucleotide
  Sense strand starting at position 3949 of SEQ ID NO: 1242204
caaagaaucgugggaaccu

SEQ ID NO: 1330127 - RNA, 19 nt, Artificial Sequence
  Description of Artificial Sequence: Synthetic oligonucleotide
  Antisense strand to SEQ ID NO: 1330126
agguucccacgauucuuug

SEQ ID NO: 1330128 - RNA, 19 nt, Artificial Sequence
  Description of Artificial Sequence: Synthetic oligonucleotide
  Sense strand starting at position 324 of SEQ ID NO: 1242205
gugggcuacucccugauau

SEQ ID NO: 1330129 - RNA, 19 nt, Artificial Sequence
  Description of Artificial Sequence: Synthetic oligonucleotide
  Antisense strand to SEQ ID NO: 1330128
auaucagggaguagcccac

SEQ ID NO: 1330130 - RNA, 19 nt, Artificial Sequence
  Description of Artificial Sequence: Synthetic oligonucleotide
  Sense strand starting at position 325 of SEQ ID NO: 1242205
ugggcuacucccugauauc

SEQ ID NO: 1330131 - RNA, 19 nt, Artificial Sequence
  Description of Artificial Sequence: Synthetic oligonucleotide
  Antisense strand to SEQ ID NO: 1330130
gauaucagggaguagccca

SEQ ID NO: 1330132 - RNA, 19 nt, Artificial Sequence
  Description of Artificial Sequence: Synthetic oligonucleotide
  Sense strand starting at position 403 of SEQ ID NO: 1242205
gugccaugaaugcagcaaa

SEQ ID NO: 1330133 - RNA, 19 nt, Artificial Sequence
  Description of Artificial Sequence: Synthetic oligonucleotide
  Antisense strand to SEQ ID NO: 1330132
uuugcugcauucauggcac

SEQ ID NO: 1330134 - RNA, 19 nt, Artificial Sequence
  Description of Artificial Sequence: Synthetic oligonucleotide
  Sense strand starting at position 907 of SEQ ID NO: 1242205
uggagauggccuuaacuuc

SEQ ID NO: 1330135 - RNA, 19 nt, Artificial Sequence
  Description of Artificial Sequence: Synthetic oligonucleotide
  Antisense strand to SEQ ID NO: 1330134
gaaguuaaggccaucucca

SEQ ID NO: 1330136 - RNA, 19 nt, Artificial Sequence
  Description of Artificial Sequence: Synthetic oligonucleotide
  Sense strand starting at position 1020 of SEQ ID NO: 1242205
guacgagauucucugcaga

SEQ ID NO: 1330137 - RNA, 19 nt, Artificial Sequence
  Description of Artificial Sequence: Synthetic oligonucleotide
  Antisense strand to SEQ ID NO: 1330136
ucugcagagaaucucguac

SEQ ID NO: 1330138 - RNA, 19 nt, Artificial Sequence
  Description of Artificial Sequence: Synthetic oligonucleotide
  Sense strand starting at position 1022 of SEQ ID NO: 1242205
acgagauucucugcagacu

SEQ ID NO: 1330139 - RNA, 19 nt, Artificial Sequence
  Description of Artificial Sequence: Synthetic oligonucleotide
  Antisense strand to SEQ ID NO: 1330138
agucugcagagaaucucgu

SEQ ID NO: 1330140 - RNA, 19 nt, Artificial Sequence
  Description of Artificial Sequence: Synthetic oligonucleotide
  Sense strand starting at position 2092 of SEQ ID NO: 1242205
guugcagagaggugucaaa

SEQ ID NO: 1330141 - RNA, 19 nt, Artificial Sequence
  Description of Artificial Sequence: Synthetic oligonucleotide
  Antisense strand to SEQ ID NO: 1330140
uuugacaccucucugcaac

SEQ ID NO: 1330142 - RNA, 19 nt, Artificial Sequence
  Description of Artificial Sequence: Synthetic oligonucleotide
  Sense strand starting at position 2589 of SEQ ID NO: 1242205
ugcccauggucuguaucua

SEQ ID NO: 1330143 - RNA, 19 nt, Artificial Sequence
  Description of Artificial Sequence: Synthetic oligonucleotide
  Antisense strand to SEQ ID NO: 1330142
uagauacagaccaugggca

SEQ ID NO: 1330144 - RNA, 19 nt, Artificial Sequence
  Description of Artificial Sequence: Synthetic oligonucleotide
  Sense strand starting at position 2699 of SEQ ID NO: 1242205
cuuuauuggcugugaccuu

SEQ ID NO: 1330145 - RNA, 19 nt, Artificial Sequence
  Description of Artificial Sequence: Synthetic oligonucleotide
  Antisense strand to SEQ ID NO: 1330144
aaggucacagccaauaaag

SEQ ID NO: 1330146 - RNA, 19 nt, Artificial Sequence
  Description of Artificial Sequence: Synthetic oligonucleotide
  Sense strand starting at position 2706 of SEQ ID NO: 1242205
ggcugugaccuugguuaag

SEQ ID NO: 1330147 - RNA, 19 nt, Artificial Sequence
  Description of Artificial Sequence: Synthetic oligonucleotide
  Antisense strand to SEQ ID NO: 1330146
cuuaaccaaggucacagcc

SEQ ID NO: 1330148 - RNA, 19 nt, Artificial Sequence
  Description of Artificial Sequence: Synthetic oligonucleotide
  Sense strand starting at position 2708 of SEQ ID NO: 1242205
cugugaccuugguuaaguu

SEQ ID NO: 1330149 - RNA, 19 nt, Artificial Sequence
  Description of Artificial Sequence: Synthetic oligonucleotide
  Antisense strand to SEQ ID NO: 1330148
aacuuaaccaaggucacag

SEQ ID NO: 1330150 - RNA, 19 nt, Artificial Sequence
  Description of Artificial Sequence: Synthetic oligonucleotide
  Sense strand starting at position 2744 of SEQ ID NO: 1242205
cucagauucccucaucggu

SEQ ID NO: 1330151 - RNA, 19 nt, Artificial Sequence
  Description of Artificial Sequence: Synthetic oligonucleotide
  Antisense strand to SEQ ID NO: 1330150
accgaugagggaaucugag

SEQ ID NO: 1330152 - RNA, 19 nt, Artificial Sequence
  Description of Artificial Sequence: Synthetic oligonucleotide
  Sense strand starting at position 2750 of SEQ ID NO: 1242205
uucccucaucgguaccaau

SEQ ID NO: 1330153 - RNA, 19 nt, Artificial Sequence
  Description of Artificial Sequence: Synthetic oligonucleotide
  Antisense strand to SEQ ID NO: 1330152
auugguaccgaugagggaa

SEQ ID NO: 1330154 - RNA, 19 nt, Artificial Sequence
  Description of Artificial Sequence: Synthetic oligonucleotide
  Sense strand starting at position 2790 of SEQ ID NO: 1242205
cuaggaugguuccuggacu

SEQ ID NO: 1330155 - RNA, 19 nt, Artificial Sequence
  Description of Artificial Sequence: Synthetic oligonucleotide
  Antisense strand to SEQ ID NO: 1330154
aguccaggaaccauccuag

SEQ ID NO: 1330156 - RNA, 19 nt, Artificial Sequence
  Description of Artificial Sequence: Synthetic oligonucleotide
  Sense strand starting at position 2812 of SEQ ID NO: 1242205
uacagcgaucccuguaaag

SEQ ID NO: 1330157 - RNA, 19 nt, Artificial Sequence
  Description of Artificial Sequence: Synthetic oligonucleotide
  Antisense strand to SEQ ID NO: 1330156
cuuuacagggaucgcugua

SEQ ID NO: 1330158 - RNA, 19 nt, Artificial Sequence
  Description of Artificial Sequence: Synthetic oligonucleotide
  Sense strand starting at position 2814 of SEQ ID NO: 1242205
cagcgaucccuguaaagca

SEQ ID NO: 1330159 - RNA, 19 nt, Artificial Sequence
  Description of Artificial Sequence: Synthetic oligonucleotide
  Antisense strand to SEQ ID NO: 1330158
ugcuuuacagggaucgcug

SEQ ID NO: 1330160 - RNA, 19 nt, Artificial Sequence
  Description of Artificial Sequence: Synthetic oligonucleotide
  Sense strand starting at position 2852 of SEQ ID NO: 1242205
gcugaagguuugccaugau

SEQ ID NO: 1330161 - RNA, 19 nt, Artificial Sequence
  Description of Artificial Sequence: Synthetic oligonucleotide
  Antisense strand to SEQ ID NO: 1330160
aucauggcaaaccuucagc

SEQ ID NO: 1330162 - RNA, 19 nt, Artificial Sequence
  Description of Artificial Sequence: Synthetic oligonucleotide
  Sense strand starting at position 2855 of SEQ ID NO: 1242205
gaagguuugccaugaucgu

SEQ ID NO: 1330163 - RNA, 19 nt, Artificial Sequence
  Description of Artificial Sequence: Synthetic oligonucleotide
  Antisense strand to SEQ ID NO: 1330162
acgaucauggcaaaccuuc

SEQ ID NO: 1330164 - RNA, 19 nt, Artificial Sequence
  Description of Artificial Sequence: Synthetic oligonucleotide
  Sense strand starting at position 2856 of SEQ ID NO: 1242205
aagguuugccaugaucguu

SEQ ID NO: 1330165 - RNA, 19 nt, Artificial Sequence
  Description of Artificial Sequence: Synthetic oligonucleotide
  Antisense strand to SEQ ID NO: 1330164
aacgaucauggcaaaccuu

SEQ ID NO: 1330166 - RNA, 19 nt, Artificial Sequence
  Description of Artificial Sequence: Synthetic oligonucleotide
  Sense strand starting at position 3300 of SEQ ID NO: 1242205
ugaaacagacuuggucuau

SEQ ID NO: 1330167 - RNA, 19 nt, Artificial Sequence
  Description of Artificial Sequence: Synthetic oligonucleotide
  Antisense strand to SEQ ID NO: 1330166
auagaccaagucuguuuca

SEQ ID NO: 1330168 - RNA, 19 nt, Artificial Sequence
  Description of Artificial Sequence: Synthetic oligonucleotide
  Sense strand starting at position 3301 of SEQ ID NO: 1242205
gaaacagacuuggucuauc

SEQ ID NO: 1330169 - RNA, 19 nt, Artificial Sequence
  Description of Artificial Sequence: Synthetic oligonucleotide
  Antisense strand to SEQ ID NO: 1330168
gauagaccaagucuguuuc

SEQ ID NO: 1330170 - RNA, 19 nt, Artificial Sequence
  Description of Artificial Sequence: Synthetic oligonucleotide
  Sense strand starting at position 3590 of SEQ ID NO: 1242205
uuuagcaaccaguaaaugu

SEQ ID NO: 1330171 - RNA, 19 nt, Artificial Sequence
  Description of Artificial Sequence: Synthetic oligonucleotide
  Antisense strand to SEQ ID NO: 1330170
acauuuacugguugcuaaa

SEQ ID NO: 1330172 - RNA, 19 nt, Artificial Sequence
  Description of Artificial Sequence: Synthetic oligonucleotide
  Sense strand starting at position 3598 of SEQ ID NO: 1242205
ccaguaaaugucgagcaca

SEQ ID NO: 1330173 - RNA, 19 nt, Artificial Sequence
  Description of Artificial Sequence: Synthetic oligonucleotide
  Antisense strand to SEQ ID NO: 1330172
ugugcucgacauuuacugg

SEQ ID NO: 1330174 - RNA, 19 nt, Artificial Sequence
  Description of Artificial Sequence: Synthetic oligonucleotide
  Sense strand starting at position 3619 of SEQ ID NO: 1242205
gggugaaugagcuagucau

SEQ ID NO: 1330175 - RNA, 19 nt, Artificial Sequence
  Description of Artificial Sequence: Synthetic oligonucleotide
  Antisense strand to SEQ ID NO: 1330174
augacuagcucauucaccc

SEQ ID NO: 1330176 - RNA, 19 nt, Artificial Sequence
  Description of Artificial Sequence: Synthetic oligonucleotide
  Sense strand starting at position 3623 of SEQ ID NO: 1242205
gaaugagcuagucaugguc

SEQ ID NO: 1330177 - RNA, 19 nt, Artificial Sequence
  Description of Artificial Sequence: Synthetic oligonucleotide
  Antisense strand to SEQ ID NO: 1330176
gaccaugacuagcucauuc

SEQ ID NO: 1330178 - RNA, 19 nt, Artificial Sequence
  Description of Artificial Sequence: Synthetic oligonucleotide
  Sense strand starting at position 3635 of SEQ ID NO: 1242205
cauggucucugcucuaaug

SEQ ID NO: 1330179 - RNA, 19 nt, Artificial Sequence
  Description of Artificial Sequence: Synthetic oligonucleotide
  Antisense strand to SEQ ID NO: 1330178
cauuagagcagagaccaug

SEQ ID NO: 1330180 - RNA, 19 nt, Artificial Sequence
  Description of Artificial Sequence: Synthetic oligonucleotide
  Sense strand starting at position 3654 of SEQ ID NO: 1242205
agauuucagucuuguggga

SEQ ID NO: 1330181 - RNA, 19 nt, Artificial Sequence
  Description of Artificial Sequence: Synthetic oligonucleotide
  Antisense strand to SEQ ID NO: 1330180
ucccacaagacugaaaucu

SEQ ID NO: 1330182 - RNA, 19 nt, Artificial Sequence
  Description of Artificial Sequence: Synthetic oligonucleotide
  Sense strand starting at position 3658 of SEQ ID NO: 1242205
uucagucuugugggaaaga

SEQ ID NO: 1330183 - RNA, 19 nt, Artificial Sequence
  Description of Artificial Sequence: Synthetic oligonucleotide
  Antisense strand to SEQ ID NO: 1330182
ucuuucccacaagacugaa

SEQ ID NO: 1330184 - RNA, 19 nt, Artificial Sequence
  Description of Artificial Sequence: Synthetic oligonucleotide
  Sense strand starting at position 3744 of SEQ ID NO: 1242205
uugagcuucugcucaguaa

SEQ ID NO: 1330185 - RNA, 19 nt, Artificial Sequence
  Description of Artificial Sequence: Synthetic oligonucleotide
  Antisense strand to SEQ ID NO: 1330184
uuacugagcagaagcucaa

SEQ ID NO: 1330186 - RNA, 19 nt, Artificial Sequence
  Description of Artificial Sequence: Synthetic oligonucleotide
  Sense strand starting at position 3745 of SEQ ID NO: 1242205
ugagcuucugcucaguaaa

SEQ ID NO: 1330187 - RNA, 19 nt, Artificial Sequence
  Description of Artificial Sequence: Synthetic oligonucleotide
  Antisense strand to SEQ ID NO: 1330186
uuuacugagcagaagcuca

SEQ ID NO: 1330188 - RNA, 19 nt, Artificial Sequence
  Description of Artificial Sequence: Synthetic oligonucleotide
  Sense strand starting at position 3765 of SEQ ID NO: 1242205
caggaauaaugauaguauc

SEQ ID NO: 1330189 - RNA, 19 nt, Artificial Sequence
  Description of Artificial Sequence: Synthetic oligonucleotide
  Antisense strand to SEQ ID NO: 1330188
gauacuaucauuauuccug

SEQ ID NO: 1330190 - RNA, 19 nt, Artificial Sequence
  Description of Artificial Sequence: Synthetic oligonucleotide
  Sense strand starting at position 3782 of SEQ ID NO: 1242205
ucuacaugggauuguguaa

SEQ ID NO: 1330191 - RNA, 19 nt, Artificial Sequence
  Description of Artificial Sequence: Synthetic oligonucleotide
  Antisense strand to SEQ ID NO: 1330190
uuacacaaucccauguaga

SEQ ID NO: 1330192 - RNA, 19 nt, Artificial Sequence
  Description of Artificial Sequence: Synthetic oligonucleotide
  Sense strand starting at position 3787 of SEQ ID NO: 1242205
augggauuguguaagggau

SEQ ID NO: 1330193 - RNA, 19 nt, Artificial Sequence
  Description of Artificial Sequence: Synthetic oligonucleotide
  Antisense strand to SEQ ID NO: 1330192
aucccuuacacaaucccau

SEQ ID NO: 1330194 - RNA, 19 nt, Artificial Sequence
  Description of Artificial Sequence: Synthetic oligonucleotide
  Sense strand starting at position 3791 of SEQ ID NO: 1242205
gauuguguaagggauaguu

SEQ ID NO: 1330195 - RNA, 19 nt, Artificial Sequence
  Description of Artificial Sequence: Synthetic oligonucleotide
  Antisense strand to SEQ ID NO: 1330194
aacuaucccuuacacaauc

SEQ ID NO: 1330196 - RNA, 19 nt, Artificial Sequence
  Description of Artificial Sequence: Synthetic oligonucleotide
  Sense strand starting at position 3793 of SEQ ID NO: 1242205
uuguguaagggauaguuga

SEQ ID NO: 1330197 - RNA, 19 nt, Artificial Sequence
  Description of Artificial Sequence: Synthetic oligonucleotide
  Antisense strand to SEQ ID NO: 1330196
ucaacuaucccuuacacaa

SEQ ID NO: 1330198 - RNA, 19 nt, Artificial Sequence
  Description of Artificial Sequence: Synthetic oligonucleotide
  Sense strand starting at position 3859 of SEQ ID NO: 1242205
uuuaaaggagauugucaau

SEQ ID NO: 1330199 - RNA, 19 nt, Artificial Sequence
  Description of Artificial Sequence: Synthetic oligonucleotide
  Antisense strand to SEQ ID NO: 1330198
auugacaaucuccuuuaaa

SEQ ID NO: 1330200 - RNA, 19 nt, Artificial Sequence
  Description of Artificial Sequence: Synthetic oligonucleotide
  Sense strand starting at position 3865 of SEQ ID NO: 1242205
ggagauugucaauguccug

SEQ ID NO: 1330201 - RNA, 19 nt, Artificial Sequence
  Description of Artificial Sequence: Synthetic oligonucleotide
  Antisense strand to SEQ ID NO: 1330200
caggacauugacaaucucc

SEQ ID NO: 1330202 - RNA, 19 nt, Artificial Sequence
  Description of Artificial Sequence: Synthetic oligonucleotide
  Sense strand starting at position 3871 of SEQ ID NO: 1242205
ugucaauguccuguguggu

SEQ ID NO: 1330203 - RNA, 19 nt, Artificial Sequence
  Description of Artificial Sequence: Synthetic oligonucleotide
  Antisense strand to SEQ ID NO: 1330202
accacacaggacauugaca

SEQ ID NO: 1330204 - RNA, 19 nt, Artificial Sequence
  Description of Artificial Sequence: Synthetic oligonucleotide
  Sense strand starting at position 3905 of SEQ ID NO: 1242205
gaguccugaggcuaagagu

SEQ ID NO: 1330205 - RNA, 19 nt, Artificial Sequence
  Description of Artificial Sequence: Synthetic oligonucleotide
  Antisense strand to SEQ ID NO: 1330204
acucuuagccucaggacuc

SEQ ID NO: 1330206 - RNA, 19 nt, Artificial Sequence
  Description of Artificial Sequence: Synthetic oligonucleotide
  Sense strand starting at position 3961 of SEQ ID NO: 1242205
aggugaagaagucauagcu

SEQ ID NO: 1330207 - RNA, 19 nt, Artificial Sequence
  Description of Artificial Sequence: Synthetic oligonucleotide
  Antisense strand to SEQ ID NO: 1330206
agcuaugacuucuucaccu

SEQ ID NO: 1330208 - RNA, 19 nt, Artificial Sequence
  Description of Artificial Sequence: Synthetic oligonucleotide
  Sense strand starting at position 12 of SEQ ID NO: 1242206
ucucgucugugagcucaau

SEQ ID NO: 1330209 - RNA, 19 nt, Artificial Sequence
  Description of Artificial Sequence: Synthetic oligonucleotide
  Antisense strand to SEQ ID NO: 1330208
auugagcucacagacgaga

SEQ ID NO: 1330210 - RNA, 19 nt, Artificial Sequence
  Description of Artificial Sequence: Synthetic oligonucleotide
  Sense strand starting at position 48 of SEQ ID NO: 1242206
gagcaaugugcgccucaau

SEQ ID NO: 1330211 - RNA, 19 nt, Artificial Sequence
  Description of Artificial Sequence: Synthetic oligonucleotide
  Antisense strand to SEQ ID NO: 1330210
auugaggcgcacauugcuc

SEQ ID NO: 1330212 - RNA, 19 nt, Artificial Sequence
  Description of Artificial Sequence: Synthetic oligonucleotide
  Sense strand starting at position 284 of SEQ ID NO: 1242206
uugagugccguguucuuau

SEQ ID NO: 1330213 - RNA, 19 nt, Artificial Sequence
  Description of Artificial Sequence: Synthetic oligonucleotide
  Antisense strand to SEQ ID NO: 1330212
auaagaacacggcacucaa

SEQ ID NO: 1330214 - RNA, 19 nt, Artificial Sequence
  Description of Artificial Sequence: Synthetic oligonucleotide
  Sense strand starting at position 291 of SEQ ID NO: 1242206
ccguguucuuauuccggga

SEQ ID NO: 1330215 - RNA, 19 nt, Artificial Sequence
  Description of Artificial Sequence: Synthetic oligonucleotide
  Antisense strand to SEQ ID NO: 1330214
ucccggaauaagaacacgg

SEQ ID NO: 1330216 - RNA, 19 nt, Artificial Sequence
  Description of Artificial Sequence: Synthetic oligonucleotide
  Sense strand starting at position 324 of SEQ ID NO: 1242206
agaagugcucggcagcaga

SEQ ID NO: 1330217 - RNA, 19 nt, Artificial Sequence
  Description of Artificial Sequence: Synthetic oligonucleotide
  Antisense strand to SEQ ID NO: 1330216
ucugcugccgagcacuucu

SEQ ID NO: 1330218 - RNA, 19 nt, Artificial Sequence
  Description of Artificial Sequence: Synthetic oligonucleotide
  Sense strand starting at position 423 of SEQ ID NO: 1242206
ucuugauguaaguauuggu

SEQ ID NO: 1330219 - RNA, 19 nt, Artificial Sequence
  Description of Artificial Sequence: Synthetic oligonucleotide
  Antisense strand to SEQ ID NO: 1330218
accaauacuuacaucaaga

SEQ ID NO: 1330220 - RNA, 19 nt, Artificial Sequence
  Description of Artificial Sequence: Synthetic oligonucleotide
  Sense strand starting at position 712 of SEQ ID NO: 1242206
ugcagucgucccgaaccaa

SEQ ID NO: 1330221 - RNA, 19 nt, Artificial Sequence
  Description of Artificial Sequence: Synthetic oligonucleotide
  Antisense strand to SEQ ID NO: 1330220
uugguucgggacgacugca

SEQ ID NO: 1330222 - RNA, 19 nt, Artificial Sequence
  Description of Artificial Sequence: Synthetic oligonucleotide
  Sense strand starting at position 916 of SEQ ID NO: 1242206
uccauuccgcuuugcagaa

SEQ ID NO: 1330223 - RNA, 19 nt, Artificial Sequence
  Description of Artificial Sequence: Synthetic oligonucleotide
  Antisense strand to SEQ ID NO: 1330222
uucugcaaagcggaaugga

SEQ ID NO: 1330224 - RNA, 19 nt, Artificial Sequence
  Description of Artificial Sequence: Synthetic oligonucleotide
  Sense strand starting at position 917 of SEQ ID NO: 1242206
ccauuccgcuuugcagaaa

SEQ ID NO: 1330225 - RNA, 19 nt, Artificial Sequence
  Description of Artificial Sequence: Synthetic oligonucleotide
  Antisense strand to SEQ ID NO: 1330224
uuucugcaaagcggaaugg

SEQ ID NO: 1330226 - RNA, 19 nt, Artificial Sequence
  Description of Artificial Sequence: Synthetic oligonucleotide
  Sense strand starting at position 1213 of SEQ ID NO: 1242206
cgcggaucccgauacugaa

SEQ ID NO: 1330227 - RNA, 19 nt, Artificial Sequence
  Description of Artificial Sequence: Synthetic oligonucleotide
  Antisense strand to SEQ ID NO: 1330226
uucaguaucgggauccgcg

SEQ ID NO: 1330228 - RNA, 19 nt, Artificial Sequence
  Description of Artificial Sequence: Synthetic oligonucleotide
  Sense strand starting at position 1316 of SEQ ID NO: 1242206
ccacgaucucggcgacaug

SEQ ID NO: 1330229 - RNA, 19 nt, Artificial Sequence
  Description of Artificial Sequence: Synthetic oligonucleotide
  Antisense strand to SEQ ID NO: 1330228
caugucgccgagaucgugg

SEQ ID NO: 1330230 - RNA, 19 nt, Artificial Sequence
  Description of Artificial Sequence: Synthetic oligonucleotide
  Sense strand starting at position 1325 of SEQ ID NO: 1242206
cggcgacaugcucagaacu

SEQ ID NO: 1330231 - RNA, 19 nt, Artificial Sequence
  Description of Artificial Sequence: Synthetic oligonucleotide
  Antisense strand to SEQ ID NO: 1330230
aguucugagcaugucgccg

SEQ ID NO: 1330232 - RNA, 19 nt, Artificial Sequence
  Description of Artificial Sequence: Synthetic oligonucleotide
  Sense strand starting at position 1352 of SEQ ID NO: 1242206
gcacgcacucggucauguu

SEQ ID NO: 1330233 - RNA, 19 nt, Artificial Sequence
  Description of Artificial Sequence: Synthetic oligonucleotide
  Antisense strand to SEQ ID NO: 1330232
aacaugaccgagugcgugc

SEQ ID NO: 1330234 - RNA, 19 nt, Artificial Sequence
  Description of Artificial Sequence: Synthetic oligonucleotide
  Sense strand starting at position 1854 of SEQ ID NO: 1242206
gccgcaaugccgagcgaaa

SEQ ID NO: 1330235 - RNA, 19 nt, Artificial Sequence
  Description of Artificial Sequence: Synthetic oligonucleotide
  Antisense strand to SEQ ID NO: 1330234
uuucgcucggcauugcggc

SEQ ID NO: 1330236 - RNA, 19 nt, Artificial Sequence
  Description of Artificial Sequence: Synthetic oligonucleotide
  Sense strand starting at position 1886 of SEQ ID NO: 1242206
gcgacagaagcguuucuuu

SEQ ID NO: 1330237 - RNA, 19 nt, Artificial Sequence
  Description of Artificial Sequence: Synthetic oligonucleotide
  Antisense strand to SEQ ID NO: 1330236
aaagaaacgcuucugucgc

SEQ ID NO: 1330238 - RNA, 19 nt, Artificial Sequence
  Description of Artificial Sequence: Synthetic oligonucleotide
  Sense strand starting at position 1889 of SEQ ID NO: 1242206
acagaagcguuucuuuaag

SEQ ID NO: 1330239 - RNA, 19 nt, Artificial Sequence
  Description of Artificial Sequence: Synthetic oligonucleotide
  Antisense strand to SEQ ID NO: 1330238
cuuaaagaaacgcuucugu

SEQ ID NO: 1330240 - RNA, 19 nt, Artificial Sequence
  Description of Artificial Sequence: Synthetic oligonucleotide
  Sense strand starting at position 1891 of SEQ ID NO: 1242206
agaagcguuucuuuaagga

SEQ ID NO: 1330241 - RNA, 19 nt, Artificial Sequence
  Description of Artificial Sequence: Synthetic oligonucleotide
  Antisense strand to SEQ ID NO: 1330240
uccuuaaagaaacgcuucu

SEQ ID NO: 1330242 - RNA, 19 nt, Artificial Sequence
  Description of Artificial Sequence: Synthetic oligonucleotide
  Sense strand starting at position 2244 of SEQ ID NO: 1242206
cucucuuuguugucuaaug

SEQ ID NO: 1330243 - RNA, 19 nt, Artificial Sequence
  Description of Artificial Sequence: Synthetic oligonucleotide
  Antisense strand to SEQ ID NO: 1330242
cauuagacaacaaagagag

SEQ ID NO: 1330244 - RNA, 19 nt, Artificial Sequence
  Description of Artificial Sequence: Synthetic oligonucleotide
  Sense strand starting at position 2307 of SEQ ID NO: 1242206
ggacaaucauugucccuaa

SEQ ID NO: 1330245 - RNA, 19 nt, Artificial Sequence
  Description of Artificial Sequence: Synthetic oligonucleotide
  Antisense strand to SEQ ID NO: 1330244
uuagggacaaugauugucc

SEQ ID NO: 1330246 - RNA, 19 nt, Artificial Sequence
  Description of Artificial Sequence: Synthetic oligonucleotide
  Sense strand starting at position 2412 of SEQ ID NO: 1242206
ucccguuaguggcuccaaa

SEQ ID NO: 1330247 - RNA, 19 nt, Artificial Sequence
  Description of Artificial Sequence: Synthetic oligonucleotide
  Antisense strand to SEQ ID NO: 1330246
uuuggagccacuaacggga

SEQ ID NO: 1330248 - RNA, 19 nt, Artificial Sequence
  Description of Artificial Sequence: Synthetic oligonucleotide
  Sense strand starting at position 2448 of SEQ ID NO: 1242206
caaagcuuccucugugaga

SEQ ID NO: 1330249 - RNA, 19 nt, Artificial Sequence
  Description of Artificial Sequence: Synthetic oligonucleotide
  Antisense strand to SEQ ID NO: 1330248
ucucacagaggaagcuuug

SEQ ID NO: 1330250 - RNA, 19 nt, Artificial Sequence
  Description of Artificial Sequence: Synthetic oligonucleotide
  Sense strand starting at position 2449 of SEQ ID NO: 1242206
aaagcuuccucugugagaa

SEQ ID NO: 1330251 - RNA, 19 nt, Artificial Sequence
  Description of Artificial Sequence: Synthetic oligonucleotide
  Antisense strand to SEQ ID NO: 1330250
uucucacagaggaagcuuu

SEQ ID NO: 1330252 - RNA, 19 nt, Artificial Sequence
  Description of Artificial Sequence: Synthetic oligonucleotide
  Sense strand starting at position 2450 of SEQ ID NO: 1242206
aagcuuccucugugagaag

SEQ ID NO: 1330253 - RNA, 19 nt, Artificial Sequence
  Description of Artificial Sequence: Synthetic oligonucleotide
  Antisense strand to SEQ ID NO: 1330252
cuucucacagaggaagcuu

SEQ ID NO: 1330254 - RNA, 19 nt, Artificial Sequence
  Description of Artificial Sequence: Synthetic oligonucleotide
  Sense strand starting at position 2451 of SEQ ID NO: 1242206
agcuuccucugugagaaga

SEQ ID NO: 1330255 - RNA, 19 nt, Artificial Sequence
  Description of Artificial Sequence: Synthetic oligonucleotide
  Antisense strand to SEQ ID NO: 1330254
ucuucucacagaggaagcu

SEQ ID NO: 1330256 - RNA, 19 nt, Artificial Sequence
  Description of Artificial Sequence: Synthetic oligonucleotide
  Sense strand starting at position 2461 of SEQ ID NO: 1242206
gugagaagagucuguaguc

SEQ ID NO: 1330257 - RNA, 19 nt, Artificial Sequence
  Description of Artificial Sequence: Synthetic oligonucleotide
  Antisense strand to SEQ ID NO: 1330256
gacuacagacucuucucac

SEQ ID NO: 1330258 - RNA, 19 nt, Artificial Sequence
  Description of Artificial Sequence: Synthetic oligonucleotide
  Sense strand starting at position 3379 of SEQ ID NO: 1242206
cauagagucgcccaagauc

SEQ ID NO: 1330259 - RNA, 19 nt, Artificial Sequence
  Description of Artificial Sequence: Synthetic oligonucleotide
  Antisense strand to SEQ ID NO: 1330258
gaucuugggcgacucuaug

SEQ ID NO: 1330260 - RNA, 19 nt, Artificial Sequence
  Description of Artificial Sequence: Synthetic oligonucleotide
  Sense strand starting at position 3565 of SEQ ID NO: 1242206
cucgguuucucacccguaa

SEQ ID NO: 1330261 - RNA, 19 nt, Artificial Sequence
  Description of Artificial Sequence: Synthetic oligonucleotide
  Antisense strand to SEQ ID NO: 1330260
uuacgggugagaaaccgag

SEQ ID NO: 1330262 - RNA, 19 nt, Artificial Sequence
  Description of Artificial Sequence: Synthetic oligonucleotide
  Sense strand starting at position 3620 of SEQ ID NO: 1242206
ggucguucggaagauuaaa

SEQ ID NO: 1330263 - RNA, 19 nt, Artificial Sequence
  Description of Artificial Sequence: Synthetic oligonucleotide
  Antisense strand to SEQ ID NO: 1330262
uuuaaucuuccgaacgacc

SEQ ID NO: 1330264 - RNA, 19 nt, Artificial Sequence
  Description of Artificial Sequence: Synthetic oligonucleotide
  Sense strand starting at position 3632 of SEQ ID NO: 1242206
gauuaaaugcgacagugga

SEQ ID NO: 1330265 - RNA, 19 nt, Artificial Sequence
  Description of Artificial Sequence: Synthetic oligonucleotide
  Antisense strand to SEQ ID NO: 1330264
uccacugucgcauuuaauc

SEQ ID NO: 1330266 - RNA, 19 nt, Artificial Sequence
  Description of Artificial Sequence: Synthetic oligonucleotide
  Sense strand starting at position 3658 of SEQ ID NO: 1242206
gcgcuuacaaaucaguaga

SEQ ID NO: 1330267 - RNA, 19 nt, Artificial Sequence
  Description of Artificial Sequence: Synthetic oligonucleotide
  Antisense strand to SEQ ID NO: 1330266
ucuacugauuuguaagcgc

SEQ ID NO: 1330268 - RNA, 19 nt, Artificial Sequence
  Description of Artificial Sequence: Synthetic oligonucleotide
  Sense strand starting at position 3660 of SEQ ID NO: 1242206
gcuuacaaaucaguagaca

SEQ ID NO: 1330269 - RNA, 19 nt, Artificial Sequence
  Description of Artificial Sequence: Synthetic oligonucleotide
  Antisense strand to SEQ ID NO: 1330268
ugucuacugauuuguaagc

SEQ ID NO: 1330270 - RNA, 19 nt, Artificial Sequence
  Description of Artificial Sequence: Synthetic oligonucleotide
  Sense strand starting at position 3742 of SEQ ID NO: 1242206
uggagcugucuugggaaag

SEQ ID NO: 1330271 - RNA, 19 nt, Artificial Sequence
  Description of Artificial Sequence: Synthetic oligonucleotide
  Antisense strand to SEQ ID NO: 1330270
cuuucccaagacagcucca

SEQ ID NO: 1330272 - RNA, 19 nt, Artificial Sequence
  Description of Artificial Sequence: Synthetic oligonucleotide
  Sense strand starting at position 3797 of SEQ ID NO: 1242206
agccacuuacagugguuau

SEQ ID NO: 1330273 - RNA, 19 nt, Artificial Sequence
  Description of Artificial Sequence: Synthetic oligonucleotide
  Antisense strand to SEQ ID NO: 1330272
auaaccacuguaaguggcu

SEQ ID NO: 1330274 - RNA, 19 nt, Artificial Sequence
  Description of Artificial Sequence: Synthetic oligonucleotide
  Sense strand starting at position 3811 of SEQ ID NO: 1242206
guuauuuccucaggauguu

SEQ ID NO: 1330275 - RNA, 19 nt, Artificial Sequence
  Description of Artificial Sequence: Synthetic oligonucleotide
  Antisense strand to SEQ ID NO: 1330274
aacauccugaggaaauaac

SEQ ID NO: 1330276 - RNA, 19 nt, Artificial Sequence
  Description of Artificial Sequence: Synthetic oligonucleotide
  Sense strand starting at position 3869 of SEQ ID NO: 1242206
aaaggaauguucgauggga

SEQ ID NO: 1330277 - RNA, 19 nt, Artificial Sequence
  Description of Artificial Sequence: Synthetic oligonucleotide
  Antisense strand to SEQ ID NO: 1330276
ucccaucgaacauuccuuu

SEQ ID NO: 1330278 - RNA, 19 nt, Artificial Sequence
  Description of Artificial Sequence: Synthetic oligonucleotide
  Sense strand starting at position 3872 of SEQ ID NO: 1242206
ggaauguucgaugggagga

SEQ ID NO: 1330279 - RNA, 19 nt, Artificial Sequence
  Description of Artificial Sequence: Synthetic oligonucleotide
  Antisense strand to SEQ ID NO: 1330278
uccucccaucgaacauucc

SEQ ID NO: 1330280 - RNA, 19 nt, Artificial Sequence
  Description of Artificial Sequence: Synthetic oligonucleotide
  Sense strand starting at position 3908 of SEQ ID NO: 1242206
ugccgaguccuccgugaaa

SEQ ID NO: 1330281 - RNA, 19 nt, Artificial Sequence
  Description of Artificial Sequence: Synthetic oligonucleotide
  Antisense strand to SEQ ID NO: 1330280
uuucacggaggacucggca

SEQ ID NO: 1330282 - RNA, 19 nt, Artificial Sequence
  Description of Artificial Sequence: Synthetic oligonucleotide
  Sense strand starting at position 3937 of SEQ ID NO: 1242206
agagcuccaguaggaaauu

SEQ ID NO: 1330283 - RNA, 19 nt, Artificial Sequence
  Description of Artificial Sequence: Synthetic oligonucleotide
  Antisense strand to SEQ ID NO: 1330282
aauuuccuacuggagcucu

SEQ ID NO: 1330284 - RNA, 19 nt, Artificial Sequence
  Description of Artificial Sequence: Synthetic oligonucleotide
  Sense strand starting at position 3938 of SEQ ID NO: 1242206
gagcuccaguaggaaauua

SEQ ID NO: 1330285 - RNA, 19 nt, Artificial Sequence
  Description of Artificial Sequence: Synthetic oligonucleotide
  Antisense strand to SEQ ID NO: 1330284
uaauuuccuacuggagcuc

SEQ ID NO: 1330286 - RNA, 19 nt, Artificial Sequence
  Description of Artificial Sequence: Synthetic oligonucleotide
  Sense strand starting at position 3974 of SEQ ID NO: 1242206
gguuuauggacuuggaauc

SEQ ID NO: 1330287 - RNA, 19 nt, Artificial Sequence
  Description of Artificial Sequence: Synthetic oligonucleotide
  Antisense strand to SEQ ID NO: 1330286
gauuccaaguccauaaacc

SEQ ID NO: 1330288 - RNA, 19 nt, Artificial Sequence
  Description of Artificial Sequence: Synthetic oligonucleotide
  Sense strand starting at position 517 of SEQ ID NO: 1242207
gccacugugcuccacaaau

SEQ ID NO: 1330289 - RNA, 19 nt, Artificial Sequence
  Description of Artificial Sequence: Synthetic oligonucleotide
  Antisense strand to SEQ ID NO: 1330288
auuuguggagcacaguggc

SEQ ID NO: 1330290 - RNA, 19 nt, Artificial Sequence
  Description of Artificial Sequence: Synthetic oligonucleotide
  Sense strand starting at position 591 of SEQ ID NO: 1242207
gcuaguauuggcuagagaa

SEQ ID NO: 1330291 - RNA, 19 nt, Artificial Sequence
  Description of Artificial Sequence: Synthetic oligonucleotide
  Antisense strand to SEQ ID NO: 1330290
uucucuagccaauacuagc

SEQ ID NO: 1330292 - RNA, 19 nt, Artificial Sequence
  Description of Artificial Sequence: Synthetic oligonucleotide
  Sense strand starting at position 891 of SEQ ID NO: 1242207
uggguuuaugggcauaaga

SEQ ID NO: 1330293 - RNA, 19 nt, Artificial Sequence
  Description of Artificial Sequence: Synthetic oligonucleotide
  Antisense strand to SEQ ID NO: 1330292
ucuuaugcccauaaaccca

SEQ ID NO: 1330294 - RNA, 19 nt, Artificial Sequence
  Description of Artificial Sequence: Synthetic oligonucleotide
  Sense strand starting at position 956 of SEQ ID NO: 1242207
ugccucucaguagggaaua

SEQ ID NO: 1330295 - RNA, 19 nt, Artificial Sequence
  Description of Artificial Sequence: Synthetic oligonucleotide
  Antisense strand to SEQ ID NO: 1330294
uauucccuacugagaggca

SEQ ID NO: 1330296 - RNA, 19 nt, Artificial Sequence
  Description of Artificial Sequence: Synthetic oligonucleotide
  Sense strand starting at position 966 of SEQ ID NO: 1242207
uagggaauaaaguguggau

SEQ ID NO: 1330297 - RNA, 19 nt, Artificial Sequence
  Description of Artificial Sequence: Synthetic oligonucleotide
  Antisense strand to SEQ ID NO: 1330296
auccacacuuuauucccua

SEQ ID NO: 1330298 - RNA, 19 nt, Artificial Sequence
  Description of Artificial Sequence: Synthetic oligonucleotide
  Sense strand starting at position 968 of SEQ ID NO: 1242207
gggaauaaaguguggauua

SEQ ID NO: 1330299 - RNA, 19 nt, Artificial Sequence
  Description of Artificial Sequence: Synthetic oligonucleotide
  Antisense strand to SEQ ID NO: 1330298
uaauccacacuuuauuccc

SEQ ID NO: 1330300 - RNA, 19 nt, Artificial Sequence
  Description of Artificial Sequence: Synthetic oligonucleotide
  Sense strand starting at position 973 of SEQ ID NO: 1242207
uaaaguguggauuacaguu

SEQ ID NO: 1330301 - RNA, 19 nt, Artificial Sequence
  Description of Artificial Sequence: Synthetic oligonucleotide
  Antisense strand to SEQ ID NO: 1330300
aacuguaauccacacuuua

SEQ ID NO: 1330302 - RNA, 19 nt, Artificial Sequence
  Description of Artificial Sequence: Synthetic oligonucleotide
  Sense strand starting at position 1193 of SEQ ID NO: 1242207
gacuguaucccgcacaaug

SEQ ID NO: 1330303 - RNA, 19 nt, Artificial Sequence
  Description of Artificial Sequence: Synthetic oligonucleotide
  Antisense strand to SEQ ID NO: 1330302
cauugugcgggauacaguc

SEQ ID NO: 1330304 - RNA, 19 nt, Artificial Sequence
  Description of Artificial Sequence: Synthetic oligonucleotide
  Sense strand starting at position 1235 of SEQ ID NO: 1242207
cuaucuaucuagucugaua

SEQ ID NO: 1330305 - RNA, 19 nt, Artificial Sequence
  Description of Artificial Sequence: Synthetic oligonucleotide
  Antisense strand to SEQ ID NO: 1330304
uaucagacuagauagauag

SEQ ID NO: 1330306 - RNA, 19 nt, Artificial Sequence
  Description of Artificial Sequence: Synthetic oligonucleotide
  Sense strand starting at position 1237 of SEQ ID NO: 1242207
aucuaucuagucugauauu

SEQ ID NO: 1330307 - RNA, 19 nt, Artificial Sequence
  Description of Artificial Sequence: Synthetic oligonucleotide
  Antisense strand to SEQ ID NO: 1330306
aauaucagacuagauagau

SEQ ID NO: 1330308 - RNA, 19 nt, Artificial Sequence
  Description of Artificial Sequence: Synthetic oligonucleotide
  Sense strand starting at position 1306 of SEQ ID NO: 1242207
auacuuaaguuccuaagua

SEQ ID NO: 1330309 - RNA, 19 nt, Artificial Sequence
  Description of Artificial Sequence: Synthetic oligonucleotide
  Antisense strand to SEQ ID NO: 1330308
uacuuaggaacuuaaguau

SEQ ID NO: 1330310 - RNA, 19 nt, Artificial Sequence
  Description of Artificial Sequence: Synthetic oligonucleotide
  Sense strand starting at position 1314 of SEQ ID NO: 1242207
guuccuaaguaauuacacu

SEQ ID NO: 1330311 - RNA, 19 nt, Artificial Sequence
  Description of Artificial Sequence: Synthetic oligonucleotide
  Antisense strand to SEQ ID NO: 1330310
aguguaauuacuuaggaac

SEQ ID NO: 1330312 - RNA, 19 nt, Artificial Sequence
  Description of Artificial Sequence: Synthetic oligonucleotide
  Sense strand starting at position 1452 of SEQ ID NO: 1242207
auacuuaaguuccuaaugu

SEQ ID NO: 1330313 - RNA, 19 nt, Artificial Sequence
  Description of Artificial Sequence: Synthetic oligonucleotide
  Antisense strand to SEQ ID NO: 1330312
acauuaggaacuuaaguau

SEQ ID NO: 1330314 - RNA, 19 nt, Artificial Sequence
  Description of Artificial Sequence: Synthetic oligonucleotide
  Sense strand starting at position 1504 of SEQ ID NO: 1242207
acauuagucuaaggaauuu

SEQ ID NO: 1330315 - RNA, 19 nt, Artificial Sequence
  Description of Artificial Sequence: Synthetic oligonucleotide
  Antisense strand to SEQ ID NO: 1330314
aaauuccuuagacuaaugu

SEQ ID NO: 1330316 - RNA, 19 nt, Artificial Sequence
  Description of Artificial Sequence: Synthetic oligonucleotide
  Sense strand starting at position 1513 of SEQ ID NO: 1242207
uaaggaauuuguggaggcu

SEQ ID NO: 1330317 - RNA, 19 nt, Artificial Sequence
  Description of Artificial Sequence: Synthetic oligonucleotide
  Antisense strand to SEQ ID NO: 1330316
agccuccacaaauuccuua

SEQ ID NO: 1330318 - RNA, 19 nt, Artificial Sequence
  Description of Artificial Sequence: Synthetic oligonucleotide
  Sense strand starting at position 1537 of SEQ ID NO: 1242207
aagagaggugcuugcugaa

SEQ ID NO: 1330319 - RNA, 19 nt, Artificial Sequence
  Description of Artificial Sequence: Synthetic oligonucleotide
  Antisense strand to SEQ ID NO: 1330318
uucagcaagcaccucucuu

SEQ ID NO: 1330320 - RNA, 19 nt, Artificial Sequence
  Description of Artificial Sequence: Synthetic oligonucleotide
  Sense strand starting at position 1544 of SEQ ID NO: 1242207
gugcuugcugaauacgaga

SEQ ID NO: 1330321 - RNA, 19 nt, Artificial Sequence
  Description of Artificial Sequence: Synthetic oligonucleotide
  Antisense strand to SEQ ID NO: 1330320
ucucguauucagcaagcac

SEQ ID NO: 1330322 - RNA, 19 nt, Artificial Sequence
  Description of Artificial Sequence: Synthetic oligonucleotide
  Sense strand starting at position 1573 of SEQ ID NO: 1242207
ggaacaagaucggaugcaa

SEQ ID NO: 1330323 - RNA, 19 nt, Artificial Sequence
  Description of Artificial Sequence: Synthetic oligonucleotide
  Antisense strand to SEQ ID NO: 1330322
uugcauccgaucuuguucc

SEQ ID NO: 1330324 - RNA, 19 nt, Artificial Sequence
  Description of Artificial Sequence: Synthetic oligonucleotide
  Sense strand starting at position 1734 of SEQ ID NO: 1242207
guaccuuucucauugcgaa

SEQ ID NO: 1330325 - RNA, 19 nt, Artificial Sequence
  Description of Artificial Sequence: Synthetic oligonucleotide
  Antisense strand to SEQ ID NO: 1330324
uucgcaaugagaaagguac

SEQ ID NO: 1330326 - RNA, 19 nt, Artificial Sequence
  Description of Artificial Sequence: Synthetic oligonucleotide
  Sense strand starting at position 1804 of SEQ ID NO: 1242207
uugggaccgacauguugau

SEQ ID NO: 1330327 - RNA, 19 nt, Artificial Sequence
  Description of Artificial Sequence: Synthetic oligonucleotide
  Antisense strand to SEQ ID NO: 1330326
aucaacaugucggucccaa

SEQ ID NO: 1330328 - RNA, 19 nt, Artificial Sequence
  Description of Artificial Sequence: Synthetic oligonucleotide
  Sense strand starting at position 1839 of SEQ ID NO: 1242207
cccgaaacuugacuaauuc

SEQ ID NO: 1330329 - RNA, 19 nt, Artificial Sequence
  Description of Artificial Sequence: Synthetic oligonucleotide
  Antisense strand to SEQ ID NO: 1330328
gaauuagucaaguuucggg

SEQ ID NO: 1330330 - RNA, 19 nt, Artificial Sequence
  Description of Artificial Sequence: Synthetic oligonucleotide
  Sense strand starting at position 1905 of SEQ ID NO: 1242207
accugaguccgcgaacaca

SEQ ID NO: 1330331 - RNA, 19 nt, Artificial Sequence
  Description of Artificial Sequence: Synthetic oligonucleotide
  Antisense strand to SEQ ID NO: 1330330
uguguucgcggacucaggu

SEQ ID NO: 1330332 - RNA, 19 nt, Artificial Sequence
  Description of Artificial Sequence: Synthetic oligonucleotide
  Sense strand starting at position 1944 of SEQ ID NO: 1242207
acuacuuacggcugagcua

SEQ ID NO: 1330333 - RNA, 19 nt, Artificial Sequence
  Description of Artificial Sequence: Synthetic oligonucleotide
  Antisense strand to SEQ ID NO: 1330332
uagcucagccguaaguagu

SEQ ID NO: 1330334 - RNA, 19 nt, Artificial Sequence
  Description of Artificial Sequence: Synthetic oligonucleotide
  Sense strand starting at position 1969 of SEQ ID NO: 1242207
ccggaaauacgugacgaga

SEQ ID NO: 1330335 - RNA, 19 nt, Artificial Sequence
  Description of Artificial Sequence: Synthetic oligonucleotide
  Antisense strand to SEQ ID NO: 1330334
ucucgucacguauuuccgg

SEQ ID NO: 1330336 - RNA, 19 nt, Artificial Sequence
  Description of Artificial Sequence: Synthetic oligonucleotide
  Sense strand starting at position 2073 of SEQ ID NO: 1242207
guccucuacgucgcagaau

SEQ ID NO: 1330337 - RNA, 19 nt, Artificial Sequence
  Description of Artificial Sequence: Synthetic oligonucleotide
  Antisense strand to SEQ ID NO: 1330336
auucugcgacguagaggac

SEQ ID NO: 1330338 - RNA, 19 nt, Artificial Sequence
  Description of Artificial Sequence: Synthetic oligonucleotide
  Sense strand starting at position 2142 of SEQ ID NO: 1242207
aggacucugcggugaggaa

SEQ ID NO: 1330339 - RNA, 19 nt, Artificial Sequence
  Description of Artificial Sequence: Synthetic oligonucleotide
  Antisense strand to SEQ ID NO: 1330338
uuccucaccgcagaguccu

SEQ ID NO: 1330340 - RNA, 19 nt, Artificial Sequence
  Description of Artificial Sequence: Synthetic oligonucleotide
  Sense strand starting at position 2178 of SEQ ID NO: 1242207
uuacguguuagcuugguuu

SEQ ID NO: 1330341 - RNA, 19 nt, Artificial Sequence
  Description of Artificial Sequence: Synthetic oligonucleotide
  Antisense strand to SEQ ID NO: 1330340
aaaccaagcuaacacguaa

SEQ ID NO: 1330342 - RNA, 19 nt, Artificial Sequence
  Description of Artificial Sequence: Synthetic oligonucleotide
  Sense strand starting at position 2182 of SEQ ID NO: 1242207
guguuagcuugguuugaag

SEQ ID NO: 1330343 - RNA, 19 nt, Artificial Sequence
  Description of Artificial Sequence: Synthetic oligonucleotide
  Antisense strand to SEQ ID NO: 1330342
cuucaaaccaagcuaacac

SEQ ID NO: 1330344 - RNA, 19 nt, Artificial Sequence
  Description of Artificial Sequence: Synthetic oligonucleotide
  Sense strand starting at position 2232 of SEQ ID NO: 1242207
gcgacagugaguuacuguu

SEQ ID NO: 1330345 - RNA, 19 nt, Artificial Sequence
  Description of Artificial Sequence: Synthetic oligonucleotide
  Antisense strand to SEQ ID NO: 1330344
aacaguaacucacugucgc

SEQ ID NO: 1330346 - RNA, 19 nt, Artificial Sequence
  Description of Artificial Sequence: Synthetic oligonucleotide
  Sense strand starting at position 2238 of SEQ ID NO: 1242207
gugaguuacuguuugaaug

SEQ ID NO: 1330347 - RNA, 19 nt, Artificial Sequence
  Description of Artificial Sequence: Synthetic oligonucleotide
  Antisense strand to SEQ ID NO: 1330346
cauucaaacaguaacucac

SEQ ID NO: 1330348 - RNA, 19 nt, Artificial Sequence
  Description of Artificial Sequence: Synthetic oligonucleotide
  Sense strand starting at position 2248 of SEQ ID NO: 1242207
guuugaauggcuuguugaa

SEQ ID NO: 1330349 - RNA, 19 nt, Artificial Sequence
  Description of Artificial Sequence: Synthetic oligonucleotide
  Antisense strand to SEQ ID NO: 1330348
uucaacaagccauucaaac

SEQ ID NO: 1330350 - RNA, 19 nt, Artificial Sequence
  Description of Artificial Sequence: Synthetic oligonucleotide
  Sense strand starting at position 2250 of SEQ ID NO: 1242207
uugaauggcuuguugaaag

SEQ ID NO: 1330351 - RNA, 19 nt, Artificial Sequence
  Description of Artificial Sequence: Synthetic oligonucleotide
  Antisense strand to SEQ ID NO: 1330350
cuuucaacaagccauucaa

SEQ ID NO: 1330352 - RNA, 19 nt, Artificial Sequence
  Description of Artificial Sequence: Synthetic oligonucleotide
  Sense strand starting at position 2261 of SEQ ID NO: 1242207
guugaaagcucagaagaag

SEQ ID NO: 1330353 - RNA, 19 nt, Artificial Sequence
  Description of Artificial Sequence: Synthetic oligonucleotide
  Antisense strand to SEQ ID NO: 1330352
cuucuucugagcuuucaac

SEQ ID NO: 1330354 - RNA, 19 nt, Artificial Sequence
  Description of Artificial Sequence: Synthetic oligonucleotide
  Sense strand starting at position 2275 of SEQ ID NO: 1242207
agaaguagaguuugaugga

SEQ ID NO: 1330355 - RNA, 19 nt, Artificial Sequence
  Description of Artificial Sequence: Synthetic oligonucleotide
  Antisense strand to SEQ ID NO: 1330354
uccaucaaacucuacuucu

SEQ ID NO: 1330356 - RNA, 19 nt, Artificial Sequence
  Description of Artificial Sequence: Synthetic oligonucleotide
  Sense strand starting at position 2305 of SEQ ID NO: 1242207
gccaguaguauccgauuag

SEQ ID NO: 1330357 - RNA, 19 nt, Artificial Sequence
  Description of Artificial Sequence: Synthetic oligonucleotide
  Antisense strand to SEQ ID NO: 1330356
cuaaucggauacuacuggc

SEQ ID NO: 1330358 - RNA, 19 nt, Artificial Sequence
  Description of Artificial Sequence: Synthetic oligonucleotide
  Sense strand starting at position 2309 of SEQ ID NO: 1242207
guaguauccgauuagcuua

SEQ ID NO: 1330359 - RNA, 19 nt, Artificial Sequence
  Description of Artificial Sequence: Synthetic oligonucleotide
  Antisense strand to SEQ ID NO: 1330358
uaagcuaaucggauacuac

SEQ ID NO: 1330360 - RNA, 19 nt, Artificial Sequence
  Description of Artificial Sequence: Synthetic oligonucleotide
  Sense strand starting at position 2354 of SEQ ID NO: 1242207
ugcgguauuugguuucaca

SEQ ID NO: 1330361 - RNA, 19 nt, Artificial Sequence
  Description of Artificial Sequence: Synthetic oligonucleotide
  Antisense strand to SEQ ID NO: 1330360
ugugaaaccaaauaccgca

SEQ ID NO: 1330362 - RNA, 19 nt, Artificial Sequence
  Description of Artificial Sequence: Synthetic oligonucleotide
  Sense strand starting at position 2519 of SEQ ID NO: 1242207
auacauuccuggcuagaaa

SEQ ID NO: 1330363 - RNA, 19 nt, Artificial Sequence
  Description of Artificial Sequence: Synthetic oligonucleotide
  Antisense strand to SEQ ID NO: 1330362
uuucuagccaggaauguau

SEQ ID NO: 1330364 - RNA, 19 nt, Artificial Sequence
  Description of Artificial Sequence: Synthetic oligonucleotide
  Sense strand starting at position 3792 of SEQ ID NO: 1242207
ccuaaagaauuugagucua

SEQ ID NO: 1330365 - RNA, 19 nt, Artificial Sequence
  Description of Artificial Sequence: Synthetic oligonucleotide
  Antisense strand to SEQ ID NO: 1330364
uagacucaaauucuuuagg

SEQ ID NO: 1330366 - RNA, 19 nt, Artificial Sequence
  Description of Artificial Sequence: Synthetic oligonucleotide
  Sense strand starting at position 3805 of SEQ ID NO: 1242207
agucuagggcuuuaagaca

SEQ ID NO: 1330367 - RNA, 19 nt, Artificial Sequence
  Description of Artificial Sequence: Synthetic oligonucleotide
  Antisense strand to SEQ ID NO: 1330366
ugucuuaaagcccuagacu

SEQ ID NO: 1330368 - RNA, 19 nt, Artificial Sequence
  Description of Artificial Sequence: Synthetic oligonucleotide
  Sense strand starting at position 356 of SEQ ID NO: 1242208
gcuggagaguccuccugaa

SEQ ID NO: 1330369 - RNA, 19 nt, Artificial Sequence
  Description of Artificial Sequence: Synthetic oligonucleotide
  Antisense strand to SEQ ID NO: 1330368
uucaggaggacucuccagc

SEQ ID NO: 1330370 - RNA, 19 nt, Artificial Sequence
  Description of Artificial Sequence: Synthetic oligonucleotide
  Sense strand starting at position 487 of SEQ ID NO: 1242208
agcuauuagucauuggcuu

SEQ ID NO: 1330371 - RNA, 19 nt, Artificial Sequence
  Description of Artificial Sequence: Synthetic oligonucleotide
  Antisense strand to SEQ ID NO: 1330370
aagccaaugacuaauagcu

SEQ ID NO: 1330372 - RNA, 19 nt, Artificial Sequence
  Description of Artificial Sequence: Synthetic oligonucleotide
  Sense strand starting at position 491 of SEQ ID NO: 1242208
auuagucauuggcuuuaaa

SEQ ID NO: 1330373 - RNA, 19 nt, Artificial Sequence
  Description of Artificial Sequence: Synthetic oligonucleotide
  Antisense strand to SEQ ID NO: 1330372
uuuaaagccaaugacuaau

SEQ ID NO: 1330374 - RNA, 19 nt, Artificial Sequence
  Description of Artificial Sequence: Synthetic oligonucleotide
  Sense strand starting at position 494 of SEQ ID NO: 1242208
agucauuggcuuuaaauag

SEQ ID NO: 1330375 - RNA, 19 nt, Artificial Sequence
  Description of Artificial Sequence: Synthetic oligonucleotide
  Antisense strand to SEQ ID NO: 1330374
cuauuuaaagccaaugacu

SEQ ID NO: 1330376 - RNA, 19 nt, Artificial Sequence
  Description of Artificial Sequence: Synthetic oligonucleotide
  Sense strand starting at position 564 of SEQ ID NO: 1242208
agaggcuuggguugggaau

SEQ ID NO: 1330377 - RNA, 19 nt, Artificial Sequence
  Description of Artificial Sequence: Synthetic oligonucleotide
  Antisense strand to SEQ ID NO: 1330376
auucccaacccaagccucu

SEQ ID NO: 1330378 - RNA, 19 nt, Artificial Sequence
  Description of Artificial Sequence: Synthetic oligonucleotide
  Sense strand starting at position 685 of SEQ ID NO: 1242208
acguuaccuguguguaaga

SEQ ID NO: 1330379 - RNA, 19 nt, Artificial Sequence
  Description of Artificial Sequence: Synthetic oligonucleotide
  Antisense strand to SEQ ID NO: 1330378
ucuuacacacagguaacgu

SEQ ID NO: 1330380 - RNA, 19 nt, Artificial Sequence
  Description of Artificial Sequence: Synthetic oligonucleotide
  Sense strand starting at position 687 of SEQ ID NO: 1242208
guuaccuguguguaagaua

SEQ ID NO: 1330381 - RNA, 19 nt, Artificial Sequence
  Description of Artificial Sequence: Synthetic oligonucleotide
  Antisense strand to SEQ ID NO: 1330380
uaucuuacacacagguaac

SEQ ID NO: 1330382 - RNA, 19 nt, Artificial Sequence
  Description of Artificial Sequence: Synthetic oligonucleotide
  Sense strand starting at position 692 of SEQ ID NO: 1242208
cuguguguaagauagguau

SEQ ID NO: 1330383 - RNA, 19 nt, Artificial Sequence
  Description of Artificial Sequence: Synthetic oligonucleotide
  Antisense strand to SEQ ID NO: 1330382
auaccuaucuuacacacag

SEQ ID NO: 1330384 - RNA, 19 nt, Artificial Sequence
  Description of Artificial Sequence: Synthetic oligonucleotide
  Sense strand starting at position 696 of SEQ ID NO: 1242208
guguaagauagguauggug

SEQ ID NO: 1330385 - RNA, 19 nt, Artificial Sequence
  Description of Artificial Sequence: Synthetic oligonucleotide
  Antisense strand to SEQ ID NO: 1330384
caccauaccuaucuuacac

SEQ ID NO: 1330386 - RNA, 19 nt, Artificial Sequence
  Description of Artificial Sequence: Synthetic oligonucleotide
  Sense strand starting at position 698 of SEQ ID NO: 1242208
guaagauagguaugguguu

SEQ ID NO: 1330387 - RNA, 19 nt, Artificial Sequence
  Description of Artificial Sequence: Synthetic oligonucleotide
  Antisense strand to SEQ ID NO: 1330386
aacaccauaccuaucuuac

SEQ ID NO: 1330388 - RNA, 19 nt, Artificial Sequence
  Description of Artificial Sequence: Synthetic oligonucleotide
  Sense strand starting at position 711 of SEQ ID NO: 1242208
gguguuuccuccuucugga

SEQ ID NO: 1330389 - RNA, 19 nt, Artificial Sequence
  Description of Artificial Sequence: Synthetic oligonucleotide
  Antisense strand to SEQ ID NO: 1330388
uccagaaggaggaaacacc

SEQ ID NO: 1330390 - RNA, 19 nt, Artificial Sequence
  Description of Artificial Sequence: Synthetic oligonucleotide
  Sense strand starting at position 796 of SEQ ID NO: 1242208
ccaguaacauuuggccaga

SEQ ID NO: 1330391 - RNA, 19 nt, Artificial Sequence
  Description of Artificial Sequence: Synthetic oligonucleotide
  Antisense strand to SEQ ID NO: 1330390
ucuggccaaauguuacugg

SEQ ID NO: 1330392 - RNA, 19 nt, Artificial Sequence
  Description of Artificial Sequence: Synthetic oligonucleotide
  Sense strand starting at position 1314 of SEQ ID NO: 1242208
cggcccuucccuuauguga

SEQ ID NO: 1330393 - RNA, 19 nt, Artificial Sequence
  Description of Artificial Sequence: Synthetic oligonucleotide
  Antisense strand to SEQ ID NO: 1330392
ucacauaagggaagggccg

SEQ ID NO: 1330394 - RNA, 19 nt, Artificial Sequence
  Description of Artificial Sequence: Synthetic oligonucleotide
  Sense strand starting at position 1436 of SEQ ID NO: 1242208
auacuagaguccuagaauc

SEQ ID NO: 1330395 - RNA, 19 nt, Artificial Sequence
  Description of Artificial Sequence: Synthetic oligonucleotide
  Antisense strand to SEQ ID NO: 1330394
gauucuaggacucuaguau

SEQ ID NO: 1330396 - RNA, 19 nt, Artificial Sequence
  Description of Artificial Sequence: Synthetic oligonucleotide
  Sense strand starting at position 1448 of SEQ ID NO: 1242208
uagaaucucccagguggaa

SEQ ID NO: 1330397 - RNA, 19 nt, Artificial Sequence
  Description of Artificial Sequence: Synthetic oligonucleotide
  Antisense strand to SEQ ID NO: 1330396
uuccaccugggagauucua

SEQ ID NO: 1330398 - RNA, 19 nt, Artificial Sequence
  Description of Artificial Sequence: Synthetic oligonucleotide
  Sense strand starting at position 1533 of SEQ ID NO: 1242208
agcggauuccuuugucauu

SEQ ID NO: 1330399 - RNA, 19 nt, Artificial Sequence
  Description of Artificial Sequence: Synthetic oligonucleotide
  Antisense strand to SEQ ID NO: 1330398
aaugacaaaggaauccgcu

SEQ ID NO: 1330400 - RNA, 19 nt, Artificial Sequence
  Description of Artificial Sequence: Synthetic oligonucleotide
  Sense strand starting at position 1534 of SEQ ID NO: 1242208
gcggauuccuuugucauua

SEQ ID NO: 1330401 - RNA, 19 nt, Artificial Sequence
  Description of Artificial Sequence: Synthetic oligonucleotide
  Antisense strand to SEQ ID NO: 1330400
uaaugacaaaggaauccgc

SEQ ID NO: 1330402 - RNA, 19 nt, Artificial Sequence
  Description of Artificial Sequence: Synthetic oligonucleotide
  Sense strand starting at position 1535 of SEQ ID NO: 1242208
cggauuccuuugucauuau

SEQ ID NO: 1330403 - RNA, 19 nt, Artificial Sequence
  Description of Artificial Sequence: Synthetic oligonucleotide
  Antisense strand to SEQ ID NO: 1330402
auaaugacaaaggaauccg

SEQ ID NO: 1330404 - RNA, 19 nt, Artificial Sequence
  Description of Artificial Sequence: Synthetic oligonucleotide
  Sense strand starting at position 1710 of SEQ ID NO: 1242208
uugucuaaguuugucaaca

SEQ ID NO: 1330405 - RNA, 19 nt, Artificial Sequence
  Description of Artificial Sequence: Synthetic oligonucleotide
  Antisense strand to SEQ ID NO: 1330404
uguugacaaacuuagacaa

SEQ ID NO: 1330406 - RNA, 19 nt, Artificial Sequence
  Description of Artificial Sequence: Synthetic oligonucleotide
  Sense strand starting at position 1711 of SEQ ID NO: 1242208
ugucuaaguuugucaacag

SEQ ID NO: 1330407 - RNA, 19 nt, Artificial Sequence
  Description of Artificial Sequence: Synthetic oligonucleotide
  Antisense strand to SEQ ID NO: 1330406
cuguugacaaacuuagaca

SEQ ID NO: 1330408 - RNA, 19 nt, Artificial Sequence
  Description of Artificial Sequence: Synthetic oligonucleotide
  Sense strand starting at position 1715 of SEQ ID NO: 1242208
uaaguuugucaacagugga

SEQ ID NO: 1330409 - RNA, 19 nt, Artificial Sequence
  Description of Artificial Sequence: Synthetic oligonucleotide
  Antisense strand to SEQ ID NO: 1330408
uccacuguugacaaacuua

SEQ ID NO: 1330410 - RNA, 19 nt, Artificial Sequence
  Description of Artificial Sequence: Synthetic oligonucleotide
  Sense strand starting at position 2174 of SEQ ID NO: 1242208
gagucuguugggcgggaaa

SEQ ID NO: 1330411 - RNA, 19 nt, Artificial Sequence
  Description of Artificial Sequence: Synthetic oligonucleotide
  Antisense strand to SEQ ID NO: 1330410
uuucccgcccaacagacuc

SEQ ID NO: 1330412 - RNA, 19 nt, Artificial Sequence
  Description of Artificial Sequence: Synthetic oligonucleotide
  Sense strand starting at position 2277 of SEQ ID NO: 1242208
uacaaugagcaucguguuu

SEQ ID NO: 1330413 - RNA, 19 nt, Artificial Sequence
  Description of Artificial Sequence: Synthetic oligonucleotide
  Antisense strand to SEQ ID NO: 1330412
aaacacgaugcucauugua

SEQ ID NO: 1330414 - RNA, 19 nt, Artificial Sequence
  Description of Artificial Sequence: Synthetic oligonucleotide
  Sense strand starting at position 2288 of SEQ ID NO: 1242208
ucguguuucccuucucgga

SEQ ID NO: 1330415 - RNA, 19 nt, Artificial Sequence
  Description of Artificial Sequence: Synthetic oligonucleotide
  Antisense strand to SEQ ID NO: 1330414
uccgagaagggaaacacga

SEQ ID NO: 1330416 - RNA, 19 nt, Artificial Sequence
  Description of Artificial Sequence: Synthetic oligonucleotide
  Sense strand starting at position 2289 of SEQ ID NO: 1242208
cguguuucccuucucggau

SEQ ID NO: 1330417 - RNA, 19 nt, Artificial Sequence
  Description of Artificial Sequence: Synthetic oligonucleotide
  Antisense strand to SEQ ID NO: 1330416
auccgagaagggaaacacg

SEQ ID NO: 1330418 - RNA, 19 nt, Artificial Sequence
  Description of Artificial Sequence: Synthetic oligonucleotide
  Sense strand starting at position 2320 of SEQ ID NO: 1242208
agauguuaacaagguuagu

SEQ ID NO: 1330419 - RNA, 19 nt, Artificial Sequence
  Description of Artificial Sequence: Synthetic oligonucleotide
  Antisense strand to SEQ ID NO: 1330418
acuaaccuuguuaacaucu

SEQ ID NO: 1330420 - RNA, 19 nt, Artificial Sequence
  Description of Artificial Sequence: Synthetic oligonucleotide
  Sense strand starting at position 2361 of SEQ ID NO: 1242208
aagcaugcuucgcugaaga

SEQ ID NO: 1330421 - RNA, 19 nt, Artificial Sequence
  Description of Artificial Sequence: Synthetic oligonucleotide
  Antisense strand to SEQ ID NO: 1330420
ucuucagcgaagcaugcuu

SEQ ID NO: 1330422 - RNA, 19 nt, Artificial Sequence
  Description of Artificial Sequence: Synthetic oligonucleotide
  Sense strand starting at position 2363 of SEQ ID NO: 1242208
gcaugcuucgcugaagaca

SEQ ID NO: 1330423 - RNA, 19 nt, Artificial Sequence
  Description of Artificial Sequence: Synthetic oligonucleotide
  Antisense strand to SEQ ID NO: 1330422
ugucuucagcgaagcaugc

SEQ ID NO: 1330424 - RNA, 19 nt, Artificial Sequence
  Description of Artificial Sequence: Synthetic oligonucleotide
  Sense strand starting at position 2371 of SEQ ID NO: 1242208
cgcugaagacaguauaaau

SEQ ID NO: 1330425 - RNA, 19 nt, Artificial Sequence
  Description of Artificial Sequence: Synthetic oligonucleotide
  Antisense strand to SEQ ID NO: 1330424
auuuauacugucuucagcg

SEQ ID NO: 1330426 - RNA, 19 nt, Artificial Sequence
  Description of Artificial Sequence: Synthetic oligonucleotide
  Sense strand starting at position 2410 of SEQ ID NO: 1242208
gcuauuugguaacaccuau

SEQ ID NO: 1330427 - RNA, 19 nt, Artificial Sequence
  Description of Artificial Sequence: Synthetic oligonucleotide
  Antisense strand to SEQ ID NO: 1330426
auagguguuaccaaauagc

SEQ ID NO: 1330428 - RNA, 19 nt, Artificial Sequence
  Description of Artificial Sequence: Synthetic oligonucleotide
  Sense strand starting at position 2531 of SEQ ID NO: 1242208
auagcaacauugucugaaa

SEQ ID NO: 1330429 - RNA, 19 nt, Artificial Sequence
  Description of Artificial Sequence: Synthetic oligonucleotide
  Antisense strand to SEQ ID NO: 1330428
uuucagacaauguugcuau

SEQ ID NO: 1330430 - RNA, 19 nt, Artificial Sequence
  Description of Artificial Sequence: Synthetic oligonucleotide
  Sense strand starting at position 2533 of SEQ ID NO: 1242208
agcaacauugucugaaaug

SEQ ID NO: 1330431 - RNA, 19 nt, Artificial Sequence
  Description of Artificial Sequence: Synthetic oligonucleotide
  Antisense strand to SEQ ID NO: 1330430
cauuucagacaauguugcu

SEQ ID NO: 1330432 - RNA, 19 nt, Artificial Sequence
  Description of Artificial Sequence: Synthetic oligonucleotide
  Sense strand starting at position 2575 of SEQ ID NO: 1242208
cagcgaagguuucuguaaa

SEQ ID NO: 1330433 - RNA, 19 nt, Artificial Sequence
  Description of Artificial Sequence: Synthetic oligonucleotide
  Antisense strand to SEQ ID NO: 1330432
uuuacagaaaccuucgcug

SEQ ID NO: 1330434 - RNA, 19 nt, Artificial Sequence
  Description of Artificial Sequence: Synthetic oligonucleotide
  Sense strand starting at position 2618 of SEQ ID NO: 1242208
auauguaggcccugagucu

SEQ ID NO: 1330435 - RNA, 19 nt, Artificial Sequence
  Description of Artificial Sequence: Synthetic oligonucleotide
  Antisense strand to SEQ ID NO: 1330434
agacucagggccuacauau

SEQ ID NO: 1330436 - RNA, 19 nt, Artificial Sequence
  Description of Artificial Sequence: Synthetic oligonucleotide
  Sense strand starting at position 2783 of SEQ ID NO: 1242208
gugcaaauauuaccuguuu

SEQ ID NO: 1330437 - RNA, 19 nt, Artificial Sequence
  Description of Artificial Sequence: Synthetic oligonucleotide
  Antisense strand to SEQ ID NO: 1330436
aaacagguaauauuugcac

SEQ ID NO: 1330438 - RNA, 19 nt, Artificial Sequence
  Description of Artificial Sequence: Synthetic oligonucleotide
  Sense strand starting at position 3520 of SEQ ID NO: 1242208
ccuccuagcuguguugaga

SEQ ID NO: 1330439 - RNA, 19 nt, Artificial Sequence
  Description of Artificial Sequence: Synthetic oligonucleotide
  Antisense strand to SEQ ID NO: 1330438
ucucaacacagcuaggagg

SEQ ID NO: 1330440 - RNA, 19 nt, Artificial Sequence
  Description of Artificial Sequence: Synthetic oligonucleotide
  Sense strand starting at position 3529 of SEQ ID NO: 1242208
uguguugagaccuaaguug

SEQ ID NO: 1330441 - RNA, 19 nt, Artificial Sequence
  Description of Artificial Sequence: Synthetic oligonucleotide
  Antisense strand to SEQ ID NO: 1330440
caacuuaggucucaacaca

SEQ ID NO: 1330442 - RNA, 19 nt, Artificial Sequence
  Description of Artificial Sequence: Synthetic oligonucleotide
  Sense strand starting at position 3537 of SEQ ID NO: 1242208
gaccuaaguugggacuaga

SEQ ID NO: 1330443 - RNA, 19 nt, Artificial Sequence
  Description of Artificial Sequence: Synthetic oligonucleotide
  Antisense strand to SEQ ID NO: 1330442
ucuagucccaacuuagguc

SEQ ID NO: 1330444 - RNA, 19 nt, Artificial Sequence
  Description of Artificial Sequence: Synthetic oligonucleotide
  Sense strand starting at position 3968 of SEQ ID NO: 1242208
ccaacacgucuucgugaua

SEQ ID NO: 1330445 - RNA, 19 nt, Artificial Sequence
  Description of Artificial Sequence: Synthetic oligonucleotide
  Antisense strand to SEQ ID NO: 1330444
uaucacgaagacguguugg

SEQ ID NO: 1330446 - RNA, 19 nt, Artificial Sequence
  Description of Artificial Sequence: Synthetic oligonucleotide
  Sense strand starting at position 3969 of SEQ ID NO: 1242208
caacacgucuucgugauaa

SEQ ID NO: 1330447 - RNA, 19 nt, Artificial Sequence
  Description of Artificial Sequence: Synthetic oligonucleotide
  Antisense strand to SEQ ID NO: 1330446
uuaucacgaagacguguug

SEQ ID NO: 1330448 - RNA, 19 nt, Artificial Sequence
  Description of Artificial Sequence: Synthetic oligonucleotide
  Sense strand starting at position 102 of SEQ ID NO: 1242209
cugacaggucucuagcagu

SEQ ID NO: 1330449 - RNA, 19 nt, Artificial Sequence
  Description of Artificial Sequence: Synthetic oligonucleotide
  Antisense strand to SEQ ID NO: 1330448
acugcuagagaccugucag

SEQ ID NO: 1330450 - RNA, 19 nt, Artificial Sequence
  Description of Artificial Sequence: Synthetic oligonucleotide
  Sense strand starting at position 164 of SEQ ID NO: 1242209
guagucaaacuugaaguaa

SEQ ID NO: 1330451 - RNA, 19 nt, Artificial Sequence
  Description of Artificial Sequence: Synthetic oligonucleotide
  Antisense strand to SEQ ID NO: 1330450
uuacuucaaguuugacuac

SEQ ID NO: 1330452 - RNA, 19 nt, Artificial Sequence
  Description of Artificial Sequence: Synthetic oligonucleotide
  Sense strand starting at position 283 of SEQ ID NO: 1242209
aaccguuggcggcaagaaa

SEQ ID NO: 1330453 - RNA, 19 nt, Artificial Sequence
  Description of Artificial Sequence: Synthetic oligonucleotide
  Antisense strand to SEQ ID NO: 1330452
uuucuugccgccaacgguu

SEQ ID NO: 1330454 - RNA, 19 nt, Artificial Sequence
  Description of Artificial Sequence: Synthetic oligonucleotide
  Sense strand starting at position 540 of SEQ ID NO: 1242209
uucuguuaccuuggagacu

SEQ ID NO: 1330455 - RNA, 19 nt, Artificial Sequence
  Description of Artificial Sequence: Synthetic oligonucleotide
  Antisense strand to SEQ ID NO: 1330454
agucuccaagguaacagaa

SEQ ID NO: 1330456 - RNA, 19 nt, Artificial Sequence
  Description of Artificial Sequence: Synthetic oligonucleotide
  Sense strand starting at position 683 of SEQ ID NO: 1242209
guuguuaaccagggacuca

SEQ ID NO: 1330457 - RNA, 19 nt, Artificial Sequence
  Description of Artificial Sequence: Synthetic oligonucleotide
  Antisense strand to SEQ ID NO: 1330456
ugagucccugguuaacaac

SEQ ID NO: 1330458 - RNA, 19 nt, Artificial Sequence
  Description of Artificial Sequence: Synthetic oligonucleotide
  Sense strand starting at position 745 of SEQ ID NO: 1242209
gcucgagacuucucaugau

SEQ ID NO: 1330459 - RNA, 19 nt, Artificial Sequence
  Description of Artificial Sequence: Synthetic oligonucleotide
  Antisense strand to SEQ ID NO: 1330458
aucaugagaagucucgagc

SEQ ID NO: 1330460 - RNA, 19 nt, Artificial Sequence
  Description of Artificial Sequence: Synthetic oligonucleotide
  Sense strand starting at position 793 of SEQ ID NO: 1242209
ugggaaaguuaucuuccca

SEQ ID NO: 1330461 - RNA, 19 nt, Artificial Sequence
  Description of Artificial Sequence: Synthetic oligonucleotide
  Antisense strand to SEQ ID NO: 1330460
ugggaagauaacuuuccca

SEQ ID NO: 1330462 - RNA, 19 nt, Artificial Sequence
  Description of Artificial Sequence: Synthetic oligonucleotide
  Sense strand starting at position 991 of SEQ ID NO: 1242209
cugaaacgaucccuaguuu

SEQ ID NO: 1330463 - RNA, 19 nt, Artificial Sequence
  Description of Artificial Sequence: Synthetic oligonucleotide
  Antisense strand to SEQ ID NO: 1330462
aaacuagggaucguuucag

SEQ ID NO: 1330464 - RNA, 19 nt, Artificial Sequence
  Description of Artificial Sequence: Synthetic oligonucleotide
  Sense strand starting at position 1079 of SEQ ID NO: 1242209
ugauguuaaugucccagau

SEQ ID NO: 1330465 - RNA, 19 nt, Artificial Sequence
  Description of Artificial Sequence: Synthetic oligonucleotide
  Antisense strand to SEQ ID NO: 1330464
aucugggacauuaacauca

SEQ ID NO: 1330466 - RNA, 19 nt, Artificial Sequence
  Description of Artificial Sequence: Synthetic oligonucleotide
  Sense strand starting at position 1083 of SEQ ID NO: 1242209
guuaaugucccagauaccu

SEQ ID NO: 1330467 - RNA, 19 nt, Artificial Sequence
  Description of Artificial Sequence: Synthetic oligonucleotide
  Antisense strand to SEQ ID NO: 1330466
agguaucugggacauuaac

SEQ ID NO: 1330468 - RNA, 19 nt, Artificial Sequence
  Description of Artificial Sequence: Synthetic oligonucleotide
  Sense strand starting at position 1344 of SEQ ID NO: 1242209
gccggaaauuacuuguuag

SEQ ID NO: 1330469 - RNA, 19 nt, Artificial Sequence
  Description of Artificial Sequence: Synthetic oligonucleotide
  Antisense strand to SEQ ID NO: 1330468
cuaacaaguaauuuccggc

SEQ ID NO: 1330470 - RNA, 19 nt, Artificial Sequence
  Description of Artificial Sequence: Synthetic oligonucleotide
  Sense strand starting at position 1345 of SEQ ID NO: 1242209
ccggaaauuacuuguuaga

SEQ ID NO: 1330471 - RNA, 19 nt, Artificial Sequence
  Description of Artificial Sequence: Synthetic oligonucleotide
  Antisense strand to SEQ ID NO: 1330470
ucuaacaaguaauuuccgg

SEQ ID NO: 1330472 - RNA, 19 nt, Artificial Sequence
  Description of Artificial Sequence: Synthetic oligonucleotide
  Sense strand starting at position 2280 of SEQ ID NO: 1242209
cuucguggaaacugugaaa

SEQ ID NO: 1330473 - RNA, 19 nt, Artificial Sequence
  Description of Artificial Sequence: Synthetic oligonucleotide
  Antisense strand to SEQ ID NO: 1330472
uuucacaguuuccacgaag

SEQ ID NO: 1330474 - RNA, 19 nt, Artificial Sequence
  Description of Artificial Sequence: Synthetic oligonucleotide
  Sense strand starting at position 2427 of SEQ ID NO: 1242209
gucaaaugaaucugagguc

SEQ ID NO: 1330475 - RNA, 19 nt, Artificial Sequence
  Description of Artificial Sequence: Synthetic oligonucleotide
  Antisense strand to SEQ ID NO: 1330474
gaccucagauucauuugac

SEQ ID NO: 1330476 - RNA, 19 nt, Artificial Sequence
  Description of Artificial Sequence: Synthetic oligonucleotide
  Sense strand starting at position 2469 of SEQ ID NO: 1242209
uggacagcuccagagcauu

SEQ ID NO: 1330477 - RNA, 19 nt, Artificial Sequence
  Description of Artificial Sequence: Synthetic oligonucleotide
  Antisense strand to SEQ ID NO: 1330476
aaugcucuggagcugucca

SEQ ID NO: 1330478 - RNA, 19 nt, Artificial Sequence
  Description of Artificial Sequence: Synthetic oligonucleotide
  Sense strand starting at position 2475 of SEQ ID NO: 1242209
gcuccagagcauugggaaa

SEQ ID NO: 1330479 - RNA, 19 nt, Artificial Sequence
  Description of Artificial Sequence: Synthetic oligonucleotide
  Antisense strand to SEQ ID NO: 1330478
uuucccaaugcucuggagc

SEQ ID NO: 1330480 - RNA, 19 nt, Artificial Sequence
  Description of Artificial Sequence: Synthetic oligonucleotide
  Sense strand starting at position 2516 of SEQ ID NO: 1242209
agacggauggucgaguuua

SEQ ID NO: 1330481 - RNA, 19 nt, Artificial Sequence
  Description of Artificial Sequence: Synthetic oligonucleotide
  Antisense strand to SEQ ID NO: 1330480
uaaacucgaccauccgucu

SEQ ID NO: 1330482 - RNA, 19 nt, Artificial Sequence
  Description of Artificial Sequence: Synthetic oligonucleotide
  Sense strand starting at position 2521 of SEQ ID NO: 1242209
gauggucgaguuuacaaca

SEQ ID NO: 1330483 - RNA, 19 nt, Artificial Sequence
  Description of Artificial Sequence: Synthetic oligonucleotide
  Antisense strand to SEQ ID NO: 1330482
uguuguaaacucgaccauc

SEQ ID NO: 1330484 - RNA, 19 nt, Artificial Sequence
  Description of Artificial Sequence: Synthetic oligonucleotide
  Sense strand starting at position 2607 of SEQ ID NO: 1242209
aagaguugccacuaaauug

SEQ ID NO: 1330485 - RNA, 19 nt, Artificial Sequence
  Description of Artificial Sequence: Synthetic oligonucleotide
  Antisense strand to SEQ ID NO: 1330484
caauuuaguggcaacucuu

SEQ ID NO: 1330486 - RNA, 19 nt, Artificial Sequence
  Description of Artificial Sequence: Synthetic oligonucleotide
  Sense strand starting at position 2617 of SEQ ID NO: 1242209
acuaaauugccggauauaa

SEQ ID NO: 1330487 - RNA, 19 nt, Artificial Sequence
  Description of Artificial Sequence: Synthetic oligonucleotide
  Antisense strand to SEQ ID NO: 1330486
uuauauccggcaauuuagu

SEQ ID NO: 1330488 - RNA, 19 nt, Artificial Sequence
  Description of Artificial Sequence: Synthetic oligonucleotide
  Sense strand starting at position 2742 of SEQ ID NO: 1242209
agcuaugaggugcaaagaa

SEQ ID NO: 1330489 - RNA, 19 nt, Artificial Sequence
  Description of Artificial Sequence: Synthetic oligonucleotide
  Antisense strand to SEQ ID NO: 1330488
uucuuugcaccucauagcu

SEQ ID NO: 1330490 - RNA, 19 nt, Artificial Sequence
  Description of Artificial Sequence: Synthetic oligonucleotide
  Sense strand starting at position 2751 of SEQ ID NO: 1242209
gugcaaagaaaguauuagu

SEQ ID NO: 1330491 - RNA, 19 nt, Artificial Sequence
  Description of Artificial Sequence: Synthetic oligonucleotide
  Antisense strand to SEQ ID NO: 1330490
acuaauacuuucuuugcac

SEQ ID NO: 1330492 - RNA, 19 nt, Artificial Sequence
  Description of Artificial Sequence: Synthetic oligonucleotide
  Sense strand starting at position 2787 of SEQ ID NO: 1242209
caggcaguugcugaaguaa

SEQ ID NO: 1330493 - RNA, 19 nt, Artificial Sequence
  Description of Artificial Sequence: Synthetic oligonucleotide
  Antisense strand to SEQ ID NO: 1330492
uuacuucagcaacugccug

SEQ ID NO: 1330494 - RNA, 19 nt, Artificial Sequence
  Description of Artificial Sequence: Synthetic oligonucleotide
  Sense strand starting at position 3028 of SEQ ID NO: 1242209
gugacaugcuaugugacaa

SEQ ID NO: 1330495 - RNA, 19 nt, Artificial Sequence
  Description of Artificial Sequence: Synthetic oligonucleotide
  Antisense strand to SEQ ID NO: 1330494
uugucacauagcaugucac

SEQ ID NO: 1330496 - RNA, 19 nt, Artificial Sequence
  Description of Artificial Sequence: Synthetic oligonucleotide
  Sense strand starting at position 3095 of SEQ ID NO: 1242209
gaaggaggcuuauccaaca

SEQ ID NO: 1330497 - RNA, 19 nt, Artificial Sequence
  Description of Artificial Sequence: Synthetic oligonucleotide
  Antisense strand to SEQ ID NO: 1330496
uguuggauaagccuccuuc

SEQ ID NO: 1330498 - RNA, 19 nt, Artificial Sequence
  Description of Artificial Sequence: Synthetic oligonucleotide
  Sense strand starting at position 3133 of SEQ ID NO: 1242209
uuuacuuaggaaggucaua

SEQ ID NO: 1330499 - RNA, 19 nt, Artificial Sequence
  Description of Artificial Sequence: Synthetic oligonucleotide
  Antisense strand to SEQ ID NO: 1330498
uaugaccuuccuaaguaaa

SEQ ID NO: 1330500 - RNA, 19 nt, Artificial Sequence
  Description of Artificial Sequence: Synthetic oligonucleotide
  Sense strand starting at position 3138 of SEQ ID NO: 1242209
uuaggaaggucauauuucu

SEQ ID NO: 1330501 - RNA, 19 nt, Artificial Sequence
  Description of Artificial Sequence: Synthetic oligonucleotide
  Antisense strand to SEQ ID NO: 1330500
agaaauaugaccuuccuaa

SEQ ID NO: 1330502 - RNA, 19 nt, Artificial Sequence
  Description of Artificial Sequence: Synthetic oligonucleotide
  Sense strand starting at position 3163 of SEQ ID NO: 1242209
uuugcucuuccugaggaga

SEQ ID NO: 1330503 - RNA, 19 nt, Artificial Sequence
  Description of Artificial Sequence: Synthetic oligonucleotide
  Antisense strand to SEQ ID NO: 1330502
ucuccucaggaagagcaaa

SEQ ID NO: 1330504 - RNA, 19 nt, Artificial Sequence
  Description of Artificial Sequence: Synthetic oligonucleotide
  Sense strand starting at position 3166 of SEQ ID NO: 1242209
gcucuuccugaggagauau

SEQ ID NO: 1330505 - RNA, 19 nt, Artificial Sequence
  Description of Artificial Sequence: Synthetic oligonucleotide
  Antisense strand to SEQ ID NO: 1330504
auaucuccucaggaagagc

SEQ ID NO: 1330506 - RNA, 19 nt, Artificial Sequence
  Description of Artificial Sequence: Synthetic oligonucleotide
  Sense strand starting at position 3206 of SEQ ID NO: 1242209
gcuggaauagucugaacua

SEQ ID NO: 1330507 - RNA, 19 nt, Artificial Sequence
  Description of Artificial Sequence: Synthetic oligonucleotide
  Antisense strand to SEQ ID NO: 1330506
uaguucagacuauuccagc

SEQ ID NO: 1330508 - RNA, 19 nt, Artificial Sequence
  Description of Artificial Sequence: Synthetic oligonucleotide
  Sense strand starting at position 3422 of SEQ ID NO: 1242209
cucucaaggaucugagguu

SEQ ID NO: 1330509 - RNA, 19 nt, Artificial Sequence
  Description of Artificial Sequence: Synthetic oligonucleotide
  Antisense strand to SEQ ID NO: 1330508
aaccucagauccuugagag

SEQ ID NO: 1330510 - RNA, 19 nt, Artificial Sequence
  Description of Artificial Sequence: Synthetic oligonucleotide
  Sense strand starting at position 3506 of SEQ ID NO: 1242209
augaucauaaggugugaau

SEQ ID NO: 1330511 - RNA, 19 nt, Artificial Sequence
  Description of Artificial Sequence: Synthetic oligonucleotide
  Antisense strand to SEQ ID NO: 1330510
auucacaccuuaugaucau

SEQ ID NO: 1330512 - RNA, 19 nt, Artificial Sequence
  Description of Artificial Sequence: Synthetic oligonucleotide
  Sense strand starting at position 3508 of SEQ ID NO: 1242209
gaucauaaggugugaauga

SEQ ID NO: 1330513 - RNA, 19 nt, Artificial Sequence
  Description of Artificial Sequence: Synthetic oligonucleotide
  Antisense strand to SEQ ID NO: 1330512
ucauucacaccuuaugauc

SEQ ID NO: 1330514 - RNA, 19 nt, Artificial Sequence
  Description of Artificial Sequence: Synthetic oligonucleotide
  Sense strand starting at position 3515 of SEQ ID NO: 1242209
aggugugaaugacugguua

SEQ ID NO: 1330515 - RNA, 19 nt, Artificial Sequence
  Description of Artificial Sequence: Synthetic oligonucleotide
  Antisense strand to SEQ ID NO: 1330514
uaaccagucauucacaccu

SEQ ID NO: 1330516 - RNA, 19 nt, Artificial Sequence
  Description of Artificial Sequence: Synthetic oligonucleotide
  Sense strand starting at position 3517 of SEQ ID NO: 1242209
gugugaaugacugguuaac

SEQ ID NO: 1330517 - RNA, 19 nt, Artificial Sequence
  Description of Artificial Sequence: Synthetic oligonucleotide
  Antisense strand to SEQ ID NO: 1330516
guuaaccagucauucacac

SEQ ID NO: 1330518 - RNA, 19 nt, Artificial Sequence
  Description of Artificial Sequence: Synthetic oligonucleotide
  Sense strand starting at position 3519 of SEQ ID NO: 1242209
gugaaugacugguuaacaa

SEQ ID NO: 1330519 - RNA, 19 nt, Artificial Sequence
  Description of Artificial Sequence: Synthetic oligonucleotide
  Antisense strand to SEQ ID NO: 1330518
uuguuaaccagucauucac

SEQ ID NO: 1330520 - RNA, 19 nt, Artificial Sequence
  Description of Artificial Sequence: Synthetic oligonucleotide
  Sense strand starting at position 3708 of SEQ ID NO: 1242209
aacgcugaacuuugaagau

SEQ ID NO: 1330521 - RNA, 19 nt, Artificial Sequence
  Description of Artificial Sequence: Synthetic oligonucleotide
  Antisense strand to SEQ ID NO: 1330520
aucuucaaaguucagcguu

SEQ ID NO: 1330522 - RNA, 19 nt, Artificial Sequence
  Description of Artificial Sequence: Synthetic oligonucleotide
  Sense strand starting at position 3734 of SEQ ID NO: 1242209
uacagaucucggugggaga

SEQ ID NO: 1330523 - RNA, 19 nt, Artificial Sequence
  Description of Artificial Sequence: Synthetic oligonucleotide
  Antisense strand to SEQ ID NO: 1330522
ucucccaccgagaucugua

SEQ ID NO: 1330524 - RNA, 19 nt, Artificial Sequence
  Description of Artificial Sequence: Synthetic oligonucleotide
  Sense strand starting at position 3814 of SEQ ID NO: 1242209
caagaaucugaggguccua

SEQ ID NO: 1330525 - RNA, 19 nt, Artificial Sequence
  Description of Artificial Sequence: Synthetic oligonucleotide
  Antisense strand to SEQ ID NO: 1330524
uaggacccucagauucuug

SEQ ID NO: 1330526 - RNA, 19 nt, Artificial Sequence
  Description of Artificial Sequence: Synthetic oligonucleotide
  Sense strand starting at position 3966 of SEQ ID NO: 1242209
ugcuuugaguaaccacuua

SEQ ID NO: 1330527 - RNA, 19 nt, Artificial Sequence
  Description of Artificial Sequence: Synthetic oligonucleotide
  Antisense strand to SEQ ID NO: 1330526
uaagugguuacucaaagca

SEQ ID NO: 1330528 - RNA, 19 nt, Artificial Sequence
  Description of Artificial Sequence: Synthetic oligonucleotide
  Sense strand starting at position 2146 of SEQ ID NO: 1242210
ugggauuucugagggcuua

SEQ ID NO: 1330529 - RNA, 19 nt, Artificial Sequence
  Description of Artificial Sequence: Synthetic oligonucleotide
  Antisense strand to SEQ ID NO: 1330528
uaagcccucagaaauccca

SEQ ID NO: 1330530 - RNA, 19 nt, Artificial Sequence
  Description of Artificial Sequence: Synthetic oligonucleotide
  Sense strand starting at position 2236 of SEQ ID NO: 1242210
ucagaugucuuucuuuauu

SEQ ID NO: 1330531 - RNA, 19 nt, Artificial Sequence
  Description of Artificial Sequence: Synthetic oligonucleotide
  Antisense strand to SEQ ID NO: 1330530
aauaaagaaagacaucuga

SEQ ID NO: 1330532 - RNA, 19 nt, Artificial Sequence
  Description of Artificial Sequence: Synthetic oligonucleotide
  Sense strand starting at position 2238 of SEQ ID NO: 1242210
agaugucuuucuuuauugu

SEQ ID NO: 1330533 - RNA, 19 nt, Artificial Sequence
  Description of Artificial Sequence: Synthetic oligonucleotide
  Antisense strand to SEQ ID NO: 1330532
acaauaaagaaagacaucu

SEQ ID NO: 1330534 - RNA, 19 nt, Artificial Sequence
  Description of Artificial Sequence: Synthetic oligonucleotide
  Sense strand starting at position 2241 of SEQ ID NO: 1242210
ugucuuucuuuauugugau

SEQ ID NO: 1330535 - RNA, 19 nt, Artificial Sequence
  Description of Artificial Sequence: Synthetic oligonucleotide
  Antisense strand to SEQ ID NO: 1330534
aucacaauaaagaaagaca

SEQ ID NO: 1330536 - RNA, 19 nt, Artificial Sequence
  Description of Artificial Sequence: Synthetic oligonucleotide
  Sense strand starting at position 2248 of SEQ ID NO: 1242210
cuuuauugugauuacuaug

SEQ ID NO: 1330537 - RNA, 19 nt, Artificial Sequence
  Description of Artificial Sequence: Synthetic oligonucleotide
  Antisense strand to SEQ ID NO: 1330536
cauaguaaucacaauaaag

SEQ ID NO: 1330538 - RNA, 19 nt, Artificial Sequence
  Description of Artificial Sequence: Synthetic oligonucleotide
  Sense strand starting at position 2253 of SEQ ID NO: 1242210
uugugauuacuaugcucau

SEQ ID NO: 1330539 - RNA, 19 nt, Artificial Sequence
  Description of Artificial Sequence: Synthetic oligonucleotide
  Antisense strand to SEQ ID NO: 1330538
augagcauaguaaucacaa

SEQ ID NO: 1330540 - RNA, 19 nt, Artificial Sequence
  Description of Artificial Sequence: Synthetic oligonucleotide
  Sense strand starting at position 2254 of SEQ ID NO: 1242210
ugugauuacuaugcucauu

SEQ ID NO: 1330541 - RNA, 19 nt, Artificial Sequence
  Description of Artificial Sequence: Synthetic oligonucleotide
  Antisense strand to SEQ ID NO: 1330540
aaugagcauaguaaucaca

SEQ ID NO: 1330542 - RNA, 19 nt, Artificial Sequence
  Description of Artificial Sequence: Synthetic oligonucleotide
  Sense strand starting at position 2308 of SEQ ID NO: 1242210
uccugaugcuggccuaaua

SEQ ID NO: 1330543 - RNA, 19 nt, Artificial Sequence
  Description of Artificial Sequence: Synthetic oligonucleotide
  Antisense strand to SEQ ID NO: 1330542
uauuaggccagcaucagga

SEQ ID NO: 1330544 - RNA, 19 nt, Artificial Sequence
  Description of Artificial Sequence: Synthetic oligonucleotide
  Sense strand starting at position 2523 of SEQ ID NO: 1242210
ugcagauaaauguaguaga

SEQ ID NO: 1330545 - RNA, 19 nt, Artificial Sequence
  Description of Artificial Sequence: Synthetic oligonucleotide
  Antisense strand to SEQ ID NO: 1330544
ucuacuacauuuaucugca

SEQ ID NO: 1330546 - RNA, 19 nt, Artificial Sequence
  Description of Artificial Sequence: Synthetic oligonucleotide
  Sense strand starting at position 2560 of SEQ ID NO: 1242210
uccuacuuugcugagagua

SEQ ID NO: 1330547 - RNA, 19 nt, Artificial Sequence
  Description of Artificial Sequence: Synthetic oligonucleotide
  Antisense strand to SEQ ID NO: 1330546
uacucucagcaaaguagga

SEQ ID NO: 1330548 - RNA, 19 nt, Artificial Sequence
  Description of Artificial Sequence: Synthetic oligonucleotide
  Sense strand starting at position 2568 of SEQ ID NO: 1242210
ugcugagaguacguaucau

SEQ ID NO: 1330549 - RNA, 19 nt, Artificial Sequence
  Description of Artificial Sequence: Synthetic oligonucleotide
  Antisense strand to SEQ ID NO: 1330548
augauacguacucucagca

SEQ ID NO: 1330550 - RNA, 19 nt, Artificial Sequence
  Description of Artificial Sequence: Synthetic oligonucleotide
  Sense strand starting at position 2577 of SEQ ID NO: 1242210
uacguaucaugacugcaua

SEQ ID NO: 1330551 - RNA, 19 nt, Artificial Sequence
  Description of Artificial Sequence: Synthetic oligonucleotide
  Antisense strand to SEQ ID NO: 1330550
uaugcagucaugauacgua

SEQ ID NO: 1330552 - RNA, 19 nt, Artificial Sequence
  Description of Artificial Sequence: Synthetic oligonucleotide
  Sense strand starting at position 2598 of SEQ ID NO: 1242210
gaauucuguuauguaguuu

SEQ ID NO: 1330553 - RNA, 19 nt, Artificial Sequence
  Description of Artificial Sequence: Synthetic oligonucleotide
  Antisense strand to SEQ ID NO: 1330552
aaacuacauaacagaauuc

SEQ ID NO: 1330554 - RNA, 19 nt, Artificial Sequence
  Description of Artificial Sequence: Synthetic oligonucleotide
  Sense strand starting at position 2661 of SEQ ID NO: 1242210
augugauuauuugcagcua

SEQ ID NO: 1330555 - RNA, 19 nt, Artificial Sequence
  Description of Artificial Sequence: Synthetic oligonucleotide
  Antisense strand to SEQ ID NO: 1330554
uagcugcaaauaaucacau

SEQ ID NO: 1330556 - RNA, 19 nt, Artificial Sequence
  Description of Artificial Sequence: Synthetic oligonucleotide
  Sense strand starting at position 2724 of SEQ ID NO: 1242210
cccuucugucaugauauau

SEQ ID NO: 1330557 - RNA, 19 nt, Artificial Sequence
  Description of Artificial Sequence: Synthetic oligonucleotide
  Antisense strand to SEQ ID NO: 1330556
auauaucaugacagaaggg

SEQ ID NO: 1330558 - RNA, 19 nt, Artificial Sequence
  Description of Artificial Sequence: Synthetic oligonucleotide
  Sense strand starting at position 2770 of SEQ ID NO: 1242210
cuauaaguuucuuugagga

SEQ ID NO: 1330559 - RNA, 19 nt, Artificial Sequence
  Description of Artificial Sequence: Synthetic oligonucleotide
  Antisense strand to SEQ ID NO: 1330558
uccucaaagaaacuuauag

SEQ ID NO: 1330560 - RNA, 19 nt, Artificial Sequence
  Description of Artificial Sequence: Synthetic oligonucleotide
  Sense strand starting at position 2796 of SEQ ID NO: 1242210
uugccuaaaucuguaaagu

SEQ ID NO: 1330561 - RNA, 19 nt, Artificial Sequence
  Description of Artificial Sequence: Synthetic oligonucleotide
  Antisense strand to SEQ ID NO: 1330560
acuuuacagauuuaggcaa

SEQ ID NO: 1330562 - RNA, 19 nt, Artificial Sequence
  Description of Artificial Sequence: Synthetic oligonucleotide
  Sense strand starting at position 2797 of SEQ ID NO: 1242210
ugccuaaaucuguaaagug

SEQ ID NO: 1330563 - RNA, 19 nt, Artificial Sequence
  Description of Artificial Sequence: Synthetic oligonucleotide
  Antisense strand to SEQ ID NO: 1330562
cacuuuacagauuuaggca

SEQ ID NO: 1330564 - RNA, 19 nt, Artificial Sequence
  Description of Artificial Sequence: Synthetic oligonucleotide
  Sense strand starting at position 2815 of SEQ ID NO: 1242210
ggaaacauaucugaauauu

SEQ ID NO: 1330565 - RNA, 19 nt, Artificial Sequence
  Description of Artificial Sequence: Synthetic oligonucleotide
  Antisense strand to SEQ ID NO: 1330564
aauauucagauauguuucc

SEQ ID NO: 1330566 - RNA, 19 nt, Artificial Sequence
  Description of Artificial Sequence: Synthetic oligonucleotide
  Sense strand starting at position 2992 of SEQ ID NO: 1242210
ccagauaauuucuggugaa

SEQ ID NO: 1330567 - RNA, 19 nt, Artificial Sequence
  Description of Artificial Sequence: Synthetic oligonucleotide
  Antisense strand to SEQ ID NO: 1330566
uucaccagaaauuaucugg

SEQ ID NO: 1330568 - RNA, 19 nt, Artificial Sequence
  Description of Artificial Sequence: Synthetic oligonucleotide
  Sense strand starting at position 2993 of SEQ ID NO: 1242210
cagauaauuucuggugaaa

SEQ ID NO: 1330569 - RNA, 19 nt, Artificial Sequence
  Description of Artificial Sequence: Synthetic oligonucleotide
  Antisense strand to SEQ ID NO: 1330568
uuucaccagaaauuaucug

SEQ ID NO: 1330570 - RNA, 19 nt, Artificial Sequence
  Description of Artificial Sequence: Synthetic oligonucleotide
  Sense strand starting at position 2995 of SEQ ID NO: 1242210
gauaauuucuggugaaauu

SEQ ID NO: 1330571 - RNA, 19 nt, Artificial Sequence
  Description of Artificial Sequence: Synthetic oligonucleotide
  Antisense strand to SEQ ID NO: 1330570
aauuucaccagaaauuauc

SEQ ID NO: 1330572 - RNA, 19 nt, Artificial Sequence
  Description of Artificial Sequence: Synthetic oligonucleotide
  Sense strand starting at position 3005 of SEQ ID NO: 1242210
ggugaaauuuaucaaggaa

SEQ ID NO: 1330573 - RNA, 19 nt, Artificial Sequence
  Description of Artificial Sequence: Synthetic oligonucleotide
  Antisense strand to SEQ ID NO: 1330572
uuccuugauaaauuucacc

SEQ ID NO: 1330574 - RNA, 19 nt, Artificial Sequence
  Description of Artificial Sequence: Synthetic oligonucleotide
  Sense strand starting at position 3117 of SEQ ID NO: 1242210
gaacaaaguuaggagauaa

SEQ ID NO: 1330575 - RNA, 19 nt, Artificial Sequence
  Description of Artificial Sequence: Synthetic oligonucleotide
  Antisense strand to SEQ ID NO: 1330574
uuaucuccuaacuuuguuc

SEQ ID NO: 1330576 - RNA, 19 nt, Artificial Sequence
  Description of Artificial Sequence: Synthetic oligonucleotide
  Sense strand starting at position 3156 of SEQ ID NO: 1242210
auagucauauugguggaaa

SEQ ID NO: 1330577 - RNA, 19 nt, Artificial Sequence
  Description of Artificial Sequence: Synthetic oligonucleotide
  Antisense strand to SEQ ID NO: 1330576
uuuccaccaauaugacuau

SEQ ID NO: 1330578 - RNA, 19 nt, Artificial Sequence
  Description of Artificial Sequence: Synthetic oligonucleotide
  Sense strand starting at position 3158 of SEQ ID NO: 1242210
agucauauugguggaaaca

SEQ ID NO: 1330579 - RNA, 19 nt, Artificial Sequence
  Description of Artificial Sequence: Synthetic oligonucleotide
  Antisense strand to SEQ ID NO: 1330578
uguuuccaccaauaugacu

SEQ ID NO: 1330580 - RNA, 19 nt, Artificial Sequence
  Description of Artificial Sequence: Synthetic oligonucleotide
  Sense strand starting at position 3170 of SEQ ID NO: 1242210
ggaaacaucuauuaguaaa

SEQ ID NO: 1330581 - RNA, 19 nt, Artificial Sequence
  Description of Artificial Sequence: Synthetic oligonucleotide
  Antisense strand to SEQ ID NO: 1330580
uuuacuaauagauguuucc

SEQ ID NO: 1330582 - RNA, 19 nt, Artificial Sequence
  Description of Artificial Sequence: Synthetic oligonucleotide
  Sense strand starting at position 3201 of SEQ ID NO: 1242210
agaaauacaugugaauaug

SEQ ID NO: 1330583 - RNA, 19 nt, Artificial Sequence
  Description of Artificial Sequence: Synthetic oligonucleotide
  Antisense strand to SEQ ID NO: 1330582
cauauucacauguauuucu

SEQ ID NO: 1330584 - RNA, 19 nt, Artificial Sequence
  Description of Artificial Sequence: Synthetic oligonucleotide
  Sense strand starting at position 3213 of SEQ ID NO: 1242210
gaauauggaucuguuaaau

SEQ ID NO: 1330585 - RNA, 19 nt, Artificial Sequence
  Description of Artificial Sequence: Synthetic oligonucleotide
  Antisense strand to SEQ ID NO: 1330584
auuuaacagauccauauuc

SEQ ID NO: 1330586 - RNA, 19 nt, Artificial Sequence
  Description of Artificial Sequence: Synthetic oligonucleotide
  Sense strand starting at position 3326 of SEQ ID NO: 1242210
gcaaguccuagcuagugua

SEQ ID NO: 1330587 - RNA, 19 nt, Artificial Sequence
  Description of Artificial Sequence: Synthetic oligonucleotide
  Antisense strand to SEQ ID NO: 1330586
uacacuagcuaggacuugc

SEQ ID NO: 1330588 - RNA, 19 nt, Artificial Sequence
  Description of Artificial Sequence: Synthetic oligonucleotide
  Sense strand starting at position 3375 of SEQ ID NO: 1242210
gaaagaaauuauugaugga

SEQ ID NO: 1330589 - RNA, 19 nt, Artificial Sequence
  Description of Artificial Sequence: Synthetic oligonucleotide
  Antisense strand to SEQ ID NO: 1330588
uccaucaauaauuucuuuc

SEQ ID NO: 1330590 - RNA, 19 nt, Artificial Sequence
  Description of Artificial Sequence: Synthetic oligonucleotide
  Sense strand starting at position 3378 of SEQ ID NO: 1242210
agaaauuauugauggaaug

SEQ ID NO: 1330591 - RNA, 19 nt, Artificial Sequence
  Description of Artificial Sequence: Synthetic oligonucleotide
  Antisense strand to SEQ ID NO: 1330590
cauuccaucaauaauuucu

SEQ ID NO: 1330592 - RNA, 19 nt, Artificial Sequence
  Description of Artificial Sequence: Synthetic oligonucleotide
  Sense strand starting at position 3566 of SEQ ID NO: 1242210
uuagcuaaccuaggaauua

SEQ ID NO: 1330593 - RNA, 19 nt, Artificial Sequence
  Description of Artificial Sequence: Synthetic oligonucleotide
  Antisense strand to SEQ ID NO: 1330592
uaauuccuagguuagcuaa

SEQ ID NO: 1330594 - RNA, 19 nt, Artificial Sequence
  Description of Artificial Sequence: Synthetic oligonucleotide
  Sense strand starting at position 3669 of SEQ ID NO: 1242210
uuuauagucggucaguaga

SEQ ID NO: 1330595 - RNA, 19 nt, Artificial Sequence
  Description of Artificial Sequence: Synthetic oligonucleotide
  Antisense strand to SEQ ID NO: 1330594
ucuacugaccgacuauaaa

SEQ ID NO: 1330596 - RNA, 19 nt, Artificial Sequence
  Description of Artificial Sequence: Synthetic oligonucleotide
  Sense strand starting at position 3753 of SEQ ID NO: 1242210
auucaucgugaauguagga

SEQ ID NO: 1330597 - RNA, 19 nt, Artificial Sequence
  Description of Artificial Sequence: Synthetic oligonucleotide
  Antisense strand to SEQ ID NO: 1330596
uccuacauucacgaugaau

SEQ ID NO: 1330598 - RNA, 19 nt, Artificial Sequence
  Description of Artificial Sequence: Synthetic oligonucleotide
  Sense strand starting at position 3762 of SEQ ID NO: 1242210
gaauguaggaaauguugga

SEQ ID NO: 1330599 - RNA, 19 nt, Artificial Sequence
  Description of Artificial Sequence: Synthetic oligonucleotide
  Antisense strand to SEQ ID NO: 1330598
uccaacauuuccuacauuc

SEQ ID NO: 1330600 - RNA, 19 nt, Artificial Sequence
  Description of Artificial Sequence: Synthetic oligonucleotide
  Sense strand starting at position 3767 of SEQ ID NO: 1242210
uaggaaauguuggauuuau

SEQ ID NO: 1330601 - RNA, 19 nt, Artificial Sequence
  Description of Artificial Sequence: Synthetic oligonucleotide
  Antisense strand to SEQ ID NO: 1330600
auaaauccaacauuuccua

SEQ ID NO: 1330602 - RNA, 19 nt, Artificial Sequence
  Description of Artificial Sequence: Synthetic oligonucleotide
  Sense strand starting at position 3882 of SEQ ID NO: 1242210
ucaggauuuguuugucagc

SEQ ID NO: 1330603 - RNA, 19 nt, Artificial Sequence
  Description of Artificial Sequence: Synthetic oligonucleotide
  Antisense strand to SEQ ID NO: 1330602
gcugacaaacaaauccuga

SEQ ID NO: 1330604 - RNA, 19 nt, Artificial Sequence
  Description of Artificial Sequence: Synthetic oligonucleotide
  Sense strand starting at position 3951 of SEQ ID NO: 1242210
acgccaagcucucuacaaa

SEQ ID NO: 1330605 - RNA, 19 nt, Artificial Sequence
  Description of Artificial Sequence: Synthetic oligonucleotide
  Antisense strand to SEQ ID NO: 1330604
uuuguagagagcuuggcgu

SEQ ID NO: 1330606 - RNA, 19 nt, Artificial Sequence
  Description of Artificial Sequence: Synthetic oligonucleotide
  Sense strand starting at position 3952 of SEQ ID NO: 1242210
cgccaagcucucuacaaau

SEQ ID NO: 1330607 - RNA, 19 nt, Artificial Sequence
  Description of Artificial Sequence: Synthetic oligonucleotide
  Antisense strand to SEQ ID NO: 1330606
auuuguagagagcuuggcg

SEQ ID NO: 1330608 - RNA, 19 nt, Artificial Sequence
  Description of Artificial Sequence: Synthetic oligonucleotide
  Sense strand starting at position 256 of SEQ ID NO: 1242211
gcacuauuccaagagucuu

SEQ ID NO: 1330609 - RNA, 19 nt, Artificial Sequence
  Description of Artificial Sequence: Synthetic oligonucleotide
  Antisense strand to SEQ ID NO: 1330608
aagacucuuggaauagugc

SEQ ID NO: 1330610 - RNA, 19 nt, Artificial Sequence
  Description of Artificial Sequence: Synthetic oligonucleotide
  Sense strand starting at position 726 of SEQ ID NO: 1242211
uccagaaacccaggucuuu

SEQ ID NO: 1330611 - RNA, 19 nt, Artificial Sequence
  Description of Artificial Sequence: Synthetic oligonucleotide
  Antisense strand to SEQ ID NO: 1330610
aaagaccuggguuucugga

SEQ ID NO: 1330612 - RNA, 19 nt, Artificial Sequence
  Description of Artificial Sequence: Synthetic oligonucleotide
  Sense strand starting at position 731 of SEQ ID NO: 1242211
aaacccaggucuuuacgau

SEQ ID NO: 1330613 - RNA, 19 nt, Artificial Sequence
  Description of Artificial Sequence: Synthetic oligonucleotide
  Antisense strand to SEQ ID NO: 1330612
aucguaaagaccuggguuu

SEQ ID NO: 1330614 - RNA, 19 nt, Artificial Sequence
  Description of Artificial Sequence: Synthetic oligonucleotide
  Sense strand starting at position 732 of SEQ ID NO: 1242211
aacccaggucuuuacgauu

SEQ ID NO: 1330615 - RNA, 19 nt, Artificial Sequence
  Description of Artificial Sequence: Synthetic oligonucleotide
  Antisense strand to SEQ ID NO: 1330614
aaucguaaagaccuggguu

SEQ ID NO: 1330616 - RNA, 19 nt, Artificial Sequence
  Description of Artificial Sequence: Synthetic oligonucleotide
  Sense strand starting at position 957 of SEQ ID NO: 1242211
gcugaacacgguuaucauu

SEQ ID NO: 1330617 - RNA, 19 nt, Artificial Sequence
  Description of Artificial Sequence: Synthetic oligonucleotide
  Antisense strand to SEQ ID NO: 1330616
aaugauaaccguguucagc

SEQ ID NO: 1330618 - RNA, 19 nt, Artificial Sequence
  Description of Artificial Sequence: Synthetic oligonucleotide
  Sense strand starting at position 987 of SEQ ID NO: 1242211
ccauuugauuccugauuug

SEQ ID NO: 1330619 - RNA, 19 nt, Artificial Sequence
  Description of Artificial Sequence: Synthetic oligonucleotide
  Antisense strand to SEQ ID NO: 1330618
caaaucaggaaucaaaugg

SEQ ID NO: 1330620 - RNA, 19 nt, Artificial Sequence
  Description of Artificial Sequence: Synthetic oligonucleotide
  Sense strand starting at position 1022 of SEQ ID NO: 1242211
agagcuuggacauguaauu

SEQ ID NO: 1330621 - RNA, 19 nt, Artificial Sequence
  Description of Artificial Sequence: Synthetic oligonucleotide
  Antisense strand to SEQ ID NO: 1330620
aauuacauguccaagcucu

SEQ ID NO: 1330622 - RNA, 19 nt, Artificial Sequence
  Description of Artificial Sequence: Synthetic oligonucleotide
  Sense strand starting at position 1280 of SEQ ID NO: 1242211
cgauuaaauagguacuguu

SEQ ID NO: 1330623 - RNA, 19 nt, Artificial Sequence
  Description of Artificial Sequence: Synthetic oligonucleotide
  Antisense strand to SEQ ID NO: 1330622
aacaguaccuauuuaaucg

SEQ ID NO: 1330624 - RNA, 19 nt, Artificial Sequence
  Description of Artificial Sequence: Synthetic oligonucleotide
  Sense strand starting at position 1405 of SEQ ID NO: 1242211
uuacuaccaccagggaauu

SEQ ID NO: 1330625 - RNA, 19 nt, Artificial Sequence
  Description of Artificial Sequence: Synthetic oligonucleotide
  Antisense strand to SEQ ID NO: 1330624
aauucccuggugguaguaa

SEQ ID NO: 1330626 - RNA, 19 nt, Artificial Sequence
  Description of Artificial Sequence: Synthetic oligonucleotide
  Sense strand starting at position 1532 of SEQ ID NO: 1242211
ucaauucgccgcuauuuau

SEQ ID NO: 1330627 - RNA, 19 nt, Artificial Sequence
  Description of Artificial Sequence: Synthetic oligonucleotide
  Antisense strand to SEQ ID NO: 1330626
auaaauagcggcgaauuga

SEQ ID NO: 1330628 - RNA, 19 nt, Artificial Sequence
  Description of Artificial Sequence: Synthetic oligonucleotide
  Sense strand starting at position 1593 of SEQ ID NO: 1242211
agagguucuauugggcaga

SEQ ID NO: 1330629 - RNA, 19 nt, Artificial Sequence
  Description of Artificial Sequence: Synthetic oligonucleotide
  Antisense strand to SEQ ID NO: 1330628
ucugcccaauagaaccucu

SEQ ID NO: 1330630 - RNA, 19 nt, Artificial Sequence
  Description of Artificial Sequence: Synthetic oligonucleotide
  Sense strand starting at position 1595 of SEQ ID NO: 1242211
agguucuauugggcagauu

SEQ ID NO: 1330631 - RNA, 19 nt, Artificial Sequence
  Description of Artificial Sequence: Synthetic oligonucleotide
  Antisense strand to SEQ ID NO: 1330630
aaucugcccaauagaaccu

SEQ ID NO: 1330632 - RNA, 19 nt, Artificial Sequence
  Description of Artificial Sequence: Synthetic oligonucleotide
  Sense strand starting at position 1624 of SEQ ID NO: 1242211
uuuaauacacuaugcgaaa

SEQ ID NO: 1330633 - RNA, 19 nt, Artificial Sequence
  Description of Artificial Sequence: Synthetic oligonucleotide
  Antisense strand to SEQ ID NO: 1330632
uuucgcauaguguauuaaa

SEQ ID NO: 1330634 - RNA, 19 nt, Artificial Sequence
  Description of Artificial Sequence: Synthetic oligonucleotide
  Sense strand starting at position 1668 of SEQ ID NO: 1242211
gcgagcgucccuucuaaua

SEQ ID NO: 1330635 - RNA, 19 nt, Artificial Sequence
  Description of Artificial Sequence: Synthetic oligonucleotide
  Antisense strand to SEQ ID NO: 1330634
uauuagaagggacgcucgc

SEQ ID NO: 1330636 - RNA, 19 nt, Artificial Sequence
  Description of Artificial Sequence: Synthetic oligonucleotide
  Sense strand starting at position 1831 of SEQ ID NO: 1242211
accaucuuggcugacgaaa

SEQ ID NO: 1330637 - RNA, 19 nt, Artificial Sequence
  Description of Artificial Sequence: Synthetic oligonucleotide
  Antisense strand to SEQ ID NO: 1330636
uuucgucagccaagauggu

SEQ ID NO: 1330638 - RNA, 19 nt, Artificial Sequence
  Description of Artificial Sequence: Synthetic oligonucleotide
  Sense strand starting at position 2022 of SEQ ID NO: 1242211
cccauuggacgcgauaaga

SEQ ID NO: 1330639 - RNA, 19 nt, Artificial Sequence
  Description of Artificial Sequence: Synthetic oligonucleotide
  Antisense strand to SEQ ID NO: 1330638
ucuuaucgcguccaauggg

SEQ ID NO: 1330640 - RNA, 19 nt, Artificial Sequence
  Description of Artificial Sequence: Synthetic oligonucleotide
  Sense strand starting at position 2078 of SEQ ID NO: 1242211
gggcuacuucuauaggucu

SEQ ID NO: 1330641 - RNA, 19 nt, Artificial Sequence
  Description of Artificial Sequence: Synthetic oligonucleotide
  Antisense strand to SEQ ID NO: 1330640
agaccuauagaaguagccc

SEQ ID NO: 1330642 - RNA, 19 nt, Artificial Sequence
  Description of Artificial Sequence: Synthetic oligonucleotide
  Sense strand starting at position 2342 of SEQ ID NO: 1242211
gacgaugacugguuuaauc

SEQ ID NO: 1330643 - RNA, 19 nt, Artificial Sequence
  Description of Artificial Sequence: Synthetic oligonucleotide
  Antisense strand to SEQ ID NO: 1330642
gauuaaaccagucaucguc

SEQ ID NO: 1330644 - RNA, 19 nt, Artificial Sequence
  Description of Artificial Sequence: Synthetic oligonucleotide
  Sense strand starting at position 2344 of SEQ ID NO: 1242211
cgaugacugguuuaauccu

SEQ ID NO: 1330645 - RNA, 19 nt, Artificial Sequence
  Description of Artificial Sequence: Synthetic oligonucleotide
  Antisense strand to SEQ ID NO: 1330644
aggauuaaaccagucaucg

SEQ ID NO: 1330646 - RNA, 19 nt, Artificial Sequence
  Description of Artificial Sequence: Synthetic oligonucleotide
  Sense strand starting at position 2351 of SEQ ID NO: 1242211
ugguuuaauccucagcaau

SEQ ID NO: 1330647 - RNA, 19 nt, Artificial Sequence
  Description of Artificial Sequence: Synthetic oligonucleotide
  Antisense strand to SEQ ID NO: 1330646
auugcugaggauuaaacca

SEQ ID NO: 1330648 - RNA, 19 nt, Artificial Sequence
  Description of Artificial Sequence: Synthetic oligonucleotide
  Sense strand starting at position 2551 of SEQ ID NO: 1242211
gagagagcacguuacauga

SEQ ID NO: 1330649 - RNA, 19 nt, Artificial Sequence
  Description of Artificial Sequence: Synthetic oligonucleotide
  Antisense strand to SEQ ID NO: 1330648
ucauguaacgugcucucuc

SEQ ID NO: 1330650 - RNA, 19 nt, Artificial Sequence
  Description of Artificial Sequence: Synthetic oligonucleotide
  Sense strand starting at position 2592 of SEQ ID NO: 1242211
auuccauaggcagguuaga

SEQ ID NO: 1330651 - RNA, 19 nt, Artificial Sequence
  Description of Artificial Sequence: Synthetic oligonucleotide
  Antisense strand to SEQ ID NO: 1330650
ucuaaccugccuauggaau

SEQ ID NO: 1330652 - RNA, 19 nt, Artificial Sequence
  Description of Artificial Sequence: Synthetic oligonucleotide
  Sense strand starting at position 2646 of SEQ ID NO: 1242211
gauaauggaucagagaaau

SEQ ID NO: 1330653 - RNA, 19 nt, Artificial Sequence
  Description of Artificial Sequence: Synthetic oligonucleotide
  Antisense strand to SEQ ID NO: 1330652
auuucucugauccauuauc

SEQ ID NO: 1330654 - RNA, 19 nt, Artificial Sequence
  Description of Artificial Sequence: Synthetic oligonucleotide
  Sense strand starting at position 2722 of SEQ ID NO: 1242211
uuuguauaaggugauuagu

SEQ ID NO: 1330655 - RNA, 19 nt, Artificial Sequence
  Description of Artificial Sequence: Synthetic oligonucleotide
  Antisense strand to SEQ ID NO: 1330654
acuaaucaccuuauacaaa

SEQ ID NO: 1330656 - RNA, 19 nt, Artificial Sequence
  Description of Artificial Sequence: Synthetic oligonucleotide
  Sense strand starting at position 2733 of SEQ ID NO: 1242211
ugauuagugguauaacuuu

SEQ ID NO: 1330657 - RNA, 19 nt, Artificial Sequence
  Description of Artificial Sequence: Synthetic oligonucleotide
  Antisense strand to SEQ ID NO: 1330656
aaaguuauaccacuaauca

SEQ ID NO: 1330658 - RNA, 19 nt, Artificial Sequence
  Description of Artificial Sequence: Synthetic oligonucleotide
  Sense strand starting at position 2810 of SEQ ID NO: 1242211
acaaaugggacuugcaguu

SEQ ID NO: 1330659 - RNA, 19 nt, Artificial Sequence
  Description of Artificial Sequence: Synthetic oligonucleotide
  Antisense strand to SEQ ID NO: 1330658
aacugcaagucccauuugu

SEQ ID NO: 1330660 - RNA, 19 nt, Artificial Sequence
  Description of Artificial Sequence: Synthetic oligonucleotide
  Sense strand starting at position 2945 of SEQ ID NO: 1242211
ucuguccuuuggucauuua

SEQ ID NO: 1330661 - RNA, 19 nt, Artificial Sequence
  Description of Artificial Sequence: Synthetic oligonucleotide
  Antisense strand to SEQ ID NO: 1330660
uaaaugaccaaaggacaga

SEQ ID NO: 1330662 - RNA, 19 nt, Artificial Sequence
  Description of Artificial Sequence: Synthetic oligonucleotide
  Sense strand starting at position 2967 of SEQ ID NO: 1242211
cgugguugcauaucuaugu

SEQ ID NO: 1330663 - RNA, 19 nt, Artificial Sequence
  Description of Artificial Sequence: Synthetic oligonucleotide
  Antisense strand to SEQ ID NO: 1330662
acauagauaugcaaccacg

SEQ ID NO: 1330664 - RNA, 19 nt, Artificial Sequence
  Description of Artificial Sequence: Synthetic oligonucleotide
  Sense strand starting at position 3008 of SEQ ID NO: 1242211
gccaucacuguuugagaga

SEQ ID NO: 1330665 - RNA, 19 nt, Artificial Sequence
  Description of Artificial Sequence: Synthetic oligonucleotide
  Antisense strand to SEQ ID NO: 1330664
ucucucaaacagugauggc

SEQ ID NO: 1330666 - RNA, 19 nt, Artificial Sequence
  Description of Artificial Sequence: Synthetic oligonucleotide
  Sense strand starting at position 3064 of SEQ ID NO: 1242211
uguguaaauugaucuggaa

SEQ ID NO: 1330667 - RNA, 19 nt, Artificial Sequence
  Description of Artificial Sequence: Synthetic oligonucleotide
  Antisense strand to SEQ ID NO: 1330666
uuccagaucaauuuacaca

SEQ ID NO: 1330668 - RNA, 19 nt, Artificial Sequence
  Description of Artificial Sequence: Synthetic oligonucleotide
  Sense strand starting at position 3066 of SEQ ID NO: 1242211
uguaaauugaucuggaaug

SEQ ID NO: 1330669 - RNA, 19 nt, Artificial Sequence
  Description of Artificial Sequence: Synthetic oligonucleotide
  Antisense strand to SEQ ID NO: 1330668
cauuccagaucaauuuaca

SEQ ID NO: 1330670 - RNA, 19 nt, Artificial Sequence
  Description of Artificial Sequence: Synthetic oligonucleotide
  Sense strand starting at position 3185 of SEQ ID NO: 1242211
caggguugaacaggguaua

SEQ ID NO: 1330671 - RNA, 19 nt, Artificial Sequence
  Description of Artificial Sequence: Synthetic oligonucleotide
  Antisense strand to SEQ ID NO: 1330670
uauacccuguucaacccug

SEQ ID NO: 1330672 - RNA, 19 nt, Artificial Sequence
  Description of Artificial Sequence: Synthetic oligonucleotide
  Sense strand starting at position 3298 of SEQ ID NO: 1242211
uguuuacuucucgaaauga

SEQ ID NO: 1330673 - RNA, 19 nt, Artificial Sequence
  Description of Artificial Sequence: Synthetic oligonucleotide
  Antisense strand to SEQ ID NO: 1330672
ucauuucgagaaguaaaca

SEQ ID NO: 1330674 - RNA, 19 nt, Artificial Sequence
  Description of Artificial Sequence: Synthetic oligonucleotide
  Sense strand starting at position 3361 of SEQ ID NO: 1242211
ccaguauacccuuggauau

SEQ ID NO: 1330675 - RNA, 19 nt, Artificial Sequence
  Description of Artificial Sequence: Synthetic oligonucleotide
  Antisense strand to SEQ ID NO: 1330674
auauccaaggguauacugg

SEQ ID NO: 1330676 - RNA, 19 nt, Artificial Sequence
  Description of Artificial Sequence: Synthetic oligonucleotide
  Sense strand starting at position 3362 of SEQ ID NO: 1242211
caguauacccuuggauaug

SEQ ID NO: 1330677 - RNA, 19 nt, Artificial Sequence
  Description of Artificial Sequence: Synthetic oligonucleotide
  Antisense strand to SEQ ID NO: 1330676
cauauccaaggguauacug

SEQ ID NO: 1330678 - RNA, 19 nt, Artificial Sequence
  Description of Artificial Sequence: Synthetic oligonucleotide
  Sense strand starting at position 3469 of SEQ ID NO: 1242211
uuguaacaauuagcugauu

SEQ ID NO: 1330679 - RNA, 19 nt, Artificial Sequence
  Description of Artificial Sequence: Synthetic oligonucleotide
  Antisense strand to SEQ ID NO: 1330678
aaucagcuaauuguuacaa

SEQ ID NO: 1330680 - RNA, 19 nt, Artificial Sequence
  Description of Artificial Sequence: Synthetic oligonucleotide
  Sense strand starting at position 3651 of SEQ ID NO: 1242211
uacauauuaguguaguaca

SEQ ID NO: 1330681 - RNA, 19 nt, Artificial Sequence
  Description of Artificial Sequence: Synthetic oligonucleotide
  Antisense strand to SEQ ID NO: 1330680
uguacuacacuaauaugua

SEQ ID NO: 1330682 - RNA, 19 nt, Artificial Sequence
  Description of Artificial Sequence: Synthetic oligonucleotide
  Sense strand starting at position 3662 of SEQ ID NO: 1242211
guaguacauuuguuacacu

SEQ ID NO: 1330683 - RNA, 19 nt, Artificial Sequence
  Description of Artificial Sequence: Synthetic oligonucleotide
  Antisense strand to SEQ ID NO: 1330682
aguguaacaaauguacuac

SEQ ID NO: 1330684 - RNA, 19 nt, Artificial Sequence
  Description of Artificial Sequence: Synthetic oligonucleotide
  Sense strand starting at position 3710 of SEQ ID NO: 1242211
cguaauugacauuaggguu

SEQ ID NO: 1330685 - RNA, 19 nt, Artificial Sequence
  Description of Artificial Sequence: Synthetic oligonucleotide
  Antisense strand to SEQ ID NO: 1330684
aacccuaaugucaauuacg

SEQ ID NO: 1330686 - RNA, 19 nt, Artificial Sequence
  Description of Artificial Sequence: Synthetic oligonucleotide
  Sense strand starting at position 3741 of SEQ ID NO: 1242211
uguacaggucuaugaggau

SEQ ID NO: 1330687 - RNA, 19 nt, Artificial Sequence
  Description of Artificial Sequence: Synthetic oligonucleotide
  Antisense strand to SEQ ID NO: 1330686
auccucauagaccuguaca

SEQ ID NO: 1330688 - RNA, 19 nt, Artificial Sequence
  Description of Artificial Sequence: Synthetic oligonucleotide
  Sense strand starting at position 14 of SEQ ID NO: 1242212
agcuucucaaggugagaga

SEQ ID NO: 1330689 - RNA, 19 nt, Artificial Sequence
  Description of Artificial Sequence: Synthetic oligonucleotide
  Antisense strand to SEQ ID NO: 1330688
ucucucaccuugagaagcu

SEQ ID NO: 1330690 - RNA, 19 nt, Artificial Sequence
  Description of Artificial Sequence: Synthetic oligonucleotide
  Sense strand starting at position 370 of SEQ ID NO: 1242212
ugacaaacaucgucucaaa

SEQ ID NO: 1330691 - RNA, 19 nt, Artificial Sequence
  Description of Artificial Sequence: Synthetic oligonucleotide
  Antisense strand to SEQ ID NO: 1330690
uuugagacgauguuuguca

SEQ ID NO: 1330692 - RNA, 19 nt, Artificial Sequence
  Description of Artificial Sequence: Synthetic oligonucleotide
  Sense strand starting at position 543 of SEQ ID NO: 1242212
gcauguagacaucguauuu

SEQ ID NO: 1330693 - RNA, 19 nt, Artificial Sequence
  Description of Artificial Sequence: Synthetic oligonucleotide
  Antisense strand to SEQ ID NO: 1330692
aaauacgaugucuacaugc

SEQ ID NO: 1330694 - RNA, 19 nt, Artificial Sequence
  Description of Artificial Sequence: Synthetic oligonucleotide
  Sense strand starting at position 552 of SEQ ID NO: 1242212
caucguauuuacgguaacu

SEQ ID NO: 1330695 - RNA, 19 nt, Artificial Sequence
  Description of Artificial Sequence: Synthetic oligonucleotide
  Antisense strand to SEQ ID NO: 1330694
aguuaccguaaauacgaug

SEQ ID NO: 1330696 - RNA, 19 nt, Artificial Sequence
  Description of Artificial Sequence: Synthetic oligonucleotide
  Sense strand starting at position 561 of SEQ ID NO: 1242212
uacgguaacuagcauaaau

SEQ ID NO: 1330697 - RNA, 19 nt, Artificial Sequence
  Description of Artificial Sequence: Synthetic oligonucleotide
  Antisense strand to SEQ ID NO: 1330696
auuuaugcuaguuaccgua

SEQ ID NO: 1330698 - RNA, 19 nt, Artificial Sequence
  Description of Artificial Sequence: Synthetic oligonucleotide
  Sense strand starting at position 663 of SEQ ID NO: 1242212
cuuauuauacguuaacuga

SEQ ID NO: 1330699 - RNA, 19 nt, Artificial Sequence
  Description of Artificial Sequence: Synthetic oligonucleotide
  Antisense strand to SEQ ID NO: 1330698
ucaguuaacguauaauaag

SEQ ID NO: 1330700 - RNA, 19 nt, Artificial Sequence
  Description of Artificial Sequence: Synthetic oligonucleotide
  Sense strand starting at position 785 of SEQ ID NO: 1242212
ucaagucauuguuaaacac

SEQ ID NO: 1330701 - RNA, 19 nt, Artificial Sequence
  Description of Artificial Sequence: Synthetic oligonucleotide
  Antisense strand to SEQ ID NO: 1330700
guguuuaacaaugacuuga

SEQ ID NO: 1330702 - RNA, 19 nt, Artificial Sequence
  Description of Artificial Sequence: Synthetic oligonucleotide
  Sense strand starting at position 958 of SEQ ID NO: 1242212
cggcacugcgcccaagaau

SEQ ID NO: 1330703 - RNA, 19 nt, Artificial Sequence
  Description of Artificial Sequence: Synthetic oligonucleotide
  Antisense strand to SEQ ID NO: 1330702
auucuugggcgcagugccg

SEQ ID NO: 1330704 - RNA, 19 nt, Artificial Sequence
  Description of Artificial Sequence: Synthetic oligonucleotide
  Sense strand starting at position 981 of SEQ ID NO: 1242212
gagugaugccuccaggcaa

SEQ ID NO: 1330705 - RNA, 19 nt, Artificial Sequence
  Description of Artificial Sequence: Synthetic oligonucleotide
  Antisense strand to SEQ ID NO: 1330704
uugccuggaggcaucacuc

SEQ ID NO: 1330706 - RNA, 19 nt, Artificial Sequence
  Description of Artificial Sequence: Synthetic oligonucleotide
  Sense strand starting at position 1438 of SEQ ID NO: 1242212
cgcccucuuccucagaaca

SEQ ID NO: 1330707 - RNA, 19 nt, Artificial Sequence
  Description of Artificial Sequence: Synthetic oligonucleotide
  Antisense strand to SEQ ID NO: 1330706
uguucugaggaagagggcg

SEQ ID NO: 1330708 - RNA, 19 nt, Artificial Sequence
  Description of Artificial Sequence: Synthetic oligonucleotide
  Sense strand starting at position 1541 of SEQ ID NO: 1242212
agcgcuuucucacaaugac

SEQ ID NO: 1330709 - RNA, 19 nt, Artificial Sequence
  Description of Artificial Sequence: Synthetic oligonucleotide
  Antisense strand to SEQ ID NO: 1330708
gucauugugagaaagcgcu

SEQ ID NO: 1330710 - RNA, 19 nt, Artificial Sequence
  Description of Artificial Sequence: Synthetic oligonucleotide
  Sense strand starting at position 2131 of SEQ ID NO: 1242212
gggauuugauuucguggga

SEQ ID NO: 1330711 - RNA, 19 nt, Artificial Sequence
  Description of Artificial Sequence: Synthetic oligonucleotide
  Antisense strand to SEQ ID NO: 1330710
ucccacgaaaucaaauccc

SEQ ID NO: 1330712 - RNA, 19 nt, Artificial Sequence
  Description of Artificial Sequence: Synthetic oligonucleotide
  Sense strand starting at position 2135 of SEQ ID NO: 1242212
uuugauuucgugggagguu

SEQ ID NO: 1330713 - RNA, 19 nt, Artificial Sequence
  Description of Artificial Sequence: Synthetic oligonucleotide
  Antisense strand to SEQ ID NO: 1330712
aaccucccacgaaaucaaa

SEQ ID NO: 1330714 - RNA, 19 nt, Artificial Sequence
  Description of Artificial Sequence: Synthetic oligonucleotide
  Sense strand starting at position 2136 of SEQ ID NO: 1242212
uugauuucgugggagguua

SEQ ID NO: 1330715 - RNA, 19 nt, Artificial Sequence
  Description of Artificial Sequence: Synthetic oligonucleotide
  Antisense strand to SEQ ID NO: 1330714
uaaccucccacgaaaucaa

SEQ ID NO: 1330716 - RNA, 19 nt, Artificial Sequence
  Description of Artificial Sequence: Synthetic oligonucleotide
  Sense strand starting at position 2188 of SEQ ID NO: 1242212
gugagccaccagugauaau

SEQ ID NO: 1330717 - RNA, 19 nt, Artificial Sequence
  Description of Artificial Sequence: Synthetic oligonucleotide
  Antisense strand to SEQ ID NO: 1330716
auuaucacugguggcucac

SEQ ID NO: 1330718 - RNA, 19 nt, Artificial Sequence
  Description of Artificial Sequence: Synthetic oligonucleotide
  Sense strand starting at position 2261 of SEQ ID NO: 1242212
guugaaguagucggagaga

SEQ ID NO: 1330719 - RNA, 19 nt, Artificial Sequence
  Description of Artificial Sequence: Synthetic oligonucleotide
  Antisense strand to SEQ ID NO: 1330718
ucucuccgacuacuucaac

SEQ ID NO: 1330720 - RNA, 19 nt, Artificial Sequence
  Description of Artificial Sequence: Synthetic oligonucleotide
  Sense strand starting at position 2377 of SEQ ID NO: 1242212
ucuggaagcuucguuguuu

SEQ ID NO: 1330721 - RNA, 19 nt, Artificial Sequence
  Description of Artificial Sequence: Synthetic oligonucleotide
  Antisense strand to SEQ ID NO: 1330720
aaacaacgaagcuuccaga

SEQ ID NO: 1330722 - RNA, 19 nt, Artificial Sequence
  Description of Artificial Sequence: Synthetic oligonucleotide
  Sense strand starting at position 2378 of SEQ ID NO: 1242212
cuggaagcuucguuguuua

SEQ ID NO: 1330723 - RNA, 19 nt, Artificial Sequence
  Description of Artificial Sequence: Synthetic oligonucleotide
  Antisense strand to SEQ ID NO: 1330722
uaaacaacgaagcuuccag

SEQ ID NO: 1330724 - RNA, 19 nt, Artificial Sequence
  Description of Artificial Sequence: Synthetic oligonucleotide
  Sense strand starting at position 2381 of SEQ ID NO: 1242212
gaagcuucguuguuuagca

SEQ ID NO: 1330725 - RNA, 19 nt, Artificial Sequence
  Description of Artificial Sequence: Synthetic oligonucleotide
  Antisense strand to SEQ ID NO: 1330724
ugcuaaacaacgaagcuuc

SEQ ID NO: 1330726 - RNA, 19 nt, Artificial Sequence
  Description of Artificial Sequence: Synthetic oligonucleotide
  Sense strand starting at position 2382 of SEQ ID NO: 1242212
aagcuucguuguuuagcaa

SEQ ID NO: 1330727 - RNA, 19 nt, Artificial Sequence
  Description of Artificial Sequence: Synthetic oligonucleotide
  Antisense strand to SEQ ID NO: 1330726
uugcuaaacaacgaagcuu

SEQ ID NO: 1330728 - RNA, 19 nt, Artificial Sequence
  Description of Artificial Sequence: Synthetic oligonucleotide
  Sense strand starting at position 2411 of SEQ ID NO: 1242212
gagccuauuuggugggauu

SEQ ID NO: 1330729 - RNA, 19 nt, Artificial Sequence
  Description of Artificial Sequence: Synthetic oligonucleotide
  Antisense strand to SEQ ID NO: 1330728
aaucccaccaaauaggcuc

SEQ ID NO: 1330730 - RNA, 19 nt, Artificial Sequence
  Description of Artificial Sequence: Synthetic oligonucleotide
  Sense strand starting at position 2414 of SEQ ID NO: 1242212
ccuauuuggugggauugau

SEQ ID NO: 1330731 - RNA, 19 nt, Artificial Sequence
  Description of Artificial Sequence: Synthetic oligonucleotide
  Antisense strand to SEQ ID NO: 1330730
aucaaucccaccaaauagg

SEQ ID NO: 1330732 - RNA, 19 nt, Artificial Sequence
  Description of Artificial Sequence: Synthetic oligonucleotide
  Sense strand starting at position 2492 of SEQ ID NO: 1242212
ggaugaugacgugggaaac

SEQ ID NO: 1330733 - RNA, 19 nt, Artificial Sequence
  Description of Artificial Sequence: Synthetic oligonucleotide
  Antisense strand to SEQ ID NO: 1330732
guuucccacgucaucaucc

SEQ ID NO: 1330734 - RNA, 19 nt, Artificial Sequence
  Description of Artificial Sequence: Synthetic oligonucleotide
  Sense strand starting at position 2493 of SEQ ID NO: 1242212
gaugaugacgugggaaaca

SEQ ID NO: 1330735 - RNA, 19 nt, Artificial Sequence
  Description of Artificial Sequence: Synthetic oligonucleotide
  Antisense strand to SEQ ID NO: 1330734
uguuucccacgucaucauc

SEQ ID NO: 1330736 - RNA, 19 nt, Artificial Sequence
  Description of Artificial Sequence: Synthetic oligonucleotide
  Sense strand starting at position 2570 of SEQ ID NO: 1242212
ugaauaugucaacgucugu

SEQ ID NO: 1330737 - RNA, 19 nt, Artificial Sequence
  Description of Artificial Sequence: Synthetic oligonucleotide
  Antisense strand to SEQ ID NO: 1330736
acagacguugacauauuca

SEQ ID NO: 1330738 - RNA, 19 nt, Artificial Sequence
  Description of Artificial Sequence: Synthetic oligonucleotide
  Sense strand starting at position 2959 of SEQ ID NO: 1242212
ggauuuaugucguucccug

SEQ ID NO: 1330739 - RNA, 19 nt, Artificial Sequence
  Description of Artificial Sequence: Synthetic oligonucleotide
  Antisense strand to SEQ ID NO: 1330738
cagggaacgacauaaaucc

SEQ ID NO: 1330740 - RNA, 19 nt, Artificial Sequence
  Description of Artificial Sequence: Synthetic oligonucleotide
  Sense strand starting at position 3016 of SEQ ID NO: 1242212
ccauuuccgucaguuuauu

SEQ ID NO: 1330741 - RNA, 19 nt, Artificial Sequence
  Description of Artificial Sequence: Synthetic oligonucleotide
  Antisense strand to SEQ ID NO: 1330740
aauaaacugacggaaaugg

SEQ ID NO: 1330742 - RNA, 19 nt, Artificial Sequence
  Description of Artificial Sequence: Synthetic oligonucleotide
  Sense strand starting at position 3024 of SEQ ID NO: 1242212
gucaguuuauugugagaau

SEQ ID NO: 1330743 - RNA, 19 nt, Artificial Sequence
  Description of Artificial Sequence: Synthetic oligonucleotide
  Antisense strand to SEQ ID NO: 1330742
auucucacaauaaacugac

SEQ ID NO: 1330744 - RNA, 19 nt, Artificial Sequence
  Description of Artificial Sequence: Synthetic oligonucleotide
  Sense strand starting at position 3025 of SEQ ID NO: 1242212
ucaguuuauugugagaauu

SEQ ID NO: 1330745 - RNA, 19 nt, Artificial Sequence
  Description of Artificial Sequence: Synthetic oligonucleotide
  Antisense strand to SEQ ID NO: 1330744
aauucucacaauaaacuga

SEQ ID NO: 1330746 - RNA, 19 nt, Artificial Sequence
  Description of Artificial Sequence: Synthetic oligonucleotide
  Sense strand starting at position 3027 of SEQ ID NO: 1242212
aguuuauugugagaauuac

SEQ ID NO: 1330747 - RNA, 19 nt, Artificial Sequence
  Description of Artificial Sequence: Synthetic oligonucleotide
  Antisense strand to SEQ ID NO: 1330746
guaauucucacaauaaacu

SEQ ID NO: 1330748 - RNA, 19 nt, Artificial Sequence
  Description of Artificial Sequence: Synthetic oligonucleotide
  Sense strand starting at position 3033 of SEQ ID NO: 1242212
uugugagaauuacauauac

SEQ ID NO: 1330749 - RNA, 19 nt, Artificial Sequence
  Description of Artificial Sequence: Synthetic oligonucleotide
  Antisense strand to SEQ ID NO: 1330748
guauauguaauucucacaa

SEQ ID NO: 1330750 - RNA, 19 nt, Artificial Sequence
  Description of Artificial Sequence: Synthetic oligonucleotide
  Sense strand starting at position 3074 of SEQ ID NO: 1242212
augaauaagugcucaauga

SEQ ID NO: 1330751 - RNA, 19 nt, Artificial Sequence
  Description of Artificial Sequence: Synthetic oligonucleotide
  Antisense strand to SEQ ID NO: 1330750
ucauugagcacuuauucau

SEQ ID NO: 1330752 - RNA, 19 nt, Artificial Sequence
  Description of Artificial Sequence: Synthetic oligonucleotide
  Sense strand starting at position 3078 of SEQ ID NO: 1242212
auaagugcucaaugaacuu

SEQ ID NO: 1330753 - RNA, 19 nt, Artificial Sequence
  Description of Artificial Sequence: Synthetic oligonucleotide
  Antisense strand to SEQ ID NO: 1330752
aaguucauugagcacuuau

SEQ ID NO: 1330754 - RNA, 19 nt, Artificial Sequence
  Description of Artificial Sequence: Synthetic oligonucleotide
  Sense strand starting at position 3099 of SEQ ID NO: 1242212
gacgauaaaucucaaaguc

SEQ ID NO: 1330755 - RNA, 19 nt, Artificial Sequence
  Description of Artificial Sequence: Synthetic oligonucleotide
  Antisense strand to SEQ ID NO: 1330754
gacuuugagauuuaucguc

SEQ ID NO: 1330756 - RNA, 19 nt, Artificial Sequence
  Description of Artificial Sequence: Synthetic oligonucleotide
  Sense strand starting at position 3113 of SEQ ID NO: 1242212
aaguccuuagccugguauu

SEQ ID NO: 1330757 - RNA, 19 nt, Artificial Sequence
  Description of Artificial Sequence: Synthetic oligonucleotide
  Antisense strand to SEQ ID NO: 1330756
aauaccaggcuaaggacuu

SEQ ID NO: 1330758 - RNA, 19 nt, Artificial Sequence
  Description of Artificial Sequence: Synthetic oligonucleotide
  Sense strand starting at position 3114 of SEQ ID NO: 1242212
aguccuuagccugguauuu

SEQ ID NO: 1330759 - RNA, 19 nt, Artificial Sequence
  Description of Artificial Sequence: Synthetic oligonucleotide
  Antisense strand to SEQ ID NO: 1330758
aaauaccaggcuaaggacu

SEQ ID NO: 1330760 - RNA, 19 nt, Artificial Sequence
  Description of Artificial Sequence: Synthetic oligonucleotide
  Sense strand starting at position 3257 of SEQ ID NO: 1242212
ucuuauuaaccaggcugua

SEQ ID NO: 1330761 - RNA, 19 nt, Artificial Sequence
  Description of Artificial Sequence: Synthetic oligonucleotide
  Antisense strand to SEQ ID NO: 1330760
uacagccugguuaauaaga

SEQ ID NO: 1330762 - RNA, 19 nt, Artificial Sequence
  Description of Artificial Sequence: Synthetic oligonucleotide
  Sense strand starting at position 3692 of SEQ ID NO: 1242212
ccaucuugucacgacuacu

SEQ ID NO: 1330763 - RNA, 19 nt, Artificial Sequence
  Description of Artificial Sequence: Synthetic oligonucleotide
  Antisense strand to SEQ ID NO: 1330762
aguagucgugacaagaugg

SEQ ID NO: 1330764 - RNA, 19 nt, Artificial Sequence
  Description of Artificial Sequence: Synthetic oligonucleotide
  Sense strand starting at position 3898 of SEQ ID NO: 1242212
cuuggacaccauugcuaaa

SEQ ID NO: 1330765 - RNA, 19 nt, Artificial Sequence
  Description of Artificial Sequence: Synthetic oligonucleotide
  Antisense strand to SEQ ID NO: 1330764
uuuagcaaugguguccaag

SEQ ID NO: 1330766 - RNA, 19 nt, Artificial Sequence
  Description of Artificial Sequence: Synthetic oligonucleotide
  Sense strand starting at position 3900 of SEQ ID NO: 1242212
uggacaccauugcuaaauu

SEQ ID NO: 1330767 - RNA, 19 nt, Artificial Sequence
  Description of Artificial Sequence: Synthetic oligonucleotide
  Antisense strand to SEQ ID NO: 1330766
aauuuagcaauggugucca

SEQ ID NO: 1330768 - RNA, 19 nt, Artificial Sequence
  Description of Artificial Sequence: Synthetic oligonucleotide
  Sense strand starting at position 85 of SEQ ID NO: 1242213
auacuaaacuugggagaua

SEQ ID NO: 1330769 - RNA, 19 nt, Artificial Sequence
  Description of Artificial Sequence: Synthetic oligonucleotide
  Antisense strand to SEQ ID NO: 1330768
uaucucccaaguuuaguau

SEQ ID NO: 1330770 - RNA, 19 nt, Artificial Sequence
  Description of Artificial Sequence: Synthetic oligonucleotide
  Sense strand starting at position 145 of SEQ ID NO: 1242213
augcacugacucuagauua

SEQ ID NO: 1330771 - RNA, 19 nt, Artificial Sequence
  Description of Artificial Sequence: Synthetic oligonucleotide
  Antisense strand to SEQ ID NO: 1330770
uaaucuagagucagugcau

SEQ ID NO: 1330772 - RNA, 19 nt, Artificial Sequence
  Description of Artificial Sequence: Synthetic oligonucleotide
  Sense strand starting at position 222 of SEQ ID NO: 1242213
agcuucucaaggugagaga

SEQ ID NO: 1330773 - RNA, 19 nt, Artificial Sequence
  Description of Artificial Sequence: Synthetic oligonucleotide
  Antisense strand to SEQ ID NO: 1330772
ucucucaccuugagaagcu

SEQ ID NO: 1330774 - RNA, 19 nt, Artificial Sequence
  Description of Artificial Sequence: Synthetic oligonucleotide
  Sense strand starting at position 578 of SEQ ID NO: 1242213
ugacaaacaucgucucaaa

SEQ ID NO: 1330775 - RNA, 19 nt, Artificial Sequence
  Description of Artificial Sequence: Synthetic oligonucleotide
  Antisense strand to SEQ ID NO: 1330774
uuugagacgauguuuguca

SEQ ID NO: 1330776 - RNA, 19 nt, Artificial Sequence
  Description of Artificial Sequence: Synthetic oligonucleotide
  Sense strand starting at position 751 of SEQ ID NO: 1242213
gcauguagacaucguauuu

SEQ ID NO: 1330777 - RNA, 19 nt, Artificial Sequence
  Description of Artificial Sequence: Synthetic oligonucleotide
  Antisense strand to SEQ ID NO: 1330776
aaauacgaugucuacaugc

SEQ ID NO: 1330778 - RNA, 19 nt, Artificial Sequence
  Description of Artificial Sequence: Synthetic oligonucleotide
  Sense strand starting at position 760 of SEQ ID NO: 1242213
caucguauuuacgguaacu

SEQ ID NO: 1330779 - RNA, 19 nt, Artificial Sequence
  Description of Artificial Sequence: Synthetic oligonucleotide
  Antisense strand to SEQ ID NO: 1330778
aguuaccguaaauacgaug

SEQ ID NO: 1330780 - RNA, 19 nt, Artificial Sequence
  Description of Artificial Sequence: Synthetic oligonucleotide
  Sense strand starting at position 769 of SEQ ID NO: 1242213
uacgguaacuagcauaaau

SEQ ID NO: 1330781 - RNA, 19 nt, Artificial Sequence
  Description of Artificial Sequence: Synthetic oligonucleotide
  Antisense strand to SEQ ID NO: 1330780
auuuaugcuaguuaccgua

SEQ ID NO: 1330782 - RNA, 19 nt, Artificial Sequence
  Description of Artificial Sequence: Synthetic oligonucleotide
  Sense strand starting at position 871 of SEQ ID NO: 1242213
cuuauuauacguuaacuga

SEQ ID NO: 1330783 - RNA, 19 nt, Artificial Sequence
  Description of Artificial Sequence: Synthetic oligonucleotide
  Antisense strand to SEQ ID NO: 1330782
ucaguuaacguauaauaag

SEQ ID NO: 1330784 - RNA, 19 nt, Artificial Sequence
  Description of Artificial Sequence: Synthetic oligonucleotide
  Sense strand starting at position 993 of SEQ ID NO: 1242213
ucaagucauuguuaaacac

SEQ ID NO: 1330785 - RNA, 19 nt, Artificial Sequence
  Description of Artificial Sequence: Synthetic oligonucleotide
  Antisense strand to SEQ ID NO: 1330784
guguuuaacaaugacuuga

SEQ ID NO: 1330786 - RNA, 19 nt, Artificial Sequence
  Description of Artificial Sequence: Synthetic oligonucleotide
  Sense strand starting at position 1166 of SEQ ID NO: 1242213
cggcacugcgcccaagaau

SEQ ID NO: 1330787 - RNA, 19 nt, Artificial Sequence
  Description of Artificial Sequence: Synthetic oligonucleotide
  Antisense strand to SEQ ID NO: 1330786
auucuugggcgcagugccg

SEQ ID NO: 1330788 - RNA, 19 nt, Artificial Sequence
  Description of Artificial Sequence: Synthetic oligonucleotide
  Sense strand starting at position 1189 of SEQ ID NO: 1242213
gagugaugccuccaggcaa

SEQ ID NO: 1330789 - RNA, 19 nt, Artificial Sequence
  Description of Artificial Sequence: Synthetic oligonucleotide
  Antisense strand to SEQ ID NO: 1330788
uugccuggaggcaucacuc

SEQ ID NO: 1330790 - RNA, 19 nt, Artificial Sequence
  Description of Artificial Sequence: Synthetic oligonucleotide
  Sense strand starting at position 1646 of SEQ ID NO: 1242213
cgcccucuuccucagaaca

SEQ ID NO: 1330791 - RNA, 19 nt, Artificial Sequence
  Description of Artificial Sequence: Synthetic oligonucleotide
  Antisense strand to SEQ ID NO: 1330790
uguucugaggaagagggcg

SEQ ID NO: 1330792 - RNA, 19 nt, Artificial Sequence
  Description of Artificial Sequence: Synthetic oligonucleotide
  Sense strand starting at position 1749 of SEQ ID NO: 1242213
agcgcuuucucacaaugac

SEQ ID NO: 1330793 - RNA, 19 nt, Artificial Sequence
  Description of Artificial Sequence: Synthetic oligonucleotide
  Antisense strand to SEQ ID NO: 1330792
gucauugugagaaagcgcu

SEQ ID NO: 1330794 - RNA, 19 nt, Artificial Sequence
  Description of Artificial Sequence: Synthetic oligonucleotide
  Sense strand starting at position 2339 of SEQ ID NO: 1242213
gggauuugauuucguggga

SEQ ID NO: 1330795 - RNA, 19 nt, Artificial Sequence
  Description of Artificial Sequence: Synthetic oligonucleotide
  Antisense strand to SEQ ID NO: 1330794
ucccacgaaaucaaauccc

SEQ ID NO: 1330796 - RNA, 19 nt, Artificial Sequence
  Description of Artificial Sequence: Synthetic oligonucleotide
  Sense strand starting at position 2343 of SEQ ID NO: 1242213
uuugauuucgugggagguu

SEQ ID NO: 1330797 - RNA, 19 nt, Artificial Sequence
  Description of Artificial Sequence: Synthetic oligonucleotide
  Antisense strand to SEQ ID NO: 1330796
aaccucccacgaaaucaaa

SEQ ID NO: 1330798 - RNA, 19 nt, Artificial Sequence
  Description of Artificial Sequence: Synthetic oligonucleotide
  Sense strand starting at position 2344 of SEQ ID NO: 1242213
uugauuucgugggagguua

SEQ ID NO: 1330799 - RNA, 19 nt, Artificial Sequence
  Description of Artificial Sequence: Synthetic oligonucleotide
  Antisense strand to SEQ ID NO: 1330798
uaaccucccacgaaaucaa

SEQ ID NO: 1330800 - RNA, 19 nt, Artificial Sequence
  Description of Artificial Sequence: Synthetic oligonucleotide
  Sense strand starting at position 2396 of SEQ ID NO: 1242213
gugagccaccagugauaau

SEQ ID NO: 1330801 - RNA, 19 nt, Artificial Sequence
  Description of Artificial Sequence: Synthetic oligonucleotide
  Antisense strand to SEQ ID NO: 1330800
auuaucacugguggcucac

SEQ ID NO: 1330802 - RNA, 19 nt, Artificial Sequence
  Description of Artificial Sequence: Synthetic oligonucleotide
  Sense strand starting at position 2469 of SEQ ID NO: 1242213
guugaaguagucggagaga

SEQ ID NO: 1330803 - RNA, 19 nt, Artificial Sequence
  Description of Artificial Sequence: Synthetic oligonucleotide
  Antisense strand to SEQ ID NO: 1330802
ucucuccgacuacuucaac

SEQ ID NO: 1330804 - RNA, 19 nt, Artificial Sequence
  Description of Artificial Sequence: Synthetic oligonucleotide
  Sense strand starting at position 2585 of SEQ ID NO: 1242213
ucuggaagcuucguuguuu

SEQ ID NO: 1330805 - RNA, 19 nt, Artificial Sequence
  Description of Artificial Sequence: Synthetic oligonucleotide
  Antisense strand to SEQ ID NO: 1330804
aaacaacgaagcuuccaga

SEQ ID NO: 1330806 - RNA, 19 nt, Artificial Sequence
  Description of Artificial Sequence: Synthetic oligonucleotide
  Sense strand starting at position 2586 of SEQ ID NO: 1242213
cuggaagcuucguuguuua

SEQ ID NO: 1330807 - RNA, 19 nt, Artificial Sequence
  Description of Artificial Sequence: Synthetic oligonucleotide
  Antisense strand to SEQ ID NO: 1330806
uaaacaacgaagcuuccag

SEQ ID NO: 1330808 - RNA, 19 nt, Artificial Sequence
  Description of Artificial Sequence: Synthetic oligonucleotide
  Sense strand starting at position 2589 of SEQ ID NO: 1242213
gaagcuucguuguuuagca

SEQ ID NO: 1330809 - RNA, 19 nt, Artificial Sequence
  Description of Artificial Sequence: Synthetic oligonucleotide
  Antisense strand to SEQ ID NO: 1330808
ugcuaaacaacgaagcuuc

SEQ ID NO: 1330810 - RNA, 19 nt, Artificial Sequence
  Description of Artificial Sequence: Synthetic oligonucleotide
  Sense strand starting at position 2590 of SEQ ID NO: 1242213
aagcuucguuguuuagcaa

SEQ ID NO: 1330811 - RNA, 19 nt, Artificial Sequence
  Description of Artificial Sequence: Synthetic oligonucleotide
  Antisense strand to SEQ ID NO: 1330810
uugcuaaacaacgaagcuu

SEQ ID NO: 1330812 - RNA, 19 nt, Artificial Sequence
  Description of Artificial Sequence: Synthetic oligonucleotide
  Sense strand starting at position 2619 of SEQ ID NO: 1242213
gagccuauuuggugggauu

SEQ ID NO: 1330813 - RNA, 19 nt, Artificial Sequence
  Description of Artificial Sequence: Synthetic oligonucleotide
  Antisense strand to SEQ ID NO: 1330812
aaucccaccaaauaggcuc

SEQ ID NO: 1330814 - RNA, 19 nt, Artificial Sequence
  Description of Artificial Sequence: Synthetic oligonucleotide
  Sense strand starting at position 2622 of SEQ ID NO: 1242213
ccuauuuggugggauugau

SEQ ID NO: 1330815 - RNA, 19 nt, Artificial Sequence
  Description of Artificial Sequence: Synthetic oligonucleotide
  Antisense strand to SEQ ID NO: 1330814
aucaaucccaccaaauagg

SEQ ID NO: 1330816 - RNA, 19 nt, Artificial Sequence
  Description of Artificial Sequence: Synthetic oligonucleotide
  Sense strand starting at position 2700 of SEQ ID NO: 1242213
ggaugaugacgugggaaac

SEQ ID NO: 1330817 - RNA, 19 nt, Artificial Sequence
  Description of Artificial Sequence: Synthetic oligonucleotide
  Antisense strand to SEQ ID NO: 1330816
guuucccacgucaucaucc

SEQ ID NO: 1330818 - RNA, 19 nt, Artificial Sequence
  Description of Artificial Sequence: Synthetic oligonucleotide
  Sense strand starting at position 2701 of SEQ ID NO: 1242213
gaugaugacgugggaaaca

SEQ ID NO: 1330819 - RNA, 19 nt, Artificial Sequence
  Description of Artificial Sequence: Synthetic oligonucleotide
  Antisense strand to SEQ ID NO: 1330818
uguuucccacgucaucauc

SEQ ID NO: 1330820 - RNA, 19 nt, Artificial Sequence
  Description of Artificial Sequence: Synthetic oligonucleotide
  Sense strand starting at position 2778 of SEQ ID NO: 1242213
ugaauaugucaacgucugu

SEQ ID NO: 1330821 - RNA, 19 nt, Artificial Sequence
  Description of Artificial Sequence: Synthetic oligonucleotide
  Antisense strand to SEQ ID NO: 1330820
acagacguugacauauuca

SEQ ID NO: 1330822 - RNA, 19 nt, Artificial Sequence
  Description of Artificial Sequence: Synthetic oligonucleotide
  Sense strand starting at position 3167 of SEQ ID NO: 1242213
ggauuuaugucguucccug

SEQ ID NO: 1330823 - RNA, 19 nt, Artificial Sequence
  Description of Artificial Sequence: Synthetic oligonucleotide
  Antisense strand to SEQ ID NO: 1330822
cagggaacgacauaaaucc

SEQ ID NO: 1330824 - RNA, 19 nt, Artificial Sequence
  Description of Artificial Sequence: Synthetic oligonucleotide
  Sense strand starting at position 3224 of SEQ ID NO: 1242213
ccauuuccgucaguuuauu

SEQ ID NO: 1330825 - RNA, 19 nt, Artificial Sequence
  Description of Artificial Sequence: Synthetic oligonucleotide
  Antisense strand to SEQ ID NO: 1330824
aauaaacugacggaaaugg

SEQ ID NO: 1330826 - RNA, 19 nt, Artificial Sequence
  Description of Artificial Sequence: Synthetic oligonucleotide
  Sense strand starting at position 3232 of SEQ ID NO: 1242213
gucaguuuauugugagaau

SEQ ID NO: 1330827 - RNA, 19 nt, Artificial Sequence
  Description of Artificial Sequence: Synthetic oligonucleotide
  Antisense strand to SEQ ID NO: 1330826
auucucacaauaaacugac

SEQ ID NO: 1330828 - RNA, 19 nt, Artificial Sequence
  Description of Artificial Sequence: Synthetic oligonucleotide
  Sense strand starting at position 3233 of SEQ ID NO: 1242213
ucaguuuauugugagaauu

SEQ ID NO: 1330829 - RNA, 19 nt, Artificial Sequence
  Description of Artificial Sequence: Synthetic oligonucleotide
  Antisense strand to SEQ ID NO: 1330828
aauucucacaauaaacuga

SEQ ID NO: 1330830 - RNA, 19 nt, Artificial Sequence
  Description of Artificial Sequence: Synthetic oligonucleotide
  Sense strand starting at position 3235 of SEQ ID NO: 1242213
aguuuauugugagaauuac

SEQ ID NO: 1330831 - RNA, 19 nt, Artificial Sequence
  Description of Artificial Sequence: Synthetic oligonucleotide
  Antisense strand to SEQ ID NO: 1330830
guaauucucacaauaaacu

SEQ ID NO: 1330832 - RNA, 19 nt, Artificial Sequence
  Description of Artificial Sequence: Synthetic oligonucleotide
  Sense strand starting at position 3241 of SEQ ID NO: 1242213
uugugagaauuacauauac

SEQ ID NO: 1330833 - RNA, 19 nt, Artificial Sequence
  Description of Artificial Sequence: Synthetic oligonucleotide
  Antisense strand to SEQ ID NO: 1330832
guauauguaauucucacaa

SEQ ID NO: 1330834 - RNA, 19 nt, Artificial Sequence
  Description of Artificial Sequence: Synthetic oligonucleotide
  Sense strand starting at position 3282 of SEQ ID NO: 1242213
augaauaagugcucaauga

SEQ ID NO: 1330835 - RNA, 19 nt, Artificial Sequence
  Description of Artificial Sequence: Synthetic oligonucleotide
  Antisense strand to SEQ ID NO: 1330834
ucauugagcacuuauucau

SEQ ID NO: 1330836 - RNA, 19 nt, Artificial Sequence
  Description of Artificial Sequence: Synthetic oligonucleotide
  Sense strand starting at position 3286 of SEQ ID NO: 1242213
auaagugcucaaugaacuu

SEQ ID NO: 1330837 - RNA, 19 nt, Artificial Sequence
  Description of Artificial Sequence: Synthetic oligonucleotide
  Antisense strand to SEQ ID NO: 1330836
aaguucauugagcacuuau

SEQ ID NO: 1330838 - RNA, 19 nt, Artificial Sequence
  Description of Artificial Sequence: Synthetic oligonucleotide
  Sense strand starting at position 3307 of SEQ ID NO: 1242213
gacgauaaaucucaaaguc

SEQ ID NO: 1330839 - RNA, 19 nt, Artificial Sequence
  Description of Artificial Sequence: Synthetic oligonucleotide
  Antisense strand to SEQ ID NO: 1330838
gacuuugagauuuaucguc

SEQ ID NO: 1330840 - RNA, 19 nt, Artificial Sequence
  Description of Artificial Sequence: Synthetic oligonucleotide
  Sense strand starting at position 3321 of SEQ ID NO: 1242213
aaguccuuagccugguauu

SEQ ID NO: 1330841 - RNA, 19 nt, Artificial Sequence
  Description of Artificial Sequence: Synthetic oligonucleotide
  Antisense strand to SEQ ID NO: 1330840
aauaccaggcuaaggacuu

SEQ ID NO: 1330842 - RNA, 19 nt, Artificial Sequence
  Description of Artificial Sequence: Synthetic oligonucleotide
  Sense strand starting at position 3322 of SEQ ID NO: 1242213
aguccuuagccugguauuu

SEQ ID NO: 1330843 - RNA, 19 nt, Artificial Sequence
  Description of Artificial Sequence: Synthetic oligonucleotide
  Antisense strand to SEQ ID NO: 1330842
aaauaccaggcuaaggacu

SEQ ID NO: 1330844 - RNA, 19 nt, Artificial Sequence
  Description of Artificial Sequence: Synthetic oligonucleotide
  Sense strand starting at position 3465 of SEQ ID NO: 1242213
ucuuauuaaccaggcugua

SEQ ID NO: 1330845 - RNA, 19 nt, Artificial Sequence
  Description of Artificial Sequence: Synthetic oligonucleotide
  Antisense strand to SEQ ID NO: 1330844
uacagccugguuaauaaga

SEQ ID NO: 1330846 - RNA, 19 nt, Artificial Sequence
  Description of Artificial Sequence: Synthetic oligonucleotide
  Sense strand starting at position 3900 of SEQ ID NO: 1242213
ccaucuugucacgacuacu

SEQ ID NO: 1330847 - RNA, 19 nt, Artificial Sequence
  Description of Artificial Sequence: Synthetic oligonucleotide
  Antisense strand to SEQ ID NO: 1330846
aguagucgugacaagaugg

SEQ ID NO: 1330848 - RNA, 19 nt, Artificial Sequence
  Description of Artificial Sequence: Synthetic oligonucleotide
  Sense strand starting at position 110 of SEQ ID NO: 1242214
guugaacucuuccugaaag

SEQ ID NO: 1330849 - RNA, 19 nt, Artificial Sequence
  Description of Artificial Sequence: Synthetic oligonucleotide
  Antisense strand to SEQ ID NO: 1330848
cuuucaggaagaguucaac

SEQ ID NO: 1330850 - RNA, 19 nt, Artificial Sequence
  Description of Artificial Sequence: Synthetic oligonucleotide
  Sense strand starting at position 112 of SEQ ID NO: 1242214
ugaacucuuccugaaagca

SEQ ID NO: 1330851 - RNA, 19 nt, Artificial Sequence
  Description of Artificial Sequence: Synthetic oligonucleotide
  Antisense strand to SEQ ID NO: 1330850
ugcuuucaggaagaguuca

SEQ ID NO: 1330852 - RNA, 19 nt, Artificial Sequence
  Description of Artificial Sequence: Synthetic oligonucleotide
  Sense strand starting at position 121 of SEQ ID NO: 1242214
ccugaaagcagaugaguaa

SEQ ID NO: 1330853 - RNA, 19 nt, Artificial Sequence
  Description of Artificial Sequence: Synthetic oligonucleotide
  Antisense strand to SEQ ID NO: 1330852
uuacucaucugcuuucagg

SEQ ID NO: 1330854 - RNA, 19 nt, Artificial Sequence
  Description of Artificial Sequence: Synthetic oligonucleotide
  Sense strand starting at position 130 of SEQ ID NO: 1242214
agaugaguaaauggcagau

SEQ ID NO: 1330855 - RNA, 19 nt, Artificial Sequence
  Description of Artificial Sequence: Synthetic oligonucleotide
  Antisense strand to SEQ ID NO: 1330854
aucugccauuuacucaucu

SEQ ID NO: 1330856 - RNA, 19 nt, Artificial Sequence
  Description of Artificial Sequence: Synthetic oligonucleotide
  Sense strand starting at position 276 of SEQ ID NO: 1242214
ucuggcuuugcagagcuaa

SEQ ID NO: 1330857 - RNA, 19 nt, Artificial Sequence
  Description of Artificial Sequence: Synthetic oligonucleotide
  Antisense strand to SEQ ID NO: 1330856
uuagcucugcaaagccaga

SEQ ID NO: 1330858 - RNA, 19 nt, Artificial Sequence
  Description of Artificial Sequence: Synthetic oligonucleotide
  Sense strand starting at position 370 of SEQ ID NO: 1242214
acgggagggccuuagcaua

SEQ ID NO: 1330859 - RNA, 19 nt, Artificial Sequence
  Description of Artificial Sequence: Synthetic oligonucleotide
  Antisense strand to SEQ ID NO: 1330858
uaugcuaaggcccucccgu

SEQ ID NO: 1330860 - RNA, 19 nt, Artificial Sequence
  Description of Artificial Sequence: Synthetic oligonucleotide
  Sense strand starting at position 772 of SEQ ID NO: 1242214
ucaugccaucauggacaua

SEQ ID NO: 1330861 - RNA, 19 nt, Artificial Sequence
  Description of Artificial Sequence: Synthetic oligonucleotide
  Antisense strand to SEQ ID NO: 1330860
uauguccaugauggcauga

SEQ ID NO: 1330862 - RNA, 19 nt, Artificial Sequence
  Description of Artificial Sequence: Synthetic oligonucleotide
  Sense strand starting at position 872 of SEQ ID NO: 1242214
uuagauguaucuucuuugu

SEQ ID NO: 1330863 - RNA, 19 nt, Artificial Sequence
  Description of Artificial Sequence: Synthetic oligonucleotide
  Antisense strand to SEQ ID NO: 1330862
acaaagaagauacaucuaa

SEQ ID NO: 1330864 - RNA, 19 nt, Artificial Sequence
  Description of Artificial Sequence: Synthetic oligonucleotide
  Sense strand starting at position 874 of SEQ ID NO: 1242214
agauguaucuucuuugucu

SEQ ID NO: 1330865 - RNA, 19 nt, Artificial Sequence
  Description of Artificial Sequence: Synthetic oligonucleotide
  Antisense strand to SEQ ID NO: 1330864
agacaaagaagauacaucu

SEQ ID NO: 1330866 - RNA, 19 nt, Artificial Sequence
  Description of Artificial Sequence: Synthetic oligonucleotide
  Sense strand starting at position 881 of SEQ ID NO: 1242214
ucuucuuugucuguccaaa

SEQ ID NO: 1330867 - RNA, 19 nt, Artificial Sequence
  Description of Artificial Sequence: Synthetic oligonucleotide
  Antisense strand to SEQ ID NO: 1330866
uuuggacagacaaagaaga

SEQ ID NO: 1330868 - RNA, 19 nt, Artificial Sequence
  Description of Artificial Sequence: Synthetic oligonucleotide
  Sense strand starting at position 908 of SEQ ID NO: 1242214
ugacaucugcacugucaag

SEQ ID NO: 1330869 - RNA, 19 nt, Artificial Sequence
  Description of Artificial Sequence: Synthetic oligonucleotide
  Antisense strand to SEQ ID NO: 1330868
cuugacagugcagauguca

SEQ ID NO: 1330870 - RNA, 19 nt, Artificial Sequence
  Description of Artificial Sequence: Synthetic oligonucleotide
  Sense strand starting at position 1105 of SEQ ID NO: 1242214
gucaaagagggcugaauua

SEQ ID NO: 1330871 - RNA, 19 nt, Artificial Sequence
  Description of Artificial Sequence: Synthetic oligonucleotide
  Antisense strand to SEQ ID NO: 1330870
uaauucagcccucuuugac

SEQ ID NO: 1330872 - RNA, 19 nt, Artificial Sequence
  Description of Artificial Sequence: Synthetic oligonucleotide
  Sense strand starting at position 1220 of SEQ ID NO: 1242214
aguccauuagccugaagag

SEQ ID NO: 1330873 - RNA, 19 nt, Artificial Sequence
  Description of Artificial Sequence: Synthetic oligonucleotide
  Antisense strand to SEQ ID NO: 1330872
cucuucaggcuaauggacu

SEQ ID NO: 1330874 - RNA, 19 nt, Artificial Sequence
  Description of Artificial Sequence: Synthetic oligonucleotide
  Sense strand starting at position 1322 of SEQ ID NO: 1242214
cggguaaagugggcugaaa

SEQ ID NO: 1330875 - RNA, 19 nt, Artificial Sequence
  Description of Artificial Sequence: Synthetic oligonucleotide
  Antisense strand to SEQ ID NO: 1330874
uuucagcccacuuuacccg

SEQ ID NO: 1330876 - RNA, 19 nt, Artificial Sequence
  Description of Artificial Sequence: Synthetic oligonucleotide
  Sense strand starting at position 1673 of SEQ ID NO: 1242214
ggaccuugugcugaucuga

SEQ ID NO: 1330877 - RNA, 19 nt, Artificial Sequence
  Description of Artificial Sequence: Synthetic oligonucleotide
  Antisense strand to SEQ ID NO: 1330876
ucagaucagcacaaggucc

SEQ ID NO: 1330878 - RNA, 19 nt, Artificial Sequence
  Description of Artificial Sequence: Synthetic oligonucleotide
  Sense strand starting at position 1838 of SEQ ID NO: 1242214
gacucaaccuggccgauaa

SEQ ID NO: 1330879 - RNA, 19 nt, Artificial Sequence
  Description of Artificial Sequence: Synthetic oligonucleotide
  Antisense strand to SEQ ID NO: 1330878
uuaucggccagguugaguc

SEQ ID NO: 1330880 - RNA, 19 nt, Artificial Sequence
  Description of Artificial Sequence: Synthetic oligonucleotide
  Sense strand starting at position 1839 of SEQ ID NO: 1242214
acucaaccuggccgauaau

SEQ ID NO: 1330881 - RNA, 19 nt, Artificial Sequence
  Description of Artificial Sequence: Synthetic oligonucleotide
  Antisense strand to SEQ ID NO: 1330880
auuaucggccagguugagu

SEQ ID NO: 1330882 - RNA, 19 nt, Artificial Sequence
  Description of Artificial Sequence: Synthetic oligonucleotide
  Sense strand starting at position 2006 of SEQ ID NO: 1242214
agagcuucacgggaaaugu

SEQ ID NO: 1330883 - RNA, 19 nt, Artificial Sequence
  Description of Artificial Sequence: Synthetic oligonucleotide
  Antisense strand to SEQ ID NO: 1330882
acauuucccgugaagcucu

SEQ ID NO: 1330884 - RNA, 19 nt, Artificial Sequence
  Description of Artificial Sequence: Synthetic oligonucleotide
  Sense strand starting at position 2080 of SEQ ID NO: 1242214
cgcgaucuucggucucacu

SEQ ID NO: 1330885 - RNA, 19 nt, Artificial Sequence
  Description of Artificial Sequence: Synthetic oligonucleotide
  Antisense strand to SEQ ID NO: 1330884
agugagaccgaagaucgcg

SEQ ID NO: 1330886 - RNA, 19 nt, Artificial Sequence
  Description of Artificial Sequence: Synthetic oligonucleotide
  Sense strand starting at position 2162 of SEQ ID NO: 1242214
guucuaagggcuggaggau

SEQ ID NO: 1330887 - RNA, 19 nt, Artificial Sequence
  Description of Artificial Sequence: Synthetic oligonucleotide
  Antisense strand to SEQ ID NO: 1330886
auccuccagcccuuagaac

SEQ ID NO: 1330888 - RNA, 19 nt, Artificial Sequence
  Description of Artificial Sequence: Synthetic oligonucleotide
  Sense strand starting at position 2175 of SEQ ID NO: 1242214
gaggauacaucagagagca

SEQ ID NO: 1330889 - RNA, 19 nt, Artificial Sequence
  Description of Artificial Sequence: Synthetic oligonucleotide
  Antisense strand to SEQ ID NO: 1330888
ugcucucugauguauccuc

SEQ ID NO: 1330890 - RNA, 19 nt, Artificial Sequence
  Description of Artificial Sequence: Synthetic oligonucleotide
  Sense strand starting at position 2266 of SEQ ID NO: 1242214
aaucauguaguauguugaa

SEQ ID NO: 1330891 - RNA, 19 nt, Artificial Sequence
  Description of Artificial Sequence: Synthetic oligonucleotide
  Antisense strand to SEQ ID NO: 1330890
uucaacauacuacaugauu

SEQ ID NO: 1330892 - RNA, 19 nt, Artificial Sequence
  Description of Artificial Sequence: Synthetic oligonucleotide
  Sense strand starting at position 2377 of SEQ ID NO: 1242214
gagguuugaguccagacuu

SEQ ID NO: 1330893 - RNA, 19 nt, Artificial Sequence
  Description of Artificial Sequence: Synthetic oligonucleotide
  Antisense strand to SEQ ID NO: 1330892
aagucuggacucaaaccuc

SEQ ID NO: 1330894 - RNA, 19 nt, Artificial Sequence
  Description of Artificial Sequence: Synthetic oligonucleotide
  Sense strand starting at position 2389 of SEQ ID NO: 1242214
cagacuuggcggugaggaa

SEQ ID NO: 1330895 - RNA, 19 nt, Artificial Sequence
  Description of Artificial Sequence: Synthetic oligonucleotide
  Antisense strand to SEQ ID NO: 1330894
uuccucaccgccaagucug

SEQ ID NO: 1330896 - RNA, 19 nt, Artificial Sequence
  Description of Artificial Sequence: Synthetic oligonucleotide
  Sense strand starting at position 2604 of SEQ ID NO: 1242214
uugugaagacuuuggguuu

SEQ ID NO: 1330897 - RNA, 19 nt, Artificial Sequence
  Description of Artificial Sequence: Synthetic oligonucleotide
  Antisense strand to SEQ ID NO: 1330896
aaacccaaagucuucacaa

SEQ ID NO: 1330898 - RNA, 19 nt, Artificial Sequence
  Description of Artificial Sequence: Synthetic oligonucleotide
  Sense strand starting at position 2625 of SEQ ID NO: 1242214
cuucgagucucagcaauua

SEQ ID NO: 1330899 - RNA, 19 nt, Artificial Sequence
  Description of Artificial Sequence: Synthetic oligonucleotide
  Antisense strand to SEQ ID NO: 1330898
uaauugcugagacucgaag

SEQ ID NO: 1330900 - RNA, 19 nt, Artificial Sequence
  Description of Artificial Sequence: Synthetic oligonucleotide
  Sense strand starting at position 2652 of SEQ ID NO: 1242214
agcaaagaauugcugugau

SEQ ID NO: 1330901 - RNA, 19 nt, Artificial Sequence
  Description of Artificial Sequence: Synthetic oligonucleotide
  Antisense strand to SEQ ID NO: 1330900
aucacagcaauucuuugcu

SEQ ID NO: 1330902 - RNA, 19 nt, Artificial Sequence
  Description of Artificial Sequence: Synthetic oligonucleotide
  Sense strand starting at position 2655 of SEQ ID NO: 1242214
aaagaauugcugugaugug

SEQ ID NO: 1330903 - RNA, 19 nt, Artificial Sequence
  Description of Artificial Sequence: Synthetic oligonucleotide
  Antisense strand to SEQ ID NO: 1330902
cacaucacagcaauucuuu

SEQ ID NO: 1330904 - RNA, 19 nt, Artificial Sequence
  Description of Artificial Sequence: Synthetic oligonucleotide
  Sense strand starting at position 2663 of SEQ ID NO: 1242214
gcugugaugugaguaggga

SEQ ID NO: 1330905 - RNA, 19 nt, Artificial Sequence
  Description of Artificial Sequence: Synthetic oligonucleotide
  Antisense strand to SEQ ID NO: 1330904
ucccuacucacaucacagc

SEQ ID NO: 1330906 - RNA, 19 nt, Artificial Sequence
  Description of Artificial Sequence: Synthetic oligonucleotide
  Sense strand starting at position 2893 of SEQ ID NO: 1242214
ggcugagcugcuuacaagu

SEQ ID NO: 1330907 - RNA, 19 nt, Artificial Sequence
  Description of Artificial Sequence: Synthetic oligonucleotide
  Antisense strand to SEQ ID NO: 1330906
acuuguaagcagcucagcc

SEQ ID NO: 1330908 - RNA, 19 nt, Artificial Sequence
  Description of Artificial Sequence: Synthetic oligonucleotide
  Sense strand starting at position 2930 of SEQ ID NO: 1242214
gggaauuacgaagagcugu

SEQ ID NO: 1330909 - RNA, 19 nt, Artificial Sequence
  Description of Artificial Sequence: Synthetic oligonucleotide
  Antisense strand to SEQ ID NO: 1330908
acagcucuucguaauuccc

SEQ ID NO: 1330910 - RNA, 19 nt, Artificial Sequence
  Description of Artificial Sequence: Synthetic oligonucleotide
  Sense strand starting at position 2974 of SEQ ID NO: 1242214
uuggcucugcaguaaucuu

SEQ ID NO: 1330911 - RNA, 19 nt, Artificial Sequence
  Description of Artificial Sequence: Synthetic oligonucleotide
  Antisense strand to SEQ ID NO: 1330910
aagauuacugcagagccaa

SEQ ID NO: 1330912 - RNA, 19 nt, Artificial Sequence
  Description of Artificial Sequence: Synthetic oligonucleotide
  Sense strand starting at position 2982 of SEQ ID NO: 1242214
gcaguaaucuuggcuauau

SEQ ID NO: 1330913 - RNA, 19 nt, Artificial Sequence
  Description of Artificial Sequence: Synthetic oligonucleotide
  Antisense strand to SEQ ID NO: 1330912
auauagccaagauuacugc

SEQ ID NO: 1330914 - RNA, 19 nt, Artificial Sequence
  Description of Artificial Sequence: Synthetic oligonucleotide
  Sense strand starting at position 2993 of SEQ ID NO: 1242214
ggcuauauccuguggugaa

SEQ ID NO: 1330915 - RNA, 19 nt, Artificial Sequence
  Description of Artificial Sequence: Synthetic oligonucleotide
  Antisense strand to SEQ ID NO: 1330914
uucaccacaggauauagcc

SEQ ID NO: 1330916 - RNA, 19 nt, Artificial Sequence
  Description of Artificial Sequence: Synthetic oligonucleotide
  Sense strand starting at position 3006 of SEQ ID NO: 1242214
ggugaaaggcuuugacauc

SEQ ID NO: 1330917 - RNA, 19 nt, Artificial Sequence
  Description of Artificial Sequence: Synthetic oligonucleotide
  Antisense strand to SEQ ID NO: 1330916
gaugucaaagccuuucacc

SEQ ID NO: 1330918 - RNA, 19 nt, Artificial Sequence
  Description of Artificial Sequence: Synthetic oligonucleotide
  Sense strand starting at position 3169 of SEQ ID NO: 1242214
aguuacaguccugacucua

SEQ ID NO: 1330919 - RNA, 19 nt, Artificial Sequence
  Description of Artificial Sequence: Synthetic oligonucleotide
  Antisense strand to SEQ ID NO: 1330918
uagagucaggacuguaacu

SEQ ID NO: 1330920 - RNA, 19 nt, Artificial Sequence
  Description of Artificial Sequence: Synthetic oligonucleotide
  Sense strand starting at position 3313 of SEQ ID NO: 1242214
gguccucuggcucaaauaa

SEQ ID NO: 1330921 - RNA, 19 nt, Artificial Sequence
  Description of Artificial Sequence: Synthetic oligonucleotide
  Antisense strand to SEQ ID NO: 1330920
uuauuugagccagaggacc

SEQ ID NO: 1330922 - RNA, 19 nt, Artificial Sequence
  Description of Artificial Sequence: Synthetic oligonucleotide
  Sense strand starting at position 3730 of SEQ ID NO: 1242214
aauggcaguucuguggaau

SEQ ID NO: 1330923 - RNA, 19 nt, Artificial Sequence
  Description of Artificial Sequence: Synthetic oligonucleotide
  Antisense strand to SEQ ID NO: 1330922
auuccacagaacugccauu

SEQ ID NO: 1330924 - RNA, 19 nt, Artificial Sequence
  Description of Artificial Sequence: Synthetic oligonucleotide
  Sense strand starting at position 3731 of SEQ ID NO: 1242214
auggcaguucuguggaaua

SEQ ID NO: 1330925 - RNA, 19 nt, Artificial Sequence
  Description of Artificial Sequence: Synthetic oligonucleotide
  Antisense strand to SEQ ID NO: 1330924
uauuccacagaacugccau

SEQ ID NO: 1330926 - RNA, 19 nt, Artificial Sequence
  Description of Artificial Sequence: Synthetic oligonucleotide
  Sense strand starting at position 3733 of SEQ ID NO: 1242214
ggcaguucuguggaauaga

SEQ ID NO: 1330927 - RNA, 19 nt, Artificial Sequence
  Description of Artificial Sequence: Synthetic oligonucleotide
  Antisense strand to SEQ ID NO: 1330926
ucuauuccacagaacugcc

SEQ ID NO: 1330928 - RNA, 19 nt, Artificial Sequence
  Description of Artificial Sequence: Synthetic oligonucleotide
  Sense strand starting at position 37 of SEQ ID NO: 1242215
cguauuaugguagauguga

SEQ ID NO: 1330929 - RNA, 19 nt, Artificial Sequence
  Description of Artificial Sequence: Synthetic oligonucleotide
  Antisense strand to SEQ ID NO: 1330928
ucacaucuaccauaauacg

SEQ ID NO: 1330930 - RNA, 19 nt, Artificial Sequence
  Description of Artificial Sequence: Synthetic oligonucleotide
  Sense strand starting at position 186 of SEQ ID NO: 1242215
uguuaugcgagcuccaagu

SEQ ID NO: 1330931 - RNA, 19 nt, Artificial Sequence
  Description of Artificial Sequence: Synthetic oligonucleotide
  Antisense strand to SEQ ID NO: 1330930
acuuggagcucgcauaaca

SEQ ID NO: 1330932 - RNA, 19 nt, Artificial Sequence
  Description of Artificial Sequence: Synthetic oligonucleotide
  Sense strand starting at position 674 of SEQ ID NO: 1242215
gucagucuuugaucagaau

SEQ ID NO: 1330933 - RNA, 19 nt, Artificial Sequence
  Description of Artificial Sequence: Synthetic oligonucleotide
  Antisense strand to SEQ ID NO: 1330932
auucugaucaaagacugac

SEQ ID NO: 1330934 - RNA, 19 nt, Artificial Sequence
  Description of Artificial Sequence: Synthetic oligonucleotide
  Sense strand starting at position 705 of SEQ ID NO: 1242215
ggacuuuccuguucaggga

SEQ ID NO: 1330935 - RNA, 19 nt, Artificial Sequence
  Description of Artificial Sequence: Synthetic oligonucleotide
  Antisense strand to SEQ ID NO: 1330934
ucccugaacaggaaagucc

SEQ ID NO: 1330936 - RNA, 19 nt, Artificial Sequence
  Description of Artificial Sequence: Synthetic oligonucleotide
  Sense strand starting at position 830 of SEQ ID NO: 1242215
agagacauuucucauaaag

SEQ ID NO: 1330937 - RNA, 19 nt, Artificial Sequence
  Description of Artificial Sequence: Synthetic oligonucleotide
  Antisense strand to SEQ ID NO: 1330936
cuuuaugagaaaugucucu

SEQ ID NO: 1330938 - RNA, 19 nt, Artificial Sequence
  Description of Artificial Sequence: Synthetic oligonucleotide
  Sense strand starting at position 832 of SEQ ID NO: 1242215
agacauuucucauaaagag

SEQ ID NO: 1330939 - RNA, 19 nt, Artificial Sequence
  Description of Artificial Sequence: Synthetic oligonucleotide
  Antisense strand to SEQ ID NO: 1330938
cucuuuaugagaaaugucu

SEQ ID NO: 1330940 - RNA, 19 nt, Artificial Sequence
  Description of Artificial Sequence: Synthetic oligonucleotide
  Sense strand starting at position 873 of SEQ ID NO: 1242215
ugaggcauuccuugacacu

SEQ ID NO: 1330941 - RNA, 19 nt, Artificial Sequence
  Description of Artificial Sequence: Synthetic oligonucleotide
  Antisense strand to SEQ ID NO: 1330940
agugucaaggaaugccuca

SEQ ID NO: 1330942 - RNA, 19 nt, Artificial Sequence
  Description of Artificial Sequence: Synthetic oligonucleotide
  Sense strand starting at position 874 of SEQ ID NO: 1242215
gaggcauuccuugacacuc

SEQ ID NO: 1330943 - RNA, 19 nt, Artificial Sequence
  Description of Artificial Sequence: Synthetic oligonucleotide
  Antisense strand to SEQ ID NO: 1330942
gagugucaaggaaugccuc

SEQ ID NO: 1330944 - RNA, 19 nt, Artificial Sequence
  Description of Artificial Sequence: Synthetic oligonucleotide
  Sense strand starting at position 981 of SEQ ID NO: 1242215
guuguaugauuauuugguu

SEQ ID NO: 1330945 - RNA, 19 nt, Artificial Sequence
  Description of Artificial Sequence: Synthetic oligonucleotide
  Antisense strand to SEQ ID NO: 1330944
aaccaaauaaucauacaac

SEQ ID NO: 1330946 - RNA, 19 nt, Artificial Sequence
  Description of Artificial Sequence: Synthetic oligonucleotide
  Sense strand starting at position 1026 of SEQ ID NO: 1242215
acugaaguacucugagaac

SEQ ID NO: 1330947 - RNA, 19 nt, Artificial Sequence
  Description of Artificial Sequence: Synthetic oligonucleotide
  Antisense strand to SEQ ID NO: 1330946
guucucagaguacuucagu

SEQ ID NO: 1330948 - RNA, 19 nt, Artificial Sequence
  Description of Artificial Sequence: Synthetic oligonucleotide
  Sense strand starting at position 1117 of SEQ ID NO: 1242215
caaugaacaucuguagguu

SEQ ID NO: 1330949 - RNA, 19 nt, Artificial Sequence
  Description of Artificial Sequence: Synthetic oligonucleotide
  Antisense strand to SEQ ID NO: 1330948
aaccuacagauguucauug

SEQ ID NO: 1330950 - RNA, 19 nt, Artificial Sequence
  Description of Artificial Sequence: Synthetic oligonucleotide
  Sense strand starting at position 1126 of SEQ ID NO: 1242215
ucuguagguugaguaacaa

SEQ ID NO: 1330951 - RNA, 19 nt, Artificial Sequence
  Description of Artificial Sequence: Synthetic oligonucleotide
  Antisense strand to SEQ ID NO: 1330950
uuguuacucaaccuacaga

SEQ ID NO: 1330952 - RNA, 19 nt, Artificial Sequence
  Description of Artificial Sequence: Synthetic oligonucleotide
  Sense strand starting at position 1145 of SEQ ID NO: 1242215
auauuugucaagcgagcga

SEQ ID NO: 1330953 - RNA, 19 nt, Artificial Sequence
  Description of Artificial Sequence: Synthetic oligonucleotide
  Antisense strand to SEQ ID NO: 1330952
ucgcucgcuugacaaauau

SEQ ID NO: 1330954 - RNA, 19 nt, Artificial Sequence
  Description of Artificial Sequence: Synthetic oligonucleotide
  Sense strand starting at position 1197 of SEQ ID NO: 1242215
agaaguuuauaguucucaa

SEQ ID NO: 1330955 - RNA, 19 nt, Artificial Sequence
  Description of Artificial Sequence: Synthetic oligonucleotide
  Antisense strand to SEQ ID NO: 1330954
uugagaacuauaaacuucu

SEQ ID NO: 1330956 - RNA, 19 nt, Artificial Sequence
  Description of Artificial Sequence: Synthetic oligonucleotide
  Sense strand starting at position 1200 of SEQ ID NO: 1242215
aguuuauaguucucaacag

SEQ ID NO: 1330957 - RNA, 19 nt, Artificial Sequence
  Description of Artificial Sequence: Synthetic oligonucleotide
  Antisense strand to SEQ ID NO: 1330956
cuguugagaacuauaaacu

SEQ ID NO: 1330958 - RNA, 19 nt, Artificial Sequence
  Description of Artificial Sequence: Synthetic oligonucleotide
  Sense strand starting at position 1532 of SEQ ID NO: 1242215
gaaguagaguaucuccaaa

SEQ ID NO: 1330959 - RNA, 19 nt, Artificial Sequence
  Description of Artificial Sequence: Synthetic oligonucleotide
  Antisense strand to SEQ ID NO: 1330958
uuuggagauacucuacuuc

SEQ ID NO: 1330960 - RNA, 19 nt, Artificial Sequence
  Description of Artificial Sequence: Synthetic oligonucleotide
  Sense strand starting at position 1534 of SEQ ID NO: 1242215
aguagaguaucuccaaaga

SEQ ID NO: 1330961 - RNA, 19 nt, Artificial Sequence
  Description of Artificial Sequence: Synthetic oligonucleotide
  Antisense strand to SEQ ID NO: 1330960
ucuuuggagauacucuacu

SEQ ID NO: 1330962 - RNA, 19 nt, Artificial Sequence
  Description of Artificial Sequence: Synthetic oligonucleotide
  Sense strand starting at position 1539 of SEQ ID NO: 1242215
aguaucuccaaagaguugu

SEQ ID NO: 1330963 - RNA, 19 nt, Artificial Sequence
  Description of Artificial Sequence: Synthetic oligonucleotide
  Antisense strand to SEQ ID NO: 1330962
acaacucuuuggagauacu

SEQ ID NO: 1330964 - RNA, 19 nt, Artificial Sequence
  Description of Artificial Sequence: Synthetic oligonucleotide
  Sense strand starting at position 1545 of SEQ ID NO: 1242215
uccaaagaguugucuaagg

SEQ ID NO: 1330965 - RNA, 19 nt, Artificial Sequence
  Description of Artificial Sequence: Synthetic oligonucleotide
  Antisense strand to SEQ ID NO: 1330964
ccuuagacaacucuuugga

SEQ ID NO: 1330966 - RNA, 19 nt, Artificial Sequence
  Description of Artificial Sequence: Synthetic oligonucleotide
  Sense strand starting at position 1547 of SEQ ID NO: 1242215
caaagaguugucuaaggug

SEQ ID NO: 1330967 - RNA, 19 nt, Artificial Sequence
  Description of Artificial Sequence: Synthetic oligonucleotide
  Antisense strand to SEQ ID NO: 1330966
caccuuagacaacucuuug

SEQ ID NO: 1330968 - RNA, 19 nt, Artificial Sequence
  Description of Artificial Sequence: Synthetic oligonucleotide
  Sense strand starting at position 1553 of SEQ ID NO: 1242215
guugucuaaggugacaaua

SEQ ID NO: 1330969 - RNA, 19 nt, Artificial Sequence
  Description of Artificial Sequence: Synthetic oligonucleotide
  Antisense strand to SEQ ID NO: 1330968
uauugucaccuuagacaac

SEQ ID NO: 1330970 - RNA, 19 nt, Artificial Sequence
  Description of Artificial Sequence: Synthetic oligonucleotide
  Sense strand starting at position 1602 of SEQ ID NO: 1242215
guugaacaucuauguacca

SEQ ID NO: 1330971 - RNA, 19 nt, Artificial Sequence
  Description of Artificial Sequence: Synthetic oligonucleotide
  Antisense strand to SEQ ID NO: 1330970
ugguacauagauguucaac

SEQ ID NO: 1330972 - RNA, 19 nt, Artificial Sequence
  Description of Artificial Sequence: Synthetic oligonucleotide
  Sense strand starting at position 1652 of SEQ ID NO: 1242215
ggauaaguaccguauacuu

SEQ ID NO: 1330973 - RNA, 19 nt, Artificial Sequence
  Description of Artificial Sequence: Synthetic oligonucleotide
  Antisense strand to SEQ ID NO: 1330972
aaguauacgguacuuaucc

SEQ ID NO: 1330974 - RNA, 19 nt, Artificial Sequence
  Description of Artificial Sequence: Synthetic oligonucleotide
  Sense strand starting at position 1654 of SEQ ID NO: 1242215
auaaguaccguauacuuaa

SEQ ID NO: 1330975 - RNA, 19 nt, Artificial Sequence
  Description of Artificial Sequence: Synthetic oligonucleotide
  Antisense strand to SEQ ID NO: 1330974
uuaaguauacgguacuuau

SEQ ID NO: 1330976 - RNA, 19 nt, Artificial Sequence
  Description of Artificial Sequence: Synthetic oligonucleotide
  Sense strand starting at position 1684 of SEQ ID NO: 1242215
ugaaauuacucgcucaaag

SEQ ID NO: 1330977 - RNA, 19 nt, Artificial Sequence
  Description of Artificial Sequence: Synthetic oligonucleotide
  Antisense strand to SEQ ID NO: 1330976
cuuugagcgaguaauuuca

SEQ ID NO: 1330978 - RNA, 19 nt, Artificial Sequence
  Description of Artificial Sequence: Synthetic oligonucleotide
  Sense strand starting at position 2730 of SEQ ID NO: 1242215
gugggaccuuaugcaaaua

SEQ ID NO: 1330979 - RNA, 19 nt, Artificial Sequence
  Description of Artificial Sequence: Synthetic oligonucleotide
  Antisense strand to SEQ ID NO: 1330978
uauuugcauaaggucccac

SEQ ID NO: 1330980 - RNA, 19 nt, Artificial Sequence
  Description of Artificial Sequence: Synthetic oligonucleotide
  Sense strand starting at position 2789 of SEQ ID NO: 1242215
gcugagagagguugugaga

SEQ ID NO: 1330981 - RNA, 19 nt, Artificial Sequence
  Description of Artificial Sequence: Synthetic oligonucleotide
  Antisense strand to SEQ ID NO: 1330980
ucucacaaccucucucagc

SEQ ID NO: 1330982 - RNA, 19 nt, Artificial Sequence
  Description of Artificial Sequence: Synthetic oligonucleotide
  Sense strand starting at position 2841 of SEQ ID NO: 1242215
gugaacauucguuaaauca

SEQ ID NO: 1330983 - RNA, 19 nt, Artificial Sequence
  Description of Artificial Sequence: Synthetic oligonucleotide
  Antisense strand to SEQ ID NO: 1330982
ugauuuaacgaauguucac

SEQ ID NO: 1330984 - RNA, 19 nt, Artificial Sequence
  Description of Artificial Sequence: Synthetic oligonucleotide
  Sense strand starting at position 2849 of SEQ ID NO: 1242215
ucguuaaaucaaugaguga

SEQ ID NO: 1330985 - RNA, 19 nt, Artificial Sequence
  Description of Artificial Sequence: Synthetic oligonucleotide
  Antisense strand to SEQ ID NO: 1330984
ucacucauugauuuaacga

SEQ ID NO: 1330986 - RNA, 19 nt, Artificial Sequence
  Description of Artificial Sequence: Synthetic oligonucleotide
  Sense strand starting at position 2853 of SEQ ID NO: 1242215
uaaaucaaugagugaaugu

SEQ ID NO: 1330987 - RNA, 19 nt, Artificial Sequence
  Description of Artificial Sequence: Synthetic oligonucleotide
  Antisense strand to SEQ ID NO: 1330986
acauucacucauugauuua

SEQ ID NO: 1330988 - RNA, 19 nt, Artificial Sequence
  Description of Artificial Sequence: Synthetic oligonucleotide
  Sense strand starting at position 2901 of SEQ ID NO: 1242215
uuucuucugagauggagau

SEQ ID NO: 1330989 - RNA, 19 nt, Artificial Sequence
  Description of Artificial Sequence: Synthetic oligonucleotide
  Antisense strand to SEQ ID NO: 1330988
aucuccaucucagaagaaa

SEQ ID NO: 1330990 - RNA, 19 nt, Artificial Sequence
  Description of Artificial Sequence: Synthetic oligonucleotide
  Sense strand starting at position 3140 of SEQ ID NO: 1242215
aucuacuaugagugagaca

SEQ ID NO: 1330991 - RNA, 19 nt, Artificial Sequence
  Description of Artificial Sequence: Synthetic oligonucleotide
  Antisense strand to SEQ ID NO: 1330990
ugucucacucauaguagau

SEQ ID NO: 1330992 - RNA, 19 nt, Artificial Sequence
  Description of Artificial Sequence: Synthetic oligonucleotide
  Sense strand starting at position 3212 of SEQ ID NO: 1242215
guucacagucuuugaggga

SEQ ID NO: 1330993 - RNA, 19 nt, Artificial Sequence
  Description of Artificial Sequence: Synthetic oligonucleotide
  Antisense strand to SEQ ID NO: 1330992
ucccucaaagacugugaac

SEQ ID NO: 1330994 - RNA, 19 nt, Artificial Sequence
  Description of Artificial Sequence: Synthetic oligonucleotide
  Sense strand starting at position 3279 of SEQ ID NO: 1242215
gagguaagcauugguugga

SEQ ID NO: 1330995 - RNA, 19 nt, Artificial Sequence
  Description of Artificial Sequence: Synthetic oligonucleotide
  Antisense strand to SEQ ID NO: 1330994
uccaaccaaugcuuaccuc

SEQ ID NO: 1330996 - RNA, 19 nt, Artificial Sequence
  Description of Artificial Sequence: Synthetic oligonucleotide
  Sense strand starting at position 3301 of SEQ ID NO: 1242215
augaaaucauaagugucua

SEQ ID NO: 1330997 - RNA, 19 nt, Artificial Sequence
  Description of Artificial Sequence: Synthetic oligonucleotide
  Antisense strand to SEQ ID NO: 1330996
uagacacuuaugauuucau

SEQ ID NO: 1330998 - RNA, 19 nt, Artificial Sequence
  Description of Artificial Sequence: Synthetic oligonucleotide
  Sense strand starting at position 3688 of SEQ ID NO: 1242215
ucagaagugaaugggaguu

SEQ ID NO: 1330999 - RNA, 19 nt, Artificial Sequence
  Description of Artificial Sequence: Synthetic oligonucleotide
  Antisense strand to SEQ ID NO: 1330998
aacucccauucacuucuga

SEQ ID NO: 1331000 - RNA, 19 nt, Artificial Sequence
  Description of Artificial Sequence: Synthetic oligonucleotide
  Sense strand starting at position 3701 of SEQ ID NO: 1242215
ggaguucaucuggacaagu

SEQ ID NO: 1331001 - RNA, 19 nt, Artificial Sequence
  Description of Artificial Sequence: Synthetic oligonucleotide
  Antisense strand to SEQ ID NO: 1331000
acuuguccagaugaacucc

SEQ ID NO: 1331002 - RNA, 19 nt, Artificial Sequence
  Description of Artificial Sequence: Synthetic oligonucleotide
  Sense strand starting at position 3720 of SEQ ID NO: 1242215
ugaagugggucauuggaga

SEQ ID NO: 1331003 - RNA, 19 nt, Artificial Sequence
  Description of Artificial Sequence: Synthetic oligonucleotide
  Antisense strand to SEQ ID NO: 1331002
ucuccaaugacccacuuca

SEQ ID NO: 1331004 - RNA, 19 nt, Artificial Sequence
  Description of Artificial Sequence: Synthetic oligonucleotide
  Sense strand starting at position 3742 of SEQ ID NO: 1242215
agguaaccaucuguguaaa

SEQ ID NO: 1331005 - RNA, 19 nt, Artificial Sequence
  Description of Artificial Sequence: Synthetic oligonucleotide
  Antisense strand to SEQ ID NO: 1331004
uuuacacagaugguuaccu

SEQ ID NO: 1331006 - RNA, 19 nt, Artificial Sequence
  Description of Artificial Sequence: Synthetic oligonucleotide
  Sense strand starting at position 3782 of SEQ ID NO: 1242215
ugguguguucaggugugua

SEQ ID NO: 1331007 - RNA, 19 nt, Artificial Sequence
  Description of Artificial Sequence: Synthetic oligonucleotide
  Antisense strand to SEQ ID NO: 1331006
uacacaccugaacacacca

SEQ ID NO: 1331008 - RNA, 19 nt, Artificial Sequence
  Description of Artificial Sequence: Synthetic oligonucleotide
  Sense strand starting at position 17 of SEQ ID NO: 1242216
gaauuuaaguucuaugagg

SEQ ID NO: 1331009 - RNA, 19 nt, Artificial Sequence
  Description of Artificial Sequence: Synthetic oligonucleotide
  Antisense strand to SEQ ID NO: 1331008
ccucauagaacuuaaauuc

SEQ ID NO: 1331010 - RNA, 19 nt, Artificial Sequence
  Description of Artificial Sequence: Synthetic oligonucleotide
  Sense strand starting at position 90 of SEQ ID NO: 1242216
ccuggcauuguugaagaaa

SEQ ID NO: 1331011 - RNA, 19 nt, Artificial Sequence
  Description of Artificial Sequence: Synthetic oligonucleotide
  Antisense strand to SEQ ID NO: 1331010
uuucuucaacaaugccagg

SEQ ID NO: 1331012 - RNA, 19 nt, Artificial Sequence
  Description of Artificial Sequence: Synthetic oligonucleotide
  Sense strand starting at position 116 of SEQ ID NO: 1242216
aacagaaucuugguuuaga

SEQ ID NO: 1331013 - RNA, 19 nt, Artificial Sequence
  Description of Artificial Sequence: Synthetic oligonucleotide
  Antisense strand to SEQ ID NO: 1331012
ucuaaaccaagauucuguu

SEQ ID NO: 1331014 - RNA, 19 nt, Artificial Sequence
  Description of Artificial Sequence: Synthetic oligonucleotide
  Sense strand starting at position 117 of SEQ ID NO: 1242216
acagaaucuugguuuagau

SEQ ID NO: 1331015 - RNA, 19 nt, Artificial Sequence
  Description of Artificial Sequence: Synthetic oligonucleotide
  Antisense strand to SEQ ID NO: 1331014
aucuaaaccaagauucugu

SEQ ID NO: 1331016 - RNA, 19 nt, Artificial Sequence
  Description of Artificial Sequence: Synthetic oligonucleotide
  Sense strand starting at position 824 of SEQ ID NO: 1242216
ccucaaagacugugaacua

SEQ ID NO: 1331017 - RNA, 19 nt, Artificial Sequence
  Description of Artificial Sequence: Synthetic oligonucleotide
  Antisense strand to SEQ ID NO: 1331016
uaguucacagucuuugagg

SEQ ID NO: 1331018 - RNA, 19 nt, Artificial Sequence
  Description of Artificial Sequence: Synthetic oligonucleotide
  Sense strand starting at position 903 of SEQ ID NO: 1242216
cauaguagauucuugguaa

SEQ ID NO: 1331019 - RNA, 19 nt, Artificial Sequence
  Description of Artificial Sequence: Synthetic oligonucleotide
  Antisense strand to SEQ ID NO: 1331018
uuaccaagaaucuacuaug

SEQ ID NO: 1331020 - RNA, 19 nt, Artificial Sequence
  Description of Artificial Sequence: Synthetic oligonucleotide
  Sense strand starting at position 906 of SEQ ID NO: 1242216
aguagauucuugguaaaug

SEQ ID NO: 1331021 - RNA, 19 nt, Artificial Sequence
  Description of Artificial Sequence: Synthetic oligonucleotide
  Antisense strand to SEQ ID NO: 1331020
cauuuaccaagaaucuacu

SEQ ID NO: 1331022 - RNA, 19 nt, Artificial Sequence
  Description of Artificial Sequence: Synthetic oligonucleotide
  Sense strand starting at position 924 of SEQ ID NO: 1242216
guuuguuaaauggauguga

SEQ ID NO: 1331023 - RNA, 19 nt, Artificial Sequence
  Description of Artificial Sequence: Synthetic oligonucleotide
  Antisense strand to SEQ ID NO: 1331022
ucacauccauuuaacaaac

SEQ ID NO: 1331024 - RNA, 19 nt, Artificial Sequence
  Description of Artificial Sequence: Synthetic oligonucleotide
  Sense strand starting at position 926 of SEQ ID NO: 1242216
uuguuaaauggaugugaag

SEQ ID NO: 1331025 - RNA, 19 nt, Artificial Sequence
  Description of Artificial Sequence: Synthetic oligonucleotide
  Antisense strand to SEQ ID NO: 1331024
cuucacauccauuuaacaa

SEQ ID NO: 1331026 - RNA, 19 nt, Artificial Sequence
  Description of Artificial Sequence: Synthetic oligonucleotide
  Sense strand starting at position 1112 of SEQ ID NO: 1242216
gaagguuauuggucugaaa

SEQ ID NO: 1331027 - RNA, 19 nt, Artificial Sequence
  Description of Artificial Sequence: Synthetic oligonucleotide
  Antisense strand to SEQ ID NO: 1331026
uuucagaccaauaaccuuc

SEQ ID NO: 1331028 - RNA, 19 nt, Artificial Sequence
  Description of Artificial Sequence: Synthetic oligonucleotide
  Sense strand starting at position 1166 of SEQ ID NO: 1242216
uguuauggauaucucacau

SEQ ID NO: 1331029 - RNA, 19 nt, Artificial Sequence
  Description of Artificial Sequence: Synthetic oligonucleotide
  Antisense strand to SEQ ID NO: 1331028
augugagauauccauaaca

SEQ ID NO: 1331030 - RNA, 19 nt, Artificial Sequence
  Description of Artificial Sequence: Synthetic oligonucleotide
  Sense strand starting at position 1321 of SEQ ID NO: 1242216
acggauagcaagugacaua

SEQ ID NO: 1331031 - RNA, 19 nt, Artificial Sequence
  Description of Artificial Sequence: Synthetic oligonucleotide
  Antisense strand to SEQ ID NO: 1331030
uaugucacuugcuauccgu

SEQ ID NO: 1331032 - RNA, 19 nt, Artificial Sequence
  Description of Artificial Sequence: Synthetic oligonucleotide
  Sense strand starting at position 2056 of SEQ ID NO: 1242216
ugcauugugggagaacgaa

SEQ ID NO: 1331033 - RNA, 19 nt, Artificial Sequence
  Description of Artificial Sequence: Synthetic oligonucleotide
  Antisense strand to SEQ ID NO: 1331032
uucguucucccacaaugca

SEQ ID NO: 1331034 - RNA, 19 nt, Artificial Sequence
  Description of Artificial Sequence: Synthetic oligonucleotide
  Sense strand starting at position 2380 of SEQ ID NO: 1242216
uuaaguauacgguacuuau

SEQ ID NO: 1331035 - RNA, 19 nt, Artificial Sequence
  Description of Artificial Sequence: Synthetic oligonucleotide
  Antisense strand to SEQ ID NO: 1331034
auaaguaccguauacuuaa

SEQ ID NO: 1331036 - RNA, 19 nt, Artificial Sequence
  Description of Artificial Sequence: Synthetic oligonucleotide
  Sense strand starting at position 2425 of SEQ ID NO: 1242216
cuugguuugguacauagau

SEQ ID NO: 1331037 - RNA, 19 nt, Artificial Sequence
  Description of Artificial Sequence: Synthetic oligonucleotide
  Antisense strand to SEQ ID NO: 1331036
aucuauguaccaaaccaag

SEQ ID NO: 1331038 - RNA, 19 nt, Artificial Sequence
  Description of Artificial Sequence: Synthetic oligonucleotide
  Sense strand starting at position 2427 of SEQ ID NO: 1242216
ugguuugguacauagaugu

SEQ ID NO: 1331039 - RNA, 19 nt, Artificial Sequence
  Description of Artificial Sequence: Synthetic oligonucleotide
  Antisense strand to SEQ ID NO: 1331038
acaucuauguaccaaacca

SEQ ID NO: 1331040 - RNA, 19 nt, Artificial Sequence
  Description of Artificial Sequence: Synthetic oligonucleotide
  Sense strand starting at position 2572 of SEQ ID NO: 1242216
ucacuaggagcuuacaagu

SEQ ID NO: 1331041 - RNA, 19 nt, Artificial Sequence
  Description of Artificial Sequence: Synthetic oligonucleotide
  Antisense strand to SEQ ID NO: 1331040
acuuguaagcuccuaguga

SEQ ID NO: 1331042 - RNA, 19 nt, Artificial Sequence
  Description of Artificial Sequence: Synthetic oligonucleotide
  Sense strand starting at position 2596 of SEQ ID NO: 1242216
gggagaaagucuuugugau

SEQ ID NO: 1331043 - RNA, 19 nt, Artificial Sequence
  Description of Artificial Sequence: Synthetic oligonucleotide
  Antisense strand to SEQ ID NO: 1331042
aucacaaagacuuucuccc

SEQ ID NO: 1331044 - RNA, 19 nt, Artificial Sequence
  Description of Artificial Sequence: Synthetic oligonucleotide
  Sense strand starting at position 2608 of SEQ ID NO: 1242216
uugugaugugaugaauguu

SEQ ID NO: 1331045 - RNA, 19 nt, Artificial Sequence
  Description of Artificial Sequence: Synthetic oligonucleotide
  Antisense strand to SEQ ID NO: 1331044
aacauucaucacaucacaa

SEQ ID NO: 1331046 - RNA, 19 nt, Artificial Sequence
  Description of Artificial Sequence: Synthetic oligonucleotide
  Sense strand starting at position 2611 of SEQ ID NO: 1242216
ugaugugaugaauguuaag

SEQ ID NO: 1331047 - RNA, 19 nt, Artificial Sequence
  Description of Artificial Sequence: Synthetic oligonucleotide
  Antisense strand to SEQ ID NO: 1331046
cuuaacauucaucacauca

SEQ ID NO: 1331048 - RNA, 19 nt, Artificial Sequence
  Description of Artificial Sequence: Synthetic oligonucleotide
  Sense strand starting at position 2658 of SEQ ID NO: 1242216
cugucagaugccuaugaua

SEQ ID NO: 1331049 - RNA, 19 nt, Artificial Sequence
  Description of Artificial Sequence: Synthetic oligonucleotide
  Antisense strand to SEQ ID NO: 1331048
uaucauaggcaucugacag

SEQ ID NO: 1331050 - RNA, 19 nt, Artificial Sequence
  Description of Artificial Sequence: Synthetic oligonucleotide
  Sense strand starting at position 2780 of SEQ ID NO: 1242216
aaguguuugaagggugaua

SEQ ID NO: 1331051 - RNA, 19 nt, Artificial Sequence
  Description of Artificial Sequence: Synthetic oligonucleotide
  Antisense strand to SEQ ID NO: 1331050
uaucacccuucaaacacuu

SEQ ID NO: 1331052 - RNA, 19 nt, Artificial Sequence
  Description of Artificial Sequence: Synthetic oligonucleotide
  Sense strand starting at position 2794 of SEQ ID NO: 1242216
ugauauguuuccucagaau

SEQ ID NO: 1331053 - RNA, 19 nt, Artificial Sequence
  Description of Artificial Sequence: Synthetic oligonucleotide
  Antisense strand to SEQ ID NO: 1331052
auucugaggaaacauauca

SEQ ID NO: 1331054 - RNA, 19 nt, Artificial Sequence
  Description of Artificial Sequence: Synthetic oligonucleotide
  Sense strand starting at position 2805 of SEQ ID NO: 1242216
cucagaauccgagauguuu

SEQ ID NO: 1331055 - RNA, 19 nt, Artificial Sequence
  Description of Artificial Sequence: Synthetic oligonucleotide
  Antisense strand to SEQ ID NO: 1331054
aaacaucucggauucugag

SEQ ID NO: 1331056 - RNA, 19 nt, Artificial Sequence
  Description of Artificial Sequence: Synthetic oligonucleotide
  Sense strand starting at position 2947 of SEQ ID NO: 1242216
ugcaucagagaguauguua

SEQ ID NO: 1331057 - RNA, 19 nt, Artificial Sequence
  Description of Artificial Sequence: Synthetic oligonucleotide
  Antisense strand to SEQ ID NO: 1331056
uaacauacucucugaugca

SEQ ID NO: 1331058 - RNA, 19 nt, Artificial Sequence
  Description of Artificial Sequence: Synthetic oligonucleotide
  Sense strand starting at position 2950 of SEQ ID NO: 1242216
aucagagaguauguuaagu

SEQ ID NO: 1331059 - RNA, 19 nt, Artificial Sequence
  Description of Artificial Sequence: Synthetic oligonucleotide
  Antisense strand to SEQ ID NO: 1331058
acuuaacauacucucugau

SEQ ID NO: 1331060 - RNA, 19 nt, Artificial Sequence
  Description of Artificial Sequence: Synthetic oligonucleotide
  Sense strand starting at position 2955 of SEQ ID NO: 1242216
agaguauguuaagugauag

SEQ ID NO: 1331061 - RNA, 19 nt, Artificial Sequence
  Description of Artificial Sequence: Synthetic oligonucleotide
  Antisense strand to SEQ ID NO: 1331060
cuaucacuuaacauacucu

SEQ ID NO: 1331062 - RNA, 19 nt, Artificial Sequence
  Description of Artificial Sequence: Synthetic oligonucleotide
  Sense strand starting at position 2956 of SEQ ID NO: 1242216
gaguauguuaagugauaga

SEQ ID NO: 1331063 - RNA, 19 nt, Artificial Sequence
  Description of Artificial Sequence: Synthetic oligonucleotide
  Antisense strand to SEQ ID NO: 1331062
ucuaucacuuaacauacuc

SEQ ID NO: 1331064 - RNA, 19 nt, Artificial Sequence
  Description of Artificial Sequence: Synthetic oligonucleotide
  Sense strand starting at position 2977 of SEQ ID NO: 1242216
ugcuguaaugaauaaggca

SEQ ID NO: 1331065 - RNA, 19 nt, Artificial Sequence
  Description of Artificial Sequence: Synthetic oligonucleotide
  Antisense strand to SEQ ID NO: 1331064
ugccuuauucauuacagca

SEQ ID NO: 1331066 - RNA, 19 nt, Artificial Sequence
  Description of Artificial Sequence: Synthetic oligonucleotide
  Sense strand starting at position 3043 of SEQ ID NO: 1242216
aucagucaguaaccaaaua

SEQ ID NO: 1331067 - RNA, 19 nt, Artificial Sequence
  Description of Artificial Sequence: Synthetic oligonucleotide
  Antisense strand to SEQ ID NO: 1331066
uauuugguuacugacugau

SEQ ID NO: 1331068 - RNA, 19 nt, Artificial Sequence
  Description of Artificial Sequence: Synthetic oligonucleotide
  Sense strand starting at position 3074 of SEQ ID NO: 1242216
aaugcagacccugauaagu

SEQ ID NO: 1331069 - RNA, 19 nt, Artificial Sequence
  Description of Artificial Sequence: Synthetic oligonucleotide
  Antisense strand to SEQ ID NO: 1331068
acuuaucagggucugcauu

SEQ ID NO: 1331070 - RNA, 19 nt, Artificial Sequence
  Description of Artificial Sequence: Synthetic oligonucleotide
  Sense strand starting at position 3116 of SEQ ID NO: 1242216
cuauaagaguguuuaacaa

SEQ ID NO: 1331071 - RNA, 19 nt, Artificial Sequence
  Description of Artificial Sequence: Synthetic oligonucleotide
  Antisense strand to SEQ ID NO: 1331070
uuguuaaacacucuuauag

SEQ ID NO: 1331072 - RNA, 19 nt, Artificial Sequence
  Description of Artificial Sequence: Synthetic oligonucleotide
  Sense strand starting at position 3209 of SEQ ID NO: 1242216
ugagaaaugucucucugag

SEQ ID NO: 1331073 - RNA, 19 nt, Artificial Sequence
  Description of Artificial Sequence: Synthetic oligonucleotide
  Antisense strand to SEQ ID NO: 1331072
cucagagagacauuucuca

SEQ ID NO: 1331074 - RNA, 19 nt, Artificial Sequence
  Description of Artificial Sequence: Synthetic oligonucleotide
  Sense strand starting at position 3211 of SEQ ID NO: 1242216
agaaaugucucucugagac

SEQ ID NO: 1331075 - RNA, 19 nt, Artificial Sequence
  Description of Artificial Sequence: Synthetic oligonucleotide
  Antisense strand to SEQ ID NO: 1331074
gucucagagagacauuucu

SEQ ID NO: 1331076 - RNA, 19 nt, Artificial Sequence
  Description of Artificial Sequence: Synthetic oligonucleotide
  Sense strand starting at position 3223 of SEQ ID NO: 1242216
cugagacagucauauuuaa

SEQ ID NO: 1331077 - RNA, 19 nt, Artificial Sequence
  Description of Artificial Sequence: Synthetic oligonucleotide
  Antisense strand to SEQ ID NO: 1331076
uuaaauaugacugucucag

SEQ ID NO: 1331078 - RNA, 19 nt, Artificial Sequence
  Description of Artificial Sequence: Synthetic oligonucleotide
  Sense strand starting at position 3320 of SEQ ID NO: 1242216
ucuugaaagucccugaaca

SEQ ID NO: 1331079 - RNA, 19 nt, Artificial Sequence
  Description of Artificial Sequence: Synthetic oligonucleotide
  Antisense strand to SEQ ID NO: 1331078
uguucagggacuuucaaga

SEQ ID NO: 1331080 - RNA, 19 nt, Artificial Sequence
  Description of Artificial Sequence: Synthetic oligonucleotide
  Sense strand starting at position 3321 of SEQ ID NO: 1242216
cuugaaagucccugaacag

SEQ ID NO: 1331081 - RNA, 19 nt, Artificial Sequence
  Description of Artificial Sequence: Synthetic oligonucleotide
  Antisense strand to SEQ ID NO: 1331080
cuguucagggacuuucaag

SEQ ID NO: 1331082 - RNA, 19 nt, Artificial Sequence
  Description of Artificial Sequence: Synthetic oligonucleotide
  Sense strand starting at position 3336 of SEQ ID NO: 1242216
acaggaaaguccuugguga

SEQ ID NO: 1331083 - RNA, 19 nt, Artificial Sequence
  Description of Artificial Sequence: Synthetic oligonucleotide
  Antisense strand to SEQ ID NO: 1331082
ucaccaaggacuuuccugu

SEQ ID NO: 1331084 - RNA, 19 nt, Artificial Sequence
  Description of Artificial Sequence: Synthetic oligonucleotide
  Sense strand starting at position 3337 of SEQ ID NO: 1242216
caggaaaguccuuggugag

SEQ ID NO: 1331085 - RNA, 19 nt, Artificial Sequence
  Description of Artificial Sequence: Synthetic oligonucleotide
  Antisense strand to SEQ ID NO: 1331084
cucaccaaggacuuuccug

SEQ ID NO: 1331086 - RNA, 19 nt, Artificial Sequence
  Description of Artificial Sequence: Synthetic oligonucleotide
  Sense strand starting at position 3688 of SEQ ID NO: 1242216
uagagagaagccuguauuc

SEQ ID NO: 1331087 - RNA, 19 nt, Artificial Sequence
  Description of Artificial Sequence: Synthetic oligonucleotide
  Antisense strand to SEQ ID NO: 1331086
gaauacaggcuucucucua

SEQ ID NO: 1331088 - RNA, 19 nt, Artificial Sequence
  Description of Artificial Sequence: Synthetic oligonucleotide
  Sense strand starting at position 75 of SEQ ID NO: 1242217
auggguuaaauauacguau

SEQ ID NO: 1331089 - RNA, 19 nt, Artificial Sequence
  Description of Artificial Sequence: Synthetic oligonucleotide
  Antisense strand to SEQ ID NO: 1331088
auacguauauuuaacccau

SEQ ID NO: 1331090 - RNA, 19 nt, Artificial Sequence
  Description of Artificial Sequence: Synthetic oligonucleotide
  Sense strand starting at position 77 of SEQ ID NO: 1242217
ggguuaaauauacguauau

SEQ ID NO: 1331091 - RNA, 19 nt, Artificial Sequence
  Description of Artificial Sequence: Synthetic oligonucleotide
  Antisense strand to SEQ ID NO: 1331090
auauacguauauuuaaccc

SEQ ID NO: 1331092 - RNA, 19 nt, Artificial Sequence
  Description of Artificial Sequence: Synthetic oligonucleotide
  Sense strand starting at position 135 of SEQ ID NO: 1242217
aguggcugucucuggauaa

SEQ ID NO: 1331093 - RNA, 19 nt, Artificial Sequence
  Description of Artificial Sequence: Synthetic oligonucleotide
  Antisense strand to SEQ ID NO: 1331092
uuauccagagacagccacu

SEQ ID NO: 1331094 - RNA, 19 nt, Artificial Sequence
  Description of Artificial Sequence: Synthetic oligonucleotide
  Sense strand starting at position 139 of SEQ ID NO: 1242217
gcugucucuggauaaagga

SEQ ID NO: 1331095 - RNA, 19 nt, Artificial Sequence
  Description of Artificial Sequence: Synthetic oligonucleotide
  Antisense strand to SEQ ID NO: 1331094
uccuuuauccagagacagc

SEQ ID NO: 1331096 - RNA, 19 nt, Artificial Sequence
  Description of Artificial Sequence: Synthetic oligonucleotide
  Sense strand starting at position 209 of SEQ ID NO: 1242217
cuuugaauccauggaacuu

SEQ ID NO: 1331097 - RNA, 19 nt, Artificial Sequence
  Description of Artificial Sequence: Synthetic oligonucleotide
  Antisense strand to SEQ ID NO: 1331096
aaguuccauggauucaaag

SEQ ID NO: 1331098 - RNA, 19 nt, Artificial Sequence
  Description of Artificial Sequence: Synthetic oligonucleotide
  Sense strand starting at position 295 of SEQ ID NO: 1242217
cuaucauuccauggcagua

SEQ ID NO: 1331099 - RNA, 19 nt, Artificial Sequence
  Description of Artificial Sequence: Synthetic oligonucleotide
  Antisense strand to SEQ ID NO: 1331098
uacugccauggaaugauag

SEQ ID NO: 1331100 - RNA, 19 nt, Artificial Sequence
  Description of Artificial Sequence: Synthetic oligonucleotide
  Sense strand starting at position 397 of SEQ ID NO: 1242217
guacacguugaggaguuau

SEQ ID NO: 1331101 - RNA, 19 nt, Artificial Sequence
  Description of Artificial Sequence: Synthetic oligonucleotide
  Antisense strand to SEQ ID NO: 1331100
auaacuccucaacguguac

SEQ ID NO: 1331102 - RNA, 19 nt, Artificial Sequence
  Description of Artificial Sequence: Synthetic oligonucleotide
  Sense strand starting at position 453 of SEQ ID NO: 1242217
gaguaauggagcugccaag

SEQ ID NO: 1331103 - RNA, 19 nt, Artificial Sequence
  Description of Artificial Sequence: Synthetic oligonucleotide
  Antisense strand to SEQ ID NO: 1331102
cuuggcagcuccauuacuc

SEQ ID NO: 1331104 - RNA, 19 nt, Artificial Sequence
  Description of Artificial Sequence: Synthetic oligonucleotide
  Sense strand starting at position 470 of SEQ ID NO: 1242217
agugaagcaucaucagaag

SEQ ID NO: 1331105 - RNA, 19 nt, Artificial Sequence
  Description of Artificial Sequence: Synthetic oligonucleotide
  Antisense strand to SEQ ID NO: 1331104
cuucugaugaugcuucacu

SEQ ID NO: 1331106 - RNA, 19 nt, Artificial Sequence
  Description of Artificial Sequence: Synthetic oligonucleotide
  Sense strand starting at position 681 of SEQ ID NO: 1242217
augggaugauugcuugauc

SEQ ID NO: 1331107 - RNA, 19 nt, Artificial Sequence
  Description of Artificial Sequence: Synthetic oligonucleotide
  Antisense strand to SEQ ID NO: 1331106
gaucaagcaaucaucccau

SEQ ID NO: 1331108 - RNA, 19 nt, Artificial Sequence
  Description of Artificial Sequence: Synthetic oligonucleotide
  Sense strand starting at position 682 of SEQ ID NO: 1242217
ugggaugauugcuugaucu

SEQ ID NO: 1331109 - RNA, 19 nt, Artificial Sequence
  Description of Artificial Sequence: Synthetic oligonucleotide
  Antisense strand to SEQ ID NO: 1331108
agaucaagcaaucauccca

SEQ ID NO: 1331110 - RNA, 19 nt, Artificial Sequence
  Description of Artificial Sequence: Synthetic oligonucleotide
  Sense strand starting at position 684 of SEQ ID NO: 1242217
ggaugauugcuugaucuuu

SEQ ID NO: 1331111 - RNA, 19 nt, Artificial Sequence
  Description of Artificial Sequence: Synthetic oligonucleotide
  Antisense strand to SEQ ID NO: 1331110
aaagaucaagcaaucaucc

SEQ ID NO: 1331112 - RNA, 19 nt, Artificial Sequence
  Description of Artificial Sequence: Synthetic oligonucleotide
  Sense strand starting at position 686 of SEQ ID NO: 1242217
augauugcuugaucuuuga

SEQ ID NO: 1331113 - RNA, 19 nt, Artificial Sequence
  Description of Artificial Sequence: Synthetic oligonucleotide
  Antisense strand to SEQ ID NO: 1331112
ucaaagaucaagcaaucau

SEQ ID NO: 1331114 - RNA, 19 nt, Artificial Sequence
  Description of Artificial Sequence: Synthetic oligonucleotide
  Sense strand starting at position 689 of SEQ ID NO: 1242217
auugcuugaucuuugaggu

SEQ ID NO: 1331115 - RNA, 19 nt, Artificial Sequence
  Description of Artificial Sequence: Synthetic oligonucleotide
  Antisense strand to SEQ ID NO: 1331114
accucaaagaucaagcaau

SEQ ID NO: 1331116 - RNA, 19 nt, Artificial Sequence
  Description of Artificial Sequence: Synthetic oligonucleotide
  Sense strand starting at position 807 of SEQ ID NO: 1242217
guauaaaugcagugagaga

SEQ ID NO: 1331117 - RNA, 19 nt, Artificial Sequence
  Description of Artificial Sequence: Synthetic oligonucleotide
  Antisense strand to SEQ ID NO: 1331116
ucucucacugcauuuauac

SEQ ID NO: 1331118 - RNA, 19 nt, Artificial Sequence
  Description of Artificial Sequence: Synthetic oligonucleotide
  Sense strand starting at position 818 of SEQ ID NO: 1242217
gugagagacgcaugugaca

SEQ ID NO: 1331119 - RNA, 19 nt, Artificial Sequence
  Description of Artificial Sequence: Synthetic oligonucleotide
  Antisense strand to SEQ ID NO: 1331118
ugucacaugcgucucucac

SEQ ID NO: 1331120 - RNA, 19 nt, Artificial Sequence
  Description of Artificial Sequence: Synthetic oligonucleotide
  Sense strand starting at position 964 of SEQ ID NO: 1242217
ugugaaguaucuguaggga

SEQ ID NO: 1331121 - RNA, 19 nt, Artificial Sequence
  Description of Artificial Sequence: Synthetic oligonucleotide
  Antisense strand to SEQ ID NO: 1331120
ucccuacagauacuucaca

SEQ ID NO: 1331122 - RNA, 19 nt, Artificial Sequence
  Description of Artificial Sequence: Synthetic oligonucleotide
  Sense strand starting at position 1244 of SEQ ID NO: 1242217
uuuggacuauguccuugua

SEQ ID NO: 1331123 - RNA, 19 nt, Artificial Sequence
  Description of Artificial Sequence: Synthetic oligonucleotide
  Antisense strand to SEQ ID NO: 1331122
uacaaggacauaguccaaa

SEQ ID NO: 1331124 - RNA, 19 nt, Artificial Sequence
  Description of Artificial Sequence: Synthetic oligonucleotide
  Sense strand starting at position 1246 of SEQ ID NO: 1242217
uggacuauguccuuguaua

SEQ ID NO: 1331125 - RNA, 19 nt, Artificial Sequence
  Description of Artificial Sequence: Synthetic oligonucleotide
  Antisense strand to SEQ ID NO: 1331124
uauacaaggacauagucca

SEQ ID NO: 1331126 - RNA, 19 nt, Artificial Sequence
  Description of Artificial Sequence: Synthetic oligonucleotide
  Sense strand starting at position 1247 of SEQ ID NO: 1242217
ggacuauguccuuguauac

SEQ ID NO: 1331127 - RNA, 19 nt, Artificial Sequence
  Description of Artificial Sequence: Synthetic oligonucleotide
  Antisense strand to SEQ ID NO: 1331126
guauacaaggacauagucc

SEQ ID NO: 1331128 - RNA, 19 nt, Artificial Sequence
  Description of Artificial Sequence: Synthetic oligonucleotide
  Sense strand starting at position 1382 of SEQ ID NO: 1242217
ggcugaugaccuugggcaa

SEQ ID NO: 1331129 - RNA, 19 nt, Artificial Sequence
  Description of Artificial Sequence: Synthetic oligonucleotide
  Antisense strand to SEQ ID NO: 1331128
uugcccaaggucaucagcc

SEQ ID NO: 1331130 - RNA, 19 nt, Artificial Sequence
  Description of Artificial Sequence: Synthetic oligonucleotide
  Sense strand starting at position 1383 of SEQ ID NO: 1242217
gcugaugaccuugggcaau

SEQ ID NO: 1331131 - RNA, 19 nt, Artificial Sequence
  Description of Artificial Sequence: Synthetic oligonucleotide
  Antisense strand to SEQ ID NO: 1331130
auugcccaaggucaucagc

SEQ ID NO: 1331132 - RNA, 19 nt, Artificial Sequence
  Description of Artificial Sequence: Synthetic oligonucleotide
  Sense strand starting at position 2076 of SEQ ID NO: 1242217
guuggaguuggugaacgaa

SEQ ID NO: 1331133 - RNA, 19 nt, Artificial Sequence
  Description of Artificial Sequence: Synthetic oligonucleotide
  Antisense strand to SEQ ID NO: 1331132
uucguucaccaacuccaac

SEQ ID NO: 1331134 - RNA, 19 nt, Artificial Sequence
  Description of Artificial Sequence: Synthetic oligonucleotide
  Sense strand starting at position 2089 of SEQ ID NO: 1242217
aacgaauuugcccgcuaca

SEQ ID NO: 1331135 - RNA, 19 nt, Artificial Sequence
  Description of Artificial Sequence: Synthetic oligonucleotide
  Antisense strand to SEQ ID NO: 1331134
uguagcgggcaaauucguu

SEQ ID NO: 1331136 - RNA, 19 nt, Artificial Sequence
  Description of Artificial Sequence: Synthetic oligonucleotide
  Sense strand starting at position 2497 of SEQ ID NO: 1242217
uaacaaaucgugcauguuu

SEQ ID NO: 1331137 - RNA, 19 nt, Artificial Sequence
  Description of Artificial Sequence: Synthetic oligonucleotide
  Antisense strand to SEQ ID NO: 1331136
aaacaugcacgauuuguua

SEQ ID NO: 1331138 - RNA, 19 nt, Artificial Sequence
  Description of Artificial Sequence: Synthetic oligonucleotide
  Sense strand starting at position 2632 of SEQ ID NO: 1242217
ucugguuaaucaucagauc

SEQ ID NO: 1331139 - RNA, 19 nt, Artificial Sequence
  Description of Artificial Sequence: Synthetic oligonucleotide
  Antisense strand to SEQ ID NO: 1331138
gaucugaugauuaaccaga

SEQ ID NO: 1331140 - RNA, 19 nt, Artificial Sequence
  Description of Artificial Sequence: Synthetic oligonucleotide
  Sense strand starting at position 2695 of SEQ ID NO: 1242217
aacugaagcuccgugaaau

SEQ ID NO: 1331141 - RNA, 19 nt, Artificial Sequence
  Description of Artificial Sequence: Synthetic oligonucleotide
  Antisense strand to SEQ ID NO: 1331140
auuucacggagcuucaguu

SEQ ID NO: 1331142 - RNA, 19 nt, Artificial Sequence
  Description of Artificial Sequence: Synthetic oligonucleotide
  Sense strand starting at position 2696 of SEQ ID NO: 1242217
acugaagcuccgugaaauu

SEQ ID NO: 1331143 - RNA, 19 nt, Artificial Sequence
  Description of Artificial Sequence: Synthetic oligonucleotide
  Antisense strand to SEQ ID NO: 1331142
aauuucacggagcuucagu

SEQ ID NO: 1331144 - RNA, 19 nt, Artificial Sequence
  Description of Artificial Sequence: Synthetic oligonucleotide
  Sense strand starting at position 2716 of SEQ ID NO: 1242217
aggacuuaccaguguauaa

SEQ ID NO: 1331145 - RNA, 19 nt, Artificial Sequence
  Description of Artificial Sequence: Synthetic oligonucleotide
  Antisense strand to SEQ ID NO: 1331144
uuauacacugguaaguccu

SEQ ID NO: 1331146 - RNA, 19 nt, Artificial Sequence
  Description of Artificial Sequence: Synthetic oligonucleotide
  Sense strand starting at position 2770 of SEQ ID NO: 1242217
ggacucuuguaauuccaac

SEQ ID NO: 1331147 - RNA, 19 nt, Artificial Sequence
  Description of Artificial Sequence: Synthetic oligonucleotide
  Antisense strand to SEQ ID NO: 1331146
guuggaauuacaagagucc

SEQ ID NO: 1331148 - RNA, 19 nt, Artificial Sequence
  Description of Artificial Sequence: Synthetic oligonucleotide
  Sense strand starting at position 2809 of SEQ ID NO: 1242217
ggccuucucagcgauccua

SEQ ID NO: 1331149 - RNA, 19 nt, Artificial Sequence
  Description of Artificial Sequence: Synthetic oligonucleotide
  Antisense strand to SEQ ID NO: 1331148
uaggaucgcugagaaggcc

SEQ ID NO: 1331150 - RNA, 19 nt, Artificial Sequence
  Description of Artificial Sequence: Synthetic oligonucleotide
  Sense strand starting at position 2817 of SEQ ID NO: 1242217
cagcgauccuauguauuag

SEQ ID NO: 1331151 - RNA, 19 nt, Artificial Sequence
  Description of Artificial Sequence: Synthetic oligonucleotide
  Antisense strand to SEQ ID NO: 1331150
cuaauacauaggaucgcug

SEQ ID NO: 1331152 - RNA, 19 nt, Artificial Sequence
  Description of Artificial Sequence: Synthetic oligonucleotide
  Sense strand starting at position 2867 of SEQ ID NO: 1242217
gaaacugagccuuaguuac

SEQ ID NO: 1331153 - RNA, 19 nt, Artificial Sequence
  Description of Artificial Sequence: Synthetic oligonucleotide
  Antisense strand to SEQ ID NO: 1331152
guaacuaaggcucaguuuc

SEQ ID NO: 1331154 - RNA, 19 nt, Artificial Sequence
  Description of Artificial Sequence: Synthetic oligonucleotide
  Sense strand starting at position 2891 of SEQ ID NO: 1242217
ugcaguuacuuucuugaau

SEQ ID NO: 1331155 - RNA, 19 nt, Artificial Sequence
  Description of Artificial Sequence: Synthetic oligonucleotide
  Antisense strand to SEQ ID NO: 1331154
auucaagaaaguaacugca

SEQ ID NO: 1331156 - RNA, 19 nt, Artificial Sequence
  Description of Artificial Sequence: Synthetic oligonucleotide
  Sense strand starting at position 2892 of SEQ ID NO: 1242217
gcaguuacuuucuugaauc

SEQ ID NO: 1331157 - RNA, 19 nt, Artificial Sequence
  Description of Artificial Sequence: Synthetic oligonucleotide
  Antisense strand to SEQ ID NO: 1331156
gauucaagaaaguaacugc

SEQ ID NO: 1331158 - RNA, 19 nt, Artificial Sequence
  Description of Artificial Sequence: Synthetic oligonucleotide
  Sense strand starting at position 2894 of SEQ ID NO: 1242217
aguuacuuucuugaaucga

SEQ ID NO: 1331159 - RNA, 19 nt, Artificial Sequence
  Description of Artificial Sequence: Synthetic oligonucleotide
  Antisense strand to SEQ ID NO: 1331158
ucgauucaagaaaguaacu

SEQ ID NO: 1331160 - RNA, 19 nt, Artificial Sequence
  Description of Artificial Sequence: Synthetic oligonucleotide
  Sense strand starting at position 2940 of SEQ ID NO: 1242217
gguuccuuugcacacagaa

SEQ ID NO: 1331161 - RNA, 19 nt, Artificial Sequence
  Description of Artificial Sequence: Synthetic oligonucleotide
  Antisense strand to SEQ ID NO: 1331160
uucugugugcaaaggaacc

SEQ ID NO: 1331162 - RNA, 19 nt, Artificial Sequence
  Description of Artificial Sequence: Synthetic oligonucleotide
  Sense strand starting at position 3024 of SEQ ID NO: 1242217
accguuagugcuuagauuc

SEQ ID NO: 1331163 - RNA, 19 nt, Artificial Sequence
  Description of Artificial Sequence: Synthetic oligonucleotide
  Antisense strand to SEQ ID NO: 1331162
gaaucuaagcacuaacggu

SEQ ID NO: 1331164 - RNA, 19 nt, Artificial Sequence
  Description of Artificial Sequence: Synthetic oligonucleotide
  Sense strand starting at position 3623 of SEQ ID NO: 1242217
agacauucgcccugaagcu

SEQ ID NO: 1331165 - RNA, 19 nt, Artificial Sequence
  Description of Artificial Sequence: Synthetic oligonucleotide
  Antisense strand to SEQ ID NO: 1331164
agcuucagggcgaaugucu

SEQ ID NO: 1331166 - RNA, 19 nt, Artificial Sequence
  Description of Artificial Sequence: Synthetic oligonucleotide
  Sense strand starting at position 3624 of SEQ ID NO: 1242217
gacauucgcccugaagcuu

SEQ ID NO: 1331167 - RNA, 19 nt, Artificial Sequence
  Description of Artificial Sequence: Synthetic oligonucleotide
  Antisense strand to SEQ ID NO: 1331166
aagcuucagggcgaauguc

SEQ ID NO: 1331168 - RNA, 19 nt, Artificial Sequence
  Description of Artificial Sequence: Synthetic oligonucleotide
  Sense strand starting at position 96 of SEQ ID NO: 1242218
gguguuuaccuuuaucaua

SEQ ID NO: 1331169 - RNA, 19 nt, Artificial Sequence
  Description of Artificial Sequence: Synthetic oligonucleotide
  Antisense strand to SEQ ID NO: 1331168
uaugauaaagguaaacacc

SEQ ID NO: 1331170 - RNA, 19 nt, Artificial Sequence
  Description of Artificial Sequence: Synthetic oligonucleotide
  Sense strand starting at position 170 of SEQ ID NO: 1242218
gcuccuuuagagcaacaau

SEQ ID NO: 1331171 - RNA, 19 nt, Artificial Sequence
  Description of Artificial Sequence: Synthetic oligonucleotide
  Antisense strand to SEQ ID NO: 1331170
auuguugcucuaaaggagc

SEQ ID NO: 1331172 - RNA, 19 nt, Artificial Sequence
  Description of Artificial Sequence: Synthetic oligonucleotide
  Sense strand starting at position 212 of SEQ ID NO: 1242218
ccaguauauagccaagugu

SEQ ID NO: 1331173 - RNA, 19 nt, Artificial Sequence
  Description of Artificial Sequence: Synthetic oligonucleotide
  Antisense strand to SEQ ID NO: 1331172
acacuuggcuauauacugg

SEQ ID NO: 1331174 - RNA, 19 nt, Artificial Sequence
  Description of Artificial Sequence: Synthetic oligonucleotide
  Sense strand starting at position 255 of SEQ ID NO: 1242218
gugaaugaauuagcuaaau

SEQ ID NO: 1331175 - RNA, 19 nt, Artificial Sequence
  Description of Artificial Sequence: Synthetic oligonucleotide
  Antisense strand to SEQ ID NO: 1331174
auuuagcuaauucauucac

SEQ ID NO: 1331176 - RNA, 19 nt, Artificial Sequence
  Description of Artificial Sequence: Synthetic oligonucleotide
  Sense strand starting at position 363 of SEQ ID NO: 1242218
uucuguuugaacgaacgaa

SEQ ID NO: 1331177 - RNA, 19 nt, Artificial Sequence
  Description of Artificial Sequence: Synthetic oligonucleotide
  Antisense strand to SEQ ID NO: 1331176
uucguucguucaaacagaa

SEQ ID NO: 1331178 - RNA, 19 nt, Artificial Sequence
  Description of Artificial Sequence: Synthetic oligonucleotide
  Sense strand starting at position 367 of SEQ ID NO: 1242218
guuugaacgaacgaauuaa

SEQ ID NO: 1331179 - RNA, 19 nt, Artificial Sequence
  Description of Artificial Sequence: Synthetic oligonucleotide
  Antisense strand to SEQ ID NO: 1331178
uuaauucguucguucaaac

SEQ ID NO: 1331180 - RNA, 19 nt, Artificial Sequence
  Description of Artificial Sequence: Synthetic oligonucleotide
  Sense strand starting at position 389 of SEQ ID NO: 1242218
cuguauagauucccucaua

SEQ ID NO: 1331181 - RNA, 19 nt, Artificial Sequence
  Description of Artificial Sequence: Synthetic oligonucleotide
  Antisense strand to SEQ ID NO: 1331180
uaugagggaaucuauacag

SEQ ID NO: 1331182 - RNA, 19 nt, Artificial Sequence
  Description of Artificial Sequence: Synthetic oligonucleotide
  Sense strand starting at position 390 of SEQ ID NO: 1242218
uguauagauucccucauac

SEQ ID NO: 1331183 - RNA, 19 nt, Artificial Sequence
  Description of Artificial Sequence: Synthetic oligonucleotide
  Antisense strand to SEQ ID NO: 1331182
guaugagggaaucuauaca

SEQ ID NO: 1331184 - RNA, 19 nt, Artificial Sequence
  Description of Artificial Sequence: Synthetic oligonucleotide
  Sense strand starting at position 484 of SEQ ID NO: 1242218
ugaguaaauaacggauaau

SEQ ID NO: 1331185 - RNA, 19 nt, Artificial Sequence
  Description of Artificial Sequence: Synthetic oligonucleotide
  Antisense strand to SEQ ID NO: 1331184
auuauccguuauuuacuca

SEQ ID NO: 1331186 - RNA, 19 nt, Artificial Sequence
  Description of Artificial Sequence: Synthetic oligonucleotide
  Sense strand starting at position 569 of SEQ ID NO: 1242218
aauaucuggugucucugaa

SEQ ID NO: 1331187 - RNA, 19 nt, Artificial Sequence
  Description of Artificial Sequence: Synthetic oligonucleotide
  Antisense strand to SEQ ID NO: 1331186
uucagagacaccagauauu

SEQ ID NO: 1331188 - RNA, 19 nt, Artificial Sequence
  Description of Artificial Sequence: Synthetic oligonucleotide
  Sense strand starting at position 586 of SEQ ID NO: 1242218
aagcaugaugcugggaaga

SEQ ID NO: 1331189 - RNA, 19 nt, Artificial Sequence
  Description of Artificial Sequence: Synthetic oligonucleotide
  Antisense strand to SEQ ID NO: 1331188
ucuucccagcaucaugcuu

SEQ ID NO: 1331190 - RNA, 19 nt, Artificial Sequence
  Description of Artificial Sequence: Synthetic oligonucleotide
  Sense strand starting at position 600 of SEQ ID NO: 1242218
gaagacagaucaucaguuu

SEQ ID NO: 1331191 - RNA, 19 nt, Artificial Sequence
  Description of Artificial Sequence: Synthetic oligonucleotide
  Antisense strand to SEQ ID NO: 1331190
aaacugaugaucugucuuc

SEQ ID NO: 1331192 - RNA, 19 nt, Artificial Sequence
  Description of Artificial Sequence: Synthetic oligonucleotide
  Sense strand starting at position 603 of SEQ ID NO: 1242218
gacagaucaucaguuugac

SEQ ID NO: 1331193 - RNA, 19 nt, Artificial Sequence
  Description of Artificial Sequence: Synthetic oligonucleotide
  Antisense strand to SEQ ID NO: 1331192
gucaaacugaugaucuguc

SEQ ID NO: 1331194 - RNA, 19 nt, Artificial Sequence
  Description of Artificial Sequence: Synthetic oligonucleotide
  Sense strand starting at position 606 of SEQ ID NO: 1242218
agaucaucaguuugacuua

SEQ ID NO: 1331195 - RNA, 19 nt, Artificial Sequence
  Description of Artificial Sequence: Synthetic oligonucleotide
  Antisense strand to SEQ ID NO: 1331194
uaagucaaacugaugaucu
